United States Patent Application Publication US 2004/0214272 A1 - sequence listing, part 36

SEQ ID NO: 149378 - DNA, 300 bp, Zea mays
  Clone ID: MRT4577_67758C.1
aacacgcgtccgcggacgcgtggcgaccgtggtcgcgacgcgtgggcgcagctccaaagccactcccaaacccccgcttccagaaccttctcgaagctccccgcaggctccttcactcgcaccgatcgcgaaggaacacatgcgcgtgctcgtcactggcgccgcagaccaattggatatgcctggttcccatgattgctaggggtgttatgcttggtgcagaccagcctgttattctgcacatgcttgacattccgccagcagctgaagcccttaatggtgttaagatggagttggttg

SEQ ID NO: 149379 - DNA, 344 bp, Zea mays
  Clone ID: MRT4577_67759C.1
aggattgagaagttagagccgttgctgacgcctctgtttgcccagatactattagatcattcatccgaggtttccttccgggagttggtctgaagagcttccttatattgctcacacgcatatcaatgtctacctctaatgtcgaagcattgccctccatatcttcgctggagagaaaatctgcgtccccccctctgtcgcgcatattcttcattgtgtgtctggcaaccatcattgcatgatctgcttgagagcagatgagaatctatattcatctgtgagcaaatgaaataccaaggacgattgctgcaatcatgtccatggggggagccttctttataact

SEQ ID NO: 149380 - DNA, 134 bp, Zea mays
  Clone ID: MRT4577_6775C.1
cgtccggcgacgcatgccgatagagcgtgtgtactgcaccagtgatgatgaagggtgccagtactgaggaagtgggccgtgcaggctcattagcaaccatactgctgattgtacatgtgatggcatctgcacct

SEQ ID NO: 149381 - DNA, 244 bp, Zea mays
  unsure (1)..(244): unsure at all n locations
  Clone ID: MRT4577_67760C.1
ggccgcttttttttttttttttttcttttctgctgctgtgccttattttgntaactcgntgcgcgtccgtcttcgggtggcgggccggggtgcctgtctgtgtttgcgcgctgttgttcttgttacacatccacttggtttggcttgtcttggtcctctggcgggcccgggcgcgggctgtgcgtgtgtgtgtctagagtatgcccctgcgtgcgtgctggtcttgtcttctttctcgcccttt

SEQ ID NO: 149382 - DNA, 392 bp, Zea mays
  Clone ID: MRT4577_67761C.1
gatacaaaactctacagtgagtcgtattacttcttcatcgacctcctcctcctagcacagctagcgccagctcaccttcggctgggatcacgtcgtgcagcagaggtaagtgcgactgtcgcaccagctgctcctgcggtagctcatgcatctgcatgtcccctaacgtggagaccgccgccgccagcagcatcaacatcaccgtcgtcgccgcgccgaccagcaagggtagcgccggcggcttcgaagccgccaccgacggcggcggctgcgactgcaacacctgcaactgcggcaccagctgcggctgctcctgctgcagctgcaactggaccggtcatgccatggcgcacgagagtctagaggacgaagatgagtcttacaaatataat

SEQ ID NO: 149383 - DNA, 464 bp, Zea mays
  Clone ID: MRT4577_67762C.1
aaaaccccaagcgggtttagtttggaccccaattaaaataaaccccttaaaattcgccccccaaaaggggcattccagtttttcggggggggacatcgggggatttttttagccccccaggggcaaaaaaacatccgggggggaaaagctaaaaacggcccctttttttttttggggggtttttttaaaaaaccaaaccaaaaccttaaaaaaaaaaaaaaccagcccgaaatttgaaacccgaaaaaggggggcaaaaacattttttttaaaaaccaaaaagaccttggggtttttaattcccgccaaggggtgttttgttccggatcccccaaaagcaaaaaaaaaaccggggcaaaaattttccccgtttgaccaaccggaagggtatttgggaaaaaaaccgggaaaaaaagaagcccggggggcacccactggtggcccaaatttttccggacgcgggg

SEQ ID NO: 149384 - DNA, 862 bp, Zea mays
  Clone ID: MRT4577_67763C.1
cctcgaggccggcctcccctcagcggcgtgtcaaccgcaacgttatccgcatcacccccttccgtaggagaaacggactgaggtgctcagctgacgccggtcgcctcgcagtggcaagtgcccgagcgatgcagcagataatcagcgcctgcaagctgcctcacacgcaacgggccgccgcgttcctgccgccgaggccatcgctcaggcgccttccagtcccagcaggaggtgcgccgccgccgcggcgattggtggtcaggaggagatgccaggaagagaataagcagcagcaagaggccgaggagggaagcggcgctgacgagcaggagcaggagcagcagaagcgaacgttcctgagcctggaggaggccgggctggtggagatgtccggcctcagcacgcacgagcgtttcctctgccgcctcaccatatcgtctctgaacctgctgagagtgatctcggagcaggagggcgtcccgatagaggagctcaacgccgggcgcgtctgcgactggttcctcaaggacaagctcaagagagagcagaacgtcggcaccgccgtcttgcagtgggacgaccctggcttctagctagttccagcttcgttctgagccaatgatcatgctattctacactgcagcgcacgcaggggctatatatttcagggcttcaggcccttcacgggatgagcaaccaatgccacattccatttatatatatcttttcggtttggtttcatctttacaaattttctgtagcgacgaacatttttcctgtgcggaaaatgggaaaggaatttacgggtaaactgattttgggagatagatcgagtttcttgccaataaattctgtcagctcc

SEQ ID NO: 149385 - DNA, 896 bp, Zea mays
  Clone ID: MRT4577_67764C.1
gcgaccccggccaggcaggcacggcggcccgacagcgtggggcgaggttgcccggcgtgggcgcaggcggcccagacgtggccaactgcgcggcctcgcagccacggcgtgggcggtccggccacggcggcgtggggcgcgacccccgacgacgcgggcggcctgggtgcggggccccctgggcgggacccagcggcgcgggctcgaccccagaaggcgcacgggcagcggccccggtggcgcccgcggtgattcggcgctgccccgcgtgtaggcggccccggcggtgcggcgggcaggccctggcgcgggcactaccggccatggtacgccggtgcgggcgcatctcggcgtttcggccaggcgcgggcgtagccatagcggcgggcgagcgcagaccgtgtggcccctgcgtgggcacagtcgcggccagacccgagaacgcgactccgtcgagggcggggcccatcgcggcggcacggtcacggaaagccccagcgtgtgcatcgtcggccacaagcatcagcccttgccttgtttgtgcatgccatcgacatccatgcatgcatatgagagagacttgcaatggacgatcttacatgagaccgaagatggggccctcgatgaagccgttgacgcttgagatggtggcgactcgactttgcagatgtggctgttgaaggtcacagggatgaaggcgatcaggattggtgacgggccttgcgattcgccacacacattcttgcactcgccagttcttgcgtccggacggcagaaccgctgatacactccaattccttctctcgatggagcgtctacttctccctgtttttgcgagcaaaagtgctgataacgttttgaagtatatccagtggtaacgagattaagagagagac

SEQ ID NO: 149386 - DNA, 297 bp, Zea mays
  Clone ID: MRT4577_67765C.1
gctgaagctttcattaaggcaccggtatttacagcatccacatgtatgccaagagacagcaagagcccgtaagggctatgttattctgatggaaacgaacgtctactaagggtggcatcatctgaatccccctatgctatccaagcgccgggcggaacaagaagtgcacatcgtatttctcttaacacatggcacatgctgaagaccttgattacctatcaccaacccgtcgatgtttgagcctactttgaactatttgcaaaaccccatgcccaatgatcgcaaagcccaagggaa

SEQ ID NO: 149387 - DNA, 354 bp, Zea mays
  Clone ID: MRT4577_67766C.1
aggaactcaaaaatagatgttgaatcttcacatgaggtatgctttatgaacttaacacagcaagtttatgttccaccacacttaactattcaattaaaccacaccacagagcacaaatgttttaccatctaatactcctgaaaattcccccatcgcattagaaacgccaacgaaaaggttcttacaactcctttttttctctttttaactttaaacatttactttaccaattaccatgacaaatattgttccttaatacattcctcatgaaagaaatattgtcacaggctcaagcaaatctctggaacacaacttcctcatgaaagaaatattgtcacaggctcaaacaaattc

SEQ ID NO: 149388 - DNA, 515 bp, Zea mays
  Clone ID: MRT4577_67767C.1
ccggccgggctagaagcaccctgccgcctcaccgcctctctctctgagaccgcagatccgttgtccggcgagtggaacgcgcacgaacccatggcctccgaagagcttgcctgcacctacgccgctctcatcctcagtgacgatggcatcgtcatcaccgccgagaagatcgccacgatcgtgaaggcggccaacatcaagggcgaggcctactgttcggcgctcttcagcaagctcctggagaaaccctcgtcgaggacctcatcctctccggtgcatctgccgcctgagctgctccagctgctgctgcggcaccagctggaggagctgctgctgaccatgccccggatgacgaggagaaaaaggaagagggtaaagatcaccctgatgaagatctgtgcttcagactgttccactgaggagaccccctcactcagccattagcaaacctcactagagctgtcaaagactatcttgcctgacgatcagtctccacgccattgctacaactaccc

SEQ ID NO: 149389 - DNA, 3076 bp, Zea mays
  unsure (1)..(3076): unsure at all n locations
  Clone ID: MRT4577_67768C.1
cataagtctttacaaagtttagcaacagataattgatggtaagccattcgtatgcaccttcctgcgttccatcaagatctgtaaaccaatacggttggtttttaaaggaactcttttcgcgaagaatgtccctaaccgcttgcaatatcgcctaggatttttgtgcacccaaatttctcagccctgcggtggcaccgactctgacaggcgtttggtcgcgcaattccgcgggcaccactcgcttggcatcgtcaaggagagagacgagcgactcggcggcctcccggggatcgttggcgtagtggatcttggtggtggatctgtccaaatggcatatgctattgcagagaaggatgcagaaaaggctcctaaaccatccgaccgtcccccacgccacgacgcagtcgcagcagatccaccaccgacgcgcgcgccgcgcgccccgacgcggagcgctggatcccgcgcagcaggaggcggccaacccgtcgccgtcgcagtctcccccggcccccgcaagcggcggccgcggcgtccgctaccgcacgccctcgtccccggacctcctgctcctccccgccgacaccaagatgcgccgctactccgcgctgcccaacggtggccgccaggagacgctggncgaccgcgcgcaccgctaccggggcgtcttgctcgtcgtcctcgccccgttgggtgcacacaacaccacaccacacctggccgggggtggttcggcatcggcatcggcaggcagagcactttccctcccgcaggccctcccctcctttcgctgaatatcccctgttccttgtccgcccgcgggttattctcattatggtctccttgcagctagaccacaggtcttaaaagctggcaatggcaatggttacagcaactgtatgttagagggatttcaagggcaatacaaatatggcgacaattcatttgaagcatctgcttcaccttctggtgctagttattcaaaatgcaaggatgatgcagtgaaagctcttaaggttgatgaagcatgcacccacatgaagtgttcttttggtggcatttggaatggtggtggtggtgctggacagaataatctctttgtagcatcctttttcttcgatagggctgctgaggctggatttgtgaacgccaatgcacctgttgctaaggttaaaccctcagacttcagacaagctgctgagcgcgcttgctctttgagtgtgaagaacgccgaggctacctttcctggtgtccaaaaggataacattccatatatctgcatggacctcgcgctcgtctccctcgtgctcctcctcatgccgcgctcgcccgccggcgccacggccggcgccaggaggtccggcccgcccggggccgacaagtacgccgtcatcttccgcgccgggagctccggcagccgcgtccacgtcttccgcttcgacgccaacctggatctcgtccacattggcagcgagatcgagctcttcgtccagataaaaccggggcttagccactacgccaacgatccccgggaggccgccgagtcgctcgtctctctccttgacgatgccaagcgagtggtgcccgccgaattgcgcgaccaaacgcctgtcagagtcggggccaccgcagggctgagaaatttgggtgcacaaaaatcggaggcgatattgcaagcggttagggacattcttcgcgaaaagagttcctttaaaaaccaaccggattgggttacagttcttgatggaacgcaggaaggtgcatacgaatgggttaccatcaattatctgttgggaaacttgggaaagacttatgcagacacagttggagtagtggatcttggtggtggatctgtccaaatggcatatgctattgcagagaaggatgcagaaaaggctcctaaaccatccgagggggaagatgcatatgtgaagaaattgttcctcaaaggaaccacatattatctttatgttcatagttatttgcattatgggttgctggcagctagagcggaggtcttaaaagctggcaatggcaatggttacagcaactgtatgttagagggatttcaagggaaatacaagtatggcgacgattcatttgaagcatccgctccaccttccggtgctagttactcaaaatgcaaggatgatgcagtgaaagcccttaaagttgatgaagcatgcacccacatgaagtgttcttttggtggcatttggaatggtggtggtggtgctggacagaagaatctctttgtagcatcctttttctttgatagggctgctgaggctggatttgttaacgccaatgcgcctgtcgctaaggttaaaccatcggacttcagacaagctgcggagcgcgcttgctcgttgagcgtgaagaacgccgaggccaccttccctggtgtacagaaggatagcattccatatatctgcatggacctcgtttatcagtacacattactcgtggaaggattcggcgtcgatccggaccacgagatgaccttggtaaagaaggtcccttacagcgacgcctacgtcgaagccgcatggccgcttggcagtgccatcgaggttgcatcttcgtagtaggaaggaaacacagtttagcaaggtaacatcggacggcattcttgtcatgaagttttgcgttgagagtccccactcctccacctcctcctcttgatcgcttgaattcgcacactcaatccattcatcttactatacggtacgggtagcgtctctcggctctacttggttccagcgggcattgttgtaagctctgttattaatatttgtatactactaatgcaagtaagattggagcattttgtcactcaatccatccatcctcccatacggtaacgggtagctttacacaccaagggaagcctcggctgtacttggttctagcggccattgtaagccctattactattattgttattaatatctgtatactactaatgcaagtaagatgagagcctcaggcattcttttttaaaaaaaaaaaaaaaaaaaaaaaaaaaaaaaaaaaaaaaaaaaaaaaaaaaaaaaaaccccccatactgggatgc

SEQ ID NO: 149390 - DNA, 1159 bp, Zea mays
  unsure (1)..(1159): unsure at all n locations
  Clone ID: MRT4577_67769C.1
cggccgggacgagttggttaccatcaattatctgttgggaaacttgggaaagacttatgcagacacagttggagtagtggatcttggtgaggaatcggcacgagggcatatgctattgcggagaaggatgcagaaaaggctcctaagccatccgatggggaagatgcatatgtgaagaaactgtttctcaaaggaaccacatattatctttatgttcatagttatttgcattatgggttgctggcagctagagcagaggtcttaaaagctggcaatggcaatggttacagcaactgtatgttagagggatttcaagggcaatacaaatatggcgacaattcatttgaagcatctgcttcaccttctggtgctagttattcaaaatgcaaggatgatgcagtgaaagctcttaaggttgatgaagcatgcacccacatgaagtgttcttttggtggcatttggaatggtggtggtggtgctggacagaataatctctttgtagcatcctttttcttcgatagggctgctgaggctggatttgtgaacgccaatgcacctgttgctaaggttaaaccctcagacttcagacaagctgctgagcgcgcttgctctttgagtgtgaagaacgccgaggctacctttcctggtgtccaaaaggataacattccatatatctgcatggaccttgtttatcagtacacattacttgtgcacggactcggcattgatccagaccatgagatgaccttggtaaagaaggtcccctacagtggtgcatatgtcgaagccgcatggcctcttggcagtgccatcgaggtggcattttcatcatagcaaggagacccagtttagcaaggtaacatcggacggcattgttgtcatgaagttttagcgttgggnagnnnnnnnnnnnnnnnnnnnnnnctgaattcacaccattttgtcactcaatccatccatcctccccatacggtaacgggtagctttacacaccaagggaagcctcggctgtacttggttctagcggccattgtaagccctattactattattgttattaatatctgtatactactaatgcaagtaagatgagagcctcaggcattcnnnnngacctctgtatactgggatgtgcatgatataaagtgcctccttcgct

SEQ ID NO: 149391 - DNA, 341 bp, Zea mays
  Clone ID: MRT4577_6776C.1
attcggctcgagcgacacctgacatatgttttttccttggcgcacgtaagttcagttaccggatgctataagatcacccaaccatatttcgtattgctagggagagacagtatcggggaccatgtgatgccgaatcaccgattgccagatcggatggttctgggagggcttaggcctatgcaccaatggcggcaaccgaggcatataatgcaagggggtttgcactgagaccagatcactgggatagatcgcaacatatgaatgaccgccaggacaagatcagggagtatttgtgcggtacagtaatggctgccactgggactttcgggagttagttatac

SEQ ID NO: 149392 - DNA, 759 bp, Zea mays
  Clone ID: MRT4577_67770C.1
tcgccgcgtcgcacactcagcaggtgctcgtcgagaagtcgctcctgggctggaaggagtacgagctggaggtcatgcgcgacatggctgacaatgtcgtcatcatctgctccatagagaacatcgatcccatgggagtgcacacgggggactccattaccgtggctcctgcgcagacactcactgacagggagtaccagaggctcagggactactcggtggccatcattagggagattggtgtggagtgtggtggttccaatgtgcaatttgcagtcaatcctgctgatggggaggtgatggtcatcgagatgaatcccagggtgtccaggtcgtctgcacttgcctcaaaggcgacagggttccccatagccaagatggctgcgaagctctcagtaggctacactctagatcagattcccaatgatattaccaagaagactccagctagcttcgagccttccattgattatgtggttacaaagataccacgttttgcttttgagaaattccctggctctgagccaatattaaccacacagatgaagtctgttggtgaggctatggcattgggacgtaccttccaggaatccttccagaaagctgtccgctcactggagactggttttgcgggatggggttgtggccctatcaaggaacttgattgggactgggaaaagataaaatatagcttgcgggtacctaatccagatcgtatccatgctatctatgcagctttcaagaaaggcatgagggtcg

SEQ ID NO: 149393 - DNA, 315 bp, Zea mays
  Clone ID: MRT4577_67771C.1
gccaaaacccaaacttagtacttctctataccggcacacaggggaatgtctttggcccctgttcttgacatcatgaaagacaacttgcccaaacggtgattaaatccggataccgacgctcaagactacatgccgttcattcagatcgagatgtaagctatcacatattttaaccgcttatacagaactcgtagtatacgatggctgaaactctagtacatcagtgggtggctttgtactcgtcctttagtgattaattacacactcacaacctttattatcaatttaatataatacactgtctaactgtacata

SEQ ID NO: 149394 - DNA, 412 bp, Zea mays
  Clone ID: MRT4577_67772C.1
accacacgtccggttgttctttgttggaaaattatcatttcaaataatgaatggttttggaatgacagtgccctctcaattcatagaaagaaatgcagttaaggaagtactacaaattattcaagttgctagggataggaatattcctatttattatccaacagatctctggtgcttgaaaaatggcaacagtgaaatatcaggggtcatcaactctaccggacaattggctggctggacaccagctgatataggaccatcgacattggagaagatttcttctataattacatcatacaagaagatactgtggattggccctacaaactacggtttaacagaaaaaaattcagttggtggaacacagttgggtgaaatactggaaagtgcaagctctgatggctgtgatgtt

SEQ ID NO: 149395 - DNA, 287 bp, Zea mays
  Clone ID: MRT4577_67773C.1
cgggccgattgcgtgtttaatccgtcacttcgcccgagtgttacacttggggtcatgagtggccaaccctgactgaggaagaggacgctcccgggagacgaatgaggaaccacctcctcctactgttcaagtacagggcgctggtccgcaaaggggagcaaagcaaaagacgaaaatggctaaattcgtgatccgcccagccactgccgccgactgcagtgacatactgcggctgatcaaggagctggctaaatatgaatacatggaagaacaagtaatcttaactg

SEQ ID NO: 149396 - DNA, 572 bp, Zea mays
  Clone ID: MRT4577_67774C.1
cgtcaagcagcacgcggtgacgtcgtgggcggacgacggcgagtgggacgtgccctcggcggcggcggccgacgaggagggcgccggaggagcggttgccgccgccgggaccagcgggaggaaggaccacgcggcggcggaggtgacgatcaggatcacgaggaagcagctgcagcagctgatggagaagagggccggcgggctccacggcctcaagaggcggcgggccgccgcgcagctgctggcggacgtcatggacgccgggcaggtcttccaccactgcagagcggcgcactggaagcccgcgctgcagagcatcccggaggccgtggagtcgtgacacgcacgatcgacgcgcacgcaccaccacaccacactcactgcttccttcctcttggctcgcttcttcgcagttaagttgcaggcgtccagctagcttctcatcccgggtgactcgcgcgccgtgtcatttctgttttttttttttagtttggatgcaatatgcaactaacgatgtacagaagtagggattagtaaaacttggaaacgaactgtggatttcatgaggaatc

SEQ ID NO: 149397 - DNA, 356 bp, Zea mays
  Clone ID: MRT4577_67775C.1
gtggagatgcattccatgagcattaagactggatacctgcacaggggcagagctaacaggactccgaccccttggatacttggcgggactggatcatcgacgacttgtaattgagtacctgtagatagaacaccctatatgatgaacttactgatgtggatagctacaccaagtcattgtactgggatgacacccttcaaaatgcttacaacatcttatgcacgttgcaacatctttaggactgctggcacaccaccactttacatcacaatggtcaactcttgcccattatgctgaacaggatgttaaggtggcatatcttctggtacggcctcacaatactagtatcaaaaaca

SEQ ID NO: 149398 - DNA, 366 bp, Zea mays
  Clone ID: MRT4577_67776C.1
gggaagaacaaatccatgttcccccgccgttggcccacttgttcaaattaaccaatccttgggcattaaaattttgggtcaacacacacgggggagaattcaggcagggttaagaacatgcccgcagccggccggttaaaaaaagttggggtcgtttcccttgcttgagggggcgaggatgttttaggcgactatgtggcccaccgagccccaggcgaggacctctactagggtgaagcccacggggtttttggatttttgccggcccgataacttcttggcgcgcttcttcccggggtttaaatgcggtttgccgttttgtttgggcaccttgttctgcacgtttttccgttggaagttgaaaaa

SEQ ID NO: 149399 - DNA, 344 bp, Zea mays
  Clone ID: MRT4577_67777C.1
aaaccgaagtatgggtgttttttatataaatgacagggtctgatactgtatcatgccggttttgatgccacccacccgggcctttgttacttaactgggggtgggaggcaaaactacatattggcagggaagtttaacttgatacattattatatagctggtgccaattgttttcaccacattttgcaatttacaggaccaaaaccatgttaacagcagttgcctgtgggggggtaagcttttggagccttttgtttgaaaatgttttttttggtgacccctggtgaggaagcatcccccaggaggcttggcgtgtttaaaatctttaaaaccagttcctaaaa

SEQ ID NO: 149400 - DNA, 249 bp, Zea mays
  Clone ID: MRT4577_67778C.1
gcacgagataaaaaaaaattggcaatggcggacaggatggcaacgtcccccacagaacttcgcagggctccccaatattcagatattataagtgtaacttgctaaattcttcgaacagccttttgcattgaacatggatatggtatcttttacatatggttccgtttattttcactgcaaatatgtgaactttgtgtgtgtattatccagtgaatagattacaaaagcttctgtttgtaatcttctcgt

SEQ ID NO: 149401 - DNA, 351 bp, Zea mays
  Clone ID: MRT4577_67779C.1
caatgcgttttctttttactggcgccaaacggcaaactggatatgcgctgggggatatgattgctaagggagttacgctcggagcataccaagcagtgattctgcacatgcgctgatattgcgccagacgactgaagcccttactggcgactgataagcagtagattgatgctgcatttactcatctgaagggagactacagcgacaactgacgttgtggaagcgcgcactgccgtgaatgtggccatcatggttggatgattctccaggaacgagggaatggaaaggaatcatatttagcactcgactgtttcgatctacaaaacccaagcaacatgtctcgaaaaccca

SEQ ID NO: 149402 - DNA, 445 bp, Zea mays
  Clone ID: MRT4577_6777C.1
gaaacaaaaaaagggaataaggtggggggggttaaaatttaataaataccccaaaggttaaacgtttggggggtaaaaaataattttttattccataatacttttatttattaaataataagcataggcaatggtggattatttgattccaaaaaataattttttcagaaaaatgggcagggttttttaaattaaaaccattggtacctaaatggagggggcaataaaataatttttttggcctgagggaaaaatcccttatacatgtgatttcctcctgttatggggggaaagaggaaaacctttaaaaaaattccccaaaattttttaaagggcctccaaggaaaaattaatgtaaagctttggattcttcccgttttttattttaagtcaaaaatttccaaagaataaccggtttttttgcaaaaatttttaaaaaattgaa

SEQ ID NO: 149403 - DNA, 333 bp, Zea mays
  Clone ID: MRT4577_67780C.1
attgatgccgctcttagccgttggtgaaggggccataatgccgacgagaagaacaccactaacgggtcaggatttcaggtctctccaatcgacaatgaaagccgatttctggctcctctttcaatatgctttcgcgagattggatctggaatcaccgttcttaatcaatctgcctcatgatagcgaactcgcctcattgtgctgtggactcaaccatctgactctgtgtccttactctctgcaaattctttgcccccctgcgacgcgacgctgcttcctagtatcttgtcaggtgatggacactcccacgaagcgttctgctcatatgcaccc

SEQ ID NO: 149404 - DNA, 1923 bp, Zea mays
  Clone ID: MRT4577_67781C.1
aattcggcacgagggaggattcatctttgggccagccattgcgctagccataggagcaaagttcataccactacgtaaacctaagaagcttccaggtgatgtgggtggagaagtaaatacaaacaaaacatctataaattaggccccacataattttggtctcgacagtgctgaggaagtgcaggggcttctgtatcttgaatgtatttgccgcccgtaaactttttaactccgaaaatgaacatgacaacaaatgctacagactgtagatcgaccatactatcatgccatatatagctaccacactggcgaaaacaatttcacagtgaaacccaatgataccaatatatgccacatggtaaaaaaaaagcatgccattggactgttaccatgtggaagcaggaagtatcattatataaatgcatatttactgtaatttcttcgaaagaaaaccgtaactagctagactcatttcattaaaaaatagtgtgcagtttcgttacagtttcaacatatagtagtgaatagttgttgcttttatacattacaggggcacgagggccaccccgcgcgctgtacctggtcttggcttgccgtgtttatttatatatatatgtaggcaccccccagcccagctgccgctcaaagcgacaggtggagatcggagggaggaagaagaactgagctgcggatcgagggaagggaacaagcaagcagccagagccaggtcgtggggagccggcggcagtgatcttcttgcgtcgaaggcgaggccggagcgtcggtttgagcgctcgtgcgatatgggggagcaggagaacaacaagatcggcggcagcggcaacaacgccatggcggtggacgaatcgggcgcggccgcgaacaaggggaagagcctcggcgccgccgcggacccgcgcctgcaggccatttccgacgccatccgcgtcgtcccccacttccccaagccagggatcatgttcaacgacatcacggagctgctgctgcggccgggcgtgttcagggacgccgtggacatgttcgtcgagcgctaccgcggcatgggcatcgcggccgtcgcaggcattgaagctagaggattcatctttgggccagccattgcgctagccataggagcaaagttcataccactacgtaaacctaagaagcttccaggtgaggtattttctgaaagttatgtacttgagtatgggatggattgtttggagatgcatgttggagctattgaacccggggagcgcgtagtggttgtcgatgatttggttgcaactggtggaactctttctgctgcaataagacttctcgagcgcgcaggagctaacgtggttgagtgtgcatgcctcattgggcttcccaagtttaaggtaccaaaatctaagttcgttcaaaaaagctaccaaatgtatatttcttttttctcaaggtgcaccaatatgctccttacatgcacttcagttagctaaaggaaattgaggaagtattccatctcggtctgagggaggaaagacgcaatagaacaaggccagtgtaaaaaaaaactagtctgcctgtaactattcctgtacatgtgactgcagatttttaataaatgaaatggtatcatctagccgatatcttttcctcctacgagtaaaaccgagagcaacctcagcgtgtgtttgaaaacaaagtattttaaaaaccatggtgttttgaggtaaagtatctcaaaccatggtattggtatgcatgtgcaagccgctttattctacctattacagcccctcccccttctttccccctactattccccccacatttcgttttttctacacgttacccctccccccccccttatccctaccccttcctttccccctatcccccccctttccccctcacccccccacccatcctccatcc

SEQ ID NO: 149405 - DNA, 672 bp, Zea mays
  Clone ID: MRT4577_67782C.1
ccttgtcgttactccctccgtttctttttatttgtcgcactatccagcgacaaataaaaagaaacggagggagtactttagaagttacccttttgatcacatgaggaacgtcgtctgagtgtttttttaccgagcatgctcaaatgtaacttcatattctcttctcaaacttaatcatcatcatgtaactaattaattcttcatattttgctaggcattgaagctagaggattcatctttgggccagccattgcgctagccataggagcaaagttcataccactacgtaaacctaagaagcttccaggtgatgtgggtggagaagtaaatacaaacaaaacatctataaattagaccccacataattttggtctcgacagtgctgaggaagtggagggcttcggtatcttgaatgtcgtatttgcgcccgtaaactttttaactccgaaaatgaacatgacaacaaatgctacagactgtacaccatactatcatgccatatatagctaccacattggcgaaagcaattacgatatatatggatatgtcgcttttaatttcaccgtgaaacccaatgataccaatatatgccacatggtaaaaagcatgccattggactgttactttgtggaagtatcaatatataaatgcatatttactgtaatttcttcg

SEQ ID NO: 149406 - DNA, 471 bp, Zea mays
  unsure (1)..(471): unsure at all n locations
  Clone ID: MRT4577_67783C.1
ttattcctgggaagcgcccctcatcacacaaaaactttattattgaactatccctcatatgaaacctaaaggaggcaccaccaatgatgggttggcaggttgactgctgcagccttggtcaaaccacgttggttggaacggtatgacatctgntgccacttgtggatgaggtgtgactcagcgactaagagcgactaacgtgcatgatcagaaaccgcacacactctgtgcgttgagaaccgaggggactacggttaacaccagctagctgtttgattggaccaagttggtactgctgacaataagcaggataggtcaaagctgctacttccatgaatggaagaaactgctggggttccgcagcaagttgctggctgaaaggcaattgcagctgttgactatactactcatatacagtgaacctactgctaccatggaagaaactggtggtggtgagacctgctaccttgt

SEQ ID NO: 149407 - DNA, 389 bp, Zea mays
  Clone ID: MRT4577_67785C.1
aaaaaaaaggccggttttaggatttatatatagggtcaaatcatatcatcggggaccaattaatatatgggtacagcagacccaattggatcaaccaacatgcatgttgacccacgtacatgagcacaaagactggcgccaaacatgcagagagagatagcaaactgaagaactttgttttttttttttttacacacacaccacacaattcctatgtttgggagccagctcggccttgcttattattggtcaaccaccaccacaagctagatagataataatcatatccatgggcgtcgaacgatgtgaacagcaattgcaggggttgcacttggagccgctaccgcaatttcaggcgggggcgggcttttcggacttcggcgggggct

SEQ ID NO: 149408 - DNA, 575 bp, Zea mays
  Clone ID: MRT4577_67786C.1
gggcagaacacacgcctgtggccggagcgcctagcgcggggcgtgccgatggttggcgcggcgctgctgaccggggctgccggcgcaggcgcgcagagggggtgtggcacatgatgaccaggcccatgtggaagcactgctgagccaccgatgtgacaggacgagcgagtgcgcctggtacacctacaacgcgttgatggacgtcagcaacaagtcacccggctttggaaccaccagagacaagcagacactcaggtggtagctcatcgcactgcttcggtcagacattcaacaaaaccaccggtggatgggcgactgctccggatggacgcgtcgtctggtgtatactgccaccatgaacgaacgcaaacacccgacccaccctactatggacgaggacccatacaactaacttatagggacaaatacaggctagacgaacatgctgtgagacttgaccttgcgagcgaaccagacctggtggcaaaagacaccgctgtaggcctaaagacggacatggggctatgggtgacgacatggggggacaatgacttgggccacgccgtgatgaccgg

SEQ ID NO: 149409 - DNA, 539 bp, Zea mays
  Clone ID: MRT4577_67787C.1
attacccatgttcgacaggtcctccaaacacttgcgccgccgctgcctcacaggaaaaggcgccatggtgctccgctaccgtgctgtgctgcgctacagtgataacggaggacgtgcgctagcaatgctagtgccatttttgcattacatagctgaggagctgactacatggagcgaagggagtcctgctgtcccatgtgaggagatatgacattaccgagctcattgccgtgagaagatgaaaaacctgctttacctccataagggggtgaacaccaagctgttccacgggctcatccatttgcgtgcccgagctcaatattgctgtgtgaggaccatcacagaagatgatgtcgcacaagaccaagaagggggaggcggatgtgctaagctcatacgttaagggcgcacgctgacagactagagaccaacgtaaagcatacatgaccctattaatgttctgaggctacactctggacacaaggactggctcctgagagagctctataaggaggtatgttgggactaccatgacaaca

SEQ ID NO: 149410 - DNA, 348 bp, Zea mays
  unsure (1)..(348): unsure at all n locations
  Clone ID: MRT4577_67788C.1
ccccgccagggacgcacccgcccccgccgcgccacgcagcgacaccnacgccgaccagcagccaggcaggccccggcccgagcgagggggaggacgacagagccgagagcaagcccgggcgccaccacgcgagcaaggggggggagggagcacccctctctggaaggaacgcgcgctcccgaagggcagacgcgcggaggcgaggacgagacacccccgcccagacggagagcaaggcgagcgcgtcgccgggcggagggcaccgaaaggcagcaccaccaggaggccaggaaagaggcgcggccgcgagagacacacagcccgacacaacccaccccggacgacggg

SEQ ID NO: 149411 - DNA, 472 bp, Zea mays
  Clone ID: MRT4577_67789C.1
tctcactcatctcttagactgacatcgtacgcgaacctcatacttgattgcaactggttaagacagcgcaccatctcattataacaaaatacatctgaaccttgtagatcgatgtgcagatacagaggctaaagattctacgatagatcatgcctcgctgaatcctgtgcaggatctactgcatgctgctgtctcctctctaatgtactgtcgactctcatatgcatgtagatcgctggcttgtacacttgtcgcgcctggaagcaaagacaaaaaggtaagtacctcaatcaatggccactatgcatctcgagcttcagatgataatacccctgactagaggtcattcgaggcatctgaaactctacctgatgagactaagccgcgccctgtattgtagcaactatgtgaacacatggactccaaaggccttctgaaatttctatcagactactgtagcaaacttgctagc

SEQ ID NO: 149412 - DNA, 541 bp, Zea mays
  unsure (1)..(541): unsure at all n locations
  Clone ID: MRT4577_6778C.1
ggttcctaccgcgcggtttcggaggaggcgggggggcgtgctgggcactagcctcctctgaaagcgccgtaanatggnacggttgagggagggagaaagccgatnncatcaagcgtcgcagtggaacaaatatgagccaactcaaacgcgatatcannctacctctgcctgtcgtgcgggccaccaacnaatcatactccggagcgggtggggtgcggnnactcagnaacantgnctcattcgctnnncctctggtgagattatgcccgtgccctagnntgagacctgtgcttcagaactcaagggcgagcaacctcgtgtcggtgtggcgtcggacccttcagccctcgagaaacgtagctccaggnnaccccnntgacataanncttcggtgcgcttgcnngcccgtgtgcgcactctnntggccgcncnngttggcgaagtcttgtnngttcgtccccagaacaatccgccgnngccatgcgtgtgngnncgtctccccctgcgaaacggggaaacacntnnggtgttgnnnatctcg

SEQ ID NO: 149413 - DNA, 169 bp, Zea mays
  Clone ID: MRT4577_67790C.1
cccacgcgtccgcatggtaccatctgcatacacaacatttgatgagtgcaggtttcagcaggttacagcgcatagaaaagcaggcaaagatccgtcaaatgttgtgtatgcagatggtaccatgcatttgtttccctgaatggcttcaaatgaaatgaatgtttttttt

SEQ ID NO: 149414 - DNA, 131 bp, Zea mays
  Clone ID: MRT4577_67791C.1
gattggtcggctcggaaggaaaaaccctacccgttgcccaactatcaggctagacgatgacagaggggttgtccaaattggccgcgcggaccgcaaggaccgagccggcgacgctttccgtgtaggcgttg

SEQ ID NO: 149415 - DNA, 310 bp, Zea mays
  Clone ID: MRT4577_67792C.1
accacacgtccgcccacgcgtccgtaagaaagttctatcaacaaaatcaacacacgcgaccaccaattcatagtcagagacacaaacccaaggcatcaagggccaaagcctcgcagcggatgctgtcggccggaatctcggctggccactagcgggagggagctccaggccatcgacgacgagtggctggacgcggcgcggctcaagaccttctcggagtgcgtcagggacgccattgcgggcctcggagtcgcgggccacgtgaaccaccgcacgctccaggagtgggaccgcgccaccgggggggtac

SEQ ID NO: 149416 - DNA, 1127 bp, Zea mays
  Clone ID: MRT4577_67793C.1
tttttttttttttttttttttttgctttaggatggaacatacaaattcattgcccgtttataatttttgatacccttgcactgtgctagcttacaacttttgctacaataatatggccactagcttaggcaacgctgaagaaatttaatggtacctatttcaggcttggttgttagacgctcataagtgtttctggagcatgtctctgaaccagtaggctgacgccttggggtgtcgttcgagcttgggcgtgctgaagtcgacgtagacgattccaaacttggacgtgtaacctgactgccactcgaagttgtcgaggagagaccaagcgaagtagccagccacgtcggcgccgtcatcgatggctttcctcagctcagcgaggtagcctttgtagaattgcacccttgtggtgtcgtgcaggtactggccacgagtcaagtttcctggctgatccattccgttctcggttatgaaaactgttggatttccatacttgtgcttcagatagttcacacaaccgtacatcccttctgggacgatgtaaagccactttgaattcgcctgtggtccgatcggtttgccgttccgttctaaaacatattgaacctgccaatcagctgagtagctagtaggcttctgctggagcagtttctggcccttcacgtagctagcggtgtattgattgatcccaatgtaatccgctgagcccttgaccaacttagcttgctccggagtaaacttgggcagcctctctttcacaatatcttgcattatctgtggataatgtccatttattaatggatcagcaaaccaaccaacatggaaatcccttgctctttgagccgctgcttggtcttcggttgagtttgtgagagcttcataccaattgaagtccagaactattccaacctttcctttctgagcagcctgatacttgttacggtatcttgacacagcagcagcatgtgacaagagaaaattatgagcaacgatataaggttccgttgctgaattcccaccagcagagcatttggtacacctttgaggaggaatcgacccagcgtcataaccaagtagtgctactatcctcggctcattgaatgtaaaccaatgctttacacggt

SEQ ID NO: 149417 - DNA, 785 bp, Zea mays
  Clone ID: MRT4577_67794C.1
attgggaccctcgaggccggccgggacgtctctgtcgatccctcctctcacactcctctggcactccctccagtctgcaggaccacctccagcggcgctagcactgccgctagccgcgacccggagccccccagtccctgcccgcccgcctcgctgccagcacgcatcttgcaagctgctcgacgtcaagctcaccccgggaccccctacgccgcgccgccgccgccaccaacagcgacagccgagagggcgagccgcctgccgcggggccgacaaccgggaccccctacgtcgcaccgccgtcgccaccaacagcgacagcagagaaggcgagccgcctgccgtggggccgcgacacgatccggcaatcggtcgacgggcgaagcaacagacgagcgtggacgccgatcgtgccaagcgcccagtcctgattccgcccagcgccgtcgcccgccctgacctgtttaacagtacgagactctaagtctgccttgaggatggttaggatgaacttgagaaggtcggtttcatagtggacaacgagtaacaacaagtgcatggagtggaagaggaatagaagagtgatgaaaagaggtgaacaaataaaaaaggagaagaagagagaaacaagattaagcgcttaaaaaggctggaagggaatctgaaatggatgaccacttcggcttttcagatgatgatggaatagagaaaaaacagtgaaaaacagtgcagttcatttgatgatcatcagatgttgcgcctggtgaggaggactttgaggacac

SEQ ID NO: 149418 - DNA, 540 bp, Zea mays
  unsure (1)..(540): unsure at all n locations
  Clone ID: MRT4577_67795C.1
ccggggtgccaggaggtcctgccgacgcgccngaaagagcggcacccggcgccccgtggggttaggggagctcgcgcggtgggggagcgtgcgaactcacgccgtacgcgagcccgtacgcaacccctggcgagtgagctcccctgaccccatgaagcgcaggttccactccttctgctcgcgtcaccccctctacgtacctgtcgtggaggcactcctccgcgcgcgggacgttacctagctgcaagcccaggactcgttctgagggtacgatcggtcactttacgtaccaaattgaggtctagaagaagtacttctcgacgctcactaaagtgtaagaggtctacctnagaggaannaagaccnncagaaggnttcacannnacagagtcnnacggtcccgtgtgagaaaacggttgaaactaacataactacgttaaaggtgttcttgtgtcgcgtgaggaccgagaaccagaacaattctccctgtaaagagaacccagagaaaggcgaagagaaggaagaaacaataaatactac

SEQ ID NO: 149419 - DNA, 343 bp, Zea mays
  unsure (1)..(343): unsure at all n locations
  Clone ID: MRT4577_67796C.1
gaactcggacgctatactagggatcctccttagcggtctgcccttggtttntttttttttctttttctaataatgttctttttttttctatacaaaaaaatccaaacaagtttaaacaagcccatgaaggtcatgtgacccgccgcgctaaaattttatactgggccctttttttccctaacctataaatacgacacatgacctatatgtgaaataaaatgatgaacccaccagcttttccaagggcaggataattttatattaccggggcatgccttctcgatgattgaaaccacaggagttgcttccctattatctttgccattaaagggtgaaatcaaac

SEQ ID NO: 149420 - DNA, 285 bp, Zea mays
  Clone ID: MRT4577_67797C.1
tgttagcaacattaataaattcaataattgaaggatatcataactttattgacaataacaaaagcactaattcaagaacgcaacaatatacactaatttaataactcaaccaatcaaatcatacactagccacacttctccagaaattccacgttagccagtattttacatgtacgtctggcattataaacgcatgaacattaatacagccttcttcaatcccactataaaacactatgttttccactaaatacttgttacttcattccagcatatattctcttt

SEQ ID NO: 149421 - DNA, 594 bp, Zea mays
  unsure (1)..(594): unsure at all n locations
  Clone ID: MRT4577_67798C.1
cgatcctccggaccaacgaagggggccccggngaaaccccagatatgcaacgcctcccccgcccgccaggcccggacggcctcgccctcttagcaacctacctaaaacggcctcgcagtggccccaaccgcgcacttgctgcttgtaacccaggcctcggcccaaaacccgcgactggcctggtgcgtgagtcctagagctctgtacacaccaccctcccgacctcagccctccaactcccgataaccagccgacctcctccaaccgtgcggaagaaaagggttggctatttccgtgccccaagtaatagtcaggccgaaatctcgcgatacaacttagcttccgggaagaaggcgagcggtgggaggagacgcgacgtgggggcgccatttttctcgccgcgcagggagtactgactaacgtgggcggagctctagctcgcgtatcctgaggaggcggggttggcctaggcgaagatccggactctgggtgttttgctaccgtgaccgtttaggtgagtggaatagccaagaacatttcggcaaataacaaaaacaaaacgtgcggtcacttgtgagtggatgagaactgtga

SEQ ID NO: 149422 - DNA, 1389 bp, Zea mays
  Clone ID: MRT4577_67799C.1
cattgggtacctcgaggccggccgggattctcacctcctctcctccacggcttcctcgcaccggctccggtcctcctcccatcaccatcaccaccgtcgttcctctcacgagtcccgacacacgcaaaccgcacgaaccctggctggcggcgggatgacgcggcggtgctcgcactgcagccacaacgggcacaactcgcggacgtgccccaaccgcggggtcaagatcttcggggtgcgcctcaccgatggctcggccatccgcaagagcgcaagcatggggaacctctccctcctctccgcggggtcaaccagcggcggcgcgtcgcccgccgacgggcccgacctcgccgacggcggcgggggctacgcctccgacgacttcgtccaggggtcgtcctccgccagccgcgagcgtaagaaaggtgttccttggactgaagaagaacaccggaggtttttgctgggattacaaaagcttgggaaaggtgattggcgagggatttctcgtaatttcgtggtctcaagaacacctactcaagtagcaagtcatgctcaaaaatattttatacgtcaatcaaatatgagcagaaggaagagaaggtctagcctttttgacatggtgcctgatgagtccatggaccttccaccccttcctggaagtcaagagccagagacctcagtgttaaatcaaccaccactgcctccccctgtggaggaggaggaggaggtggaatcgatggagtcagatacttctgctgttgcggagagttctgcagcttcagctcttatgcccgagagtttacagcctacctatccgatgattgttccagcttatttctcaccgttcttgcaattctcagttcctttctggccaaatcaggaagatggaggtgatctgcctcaagaaacgcacgagattgtcaagcctgttgcagttcattccaagaatccaattaatgttgatgaacttgtgagcatgtcaaagctaagcataggggagcctggtcaggaaacggtgtctacttctctgtcgttaaatctgctggtgggtcaaaataggcagtcggccttccatgcaaatcctcaaacgagggctcaagcttgatcccgcttccgcacagaaactgcattaagaaggattccctctctttttttttctatatgtaagattgaccgtgctctgtagcttgtatcatgttgtaagttatgctatgtatgaatgtacctgttgtttgtctggcacgcatgacatgccactcatgataacaaactcataatgttagtgctgatctttatggttgtaatgttgtaaacttttctgagagaaaaaaacgtactagccagttgttttcacatgctgtgttgctttttgggttaaggaggaaa

SEQ ID NO: 149423 - DNA, 424 bp, Zea mays
  Clone ID: MRT4577_6779C.1
atcttatctttgaatccccacgacggaattttgtctctgctgtttgccgctggagaatggaacggcggcgtcgggctcggtggacggtggaggcgctggagtgctggacggtggcgctgagtggtgctacaagacggagctgggcggaggccagagaaagatggagcagtcgcactaaaagatggaagacggacgaagatggcggcgctacccgacggggttgaacggcagcgcaacgcaggaagacgacactcggcgaggctgtaccgctggacgggcatgacgaaagattggggagcattagactgagggactaggcatgtttgttttaacttttttgagattttgtacttcagcttttgagatcttattggtttaacctgcgttaaatctctactatatttaaagcatcagtttcaacgat

SEQ ID NO: 149424 - DNA, 1185 bp, Zea mays
  Clone ID: MRT4577_677C.1
ctcgaggccggccgggacacaccaccatcgaaacacaaaccagcagcaggcagagcaacgactagctgccaggcaagccggccgggggtgctagcaagagtgcaacaaacaatggccaccgcgctgtccttcaaggccttggcactggccgcgctcctctccgtggtcgtcgtcacctctggcgctcgcgccgagcaacagctcaagcgcaacgccaccaccgcctcgcaggacagatccttgttgtcctacagcagtggctggctgccggccaaggccacctggtacggcgcccccaccggcgccggccccgtcgacaacggtggtgcgtgcgggttcaagggcaccaaccagtacccgttctcgtccatgacgtcctgtggcaacgagcccatcttcaaggacggcaagggttgcggctcatgctaccaggtggatacggtgcctgaagagcaaccacccggcctgctccggcgtggcgcagacggtgatcatcacggacatgaactactacccggtggccaagtaccacttcgacctgagcggcacggcgttcgggtccatggccagctggggcctgaacgacaagctccggcacgccgggatcatcgacatgcagttcaggcgggtgccgtgcaacttcccgggcctgaccatcaccttccgcgtccagcacggctccaaccccatgtacctggccgtgctcatcgagcacgagaacaaggacggcgacgtggtgcaggcggacatcatgcagagcaactccggccactgggagcccatgcacgagtcctggggctccatctggaggatcgaccccaaccgcccgctccgtggccccttctccatgcgcatcaccaacgagtccggcaggcagctggtggccaagaacgtcatcccggccaactacatccccgacgtcgactaccgctccttcgtccagtactaatgatcgagctagcttggtcattgcttaagcgtttaattgtttcttctttatttaattagtggctgccgttgccgacatgcatgtgggggaaattggaggaggcaagcatcaatgcaatgtgtgctctcccgcccactgtcactataccgttattaattaccagtgtgtaaccagcaaatcatactacatatatggttatataatttcatactaaaaaaaaaaaaaaaaaagcggcc

SEQ ID NO: 149425 - DNA, 1471 bp, Zea mays
  Clone ID: MRT4577_67800C.1
ttcgcttctcctcccagcccacctctcctctccccttccggcgcgcgcggccgcctggttcctacaccggcgggtgcgctggcggccccggggatgacgaggcggtgctcgcactgcagccacaacggccacaactcgcggacgtgccccaaccgcggggtcaagatcttcggggtgcgcctcaccgatggatccatccgcaagagcgccagcatggggaacctctccctgctcgggggatccaccagcggcggcggcggcgcatcccccgctgacgtcggccacgacgccgccgcagagggctacgcctccgacgacttcgtgcagggatcatcatccgccaaccgcgagcgcgagaaaggggttccttggactgaagaagaacatcggaggtttttgcttggattgcagaagcttggaaagggtgattggcgagggatctctcgtaattttgtggtctcaagaacacctactcaagtagcaagccatgctcagaaatattttatacgccaagccaatatgagcagaaggaagagaaggtctagcctctttgacttggtgcctgatgagtcggacctgccaccccttcctggtaatcaagaacctgaggcccagatattgaatcacccaccattacctccacccatggagggaggaggaggtagaatctatggagtcagatacttctgtcattgcagagagttcttcagcttctgctatcatgcccgagagtttgcagcctagctatccgatgatagttccagcttatttctcgccgttcttgcaattctcagttcctttctggccaaatcaggaagatggaggcgatcttccccaagaaacacacgagattgtcaagcctgttgcagttcattcccagaatccaattaatgttgatgaactcgtgggcatgtcaaagctaagcatatgggagcatggtcaggagacagtgtctacttctctgtcgctaaatctgctagggggtcaaaataggcagtcggctttccatgcaaaccctcaaacaagagctcaagcctgatcatcccctaccagcacagaaactgcattttagatggaatcctgggcaaaataagctttgctcttttttcttcttctaaatttaagatcactgagtcataaggtcactggttcgaagtagcttctccgtatttgcggggaaagcctgccctggtttctctccttcatcagaccccactcatatgggagccttcaatattgtcttttttatatatttaagattgaccgtgctcggtagcttgtatcatgtgctgtaagttatgctatgtatgaatgtacctgtagtttgtatggcacgcatggtatgccactcttatgttagcaaagtcattaatgttagtgctgatctttatggttgtaattttataaacttctaaaaaaaaagtataagccagttcttttcaactgcaaaaaaaaaaaaaaaaaagcggcc

SEQ ID NO: 149426 - DNA, 2092 bp, Zea mays
  Clone ID: MRT4577_67801C.1
ggccgggatcccccaccgcccaccggccgccccctctgctgctgccagcaagacgagccttcgaaacttccagttccatccatcgccgccctcctcctgaggagcatccgaaacaagagcagcggcagccgccaacgcccgcgcccgccatcccgacgatgcgccgacccacactctcgctcgcgctcgggctcgggctcgggctctccctcgtcgccctcttcgcggcccggggcgcccacgcctcaatccacgagtacggcggcggcggcttcgcgccgcgggccaactccttcttcttccacggtgggagcgaggggctctacgcgtctgaccactcgtccaactcctccgcatccttcatcagatttgacaccgttgtatttcgtcgcaccctggagtcagcatctaggcatgaggagatgcaacaaaagacaggattggtggaggctataattgttgagatacaggatagaggcaaaattggaggttcatatctgcactctgatgcaatatgttgcacacctgagcttgataaggagaaatcttgtagagtaggtgaggtgatcatacgtccaaatcctgagaaccccgactggcctaagaggatccagacattctttgatggtaaaaatgaagaaaccactatggtaactcaaattgtgtcgataaacaaaactgggatgtattacctctattttatgttctgtgatcctcaacttaagggattgaagattacaggaagaactgtttggagaaatccacagggttaccttcctggtaaaatggctccaatgatgacattttatggtttcatgtcacttgcatatcttgtacttggacttctatggttcattcagtttgtgcgatgctggaaggacattttgcagctgcattaccatataacagctgttattgctcttggcatgtgtgaaatggctttttggtattttgagtatgctaactttaattcaactggaacaagacctatgggcattaccttgtgggcagttacatttacagctgtgaagaagactgtttctcggcttcttctattagtagtttcaatgggctatggtgttgttctacccacattgggtggcataacatcaagagttgctgctcttggtttcatctattttgttgcttcagaagctcttgaacttgttgaaaatctgggaaatatcaatgacttctctggaaagacaaggctattcctagtgttgcctgtcgctgtacttgatgctacctttatcatctggatattttcatccctctctagaactttggagaagctgcagctgcggagaagcatggcaaaacttgaattatatagaaagtttacaaattctctggctgtgtcagtgcttatctcaatcgcttggattggctacgagctatatttcaatgcaactgacccgttgagtgaactttggcaacgggcttggatcatcccctccttttggaatgtcctttcctatgccctcctcggcatcatatgcatcctttggtctccatctcgcaatccaacagggtttgcatattcagaggatgcaggtgagggagctgatgaggaagggctctctctagtaggcagtgcggtgaaaggaaccggagatatggtaaacatgcatatctttccggaggacaagcgtgcatgataagttttggcctgaatgcagctgtactcctggcagaatgctatgtgaagtacctttttcctctggattcacgacttagctgacatcttctaaagattgcgtaagattccagatgtacaggtggtgacttgtgttgaacgatttgaccaagagatgtttacttcagttgtggctacccaatacaaaaaggtcggcaaaataaactatcactgagagcataagagggtttgtctttgtaatccttgtgatggtgacgtagctcgtaggtgattgaaatgtatcattcccagagctgagatgtactcactccgttccaaattaaaattcgtttttctttttattagatttatacaataatgtatgtgttatatatatatatatacataattatctatccgtatgtggatctaatgatttatttgcgattgatt

SEQ ID NO: 149427 - DNA, 1932 bp, Zea mays
  Clone ID: MRT4577_67802C.1
ctcgagccggcgggtgttctttttctagcattttgatggggaagtaggtcagaagtgatttagagtgattctggtggggattaaatgaagtggtggagaggaattttctgtagccatattggctgtccaggagtgattctcacaagaatctggagctgggagcaattactagtgctttgcatataatttgaactgagctgtgctctgtttgttttacattggtacctcgaagtccgcggggggcacttcttcatctcttctcctgtcggcatctcttctccttcctggcttcctcccaccacctccagtcctccaccggaccaccacctccaccactccctctctcacgacacgcgcaaaccgctcgaaccctagctggcggcgggaggcggaggtggctccgggatgacgcggcggtgctcgcactgcagccacaacgggcacaactcgcggacgtgccccaaccgcggggtcaagatcttcggggtgcacctcaccgatggctcggccatccgcaagagcgcgagcatggggaacctctccctcctctccgcgggatccaccagcggcggcgcgtcccccgccgacgggcccgacctcgccgacggcggcgggggctacgcctccgacgacttcgtccaggggtcgtcctccgccagccgcgatcgaaagaaaggtgttccttggactgaagaagaacaccggaggtttttgctgggattacaaaagcttgggaaaggggattggcgaggaatttctcgtaattttgtggtctcaagaacacctactcaagtagcaagtcatgctcaaaagtattttatacgccaatcaaatatgagcagaaggaagagaaggtctagccttttcgacatggttcctgatgagtccatggaccttccgccccttcctggaagtcaagaaccagagacctcaatgttaaatcaaccgccactgcctcctcctgtggaggaggaggtggaatcgatggagtcagatacttctgctgtcgcagagagttctggagcttctgctctcatgcccgagagtttacagcctacctatccgatgattgttccagcttatttctcgccgttcttgcaattctcagttcctttctggccaaatcaggaagatggaggcgatcttccccaagaaacacacgagattgtcaagcctgttgcagttcattcccagaatccaattaatgttgatgaactcgtgggcatgtcaaagctaagcatatgggagcatggtcaggagacagtgtctacttctctgtcgctaaatctgctagggggtcaaaataggcagtcggctttccatgcaaaccctcaaacaagagctcaagcctgatcatcccctaccagcacagaaactgtattttagatggaatcctgggcaaaataagctttgctctttttttcttcttctaaatttaagatcaccgagtcacaaggtcactggttggaagtagcttctccgtatttgcggggaaagcctgccctggtttctctccatcatcagagccttcaatattgtcttttttatatatttaagattgaccgtgctctgtagcttgtatcatgtgctgtaagttatgctatgtatgaatgtacctgtagtttgtatggcacgcatggtatgacactcttatgttagcaaagtcattaatgttagtgctgatctttatggttgtaatgttataaacttctaaaaaaaacgtataagccagttgttttcaacaaaaaaaaaaaaaaaaaaaaaaaaaaaaaaaaaaaaaaaaaaaaaaatcattaaaattagtgctgaaatttatagttgtaattttataaacttctaaaaaaaaagtataagccagttcttttcaaaagcactcaaaaaaaaaaaaaaaacacaataccaaacccttccgaataataaattgccccgcct

SEQ ID NO: 149428 - DNA, 374 bp, Zea mays
  Clone ID: MRT4577_67803C.1
caaaccttcaagcattgttacgctccagcgctcaggggtaaccatgcgtgtttgcgagctggacaatggccctatggtgcacggccttacccggatagggcgggaacgtgccggcgagggccgccttaccatacgcccgaccgacgatccgcacgacgggggggaatgccaaaccagctgctgcgtccccgagcccgtgaagcacctccgaccgtgttctgtacatgcgcccagttacctgacagccaagtagctacctgactaccgatgtgacacccgactactgttcggacaccgcgagactttcggcaagaaccgagaccttcaggaagaacactcagcttggggcaagctactcgcgctcggctatgctt

SEQ ID NO: 149429 - DNA, 482 bp, Zea mays
  Clone ID: MRT4577_67804C.1
ggccggcgccgtcgcaggccacgccggtccagttgcagtgctgtgggtagccgccgccgccgccgccgccgccggaccccaccgtccagctggtcagcgtgccgttggggtcggcggtgacggccttcttgaacgccagcagcgcctcgaggtgcacggacgcggacgcgtcggggacggcgcacgccgccggcgccgccaggaccagcaacgctagagctagcatcgcaacggcatttggcactggagtgtaagagtaagagtaagtgttcttccaggatgccattccacttgcgattattttttcttctatctccaaggcaccatgtgtgttgtgttcgaatgtgaactctggcgattgacaagcttattaggacgagcgcggtgcgcggaggccgtgccatcatcatcggctgccaagtgaagtcaatgctgtatttcccagcggcgtcaacgcgcgacgggaaacaggaccgcttgac

SEQ ID NO: 149430 - DNA, 787 bp, Zea mays
  unsure (1)..(787): unsure at all n locations
  Clone ID: MRT4577_67805C.1
gtttactcttttnacttaatattttttttgtagttactgccaatcaaagttcaacagactggcgatatcctatactccctctgttataggagattaggctaaagcactttttattatagtcccataatataaggcgtgctctctcttgacgtgcgtacgtcgatgcagtagtaatagtgttgataataaagagaattaaaatattaaatacaggggggggtctttgaaccaaagatgattatgccttacatactaggacagagggagtagtacttaaatttgcgatccgaggaagtatctaatattctaatcagaagatagtcatcttcttttttgttagtttccagttcatcagaagcaacacattgctttgttgatactgaacgccagctaagtttttattattctgattagaagaaaaactttgaacattctttctcaattttgcagttcaacaggagatgtttgagcgggaaattggtcgtctcagaacaatgtatcagcaacagcagcagcaacaggctcctgctcttgttcgtagtaacagcagggaccttgatgtgcagttcgccaacttgtctctgaaacacaaagaccccaacacgggccgggatgctctctctgggcctcttcgtacttagttctttccatccttccgttcttgtgggttctatcagtggccaccactgtgtctgtcatctccaccaagaaaggagaagtgcacttggattgtgtgaaaaacaccggaaaaaagctaatagctatggatctgatgtttattatttcg

SEQ ID NO: 149431 - DNA, 497 bp, Zea mays
  unsure (1)..(497): unsure at all n locations
  Clone ID: MRT4577_67806C.1
taccctcgggcttggccgggtgctgctcacanacccaggccaagtcgtctcctctttcacaccaagctcccgtctgtgcacctcctggtctcagcgactccatcctctccctctccagatccccgcccgtgacgccgccggctgttacctctccggactccggctcatcgtcctcaggcccaggtaattcatcaattgccgtgctgctgcggccagtgattgattcgtcgggcgggggaccgtcttttttcttccatccatccatacatccatccttacgagcgattctagtttctgggattaaatcaattgggcggatgagcaccgagcctcgcgaatttgcaggtcttgatccgcgatccgccgatttagtcggtgtcccgtcagctgcgggttttgctgtgcggggaggttgatccggcgagcgccttggatgaattcgcgccggtctcggtcggtgaagctggttgtagtgtgcgccaacggtgacggggtct

SEQ ID NO: 149432 - DNA, 722 bp, Zea mays
  Clone ID: MRT4577_67807C.1
ccggccgggatacacagcttggaactctcttcatgtctcaaacgatcttaaccccccctcagcggtcactccagatccaatcctcgatgggaaatgtggaccgcacgaaagaaattgcacgccagtcaacgggaggcaaagcgccacgaacacagctggcaaccaaggcagcgcgcaaagcacacccggccacgcgcggcctagaagaagccacatcgagttacacccgcgccaccggggaccctgtgagcagatccgcaagtaccagaaaagcacggagctgcttatccgaaaactgccggtccagcgcctggtgcggcagatcgaacacgacttcaagacggacctccggttccagtcctccgccgaggccgcgctgcacgaggccgccgaagactacctcgtgggcctcttcgaggacaccaaactctgcgacatccacgccaatgagcgacaccatcatgcccaatgacatccggctcgcccgccgcatacggggtgagaggaactgagcaccccctcgccgctgctgcgagtccatcgcttccagatatctgtggagcgaagaactactgcacgacgctaagaactactgcgagctatattcgcctgtgagagtaggaagagcaacaatgctctgatgattacaatgcagtgcccccgcgatactgacatccgtgctgcttgttctggacttcgaactacgaatgcgattgttacta

SEQ ID NO: 149433 - DNA, 290 bp, Zea mays
  Clone ID: MRT4577_67808C.1
aaaaaaagccctagccagatcagcgatggcaacgcacccggcgtacccgaccgccgacgctggtgtctgcaggtcgtcgtccggcctgacggctttgtgcctatctgcatcacatgcttttgctgtgatacactctacctcaccgtgttactttttattctaaatagccgattgctttgtcgcggggtcctgatcacaccgtccgattggtattgaacaaggcctatccaacgagcactcctttgctgatgagagggtctggcacatctacgtgggctctggggacagcg

SEQ ID NO: 149434 - DNA, 221 bp, Zea mays
  Clone ID: MRT4577_67809C.1
acctcgccggccacactcgtctttctcacgagccacagcccacaggcacaggcaggctctggagctcagtccacccatcgcaggggatggcgtcgtcgctcgccgtggcaacggtcccgtctctggcaggcctggcatgcataaacctgtgcggcggcacctcgtccctagtggctatgaacggctgctgtttgctctatgggctaaacgtggtggacatg

SEQ ID NO: 149435 - DNA, 216 bp, Zea mays
  Clone ID: MRT4577_6780C.1
ctttttcccttttttttttttttttttttttggtgtgaactataacagttgggcgctttttacctccttaatcctgctaattaacacccttcttttctaaaactcaataagatttcaattaacatgaccataaccttggtatcatcatccatccatccttctaaattttatacaacacctccatcgtcctcatcctccctcccttctgaaactttt

SEQ ID NO: 149436 - DNA, 301 bp, Zea mays
  Clone ID: MRT4577_67811C.1
gccgtatccgagtacttgttcacactgctgtagccaactttaccaagcactggtgctgccagatgttacttacagattaatgagcatgagtaaggataagcacgtagaccagtattgtaactctgtgaccagagtacgacttgctcactggtaccgtacaactattgattacgaaccgtgtgttaatccttgctatatggatctgacactgctcatgtattccaagcatcctgtactatttttcatgacgcttaccaaaaaaggaccgatccggaaaggatggtgcgggacactattataa

SEQ ID NO: 149437 - DNA, 318 bp, Zea mays
  Clone ID: MRT4577_67812C.1
ctcgaggccggccgggccgggatcacctccagctcaaccattcccgatcccgcggtctctcgattgcctgctcttctctacctgtacgagtgtcccggcttcagcacttcgactctcgagggggggctctcgcatggagtaaagctgccctaaggtccgtccgatcctgcgtgggcaacatgaatgatcccgatgtagccaagcagatccagcagatggggcggctcatccgccaggaggccgaccaaaaggccaactagatctccgtgtccgctgaggaggaattcgacattgagaagctgcaccttgctgaaactg

SEQ ID NO: 149438 - DNA, 289 bp, Zea mays
  Clone ID: MRT4577_67813C.1
acgatcatattgaccaatttggcttgaatatttgctaaaaaaatgtaattcacgtgtgatctctctcgggtctagcgttacagcagcaggcacaagacgcatactgcttaatggtcacaaacaaggcttacagtcacagtcctacgaacaaatttgaagctaatctgctcctggtacgcctaacaaatactctatccgtatctttttagttatagctggatagttcaatttttgcactattcatcgactactaaaacgaaacttacatagttagtgttacacccttgtt

SEQ ID NO: 149439 - DNA, 984 bp, Zea mays
  unsure (1)..(984): unsure at all n locations
  Clone ID: MRT4577_67814C.1
cccgggtgctctttccgccttataaaccagcggncctttttcttttcttccaaaacactcgtctgagccaccaaacacttgctatgcccgctcctccccgcgcactgctcagcacgccgtgcccgtgagaccatggacgcgagcgcggccaccgccaggcgcaagcgcaagcgccccgacgccgacatcaccggcgacgccgccgccgccgctgccgctgccgctgccgctgccgccgccccggtcgccgtcgacgaggcctcggacgccgaggtcgaggagttctacgccatcctgcggcgcatccgcgacgcctcccgccggctgtgcggcgccggcgcccggcccgccccgcgcgcgccggcgtggcggcccagcttctcctgggaggacttcgcgaccccggcccctggcgcgccggcgcctgagaccccgacccccgcgcagcaggagccagcgcagccgcggcccgacgagcctgtagccgtcgtccgcgctaccgccccgtcgccgcgtgccgggctggacctgaacgcggagccggagccggaggcgccggccacccctcgctcggcgcgcgtccaggcgtagcgtagcgcgcggcgcatcgtcgcctgcctcctgcaccgcgccaagttgggcccgcgcgtcagctcggctgctgggaggtggccggcccggtgatccggtgatgtcatgtcagccgaaagccgacggtggtcgccatcgtccgcgggcggcacagcacacacagtgcgtaccttcccctcggtgaattactgatacgaatccccatcatgtaatcgtatttttttagtggctctctttggtgcgctgctccgtgtggacaggtgagactggttcgttgctttggttgcaggaaaataccttttaatcggagcagttgatgttccgtccgaaaaaatgacgtgtttaactattcgttgcgttttttgtattaaaaaaaaaaaaaaaaaaccttag

SEQ ID NO: 149440 - DNA, 870 bp, Zea mays
  Clone ID: MRT4577_67815C.1
gctctttccgccttataaaccagcggacctttttcttttcttccaaaacactcgtctgagccaccaaacacttgctatgcccgctcctccccgcgcactgctcagcacgccgtgcccgtgagaccatggacgcgagcgcggccaccgccaggcgcaagcgcaagcgccccgacgccgacatcaccgccgccgccgccgccgccgccccggtcgccgtcgacgaggcctcggacgccgaggtcgaggagttctacgccatcctgcggcgcatccgcgacgcctcccgccggctgtgcggcgccggcgcccggcccgccccgcgcgcgccggcgtggcggcccagcttctcctgggaggacttcgcgacgccggcccctggcgcgccggcgcctgagaccccgacccccgcgcagcaggagccagcgcagccgcggcccgacgagcctgtagccgtcgtccgcgctaccgccccgtcgccgcgtgccgggctggacctgaacgcggagccggagccggaggcgccggccacccctcgctcggcgcgcgtccaggcgtagcgtagcgcgcggcgcatcgtcgcctgcctcctgcaccgcgccaagttgggcccgcgcgtcagctcggctgctgggaggcgggcggcacagcacacacagtgcgtaccttcccctcggtgaattactgatacgaatccccatcatgtaatcgtaatttttttagtggctctctttggtgcgctgctccgtgtggacaggtgagactggttcgttgctttggttgcaggaaaataccttttaatcggagaaaatgatgtaccgtccgaaaaaatgacgtgtttaactattcgttgcgttttatgtattattttaa

SEQ ID NO: 149441 - DNA, 429 bp, Zea mays
  Clone ID: MRT4577_67816C.1
catggtcacctccaaagcaagacccaggctgcttctacaaggagctgtacaaagattgagtgccagcggggatcttgagtgaacctggcgggtagagtctggttctgttacacttgtaccactgaagagttccgagttccaaaagagaaagagaaaggtaaagcagacaggctagacatgatcattagctggcaatacataggtgcggattagcacggaaagtagctcacttactagcaggcaattctttcgaagtcttaaggccatactgagctgggctggtttggctcagcgttacatactgtgtacaactaatgcccaatgtatcctttcccaacacaatgctgttctgatattctttctcttctttctgtacgtgtccttgttttttatgggacattctatttctatacaagtatacatgtggga

SEQ ID NO: 149442 - DNA, 1518 bp, Zea mays
  unsure (1)..(1518): unsure at all n locations
  Clone ID: MRT4577_67818C.1
actccctcgagggatgtcggcacaatccgcgtcatttgcagccaaaaccctcgccgtcttatctacccctcgcccccgtcgccctccccgtgatcagatcgagagagcaggcccgattcaattcgacccgaggcgccgcggccggaaggaatttcgcgagtcgcccggaaaaaaagccctagccagatcagcgatggcaacgcacccggcgtccccgaccgccggcgctggtggcgacaggtcgccgtccggaccgccgccggtgcgcctgtctgcggcacaggcggtggcggcgatccagcctacctcaccgcggtactttttctcctcgctggccgctgcctctgccgcggcgtcctccccgcaccgccgcatcggcatcgccgtcgacctctccgacgagtccgcctttgccgtcaagtgggccgttcagaactacctccgccccggggacgccgtggtgctgctccacgtccgccccacctctgtgctctatggtgccgactggggctccatcccggtctccgtcgacgacgaccccgacgtcgacatcgccgagggtgcggtgcgcgctgcggccgctgaggaggagcctgaggaggcgaagaagaagcgggaggaggagttcgactccttcacgtccactaaggcgcaggaccttgcgcagccgctggtcggcgcgcagatccccttcaagatccacatcgtcaaagaccacgacatgaaggagcgcctctgcctcgaggccgagcgcctcggcctgtccgcgatgatcatgggcagccggggattcggtgcctcgcgcagggtcgggaaagggaggctcgggagcgtcagtgactactgcgtgcaccactgtgtctgcccggttgtggttgtgcgctacccagatgatgccttcggggatgagctgcgaacggtacctgaaaatgagcctgtgtatcatgcggcgccggaggcccagaaagaaaactgagggaagtgcagggcggctaggcgacgaggggtggagaaagcagaggccgtcacgtcacgtcgtcagccagccagccctagcgtaacacaccggtgtcctgtctctccgactctccgtcccatggccactctgcatctgtaccaggaacctgtatatcatggacgagtccccgctgttttgcttcatgacatgtgtgttggtaaatgaagacttcaatgtttttggcgtgcatgggccgccgtgttcttatgatgcttgtgtcgtactggccttcctgcttggcgctaccccgccagttcatttgccgatgactcggtggctggcaaacgagtggcaccgcggtcagccacaagggcaacacacgtacatgcattggttggtagctggcagcgggtaaaaataaaaaaaaaattatggtgttcggtttgatggatgagttctccatgactgttaaacattgaatttggtctgtgaagcggaatggnttaaaaaaaaaaaaaaaaaaaaggcgcggcgctncgcgntncagaactnagcggacg

SEQ ID NO: 149443 - DNA, 570 bp, Zea mays
  Clone ID: MRT4577_67819C.1
cgccccccaggccagctacctatgctaaactgaaacagttatttttctggcctggaatgaaagcagccatcaaatcttatgttcagtcgtgttccatttgtcaacaagcgaaatctgacagagctccttatccagggttactacaacccttaactgttcctccacaggcttggcacaccatttcgcttgattttattgagggtcttccaaagtcagctcattacaattgcattctggtggtcattgacaagttctccaaatatgggcatttcttaccccttctgcatccgttttctgctagcaaggtcgctcatgttttcttggaccatatttacaagctgcatggattaccggtcaatattgtgtctgacagagatcgcatcttcaccagctcattctggcaaaatttattcaaactcactgacaccaagctttgtatgtcaaccgcatatcacccccagtccgacggacagaccgagagattgaatcaatgcctagaaacattcctgcgctgctttgttcatgctgcaccaactcgttggtcccagtggttggctgtggctgaatatt

SEQ ID NO: 149444 - DNA, 576 bp, Zea mays
  unsure (1)..(576): unsure at all n locations
  Clone ID: MRT4577_6781C.1
catggcgacggtggcctcagccctgcaggggcaagctccccaccaccaccaccatcaccacctggcgctgccatcgtcgtcccaggcggccgacgaccacgacgaccacgacaatgcagctggcgacgacgacaacgacggcgacgacttcgccctcgacactaagagcccgcaggtgaggatgctccccgccatgtccgactccgccgccgccgataacaacaataacccgctgttcctgccgccgccaagcatggccgggtgcatgctctccagcctgcagcagggcggcgccgcgaggcccgccccgccgccgcctgcatcctacttcagcggcggcggcggcaaggcagcaggcctctacgaccccagcgcgtnctccccggcgagcatgtnggccacggcgctgctgcaaaaggccgnggagatgggcgccaccgncggngggtacggngcgggcgctggcttntncaccgtnggattcgggcccatgatgggtgggcctagcgtgatgggcctttttgggcctgtgaagattctgggggggtttcgctggagggggacgatgggatgccg

SEQ ID NO: 149445 - DNA, 596 bp, Zea mays
  Clone ID: MRT4577_67820C.1
ccggccgggctccccaccttcgtgatccccaccgtgaggacaggggtgtgtgtgcgtcggagcggagaggcgagaagcagcgccgccgcggatcttacaccacggcgtcacccgacgtccgaaatcaggcctggggcctccatcgagtcactgggcggtcatccaaggcaatcttgggcggactcgatagtggggccacccctaatttatcatcggagcatttgcgtcgccaacaatccgccccggttcatgggcagacacctcccccgctctgatcatcagtaatttccccagtcatgtgttcgccctatcctccactttattttgggacggattaagtcttcggtagcgcagcgatgatcgaggttgcctcgcggcggcgcgggcgtcgccgtgggagcttgggcaccgccattacccggcgatggctggggaagaagcaccaggaccgcctgatcgcgggtgtgcggtcaggattaaaagtcgcgtaccccttcatctcatttaatcctagcggtcggatctagatcgtgcgactcggtggctgatcagggtaaaaaaaaaatagcaaaaaaaaaaaaaaaaaatttgcggcc

SEQ ID NO: 149446 - DNA, 431 bp, Zea mays
  Clone ID: MRT4577_67821C.1
aaaaaaaaaaaaaggggttagggctccgttttttttccctaaaaaagttccctgggggaaaataaaaaatacccccaattagggccttttttggttaccaaaaaaggggtaaacctttgccccacttttacggacaaggggggggttaaagacccacccaagtgggggggcaaccctaagggtgggaaattttagaaaagggaacggcccaaaccccttccccaaatgaaaacccaagggcaccggccccggaaaagaacccccctcctgggggtaacccctccccaaaaaaaaaggaaaacttggcaccaaaaaaatgggtgtggggtaaggcccccccccattaaaaggggagggcccagacccattcgcaaggggaataaatttgcaaaacttttttgggggcgacccccctgggggggggttccctt

SEQ ID NO: 149447 - DNA, 129 bp, Zea mays
  Clone ID: MRT4577_67822C.1
gtgcctaaaaactagtagctagtgattgcttctgtcgaatgacactatgcaatgtgatcgggaaccttgggtcttgttttcgaccctctgtatgactttcgtcataaaaatatgttggctccccgtatg

SEQ ID NO: 149448 - DNA, 741 bp, Zea mays
  Clone ID: MRT4577_67823C.1
gtacccgggcccccccctcgagttttttttttttttttttttttttttttttttttttttttttttttttttttttttttttttttttttttttttttttttttctttgaattttgccccaatttttttagggtttaccccccaataaagtggaaaaacctttaaatcccccaaaaaaaccccggggggggtaaaaaataagggacaacccccttataaaataaaagggcgggaagggaaaaaaacaggccggaaaaaaaaagttttggttttttttttcctcaacggttaaagggggcgggggggcaccccaaaaaggggggggcccttagaggggaagagggggttttttttaatattttttcccataagcggtttttttttgcgggggggttagaacaaaccctttcttttgtcccaaaccccttaattcctcaaaaaactgacagaaggggggttgggaagccttcttttttaaaaaaaaggggggcgggggcttgggggtgaaaaaccccggcggcttcaaattgaaggggggcgttttggggcccgccgttttcgggggggaagggcccccggggggggccgttttgggtgccgaagcttttgggaaaggggttcccctggggggggccgttttggccctcgaaggttttgggaaaggggggacctttcgggggggcccgttttggcccttcggtggtgggggaaggtttgggctttggagtgcaccccgggggg

SEQ ID NO: 149449 - DNA, 185 bp, Zea mays
  Clone ID: MRT4577_67824C.1
agctggtcaagcacaacgacaccggggaggttggactagtgatgcgtcaggcgaagacgctgaagatgtgagccaaccatctagtgctggagacgactaagatgcaggaacacgcggcgagcgacaagtactgcatttagaacgcgctggagtttgctgacggctagatcaaagaggcagatgtt

SEQ ID NO: 149450 - DNA, 534 bp, Zea mays
  Clone ID: MRT4577_67825C.1
cgtccggggccggggcccgcagtcgtgcgcgccgccattgtggtgcgccgccaagccctgaatctcgctgctggtcgcgctgaccggcactctctccccccgggcggaggaggagcccccgccgaggccgagggagccggctcacctcaacgcgacaatttgacgaggccgtcgccaatcaccccttaatggccaaaccgttctactccccctggagtgggcactgcaagaaacttgctccataattgagaatgccgccatagtacttacaaagcatgacccaccgatggattctagtcagggtgatgctcacaaggataataacagggccgcttgctaccaagtccgagatacaagggttcccaaccaccaaaatctttagggaccaatggaagaacattcatgaatacaagggcactaaagaggctgattgcattgaggattacttagaacaacaggttcgcccttcgtccaaagacatcaagtcaccagaagatgcgacgggccttatcgatgacaagaagaactacattg

SEQ ID NO: 149451 - DNA, 437 bp, Zea mays
  Clone ID: MRT4577_67826C.1
tttttttttttttttttgtgtaaataatactattaaattgcgccgtagccagctactcaaaagcacatagctataaaaaagcggaagcgggggggagttgatattactgccatgaaagaccaaagattaccacccgtagtagccaccgtagtagccaccgtagtatgagttgtagccgtatggagtgtagccgtaagggtagccgccaaagaaaggaccaaactgcttggcctgaccggcttgagtggcttgatgagcctgggcggtttgttgggcctggacatgctcggaggcgggtctggcgaaaacaccagtgcagacagcaagggcagcaacaaaaacggtgaattgcatggtgaggatgaaaagttgttgagaaaatgaagcaatgagccagtcaaaccgctaaaaaggtggttttagcgggtaagaaagct

SEQ ID NO: 149452 - DNA, 125 bp, Zea mays
  Clone ID: MRT4577_67827C.1
gacaatacttttgagttttaaaccatgggccaagaacaaataaacagggggaccggtcgcttatgaactattaacagaccacagaccgtggactccccactcactgttgttaagctgatccatgc

SEQ ID NO: 149453 - DNA, 281 bp, Zea mays
  Clone ID: MRT4577_67828C.1
tcgcacaggcgtggggggagccaattgactattgggcaaagttgccgaaaaattctttgacaacctaccaggctgtaaaatggtcttccaacaagcacggggtgcccttcatccccggaagttctagcggaggacccgggtacattcccgtctcctttggagggctcaaggaaacaaacaccaccctggctgctgtaaagctcaagcgcggtctgcatgagctcgtgaccgatgcaatggtaaagtgaccgttccatgggtgtaagtaaaatctccatttt

SEQ ID NO: 149454 - DNA, 321 bp, Zea mays
  Clone ID: MRT4577_67829C.1
ggccggggacataatatcacaaacatcgagtacagtcctctaggtaatctggtggtatgacgatacggcgcgcaccactagcaagtcgtcggcgtcctctagctcggcacatcgatatgctgccgaactgtctcgtggccgacgtcgaggcggagttcgcactgaagtggaccccagagctgctgtgcgacataagcaacgaggagatcatgcccatctcaaaccgcagtcctcacagaacacggatcgagcgcctggaacgctgaagataggctgcgacgatgtatccagaacgttattcaactgcctgctccgcgacaa

SEQ ID NO: 149455 - DNA, 383 bp, Zea mays
  unsure (1)..(383): unsure at all n locations
  Clone ID: MRT4577_6782C.1
ggcgacccacgcgtncggggaggcccagtgactgtagaagtgaacatttctatggcagttgtctgtaagctattttaggtgctactagtgcaagatcccaagccaggatagagagtcatagatagaggtgtgtgtatgcgtgggtgtgcttaagatcttgcataccttgggttgctgtctcggtatgaccgtatgggtctcctagtatgtccgcagtcggcagagacaggtcgctgcagaatactactacaatacggagtacaatactactagtacatgattgtattgacctggttgagtggatgtagttgacacctctatctacagacagaatggaagtaaaagtgagaaagaaaaaaaaaattaataataaataatttttt

SEQ ID NO: 149456 - DNA, 301 bp, Zea mays
  Clone ID: MRT4577_67830C.1
cacgcgtgcggttagttgtttgtatgtttcagccgatcgagctgaatcatcaaagacagtgatcgccatgcatatattctttgtaggagggatttgaactgagggatgaggttatccagagcaagagctactgagatgagcttagcaagcttgggatgatcgagagactctgcttgaatagctgcccatcaaaacaagggtaggctacctacctccaagagagcaaagcatggacacacgagatgacagtttatgcggatagagatatcaaagacacaaaagattacgcatatgaccggtt

SEQ ID NO: 149457 - DNA, 391 bp, Zea mays
  Clone ID: MRT4577_67831C.1
agcatacatattgctcaatgcattttctttattgatgcatcgttcatgggaatagagcacgaaatagtgtgcctattccttgaacaaaacatgccatatttgatccatcacatcgtagcgaggccccatacaatattcggatccgcaatcaatggttttcctcgatctgctgtccctggatctcatacttgacgccgaagctggccctcttggagctgtcgaatgaccaacttaagagggccggctggttggccagccgctgcaggttctaggcggccctgctgcccacgtgcggcgcgatcagtccggtggagctgccggccaggaagctggcgatgaccccgccgccgcggaaggtcggtgactgctgggcgcagaactagacgctcgt

SEQ ID NO: 149458 - DNA, 454 bp, Zea mays
  Clone ID: MRT4577_67832C.1
tagcatatatatttgcttcaatcggtgtcgtcttcagccccagcaggattagaaaaaaaaagggggggacactgcagctcgtaaacgttgtccatacagattatcagaggtgaaaaccatacatgatgtaatttaacactagatagttacaacatggggctgtctcagtatggaggattgttaactactctccatcacggcagtaggtgtgatgtagaagagtgatcactcaaacagcggtttgcccagctagctagtcgtcacactgtgtgttgcaaatttgcaacacaatgattactaatataaaagatactcttgagttaaaaaaaaaaaaaaaaaaaaaaaaaaaaaaaaaaaaaaaaagcttgtacctgcccgggcggccgctcgaaaaaaaaaaaaaaaaaaaaaaagtttgaaacttcccggggggccctctcaaaaggggcaattt

SEQ ID NO: 149459 - DNA, 198 bp, Zea mays
  unsure (1)..(198): unsure at all n locations
  Clone ID: MRT4577_67833C.1
ttnagaaatttaatttttttgaccctagacacccaatgaatgaacttaaatgtgtgttgggacaccccacgggcacacacacgatcacacacccacaaaatggaacttaaattaaaaataaaaaacggggaatctgcggaaagacaaatgctgggactgaaaaaggaatttattaatgggaagggaaattggttttgg

SEQ ID NO: 149460 - DNA, 109 bp, Zea mays
  Clone ID: MRT4577_67834C.1
ctctcaacaaatgaatattctcggacaatcatgcaacgaatcaaacaacggaagctactcttgttcgtcgccggagactggtagctcctctaacattccacacaacata

SEQ ID NO: 149461 - DNA, 567 bp, Zea mays
  Clone ID: MRT4577_67835C.1
gggaacgaatcaagggccaatctttgggggggccctttttttatcgaaatttttcaaaacccaacaaggagcaggaggaaaaaaaacggggggggacccgaaaaaagccgggggagctagcaaaacaactagctgcccctttggggagagtcccatcacagggatcccccgaaaaccccaaggggggggggggaaaccccacctcgggcgaaaaacccaacgagggcccccccttgctgcccggggatcccaaacgggggggcactcccgcccccccatgctccaaaagggcccaaggtcttggggcttgggacaaacttggggggggttataacgggggggccggcaacgttgccgatcgccccggacagttccgggagccccccggagtccccgagctggatcaccggctcagtttctccaccggaacccccccaaggaccaaaaaattgggtttggccgggggggtccccctaggaaaaggcaatcggggccacggggatgcccgaaacaacggggatgctcttaaaaccctggggctttgccgggagggccaccggaaacccg

SEQ ID NO: 149462 - DNA, 342 bp, Zea mays
  Clone ID: MRT4577_67836C.1
caccttggaaggtttactgcaaacaaaataggggcgggccatgtaaacattggggggacaatcaaggaagccccccggggcgcgttcaaaaaggacctggacccaacctctcttgttgtccttggaaaggggttcctttttcttcagcgttattgaagacggcataaaatctcaaccctccagggtgacccgttccaaggaaggtattaaataaggggcccccccccttgttttctttccaccccccaaagtacccactgttgggtataaagacacctgttgtccaaaaaaaccgggggataccccggagggaatttccggggtaaggaaaagtgtcccggg

SEQ ID NO: 149463 - DNA, 787 bp, Zea mays
  unsure (1)..(787): unsure at all n locations
  Clone ID: MRT4577_67837C.1
gaaaatgcaccagttgaagagcctgttctggtaccacctgttactgaagttgtttcacctcccaagtccgaggtggccgatactggtgacttactgggcttagatgatccaaatcctgctgtatcagctatagaggaaagcaatgctcttgccttggctattgttccaacagatggggcttccacaaccggtaacactgcatttcaagataaggggtttgatcctacaggatgggaactcgcccttgttaccgcaccgagcaacacgacttcatctgcgtctgtcggtcaattgggtggtggatttgacaagctcattttggacagcctttatgatgacggggcctacaggcagaggcaacagcaacaggtgtatggttcagcagtgcctaatccattcatgtcaaatgatcctttcgtgatgtcaaaccaagttgctcccccaccacaggtaggcatgggtccagcaacaaacaatccctttctggatgctggattcggggcattcccagtggcgaacaatggccatcagcaacacaacccatttggcagtgcccaacttctgtaggctacgtagttacaagagcaaatttgtgcttcagcagatgcgattntttcggtgattatatcgtgcattgtgctcggccattctttcatgcgatgcgtgtattatgaattggcttcaccacacggggagctatggcttgacccaacccttgntgtaaagaattagcgacttgtgtacatcgaatgtatgtcaataacagtaggcaatgttattataacta

SEQ ID NO: 149464 - DNA, 312 bp, Zea mays
  unsure (1)..(312): unsure at all n locations
  Clone ID: MRT4577_67838C.1
atatgaagtggtngggcgcgataaagggcgattcgacgctgactgctgtccctattcatcattttggaccggtctggggattggcacgccttatgtgcggtttatgcattcactgatggtgcttctggaacatcactgagagatgggatgaacccttgggagcctacgaatatgctgcattcccaagggtctaaagaaagggaggtctgatacttaatgaaggttgctggggcagcaccatccccttggaggcggcggccattcctaataaaaccccttggaaaatttacaagagggttggcagactcaaat

SEQ ID NO: 149465 - DNA, 2221 bp, Zea mays
  Clone ID: MRT4577_67839C.1
agaacaagtccagtctgtccagaaatacattagaaaaaagagccaaagaggagaacaccggccggcgaggtggacgaagcggcccgccgaggaaatggcgtcgatgcagagctggcgcaaggcctacggcgccatcaaggacaccaccaccgttagcctcgccaatctcaactccgacttcaaggtgtgccttcgatccggatctggatgtggcgatcgtgaaggcgactaaccacgtggagtgcccgcctaaggagcgacacctgcgcagggttgttgcggcgacgtccatcaccaggcctcgggcagatgtcgcctactgcatccacgcgcttgcccgccgtcttgccaagacccgcaactggatcgttgctctaaaagcacttgtagtgatccatagacttcttcgcgagggtgatcctacatttcgagaagagcttctcaactttacacagaggggacggatcctgcaactttcaaactttaaggatgactccagtccaattgcttgggattgttctgcctgggtgcgcacatatggtttgtatttggaggaaaggttggaatgcttcagagttctgaaatatgatgtcgaagctgagcgcttgtccaaacaaggtcaaggtcctgaaaagggtcacagtagaacgagagagttggattcacaggatctgttagagcagctgccagcattgcagcagttactgtaccgacttgttggatgtcggcctgaaggagctgcaaataataactacttggtgcaatatgctcttgctttggtgctaaaagaaagctttaaaatttattgtgcaataaatgatggaatcataaacctcgttgataagttttttgagatgccaagacatgatgcacttaaagctcttgaaatctacagaagggctggccaacaggctgggaatctatctgatttctacgagaattgccggggattagaacttgctaggaattttcagtttcccactctgagggaggtgagggcttgtactctgtctagtcttcgctatgtgcactggattatgttatgacatcttttacatgagaaaattctcagccaccacaaacatttcttgctactatggaggactatgtgaaggaggctccacgcatggtcccagttcgagaacccctggaacttcctgagaggctgcttcttacatacaaacctgaagaatcagaggaaattcttgagcctgctcctgttgaagaggaaaaagcaccagttgaagaacctgttcttgtaccacctgttactgaagttgtttcacctcctcccaaggctgaggtgcccgatactggtgacttactgggcttagatgatacaaatcctgctgtatcagctatagaggaaagcaatgctcttgccttggctattgttccaacagatggcgcttcaacaactggtaacactgcatttcaagaaaaggggtttgatcctacaggatgggaacttgcccttgttactgcaccaagcaatacaacttcatctacttctgttagtcaattgggtggtggactcgacaagctcattttggagagcctttatgatgatggggcctacaggcagaggcaacaacaacagctgtatggttcagcagctcctaatccattcatggcaaatgatcctttcgcgatgtcgaatcaagttgctcctccaccatcagttcaaatggctgccatgtctcagcagcatcagcaaatcccaacgatgatgcaaccaaatccctttggaccacctatgcatccacaggtgagcatggcccctgcaacaaacaatccctttctggatgctggcttcggggcattcccagcggcgaacaacggccatcagcaacacaacccatttggcagtgcccaacttctgtaggtcacttagtcacaagagcaaatttgtgccccagcagatgcgatttttgtgtgattatatcatgcattgtgctggacctttcttgcatgcgacgcgtgtattatgttatggcttcaccacacggagagctgtgcctatgtcgtgatccaactcttgttgtaaagaaattagtcacctgtgtaacatccaatatatgtcaataaacagtaggcagtgttattacatctataaacaaaagaacagtggaatgtaggaaattcttaatattgtttattccattgctgtttatcttctaaaaaaaaaaaaaaaaaaaaaaaaaaaactcgaaaagggggc

SEQ ID NO: 149466 - DNA, 413 bp, Zea mays
  Clone ID: MRT4577_67840C.1
gaacctttgggctgatttatgtgcttgttccccctccgcggcggtaatactactactagcgcgggccgtagaaggagttgacgatccagaagccctccgtgccaaagagcgtatttaaaaccccaatatctttgagggtaagaagactcgcgaaatgacgcgcgttaatttcaaaggaaggttcactgatagagccagagtcgaccgactaacgtctactcccacccgcagtcagtcactacgtacgtgacgacggttcctccgaccaccaccaccctaccttctacgccgcccgtctccgtacgccccccttattatcaacaccgcttcaaccgacgtacataagccgctatctaaagtacccctcacgtcccatccaccggccaaacaaacataaaggtccatccccattc

SEQ ID NO: 149467 - DNA, 2350 bp, Zea mays
  Clone ID: MRT4577_67841C.1
ctgtcatttgagaatcgagttgtcgagagtcgagacgcacacgctcgtacgcaacttctcaaaaagcagcctgccctgttcattttctctctcctcccgtcggcgaaattttatacgccagcaaaaccgccctgtggaggaaatagagaaaaaaaaccccgaatcatacggccagaaatattaaacagacagaaaggaagaggagaatagcggcgaggacgaagtggcccgcccaggaaatggcgtcgatgcagagctggcgcaaggcctacggcgccatcaaggacaccacaaccgttagcctcgccaacctcaactcggacttcaaggatctggatgtggcgatcgtgaaggcgactaatcacgtggagtgcccacccaaggagcgacacctgcgaaaggttgttgcggcgacatccatcgccaggcctagggcggatgtcgcctactgcatccacgctcttgcccgccgtcttgccaagacccgcaactggattgttgctctgaaagcacttgtagtaatccatagacttcttcgtgagggtgatcctacatttcgagaagagcttcttaactttacacaaagggggcgtattctgcaactttcaaactttaaggatgactccagtccaattgcttgggattgttctgcctgggtgcgcacatatggtttgtttttggaagaaaggttggagtgcttcagagttctgaagtatgatgttgaagctgagcgtttgtccaaacaaggtcaaggtcctgaaaagggtcacagtagaaccagagagttggattcacaggatctgttagagcagctgccagcattgcagcagttactataccgactcgttggatgtcggcctgaaggagctgcaaataataactacctggtgcaatacgctttagctttggtgctaaaagaaagctttaaaatttattgtgcgataaatgatggaattatcaaccttgttgataagttttttgagatgccaagacatgaagcacataaagctcttgaaatatacagaagggctggccaacaggctggaaatctatctgatttctacgagaattgccggggtttagaacttgcgaggaattttcagtttcccactctgagggagccgccacaaacatttcttgcaactatggaggagtatgtgaaggaggctccacgcatggtcccagttcgagaacccctggaacttcctgagaggcttcttcttacatacaaacctgaagaatcggaggacattcctgagcctgcttctgttgaagaggaaaatgcaccagttgaagagcctgttctggtaccacctgttactgaagttgtttcacctcccaagaccgaggtggccgatactggtgacttactgggcttagatgatccaaatcctgctgtatcagctatagaggaaagcaatgctcttgccttggctattgttccaacagatggggcttccacaactggtaacactgcatttcaagataaggggtttgatcctacaggatgggaactcgcccttgttaccgcaccgagcaacacgacttcatctgcgtctgtcggtcaattgggtggtggatttgacaagctcattttggacagcctttatgatgacggggcctacaggcagaggcaacagcaacaggtgtatggttcagcagtgcctaatccattcatgtcaaatgatcctttcgtgatgtcaaaccaagttgctcccccaccatcagttcaaatggctgccatgtctcagcagcatcagcagatccccacgatgatgcaaccaaatccttttggaccacctatgcagccacaggtaggcatgggtccagcaacaaacaatccctttctggatgctggattcggggcattcccagtggcgaacaatggccatcagcaacacaacccatttggcagtgcccaacttctgtaggctacgtagttacaagagcaaatttgtgcttcagcagatgcgattttttcggtgattatatcgtgcattgtgctcggccattctttcatgcgatgcgtgtattatgaattgggcttcaccacacggggagctatggcgtgacccaacccttgttgtaaagaaattagcgacttgtgtaacatcgaatgtatgtcaataaacagtaggcaatgttattataactataaacaaaagagcggtggtatgtaggaattctgtttatttcattgctgtttgattgccgctcttgcatgcacattgattggccatgtgttctaaccccagaactgaagcgttattgtacctatacacatgcatatactacttgcgattggtaattattttacgttgttcacatttaaaaaaaaaaaaaaaaaaaa

SEQ ID NO: 149468 - DNA, 710 bp, Zea mays
  Clone ID: MRT4577_67842C.1
tcctcgacgtgggcggacgcgtgggtccttaccagcacacagtggagctagctagctagtagaggtcaatcaccaaaatggcgaggcagctcgttgtgcttgctctgcttttcgtgatcgccggtgtggcgcatggcgcgggggagtgcgggagagcctccgccgacagggtggcgctaaggatggcgccatgcatctcggctgccgacgacccgcagtccacgccgaccagcagctgctgctccgctgtgcacaccatcgggcagagccccagctgcctgtgcgccgtcatgctgtccggcaccgccagggctgccgggatcaagccggaggtcgccattaccatccccaagcgctgcaacatggccgaccgccccgtcggctacaagtgcggagattacacgctgccctagctgatgaagacgtcgtcaacgagaccgtgcgagtcaagtgcatgaacgaatgccattatgccatgcaactatgttgtgttgcgttgttggaataataatcgaatccgctagaataaatatgtacgtgcacgacggcctcttgcttgtatcactggactttgcttgtgtgttgtacgtcaaatatgttccgtttctctcatataagaaaaatctgcaatgcttgttattaagctaattcattgcacactggtctaacggcctccggccggtaaccagtgataagtagataaagcttga

SEQ ID NO: 149469 - DNA, 352 bp, Zea mays
  Clone ID: MRT4577_67843C.1
aatgacaaattcacattcatgctgaaacaaacttccacacgggggtacaaaggcaaaacggtagttgtgagttacaagaaacatggtttcaagccaacatgggagaatatcacgcgtgttaaaattttacaaagcggagccttctattgggcggatcaaccataagaggttttgcactcatgccaaacccggtaccccatctcttttcaaaaagaagaatcgggttacttggatcagctatcacctataaagaggcagatgcatactccagtccaggctgagttttagacagagcaatctgggcaatccccggacggacgaacgttgctagccttaccaaaaccgacatttt

SEQ ID NO: 149470 - DNA, 2223 bp, Zea mays
  unsure (1)..(2223): unsure at all n locations
  Clone ID: MRT4577_67844C.1
cattgggtacctcgaggccggccgggagaaaagccagtctgtccagaaatacattagaaaaaagagccaaagaggagaacaccggccggcgaggtggacgaagcggcccgccgaggaaatggcgtcgatgcagagctggcgcaaggcctacggcgccatcaaggacaccaccaccgttagcctcgccaatctcaactccgacttcaaggatctggatgtggcgatcgtgaaggcgactaaccacgtggagtgcccgcctaaggagcgacacctgcgcagggttgttgcggcgacgtccatcaccaggcctcgggcagatgtcgcctactgcatccacgcgcttgcccgccgtcttgccaagacccgcaactggatcgttgctctaaaagcacttgtagtgatccatagacttcttcgcgagggtgatcctacatttcgagaagagcttctcaactttacacagaggggacggatcctgcaactttcaaactttaaggatgactccagtccaattgcttgggattgttctgcctgggtgcgcacatatggtttgtatttggaggaaaggttggaatgcttcagagttctgaaatatgatgtcgaagctgagcgcttgtccaaacaaggtcaaggtcctgaaaagggtcacagtagaacgagagagttggattcacaggatctgttagagcagctgccagcattgcagcagttactgtaccgacttgttggatgtcggcctgaaggagctgcaaataataactacttggtgcaatatgctcttgctttggtgctaaaagaaagctttaaaatttattgtgcaataaatgatggaatcataaacctcgttgataagttttttgagatgccaagacatgatgcacttaaagctcttgaaatctacagaagggctggccaacaggctgggaatctatctgatttctacgagaattgccggggattagaacttgctaggaattttcagtttcccactctgagggagccaccacaaacatttcttgctactatggaggactatgtgaaggaggctccacgcatggtcccagttcgagaacccctggaacttcctgagaggctgcttcttacatacaaacctgaagaatcagaggaaattcttgagcctgctcctgttgaagaggaaaaagtaccagttgaagaacctgttcttgtaccacctgttactgaagttgtttcacctcctcccaaggctgaggtgcccgatactggtgacttactgggcttagatgatacaaatcctgctgtatcagctatagaggaaagcaatgctcttgccttggctattgttccaacagatggcgcttcaacaactggtaacactgcatttcaagataaggggtttgatcctacaggatgggaacttgcccttgttactgcaccaagcaatacaacttcatctacttctgttggtcaattgggtggtggactcgacaagctcattttggagagcctttatgatgatggggcctacaggcagaggcaacaacaacagctgtatggttcagcagctcctaatccattcatggcaaatgatcctttcgcgatgtcgaaccaagttgctcctccaccatcagttcaaatggctgccatgtctcagcagcatcagcaaatcccaacgatgatgcaaccaaatccctttggaccacctatgcatccacaggtgagcatggcccctgcaacaaacaatccctttctggatgctggcttcgggggcattcccagcggcgaacaacggccatcagcaacacaacccatttggcagtgcccaacttctgtaggtcacttagtcacaagagcaaatttgtgccccagcagatgcgatttttgtgtgattatatcatgcattgtgctggacctttcttgcatgtgacgcgtgtattatgttatggcttcaccacacggagagctgtgcctatgtcgtgacccaactcttgttgtaaagaaattagtcacctgtgtaacatccaatatatgtcaataaacagtaggcagtgttattacatctataaacaaaagaacagtggtatgtaggaaattcttaatattgtttattccattgctttttatcttcttggaaaaaaaaaaaaaaaaaaaaaaaaaaaaaaaaaaaaaaaaaaaaaaaaaaaaaaaaaaaaaaaaaaaaaaaaaaaaaaaaaaaaaaaaaaaaaaaaaaannggggcggcgcc

SEQ ID NO: 149471 - DNA, 858 bp, Zea mays
  unsure (1)..(858): unsure at all n locations
  Clone ID: MRT4577_67845C.1
tcttcagctgcatctgcattgcattgcattgcatgcacaggtcgcgcccaccatcagtagcggtcgccgccatgcagagactcgtgcgcgtcctcgtggtgctgggcgtggggccgggagcgacggccccaggtgcatctgcattgcattgcatgcacaggtcgcgcccaccatcagtagcggtcgccgccatgcagagactcgtgcgcgtcctcgtggtgctgggcgtggccgccgcggcgtcggcgcaaggcccaaggccgggcagttcaacaccttcatccggctgctcaagtccacgggcgtggcgtcgcagatcgacaaccaggtcgccaacggcgggaacggggtcacggtgttcgcgcccacggacaacgcgttccagtcgctgccctcgggcacgctcaactcgctgtcggaccaggacaagaacgcgctggtgcagtaccacgtggtgtccgccgccatccccatgtcgcagttcgacaccgtcagcaacccgctccgcacgcaggccggcagcgcctcgccgggggagttcccactcaacgtcacctcctccgagggccagcaggtcaacgtcaccacgggcgtcgtcaccgccaccgtcgacaactccctctactcgggcgacagcctcgtcgtctaccaggtcaacaaggtgctgctccccatgaagctcttcggcgccgcggatgcgcccgcgcccgcgccgctcgcgccggncaagaagaagggcaagacgccggcggncgtcgccgactcgnccgacgcggnggaggggtccccggacgccacgaccacgtcgctcgcgcccgcgaggctgacgcggggtggcctcgccacggctcttgcgct

SEQ ID NO: 149472 - DNA, 1288 bp, Zea mays
  unsure (1)..(1288): unsure at all n locations
  Clone ID: MRT4577_67846C.1
gcttgtgcacgtgtgcaggcgtccgtcctacccataccagcacacagtggagctagcgaggcagtacaggtccacagtggagctagctaggtagtagggagtagtagccaaggttaccgagatgaacggcgtgttgttgctcgtcctcgcgctggtcggtgccgctcacgtgcctggtgagcgtgggagggccgcgcgcgtccggggcgccgccgcgctggcagcatgcctctcggcctcgcaccgcccgcggcccccgcggacaagccccgcccgccccgctccgcagaccgctgggcggcgccgcagctgcttgtgcggcggagccctcggcgcctccgcggcggcaggcgggcgtccttaccagcacacagtggagctagctagctagtagagaggtcaatcaccaatggcgaggcagctcgttgtgcttgctctgcttttcgtgatcgccggtgtggcgcatggcgcgggggagtgcgggagagcctccgccgacagggtggcgctaaggatggcgccatgcatctcggctgccgacgacccgcagtccacgccgaccagcagctgctgctccgctgtgcacaccatcgggcagagccccagctgcctgtgcgccgtcatgctgtccggcaccgccagggctgccgggatcaagccggaggtcgccattaccatccccaagcgctgcaacatggccgaccgccccgtcggctacaagtgcggagattacacgctgccctagctgatgaagacgtcgtcaacgagaccgtgcgagtgaaccagtgcatgaacgaatgccattatgccatgcaactatgttgcgttgcgttgttggaataataatcgaatccgctagaataaatatgtacgtgcacgacggcctcttgcttgtatcactggactttgcttgtgtgttatacgtcaaatatgttccgtttctctcatataagaaaattatgcaatgcttgttattaacctaaaaaaaaaaaaaaaaaaaaaaaaaaaaaaccctgggggggggggcgccgggaccccattcccccctttaggagcgatttaaaacaanntccccntttataatacaccggccgtttcccgttctccacccgcccgcccaacaccctatttatgttttaccactgccacttatgcaccgcgactattggtctccgcgtcgggtacctcgtatgttccccgacattatcgttccgcccgttatatcgtgacgaattctctcatttttccccgcccgcattatttttgttaacccacacaggtaataacg

SEQ ID NO: 149473 - DNA, 1155 bp, Zea mays
  unsure (1)..(1155): unsure at all n locations
  Clone ID: MRT4577_67847C.1
tttccactgcatctgcattgcattgcatgcacaggtcgcgcccaccatcagtagcggtcgccgccatgcagagactcgtgcgcgtcctcgtggtgctgggcgtggccgccgcggcgtcggcgcagggcccgacggcggcgccaacgacgcccacgccggcaacccccgcggcgcccggggcgtggagggcgtccagcaacatcacgggcgtgctggccaaggccgggcagttcaacaccttcatccggctgctcaagtccacgggcgtggcgtcgcagatcgacaaccaggtcgccaagcgcccacggacaacgcgttccagtcgctgccctcgggcacgctcaactcgctgtcggaccaggacaagaacgcgctggtgcagtaccacgtggtgtccaccgccatccccatgtcgcagttcgacaccgtcagcaacccgctccgcacgcaggccggcagcgcctcgccgggggagttcccactcaacgtcacctcctccgagggccagcaggtcaacgtcaccacgggcgtcgtcaccgncaccgtcgaccaccccagctgcacgggcgacacattcgttgcacaggtcgcgcccaccatcagtagcggtcgccgccatgcagagactcgtgcgcgtcctcgtggtgctgggcgtggccgccgcggcgtcggcgcaaggcccgacggcggcgccaacgacgcccacgcccacgccggcaacccccgcggcgcccgcgcccacgacggcgtccagcaacatcacggccgtcgccgactcgcccgacgcggcgggggcgtccccggacgccacgaccacgtcgctcgcgcccgcgaggctgacgcggggtggcctcgccacggctcttgcgctcgccgtcgtgtggtgggggctgtagtcacggcgaggagtgtctcgtgaggtctctccggtggccgtgacatctatacattttttttttcgttcgcgggtcttgtttgtcttttcgtttttactttattgcccatttttggatgaattgttcttccctgtcattcaaattgctaggagtatgtcatgtcatgtaacgtccttgtcccatttttatgtaattttaactaaataaatatgagttgtgtatatttcaggaaaaaaaaaaaaaaaaaaggcccctaggc

SEQ ID NO: 149474 - DNA, 276 bp, Zea mays
  Clone ID: MRT4577_67848C.1
ggaattcaaagggcctgacccacgcgtccggaagtatcttttacgcggctaacgagaagggaaacaccagatcctactatactctgtgatatctcgtccgctcacaacaaaaaagaatgtgggcaggagctctgctcccttgaccgatctatgagcttgcagcagggtgcccactggagactagtgacgtgccgtgatatgcccgccgtggacaccgaggcggctgcgacatgacttcatagttaggcggcacgtcagatcattatagacgaggta

SEQ ID NO: 149475 - DNA, 3102 bp, Zea mays
  Clone ID: MRT4577_67849C.1
atgatctgtaatgtctgcgtgccgggtgaaacgctcttgagaaagatgccttcctggactcgtgctcaggatggggctagtacctctcatgggagggaggcaacaccaaacccacctccagtccctcccacacttgccgaggctttcgccgccttggtaaacgctacagcagataatacccgcttcctgcgggagatggcaggtcagcaacttcaacaacaaggcaggtggggctatccgcaaggtccccgtgagacatcttatttggacttctccgaaacgcgtccaccgttgttcgtcaaggcagaagaccctttagaggcggacgaatggatccacgtcattgagcagaaatttggacttcttcgatgttctaaaactcagaagcccctgttcgcagctcagcaattgcgtggccctgccagcacttggtggggaaactttgtggccgttcagccggccaatcatcaaattaaatgggaagaattcaagctgaccttccgtgaacattacatacctgaaggagtactccacatgaaacaggaagaattcatgaagttgaagcaaggcggagatactgtcacccagtatctcaataaatttaatcacttatctcagtatgcaattgaccaaatgcaaaggaaaatggctacctgcattgacctcacctacggaagggctgtcagcatagcgctggcagtcgaatctaaatatacaagttctggaaaaaccaaggggagcggaggcaacaggcctagtcagggccccgagaaaaggcaacgaatcgcacaaacaatcaacaaggtactgggaattcttctcaagctaaaggaaatgcgggcaagaatactaagaagacgggatgaatttactacactcaagtggccaccacaccagacgatgaaccgagtttatgaagccattataccggagatcaaggatattctggtagtatgcgagttcctagatgtctttccagaggatttgcctggattgccacccgaaagagacgtagagtttgtaattgagttaaagcccggtacggctcccatttctagaagatcgtaccagatgcctccaaatgagctggcagaattgaagattcaattacaagatctactagaaaaaggattcatccggccaagctcgtcgccatggggttgtcccgcaatattcgtcaagaagaaggatcaaacattacggatgtgcatggattatcgacccctgaatgagaccaatgctccggcccacttcacttatttgatgaactcggtatttatgcccgagttggacaagtttgtggtggtcttcatagatgatattttaatatattcaaagaatgaagaggagcatgctcaacatttacggatcgtagtgacgcgcctaagggaacatcaattatatgccaagttcagcagtgggctcggttgcgtattaatgcaagagggccgagtaatcgcatatgcttcaaggaagttacgtcggcatgaggagcattatcccactcatgatttggagctagttgcagtggttcatgccctgatgatctggcgtcattatctactgggaaatgtctgtcatatttatacagaccacaaaagtttgaaatacatttttacccagtctgaactcaacatgagacaaaggagatggctcgagctaatcaaggattatgaactagagatccattatcacccaggcaaagtcaatgtggtggcagatgcactcagtcgcaaagtctcctgccattgtttaaccatgaggacttctgacattacattatgccaggagatggagaatttgaacctgggaataattcagcatgggacttcaaatcacttgaagctggagtcagtcatcttacaaaggataattgacgcacaaaagaatgatgaggtggtgccgaagaatgaaggggtccgccagcaaattttagatgaagcacatcttagtcgctattctattcatcccggaagcactaagatgtatcaagatctgaaacagcattattggtggacaaagatgaaaattgaaattgcacactatgtggctagatgtgacacttgtaaacgtgtcaaggccatacacctgaaagctgccggtccattacaatctttaccaataccaacatggaaatgggaagatataagtatggactttattgtgggattgcccagaaccgcaaagggatatgactctatctgggttataatcgatcggcttacgaaaattgctcattttctgccagttaacacagatcacccagttactgtctatgccaaattgtacattgctcgtattcttagtctgcatggtgttccaaagactatagtgtcggaccgtggacctcaatttatagccaagttttgggaggcacttcacaactccctgggtactaagttgctccatagttcggcctatcatcctcaaaccagtggccagactgaaaggctatcaagaaagcatcaagatgcaccctttgaagctttatatggacaacgatgtcgtactccgctaaattggtctgaacctggtgaaaggtacttcttcaggcccgatatggtgaaagagaccgaagaaaaggttcagagaataatttataatttgaagaaggctcaagctcgtcaaaagagttatgcagacaaacggcgaatgcccttatattttcttgagggagactatgtctacctaaaggtttcgccaatgaagggcgtatcgcatttcggggttaaaggaaagcttgcaccacgatatattggtccttttctcattcttgaaagatatgggccagtggtgtatcgaattcaactacccaaaaccttgtctgttgtacataatgtgttccacgtgtctcaactaaagaagtgtcttcgggttccagatcgaactattgaagtaacagatgttgtccttgagccggacttgacatattttgagcaccctaatcgagtcctggatcaaaaggacagggttacccgaagaaaaactctcaagttttacaagatacagtggaaccagcattccgaagatgaggctacttgggaaactcaagacttcttagataagaatttcccaggctttttagcctcttgtaatttgtaa

SEQ ID NO: 149476 - DNA, 2164 bp, Zea mays
  Clone ID: MRT4577_6784C.1
ctcgaggccggccgggccggtaaaacaaaaccctccatccattctacacgcgccgccgccctcctgtacacgccccgccgccaccgcctccaccaccacagcgcgcaggaatccctcgttctcgcacagagggtttcaggcgtcgtatgtaagagaagatggcgctctcagtatccatggagggcatcgaggcgcgggcacgggatctcggggtggacctctccgctgtcgatctggactccatcaccctcccggccggcgaggacttcggcatcgtcagtgatgacgaggaggtacttcgtggtgaggatcttccagaacttgaaatgggtttgtccaacattattgtcgtggacaatctgccagttgttcctccagaaaagtttgagaagcttgagaatgtcatacgcaagatctacagccaaattggagcgataaaagaaaatggtctatggatgcctgtaaacccagagacaaagaagacatacggttactgtttcattgagtatagtacccctcaggaagctgagctggctagggaaaaaaccaatgggtacaaactcgacaagtctcacatctttgcagtcaatttgctcgatgattttgagaagtacatgaaagttcctgacacatggacccctgctgaaattaagccatacactgctggagaaaatcttctgaagtggctaactgatgaaaaggcccgagatcaatttgtcattcgtgctggcacactaactgaagtttattggaatgatgcaagaaagctagcacctgagcttgtttttcaaaagcagtactggacagatagtttcattcagtggtcccctctgggaacctacatggcaacggttcataggcagggatcacaggtgtggggcggtgaaaatggcttcgagcgtttgatgcgttttgctcatcctttggtgaaactgattgacttctctcctggtgagaggtatttggtcacatacagcagccatgagcctagcaaccctagagacacacatagagttgtcctgaatatatttgatgtaaggactgggaaagtgatgcgagactttaagggaagcgctgatgattttactactggcgggaatattggggtttctggtgtttcatggcctattttcaggtggggtggtggaaaggatgacaaatattttgcgaggcttgggaagaatataatatctgtctacgaaacagatacattctcccttcttgataagaagtctttgaaggtagaaaatgtagtggacttcagctggtctcccactgatcctatcatatctctgttcgtgcctgaaatgggtggtggaaatcagcctgcgagggtgagtctagtgcaaatccctggcaaagaggagctgcgacagaaaaaccttttcagtgtcagtgattgtaagatgtattggcaaaacagtggagaatatcttgctgttcaagttgatagatacacaaaaacaaaaaagagcacctacactgggtttgagctgtttagaattaaggagagggatatcccaattgaggtccttgaactcgagaacaagaacgacaagatcattgcatttgcatgggaacctaaaggacatcgctttgctatcatccatggtgatggccctaagcctgatgttagcttctacaccatgcgaacagccaataacactagccgtgtatccaagctcacaaccctcaagtccaagcaagctaatactctgtactggtctcctgctgggcgcttcatagttcttgctggactgaagggtttcaacgggcagctggaattctacaatgttgatgaactagagacaatggcaacaggagagcattttatggcaacagatatcatgtgggatccaactgggagatatctcgcgactgcagttacctcagttcatgaaatggaggaagtcgttgatgtccgtcaagaagttcttgcattcgacctagatcaggagtgaaaacacttattatagaatctgttgatttctttcctgttggtgttaaagttcattggggtcgcattgcataataggccctagtgatcaagtgcgcaatttactgatcgttgtactgcttatttgtacacttgctgcttgaattgttggatcatgtgttcagatatcaaattttgctgctggattactaatctgtctggttctgc

SEQ ID NO: 149477 - DNA, 267 bp, Zea mays
  Clone ID: MRT4577_67850C.1
ctgacgcatgcgctctaggactacctggatggctcggcgtgttctgctccggctctctgtggcgtcagccggagccgttgcctccagatcctactcgacggatccggtgatctggaatgcgggtactactacacattgccaccaattatacatcaacacatagactcactcaaagagcttcttgcaggtgtgtggactgttctagtatgacacttacgaatactcgttacggtgttccgggatccatggtaagtatgagtcgcgcgc

SEQ ID NO: 149478 - DNA, 321 bp, Zea mays
  Clone ID: MRT4577_67851C.1
ggcgttttcaggacgtcgcccactgggaaatgagcgtgggggattttcaaacgggttcggggtatgataagcccgagccaatgatccactccctctgtacgcaaaagccctaacgtgtaatctattcgtatccgctagcatagtgcgtcaccttttaaaatgcatcctgacttatatgcgtccacaccttgcactgaacccggttggttagcgccaatgttttcttgaccagttgcgacgtccacttgaagaccttaaccgtaaacattgcactaacatgcattattaccgcggccaggtcgatcattggctataattgac

SEQ ID NO: 149479 - DNA, 3849 bp, Zea mays
  Clone ID: MRT4577_67852C.1
atgtcgccgcgcacaaggagaacagcgcgcaaacatactggaccgattggtgtgccgtgtcaccagctggccccaaggcatgaaaatagtagtagcggaagcaatgatcctataggggatcttgaagctgaagtaagtcggctccaagcagaactccgccgcaggacggctatctgggtcgtagattgcgactgtataaatgagttgagaagagacgtccgccatctgcgagatcagctcacggaccgggatttggcacttgactgggttgttcaatcccgttcgcttgcatgggacaaggagcaaaaagctcaagctcgagtagccgagctcaacttggccgttgaagaactgcagacatattgcaataccttacatgaagagatgccttccaagactcgagcacaggacggagctggtacctcccgtgggagggagtctaccccaaatccacctcctgttcctcccacactggccgaggcgattgccgccttagtaaatgcaaccgcggataatacccgctttctgagagaaatggcgggccaacaactccagcagcaaggtgggcggggttatcaacagggcccctgcgaaacttcttacctggacttctcagagacacgtccacccttatttgttaaagctgaagatccgttagaagccgatgaatggcttcgtgtgattgagcaaaagttcggactgctgcgatgttcagaaacccagaagcctttattcgcagcccagcaactgcgcggacctgccagcacttggtggggtaattttgtggccgttcaaccggccaatcatcagataacttgggaagaattcaaggtggccttccgcgagcactatataccagaaggtgttcttcacatgaagcaagaagagtttatgaagctgaaacaaggaggggatactgttaaccagtatctcaataagttcaatcatttgtcgcaatatgcaatcgatcaagtgaaaactgatctgaagaagaagaattgctttatgagaggattaaatgatcgactgcaaaggaagatggcaacctgcatagaccatacatatggaagagctgtcagtatcgcactggcagtagaagcaaagtatgcaggcgctggaaaatccaagggttttggggattgcccttatccaaagcagaaccagtcaaataatcagcaaggatctgggaattcatctcaagccaagggaaataatatgggcaaaaatacaaagaagacggggcgcatatattatacgcaagtggccactacgccggacggtgagccgagaattatcaggttgagtcataaccaagatgaaattcttttgcctatccccattccaaccaaagctactggcagagcttatgaagccattataccggaaatcaaggatattccggtggtatgcgagtttcccgatgtctttcccgaggatttgcccgagctgccacctgaacgggaggtagagtttgtaattgagttgaagcccggtacggctcccgtatctagaagatcgtaccgaatgcctcctaatgagttggcagaactaaagattcaattacaagacctacttgagaaaggatttatccggccaagctcgtcgccatggggttgtccagccatattcgtcaaaaagaaggatcaaactttatggatgtgtgtggattatcgacccctgaatgaggtcaccatcaaaaacaagtaccctcttccaaggattgacattctatttgatcaactgactggagcgagggtcttttccaagattgatctccgatcgggctatcaccagatccatattcggcccgaagatataacaaagaccgccttcactacgcgggggattgcggtagatcctagcaaagtcaaggacattttggagtggaaacccccgaccatggttcatcaggtccgaagtttccttggactggctggatattaccgccgattcataccagatttttcaaagcttgtgaagccaatcacaagtttattgaagaatgatattaagtttaattggtcttcaaagtgtaatgaagcttttgaacaattgaagacattattaaccactgctccggtattggctcaaccggacatcaccaagccctttgatgtatattgtgatgcatcaggcagtggactcggctgtgtgctaatgcaagaaggccgagtaattgcatatgcttcaaggcagttacgtcgacatgaggaacattatcctactcatgatctggagttagctgcggtggttcatgccctaaagatctggcgtcattatctgctgggtaatgtctgtcatatttatacagaccataaaagcttgaaatatatcttcacccagtcagaattgaatatgagacagaggcgatggctcgagctgatcaaggattatgaattagaaatccattatcacccaggaaaagcaaatgtagtggcagatgcgcttagtcgcaaggtttcctgccattgtttaacactggagtcaatcatcttacaaagaataattgacgcacaaaaagatgatgagggtatgaagcacatacgtgagaagataatggctggaacagccaaatgtttcaaagaagacgatcaaggtgtgatatggttcaataaccgcatagtggtgccgaaaaatgaagaactccgccagcaaatcttagatgaagcacatcttagtcgctattctattcatccggcaagcactaagatgtatcatgatctaaagcagcactactggtggacgaagatgaagattgaaattgcacgctatgtggctaagtgtgacacttgcagacgtgtcaaggccatacacatgaagactgctgcaaaaggctttgactccatttgggttatcatcgatcgacttacaaagattgcccactttttacctgttaaggcaaagtactcagtggccacttatgcagcattgtacattgcccgtattctcagtttgcatggtgttccgaagactatagtgtcggatcgtggaccacaattcgtatccaaattctgggaagaacttcatagatccctgggtactaaattactccacagttcggcctatcatcctcaaaccagtggacagactgagagagtgaaccaaatacttgaagatatgatgcgggcatgtgttctggaatttccacaaaaatgggatgaatgtttgccgttagcggaattttcatataataatagctatcaagaaagcattaagatggcaccctttgaagctttatatggacgacgatgttgtattccgctaaattggtctaaacctggtgaaaggtacttcttcaggcctgatatggtgaaagagactgaagaaaaggttcagaaaataattcataatatgaagaaagcccaagctcgtcaaaagagttatgcagacaaacagcgaatgcccttatatttccttgaaggagactatgtctacctgaaggtttcaccaatgaaaggagtatcgcgtttcggggttaaaggaaaacttgcaccacgatatattggtccttttcttatcctggaaagatatgggccagtggcataccgacttcaactacccgaaacattgtttgctatgcataatgtgttccacgtgtcacaattgaagaagtgtcttcgggttcctgatcgaaccattgaagtaacagatgttgtccttgaaccggacttgacatattctgagcaccctattcgagtcttggatcaaaaagacagggttacccggagaaaaactctcaagttttataagatacagtggaaccagcattccgaagatgaggctacgtgggaaactcaagactttttagacaagaatttcccaagatttttagcctcttgtaatttgtaa

SEQ ID NO: 149480 - DNA, 1182 bp, Zea mays
  Clone ID: MRT4577_67853C.1
atgaaaattgaaattgcacgctacgtggctaggtgtgacacttgtaaacgtgtcaaggccacatacatgaagattgctggtccattacagtctctaccaataccaacatggaaatgggaagacattagtatggactttattgtgggattacccaggactacaaaagggtatgactctatctgggttattgttgatcggctcacgaaaattgctcactttctgtcggtcaagacatattacctggtacttacctatgcagagttgtacattgcccgtattctcagtttgcatggtgttctgaagaccatagtgtcggatcgtggacctcaattcatatccaagctttgggaagaacttcataaatccctgggtactaaattgctccacagttcgacctatcgtcctcaaaccagtggacaaactgagagagtgaaccaaatacttgaagatatgctgcgggcatgtgttctggacttctcacaaaaatgggatgaatgtttgcccttggcggagttttcatataataatagctatcaagaaagtatcaagatggcacccttcgaagctttatatggacgacgatgtcgtactccgctaaattggtctgaacctggtgaaaggtacttctttaggcctgatatggtgaaagagactgaagaaaaggttcagaaaataattcataatatgaagaaagcccaagctcgtcaaaagagttatgcagacaaacggcgaattcccttatacttccttgtgggagactatgtctacctgaaagttttgccaatgaagggggtatcacgtttcggggttaaaggaaagcttgcaccctggtatattggtccattccctatacttgagcaatgtggaccagtggcataccgactccagttacccgaaaccttgtctgctgtgcataatgtgttccatgtgtcacgattgaagaagtgtcttcgggttcccgatcgaaccattgaagtaacagatgttgtccttgaaccggacttgacatattctgagcaccctattcgagtcttggatcaaaaggacagggttacccggagaaaaactttcaagttttataagatacagtggaaccagcattccgaagatgaggctacatgggaaactcaagactttttagataagaatttcccaggctttttagcctcttgtaatttgtaa

SEQ ID NO: 149481 - DNA, 591 bp, Zea mays
  Clone ID: MRT4577_67854C.1
cgggaaaaaaaaaaaaacaagtgtccatccaatcctatgcaataaaaaaaaaaaacaaaagaacaaaaagaaggcaacgctgctgaaaagcactgcatgcacttactatgtcccaacaactcgccgagtgttcgccttctgctggttgtcgccgaagatctgtgccatgccgaagtccgctatcttaggcctcatctcggcgtccagcaggacgttgctcgctttgaggtccctgtgtatcaccgtcagccttgagtcttgatggagatacaggaggcccctagccacccccttgattatccccagcctcgtcggccagtccagcagcgacctcctctcgctgtctgcgcatgcggtgaacacggcgataataaagcataccaccattacacactgcttcagcaagctccgtcagttctgacgagagcaagcgcgttaacgtaccgaagaggatagcgtctaggcctttgttggccaggtactcgtacaccagcagcctctcggctccctccgtgcagcagccgagaagccggaccagtttccggtgctgcagcttggagatcaaggtagcctcgttcttgaactcctccg

SEQ ID NO: 149482 - DNA, 228 bp, Zea mays
  unsure (1)..(228): unsure at all n locations
  Clone ID: MRT4577_67855C.1
gaaaacaattcgtttcatgttattttaaaaacatananaccgccgcgggtgggtgaaaccatcatttgcagggaccaaaaacaccacccgtgtcccaagagtagctgctgattccattccctccttttttataatctttcccccttattatgtattcccaaattgatgcgaaaatctacatcgactctataaatttcaaataattcctcaaacacacatacctaactg

SEQ ID NO: 149483 - DNA, 206 bp, Zea mays
  Clone ID: MRT4577_67856C.1
caggggcctgggccgacacatgtacaataaattactttcattgtattctcaatagacatgccagatcaaggcatgacgatgagagaacgactatgctatagggtcactacaaactaagactacgataaggagcgcggagcgtcacactaataatatcaaatcaggtgagctcttcagatgaaggaactataccttgcttgatccat

SEQ ID NO: 149484 - DNA, 645 bp, Zea mays
  Clone ID: MRT4577_67857C.1
tgtgaactagaaaggactgggcaacctgtgtgtatatatgagatctatagtggagagggggcatggccatttttacaccatggatctttgtatcgtggtgttacactttcgaaaggaggaaggcgaccaagatcagatgatgttgatgctgttaccaggctttcagttctagacaacccatactatcgagatcttctttgtgaatttggtgctatatttgccattgcaaatagagtcgatactgtacataagttaccatggataggtttccagtcatggcgggctgctggaagaaaggtatccttgtctgaaagagctgaagaaaccttagaggaaattacatctggagaaagtaacgaggatgttatatactactggtcaccaatggatatggaccaaacttctgacttttggttgacatgtgattctctaaatgctggcaattgcagatctcttttcgaagatgcatttagggctatgtatggattaccagagaatgtcttggcccttccaccaatgcccaatgatggggatcattggtctactcttcatagctgggtcatgcccaccccctcatttctgaaattcatcatgttctccagaatttttgttgattcacttcctagcttgaatgtgaatagttct

SEQ ID NO: 149485 - DNA, 1870 bp, Zea mays
  Clone ID: MRT4577_67858C.1
agtgcactacgctgacactccctcctctgcctgcgcgcactgctgctcgtaccagcagcaagaagctaatcagctacgatggcggactacgtgtatggccccgggcggacccacctgttcgtgccgggccccgtgaacatcccggaccccgtgatccgcgccatgaaccggcagaacgaggactaccgctcgccggcggtgccggcgctgaccaaggtcctgctggaggacgtgaagaagatcttcaagaccacgacgggcacgcccttcatgatcccgacgacggggacgggcgcgtgggagagcgcgctgaccaacacgctgtccccgggcgacagggtcgtgtccttcctcatcggacagttcagcctgctggtggacggcgtgtcgtccatctgcgcgctggacttccgcatggacgagtggggcgtggacgtggcgctcacgggctcgcagaaggcgctgtcgatgccgacggggatgggcatcgtgtgcgccagccccagggcgctggaggccagcaagacggccaggtccgtgcgcgtcttcttcgactggaaggactacctcaggttctacgacatgggcacgtactggccctacacgccctccatccagctcctctacggcctccgcaccgcgctcgacctcatcttcgaggaagggctggacaacgtcgtgaggaggcacaaccgccttgggacagccaccaggctcgccgtcgaggcgtgggggctcagcaactgctgccagaaggaggagtggttcagcgacaccgtcaccgccgtcgtcgtgccgcccaacatcgacagcgccgaggtcgtcaggcacgcgtggaagcgatacaacctcagcctcggcctcggcctcaacaaggtcgccgggaaggtcttcaggatcggccatctcggcaacctcaacgagctgcaacttctgggatgtctgagcggtgtggagatggtgctcaaggatgtggggtacccagtgaaactaggtagcggcgtggcagccgcggcggcgtacctgtcaaactccacgccgctcatcccatctaggatctgagaacaatgtaaggggaggatatcgcaaacaaggccagcgacaacgagtgggcagacgaacgaacaaagcgttgctacatagtactctctcagaatgtaaagttaaatttcacacccagctgttgctacatagtaagtcacaaatcaccagtatgtattgctggtatcaagtcaagtctttgcgcgatcatagaataaaactgtttcgaaaaacgaagtacatatactgtaactcaatgtaaaaacggcgaaaattcagtaacgaaaccgaaaaacttgaagcgaagtactggctgttgcgctgaataatatcaggcagctttggcgagctccctgtcgacggcgaccttgaggaagctgccttcgtctaggaccatctgcacggggaggaagccgaggccgttggccacgccgagcatcacctccttcatctccgcgcggaactcgtgccggtccaccatgccgctgccgtccctgtcgaaccgcgcgaacaggccgcggtacagcgccccgaggtcctccggcgccaccgcggcctcgtccacgccgaagtgcctctccagcacccgcaggctcatgagctccccggccatctcggcgtaggtgagcaggccgtcgtggtcggcgtccagcgcggcgaagcggccgtccaccgaggagttgaaggcgcgctcgtcctctacgaagctccgcaccgtgctcccgtccaggatctccacgctcatcgtcggattcctctcgctgttcgtgttccttggatgtgttggtgtgtgagttttctgagaaaccggccggcctcggaagcggcc

SEQ ID NO: 149486 - DNA, 715 bp, Zea mays
  Clone ID: MRT4577_67859C.1
tgagaaatgcaatagacccttatctacattccatgtgaattatggattgaaccaaaacattgtaaaatacaaaaagaacatacatggcactacgcgcgcatgggcgcgtgcaagccactagttgtatatatagtataatttattctccatatattatgttcgacatttcctcgctctctctcgaatagtgtatatactggtagtatttcgcgcgcgtgagtgagcttcatttacgcagctttggcgacctggccgagctccctgtcgacggcgaccttgaggaagctgccttcctccacgaccatctgcacggggaggaagccgagcccgttggccacggcgagcatcacctccttcatctccgcgcggaactcgtgccggtgaaccttgccgctgccgtccctgtcgaaccgcgtgaacaggcagcggtacagcgccccgagctcctcgggcgccaccgcggcgctcgtccacgccgaagtgcctctccagcacgcgcaggctcatgagctccccggccatctcggcgtaggtgagcaggccgtcgtggtcggcgtccagcgcggcgaagcggcccgtccaccgaggagttgaaggcgcgcctcgtcctccacgaagctccgcaccgtgctcccgtccaggatctccacgctcatcgtcggattcctctcgctgttcgtgttccggggatgtgttgtgtcttgtgtgtgagttt

SEQ ID NO: 149487 - DNA, 611 bp, Zea mays
  Clone ID: MRT4577_6785C.1
aaccgttgggtttctatttgaacccattaaaaaacccatggatagagaaattgacccaaacccataccctaatagagaaaaatccaccgggtttcgggtagcgggtacccattgctgtctctaattcctgaattcctgattcccagcctagtagaactgggctcgagggtttcccgaacattcgctgcaatagaacaccactaggacgcatcctgattcccagcctagtagaactgaactgggctcgaggagttccccgaagatatgggaaatcatatccaattcggagttccgtctccaaactgctgattgactgctgcttacgcgagctcgtcgacgtcgaccttgatgaagatggcatcggtgaagcgggaggccagctccttgaaggccggctcgatgaagcggcagggcccgcaccaggacgccgagaagtcgatcaccatcagcttgctgctgctcttgtgggccgcccactgctcgtcgtaggtggccttggagtgcgcggccaccacggcgcagttcgggtcgtcggcggccggagggggcgtcactaaggtcgagaagaagagcccatcgctgatcgctctcgcggttgcactcgctgcctg

SEQ ID NO: 149488 - DNA, 1879 bp, Zea mays
  Clone ID: MRT4577_67860C.1
tggcactagctttttcctcggggctccattgggtacctcgaggccggccgggatcgcccccgccaggcgccagcctccccccgtatttgatgtttcacaaacgtgagcggctctccctcctctccagtccctccttcctccggtccgcacagggtagcagccggcagcagctagctaccacagtgctagtaccagcagcaagaagctaatcagctacgatggcggactacgtgtatggccccgggcggacccacctgttcgtgccgggccccgtgaacatcccggaccccgtgatccgcgccatgaaccggcagaacgaggactaccgctcgccggcggtgccggcgctgaccaaggtcctgctggaggacgtgaagaagatcttcaagaccacgacgggcacgcccttcatgatcccaacgacggggacgggcgcgtgggagagcgcgctgaccaacacgctgtccccgggcgacagggtcgtgtccttcctcatcgggcagttcagcctgctgtggatcgaccagcagcggcgcctgggcttcgacgtggacgcggtggagagcgagtggggccatggcgccgacctggccgcgctggagcgcaggctccgcgaggacgcgccgcggcacgccatcaaggccgtggccatcgtgcacaacgagacggccacgggcgtcaccaacgacctggccgccgtgcgcgcgctgctggacaagcacgcgcacccggcgctgctgctggtggacggcgtgtcgtccatctgcgcgctggacttccgcatggacgagtggggcgtggacgtggcgctcacgggctcgcagaaggcgctgtcgatgccgacggggatgggcatcgtgtgcgccagccccagggcgctggaggccaacaagacggccaggtccgtgcgcgtcttcttcgactggaaggactacctcaggttctacgacatgggcacgtactggccctacacgccctccatccagctcctctacggcctccgcaccgcgctcgacctcatcttcgaggaagggctggacaacgtcgtgaggaggcacaaccgccttgggacagccaccaggctcgccgtcgaggcgtgggggctcagcaactgctgccagaaggaggagtggttcagcgacaccgtcaccgccgtcgtcgtgccgcccaacatcgacagcgccgaggtcgtcaggcacgcgtggaagcggtacaacctcagcctcggcctcggcctcaacaaggtcgccgggaaggtcttcaggatcggccatctcggcaacctcaacgagctgcaacttctgggatgtctgagcggtgtggagatggtgctcaaggatgtggggtacccagtgaaactaggtagcggcgtggcagccgcggcggcgtacctgtcaaactccacgccgctcatcccatctaggatctgagaacaatgtaaggggaggatatcgcaaacaaggccagcgacaacgagtgggcagacgaacgaacaaagcgttgctacatagtactctctcagaatgtaaagttaaatttcacacccagctgttgctacatagtagtatagttttatgaattacaggtttgattaaacttcaaattaatctacatgtatagccctgcccagatttaactatattgggaccgtattacttaccgatcaaaaaaaaaaaaaaacggcaggctcatgagctccccggccatctcggcgtaggtgagcagcccgtcgtggtcggcgtccagcgcggcgaatcgtccgtccaccgaggagttgaaggcgcgctcgtcctccacgaagctccgcaccgtgctcccgtccaggatctccacgctcatggtcggattcctctcgctgttcgtgttccttgaaaatgtt

SEQ ID NO: 149489 - DNA, 256 bp, Zea mays
  Clone ID: MRT4577_67861C.1
cgagattctagcatgagtaaccctgagatctgttggaccagtctttacagcttattttgggttctctagactagatgctctctccatttccagctgccagccagccaggcagccttgtttgttaacgatcgattttagctgatgcatcttgtggtgaagatgaaaaggagctttcgtttgcctccatacatacggccataccaatgatgatgatgaaatgcagcacatgcacatgcatgcatgtgtatgtgtgggg

SEQ ID NO: 149490 - DNA, 510 bp, Zea mays
  unsure (1)..(510): unsure at all n locations
  Clone ID: MRT4577_67862C.1
cccacgcggccgaggagcaggaggacagggaacacaagagccaggagagagggaaaaaggcacgcnnagcggacacgacgagcacacgacaaggcttcagggggcagccagaanacnccaggaacgcaagagcgaccnaaagggcaccgctcttctagaanngcggccggtttaggagggccagggcggngcgnacaacgcgccgcaagaaggcgggcgggacgacgcgccggccacaancggcnagcacgnagacccggcccnccccggcggagncgnnncgnccaggccagggcccnncgcggcgacgnccggccggnnccaggcgacggncaccggcaaaggcgggcacgccgcgaagccccacgaanccaacgacccggnaggagcagcagccacnacaggcgncagccnccagaagaacancncccgggaaaacgaacccccgcagggcgcggnagagcccgcaacnnncncaagggaggagaagcggacaaaggcancccagag

SEQ ID NO: 149491 - DNA, 316 bp, Zea mays
  Clone ID: MRT4577_67863C.1
ttttttttttttttttttttttttttttttttttttttttttttttttttttttttttttttttttttttttttttttttttggggaaaccctttaaacttgtgccacaaaagggggttgggcgaaaacggttccattgttttttacacacacaaaaaaaagggttcacaaacaccatttttgttttttccagggggaaacattttttgcagggtgaatcaagctgtaaaggagcctcacaaaaaggttgggggggggaaatcagctttcgcaccagggcaaaggttggagcttacattgaacggcgcggtttaac

SEQ ID NO: 149492 - DNA, 132 bp, Zea mays
  Clone ID: MRT4577_67864C.1
gaggaagattgtatcgaggacattgctgtatgtgttggctccgatgatgaagagggttcaacagaagaaggtgcaggtcgaccctaaggatcaagaagactttgacagggcactgaaagcctttcaagcttg

SEQ ID NO: 149493 - DNA, 1110 bp, Zea mays
  Clone ID: MRT4577_67865C.1
atttcgcataaagacgcggccgggccgtaggagggttctgttgtctctttcgcttgctccgcgccggcatgggccccccttcgccgccacagcgatcttgttctcagttctgcggcggcgataaccccctccactccccaccctgtcacccccacaaaataagttctgcggcggcgatggcgctctcctcctcccggccgaagcacctcctgcgccccctcctgcggggtttccacgcctcagcgcgggccctggcgcgggtggagccgcacgagttctccaagcccagcgagtacctgggcagctgggagcccgcggcggagcctcgggaggcgtgggcgcggctggaccggctgcgcaaggggtacgcgagcgaggtgcgggagctgcggcggcagtacgcctacgaggtgcagctgttgcaggccgagcggcagcggaaggccgacgccagagccgaggccgcccgcgccgccaaccaggagcgcaaggccgccaagctcgccgccgcccagacgcgcgccgccgagcgccgcgcgttcgaggaggacttccgccagaccctcatgaaagaaagagctgagaagctggagagctggcggaagaaggagaagcgcaaagaggagaagaaggcaataaagaaggagctcctgcgcaggaagagcagcatgtggctttctgaagataagattgaagaacaaatacaaactgctatcatgcaaaccactcctctatgaggttggttctgcgaggaaagctgataatagtagcttgcgaatcatgaggagggggggtggacatcacatggacgtgctcgtcgttacctgtgagaagctaataagaacggacctggtatttggcgtggaaaaggccgtgtgtttatttagttagacttgatcacaccaaaagctgtgcctggagagatggctgaatctgctgtgccttcctttttcacgatccatttgttgttctcgtctgcttaaactcttggcgtgatctggacggaacatatttttggcaattttcttacttggacgaagaatgaccatcataatcgatgttgtcgtcgtgctgttatgctaattgttaaaaaaaaaaaaaaaagcggcc

SEQ ID NO: 149494 - DNA, 317 bp, Zea mays
  Clone ID: MRT4577_67866C.1
agcaacataaataaatgaagcagatggcattatgtatttaagtacacaatgggcttcagaaaattgcaaaacaataaaaaattattcagtgacatgcatactaggcctgtttgcctatcatctgattctaagacctcactgtcaacaaagcaatatatttactttattgatatagaacaaaaagatgttcaattaattctctagattttacatcatttcgagctaagggagagcaacagatcaataatgataccacaaacttcactacatagcaaaaaaaattggcttcattggaaactattgagcttcaggggcat

SEQ ID NO: 149495 - DNA, 491 bp, Zea mays
  Clone ID: MRT4577_67867C.1
gccaaaattcacaaaagggacttccgttccgtgctagcgcgcgatcgcgtcggtctccactgcagcgttccgaaaaagcttaccctttgggactgtgtgtctggctggcaatcgatcgatctgcatgacgacgtccccacccgcgcgcactgctggttgccatggcgctggcagtcgcattcgcctgcgcgctagttcgcaggtccgcggacgccgactcgcacgggggctccgtgtacgaggtgcacctggccacggacaggacgtgcaggcccgagggcgtcggggtgatgctgcccgactgcggcattgacctaaatggcgacgggaaccaggactagctgccgaaggttgacccacacttcacgatcctcggccatgcccacagagtgtgagtgcaggtgcagctggctgcttggacatctcactcggtgaactgaacatgcgttgtaatctctgtcgctcattcgacgcgagaggaattgattggg

SEQ ID NO: 149496 - DNA, 149 bp, Zea mays
  Clone ID: MRT4577_67868C.1
ttgctcggccgaccagctcgcggttctgctctggcgccgccgccgctgccgctaccggtgccgcaggaaccctaaaccgcgctgagcgaccccaggtctacgcggcgtagatcccgctggaactggaatacggcgctggcctcgccgcc

SEQ ID NO: 149497 - DNA, 525 bp, Zea mays
  unsure (1)..(525): unsure at all n locations
  Clone ID: MRT4577_67869C.1
ccnggccggggtttctatttgaaggcattggacttaacacaaaagaatttgacatgcatgtcatcatcgagacaaaccgcacaactgctaggattttcccagctgttcttgatgttgaaaacccagagttcaagcggaagttggaccggatggtggagataaacgagaagatattgctgttggggagagtgatgacatagcggtggtgaagaacttgaagaggatcccactggttgctgcattggtgtctgaactcttggcaacatatctaatgcctccaattgagtcagggtctgtagatttggcagagtttgaaccacaacttgtgtactgaagttgtgtataaattgattaaattccttatgtccttttgatctccatcaaaatgttcatcttgagtgttactagtattggtgctaaagtaaaatatggttgtacaagacagtgaggaaacatttaccatgatgaggtcctttttagttttaatcatctttttctcccaaaaaaaaaaaaaaaaaagcggcc

SEQ ID NO: 149498 - DNA, 2729 bp, Zea mays
  Clone ID: MRT4577_6786C.1
ctccgctccgcgcatggagaatggctttcaaatatggtccttcagtggcaagcatctttacaaggtgtcaaaggatcatttctatcagtttatatggcgcccgagaccgccctcactactgacggccgagaaggaagaagagatctcaaggaacctgaagaagtatagcaagaagtacgaaaccctccatccattctacacgcgccgccgcactcctgtacacgccccgccgccaccgcctccaccaccacagcgcgcaggaatccctcgttctctgagggtttcaggcgtcgtatgtaagagaagatggcgctctcagtatccatggagggcatcgaggcgcgggcgcgggatctcggggtggacctctccgctgtcgatctggactccatcaccctcccggccggcgaggacttcggcatcgtcagtgatgacgaggaggtacttcgtggtgaggatcttccagaacttgaaatgggtttgtccaacattattgtcgtggacaatctgccagttgttcctccagaaaagtttgagaagcttgagaatgtcatacgcaagatctacagccaaattggagcgataaaagaaaatggtctatggatgcctgtaaacccagagacaaagaagacatacggttactgtttcattgagtatagtacccctcaggaagctgagctggctagggaaaaaaccaatgggtacaaactcgacaagtctcacatctttgcagtcaatttgctcgatgatttcgagaagtacatgaaagttcctgacacatggacccctgctgaaattaagccatacactgctggagaaaatcttctgaagtggctaactgatgaaaaggcccgagatcaatttgtcattcgtgctggcacactaactgaagtttattggaatgatgcaagaaagctagcacctgagcttgtttttcaaaagcagtactggacagatagtttcattcagtggtcccctctgggaacctacatggcaacggttcataggcagggatcacaggtgtggggcggtgaaaatggcttcgagcgtttgatgcgttttgctcattccatggtgaaactgattgacttctctcctggtgagaggtatttggtcacatacagcagccatgagcccagcaaccctagagacacacatagagttgtcctgaatatatttgatgtaaggactgggaaagtgatgcgagactttaagggaagcgctgatgattttactactggcgggaatattggggtttctggtgtttcatggcctattttcaggtggggtggtggaaaggatgacaaatattttgcgaggcttgggaagaatataatatctgtatacgaaacagatacattctcccttcttgataagaagtctctgaaggtagaaaatgtagtggacttcagctggtctcccactgatcctatcatatctctgttcgtgcctgaaatgggtggtggaaatcagcctgcgagggtgagtctagtgcaaatccctggcaaagaggagctgcgacagaaaaaccttttcagtgtcagtgattgtaagatgtattggcaaaacagtggagaatatcttgctgttcaagttgatagatacacaaaaacaaaaaagagcacctacactgggtttgagctgtttagaattaaggagagggatatcccaattgaggtccttgaactcgagaacaagaacgacaagatcattgcatttgcatgggaacctaaaggacatcgctttgctatcatccatggtgatggccctaagcctgatgttagcttctacaccatgcgaacttccaataacactagccgtgtatccaagctcacaaccctcaaggccaagcaagctaatactctgtactggtctcctgctgggcgcttcatagttcttgctggactgaagggtttcaacgggcagctggaattctacaatgttgatgaactagagacaatggcaacaggagagcattttatggcaacagatatcatgtgggatccaactgggagatatctcgcgactgcagttacctcagttcatgaaatggagaatggctttcaaatatggtccttcagtggcaagcatctttacaaggtgtcaaaggatcatttctatcagtttatatggcgcccgagaccgccctcactactgacggccgagaaggaagaagagatctcaaggaacctgaagaagtatagcaagaagtacgaacaagaagaccaggatgcattcaatcagttgagcgagcaggaccgcaagaggcggacacagcttcaggaagaatgggactcatgggttgccaagtggaagcagatgcatgaggaggagcgtgcttacaggagggagctcagggatggggaggccagcgacgacgaggaagagtatgaggccaaggaagttgaggtggaggaagtcgttgatgtccgtcaagaagttcttgcattcgacctagatcaggagtgaaaacacttattatagaatctgttgatttctttcctgttggtgttaaagttcattggggtcgcattgcataataggccctagtgatcaagtgcgcaatttactgatcgttgtactgcttatttgtacacttgctgcttgaattgttggatcatgtgtttagatatcaaattttgctgctggattactaatctgtctggttctgcaaaaaaaaaaaaaaaaaaaaaaaaaaaaaaaaaaaaaaaaaaaaaaaaacccccccc

SEQ ID NO: 149499 - DNA, 113 bp, Zea mays
  unsure (1)..(113): unsure at all n locations
  Clone ID: MRT4577_67870C.1
tatcgcttttctgcaaatctgcaagcgggagcaggggcagaaaagcagcacttagcctcttccttgtcgngagcgttggattaagggacgccatccgnntggcccgatactcc

SEQ ID NO: 149500 - DNA, 483 bp, Zea mays
  Clone ID: MRT4577_67871C.1
ctttgggctgatttatgtgcttgtttatgtgcttgtttatgtgcttgtttatccccctgtggatgtgcgggcacatcgtcctgggcgcgcgcggcccgcgggcggctcgctcgccccttaccctcactctacgagtattaattagataattcacgagaatcctagacactgtcacgactggtgggttaatttgcataatacagggactccgaataatcctacggagacacctcgtattgtagctttcttccttaagaataatccttgagttagggctttagcagagtaaggcccatagtaactgtgcgtgttagtaaggggccctacgagctcaaatacggacaaattcgccggggatcctgaaccgagcaggaagttagcactacgggacgaattctggctagtagtcgacactagggatccggagggcggctcagggggctcatcggatgagaaagaaggtaggacagtttacgtgccttt

SEQ ID NO: 149501 - DNA, 391 bp, Zea mays
  Clone ID: MRT4577_67872C.1
cgctctctcggagtctcagtccctctccaggcttcagccttacttgtgcggaggcgcagccgcagccggtgcttttccttcctcttcatcccgtacccttgccgatccatccatcggcgatgactctgggaagctccggcgccggatcgagcgtcgtgggtaagtaacctacttcccccttttcccttgctgtggatctgcctatccggtccgttctttactgtaccttgcgcgggtgcgcgtgccccgatctgaccctgtatgatctgatttgactatggcgagagatcaatatgtatgtgttgtgcttttgttcgggctaggttggaccaattattcttttgtatattgcggcatggataaccaagattcttactgggttggactaatt

SEQ ID NO: 149502 - DNA, 262 bp, Zea mays
  Clone ID: MRT4577_67873C.1
atcatcctgatagtttgttttacgccctatgacgatacaatacacgggcgggatactgaactcttgttctatacaggcacaaccctcttgcgttgatcttccacttggatggaaaaaaccacaaagttgtctaatattccctaatccactcttcagaattttgggcaggcacgcgggtagacgttctgttgcctttcctttttcaggcccctatttgcaatccagatgaaaaggacctgggggttaaagccccccaatttgt

SEQ ID NO: 149503 - DNA, 421 bp, Zea mays
  unsure (1)..(421): unsure at all n locations
  Clone ID: MRT4577_67874C.1
cgcgtccgccccgcgtccgccccgcgtcgttgggctggcgcggcgaccatcgcgttggtgtctgcggtggtcacgctgttgattgtcctcctgatcattgcgattgcgctgatggtggtgcgccgcagggcccggggttcaggcgaggtgaactgcacggcgttctcgtcgtcgagctcgggcagggcaaaccggcagctcgtcgtcaagggctcggcgcggcgggagttccggtgggaggcgatcatggaggccacggcgaacctgagcgaccagttcgccatcgggtccggcggatcaggcacggtgtacagggcggagctgtncactggcgagacggttgccgtgaagaggatagtgcatatggacagtgacatgctgtttcacgacaagagctttgngcgggaggtgaagatcctgg

SEQ ID NO: 149504 - DNA, 304 bp, Zea mays
  Clone ID: MRT4577_67875C.1
attgcggggaaaaacctggaatccattcgatatatgcgtgcacttttggctggtactgccactgtagcctctgatgcagagaacggatccatatgcaggccactggaccatataggcatgcctttcatcatgacgctcgccggcccaacatatagatatgataaggtggtctcctgctgaacccagctgacaaggtcaacgcatatgactagtatgtgaattaaaaaacgcatcggtacaaaaaatcatgacttgtgagaacagacaccgaggaatctttcttgagagaggactgtaggaaagc

SEQ ID NO: 149505 - DNA, 358 bp, Zea mays
  unsure (1)..(358): unsure at all n locations
  Clone ID: MRT4577_67876C.1
aagaagagcggcaccagcgagagaaggcagcggaggcggngcacgacggagagccagccgccgcaggagccgacggacacggaaccggcccccggcaacagcggagccagccggagcaccgccggccgccgcccccgagaaggagatcacgcgcaccagcaagggcaacgccgacgagcacaagaaggacacgagcagccccagcaccgcccgacgccacgcaacgaccagcggacacacacccgccaagaggaacccagaagaacggaccgaccaggacgcagggaaacagccgagaaaggcacgcccgggggccagcgcccaggaggccagaaaccagcccggaggaggaaaggac

SEQ ID NO: 149506 - DNA, 1419 bp, Zea mays
  Clone ID: MRT4577_67877C.1
accctcgaggtctcgcgtcctttccttcctggatgcggagatggaggacgcaggaagacagaccgagatcgagtggggcggcggcggcggcgccgacgcggtcctgggtcttgccggcggcgcctcctctgtgtcgctgtgctaccaccaggcgttcggtccccacgacgacctcgtgctcctcgaggccgctgacgacctcctccctgacctcctgcaaggccgggtgactgtaagagggcgtcctgatgaagatgctgtcctctgcacaccttgtgcaacttactccatgaagtttgttggcacatcaaattctatgtttttgataccacctggggaaccatctgctaaatgcttaagaccagacaacaccagtggcaatgctaatgcgttggctgctaccattaaactggcaccggggagcattgaattggtccgagtcgctccaagactagataaacttaagagccttctccgggagcggccctacatacttgatgaggatattggggatgatgacctccaacataagaataaggaggggctgtacacatggcaagacctctgcaaacttatccaggccagtgatggcgagctgttagatgcgctgaatgccctctcggctgttgacattgatggattctggaggacagttgatgccagttctgtgaacacgattcttgacatgatcctgcacaactctgtgttgcgtgattggccattaaaggcaatgccagaaagtgatgtgctctctgtcatgggatctgatggttttacgcataatatcgtaacccactgcctcaacagatttggcacaaaggtagagcaggaagccagaagcttttggagcctggatgagaagcgtgtatgcttacaatttgctcggagagcacttggcgctggaaagatgaagctcagcaactttatggagaaatggaagagaagcattccttcaggaatgtgttgtccggatcttcagatgcttgaaggggaagtgttgtgtgaaaagcttggggctgagacctgggtgcatgctttcagtgttactgatctgccactggcgcctgctgagaggttcgcagcacttttccgtgagcgggcaaaatgggaatggaaagacctgcagccctacatcagggacttgcatgttccaggtgcatcctcggaaggattgcttatcaagtataccagaagaagccaaccaaatgctgaagctgaacctatttttactgcaagataataatcaatgtacggccatgtcttggcgacgtggtgcattgcatttgcatgctagatattgtcaatggaacccaggttttgagaaaaaaaacatttgtgccttttgctgtaacttttgtttttggtgaagaaagctgaaatgcaagtattgagatcccaacaggttttgtttagaaaagg

SEQ ID NO: 149507 - DNA, 1981 bp, Zea mays
  Clone ID: MRT4577_67878C.1
attgggtacctcgaggccggccgggatacggattcaagcgagtagagacatctcaatgacactgggtcaccgatccctgatctccggggcctcgtcgtcaaccacagcagccggcagcgcgtgcacgcagcgagggtagcgccacacatgccactgacactgggctcaacaaagtgacggatccgcaacccagtgggacgtcacctccctgcacgggcccactctgttccagcttccgtgtgtacacagtacaccacagcacacgggcctactcaccctcgcctccgaggcttcgagtccgagagagcgcttgagaagaagctcaggcgaggcgaggcaagggatgccgtgattgacgacggaaacgaagccgagagggagaagcgaagctagccttgcatacacccggccccgtcccaatgcccaccgcttccggctcggatcccaaaccctaaccctactcggccgtccgcgggcccgccgccggcgacgcgatcgggtgccgacgctgatgcgctctgtgccgcgtgcgtgattctctcgcgcaagtaagcgttggaaaaggggctccctggctgcagcgacgcgtggccgaggtgcggatcggggaggggaggacggtcggagcgagatgccgggggacgtcgcgacctcgccggcgccggcgccgccgtccgtgtcctcgtcgtcgcagaaccaccaccatcacggccccacgaccgcccgcggcctcctctgccacgctgtcgccggcgcctccgctggcgtggtggcggcgaccttcgtgtgcccgctcgatgtcatcaagaccaggttccaggtacacggatggcccaagcttaccacaggcacaattggaggcagtgtaattattgggagttgacagcagattgctcaacgggaaggttttcggggcatgtaccgtggcctctccccaactgttctagcgctcttgcctaactgggcggtctactttactgtgtatgagcagcttaaaagcttactttcttccaatgatggaagtcatcaactttctttaggggcaaatgttgttgctgcatcatgtgctggtgctgcaacaactactgtaacaaatccactttgggttgttaagacaagatttcagactcaaggaataagagccgggccaatgccatataaaggtacacttgctgccttgcgaagaatagcacatgaagaaggcatccgaggactatacagtggtctggtccctgccttggctggtatcagtcatgttgctattcagttccctgcatacgagaagataaaagcttatctggctgagcgagataatactactgtagaagcattgagttttggtgatgttgctgttgcgtcgtctctggctaaagtagctgcatcaacattgacatatcctcatgaggttgttcggtcaaggctgcaagaccagcgagcgcactctgatgctagatacaagggtgtagtagactgcatcagaaaggtttatcataaagagggtgtggctggcttctacagtggatgcgccacaaatctattgcggacgacccctgccgcagtgataacattcactagcttcgagatgatccacaggttccttcttgatctattccctgctgaatctgaaccgcacatccaacctctcaagcattgatcatacaacatttgtaccctatccatgctgccattcgagtttaggaccccagtaaccacccagcaacagcaatgtgtttactgtgccagatggctgttgtaaaagagagaattgtttttttcccggatatgcaacagtaattcggaagttcaaacaatagtgttggctgagcattagcaacttgtatgtaatagatttgttagcatgcatttgcgggaggtatattgggtatgttttcttgatgatgatgaaaagaaaacaatcttaccacatatgaaagaatgattgctatatttttttcccaaaaaaaaaaaaaaaaaagcggcc

SEQ ID NO: 149508 - DNA, 524 bp, Zea mays
  unsure (1)..(524): unsure at all n locations
  Clone ID: MRT4577_67879C.1
caagttcacggcttnccagcggggcctcgcgtctgcttgggaaaggagttcgcgtacaggcagatgaagatcttcgcagcggtgctggtctacgccttcaggtttgagatgtgggaagccaatgctaccatgggctaccggcccatgctcacgctcaaaatggacggcccgctgtatgttcgggcatcgctccggcaatgaggtgtgggcgactgggcggcggccacgaagtcaaaatacgttgcgtactgttatgatactatcttagatattaaacttgttaaaataaatattttattttatcttagctaaaagactgaaaataatacgagttgaagagaaactcaacctttttgttatagctagctcgataaatcgtcatctttcaactagcgaaatggtattatatgaaagtgttgtactatgtatacgtgtgacttcctttcgtattagacctcggtagtatctggtagcccatctatgatgtaatgattgattaataagcgagaagagggaagagcaat

SEQ ID NO: 149509 - DNA, 719 bp, Zea mays
  unsure (1)..(719): unsure at all n locations
  Clone ID: MRT4577_6787C.1
aattcggcacgaggcaacaaccactctccaacgcagcaagcagacagaaggacaggcaggcagcgagtgcaaacaaccgcgagagcgatcagcgatgggctccttcttctcgaccttagtgacgccccctccgcccgccgccgacgacccgaactgcgccgtggtggccgcgcactccaaggccacctacgacgagcagtgggcggcccacaagagcagcagcaagctggtcagcccctcttcccttctcggctcttgttgccttgcccccgggccttccgcgccctggatctgaggaacgcgagggtctggttcccttgcgctctttgcttggcagatggtgatcgacttctcggcgtcctggtgcgggccctgccgcttcatcgagccggccttcaaggagctggcctcccgcttcaccgatgccatcttncatcaaggtcgacgtcgacgagctcgcggtacgccacgcctcctgcggccctgacgccatcctcgtgcctactttttttcttgtggcttggtattgtggtccggaatacactgtgatttagcctcggcatgatcctgtctctagtaagcagcagtcaatcagcagtttggagacggaactccgaattggatatgatttcccatatcttcggggaactcctcgagcccagttcagttctactaggctgggaatcaggatgcgtcctaantggtgttctattgtagcg

SEQ ID NO: 149510 - DNA, 365 bp, Zea mays
  Clone ID: MRT4577_67880C.1
ggctttagtttcttatgcccagcttctgtcaacaggggtgccgtacgatgtgatcgcgaagcgactgaccctgatcgccatagttagcgaggacatcctcatgcccaatatgcacctcccggagtgcaagaagacctgtcccacccgcatgaccggaatcgacagaccaatttcactctacctccaaaccgtgtacgtattggtggacaacctagaatgtgtgcagctattctactaaataaatcgctctgagctccacctgtacaaatacaccttgcagatgacgctgtaaggcataccaagctgctgcgtgatcctaatcccttccttctagataggacccctgaaattagactccctaaggc

SEQ ID NO: 149511 - DNA, 799 bp, Zea mays
  Clone ID: MRT4577_67881C.1
gtgggagcagaattgggggaacatcatgaggacacacatgaccatgaggagtttgagttcggtgaagtttttgttcaccaactgattcacacgatagaatttgttctgggtgcagtctcaaacaccgcttcataccttcgtctttgggctctgagtcttgcacactctgagttgtccactgtattctacgagaaagtactaatgacggcatatgggtttaacaatgttttcatccttattattggtgtcgtcatcttcatctttgccacgattggtgtcttgcttgttatggagaccctgagtgcattccttcacgcgctgaggcttcactgggtggagttccagaacaagttctatgaaggtgatggctacaagtttgccccattctccttcgcgctgattcgtgaggaggaagattgagcttgtctcaacatttgtatttattgtagccgataaaaaatctttggtggcctttgttcccagaccaaatcattttttcatctgttgtgtcggatgtggatcataaaccaccgtccctttgtttaaactgggacgaacagcatcatttttccttagctatgcagaggattcttgggtcggttggcaacagatatggggtgatgtcacccttgtatgatgctaataagtagttgccgattgggcggtgtgttggatataaataagcactgtattgaaggttagacaatctccatcacgttcattgtcaataaaataaagagtgctatttacgctgctggtgttaaaaaaaaaaataaaaaaaaaaaaaaaaacctgcccg

SEQ ID NO: 149512 - DNA, 595 bp, Zea mays
  Clone ID: MRT4577_67882C.1
gatttccattctttctttttcccccgcttgtgtcgccgcaaccttcctccagcccatctcccaacgcccccgactcgcctccatgatcccaacaccactccatctgcctttgctcccccatcccgccaggaccaatctacagcgacgaccgacggatggacaacgtcataccagttgggaagcataaacaagcgcagcaatcaaaaggcgccagaaggcacgtgctgacctccacgatcgcccggtacctcacacccggagggctccatgagactcagagctactgctgaaagaggtgtcactgatatcctatcagcgtctgtggggctcatatgaccacctgctattactgaacggcccctgatgcccctgcacatggatactactatttaaacacgactcgagtgaccttatctattgacagtacatcctactagctgaaagtccaccactaggaatatggaggccatgatgtgctacgacaggaagaccctttcacttgatctacccttttccagccttggaggactctagatgacttgctggctcaattctaagaatgtactcactcgcacatacttctgtgcactgtgtc

SEQ ID NO: 149513 - DNA, 1615 bp, Zea mays
  Clone ID: MRT4577_67883C.1
tgatcttcttgcaactcactgaagatgaagatgcctattcttcttggagttgcacaaatgaaccttgggattgtgattagttacttcattgcgataattttctggatcagcccaactgtgtggcaccagttcattccccagctgatcttcttgaacagcttatttggctacctgtccttgctcattattattaagtggtgcacggggtcgaaagcagaactattccactttttgatctacatgttccttagcccaacagatgacattagtgagaaccagttgtttgggggccagaagacagtgcagcttgttctgcttctgcttgctttggtgtctatgccttggatgttgattccaaaacctcttcttttgaagaagcaacatcagcaaaggcatcaaggtcaccagtacgcaatgcttcagggcattgatgaatcagtgggagcagaattgggggaacatcatgaggacgcacatgaccacgaggagtttgagttcggtgaagtttttgttcaccaactgattcacacgatagaatttgttctgggtgcagtctcaaacaccgcttcataccttcgtctttgggctctgagtcttgcacactctgagttgtccactgtattctacgagaaagtactaatgatggcatgtgggtttaacaatgttttcatccttattattggcatcatcgtcttcatctttgccacggttggtgtcctgcttgttatggagaccctgagtgcattccttcacgcactgaggcttcactgggtggagttccagaacaagttctatgaaggtgatggttacaagttcgccccattctcctttgcgctgattcgtgaggaagaagattgagatcgtcccatgtagccgatgtacaatctttgatggcctttgttcccggaacaaatcattttttcatctgttgtctcggatggatcataaacctcagtcccctttgtttagacatgggacgaacagcaccatttttccttgtttagctatgcagaggatttttgggtcggttggcggcaaacatgggggtgatatcaccattgtatgatgctaataagtagttgccgattgggcggtgtgttggatataaataagcactgtattgaaggttaaacattcccctacgttcattgtcaataaagagtgctatttacgctgctggcgttagtcaaaaaaaaaaaaaaaaaaaaaaaaaaaaaaaaaaaaaaaaaaaaaaaaaaaaaaaaaaaaaaaaaaaaaaaaaaaaaaaaaaaaaaaaaaaaaaaaaaaaaaaaaaaaaaaaaaaaaaaaaaaaaaaaaggggggggcccttttttaaaaaacccaaatttacttcccggggcttggaaaaaataaattttttttttgggcccctaaaataaaattccggggccgggttttaaaaccggggggatgggaaaaaccctgggtttaccaaattaaattgctttagagaaaaaccctttttccccagttggggaaaaaaaaaaaggggccccaccggtcccctttccaaaaattttccccaccttaatgggaaaggggacccccccttaacgggctaattaacccggggggttgggggggttccccccag

SEQ ID NO: 149514 - DNA, 478 bp, Zea mays
  Clone ID: MRT4577_67884C.1
ataacaagcccacttttgttttcattcaagtaataaacacatacaaaccccaccctccccccaagggaaaaaaagaggggcggggggcccacaaataatcaaagaacgacccggacccgggacgggcctagcttggaagcaaaaaccctttattggcccctctttttttttttctttctcctatcatggaaagcaatgcaacatgttcattcaaaagggggggggatggacccggttggggaacgatcgaattatacatgtcgggctggggggcaaacaactggcaggctgtacctggtgggacccaaaccaacgacccttattaggggggggggctcctcaccttgaaccgggacaaaagctttttttttctggaccccgggttgttcacccccagcaccaacttgccgggctccggggccttgaaactgcccttcatgaagggctcctcgggggcggggaccttccgcgtcttttg

SEQ ID NO: 149515 - DNA, 943 bp, Zea mays
  Clone ID: MRT4577_67885C.1
tcgcgatctagaattcggcacgaggcctcttgagtcttgacgaaagagagacagggaaagagggagaggcaagagtcgcagcctcgcagctctagacccagaccgcctccgcctccgccggtgatcgagtcgcgtcggcgctacattcaagctagaagacaataagcttcggcattcggaagccatgttcggctccaccaatccatttgggcagtcatccacaagcccatttggtaacaacaactcgtttggaactccccagggatttggccagtcttccactgctgccaacaatccctttgccccaaaaccatttggcagcccgaccacgccttttggggcacagactggaagctcgctctttgcaactacatctactggtgccttcggtcagcagcaatccgctcccgcatttggcacaacatccactggtgcctttggtcagcagcaatccactcccacgtttggcaccccatcctcctctcagttcgggagctctacaccagccttcggtgcatcccccactcctgcctttggtgccacatcctctgggtctttgttcggacagaagccaagttttgggggttttggatcatctcctagccagtcaagtccttttggtagcacgttccagcaaacacaaccaacatttggaacgacgccggcatttggtaccatgactactcctgcatttggtacaagtacaccagcctttggcaccacaactgcaccagccttcggtgccacgactaccccagcatttggttcaacatcaacatctttattcggtgcttctagcaccccagtgtttggttctacagcctttggcacatctgctactggttttggaacttcagggactacagcattcggtgtgagtagtactactacaggttttggatcttcaagcacaccttcatttggcacatcagctagcgtgttc

SEQ ID NO: 149516 - DNA, 710 bp, Zea mays
  unsure (1)..(710): unsure at all n locations
  Clone ID: MRT4577_67886C.1
ggccgcttttttttttttttttttacacatcaacacctttgcagcggaaatcttattaccaaattttacaagttacaaaaattttactttgtatgatcggagtgattacaaaggtgattcaaagaaataactttaaactgttataaattatttataagtttgaaatatatgctagctcaagtgaccatcctcgataagaaggtaaagacggggtatacttatataagaaggccgagcccaccggcacttaacaccatcaagcaacacaaggttagaacctgggataaacactacgttagtgtttgttagacgtcgatcacttgacgacaatcttttgttctgatacttgtttcgtctgtccatcttcagttccgttcatcagcaccatcttgtgatcgactcatttctggttctccacatcacgtggttaattcacgtaccgtttcaacagctgactcgaatccgcgagatcggtaatgatttttcgatccaagcaatttgtcgagcgcttgagaaatatcgagctgctagcttcgtcttcacccgattcttgggatttattgctgatgcgcggaacgacgacgagatcgtgtttggagcgagctggtgaggtgggggttgagcaggagatgacnggtttgacgactcgattgtgaatgacacaacgacgagctggggcaggatccgagctaataggcatagtatggaac

SEQ ID NO: 149517 - DNA, 939 bp, Zea mays
  Clone ID: MRT4577_67887C.1
cctcgaggccggcctggcagacagatccccttcgggcttcgtcccctattcttgagtcaagccgagagagagaagaaagagggagaggcaagagtcgcatcgcagacccagaccacgccgccgccacctccgccgccacttccgccggtgatcgagtcgcgtcggcgctaccttcaagctagaagacaataagcatcggcagacatgttcggctccaccaacccatttgggcagtcgtccacaagcccatttggccagacctcgtttggaactccacagggatttggccagtcttccactgctgccaacaatccttttgccccaaaaccatttggcagcccgaccacagcttttggggcacagaccggaagctcgctctttgcaactacatccactggtgcctttggccagcagcaatccactcccgcatttggcacaacatccactggtgcctttggccagcagcaatccactcccacatttggcacaacatcctcatctcagtttgggagctctacaccagccttcggtgcatcccccactcctgcctttggtgccacatcctctggatctttgttcggacagaagccaagttttgggggttttggatcatcttctagccagtcaagtccttttggtaacacgttccagcaaacacaaccaacatttggcagcagcacttttggttcatcaactccgccggcgtttggtgccacggctcctgcatttggcacaactacaccagcctttggcaccacaactgcaccagccttcggtgccacgactagcccagcatttggttcaacttcaacatctttatttggtgcttctagcgccccaatgtttggttcttcagcctttggcacatctgctactgggtttggaacttcagggactacagcatttggtgtgagtagtactactccccgggttggatca

SEQ ID NO: 149518 - DNA, 297 bp, Zea mays
  Clone ID: MRT4577_67888C.1
ggactaccggcaggatgagtcctacaattttgagggggacatcgccctgctggatctggaaaatagcgtcaccctgagcccaacctcctctccatctgcctcgctgacaacgataccttctacgacctggacttgatgggctatgtcactggcttcggggtcatggaggagaagattgctcatgacctcaggtttggccgtctgcccgtagctaatccacaggcctgtgagaactgctccgggggaagaataggatggatgtgttctctcataacatgttctgtctggacacccatc

SEQ ID NO: 149519 - DNA, 328 bp, Zea mays
  unsure (1)..(328): unsure at all n locations
  Clone ID: MRT4577_67889C.1
cccccctccacgcctccactattttttttttttttttttgaggaattaacagtctttattnnnctgagaccgggaatccttttggctttaggacctctatntatttatcaattttcttctccacaatcttctccacctgtttccataccctcataaactcattcttaattccataagataaacatatctaaagctacatgattgaaaaagatataccacaaaaacactaatctactttcaaccaacctcatgtgacagctcatgcctgtaatcccagcacttttgtaagcctaagactctcgatcacaaagtcagcatttacaaacca

SEQ ID NO: 149520 - DNA, 568 bp, Zea mays
  unsure (1)..(568): unsure at all n locations
  Clone ID: MRT4577_6788C.1
ttcgcataggccgtcgagttcagtcactccgctactgtagtactgtcttaaaccctcgtcgtcgtctttccgccgcccgtcgcttcgttcctcgcttccccccacaggcccacactctcgcgcgcatcacggcggcggcggcgaatcaccgcgtggccctccacctaagtcctagcccaagcgtaagcgatcgctctccccatcagccaccatggcgccacgcccccgcaagcgggcctcgcgccccaagccccgcccgggctcccgacgtggcggcggcggaggggacgaccatcccttcttcgagtccgagcccaagcgccgccgtggaggccgtgacgaggacatcgagagcgaggacagcgacgacgatggcgtggctgcgtttgggggcggatttgatgaggatggggacgagcgcggtagggaggaggaggacgaggagacggtgggggagaagaagatgcggatgacgaaggagtggctgaagaaggtcactgaggtcgttaagagggggcaggaggatgacgacnaggacgagtcnggagggagacgggtggggggagat

SEQ ID NO: 149521 - DNA, 256 bp, Zea mays
  Clone ID: MRT4577_67890C.1
aggtcgagtgcgtataccgttgtcgagagctacagcgagaacggtagctcaggtggttcatgttcagatctatgtggcgttagcattagcgtttgcaaattgtaaaaagaccacgttaactaaatgcagagctggagccatcccgagagggtgaccggagacacgtttcttgcagcaaccactacacggactaacgctcggaggtgcatggattaccaaggcccaatccagagacttacaccctgcggaaagatca

SEQ ID NO: 149522 - DNA, 686 bp, Zea mays
  unsure (1)..(686): unsure at all n locations
  Clone ID: MRT4577_67891C.1
atagtatcgtcgtctaacggccggtatggtgtcgacgctggagcagctgctcatcgcggctgccttcctggtggtggcggcggcggcgtcgacagtgcccgtgtctcctgctgcggcagcgacacggccgtaccacggcggcggctgctacagccatttcttcgcgttcggcgactcgctcatcgacacgggcaacttcatcggctactccacggcgagaccttcttccaccgccccaccggccgctggtccgacggccgcctcatcgttgacttcattgttgagcggctggggtacccgcgctggccgccgtacctggacgggaagagcaaggacgacttccggcacggcgctaacttcgcggtggccagcggcacggcgctcaaccagctgctgttcaagaagcacggcctcaacgtcaacggcatcacgccctactccctcggcgtgcagatcggctggttcaagaaggtgctcgccatgctcgcctccaacgagcacggtatgcgtgtatacgtacatatagccagcaattaccacgtactacatacataactgtggatgaatccagctctgtggcttctagaaaaaatacatttctctctaacatagatatgcatttttttcttanaaaacagtctcctaggaaacctataaattttaaggtgccgttgccttatatgatg

SEQ ID NO: 149523 - DNA, 398 bp, Zea mays
  Clone ID: MRT4577_67892C.1
tcccggtcgccgccttttttttttttttttttttttttttttttttttttttttttttattttttttggacggggggtttaatctaattttctctaaaagccacaacatattcgggccccgaaacattacagcgaaaataaatgccgtccctaggtttaagggaaaacagcacgtgtggggggggatcatctggcagttttacaaacaggcctatttagagaatgagtccaccttgcacaaaaaaagtggaggtcaagaataatatttcaagccccctaagcaaagcaacaacaaatttcagttcccgagcattttaaagaattctgtttaacatgcatgccattttgaaccggttttattttcgaaaagggaattttatccgtgggttagttttttt

SEQ ID NO: 149524 - DNA, 1069 bp, Zea mays
  Clone ID: MRT4577_67893C.1
gccggccgggtcgggattcgttagctggctctatcgtatagtatcgtctacacggccggtatggtgtcgacgctggagcagctgctcatcgcggctgccttcctgacggtggcggcggcgtctacagtgcccgtgtctcctgctgcggcagcgacacggccgtaccacggcggcggctgctacagccatttcttcgcgttcggcgactcgctcatcgacacgggcaacttcatccgctactccacggcgccgggccccgtggcgcactcgccctacggcgagaccttcttccaccgccccaccggccgctggtccgacggccgcctcatcgttgacttcatcgtggagcggctggggtacccgcgctggccgccgtacctggacgggaagagcaaggacgacttccggcacggcgccaacttcgcggtggccagcggcacggcgctcaaccagctgctgttcaagaagcacggcctcaacgtcaacggcatcacgccctactccctcggcgtgcagatcggctggttcaagaaggtgctcgccatgctcgcctccaacgagcacgagcgtcgggagatcatggcgagctcgctgttcctggtgggcgagatcggcgccaacgactacaaccaccccttcttccagaaccggacgctggacttcgtcgactccctggtgcccctcgtcatcaggtccatcgggcgctcgctggagtcgctcatccagctgggcgccaagacggtgtacgtgccgggcatcttccctctgggctgcctcccgaggtacatcttcctcttccgcgacagcggcgccgccggctgcctgcggtggttgaacgacctcacgtcccgccacaacgcgtctgctccgggacaagctcgccggcctccgccgtgcgtaccgggacgtctccgtcgcctacgtccactactacgccgaggacactgtgatctacccaccgcctcagagctatggacctaatgcacgtactccttcaccttatatgctaccgcctagtggacctgctcctccttactatggacaacactaccctaccatgtatgaacct

SEQ ID NO: 149525 - DNA, 380 bp, Zea mays
  Clone ID: MRT4577_67894C.1
atttatgatagtattggctgttaataggttctcttatggattctactggtcctatgtctctatgcactaccatgatgcatgctgcatgttgtgtgtacgttcaccatggattacaatgcctttttcacggctaaggttaattggtttatccatgatttcgtgtttaattactaccgctttatctatgcatcatggatgactctcaatgtacttaacgcgatctgattgtatatattgatcatactcgtagatgagatatattgactgctaatccaattaactatctgttatgattctggatatagtctgtctgagagctagaaacggccactgcttgtgtcatcgatacaattgcatttctacttgagtcaacacctgat

SEQ ID NO: 149526 - DNA, 257 bp, Zea mays
  Clone ID: MRT4577_67895C.1
agtgcatccaaacaggagaggctaatagttagtactccctccagtttctttttattaggcgctggattgatcaattttaaaccatccatcgactaataaaaagaaacggagggagtactactttttgccctaacgtttggctactctcgaacgcacgagccagcccagaacttccggtccgatccccacaggcgtaccagctactcgtactatgagacgcatacaagctttaaatcatgatagtgatacttactatc

SEQ ID NO: 149527 - DNA, 148 bp, Zea mays
  Clone ID: MRT4577_67896C.1
gtcagagcataagctcagcgtactcaaaatcccaatctagcgagccttcttgacgaacttgccaatgtgggctaagcttactcgtgaggctatttatagtgtcgtcgaaggattctgcaagtagtccaacaatcgttgttcttcatgg

SEQ ID NO: 149528 - DNA, 330 bp, Zea mays
  Clone ID: MRT4577_67897C.1
tggcattggtggggagggtagtggcgaagacatcatgagggagaggaacggggtgcatgtcgcctatggaactccaagccgagaacgtgacatgaacataaggaggacactgggtacacgatacatcaacatggtatggctagatgaagctgacgagacgctgagataacgcttgaaggttcagatacacgatcgctaccaatatctccttcaataacatgaggtgatgctgatacatgcacatcttcactgatgagatcttggagatgactatgaatggagatgaccgaaccgaagacgatgcatgggaagcgtgatcagctgaccctg

SEQ ID NO: 149529 - DNA, 978 bp, Zea mays
  unsure (1)..(978): unsure at all n locations
  Clone ID: MRT4577_67898C.1
ccggccgggacacatcagcatctcagtttggttatttatccaaactccaaaacgacgagaccctctcgcatctctgaattttacacgcactagtggcaaatttccaaacgcagtcgcttgagcctgttacatttttcggccaagtccaaagacttcgtggccagccagagacatcgatccatctacggcgattgcacctcacgtcggaaagcagcaccggagctcgcgccgtcgcgcgtccaggcgccggccaccatgacgttgacgacggtcgcattcaccgtgcgccggggggagccggcgctcgtcggccccgccgcgccgacgccgcgcgagacgaagcgcctgtccgacatcgacgaccaggagacgctgcgcgggcagatgccgttcctcttcctgtaccgcggcggggtgcacgtgcgtgccgacaacgacgacgacccggcgtgtgtgatccgccgcgcgctcggcgaggcgctggtgccgttctacccgctcgcggggcggctgcgggaggtggagggccggaagctggtcgtcgactgcaccggcgagggggtgctgttcgtggaggccgacgctgacgtgcggctggacgagctggaggcgaccgggctgaggccgccgttcccgtgcatggaccagctgctgttcgacgtggacggctccagcggcgtgctccactgccccctgctgctcatccaggtgacccggctgctcggcggcggcttcgtcctcgcgctccgcctcaaccacaccatctgcgacgccatcggcctcgcccagttcatgtccgccgtggccgagctcgcccgcggcctccccgcgccgaccgtggcgcccgcatggtcccgcgagctcctcgaagcgcgcaacccaccgaagccggcgttccctcaccgcgagttcgacgcggcgccacctccgccacccccaccgccggacgacatggtgacgcggaccttcactncttca

SEQ ID NO: 149530 - DNA, 278 bp, Zea mays
  Clone ID: MRT4577_67899C.1
gaaagccattgtacagcatcatagccaaacggtgttcaatggcgtttctagtgttacacaatcaaccattgaacagcgtttggctatgttgctgtacaatggcgttttccgtgccgttttccgagctatcgttcgcgtgctttcgcattatttgcatccgtttcgggccttccatagtcaaaactctgtccatcgtttcacacttctatggcgctcccagcaccgttatttcatttcggactgctatctgatggcatacctgtttttcctatttcggt

SEQ ID NO: 149531 - DNA, 293 bp, Zea mays
  Clone ID: MRT4577_6789C.1
taagctcggaattcggctcgaggcggtttgagctctgggagtgtgcgcacgtggggtacctagctcgctcggctagtttaccatggctgatcaccacttgggtgcgacgggaggtggcgggggctacggcgacctccagcgcgggggcggcatgcacggtgaggcgcagcagcagcagaagcagggcgccatgatgacggcgctcaaggccgcgacggccgcgaccttcggcgggtcgatgctggtgctgtacggactgatcctggcctggcaccgtgatcgcgcttacagcg

SEQ ID NO: 149532 - DNA, 418 bp, Zea mays
  Clone ID: MRT4577_678C.1
gtgtccggttcccgcaggcgtacccgctttccctaaggggaggccacttaaagccaggcgaaagcatggacaaagcgggggggaggggaaaacagggacacgctcacaatgcaaaggaactcgcgaaaccgaaccagaaaacgtaaagaccggggggccaaaggagaaaacaaacatgacaaaaaaggagatgaactaaaagcccaattacgaacaggaaaaccagccgagccataggaaaaaacgaatcggccaaagcccaaaaaaaagcggtacaaggacagggaaaaaaggtggtttttcttcctaacagggaaacgggcaatacatgatggcaattaacccccgggtactaaaaaaataggagaaggcgccccaggctggttcaaccgagtacgcaaaaaggggggctgatggg

SEQ ID NO: 149533 - DNA, 340 bp, Zea mays
  Clone ID: MRT4577_67900C.1
gagaaggaaaaatatccccaaaccctagctcccgatctcgatggcgagccctaggggcttgttcgacatgaccgtcggcggtgccccggctggccggatcgtgatggagctgtacgcctacgaggtgcccaagaccgttgagaactttcgcgcgctgtgcactggcgagaagggcgagggcaagtccttgaagccggtccactacaagggctccaccttgcaccgggtcatccccgagttcatgtgccaggggggcgacattacccgcgggaacagcaccggcggctagttcattttctgcgagaagttccactacgtgaagttcgtgcgcaagcacacc

SEQ ID NO: 149534 - DNA, 472 bp, Zea mays
  Clone ID: MRT4577_67901C.1
gggggataaaaaagggaccgccgcccgcaaaaataattcaatttggctaggggttttccatggcccaattttaactaaccaaaaaccaacccggggccctgggcctgatttctacttgaatccctttcacaattttcttaaaacacggatttgattgccatacttgggaactttcacagctggcatgggatctgaggattcaaggcatgcctgctacacaaattgacttaccatccatcgaacattttccggggccatgtgaacagcaggcactgtccccctaaacatatatgccccaatttcttgggtatcttccattacttggggttggcgacccatatagcggggggggatcccacccatttcaaaagatggcccttcagcaacccactcaaataaacatgaaatcttggacagggaatatgccccctttttattacacccaccccacaagggtgacaagatagttttg

SEQ ID NO: 149535 - DNA, 221 bp, Zea mays
  Clone ID: MRT4577_67902C.1
ctgatctatcgctcactaacgcatataataaaatacacggcgatagccatggcatccaagcggaccttgaaggaactcatgcaactccaaaaggatccttctacctcatgcagcagcagcctctgatgctgacgacatgttacactgacaagcaacgattatgggtcctccatacagtccttatgctggaggagggagcctaggcactatccgttagactc

SEQ ID NO: 149536 - DNA, 468 bp, Zea mays
  Clone ID: MRT4577_67903C.1
aacaaactgcagtagttttttttgtcctgcttccagtgcaacgtttaaaagcggtcatgtattgacattgtaattgcattagtcagttttgctgatgaataaatggtaaagtacagtattggatccttttaaatacactacttgagtaattattggcttattcagctgttaaatatttattgtgacaattttctccttgattaccacagcgcttccgccatcgtcaaggtagttgactttatgcacttctgaactttaatcatttaggccctgtttggaagcacctagtttttaagaaactggtctatagaaattgaggtggttctaaatatagcagtttatgattcagtttataaaaattagattctcagtttcttaaaaaccaagaagctggcctctcccaactaaaagataaaaactgggttgcttcaaaaagggtctagactagtctaggtgacaccatacctg

SEQ ID NO: 149537 - DNA, 833 bp, Zea mays
  Clone ID: MRT4577_67904C.1
gaactagacaagattagaagtttaaagaggccttacatcaagagagtacaagatcgccataaggaagtacaagtctttgaggaaagtgaccttatgagaagcttgagaaaaatcaacttgaaagtgaccttcatgatgatacaataaattgtctcaaacgcaacactattgaaatggagggatacattcgccctcttgacgtagtcataattgtgttgcagtatataccttgctctgatgaccagcattctgatggtgttgcagatgatcatcccagcgattccttattctctccaacataccatcatcacaaggtggtgtctgttttttattcaacaggaggtctacgtggcggtgtctataggtctcgatgtcaagcctggttccactgttaagtgtgagcctggatatggttttatgctgcacctttcccaggctgctcttgaggaatcgaagaatagtgataatgcgctattgccttgatgtatgtcaaaattgatgatcaaaaacttgccattggaatcctctctgttgacaagaacccacacatacaatttgatctggttttcgataaagagtttgagctgtcgcacacatcaaaaactaccatcgtcttcttgactggctacaaggttgagcaaccattcaaggaagatggaatggatcttgattctgaagatgaagacgaggagctgaatgtttctttagtcaaggaaaatgggagagctggggggaagatacagaaaagtgaagacaagcgccggtgcttgggttgggcaaagggaaagatggttacggatgttgggaatgatgacctgggtggaccctatgca

SEQ ID NO: 149538 - DNA, 329 bp, Zea mays
  Clone ID: MRT4577_67905C.1
tttttaaaaatgggcccttatacaaaaaacatacccaagggtggaccattgccacgggggcaaaatcttcgcaaaagaaaagaaaaattaacccgcccccgccagattaacaggatatgctggctactgtgtttttgcggggggtaagatatacataaaagggccagtccgttttgcataagttatttggacctggaggggcgcctttccgtttgggggagcctgggggccaaaatgatttgttggcttttgaaaagcccttatcctcctgctttggcttagaatccaataacttgaatggaagatcgggggttgtttcaggccatgga

SEQ ID NO: 149539 - DNA, 255 bp, Zea mays
  Clone ID: MRT4577_67906C.1
cagggaaaaacttaaaccttgaaaccccaagtttttggtgaaaacattttttttggaacctatgtttagcgccaaaacttttttttgatttttcactccttggccgctcccggttatttttctaatactaaaggcccgcctttaaaacataaaggccacttccaaggggaaaccccttttccaacccaggggcatcttcattccatggaaaaaaaggtgggccctcacccaaatccgttgcccaccccaccccaa

SEQ ID NO: 149540 - DNA, 216 bp, Zea mays
  Clone ID: MRT4577_67907C.1
ccacgtcatgcaacgcaacattccagggccatgtatcatggataagttgctggctcccacatatgaactagtctctatcatcatccaatccagatcagcaaagcggcagtgcgtagagaggatcgtcgaacagaacagcatgaagatggtcatcgtactcgacgtgtgcctggctctgctagctgacagtacctatgcaatgcagatgccatgcca

SEQ ID NO: 149541 - DNA, 1366 bp, Zea mays
  Clone ID: MRT4577_67908C.1
cctcgaggccggccgggccgggctctctgttgcatttcccgtcctgtccttcccttacccggcggcttaaaccctagttctcactcccatcgccgcttcagctccgccgcagcagatggagttctggggtctcgaggtcaagcctggttccactgttaagtgtgagcctggatatggctttgtgctgcacctttcccaggctgctcttggggaatcgaagaagagtgataatgccttgatgtatgtcaaaattgatgatcagaaacttgccattggaaccctctctgttgacaagaacccacacatacaatttgatctgattttcgataaagagtttgagctgtcgcacacatcaaaaactaccagcgttttcttcactggctacaaggttgagcagccattcgaggaagatgaaatggatcttgattctgaagatgaagacgaggagctgaatgttccagtagtcaaggaaaatggcaaagctgatgggaagaaacagaaaagtcaagaaaaggcagttgctgcaccttcaaaatcaagtccggattccaagaagagcaaggatgacgatgattctgatgaggacgagactgatgattctgatgaggatgagacggacgattctgatgagggtttatcttctgaagaaggcgatgatgattcaagtgatgaagatgataccagtgacgatgaggaggaagacactccaactcctaagaagcctgaggtaggcaagaagagagctgctgaaagttccgtgctgaaaactcctctatctgataagaaagcaaaggttgccacaccgtcatctcagaagacaggtggcaagaagggcgccgccgtccatgtggcaactccacacccagcaaaaggcaagaccattgtaaacaatgacaaatcggtcaagtctccaaaatctgcgccaaaatctggtggctcggtcccttgcaaatcgtgcagcaagtcattcatcagtgagacggcacttcaggctcactcgaaggcgaagcatgggggcaagtgagtcgcaggtccaatagagtcaacaacaaatgcgaaacatgggagaggagggtaagcgagagtctcgaaagagtgtcggtggaagtaggcctaaccttattttgtttagagacgggctatgcgttcgatgtagcaaaacaaggctgtggtttgtgtacttcaatatttgggttgtgtgtttcgaatttttttttgaacgtgtctcggattgctgtgctgcgaattggttgtttctgtcgctatggtgagatagtgtcacgtttctttctctatttgaaagacctgtcgcattctatttcttgggaactgccagtgcctgccttgttgaaaaaaaaaaaaaaaa

SEQ ID NO: 149542 - DNA, 379 bp, Zea mays
  Clone ID: MRT4577_67909C.1
tcgcagatgcgcacgctggaggcgggcaccggggtgctggccggaacgcaactggcgtacgtgctgatgctgcaccgcgccgccaccgtcgggtacgcttgtgatgaaaccggtgctaccggctaagccggcgctggtggggaccagtgcgagcctggctgattcaaccgcaccgacgacgagggcgactactaatgtcaaggcgcgcagttgcagaacgatggacgacaccagcaacaacccaggcagggccgggggcccttgctcaacgttatgtgaactaggatacccatggcatcatgtttggttggagaagctttttgggctagcgattttcggggaagagtttagtcacgtggaaaataagcaattgaaactt

SEQ ID NO: 149543 - DNA, 195 bp, Zea mays
  Clone ID: MRT4577_6790C.1
cggctgcttttagtggcggttcagattcatgctatgatgaattagtcaaacatacggatccccgtgacgttagatcaggaatggctaatgatgcataccttggtccagtgatcaacccacaggcataggatcgtatctgtaaattacttcaaagtggtgttaacagtgatgctcgtatattgcttgatggaagaa

SEQ ID NO: 149544 - DNA, 360 bp, Zea mays
  Clone ID: MRT4577_67910C.1
cccacgcgtccgccgactcgtccgcggagttcaagaccagcaacatccaaacgctctggggagagatctcgtacgcatggcccacacagtgctacacacggctgacgctatagcgcatgggtcgaccgacacagatgtactcagcagatgatagctcacctgataccactgcgccacatctatacgtgccacgatcccaattccgctcatcgacaacacgtctctcatgtggaggtagacgcctacgaagggcgacgtacaagacgtactagctgaggacgactacgactacaaggaggactaggatccggaagaaggatgagctgagctggagctggatcgaacagcccagggaagagg

SEQ ID NO: 149545 - DNA, 325 bp, Zea mays
  Clone ID: MRT4577_67911C.1
tttgtttttttggacggaagatctttatagaccctaccgtaccaacatacggtttatatcaaggccaaagggatcaagcattggtacagcaaacgaattggagttagcacatacactcctttggaacgaacagagccaaaaaaaggtcgctgattcgcccaccgctagcttatacccggatgaattggaatgtcagccaccatccgggtgatgtcggactggccctccgtgtactaggggcccctgagggctatttcaggttctacctacatgatgtaggcggcgtgcaacgtccgaaaattgtcattgccaaccgggggcttca

SEQ ID NO: 149546 - DNA, 265 bp, Zea mays
  Clone ID: MRT4577_67912C.1
ccgccaagaagacaacatatataataacagagtgtttagagataaatgtcaaaaacataatcaggagttttttttcatagcgggagtcctacaaaattaaagacaaattttacagggttttaaattcattcttggggccagaaagttcactgggaaaccattaccttaaccttaaaagaacacaggggaaattcaccattggccttcttcaatgattccaatttttggacttgcacttgggaattcaaggtttaaattggttttt

SEQ ID NO: 149547 - DNA, 597 bp, Zea mays
  unsure (1)..(597): unsure at all n locations
  Clone ID: MRT4577_67913C.1
gtcctaactaattaaaaagtttgtcataaaaaattctaactacaggaattcttgttatgggggaaaatgtgtaacacttgaaatgcaaataatcttcttttatatcaagctaattatgcagccattagttcaagccctgccttctgctgtcttttatatatagctctcctgtgaggtctcttcctgaaaactcttcactggtctggtaaggggaacagggaattctctcttaactctgctgctgcctcttgaaagaaggaaacaatgactggaaagataaaatatgctctatctgtggttgatttttgacccctaattaggtttcatctgtaggttcactaacagcgttttcctaccatatgtaaaattaaacagtaatgctttctccataacttaatttgcatgctcgaatcccttgtggatcagcagcattagcacaccctgngagctcattagaaatgcagaagctcaggacccaccacggatttacagaatcgaagaatctgcgcttaatagtgttcctgaagcatccgtatacatattgaagtttaagaagcattgtgctgatgtaccttcaaaacagtgttccaaaagaag

SEQ ID NO: 149548 - DNA, 297 bp, Zea mays
  Clone ID: MRT4577_67914C.1
agcgtgcgcacggccgaggcatcggcgcatcacgcttgtgccagacagggccacgaagaccctcttcatcctcgacaggggcgtgggcgtgaccatgtccgacacttgtcaacaacctcagcaccatcgccagttccggtaccagagagcgtatggaagcccttgctgctgacgctgatgtgcctatgattgcgcagcgcggagtctgcttttactctggctacctcggaggcgagagggtcgtcgagaccaccaagcataacgatgactagcagttcctgcccgagcgccgctcga

SEQ ID NO: 149549 - DNA, 164 bp, Zea mays
  Clone ID: MRT4577_67915C.1
gcgggcgggcttttttttttttttgatgaatggcggaagctgatcagtcagaatgttttacgagggaaagcaaaacatcaagctcgctgcctaactgcttgatttatgacaatcacactttggggctgttgccttcaacagaccgttcacttctacgctcaaac

SEQ ID NO: 149550 - DNA, 274 bp, Zea mays
  Clone ID: MRT4577_67916C.1
aaaaaacccaaaaaaatttttttttcaaaattttgtaaaaaaaaaaagggagcggccttttacgggggaaagaaatttttttggttagaagttaaaggttcccatcacacacacccttttccccccccttccggaaaattgtgaagttgggcccaaaaactggggtcaaaaataaaattgcatgggaggggcaacaagaggggtttaaaagagcggttggggtttaatatttttggggaaaaaatttttccccggaaattagggaaaaattccc

SEQ ID NO: 149551 - DNA, 654 bp, Zea mays
  Clone ID: MRT4577_67917C.1
aataataatataattaatataatatagatgagtaccaataaatatttcatacataagtgtactctaaatccaaaccaaaacattgagataatcatgtaattagccaaacaatctgtgcaagtgcagaatacaatgtacagcagattgatttgcatcatgtcaaaaccagattgtccaagggatcgatacatcggttgccgctgtcgcacccctcctgtcgatgttccatgactccattcttgctggccactcacaataattccagattggttctagtggcgtctatatgctaagtgccaagctctcatttgagttacaatgatctcagtttccacaaccgtgatgtgcagattgcagaggactggcgcttggacgaggacaactgccggtcccggtcaggcttgctgcttgcacgagcagcacgaccatcggtctgggactctgggcgtctagcacagcggcacctggagctggagccctggacgtcgttggtcccggtcgagccgatggcctgtggcgatgcagcctgcgcggtcacctgcgtcgatggcccgagccgccgtgtctcggacggcgagcagcgacacagtggctaactggttgcggcggctgtcgcgtgcttgcgagtgaccgaggggctgcgaccctggccgg

SEQ ID NO: 149552 - DNA, 795 bp, Zea mays
  Clone ID: MRT4577_67918C.1
aaaaaaaaaatttaaaaaaaaaaaaaaaaaaaaaaaaaaaaaaaaaaaggaaaaaagaaaaattcaacaacacctgctacttgagccaacaaacaacacacagcttgtcctcgccattgctcacttgggagcatccaatccaacccacaacacttcgtgactgcaatatgaagctgctcgctggaggccagaggaggaggcagaggggattcggcaaggccctcaaggagcagagggccaggctctacatcatccagagatgcgtcgtcatgctcctacgctggcacgactgaccaaccgctgggatccacgccatggggaagcttcatccaaggtcggacgagctccgatccatcgtgtcttcgcctgacgactcatcgggtgccgaagttttgggggggctcgtgctggtgccacaatggttgccggctgctgtacatagagggccagtatagtgtagtactccgacaaaaagaggtggtagcagtaggattcactctggtgttcgtcgtcagtgtctaccgtgtcattgtgtaaccacatcggtgtgatggaataccaaatcaatcaaacagagaacaaccaatggatcgctgacaaagccttcatcagattgctttcctcttcttcgtcagaaaaccagaacttgtaatctgcggaaaacaacttgtttcaatgtcttgccggctcaaaacatcatgcaacagacctgctattttctggttctgaaggtctggacaattcctgtatcagcacaagtcctttccatctttggaccctgctctcttcctttgc

SEQ ID NO: 149553 - DNA, 255 bp, Zea mays
  Clone ID: MRT4577_67919C.1
gaacatccaacatttaaccaaattttttctctcgataaaggacaaaccaactagcattacgttccttgttttggggaaaaaactatcagccagaactaacccaggcataatgactctggtggcgccgggcttactaaagaacattgggtcaaagttttgccacggcatatgcctctaaggcactgatggccaaccttccctgatggatctcggtctccctttcatatttgttggaagggttcttcacaacacgtt

SEQ ID NO: 149554 - DNA, 535 bp, Zea mays
  Clone ID: MRT4577_6791C.1
aagacaagtgagacctctccgctgatttcttcccatccaattcatcgttccagaccattgccgcaaatcaccccactgagatggttgaccattgacagataactgacccgacagcttgatgccaacctccagagaatgccgctggcgaaaacgcaaccttcgagaaaatgccatccttgcatatcacttgctccgctgaaaactgcacttacgatgaagaagattcctctttaacagcacataacaaagcttagctggagaacgaaacacctgacgcacccagatcctgcctgtgatgaaattagtgcacccgcacatggtgatctcctccttgccatgcacgtcatgatagtcccttccctactgatatctcctagatcatcgatgccttaaacatcaaactcgaggggtactcaacaacatgactaccatcatctccaataagatccagaccgtatcgcgacgactcgtccttcatcgaaggagctctttccaccataacattctcgaaaaccaccaaggccttcaactattg

SEQ ID NO: 149555 - DNA, 144 bp, Zea mays
  Clone ID: MRT4577_67920C.1
aacacatatacccatacataaagattgtatcgctttggagtggcatttcagaccactaccagcattggcgccagagtatatatccactccgcgattgttgctcccgaaatagtacactctatattgattgctactccagcaaac

SEQ ID NO: 149556 - DNA, 313 bp, Zea mays
  Clone ID: MRT4577_67921C.1
attcggctcgagacaggaggcattctcatatcagttcctgatcgttgtattccagaaggtcctgtaaatggaattgcgaggaagacggatgagcggctcctgaggcacctgccggtgcagcgccagctggcagtgcctgcggggctgtggagggggcaagatgtacactgacatggtactgaaggtgaccaccacccacactgtcagcatgggagtcgcaccatccaacgacaaggtcatggctgcctggcgctactgagcccgttacacccggaagcaactccggaccgagacctgccagcgtgccaaggtg

SEQ ID NO: 149557 - DNA, 541 bp, Zea mays
  unsure (1)..(541): unsure at all n locations
  Clone ID: MRT4577_67922C.1
gacaagctttttttttttttttttttttttttttttttttttttttttttttttttttttttttttttttttttttttttttttttttttttttttttttttttatgctgctgctcgctccctttggctcacgacaccccggggggggggggggggctctgtcccaccagaggcggggcaatgccccgtttgaacatcctagtccgcggctgctctgactgccttgcattctctaaaatctccgggcttcttttttttcttcctcctttgacgcagaggacctcgcgngatccacactcggcaggtcggggggggcggctgggggaccgctccttcttttggggagccgggtggggtgaccctttccccctggggggagcccgcttcttcagggcgttttgggttccgtccgtcgaaggcctgcgcgcgctcctgcttaggcgcggctcttccaaccccttgtcgggccctcctgcttttccttcctttcgcttgcctggacttggctaggctctcgttcggggggggggcccccgttttc

SEQ ID NO: 149558 - DNA, 372 bp, Zea mays
  Clone ID: MRT4577_67923C.1
ctgactcgttgacgcttacacggtggtttgaaagttctgcaaggacaaggactacttgggcgaccggaggggcatagggcgcctggaccatggccatggcagcgtatatgacgacgaccatatgcacgcgcgacggatgattcatacatcggtggcgacaacgacggacacctatccaaagagaacctattagggctgcgactggtgcagctagctataaacagattgataccttactgttagagtctaagaactaacgtatggtacgaaacactcgctactgagagaaatgcgagacatataagctctattgaacggtgaggtttctgggatgggacggcacatgagtgtcttcgttggacacatcttttg

SEQ ID NO: 149559 - DNA, 525 bp, Zea mays
  Clone ID: MRT4577_67924C.1
acgccggcgtacagagaggtaaggtgagcatggtgagggtccgagggctgaacgacacgctcaagtgcatgtacaaccctgagaagatcggcaagaggcatgatatgatcaaggctcagttcaaggacatgatgaagttgctgacgggcatgctaagccacggctacatggctgagttctagctcgttgaagacgcaccgatcgtgcaagatgcgtgagtcccactcaactgtgagtgctgaacaaagagcggcgttactatgccctcgctattgatatgcagcgcgagagacattgtaggatggaccgccaggctgctaccggacaggctgtttggatccatcgtcctcacaacttcggcaggcatcatggaccacgaggaggcccgccggaagagcgtaagaggcaaggttctaggtttcttctattgaagaagctgagaatctttgttatggcctgcctgcctgtcttactctctcagactagagtacctgttattttactttaatatgtctctctcagact

SEQ ID NO: 149560 - DNA, 309 bp, Zea mays
  unsure (1)..(309): unsure at all n locations
  Clone ID: MRT4577_67925C.1
ctccactgccgccccgccgccggcatctccctgcgggcgcatcttggggggggcggggggatgggactctcgcccaacttcggacgctcctgcaggacgctgcgtgggcggggtcagcgtcngatacccgctcatgatcgcgcccgtgtacgcgggcgagatttcctgcgcgcacatcgcggggtccgtcacctcggggggggagaggtgatcagctttttcatcctgattggggacgtggccaactacctgctagctaanctcccgctgggctacggctggggcgccatgctggggcctcggcgcgct

SEQ ID NO: 149561 - DNA, 268 bp, Zea mays
  Clone ID: MRT4577_67926C.1
aagcagtggtaacaacgcagaggactgggtttttttttttttttttttttttttttcaggaaagccttcagtccgtaacaaattgcttgctgtcatttggccaggtgatgccatcccaacccaaagaatttttatttttttagttctttttaaaaaagaatgggagaccaacgggggaggcgggatttaactctttaggggagccaaacgcgaaaaggacgattaggattcagggagaccccgcgtcctctgcgttgttaccactgct

SEQ ID NO: 149562 - DNA, 163 bp, Zea mays
  Clone ID: MRT4577_67927C.1
cccacgcgttagtggactcgttagccgttcacttgtgatcacgggagacttcgacgccggactgcagccttcatccgttccatggaacaagccgccattccgaaagttccaccgctcaaactctgcatacaagggcttgaagggtccaaaaatggggttgggt

SEQ ID NO: 149563 - DNA, 502 bp, Zea mays
  Clone ID: MRT4577_67928C.1
aattcggcacgaggctggcctggccgctcgaccgcggaggcatcggcgaggcgcttcagatgggcaggaacgccagccgggggcctctgcccacggtccagcaacaggaggttttctgccttctaatactcgcctgctttatctctcatacatatgactacataaataggccggttgtcgctgcccctatatagctatagatccttatctcctagaaactctcaacacactacctaactggtaaccttactagataatctcagctaatctgataactaatctgaactaatcttctaatcctatctctaactatacttatcaaccaccccttgatggcccatggctgatgctaccgaagaccacccgtgggcctacttaagccctgacactacacccctcctggacaagcagctcgacctcaaactgtcgcatcatgtatgctcaaagaccgtactgacttgacccgcatccaaactcctataagacttgccgttcacgacct

SEQ ID NO: 149564 - DNA, 341 bp, Zea mays
  Clone ID: MRT4577_67929C.1
gcgacgccatcgatactcagcctgattggtactacctggcatgcttagcacgaaacgggatcagtacttgggcttgtcatatatcattattatctcctcttgtacctaatgactatcaaattcaactgacggggacgacgccactggaccaagtgccaaacaaggcgaaatgatcaagggtgggcaagctattgagacatcacacgcgtaaaactggatgacgtttgattatacattgaactcttactgtgcttaagtcattgccctataacacctgtctatttacatacaagagagagagagaattctatgcacatgaccaccatgaccagagaccacag

SEQ ID NO: 149565 - DNA, 1766 bp, Zea mays
  Clone ID: MRT4577_6792C.1
cattgggtacctcgaggccggccgggattccttccctctttcccgatctcaattcggcacgagggcactgcctccatcatcctcccagagagagactgagagagagagagcgcagccgaggcagttcgcccgcatgtatcccgctgctgcagagatcacgcccagcttctgcgcctgcagctccagcagtagcagcaccaggggctgcagtggaaacggccgctgctagttcccctttccccgcatgatctctgccccttcccctaccttctcttgttcttgcttgcacgacccttttccttgtgcgctagctgccgcttcttcttcgtcttcctggagctccccgcatccacacatacctctaaagaaccagacaaataaacgacacagaaccgtcggagtcgtcttctactactatttccagcgatttgattatatggatgtgtgcacaggtgcacgtagataggtagaatagaagggagattatagctagctagaggcagcgagcagctcggttgctgggacacgcgatcgagctccaggcaagaagattattgcaggaaggcgcggcaggcatggaggatctgtacagcatccacccggggatctcacgcgccgggggcgccgccacggcggccagcgaggtgtccggggtcgccggcggaccaggctcgccccctcccccgccgtcgcagccccctccgccgccgccggcggatctgacggagctggtcaaggcgcagatcgccgggcacccgcgctacccttccctcctctccgcctacatcgagtgccgcaaggtgggcgcgccgccggaggtggccacgctgctggaggagatcggccgggagaggtgcgccgccgcctctgccggcggggaggtcgtcggcatggaccccgagctcgacgagttcatggagacgtactgccggttgctggagcggtacaaggaggagctgtcgcggccgttcgacgaggcggcgtccttcctcagcagcgtcaggacgcagctcagctccctctgcggcggcgccgcctcgctctcagcaatatattatacgactgctaatcccgaaacgacaagttcattcaacatcgcattagtttatgaaatggtagggtcgtcggaggaggacgaagcatgctcgggaggagacacggaggcgacggagccggggcagcaggagcacagctcccgcctggcggaccatgagctgaaggagatgctgctgaagaagtatagcgggtgcctgagccggctgcggtccgagttcctgaagaagaggaagaaagggaagctgcccaaggacgcgcggtcggcgctcatggactggtggaacacgcactaccgctggccgtaccctacggaggaggacaaggtgaggctggcggcggcgactgggctggacccgaagcagatcaacaactggttcatcaaccagcggaagcggcactggaagccgtccgaggacatgcggttcgcgctcatggagggcgtcaccggcggcgggccctcgtccgggacaacgctctacttcgacacgggcaccatcgggccgtgatcacctctgatgacaagccgtttcgaattgagggcaaattgttggttgatacggagattagttacatgaagcaatatccgctgtcattttgtcggattcattgtgtatatgcatgggcgacaacgtgtattgtcgggtacacagtatgtagtggcatgtaaagacaccgtaacaatataacatgaattgtttaattgcctgttg

SEQ ID NO: 149566 - DNA, 238 bp, Zea mays
  Clone ID: MRT4577_67930C.1
cccacacgtccgcccacgcgtccggaattagctcacttggtgatatgtcctatattggctaaattgaaacctggaattgtggggcaatctattaatagcagccttaaagtcagtaacttacccttagggaggctgggggaaaaggttagattttgtattcaggggttttttgtgtactttttgggttttttaaaaattgtttttggaggggtttatgctcaatccatgttctatttca

SEQ ID NO: 149567 - DNA, 420 bp, Zea mays
  unsure (1)..(420): unsure at all n locations
  Clone ID: MRT4577_67931C.1
cggacgcgtgggcgagcgcgtcagcacgctgcagaacgagccggtgggactgggtctggatgggagtgggggtccagagccgccggcgacgcaagcgcatgatgtgcctcagcatccgcaaccggagccggagccacgtctgcctcagcagcccgaggggccatatgtctatcagccgccgaagcagtcctcgtcgtcgtcgtcagggacgaagaggccagctggagcgtcgccgacgctcatcaggaggaaggagaaggcgaagaagctgctggcggtctgcttaaccctgtgctgcatcctgttctggcttctggtggtctgcatcgggctcgccatcctggtggtgtaccttctgtaccaccccaaggggccccggatccacgtgagcaccgncacgctcaacgccgggtacatcga

SEQ ID NO: 149568 - DNA, 231 bp, Zea mays
  Clone ID: MRT4577_67932C.1
tcgggcacatttttaactttctgaagcctagggagccagggcaccgccggcaagggagccgaaatggttgcattggtagctcttctagctatttgcgcaagcgccactcatgtgacccatattttagggcccttgccaccaattgtgcccatgggtaccatgaaaccatgcctgcaggactgacaggggccacacgggcttgtcagctttatggcccttacgctcctgaaa

SEQ ID NO: 149569 - DNA, 842 bp, Zea mays
  unsure (1)..(842): unsure at all n locations
  Clone ID: MRT4577_67933C.1
agtcctcccaccgattcgatcgcaacctcgcaaccacgactatcgatcatggccgacgcagtccgcgacgggcagacggccctggcgctccgcctcgccaagcacctcgcggaagacggcttcggcggcaagagcgagaacatagcgttctcgcctctgtcgatccacgcggtgcttgcgctgcttaccgcgggggcgcgcggtgccacggaggcccagctgctcagcttcctcggcgcgccgtcggcggctgatctggccgccttcgtgcggcgcgtggcggaaaccgtcctcgccgaccagatggaggacgagagcgccccctgcgtgctcttcggcggcggtgtctgggtcaacgcttcctgcggcgggctcaagaaagcgttccgggatgttgccaccaagtcctacaaatcccaggctcgcaccgtcaacttcgccgacgctccggaggaagcagtggagatcatgaacgactgggtgaaaaaggccaccaacaacctcatcaactccctcttttctccaagcgacatcaaagctgacaccgccctcgtggtcgccaacgcggtctacttcaaaggcctgtggcgcaatccgttccaccgggccaacacggcgcctcgccactcgccagtttcaccttctcgacggcagctgcgtcaaggcaaagttcatgagcaagtattctcaatcccagtttatctccttgcgtggatggtttcaaggtgctcaagcttccctatctgngcccatggaaaaccaaggcagatgccgcccacgcagcttctctcaggncgtcgccgcggtcccagcgccgctgcagctgtcgacgctgatgacct

SEQ ID NO: 149570 - DNA, 465 bp, Zea mays
  unsure (1)..(465): unsure at all n locations
  Clone ID: MRT4577_67935C.1
cattgaaaaagaacatcgtggtggtgaccttacatacatcaagtgacggtcccagaatttgaatttaaacgttaacatatattatagtttatattccggtactacatatgtttaatttatatatttttggtacatgaggaaaaaaaaactaaaatatttttaatgtttttataagannagannaggnngcaagnngnanagannaaaanatntaaacctagacgctaagaagnagnnngnnnnaaggcnaaanncnagagcagncgcaggccaagccngancnggggaancngaccannnggnccaacaggncnaagaaggaacnnnannggcccgcccgaagacgggcgncnggacgcgagcngcaaannaacancgngaagcanccgnnccaaggganggcaanggcnacccgaaacccgaaacccgangggnaaaaacccaaaaagggcacgggnanggcgg

SEQ ID NO: 149571 - DNA, 371 bp, Zea mays
  unsure (1)..(371): unsure at all n locations
  Clone ID: MRT4577_67936C.1
cctcgagccggccggaacagcgtcnctaagcaccggtccacactttcacgctcaggcgctcagctctagcaatggctgcctccaccatggcgatctcctccacggcgatggccggtacccccatcaaggtgggctccttcggcgagggacgcatggacgaggcgcaagaccgagaacgagcccaaagaggacacatacataggagagcaagaacgcccacagatagctcaaagcaatcaacaaggtgaacatgatcgaagcgcaaacaaccaccgaccacatccttcagcaaggacgcggcgaaccatccacccacgaacaagaaacggagacaccggcgccatcaggggaccatattttttccccccccc

SEQ ID NO: 149572 - DNA, 255 bp, Zea mays
  Clone ID: MRT4577_67937C.1
acccacgcgtccgctcggacacggtcacaacatagcttgatttcgtgcttgcccttactgaaggggactctggccagctctgactgccgactgtcgtctacaagaatggcatggtctagtccatccacgatgcttgtgttctgatcaagcctggtcgtatcaaggtggcaaggcatactggtggacatatcctatcgcatggtcacggtcgatatagattaccacatcgaattttgcctcaacagcgatttctgt

SEQ ID NO: 149573 - DNA, 181 bp, Zea mays
  Clone ID: MRT4577_67938C.1
gactgttatagctcgcccatgtaaaggaccataggatgggctagatctcaattgctatggcacatataaccgcaccaggcgctcctgtaaccgaaaatcaaggccggacaaagcaaggacacccaagtgtgcaacacacaaggcgagggagcttaaggatgatgcagaagacagagacgac

SEQ ID NO: 149574 - DNA, 599 bp, Zea mays
  Clone ID: MRT4577_67939C.1
aattcggcacgaggcccaaagccgttgccgttgctgccccacagcgcgtgccctgacctacatgaccatggagctcgcagagcttcgagctgtgggcacctgcatccgtacgggcctgttgcctgctaccgagaagcacgccgcgcaggtctctgctcaaggagacggacctctagccctagcacgaccctaccctaagcgctggtagccagggcggcaccgctacctgctgtccatggcggcacgtttctgctacatgcggggggaggccctggggaacctctatgataaaggttgacacgatcccatgcatggcaagctcgtccatgccttcgtgctccgccaagctccccttccctgtttcaggaacctaaaatgttctctagtcctcatataatggttccccgaactcgctcagcaccctgtctgctgggggccattcatctctgcagcttccatggggaggcactgacgttagttaacatagagtggaatgttttaggacatcacacaccaggtgtttggagaaaggtccaagctaaaaatcgctgtggttgtacaatatatttggtacagggtatttagctgaactgacacat

SEQ ID NO: 149575 - DNA, 159 bp, Zea mays
  Clone ID: MRT4577_6793C.1
gcgacgaggcgagacacggggagccccagcgagcccccccgccccggccgccgcggcaggaccggaaccgccaggagcgacaacacaggagaatccaagggaccacgagacctaccaaggaccaacggagaggatgacgacaaccgaagaaccgacacc

SEQ ID NO: 149576 - DNA, 547 bp, Zea mays
  Clone ID: MRT4577_67940C.1
ggcgattgggtccctcgaggccggccggggtgagtggattccgagggccgccgcggttgcaagaactgggctgtggtgcacgccgaagcgaaccatgggctaatagagcgaaggtagtgcttggagttcgaaggaaagtttgccagagttcacgtctcgtggggaacttcactgtgtcgacgatggccagcctcgtcgtcgattgtgtcgatggccagcctcgtcgttgattgagcatcgcggccaagtctgttgtgaccgggattcttcaacacgttccacctcgagcagtgaggtcacgagtcacctgaagatcatcctggtacctggaatctcaagtcccaggtcaaaaacaggtaccacaggatgaggcgcatggaggatgctgtgatgagttcgtgagaggtctaggccgtcatctcccagtcaactttgggttgctggaccgttgtctccctataatgtaattatttattttgtatagaattcctgttatatataaagatgtgacattcgatccaaaaaaaaaaaaaaaaaatttgcggcc

SEQ ID NO: 149577 - DNA, 671 bp, Zea mays
  Clone ID: MRT4577_67941C.1
ctaaccgagcatgtctatgggtacaatcccgtcccctacggagctgcagataacaatgttggcagggataaatcaaatgctggcgccctagccaaagctctgtacacgtcgatcgccatccctatgctgctgtgctgcttcatctactccctgttgtaccggacgtacccacgagacagggagagggcaaggatggactctctgatcactccagagctccagcagattgaactggaaagatgtcatgggcaagtggattattattctggaaggaaggacggctccactgtgttcgatatggattacagaggaatcgacgcctatgatgacaatgacgagaagggattaatcgatcagcaggctaagcagagcggcaatgtcaagtggcacaggagtcattcacaaaacttgtgacggttttgccaaagtatcagtgctgtcggatctgtacaaaaaacgtgagtgagaccgagttaccctctcgaaggacgattacatagggttgtttagatagactcagaagcatcagaacaattcggttatgttcagcattatatatataataatagtataagactttcggaggaatatggaggtgaatatatatctgtatttgatcagaccgacgaggctactatacaaattatgtaatcagtaaaacacatatgtac

SEQ ID NO: 149578 - DNA, 144 bp, Zea mays
  Clone ID: MRT4577_67942C.1
ctatggaagatatggaaatatcacggtcacttagacaattgagacattcaccaggttcagtgggaaagaagcaccattcagaggtttttgttggtggtggattcaaatgtatgcgaagaatgacattcttttccttgatttccc

SEQ ID NO: 149579 - DNA, 105 bp, Zea mays
  Clone ID: MRT4577_67943C.1
agataactctccagctgatacagcaatgatacaaaagctcgctcgaagaatcgaatggatggagcactgagaggagcccatgaattgggacagccaggtggcgcg

SEQ ID NO: 149580 - DNA, 876 bp, Zea mays
  unsure (1)..(876): unsure at all n locations
  Clone ID: MRT4577_67944C.1
tcctcgcgtccgctccgcctcctccgtcgatttggattcgcagcggcggcggcggccaatcaaagcaatcatcacccagtcgcccagcccaacagacgctccagtccccagccctcccacccgcatcgatcgatgcgaggcacaatgccggccaccgactcctcctcctcgtcgtcgccggcggcggcgccgctgtcctccatcggccgctccatccgctcgctccgccgtgaccagaaccagatccactccttcccgccgccgccagacgccacagacgccttccagcgccgcgccgcccaactcctggccgacctcccggcagccgacgacgtcctctccctcgcctggacgcgccgcctcctcgaatccttcctcctctgcctcgaggagttccgcgccctgctcttcggctccggggactcgcccgccgcgcgccccccgctcgaccgccttgtcgccgacttctccgaccgcgccgtcaaggcgctcgacctctgcaacgccgtccgcgacggcctcgacctcgtccgccagtggcgcaagcacctcgccatcgccgcagccgtcctcgcctcgtcctctgattcctcctcgccgctcggggaggcccagatctgccgcgcccgcaaggcgctcaccgacctcaccatcctcatgctcgacgacagggaccggcgggggcgtcgtcggccagcgcaaccgatccttcggccgcgccaacgagaagccccctcgccaccaccgccggagcagcagcggcgggagctccggctccggctccggctcccacntcaggtccctctcctgagcgtgtcccggcctggtccgncgcgcgccagctgcaggccatcggggaggactccccgtgccccg

SEQ ID NO: 149581 - DNA, 324 bp, Zea mays
  Clone ID: MRT4577_67945C.1
cccacgcgttcgcccacgcgttcgcccacgcgttcgcggacgcgtgggttttttttttgtttttttttttttttttttttttttttttttttttttttttttttttttttttttttttttttttttttttttttttttttttttttttattttattaatttatttttataatggttaaatgatatttgaaattgagaaagaatggttgttgctgctgaataaatgtacattgagattgagattttgtttaaaaatgtttaaagttcaaaataaccgggtactgatgggaggacaatattggagatttttaaaaatgctgtaaaa

SEQ ID NO: 149582 - DNA, 207 bp, Zea mays
  Clone ID: MRT4577_67946C.1
cgcgcgcatgcgcaccgagaggctgttgtatctcgtcacctgacttgaataaaatgcgcacggtgtgacaacctcccgactgggacaaccctgactttacctaactaactcaccgtaggatctatcagctctgtgtctagtgttgtatcactaaaaagcacgaagcgattgccgttgtgaaccctggcgcaggctgaatggcgaatg

SEQ ID NO: 149583 - DNA, 1852 bp, Zea mays
  unsure (1)..(1852): unsure at all n locations
  Clone ID: MRT4577_67947C.1
ccggccgggaanaaaatccgctctgcaagtcttcgacaaactcgcatcacgagacgagaactcaaaactgccaaacactgcacactcgggactgggccgtttcagtgtcacttccgccgccttctccctcaatcaagagcgcccgtcccctcgcccgcgcgccccgccatggccgcgccgtgcggtcgcggcggcggcacgctgacgctggtcctcgtggctctctccgcggcgttcctcacctacaacgtgctcatctccttccactcctccctccagcccctcccttcctccttccccaccgccaccgcctcccgccgcttcggcgccgcggggtctgccaggcggagggcgttccacaccgcggtgaccgcgtcagggtccgcgtacaacacgtggcagtgccgcgtcatgtaccactggttcaaggaggcgcgccgggcgccgggcggcgacgagatgggcgggttcaccaggatcctgcactccgggaaacccgacgagttcgtcgatgagatccccacattcgtcgccgacccactccccgatggggatcagggatacatcgttctcaataggccatgggcatttgttcagtggctccagaaagcagacataaaggaagactatattttgatggcagagccagatcacataattgtcaagcctatcccaaacttgtcgagagatggtcaggcagcagctttccctttcttttacattgagcctaaaaaatatgagaatgtgttgcgtaagttcttccctgaagacaaggggccaatcactaagattgatcctataggaaactctcctgtcattattgagaaggaatctcttggaaggattgcaccgacttggatgaatgtttcattagcaatgaaaaaagatcctgacgcagataaatcttttggctgggttcttgaaatgtatgcctatgccgtggcatctgctctccatggagtgggcaacatcttacgcaaggactttatgattcagccaccttgggacttggaagttggtgattcttttattattcattatacttatggctgtgattatgacatgacgggtaagctgacttatggcaaaattggtgaatggagatttgacaagagatcatacacggacaaacctccacctagaaatttgccgttaccaccacatggtgtagctcaaagtgtggtgacacttgtgaaaatggtcaatgaagcaacagccaacataccaaactgggactcctatgccgctgctttttaacctgttacaaatttggctcacaattttgtttgccagatatttccattccagctgactttgatacatgataattgcctaacatggaagatgagtggatgatacagtggaatgcataccaggttttacacaaggctgccggttccttacctttctgattgaatcctgataatatatggtgcaatgccatccctttttctcctaattttgttaaacacatgcacatcagcacatgacacaatatgtcaaaacacactcacctttggtgaaagctgcaatgtagatgactgagagatgtgatgttcttatctggctctgaatgtgcttattagaagaagaaaaaaaagagtcaggcgctgctctgacaaacgcaaaacctcctgtgtactggttttcctaatgcttgatttactcgattattcatttggaatgaagctgtgaaaagttgcatcaatcaaactcattgtgcaatataagccgaccctctggaggtaccaacaacttttgtgagacatttatttgttgtttatttacgtaattatttgtttatttgatctcatacaaaattcagccaaaaaaaaaaaaaaaaaaaaaaaag

SEQ ID NO: 149584 - DNA, 483 bp, Zea mays
  Clone ID: MRT4577_67948C.1
gatgcaattggaagactgcgttttttattcgggaatggaaccaaagccacacattcccccagaaactagcccaagagaaaaacacacactccaaacttagaccacatctagccaacgtcttttcccaccagagacaggctaacctatcactaacaccatggaacagggggtgacacccatattatagaaagcagccgtctcatttccctctctgagaccctggaactatcaaacgacctcattctgcgctttcaagatgggtacgtttgagcttgatagccgacaccatattagccagggctggcttgaccttcgggtactcgcctgtcttgagaccacagacacggttcacccataggatgctggtgtcaagcacggggagcattttatgaacgcggtctgggacctcctccctggatggaaccctacctgagaggatgtcttagcccacgcgtgcctggcacgcgtggacggactcgacct

SEQ ID NO: 149585 - DNA, 368 bp, Zea mays
  Clone ID: MRT4577_67949C.1
ggcagttttacccacgtccgtcaccttggtgctcatgtattttgtggatgtccacaatccacatgaacggtatgagaagaaattcctagacgctttctccctcattgctgttactgttgctggatacttgatgattctcataatctatggtcaagttttcccaataagctcagctgtgcagagcgtttgtttcgtggtactcctgctactagtgatgtctccaatagctgtggctgcaaaggcccagacgccagaatcaatagctcatcaaggatcaatctcagaacaaagggctggactgctccgcaaagaggtcacagaggattctgaaaatgctagctcaagcactactgcgcttgggggatcta

SEQ ID NO: 149586 - DNA, 280 bp, Zea mays
  unsure (1)..(280): unsure at all n locations
  Clone ID: MRT4577_6794C.1
ataagataactaagatagaatctctacatacggaatcactaaatggttgtatattccaatataaattgcacatcatttcgtctggataagtcaacatgagaccacttttgctaggatatttgtatttgtagatattgggacacaaaactaaaaatattatgagtcttagctaaactccttcagaggcacatttatatangagcntacccgatttgtntttttagcttccagcacttccatattccgctcnatgtgtatttttttcttaatatcactgtac

SEQ ID NO: 149587 - DNA, 336 bp, Zea mays
  Clone ID: MRT4577_67950C.1
atcccacgcaatatatatatctgcaaacatttcaaaatctatttattatggggacatctaactttctacacatattttgtacaaccccccatacatcaaaacttgtaaaactaaatctcctatgccaatgctatcctattttttccctatacaaatatttttccaagccatcggatcttcgggtacacctcacctcaaaaattttcctttgggaaatggaaccaccttgtggttatctggcttaattctttcaaaaaaaccttgactttttttatgagcctccgaaatccacaatagaaaactcctattccaaaatttttgtgtcccctggccaaa

SEQ ID NO: 149588 - DNA, 2353 bp, Zea mays
  Clone ID: MRT4577_67951C.1
ggtcgagatgcccttagccggagaagccacgattcgcctcccaacgctactacccctttccttccaacttccgtccgccggcgccagccgcaaccgaacaatccaagcaacgcgtcaggcgccgccatggccacgtggcgcctccgccgcgccggtgccgccctagctgcctcctccaccctcgccgctgtcctcgccgcctcatcggcttccgccaccgacccgtccgccgccgccctagaagcggcaaggcagcgtgttgcgcggtcgggggccacgccgcccctgcgagatgcgcagcgtgcggcgctggcagggtccacccctgctgagcccctagacgtactcgtcgttggcggcggcgccaccggatgcggcgtcgcgctcgatgccgccacccgcggactccgtgtaggccttgtggagcgcgaggatttcgcttctggaacctcctcccgatccaccaaactcatccatggcggcgtgcgctacttggagaaggcagtgttcaatcttgattacgggcagctgaaacttgtttttcatgcacttaaggaacgcaaacaggtcatcgagaatgctccccatttgtgccatgctttgccatgcatgactccttgctttaactggtttgaggttgtatactactggtttggtttgaagctttatgatcttgttgctggaagaaggctactacatttgtcccgatattattctgtggatgaatcagttgagcttttcccaacccttgcaaaaaacggacataattgtagcctaaaaggaacagttgtgtactatgatggtcaaatgaatgactcacggctgaatgtggggttggcatgcactgctgcagttgttggtgcagctgttctcaattatgctgaagtggtctctctcattaaggatgaatcgggggagagaatcattggtgcacgcgtccgtgacacactatcaggtaggtaaggagtttgaaaccttcgcaaaggtggttgttaatgcagcaggaccattctgtgactctgtgaggaagatggctgacagtaccgtagcacctatgatctgtcctagtagtggtgtgcacattgtacttcctgattactactcccctgaagggatggggctaattgttccaaaaaccaaggatggcagagttgtatttatgttgccatggttaggaaggaccgttgcgggaacaactgattcgaacacagcaataacaatgcttcctgaaccacacgaggatgaaatacagttcatattggatgcaatctctgactatcttaatgttcaggtaaggcgttcagatgttctttctgcctggagtggtatacgtcctttggcgatggatccatcagcaaagaatactgagagtatttctcgagatcatgttgtatttgaagactaccccgggttaataacaattaccggtggaaaatggacaacctataggagtatggctgaagatgctgtaaatgcagcagtcatgtctgggaatttgaaaccagccaatggttgtttgactgataatttgcatattgttggtggatatggatgggaccctgcttcttttacggttcttgctcagaattataagcgaatgaagaagacatatggtggcaaggttattccaggtgcaatggacagtgctgtatcgaaacatttatcgcatgcatatggatctttggctgaacaagtggctactattgcccagaacgaaggcttgggaaagcgccttgctcatggatacccatttttggaagctgaagtagcatactgtgctcgttatgagtactgtgaatctgccgtggattttgttgcaaggagatgccggcttgctttccttgacacagatgctgctggtagagcattgccccgaatcattgaaattttagcttcagagcacaagtgggacaaggcaaggaagaaggcggagctgcagaagggtagagagttcttggaaacattcaagtcatctaagaacgcccaattccatgatgggaagcataatggacgttcatgaccgaatatgcagttttctgaataagtgttgattttacacatgaacaagcaggctccgatacaagagtgagcctgcgaatgcagaaaggtttcgtttccacatttctacgcatggctgtgaaaatcggcgtgctggtttccagcagaataagatgtggtcacggcactatgtaattgtaaataccacatcatattagtcgattttgaaataaactggaaccaagaatttgtacttttaattgttattcttgcatgttatatagttgaaaagaggtgcaaaatcgacatggccatttcctttcgtcgaaaaaaaaaaaaaaaaaagcggcccccc

SEQ ID NO: 149589 - DNA, 321 bp, Zea mays
  unsure (1)..(321): unsure at all n locations
  Clone ID: MRT4577_67952C.1
taattcggcacgagggcgacatggaggacgggttcaatggcgacggcccccgcacccctctcgctctccgcctccaccctgcccgcccggctccgtgccggagtggtaccggcgggcacacggtggaggcagccgcggcgcgggcggatgttgttgtgcgccaagatccggtagagggtgagggcggctcttatctccaccatgacggagggaaagatcgtatggggggggggtgggcgaccnanaccgaggatacaaaaacgatgctggtgtgggcgtcnattctgacaagggcgccntggacgtcaagagcttgcctga

SEQ ID NO: 149590 - DNA, 287 bp, Zea mays
  Clone ID: MRT4577_67953C.1
gccatttaccttttacctcttacttgaaggcagaatcgcaaaacgtttgaaatggcttttctaaactactctactctggtgagagctcatttaccacaagaagccttataacaaagtatattttgtaataaccccgtagatactgtacctaacaaaacatgactcgtattagctctataaaatatttgtggcttaggattttttttttacatatatcgttttataactttccaggaactaagcacattatctgataattgttgtaaattttgttttcagtgctttag

SEQ ID NO: 149591 - DNA, 719 bp, Zea mays
  unsure (1)..(719): unsure at all n locations
  Clone ID: MRT4577_67954C.1
tattctctccttggcggtcgcttccttttagtttccggtggcgccctccaagctgccagtctgcacggcaggagtcgcaggactgagcaaggagccaaggagatgggaggagaccagagaagaagcgggcaactggacgtctggatggacggcattaaagacatccatcacccaaccgcagcaccttgaaagccttagtagaagtgatgcagggatcacaatccgaacaatcagcacagcacagaatggaatactaagcacgaaacaaagaacatgttgtcggaataacatttttcttaacaacaaaaacaacaggttactgactgcactaaaaagggctggtaagagttcgggactacaagtggttgaggatctggacgagcaggaggaggacaccaggatctcgtgctcctccccgcacattccatcgtcgaccacgggctttcctgactgatggttctttctacaagggacatgaaacggaatcaagctagacgatgtcaaactaaccagatgagtaactctaaagaagctgctactgctgctgctccatgactacacagggaaatggaaaccgtatgtacagtttcagtgctgtaagctttacttctccatgaccatggcgtcccccgtgtaggtctcgtcgcgggcaccggggcatgcgacggcggccgccgactagtgagctcgtcgacccgggaattaattccggnccggta

SEQ ID NO: 149592 - DNA, 583 bp, Zea mays
  Clone ID: MRT4577_67955C.1
ttttcgcatcatactgtatgagatgatgaacactgccaagaaaaaggctgacgtgcgctcgagggataaaagccttatgctctaatactgttggggagatccatttgtagggcctgctggacaacaccctcgttattactgggcatatggtggattaaactgacctggggttgaattttcagaacgaaaacctggcgctgcatgaatgtttattagctccgggcgcacaacgcggaacctttgccagcaccattcctagctttggatggaatgccagaagattcttcctcagggcttgaagaggcaatgccattacatggagctgctctgacctttgaaactaggaacgaatgctgggggctgtggtaccattgaaagagacggtgagagctgctaatccagacgaaggagatgctgccactgatgaactaattccagaacttgtgaccgaatgccggacataccagaaaaagagcatgacttgagtgggcttagtgagggaggaagaactctcgggccaagctctccgatttacacgatagatcacaaatcctgtctgataaacacgattggacaacatcgg

SEQ ID NO: 149593 - DNA, 518 bp, Zea mays
  Clone ID: MRT4577_67956C.1
gcacgaggcaaggtgtcgtgcagctctagcaagcgtcacgaaggaatggccatgacaaggggcgcaataaagatgtgcactcaaccaagggcgacacgcgaggtcaacaatgacacctgccactactgtggaaagtctaggaactaggcccacgagtgccgaacaaagaagcacgatgaggcatagacaccaacaaatcaagcataggccaacctcactaaagcagaggaggattcaccttttctattcatggtggtggtgtggccgttagagagagttgttcacaatgtgaattgcatcgagcatgtcttcgtcaacaagcgcaaggtcgtggcggacatcgacaatagtggtgaccatcaggagatgaagtggtacctccacattgaagcatcgaatcacatgacaggtgacatggccatcttctctgagctcaaccatggtgtcattggctctatgtgtctcactgatggttcactagtgaagatcgtcgggcgcgacatgatcctattcgagtc

SEQ ID NO: 149594 - DNA, 428 bp, Zea mays
  Clone ID: MRT4577_67957C.1
aatataagtttttaaactgcctaaaacttacattcttaacaggacggtcacacggaatatttaaaatacagcaaaggggttgtaacaacaaggcaaagcaacaaccttgggaggaacgataatatatataaaagcgatgacaataccggtataccattcatactatttgaaaggacgcatacataactgcgcaagcaaacgagtatggatcgtaaacacaaatacaaaggacgcgcaactgatataacttaagagggatagggagaagtataatggataattcataatggcaaagttgagattggaatatgagacacaaaccactgggttcaaaccaaattgtgttgcatataggactggctttgcatagtaggaccatcgatatgtggatattccaggaacacgttaccaactgctacaactggatg

SEQ ID NO: 149595 - DNA, 436 bp, Zea mays
  Clone ID: MRT4577_67958C.1
ggtacacgagaacgcaagctgctgccggaccacacttcccgggatccaaatcccgcgacagcaagaggctcgtagcgacctgcggtgctaaggaacgcagtgctttcaaaattggcgtacgctgttcgcctcttctcccgggagtcttatacctcctcccagaagaggagggaagcacagtatgaagactttggagactcaaccgttagctccggactgctgttccttagaccaggatccagctccggcccatccttctccctacgcttccccgatggataaaaatgccgaccctgaactgatgccaccgtctctcgaaagggaggatccgcccctgttggccccagatcctgtggctggctcagctgtgccccacgagctaggggagggggaccccgtttctcttttcactcccctggaaacaaaatttggtgct

SEQ ID NO: 149596 - DNA, 457 bp, Zea mays
  unsure (1)..(457): unsure at all n locations
  Clone ID: MRT4577_67959C.1
tcnaataccttggatgctctntnncacttttgttcctactagattagattctgagacctgagtcaatgtttgtgagactaatatatcaggtcagttgcatctcataagttcctgccaaatttttgcatttgtgcaactacgtggtggtggcttacatatcacacttagaacttttgtgtcaggtgaaattcacgagctgaatgttgcagagcctatggagtctacaagaacattaccccagtggaaaaaaggtccgactatacctagaacgccacgattatgttcgagcacaaatgttatgaaggacaaccacagctacagtatttgacgcagatccatcaaaggcaaaaaagaacccaaaggagggtgacaacattgcttacgatgctcctgcagatatgtcatgccttctagaattgaaggcgatctactatgaactgatgatttgggaactact

SEQ ID NO: 149597 - DNA, 197 bp, Zea mays
  Clone ID: MRT4577_6795C.1
caggaccgtaggacggcccatgacctagagaaaaaaccggcggcgcatccgaagagaaccccaccttgaacgaatagcgtcatgcaccgagacgaccttagcgcacaagattcatgaccaagcaaaggagcggtgcactttcacgaacaagatacatggcttgcatgaaaagtttctgttcagtttggagaacatac

SEQ ID NO: 149598 - DNA, 246 bp, Zea mays
  Clone ID: MRT4577_67960C.1
gttcctggtggcggcagaaccccgtgctgttggtgggccccctgctgcacgcgacggagaacgccagaatagcgcacatgctcaaggacctggacggatcgaaccgcaccttcgacaacgcccagcaggcgtacgtggacgtgcacgacgtgaacgacgcgcacctccacgtcttagagagccctcgcgcgtccgggcgccacttatagtcctagcgcgtgctgcagagtgaggagcgggtacgga

SEQ ID NO: 149599 - DNA, 611 bp, Zea mays
  unsure (1)..(611): unsure at all n locations
  Clone ID: MRT4577_67961C.1
gcgttcggcggnaccccgnccgcgngtatgggngacatcttcgtgaagaagcccaagacactgacgtcgatagggccatcctcaccctcaagacgcagctttcagctgaggatgaagaagctgtcatggccgagtttgaaaatttggaagctcagcttgccgttgagtctttgccagacgctcctgctaccgaagtaaggcctgaagagaaaacgaaagctccggctgacacagaagctgctcctgaggacatcgatgacgttattgagcttcctgatgtgcctacgaaagtgccagagaggcctgaagctccagaaaaaaacaaagttttggaggagccgctacctgcataagtggatggagctgagatgaatacggcacacttttagtttgcaggaaattgtaacatacccaccatttcattgtactatctcattctcagaatttcatcgtgtacagcaagaaaaatttgttgtctttgactatcagttgtcaccagtttggatttctcagtgcccgtttattatcctatcctacggggtaaacataatatttttccattgtgtttctttgtaaggcagaaatgctgaagtctgcaagcacataccttg

SEQ ID NO: 149600 - DNA, 307 bp, Zea mays
  Clone ID: MRT4577_67962C.1
accacaccggactatctcgggctctagaatccgccgacctatctcataggacggaaactgtggccgctcccactccgaccggattcggtgggacgggggcgtgcattcgcccgcgataccgttgatgaaactgggtcaacctgtgctcgaacactacaagctgatcctgatactgatccaggaagcgctatcgagatttgtaaggacctgagacactacattgcaagctcttccgtcacaggacgttggacgaagaagcaaacatgctttaccggggatatgcttaccatgtcgacctcggtcgagc

SEQ ID NO: 149601 - DNA, 176 bp, Zea mays
  Clone ID: MRT4577_67963C.1
agcccgtgcgctgaaattttggtgacggtgcgtaatggactcttccttaacaaaaaaccggccacgcttgcgccggataccgacaatggagaggactcttaatttgcaacggcagcaatgagcatgtttcgcgctgtgtgcatcatggccaacttacctcacaactcggcgggcat

SEQ ID NO: 149602 - DNA, 221 bp, Zea mays
  Clone ID: MRT4577_67964C.1
ggcatcacagttcaggtccgaggactagtcagtccatcgcgttcgcgtccacggtcagttgccggcgccatgcctggcgctgctcaggcgtggccggctggggtgcacgatcggcgacggcgatgtctcgcgaggcgcgtctcggagtcggagtcgagggggaccagccgagggagagaacgcggccgctgacggcggcgaaggggtcgggttcaggtcag

SEQ ID NO: 149603 - DNA, 1311 bp, Zea mays
  Clone ID: MRT4577_67965C.1
ttgggtacctcgaggccggccgggacggtccctggcaaaaaaaaaaaaaccctgccccgccggcaccgaacggctactgtaaatgtcgtgaccgtctcgtccccgtccagtccaccttttcctcctctccgactccaccgccgtcacgccatctcgccgggggcggaaccccgaccgcgagtatggggaacatcttcgtgaagaagcccaagatcactgacgtcgatagggccatcctcaccctcaagacgcagcgccgcaagctcgcccagtttcaacagcagcttgagaaggtaatcgaagcagaaaaggaagctgcacggcagttggttcaacagaagaagagagacagagctttgattgctctgaagaagaagaaagctcaggaagagctgttgaaacaagttgacacatggcaaatgaatgttgaacaacagctggcagatattgaactagcaagtaaacaaaaggctgtatttgaaagcctgaaggctggaaatgctgccctgaagtctatacagaatgagataaacattgatgatgtccaaaagctgatggatgacacagccgaggctaaggcttatcaagatgaaataaatgctgttctgggcgagcagctttcagctgaggatgaagaagctgtcatggccgagtttgaaaatttggaagctcagcttgccgttgagtctttgccagacgctcctgctaccgaagtaaggcctgaagagaaaacgaaagctccggctgacacagaagctgctcctgaggacatcgatgacgttattgagcttcctgatgtgcctacgaaagtgccagagaggcctgaagctccagaaaaaaacaaagttttggaggagccgctacctgcataagtggatggagctgagatgaatacggcacacttttagtttgcaggaaattgtaacatacccaccatttcattgtactatctcattctcagccataccagaatttcatcgtgtacagcaagaaaaatttgttgtccttgactatcagttgtcaccagtttggatttctcagtgcccgtttattatcctatcctacggggtaagcataatatttttccattgtgttcctttgtaaggcagaaatgctgaagtctgcaagcacataccttgttccgtatgaatatatacgtatgttttttttgtgtgccaaagctgtaaaatgtacggcatttgtaggtgccacttgttgcttgaatttaattggtggaccgtgtaagatagaatactcaaatcagagcagtctgtctgtatcgagtataaaaaaaaaaaaaaaaaagcggcc

SEQ ID NO: 149604 - DNA, 530 bp, Zea mays
  Clone ID: MRT4577_67966C.1
ggcacaaaaaaaacacacgtatatattcatacggaacaaggtatgtgcttgcagacttcagcatttctgccttacaaagaaacacaatggaaaaatattatgtttaccccgtaggataggataataaacgggcactgagaaatccaaactggtgacaactgatagtcaaagacaacaaatttttcttgctgtacacgatgaaattctgagaatgagatagtacaatgaaatggtgggtatgttacaatttcctgcaaactaaaagtgtgccgtattcatctcagctccatccacttatgcaggtagcggctcctccaaaactttgtttttttctggagcttcaggcctctctggcactttcgtaggcacatcaggaagctcaataacgtcatcgatgtcctcagcttgccgttgagtctttgccagacgctcctgctaccgaagtaaggcctgaagagaaaacgaaagctccggctgacacagaagctgctcctgaggacatcaggaagctcaataacgtcatcgatgtc

SEQ ID NO: 149605 - DNA, 1334 bp, Zea mays
  unsure (1)..(1334): unsure at all n locations
  Clone ID: MRT4577_67967C.1
cagaccggcacgagcgatggcaccgggggtgggtataccaccggagcacgacacggccagcagaccctgccccggttcaactgccgtggccgtctcgtccccgtccagtccacctttccctcttcctctccgactccgccgccggcggaaccccaaccggcgaggatggggaacatcttcgtgaagaagcccaagattaccgaagtggacagggccatcctcaccctcaagacgcagcgccgcaagctcgcccagttccagcagcagcttgagaaggtaattgaagcagaaaaggaagctgcacggcagttggttcaacagaagaagagagacagagctttgattgcactgaagaagaagaaagctcaggaagagctgttgaaacaagttgacacatggcaaatgaatgttgaacaacagctctcagatattgaactagcaagtaaacaaaaggctgtatttgaaagcctgaaggctggaaacgctgcccttaagtctatacagaatgagataaacattgatgatgtccaaaagctgatggatgacacagccgaggctaaggcttatcaagatgaaataaatgctgttctgggtgagcagctctcggctgaggatgaagaagctgttatggctgagtttgaaaacttagaagctcagcttgccgtcgagtctttgccagacgctcctgttactgaagtaagacctgaagagaaaatgaaagctccggctgacacagaagctgctcctgaggacatcgatgacgttattgagcttcctgatgtgcctacgaaagtgccagagaggcctgaagctccagaaaaaaacaaagttttggaggagccgctacctgcataagtggatggagctgagatgaatacggcacacttttagtttgcaggaaattgtaacatacccaccatttcattgtactatctcattctcagaatttcatcgtgtacagcaagaaaaatttgttgtctttgactatcagttgtcaccagtttggatttctcagtgcccgtttattatcctatcctacggggtaaacataatatttttccattgtgtttctttgtaaggcagaaatgctgaagtctgcaagcacataccttgttccgtatgaatatatacgtgtgttttttttgtgccaaagctgtaaaatgtacggcatttgtaggtgccatttgttgcttgaatttaattggtggagcgtgtaagatagaatactcaaatcagagcagtctgtctgtatcgagtacattgaattgcctatataaggtgcctttttttgttttaaaaaaaaaaaaaaaaaaaaacaaaaaaaaaaaaanagg

SEQ ID NO: 149606 - DNA, 307 bp, Zea mays
  Clone ID: MRT4577_67968C.1
cccacgcgtccgcgtgttcgtgtcctggctgccggagaaccaaaggacatgctctgcatatgctccccctgatcgagaatgaggatcatggaatgtgttcgatgcgttgcaggtgttcctgctgctgctgttctgcccgatcaacgtcgtgtaccggtccagtcggtttcagttcctcaggatactgaggaacattgtgctgtcaccgctctacaaggttgtaatggtagacttcttcatggccgatcagctttgcagccaggtgccaatgctacggagcctggagtacctggcgtgctattacatc

SEQ ID NO: 149607 - DNA, 303 bp, Zea mays
  Clone ID: MRT4577_67969C.1
ccacacgagtcgacactcgacttaagcccgctaaccgctcccctatgttccgtccccatattctcggggacctacccggcaactatcagctcaacaatagcgccgcaaaaccaccggctcaacatcatgccaacagtaaccacactcgccgtcatgaaggcgctgctcgtcagcaccacccgcggccacgcgctgttgaagaagaagtccgacgcgctcacggtacaactccgtgccatcctcaagaagatcgcagccgccaaagagtccatgacccagacaacgcgcgcctcctacttctcc

SEQ ID NO: 149608 - DNA, 283 bp, Zea mays
  Clone ID: MRT4577_6796C.1
acggggcatcaaggggtggactaaactgctggcggacaatgcgcccaacgctacgaacgaggcgaagaacgagaactacttcgggcgctaaatcggccgcgaaaccagcatgagcatataccagagcctgaacgaagttctgagggcaggcatggggactctcacagatgatgctggagaagacactagtgatttgcctggaaagttgcaccggacgatcagactaccggtaacagtaatggaagcaggttatgagccagatggcgagccttatggtatgaat

SEQ ID NO: 149609 - DNA, 254 bp, Zea mays
  Clone ID: MRT4577_67970C.1
attcgtgggcaggcccctctcacacagaagatttattattgagctatccttattgaacactacaggagccaccacgcaagatgggttggcagcttgaaatgcttcagggttggtcataccacgttgattgaacggatgacattgttgcccttgggagacggtgttggcgcaggcgcaaggggccggcagctccgacacctctgtgcgttgagaaccgaggggactacggttaacaccagctggctgtttgattg

SEQ ID NO: 149610 - DNA, 359 bp, Zea mays
  Clone ID: MRT4577_67971C.1
ccgacgcgtccgcccacgcgtccgcccacgcgtccggtcttcccaaacccccaacatgcatgatccatctgatcgacaccccctccgctctccttatcccttccattcgcccaaacccccgccggcgtgacccctgccagcccggggccttcccctcgttctaggcttcaactgccggccttgtgtcttttgggctagtgaagattgggatggcgtcgccaataccgcgcgagtgggtcgggctgtatcaattttcttcggccacccagaccgatctgcacgagctttctgcaagcttaaggaggaggttgggagcacattgacaattctggtgattgggtaaggcggtttggggaagt

SEQ ID NO: 149611 - DNA, 197 bp, Zea mays
  Clone ID: MRT4577_67972C.1
aagggcacaagctcgagcgctattttcttcaaaacaaataccaaaaaaacaaaacctattactaaccctactaccgctcatactacctgcacgggcggatgaacctacaacctaccctacataccccgtacgaccctagatgagctacgcctaccacagactctacgctaccgagtggacctatccgactaccgcct

SEQ ID NO: 149612 - DNA, 166 bp, Zea mays
  Clone ID: MRT4577_67973C.1
cccacgcgtccgcccacgcgtccgcggacgcgtggttccgcttgttttccgccggggggttttgtttcccacaccgaaaaacttccaaaaaatttagaaatcccaaaatccgcgagatctatcagtttggagcgtttaaccgctccgttggctggggtttagttcc

SEQ ID NO: 149613 - DNA, 349 bp, Zea mays
  Clone ID: MRT4577_67974C.1
gacctttgcgcggtctcttgcgatcctactgctcgccatcggcatgctaaggaggacccgccacggaggcgtccgtctcggccggaagctgctcggactgtggcagcgggcgctgtgcggcgggcgccggcgccggagaggctaccgccgtctgaagcagcagcagcagcagccctgcgccggcacgcccgagcgcgccgcgaggaagctcgcgccggcgctgctgccgtggggccggtcgctggcgcgctgtctgcccctcaggtggagggccagcggcgggcaccggatgctggacggcgccgaggctgatgtggccaccacccccaaggggcaagttgccggtgta

SEQ ID NO: 149614 - DNA, 650 bp, Zea mays
  Clone ID: MRT4577_67975C.1
gtacctgaaattcctgcagtgccgtaggtgtagcattttttgtatctggcacattgttgaaatttttagctggaggtggaggatagaagcccagaaggtgcggtaggtggggagtggacgatttcatctttgccactcgtgcttataaagatcgcagttcgggccttgccatatactcatacacttaagcaacagatatacaggacaggagtatcagggaggaagacgaggaaacgttgatggccggcagagaagagctgaagctgctggggtggtgggcgcccggtgtgagtcccttcgtggtcagtgtctacatggagatcgtgggagaggatgtgaaattgcaatagcacctgtccagcatgcatgagaaaaaataagagcaacaatatagtatgatctattggatattgtggtgactcacaaggaaagaccaaaatacaaaaaaaggcaaatgattgctctgcgttgcatgcctacctaggcgaatctacatgcctatgtaacaaattcaagatgcatgggtctgcatgtagagagcactatcaaataatcaaggaatttgcgagggtttacattatcttcataagagttatattgttcgcttagaccttagacctgcaaacatatttctagatgacaatatgatg

SEQ ID NO: 149615 - DNA, 221 bp, Zea mays
  Clone ID: MRT4577_67976C.1
ttgagtcgtattaggcagctcggcacgtggtcgcagtgccgtaccccggccgatgtcacgtcaaccccatgctcgtcgtgtgccgcctgcacaccgccgcggacgctgcctttagcgtgaccgtcgtcgtcacatacgattggaactcggctgctggacgcaacgaaggtgcccggcacgctccactatcgcgtccgcctcgccatgatcaacaacgtcat

SEQ ID NO: 149616 - DNA, 483 bp, Zea mays
  unsure (1)..(483): unsure at all n locations
  Clone ID: MRT4577_67977C.1
tcccccaaattcacccggcgctacctccgtttcagcagcagatctttgtgtaaatccctgaccggttaagtatattaccctcatgtggagtaggctgacaccattgacatctttaaggccaccatccaggacaaggtagggcatgcccccagaccagtaggggctcatcttcgatgacaaacatcttgaggacgggcgcacgcttgctgactacaacatccagtaagagagcaccctataccttgtgcttcgacttaaggtaggcatgcagatctttttaaaaaccctgaccgggaacactatcaccctagaggaggagtcctgtgacaccattaacaacgtcaaggccaagatccaggacaaggacggcattcgtccagaccagcagcgcctgatctttgctgggaagccgctggaggatgggcgcacgcttgccgactacaacatccagnaagtagagcaccctacatttggtgctgcgcc

SEQ ID NO: 149617 - DNA, 582 bp, Zea mays
  unsure (1)..(582): unsure at all n locations
  Clone ID: MRT4577_67978C.1
ttcccactcagaggataacggacacacangtgcgacaaaagccacagttcctccacaataaggctgaagcggatgatcacgatgttgtgccagaaggcaccaacacagactgataacaacgggtccgagaagctctacgcagagataacacacatggttcatccccgggagcactgcatcactccatacgatcttcactgtcgtgtcaaaccgcctgagtctcatgctctgcaagaaaagatgccgctccagtcagcagatatggacatgagtgaattcaaggtaactcgtgcatgacgatacacctatcccaagctattcttactgtgcaaacctgataagctggatgtatttctatacagattgctccctctgtcttgagtgctactgaattgatacgctcaaatcgctgataacccaaagtatcgatactgctgcatgatctaacatgtttggatttggacttaggtctggaatatctttagccttatgttcagtagaatattatatacatttgaacgagcctcgcacttactgtgtgaaatcggtgagaagcgcttgctgcacaagcactgatcaatg

SEQ ID NO: 149618 - DNA, 244 bp, Zea mays
  Clone ID: MRT4577_67979C.1
aaaaattgtgtaattctgccaaaccaaggcgatgctacaactcacataaatggtacctggtctctggtctatgccacctgatgtttcttgctcttattcaggcatttgcttttttctacagattttcttctcttgggactgaacatttcaccatccgtgtctggcatcctcgcccgttcaatagatctacccttctttttcttcttttcttttctaggctacatttcaacattatttttactat

SEQ ID NO: 149619 - DNA, 167 bp, Zea mays
  Clone ID: MRT4577_6797C.1
attgcagggcgagaccgaacacctcttgacagtttaagccaacgcaggagctcagcggggagcaaagctcttaaaacatcaccaggatcactaacaaagcggaaacagggaacctttcagttcccgggttttccaggtttcagacacacgaatttacaggcccacgg

SEQ ID NO: 149620 - DNA, 642 bp, Zea mays
  Clone ID: MRT4577_67980C.1
cgcgtcgacattttgatctcgacgagcaaagttattttttgtttagacccgtaaatcacattcattcatggtaatcaacaaaagttcatctgggtcgatcggtacagctgtaacacctctgatcacagcctatgccgcctgagacgatcgtttctgtctcgattccggtcggggtggcgttaagttgtgcgtgtttcttctgcagttgtctacccaatcccaatcggcaatcgtaacgaaacttcggccctgttctaatctcgcgagataaattttaacagcttttttagctatttttagccatttgtaatctaaatagaagagccaatggtgataattgaagctaaactttagcacttcaatttatatagctaaagtttatcccgtaaaattgaaacagggccttcatcgtctactcaaagcatccttcatcgtctactcaaagcatccggaaaaaagagcaggacctgactcgaatattcccaccgccaatgccttcccccaatccccatagtatttttagtcgccacggcggatccagaccggaaacgcgtgtgcgcggcgcgggtggataagctcaagctgcgcgcgcgcacctcccgcgacgtcgccgtcgcggtcgatgcctcccccgtcgacgcg

SEQ ID NO: 149621 - DNA, 390 bp, Zea mays
  Clone ID: MRT4577_67981C.1
gtacacaatgcatgattttgtccactaagacagctcattccctcctgcatgttatctattccagagtccgggtgtctccaaaccgagggaaggagaagcaagttcctcacatctctcctgccatatctgctacttcagaagctttccttcacctactctctgcttcaagaattcaaagtagctggctctgcactctcctagcaacgaacttgctgccatcgatcccatgaagtcgaactatctcgtcgacctcctcttggcatcactcttgctcttcctcgtcgcaggacggcatatgaagaatctcgatgacgcatcaaaatcaatggatacattggaatccatgcatgaagactaccaaatgacagatgttgtccacaagacaattct

SEQ ID NO: 149622 - DNA, 321 bp, Zea mays
  Clone ID: MRT4577_67982C.1
ggatcgtcaactgccgccgccgccaaggacagcccaacgtcgtcgtggctcgagggcctcgtcacctcgcgctcctcttcctcgatctaggtcgtcttcgacgtatggcggagcatgaggtcgcccggactcgagctcgtgcggggcatatcagcattcaccgtggtcgaagatcaagtgctactatgccgcagtatgctcaaggaggctgtcgcagtaccggggcacgcgagggtgcaggcacacgggacatttcggtgcgcggaagaatgactgagtgtcccactggctggtagctcacagtggcagagggtcaggatg

SEQ ID NO: 149623 - DNA, 1039 bp, Zea mays
  Clone ID: MRT4577_67983C.1
cgcattcggccacaccagtggcgcacacagacaccacacgggttcatcttctagctcccctagattgcagctatctcgctgctggtgtggtactggccaccagttcaccatgggcgactcctcgtcgtcatcggcagcctacatcaaaatggttcaccatatgatagagaagtgcatctgcttcaacctgagcaaggaagagtgcatggacgcgctggagaagcatgccaacgtcaagcctgtcgtcacttccacggtgtggaaggagctagagaaagagaacaaggagttcttcgagacgtacaacaaggaccgcgaggagcggaaggtggaggcggagacgatggcgcggatcgagaagatgctctccgaggcggcggcctccaagagctccgacgacgaaggctagctagctatagcacgcgatccgttagcttagctagctctctagagctatagatcatgcagctccgacgatcctctccatgcatgggaattgggagctagccttctcgtacgtacatgagaccattctatttaattagctgcctatatttatatcttgctacatacctagctagtacaacataacacgccgccactgcaacaaggaccatgcatgcatgatgtgtatatgtggtacgtctggttattattaggaccagaaaagttatgttttacgatgtagaaagatgcatatgcatgtattcgaccaatattacacataagaatctaccatgcctgtagctagctagggtcatgttaaagcaaaaggtaggcaggcttgtctatcattgactgtaaccttccgtgacacgtggcagctggcgcgcgaatccaccagtgatgtcctgtacctcatcgggggttgctacttggtacttgccgaggtagccggtgcttcttggcttgccgtagaaaatccttaagaccttctcgccaaatttccccatttcccgtgttttttctgtaaaaataaattgtttcatgtgaaatttctatatattcctataaaattcatgcgttctaaaggaggctt

SEQ ID NO: 149624 - DNA, 508 bp, Zea mays
  unsure (1)..(508): unsure at all n locations
  Clone ID: MRT4577_67984C.1
gaagggcctccgcgacccggtgctcccgatcgccgaggggcagcacgggacgcacacgtccagcaccgcggccggcgcgttcgtgcccaacgccagcgtcttcggcaacgggctcggcacggcggccggcatggccccgcgcgcgcacatcgcgttctaccaggtgtgctacgaggacaagggctgcgaccgggacgacatactggcagcggtggacgacgccatcggggacggcgtcgacatcctgtcgctgtcgcttggccacgaggatgccatcgacttctcggacgaccccgtctcgctcgccgggtacacggcgatcctcaacggcgtgttcatctgcgccgcggcgggcaacaccggcccgtcncccgcgaccctcgtcaacgaggcgccgtggctgctcaccgtgggcggccaccaccaccgaacaggaggttcttggccttcgtaaagctaggggacacggtccatattgacggcgattccctcaaggaccctaacacaa

SEQ ID NO: 149625 - DNA, 347 bp, Zea mays
  Clone ID: MRT4577_67985C.1
ggaagatatgtatgagtttgcaggtgaagctaacattgaggtagcatgcatgaccttgaccagcgagacaatgggaactgaggatgataagcctgaagcctcagggaatgaggtcggatatccggtcagcattgcaagtcgacacctgctgaactacaggggtgagaatgatcatctgtgattgggccatataggtggtcttatgatggctatcctgaggacggaggcattgagatctgaagaccttgtgatgaaacaatctccacattatcaataacgcccgatgcagacgtggtcatcgatgattcgtactgatctatggcaatatcaggcctatactgcggcct

SEQ ID NO: 149626 - DNA, 3034 bp, Zea mays
  Clone ID: MRT4577_67986C.1
atgggcattttggttgaaccacaccgagtcaactgggcacagtcacggcgccgttacccccgtgaaccagccacctctcccacgtttcctgtttctaaaaccgtactcgcgcattcaacggagataaaccagcggccatttgaagaaaaccccagccgcgcagagtttcctttcgtgggaggcgactcccctggcgatttcagcgtctccaaaccagcgcagcgccaatcctccgccgctccaatccagcgccattccattactccttacatccttcaatctcccagcattggagccgattcaagaagttccagatttattcattatttagtcatgaagtctgttgatcgcccgcccagtaatccaaaaagattaactattgaatccagtcaggaggttttttcaattgacatttccagacgtacaagatccagcagctcagctcaccaaggtgatattcctcaaaatcaggaacagaatgagcctcagccagccccaatccatcgtgttcgcagaaaggctttagcttgtcgtttaaaaagacaacctcctgctccagccgctctctctgacgacgacttcatggatgctccatcgttaaagcgtcaattcagatctgcatcaccttctcctccagaccaaatcagctcaaagaagttaaaagtaccttctcctcaagttccgaccgtgaaaagaagcccaaagtataatatcattgccaaaaaaaactctcctaaaaagaagtctcctgtcaaatcacagaaattgaatatccgatgcattcccttggatgttattgtatcatcatggataatgagcgatcggcagcgtgatgccgtcgctaggttgggattttctagcatatttgatttgcgaactgatgcattggagagcagatcacttatcaggtggttgatggacaaattagatccaaatgacatgaccatacgcccaggggctggcaaagaacttaagataacaaaagatacggttcatctcattttggggttgccatgtgccggaggaggtagagagtttactgattggtacggtgaaatcgatgctgctgctaatctgagacgtcatctcaatgtctgtaaagaagaatttgatgttgtcaagcttcaagataagatagtgcttggcaacgatgatgagctatcaattagatgtttttttctcattctattcaatcgacttctgtttccttctgcatcttggggcattacaaacaatgaggtgctcatgacttcaaacatggcccgaatggctgatattgactggtgtcaactagtttacacggatttgtgcgatgctgccacacgttggcataaaaggaacaaaactaacatcacagcaacaatatatggatgctcactcattgttttatttcgtagccgttcagaaacgtgttacgtcattgctccagaacggcctgcttctgccgttttcaacatatatgtgcctcgtatcaagaatttgattggacacaagttgcaatgtttgccctcccagcagcgtccaatgtttcaatcattgtttgatgctcatgacaaagagataaccccccccccccccactacctcaatgcctccaacaaatgatcctgtatccacaccaactgttccaacacctgataaacaacaacatgatcaggaaagccatgttcctactgatcatatcaaagtatcagatgatgctcccacaacagacaagcctgctgatcctaagttaacaccaaaaataaatagtgaaggacaaaaatctgttacacatgatactcctgtatctggtgcacctctgtttgataaaaccccattgacagatgcaactactgacctggttgcaaaggatagttcctgtaaagacgcagtcgctgaacatccccacgtgtcacgtgaagactgtgctcgcaacctgcttaagttcattttgtcaggacaactagatccgagcatgtctatcattaattttggaggatttggagggtctgtacttgatgttgtccagtcgtttggtcccaacaaatgtcttgagaatactttcatgcagggatttatcgactgtattcgtcaggatgatgttttatacaatccagattctgtaatcaacactctaatactgaacgtcaacgttgggaccgttttgaatattgaggagtttgaacaacacagttcaaatccacagcccttcacaacaacccttcttaaagaacatcttgaaccgaccctaccttcagatgatgttctaaaccagattaaattgatactggttcctatgctacgccgaggccactggaccctttatgcaatcaattttgaacgtcgtcgcatagacatcttagattcaaacccttatggtacattgcttggaggcactacatggaaacaaatccataatgatcaaatgatgataaatggaacgaagataccttggtccagactcataatgagaagacttagcattgccttacatgaagctcgacctgagtcaactgtaccaaagtttggcaactacaagattgggcttcttcccaactgtccaaccatgacaccagggtcaaatgattgtggtttttttgttgcaaacttcctccgctactacgattttgatgatggtgacttatcagaattttatactccggatgaaccattggaccaacgtgcctttgttctgcattaccttacctttcatcgcaacaacatggttgccccccttcctgcagaactgctgcctttcaagtattctccaaggaggcgccgctgtttgaaagccaagacttagatagaatacctgatcatgattccctgtgggatgaacaaaactgtttatgttacttgttaagtcacttatgtcaggcctctcacaatgtgtttgatactctgtgtgccacttatgttcaatgtggctaatgtctatgctactgcgcaacagctttatctgaagtgtgtcaaacataattgttgccagcatggctatttatgttatctgttaacaaattctatgttagttcatatccagtttgtgagttact

SEQ ID NO: 149627 - DNA, 1236 bp, Zea mays
  unsure (1)..(1236): unsure at all n locations
  Clone ID: MRT4577_67987C.1
atttcgtagccgttcagaacgtgttacgtcattgctccagaacggcctgcttctgccgttttcaacatatatgtgcctcgtatcaagaatttgattggacacaagttgcaatgtttgccctcccagcagcgtccaatgtttcaatcattgtttgatgctcatgacaaagaggtggataaatactgtgactccctacagtcgagccatcagatgattgtttcgaagcagattgaactctctgaaacatttggtgaaatgatagatgaagttttgagagctgcaacgcagcgcgattcacagccacaagataacccccccactacctcaatgcctccaacaaatgatcctgtatccacaccaactgttccaacacctgataaacaacaacatgatcaggaaagccatgttcctactgatcatatcaaagtatcagatgatattgtcagtgggaacgtctgcaaaaagctacagctatggatgatcctatttttgacaagactccaaaatctaatgctcccacaacagacaagcctgctgatcctaagttaacaccaaaaataaatagtgaaggacaaaaatctgttacacatgatactcctgtatctggtgcacctctgtttgataaaaccccattgacagatgcaactactgacctggttgcaaaggatagttcctgtaaagacgcagtcgctgaacatccccacgtgtcacgtgaagactgtgctcgcaacctgcttaagttcattttgtcaggacaactagatccgagcatgtctatcattaattttggaggatttggagggtctgtacttgatgttgtccagtcgtttggtcccaacaaatgtcttgagaatactttcatgcagggatttatcgactgtattcgtcaggatgatgttttatacaatccagattctgtaatcaacactctaatactgaacgtcaacgttgggaccgttttgaatattgaggagtttgaacaacacagttcaaatccacagcccttcacaacaacccttcttaaagaacatcttgaaccgaccctaccttcagatgatgttctaaaccagattaaattgatactggttcctatgctacgccgaggccactggaccctttatgcaatcaattntgaacgtcgtcgcatagacatcttagattcaaaccttttatgtacattgcttgggagcactacatggaaacaaatccattatgatcaaatgatgataaatggac

SEQ ID NO: 149628 - DNA, 323 bp, Zea mays
  Clone ID: MRT4577_67988C.1
ttatagagcgaacgagctacaactactatacctggttaggcaccggaagcggaggggcatataaagcgaatacctaggttccctctcgtcaccatggctgagcctgccctgcgcggccccggggcgagcccagcttgcggcgctcatactgtagtacatgaaagcactccggccactggctcaacgaccacgagcgcgtgctgaagatccgggtggacaagcacgatatccattacttggtcatagatggagggggcggtggactccgagaacgatagctacaaccatatcctcatctggcagatcaactcccgcacgtacat

SEQ ID NO: 149629 - DNA, 336 bp, Zea mays
  Clone ID: MRT4577_67989C.1
attcggctcgagtgctcacccaactgcttttcttatctcccggaccataggggccttttgcgagctctctctggctttatccgcgtcgccaggagacttccaccaccacccctggaccaccccgagcatgctttcctgtagggctatggaccacactgtgcgctcaaggtgggcatgccctgggaggcctgtggcgagattgtcctgcggcccctggggatgacggcacgctggaggacctactccttggacttaatggcaccttccgtggccgtgaggggaaatgcgacgcctgactccccaatgaccactgtgttcacgagtggccagaagact

SEQ ID NO: 149630 - DNA, 685 bp, Zea mays
  Clone ID: MRT4577_6798C.1
atctccatgttttttttccctcgcctgctcggctcccctataaatggagctcaccttccgcggcctccctccgttcccatccgccgcccgcgcacttcttccttcgggcacacaggacaccaccgtcgacggattcatcgcgacgatggggctcgacgtcatggagatcgggatgggcgccgatttgagcctggatctgaggcacttcgcctccaaggccgtgaggcagagcaaggacgacacgccggcgccggacatggacgcatgcatccgccgcctcgaggaggagcggggtaagatcgagatgttcaagcgggacctcccgctctgcgcgcgcctcctcgccgacgtaattgatgtcatgaaggaggaggcggggaagaagaagacgacgacgaggaggagtgaccgcaggctggcgtctgcggcagctgatgaggaggaggaggaggaggacggcgccaccgcggacaagagcaagtggatgagcacggcgcagctctggacgggcgattccgggcgggaggacggggaatcagagaagcaagacaaggggcggtgctcgccggaggccaggtcccgcggcgctctattaccgttcaaggctgatgtgggctctggcgcgccggcgttcgcgccgctctgcttgagaacggacgacaaggctgcggctgcgcgcgtcggg

SEQ ID NO: 149631 - DNA, 102 bp, Zea mays
  Clone ID: MRT4577_67990C.1
tcttctgcaaccatcacaaaccgggtcgctacaaacgtgccatagtttggtgagcacccactctggaacacacgccttggatcctggcacctcgaactgcta

SEQ ID NO: 149632 - DNA, 190 bp, Zea mays
  unsure (1)..(190): unsure at all n locations
  Clone ID: MRT4577_67991C.1
accggaacggannacccggcgggaccgacgcgacggaaaggcatacactacgcccccacccatgactacaaccagacgagcaaccnnttcatccgatcatggaataaagggtgtcccaccacatcaccaancccaacacnacngacatgagcgcggacgccggcaccgacagggtgatggggggggctgg

SEQ ID NO: 149633 - DNA, 2197 bp, Zea mays
  Clone ID: MRT4577_67992C.1
cgggccgggaatcagactcgtacctcgcggctgcctccttcccgtcgttccccatcttcgccgccacttgccggcgctttgttctactcttcgaagcagccactcgcataagcgccccggggctttcttctcccccgtacgcgccgtctccggctactccgccatggcggctggttcgccggagcagcagcagcggagcgttgtggtcaaggagactgtggagctcacggagacggaggagcgcatctttcgccgccttctcgaggttgttcgccacttcagcctcggcacgcagctccgcgtcgccggcggatgggtccgtgataagctattagggaaagactccgctgacattgacattgcccttgacaatatgacgggtcagaatttctgtgagaaagtaaatgagtactcaaagttgataggggagcagcagaaaggaatcggtgttatccaatgtaaccctgatcaatccaagcacttggaaactgctaggatgcttattctcgacatctggattgattttgttaacttgcggtctgaaacatataaaactgaaaacagccgtatccctacaatggagattggtactgccaaggaggacgcataccgcagggacttgacaattaatagcttcggcattcggctcgagaataactcggttgaagatttaactggaagaggtattgaggatctcaagaagggccttattgttactcctttacccgccaaagctaccttccttgatgacccacttagagttcttcgagcaataagattcgctgctagattcaactttacattagatgaagatttgaaggaagctgcatctgatgaaaaggtgaagtcagagcttggcacgaagattagtagagaacgtatcggtcacgagattgatctcatgatgtcagacaaacaccctgttaaagcaatgtgtgacatccgcgatttggggctattttatgttgtattttcttttcctgaaaaatccaaccctcctgtttttgacaagtgtgattggcagtgtgtttcacatattgaagcagcttgggatcttgcatattctattggcagctgtgtgttcagcagtggttctgactccaagtcgcaggatgagcgaagaaggctgtacttgtatagtgcattattcaaccccctccgaagtatgttctacctggacaaaagatctaagaaggctcctgtttctagctttattatcaaggactcgctaaagttgaaaaccagcgatgctgaaactgtaacaaccctacatgctgctagcgaaaagtttgctgaactgattcctctcctcgagtcaagcgctgacttgcatgctctcaaagagaagctggaagatgagtaccttgagataccaggagacagcgtgaagcgtgtttttgcagggcttatactccgagaaataaaggagttttggcgggtggcgctgcttctatccattctcttctaccgagaaactgaaactgctgctggcaccctcgacgagcaggacgagctgcgtcggaggaaagagaaatacatcagagtcgagcgttccataactgacctagatcttgacggggtgtggaagctgaagccgatactcgacgggaaatcgatcatgggagtcatgcaggtcaagtccggaggtccactgataggaaaatggcaacaacgtgtgctgaagtggcagcttgcgcatccggacggaaccgtggacgagtgcgtcgagtggatgaagcagtcgcagtcaaaacgacagaaagtggagcccagcacctgatagtcggaatgacagtttggtcgtagtcagttttcagatcggttagcaactgcctgccccttgcaaacagttttttgcgtagacggtgaactcttgctgctaagacagccagttctcccttgttcgaaacctgtcctgaacgtagagagagagagatggtaatctataatattaaaatatagcatgaatatagttgtcctgagcacaaaaaaaaaatacgcgcagacgaagtgcctatttgagaatggtcttcacagctgagctccctatcccatttctaacacgaggcagtgatgcaggttttagacggcttctttcaaatcaatgtataggccggggagagggagccgcgagagagagggagcgatgggactcgatcgtttgtgccggattggtgggtcggaacgatttctaacc

SEQ ID NO: 149634 - DNA, 468 bp, Zea mays
  unsure (1)..(468): unsure at all n locations
  Clone ID: MRT4577_67993C.1
atgacatccctgtaacaagtggaaatgttgcttttgcaagactagggaaatgcctaactggtttaattcgaagtactcaagtaccaactgtcatttcactcactcactaccacaaaagtgagagtaacgatactgcaatgtggaactctgaggaccttgagtccttacttcaagatgctggtgctcacaagattggtttcaatccagtaaccacaaattctatcaagaagatccttgttcgagtatgcaaagaagaaagctgccatgcatctgaagaattattgcatcaaatagccacctctagcggaggtgatattagacatgcaacaggtgnctcttcaannctattgtcttgacccctgaaggcatagttctgcattggcaacaagttctagnnctactggcccaaagaaccttgattctttggttccagggcatgagaagcagggcctagcagtgcattacctt

SEQ ID NO: 149635 - DNA, 483 bp, Zea mays
  unsure (1)..(483): unsure at all n locations
  Clone ID: MRT4577_67994C.1
gagggcctgatacccaattaacacaatctataggaacatttctatattataattgcagggaaaataagaaaggatagggaacagagacttgatactatcatcaagagcagatcatgatatgggacacttgaagagaccataatcaatagcctctgaaacacacaaggttgcctaaatgaaggggggcataaacaagagactccctcgccaatgagcatcggacgcagttctggaaactacataaatgcgctaacacagacaactganggagaccaatgagagtgcttgtaagatacagctagaccaccaacatcatgcgacatagtcaaggaacgtaaagcagcgacctatagagtccatgtcagaaaattgaaggacacaagctgcttgatctgagaaagcaaacatactatttacccatgagacacactatatgcatgcgaccccatcgatccttagatgataccggacgcttgggtgaac

SEQ ID NO: 149636 - DNA, 304 bp, Zea mays
  Clone ID: MRT4577_67995C.1
cgcgctcatacccctcgcacccactatccccgcggcttcatgcgccgatgaaccgctgtcctgatatcctctcgtacaaaataatgcggtgccagcctggaccgcttgtcttccagttcgaaggtactcataatcacttcccaggttcaatgcaaccgacagctaaggagacgaacaagaaatctacgaatcacgaccagaaacctgtgtcgagcaaagaaaactacgtcttggatgagataatcttcgctcaccagaacatcattctcacatcgaataacatggccctaatgctctccttcct

SEQ ID NO: 149637 - DNA, 747 bp, Zea mays
  Clone ID: MRT4577_67996C.1
ccgctccgagccggcctctccgtgttaaaaaaagcccgaccctgcctccagcggaagaccaaaccctagccatggcggccgcagcaaaccctcccgcggccctcccgtcggcgcccccgccctcctaccccgccaccgccgcccactgcgcgtcctcctcctccgccgcggccgaggacgacgacgacctctacggccgcctcaaatcgctccagcgccacatggagttcgtcgagatccaggaggagtacgtcaaggacgagcagaagaacctgaagcgcgagctgctgcgcgcgcaggaggaggtcaagcggatccagtccgtgcccctcgtcatcggccagttcatggagatggtcgacggcaacaacggcatcgtcggatccaccaccggcagcaactactacgtgcggatcctcagcaccatcaaccgcgagctgctcaagccgtcggcgtcggtcgccctgcaccgccactccaacgcgctcgtcgacgtgctgccgcccgaggccgactccagcatctcgctgctcgcttcgtcggagaagcccaacgtcctgtattcggacattggaggatgtgatattcaaaaacaagaaattcgggaggcagttgagctaccattgacacaccatgagttgtacaagcagattggtattgatcctccaagaggggtgcttctctatggtcctccaggcactggcaagaccatgcttgctaaagctgtggcacatcacactactgctg

SEQ ID NO: 149638 - DNA, 238 bp, Zea mays
  Clone ID: MRT4577_67997C.1
gggaccaaaccagagacaaatcctttccgcttttttaggcaattgccgagccatggacggaccctgtaaaaacacggagcacaaaccttgaacagggccggccggtcgcttgcttctacgggcctaccggggggccaaaccaaaccactagtattattagctagcaggggggagacacaccaaacacctttttacatattactacagggcaaaaccccgggccaaccccacctggaaa

SEQ ID NO: 149639 - DNA, 137 bp, Zea mays
  Clone ID: MRT4577_67998C.1
ctactcgttcttgtactgcacctaccccagggacagggtagatggccgcggtgcttgagtgtcggcgcggaaatagaaggggaattatggccgatgaaagggaattgggatccgaggacgaagacaatggcgagagg

SEQ ID NO: 149640 - DNA, 305 bp, Zea mays
  unsure (1)..(305): unsure at all n locations
  Clone ID: MRT4577_67999C.1
attctatcattttaataatattataattatggnaacggttttttaatttttgaattttattattttttttctttaggaaaacagattttactagggggactttttttataaagttcttcaacaggggccctgcaaccctccaggatatgtgacaaaaagctaatctgcttttcttatagttgttgcgaacccacctttttgccctggtaaaaaaattaaagcggggtttaaaaaccttgttcgcctatatttttccacaaaaaaccctctctaatttgtttgataggaatctttttccttccccc

SEQ ID NO: 149641 - DNA, 666 bp, Zea mays
  unsure (1)..(666): unsure at all n locations
  Clone ID: MRT4577_6799C.1
cccgggtcgaccctgcgtccgcggacgcttgggtgcggccagcttggggcccgggagctcactagccaggcccgggcgcctcaccgccacggtgaccgccgccttctttgacgcctgcggcctgcctaaccccgaagtctctcagtgcgtgtttggccgaaatccacggggagggcttgtcctctcctttgctgagcggggggggagcgganccntgcctacttgagttcaggtttgtttcgccatccgaggccaagattcggagcgtcgccgaagggaggcgatgaagggcaaaggcgggccggtggacaggaggtcctccgccagatggaggctgctggtgctctgcgcattcagcttcggcatcggcatgatcttcaccgaccggttctggacagcaccggataccagtagccataccatgtctcaacgctggaggcaagagcaagagctccaacttgtatcagaagattgcaacacaaagaggaagcatggggaagacaaggatataatgggagaggtaaccaagactcatgaagccatacaatggagcttgcagcanagcggagcacacttgagctactccgatctagtggttcaccagtaacctctgaaactagccaaccaaggaaaaaggcttttgttggcattggagtcaacactgca

SEQ ID NO: 149642 - DNA, 1174 bp, Zea mays
  Clone ID: MRT4577_679C.1
gcacgagggaacacatagcagctggcaggaacgactgccaagcaagtccatcggtcgaggtcctagctagcgcaacgacgatggccaccgcgctctcctgcaaggccctcgcagtggccgcgctcctgtccgtggtgtccgtcgtcacctacggcgctcgcgcccagcagcagcccagccacaacgcctccgactccgagtcgtcgcaggacaggtccttgctgtcctacagcagtggctggctgcccgccaaggccacctggtacggcgcgcccaccggcgccggccccgacgacaacggtggtgcgtgcgggttcaagggcaccaaccagtacccgttctcgtccatgacgtcctgtggcaacgagcccatcttcaaggacggcaagggttgcggctcatgctaccagatacggtgcctgaagagcaaccacccggcctgctccggcgtggctcagacggtgatcatcacggacatgaactactacccggtggccaagtaccacttcgacctgagcggcacggcgttcgggtccatggccagctggggcctgaacgacaagctccggcacgccgggatcatcgacatgcagttcaggcgggtgccgtgcaacttcccgggcctgaccatcaccttccgcgtccagcacggctccaaccccatgtacctggccgtgctcatcgagcacgagaacaaggacggcgacgtggtgcaggcggacatcatgcagagcaactccggccactgggagcccatgcacgagtcctggggctccatctggaggatcgaccccaaccgcccgctccgtggccccttctccatgcgcatcaccaacgagtccggcaggcagctggtggccaagaacgtcatcccggccaactacatccccgacgtcgactaccgctccttcgtccagtactaatgatcgagctagcttggtcattgcttaagcgtttaattgtttcttctttatttaattagtggctgccgttgccgacatgcatgtgggggaaattggaggaggcaagcatcaatgcaatgtgtgctctcccgcccactgtcactataccgttattaattaccagtgtgtaaccagcaaatcatactacatatatggttatataatttcatactatacagtataataagaaaaaaaaaaaaaaaaaagcggcc

SEQ ID NO: 149643 - DNA, 649 bp, Zea mays
  Clone ID: MRT4577_67C.1
actacaatcacactccaccagcttaaccacactcatctgatcacccatagctagctagctagcagcttaaggaactagcttgcagctaccgatcgatggctcgtctcaacagcaaggctgtggtggccgccgtggtcctggcggcggtggtgctgatgatggccggcagggaggcctcggcggcgctgtcgtgcgggcaggtggactccaagctcgcgccgtgcgtggcgtacgtgacggggagggcgtcctcgatcagcaaggagtgctgctccggcgtgcaggggctgaacggcatggcccgcagcagctcggaccgcaagatagcgtgcaggtgcctcaagagcctcgccaccagcatcaagtccatcaacatgggcaaggtctccggcgtgcccggcaagtgcggcgtcagtgtgcccttccccatcagcatgtccaccaactgcgacactgtcaactagttcaatatataacccttcctacgtgcatgcatggacgcgcttgtgtggagcttaatgtctatgttgatggagtgctcatacgatactgatgagctactaaaaaaataaaataaagttgcctgcatgtgttatttcagtagtgtgtctatgtctgtaccttgcacacacactgtgtgtgcatatat

SEQ ID NO: 149644 - DNA, 389 bp, Zea mays
  Clone ID: MRT4577_68000C.1
cccaattcttgggtaagctggacgcctgcaggcaccggcccggacttaattaccgggtggacgagctttctatacggcggccgcccttcctttttttttttttagtattatcttgtctattttgaattttattgctgcgattcaattttgcctactagaaaggccaaaccccccaactgggtgcatgcgtgcaaaagggcaagaacaggaaacactgctcaataaatttatccgacgcaaggaatctaaaacagtcgacggtcggaagaaaaaagacatttccccccaaaggtagtagtcggggaaagggccaacaaattttaaaaacgccccggttgggaaaaaaacctggacactctggtggtccaaaaggcccaggccagggttcc

SEQ ID NO: 149645 - DNA, 1070 bp, Zea mays
  Clone ID: MRT4577_68001C.1
gctgcatcgtttcttggaggttcaatgagaatgactgtatctttatgtgttatcatggttgagattacaaacaacttgaaactcttgccattgatcatgcttgttcttctggtttctaaggcggttggtgacttttttaatgaagggttatatgaagagcaagcccgattaaggggcatccctttactggattccaggcctaagcaagtcatgagaaatatgaatgcaagggatgcgtgcaagaatcaaaaggttgttgaccgtgggcagaatggcgagtcacttgtcataggtctcatacttcgtagccacttattggtacttcgccgggttttatattgatggtgcatctggtgggataatgcttcttggaatagtcggattttgtatattattgcctttgatgatagctgttatttatttgtcaagatcatcaaaatatactggaaactatgtcatgcatcaaactctgtccacttactactactttatgaagccatctcttgctccaagcaaagttatagatgtcttcatcaaggctgcagaatatatggagatgccagttcgacgcagtgatgatgaacccctgcaaaaattgtttgtagctgttagaagcgagttaaatctggacttaaagaacattaagacagaacaagcaaagttctggaagcagcatccatcactagtaaagatggaactgctgattcaggcgcatctcacttgtgagtcattcgctttgacgccagcacttcttaaagattacagaaaaaaaaaaaaaaaataaaaaagttttgcgaactaacaagcataatggtttccctgttgttgaccgtgggcaaaatggcgagtcacttgtcataggtctcatgcttcgtagccacttattggtacttctacaagctaaagtagatttccagaacagtgctttcccctgtgggccaggcgtactgaacaggcacaattttagtgactttgttaaaccagcatcaagtaaaggaaagtcaattgatgatattcatttgacagaggatgaactgggggttgattttggatctttgcccatttttaaa

SEQ ID NO: 149646 - DNA, 429 bp, Zea mays
  Clone ID: MRT4577_68002C.1
gcgaagcacaatcgcaacaacctaaccacaatttctacctacaaactacaacctctaccaggacattctgctttctttaacaactcatacgcctaccttattccacaaatcctactaacttctaataccattacttctttcctattaccactaactaacacaatctactttcaataaaaacccattccttcttacattcaacatccaacactcaattacagcttacaacatacctttataacctcttttcctccacaattcatcactcatataaacttacaaaccatctcatcatatattctaccacaactttttccatcactaatccacctaactctttctaaccaatcctttctactttcatcaacaactactttcatccaacccacttgctcttgctaacttagctgcataccatcaacaacaact

SEQ ID NO: 149647 - DNA, 503 bp, Zea mays
  Clone ID: MRT4577_68003C.1
atccattcactcgcctgcgctccctcgccgccccagttccccaccccctgctcacccacccgtcccctcctgctcgcccatggctcccatcgctgtcggcgacgccctccccgacggccagctcgggtggttcgacgagaacgaccagctgcagcaggtctccgtacacgtgctcgccgacgggaagaagggaataatcttcggggttccgcccggcttcagtccgagctgcagcaaatacgatggtaccagaattaatcgcaaggtgctgaatcaggtaagatgccagggcaggagactgagagcgtgatattgaccaggacttccagacttatcttggattccagagctcaacacgtagccgcgagaacaagaaggtgacgatgcccacctcactgatcttcttcgaacacaccaatctctgagccattcacgccaagtgcgtcaccatgatgtgctaggaatttcagatacccccgccttattcgtggaaatagtgccta

SEQ ID NO: 149648 - DNA, 855 bp, Zea mays
  unsure (1)..(855): unsure at all n locations
  Clone ID: MRT4577_68004C.1
attcatctcaaagcctcggccccatttcgctgttcccttcccagcatctatagcagcatacctcaagtgttggatcttctccagaaatgaataccgaagatgacaagcagactgttctaagcacgttacccaaggacctacctctagacttcttgaagaccatcacagatcagttctcagacaaccgtgttatcggtaaaggtgcatttggaacagtttatacgggaactatgcctgatgggcaaacgattgctgtgaagaagcttgcagaaaatgcgccgattgcacgtgacaaaatatttaataacgaagttcaaaacatcatggcttaccgacatgaaaatatagtcaagttggttgggttttgccatgaaggacagaagaaagtagttctaaacaatgggcgatatattgtcgcagatgtttacgaaggtctactctgttacgaatatttacctaagggaagcctccagaagaacctctttgacaaacccatcaacatggcttgggacacgcgtttcaaaataattaagggggtctgcgatggtttacttttccttcataggattcctattatccacatggatttgaagcctcaaaatatattgttggccaataacatgacgccgaaaatcgcggactttggactttccaggctatttggccaagaacaaacacgggcgaacacacangaatgttgtgggatcatacggatacatagctccagaatacctatacagaggtgaaatctccactcagtccgacatatacagtttaggcctattaatcatcgagactaccactgggcgagaagaaatacccccaacagaacgaaccatcagccaagggaattta

SEQ ID NO: 149649 - DNA, 945 bp, Zea mays
  Clone ID: MRT4577_68006C.1
tctacgaattattcaatgcaagtccagtgcggggggccgagctaccaagtgcagctgggcagaagggacggcatggtgtcgcaggcgtccatggcgagcattctgccgggccccaacgtcgacgtccccaccgccatcgatctgttcgcgcggaagggcctcaacagcttcgagatggtcagcctcatgggcgcgcacacggtgggggtgacgcactgctcggtgatccacgaccggctgttcaacttcaacggcaccgggtcgccggacccggccatggacccgatgtacgtgtggatcctgacgacgtacgcgtgccccaggggccaggccttcgacaacatcgtctacctcgacgacccctccagcatcctgctcgtcgaccggagctactactcccagatcatgaagcgccacggcgtgctgtccgtggaccaggccctcggcgacagcagcgccaccgcgtggatggtcaagttcctcgccaccaccgacttcttcccctccatgttcagctacgcgctcaacaagctcgccgcgctcgacgtcctcaccggcaccgacggcgagatcaggaagagctgccggaggaccaactgatctgacggatcggatcgatctgccgcagttgttagttgattgatacacagagataggttaatcaatcattaccagcagctacctaatagctggctagacgagcagctgctgtgctgtgagacgcaaagggggaaaaaaggacaagagaaagcatatcgaaccaatggatcgaggactgagggagcattaccagtggtagcatttggttttaccgtagtaaatttgagtaaagattcaatttactggtgtagtacaaggatgcattttgtgtgtgtgtgtgtctgtacgctgattcttttgtacgtggccgctataaaaatatacgttccatgcatatacaccact

SEQ ID NO: 149650 - DNA, 534 bp, Zea mays
  Clone ID: MRT4577_68007C.1
cctcgttttcggccgggttaagcctaaggccatttaacttgtcagttaagggctcagatgactcatcgagtgcaaagcagttgttatcccaagaaccatgcatgctaccagaataagaaagatgagagcggttggtggccaaggctcctgaaaaaggacatgtgttcttgaaggttgactggacaaatggtaggatgaggatggcgaagatgttgaatatactaaattggaagagaaagcctcaccaagtcatcatctccaggaacaatgttagcgaaagtcaatttaatctggtgctgaatattgagttgcaacaaatcatcgatggagactgaatcaccgcagctagaaaccactgcctcaaggtgctgaacattgagttgcaacaaatcatcgatggagaccgagtcatcgcagccagaaaccactgtctcaatttgaggatattttccatctatgtttgttagcaggcataatgcctatttatctcctgtattcgaacatttggcaattaagaaatagaagattactttc

SEQ ID NO: 149651 - DNA, 709 bp, Zea mays
  Clone ID: MRT4577_68008C.1
tctctgacgcgtgggcggacgcgtgggcgcgtgggccctacagctattcagaccgatctatgggacaaccagccgggttcctgcgtgggccccgggggcctgggggggccctcccggcacgcgtcgcaccggggttcccgctgcggccccgcggctagtcggaccgcccggtggggcggaggccccgtcagctatcaggtgcctgacagcaagggcatgccatatggacactggacttactggagaaggtgaaacgatgactcgggtagaagaaacaccaggaatagaggaggccccatcagctcaaagccaatgaaatcgaagtatcaaacggatgaacacagtggtgcaatcaatggttggaggaactgccgagtaacgaatgatgtgtttgattattactcatatgggcaggctgtaccaagcagtcacacgcaatgtgagtaagaagctatggggctatgtgagtaagaagctatggggctttcggcattgggagaagacgagaagtttccttctctgccgtccgctgcgcgttcggcgtgtccgctgtgcttcccctgcaggtgccctggtgggggtcgtcagctagtagatcttctgcaggttgtgtcccctcctcccccctaagctgctgtagtctgtagacgcggccgcgtattagcctaatgattgctttgtttagcaattggcaatgtacatatctgtc

SEQ ID NO: 149652 - DNA, 755 bp, Zea mays
  Clone ID: MRT4577_68009C.1
cattgggtacctcgaggccggccggggtaaagcttaagacagacagaggtgggcggtgttgttgcttccgtcgtcgatgttggtgttgctcgtgccgcgcatcgagtcaaggtgtgccgtggacgagaggatgccggtcgccgcgaaaaggatactgcggctgagggcacagcagagagaaagactgcaagaccgatgcgagccctgaacagtcgaagcgccgccgttgggttatacgggttaagccgcaataagcctgcttttaacattgtgggctgctctgcaagattgtgcaggagaaggtttcaaattcttcatcgaaaccacctgtccatatgactggtagtggtaggcctaatgctcctccataccgtcttccagttcttccaatggacgatgatgaaatctcatccaaagttcttctagcagttgaactttgctaattgaagctgcaaaaggaacttcgatagatcagcattacgaggcacagcagtgaaagccccatgtttaccttttccacgttcagcacgccggaacagaaagcacgccacagtggtccttgtcaaattcgacgccttctgccaacagagtcaaacaagactgcatgcttactcctcttggcgaacctccttcacaagagctgcacatgtagcaactgctggttgaacatggtggtcattcagggtgggatttggtcagctggcttatccgctgaggaccttcattgttcttgatcttaaacaacaacgaccgcg

SEQ ID NO: 149653 - DNA, 266 bp, Zea mays
  Clone ID: MRT4577_6800C.1
cccttgctatcctggagctcgttcggagacccgctcaaggacacctcgggaccttgcgttaacatactcaacaagttaatgtaccggcttcgttctatatgccgcctttgttctatctgccgccggagcagaagtcgcagccatggtaataccccactcaaccaccgcatctaaacccgtgccaccagttcggatcctgcggcgtctgtagcgattgcagcccgttcctgggccagagaaatgagttcctgaggcaccagtgcaaa

SEQ ID NO: 149654 - DNA, 264 bp, Zea mays
  Clone ID: MRT4577_68010C.1
cttcactagtacagggctggtcgagacgtgcaaacggatcatcaagcggcaataatcccatccagagccgggttccactgctgcagacaccaaaggcaactatctcaacatgaagggtgattactgctaatacctgagtatgagtaagactggacctgatagaaaaagctgtgcgcccatacaaacggcttgataaaaggtcagatcgcatcatagatatggaggagcttctttaacataaccttatgatgctgggacaatcac

SEQ ID NO: 149655 - DNA, 570 bp, Zea mays
  Clone ID: MRT4577_68011C.1
aacacgctgtaccgttgtcctggtgcgtagcacggtacagatggtgacgcttcacccaatgaatgagatgctgtctggtacatgcacaatcctgaactgatccttaccaccatatgtccaaccgaggttagagacttgacaccagatcgctctagcatatcaataagtggctgaggttcttgaggctaggacaatataagacctccatatgaggcatggctgcactaacagaaaggctgtcatttctgatgggtgcacatgcatcctacttcgactgggctgaccactacttgagacttaccaactgctagatccaggatcacctccatattcatacgctcatgttctactccaacttgaacgatattatcaattccatcattgctattgacactaccgtcatcatcattgacactccctgcccaacgagaatctgttatccatattacttgagcgccaactgtacagggcgtgcatgaaggcctgtatttactacatcacactcattcaggatcacgtttgatgactagatcgaataccaaatcgaaactatactggagctgctggaca

SEQ ID NO: 149656 - DNA, 277 bp, Zea mays
  Clone ID: MRT4577_68012C.1
cccacgcgtccgtgctgacgctcgccgccgtgggcttcccgcacgacgccgcgcgcgggtcgcggacgcccaacagccccgagaggtgaaaaccccggctcccggcctggagtacgcccaaggtctggcccaacagcaacccgcggccggcaaccaagccggctggatcggttggctggacacgcttgaagccgccgaccaagtgccgcggctgggcaactgggcgcacggctttcaacgggcctggattgaccggtggatcgaactaaggccgacc

SEQ ID NO: 149657 - DNA, 158 bp, Zea mays
  Clone ID: MRT4577_68013C.1
ctacatcgatatactgacgatattcatgttaccttggagcacttctagcattaacaccttccagaggccgtcgacagtatttggccctgaagacattaagcggtccatcttgtcactgcagtacactggggaactcgctgcgctctttgagtctactg

SEQ ID NO: 149658 - DNA, 218 bp, Zea mays
  Clone ID: MRT4577_68014C.1
tcgtcgtccgtcccggcagcttccctccctctcctctccgcccccgcttacctagcccggcccctcctacgccccccccctcccgccgccgcacgatgagcacctctccggccgcgttagccgccgtgtcaactgcgcctacaattgcctccgtgccctcagcgtgaaaccccacaccaacttgggccggccgaccgagggggggggggaaacatcca

SEQ ID NO: 149659 - DNA, 498 bp, Zea mays
  Clone ID: MRT4577_68015C.1
tggcaccaagcccttgtccttcccctaattttcgcatctggcttcgctaggttgttcggctgtcgcgttcatgagtacagccggtcgatatggcggtcatcaatgatgagtaccaataagacccgaccggcctcaacgggaccaaggctgatcactacatcaacagctgctacctgacctacatgcagggcctgcttttcaaaatcatacttgatatgttaccatcataggatccgttgtgtatgctttggtagcttactcactgatgacttgataactgacgacctctactatatgaaccccaatgatctggacatgcagcatattaccattaaacatatcgaaatacaagaatgctatatatgacatatgttagacatctgtgcaatgtcaaataggatttttactacggcggctacttacatctatacacttgttgcatttacaatagttgtattttttactggaaaatttgcagatacagtggtggtggcggca

SEQ ID NO: 149660 - DNA, 270 bp, Zea mays
  Clone ID: MRT4577_68016C.1
agggatccaatggtcaacttggataccacaggttttcctttttttgggtttctcccggttacgagggatctccacaacttggaggctctcggccttacaatggtgatcacaaaagatgtgcgaaaggaagggaggggagaggaacacacacaagactcaaatcacaggactatcacgcacacaagtcacaacttgaggtcaaaacacaacgcacggaggtcacaactcaaggggaggtcaaggcactatctcaaagaatcaaatgcacga

SEQ ID NO: 149661 - DNA, 583 bp, Zea mays
  unsure (1)..(583): unsure at all n locations
  Clone ID: MRT4577_68017C.1
ggccgggnaaaannaattaaaaaaaaaaaaaaaaaaaaacgccagagaggttgggaggcgaagaactggatatgaacatgagagagtggatttgatgccgctaaaaacaatgcagcttttctagtttagattactaaataaaaacacctaaactcaactaaccgagccacaaaggactggaacgtgtgcactcgcaactgaagcgtgtgggcacgcatgatgcatgcatgttgcctaatgcgcacgcccgcgagacttgccccacatgaactgtgcatgcgtcaggccaactgctatcctgcttatttaacataaacgacaacctaaatagaaagcataaagggcactctaaagacaaggattttctgacagttggtttcatgtaattagttgtcatcgaacacacagcagaatttggagttctgaatactcaatccactgaaattttacatgtatgcagagcaaaacaaaataatttccaagtcacttttctttgtgggagaggtcggtggaaatgattacaaccatttaatcgttagggataaatctngtgatgagctacatngaagtgttcctaatgttg

SEQ ID NO: 149662 - DNA, 361 bp, Zea mays
  Clone ID: MRT4577_68018C.1
gagagaaaaaagccataagggggcaatcgacctgggcgcacacaaaaagtgggcaaacggggaggaaaattccacaaaaaatggagtaccccaaggggggcgcagattaacccgacaaatctaaagggcaggggcggacttcgccatgctctcgagagagacccacaaaaaaaaccggggagaactttcgccggcggggcgacaactctgaactggccctcgccaagcctgtcacaaaaggacctacccttactttgcgaccggcaccgggggatgtacccacattccctcctgagaaagacccatagacattccaataaaaatctccttaaccacactcgggcccaaagaggaggcctgc

SEQ ID NO: 149663 - DNA, 2125 bp, Zea mays
  unsure (1)..(2125): unsure at all n locations
  Clone ID: MRT4577_68019C.1
ccgcctgccgtaccggtccggaattaatttccgggtcgacgagctcactagtcggcggccgcgacgacgggcgggagagggagggccgcgacagcaaccggagaaggggaagaagctggctgcgagggcagcacagcgacggcgcgacggcgccgaaaaaaaattggatcaaggttgggtttagatgtaaaccctaaccctaacctgctctgttaccatgtgactaacctggattaggtgagatctctctctcccaacgactgggttaccgacgcagccgccctcagccaggtgcgcgcgtcttctttgggcccttcgctggtgacgagcgcccactaggttggctgtgtgctgatgctatttgtgtttaagtacttccacctggtgttaatcttttgggagtggaatctctgagacctctgaggtgtgcctttctggcatcaagtttaactgcaacgatcagagggtttctggtgcctgctcattctgaatggcagaccttacggacatcggttgctgcagttgctttagctttttaaggaagcccagtgtacctgtacgtcaacatcaggatgctgatggcatgttatctgaagatttactgaagcgtcaatcagctgaagatcctgatggaagtttctacactggggatgatcctgatgtaagcttttataacggggatgatcttgatagaagcttctacaatggagatgatcctgatagaagcttttacgatagagatgatactgattatattgagggaagcgatgatggaccaccaaggaagagttctgaagatattgtacagttaagaactcaaaatggctttgcatgtagagaaatctcagttaaagagactaaaaaagtatttcgctcagaggatgaaaatggtaataagatggtcaatcaatatgtccacttgggaaagattggttctggaagctacggaaaagtggttctgtacagaaacattaaagatgggaagttgtatgccatcaaggttctgaataagccttacatgatgaaagtacgtgttgtacgcacagaaactgccatgacagatgttcttcgggaggtgtccataatgaaaatgctgaatcaccctaacattgtcaatcttgttgaagtgattgatgacccaaacatagataaattctacatggttcttgactatgttgaaggaaaaatggtttgcgataatggtttagaagaaggtactgcaagaaattatttgcgagacataatatctggtcttatgtatcttcactctcataatgttattcatggtgatatcaaaccagacaatctcttggttaccagtgccggcaatgtgaagattggggatttcagtgttagccaggtttttgaggatgatgatgatatgctttggagatctcctggcactcctgttttcactgccccggagtgctgtcaaggttcagcctaccatggtcgggcctctgatacatgggcagttggtgtaactttatattgtatggtttctgggcattatccatttcttggggatacattgcaggaaacttatgataagattgccaatgatcctgtgcaaatacctggagacatgaacccccaacttgctgatttgctcctaaggcttctctgcaaagatccaggggatcgcatcacgctgcaggctgcggctgagcatccttgggttgctggtgatgagggcccagtccctgaattcatctgtagatgtgggtttggccgcaggaagaggaatgatgtccgcgaagaagtacaataacaaagcatcctcggatagtccacaggtctagtgtagataattgataaaggttggcaaaacgtagccctgacgatgagtttgtttttttgtttgtttgtttgttgtttcgtgttcccaatttccaacgagtgttgggcgctcgactgaacatgtttcttttagtaagagaatctcgagtgtaaccctaatgacagtaaaacccaccgtctgcccccggccacaaaccaccaaggtgccgtaaacatgcactgccattcagatagtgtgagaagttgcgtttccaaaaaaaaaaaaaaaaaaaaaagatnnnnnnnnnnnnnnnnnnnnnnnnnnnnnnnnnnnnnnnnnnnnnnn

SEQ ID NO: 149664 - DNA, 1957 bp, Zea mays
  Clone ID: MRT4577_6801C.1
ctcatgtcagtcatgcggccagcttcctccccgctagctcactagccaggcccgggcgcctcaccgccacggtgaccgccgccttctttgacgcctgcggcctgcctaaccccgaagtctctcagtgcgtgtttggccgaaatccacggggagggcttgtcctcgcctttgctgagctgctccggagcggagccgtgcctacttgagttcaggtttgtttcgccatccgaggccaagattcggagcgtcgccgaagggaggcgatgaagggcaaaggcgggccggtggacaggaggtcctccgccaggtggaggttgctggtgctctgcgcattcagcttcggcatcggcatgctcttcaccgaccggttctggacagcaccggataccagtagccataccatgtctcaacgctggaggcaagagcaagagctccaacttgtatcagaagattgcaacacaaagaggaagcatggggaagacaaggatataatgggagaggtaaccaagactcatgaagccatacaatcattggataagtccatctcaacgctgcagatggagcttgcagcaaagcggagcacacttgagctactccgatctagtggttcaccagtaacctctgaaactaaccaaccaaggaaaaaggcttttgttgtcattggagtcaacactgcattcagcagccgcaagcgccgtgattctgtccgggagacatggatgcctcaaggagaaaagctgcaacaattagaagaacagaagggaatagttatccgcttcactatcgggcacagtgctacatccaacagtatactggacaaagctatagattcagaggacgctcagcatcatgactttcttaggctggaccatgttgagggatatcatgaactctcagctaagacaaaaatattcttctctactgctgttggcatctgggacgctgacttctacgtcaaggtcgatgatgatgtgcatgtaaacctaggaatgcttgccactacccttgctcggcataaatcgaaaccaagaacttatattggctgcatgaagtcaggcccagttcttgctgacaagaatgtgaagtaccatgaacctgagtactggaaatttggggaggaaggaaataagtacttccgtcatgctacagggcagatatatgccatttcgaaagatctggcgacttatatctcaatcaatcggcctatcttgcacaaatacgcaaacgaagacgtgtcgcttggatcgtggttcatcggtttggaagttaatcacatcgatgaaaggaacatgtgctgtggaactccaccagactgtgagtggaaagggcaagctggcaatgtctgcgtagcgtctttcgactggagctgcagtggcatatgcaagtctgttgagaggatcaaagatgtacatgctcgctgcggcgaaggggattcagcagtttggagtgctcttgtctagcacataccctcctttgcccgtaaatatgtagcataattggtaagctttggtggtggtggacaccagcataggcgttaggcaactccccaagtaaacttgacaaaacccagagatcatgatcatgccccgtggaacattgccaatggtaactctggctggaaaaattctgcgtaattttggtctgtcactgttcatgaccttcggacttcggtggtgttaggagctccaaggtagggttgcaactgatgttactgatcttacatgtagggggagagtttctcagctgatgcgagatcatgtaatgcagaggacattgttttatgcaaattttgacattcttttgcgggttctttccacacatttttgtcattcattaatgagagtgccccatactgtaacatatgacccgtggacggattgttgatttagcaaatcttgttctattaaaaaaaaaaaaaaaaaaaaaaaaaaaaaaaaaaaaaaacccccccccaacc

SEQ ID NO: 149665 - DNA, 449 bp, Zea mays
  Clone ID: MRT4577_68020C.1
aaccaaaaaaaccctgtctgtaattgtttaggggggtttcaaatgaaaaatgaaaaaaagtaagctgctcgaaataggctaaatgtaaatttctacgtttttcacaagatcagatttcaaatgggagtttcaaagtccttggaaaagttgggtagttcgttgtaccatgcttgtcaaaattgaccaaaagatgggggccctaaagttttttgagcatgaaatgccccccgtgttccggctgcaaagtggaccccgggaacggcccgtgagtgtaggactgcaaaagggccaaccaaaagtgctgcaggatgctgctgaaccccattttggcctcaaccagcgcgaatttttggccgacgcaaatccgtggaccccagccgaacgggaaaaaccccggcgagtccttggaccccctggagaccccgtccttgaacctttccgggctgaac

SEQ ID NO: 149666 - DNA, 1874 bp, Zea mays
  Clone ID: MRT4577_68021C.1
ccggccggggttctcccgctacctccgagcacctcggccctcaggctctgaccttaaatgggatctgccgcactcctgctctctatctctctctctgcaacgactgggttaccgacgcagccgccctcagccaggtgcgcgcgtcttctttgggcccttcgctggtgacgagcgcccactaggatcgaggcgtggtgatggtcgttgggtacttccatttggtgctaatctgtgtgggaggtggaattcatggacgttgttaccgggcccaagtttaatcctagcaatttcagggtttctggtgcctgctcattctgaatggcagaccttacggacatcggttgctgcagttgctttagctttttaaggaagcccagtgtacctgtacgtcaacatcaggatgctgatggcatgttatctgaagatttactgaagcgtcaatcagctgaagatcctgatggaagtttctacactggggatgatcctgatgtaagcttttataacggggatgatcttgatagaagcttctacaatggagatgatcctgatagaagcttttacgatagagatgatactgattatattgagggaagcgatgatggaccaccaaggaagagttctgaagatattgtacagttaagaactcaaaatggctttgcatgtagagaaatctcagttaaagagactaaaaaagtatttcgctcagaggatgaaaatggtaataagatggtcaatcaatatgtccacttgggaaagattggttctggaagctacggaaaagtggttctgtacagaaacattaaagatgggaagctgtatgccgtcaaggttctgaataagccttacatgatgaaagtacgtgttgtacgcaccagaaactgccattgaccagatgttcttccgggaggtgtccctaatgaaaatgctgaaccaccccaaccatttgtcaatcccggtgaagtgattgatgacccaaacatggataaattttacatggttcttgagtatgttgaaggaaaaatggtttgtgataatggtttagaagaagctactgcaagaatttttttgcgagacataatatctggtcttttgtatcttcactcccataatgttattcatggtgatatcaagccagacaatctcttggttaccagtaccggcaatgtgaagataggggatttcagtgttagccaggtttttgaggatgatgatgatatgctttggagatctcctggcactcctgtttttactgccccggagtgctgtcaaggttcagcctaccatggtagagcatctgatacatgggcagttggtgtcactttatattgtatggtctctgggcactatccatttctgggggatacattgcaggaaacttatgataagattgccaatgatcctgtggaaatacctggcgatgtgaatccccaacttgccgatttgctcctaaggcttctctgcaaagatccaggagatcgcatcacactgcgtgctgcggctgagcatccttgggtcgctggggatgaggggccagtccctgaattcatctgtagatgtgggtttggccgcaggaagaggaatgatgtccgggaagaagttcaataacaaagcatcctcggatggtctaataggtctagcgtagataattgatgatcggcaaagcgaagccctgacgatgagttcgttgttccgtgttccctgtttctaatacgcgctcgactgaacatatttctttttggtacagaatatatactgcgtaaccctatgccagtaaggcaacgtttgtcacagtttcacgttgtcaaacgcagcttaacgggtgatgttttttttttatgatccgagaggaatggataagtgaatttttttttttg

SEQ ID NO: 149667 - DNA, 609 bp, Zea mays
  Clone ID: MRT4577_68022C.1
cgggatctctctctctgaacgactgggttaccgacgcatccgccctcagccaggtgcgcgcgtcttctttgggcccttcgctggtgacgagcgcccactaggatcgaggcgtggtgatggtcgttgggttggctgtgtgctgatgctatttgtgtttaagtacttccacctggtgttaatcttttgggagtggaatctctgagacctctgaggggggcgtttctggcatcaagtttaactgcaacgatcagagggtttctggtgcctgctcattctgaatggcagaccttacggacatcggttgctgcagttgctttagctttttaaggaagcccagtgtacctgtacgtcaacatcaggatgctgatggcatgttatctgaagatttactgaagcgtgaatcagctgaagatcctgatggaagtttctacactggggatgatcctgatgtaagcttttataacggggatgatcttgatagaagcttctacaatggagatgatcctgatagaagctcttacgatagcgatgatactgattatattgagggaagtgatgatggaccaccaatgtcgtattcttgaactttttgttcagttaacaacttaa

SEQ ID NO: 149668 - DNA, 1017 bp, Zea mays
  Clone ID: MRT4577_68023C.1
cggccgggccgggctcggcccttaggctctgaccttaaatgggatctgccgcacctcctgctctctatctctctctctgcaacgactgggttaccgacgcagccgccctcagccaggtgcgcgcgtcttctttgggcccttcgctggtgacgagcgcccactaggtatggccaccccttcccttcctgccatgcgagacagagcacccgaaccctaacttaagctatttgtctatttgatgcataataacttcgaatcgtgtgcaaaaattgttgggtgtacacccatgttccttactgactcggcccctggctgaaggatcgaggcgtggtgatggtcgttgggtacttccatttggtgataatctgtgtgggaggtggaattcatggacgttgttaccgggcccaagtttaatcctagcaatttcaggttggctgtgtgctgatgctctttgtgtttaagtacttccacctggtgttaatctttttgggagtggaatctctgagacctctgaggtgtgcctttctggcatcaagtttaactgcaacgatcagagggtttctggtgcctgctcattctgaatggcagaccttacggacatcggttgctgcagttgttttagctttttaaggaagcccagtgtacctgtacgtcaacatcaggatgctgatggcatgttatctgaagatttactgaagcgtcaatcagctgaagatcctgatggaagtttctacactggggatgatcctgatgtaagcttttataacggggatgatcttgatagaagcttctacaatggagatgatcctgatagaagcttttacgatagagatgatactgattatattgagggaagcgatgatggaccaccaaggaagagttctgaagatattgtacagttaagaactcaaaatggctttgcatgtagagaaatctcagttaaagagactaaaaaagtatttcgctcagaggatgaaaatggtaataagatggtcaatcaatatgtccacttgggaa

SEQ ID NO: 149669 - DNA, 287 bp, Zea mays
  Clone ID: MRT4577_68024C.1
ccgatctcgattctattttttgtactcctcgtttctcttagccatcgtgtacaatcatattggctggggggacacacactctcaaccacaacatgactgagcaaattacccttcatggcaccctcaaagtccacaacgtgctcataacccatatcgctactaccccgcaattaccgcacatgatcctatcctcctttcaatataacaccatcatcatttgtaaactgaccagttatgaaaccaactattgaatttcacaactaattcttcatattcactcccacttt

SEQ ID NO: 149670 - DNA, 305 bp, Zea mays
  Clone ID: MRT4577_68025C.1
gttatagacgctttacagagatcgaatacttccgatgtaatttactgcaggaggtgtaaccccacgaagtcagcgcagtcaaacaaggggatcatacgcgaagagggaataacgaaggaagggacgccccaaacgacacgggcgacagactatagaggggaagggaaaaaggagacaagcgcaagacgcaaaatctcccgcatggagtagacggcccagagaagaaaacggaaagaaaaggcccaccaaaggaaccgttgcgggacttgcaaaaagggcccgacgaaacggggcgccacaagaaa

SEQ ID NO: 149671 - DNA, 420 bp, Zea mays
  unsure (1)..(420): unsure at all n locations
  Clone ID: MRT4577_68026C.1
tcggcaatcactgcgaacacaagctgtcgatctcaccgacaccgtcgaagaacagatcaatggcgttcgagcatgcagtcatgatcgcgtgccacagcaaggctgattttgacgcctacatgaccaatgcccaggaagcccgctagctggaggtcattgacttcactggcgactggtgcggtgcatgccgcgccatcgacccactgatgcgagaacactccaagaagttcactcaagtagcgttcctgaaagtggacgcggactacttgtaagaagttaccgtgtgctaccaggtccaggcgatgccgtactancacttactgaagaacagcacgacggtcgcgaccatcgtggttgccaggaaggacgagctcctggcccagatctgagagcatgcactgcctgcgcctgcgtctgcgt

SEQ ID NO: 149672 - DNA, 321 bp, Zea mays
  Clone ID: MRT4577_68027C.1
accaaagatcataaccgtcgccgggtttacgagtttttttgtacacattgggtaaacattacaaggggggggggacacttctgacagagggactgacagggacacggggtcactggtttccataaccattttgtttttcagatccgccactggctgtactgtaaacgcacgtttcctctggagtttttggtggcccggcacatgtttggctcgagtccaccttaatgggcttccaggacatcactgttggaaccttaacgggccgggggggggggttggaggtattgttgggggggggtgcaccgacccctgggttgaccc

SEQ ID NO: 149673 - DNA, 368 bp, Zea mays
  Clone ID: MRT4577_68028C.1
gggaagcccttcctagactcaccctcctctctaaaaccttattttggcttataaaattgataggcctctcaggaatatggagaggattgcttcctataaaaacaggagcttggtgggcatacgtgacaatgatccttacatctgtagcattgcaagaaggcactctgcttgtgttcaggatgctctacaagaaaatggaagacatgctagatgctcttgctgatagaaaatctaagccacgtcttacattgactgacaagacgctgatttcttgagctggtggcctatgccatggagaggctcatgcaatctttctccgtctcaggcttttgactacagcgtttgggcgagccacattctatactgaa

SEQ ID NO: 149674 - DNA, 447 bp, Zea mays
  unsure (1)..(447): unsure at all n locations
  Clone ID: MRT4577_68029C.1
ggaatctcagataattaacgccttaagccgatctgaaaggggcagcaaaatctaggttttgaggagtaggtaggattacaaaccagaggctggtcatcggcgtcgacgctctcgtctacgtcgtgatgataggcgaagtggcgccagagcatctggtactcgcgggcggaggtgatccccgtggccgacttcgccaccaccgccctccagtctatgcgccggccatccgcgtgctgcgccacctcctgcagcgccgtcaggatcgtccctggatggtacctgcggggggaagggttgcaagcgacgcggtgaagtaaaacccaagatgaaagccagccgcccggggagagaacaggaggacgggctgggggaggacggnggcacctgtggaggaggagccagacgtcgtcctcggagaggtgccgctttcgtttccccttgcacgcc

SEQ ID NO: 149675 - DNA, 215 bp, Zea mays
  Clone ID: MRT4577_6802C.1
attcggctcgaggtatggtaaccatgctactttttatgctctaggaagaggccaagctgatgaggggagccatagtattactcagcgggccgggcaggatgaccccatgagccaaaatcaatgtgcatcagatgggatagagaagtgctctcaatatgtagatattgaggggcggcatcttctgagctgacagatagcggagcggtcagagggca

SEQ ID NO: 149676 - DNA, 628 bp, Zea mays
  Clone ID: MRT4577_68030C.1
actcctatgggcgattgggttcctcgaggccggccgggggggacatattgcccatagcttctcctgtttctaggcggtctccagatatattgccgcctctcgggtgtactaacattgccatgagaggcttgatgagcttcgattactaccacgtgcgcgtgtgtagctaaagatgtgcatctgccacccgagtctcatcttgagggcgtggaggcgcctgctactagacatactggaggctccaccgttggatgacatgcaggacgacgggtcgggcggcaacttgaccttgctcgtgcgacagaactgagaactgactactttccttacccaaaggttatttccttggcgtacaactgtacttcacaggcccttgctagagcgacccgaccgtccaggtggatggaaatctgctagggacaccgcacctaagccatgtcaaggtacagtgtatttgtatctcagattctacgcgggaattacctggtcttcaccagcaggggaaaccttgaccgccatgacccacccttgaggggcaagaactcctgcatcaagagtacgactgcgacatccttcccaccccactgctgatggacttcgtcaacaacacggaaggtgtccggggtca

SEQ ID NO: 149677 - DNA, 1053 bp, Zea mays
  Clone ID: MRT4577_68031C.1
atttactctagacataatgtgtgcttgctcttctactgtgtatgtgtttgtgtactatatgcagcacggatacgactacgtgtatcagtatcaggcggatacagatacgtgaataagtgtttttttttttctctaaaaaatccgatacgtggtaacagttttacattcttgctgaagaatgtaaaagctcttttagtaatttaaagccatgcaacttcttgtagtttttttttttggtttttgttctatatgctgacatgccaccttattcatgcatccagtgacaggaactttaaagggatatgaccagctactcaacctagtgctagatgaagcagttgaatatgaaagagagcaagatgacccattgaagctatcagggaaaaccagacagcttggcctcattgtgtgcagaggcacggcagtcatgctggtctcaccgactgatggaactgatgagatcgccaacccttttcttgcggaaggagcataagcttgcagttggtcgattatttagaaccgtgctctcatgtcaccctcagaacgatgtgtcccagtgggaaaaagaactctattctcgtaccggttggtgatgaactctgtaatattccccgtgcaactgcaacttaaaacatctgtgatacgagctattttttttaaaaaaaaaaaaaaaaaaaaaaaaaaaaaaaaaaaaaataaaaaaaaaaaaaaacaaaaaaaaacaaaaaaagggggtcctttaactcagggttatttgccctttaggcaggtgtaatggggataattggtgccttagtgaaattgtttgcctctcacaatacactggaacaaaggtgaaaggaagcaaaaagttaaaagcctgaggcgccaaatgagtaacctgactagcctaaagtgcgaagtaattaatgtcaattttatagttggcaatgccgtctttccagctgtaaaaatgaataagccaacggcctgaaagaagcgattaactcatggagcgcgctggcattggctttttcacttattcccttttctcggttattgagttgatggaat

SEQ ID NO: 149678 - DNA, 848 bp, Zea mays
  Clone ID: MRT4577_68032C.1
ccgccggccgggaacatcttcatcaaccccaaattccataacgataccccttggccttaaacaacctgccttcagtccaataagaagatatgggggccaagtctaacaagtcgctttacttcgacaagctcaagggcttgctcgagaagtacacctccatcttcatcgtcgagatcgacaatgtcagctctcagcagatgcacgagatccgacatgctctccgaaacaagggtgttgtcctcatgggcaagaacaccatggttcgccgagccttgaagaccttcgtcgctgactcccccgagtacgagcgtctccttccccacgtcaagggtaacgtcggtttcgttttcaccaacgaggacctcaaggaggttcgcgatgttatcctcgccaacaaggtcgctgctcccgctcgtgccggtgctctcgcccctgccgacgtctgggttcctgctggaaacaccggaatggagcccggaaagacctctttcttccaggctctcggtgtccccaccaagattgcccgtggtaccattgaaatcaccactgatctcaagctcgttgaggccggctccaaggtcggtccctccgaggccaccctcctcaacatgctcaacatctctcccttcacctacggtatgggtatctctcaggtctacgaccagggccagaccttccctcccagcgtcctcgacgtcggtgaggagcagctcctcaagactctgtctcaggccattgccaccattgccaccatctctctggctctgaacttccctaccctgcctttcgtctcactccctcgtcacagctaacagaaggtcttgctgttgcgttgtcaccgagtcagc

SEQ ID NO: 149679 - DNA, 275 bp, Zea mays
  Clone ID: MRT4577_68033C.1
ggagactcgcagctagctgacacggccgagaagcagcttgcattgcaggcgtagtacgtacccagcagcagctagcagtagcagtccatcggagcgacgatggtgagaaggacggtgctggcggcgctggtggtggccggcgcgctcgccggcagcgcggcggcgcagtcagaggaggggttctacgactagtcctggccacaggcggagaagatcgtcaaggagtacgtggaagcgcacatccgcccacgcgggcgacgtcgggtccaggctgg

SEQ ID NO: 149680 - DNA, 211 bp, Zea mays
  Clone ID: MRT4577_68034C.1
ccaggagtccaaacttattgccaaaaccaagttgtttgggaaagtaaatcctgacaaaaggaaggttagccacggagcggccaaaccttcgtcatcaaaggtctcatctaggagttgggcacagttacacacatttattcatacacttttctttaccagctgtactatactattaattttatttatttacatcagtcaatgcaccaaggcc

SEQ ID NO: 149681 - DNA, 456 bp, Zea mays
  Clone ID: MRT4577_68035C.1
cagctcgaggcgcctatctgctgctgcgcgatagcagcaacatggctgccattctcgaaataggcgagaacatggatgagaactgcctccaattcgacccatctgcgaagcacacagagccggacatgacgcgcaagacaccagactacttcatgtagaaaaaacaggtgtggatactagaaagagaagagacgaggggaagatgcaggaaatgaacccgatgttctagctgtgactgtattgtgatgcctggctaggtgagatctttcggtgatgtggcgattcagactggctgtgcatcctaccgcggatcatagtcgaacgttgcccatgctgcgaaagatgagtacacttgttatgtggagacatctctgcacactatgcttttgaactgctccaatataggacatcagtgtctaacgtcagtcaccatgccgcgcccatgccaaccggtgc

SEQ ID NO: 149682 - DNA, 129 bp, Zea mays
  Clone ID: MRT4577_68036C.1
tgctcgagggggtaactggggattagttacattgttagctggggaacatactaactccttgagaaactgcagggtggactgtggtggaaaactcatatgaaggtgtttgatgataatttagatctgggg

SEQ ID NO: 149683 - DNA, 259 bp, Zea mays
  Clone ID: MRT4577_68037C.1
accaaaaatttgttttacacccgtgggttttaaaaaagcacgggaccatgcctgtttttttaaaagaaatgtctgggaaaaggtaaaccattttgtggcatccaaaaaatagaaaaaaaaattcttaaaaaaaccgggggttgcaaaggttaaccataatgtgtttgttttgggaaaaaactgtggtcgaacgcgcggcctttaactccacgaaagaaaaaaaaggggcccgaacaggcccaaattttttaaaaacaac

SEQ ID NO: 149684 - DNA, 601 bp, Zea mays
  Clone ID: MRT4577_68038C.1
gggggaaaaggaagtttttagtttggggcccattgttggcccatgaacgatggtcatcccccttaattttgtttacgggtttacaggagccccttttttaatttacaaggtttttgagggccggggaaaatttttgccctttgggggaaaacttgttactataggggggtggaaaaaaagaacaggaacttgttttttcggacacaaaaggttggttttttatagttttgacccagttaaattagccggggggggaaaaccagtttaaaaaccctttttaattaaaaacccctgtccttgggggggggaaaactaaacccaacatttcagtttaattttgggctcaaatccccctgccgtttttttgggttttaaaacaccccatgccgttgcaaaaacaaaaaattgttgccaacaaaaattgggctaggggccctcaccccccctgagaaagagggggttttgggaaaatttttttgggggagcacccctccaggggcaattggaagggtttcttttttttttgcccctgcccaggccaaattttggggaacttttgccatcgtggccttcgacggggatggcgcttttcccccctgaa

SEQ ID NO: 149685 - DNA, 270 bp, Zea mays
  unsure (1)..(270): unsure at all n locations
  Clone ID: MRT4577_68039C.1
agcctcgtgcagcactgacaacgacgctcacgtnacagcctacgcgcacacttgcgcgactacagagactagcagacctcacagactatacacggtcaagtagcgacgaaccagggaacgaaggcagtaccccgatacgaacatctaccacgggcccaggacggtactatcaaacccgagcgctgacagccgctaccacagggcactacaccgtggccaacgccacctcgtcgacaacggctcaacgtcgcgctggcttcgacgcgaggg

SEQ ID NO: 149686 - DNA, 400 bp, Zea mays
  Clone ID: MRT4577_6803C.1
cttttgtgttgtgtgttttttttaaaattttttgggggggggccaatgagttattaatttggacttaaaaagatggagggaagagcatccttgccaacgggggaaagagggggagacagaccacataaaaatttttttttaccccccgttgactttttattggggggggggggataataacacaacccttttccttccagataatactaaagcagggaattttgcgaaccacatacagttatccctttttttcgtttttaaaggacattaatgaaaaaccggtggcttcctggccgcttatccaatatcagggcttggaggggccagcatttggctaccaatattgccatgacaattacagatctctttgaaaatcgcgctgatgccgcccctctccagg

SEQ ID NO: 149687 - DNA, 111 bp, Zea mays
  Clone ID: MRT4577_68040C.1
gaagagccgagccaaaccaaagtcgtctagttgtatccaaccttccctcgcctctagactaggacagggttacataccagcccctgacggcatgcgatacagatggagggc

SEQ ID NO: 149688 - DNA, 315 bp, Zea mays
  Clone ID: MRT4577_68041C.1
atgacgagcgggcacggacattgtttacaatatagaccgagtgcataaaaaatcgtagctccgattgaagagccaccaaggcacaactagaaactccaacttatcaaacactgccaaactggcagtcctagaagctgctcaatctgacaagaatcgagattgctgctatacatgggttccaatggatcaagatggaagaacccacacatatacagttcttcgagaactaccgtgacgcggatctacgccatgaactacacgtgctctgggaatgaagcctttatacggatctttcatgaagacctttatcatcac

SEQ ID NO: 149689 - DNA, 1363 bp, Zea mays
  Clone ID: MRT4577_68042C.1
catcgtcgccctcgaggcgggccggggatcaaaacggaagcctgagggaaccaccgcaagccatccagaaatggtagggttcttcggcgcctctgctgcatctgatcactgtcgtttgctgacaagaaatggatcagttcaccatgaactgattagacgacaccatggcagaccaagaagtgcgatcaggtgctgcagcagcacggcaaggggaaggaccagggactattactaccaggtgctgggtatcgcaattcattccacacctcagcagatcaaggaggcttacaggaaactccagaagcaacaccatccagacatcgccggctacaagggccacgactacacgctgctgctgaacgaggcgtacaaggttctgatgcgggatgtttccagttccaggcacgccgatggaaggggcaggagtagggtggggtcaggagccggttacaccggggacggatacagttcttgggaagggcccgtgagaagccaagctctcttcgtggacgagaacaagtgcataggatgccgggagtgcgtgcaccatgccgctaggacgttcgccatggacgacgttctcggcagcgcgcacgtggaggtccagttcggcgacctggagcagcagattcagctggctgtggagtcctgccccgtggactgcatccactgggtcgagagccacgacctgcccgtgctggagttcctgtcccggccgcagccgaaggaaggccacggcgtattcggcggcgggtgggagcgccccgggaacgtgtttgcggcggcgaagaacttcgccaggagactggagagggagaagcagcgggaggagctggaacgggatcagccctccgggggcctcgacggggacgcaggccgcgaggcggagacggaggcgcaggccgaggcgaggcgcagcgcgtgggaggagctcaggtggaagcccctgcttgatgcttggaatgggctgataggtggtcgttgacgctgcaggaggttgaagagaagctcagcgctggaagctgaacccgtaacatctgcagctgcagaaatagtggatgtgccaaggacaaaatagcacctttgtggccgtgggttatcaaacagtaggtgtcgtcgtaactcgtaaatgatcatgtgtaattacagattacaaaaaatgtgtaggaatagtagtcaaatatatgtgtgtagatgttggcatattgcacaggattatgtcccctttatatatatggtggttaatggaaatggcagggtggtacatcactgtatactacagacactagtagtttccggagaaaatctattcaacggtatcgaaacttaaaaaaaaaaaaaaaaaaaagggcggccgccaccg

SEQ ID NO: 149690 - DNA, 609 bp, Zea mays
  Clone ID: MRT4577_68043C.1
gtgtttgcggcggcgaagaacttcgccaggagactggagagggagaagaagcgggaggagctggaacgggatcagccctccgggggcctcgacggtaaagtgaaccagaatatctgtccttagctttccttggttcgcgcgaacgagcttcagaaacttggttgcaggggatgcggaccgcgaggcggagacggaggcgcaggccgaggcgaggcgcagcgcgtgggaggagctcaggtggaagcccctgcttgatgcttggaatgggctgataggtggtcgttgacgctgtgcaggaggttgaagagaagctcagcgctggaagctgaacccgtaacatctgcagctgcagaaatagtggatgtgccaaggacaaaatagcacctttgcggccgtgggttatcaaacagtaggtgtcgtcgtaactcgtaaatgatcatgtgtaattacagattacataactcgtaaatgatcatgtgtaattacagattacaaaaatgtgtaggaatagtagccaaatatatgtgtagaggttggcatattgcacaggattatgtcccctttatatatatggtggttaatggaaatggcagggtggaacatcactgt

SEQ ID NO: 149691 - DNA, 252 bp, Zea mays
  Clone ID: MRT4577_68044C.1
ctactctgagtacggacacgtggtgtgccgtgggcacggcgcgcagtggttggcgccggcgcagtggacggactggaggccgtgctgcggggggtccccggagagcttccgctggaggtgctggagaagatgcaggagccgggcaaggaccccgaggtccaagtgatcgtgtttgtcgaggaggtgcatgaggatgacggagtgtagttagggttagagacgaggtacggagatatggtttttgtaaatgaa

SEQ ID NO: 149692 - DNA, 391 bp, Zea mays
  Clone ID: MRT4577_68045C.1
tggtactttgccttttctttttcctgtgagaggatgaagtagaaactatggggaagaggcacatcatctcgtgacattatgcttaatttcttattgaggttgctagtgagaagccgcttgggtagtaggtttgccatcctatttttcagccagcggtctttcaccatctgctatttgttttcactcaaaattttctggtggctgcaagtccagaaaaggtttgaggcacttaagaaaaggaaggatccaagtgcctttactgaagaagatttggatgaaagaataatgaaacaacagcaagatgaggtggaacggaagcgtcagcgcaaagaaaagaagaatgagaagaaaagagaacaggccacccaacatgaacctgaagacgttgatc

SEQ ID NO: 149693 - DNA, 348 bp, Zea mays
  Clone ID: MRT4577_68046C.1
aaaaaaaatttgtaataattattataaggggaccatttttttaatagttagcaaagggggggttaaaaaattttttgataaagaaaccaattgaaaaatgggggaaaaaaaaaaaaaagaggtcccattgttaaaataacacttagggaagcgcaacaaaaatggacaggggccttataatcctttaggtatgggaaacgggtgaccagtctaatttttttcaattttttttaaaacccgacccccaaatcgcccctttttgggccttggcctaaagccccttaagggcttttccctaaattttttttttttgaaaatataaaaaatccgttttgtagaacttttttt

SEQ ID NO: 149694 - DNA, 261 bp, Zea mays
  Clone ID: MRT4577_68047C.1
gaagaacctcctggacgaggagggcgcgtcggggtacccggagtacttctcgggtgagtcggaccctgggtgacacctggaacgtaacgacggttcgtccgaaatcctctgctccaaccaccgagtaggccagggaaaaggtgtccgtgatcgtacgttgagtcctagccactattatacacaccacgaaatgaagaaaccgtataatacggggcaatctactcattcccaaacgtccaactaacccatcatggtgttata

SEQ ID NO: 149695 - DNA, 354 bp, Zea mays
  Clone ID: MRT4577_68048C.1
gggccgcccaacccggggcgacccagcgcccgcccagcgaccgggagacaagaccctcagagagaagaacggaagcagcaggccacgcggggaaaggaaaaaggaacgaaagcccacccaccaaagaagcacaagggagagacaagagagagactacaggagcccaaaagcagaacaggcacaaaggaagcaccgagcaagcccagaagcacagacaaagagacccaacagacacggggcagccgagaaacaccagcagaagggaagcaacagcagcaaagagacgagagaagaagaggcaccaagaggggaaggccaagaagaaggaagcagaggagaagaagagggccgaga

SEQ ID NO: 149696 - DNA, 356 bp, Zea mays
  Clone ID: MRT4577_68049C.1
gttgggggttgtttggtttttttttttttttttgtttttttttttttttttttttttttttttttttttttttttttttttttttttttttttttttttttttttaacaaacaaattactcccctattctggggtctgaatacaggggccgggggggggggggatttcttttttgccccctggttttttcatggcccgcttttaagggaccctgaaaaaaacagggggcccctcgggccccggggacaaaaacagggggggctaaaagatggggccccggggggaaaattcctccccgggggcccctatccccaattggtgggtcttaaaaaacatttggggggtcttgggtcccc

SEQ ID NO: 149697 - DNA, 803 bp, Zea mays
  unsure (1)..(803): unsure at all n locations
  Clone ID: MRT4577_6804C.1
ggtacccccnggtttgccgggacttgctgccgtcttcgcggtctttgcgcgggcagggtagagccggagatcagagatcttgatgcagacaagtccttcggcgtgcaggttctctctaagcggaatccttgtgttcttgagagagagagagagagagagagagactcagaaaggtagcgcagaggtgagatttgtaacctgtaataagcgacttgtggcgctgaagatcgaaagtcagagaaatcttgtggatacaagctccacctccaaggaatgataatggaccctcgtcctcgtgacgatcccaacctcggtgctcgattgcccaccccaaatccacccgcacctcacatgattagcttctccctccagcagccacagcttcagttcttcccttcgtatggattccacggccacagccacagctctcctgtcagctcgcatccatctccaccctcggccatgcctggctgcaccacgccaagcccggcatcgacaaccacaaccgagcgagacagcgtcgaggatttctccgagaaatctgctgacgacgcggtcctagcatacatcatgataatcgaccctcgagacgaggacgaggaatcctatcctattaccagcgcgcctgtggaggattcagcactcctcgccgtcgtcgagtcccccttcgtcgacatcctcgagtctttcccgcctatcgcagcacagggcttatgaagtaaagtctttgggatcactgatgactgtgattctacagggagcgggaagggtttcgcgatgtggtcacaaagtagtctgcctcg

SEQ ID NO: 149698 - DNA, 302 bp, Zea mays
  Clone ID: MRT4577_68050C.1
cgtttttgtaaggtaacaggcttgtgtaattatacatatgggggtgctgcaagaacatcattggttgcaacaattggtccatattcagaatagaggctagagattacatatacaatgatgtttggacagtcggagactttagttgatcacatgatagaggtgatggattacttcgattacacgaactaaggtagcatacttgttcttgaatatggtaaatttctagcatgaaatgaggagatgaggaatgattttgatgaggaacatcatagaatcagaggtggaattctattccgcattgt

SEQ ID NO: 149699 - DNA, 465 bp, Zea mays
  Clone ID: MRT4577_68051C.1
acgcattcttcccctctgctaccctcttgcgtggactcgaacacccgaaatcagaacgccgtcggcagagccgtatccaggaaggtgaaagcaccgccgccaccgtcgtccgcgtgctacaccatagtcgtgaccttggagtactacctaggagattcgccttattgtgattcttgtgcgcgatcacttcgagagagcggaaaccagccgttccttcctcaattgctcgccggaggagggccgtcaccctgtttccatgtcgtgccgtgggcaaggggttcgggcattacgattcaccgacgagccatctacagaggatctcggggttcagcaggtggagactgctgagcaggagctcgttgaagagatcaaagatgtggtgtttgccctgaaacacaacagtgctccgggtcccgatggtttcccttctgaattttatcaggagttctgggaagtcatcaaagt

SEQ ID NO: 149700 - DNA, 892 bp, Zea mays
  Clone ID: MRT4577_68052C.1
cattgggaccctcgaggccggccgggacctctacggtacacactttaccaggccactttgagcagtcagttagcagcactgataacccacccagcctcgatacaacaacacagcaaccatgggcaaggcaaagtacatcatgctcgactgcgacaacacgcttgtccagtcagagcgctacgccttcgaggcctgcgctgacctcaccaacgaagtcctcagcaagcacaacatcgacgccaggtacacggccgagacactgcttgaagactttgtcggccacaacttccgcggaatgctcaacggcctgcagaagaagcacaacttccagatgccacccgaggagatggatgactacgtccagcaggaactgggtgccgtcactcgcaagctgagccagaaggcggttgagtgtcctggcgtgactgagcagctcaagtggctcaaggagcagggctaccccatggccgttgtgtcgacttcagccaagagccgtgtcgttgcctcgattgaaaaggcgggcatcgaccacttcttccccaacgagcacgtctactcggctgccacctcgctcaacccgccctcgtccaagcctgaccccaagatctacctgtacgctgctgaacagctcggtgtcaagccatccgaggctgtgacggtcgaggacagcaagagcggtgccacggctgccatgcgcgccggtatcccctgcataggatacgttggcatctacggcatcgaggagggcaaggagaagatggaagagatggccaagctcctcacagaagagaccaagtgcgcggccatcatgtacgactgggaggacttccccgagtgcctcaagaaggttgagggcttcatgtgaatgcatggtagagcaccaggcatgacg

SEQ ID NO: 149701 - DNA, 248 bp, Zea mays
  unsure (1)..(248): unsure at all n locations
  Clone ID: MRT4577_68053C.1
tcagatcatactcaagaaactctgatatcancacattaacaggaagmgaaacatcgctacaacacatatcataacagaamcggtccagcctagcmmctctgmctcctcccacaagaaacaaagaaagtcggcgcctcacaatctgcccagcacaacaccgmacgcsggrctcgccgaccaacccccmccrcgcgccgcacaaccaaagrmacacgtkctcgatagcacaggcagaaacaaacgtgtta

SEQ ID NO: 149702 - DNA, 589 bp, Zea mays
  Clone ID: MRT4577_68054C.1
gccggccgggtcgggatgaatcgcccttaccttacccgtgaggacagacgacgatcgtgaccatgaagacaatatgagatagagacatcgcaagatgatgtatgatgatgatgaggatgatgttgaggccgtcgacaacaaactatataacacgattgtgtagaagacatcaccagctgaatacgcacgcatcctgcaccgtagatgcgtggaatcgtccgcacgacgactcctgcactcaccacccgtacgtcatgcacgctagcctagatagcgccactgatggatacacaacagatagagagatagactttcccacaggatacatagatgaggatgacctccaagatgctgcaacattgacctacctgaattatccatggtgttgcgcatactcggacaatcgctctttctttgcatcggtgttagttgagcccattatcacctgtccatatgcatatacggaagctgtgtgtggtgaacatattttgagggtagctaagtatgaacctgttgactcttatgccgacttacaccgctgcttatctgagaaaaaaaggcccctaggggcccctacggtcgagaacga

SEQ ID NO: 149703 - DNA, 559 bp, Zea mays
  Clone ID: MRT4577_68055C.1
ctctctcttctctgtctgcgtcatctcatttccgtttccgtctctccctctcctcgcccacacgtccaaaaccgaagggagcaaacgaacaaaacccggccgagtaacgcaggagacgaagctgcggaaggcgagcaagcacgatggaggcggcagcgtcagccgagtacgggtactacggcccacacgagacgaagaccgccgggtgcggggaccacttcgtcgtggacgacctcctcgcgctgccgccgtacgacgaggaggaggagggggcgacaggcgagaccccgctgtgcctgcagcctgtcaaggaggagggcggcctcgggaatttctcggccgactcttccatcgtcacagcaatcgacagctgcagcaactccttctgtaggctagccgatgacgacttcccgggggaattctacgagccgtacgaccaactggtggagctagaatggttatcaaactacatgggcgagggcgaggaaactttcgcgtcggatgagctggataagttgaagctcatttcctgtgggtcctcccctgcgccctgtgaacg

SEQ ID NO: 149704 - DNA, 168 bp, Zea mays
  Clone ID: MRT4577_68056C.1
cagtcgattagcgagtcggaggtccacacctgtgcccctttgacacccttggcgcgctagggttttcctgtcccaccccgctcgtgtgctgccttttcggtgtcgagtttgcctcctaggtttcggtcccggccatttcagccccagagggtagtcatagcaacaaac

SEQ ID NO: 149705 - DNA, 449 bp, Zea mays
  Clone ID: MRT4577_68057C.1
aaacataatcccacaaaataaaaaaggatcaatagggattacattagggggggttcagaaagaaaaaccaaaattttaaaggccggggaaaaaaccaacggaaaaaaccgggaaaaagggggaagccgggccacgccactcccccggggccccccccgggggagcaggaacccactcgaccatctatcccgggggcagagaggaaggccaagtcacaccatcaaccaaaacaagggggacctttaaattaaccggacccggggggccacccgggaaatcccgaccgggaccggcaggggcaccaactttccccaaagggaggcgaaaaaaagccgggcgaaaaaaggggcaaagctggtccctgggggaaattggtatccggtaacaattccacacaaaaaaccagccggaagcaaaaaggggaaagcccggggggcccaagggggggg

SEQ ID NO: 149706 - DNA, 334 bp, Zea mays
  Clone ID: MRT4577_68058C.1
gcagaccataatccgtcctaccaatcgccttcacagatcggcggtccacccggaggctgcgatggcgtcgtcgcatgcttacatctacaagatgcatctccttcagagctaccgcatcgtctgtcacaccgacatgactaacgccatccatgcctactaatactactgctgcctagcgctgacgagagtcattagaatgtcactcatgcgtcaacttgtgctattactgaaaatacacctttgagatctgtgaagggctccaatctatttaagcgatcaaaggaatagtatctaggccttttcctgagctggtgatactaatatggagcaccat

SEQ ID NO: 149707 - DNA, 745 bp, Zea mays
  unsure (1)..(745): unsure at all n locations
  Clone ID: MRT4577_68059C.1
ccggccgggctcccgtcctggcggcacatttacttcttccttatcacctccatctctcaccccggtctctctcccctcgcgcggccggcgccccaactccctcccctccggttctcgctcgcctccacttcttcctcctcgcctctgggtcctgacgccttccaccgtcggccggagaagcacctccgccttgccaccgtcgggccctgctgtctccagccatcgccgctccacctccgccaccccaccaccgggtcccgtcggcatctggccactgttgccggtgcagcggcgtggcgaggaagcgcgggaggagccggtacggcgggacgcggagggccccgtcgcctggtccgcaacagcctgcatcccgggaggccacgagtaagataaggcggcagcccgactaaaggaacgcccgccgtcgccgccgccgtcgccgacttcacctgcgcccctctattggaacacctgcttgctgttttttcttctctgttcacctcgtctggccgggccggactgccgcagccttactcccagctgcccaggtttctgttggacccttcgacggcaacgagcatccaccataccaggtaggtcgacctgcgccaatgcactgacaacacggacacggnggatacattcttcggtgaagaataatcttagctttggacctttttagtggactcgagctatttgcatggagattgtgaacagtgtttccttcagctcatttggagtcgga

SEQ ID NO: 149708 - DNA, 362 bp, Zea mays
  unsure (1)..(362): unsure at all n locations
  Clone ID: MRT4577_6805C.1
gcacagcgggagccnaggcaaaaaaaaaaggcagcggnnnnacaccannnnncccangggcaancccngggcggcaccaanaacaanaggagacccnaagggcngcancagcggaggagcaaaagnnncaannaagggcancgnnnncccgggaaccgggcaagaacagnnccacccaaagggggaccaggaagnccaaccacagccggggggagggggaananaanngggccagannananaancnaaccgagggggaaccaacaccgaggncaaaagaagaaaggggananaancggggcaggggaaanccnaaacaccaggcccncaancacagagaggggcagagccaagcgaccacg

SEQ ID NO: 149709 - DNA, 396 bp, Zea mays
  unsure (1)..(396): unsure at all n locations
  Clone ID: MRT4577_68060C.1
actatcattaccactttcacaacaccgaatatgccctctacagctcaacatcgatcaagagccnaagaagatattcatatcgggtttggcaaactattatccatataacctgccaaagtttctgtccactaaaaacactctcatctcactattgctcgaatccagattctcatagcatgcttctctaacgactaatgcatgcacacttattcctctataatctatatggatatcttcatcaccaactcactaaatctttagcttatcaagaacgctttcttagaatgaatctacttacatagcggcatctcatcatgacatggtaaataagaaaaagaagcatctgttttcatttaacctacagcaacttattgatcatcaacacaagtctcactt

SEQ ID NO: 149710 - DNA, 1010 bp, Zea mays
  Clone ID: MRT4577_68061C.1
gctataatgtatttttagcgtcctcgcggaccgtttggggtgcacgaccggaccatccgcgactgctttatctgacatctgatgacgcattaaatgctttatagccgttgatatagccgttactgctgaccgttgcgattttagtcgttgatgtgcaggggcagaccgtccggaccaggggcgcggaccgtccgcggtcggcagaaagagagcaacggctaggaagtggttgggggctataaatacaaccccaaccacctccattcacttcacccaagcattccaaccttcaacattcaatacaagagctagcaatccattccaagacacaatcaaagcctccaatctctccaagttccacaattgagacaagtgatcattagtgattagtgacttgagagagagagggtgatttgtgtgttatttgtcgctcttgtcgcttggcttttgcaatcgcgctttcttccttcccattcttattctcaaggcacttgtaatcaaagcaagagacactaagtttgtagtggtccttgtggggtctaagtgatccgtttgattaaggagaaagctcactcggtctaagtgaccgtttgagagagggaaagggttgaaagagacccggtctttgtgaccacctcaacggggagtaggtttgcaagaaccgaacctcggtaaaacaaatcatcgtgtcttgctctttatttgctcacgatttgttttgtgccctctctctcggactcgtctatacttctaacgctaacccggcttgtagttgtgcttaagtttataaatttcatattcgccctattcacccccctctaggcgacttttagtaccaagtgggtattccgcaacaagcaagatgagcatgggtgtgttgacaaggaacaaagtctgacttgtggccaagggatattcacaagtcgaaggtttggattttggtgaaacctacgcacctgtagctaggcttgagtcaattcgtatattacttgcctatgctacttaccatg

SEQ ID NO: 149711 - DNA, 761 bp, Zea mays
  Clone ID: MRT4577_68062C.1
gcatcggcgacccttttttttttttttctctgttcgaaaaccttggatggatggtgcctttcttatcgaaatggcatcatggactgtatcatttgtatggacattgggtaacgttttcagttcaacagattggtgatttctggcacaagtacatctggcatgggttcaaaagtacaaatctaacgctacattaacaggcatagacttatcatcaaccgcgcccaatcagatgatacagtttccgaaacataagagagttttctttgcagaatgctcagggcttcgtatcgctcttcagagcttcggtggttgtggtggagcttggttctgccagcgaaaacttcttcaccctcttgcgcacgatgcattcacggagggcgtcgacgagggcgaggcacctatcccggtcgtaggggaccgaggcgacgcagttgagcagcgccagcgactcctgcgcgcagaccggctgcgccgtcgtcgtcgtcttctccatgccgatccaaacaggaggatgctttgcctaatccagagagagggagcgcaggccgctcccgtgccgcgaggcctttacaaaggaccgcgccggcggcgcggcttgggcgagaagaaagaaaaccagcggcggtcggcggccgttgatgggatcgcaatcggaaagctctctctctcgagccgtctttctcgaagaagctcccgccccgcttcgagcgttaccaaatgcgccggagacggcccggcccacgcgtccgcccacgcgtccg

SEQ ID NO: 149712 - DNA, 705 bp, Zea mays
  Clone ID: MRT4577_68063C.1
tcttcttctcccctttgcttcttccagaagctccctgaaagtccaggcccgatcccccatggcctccggcgaaggcaccggagattcgaacgctgcgggggcagggatggaggtgccggaggtggagttgtgcctcgacctcacgagctgccagctgcacgatctgagtgaggtggagatcccgcccaccctggaggagctggaccttacggcgaaccgtctcaccgcagtcgacccccggatcggccacctccctcgcctccgcaaactctcgttccgccagaatctcctcgacgacgacgccgtcgcgcccctcttcacctgggatgccatcgctggcttacaggagatagtccttagagataacaagcttataaagatccccgatgccagcatcttcaagggtcttctggtgtttgatgtttctttcaatgagttgtcgtccttaaatgggttatccaaggtttccagcacagtgaaagaactctacttttcgaagaatgaggttccaaagatggaagaacttgaacatttccatgcattagaattgcttgaacttggtagcaacagattaagggtgatggaaaatctggaaactttgacaaatctacaggagttatggctcggaagaaaccggatccggactatcaacttatgtgggttgaaatcaatcaaaaaaataagtctgcaaagcaacaggctaac

SEQ ID NO: 149713 - DNA, 792 bp, Zea mays
  Clone ID: MRT4577_68064C.1
cggccgctcaagccggctggcgggacttatctattcccacttctcttctcctcccagatgtcaccgacgagctggatatttctctcccctcccagcgatactctttcttcttcattcttctccctcgcccccttcgcgagctgcactcaaatctgcatcaccacctctcctgttctgtcgcccacctcttccccatcgagctaccgccgggctccggcccgcaccatggtgccccttcactatccatcaacccacgcgtcgccggtgctctggacgaagctctgctgccacatcaccaccagccgtgaacaaatctgactctgcacgccaccccgcacgcggcaagcgaggaatctagtttcctggaatttttcttctttgaattttttctttcatcgattttttatccgaggtttctggatgttctcttggacctccagccgttctcatttacagcgccgcagtccttgatatttccatctgcgtcccactgttcctcttcctcaaaggtcaatcccttcccctctttctgatccttcccgatctaaaccagtgagctgctagatccgccgccatgtgtgcctcctcgtccacatcatggcatcctagctccacgagcaggctcctcttcatgtatagcctggcaccgcctccaacaccacccatgcgtcgccggtgctcgggacgaagctccgctgcctcatcgcccccagccaccgacggatccaacctcccatgccaccctgcacacggccaccgatgaatacagaattacagatacagtagaagcac

SEQ ID NO: 149714 - DNA, 111 bp, Zea mays
  Clone ID: MRT4577_68065C.1
gaacacgtcactaatcaccacggcggcggaaccatcgtagcaataagtgctgtcactcatttaggacccaacataaccacgtgcacctgaaacgccacacggttgacttgc

SEQ ID NO: 149715 - DNA, 509 bp, Zea mays
  Clone ID: MRT4577_68066C.1
tcccccttgagccgccgcactgttcttcttcttcctcccccagcaggcacccctcttcttcgtctgaagaactcaccaaatagccaaggctccttcatcaccaacaggcaaatcaagttctccatggctccagcggctgcagcccaaccccccttcatgtgccacacagcccaagcagcagttcttcttcatgtcttctccttgagaaggggaagaagaacatcgttggacaccatggacagagaaggagaaacagccaactggtggggagtggggagcagcacctaagaggaaggaagccatgggattcaacatcatctgcaagcaagatttggtttgcaggagtggagctcatgggggttcagcaccatctgtagaagtgggagggctactacttccttgaagatgccgaaggctatctgttccaggaggccgatggcgggttctactttttggagtgctttgaaggggagggctactattaccaaagcgaagaaagtgactacttt

SEQ ID NO: 149716 - DNA, 325 bp, Zea mays
  Clone ID: MRT4577_68067C.1
aaaaccaaaaaaaccctggatgggtttcacttaacttaaattttaaaatgaaatttgcctttttttggcaacattccaacgcttaaaagggggggggaaaccttgggggaaacgggtaataacttaaattttccacggggggaagaaaaaaacttgcccagtttggtgcaggaatacacagagtttttgttttggttaacaaaacggggcaacagtgggccccacccctgaaggggccgccatttggaattgccggggaaacttggggggggcggacaagaagacttttcaggggggcccccgttttttggactggaatgttttg

SEQ ID NO: 149717 - DNA, 579 bp, Zea mays
  Clone ID: MRT4577_68068C.1
ggccgggaataacatattttcagaaagactgcttctaggtacgtgtgctctgcttctttggtgtcgttccgccgttacttctgtcagctgcctccatcctacaagcgtagcgaagcgaggctagcttacttactgtgtggctggatgtcgcgcgagcgctgggacatgaggccacaggccataccttctgcctcgttggccggatccaacgtggtgctcgcaatggggagctccatcatgcttctttccgacagggtcgtgctctattccatgtgccttgcggaagaggaccctttgccgcttcacatctatgacgacaaatctccgagctgtcctcctctgctcagcgcgagcctttcctttccctagaagcagaaaaatattaaccacgagatgcatctccagggcagatcacaaatcggcgaaccttctgcgtcaccacagagttgcttcggacaaagtccggccatgcccgccatgcaagggaagatgctcgaagcgtcccacctgggcggcatcatacgcacatgccgctcaactttttattttgtgtaccgtcgccatgctccttggaacatc

SEQ ID NO: 149718 - DNA, 383 bp, Zea mays
  unsure (1)..(383): unsure at all n locations
  Clone ID: MRT4577_68069C.1
ggcttgngacctttgggctgatttatgtgcttggatgattcttttttctttttgtacctctctatgttgttcgtgtctcttttgctgtgagacagataatttcagtctttgctcttccgtccatttcttctcttaattttctcttgactctcacaaaagatttgaaccctgaacctttttctgaatttgtgacttgtgtcccttcctttgtttaccctggctctcgacctggtgtggacctgtcgtgtgggagtttttgaggccgtgcgtgcgacctggacggtggagttggngtctgagggtagttagttggcggactcgcttaagtattttctcggtactgcttttatgtcttagaacactgcactaatagccaacccgga

SEQ ID NO: 149719 - DNA, 297 bp, Zea mays
  Clone ID: MRT4577_6806C.1
ctgggcaagtcaaaactatagcagagttgcctcctgtctctcgactcttccagagatatcacttaattgttaacagcttttgtgtcaatccccttcagcccctagctcttttattctaccacggctggagagttgatacctgcagtcagcctgcctgtgactcctagtgtctgtctctgacttatttttcctgtctctgtcttccaacccccaataatatgtccaccggggatgcatcatttttactcccaatatcctgtagcagacggagtcaggatgctgtcttcacacgaatag

SEQ ID NO: 149720 - DNA, 313 bp, Zea mays
  unsure (1)..(313): unsure at all n locations
  Clone ID: MRT4577_68070C.1
cccacgcgacctggctttcgcgcccaaaacgtcctcctcctcctcgctgtcctcggcgttgcacgcagcgtcaggcgccgccgctgctcctgaggcggatgtcntctaccgcaacaccgagacggaggtacgacgcgggcgtcgtcgtcactagagctgcagcggctgctgtcaccgttcccggcgccccgccgcatgcaccggcgccagcgcctgtaaacacaaatcccacacttggatccgataaggggacgaaacgattactgtccttgggtgaatggaaatgttgctgctgcatgttgtattaaaaccg

SEQ ID NO: 149721 - DNA, 167 bp, Zea mays
  Clone ID: MRT4577_68071C.1
ctgttatttttctactctccccagacattttgtaggcctttggcattctgcgaacttccttattcactctcctagtgtggagctataagcccactcaaactatatacatgactctaagtgccatgccgaactagttcgcataatgtaagtgcaagggctgctaagga

SEQ ID NO: 149722 - DNA, 260 bp, Zea mays
  Clone ID: MRT4577_68072C.1
caaacccaaatttttttgatcctttaaagcaatttttataggagacccaccttttttaaaaaatgtacccccaggaaaaaatatttgatttatcaaaaacatttttttaaaaagagtttattttaaaaaaaactcggggccaaaaccttacaaattttaaaaaagaggatactttaaaaaccctgtttggtttacccatgggtctttttgcggaaaggcattttaaattttggacatttttttaaaaagggaaacaagga

SEQ ID NO: 149723 - DNA, 712 bp, Zea mays
  Clone ID: MRT4577_68073C.1
acagtgccaaaataattcggtactgtagagtgcataaagtacactatgttacaacttacaaagcagccacatttgaggcacaactgccttcgattgctggatgcagggggggggggtattgatacacaaaaactaaaatacagatctattatgtagggatcagcaacttggcacaataaatgagtcatgggtaacattccgtgtttactaagtatgtgtccgatattttaaacaatgtgagcagggagatattgccaagacctggtttctgacagaaaaagaaaactaactcaacatcaaataccactaaaactggtagaagaatgataacatatattcagaaatctaagacctctagtaaattatcaagatttcatggagcatgtcgactctgcaccagttggcaatggcaatcacaaaactcagtgtgcttgaagctctcgcctagatgtaatgacaaaggaccatgataataccaagaacaaataaagcctatcaagcaattgatgaatatgatacacattgatgtcattcaccttgaaccatgaaaacttaggtttcaaccacacacttatcctcaacattgccatttgttggggaaatttctgtgcctgaagtcatgactttctttttttaacactcaggggctacattagaaaagggatttttcaacactgtcaaaatatctgattttgaagctccacccaactta

SEQ ID NO: 149724 - DNA, 448 bp, Zea mays
  unsure (1)..(448): unsure at all n locations
  Clone ID: MRT4577_68074C.1
atcatacgaaatctatggaatatataataccactcaatacttacatgggagcataacgaggacacaaataggagactgtgcaaatgtacagcaccgagataagaaaacggcaactatactgttacagtagccaaccttaatacataaacatgttttttgtttggcgattagcactgcacttcaagatcatggaacctcgaaggtggtggcacctgcaggcgcagcggattcactagtcacgggccgaagctccaaaaacgaagggttgttgagaggcttggaaacagcttgaggcaccgcggcaggtgtctcattgcacttgacggggacctgtcgctccatgatgactacgtcgcaggactagacgccttccatcttgaaccagacccgnttggcagctagcaacaaagtcctcaaaggacatggcaaccccgaccacaaagggccc

SEQ ID NO: 149725 - DNA, 662 bp, Zea mays
  unsure (1)..(662): unsure at all n locations
  Clone ID: MRT4577_68075C.1
gaattcggcacgagtgttcatgttgcaagtatcatcaagtgcactgacctctaccgccactcgaggcagcaccaccgggtgttcgactacatccctccatctgcaactgaactaaacgaagtagacaaagctacgtgtgatctgagattcaggacctgcccagcgatgtactccactctggaggacggcacagtggtgaggggcctcgctggagtgccccaggacggcccagtgctgctggtcggcaaccacatgcttctggggatcgagctcatctcgctggcggcggagttcctgcggctgaagcgggtggtggtgcgcggcatcgcgcacccgctcctgttcccgaacaagaagagggcgtggtctgagggccatgacttcttcgacttcctcaacctgtggggcggcgtgcccatgaggtacaagtccatctacgacctgctgcgcgccggcgagttcgtgctcctctaccccggcggccaccgggaggcgctgcattgcaagggcgaagagcacaggctgttctggccaacccagacggaatttgttaggctggcagcacagtttaacgcaacgattgtgcctttcggagtcgtcggngaggatgatctgttagaactgctctgtactttcgacgacatcaggaatgcacccttcgg

SEQ ID NO: 149726 - DNA, 316 bp, Zea mays
  Clone ID: MRT4577_68076C.1
ccccctgccggtgtcggagtatcgggtgtcgtagagggttctgccgggggttacggctttcgtggcgtgggccggatacgagatcggcggcgtccgtatgttagagtaccgattgctatcgtcggcagcgctctcctggtgccacggtacgaccatcttccctccacaacgtccttacagcacctacgcgcgagggtccttctagtccaagcatcatcctccgatctgagagacccagtacgtccccccgtcttctagcttcttcaccttttttcacgggggcaggcgatgctgtaaccccatctgtaggcattaa

SEQ ID NO: 149727 - DNA, 838 bp, Zea mays
  unsure (1)..(838): unsure at all n locations
  Clone ID: MRT4577_68077C.1
cctcgaggccggccgggaccgttcgatccgagtgtcctgcagagcccatcctgttcctgtccccctcgagcaatcgagctcagctgcacgctcgcttacgcggagacacagacgctgagacacacgcaggtcatgatgctgctcatggactcggggagccgcggtgactgctccccggtctgcttggacctcagcgtcggcctttcgccgccgtcgccggggagcggcccggaaacgacagctgacgctgagagactcgaccgtcccgccactggctgctgggggccacggacatcgtccctcgctgacgggcaggacgaggccaagaccctggaggccaggctcacccaggtcagcgaggagaaccggcgtctcaccgagatcatcgcctacatgtacgccagccaggtcgccgcgcggcggagtcccgacggcaggaagaggagcagggacagcctggagccgtcgaattcgggcgacgccaacgctgccgtcgagagcgccgccctcagcgacgagggcacgtgcaggcggatcaagctcaccagggtctgcaccaagatcgacccctccgacaccacgctcaccgtcaaagacggctaccagtggcgcaagtacggccagaaggtgacgcgcgacaacccgtccccgagagcctacttccgctgcgcatacgcaccatcctgccccgtcaagaagaaggtgcagaggagcgcggaggacagcgccatgctggtggccacgtacgagggcgagcacaaccacccgagcccgacgcgcgccggcgagctccccagcttcacctccatcaactcctccggcccggncatcacgctgg

SEQ ID NO: 149728 - DNA, 360 bp, Zea mays
  unsure (1)..(360): unsure at all n locations
  Clone ID: MRT4577_68078C.1
taattaacatttccgctggggcgtttgttttttttttgaggaataggangccaacgcccacagcaacaaacacccaacctcctatacatgacaccaggaaacgccctcctgtaaacatctgaaaatacccacccccccgccaatctggtacttgcgctgcggccttagcatgaggagggcgctcgccctctcaaaacaccgtcggccactccccctggtcgtccttcccgtttttctctacacgattcctgggaccccctcaccaaggcaagtcacacacgatcctgccgagaacccttctatttatgaatgccccggcaaaccttctttcagtttccaaagcaatggtgagaataaaac

SEQ ID NO: 149729 - DNA, 352 bp, Zea mays
  Clone ID: MRT4577_68079C.1
ccggaaacgacagctgacgctgagagactcgaccgccccgccactggctgctgggggggacggacatcgtccctggctgacgggcaggaggaggtaactaactgaccgacgaccatttcctcgccgctcggtttccacaatctatcggcgtcgtcgtcgtccctgaaatcctgaaaatctatcggcatcggtggccacaatgctgtgtgatgatgacaggccaagaccctggaggccaggctcacccaggtcagcgaggagaaccggcggctcaccgagatcatcgcctacatgtacgccagccaggtcgccgcgcagcggagtcccgacggcaggaagaggagcagggaca

SEQ ID NO: 149730 - DNA, 292 bp, Zea mays
  Clone ID: MRT4577_6807C.1
accgactcggaggggccgagaaaactttgaatcaaatgacatgaaggggaaaggtttgacaagcccagcaaacgactctctgagtcttgtgtgaaacccaccaagaaccacgaaaaacatatgtggaaacaaggtcaatgatagatcacacagcgaactctctggcctactgaaaaacctaggatacaccgcaaaaaaaaaatacaaagtctgggaatacaccgtagactctaaaaaccacacacattcaagcagccctgcactcgataaaccaaaactgaactccatgttg

SEQ ID NO: 149731 - DNA, 254 bp, Zea mays
  Clone ID: MRT4577_68080C.1
ttgagcctcccagcccgacctggtcacagtgcgctggtacactacccccacaagctcgaagaagcagtggtactttgacatggctcctctttcgtccaaggccgttgcactcgttgcactgttctccctcctcgtcacctacgccgccggcgccgggaacttcaacgactccgccttcaccgccgaccccaactgggaggacgccagggccacctggtacggcgcccccaccggcgccggccctgacgacgatg

SEQ ID NO: 149732 - DNA, 272 bp, Zea mays
  Clone ID: MRT4577_68081C.1
gtgatgcttcagccaaactctgggatgtgcgagaaggcatgtgccggcagaccttcactggccacgagtctgacatcaatgccatttgcttctttccaaatggcaatgcatttgccactggctcagacgacgccacctgcaggctgtttgaccttcgtgctgaccaggagctcatgacttactcccatgacaacatcatctgcgggatcacctctgtctccttctccaagtagcgggcgcatcctccttgctgggtacgacgacttcaactg

SEQ ID NO: 149733 - DNA, 328 bp, Zea mays
  unsure (1)..(328): unsure at all n locations
  Clone ID: MRT4577_68082C.1
gcaatcctatacctggaagtatatcctgggcgaataacaatgtaatataattggtgctgttgttcagctagattttattaaccaccctgtcttgaggcttatttttttttttttttnngacaacaggngaagaagcatggaggagtttcctcattgtaaaagcatccggnacgncnngngnggctgctggggggggaagngccccccccacgctganggagaagnnccaagcggagggggagcacaagagccgccngccgaaaacaaaaaaaccagcaangaangngacgcacancacgggcagaaanncnagcccggctgcancagc

SEQ ID NO: 149734 - DNA, 347 bp, Zea mays
  Clone ID: MRT4577_68083C.1
aatacaaaggttaacacatatttaataaattgcgaatttaatacgacgaggcacaattctacttgctagaggttgtcgcaccgagggccacatggggttgcagccacaacagatcagacttgagggattttgtgtgaatgaacaattctctttcttactccttgcatccaccagcagcaaggggatggggaaattgatttggctgtagggcaagcaggggcctagcatctatcgtgggggattggccacgtgtgggggcccatgggcggtcggccagatgcacgcaggggggtatgggggctatccgggccgcgccattggccgaggtgcccaagctgctggatgcg

SEQ ID NO: 149735 - DNA, 530 bp, Zea mays
  Clone ID: MRT4577_68084C.1
atcgccaacctcataatttaaattcaaagggccttttttttattacaatccaaaccaaacccgttttttttttggaaggggccaacatgcaacaaattgttttttgagaacaacttttggaaaattttatttaaaggccgttcatgacccttgtttttggcataaagcaaaacttgaaaaccccatccgctttagtttcccttcctggggaaagggcacccctaaaggggccttgcctttcctcctgggggtgggcaaaggacattttggcacccagggcacaaaaaaacagtttgggggggggtgaaaacaggggttttgcaaaaaaaaaaccttaattaatcctttcccctccctttccaccagaagggtttgggaaacttgttaaaacaatgggttttcctttaccccaatgaaaaaaacaatttaggcttatggggcttaaatttatgacaacctcctggttttttgggacctaaaaacacaaaaaatgggggatcatttttaagtttgggggggcccaaattttt

SEQ ID NO: 149736 - DNA, 347 bp, Zea mays
  Clone ID: MRT4577_68085C.1
aaatacgtccggcttgacacatgtacaggttctttgcaacctagaaggaacgagggccgataatggctccggcggagcaggtggcgcagctggcgggcgaggacgcgttcagcctgatcacgatgatcgcggaggctgcgcaaacggtgcggcggaaccgcgccctgtgccagcagctggcccggggcgtggagatgatcggcggctctgctccggcggctgcgcgagcaggacaacgacgacgactacgatgtgcggctgctgcggcacgcggagacccgcggtcccacggaggcgctcgaggagacgctccggcgcgcgtacctgcatgggcggacctgccagcg

SEQ ID NO: 149737 - DNA, 543 bp, Zea mays
  Clone ID: MRT4577_68086C.1
accccctgttccagaacctcgtcgaccgctctggcggcgccggcgtaggcgccggcgggaccgtcgtcggctgcgaggtcgtgctgttcgagcacctcctctggatgctcgagaacgcccgaacccgcagccggagtcgcttgccgagctcgtcgagtattacgcgtgctgaccgcctacccacggtcacggccacgtccgatccacgatgccggcagcgcagcggcgcccccgagctcgacggccggggtcgaggggtaatttgggtaatctggttcctttgtttaatgttaggggtagagttgtaatatatgcagggttgcgagggcaaggagtaatccacatggagattgctaaccttggggtgcttgtggtaattgtgtcgagatagccgtgtaattaccgtgcacccaaggtaatgctatcccggggaagttaattactctctagtgcctgatcatgtaacaatgtggcttgcatgtttcttctgctagctgtttcttttaagcagaattgaataagatttcaggaacggatgtatgt

SEQ ID NO: 149738 - DNA, 381 bp, Zea mays
  Clone ID: MRT4577_68087C.1
ttattttttttggttttttttttttttttttatttttttttttttattgttttttgttttggttgctttggtttttttaacaccaccaaacgcctggcttgggagggattttatgcttttcagcaggagtagttgggtttacaaacttttggagacccactatgcatttgtttgggggggggggcccaccccacactggggggcgcttttcattttttggtcgggctggcttgggggggttttttgggtgcggagcaacccgggggctttttagggggggggcccgggggccggtacttgggaaccgttttcctgggctttaggaccttctaccgcgttttggctgcaccattggttggtttttttggggttccttgggga

SEQ ID NO: 149739 - DNA, 423 bp, Zea mays
  Clone ID: MRT4577_68088C.1
ggcgaacctgcaaaacccgtagctgacgcatagggaggggaggaacattagcctggaccctggaaagagcaagcaagtcggcgacgggcaacccgtttcggcggcggcgctagggcgcggacccccagcaagtagccaccgcaggcaagctcctcctcccgcccgcccattggaatgcggagagatccacccgggagtgggtggattggtttcttcctctgttgatacttcaaatggactattatggactcagcttggtatctgaaaaagaaccagcatagctacactccctttgcaagactaatagactctaaagatgccttcctcaccatcacctaggagatctctgaaagaagtttgccacgcaagggggcataagtttgtcagtattctgcctgctaaatcgaaggatgatgaactcac

SEQ ID NO: 149740 - DNA, 648 bp, Zea mays
  Clone ID: MRT4577_68089C.1
ctctttccttcactccactccactcccagtcgcagagtcgcagtccgtaccgtagctcctcctgccaccagaacccaccatgggcctctgcttcagcaagaagaagccaccggccaagccgggaaaggtcgccgccgcggtctccgacgacaaggccaagaagagtccggcgcagcagcccaagagagcggcggcggcggcggcgaacaaggctgcggtgtccgccaaggacgccgcggtgcccggggaggagaagaggaggcggtcgggatcgcaagggccggcggccgagaagcagctgccggtagtgctggtgccgtcggcgccggtgcgcacgtccagctgcaccaaggaggaggtggacgcgatcctcatccagtgcggccggctcagccggagctcgtccggggccggaagggcggcgtcgaccggcgacacggcagcgtgcggcggcgggcaccgcaggaggcgctcggggtccaagcgcagctacgacttcgaccaggacggcggcgcggacgaggagtgcgactgggagaggcaggggcgcgcggcgcccgtgtccagcagcaggccgtcgccgcaccgaggctcgccgcagcgcaagcggtcgggaagccgggagaggagcggcgccggcgccgggag

SEQ ID NO: 149741 - DNA, 268 bp, Zea mays
  Clone ID: MRT4577_6808C.1
gggttaaaaatttttttttattttgtttttgtttttattttttgaaatcctgcaaaaaaagtcagatatgtggttttataatgcatgcattttgaaatttggaacaagatagtcaatccaaaataacctgaaaaaataagaaaatcctttaaaaaaaggattgttaagggggatattgtttaactcttcaaagaagggattgctcatttcatagacgaattggggaggaattgcatccaagggggttattgaaatgcaataactgggg

SEQ ID NO: 149742 - DNA, 185 bp, Zea mays
  Clone ID: MRT4577_68090C.1
aaaaaaaaaaaaaaaaaaaaaaaaaaaaatataaaaaaaaaaaaaaaaagacaaacggtaggggatctccaggctcccggcctcctgcctcctacatgctacgctcttctatattgtatcctgacaccaatatactgtccgctggtcgacaacgtacaacactgggaaatccctaaaccttccca

SEQ ID NO: 149743 - DNA, 1333 bp, Zea mays
  Clone ID: MRT4577_68091C.1
ccatgcgtccggagggatgatgctattaaagatcttaatagagctatggagattggggatgagaatgcaattgaaaaatttagtaaaaggactgtcaaggttacaggaaggcataatgatgactgcaagaggctgttaaggttgatgggtgtccctgtagttgaggcaccaggtgaggctgaagcacagtgtgcagcactttgtgaaaatcaccaggtttatgctgtagcttcagaggacatggacacactgacttttggtgcccgaaggtttcttcgtcacttaactgaccttggttataagaaatctcctgtgacagaatttgatgtgtcaaaggttttggaagaacttggactcacgatggatcagttcattgacttgtgtatccttagtggatgtgattactgtgagaatattagaggtatcggaggacaaagagccttgaaactcattcgtcagcatggttgcatagaagaagttctgcaaaatctgaaccagacgagattcagtgttccagaagactggccttaccaggaagttcggacattgtttaaggaacctaatgtttgtgcaggaattccagatttcacgtggacctcaccagatccagagggccttatggatttcttgtcaacagaaaacagtttcagtcctgatagagtaacaaaggcagtagaaaagataaaggttgctagggataggtattccccaggcagaatgaagcatttaacaccagttgctagcttacgaggatctcatactgagaaggaaccccagtgcatactaggttctccaggacaaactctgaaggtcatgtcatctccacaagtatgcaagagtccaagctctggtttcagatatggtagctcaaagccatttatgctgggcagacagtcaggatttcatggaatgccttatgctctctcttttatctaaaatctgtagctgctctggtttatgagaaggttgaccgaagctgtagctgcggctacatttttagatgatggaaaccgatatccggctttcacctcactgggaggatatggccaagtagctgtagctgcagctacatgaaaggatgctcacttataatatgttaatctcgtgctactattgtaatctttccatttctattgtaacgtagttaatcagctactgcagttcatcgttgacatctaatgctggttgctgctacaccggttgaccttaccttttgtcaatatattttgagttttcgggatggtgttttttcccctcaaaaaaaaaaaaaaaaaaaaaaaaaaaaaaaaaaaaaaaaaaaaaaaaaaccaaaaaaaaaaaaaaagggcggccg

SEQ ID NO: 149744 - DNA, 264 bp, Zea mays
  Clone ID: MRT4577_68092C.1
gcgctagtagctcgatcgctcagtgcagcagcacgatcacgcgaagatcacgtggctctctctcactagtgagccctcgccgcgcgagaccgactggcgtgtgcgcgactcaagcactacgagacatggcgccacagagagcacagtgatgtgtcactctcgcgtcctgtgcggctgcgctcatcagcggctcaagagctgctccgctcacgatgcatctcataggtcacgtcgagactccgagtccaagcatgagtaagcatc

SEQ ID NO: 149745 - DNA, 827 bp, Zea mays
  Clone ID: MRT4577_68093C.1
aactctcgtttccttctcctttcctttcccttcccctcctcccctaccttagcgtctcctcgccgctaccctcctaggtctcggcgccgccgccgacgccgccgagggtctccggcgaccacggacgcggttcgctgttacccctgactgtccggcacgaatttgaagttggatataagaaatcaacctagcgtctgtcttgttctctgtgtagcgctttcctttggattgcagagaattttcaaacaaaccaacaacaacttgcatctgactgacttgaggtaactatgccaaaggacaggagctcccgttcagtctcgcacgagggctgccgatctcgtgtctccccatacaagttgcggagtggttctcgcaggtcagaggaggctgctgctgccgccgccgctgcagcagcaaagcaggctgcagaatgggaggaggttcgctgtcctgtgtgcatggatcaccctcataatgctgttatgcttgtctgctcgtcacatgagaaaggctgccgccctttcatttgcgacacaagctacagacactccaattgccttgatcagtaccgcaaagcctccaaggagtcctctaaggattcaggggcagcagaatgcgctgagtgccagcagccagttaaactggcatgtccattatgccgtgggccggtcagccattggactaaggattatgatgcacggaagttcatgaattctaaggatcgagcatgcaccatggagtcatgtgagttcaagggtgcatacaaccagttgaggaagcacgcaagggaggatcatcctgctgtacgaccaacggaggtggacccc

SEQ ID NO: 149746 - DNA, 386 bp, Zea mays
  Clone ID: MRT4577_68094C.1
gagcccctcccctaaatccatcaacctattcctggaaatttttttacaccatgaagattgatttggtaatttacacctgacaacatttggatggaaaagggggaggggcccccatacaaagggagatgacagaacccaagtggaaattatatacggcgcttacacaattaaaacaagaaggtaaacagcggatgactggagctacccgtggaatggagtccttattaaactgatgttagaaccagccccctgagctgcttgaatggagcacatcaatgtctggaaatgatcttccagaataaggggctctcgatgcctcctgtaggctattggtttccagtgggccaggaacccctttttggttgataggacccttttgaaaaatt

SEQ ID NO: 149747 - DNA, 513 bp, Zea mays
  Clone ID: MRT4577_68095C.1
atggatcctaacgacaccgaggatagcctttatgaagcttgggagcaccgaaatttgttgttgcggcgcgagctcatcttcgatttgaggaatggagaccatgtcggcacggaggaggaaggagacgcctgcagccttgacgtgggtgacggcttggggcgtggtgttggacgcggcgacagtgtatcacgggggcgcagaactaccgacgttgggcgtgcatcaaccagcttggggcgtggtgttgggcgcggaagtacttgtagcctggcgcgaggcaccacgggagccaccggcgttggatgcagctccgtctccctcgagtccagcactggcgcacctacagatagtaaaatggccgatgatgagtttgatcgttgtgatcaagacgagaactatatgccgattcctccaagtcatcacaatgctgaaggccaattgggagaagaagagggagacatgaataactttcgagatcaaattgccaatgcactatttgatatgagaatgtaa

SEQ ID NO: 149748 - DNA, 810 bp, Zea mays
  Clone ID: MRT4577_68096C.1
aatcttctggaaatatgcttaaagaagaaaaagaaaaagggaaaacagctaaccgcggcgagcaaggaaccctaatcgtcaatcgatcgatcgatcgatctcccagattgatcctcgagatcgaccagaccagaccagaccagaccagaccagaggacccggcagaagcagaacaagaaatcgatggcggcggcgatgaggctcggcggcggcgctcttctccggcggacgcctgtggcggaggcaaggcggcgcctcgcccacacgaccgcggaggagatgagagaggtggcgacccgcgcggcgcaaatcgacaagaccaaggaggagctgttcgacatggtcattgacctcaatagcaactacaacgttccccacagcatgaaacggaagcacttgctcctctcgcagcgcctctcctcacaaatccagcctagaccatacgacccagcctggcgtttctgtcgacgtaccgaaagacgcaatactttctacaagtttgtgggggtggctacttgtgaccttgtcggctcagccggcctcttcttgctcctacacggacctcatcatcgaccaaagaagtgggttgtcgactggtgggacaagctaaccagttagaatccatccatccatgccctgcttcaacaacatatactagctagaatgccaacaagactagcttccttgtcatgaggtttatgttaattagctttgcttggccaccaattaagtgctattatatgttttttgtccaacgatttgtactcgtatttataccagagctatgctaggtgtgcaactgctttacta

SEQ ID NO: 149749 - DNA, 659 bp, Zea mays
  Clone ID: MRT4577_68097C.1
cctgcgataactcggctcctataaatctctatacctcctcccttgaggggaaaagacggagagatgagcgatcacgccaccttaacaaagttaagcttcccatcatccagaggagcttgagggtgcgcgactgtggcagtttgtgagcgcaacgcgcaggggcggctgccaccttacatccatgggtgggttatgcaacaaagcggcagcgcaggtcgagaagaaccagcaggtcgagaagaaccagcaggtcgagaacaagctggacgcagcgccgctggacgagaaggtcaacaccattattcgccgcggcacaaaagattaatatctcctcaatcttcattcgtctcggcgattgatgcatccattgttccatcgatatcgatcatataagatacggtcgactttatacgcgccctatagctataatcggtggtttgtatgcgtgaaacatatcttattttacgacattagtgtcctagctatactcgtggtttgtattgtatacatgcagcatatcttattcggtcttattttactagtacttgtggtttgtatgtgtagagcatatatcttactattactaaatattgtaataatgttactgttagtaactggagactttttctgagcctctgtatctggcgacttattcaaaa

SEQ ID NO: 149750 - DNA, 455 bp, Zea mays
  Clone ID: MRT4577_68098C.1
gactgtgaactagatactcaatacgtgcgacggtgaaacacacgttcgactgcccaccgttcattggattcaacccttgaacacgctgctagcatacagacgacatgggtccaacccaggcgacgggcaaccgtccacctcttgaagtacataacactcatataacaaatgctaggttttacatgacatatcataacaaggtaaggtcgcctaagcatactattgacacttttactttaggtactcgcacacagggttctatgcaacacctcgagcacgaatgcttaactgccaacagacagccatattgccgacctacattaccagctgaggttgtgctctggattctactccgagttggcggcatttctgtctatactaaacaacacctctcgttgatactaggaactgttgttgctttcatactcatgggcgccttcttggctcttggtggt

SEQ ID NO: 149751 - DNA, 473 bp, Zea mays
  Clone ID: MRT4577_68099C.1
aaggcccctttggctaacttttaaagggcaaccaaccccgggggattttgtttaaaaaaaagggccccacaaaaggatttaaaaatggtataaaaggccggacaaaaaggcctttaacaaaatggattttgggaaacccaggtttgggcaaaaccaaccaaaaatttatcccgggttggctaccctttcaggcaaaattggccggctttttttttttacaaaaaccagttgggatgaaaaaaagggccacttttttttgaaaaagggttggaaaacggaacctgggggtcccaaaaaaaacaaagggggggggggaacaacctagggggaaaaatttgggctacgggaagctttggaatccatccattaccaggggggggaaattttaaaactaaccatggtttaaaggggaggaataatttggcaaaaaaaaaatttaaaaggggccccacattccccctttttttggggga

SEQ ID NO: 149752 - DNA, 656 bp, Zea mays
  Clone ID: MRT4577_6809C.1
ccggccgggataggctaccggccaggacactccatcccatttctgcatcttacccgcaacactgtcacgaaacttcaagttttcctaaagagacattatcttaaatttaccctacgccgccacttaaacgaccaccaagactctcaaatcaaccctcaatctcaacaattgtctcacttattccgtcatcatgaaggctacgtttttcatctctattatcgccgccactgttactctagtcaatgcagaccccgttggtatctcattgcccgaacctgaatgcccagccggccccacatcttgcgcagatatcatagggatgagtaatgaatgttacaatctcaatggcggagatgttgagtgctctgaaaaggccatctgcgaatgtccagaaggctgtcacttagtcgaagctccggacccagtgacataccctggtggagcctgtgtggtcatcgagtagacttgcacctgatgcaaattgcagcaaggtgcatatgagatgcaaggattttagtgcattaccaggaggaatataaatctagcaaacagagatatacgttaccctgtattaaattcacatgccaatcttctaaaaaaaaaaaaaaaaaacccgcggcctgaaatgtcaggacgttacatgccgtagatcattg

SEQ ID NO: 149753 - DNA, 1862 bp, Zea mays
  unsure (1)..(1862): unsure at all n locations
  Clone ID: MRT4577_680C.1
cattgggtacctcgaggccggccggctctcacccatcggaacacatagcagctggcaggaacgactgccaagcaagccgatcggtcgaggtcctagctagcgcaacgacgatggccaccgcgctctcctgcaaggccctcgcagtggccgcgctcctgtccgtggtgtccgtcgtcacctacggcgctcgcgcccagcagcagcccagccacaacgcctccgactccgagtcgtcgcaggacaggtccttgctgtcctacagcagtggctggctgcccgccaaggccacctggtacggcgcgcccaccggcgccggccccgacgacaacggtggtgcgtgcgggttcaagggcaccaaccagtacccgttctcgtccatgacgtcctgtggcaacgagcccatcttcaaggacggcaagggctgcggctcatgctatcagatacggtgcctccggagcaaccacccggcctgctccggcgtgccgcagacggtgatcataaccgacatgaactactacccggtggccaagtaccacttcgacctgagcggcacggcgttcggcgccatggcgagttccggcctgaacgacaggctccggcacgccgggatcatcgacatgcagttccggagggtgccgtgcgacttcccgggcctgaccgtcaccttccgcgtgcagcacggctccaaccccatgtacctggccgcgctcatcgagcacgccaacatggacggcgacgtggtgcaggccgacatcatgcagaacaactcccgggtactgggagcccttgcacgagtcctggggcgccgtctggcggatcgaccccagccgcccgctctgcggccccttctcggtgcgcatcaccaaccagtccggcaagcagctggtggcccagaacgtcatcccggccaactacatcgccgacgtcgactaccgctccttcgtccagtatacgaattaacccgaccggccgatcggtcacctctgcgaccgtcgtacgtccgagatatatagctcgttgctttaagtgttcttgtttagtggctgccgtcggcaaccgccggactgaggatttttaaacctcaattccggcgtggggtgtgtgtgtgtcttgaagatgtgtgggaaattagaggaggcgagcatcaatgcgctctcccgcccactgtcactctaccatcaccagtgtgtaaccaacagaccatggttattggttaatactacatcagtgtgatgctgtttaactaaaaaaaaaaaaaaaaaaaaaaaaaaaaaaaattgctcgttgctttaagtgttcttgtttagtggctgccgtcggcaaccgccggactgaggatttttaaacctcaattccggcgtggggtgtgtgtgtgtcttgaagatgtgtgggaaattagaggaggcgagcatcaatgcgctctcccgcccactgtcactctaccattaccagtgtgtaaccagcagaccatggttattggttaatactacatcagtgtgatgctgtttaactaaaaaaaaaaaaaaaaaaaagganntnnnnnnnnngccccgttgcttaagtgttcgtgtttagtggctgccgtcggcaaccgccggactgaggatttttaaacctcaattccggcgtggggtgtgtgttggtgtgtgtcttgaagatgtgtgggaaattagaggaggcgagcatcaatgcgctctcccgcccacggtcactctatcattaccggtgtgcggtgtgtaaccagcagaccatggatattggttaatactacatcagtgtgatgttgtttagctacctctacccccatgctgcctcctaactaatgccactgccaggggaccttgttcggttattcccaacac

SEQ ID NO: 149754 - DNA, 677 bp, Zea mays
  Clone ID: MRT4577_68100C.1
tcgaggccggccgggccgggaaacgaaggagaggagcgatcacgccaccttaacaaagttaagcttcccatcatccagaggagcttgagggtgcgcgactgtggcagtttgtgagcgcaacgcgcaggggcggctgccaccttacatccatggataccgggtcatgcaacaaagcggcagcgccaccaccaccacgcaatatcgagaagaaccagcaggtcgagaaggaaccgatcgaggagaagccgaacgcggcggcgcaggtcgagaagaaaccgatcgagaagaagctcaacaccattattcgctgcggcacaagagattaatatctcctcaatcctcattcgtctctcggcgtatattgatgcatccattgttccatcgatatataatagatcatataagatacggtcgactttatacgcgtcctatagctataatcagtggtttgtatgcgtgaaacatatcttattttacgacattagtgtcctagctatactcggtggtttgtattgtatacgtgcagcatatcttattcggtcttattttactagtacttgtggtttatatgggtagaccatatatcttactattactaaatattgtaataatgttactgttagtaactggagactttttctgagcctcgaaaaaaaaaaaaaaaaaagcactaggcc

SEQ ID NO: 149755 - DNA, 234 bp, Zea mays
  Clone ID: MRT4577_68101C.1
cgccggacgatcgacgtgaacgagcatcggacaagcatggcgaacgagcacgcaacaaggcgcgacgctacggatggccagcagcagagccggatggataaggcgaaggggatacgttgtcagaccagatccgcctgtcccgaagcgcgtggcgatgctggaccggcagaacgttcaagggcctgatccgagaatgcatcacgctgcacagcagcgtgaaacgtgtccagcccc

SEQ ID NO: 149756 - DNA, 475 bp, Zea mays
  Clone ID: MRT4577_68102C.1
aaaatggggggaaacccaaaaaaaaaaatgggttattttagggaaacaaaggccgcttgggggggcccaatatgggggccacctaaaagggaaaaaaaaagggggccccccaacggggggggggggccaaaacagggggggggtaaaaaaaaaaaacgggggggagggaaaaaattggggccgcggggggaggggagccaccaagggggaagcccccggggggggaaaaagaaaccgggggccctgggggggggccccaaaaaaggtccacacaaacaagggggtgaaaggaaacagctgttgcaagggggcaacaggggttgccacaactaggggggacaaagcgggaacaaacgggggcaaaaactgggggtgccgggattaaggggcaaaaaccccaagggggacccggggggtaacccggaaaatgcgggccggggccggggggggggccaggctttgcccaaaggggggg

SEQ ID NO: 149757 - DNA, 278 bp, Zea mays
  Clone ID: MRT4577_68103C.1
cttttgtatatctctcttatctcctacaggttttccaatatttgttctctatacttcgatagcttttcatattttttctttgttgaaaaacaagaaaactaaatgtagccgcctcttcaaaaatggagtgaaggaaggatggttttggagagtggtttagagaagtttatctattggagtttttttatttgttttctaaattttgttataaagaaacatgtagaatgtcttagagattctctaagaaaaatgctagctatgaacttttataaagagaa

SEQ ID NO: 149758 - DNA, 439 bp, Zea mays
  Clone ID: MRT4577_68104C.1
ccccaaccaaaaatttatttaaaacgcccctttaaaaaaaagggcaggcaaacaagaacggggccggaaatccaccaattgggcccgggcccccaacaaaaaaaccaaaaaaaaggggaggggggaactgggaaacaacaaaaagagaagggggcaaggcatcaaaaggggaaacaagggcacaacgaaagattaaaaggggtttttgatctttggcccccccccccagaaggcaggccccttggggcttggcccacccccccaggagggaggcccagaaaaaaacaaagggggccatgggggcctaacaaaccccacaacgggcttttattcacgggggggccgcacttcaaacaaaggggtggggtaaaagggaaggaggggaacgggacaaatagggcagggaaagaacaccacagttactcgatcctatggggaa

SEQ ID NO: 149759 - DNA, 445 bp, Zea mays
  Clone ID: MRT4577_68105C.1
tcccgcgtcgacccactcgtccgcccacacgtacggccacacatttcattaaacaaaatgcctgtatctaactgtgatgagcatcagcgacaacctcatccattcagccacctagctactgactaccagaaccaatgccttgcattaaaccaactgactgacatgaactctgctgctcatatacaacagcaacagctaccaccattcagccagctagctgatatgatccatgtcgccttcttgacacaacaacattatgctacaatctacctacacgctgctcctaactctcacaccctataacaactgctgcagtatctgccattcaaccaacttgctatgacaaaccctacaactttctaccaacatccgatcattgacggatccctaattaatatcgtatacaagtaatagctcactaatgaagattaccggaacatgtaag

SEQ ID NO: 149760 - DNA, 437 bp, Zea mays
  Clone ID: MRT4577_68106C.1
ttgtgagtgggagacccgccagaggctccgggcggcgtttttttagatgactgggcgtttcacctacctgcaaggagggataaggcgatggccggtatcggaccgatcaggcatgactggaagctctccgtcgcgcggaagaaggcacccaccgtcgtcgtcaagaaggatgagatggccgtcaacgccgcgcgccgtgccagtgcggagatcgataccatgaagaagtacaacgctggtacgaacaaggcggaattcagcggtacatccctcaacaccaaacgcctcgacgacgacaccgagaacctcgcccatgagtgagactcaagtgatccgaagaagaatcctatgcaagcaagggcttgttaagaagctgacacagcgcacaaccttgctcacgatgacaaatgagaagccacaggggattcaagagtatg

SEQ ID NO: 149761 - DNA, 262 bp, Zea mays
  unsure (1)..(262): unsure at all n locations
  Clone ID: MRT4577_68107C.1
catttaattaaatatacacctctatccaaacgtanaacaaangaagaattttaaaaacttatcccccaacttcaataaaatttcctatatattaaaaacctttcacaattctctcttctaacttaaaaatatttacttccttttaaaatatttcacttaaaactcttcaactcattccataaatacatcctccctaattacacaaaaattcatattccttcaatcaaaacctattaattcactctctttacataaaaattcc

SEQ ID NO: 149762 - DNA, 243 bp, Zea mays
  unsure (1)..(243): unsure at all n locations
  Clone ID: MRT4577_68108C.1
gtcatcgatttgtctttgggtgcgtctgcgggttggatgtgctgcgcggtggctgcatcagaatagttgggggacgcgggatttgtggtcgtggtggtggttatcatgagagttagggtggttattgtgctttggctggatcagaagctgtttgcgctggttgaccgttctgatgcgctgctggtgttagcctgtctgtttggagcttgtgctgccaagttgttntgatgatgttggtggaag

SEQ ID NO: 149763 - DNA, 354 bp, Zea mays
  Clone ID: MRT4577_68109C.1
agccaaaaaatcatttgggctttttttacaaatgaataccataaaactttttttattttttttacacatgacacagggggaaaaaaacaagggttgggccggaaaaattacatccaaccactcatggtcaaaagaggtgcgctttaaccttaaaactaaaaaaacaaaccatgcaaaaacacctctaaaaagacccccctatttctgaaagcaattcccacctcttttggatagactcgctttcttttatttttttttagcaggcagcaggcaaaaattactatccaattccaacttcaaatgagttgaaaacaacgttacccactttaatccccgcgggctttttttaaatcg

SEQ ID NO: 149764 - DNA, 463 bp, Zea mays
  Clone ID: MRT4577_6810C.1
ggcgtttttgcaaacgaacatcagtctgaatgcgatcaagatcgtcccggggaaatacagtgctgtcaccgatcatcagtttcgtgcgccgtatcgaattaggtgcgccgccgcttcacctgggaaaaaacggtataacatcgctctgcttcccggagacggtatcggtccagaagttatctctggtgctaagaatgtgcttcagaaagctggatctctcgaaggactggagtttgatttcaaggagatgcctgtcggaggagcagccttggatttggttggagttccattgccggaggaaactttcacggctgcaaaactatctgatgccattcttcttggagctattggagggtacaaatgggacaagaatgagaaacatctgagacctgagatggctctgttttaccttagaagagatctcaaagtctttgctaatttgagacctgctacagttttgcca

SEQ ID NO: 149765 - DNA, 834 bp, Zea mays
  Clone ID: MRT4577_68110C.1
ccggccaggaaaacaatacacaaacgtcaaagcaagcactactaagactggctttacaccaacgcttactttgaactacgaatcaattcatttgatactctcaaccatcaataacaaccgcagccctgtcttttaaagattatccccaaacaaaatacgaccgcattcaaaatgtctgagtctacatctcctcagaaggtttggctggcctctaatgacagcgcaaacatcgaagtcgaccgcgttgtcgccgagcgatcaatgctgatcaagaacatgctcgaggatgttggtgacgaaatcacccagggcaaccctattcctattcccaacgtcaacgaggcagtcctccgcaaggttatcgagtggtgcgaccaccaccgaaacgaccctcctcaggctcaggatgatgaatccgacgctcgcaagaaaactaccgacatcgaggagtgggaccagaagttcatgcaggtcgatcaggagatgctcttcgaaattatcctcgcgtctaactacctcgatatcaagccccttctcgacgttggatgcaagaccgtcgccaacatgatcaagggcaaggcacccgaggaaatccgcaagaccttcaatattaccaacgatttcactcccgaggaggaggagcagatccgccgtgagaacgagtgggctgaggaccgctaaactgcttcgatcttgctacagaacaaaattggaggggggagtctcgaaccggtttctctaccccgattctcaatgtgttgccgcagattctttcacatcgcggtcgcccaggcctgaacggcacgaatgttatgagtcacaggggtctcatta

SEQ ID NO: 149766 - DNA, 335 bp, Zea mays
  unsure (1)..(335): unsure at all n locations
  Clone ID: MRT4577_68111C.1
ctagaggcncnggcncgggtggnagcngccgcaggtgcagatcttggnggtagtagcaaatantcnaacnagaactntgnaggccgnngtgnagaagggttccatgtgcacagcagttnaacatgggtcagtcggtacctgagagatgtgcgagngcngttccnangggacgggcaatagcntccgttgtnctcggccnatcgaaagggagtcgggttcanatccccgaatccggagtggnggataggnngccganatctancantncggtaagcggccgatcccgaganaagccggcnngngnccgggganantctctntctntgttaaggcng

SEQ ID NO: 149767 - DNA, 356 bp, Zea mays
  Clone ID: MRT4577_68113C.1
tgggaacaaaggtctggcctccagaaaatgaaggctgtaaaacattgttttgtggtgatcctattggcaaaggcagagaagttgtttgtggttgcgtttatcctggatcagtggaatgtgttcggtttcatgtagcagaatggagacttaagttgaaacatgaacttggtgcagctttctatgcatggggattcaatcgtatgggtgaggagattgcactttcttggacagatgaagaggaggcaagtttcaaggccgcagcacaacatagtgctgcgtcttctggcaggaatttctggaaccgcctccacttattttttcaatttaaggggaggaaagaactggtgagctattat

SEQ ID NO: 149768 - DNA, 293 bp, Zea mays
  Clone ID: MRT4577_68114C.1
ggaagatgaagatgataaaacagttttggatctagctgtggttttgtttgaaacagcaacgcttcggtcagggtatcttttaccagacactaaagcatatggagatagaatagaaagaatgcttcgcctcagtttgaacattgaccctgatgcaaaggtggaagaagagcctgaagaagaacctgaagagacagcagaagacacaacagaagacacagagcaagacgaagatgaagaaatggatgtgggaacagatgaagaagaagaaacagcaaaggaatctacagctgaaa

SEQ ID NO: 149769 - DNA, 351 bp, Zea mays
  Clone ID: MRT4577_68115C.1
ctagcaacagcaaaatagtccacttcttctcttctgggtagagcacaagatatttgcattcgttcatggtacagatcaccacagacacgagtagtgtacaacaaattgtcctggcacacccctaccaggtcgctagcttaagaaccctggtccgaactggattacataaacgcctgccttgtttgcaacggcatctgtaacggggtggcgattgatgtaactgctgatgacaacggtggtgtgggctggatctaaggattctataactaccttgtgttgatgggacgacattggtaagcgaagccgatcttcatgacgtacatggctgttgatcatgctatgagatactga

SEQ ID NO: 149770 - DNA, 457 bp, Zea mays
  Clone ID: MRT4577_68116C.1
aattcggcacgaggcacacactgagctaccgctattccaacctgcgcgcgctctgttttatgatacttagctcggtgaacaccctgactggtgcgatatttccctaggtgtggagcgcacagacacgctggacatcgattaggcgattatctaggaccacgacagcattcccccagaggaggaccagctcatcctcactggcaaacactataaggacgggctctcgctcgctgactacaacttcctcagcgatagcgcgctccacattgagctccgcctcaggcgagccttgcacaacgtcgtgaaggagctgaccggtacgattatcaccctttatgtggatgtctacgacaccattagactcgtggacggcatgattcaggacaaggtgaacgatacgtctagacaagaacatgctcagctttggtgccaagtatctcgttgacgtgcgcacgct

SEQ ID NO: 149771 - DNA, 433 bp, Zea mays
  unsure (1)..(433): unsure at all n locations
  Clone ID: MRT4577_68117C.1
tntttttttttttttttttttttttttttttttgtttttttttatttttttgggtttttttaaaaaaaaaccaaatgggcttcctggggatattatatatttgaaagttttttaaacaatgacacaatttgaggtccacaggcagcacttaatattagaaacctcctggggattcaaacactgatgaaacagttgcatgtacaggggcttatttattaccaattcttattttatttgcaaaattacataacccggaatttcatttttttttttcaacattaaaaaaaaaaggttaacccagcaaaaaagggttttgatttggaaccaatttgtgcatgttttggcatcggggctggagccttattatcatgaccatattgcaacaactaccgcccgagtcctgggaggggcaatttgaaccccatttggggga

SEQ ID NO: 149772 - DNA, 253 bp, Zea mays
  Clone ID: MRT4577_68118C.1
ggcgagacccgaccccccgtagcattagagctggctgttcaaggcacggacaaggtcctgcggctaaccggggttgcgcatcctaggcgcaacataggaacggaaggtggtcatccttggcgctgcgggcggcatcatgcatgcgcactacaatctaacaaaggttaaactggtcacccaccaactctgaatcttagattggattagaccccccggagacaagatagattttcccaaattaaaaccccccccc

SEQ ID NO: 149773 - DNA, 1875 bp, Zea mays
  Clone ID: MRT4577_68119C.1
cccacgcgtccgtcttgggtgacacaactggaggaacacttgaaagcaggcagcctgaaagtctacatgtaccatggcgagcggacgagagataagaaggagctgttgaagtatgacctcgttcttaccacctacagcatcttggggacagaatttgagcaggaggactcaccggtgaaggatatcgagtggtttcgtgtgatcctggatgaagcccatgtgatcaagaactctgcagcacggcagacgaaggcggttatcgctctgaatgcagagaggcggtgggtggtcactgggacacccattcagaacagctcatttgatttatatcccctcatggcatttttgagattccagcctttctcaatcaagagctactggcagagcttgatccagcgccccttagagaaaggaagtaaggctggattgtcacggttgcaaaacctcttaggtgctatttcattgcggagaatcaaagagatggacgatggaaacaagagcatggttgaacttccctccaaaactgttttggcatgttatattgatctttctgcagaggagcgtgaatactatgatcagatggaacaggaagggaggaacaaaatgcaggaattcggtgacagagattcgattctgagtaattactcaaccgtgctttatttcattctgaggctccgccagctctgtgatgatgttgctttgtgtcctttagacatgaaagcatggtttcctgcaagctctatcgaagatgtgtctaaacacccagagctgttgaagaaactggccttattggttgatgatggagatgactttgactgtcctatttgcctctctccaccaactaaaactgtcataaccagctgcactcacatatactgccaaacctgcatcctaaaaatcctcaagagctccagttcccgctgtccaatatgcaggcgcaccttatctaaagaggacctcttccttgctccagaggtaaagcatcctgatgaagatggttcaggcaaccttgagtctgacagacccctctcatccaaggtgcaagcactgctgaagctgctgacggcttcacagaacgaagacccctcatcgaagtctgttgttttttcccagttcaggaagatgctgatcttgctggaagcgcccctcagaagggcaggctttaagacactacgcctcgatggctcaatgagtgcgaagaagaggctgcaagtcatccaagaattcagtcacggtggctctgactccccaactgtgctactggccagtctgaaagccgcgggagccggcgtgaacctcacagctgcctcgacggtgtacctgttcgacccctggtggaaccctggggtagaggagcaggccatggacagggtgcaccggatcggacagaagaaagaagtgaaggtgataaggctcatcgtgaagggcagcatcgaggagaggatactggccctgcaggagaggaagaagcggctgatcagcggcgcattcgggaagaagggaggcaagaacgagaaggagatgcgtgtcgaagagctccggatgatgttgggcctaggtaagtaaggaaaaggctggttggtggtgataggaggagtgatgcttgtgttgcttgtgatatagctctggcggtagaagttgtagctagggcgatggagtttcagtgtaggcatagggtagggctggaagaaaacgaaatccaggcacgcgtgcatgtatctctgatgctaaacattagcactagatcagtgctaaatgattgggtcctcacttcctcagctgtgatggtcaattactgaacacggtcaaatctagtagtagctgtgctaaatgaattgcgtttgcagctttcctattcaaaaaaaaaaaaaaaaa

SEQ ID NO: 149774 - DNA, 499 bp, Zea mays
  Clone ID: MRT4577_6811C.1
atgttaggtacacgagaacttcgtgttcgcgcgactacctgtatcacctgcacagccgcagtgatgctctgcattatgatcgaaccaccgcgatctgcaggcactgctgcatcccactgtgactgagtctgattgatgactcgctctgaaaggcccactgaaggactccactgtcgtgcttgatagggacactaatgcacgcaacaggatgccgatatgcgagtggccgacataaactctgctgtgggagagacccagacacatggacagagacgtggtcctcatacccataaaggggccacacgaagataaaatggatacgcaacagtggaagcatcatattctgctcccgacccaagcatagcaacccatactgcatatacaacgcttgtctacacttattgcagcaaggctcctgaatgcactctaccatccagtacagcaaccgactgtataacatcgcggacatcatcggatacaacaagctgctgctcgtgac

SEQ ID NO: 149775 - DNA, 610 bp, Zea mays
  Clone ID: MRT4577_68120C.1
gccggccggtccaggctgatccactctccgcttcccgctccgatcgacctgctccctccccaccaccgagcccatggcggaccagctcaccgacgaccagatcgccgagttcaaggaggccttcagcctcttcgacaaggacggggatggttgcatcacgaccaaggagctgggcactgtcatgcgctcgctggggcaaaatccgtgaggctgatgtcgatggtgatggccagatcaactacgaggagtttgtcaaggtcatgatggccaagtgagccacagaaccataatctgaaggcagagaagattatgcattgcatattagtcaagatgcaactttttattccatcgacttctagtgaaacattctgctagttgtagttgctgaaaaaggcaatgtagttcctgctttgttcttccctccagtgtgttttcagaactgttgtttcatgtgaacttgtaatgattgccctctctgctgtgtcttgattgcagttaaaatcatatgtagtttcaccccacccacacatcaacttctgtttcacgctgtttgtatcaatggatggcccgttgtttttagtgcgaaaaaaaaaaaaaaaaaaggccccta

SEQ ID NO: 149776 - DNA, 309 bp, Zea mays
  unsure (1)..(309): unsure at all n locations
  Clone ID: MRT4577_68121C.1
tctttttttaatcgatnngnactatttttattttatggnctgnggntgctaagtcttgggcccttcctgcgctacttgctctttttgcgaccccnacacatgcatccatcactccacaatgctcacttgctcctattatcattatttcacagttcctcccaccatatactataatggcctccttacacccatttgtgctagcccatagactacaacaagccttctcgttgaacatattacaacaaccaattgccctatttcaacaacaattcttgccacatttaacaattctaaccattttaacgcaac

SEQ ID NO: 149777 - DNA, 1068 bp, Zea mays
  Clone ID: MRT4577_68122C.1
gagctaaaacgataaaccagagcccggcctaaatgtgacggccgctctagtggaagcgcgtataaattgggggaaggaaaattccagcggacgagcgctctaagccgtttttcctcgtcctcgatccagccccctgccgcttccagctccgatcgatctgatccctccccaccaccacgcccatggcggaccaactcaccgacgaccagatcgccgagttcaaggaggccttcagcctcttcgacaaggacggggatggttgcatcacgaccaaggagctgggaactgtcatgcgttcactggggcaaaaccctacagaggctgagctccaggacatgatcaatgaggtcgatgccgatggcaacggcaccatcgattttccagagtttctgaaccttatggctcgcaagatgaaggacaccgactctgaggaagagctcaaggaggcctttcgtgtgtttgacaaggaccagaacggcttcatctctgccgccgagctccgccatgtcatgacaaatcttggggagaagctaactgatgaggaggtagacgagatgatccgtgaggctgatgtcgatggtgatggccagattaactacgaggagtttgttaaggtcatgatggccaagtgagccacagaagcataagctcaaggcagagaggattgtgcattgcatattagtcaagatgcaatgcaactcttatttcatcgacttccagtgaaacattctgctagttgtagtttttgaaaggcaatgcagttgctgctttgttcttccctccagtgtgttttcagaactgttgattcatgtgaaactgtaatgattgccctccctgctgtgtcttggttgcagttgaaaccatatgtagctacattccccctcccaccacctccacacatcaacttctgcttcaccttttttagcatcaatggatggccggttgtttttaatgcgatgatctgcagttatcgtggcagaagctctttgtgcaaaattattccaaaccgccgatttgtattgttggatgcaactgaaacaaatgaatatatcagcaccatattccagt

SEQ ID NO: 149778 - DNA, 1020 bp, Zea mays
  Clone ID: MRT4577_68123C.1
tgagctaaaacgataaaccagagcccggcctaaatgtgacggccgctctagtggaagcgcgtataaattgggggaaggaaaattccagcggacgagcgctctagccgtttttcctcgtcctcgatccagcccctgccgcttccagctccgatcgatctgatccctccccaccaccacgcccatggcggaccaactcaccgacgaccagatcgccgagttcaaggaggccttcagcctcttcgacaaggacggggatggttgcatcacgaccaaggagctgggcactgtcatgcgctcgctggggcaaaatcctacagaggctgagctccaggacatgatcaacgaggtcgatgctgatggcaacggcaccatcgatttcccagagtttctcaaccttatggctcgcaagatgaaggacaccgactctgaggaagagctcaaggaggccttccgtgtgtttgacaaggaccagaacggcttcatctcggccgccgagctccgccatgtcatgacaaatcttggtgagaagctaactgatgaggaggtggacgagatgatccgtgaggctgatgtcgatggtgatggccagatcaactacgaggagtttgtcaaggtcatgatggccaagtgagccacagaaccataatctgaaggcagagaagattatgcattgcatattagtcaagatgcaactttttattccatcgacttctagtgaaacattctgctagttgtagttgctgaaaaaggcaatgtagttcctgctttgttcttccctccagtgtgttttcagaactgttgtttcatgtgaacttgtaatgattgccctctctgctgtgtcttgattgcagttaaaatcatatgtagtttcaccccacccacacatcaacttctgtttcacgctgtttgtatcaatggatggcccgttgtttttagtgcaatgatctttagttaccgtggcatatgctctttgtttagtgcaaatttatttacaaactgctggtcccatattgttggttt

SEQ ID NO: 149779 - DNA, 536 bp, Zea mays
  Clone ID: MRT4577_68124C.1
aaaaaaaaaaaaaaaaaaaaaaaaaaaaaaaaaaaacaaaaaaaaaaaaaaaaaaaaaagaaaaaaaaaaaaaaaaatacataaacactgaaaaaaaaataaaacatacatatagagggcccaatacaccctataaagaaaaaaattttttttccctgcccggcgccctttaggggcatttttgggaaattccctcccccttgccggctttttggccttgcttttaggggccctttcccccccttgggggggggctttaaagaccccgccgcccgcttttcccacccgttgcgcgggaaaaaccggggttggcccccccctgtacccttgcattaaacccccctttttgcggggggtgctctcagcgggaccgccccacttgccggccccctcacgcggggtccttccgctttggggaattggtttcccccctcacccgccctttttccccgggggggtgggggtttccccccccctttccggttcccttttccggccttttggcccccgggcctttggatttttgcctttgtttt

SEQ ID NO: 149780 - DNA, 949 bp, Zea mays
  Clone ID: MRT4577_68125C.1
cggaaatggagatgaggatcctttccccagctgatcgactatgattatactgtgcgcaactgcgatgccttctctgcggaggagggtcccaagccagaattctgatccatctgatccactctccgcttcccgctccgatcgacctgctccctccccaccaccgagcccatggcggaccagctcaccgacgaccagatcgccgagttcaaggaggccttcagcctcttcgacaaggacggggatggttgcatcacgaccaaggagctgggcactgtcatgcgctcgctggggcaaaatcctacagaggctgagctccaggacatgatcaacgaggtcgatgctgatggaaacggcaccatcgatttcccagagtttctcaaccttatggctcgcaagatgaaggacaccgactctgaggaagagctcaaggaggccttccgtgtgtttgacaaggaccagaacggcttcatctcggccgccgagctccgccatgtcatgacaaatcttggtgagaagctaactgatgaggaggtggacgagatgatccgtgaggctgatgtcgatggtgatggccagatcaactatgaggagtttgtcaaggtcatgatggccaagtgagccacagaaccataatctgaaggcagagaagattctgcattgcatattagtcaagatgcaactttttattccatcgacttctagtgaaacattctgctagttgtagttgctgaaaatggcaatgtagttcctgctttgttcttccctccagtgtgttttcataactgttgtttcatgtgaacttgtaatgattgccctctctgctgtgtcttgattgcagttaaaatcatatgtagtttcaccccacccacacatcaacttctgtttcacgctgtttgtatcaatggatggcccgttgtttttagtgcaaaaaaaaaaaaaaaaagggccc

SEQ ID NO: 149781 - DNA, 475 bp, Zea mays
  Clone ID: MRT4577_68126C.1
accatagcactcttctgaggagccactttaactcttgctcacactgatatgacacgaagctcaacctatgctacaatgcctaacatgagtcctattgatgctagctctaggtacaggtccatatcaagctgacttattccataaggtcactcatgctccatccaaagctttattgcccacataatccgtatgcgttattcattcaatggaacctcatgttggatattcacccaataacaggcaaaatatggatcttatgggtgagtaaagaaagtacgtaccaaggacatgaactacttgactctgtgcgaccatcagtcgataccacactgatgcctaattacatcacactgtcgaacggtactgcagaatccaatctctaaaccatacttgaccgaatacacggaaatagctgtatgactgaaacggaatacattctttgacgaatccacacaccataccaacccttggcttg

SEQ ID NO: 149782 - DNA, 124 bp, Zea mays
  Clone ID: MRT4577_68127C.1
agggaatggggaagggaacagagcatggacactactagaaaggcacgcccaagaggcgcgatgatggccctgtgcgttgtgatgcgctataaacagcctccttttaggctagaaaaagaaacaa

SEQ ID NO: 149783 - DNA, 278 bp, Zea mays
  Clone ID: MRT4577_68128C.1
cacattcaataccttaaattgtcacaccacaagggcgtggagaacagaaaggctagggaacttctacagattaagacaactgaaatgaccctcacgcgccgggacggcgactactctgcgcccgagcacgttcttcacctggcgcacaccatgaagacggcggaagacaatctcaagaggacagcgctttacgaactacacatacacccaccccggatagagagtacacaaccacgactggagcatgcccattcagtacagcgacttcatactggact

SEQ ID NO: 149784 - DNA, 326 bp, Zea mays
  Clone ID: MRT4577_68129C.1
gggaccaaggcaaaagcacattattttgggaaataaattcatacaaaaacattaatttaacctggctaggaacaaaagcaagataggaccgttttaaatccattcatccaaaacggaaatggagtggggaataaattaggcgtagtcctggtccccaaactttttgtaggaacccccaataaaaaacttcccctaaaaaaagccaacaaggccccccccaaaaaacgggcccacccaataaaaccaatttccggaaaaatcccccccgggaaacggggggccaaaagaacgggcggggttcatggaaccccccttaaaaggccccc

SEQ ID NO: 149785 - DNA, 754 bp, Zea mays
  Clone ID: MRT4577_6812C.1
ccggccggggttatcacttaactcaacatttatttttcacgtttttggacctctactttctaggtattccccatatcaacctccattttcttgtgcgaaatcgacgataaagaagacggactatcaaaaattttggacttttgctacgattgccactttaccgccaaatatcgatttatttaacatcattatcaagaaccaaagatgaacgcccctgatcgtttcgagctcttcctcctcggagagggtgagaagaagatcgaggagaaggccttctctggaatgtccaatacctcggactttgttctcatgaaggaagaccacacccttggaaacctcctttccgagcatctcaagatgcaccccaatgttcatatggccggatacaagattgcccaccccaacgttccggagctttttatccgagtgcagacggacgggaccatcacccctcgagacgtttttacctcagtctgtgaaaagctcattaaccaactcgagatgttgcaccaggagttcacgcgagagtgggaattgaggcgaatcacaactgccggagagcaaggcaacatgcagaacggtcactaaatcgtctttcttgaagtcgatcgtatcacgatcatttaaaaacaaacaggcaccatggggtggtcggcgtttgggggctgtagattactgctttttatttttaccagatgtaaactgggatggactcaagacttagcataaaaaaaaaaaaaaaaaacccgcggcc

SEQ ID NO: 149786 - DNA, 409 bp, Zea mays
  Clone ID: MRT4577_68130C.1
tgggattaactcgagaaccgacttataccgggtccagtcctcccctttatatagatgaagggctacgaccgattgaaccccccacaatcgatccaatcaaatctaattatcgtttttaccttatgcattaggagtagctctagtttagcctccctctacctcgaatcttcacctctcttccactatatgtcgactagaggcgtcttgggtggctaccccccacaatcgatccaatcaaatctaattatcgtttttaccttatgcattaggagtagctctagtttagcctccctctacctcgaatcttcacctctctttcactatatgtcgactagaggcgtcttgggtggcctgccgtcgccaagacacaccctatgatctcttcttcctgacggggtccctcccggga

SEQ ID NO: 149787 - DNA, 698 bp, Zea mays
  unsure (1)..(698): unsure at all n locations
  Clone ID: MRT4577_68131C.1
atcacccctcgatcccctgtgcgccgccgccatgcacagccatcgccagggagagccctgctcgatcccctcctccctcgatgcgccgtcgcagggagagcagcgccgcgccctcgtctcgttcccctcgcgctgccagagaggagcagagccccgctcctcccgacccacctcgcacacgaccccgccgcctcgcgcctccacctcctcgtcagccggccgcagctcgccgagcccgatccccatctcctcgagcacctcctccaccccgcaaccatgccccgtcgcccctccggtcggcgagtccaggccgcgccgccctgcctgacttgcttcggccatggccatgtcgccccgcgcctccgcctccgcttttgcgccagcgcctcgtcgccgggagttcgtccccgagccctacgcgccgtgaccacgaccccatctcctgcgtgagacctgcatcgctgctcctctgctccacgcgcccgtcctggagctcgtccgcctccccaagtcacctccctggnctcggatctggccggatcgagccggcccgcgtccaccaccaccactaccttgctccgtcgcccgcctcccctgcgacctgggcgctcatccccgtcttctcggcctcctccgtgcccctagctgcctctgtccgcttcgagcagcagcagctcgtcgctcagcgccatgccact

SEQ ID NO: 149788 - DNA, 951 bp, Zea mays
  unsure (1)..(951): unsure at all n locations
  Clone ID: MRT4577_68132C.1
ggggtgttttttttttttttttttttttttttttttctttttttttcgcgtgggtttttttttttttgacccataaaatctttgtgatttcatatactttttactcatgaaccctttctttgggttctgctacatttgcaatataagatagttcgtattcgtgaatgctatgtggcctagagttgttcttgctacaatctattcagtatccagcggcgtgtttctcttggattggattcctgtgctttgatcattgctgctgcgcctggagctcggcctgcgtgataaagatgccgtggaagccgtaggggacgcgcgcgggcagctgcacctcggcgacgatgtccagctgcgccgacctggcgtccatcaccacgaactggttctcgccggtccgctcgttgtggacgtagcacaccaagtagccgtcgtcctcgttcccctgagagaaagagggagctacttagatcgcctcaccgaacgtgttctcgcctgagtaggtgatgtagaggaaaccgtcctcgtccttgtgctcctcgtatatcgagctcataagagcggctgttggcggcaggacctcgtcaacgaagatgaagatggccttctcgggcgacagcttaatgcgcttgcggataacgtagacgaactggccaacggtgagatcggcgggaaccaagtacttctttttgtcgatggtcgcgatatcagacttctcgaccttctcgcaaataacgggaatgcggtcgttgtacttctggcgaatgcgctcggcctcggccttgcgcttctcaaaggggtgctcgtccttgaacttggagcgcatgtcgacggcgataagtttactgtgttgggttgagtagtaggttggaagcgggtggtcgcagaaaggtgagaggagtgggtggcgtggcgaggtttgaagnggagtcccggccggcctcgagggtccca

SEQ ID NO: 149789 - DNA, 719 bp, Zea mays
  Clone ID: MRT4577_68133C.1
cctccacgggctcggcatcgccgcaatcggcctcgactgggcatcgatttccagctaccttgggagtcctctcgtcagcccctggttcgccactgcgaatgtcgctgcaggcttcttcatcgtcatgtatatcatcgtgcctattgggtactggtttgatttctacaaggcgcagaccttccccatctactcttccggtctcttcacctctgccgggcagaagtataacatctcggctatcgtcgacgaccatttccatcttgatatagaggcatatgagaaaaatggtccactgtacctcagcactctctttgctgtcacatatggtattggcttcgcgtcacttaccgcgacgatcgttcatgtcatcctgtttcacggaagggagattttgcagctaagcagatcagcttttcaagggaaaagtgtggacatacatacgaagctaatgaggagatacaagcaggtccctgagtggtggttcatctgcatccttgtcgttaacattgccgtcactgtatttgcttgtgaatactacatagagcagctccagctgccctggtggggtgtgttgcttgcatgctccatagcctttttcttcacgctcccaatcggaattatcacagcaacaacgaaccagaccccaggactgaacatcatcacagagtacatcatcgggtacttgtaccctggacgacccgtcgcgaatatgtgcttca

SEQ ID NO: 149790 - DNA, 568 bp, Zea mays
  Clone ID: MRT4577_68134C.1
ttttaatcataaggctggaccttggcaaagaatgtgttcaggactcattccctgatttggtgtcctccatccttcgtgagaagggtccaaaagaagctctgcaatttctgaatgtgttggagccattgctgatggagcatttacttcttgacggtttgagtctaagtctgcgggattttaatgttcccaaggctttattggaggaagcacaaaaggacattcgaaatcagtcccttattcttgagcagtctaggtgctctacaagtcaattcgtagaattccgagttgaaaacaatttgaaaaatgtcaaacaggacaattcagattctgttgggaaattctctgaccttggactgctgattgatccgaaaaaggaagcctcaatgttaaaagttgtctaccaagtcggttttgttggcttgcaactgtatttgtgaaggcaagttgtatttaagacgcttggtagaggacctgcttacaaactttgttaataaacacttgagcatggagatgagcatcctcagaagcgtatggtccttgtcaaggttatatttttcatggcctcatt

SEQ ID NO: 149791 - DNA, 1313 bp, Zea mays
  Clone ID: MRT4577_68135C.1
ctcgaggccggcctggcgcgcggcgccgtcgtggccgccagagtgctcaccgggcagatgaacccagccgagggcgtggggctcgctaacacccccgcctcttcatgggcatgaccgctcacccgaagaaagaccccgtcaccggcgaggtcttcgcgttccgctacggccccgtgccgccgttcgtcacctacttccggttcgacccggccgggaacaagggccccgacgtgcccatcttctcggtgcagcagccgtcgttcctgcacgacttcgccgtcacggagcggtacgccatcttcccggagatacagatcgtcatgcagcccatgggcatggtgacgggcggcgcgcccgtggggtctgactccggcaaggtgccccggctcggcgtgcttccccaagtacgccacggacgagtcggagatgcggtggttcgaggtgccgggcttcaacatgatgcactcgctgaacgcgtgggaggaggccgacggcgaggagctggtgctggtggcccctaacgtcctgtccgtggagcacgcgctggagcgcatggagctcgtgcactcctgcgtcgagaaggtgcgcatgaacctgcgcacgggcgccgtgtcgcgcaccccgctctcggcggggaacctcgacttcggcgtgatccacccgggctaccttggccggcgcaaccggtacggatacctcggcatcggcgaccccatgccgaagatctccggagtggccaagctggacttggaccgcgccggcacgggcgactgcacggtggcgcggcgcgacttcgggcccgggtgcttcgcgggggagccgttcttcgtccccgacgacgtggagggggacggcaacgaggacgacggctacttagtgtgctacgtccacaacgagcgcaccggcgagaaccagttcgtggtgatggacgcgaggtcgccgcagctggacatcgtcgccgaggtgcagctgccagcgcgcgtcccctatggcttccacggcatgtttgtcacgcaggccgagctccaggcgcagcagcaatgatcaaagcaccgaacactcgtccagtgtttacgtgctggggatctgtagcacatgattccaggagaaacacacacaaacacccatcaggtgcatactgaatagattgtagtaagaacaactctaggccacatagcattcacgaattatattgtagtgtaaatgtagcagaacccataaaagagttcatgagtagaattgatacgaaatcacaaaaaaaaattattggaatagaacaataaaagggcaaacgctcgcgatctagaactagt

SEQ ID NO: 149792 - DNA, 512 bp, Zea mays
  Clone ID: MRT4577_68136C.1
aaaagggaaaatttttttgggaaaattgtttaaaaatgaaaaggggaaaggtagagtaataagataaatttgtttttggtaaaaaaaatttttttaacaaaaaaaaaaaaaaaaatattttggagaaaaagcaaaaagtttttttcctcccgcctgaggtaaagaaaaacaaaaaaaaaacggctacccaaatggttaaataaaaaggcaaaggccggcaaaaaaaaaaggaagggcccgggttttaaatttcttaccccaaaacggccggagagaataaaaaacccggtgccaaggaccggaaaaggaaaagtttttagggacccaaaaaaggaacgcgggggaattcggccaaaaacttgggaaaaaggggcccttgggaacaaaactggcggaaaaggaaaacacaaaccttcccattaggggggttggcaaaaacaaacacctttttttgaaactagaaaaaggttttttcttttcaaaggaaaagttgggttttgacctgggggggg

SEQ ID NO: 149793 - DNA, 583 bp, Zea mays
  Clone ID: MRT4577_68137C.1
ccccgcgtccgcaagggtccacatcctaatgaagtaaaaaatgaaggatacagtgcaggaacccaatgtaatcctgcagattccctcactatactttataacaacttatgccaggaggccataaaatttgcaaaagaaggttcagtcacagaagaaatttaccatgtggcagtttctgccttaaaagaggctgcagaaaaggttgctgaagtcaaaaggagtcgtccaacattgtcacattgtggtttcgttagagaaagcaaacatgatgtcttgcaggagaaaagtatgagtgctttgcaatgttcaaatcaggttgaactgacaagaacatctcctgggtccaggcctcttcaagattctgcatcaaatcttctgctgataccaaccgacattttgactgattcaaggttatatagcggtgtcgatactgctcctctaacaggaggtttccccacaaatgagagtgaaagtacacatgcatcagaaagttcctttatgcattataagaacacaaagaaaacctcttcagaaaaatctcagaacacttgttttaatcaactcgtccatggaaaggaagcag

SEQ ID NO: 149794 - DNA, 524 bp, Zea mays
  Clone ID: MRT4577_68138C.1
cgtaacgctctttaatttattccactacataaaacgccacagagcgcagatgaagcctacatgcaaacgggttgcaccaacgtacagaatacagacaacatgaaccatgtgagggacctccaatgggatcccttctaacaggaatcaattgttattatggtgatcgaaaccaaaattatggtggtgccagccggatatctattgctgcaatatcaaaccgggccagtgagccccgcttcagtgccacctatgcacatatggatgcaccgtgggggggctctattagcttcaatggcaaaaattcatttgcaaccaatgcaaggggcgccatcttcgtaggaactcgaaaccaaaggtcctgattttaattcactgtggggagggtacgacaaacacaaaaaccgacagccgtgttaatctgtctcaaggctttggagggaataacgcacgcaaattgtccacggctgagataaagagctgtttagttttccacctcattaagctacatgaaacctggccttttg

SEQ ID NO: 149795 - DNA, 399 bp, Zea mays
  Clone ID: MRT4577_68139C.1
ggcttggaacctttgggctgatttatgtgcttgagattactccggccttaggaacgcatccttccgggtcgaagaagttgtaggaatgcgtcgactctaccgtgcattcgaaggaagtaatcgtgcagcacaacgatatgttcccgttacgaagagaaaacctgccccgtagcccaacaacaaatacccccagataacccgggctatctcggccggatagggcatataactcatgctctagcacccccgcctccacggctctggcaccgaacgttcaggcgagccccccccagtcgcgtataaaaaaatagccaaatctgacggcactctaatcgtcggagaaacgtcagcgtttcacccccggtcgcggaaccggaaactcggaacgtacttaccccg

SEQ ID NO: 149796 - DNA, 788 bp, Zea mays
  Clone ID: MRT4577_6813C.1
atgctgttaactttcctcccctcccctccttccgtgctgcgctctctcccacccgcacagctaccgtccaaatcgcggcataaaatgtgggccggccatggtgttaactttcctcccctcccctccttcctcctcgccctcgcccccgcatctgggccacaatagctcccccatcgcccagccggaggatccccagatcgacccaccgcctcctccggacggtcacctccacctcctccaggtgcaagcccatctcaccggtgccgcttcttctgcagcgcagctgagctgatctagggatataccaatggcgacatccaagaaggggcctctctatcccagcagggacagggccaccaggatggcccccaacctcaagccctccagcagcgagttctcctcctccggctacggcgcgcgccgggcgaggtcagtgccgagttccccagatcgcaagctcggtccttcggctgccgctgcggcggcggcggctccttccgcctccccggacatgtgccgtccctcattgtcacacgctggccggtccatctcttcacggacaatgtccggctcaggcccatccattcatggcagcaagccagcctcaaagccggctctggctagagcgaaatccgacaaagtcaccgccaactcacagcggcctcatgcgctcgctgggccgctcagcagttcgttcaaggacaccgccaactcgtcttctaccttgctgaagaataagctttcgccaaggcccacccctggcaaaggggtggcgtccccaaagccga

SEQ ID NO: 149797 - DNA, 292 bp, Zea mays
  Clone ID: MRT4577_68140C.1
cccacgcgtccggcggttacctgccgctgactcgctctagtggtgaggacctgctgcagtggacgtctgccgtggacgtggtggcggagaggggtgctggcggcgagcgacggcggagcagccatggaagcggtgcagacggtacgcgatctaatccgccttttcctcgtttcttcaatcttgtcccacgcgcgcgtggacatgtctaggcatctagccgcttgatcaattattccgttgtttgtatgcgtgggaacatgatcctatttattactttccgcgttgcttgcgt

SEQ ID NO: 149798 - DNA, 159 bp, Zea mays
  Clone ID: MRT4577_68141C.1
ccagattcatgtacgacaagttcgtattttatctaccaccaacgattggctttgagtcgctgtcaaaaacaacgtatctagaacaccgatctgtacgtctacaactctgggatactgcaagacaagatacgtttaggactcctattccaagctacatca

SEQ ID NO: 149799 - DNA, 1918 bp, Zea mays
  Clone ID: MRT4577_68142C.1
cccacgcgtgatgcttcaaatccttttggggatcctacacctttcaaggcagttcttgatgaaagtccagcactacctcagacacatgctgcaccagctggttctttccaacccactggacctggtacggatgtgaaccctttccagcctgcttcagccgcaagctttggttttggagacactcttggtgatctcacttttgcaccaaatgctgcacctgagctgcaagatatgtttgcaaacacagcctccttgccttcagaggtagcaccagcaaacccatctgtggttctccaacagccagttcctactaatttctcctctcaggtatctcagccagttgctggcacattgcatgctgctcctacagcatttgctccttctcaggctcctcccacatcatttgctcattctcaggcacctcaggctgcccctgcattttcttattcacaagggcctcatcctggtgctgccatccagtctcaatttccccagactgtcgccccatcatttcctccttcgcaggtgcctcaatctgtaacacccaatctgccaccaggccaatcgaacttttttttgcaatcagcatcagggtctggtattgacagcctgtctggggttcctacccagaatggagcaccatcctacattcccccacagaattctcagttcactgctccggcaaatcaacaaccattgcagccaagcttcatcccacaaactagcacaccagcactccagccggccttgatctctaggggggcatcccagccccttggtgtgccaaattcagtgcctactagtggcagcttcccgttgcagtcaagttcatcagctcccccagaaacaatcgtttctgctttgcaagtcaatcaaactgagccagtgaagaagtttgagcccagatctaaactgtggtctgatactttgagccgaggtctagtcaatctggacatttctggaccaaaagcgaatcctcatgctgatattggagttgactttgattcaatcaatcgcaaggagaaaaggcaggaaaagaaaatcaaccaagcacctgtggtgtctacagtcaccatgggcaaggccatgggagctggttccggcattggtcgggctggtgtaggtgcaatggcacctcctcctaaccaaatgggtgccgggaggggtatgggtcctggtgccggtgccggttatggtggtggaatgggaatgaaccggccaatgggcatggggatgggaatgaatcaacaacagatgaggatggggatgaaccaacaaccgatgggaatggggatggggatgaaccaacaaccgatgggaggaatgaacatggggatggggatgaaccaggggatgccgatgcgtcctccaatggggatgggtcctggtggaatgcccggtgctggctacaatcagatgggcgcggcgtacggtggccagcagccatacggtggatacaggtgaggaggggctatgcagtcccccacaccacagatttatgggggcgaggtgttgaagaaacggttttggaggcatctgtattttgctcacctggttttgctttgggtatgatttcttgtttcttttgggggtggaggtgagaagggtataattttcgtcactattcttttacagtctatgttggatactgtacctactttactaaatagcaaaaagcaaacatatgaacaagggcggtgctacaactactgcgttgtgttggatgtaaagccttgatatattatctctttcccatgtagttgtggctataggcggcttcttttcagtgaacatattgtctgttccagcgttcttgctggatggatagtaaatggctgtaccatttggttgaattatcatggtttttgctttgatgttaaaaaaaaaaaaaaaaaaaacgctcgtcgcgatctagaac

SEQ ID NO: 149800 - DNA, 305 bp, Zea mays
  Clone ID: MRT4577_68143C.1
gagttatctagtcagaatctgacggaagccggatcacagctttagttacagtcttagtaagctgaacatagaggggccaggctcagttatggtggatcgtgtgaggtacggagacctgacttgatatctatgatcgtgatcattgtcttttagaccaatggtctatgtcagggtatagcgactcaacagattcgagggtcagatggggatatgtagctccttattcagccagtgtgtagcagatatcctgcttatcattacagtagcggagtcagctgacgagctttacatgtcctatacttcac

SEQ ID NO: 149801 - DNA, 561 bp, Zea mays
  Clone ID: MRT4577_68144C.1
cggccgggatctcaccccaaaccccaacccaagaacaaaaatgttcaccgccaccactgaagcggaagtccgtgagtccctcggcacgaagttcggtcgcctcaaggtacaggcgaaagacatggcctccaggcaccccgtcgctggagacgtgtgcgacatcgctgtcagcgccgtgggcgcctacttcttgtggcccgtggcggccccggccgagtacatgatgaacgcgcctggagccggcgccgcgctcgtctcccgcgtagcggctctcgcgaagaaggatctgtacttcaagctcttgcacaccgtgggcgctgcagagctgctccccgctttgagggtgtagatgcgcatgcactactggtacatgctgttcgtgaacgagcggcgtaccggacgtttcaggttagtatgttgaccaagcggatattagcactttcctttcgttgttgttgagtctcgactctcgagttcggatcatctgaccaaaacctatgtatgcccgcatgatcagtctgatgcataatggaactcttttaggacaactacaacaataag

SEQ ID NO: 149802 - DNA, 215 bp, Zea mays
  Clone ID: MRT4577_68145C.1
ttttttgggcaaaccctttttcgttataaacaaaaacacccagcccgaaaccatgcggggacggactaatgatcacagggaaaacaaagacaccggcctcccaaaaaaaacgacacaagattacccaaaacagaccgaacgccccccataccccaaacagccaagacaaaaacagatcaaggaccaccaccgcccgaaaaagcagcacacccccc

SEQ ID NO: 149803 - DNA, 343 bp, Zea mays
  Clone ID: MRT4577_68146C.1
ggaacaaaacctccttttgtttatcggcatccttaaatttgttttaacagcatccgggaatttttttttttttgggggctccaaacaatcctttcaggggaaaagggaaaatttgggttttatccctgatgaggacaggaaacttggggatcccacttccactgaaaagaaaaatggcggaaacaaaacaaaattcggtggtccatgtaaactgggctgtaccataaaacaaattctgggtgggatgctttactaagccaaacggggttctttaccagtttggcccctttatatggccattttattggtcacgatctgggaaactggaaccgggctccattaa

SEQ ID NO: 149804 - DNA, 356 bp, Zea mays
  Clone ID: MRT4577_68147C.1
gacttagtaataaaacatggaccaagcaacatggaaactgatcgcacaatgtatacactaggaacacaattgcatctcctggaggtgtgctctgctgcttggagcttatcctgctccccttcacctatgccggcctcagggccaggcggtcgaacacatgcttgaccaccgtctacgccctacttgctagcttactgaatttcattcgatgctatggtactgactatcactcccctacaccatgtccgtaacgttgtgcgccgatgccatgcccgggggggctttgggtccacatggagaagcggatgcatgatttgcgaagctgctaggagaggttgtagagtattacatgcaaa

SEQ ID NO: 149805 - DNA, 684 bp, Zea mays
  Clone ID: MRT4577_68148C.1
cgggagacacctcctcgagaggcccttcctcctttaccctcggcaaacccgcctgctccggttcgaactatgactggttaatatgagcgtccgacatggtacatgacacgcggcgaggaccaggatgtgtgatctgtgcggaaggaggcaggagaacaacgtcacatcagacctatggggtgagtctgcgccttgggccagtccaaaaccatggacatcacctatcaagccatggtactgggttaggcgcgtggagccggctatcgatctagacgcgggggagccaggactgtcacactcaccccgcgatcgtgaaggccgcgatggatgctatcaggaatgggtgttcaacatacactactaatgctgtgactatggagctgaggaaggctattgacactaaactctactaggataacggtgattcctacctaccacatgacgtgctgaagagcaatggaactaagccttgcatcacacaagcgtgcgcgttgcatattagctcactctggcgatgagggtttgattgctgcctatttgagcagccacctgagaggctgactggctgatgcgactccagggattcttcctacaaacatattacagaatctctatggaaggtcatacgcgcttaccgacaagatcaatgagagaatagagctcttaatactctgctctccatct

SEQ ID NO: 149806 - DNA, 267 bp, Zea mays
  unsure (1)..(267): unsure at all n locations
  Clone ID: MRT4577_68149C.1
tccacgangtgaggaaaccctagcnaccgaccatggcgttgctcccgcgcaccgcgcgctgggccctcctttccacncnncntgttntanaagctgccgctgctgcgggcncctccccgacgtncccagcgncatnnngggcgcncncccnccggntatgtcgaagaagccganttcgtggtctctaaagtggacgacctgatgaactnggngngtaagggtcgatctggcccatganttcgggatcgctgctgngcggtggagatt

SEQ ID NO: 149807 - DNA, 319 bp, Zea mays
  Clone ID: MRT4577_6814C.1
attcggcacgaggcagaagcctatttggatcatgactcccgaggatatcaccacagaagactaagttgccttctacaagagcgtgcccaacctgcgggaggatcatctcggcgcaaaccacttctgtggccgggataggctccggcttctggatcaggtgcaagcccagataagagccccctttcagctctccgaccccggaggcaggcagctgccaacaaggtctatcagcgccaattcctaatcctcgagatctccttgaagctcaccccagagcgtctgagccttggaatgggcattgcagcctaagaggagcctc

SEQ ID NO: 149808 - DNA, 339 bp, Zea mays
  Clone ID: MRT4577_68150C.1
attaccgcaaagaagaattccgtcttaaattaaggtttgccacaaggcgtgattacattgttccgaccgattatcacgaggcccaaaacaatgacgcaccataaaaattccaaccatccacaaataaagtgtaagcggacgcaccggaccgactgacgttcactatcggtagtaactgtgccttccagaatgtgcccggcactcaatagtggcaacatacctcttaagataccttctccatcttggcgttagggcccaccttctcggattgggcgaactccgccatgcacccctccatctccatctcttcgcccatgcccttggacacgaacaccttgt

SEQ ID NO: 149809 - DNA, 269 bp, Zea mays
  Clone ID: MRT4577_68151C.1
gggcaaaaaacaacactcaaatgggggtgcccattaacccaatacacttgtaaaaacccgggctccgttgaacacaaaaacctactggtggggcacttaacgggcccctgttttttaatgacccccaatttagatggccgggaagtactttttgtttcccttgggggggggcttaatcgacctttcccctgggttccatccgggcgggcacaccttgtttgggttttcctggacgttctgcaatgcctgaaggggccttatggtcttat

SEQ ID NO: 149810 - DNA, 375 bp, Zea mays
  unsure (1)..(375): unsure at all n locations
  Clone ID: MRT4577_68152C.1
acacacgcacacaggttgacagggtcggaggcgcaacaggtgcatggcagacatctgtcccataaaagcaggctgcggagggactaactgcggacaaagagnacgatgccactgctgattactgtggcacctgacaaggccggggaacggacatatcttactggaggcaggctctccctgcgggccagaaattggctcagagagtttgggtgcatatccaggaggaagacccgtgtttggacaatgacaatgacaggaatgctgatataaaacccgaatctgactccatagagctatagctcaaacacaaccaactcaatcgatgtgaacatcgagcctgctgactcagcccttaacgcacatgctaagcgcaca

SEQ ID NO: 149811 - DNA, 299 bp, Zea mays
  Clone ID: MRT4577_68153C.1
ttttccagaacataatattcaaaggttggcgaataaaaagcggttacgggtggtgatacctttttttctttaaaaaagcgttgtttgggggtatcccgccaattgttttaccttacggcaggctttccatgggcggttgacacatttttggtgttttcaaaacaaaaacgggacaattgggttattagacggggggggtgctttacaatttatggaaccacgtttttctccgttggccaaagttttttccttcggggcctggtttgtgggcacggtttatcccttggccggacgcttgg

SEQ ID NO: 149812 - DNA, 695 bp, Zea mays
  Clone ID: MRT4577_68154C.1
ggccgcgatgccggccacagcccacgggccgccacgccgcaggccacgccggcggccacggacacggacctgcgcggcgtggctgacggcgccgttccggccgttgtcgcggcggcggcggtggtggtggccgggagcgccgtggcctccggcttggcgggcatggaggcgtcgagggcctccgggagcgccgcggcggcctggggcttgaagaaggtctgcatctccggcgtcgtcgtcgcctcgtcgctcccgctcgtgaagtcccccaggccgtgggactccgaccgcgccgtgagcagggctctcgcgctgagcgccaacagcaggctttttgttttgcacgccatcgctcgctttcggcggtttccgagctttaggaaaagactagcgtttgtgatggagaaaggaccagcgaggactgagggggagcccagggcgcgcgcgtgcttttttttttttttttttttttttttttttttttttttttttttttttttttttttttttttttttagtttcggaatgtttcctttggcgtgtttgtgactgaaccaattattacaaaacctgctatgttacactccacgcaacagcactgccacttttccttcttcttttcttttttttttacgaatcagcctggaacgagcttagtgctctgatgacatttccggccggcctcgagggtccca

SEQ ID NO: 149813 - DNA, 782 bp, Zea mays
  Clone ID: MRT4577_68155C.1
cggtcgcgtgggcgcgcgcgccctgtgctccccctcagtcacaaacgctagtcttctttccctgtacgtacgtacgtacgtacgtacagcttcggaagcgagcgatggcgtgcaagacgaagggcctgctgttggcgctctgcgtggcggcgctgctcgcggcgcgctcggagtgccacggcctgggggacttcacgagcgggagcggcgaggcgacgacgacgccggagatgcagaccttcttcaagccccaggccgcggcggcgctcccggaggccctcgacgcctccatgcccgccaagccggaggcggcggcggcggcgctcccggccacgacaacggccggcacggcgccgtcagccacgccgcgcaggcccgtgtccgtggccgccggcgtggcctgcggcgtggcggccgtggccgtggccggcatcgctgccgccgtggcgtacgtggtggtgcgcggcgcgcggcgcgggacggaggtgcagctcggttagctcctcccccgtgagccccgtccggccgggcccgcgtcataggccgtcgtcgtcgttaggatctggttaagcgcgttgtttagcttttgcgattttgtgttttagtcgatctggagactggttgcttttgggtcagcggttgtattctttcgtacgtgtgggggggtgagacggtgaggacgcctgaactctgttccttggtgactggagccagagcctaccatgaacgtccttgaccttgggaaactctgaattatatcgattcatgcatgcctcccagag

SEQ ID NO: 149814 - DNA, 326 bp, Zea mays
  unsure (1)..(326): unsure at all n locations
  Clone ID: MRT4577_68156C.1
cctggccgttgcccggggtgtcntctttgtcaacccccgccgcnnggtgggctggctcactggcctgttgnggggctggggccccaccgtttctgcccctcatggttttttttttttttnncnctnggggcgggggggggggggagtttttttttttttcctccccngngctcgtggcggggggcgggttgctcgtgggcgcgcggctcatcaggtgtccctggtcnntctctttgttcttcctccccncgccgggggcttcctgcctcgtgttggtcgctgtggtcgttctggtgggttgggtgttgccctctactttgtgaccc

SEQ ID NO: 149815 - DNA, 1775 bp, Zea mays
  unsure (1)..(1775): unsure at all n locations
  Clone ID: MRT4577_68157C.1
ngacacgcctccgctgnaccacctcctgctcctgctcctgctgccgctcctgttcctgttcctgcccctgcccctgctgcccctcctgctcctgttcctgctcctgctgccgctccttctcttatcccagctcctgctcctgtttctggggacgccttggcctcggctgatggcaatgcgttctggacggtgtgcccctactgctgccatgtgtatcaataccagcgtgcgctggtggggcgcgcgctcaggtgccagagcgcgggttgccggcgagcgttcgaggccacagagatcccgaacgcgccgcctattgtgcccggcacagacatgtactactgcgcgtggggcttcttccccatgggtttccctaaggcagctgatttgagcaccaactggaggccattttgccccatgtttcctgggaattctgaatctccgctgcagccagcacctgcggtcactgtgaatgttgatgtacagaatcttgagaataatggcggcactgatgtacaaaatgttgagaataatggcattgacgacaattcaacgccagcaagtgtgcagcccccaggtaagagtggtgacattgaccgtgcagcaggtccatctagaggaaggatgaagaagacaacagcccgcaagaaagttggtgctgtatctaagaagcacggttccagtggcgtggacagtggcattgagccatctatgcttggggcagattcgttgaatgggaatgcaggaagtgggcagacagtgggtactagagagatcaacataaatgaggtggcaatgccaactgatagcgccacaatgcttaattttggtggggatgaggatatcaggtttgatttggatgttgatgcaactgatgctatattggggaatttgcacaacttaccattcttgagggaggatggcaataacagaaggatgttttagttgtcacaatgtgctcagtgtaggtgttcgtagaagtggtgtgtatcctattgttgaaggaattcctacttagtctgatccttcactactcccttggttccattgccaccatttctcatacttattctgcgttttgtagttagctagtctgctgtaccatctgggtcaataatcttcacaaatctgcagagtaaagtaccccatattagttggggacatgtaatatgtgccacccgtgattaacataaggaggtaaatggggtgaatggaataacgcactcgacatggatgattgatgaagcttttagttttataagggttacagtgcaacataggtcatatggagcactagcagataaatgccatttacaataatgtctcgatcaaaaactctacgcatttcttgccatcagttgattgccttcactagtcatcgaaggagctgaataagagaagtggtatggacgtgtgcctcagtttaggggccatccgtggcttgtagcctataattctttctttgttgtttgtcatatgccaagctattgatttcctcgcctgagctaatttttagtcaaacaccccctaaatggaatttgtctgtgcccaattttccatcgtaagcggaaaatagtaactgtggttggcagctagaatatttatttgtcaaccgtgttactgtagctcctggaagcattgccttcgtagtcatcacgagctccaatgctccatgacctcaaactgtactttgtatattggtatgaatttcaactacagcagcaaggatataaacaagaaaaaaagctccgaattccatatgtgaatgttcgaatcct

SEQ ID NO: 149816 - DNA, 831 bp, Zea mays
  Clone ID: MRT4577_68158C.1
attgggtccctcgaggccggccgggcgtttgattatgtgctcctttgattgcaatccatccattggaggtggggaggtatagaattccctctaccttttggaagagtactcagtcctacagaaagtttcatccatgaactagatgagaagggagttttccgtaccgctgacatgtgaacgatttatattgggacttccctactactgctttaacacttctggactatctatttgcggtgtttgtcagtttggtcattctatatataaactgtatgcaattcttttcctgagggttgaactaacgtgaacctcaaattccacagattgagataatattgggaaagagtgacaaattcgacgagttgatggttgctgccgccgacgagaggggagaagttgaagatggtgaagagcaggcttgaaaaaacagtgtcgaccatccctgcaacgcgtgacgcgtccaatgacccctgtaggatcctttcgtctcctgctgtggccccttcacccgcagccgcccaatcagcccatcctccacagctggcctgaacgccgcctcgatggcttccttgcttccctgtccggcagccccttgtcttccccgtccacctcttcttcgagggtgtaacaattgtcttaaggattaggtacttgtcaaaggaatgcccgatcaagtggttgaaggattagtttcaggaagagacatcaaaatgtttcttttgaatcccactaagccatatgcgttgttgcatatttagactttggagtgtggacctatgtaacagacataattagtacagctcatggcttggatatctgaaaaaaaacaaa

SEQ ID NO: 149817 - DNA, 151 bp, Zea mays
  Clone ID: MRT4577_68159C.1
ctggcgtatatccaccaaatggactttaaaggaatcatcgaaccgaggatgtgttggcccttgatgctcaagtcgcacacagcgcccgaatccgtgatcccggttctctgtcgccttaacttcctgcaatgctgaagccgttcttcttggg

SEQ ID NO: 149818 - DNA, 1364 bp, Zea mays
  Clone ID: MRT4577_6815C.1
cccacgcgtccgagccggcgcacgccgacgggcacagtagcgaccgcgagcgagccagagcatgggtgacactggcgcgaacatggcccactggggcgggctctacggccggggcggcgcgccggcgacgacggaggcggtgacgacggcaggaggcggcgggtcggtgtcgagccctacgtcgggcgggtcgggcggtagcccgagccgcgcgcagctgcagcccggggtcggggtggagggcgggcgcgtgggcaagcccgcgcggcggcggtcgcgcgcgtcccgccgcgcgcccgtcacgctgctcaacaccgacacctccaacttccgcgccatggtgcagcagttcaccggcgtcccgcccgggccctacggccccggccccggcggcggcggggggcccgtcatcagcttcggcgccgagtacggcggcgcgcagctggtgcgcccgtcgccgacgtccgccgtcatgtcgttcgacccccagcaccaccaccaccggccgacggcggcgtcgtcgctgcagagccagctgttcaggccgcagcagcagcagcagtacggtgccgacgtcggcggctacggcgtgcacggcatggccatggcggcgccgtcctccttcctgcacggcgggttcgaggcctcgtcggaggaccggctgctgctgcagagcatgatgcaggcctcgacgatgcccaccggccacccgccccccactaacaacggcaatggataccacttcggctagctgatcgatccaccggtttgatccccaccgcacaaccgaggtaattaatataataagcggggagctagatcagggatccatggaacgaagaagccgtcgtcgatgaccacgagctgatgatgacgcgtgttctagcttgttgctgctgcttaagcagctaagcattttttttgttatgttttttttgctggcctcgcagaaggctagctaattacgagtaagtaactaagtatagttagtagtggtagtgttatcttgctgctttaactagaaaaggagttaagctaggtcgatgtaaatagttccctttccttttttttctttttctttttgaaaaaaaatatcaatcaagaagtttaattttggggccgtcgtcaggttgttggcgcccgtgaactatcggtgttgttacgaacagctagtgcagctgcgcagaaggaaactttcttacgagtaagtatcattagtagcgtacggctagtgtgtagcttgctgctttaactagaaaaaggagttaagctaggtcgatgtaaatagttcccttttctttttatttttgaaaaaaaaatatcaatcaagaagtttaattttggggccgtcgtcaggttgttgg

SEQ ID NO: 149819 - DNA, 276 bp, Zea mays
  Clone ID: MRT4577_68160C.1
gttttccgtaccgccgacatgtgaacgatttatatagggacttctctactactgctttaacacttctggactatctacttgcggtgtttgtcaattgagataatcttgggaaagagtgacagattcgatgagttgatggttgctgctgccgacgagaggggagaagttgaagatgaagagcaggcttgaaaaaacagtgccgaccatccctggtacgcgtgacgcctcctacgggggccggcggaggcgtcacgcgtggcagggatggtcggcccc

SEQ ID NO: 149820 - DNA, 1308 bp, Zea mays
  Clone ID: MRT4577_68161C.1
cctttgattgcgacccatccattggaggcacacagaaaaattggcgacttcattaaaggagtaatttctgtcttccaaggtaccacagatttgggaaatgtttatttgctggctgtagtgaattaagaatttttcatgtcactatattttcttatttgccatgtttataataattatgctccatctccatatggatttctcatttcttgagatgaatccgttcactatggtcaacggggagacatatcctctggacatcagaggagaactagatgacacaacaggcttcaaaaacttcaagaagtgaatcagatacccagggataccatttcttgttgtcattgttggatttactcttatcaactgtgtaggtggggaggtatagaattccctctaccttttggaagagtactcagccctacagaaagtttcatccatgaactagatgagaaggtattgatctctgggctatatttttatctgtctttctttccctgaggtctatcacctataaaataatcagtttccatgagaaatacgggatctgcagtgtattctgttgatgtgtgttaattcgccaaccttgttatttcagacaagtgcttgttcttttgtgctactttgcatgtcctgttgatgttataccctgatttaaggctgttcttcatttgccttgcgactggatttgaacctgaggacgatgtttgtaggaccatgcatctattgtatttaaagtttaaattagacataaccacctttttctaatgaaaatatgatgctgcgcttacctgtgttaaatttagtagttcccctttcactgagctaataaaaagttgctttgttgtgatgccatggctagcaagttctttcatcttggtttgccattctattgttgatagtgagagtgagcatgaggtgcacgctgatgtactcaagcggttcaaactgccagcgaagatcatgtagagctcctctcttcactttcactaccacacacacaaagagttctcagtatctccttttgtatgcagggagttttccgtaccgccgacatgtgaacgatttatatagggacttctctactactgctttaacacttctggactatctacttgcggtgtttgtcagtttggtcattctattttaaactgcatgcaattcttttcctgagggttgagctaacgtgaacctcaaattccgcagattgagataatcttgggaaagagtgacagattcgatgagttgatggttgctgctgccgacgagaggggagaagttgaagatgaagagcaggcttgaaaaaacagt

SEQ ID NO: 149821 - DNA, 591 bp, Zea mays
  unsure (1)..(591): unsure at all n locations
  Clone ID: MRT4577_68162C.1
ctcgggcggaaaaaaaaaactcctcccacactaaactagggccgaattgctgccgcattccctggctggattcccctcctccgagtgtccgacccatcggggggcctctccctcgtggggacgggcgctccaccgccgctgccgagtggggcttgggcggggacgaccgcccaccggatacagcggcgggcgttatgcggggaacttctgcggaaaaacacacaacaataatggggcacgaccatatgtgtcgtgtaaagatgcgtatgggagaaggggcttttggggacaggaaccggggccagcaacctgggtgcaatgaggtggtcgatggaaggggagtgtactgcaaaactcacaggggggagtgtggatgcgaacaggtcantcacctccagagcgggctggggagcgcantaccatgcgctgagcaagangtacatggcaagcacgaaggggatgatcgaggtgaactaaaggagaggtctggggacactttgggtcagactgcgcaatttgtgttccctggggcaggcatgttttgcaagaacgataggtgctgcgagcgagcgcatgagaactcaatctact

SEQ ID NO: 149822 - DNA, 328 bp, Zea mays
  unsure (1)..(328): unsure at all n locations
  Clone ID: MRT4577_68163C.1
gagacagagaaggaacagggggggggggggcggcaaatccatgctatcgattgcttaccccaccggcagagacctctcctcctctgctcaccccgcacgggggaggccaggctgcaccttttggcagcaggcacctacctgcgggggaagccacacacctccctcaatcctgtgggggggggggaccacttngagaagagcggcaacgcacctaaagagggccaagacctctactcggatctcgggctaaaagaggagaactagaagcccaatcttaaggacaatcaccggatgctgatcaagaaatgggagcctgacaaatgctgat

SEQ ID NO: 149823 - DNA, 468 bp, Zea mays
  Clone ID: MRT4577_68164C.1
cctggcaaattggcccaaattaataaggggttaacacccaataaaggggaaaaaccataacaaacccgaaaaaaaaacgggggggggttaaacatatgggacaaacacactagaaaataaaacggccgggacggaaaaaaacaggccgggagaaaaaagctctgggtaattctctcctggatcgttaaacggggacggggggcagcaaaaaaagaggagggcccgaagaagggaaaaaggggtcttttataataataattaccataagaagctaatttttgccggggggctaggaaaaaacccttccatggatccaaaccaccaaaaggccccaaaaactgacagaaggggggaagggaaggaatcgctttcaaaaaaaatgggggcggcggcctgggggggaaaaacaccggcggcgtcgaagggaaggggggcggtttgggggccgggggcttcgggggggaaggg

SEQ ID NO: 149824 - DNA, 1752 bp, Zea mays
  Clone ID: MRT4577_68165C.1
ctcgaggccggccggggcagtggtcactggatacttacggattggtagaggattaggattcaattctagacaccaaagaatctagtcatctacgcatgcatcctccgtcacccgcgcctgcgccttataaataggcacgcccgtgagcggagcggagagcatcaaagcaagccatgtggaggagggctttagcgatggtgctgttcatggctggcgccgcgctgctcgccggggccgccggcgccagcgcgcagcagggcgtgtggagcatcatcacccggcccatgttccagagcatgctgagccaccgcggcgacagcgggtgccagggcgccttctacacctacgacgccttcatcgaggccgccagcaagttccccggcttcggcaccaccggcgacgagcagacgcgcaggcgggagctcgccgccttcttcggccagacgtcccacgaaaccaccggtggatggggcgactgctccggatggaccgtttgcctggggatactgccgggtgaaggaacagaaacagacggacccaccctactatggacgaggacccatacagctaactcataagtacaactacaggctcgccgggcaagcgctgaacctgaacctggtgggcgacccggacctggtggcgagagaccccgtggtagccttcaagacggccatctggttctggatgacgccgcagtcgcccaagccctcgtgccacgccgtgatgaccggcgactggaggccctccgccaccgaccgcgccgcggggaggctccccggatacggcctgaccacgaacatcatcaacggtggcctagagtgcggcgaggaccgctccaccgacggcgccaaagccgccaaggaccgggtcggctactacaagaggtactgcggtatgctccggagtggggtacggggacaacatggcatggcgggagccagaagccttacggaggatgatgacactagtagctgatctatggttgctgcaatgcaagccttcacgtgtgtttgcctctctacctaaagaataaatcaagctagcagcaaacctaccttcggcgtgtgtctacttgcttatcatagtgtgtgtccgtgtatgagagatgatgtattgtcacgtgtgtatgagaggatgtatggtaaaaaaaaaaaaaaaaaaaaaaaaaagtccccgactccgcagtccgcaggaccggtcactcggcacgcaggctagcagcacagcagcagccagagccatcccctctcctcgctttcgcttcgcttcctcggcgccgattcctcctcctcctcctccaccctcgtccgtccccttccggcgcgcgagctcgcccgagatggcgaacgcgagatcgggtgtcgctgtgaacgatgagtgcatgctgaagtttggcgagctgcagtcgaagaggctgcaccgcttcataactttcaagatggacgacaagttcaaggagatagttgtggaccaggtcggggatcgcgctaccagctacgatgacttcacaaacagcctccctgagaatgactgccgatacgcgatctatgatttcgactttgttactgcagaggatgtccagaagagcaggatcttctatatcctatggtccccatcctccgccaaggtgaagagcaagatgctttatgcaagctcaaaccagaaattcaagagtggcctcaatggcattcaggttgaactccaggccacagatgccgaggaaatcagcctcgatgagaacaaggatcg

SEQ ID NO: 149825 - DNA, 736 bp, Zea mays
  Clone ID: MRT4577_68166C.1
ggccgcttttttttttttttttttctaaagttgaacccgtgcgaggtattgcagactttgaaatgatacgagcttttgattgcgaaccgaggtcatcatctcacaaccccctaagtcttcgtctcccgaggcctgtgccgttgaccctatacaactcctgtaattcctccaaatccgtccgtgtgccgccagtacaataatgatacaagaagatattggccatgtcgatatatgggcccatgtcgtattacagatgaccaatcaataaatggatccaagcgccgggcaatgcgtttacatgatttttaatcggtccctttacttgggggagtacctctcgaatgagtagatgatgcccaaaactaggaaagcgatagcgccgccgagaggaacattgggcatgctgatcttgccagcgatagcgcgaccggcaataacagcacctgctgtgcaaatggcatgtcccgcggtagcacctccagtaacccaccagtagtcagagcctggagccatggcaacagttgcgatctggctgcggtcgccccactctccgaggaagggcataacaaagggctgtacccaggctgggctcaaaaggagagagaacacgttgttgatgccgctcatagcacctgcgaacgaagaaccaccaggggatgtgggagcgcgctgtccaggtatatgggctccgtgcgggcgcacgcaggcgagagttgtggcgtgagcgtcttacccg

SEQ ID NO: 149826 - DNA, 247 bp, Zea mays
  Clone ID: MRT4577_68167C.1
gggaagtaaaaaattaccgggttgatttgactaaaaccgccacacattactttgggggactggaaataccttccagggggggaaaaaggacatttttcttttttttaacctcctttttaattttttttgggtttccgacacctttatttcacggttgacatttgaaaaatcgggtcgcaaattatacgccatccactgggggggtttttttttttaaggggtagttcaccaaggagcggttggtttt

SEQ ID NO: 149827 - DNA, 254 bp, Zea mays
  Clone ID: MRT4577_68168C.1
ctctattctaaccaaaggccaccaaacgtgcctggggcaggctaaagaacgccacgcgggaggacccgacgaggcggggattacaaaacaggggggcgagataagcacaaccaccaacaccagaggcaacagaacaaggacgaggacgcacacgaacagattctacagcagaccaaacggcgagaccgcccagtacacttcaggcgacaggcgaagccacagtatgcacctacgccaacaaaggcgcgagaaca

SEQ ID NO: 149828 - DNA, 808 bp, Zea mays
  Clone ID: MRT4577_68169C.1
actcctcagctgctcacacacttcagccagccgctagcaagagatggctctacttgctgccgctaccctgaatcccaccacccaccttagccttagaagccgtgcaggacgcaacagtgagaacctatggctccggtctgctgcttcatcacagaagagcaagggaaggttctgtaacctcaccgtcagggcaggcacaccgtcaaagccagcagagcccattgggcctgtgttcactaagctcaagccctggcaaatccctaaaagggactggttcgacaaggacttcctctttggtgcctccacttcagcgtaccagattgaaggtgcttgggatgaagatggcaaggggccaagcacttgggaccacttctgccacaaatatcctgagcgcatatcggacaggaccaatggggacgttgcagcagactcctaccatctgtatgaagaggatgtcaaagcgctgaaggacatgggcatgaaagtgtataggttctccatctcttggtcgagaatactgccaaatgggacgggggaagtaaaccaggcaggcatcgactactacaataagctgatcaactcactgataagtcacgacatagtgccatatgttacaatttggcactgggacacccctcaagcactggaagacaagtacggcggcttcttagatctgcagattgtagatgattacaaacaattcgccaaggtgtgctttgagagcttcggcgacagggtgaagaactggttcacctttaacgagccacatacgtattgttgtttctcctatggagagggggatcatggc

SEQ ID NO: 149829 - DNA, 441 bp, Zea mays
  Clone ID: MRT4577_6816C.1
gtacgtctcctggggctgattccagcgctcatctcctcctccgtactcgcacggtgctgcagtgctgcaactgtgcctagtcgctactcgctttcctgtgccgcctcgtccgtggtcgtctctctgcccagtctggtgtcctgctctccatgacggccggcctcgccgtgaaccagctccagcctctagcagccgcgacgctcgcctgcttcacgctcaaatcctgccagcatctcctagtcgcccctcgcgcagaatcaacgattgtcagacgtcacctccagttaaactctgtcctggccgagacgtccttgcgcatccctgtttcccctcgccgctgatcgtctcaacgtcgtcctccactaacccggctgtggcatccagttccctcgtcggtcgtcgcgccccttgctcggtctccagtttccatgttggttctta

SEQ ID NO: 149830 - DNA, 710 bp, Zea mays
  Clone ID: MRT4577_68170C.1
gggaggtaatgcatggggacaatatgatgaagatgagtatgttggcgcatacgatgagaaggcaacctacaaggagctattttctgatatagaagagagtggatcagagtacatccctgactctgatgatgaagaccacgatgattgtgttgtagatgacaatggagatcctctgtttgtcacaacaactgacttagagaaccctaatattgcagtaggtgttagatttgaggatgggcctactttcaaaaaggctattaggcagtgggctatcttacatgaggttgaaattggggctcactatagtgaatcttctaggtatagaggattctgcaaagcaaagaagtgcaattggaggatccatgcatcacaattgcctgatggtaaaacttggcaggtaaagaagatgtcaaagaggcactactgcaggagcagaagcaagatggagaagaattgcatggccaatcagtattgggttagagacaaggtagtgccgatgcttagggaaaatcctaacctaggtgctggagctctggtgaaaaagctacaagagaaatatctcatccaggtttcatattgtgttgcatggaaaggaaaggagctagcacttgatgagctgatgggcaaatgggaagacagctttgaccatatctatgctttcaaggctgcaatagagaaggagtcttctggtagtgtagtggagatacaaa

SEQ ID NO: 149831 - DNA, 2468 bp, Zea mays
  unsure (1)..(2468): unsure at all n locations
  Clone ID: MRT4577_68171C.1
gttgcgcagacgatgagaaggcaacctagaggganctattttctgatatagaagagagtggatcacagtacatccctgactctgatgatgaagaccacgatgattgtgttgtagatgacaatggagatcctctgtttgtcacaacaactgacttagagaaccctaatattgcagtaggtgttagatttgaggatgggcctactttcaaaaaggctattaggccgtgggctatcttacatgaggttgaaattggggctcactatagtgaatcttctaggtatagagcggtgggcggacgcgtgggcggacgcgtgggcctaatcgtatccagccacggagccaccattccccttcaacaacaggtagccaccccctcgcccaccacatcttcaccgcaatccacgattgagtcggacgcactctgccatgacgaaacgggagaggaaggatccaggtcgcatgacaagcttgggatccctgaccaagcagccgaatctatcatgggttccgcccgggaggattctgcaaagcaaagaagtgcaattggaggatccatgcatcacaattgcctgatggtaaaacttggcaggtaaagaagatgtcaaagaggcactactgcaggagcagaagcaagatggagaagaattgcatggccaatcagtattgggttagagacaaggtagtgccgatgcttagggaaaatcctaacctaggtgctggagctctggtgaaaaagctacaagagaaatatctcatccaggtttcatattgtgttgcatggaaaggaaaggagctagcacttgatgagctgatgggcaaatgggaagacagctttgaccatatctatgctttcaaggctgcaatagagaaggagtctcctggtagtgtagtggagatacaaacagagaaggttggggaaaagatcagattctgcaaaatgtttgttgcattcaaggcttgtattgatggttttttgcaagggtgcaggccctatttaggcattgactcaactgtgctcacaggtaggtggaaaggccaacttgcttctgcagttgcaatagatggccacaattggatgtttcctgtggcacttgggctgtttgaatctgaaagtaaggatagttggaaatggttcatggagaagttgcagacagctataggatcaccccatggtctagtaatatccacagatgcaggaaaaggcatagacagtgcattaaccaatgccttcaacaatggtgttgagcaccgagaatgtgtgagacacctatttaagaattttcagaaaaggtttcatggtgaagtgtttgaaagaaacctttggccagcagcaagagcatataggaggacagtccatgataagcactataatatcatgaaaatagcatcacctgcagccattaagtggttggaagacactcacaaacatttgtgggccagatgttatttttctacagcaagcaagtgtgactatgtaaccaataatattgctgaaacgtttaactgttggattaaagatgagaagtctttaccaccagtggagctaattgatagaatcaggcaaaagattttggagaagttttttgtgaggaagaaccttgcagataagttgactggcacaattttaccatctgtcatgaaacaacttcatgatgctggcagaggtttggttggttatgtggttcacaagggtcctgatcatacagctgaagtgtctggtgttcataaggatttgactccatggagacacactattgatctggtaaatagggagtgcagctgcaagaaatggcagctaactggtttgccttgcactcatgcattgagcgttataggttgtttcaggaacctgaaattggaagattatgttgactcctactactctgtggaaaaattcaagactgcttatgttgggaagatacctactttgacagataagactgagtgggagcaaccagaggtaggttacaaggtatggcctcccatactaaagagagctgctggtagccaaggacaagaaggttcattggagtagaatgagggtcggggaaaaagaggcacaaatgcaagagatgtggtcagtttggtcaccaaatgaggacatgtaatgaaccagtatatgactcagatgcaccaccaccaactgctccaaagcctaagagggtgagacagaagaaaaagaaggtggtggtggtagaagatgatcctctgtcattgcctgcaccatcaagtccagtgtagaagaaaaagaaccagaggggaaccaagagcaagtagtgttacttatgttactcattatactacgttctgtaatgtgccatgaagtggtactatgttctgttagtcatgtttcttatgtaagacatgtgcaatttgttttctgttgaacatgtgtaatgtgtcctctgttggacatgtgcaatatgtcattgaactacgttctataatatctaagtttcatggagttt

SEQ ID NO: 149832 - DNA, 398 bp, Zea mays
  Clone ID: MRT4577_68172C.1
cccacgcgtccgaggtccttcaaaggccatgatagctcctgcagtagctatcagagttcggtcactatctctgagaggtccttcaatgtctctgacagcatcttctatgtctgtaaaggaagaccaaactttctcacacaggtcacatgatgcaacagaatctgtgccgatgaatctgagcgcacgtcaaatcacactctctgtgtaatccatatgtgctgaatcaacatgctctgaaaatacttctgtgaactatgaaggcatcgctcatacttacagtgtgcttgtgttagtctctggatctaacgtctcatcgtttgacgctcttactcagagttatcacgtttcactttcttttcagatccattactgtcatgtaggaggcttcattacaacct

SEQ ID NO: 149833 - DNA, 732 bp, Zea mays
  Clone ID: MRT4577_68173C.1
ccggccggggtgaagaaaacgccggctcgctcgctcgctccgtctctctctctcctcctcgctgcatatctttcctttgccttgctgtctccctcgcctctctccagtcttcttcaccaccctgcttcctccctcttcctcttttgtttcatcagagagaaaaaaaactagatttagcgagggcggaccgacgacgcagtagaagcaaccgagacatggagcggcggaggaaggcaatgtggctgtaccccaaggtcgtcggcttcaacccgccggagaggtggggccactccgcctgcttcttcgaaggcttcgtctacgtcttcgggtttccggtgaagggtgcatcgcccggcgtcagagcaggtcatgcagctatgagtgttggatctaaggtatatattatcggaggcgttggcgacaagcactactacagcgatgtctgggttcttgatgtcacaaaccgctcgtggagccaacttgaggtgtgcgggcagcgacccgcaggggcggttttctcataccgcagtggccatgaatactgacatcgcaatctacggaggatgtggcgaagatgagcgtcccctgaatgagcttctcattctgcagttgggctctgagcatccaaacggccgctacaacatttccatgtgcaaggttcttagcaaccactggagccaggagaggaggaagtttctcagatcagaagctagagatgcaagtgtgagcaat

SEQ ID NO: 149834 - DNA, 1999 bp, Zea mays
  Clone ID: MRT4577_68174C.1
ggccggggaggcactcctgtcccctcgcctccgtcccctccacgcagcagcagctacacctacacagctgtgtgtgtgtcggtcgccagaatcccagaaattagatagctggggttgggcgggcgacccgccgcgactgcagcgagaaccttggacatgagttgagaggccctatcttttcatgcccatgtccatctcgcgagtgatgagtgagaaaccgattgattgattgattgatgtgtgatgcctcactagctccttcgtggcaaatctcatcagcaacagagacggctggtgtgacagcttgtgaagaaaacgccggctcgctcgctcgctccccgtctctctctcctcgctgcatatctttcctttgccgcttgctgtctccctcgtctctctccctccagtcttcttcaccaccctgcttcctccctcttcctcttttgtttcatcagagagaaaaaaaactagatttagcgagggcggaccgacgacgcagtagaagcaaccgagacatggagcggcggaggaaggcaatgtggctgtaccccaaggtcgtcggcttcaacccgccggagaggtggggccactccgcctgcttcttcgaaggcttcgtctacgtcttcgggggatgctgcggcggcctgcacttcggcgacgtgctgaagctgaacgtggagaccatggcgtggagccttgtggccacgacggggcagtgcccgggcacgcgggacagccacggcgccgcgctggtgggccaccggatgctcgtcttcgggggcaccaacggcggcaggaaggtgaacgacctgcacgtgctggacctgcgcaccggggagtggacgcgcccgcagtgcaagggcgcgccgccgccgtcgccgcgggagagccacaccgtcaccgtcgtcgggggcgaccgcctcgtcgtcttcggcggcagcggggagggcgagggcaactacctctgcgacgtgcacgtgctggacgtgcccaccatgacgtggtcctcgcccgaggtcaggggcggccacgcgcccgcgcccagggacagccacagcgccgtggccgtcggccgcaggctcttcgtcttcggcggggactgcggcgaccggtaccacggcgacgtggacgtgctcgacgtcgacaccatggcgtggtcaatgtttccggtgaagggtgcatcgcccggcgtcagagcaggtcatgcagctatgagtgttggatctaaggtatatattatcggaggcgttggcgacaagcactactacagcgatgtctgggttcttgatgtcacaaaccgctcgtggagccaacttgaggtgtgcgggcagcgaccgcaggggcggttttctcataccgcagtggccatgaatactgacatcgcaatctacggaggatgtggcgaagatgagcgtcccctgaatgagcttctcattctgcagttgggctctgagcatccaaacggccgctacaacatttccatgtgcaaggttcttagcaaccactggagccaggagaagaggaagtttctcagatcagaagctagagatgcaagtgtgagcaacggagagatggctcagaaaccccgagaagcagaaacggagcaaaggaacccgttcctgcgtggcctagagaatggccgcgtgaagcgaaggagaaccggtgaagctcgcccgaaggaggccgagtcagagcaagaggagcactcgctgtccctttcccaacattcctcgccgtcgcagtcggatcaggagcagaccggagctcacaagcttccggcctccgccaacacgtcgccttcagccctgcagccgttcgctcgtctcaacggcaatggcgctcagctgagggccgccggacccggaggcgtctcctcgaggcctctcaaggcggaccagcttctccgcaccatcgcgccacagcatcggcgggaggtgcagttcctttcctccgaccatcagccgcagccccgggggcctcccggcccaccacaccttat

SEQ ID NO: 149835 - DNA, 359 bp, Zea mays
  Clone ID: MRT4577_68175C.1
gcgacatgtgaaaactcatctagttcaatatggccttctatgctgcgtcggacctgtgatggccgactctaaccctctagtatgacgcacgctgttactgctgctctcctagatgaatgtatacgagaagacactcatggtatctagctcccagatcgaaatgtagccgaccgacaaggttgatggtgtaacaatggttatagataatgtgcttgagcaggctctgtattgagcttaccaacatgtccttatacatggacgaaaggtattcagcgatgtctccacattagacgaggatttagggactgacaataatgtcgttgttataatgctcagacagaacaagggatcatcaagtg

SEQ ID NO: 149836 - DNA, 342 bp, Zea mays
  Clone ID: MRT4577_68176C.1
ccatatatgaacactagttttatattgcaaacagcaagattaaaagggattcataatcagtaagaaaggtacacacacactaaacaacgggcaaatttttaaacaaacactatcgagagttatcaaactaactgctgaacctttgacaacctccataaagagtagcagggcacacagtacagctatgaacaattggctacttaaactactgatccactaaagtggtctacacaaatatactggaacactaagtttgtagaaaactacctgttatgtatcatgcagtgtgttatgacagacaatattttcctgctgtttaagctagcaaaatcaccacctgct

SEQ ID NO: 149837 - DNA, 352 bp, Zea mays
  Clone ID: MRT4577_68177C.1
ccagcatgaaatgcaccacgcaaagcttttttagggttcaattcagtagacttatgctaatacataacagaatacccctcctttttttaaaaaaagaaaagaaaagcagggaaaagagggggtaacccctgaatttggggaatattaaaaaagaaaatgtttcccccaaaatcagggtgttacaacaggcgaggggggtcaaggacagtacgatgacgtcgacaaagcatcgacggggagcttgaccagcatgggcgggggatagcgtggaggtctaggcaagcagggcgtgatggaaatggcccaaaaggaggaatccaagcgagcaaacccagggagatggacaggccaa

SEQ ID NO: 149838 - DNA, 147 bp, Zea mays
  Clone ID: MRT4577_68178C.1
gtcccgctttcatcctatagagcttccctgcagtaccgtcgattcgtcgccactcgctcgtggacctgcatgcattgcagaagtgacaggacgacttctattgtctgtgaggctgctgtgactttcatattgggacattacttgaga

SEQ ID NO: 149839 - DNA, 467 bp, Zea mays
  Clone ID: MRT4577_68179C.1
ctaaaaagctaaggtcacaaacacacagggtcacattttgttccaaaacttttatccaggcccaaagcatttttgaaagaacaaaaaacctttataaaaaaatcattgggggcaaaaactaaagggatggggaaaagggggtcccacaaccattaaatgaccgggaaaagcctaatttatttcctggaaaagaggggccgggggggggcccaccagggggggggggaggaacttcttcgggagaaaaattgcccttagccttgtggggggggcggccccgggccttggggtccaagagcgccttggggtccttggggagctttagcttaaggacaaacaccttggggggggggatgcccaccttcacggggggagccgttaacctttttgggggggtatcccttgcaagggggaaaaaccaagggggggggggggaactggcaccaactttccctttgggggccttg

SEQ ID NO: 149840 - DNA, 1342 bp, Zea mays
  unsure (1)..(1342): unsure at all n locations
  Clone ID: MRT4577_6817C.1
ccacgagcgggccccggcccccggcgtccggtccggnaggaggnacgcttcgtggaaacctgcacgagccatcgaccttccagaagacgacttggcgccgtgcgtcgcgcatccgacggcccggcgaccctcccaagcgcccccggtttgactcgtcgccgggggtggcaactataagtacctgccctccccgtccgtccaaagaactctaactcctctaccagccggcgcacgccgacgccgacgccgacgggcacagtactagcgaccgagctgcgagcgacgccagggcatgggtgacactggcgcgaacatggcccactggggcgggctctacgggggtgtcgccgcggccggggttgtcgcggtgacgacggcaggaggcggcgggtcggtgtcgagcccgacgtcgggcttttttttttgcagcccgagccgcgcgcagctgcagcccggggtcggggtggagggcgggcgcgtgggcaagcccgcgcggcggcggtcgcgcgcgtcccgccgcgcgcccgtcacgttgctcaacaccgacacctccaacttccgcgccatggtgcagcagttcaccggcgtcccgcccgggccctacggccccggtcccggcggcggcggcggggggcccgtcatcagcttcggcgccgagtacggcggcgcgcagctggtgcgcccgtcgccgacgtccgccgtcatgtcgttcgacccccagcaccaccaccaccggccgacggcggcgtcgtcgctgcagagccagctgttcaggccgcagcagcagcagcagcagcagtacggcgccgacgtcggcggctacggcgtgcacggcatggccatggcggcgccgtcctccttcctgcacggcggtttcgaggcctcgccggaggaccggctgctgctgcagagcatgatgcaggcctcgacgatgcccaccggccacccgccccccactaacaacggcaacggataccacttcggctagctgattgatccctcggccaccaccaccgcacaaccgaggtaattaatataataagcggggagctagatcagggatcgatggaacgaagaagccgtcgtcgatgaccacgagctgatgatgacgcgtgttctagcttgttgctgctgcttaagcagctaagcattttttttgttatgtttttttttgctggcctcgcagaaggctagctacttacgagtaagtatcattagtagcgtagcggtagtgtgtagcttgctgctttaactagaaaaaggagttaagctaggtcgatgtaaatagttcccttttctttttatttttgaaaaaaaaatatcaatcaagaagtttaatttt

SEQ ID NO: 149841 - DNA, 202 bp, Zea mays
  Clone ID: MRT4577_68180C.1
aaaaaaaaaaaaaaaaaaaaaaaaaaaaaaattaaaaattaaataataaaaaaaaaaaacaagggatatagaaatatccaaacttaagaacacaaacatacggcctgactattttgatgttccatcctcttcaacccaatctttcgaccttatagctccaatttcgtgactcgtaaatccatttcattacccatctttttac

SEQ ID NO: 149842 - DNA, 915 bp, Zea mays
  Clone ID: MRT4577_68181C.1
cattgggtacctcgaaatgggaccttcggccgggagccgctcgggggggccggggccaacagccattccacacctcgcttgcgttgtcctcgccgcggcctcgccctgattcggttcccccgttcctcgcctctgtcatcgtctcctctgacccaaattgagccaagcgaagccgtggccgtgatccggtccatgcgcggagcgtggtagccggattctatcgccgtcgcctccccttcgccgctattttccagtcgccgggatcagccgagttggatctcgaggcataaagcgttgcgggcgcccggcgaggatacgatgcctgcggtgctcgccgcattcgctacccttcgagccgccgctgccatcgcctccggggactcctccttcccctgttcccatcgtctcaagcatcgttttagtagtagtaattttagtagtagtaattgtcattaacctttgcgttccctccgtcgcgcacgctcctcggctcggtcctcaccttcgcatttcggttttggtctggttgtgctcgatccgaggcttactttggctttgcggcttctctccttgtcgaagcttgttgtctggattcgacctgcagatcggaaggaaacaaggtggtcattatcacctacaagataagagaaatttctctttgtaatttgggatcaagcctgtggatggacgaaccctcggtggacttcagtgctgaaggtgttagcagcagatcaggtctctgccaaagcacctgtttaaatcctggttgtaagcatgaccgtgcttgctgggaagatgattatgtcaaggctgtaatatctcatgggcaagatgattttggcggtcgatgaaattggattggctattactgaagtgatgcatgcatatgatgatgacaatggtcaaatcttatat

SEQ ID NO: 149843 - DNA, 227 bp, Zea mays
  unsure (1)..(227): unsure at all n locations
  Clone ID: MRT4577_68182C.1
gactgcancaaaaccatcatatctagcagaactctctcgacctcatcggcgttgncnaaccgggtgtgtgaccgtatatggcgccgagcgggtgtatgattatctcgttcgctcattatcgcctggcgcccagacactgtttgcctgtggttcgcgctcgccgccgcctcacttacgctcgtccaggctaataaggacctgtcggaggttacccacattgtctactt

SEQ ID NO: 149844 - DNA, 186 bp, Zea mays
  Clone ID: MRT4577_68183C.1
gcccacgcgtccgcggacgcgtgggttggagcagaaatagataataacttgtatattttccgcagatctttattatatatgactgctccaacatttacagtttgaacagaaatatataataaagatcagcgggcaatatacaagttattatctggaagaatcatatctgaaaatgtccctgaagat

SEQ ID NO: 149845 - DNA, 223 bp, Zea mays
  unsure (1)..(223): unsure at all n locations
  Clone ID: MRT4577_68184C.1
tggcctcccttctttttttttaacnnnacatcaaaggctcatactgtagtttttgtggggttttacgtaaaaccccacaaatacagccgcaaaatacaacgcctacacacatgcaccttgttctgggctaacaaaatcaagcccctttgcacacaattaaagaggagccctctactcaaaatttaacacaggtgaaggcccaaaaaaaagatcaaaaaggaaa

SEQ ID NO: 149846 - DNA, 444 bp, Zea mays
  Clone ID: MRT4577_68185C.1
agtttctgctgttttgaataatcaaatgcgtgtcatggcctctacctgatctgcaacctgtgacagacttgaacttgtgtgaagttcaaagcaagagtccttgactacaaaaagacttacataaattaataagtcaaaacaagaatggaaagggtctaaatactcattagtaatgttttaagacaaagtcttgctttcagcttccaggggttaattttattttttgtattaaattgataattacgatatggttgatctatattgcatacaaactgtggagcttttatgattacttgaagtagtcttaaaatattatttacttagtcaccaccacttatgatacagtggaggcatcaaaccatcaactatttagaagtgttacacgacttccttcttgagtattgcgagctgattcagacgagactgaaagcatatgaacatatt

SEQ ID NO: 149847 - DNA, 263 bp, Zea mays
  Clone ID: MRT4577_68186C.1
cttcctccgacaattcgtcacgcccatgccgccctcccctccgaccacctaacttcgctccgcccatggccgtcgtcgcccatgccggcctcccacggcctcgcctctttctccctttctccttccacggaagccccatctattcatcatgcctgtcattggctctgccttcggttgctgtagattatgaccatgggaacccatggtgtcgccctgacactcctcacaacggtgcttctcgagagcacatccagtgtcacagt

SEQ ID NO: 149848 - DNA, 669 bp, Zea mays
  Clone ID: MRT4577_68187C.1
cccccgaggctggccgggccgagcagcccctggaggcttcctcccaatgccatacatcttcacgcactcaacctcgctcgcctctcccctcatctctactatttctggccggcaacagaagtccttctcctcgatttgtgcttatgtgcccaccagccgttcatcgctgccgcaagctcgcatctgctctccaccacggcgagctccccatcgccgtccagctcgccggctttagctacagggcgccatcaaccacaagctccgacatggaacgctcgtgctcagcctccggtggaccttcctcgtcgactcctgctgcgctcacctgcgtttcctcctgcgccggccatccagcagcttgcccaccccactcgcgagttttctgcatcgcgctgtcctagccatggacgctgtcctgcacgcgccggcatcgcgctcggacctctcccaacatcctctcggcaactaggcatctcgcctcgttttccagcatcgccagaccccgctgctcctgtgtcaacctggctgacgctgctccctgctcggcctctgcttgtgtgtctcctctgctacctcaccggcgagcttggcttcagctccgtcgctcggccatggacacctgaacatacacctgcatcttgctgtggcacgttcggctcgcctgaacct

SEQ ID NO: 149849 - DNA, 257 bp, Zea mays
  Clone ID: MRT4577_68188C.1
attgctgatagtcaaaatagcatcatcttataagggtgtgcactaggataaatttaatccttttcatgttgctcatacttaattaattaagttgctgcaattttcatccattttgaccgaatgtgaatatacttatcaaggaattctttgtatgatctttaagaacgtgcgcattgtaagatttatgtgacctctgtacggcatagtataaggtagttttgcgtggaaaatcgacagtgcttactcaaaaggtgctg

SEQ ID NO: 149850 - DNA, 364 bp, Zea mays
  Clone ID: MRT4577_68189C.1
cggaatggccggtgcggccgtcgctctgttcgtggtaatcaggacacccagttttcgattttttgtgcacataaatactgggtgcaagggtatatttttacaaggccatgggtaccaaaatgtttgagtggtctaccatacatctatcttgctgacccttacatcctacacagaaaaattgttgtcgtgtggtcacagcaacccgcctgtgctactctttttttttcactcagattcattttattacaccttaagcccttaacttggggtgcataaaaggatgttctcaagaagcatatttacgtcaggaaagaatacacaccgtgtccagtacatgtttatatatactctatgcacacataag

SEQ ID NO: 149851 - DNA, 507 bp, Zea mays
  Clone ID: MRT4577_6818C.1
gcggccgttcctttcctgtccgactcccagccgtcgtctgctgcgtactccgcctccagtttggtctgtttcttgcaagctcggccacaaacaggatcatcactgccaaggaccatgcctctgtccagatcaacattggccacttggatgcgaatggcctgtatgatggtcacttcacaacatttgctctctctgggtttgtccgtgctcagggcgatgcagacagctccttggacaggctgtggcagaagaagaaggctgatatcaagcagtagattttacatctagtttaccaagaattggacactgccttagctatgttttgaattcatgtcactatatgcaatgttgtgatttcagctggtaccttaaatctgaagatttagtatctttgttgggttccttctgagtttgatgtgtggcgctcgtataattcccttgtacaaccccatttagtatcattgtgatgattttggactcaattttgctcgagtcagggtacgactc

SEQ ID NO: 149852 - DNA, 232 bp, Zea mays
  Clone ID: MRT4577_68190C.1
cgatgtcgtcctgttggcacttattagtgtacttataccaggcgatagctcaagtcccaagtctgagcactcgttggctcgatgggctacacctgaacttcatgatatcgatgctctgcctaatatggttggacctcgcttggaaggactataccctgagaagtccctttctcgacttgcggatgatattgctctatgcgttcatgccgagccggaattccgaccagctatg

SEQ ID NO: 149853 - DNA, 251 bp, Zea mays
  Clone ID: MRT4577_68191C.1
cggacgcgtgggccggagtcagacacgcctgccccgtcgcgcgcatgtctgcctaagcgccgctccgcccctgccctacgagagcactctgcggccaaggttgcaggctgcagccaccaggcctctacggtggaggagaagaatggaggatgctgccaaacggttgagatgagactccgcttcacaagacagtctccacagtgaatctgcaatgggtagctcactgcagtctgatggacataggagagatg

SEQ ID NO: 149854 - DNA, 314 bp, Zea mays
  Clone ID: MRT4577_68192C.1
tcgagcggccgcccgggcaggtacagtatcacctttggtctcactaaaattgcaaaaaaaaataaaaggtcaacccagtgtcttatctgtttcttcaaacgtagtgagtagatctatcctggcatcaagatcatgacctggccgaccattgcacgaagacagcattactcatactgacatgtaagcataaatgttgtttatgaaattctttatatgataaatgcatcctagataaattgaaaaaaaaaaaaaaaaaaaaaaaaaaaaaaaaaaaaaaaaaaaaaaacaaaaacaaaaaaaaaaaaaaaggttgg

SEQ ID NO: 149855 - DNA, 273 bp, Zea mays
  Clone ID: MRT4577_68193C.1
ttatcgacttctatggggaaagctggcgcgctctgtaggctccgatcctgtatagcgggcgcgatccacgcgttcgcagcattgaactctcctgcttatatacagtgggaagccactactatcatacagccagctagctgattgggagccttgctatcttatagtacacgacggtcgttgccggactaccagcacgctgcacctctcgctggttcgctattacaagtgcaacaattgctgccattcaaccaacttgctataacaaacccagca

SEQ ID NO: 149856 - DNA, 322 bp, Zea mays
  Clone ID: MRT4577_68194C.1
ctataagcatattccatttgtcaaatattatatcttatacattttttcgaggacaaatgtactgttcataatcatataaattaaattttcaggcatggggagctacagtaagggggtgtttgtttgagattataatctatccagattatataatctaataacttttgaactaagagttagttcaaaaattgttggattatataatctaggtggattataatcccaaacaaacaccccctacggctgcctccatgccggagagttggggtataggagtgtgaacgggacctcggtccgcgcgatgcggtttttgatgtgaggt

SEQ ID NO: 149857 - DNA, 425 bp, Zea mays
  Clone ID: MRT4577_68195C.1
agtgatgaccaggtatgccgcatgctggctcgacctttgagtaacacaacctgaccctaaaggagagctgttcttgctggagcaagagttcatgacttgaggcgccggctgcaggctgttgaggaacaactctccctaggtgggggtttcgcacgtggcgagaatgaactggcggaagctcctcctccgaatcatgcgaagaggctccatactagccaccagaatagcagcgatgatcagatacagatcgctgatcccgcatctgccatggggagaacccaaactcagggtgcaatgactccagagaaatctgtaggggatgattccacaaagcagggtgctacgcgctcagataagagctcgccgatatgacgcaggccaacagcatgcttgttgtgtgctttggcccaagactgatgcgcaca

SEQ ID NO: 149858 - DNA, 288 bp, Zea mays
  unsure (1)..(288): unsure at all n locations
  Clone ID: MRT4577_68196C.1
actatataaactanacggccatgcacacgtacttaatcttttatcctctagatctatcctcctattttttagttaatttttttttttttttgcgggtgcgggggttatttccatataacatttttttttattccaattaacntttaatttccaatccaaactaaactcatttaacataacattaccaaactcggatcactaaatacaattgttctaaaaaatactatctcctacataaatatcaaacaatgtaatcccatccttaggtattttatcccctcctttaaa

SEQ ID NO: 149859 - DNA, 342 bp, Zea mays
  Clone ID: MRT4577_68197C.1
attctttaattcctgtcttagcaaatatgtgggctccttaaaacatcgtggctcattaacatcctctaatcatgctcgttaccaccctcctaggcctgagcgcctactccgtcgcagaggcaagcttttcgcgcaacatcatttactacgatcaatggcacaccaaggatctgccccccaaggacgtcacccacagcgtcacccacgttatgatgtcctttgccaactcgttgctcttcaccactaagcctgctggcaagtatgagccgctccaacctcttaaggaggtccgcgctctgtttgatcacgacatcaaggtttgtctatgctgttggaggatgg

SEQ ID NO: 149860 - DNA, 1525 bp, Zea mays
  Clone ID: MRT4577_68198C.1
gtcctcccccgcccacagccgcgtcgcgcaccaactccaattcctcctctccgagcgcccccacccacctcgacgcctcgcctcggccgttgagatctcgcgcgcccgcggcggcatggcgacgcgcaaccggacgccgctctaccgcaagtaccgcgacgcgctgcggcacgtccgcgcgccgcccggggcgccgtcgtcgtccggcggcggcggcggcgggggagggccggtaatcgagatggcctcactcctgcgctccgaccgcccctacgcgcccctcagcaccgacgacccctccgcctccagtagaggcgctgcgacggtcgggctacccccagcctgggtggatgtctctgaagagatatccgcaaacatgcagcgggcaaggacgaaaatggcggagctgggctaaggcgcatgccaaagccttggatgccgtcctttggtgatggcagagacgaccaacgagccattgaggttctcacgcacgaggtaacggacttgctaaagaggtcggagaagaggctgcagaagctgtccatgaaagattcgtcagaggactcaaatgtccggaagaatgtccagcgttctcttgctacagacctgcaaaacctgtcaatggagttccggaaaaagcagtcgtcgtatctaaagcagcttcgtcaacaaaaagagggtcaggacggtgttgatttggaaatgaatataaacggagcaaagtctacatttgaagatgatgagtttgacgatgtgggtttcactgaggttcagatgtcaaaacttaagaaaagcgaagccttcactagagaaagggagagagaaattgagcaggttgttgaatcagtcaacgaacttgcacagatcatgaaggatctttcagttctcgtgattgatcagggaaccatcatcgatcggatagactacaacatacagaatgttgcagcttcagttgaggagggttacaaacaattgcaaaaggctgagaggacccagaagaaagggggcatggtgatgtgtgccactgtccttgtcattctaatcttcatcatgatagtccttctgattttgaaggagatcattttctgacatacatacctatctcattctaccgggaacgccgcagttcgtttgaatagcgcgatacggttcgctgatctgaagatagttctcctgcccattttcataatggctgggccagcaactgtcttccgtgttggccacaatttttttgcatcgttgcagatgtagagatgctctattcatacatgcctcatatttatagggaaaagaggattgttttacacgtttcaccttccagtttgccttgcggcgacgaggcttggctggttgtttatgcctctgtatagggtgagttgtatcatacatcaggttatcggaaatcagaaagtagattcagttcctttctgctttatgttgtctgcccttctattttgagctagttttgaagtggcatttcattgtaccagacattcctaacaattgtttctacaacttttcgctc

SEQ ID NO: 149861 - DNA, 313 bp, Zea mays
  unsure (1)..(313): unsure at all n locations
  Clone ID: MRT4577_68199C.1
agaaacattggaaaattttaaacccgtacaccccccnnccccatttttttaaaccaacaataaaaaaatttctcaaaagccaacttccattcaatttaatgcaactcccatacaggaattaattcaaacaagcaatacaaaaacttttctgaaccatacaaggcatcattttttataaagtaaattgttctcaaccatttccttgcccaaaaaattacttgtaaaatcattccaccaacaaattattgcaacttcctttcaattttccataagtttaaacctaaacttttccacaatccccataacataacta

SEQ ID NO: 149862 - DNA, 361 bp, Zea mays
  Clone ID: MRT4577_6819C.1
ggccccggcccggaattcctggggccgacaccacgcgtgctaactcaggtcctagcatgacgcaggagcgtgcaattatcctcagatgatcacgcctgtatctatggacttcggcaggatgctcggctatatccatgggatcaaaaggacatgactccagctaaccgaccgaataagaatggaaacccaacacccatagcagcggaagtggagacatatgcaagagactacacacctttcccaacaacggacactcctgctgaccgagcttggcgtcctgacaccatctgtggataaggaagagcgcatgcaactggatagaagcacatagcggcaggcgcagctgattcatcgacacgtc

SEQ ID NO: 149863 - DNA, 257 bp, Zea mays
  Clone ID: MRT4577_681C.1
ttgatccaaaccctaagccttcacctaaacagacaagaagcttcttatagctttgatttatctaccataatgcgtctttcccttcttttattagccctccttgcgggtgttatggcagcccctgtcccagacacggcagcaaacccagtgatgctagcgtatgatgctggtgatgaccccttagataaaactcccgtcatgttggcttatgatgttcaaggacgcgcctgaaggggggctgtgctggccatggctag

SEQ ID NO: 149864 - DNA, 407 bp, Zea mays
  Clone ID: MRT4577_68200C.1
aacttgtgggcgacttgtacgtatgccagtcaacaggtgcgtaacgaccgacatgaactgcagtctgttgcctgcagcggggccatgcatgcatgcccgtactgaacagtgaacacagtcctttgattggacgtagtacatacataaaaactgttgtctattaacctgtatactggtggttcacttgtcaattcggctattccgacaacgcaaactgtgaaacgcagacgatgtcgttcagttgcctcaggggtacctacccgcccggccatggccatgccatgcacacctcttcgtcgtcgaataaccgctcgatccatcgacgacctacgtaccttgttcatgcatgaactggacccggaccgacaaaacacaactgccttgagcctgcggcggcaaggcccgga

SEQ ID NO: 149865 - DNA, 382 bp, Zea mays
  Clone ID: MRT4577_68201C.1
gcagctagctctagcaaagcacttgccatctaccgaccggcgcattccaaacagaccgacgagctagcagagcggcaggcacctaccttctaaaggaacatggcccgcatgcagcagatggcaatggcgacggcagccgcggtggccttggtgctgctggctgcctttacctcggaagcaagcatcaactgcaatcagatggcgtgggccatcgtgctctgcatatcctacactcgcggtcagacattggagccctccatcggctgctgcactggcttctggagcctaaacaacgccatccgaaccaccgactaccgtcaagccgtctgtaactagctcaaaaacgtcgacaccggcgtcagccggcataacgccggcaacg

SEQ ID NO: 149866 - DNA, 305 bp, Zea mays
  Clone ID: MRT4577_68202C.1
attccgcacctagggttttcgcgccgccgccgcagccgcaacaatgccgtcgcacaagaccttccggatcaagaagaagctggcgaagaagatgcgccagaaccgccccatcccctactggatccgcatgcgcactgacaataccatcaggtacaacgccaagcgtaggcactggcgccgcaccaaggtcggattctgagcgtgcggactgtcctgctggtgcggccgaacgctaccgtctaagagctatcttctgctttatcattgcctctgttcctgtaagctagccatgcgctgctgtgctg

SEQ ID NO: 149867 - DNA, 848 bp, Zea mays
  unsure (1)..(848): unsure at all n locations
  Clone ID: MRT4577_68203C.1
ggtaccctccngagtcccggccgggaagagacctttcatttccttctaccgcagcctcagaattcccccctcccccgtagcgaaaccctagccgccacgccaaaaccaaatcccgccgagcccgaaaatttccggcgggttccttgccgcgaatcgattgatttcgagcgattcgactcctttgtgatctctcggcggggtagagcgcggtcgaccgtcggccatgtcgaggtgcttcccctacccgccaccggggtacgtgcggaacccagtggccgtggccgagccggagtcgaccgctaagctcctgaaagaaaaggaaaaggccgaaaagaagaaagagaaaaggagtgacaggaaagctcccaagcagtgtgagacgtccaaacattcaaagcacagccataagaagagaaagcttgaagatgtcatcaaagctgagcagggtcccaaaagagtacccaaagaatcagttgagcagttggagaagagtggactctcagaagagcatggagctccttcttttgtacatacgatacgtgactctcctgagagctcacaggacagcggcaagagacgaaaggttgtcctgtccagtcctagccaacctaagaatggaaacattcttcgcttcaagattaaaagtagtcaagacccccaatcagctgttctggagaaaccaagggttcttgagcaaccattggtccaacaaatgggatcaggttcatccccgtcgggcaagcaaaattcaatccatcataagatgaatgtgagatctacctctggtcagcggagggtcgatggtgactcccagcagtacaaaaatgtttgattacagaatccccggc

SEQ ID NO: 149868 - DNA, 2997 bp, Zea mays
  Clone ID: MRT4577_68204C.1
gggtactcgtggctggcgccgcttttatttccttctaccgcagcctcagaattcccccctcccccgtagcgaaaccctagccgccacgccaaaaccaaatcccgccgagcccgaaattttccggcgggttccttgccgcgaatcgattgatttcgagcgattcgactcctttgtgatctctcggcggggtagagcgcggtcgaccgtcggccatgtcgaggtgcttcccctacccgccaccggggtacgtgcggaacccagtggccgtggccgagccggagtcgaccgctaaggtttgttgaaccttcggatttacacacgcacgtgccagatcgtttgttcaatctgtaggttttgcgcggatctgtggtttgcgcgtgcgtgatgtgggtattgcccgtgccttgaaagctaaccgagctgaggaagtgtatggatcttgtgtagctgcacgaggtcctccaaatcgattgtaaaatttaagttgtatggccggtaggccaagattgggttattccggttttcgaaaactggtagcatggttatcggggacattgaaagaatggtagaacatcaaattcgattcaaaactgtgctagatttgcatatttagtcgccctaaaattacgtggacgtgggtgatccgaattggttgttgtatgatggttggaagtgactggccaaatttttttgtttctcaaagttttctttgagaaactttggagaaaccaagggttgtggagcaaccactggtccaacaaatgagttcggtttcatccctgtcgagcaaacaaaattcaatcaatcgtaaggtgaatgtgagatctacagctggccagcagtgggtcaatggtgactcccaagcagtacaaaaatctttggttacagaaaccctgtcaagggcaatgcagagaactgtcccccagcctgcagtgaaggtcacacgtcgggctgatccccagctatctgttaaggcgccggttggaagatctgacctacctccaaagttttcgggaagtgtgggcccttcacctgctagagtgaccggaagattttgtcctgcacctgttaagacgcaacagagaattgagcatccaccttccatggtgtcacagagagttgatcctcaggcgaaggtgtcacagaaggaaatgggatctgctgtttgcctgccacaagctccacatcctcctgttttgcagaaacccaaggacttgcctgttcctaaacagcgggagcctatcaactctttgccaaaagaagagccttgtttctctggaaggactgtggaagcagatcaagggaaggaagctaagctctcccgttcagatcggaagaaaatccacaaaactaaaaaaaaaaaaaaaaattcccgtcgtccgttctaaatcagaactgacgattgctctggtggctgaagctcctgaaagaaaaggaaaaggccgaaaagaagaaagagaaaaggagtgacaggaaagctcccaagcagtgtgagacgtccaaacattcaaagcacagccataagaagagaaagcttgaagatgtcatcaaagctgagcagggtcccaaaagagtacccaaagaatcagttgagcagttggagaagagtggactctcagaagagcatggagctccttcttttgtacatacgatacgtgactctcctgagagctcacaggacagcggcaagagacgaaaggttgtcctgtccagtcctagccaacctaagaatggaaacattcttcgcttcaagattaaaagtagtcaagatccccaatcagctgttctggagaaaccaagggttcttgagcaaccattggtccaacaaatgggatcaggttcatccctgtcgggcaagcaaaattcaatccatcataagatgaatgtgagatctacctctggtcagcggagggtcaatggtgactcccaagcagtacaaaaatgtttgattacagaatccccggcaaagaccatgcagagacttgtcccccagcctgcagctaaggtcacacatcctgttgatccccagtcagctgttaaggtgccagttggaagatcgggcctacctctgaagtcttcaggaagtgtggacccttcgcctgctagagttatgagaagatttgatcctccacctgttaagatgatgtcacagagagttcaccatccagcttccatggtgtcgcagaaagttgatcctccgtttccgaaggtattacataaggaaaccggatctgttgttcgcctaccagaagctacccggcctactgttcttcaaaaacccaaggacttgcctgctatcaagcagcaggatatcaggacctcttcctcaaaagaagagccctgcttctctggtaggaatgcagaagcagttcaagtgcaagatactaagctctcccggtcagacatgaagaaaatccgcaaagctgagaaaaaagataagaagttcagagatctgtttgttacctggaatccggtattgatagagaatgaaggttcagatcttggtgatgaagactggctgttcagcagtaaaaggaactccgatgctatcatggttcaaagcagagctactgatagttcagtgccgatccatccaatggtgcagcagaagccttctttacaacccagggcaacatttttgccggaccttaatatgtaccagctgccatatgtcgtaccattttaaacatctggcgaggtagatgagaattagatgagatgttgggagagagctgtgtggatgtgggagataatgggttccctgccgcagttttccagctttgttccatagtgtttctttgaggccaatagagttctggcagaatttataatgtaatattgattaattatttcgctcatgtatgtaagcagttgaactgcaaaatcttgtttctaggatgttactgttttatgacacgcagtatttgttatattgaccttttgcctcgtttatttcagttgcattaatttcgagataaaaaaaaaaaaaaagcggcc

SEQ ID NO: 149869 - DNA, 356 bp, Zea mays
  Clone ID: MRT4577_68205C.1
gcttgctggtgtttctctacatttaatcatttgtggtgtttccacccaaaaatcgcctccagaggggatccaattgggcaccaaaaacactgactgcccccaaagggactctttactatgggggcggaaaaacccccggggccagcccaagggacaagggggttactaatccccccagcccccgagtatcgacccgacaagatgcccttcattttccccagtccacagggggggcccccactgggggccacaaacaaagccaagctacccaacccgctgaagggtgacaccaagaacacgctcaagccgtacgaaaaccccaccgaatgaggtgcaaacggaggggcccaaatgcc

SEQ ID NO: 149870 - DNA, 299 bp, Zea mays
  Clone ID: MRT4577_68206C.1
ccaaattctccttagagacagtgattaatagaaggaatgagtggaagattagtatacacacaaggctattcaggagtgggggtacaatgttaatgcggtgacctttaaatcttcatttgtctctatttccctgaatgctaattagaggacatgttcatcaccaggaggaatttgcatccaagtccgtctccctgctaagtggtattttgagaattccgaagcttagtctcagagaagagctgacctgaacttgccgaggctctcactgcattgtagcttttctctggagaacaaaaact

SEQ ID NO: 149871 - DNA, 267 bp, Zea mays
  unsure (1)..(267): unsure at all n locations
  Clone ID: MRT4577_68207C.1
cctccnnnnnnnnnnnnggggtttatttctgggggtttaacgtctgatcctggagaagatataaaccagcgttttggcacgaaagaggtcatgcaccgaagcagcgcactcgatgacttaattgacccatcgccccaacagcatggaacaggcaccccgtgtaggtctagtccaagaatagccatgcacggtcgcccgtggcttgctgggctgaaaaagcacacaaaaaccgttgccgaaggaccccggcctggcaagcatataaac

SEQ ID NO: 149872 - DNA, 166 bp, Zea mays
  Clone ID: MRT4577_68208C.1
acgagactaggcgacgcgagtcgagaggagtcgattacgatcggggctcatgcaagatgaagagggagccagcagactgggactgcgggtcgtgccaacgccgaaacttcaggcatcgatacatatgccagcgctgcagctagccactttgacatgatcatcgtgg

SEQ ID NO: 149873 - DNA, 149 bp, Zea mays
  Clone ID: MRT4577_68209C.1
tagctcttttccaatatcatcctcactctggggatgcacagttcctgtgggtggggtctttccaccttcaacacggaggaagctacccttaacgccatccaacgcattaacggaaactagctgttccgacttaacatcactttaaacta

SEQ ID NO: 149874 - DNA, 555 bp, Zea mays
  Clone ID: MRT4577_6820C.1
tccagccgtcgtctgctgcggactccgcctccagtttgctctgtttcttgcaagttgctcttgcggtagttcccccaactgtcaccatgcagaacgaggagggtaagactgtggacctctatgtccccaggaagtgctcggccacaaacaggatcatcactgccaaggaccatgcctctgtccagatcaacattggccacttggatgcgaatggcctgtatgatggtcacttcacaacgtttgctctctctgggtttgtccgtgctcagggcgacgcagacagctccttggacaggctgtggcagaagaagaaggctgatatcaagcagtagattttacatctagtttaccaagaattggacactgccttagctatgttttgaattcatgtcactatatgcaatgttgtgatttcagctggtaccttaaatctgaagatttagtatctttgttgggttccttctgagtttgatgtgtggtgttcaattcaaccgtccagtggcaccgaaatatgctgttggggtagtttcattcaaaaaacgtgccattcaattc

SEQ ID NO: 149875 - DNA, 355 bp, Zea mays
  Clone ID: MRT4577_68210C.1
gtgggcggacatgagtccatgacacactcctgctcgcagcgtgggtgctcataccgacgctgaacctgctctgcccctcacgccacgtggggttcttctgataccaccacccacatgaaccttgatgatatataatatggttacactatccaatagccaaagccattatcttactcatcacatacactaactgcggaatgccatattgcaagagacagaagtgcctcctagcatggtatcatcgatttcactgcacccatcatgtttaacatactacacacatgtagcttcaagtgtgatcgctaactcatatgaccctacaataagtccaccagctataagagccttgagatca

SEQ ID NO: 149876 - DNA, 246 bp, Zea mays
  Clone ID: MRT4577_68211C.1
acgcgtccatgatcggacgaccacgaactcgctactgaccgtcggggattctcgggctcttggctcacgcagttctgctccacacgcgcaacccaatgggatatgcatgcacctggcagtttactcactgctgtctactctgtagccaagaacttccgacacaggcgcccagctgtatctgtcgaccgttcacctggtcgatgagcggaagatctaccattcccaatctcaagatgcatgcagtct

SEQ ID NO: 149877 - DNA, 1114 bp, Zea mays
  Clone ID: MRT4577_68212C.1
gagctagcgacgacgacactgcccatgcagcatcaacgctcaatgatatatactagtacatctttttgccaacattttcattcgcctcgctatacatacatctatcttccgcggccaacaatttccaggaggacaagacggtcctgctgctgcaaccagctcgcgagttcctgccggtgatcgacaaggcttacaaggctctggtggagaagacgaaggacacgacgggggccagggtggagaacaacaagttctgcctctccgtgcacttcagatgcgtcgacgaaaagagctggagctcattggctgagaaggtcaaggccgtgctccgggacttccccgagctggagctcaccgagggcaggaaagtcgtggaggtccggccgtcgatcatgtgggacaagggcaaggccgttgagttcttgctcaggtcgctcggattcgacgacgaccgcaccaacgtcctgccggtgtacatcggggacgaccggaccgacgaggatgctttcaaggtgttgagggagagaggtcaagggatagggatccttgtttcgaaatgccccaaggagactgatgccacctactctctccaagatcccactgaggtcatggagttcttggtccgtctggggcagtggaatccactgcgatcaccatcgccggcggcgcgcccaagggggcgaaagcagtaacagacgacgacaacaacagatcgctaagcgtgtttaatttaattatagttagttagttagtttattaattgttgcactactctaggagtaataaccctcctcgacgatctacatacattaccccatcgtctcagctcagctcccggccccagatgtgtgaactctggccggccaacctgctgattgtgttcgatcagacgttcttccatatgggttttagaggcacaggcaggcatccatgtgcaaagctgcctgccgcctttgattagcttaacccaggaaggttcatctgctgtatgagttgtgtggtgactacctagctatgaccttagcagcttaattattagcccgtctactgtaaaatgtaacatataagcaactggcagaattttaatatgcacttcctttgctctgaggaccct

SEQ ID NO: 149878 - DNA, 458 bp, Zea mays
  Clone ID: MRT4577_68213C.1
aaagaagaacagttcggtcatttgtattctctctgtctctctccactgagtaaattttaacacgttatcagcactgctctcaagatcagagaaaaagacttgggctgagtttcttgttcggatgaacgtagacttggatcgctacagcatgcaacaacggattttcttgtaagatattgctcttgaatttttgttcatattcaatggcatcgtcttcatggacaaagaggagcgaacgagttttccttgtacccacgcgggcgtttcctccgtatggggctgttggtcgccgtgctgcgctttggccggaggccgcgttggccgagggccgcacgccagtggtttgccgcgaagccgagcccgcgctcgtgcgcgccggtgaacgcgcccgcgcagccgtggtcgggccaccgtgcccgcacgtactggctgctgcccatgcgccggagccacgctcg

SEQ ID NO: 149879 - DNA, 592 bp, Zea mays
  Clone ID: MRT4577_68214C.1
agcaagtggtaacaacgcagagtagcgggtgattgcttgcaaaaaaaaaaaaaaaaaaaaaaaaaaaaaaaaaaaaaaaaaaaaaaaaaataaaaaaaataaaaaaaaaaaaaaaaaaaaaaaaaaaggtactctgcgttgttaccactgcttaagggcgaattttggaaatatccataaaaatggcggacgttcaagaatacatataaagggaccaattagccctataggaagtcgcattacaataaaatgaccagcattttaaaaagcagtaagtgaaaaaaacatgagtttaccaaacattaatacgcttataaaaaaaatccaatttatccagatggggtaaaacaaaagaggcccaaacagattgcccttccaaaaagatgcaaatactgaaaggtaaaggaaagcacccttgagcggtgcaaaaaacgcggtgtagagaacagaatacccgcagggataactcgatacatttgccatagccctagcaccagcacgtttggatttgttgccttaatttatagcgaagtagagcgtttttacccgggatgttttaaatcagaggatgcatttagggagaaaaaatata

SEQ ID NO: 149880 - DNA, 2813 bp, Zea mays
  Clone ID: MRT4577_68215C.1
ggtggggacctcgagcgtccgatttcctcgtggctggggagcgcgctgtgccctatacacgctccaggctctcgtttcctggtaggcgctggtacaagcggaagcagcagtagcgtgaggcatccccatgccgggggcaatctcttcctcgtcgtcggcttttctcctccccgtcgcgtcctcctcgccgcggcgcaggcggggcagtgtgggtgctgctctgcgctcgtacggctacagcggcgcggagctgcggttgcattgggcgcggcggggcccgcctcaggatggagcggcgtcggtacgcgccgcagcggcaccggccgggggcgaaagcgaggaggcagcgaagagctcctcctcgtcccaggcgggcgctgttcagggcagcacggccaaggctgtggattctgcttcacctcccaatcctttgacatctgctccgaagcaaagtcagagcgctgcaatgcaaaacggaacgagtgggggcagcagcgcgagcaccgccgcgccggtgtccggacccaaagctgatcatccatcagctcctgtcaccaagagagaaatcgatgccagtgcggtgaagccagagcccgcaggtgatgatgctagaccggtggaaagcataggcatcgctgaaccggtggatgctaaggctgatgcagctccggctacagatgcggcggcgagtgctccttatgacagggaggataatgaacctggccctttggctgggcctaatgtgatgaacgtcgtcgtggtggcttctgaatgtgctcctttctgcaagacaggtggccttggagatgtcgtgggtgctttgcctaaggctctggcgaggagaggacaccgtgttatggtcgtgataccaagatatggagagtatgccgaagcccgggatttaggtgtaaggagacgttacaaggtagctggacaggattcagaagttacttattttcactcttacattgatggagttgattttgtattcgtagaagcccctcccttccggcaccggcacaataatatttatgggggagaaagattggatattttgaagcgcatgattttgttctgcaaggccgctgttgaggttccatggtatgctccatgtggcggtactgtctatggtgatggcaacttagttttcattgctaatgattggcataccgcacttctgcctgtctatctaaaggcctattaccgggacaatggtttgatgcagtatgctcgctctgtgcttgtgatacacaacattgctcatcagggtcgtggccctgtagacgacttcgtcaattttgacttgcctgaacactacatcgaccacttcaaactgtatgacaacattggtggggatcacagcaacgtttttgctgcggggctgaagacggcagaccgggtggtgaccgttagcaatggctacatgtgggagctgaagacttcggaaggcgggtggggcctccacgacatcataaaccagaacgactggaagctgcagggcatcgtgaacggcatcgacatgagcgagtggaaccccgctgtggacgtgcacctccactccgacgactacaccaactacacgttcgagacgctggacaccggcaagcggcagtgcaaggccgccctgcagcggcagctgggcctgcaggtccgcgacgacgtgccactgatcgggttcatcgggcggctggaccaccagaagggcgtggacatcatcgccgacgcgatccactggatcgcggggcaggacgtgcagctcgtgatgctgggcaccgggcgggccgacctggaggacatgctgcggcggttcgagtcggagcacagcgacaaggtgcgcgcgtgggtggggttctcggtgcccctggcgcaccgcatcacggcgggcgcggacatcctgctgatgccgtcgcggttcgagccgtgcgggctgaaccagctctacgccatggcgtacgggaccgtgcccgtggtgcacgccgtgggggggctccgggacacggtggcgccgttcgacccgttcaacgacaccgggctcgggtggacgttcgaccgcgcggaggcgaaccggatgatcgacgcgctctcgcactgcctcaccacgtaccggaactacaaggagagctggcgcggcctgcaggcgcgcggcatggcgcaggacctcagctgggaccacgccgccgtgctgtatgaggacgtgctcgtcaaggcgaagtaccagtggtgagcgaattaattggcgacgccgacgccgctcctgtcgcaggacctggacgttatttagaaggctcttctccctggcggctttgatgcgtgcgtcgcatttgcgccgggcggacgggcgacggtggttggcctaccgcctacgtcggctgcgtgccctgggaatttgggcgggcacgatgatgccactgggcaccgggcgcggggtagtatgatatgaaaccgacggcgatggagatgaggcgcatggcattttcccactgataaatggggagttgtatgctactttaatatcgccactcctgttagtatttatattgatgctgtcaagttttccactccaagaacaaatgacggtagccggtaagtataggcctatttgtagagctagttagaagtacatgtgcccaaaccgacaacattgtacgtacattataaagcacggcactatttgttactgtcagtaaccgtgtcgtgctagtacgtcaccggtccagcgtcacagctcctatgacgccattgtatagcacttagtagtgctcttgtcagtctagatattatttcactttaagagtgctcaaaagagctagaac

SEQ ID NO: 149881 - DNA, 278 bp, Zea mays
  Clone ID: MRT4577_68216C.1
gggatgcttgcgcagacagggacggagaaccggggggggcttttagcggcgagtccgaggaacagcctcacgaaggacgggacataaaggacaaacgatttggaaaaagcctagagcacaaaggaagaccaaagcggggaaagaacgcggataaagacagaaatgacaggacccagacgacatggaaaatagacagtgccgaggcatggtagtgacgatcaacacacaaacagttacagctactggtgcaaaaaaaggaatgaagaagggatgcagat

SEQ ID NO: 149882 - DNA, 139 bp, Zea mays
  unsure (1)..(139): unsure at all n locations
  Clone ID: MRT4577_68217C.1
cgccgtgtctgctacacgttctctgccgcacgcagctcctctgcgtcgccattctctggcgttctctctcnctcgcgcgtagcttcatctgctcgcgtctgtctccagctcgtaagccatgtgcccctctccctgcacg

SEQ ID NO: 149883 - DNA, 468 bp, Zea mays
  Clone ID: MRT4577_68218C.1
attaagattgttggaatatctgcgcaaactccagcttatgctatcgataaaaagaataagcatcctaaccctcctatccagcaagatacggagaggtgccgcgcaacgtcttttacgttatgcggcgggtctccgccccacatttagacaacagtaggaggaggcagtcgctccccagcttgtccgagataacagtaatctaccggtcccagatcaaggccgctccgggagcattcctaatcccggtaggtgaccatatcatccaaccttcatgtgcggtcaccatcactatgccgggatcaactcgggtcttgatgtccccatcacgtactcaattaacgaaccgcggagaacagaacgacagcgaagttcagttcaagcactttatagaacaccgaaagaggagggcacttaaccttgttctccacctaattctacagggattttactccatatacgacacattac

SEQ ID NO: 149884 - DNA, 602 bp, Zea mays
  Clone ID: MRT4577_68219C.1
ctggccgggattgcgccgtaccgcgggagtgagcatgtcgctcgctttatgctgccacggacatcgcaccgcacatatgactagacagagctactagagtacgctacgaagttaaactcgaactaaattaatatcgctgttcttcggcatgttgtgacaatgccccagttgctgctcgagtagtacaaccgtacgacggagtcaaaggcgcggtgaacctgcagagcgtggctgataactggtgcacctcggaaccatccttgctcgcgtagatagctgatccccggcacgtctcttactggacaaaaaccaggcagtggctcggaccctcccagatcttctgcgactgcacattacatggccacagactaaaggacgctcgaacacctgagtgactacgatctacaaaaggacgctagtttacatgggggcctacttcttacggctggcaccttgatcagagtcaacgctgctcatgcggacgagactgccatccgaattgaagccactgactctacacgaggtgatcatcgatcgtgtctgaagataacaaacgcattcctcctgctcgacataggctcactctatgctgttgatcaggt

SEQ ID NO: 149885 - DNA, 475 bp, Zea mays
  unsure (1)..(475): unsure at all n locations
  Clone ID: MRT4577_68220C.1
aaactctgtgctctgattaaagcatcacatgacgaatacagagagccagcagagcaaacccaaggacacagaggtgctgctatgctagcgtacgtgctacggcgtgtgacggacgaggtacacgacgacgacgatgacgacgacgacgacgacagcgaacggagggactagacaaagtgacgaccagggggagcatgagcaacttatttaccaagagccacagaggcagtctgaggacacacacgcagctaggacatctgctaggacgaccacgacgaccggatgcggctgaaggccacgctgccatccaacgagcatgcgcaggcatagctaacctacactacgggccatcgagcaacagatctagaagcagcaaacgggggggctgatgggcacgccgacggagacgccacactagccggagacgaaggcggngaaggccctgctgacgcctacaccgaggcggcccgagatg

SEQ ID NO: 149886 - DNA, 327 bp, Zea mays
  Clone ID: MRT4577_68221C.1
gatggcggtgcccatcatcaacagcaccacggccttggcgatgcaccacccggggttgttcacgctctccaccgcctcattggcacctgtcaaccagctcgctgggctcctgcctcgaactatcgtggcattcattgatgaactgggcggagaaggcgccgaccacgggcacgctgagcttggcctcgttgaaccatttcttcattcaatgcacaaactatctctgctcaaccacatagttgcgggacgtgtcgaagtcgaacatgacctcgtacaccgcatccgtactgtcaaagtgaaccttgtcaaacgggataccaactatga

SEQ ID NO: 149887 - DNA, 646 bp, Zea mays
  Clone ID: MRT4577_68222C.1
accccgcatctcctagcccagctagatctttggacacatatcgaaacagctctagctagcgcgctcgtcgtctaacctggcttccggcatggcttccaagcagatcggagtcttgacctgcttcattgccatcaccgctctcgccttccgtccctgcgcatccgccgtgcccatggacggtggctggtccaacagagatgccacctggtaccgtccaatcaaaggagatgtatcccacggaactacatgagccaaacactgtggcgcccatcaatgtccgttatcggcgataataatggcccagagatgaccacccgctctgagctaatgctcctgctgacaaaggaggcaagaaattgctgattgatttcatgatgggccgggattcagctgctgttgcaaatactgcagctgctcccatcgagtgtgtgaaactggttattcagaaacaataagatatgattaactctggtaggctatcagagccaaaccagggtattgctgactgcttcaaacgtaccattaacgatgaaggcttctcttccttgtggaggggaaacactactaatggtattcggtacttccctagtcaggcgtttaacattgcatttaacggctactgcaagacgatgatcaacttcaagaa

SEQ ID NO: 149888 - DNA, 600 bp, Zea mays
  Clone ID: MRT4577_68223C.1
gttagtggtcattgtggcagtagcccatcatctcatcaataatgctgtaagtcatgaatacttgaatagatatgtgtgctctgatgagggctatgaggatggccacctaaagaagagccagacgcttgtaaacatgcttgaaaaggatcatggtcaggattctagcgaaagctctgacgttgatgttacaaaccatgaacacaaatatgatccctctaattagaagagatctgaaaatagaggagaatctagtaagctgtacagactgaaaaacgaagatgattttgatgcctaatctgacctaatcagtcatcacttttgtgaacctttatgtgatcacactggtgattactagatagccatcatgacatgccttattaccaaagcaatctcccaagatcacaatctgcaatattttataatgattgcaccagtgatccaaaaggttctgcagattgtgagatactatggtgcatatctgttgacagattatgttcactgactgatgacaaatctgactacctgataggctgccaaatgtatcactgtaaatcaaattgggatgtatattgtgcaccttattcaaaatgcaccgaacat

SEQ ID NO: 149889 - DNA, 463 bp, Zea mays
  Clone ID: MRT4577_68224C.1
gcgggaataaaattctctgcatcggtgatgtacttcgtcacccttgcagcaccacttcggtgaagtacacgtgggtgtcttcacacggcaaagccgctcgtccagacgtcctggctctttgcctcaaggaacgactggctcgattagccgtgtcatcaatggttcgattagctagcatcattagctattgatttcggacgtgtgtcattcatcgatatagtgctgcacggatgatggcatgcattagtgctgcagagaattttattccgatgtacagtacagaggagagagaattgggggaactgcgaggagcgatgaacagtgtatagagtgaaaaataaaagtgcttcgtactaataatcactagaaaattatgcacatcttccacgcactaccggcacgactattgagtattttgtaaaataagatgtcacaagatatttattttctgtatgattacatc

SEQ ID NO: 149890 - DNA, 270 bp, Zea mays
  Clone ID: MRT4577_68225C.1
acgctttagcaagctgaccggcggcggcccgactacctcggcgggcctgatcgcggcggcggtggcgcacgcgttcgcgctgttcgtggcggtgtcggtgggcacgaacatatcgggcgggcacgtgaacccggccgtgacctttggcgcctttgtgggcggtaacatcaccctgttccgggggcttctggactgggtggcgcatctgctggggtccaccggtggcgtgctttctgctttcgattctcgacggtcggacaggccacgggc

SEQ ID NO: 149891 - DNA, 349 bp, Zea mays
  Clone ID: MRT4577_68226C.1
ttttattgaactgtggctgatgaaacatctatgagagggcaccaccaatgatcgggttgtgcttctaacactgtttggttgtgctaatcaagttaccataatggcaacaagcgcagaagctgctatagggtgccttctttcggcacagctgtctcgcatagaacggctacaactggggatgacccaataatgcaacccggctcacaccaactagctggctaaatgggaatagtagctgctgctgcctataagcatgaaagttcaatgctgccattacagtgaatgcaataaactgctggaggtaggacaaaactaactggacgaatggtacatgatgttgttgcaaata

SEQ ID NO: 149892 - DNA, 432 bp, Zea mays
  unsure (1)..(432): unsure at all n locations
  Clone ID: MRT4577_68227C.1
ccggacgcgtgggttcgcctgatggcgatacagacgaaaggccaaatcgaagtacagcaggcgctgcacgacaagattcctcgaggctcctgatgctcagcaacagcaaattaaatgtcgtcatagcatctacagtaattaaattgtgtggcatacaaaagaaaacatgtactagcatgcatgacaggatatcggggcagaaaggtagcatcagctagcgttggagttgatgcgtaccatgttgagaaagtgttgcattcttttattcaaaaggggcaaaatgaatagacgataggttaccactttccccgtgtgattagtaattgtggtccctgcttcatgtgaaaaagataggttatcttatgaataccaaaaagggttggacggctaaagcctaaaaaaaaaaaaaaaaaaaaaaaanaaaaannnnng

SEQ ID NO: 149893 - DNA, 214 bp, Zea mays
  Clone ID: MRT4577_68228C.1
gactcgacgacgagggagagaaaaaaaaaaaacttcaagaacccttggaattaaacggggggttgttgcaccgggtcctacttgattttggccggtcggtttgacgggaaaatgacgttgggcgggtccttagccctgcgccttgatgggggaaattattgccgagaaccggcgcttttggatgcccgggggaaggggcttggccacccgttcg

SEQ ID NO: 149894 - DNA, 341 bp, Zea mays
  Clone ID: MRT4577_68229C.1
tgttttaatactgtatgtgccaacaacagttggcggctatatacaaacaaaatcttgaaggccagctttcaactgcccctctacaccgaaaacaccctctactgaaccactggcgaacattagagaacgaacactccagcactaggctcaaacctgctgtgtcaaccattaccactggctctgaacttccgaagggcagggtcacacataaagcgatctggtcgaacgcgagatggaacccgggcactcctgaccgtgacctgcctgcgagccaggtatgaatatagtgagctggattacaacttggcaccttcagggccatagctccttcctgctctaaa

SEQ ID NO: 149895 - DNA, 555 bp, Zea mays
  Clone ID: MRT4577_6822C.1
tatagaatagcttgcttgtccatcaattttgaattgttacagtactgaatgagtcctcagagtgcatagtgttgttctctttttatgtgcctgatagttggtcctcttgtatttcagttgctcttgcggtagttcccccaactgtcaccatgcagaacgaggagggtaagactgtggacctctatgtccccaggaagtgctcggccacaaacaggatcatcactgccaaggaccatgcctctgtccagatcaacattggccacttggatgcgaatggcctgtatgatggtcacttcacaacgtttgctctctctgggtttgtccgtgctcagggtgacgcagacagctccttggacaggctgtggcaaaagaagaaggctgatatcaagcagtagattttacatctagtttaccaagaattggacaccgccttagctatgttttgaattcatgtcactatatgcaatgttgtgatttcagctggtaccttaaatctgaagatttagtatctttgttgggtggaaaaaaaaaaaaaaaaaaaaggcccctagggcc

SEQ ID NO: 149896 - DNA, 284 bp, Zea mays
  unsure (1)..(284): unsure at all n locations
  Clone ID: MRT4577_68230C.1
gtccgcgtccaccacgccctggtcgttggcggtggcgctggcgctggcggccttgatctgctcggcggcgggcgccggcaagggggacttgctgtacgctcggccgtcggctgccggtgccggcgagggggagttggtgtgcgcttggtcgtcgtcgtcggcggcggctggtgccggtgccggcgaggggggcttggtgtacgcttggtcgtcgtcggcggcggcgggcgcgtctgaggagggggctgcgacnggcgcggccttgcgcggtgagggcgcgtctg

SEQ ID NO: 149897 - DNA, 497 bp, Zea mays
  Clone ID: MRT4577_68231C.1
gtcggattccaggtcgacgccacgcgtacgcgcacgcgtacgacttggtcctgaggactactgccagatcctccgggggctcggcgacagggataaatctgcacttcgtgcattcgaggtgttctatgccgcactacccttagttgggggtggtgctgttgacaagggaaaacttctgactgccgccattggtgcacttggcaagatgggccggccagacctcgcgaggagggcttttgatactggcattgcagggagctatggcaatacggtgtttgcgcattctgcgcttatctcagcttatgccaggagtgggcttgcaactgaggccatgggggtgcttgagtcgatgaaaggtgcaggattgcggcctaccacggtatcatacaatgcagtgattgatgcatgtggaaaagggggtgttgaccttaggttcacacttgggtatttccgtcaaatgctagcagatgggctctgtccggaccgtaaaacattta

SEQ ID NO: 149898 - DNA, 242 bp, Zea mays
  Clone ID: MRT4577_68232C.1
acaatgaggatgtcttattcaaatatcatagtgcaaacatgatgaagtatggggctttcattggttgacaccggtatatgagtataacgggtagggggacacaatgcttgaattgcgaaacaccactaatggcattggtggtgcatggattattttggggggatgagggggacaagccgcacattggtggtgggggttgtgctggtgagaagatcgggcaccggcttgggagtagatggggg

SEQ ID NO: 149899 - DNA, 916 bp, Zea mays
  Clone ID: MRT4577_68233C.1
attgggtacctcgaggccgggcgattgggtacctcgaggccgggccggggagccgaacccgaccgaatagccaacaagccaaggcaggcagcagcgaccagtttgcaccgcaccccttttcgcccttcgttccggtcaggcgagttagtcgtcgtgccgccggtgccctgtatccatggcggcggcgttgcgtgccgtcttgagaggcatcaaggagaaggggctcaccaacttcatccgcgacgtccgcgacgaaggatacttcaaatgccttctggacgggaaccttttgcaaacgaaaattcacaatattggagcaacacttgtaggagttgacaagtttggaaacaaatactatgagaaactacatgacactcagtacggaaggcataggtgggtagaatatgcagagaaaggtcgctacaatgcatcccaagtgcctcctgaatggcatggatggctgcaccacatcacagatagcactggggataagctgctgaaccagaagactgctaggtaccttgtagagcacaagcagaactactccggtgagggtgaagagctgatctaccactccaaggggcatgctttgaatccgggacaaagggactggacgaggtatcagccctgggagccaaagaaagagcaagcctagctattgagtacattgtggggaagctactgaaatgtttgcatggcgttgggtcaggtatcaccgagctgaatggactctgagttatgtttgaactgggcccaaataatgttgtcctgaatatcaatatcatctttggacatgaagtgttgttgttactgctgtaaaaacagctttggggaaaatctcatgcatttgttactaccttcggttatatttgaaagtatacgagagattatacaaaaaaaaaaaaaaaaagcggcc

SEQ ID NO: 149900 - DNA, 961 bp, Zea mays
  Clone ID: MRT4577_68234C.1
ttgcaaacccacgcgttcgcccacgcatccgcccccgggcggaccgaaccgaatagcgaaggcataagccatcagtttccaccgcacgtccgcaccccctctccggcgtgccgacggtatccatggcggcggtggtgcgcggcgtcttgaggggcatcaaggagaagggactcaccaacttcatccgcgacgtccgcgacgaaggatacttcaaatgccttctggacgggaaccttttgcaaacgaaaatccacaatattggcgcaacacttgtaggagttgacaagtttggtaacaaatattatgagaaactacatgacactcagtatggaaggcataggtgggtagaatatgcagagaaaggtcgttacaatgcatcccaagtgcctgctgaatggcatggatggctgcaccacatcacagatagcaccggggataagctgctgaaccagaagactgctaggtaccttgtagagcacaagcagaactactccggtgagggtgaagagcttatctaccactccaaggggcatgctttgaatccgggacaaagggactggacgaggtatcagccctgggagccaaagaaagagcaagcctagctcgtgagtacattgtggggaagctgctgaatgttttgcgttttcttgcattgcgctgggtcaggtatcaccgagctgaatagcctctgggttattgcctggacgggacccaaataatgttgttctgaataccaatatattgtatatttgatcatcttttgacattgaaatgttgttgctgttgtaaaagcagctttgaggaatatctcatgcaggtgttactgacttcggttacgagacattgggtctatttgtttcagttttttttttgctgattctgaccgtcagaagttgttgtagaccaaacactaagcttttcagtcagcttttatatgaatccctttagtattaaaaaaaaa

SEQ ID NO: 149901 - DNA, 324 bp, Zea mays
  Clone ID: MRT4577_68235C.1
atcctattatctttatctgttagtgtcataaatttttttacggttttttactctgccttatgaaatactttatctttttttaattctcttcttcatctcttctacaaaaaccaactgcaaccactatccacgatccacattctttcaataaccaactctatcctgtatgtacaccttgctttttacaacatacccaaacaagcttttttattttaccaaggagtccaagcaaaaaaattaacgtcacccccacccatagagccccactacattttctgcaaccctttctaaacttacggagacattgaaacaccttaataacat

SEQ ID NO: 149902 - DNA, 733 bp, Zea mays
  Clone ID: MRT4577_68236C.1
gggatcgaatgtcacatctttactacataacaggagttctatacaaaataaattacattataaggagacaacggtccagcaacccaaagttgactgggagacgacggcctagacctctcacgaacacatcgcagcatcctccatgcgcctcatcctgtggtacctgttcttgacctgggatttgagattccaggtaccaacttgctcttcagatgacacgtgacctcacgcggtgcttgaattgcgcagaggttggtccgcggtgacgggcgtgaacgtcaccgagtggacgaacatgcaattgaatgcgtggatgtgggcatggaggggatccagcggtcgaagacagcaacacgtcggtcagggaggcgtagacggaaagtagaaacggcatcgggcttgaacccgctactggcgctctgtagcctgccgaggctcataccgcgcgcgtgcagacagcgagccagggtatcccgccaacgccagggtctcgatctgcgcgacagccatggtgaacgtcgcgccgtcttcagcagacgatgcgcatagcattcgcacgggcgcccgcaacgaggagcgaggcggccggtgagtccatcacatcgctagaggagagagagacggttggtcgaggaggaggccagacggacagggagaaggaaaaacgagctatggggcggcgcttggataagatccggccggcctcgaggatcccaatcgccctatggagtgt

SEQ ID NO: 149903 - DNA, 374 bp, Zea mays
  Clone ID: MRT4577_68237C.1
tccggaattcccgggtcgacccacgcgtacggggttaacggcgacgggatatgtgcggatcggctaggaaatgatgcgggtgaccgcggaagatctgtggctcaggcgctgcagatgctaggctgatgtcaatgtgccatgtctgatgctactctgccgtagcagccactgcggtaccggtggttgcttcctaggccctatatacattcaatgctcgctataacaggagtatgcgtgcgcgacagtgtattgatgcgaacgacgctgcggaccattgctcggacaatgctacaaggaaacagagtgtattatcatacgatctgatactgccgcccaacacggaacagctgagcctggcggtcattatagagata

SEQ ID NO: 149904 - DNA, 281 bp, Zea mays
  Clone ID: MRT4577_68238C.1
cgcgcgaggcccgactgttactcgtcacgtcgaggtattcccttccctgactaagcgaccgacccaccctccccacacgtgcagcccctggtctcttgatataatgccaaagatgtggggacttgtttttaacattgtcaaagatgtatttgattttatatgtagtaccattgccaaagacatggggacttaatattcaattgaaatatgaactttattataacattatgatctcatcacgagttgtgttaacttttgtgcatttgatttgatatatgtag

SEQ ID NO: 149905 - DNA, 456 bp, Zea mays
  unsure (1)..(456): unsure at all n locations
  Clone ID: MRT4577_68239C.1
ggatcctgtatagcggccgtcctttnncacccttaaataaataaccccnccagncagccccccccgggtgggattttttaggggatttttccgttttttttttaacacagattttttttggggcggggaaaccgcccccatttaatcaaaatacattttacagtcccgattggtttttggaccccaaaatggtccccccaaaaccttcttaaaaagaaaaaccctccccaaaaaaaggggtttgggattttgggaatttttaaaaaaaaaaaatttgttaaaaaaaaaaaaaaaaaaaggccttctaattcgggggggcaaagggaccaaaagcctgaacccccccgggcaaaaagaggggaaatgggaaaaaaccgcccctgaaaaaaaacccaaacctgacgtgggggggaagccaaattttaaaaaaaaaaaaagccttccgttttgggaaac

SEQ ID NO: 149906 - DNA, 375 bp, Zea mays
  Clone ID: MRT4577_6823C.1
attcacataccagcatacaggttgttgacaatatcattgcgtgcatgcgcgattaggaggaacggctgcagaacacatttccacatcaaatgatagggtgttcacttcttcattcgcattaaccagctattttttgggatgccgactacaatatatacatggaccaaaccaaaacccaggaatgcgcattcagggtgcgcttactttgactaccaacattgattggcggcagacatgaaatactccattgaaaatgctcatcaagttatcaccccatagaagcatactggcctcagcttgtctaataatgttcatgcatgctctggtgtgggagcgcatccaatctcatcttcagatgtcttatgtacatatctg

SEQ ID NO: 149907 - DNA, 222 bp, Zea mays
  Clone ID: MRT4577_68240C.1
atggacccagacggccgcatcacaggagaaagaaaaaactatgatatcatcaccggcgagaagaataagataaggaagaaaaaagattataggaggacgtgggaagcattggcatcacgtgccgaccagtttccagattttacttcaaaattcaaatccctttttaatctaagttggtatttccacttcaatccaaacgcacaaccaaaattcccaacataa

SEQ ID NO: 149908 - DNA, 602 bp, Zea mays
  unsure (1)..(602): unsure at all n locations
  Clone ID: MRT4577_68241C.1
gggtaccctcgtgtgtcggccgggaacagcctccgggaggacgagcaactgcccctgcacccccatgactccgtggtgttgctccggtttgcaggacggcgccggagaactgcccctgcacccccatgactccgtggtgttgctccggtttgcagaagacggcgctagaggactgcccctgcagcccatttacaccatggtgctgctccggtttgcagaagacggcgctggagaactgcccctgcacccccatgactccattctgttgctttggcgccggcagtgctgccacaaactgaaatcttcatgagaagaacatgcatgcagatggatgtggcctctaaatgtgtgcggtatggtgcttgcgtatcattcctgccgtgtgtctttgttctccaacaataagtacgtacgtgtagaggggatgcatgctgctacatctgcatgcaccgtagtacgtaggctttgtttgctgcagatgctctgcaggcttgcaaccacagtgttgtgtccagtacaagggtgtacgcctgncttgtatgagccaagtaatgctagctggtttgctttcaaataataaagaggccgcgcatgcaacagtt

SEQ ID NO: 149909 - DNA, 468 bp, Zea mays
  Clone ID: MRT4577_68242C.1
ggaagggaaacaaacgtcccatgggggcccatcattaacattatttccaagccagggcatttacggggacagggggattaaaacatttacaaggggggcgattcgatggaaggccccaccttggcagggggggaaaactttttttttggacaagaaaaaacacccaactggggggcaacggggcgtccttgctaggggggggcacaaagcgcacgggcgtttcgttttttatgcggacagggccatccaattttttggccaaaaccttaaactcctggaaaactggcccaacagggaacaccattttgccgccgggcttaaactggtcaatcagcgcctccgggatctggggggctgcaactccaacagggagggcttcaaagggggccagttttggccaaccttccctgccataaaaaacgtgtttactgggggacccatcatttaaagggggggctgcggcacttt

SEQ ID NO: 149910 - DNA, 242 bp, Zea mays
  Clone ID: MRT4577_68243C.1
tgctgttgtcgtcatttgagttcatgttcagcaaggtcgacataaaagacctaccaggggctaattaacatgtaagacgaactaaccctttgcacgggcaagctggttacctatcctgtgcaaatgggcagtacaatacgaaatgttcagatttcaccgtggcatcaatgaacttatgttcgaaggcagcgacaccacccaaggtatcgataccgattgtgaaaacgcatattgatagaaga

SEQ ID NO: 149911 - DNA, 873 bp, Zea mays
  Clone ID: MRT4577_68244C.1
cccacgcgtccgcccacgcgtccgctcgcactcgcacctgcacctcgcactagctagtcttgccaattaagctagctaggtatagaccagcatggcttctgctctcaagatgactgccatctgcatgctgatcctgaccacgggccagctgatggcaactgccggtgcaaaggcgccgctggtgcaggcggacgccgcgcctacggctcgccgtctgctctcggcggaccatgagcgctcagcctccgggaggacgagcaactgcccctgcaccgccatgactccgtggtgttgcttcggtttgcagaggacggcgacggagaactgcccctgcaccgccaggactccgtggtgttgctccggtttgcagaagacggcgctagaggactgcccctgcagcccatttacaccatggtgctgctccggtttgcagaagacggcgctggagaactgcccctgcacccccatgacaccattctgttgctttggcgccggcagtgctgccacaaactgaaatcttcatgagaagaacatgcatgcagatggatgtggcctctaaatgtgtgcggtatggtgcttgcgtatcattcctgccgtgtgtctttgttctccaacaataagtacgtacgtgtagaggggatgcatgctgctacactacatctgcatgcaccgtagtacgtaggctttgtttgctgcagatgctctgcaggcttacgacccgagtacgcgtatagccgtataggcggtgtacgcctgctttgtaatgtaccaagtaatgctagctattttgctttcaataaataaaagaggccgcgcatgcaacagttaaacttctacaattaaacaacgccgactacaacgacgaggattttt

SEQ ID NO: 149912 - DNA, 266 bp, Zea mays
  Clone ID: MRT4577_68245C.1
cgtccggtgccgtgcccctaactgatactgacacatctggcctacattacacgatcccgcccgctaggggcctttcgggggcattttatatcttgtactctcttcaccagatatgaccattttgcaattagaatttgaagcccttaactcgataatcccgttacaagtgcatctgtattcactgaccatattagctttctttagattgcttctcaactgccaagcttcatacaatccagtccaccgtcttgttgattgattaaaca

SEQ ID NO: 149913 - DNA, 351 bp, Zea mays
  Clone ID: MRT4577_68246C.1
ccctcgcctcctgcgtgtacacctttgtgtgctgcaacaacagcggccagcggacctccaaccagaactacggctagatcgagacttcctccgatactacataccagctgcagcgtcgcctctccactgccgactgtggcgactactgtgactacggcgtccagatgttcttctccatggtcaccccgagctacgtcatcttccaggttatcgtgtgcgctgcacaccttggcccaatcaatggccagcggaggtgctagttcatgctctgctgcatctgccagtgctgctaccgaggctaccaaggcggggccgacggaagcggactaggaagagagcgactacaacatg

SEQ ID NO: 149914 - DNA, 260 bp, Zea mays
  Clone ID: MRT4577_68247C.1
agcacccgcggcaaggagcccgcgaaccatggcgagcaccaggatggcgaccagccacctcgcgattgatgctgggcgcggacgtgcccaccgccagcagaggtggccgggtcaagctcgcctcggcgcccaaccggcgttgacaggagggtcgaggaccgcgacgagaacgaggccgccgcagctgaggccgcgaaaggcagagggagccagtgcccaccaagccgaagggcgacaagccaccgccgaccgaagccaag

SEQ ID NO: 149915 - DNA, 294 bp, Zea mays
  unsure (1)..(294): unsure at all n locations
  Clone ID: MRT4577_68248C.1
tcaatctctccccactaaaaaccttaaaccagggtgggtaacacctatatttttctgcgtactaaaanatncctccaacaatttctcgcaacacatcaaaacaaaccctcataaccaaaccaaccaaccccttcttatcatatgcacaatctcaatgttagttcatcatccaatctcgttcacctacaacaggatccttccatttctcatgaaaaatgacatctctgctcacgaatgtaacacggtcaaaattccaaaaaccccccaactaaaaacctcttccacccaaaaata

SEQ ID NO: 149916 - DNA, 551 bp, Zea mays
  Clone ID: MRT4577_68249C.1
gcacgagattgccgatcacttgcctgacaggggtagcagcctcttcgcggtggctggggatggcgggcggcaggcggagggcggcggcgagggctagctccggtggtcgccggccacgcgaatcatctctttctctgtgaatgtggcgtccgcttcgaactacatcgtccgttggccatctgcacctccttcccggtgaaccctacaagcccctaacctcccatgtaaaatgtggagcccattgtcacccctaagtgcatctcacagtgccgacatataatctatggaagcagaaaacacttagggctggtttggtggacaagtaattgaaggagatctatgtaggaggaatccccttcctatttaattttgaatagcatggagatttcttcttcatacatcttctccaattctctagtcaccaaatcaaccatcagagctgatttggtgacctggaatccccttgtcaccaaatcaaccctcagcatccagagatgagagatgtctcttaattgaggatatataataataacagccacatgagaagcaca

SEQ ID NO: 149917 - DNA, 622 bp, Zea mays
  Clone ID: MRT4577_6824C.1
ccggccgggctctcgcccctctccctctctcccaccccgcagccgccgcgcaggtagccctagcacccgcgacgagcaggatctgcccagttgctcttgcggtagttcccacaactgtcaacatgcagaacgaggagggtaagactgtggacctctatgtccccaggaagtgctcagccacaaacaggatcatcactgccaaggaccatgcctctgtccagatcaacattggccacttggatgcgaatggcctgtatgatggtcacttcacaacgtttgctctctctgggtttgttcgtgctcagggcgacgcagacagctccttggacaggctgtggcagaagaagaaggctgatatcaagcagtagattttacatctagtttaccaagaattggacactgccttagctatgttttgaattcatgtcactatatgcaatgttgtgatttcagctggcaccttaaatctgaagatttagtatctttgttgggttccttctgagtttgatgtgtggtgttcgtttaattcccttacaaccccatttagtatcattgtgatgattttggattcaattttgctcgagtcagggtacgattcaaaaaaaaaaaaaaaaaagcggcc

SEQ ID NO: 149918 - DNA, 323 bp, Zea mays
  Clone ID: MRT4577_68250C.1
ttctctatccgagcgtgctcgcggtgggtggggggatcattccgtccggcttcgtgctcgctgcctgtgagagccgcccgccaccgtcggtgaacataacccgggttctgaccgacgcgcgggggttcatcgttgctgtccacatgtgagaggccttctgcggagcgagtgaggttgaggccgactagcacggtgctggtatcaccgtgtttgtacccaccgaacacagcctttgctgggctgcccgataccgaccgtcttcagatcctacccgatgagcgctaggacatcgtgctactgttgcatgtgctctaattttacta

SEQ ID NO: 149919 - DNA, 254 bp, Zea mays
  unsure (1)..(254): unsure at all n locations
  Clone ID: MRT4577_68251C.1
cgagtttgaggccangaaggagcagcgggagcgggcgcagacgtcggagagcccgcagcggcggagggcgccggnggaccaggcggngagccgggcgcgcaccgacgagacggcgcggacggngaaggagaacagccagcgcngccaggccaaggaggcggagcagcggacggcggnggaggacgngccgnggaaccngcagaacgcggcgcaggngcaggacgaccggcgcggggacacgaggagcagcacca

SEQ ID NO: 149920 - DNA, 156 bp, Zea mays
  Clone ID: MRT4577_68252C.1
cttccttgttctgacactactggtgggagcgaccgcgcatgactgctaacccaactgatctcgcccagtcgtcccaacgacgccagtcttgacgactccgtcgtcccacagccacgctacctgaccaatcgacgcgatcaagatcaagtggggact

SEQ ID NO: 149921 - DNA, 1177 bp, Zea mays
  Clone ID: MRT4577_68253C.1
ggggggactctttcgttgggccagcgctgcatgcttccttgcttgcttttttgtcgcgcctgcttctcccccctcctgcctcttcgtgctgcttcctggttggggaagggaaggagaaggagaaggctgtgtgcgtcctgcgccgataacgcgatggtgtccattgtcaccgaggtatgggcgctcgctggatgcggcccggcgtccaaggcggcggcggtagcggtagcggcgcaggagttgccggcgcagcatccttctcctgccgcagcgggaggagggaaggccaagaagagagccgtgccagtgtcgttcagaggcgtcagcagcggcggtggccaggaccaccagcgtgaggccgccgccgtcgtcgtcgggcggcggcgcggcctcgcgtcgtgcgcgctcgccgccgtcgccgcctcgttctccgcccgcgctggccgccccgcgcgggcgcttgtcctcgaggaagacgacgacatcgagctgctggagcgcgtgaaggaggacaggaagaagcggctgcagaagcagggcatcatcagctcctccggcgccgagaccgggtatttgcaggacctcatctacaggctcagcaaagtcgggcaggccattgacaacgacgacctcccagccgcgagcagcgtgctgggaccaagctcagacgcccagtgggtgcagaacatcaatgcagctttctccaagctcagctcaagcccggagcagaggaacgtggtcgacagcttcaacagctcgctggccacactgtttacatcagtgagcaagctcgaccctgaatcctccaagtcggcgttcgtgtcgtccgcgacggcgttggagaaatggatcgcgttagctggactgggcggccagctcaagggctactgatgcgtgcgaggggaagagaagcactgggttgttctatgtttgggtccggcatttgtgaatctcctgaagagggtaccgtgaccgagaactgagttcagataggcatgctatgctcatcaagaaactgtgactgtttttgagactctgctgttacttacaagtggtaggaaacgaagttgtcttgtatcttgttgtccagtttaactttcgaaattccaaagcagctggtgtttattttttttaaaaaaaacaaaaaaaaaaaaaaaaaaaaaaactcttccccagc

SEQ ID NO: 149922 - DNA, 373 bp, Zea mays
  unsure (1)..(373): unsure at all n locations
  Clone ID: MRT4577_68254C.1
gtaccctnncgaggccggccgggccgttcgtggagaagaggggcggtcgcgcctgcttctcccccctcctgcctcttcgtgctgcttcctggttggggaagggaaggagaaggagaaggctgtgtgcgtcctgcgccgataacgcgatggtgtccattgtcaccgaggtatgggcgctcgctggatgcggcccggcgtccaaggcggcggcggtagcggtagcggcgcaggagttgccggcgcagcatccttctcctgccgcagcgggaggagggaaggccaagaagagagccgtgccagtgtcgttcagaggcgtcagcagcggcggtggccaggaccaccagcgtgaggccgccgccgtcgtcgtcgggcg

SEQ ID NO: 149923 - DNA, 548 bp, Zea mays
  Clone ID: MRT4577_68255C.1
gtaacaacagctcagctcaagcccggagcagaggaacgtggtcgacagcttcaacagctcgctggccacactgtttacatcaggtagttacatgtgcagaaggcctatcctgctttgtgcccgtagtatgaatgaacctgacaggtttcgtggatcctctggttttttccagtgagcaagctcgaccctgaatcctccaagtcggcgttcgtgtcgtccgcgacggcgttggagaaatggatcgcgttagctggactgggcggccagctcaagggctactgatgcgtgcgaggggaagagaagcactgggttgttctatgtttggatccggcatttgtgaatctcctgaagagggtaccgtgaccgagaactgagttcagataggcatgctatgctcatcaagaaactgtgactgtttttgagactctgctgttacttacaagtggtaggaaacgaagttgtcttgtatcttgttgtccagtttaactttcgaaattccaaagcagctggtgtttatttatcttttaaatccaaaagttgttgcatgc

SEQ ID NO: 149924 - DNA, 549 bp, Zea mays
  Clone ID: MRT4577_68256C.1
aaatatcatatatgatcgaaactaaaccgatatgactttctccggagcatcgcaatccgagttcctggtgtaccacccttgctctccgaggcatatgacttttccagctaatccgttaatcctatgaccggagggctgccttgccttatcgattatccccgttcgaagtcggctttgcttctgcttgttttagcttatacccctgatccgtatatctgccttggccccgctttgcattcataaatgtcactattcgtcgagtgcttccttacctgtttatcaccagctcccattgccaactctaaattacatgaatttcactagtccgccaatccaattaggattgtcctcccgtcggttgcatcgctcctgctcgcagtagtcgtttctttgccggtgaatcaattgaatttcttctaaacagaataaggccggcatcctgctctcgactatccctaccttggttggtaaagttactactcaaaggatggcttttctttcctacctactattgtatttgattcacttcttttcaaatacgagggtgag

SEQ ID NO: 149925 - DNA, 1222 bp, Zea mays
  Clone ID: MRT4577_68257C.1
ttgagcacactgaagaagttaatatatcactaaatgctgctgctggacggctcaaacaaacctagggaagagagggaccaatttgacgaagcaaacaatcaaatcatatttagcttgaaaaaaaagaggatgacctctcaaaatccattgccttatgtaatgtggaatccaatgggggcaagatctggatcggtttccttgaggactcgtggaagctgcagtcctcatacaatgaacagaaggataataaaacgtgtgatgagctggagaaatgtgtgagtgattttctaaagttgacaaaacatcatctttcagcattcaaggaagtcctaagccaattgattgagaatatcgaaacatatgtcggtaacttggctgtcttaacctcaagggaagaggaaaaagaacatggggatgatgaggcatctgagaggacagatccacgtaaatcccttgaagaggaatatctagaaacagaaaagaagattataattgcgttcagcatagttgatcacataaagaaattgttttattctggggaaggggctgattcaaggagagatgacccagaggtcaagagcttaattgaggagattgagaaaatgagggaatcgttcgagtctatagaaaggccaacactaagcatagaatctgagaaagcaaaaccactacctgttgagggatcgaaactgagtccttcacctcttcaggctcctgctaccccaaaagctgcacacgttgactcaccaaaatctcccatgaaacctgagcagcatttcgattcagatgcggagcttgcaaccctgggatcagagatcgggaaagaagacaaagagtactcagttgaggagataagcgggtgggagtttgacgagctcgaagaggaccttaagagctgacacaaagaatcgacaaacagaacacaattcgatttggttatcttcactgacatgtattatttgtctgggccttgcgtgggcaagaaatacacactggttgatatgtacatagtgctgtttgattgtgtattgtcgcgcactcgcgctgtcaatttgtcactgtcttaagatatacggactgagctggtgtaacttgggcgaggcatttgctatttgtttgctcttgccgcgaatatttttatcttacatgtataccgaaccctgttgtaacagttgtaaacgcggaaaacaaaattcgaacatttgacaaaacccccccaccc

SEQ ID NO: 149926 - DNA, 430 bp, Zea mays
  Clone ID: MRT4577_68258C.1
gtatcatgacgctatcactacggagaacatcgaagtacatggtgaggaagtaaggattcagcgccctgaacatcgcgtggactgcaaaatgtctcctgaggttgagcgtgagtggcaccgtgttcaggccacagaggacatgtctgccgcacgggctgcagcggaggtaggtgctttctctcaggccgtggcaatcctggaagcccgtaggaggatactggaagcacaagcagcacaatcttcagacgaccagttcctggcattgatggcggagctgacggagatgcagcagagagtggagaaccggcggaagtacgaggagtcaggcagagctttcatgctggcaggcctgagctcagactcatggcagagagcatctgcacgaggggactcatcagagatcactaccactattcatacctaccagacg

SEQ ID NO: 149927 - DNA, 304 bp, Zea mays
  Clone ID: MRT4577_68259C.1
ccgccttaatacggcccgcaaggccaaaccaggggcggacaaaaaaagaaacgcgcggggccccacaaccgcacaccaccacaaagcacgcggggcgatcgacagaaaaaacgacacgcaccaccacaaccccgaaaacgcacagagccggaagacagagcacacggaccacacgcgcccaaacaacgcaagcacgccgacaagaacaaggagaaccacgcaaaccaaacgcgcaccagacacaggacccaaaggcaccacgcgaaagagagaacccccagaacagggccacgacaaccacaaa

SEQ ID NO: 149928 - DNA, 1926 bp, Zea mays
  Clone ID: MRT4577_6825C.1
cctcgaggccggccgggccgggtctcgcccctctctcccaccccgcagccgccctagcacccgcgacgagcaggatctgcccaggtaaatcgacttcaagccggatgcatgccggcagctagtttcttctctgtccctaattccccactccaagtgtttgtctggtcagtaggtaagattatggatggggatccagcacctaccgcacctgggctggttttctagtctggaaggagagcaacatgacacgctcgtgctggaatatagtgcgattttatgttcctgctacgttgcgactgctcatagaatatatgccaattttcatcttcctgctatgtccgtgtatcatgttttttgaaaaataatatctccatatccgcatcctcctgataccgcccatatccatgcatacatatggtttgcttgctatatgcaagcgcctcgaacccggattgctataatttgatgatttcgtgtctctcacttgatctttttttaaagaataagttggtgtcgtgattgtagatctaagaagtgtgacgtaactaatggaatagtgtatcctgacaaataatgcatggtgaaacgttttttatccagattccttgaatcccctaaattgtgtttgtttattgttagaaatgaacttcatctaccaaacaggattcgaacaggcctttctttaccatgtttcgtgcaactatgcactgctaacatatcagtaccatggtttgcactgctagaatatcagtttattaccattttcgtgcaatcgtgactgaggtggatggggttattgaacaacgtatttgaatatttgatgttttagctgcatggaagtattcattccaatccttctgttgaattgcaaagaattgcttaaaattgagatctgtatagttcagttttagttatgccttttcattggagcctgaattggacttcagttgtttgcatagttatagttataaatatagaatagcttgcttgtccatcaattttgaattgttacagtactgaatgagtcctcagagtgcatagtgttgttctctttttatgtgcctgatagttggtcctcttgtatttcagttgctcttgcggtagttcccccaactgtcaccatgcagaacgaggagggtaagactgtggacctctatgtccccaggaagtgctcggccacaaacaggatcatcactgccaaggaccatgcctctgtccagatcaacattggccacttggatgcgaatggcctgtatgatggtcacttcacaacgtttgctctctctgggtttgtccgtgctcagggcgacgcagacagctccttggacaggctgtggcagaagaagaaggctgatatcaagcagtagattttacatctagtttaccaagaattggacactgccttagctatgttttgaattcatgtcactatatgcaattgcagtgttgtgatttcagctggtaccttaaatctgaagatttagtatctttgttgggttccttctgagtttgatgtgtggtgttcgtttaattcccttgtacaaccccatttagtatcattgtgatgattttggattcaaaaaaaaaaaaaaaaaaaaaaaaaaaaaaaaaaaaaaaaaaaaaaaaaaaaaaaaaaaaaaaaaaaaccaaaaaggggcggccgttcgcaatctaaaactagtcggccccgtgggcaactccttccaatcccggccatggggggggaggactgccgttccggcccgaaaatggaccccctcgtccaacgtttgaagctccaccggccgtcccaatccccttacaaccccaatccggccggggcccccgtccccgccaccgccgggaacggaaagctgttccggccggggagagctgccgtgcttgtttgcctcttccggggagacggcgggaagctccggttaatcc

SEQ ID NO: 149929 - DNA, 1880 bp, Zea mays
  Clone ID: MRT4577_68260C.1
gtacgtaagctcggaattcggctcgtgcgaacctccttctgggtggaagtttcactgcttttggaaatattcagcatatgccttactggagggaaagaagtgaacaaagaaatcatgagtaatgtacaagacttggccaaggcattttcagaatacaaagatgaagtcctggtgaaacgtgaagagctgcttgagtatgcccaaagtatcatttcaggactgaagagaaatgctgacattgtgaggatagatgctgaaaccctagaattgcagagaaaactagacgagaagcagaaatcacgaggtcaatcacctgaatatcaagataaaacgtcagataagattgctgctgcaaatcttgaggtcttcaaagaagcacttggtgaactccgcttatgctctagagttgaagaacttctgctgaagaagaaatcaatcactcttggtgactccctggagattcattctcagaaggtagataaactaaaggttttagcagattccctggcatgttcatcctccaaagcagaacagcgtattttggagcacaggcgccagaaagaagatgctctcaactttcgtgtgaaaaaagagaatgaagtcagtgtttctgaaaaggaattgcttgatgagattactgaattggaaaagcaaagagatgagcttgaggcacagctgaagaaggttaatatatcactaaatgctgctgctggacggctcaaacaaactagggaagagagggaccaatttgacgaagcaaacaatcaaatcatatttagcttgaaaaaaaaggaggatgacctctcaaaatccattgccttatgtaatgtggaatccaatgttgtcaagatctggatcggtttccttgaggactcgtggaagctgcagtcctcatacaatgaacagaaggataataaaacgtgtgatgagctggagaaatgtgtgagtgattttctaaagttgacaaaacatcatctttcagcattcaaggaagtcctaagccaattgattgagaatatcgaaacatatgtcggtaacttggctgtcttaacctcaagggaagaggaaaaagaacatggggatgatgaggcatctgagaggacagatccacgtaaatcccttgaagaggaatatctagaaacagaaaagaaggttatactcagtcaccttactttaacttggtctcatacatggttcttaaagcggtaaggcgaggtaaggcattgaaccaccgctggacgcctaggcgccgccaaaggcgagcggggcgacaccttatcaacatgagaaccagcaaaaccgctacatggtggaggaacaaaaaggagcccttcacctcttcaggctcctgctaccccaaaagctgcacacgttgactcaccaaaatctcccatgaaacctgagcagcatttcgattcagatgccgaagtggaaaccctggaatagaaaatcgggaaggagtttaacgagctcgcagttgaggttatgagctgacacaaagaatcgacaaacagaacacaattcgatttggttatcttcactgacatgtattatttgtctgggccttgcgtgggcaagaaatacacactggttgatatgtacatagtgctgtttgattgtgtattgtcgcgcactcgcgctgtcaatttgtcactgtcttaagatatacggactgagctggtgtaacttgggcaaggcatttgctatttgtttgctcctgccacgaatatatttatcttacatgtataccgaaccctgttgtaacagttgtaaacgcggaaaacaaaattcgaacatttgacagaatttgctctgtagaacattggattgttgggtttgagtttttcatgcctttctaaaggattgatctatcaggattt

SEQ ID NO: 149930 - DNA, 288 bp, Zea mays
  Clone ID: MRT4577_68261C.1
gtggggtgccaccctcccacaagggctgggctgagacccagctgagtgcagcgtggcgtttccctttctgggggggcctgaggtcttgtcacctggtcctgtgcccccacaggaaccagaggtaggatgggagggggaacgagagcctctttctccccagagcccccggcccaggcctgttgatccgcgccccaggacccccgtctttgcagagcccgaggagcctcccctgtcccctcgggcagatctgttgtgtctctcttcccacctggcagcctcagctctgtg

SEQ ID NO: 149931 - DNA, 283 bp, Zea mays
  Clone ID: MRT4577_68262C.1
cttaaagaacgactcttgcagcccttcatgtccaaataacaggattttgccacacaaacatgtttcttctttttaacggggggactttcccaaatctaccgaaggttaccgggtgcgagattgaagcctgaaaaccacagggcggaaactaatttttccaaatgcttatttagggggcggctcctttttactacaggggcctttccgctttttggtccaagattcatccaacctggcccctttaaaaaccatgttaaccaattgggtttttgggcttggaaat

SEQ ID NO: 149932 - DNA, 236 bp, Zea mays
  Clone ID: MRT4577_68263C.1
agcgtcttctgcctgccttgtcacccgtatctttgccttgtgaagaaaagtcttctcctgcctcttctctaatgaaatcctcttctcatctacaactgagcctccttctctctttcggatcacatgctttctcctatccaacatcgtttaatctcgctctcttattccattgttctaaactcattgttcctttttttctatgacattctcgttccaactccattctttttatcaat

SEQ ID NO: 149933 - DNA, 263 bp, Zea mays
  Clone ID: MRT4577_68264C.1
cccacgcgtccgatcatatgatggtgggagtcaaagcacttccagtggaaagggaattgctgatttaccttcatatgagtcttttgatcttaacaggagtgctgtgcttgacgaagaaactttttctatggagcctggaattgtattttttgaggacggatcatactctagaggtccagttgatatagcaattggtgaatatgatgaatctaaatacttcctttcaccaacatataagtttgagcaatgccttgttaaaggtt

SEQ ID NO: 149934 - DNA, 303 bp, Zea mays
  Clone ID: MRT4577_68265C.1
cgcttgtattgctccgttatttcagttgctatacaagcggcacaaacagggaaccggggggacggcagcattaacgacggattggcttctgacttgagcctgaactctggagcttcaagagaagagagcctgaactctggagcttcaagagaagaggggtgactttaaggtgccttctcatttatttcaaagtggcaactctaaggaagccagatcgattttggtggaaagctattccaaccaacgtgccatatctctgcccacctttctttagttgaagcttcagagtacatgcttcaaatt

SEQ ID NO: 149935 - DNA, 229 bp, Zea mays
  Clone ID: MRT4577_68266C.1
atatttttctttatatatatttgatcgccatggtacacttagagaacattcggcaatgtgcggcatccctacatatgctgatcaacctaggctgcattccccgcggttgacaatactgctgaaggaacgattgttattgcaatcggattccacaacctcgagaaaatacaatactgatactgctcattccttgatgcacaccggggtcatggacatgtaaattgatgtg

SEQ ID NO: 149936 - DNA, 261 bp, Zea mays
  Clone ID: MRT4577_68267C.1
ctaggttctacagacaaaagatacaatcaccggcaggattctggggaggcgggggggcaccaaccctatgtatggaatacaggaaaggaacctgcgacaccggacgcctaaaatacacacgggcatatgcaccggtataacttgttgcgtggaccacactattcaccgaagagactactgttgacagtcaaaaatctttccaacaaacaagggccatttaagataactatagcagaaggcactcaaaaactgaacaaaact

SEQ ID NO: 149937 - DNA, 403 bp, Zea mays
  Clone ID: MRT4577_68268C.1
aacttcgggtgtatggggtaatggcaactcaggttggggtgatgctctggagaaacccaactggcgtggctcgagcaacgaccattactcgtcgaacaatagaaacagcggcttttttggtggatccagcaataggcaccagcaggaggatccaacccatgcatctggaaggaaacggaacagcggggagtactcacagcagtggaacagcaagcataggagacaggatgggcggtatcaaattagcagttgccggggacgaaatgacgaatggcgtccatggcactagatgacttgcagataaatggttaccaggggaaaaatggctcttggttttgtggcagaagcgtgaaggtcttattccgttcagcggggattggaccggattgagaggggattttgt

SEQ ID NO: 149938 - DNA, 556 bp, Zea mays
  unsure (1)..(556): unsure at all n locations
  Clone ID: MRT4577_68269C.1
cgtgggggttcttctcccaatggaggggggggggggcgggggacacatacacaaaacagatataccgaccacagnaaacactaataaaataaaacacgtgaacagnaaagggcggaatgcgtgtcacgtgtatttcaagtgtgagcgccccaccgtgctacatgcttacttatcactttactggcacttccagggaggggcgtagtgagnaatatttcataaaannaaaaaaaataaaaaaaaaaaaaagggggcggcgcgcgtcttanagggagtccaaagctttacgttaccgcgttgctattgcggacgtcattagcttctttctattaggtgtgcacctttaaattcatattcacttggcgcgtgcgtttttacatactgtgcgtgacttgggaaaaaacctctggcggttaccccaacttttaatcgctcttgcgagcacattcccctcttttcgcgcagcgttggcggtaatatgcttaagaaggcgcccgcacctggatcgcgcctttccctaaccatgttgccgcagccttgaatgggcgaatgggga

SEQ ID NO: 149939 - DNA, 1531 bp, Zea mays
  Clone ID: MRT4577_6826C.1
ccggccgggagcgctttcctgtccgactcccagccgtcgtctgctgcgtactccgcctccagtttggtctgtttcttgcaagttgctcttgcggtagttcccccaactgtcaccatgcagaacgaggagggtaagactgtggacctctatgttcccaggaagtgctcggccacaaacaggatcatcactgccaaggaccatgcctctgtccagatcaacattggccacttggatgcgaatggcctgtatgatggtcacttcacaacatttgctctctctgggtttgtccgtgctcagggcgatgcagacagctccttggacaggctgcggcagaagaagaaggctgatatcaagcagtagatcttacatctagtttaccaagaattggacactgccttagctatgttttgaattcatgtcactatatgcaatgttgtgatttcagctggtaccttaaatctgaagatttagtatctttgttgggttaaaaaaaaaaaaaaaaaaaaaaaaaaaaaaaaaaaaaaaaaaaaaatccgccccaccccggtgaggcgctgatccatcgcctcggacagcggctccagaacctccgcgttgcagaaacacagtagcgagaactattcggtggggccgaagatggtgtcgctgaaggtgccaaagcgcctcgccgcaagcgttctcaagtgtgggaaaggcaaagtgtggcttgaccccaatgaagttagtgagatctccatggcgaactcccgccataacatccggaagttggttaaggatgggtttatcatcaagaagcctcagaaaatccactctagatctcgtgcaagaagggcgcacgaggctaagcagaagggacggcactcaggatatgggaagcgtagaggtaccagggaggctaggctccccaccaaggtactgtggatgaggaggatgcgcgtgctgaggcgcctgctccgcaagtaccgcgaggccaagaagatcgacaagcacatgtaccacgatatgtacatgaaggtcaaaggtaactcgttcaagaacaagagggtgcttatggagagcatccacaagtccaaggctgagaaggccagggagaagacgctctccgatcagttcgaggccaggcgcgccaagagcaaggcgagtcgcgagaggaagaatgctaggagggaagagaggctggcccagggcccaagagaaataccaccaccagtctcagccacagctcccactaccggggcaccgaagaaagcaaagaagtgaagtattgaaacaaagctgcagctttctagtccagtacttcgtaattttggagcgccctgatcaattttgctgttatacagcttcgtgtcttttattttccaaaagctaccgtacccggattgttagagatgtttacgcagagtttctttggaagaggatccgctcaaaaatgtttatttggatcagatggtctcaggaaatgtggttatgttttatggaaatttatcctgttgctatttgattgaccaaaaaaaaaaaaaaaaaagcggcc

SEQ ID NO: 149940 - DNA, 284 bp, Zea mays
  Clone ID: MRT4577_68270C.1
ggggcaaaattttgtatgcccacatttcctcaaaatacaggtttcgatcgtacaaaacttggcaaggctttcgaaaactccccgggtcgtttcgacttttcctttctgtacaggttttgggacacaacgaactagcccccatggtgagtctcgaatcaaccatgtgaacctgaaactttacatgctccaaaaagctggtgcccatgcacccgtgtttaactccctcccaaagtttgttcaactttcctggtacaatctgggaccccatgggacgcttttttacc

SEQ ID NO: 149941 - DNA, 276 bp, Zea mays
  unsure (1)..(276): unsure at all n locations
  Clone ID: MRT4577_68271C.1
atcgcagcaaccgccgctaggaagaagagctccgcgatatccaggtcgcgcgagaatatgccgaagcagatccatgagattaaggtgcttctcctcaccgcgacgaggaaggatgcccgctcagtgaagatcgagatgagtaaggtttttgtcaagttcaaggtgcgctgctccaagtacttgtacacgctctgcgtcttcgatgctgagtaggcanacaagttgaagcaatctcttccaccatgtntgatcgtcgacgaggtctgattggataca

SEQ ID NO: 149942 - DNA, 245 bp, Zea mays
  Clone ID: MRT4577_68272C.1
cataccattagctgtattgattacggacgcttctttaacctcatgcataccattaggacggagcgagtcgcctgcattatgggggcacttgcaacaagcgccacctgtacacatacgaggaggggctgccgctggcatccagacccgaaggttgatctaccgaagcgcttgcatcagccagcgacatttgacatatcaaatgcggagaatgtgacaactatggtcaacctgactactaccatgca

SEQ ID NO: 149943 - DNA, 625 bp, Zea mays
  Clone ID: MRT4577_68273C.1
ggcaccagtagcacactagcacttaacaatgttacaccaaaatgtggattatttatcaaacctgaatgcatctcatgatgcatcatatatatgtgactttagagaatatgaagtacaaagagactttccacagtcaactgtgaaatctggatttgaagataaaatgcagagtgtgtcgtcataaggaattaaggatgaagtgtgatgttaaaacttacagaaactgcaacgacatgtttcagtagcattatgttttgtttagaaaagggatgcacttctttgaagaaattgtgatcctacagcgaataacctacttatgataacttagacataatccatgcacatgtaatatgtatatattgtttaattgtgcctgaaatcttgctgaaggacggtgattgatcgtatttcctgatttgtgtgatcatgcttcttccctgaatatgttgctattcaaccatttataatctgctaaacctgtcattgctcaaatatgcaagcatgcgtgctcaccagtcaccacacacaaatgtttgcaaaaaaaaatcatgcacaatatgaggaaaaatgcaccattgtataatagacattaaacaatcaactattctatggaattttatgcttt

SEQ ID NO: 149944 - DNA, 867 bp, Zea mays
  Clone ID: MRT4577_68274C.1
cagaaaaatatcgcacaccggccgggactgtacgctggaaagcagaccgccgccgttcacgccacgggcccgcgccgcaccacctactactgcgcacccagcagcgatatgccttctctcctcttctcctcctttatagctcggattactggcccattagagccagccgtttcctccatcaatggtgttcaaatcctccgtttctcatcttcaatccctattaatttggccacgaatcttcctctcctaccgcctataaaatctgagccgagcttgttctcctctcccctgctggctccggttgttctcatgctccaaatatttgctcccttgcgctgagttcgttacttcattgtcgcgaagtcatctgtgtgcgtcgtctgcgctccagcagcctgccagccagactcgtcgccggagttcgccgttcatcgccggagctacgccacccgtcatccgaagccgagccctgctcttctccacccggccgaaaccccgtcgagccatccctgtcacacgtgcgaacccaaggttgaagacaaccccaaattaatttgtgtattttcaaaatacttttgattagattcatgaactgtatatttagtttgttgtaatatgaacatgtgtgatccgcaattcatgtgtatgtgcgttattcctatccgtggaagaccctcaagttttcaataagcaagaagcttgcaagatgaagatataatcttgagctccatggatgctagtctagtaatacccccggtcatcttccggtggatgaatgtccatgtttcactgtactttgataaataaaggttaagacattatgtctgtttaagtgtaatatgttaatataatcgttatttactcttt

SEQ ID NO: 149945 - DNA, 370 bp, Zea mays
  Clone ID: MRT4577_68275C.1
aaaaacaaacataatttaacgttttttgttacccattacgttacaaatttgggaaccaaacggcacctaaaacttagggaatttgttacagggcgggggcagattagttaaacccaaaaggacaaaggggccaaaacccatggatccagggtccaggggccccggtcacattttttttcagcataaacaagccgcaaagatgggttgggcaccaaaggccattggggaccacccttgttggggggggagaaatatttttttttactgggtcttgaacatgggggggatcaggtcgaccacgggggtggtgtagccccacttgttgtgggaccaccagacgagcttgatgaaatggttcttttaagggaat

SEQ ID NO: 149946 - DNA, 245 bp, Zea mays
  Clone ID: MRT4577_68276C.1
ctcccattgtgattattcctaatttcagtagttatcactagccccatgattatattattgaattgctgtgttcaagtgtactctaaataatatatactgatagaaatttaaagcttgtgcattatgtttcaactctatggtagctttattttgtatcaaaccattttaacattctttctttgcttcatgatatgactctcactctcgttcgtctttggtaattattttaaacataaattgatcct

SEQ ID NO: 149947 - DNA, 280 bp, Zea mays
  Clone ID: MRT4577_68277C.1
cccacgcgttcgaaaaaaaatacaagttttaattttaaaaaaaacaaaatacacaaagggaattggaaaaaatatatataacaatataaaaaaaaactaaattaaaaaaaaaaataggcccatcattctaaagatccaaattttcgtacacgttcattcaatgtcataacttttttataatttgacttaaattaaattaactggacctctatttacaacttctaaccttttaaaaccctgtcttctcccaacttaattaccttacaatatattccccttt

SEQ ID NO: 149948 - DNA, 245 bp, Zea mays
  Clone ID: MRT4577_68278C.1
acgctgacacgtggtttagccgccgccgtcttttttttgctgccgacgacatggggagaaggcctgcgatatgctatcgccaaatcaagaacatgccataccccacgtacaggtactgacggggtgtccctgaccacaagattaggatctacgacattggcatgaagagaaaggttgtggataagttcccctactgcgtgcaccttgtttatgggaataagaaaatggcttcaaggaagcctttg

SEQ ID NO: 149949 - DNA, 213 bp, Zea mays
  Clone ID: MRT4577_68279C.1
tacagttcgtcgtcgtatgatgatgcaatcgggtcgcaaagcaaccgaaattatctacaagagcacaatccactgctgggctacaattgccaaacaagaaggaaccggtgccttcttcaagggtgcattctcaaacgttctccgtggtactggcggtgctttcgtccttgtcttgtacgatgaaatcaagaaggtgttgtaaatttaattttt

SEQ ID NO: 149950 - DNA, 632 bp, Zea mays
  Clone ID: MRT4577_6827C.1
gccggccgggccgggcccccagtctctcgcccctctctcctaccccgcagccgccgcgcaggtagccctagcacccgcgacgagcaggatctgcccagttgctctttgagtagttcccccaactgtcaccatgcagaacgaggagggtaagactgtggacctctatgtccctaggaagtgctcggccacaaacaggatcatcactgccaaggaccatgcctctgtccagatcaacattggccacttggatgcgaatggcctgtatgatggtcacttcacaacgtttgctctctctgggtttgtccgtgctcagggcgacgcagacagctccttggacaggctgtggcagaagaagaaggctgatatcaagcagtagattttacatctagtttaccaagatatggacactgccttagctatgttttgaattcatgtcactatatgcaatgttgtgatttcagctggtaccttaaatctgaagatttagtatctttgttgggttccttctgagtttgatgtgtggtgttcgtttaattcccttgtacaaccccatttagtatcattgtgatgattttggattcaattttgctcgagtcagggtacgattccaataaaaaaaaaaaaaaaaaaaa

SEQ ID NO: 149951 - DNA, 383 bp, Zea mays
  Clone ID: MRT4577_68280C.1
gcttaaagcgacagacttcaaggacaaaagtgcttcctggcgcacatcatcatgggatgttgcaaggagccaacccaacaaaacccgggggggccaggacacaaacataggcatgacacaccacaacctggttgacagctctacagattaactgcaggccaaaaggcaggcctgtaggtgacactagcattcactagggaaatctggggaaccctacttgtacacactggtccagggccaacaggtccttttgggcctggccaaactggagctggtctatgtgagggccaacgttccagtacacgaacgcacgcttgaggtgcaaggggccaaacttgttggtgttaccagagaacaccacctagaccttttttgcttcacct

SEQ ID NO: 149952 - DNA, 165 bp, Zea mays
  unsure (1)..(165): unsure at all n locations
  Clone ID: MRT4577_68281C.1
aattcgnacgagggaccttggtttgggggggttaacataattctaaacaggtcctgctcttattagtacaccccgttatccctcctgtaacacctttctttaggggcacagtatgttggtttctacgctgtgttctccccgacactccattcaattccaccccat

SEQ ID NO: 149953 - DNA, 275 bp, Zea mays
  Clone ID: MRT4577_68282C.1
acgccccctcctgggtcccaaccgcggggagcaggctatttgaggagatgccgactttgccatcctaactctttggctccaatactgcaagggctgagcttcctttaatccctggcaagctctgcaatggggtggggattgagcgggtttccaaacaaccagaacccacttcatggaagttctaccgtgccagacccaagaaaccggtgggttttaaaggtgattttttcaactggcaaccaaccaatgtggtttggttaatcgaggatgggttt

SEQ ID NO: 149954 - DNA, 682 bp, Zea mays
  Clone ID: MRT4577_68283C.1
cctcgaggcggccgggaatccatacaaaagaatggtttgcttccttcctttctccctctatatctcgccttctcctcgaccagcggagggtacgttgttgccgatccacgaaccgacacttgtcatgccagtatgcatccgaacatgcttgctatgtcaactgccactattgcacactatactggtggtaaatgtcccaagacagctgttcctacaacgcccctgactgctaaacgtgcgcttcgtacaaaggggctgctactggatctcagtcccttccatcaccccccactaactgtcccacacaatgaagttgctcacaactgaggcctcgaataacctttccttagtactaacaacccataagccagcaaatctatccacacgccctcccagtgtgatccacgtgtccgaacacatctgccacaattgccacccttacgaccctcatagaaaacacccactgctccatcatgatacaactcattcctctactgctaaccacgaaggctaaagacaagccacccagagattagccacagggaagcattccgtgctgcaacgaagaattggcctcatctacctcatactccatttcaggctcatcgtatgtgaccatcggtagggtaacaactagcaaagacaatgattacgtatcgatctcttcgacttaccatatata

SEQ ID NO: 149955 - DNA, 204 bp, Zea mays
  Clone ID: MRT4577_68284C.1
gctccaggacggacgtacgtacctagatcgatccagcgatcgctatctacctgatgagcatggcgtccctctcctctggcgccatcacggccccttccttcgctgccccgccggcactcgcactggccatcacgatggccgtcaccatgcgtgcctctcttcgcaagggcagtggcaccgcctgcgtgggcgttgccgccaccg

SEQ ID NO: 149956 - DNA, 449 bp, Zea mays
  Clone ID: MRT4577_68285C.1
cataaatcatagagggtagaaggttgcttatggttcattagtgagttgacttattgtttgttttgctagatggttttcaccgtaatcaataatatggtgttagagcattctaaatttcaagaacatagtaattgtagaagctaaaaaaatagaagtaactaggagctaagttaaaattattgctctctagacctgcatgtccaattttaattatgcagtgaagtaaattatgttttctgtaaaagtgttatatagaaaagttatagctaactcctttatcttgcttgtgctaaaatttcatgaccataggtctgtagtttaaaagttatgattttctcaagtccagtcttggaatctgtttagattttgtacatatttcgaaactgactttgtttgttcaatttaaacatagaatcagttcttataaattataagaagttgtatgtaac

SEQ ID NO: 149957 - DNA, 432 bp, Zea mays
  Clone ID: MRT4577_68286C.1
tccttaagcagtggtaacaacgcagagtacttttttttttttttttttttttttttttttttattttttttttttttttttttttttttttttttttttttttttttttttgggaaaaaaacgcccaagctttttataagcaactggtccggagctagcacgtactggactgggtacacaactacagggggatcgatggacacgtacgtacaatctgaataattggaccttgccacaccactttacgccggacggacaggttcgggggatgattttatttaagcccatgggtctaccgggggacggaaatcatgggggagctagctagcccccctgcaattggtccggacggggccggctgggcctgggagcccctgtttgggacccattttgatgcccgcggactctgggggggtacccctggttaagggg

SEQ ID NO: 149958 - DNA, 426 bp, Zea mays
  Clone ID: MRT4577_68287C.1
aagcagtggtaacaacgcagagtacttttttttttttttttttttttttttttttttattttttttttttttttttttttttttttttttttttttttttttttttgggaaaaaaacgcccaagctttttttaagcaactggtccggagctaggacggactggactggggacccaactaccggggggtcggtgggcccggccggacaatctgaatcattgggccttggcacaccactttacgccggacggacaggtttgggggatggttttatttaagcccctggggctcccgggggacggaaatcatgggggagctagctagcccccctgcaattggtccggacggggccgggaggggcctgggagcacctgtttgggacccatcttgaggcccgcggactctgcggtggtacccctggttaagg

SEQ ID NO: 149959 - DNA, 298 bp, Zea mays
  unsure (1)..(298): unsure at all n locations
  Clone ID: MRT4577_68288C.1
tcggtacactggttccatcggcagaccgcttccatggaggcggccgagtggagcaacccccttgcaagcaggcattgtntttgggcttgtttcgtgggccggatctgggaacgcggcgcttacaggggaatacagtggactacgtcgtcaggtgcaatacttcttgatccagatccaagcgttctttcaactcttgcttctgcattcgtgtggaggggggattcttctggcctttcgagggacttcttttctttaggattgggagatacaacatcaactgatccaatggcgacatata

SEQ ID NO: 149960 - DNA, 253 bp, Zea mays
  Clone ID: MRT4577_68289C.1
aggcaggtacacgttatgatgttcaagttttattgggataagatcttttgatcccaaggtcaggtcgatggaattttcggactgatatctgctccttgagtcttcagggcagtgtctctatgaaggttaaccggttgaggggtaccacatacgatagtgtgaagtacgtatgatgggcagtcattctattctatagttcttaaatgtagtctacatctctcagatgtatccccattcggttttatcctcagaa

SEQ ID NO: 149961 - DNA, 519 bp, Zea mays
  Clone ID: MRT4577_6828C.1
ggtaccctcgggctcggccgggtgtccgactcccagccgtcgtctgctgcggactccgcctccagtttggtctgtttcttgcaagttgatcttgtggtagttcccccaactgtcaccatgcagaacgaggagggtaagactgtggacctctatgtccccaggaagtgctcggccacaaacaggatcatcactgccaaggaccatgcctctgtccagatcaacattggccacttggatgcgaatggcctgtatgatggtcacttcacaacgtttgctctctctgggtttgtccgtgctcagggcgacgcagacagctccttggacaggctgtggcagaagaagaaggctgatatcaagcagtagattttacatctagtttaccaagaattggacactgccttagctatgttttgaattcatgtcactatatgcaatgttgtgatttcagctggtaccttaaatctgaagatttagtatctttgttgggttccttccaaaaaaaaaaaaaaaaaagcggcc

SEQ ID NO: 149962 - DNA, 749 bp, Zea mays
  Clone ID: MRT4577_68290C.1
cattgggaccctcgaggccggccgggagtggtgtaggtcttttcggtcctcaggcttcatccctgtgcaagtgcagggataattgcttctgatctcccgaggctgcataacctgattcagaggcagagcaagggggcgtgagggagatgagggagatcatcagcatccatatcgggcaggcaggcatccaggtagggaattcttgctgggagctctactgcctcgagcacggtatccagcctgacggcctcatgcccagtgacacctctgtcgggatcgcgagggatgcgttcaacacgttcttcagtgaaacgggcgcagggaagcacgttccaagggccctgtttgtcgacttggagcccactgtgattgacgaggtgaagactggggcttaccgccagcttttccatcctgagcagctcatctcacacaaggaagatgcagcgaacaacttcgcccgtggacattacacagatctcgactgctgtggtcgagccttataacagcgtgctctccacacattccttgattgaacacacagatgttgttgtgcttcttgacaatgaagctatctatgacatatgcaagaggtccctcgacattgagcgtccaacatacaccaatctgaacaggcttatatcacaagttatatcatctctgactacctctctgaggtttgaaggagctattaatgttgacataactgagttccagaccaaccttgtgccctatccccgcatacactttat

SEQ ID NO: 149963 - DNA, 417 bp, Zea mays
  Clone ID: MRT4577_68291C.1
gcgcccacgcgtccgcccacgcgtccgttctacttatccaacttgttgctgctgatcaactggtgacaagtgccatcaaacgcaagggaactgcccccactgcgaaaattgactgcggtggagcttgagcggctaggagccgattattatagacgccacacctacgcaagagggcttacgggacatgttgctcacgcggtaactgtattccaccgaggacagtctctaaccaagaaacagtgcccttgctatgatatcttgaccaccgacgctagaacacgtacgtgctcttgattgataatcgacaatcggaacaaatatttctattttaacggtcttccgcaattgataaacacacacatggtttactttaaagagggataaatcgaagcattggacttaattacttgcattttt

SEQ ID NO: 149964 - DNA, 305 bp, Zea mays
  unsure (1)..(305): unsure at all n locations
  Clone ID: MRT4577_68292C.1
aacccattccccttactcacatatccncacttgacaaacgaaaactttttaagttctcccaacctcacnnccncacccccacccataactcaaacctacatctatttattcactagcaactctactcaatactaccacatccaacatctacacatcatcaacctaactacgactcaaaacccaaccctaaaataaatcccaaccaaatcctactccacatatcctaacatgccactcccctaaaacaatcttaaatcaaattatcacctacactctcttcatactgtcaaaacaaacacatcaaa

SEQ ID NO: 149965 - DNA, 3278 bp, Zea mays
  Clone ID: MRT4577_68293C.1
gtttaaccctgtcgcaggaaaagctatggcatgattgccaggaaataattccaacactgacagtttgccaccatagcatagcagacagatcggagtagacgatcatcatctccagtgccgtaggccctaaatggctatatatgagtcatcgcagtagttgttaacaattacacctagacctagtactgttttttgtccgtccgggttgctttccggctaacgtgtgtagtgtagcacaacccattggtcgctgtctgctttctgaagaacgttcattccggttgacgccgctacgctgccgtgtcttctttccttcccttataccctgccgcacacaccttttccgtttgcagtggtgcaggtcttttcggtcctcaggcttcatccctgtgcaagtgcggggataattgcttctgatctcccgaggctgcataacctgattcagaggcagagcaagggggcgtgagggagatgagggagatcatcagcatccatatcgggcaggcaggcatccaggtagggaattcttgctgggagctctactgcctcgagcacggtatccagcctgacggcctcatgcccaggtgaggcccctttccattccaactcatcctttccttgagaattatgtcagattttgttctgtacttctctctgagatgattattccagttccagctcagataattatttaagatagggctgccatctgggttcttgtagcagtcgcctcaaaaggttgggtttttgagataatcctgaggaagatctttacttgttgatcacagacagcactctaaaagctagagaaacttcgctggatgctctgacctctaaaaatcttctcttaagagtcgatgacacccctgcgttcaaaaccacttgcttaaaaagttagaaagagacatgataggataaacaaccctgcatattaaagaagaagctcatgttttctgaaacgaggataatcatgtgacaagctaccggtttctgtgtccaactcaccgatttcacagcatccaaattctcagccttggccgttcgcttgcagtgacacctctgtcgggatcgcgagggatgcgttcaacacgttcttcagtgaaacgggcgcagggaagcacgttccaagggccctgtttgtcgacttggagcccactgtgattgacgaggtgaagactggggcttaccgccagcttttccatcctgagcagctcatctcacacaaggaagatgcagcgaacaacttcgcccgtggacattacacaggtgtgacatgttcccctcaccctgagctatttcccggagaacaaaaaatgtttttgcaattttaaatgcaatattggttcaagtacaaaaactattggggtttggaagccctaccttgaatttcggtgcattgccaaaatgcgtaaagaccaaatttgtgttcttgaacagtactagcaagtggtagccagaactagtccacaacaatttggatattatgaaggggctgggtcaggatcttataatttacatattcaaccatcctatgccatgattattatagtatttttcatgacttcatatcatacaagcaacctcactttccttacctggggcaattgttttaaaaacattacaatgctttggaactgttctctgctctttattaatacctatcctgtttggaaactgagtaatgtcagaagttctacaacatgttttttctgctgcagttggaagagaagtaatagatctttgccttgatcggatacgaaaattggcagacaactgcactggtcttcaaggttttctggttttcaatgctgttggtggtggaacaggctccggcctgggttcgctacttttagaacgtctatcagtagattatggtaggaagtcaaagctcggtttcaccatctatccttccccacaggtatcaagatgataatttgggaacattcatgtatgcatcatttggtcatcgtaattacttatgcagtcatcaagcccgctcgggcggctatagctgcactagcaccgcactagtaccgtgctatagtagtatgcagttttgaagcagcagcagcagccgcaagtagctgaagctcatgtttctttctgggcaagtaattacagacttaattaccgtctcgacaaaggaagagaaaaactgttgtgcaatctccatacaaccaaattaccaaaagtcacgattttttttcaaaaaaaaattacagatatacttcattgtttactctaccaacatatcaagttttaagttatgattcatcctactttaagagatataaaaaggagaaaactatatccaatatgaagtattaaaaatgatagaattttatttttctatgtatatttcttaacataggatgacttaagaacttaaaatgtgatacattattagagtaaaatacatctataaaatttttaagaatttttatgacttttgttagtttgattgtgtcatggaccttcggtccatggggatagctgtcttctccggcgaggttatacccctctgccataggcttggttctagggtagcagccctaggcgcttgagagggtcattgcaagagagagagattggtttgataatgatcttgcttgatttattccctgctgccatgcggcttataaatagccctatggctaaccaacttctcctacaaactctcaactaactcctactttcttggacttatctgctgctaaccaactctccacaattctctcatctcaatcttattctctagccttatcccagctcatctcaatcttattctctagccttatcctagcctggttgttgcctctcactccctattatgcccatgacatctccccctcccttgaggaccagctcgtcctcgagctgccatagacttacctgacacgacttaaggttaagccttttacatctcggcttacctttattatttaagacgaaaatacaaaataattgtaaaactaaaatataaatgtgaactgcagctatgtcctcctggatcccaaggaaagagctgaactgcggacttcacgttggatgaaagcaaggaaattttgcatcatcttggaaatgccagactttagggggctttcggctggggaggattggcttaggcaaaaactgaaacaacattgtctcagcctggcattccttgaacgcactattgcaagactgcgttctcgcatcttatatcttcgggaaggcgatgcaaataccttttttttccaccaacaagctcgttccgcaagaggtaaaaaaaaaaaaaa

SEQ ID NO: 149966 - DNA, 846 bp, Zea mays
  Clone ID: MRT4577_68295C.1
ccggccgggctgtcccagaatctcggcaagctagagacgaggctcgatcagtccactacgctaaacgaagcagtctccgtggagaacaaggggaagccgcagccccagcgtcagcgcgcagctgagcaggaagctccgagcggcttcgtgctccctgacctcaacctcccggcagacgtctgacggctgcctgaatctgtcggtcggtggccgccatcttcagatcgagctatagcacgctaacctcatagctaaactgtacatagaagaagaagctgggccagaaggaggggggtggggttctgaacggccacacttaccaggatactgaggcagaagaagaacggaggttatctttgtgtcataagttgtcgacgtttagggtttagagccgtcgtgatcgtatcctccggcctgaacaacgttgttttatgttcagagcggaggacccggcttttacgtttacctcgctcacgtttttctgtcgacgttctttagtagtgcccccgcgcatcggtgtggatggacgcgcagtgggatatatatgtgtttccaggtagttggagattcgaaacgaaccagtgatgtagatttgtttcatctaaatatatgctatagttcaaaaaaaaaaaaaaaaaaaaaaaaaaaaagaagaaaaaaaaaaaagaataaagcacatgaagaaaaaaaaatgaaaaaacaaaaacacggaaagaaagacaccaaaaagcaagaacaccgaaaaatgaattcaaaaaatgtcgactgagaaaaaaatggggggaaaaaccataggctcagacaaataaatcggccattcgcaacatggacgtttcgccgggtaga

SEQ ID NO: 149967 - DNA, 375 bp, Zea mays
  Clone ID: MRT4577_68296C.1
ctcgagccgaatgagcgtcaatgacattgggggggtaggtgcaaaattattgtgcttcctagattactatgcaacgagcaagcttgatgttgatcttgcagagaaggttatcaaggggattagggatggctgcgaacaatcagattgtgctctcctaggaggggaggtaagatgtttttggaattgaattactaggactcgacaattcaaccatgcagtattacccttgtaagtttagtagttgcatatgaatggatcaaatgtcttaaactgccatactgtccaccattgttgcattgtttatctgccagaatccctttactaagaagcagggattttaatgtttatgtttgaagcgtactacttgattgataa

SEQ ID NO: 149968 - DNA, 864 bp, Zea mays
  unsure (1)..(864): unsure at all n locations
  Clone ID: MRT4577_68297C.1
cctcgaggccggccctctcctctcctctccccgtggccacaccacagccgccggaagctcctcctcctcctcctccttctccatgagagagatctagcaaagcatagcctccttcctgctggcgggatctccttttgattcgtaacttgtaccgtctctctctgctactttatagtatttttttcgttttaaggatcttgcttattattaatttttaggatcttcaactcttcatgtatgcgaatttcatatgctgctagtcgaaagatgcaaaaaaaaaaaacaggggcattccgagaattgaactcgggacctctcgcaccctaagcgagaatcataccactagaccaaatgccctgtgttgcgctaacgacggtccgttcttgtagataacgaaagaggaggaggcacagcaccttgtcaaatgatgaactctcagaagctgcagctgcccgttcaggatctgatgagtctgagagggagatcattcatcatcagcaaggtgatgatgcaccagtgcactgcagctgcttcgtcgtcgtcttcacctgctcctgctgctagaggcctgcaggttgctgcccatcccagttccagcaggaggcggcgtcctcgtggcctcgttgccgcggccggcagtgacgacgacgaatgcgcttcagctggtggtgagtccgagtcgtcgtcgtcgggcgggaaagacgatggcggcgccggcttgtcccgagaggatctggaacgcctggtcgggagtgacgaagatgccaagttcaatgggttggatcttgcaaactcatcaggaagaatacggtagatcgtacgatgtgacgctgataaagaaagagttcatggngaggaatctgc

SEQ ID NO: 149969 - DNA, 265 bp, Zea mays
  Clone ID: MRT4577_68298C.1
ggatgatgcgtggagtctggacaacaaccctgcacactggatgaagcaagaggagttctggctagagcgggccttggtgggggacttgcttgtggaagctaatggctatgactttaggcaccttcgctttgacgatggcataaggaggtgccccggcagcattgctgcattgcctatactagccatcactttgggacagttgagccacaactctgagctcttgcctccccctggccagtcccagattgacactagtgagaaagga

SEQ ID NO: 149970 - DNA, 426 bp, Zea mays
  Clone ID: MRT4577_68299C.1
acagtttatttggtgctggtgctggtggaggaagaagcagcgcagcaggtggcagggatgggtcgcggcggcgggatggggaacccggtcaacgtgggcatcgcggtgcaggcggactgggagaaccgcgagttcatctccaacatctccctcaacgtccgacgcctcttcgacttcctcctcagattcgaagctacgacgaagagcaagctggcaagtttgaacgagaagctggacatcctagagcggaagctggagatgcttgaagtccaagtgggcagcgcgacgaccaacccttccgtcttcaactaggaatcgcgggtttatatgcttgtaccaacgaattctggtcgctatcaattatgtaatgtaatgtaatggattttgttattattattgtggtatgtgtaaagatgtgcagaatcg

SEQ ID NO: 149971 - DNA, 662 bp, Zea mays
  Clone ID: MRT4577_6829C.1
cattgggtacctcgaggccggccgggctcgcccctctccctctctcccaccccgcagccgccgcgcaggtagccctagcacccgcgacgagcaggatctgcccagttgctcttgcggtagttcccacaactgtcaacatgcagaacgaggagggtaagactgtggacctctatgtccccaggaagtgctcagccacaaacaggatcatcactgccaaggaccatgcctctgtccagatcaacattggccacttggatgcgaatggcctgtatgatggtcacttcacaacgtttgctctctctgggtttgttcgtgctcagggcgacgcagacagctccttggacaggctgtggcagaagaagaaggctgatatcaagcagtagattttacatctagtttaccaagaattggacactgccttatctatgttttgaattcatgtcactatatgcaatgttgtgatttcagctggtaccttaaatctgaagatttagtatctttgttgggttccttctgagtttgatgtgtggtgttcgtttaattcccttgtacaaccccatttagtatcattgtgatgattttggattcaattttgctcgagtcagggtacgattccaataactgtcagctgttctcccaaaaaaaaaaaaaaaaaagcggcc

SEQ ID NO: 149972 - DNA, 1219 bp, Zea mays
  Clone ID: MRT4577_682C.1
cattgggtacctcgaggccgggccgggctcacacaccatcgaaacacaaaccagcagcaggcagagcaacgactagctgccaggcaagccggccgggggtgctgcaagagtgcaacaaacaatggccaccgcgctctccttcaaggccttggcactggccgcgctcctctccgtggtcgtggtcgtcacctctggcgctcgcgccgagcaacagctcaagcgcaacgccaccaccgcctcgcaggacagatccttgttgtcctacagcagtggctggctgccggccaaggccacctggtacggcgcccccaccggcgccggccccgtcgacaacggtggtgcgtgcgggttcaagggcaccaaccagtacccgttctcgtccatgacgtcctgtggcaacgagcccatcttcaaggacggcaagggttgcggctcatgctaccagatacggtgcctgaagagcaaccacccggcctgctccggcgtggcgcagacggtgatcatcacggacatgaactactacccggtggccaagtaccacttcgacctgagcggcacggcgttcgggtccatggccagctggggcctgaacgacaagctccggcacgccgggatcatcgacatgcagttcaggcgggtgccgtgcaacttcccgggcctgaccatcaccttccgcgtccagcacggctccaaccccatgtacctggccgtgctcatcgagcacgagaacaaggacggcgacgtggtgcaggcggacatcatgcagagcaactccggccactgggagcccatgcacgagtcctggggctccatctggaggatcgaccccaaccgcccgctccgtggccccttctccatgcgcatcaccaacgagtccggcaggcagctggtggccaagaacgtcatcccggccaactacatccccgacgtcgactaccgctccttcgtccagtactaatgatcgacctcggtcattgcttgccgcttattaagcgtttaattgtttcttctttatttaattagtggctgccgttgccgaccgaacatgcatgcatgtgggggaaattggaggaggcaagcatcaatatgcaatgtgctctcccgcccactgtcactctaccgttattaattaccagtgtgtaaccagcaaatcatactacatatatatacatggttatataatttcatactatatatacagtatatgtgatgctaccat

SEQ ID NO: 149973 - DNA, 542 bp, Zea mays
  Clone ID: MRT4577_68300C.1
cattgggacctcgtagccggccggggaaagtttagttggtgctggtgctggtggaggaagaagcagcgcagcaggtggcagggatgggtcgcggcggcgggatggggaacccagtcaacgtgggcatcgcggtgcaggcggactgggagaaccgcgagttcatctccaacatctccctcaacgtccgacgcctcttcgacttcctcctcagattcgaagctacgacgaagagcaagctggcaagtttgaacgagaagctggacatcctagagcggaagctggaggtgcttgaagtccaagtgggcagcgcgacgaccaacccttccgtcttcaactaggaatcgcgggtttatatgtataaataaatagataaatgtaggtatgaatgttgcttgtaccaacgaattctggtcgctatcaatcatgtaatgtaatggattttgttattattattgtggtatgtgtaaagatgtgcagaattgaaaagaaaaaaaaaaaaaaaaagcggcctggggcaaaaaaaaaaaaaaaaaaaagcggcc

SEQ ID NO: 149974 - DNA, 1131 bp, Zea mays
  Clone ID: MRT4577_68301C.1
cgttcatcatcgccaccaaaaggcagatgagcgccatgcacccgatccacaagctgctggagccgcacttcaaggacaacatgcagatcaacacgctggccaggagcatcctgctgagcgcgggcggcatcctggagaggaccatgtacccggggaagtacgccatggagatgtcctcggccatctactccgagtggaggttcacggagcagtccctgcccaacgagctcgtcaagaggggcatggcgtccaagatgggcggcggcgccatcgccctgcacgtggaggactacccgtacgcggtggacggcatggacgtgtggcgcgccatcgagggctgggtcaggacctactgcgcccacttctaccactccgacgccgcggtggccgccgacgcggagctgcaggcgtggtgggacgacgtccgccgcgtcggccacggcgaccgccagcgcgacccggcgtgctggctggacctcgactccgtggccaacctcgccgagtcgctgtccacgctcatctggatcgcctccgcgctgcacgccgccgtcaacttcggccagtacggctacgccgggtacatgcccaaccgccccacccggtgccgccgcttcgtgccgctgccggactccccggagatggcgcagctggaggccgacccggacaggttcttcctcgacacggtgcccgaccgcttcaccgccacgctcgggctcacgctcatcgaggtgctctccaaccacacctccgacgagctctacctgggccagcgcgccaccgcggcgtggaccgacgatggggaggtgctgcagctgctcgacaggttccgggaggagctccgccgggtggagaagcggattacggagaggaacagggacccgcgactcaagaaccggaagggacccgccaaggtgccgtacacgctgctgttcccggacgtcggcggcaaggagaaggggatcaccggcaaagggatacccaacagcgtctccatatgacaattgacaagctcgctccttttttttttttattgttttgttgcagaggatctgattatggttgtcggtttaatttcgttgtgagcatcattgtgttaatatgttttattgcgatgattggtttggaatttta

SEQ ID NO: 149975 - DNA, 197 bp, Zea mays
  Clone ID: MRT4577_68302C.1
cccacacgtccgcccacgcatccgggcaaggcaatatctttgtgtcctcatacaaatgtcgctggaatgcctttttttgagataacatttattcatactatatatattttctgtcaccatcacctctgttgaaggtcatgcacatcttcgacatccgcgtcaaccccaccgtacacgtagacgtgatccttatgtac

SEQ ID NO: 149976 - DNA, 1291 bp, Zea mays
  Clone ID: MRT4577_68303C.1
tataatttttaggatcttcaactctggggggtgggggggggtcatatgctgctagtcgaaagagcaaaaaaaaaaaaaaaaatacaggggcattccgagaattgaactcgggacctctcgcaccctaagcgagaatcataccactagaccaaatgccctgtgttgtgctaacgacggggcgggccccaccacagccgccggaagctcctcctcctccttctccatgagagagatctagcaaagcatagcctccttcctgctggcgggatctccttttgattcgtaacttataacagaagaggaggaggcacagcaccttgtcaaatgatgaactctcagaagctgcagctgcccgttcaggatctgatgagtctgagagggagatcattcatcatcagcaaggtgatgatgcaccagtgcactgcagctgtttcgtcgtcgtcttcacctgctcctgctgctagaggcctgcaggttgctgcccatcccagtcccagcaggaggcggcgtcctcgtggcctcgttgccgcggccggcagtgacgacgacgaatgcgcttcagatggtggtgagtccgagtcgtcgtcgtcgggcgggaaagacgacggcggcggcggcttgtcccgagaggatctggaacgcctggtcgggagtgacgacgatgccaagttcaatgggttggatcttgcaaacctcatcaggaagaagtacggtagatcgtacgatgtgacgctgataaagaaagagttcatggggaggaatctgctggccatgaatgtgatgtggaagtacagggagcaaagatcgttcccgctgagcgaggaggagtacctgctgcggctggacgatgtcgccaacacgctcaagtgctggggagccgtggcgcacgtgcgcaacacgctggagaagctcaaggagaggccgcgcatcggcaaggccgtcagcatcttcatcgacatggaccagaccggaggccgctccaacgaatggatttacaagtagcttcccactccatcgatcatgtatatgcatccatcgcccccatgaacaaacacattcatcaggtgtatggagaatgaatgtgggtaccaatttcatctccaacaatcaagcacatcgcaaagatcataccatcacatgatcttattgattcttagatcgcacctaagcatgtctcttgatattctcacatatgacaccatgcatgtatacaacgagctccttcatcaatactagttaagtattgcaataaaaaaaaaaaaaaaaaagcggccgcggccccgactaggag

SEQ ID NO: 149977 - DNA, 440 bp, Zea mays
  Clone ID: MRT4577_68304C.1
tggctctggacctttgggctgatttatgtgcttgagaaagggcttgaactgaacttgcggcgcatcgttttccttctttttataagttgttggtgttgttgcgaggatcttggtgaacggtgctttgtgctgttctgggttcttcttgttgttgtgttggtgttatatcaggttcttcaaggagccacgtatacgctagaagtcataatagctaatccctagtcccggccctcgtcatactcgaacgtctaaactcgttgagaagacgtcaccatccattcaactttctcttacattaagcccggagcaggctacccgtcctagataatggagataagcccgaggtcgccgcgtttcctacgggcgaactcgcaatcgacggaatctccgtcaatcctccaaagaaattcggagatagagctgaggtcgacgaattcaca

SEQ ID NO: 149978 - DNA, 197 bp, Zea mays
  unsure (1)..(197): unsure at all n locations
  Clone ID: MRT4577_68305C.1
ctcccccctncggggggtcgacnccacgcccgtccgggaaaaggcaaaggcaaacactaataccagagtagacgcagagcgccgtcgggcgacgcacggcacacgcaacaatggcggacgacgaacggcagctcgggcgtgtcgcaggctgattggtagcttcctgctctgggcgccgctcgcccgggcnggtcgcg

SEQ ID NO: 149979 - DNA, 2003 bp, Zea mays
  Clone ID: MRT4577_68306C.1
gtttagttggtgctggtgctggtggaggaagaagcagcgcagcaggtggcagggatgggtcgcggcggcgggatggggaacccagtcaacgtgggcatcgcggtgcaggcggactgggagaaccgcgagttcatctccaacatctccctcaacgtccgacgcctcttcgacttcctcctcagattcggtcagctcctcttccattccatttccccgcggcctgccctctctcgatctggatctccaacttttggatctggtccgccgccttcgtgcttcataccataccacgcggagcttaattgtccttgctacccgcatattaccttgccctgcccgagcttatgtttagtcattgtgggatggcagacaattgctcaaactacccatgagaccggatgctttaactagtcattgtgggataatcaatattccggcgacgtttgaattgatgtcagacaacacatcctaacagccatccatctacatagcctgcctacctactcgttcggcctgttgctacttaccagcctcatgctcgttgtcaattaggctcgggttttgcatggaatggctgtaacttgcggtcactaagtaccttttaaaaaatagttgatagttgaatcccacacagcacctgcttgggattcaaaactcacaaccacttgtggatagtttgatcttttgatggtagatggggaactttcgagtcgctgggggagaagcaattgttgtacaggaggatgcagcaagagctatgagaaggaaacgcttatgaacaatacatatctggtcgtcctaattttatgaagctacgacgaagagcaagctggcaagtttgaacgagaagctggacatcctagagcggaagctggaggtgcttgaagtccaagtgggcagcgcgacgaccaacccttccgtcttcaactaggaatcgcgggtttatatgtttaaataaataaatgtagaagaggaggaggcacagcaccttgtcaaatgatgaactctcagaagctgcagctgcccgttcaggatctgatgagtctgagagggagatcattcatcatcagcaaggtgatgatgcaccagtgcactgcagctgcttcgtcgtcgtcttcacctgctcctgctgctagaggcctgcaggttgctgcccatcccagtcccagcaggaggcggcgtcctcgtggcctcgttgccgcggccggcagtgacgacgacgaatgcgcttcagatggtggtgagtccgagtcgtcgtcgtcgggcgggaaagacgacggcggcggattgtcccgagaggatctggaacgcctggtcgggagtgacgacgatgccaagttcaatgggttggatcttgcaaacctcatcaggaagaagtacggtagatcgtacgatgtgacgctgataaagaaagagttcatggggaggaatctgctggccatgaatgtgatgtggaagtacagggagcaaagatcgttcccgctgagcgaggaggagtacctgctgcggctggacgatgtcgccaacacgctcaagtgctggggagccgtggcgcacgtgcgcaacacgctggagaagctcaaggagaggccgcgcatcggcaaggccgtcagcatcttcatcgacatggaccagaccggaggccgctccaacgaatggatttacaagtagcttcccactccatcgatcatgtatatgcatccatcgcccatgaacaaacacattcatcaggtgtatggagaatgaatgtgggtaccaatttcatctccaacaatcaagcacatcgcaaagatcataccatcacatgatcttattgattcttagatcgcccctaagcatgttttttgatattttcccatatgaccccaggtatgtatacaacgagctccttcttcaaaactagttaagtattgcaaaacgttttaaaaaaaaaaaaaaaaaaaaaaaaaaaaaaaaaaaaaaaaaaaaaaaaaaaaaagaaaaaaaaaaaaaaaaaagcggcc

SEQ ID NO: 149980 - DNA, 364 bp, Zea mays
  Clone ID: MRT4577_68307C.1
tttttttttttttttttttttttattttgggttctttttttttttaattttttaaaaatgtttttttttttgaaaatactttggtccactttattcagtacacattaacttttgacatggcagatcttggtccttctcttgtttaggggggaaaatttatccaaaaagggagggggcggtttaaaaacccaaaaaggccggcccctttttttttcaaaggggaactagtgggggaagataatattcttaaagcgtttggtccttttgggattttttttaaaaaagtggggcggcgaaaacccccccctgaaaattccggccccaaaaaaaacggggcgaacttttaacatcccttgggacaagg

SEQ ID NO: 149981 - DNA, 833 bp, Zea mays
  Clone ID: MRT4577_68308C.1
gggaccctcgaggccggccgggccgggatacacaggcctcctaaaaaactgtcataaccgtcacacacacgacgtacacttgggacttcgccatagccagcaagcaaggtaccttcgttcgacttcatctccgatccaccatgtgcgacgactgcgagtactgctgctcctgctgcaccccgtaccagcgcttcgcgtgcggcttctgcatcggcctcgtcgtcatcgccttggtcgccgtcatcgtcgtgctcatcctcggctacggccacgcggcgcagcccaggttcgaggtcgacgacgcctcgctcgcgcgcttcaccgtcgccacctcgccgtccgggggcagtgccaccgccatctcctacaacctgacgctcacgctgggcgtgcgcaaccccaactgggccatgggcgccaccttccggtccctcgaggccgactacctcttcgaggaccagcgcttcgaccgcgtcgacgtcgtctccgcgcccccctacgtcctgtccgccaggaagaccgccgtgttccgcctctccagcggcgccgacgccgtcagcgtcgtgctcgggagcgccggcgtcagggcgtacaggaggcagagcgccaagggggtgttcgacgtcgaggcgaagctctccggcgaggtcaagtaccaactgcacaccacgtggtgcaggctggaggccaagtgcccactcagtctgcagctcgggtcgccggacggtggcgccgccgtcgtcttccagaagacaacctgcgaggtgctccgatcatcgcagaagggatgctaagctgttcgccgctagccgtcgctgtgattttcttttgtt

SEQ ID NO: 149982 - DNA, 324 bp, Zea mays
  Clone ID: MRT4577_68309C.1
tacgacggccgggccggcgggctcgatatacaaacctataaagcgggggctatcaatcctttaaacactaacctgtttgacagatggaggagcccaactagcgaccacatatgtgtagcgtggatacgaggcagccatgcgtgcatagcgacgttgctttttgatccttggggggggggtctgaccataatgcagcggcactatgaacgctgggctggctcgtgcaccctctacttggggacgctagctggactccaccggcttgagacagggtaggtctaccggaccgatgacccgcccgcgatcggaatgcatccgagcccg

SEQ ID NO: 149983 - DNA, 1346 bp, Zea mays
  Clone ID: MRT4577_6830C.1
cctgcaggacttctcctgcataaccgctttgtcgacccacgtttctttaaaacctcgagttgggacgagcgggagcaaagccaaaaagcaaagcccgggccggacgggaagggaggcccaaccatccagctacacctcccagcagcagcagcagccatataaagctactgcctactagctacgaggggagacgagaggcgaggagagacgccgccggactgccgtgcccagcgcccgtgaccatcccatcccatccggtcggtcgtacatgaaggaccgccgtggcagctcctccgtcggcggcggcgagcgcttcgccgtcttccccttctccatgggctgcatgtcgcagtccgccgtgtccgtcgccgaccccggcgacaagaaggcgcagggggacccgtcctccactgccgccgccacggtggctcggggcagcagcagcaggttcatcggaagaaggcgccggcgaggccatgacgaaggagaaggccgtggcgtcgtcggcggcggcggcgacgacgccggggctcgtggcggccggggtgtcgaggctgatgaaggggatccggagcctgtcgcagatgttcgcgggggaggacggcggcgaagatgaggatgaaggaaggaggaggatgacgaggagcgggagatggtgatcgggtaccccacggacgtgcagcacgtggggcacatcggctgggacggccacaacagcaaggcgggcgccgccgcggccatggctggcatggtgaacgccttctccctgccctcctccctctccctccgccacctcgacatggccatggaccgcgccgtcgcgcacgcctccgcctgaacccggcctgatgaccgcgcgcagctccgacggccggtatcgtacgtagctactagattccgcggttccgccatttgattgcttcacacgttcgtacgcggagaaggaaggatatgatcgattcccatgcctccagtttgctgctgcttgttaatgccgccggccggtccctgttcttgccagtccagtgccatacgtgcgtgaaagtctctcgctttctgtgtcatatcatatccggtgtgagctactatagcgtagagcatgagacgacaagcgtatttgtgtacatacgtgcatgccaacttgtatagtttgtgaggcttcgccatcacacaccccacggtgcctgctggagctcatgtcagtatgtgtgtgtgtgtgcctgccactgccagtgacctatataactctgcgtgtgatttgtaattaactcccacgtttcaatttttgcaaaaaaaaaaatgatcatcttattactggccaaaataaaataaaaaaaaaaaaggcc

SEQ ID NO: 149984 - DNA, 208 bp, Zea mays
  Clone ID: MRT4577_68310C.1
ttctttttttttttgaaacagggaaacccatcactttatttattgcatgcatgacaaggccagactgaattggaacaatgcgccatcaaccaccccgcctggcagagtatgcctccaaaacctctcgaggcggagacaaacagaaaatattcagctccaaaccacccccccaacttctatgggctgcacccacataatgaggcccccg

SEQ ID NO: 149985 - DNA, 264 bp, Zea mays
  unsure (1)..(264): unsure at all n locations
  Clone ID: MRT4577_68311C.1
tgnactttntttttttttttttttttttttttttttttaatttttttttttttttttttttttttttttttttaaaatcaaaaatccattgggtttatcaaaacccgacaccaaacaagctataagttcaaaaataaccaacgggcgatacataggggggccaaaacaacatgcggaaagccttaactaagggagttcatgaccttaacggctgggcacagaacaaaatttgaatccccttactggagattgagaaccgatcca

SEQ ID NO: 149986 - DNA, 667 bp, Zea mays
  Clone ID: MRT4577_68312C.1
tcgagccggccgccatggaggacaccctcaagtcgctgtccatggactacctcaacctgctcatcaacgggcaggccttcagcgacgtcacgttcaacgtggagggtcgcctcgtgcacgcgcaccgctgcatcctggccgcgcgcagcctcttcttccgcaagttcttctgcggcgccgaccaggccgccgccgggcccggcgcgctgctgctggaccacctcagcccgcgctccccgtccggcacctcctccccgcgcggagcctccgccgccgcgccgggcgccgtcatacccgtcaactccgtcagctacgaggtgttcctgctgctcctgcagttcctttacagcggccaggtgtccctggtgccgcagaagggggagccccggccgggctgcggcgagcgcgcgtgctggcacacgcactgcgccgccgccgtcgacctcgcgctcgacacgctcgccgccgcacgctctttcggcgtcgaggagctcgcgctcctcacccagaagcagctggccggcatggtggagaaggcgtcgatcgaggacgtgatgaaggtgctgatggcgtcgcggaagcaggacctgcaccagctgtggaccacgtgctcccacctcgtggccaagtccgggctggccgccggaggtgctcgccaagccccccc

SEQ ID NO: 149987 - DNA, 664 bp, Zea mays
  Clone ID: MRT4577_68313C.1
cccacgtttttgagaaatcggagcagagatacacaataatggaggcggcaggtggagggcagcacgaaacacgacgacgtgcaggcctcgccctcctgggcgtcgtctactcatcgctgctcctgaacgccatcttcgtcgcgcaccacttcctctcgccgtcccggctgctgctccgtgacgacgggtgcgggtgcgggctcacctggtctctgcaggcggccagggaggccgaggcggtggccgccgtggagtgctcgggccacgggcaggtgttcgtcgatggcgtcgccggcgaggacgggcggcccgggtgcgagtgcaacagctgcttcggcgggccggactgctcccttcgcacgcccaactgcaccgccgacgccgacagcgggaacccgttgttcctggagccgtactggcggcgtcacgcggcggccagcgccgtggtgttctccgggtggcaccgcatgagctacaccaccacgggcgggttccagtcggtggagctggagcgccagatccggcgcctgcacggggccgtcggcaacgccgtcgcggacgacaagcacctggtcttcgccagcggctccctgcagctcatcaacgcgctggtgcacgcgctgtcgccggacgccacggccgcctcgccaccgtccagagtggc

SEQ ID NO: 149988 - DNA, 893 bp, Zea mays
  unsure (1)..(893): unsure at all n locations
  Clone ID: MRT4577_68314C.1
ctcgcgagatcgaggtggcatgcttcctttcagttccctctttgagtcgagccttttattgctgtggttgagctgacagttccagttcgggactgatgggatcctggtttcagagaaaccacagaacagagggaagaggaggttcctgtacggcatctccatgggcggaagcgtggcccttctcctccaccggaaggcaccgggctactgggacggcgccatcttgctcgctccgatgtgcaagatctctgatgacatgaggcctcacccgatcgtggtcagcgctctaacgatggtttgtgctgttgcgcctggttggaaggtcatacccacacctgatatcattgacaaagtctgcaaagatccagagatgagaaaggaggttcgttccaatccgtatatatacagaggaaagctccccctgaaaacttgccatgagctcctgatggtcagccttgatatcgagaagaacttggatcaggtgacgatgccgttcctggtcctgcacggcggggatgacgtcgtgaccgacccttcagtcagcaagctgctattcgagaaggcatcgagcaaggacaaaaccttcaagctgtaccctgggatgtggcatgcgctgacagccgaactccctgacgacgttgagcgtgtgtatgcggacattatcacttggctagaggaaagagcggttgtttgcagctagtgtttctagtgccacaccacgtgtctgaactctgaaagatgttaaatatgccatggcagatacgtatacggtgtggtattcaaacccatgtaggagggcaagcatgtaaatatgttagatttagattcccccatatgntgtaacacttaaacctttacacaaccacctcgtgtagctttataaataaaatcca

SEQ ID NO: 149989 - DNA, 1004 bp, Zea mays
  unsure (1)..(1004): unsure at all n locations
  Clone ID: MRT4577_68315C.1
cgcgtccgcccacgcgtccgcacagacagacaccattaacgagccagaaccaaagcaagtcgaaaaaccgaggcgagaagacgaattcttctgtaattcctgagaggaaagatggggaacctaccaggagttgtgcagaagcccttccttcacttcccaatcagatacagggagcatcattcccacactcttcaggagatgctggatgccagaatgcaccagccgaggcacctgttctgcgacaacaagcaggagcaggacaaggcgaaacatctgatggtttgcctggatctgccctgacgtcgctgtttcaacatgtctggtcagacccgtgccttgtgttcgcgttcaggactctcctgggtgatatccctgttcttgatgacgctcgagcatatcggtcttcggcttatgatggtaacagagactactaccttccaccacagaacatgaataaaaatgctgcagccaactggtccgctctggcttatgatagtaacagaaaccacgcgcaagtcgaccatgttatgccgaggacatcagatacgttctacagcagtggttggttccctccccagtgaattcaatctaggaaatatgaaagcaatttcttacctggcaaaggacaaatcagaagcaaggatgcatgttgcaagcaagactgcagctcgttgtaattgtgtagacgatccataactaatagtctaatgtagctatcacatgctaccgtgcgccatcagcatcagtctaattcacaggaagctgtctggtggtagacttggcaatactttctgttgtttgtgtttttgtagtaccaacttgatcatgcattcacttgttgcattgttacgtgttagagcagcctcaatagtcaatatcccaggaagtgatctgggctgtactttgtctatgagcatccacttgtgtattactacttgtaacttggtagactttcaacgtgcatcgtggcatcggactaagttgtaccaagtgtgtttgtttng

SEQ ID NO: 149990 - DNA, 363 bp, Zea mays
  Clone ID: MRT4577_68316C.1
tcatcagctgcttctgcttgctctccccggagagagagagagagtgagccatagggaggctacctaggaggctatgaggtgatcctcggacaaacacgttgatggtgatcaccgaccatgggtccatatatgcccccaaaagatgatgccggggatactaccggatgccgttgttgaggacgaaggcgccaccagctgctgcgtctactacctgcgcgggaacgagccggacttgtcggtgcagatcggagaccacggcctacctcgggtacgtcccacgacagccacgccgtcctcctccccagctcgtgacccgccgatgacgaggtgtcctgactgctagaggttgcgctggatcttctg

SEQ ID NO: 149991 - DNA, 2063 bp, Zea mays
  unsure (1)..(2063): unsure at all n locations
  Clone ID: MRT4577_68317C.1
tcgagggcnncggccgggaccacggacgcgtgaaagaaagctgcggccttttctgctactcctgcctgccagcggcctgcctgcctgcctactagtgcggcgtggaggtggagcagtgggcgctacagcctccatcagctagctgccttgccgtgtcctcctcttcctcctgtcggtggcgatctctgcggaaacccgagcttcgtccaagccgggcagtagtgcgcgccgcctgggcgtaattatggattcttttgagggctctgatcatataactcaaagaaaggttgttcctgcaaaacatattgcattggttgatggaaagaatgagcctgctggagaggggttgcctaatggttggctgaaagaatgcagacctagaaagaaccgatatggatctagagccaagagtgacacgttctatattgatccaatcaatggatacgaatttcactctctcaaggatgtacaccgctatcttgaatctggagacatcagtaaatgtattagatcgccaaacaagagaaaaattggggacctgcatactaaagaggaccaatctcatcatacaggaaaactatcagatcatacccagctggatactgctgatgagtctaatcgatatgatctaccggaaggtaccaatgcactgggatatgctctgcaaaatccagaaagcgaagagaataatgaaaatattgcactgtccaagcctgacaatataagctcaatccaaattgaagctggtcaggttgaagctacagaagataagagcatccaatcaggctctatagaatacactccaggggaagctaaatctgtcactaggaaaggaacagatgtgaaggagaaaccgaaggggaaacagtacaaaactaaacctgccaaggggattgctatacctcttagatcgtcacctcgtttagctgcactgaagattagccaggaagcaaataatgcaaccagagatggacatattggcacacagacagacaccattaacgtgccagaaccaaagcaagtccaaaaacccaggcgaaagacgaattcttctgtaattcctgagaggaaagatggggaacctaccaggagttgtgcagaaacccttccttcacttcccaatcagatacagggagcatcattcccacactcttcaggagatgctggatgccagaatgcaccagccgaggcacctgttctgcgacaacaagcaggagcaggacaaggcgaaacatctgatggtttgcctggatctgccctgacgtcgctgtttcaacatgtctggtcagacccgtgccttgtgttcgcgttcaggactctcctgggtgatatccctgttcttgatgacgctcgagcatatcggtcttcggcttatgatggtaacagagactactaccttccaccacagaacatgaataaaaacgctgcagccaactggtccgctctggcttatgatggtaacagaaaccacgcgcaagtcgaccatgttatgccgaggccatcagatacgttctacatcagtggttggttccctccccagtgaattcaatctaggaaataagaaagcaatttcttacctggcaaggacaaatcagaagcaagctcaagtcctagtcctagtcttggctcccttttggcccttgcctcaacaaggatgcatgttgcaagcaagactgcagctcgttgtaattgtgtggaggatccataactaatagtataatatagctgtcacatatgctaccgtgcgccatcagcatcagcctaattcacaggaagctgtctggtggtagacttggcaatactttctgttgtttgtatttttgtactaccaacttgatcatccattcacttgttgcattgttacttgttagagcagcctcaatatcccaggaaatgatctgggctgtactttgtctttgagcatccacctgtgtattactacttgtaacttggtagactttcaatgtacgtgtttggtttcagaaatgaagtagtccatttttttccgaaaaaaaaaaaaaaaaaaaaaaaaaaaaaaaaaaaaaaaaaaaaaaaaaaacaac

SEQ ID NO: 149992 - DNA, 428 bp, Zea mays
  Clone ID: MRT4577_68318C.1
ttggaagcagcgccgcgtgcgggtgccgggactgaattaacgtgctggagccgcttgttttctagtcggcggccgcccttccaaatgcggggcctacttgccgacggcgtgcgctaagccaaatgcttcatagatcgccaaggtcgccgaggataccgggacatactacgagatcggtaagagggacggagacctactatataaggactaccacacggaccagaactgcacgctcaccacctacaacaacaacggagctgccatcactgctacaggcacaaggaaagaccaaacgtcttgaaggaaaggcagagccagacgatacacatcattgtgactgtggatgtgaacgccactgtggaatcggatgccataactacagtcactacctatgagctgggcacaccacgcttgaaggcaatattatg

SEQ ID NO: 149993 - DNA, 143 bp, Zea mays
  Clone ID: MRT4577_68319C.1
atccaggacaagctggccgcgctgcacgcggagggctgcagagcggagaagggcgctccggtcgccgccggagacgtcagcctgtggtcgctcaggctgtactcccacacgtactaccgctacgtcgggtcgttcaccacgcc

SEQ ID NO: 149994 - DNA, 243 bp, Zea mays
  Clone ID: MRT4577_6831C.1
aaataaaaacaaataatagatcaaacgctaaaaaaaaaaaaaagataaagattacgtgcgatgagaagtcaacataatagaggttgcgataaagaaagtggggtgcctttttaggggacctaaatttacatcggcgggcatgcgacaacctatgaccttacataatgtgtactgaatttcaatcccatgtcctttggtttaaaacgtattaactggaaaatcccgggctttaccaaacttaat

SEQ ID NO: 149995 - DNA, 293 bp, Zea mays
  unsure (1)..(293): unsure at all n locations
  Clone ID: MRT4577_68320C.1
attgggtactcgagcggccgggactactatcaatgggctcggattggtactctacttgtncgctgtgggcgcccagaggtgctgcaatggagcaggagccgcaccggcccatgggagctgcccccgggcttccgcttccacccgaccgacgaggagctcatcacgcactacactggncggcaaggncgccgacgccgcttcgcgcgttcgccgtcgccgaggncgacctcaacaagtgcgagccctgggactgccatgctggcgagatggggagggaagagnggacttcttct

SEQ ID NO: 149996 - DNA, 309 bp, Zea mays
  Clone ID: MRT4577_68321C.1
tggtttctggagttgcatagtcccgctattcgcccggcgtcgtacagggtacattagctcctgagtacgcctacacgctgaaagaggacgagaagagcgacgtgtacagcttcggcgtggtgctgctggagctcaaagtttgttctagcccgggggggagttcggagacggcgtggacattgtgcactgggtgcggacggtgaccgggccgagcaaagaaggcgtgatgaatatcgcccgcccacggtttttgacggtgcctttgtacgaggtaacccacggtttctacatagccacgctgtgcgcggc

SEQ ID NO: 149997 - DNA, 162 bp, Zea mays
  Clone ID: MRT4577_68322C.1
ctgacagctcagctgcatgattcgtcaggtttcggggcttggaagtcatgacttgctgctgccacatgactgaccggtagcctgcaggccacagaaatggaggaatcttgcgtagaaaggtcgattgagatcggagctgacgagctctagacttgtagcgca

SEQ ID NO: 149998 - DNA, 121 bp, Zea mays
  Clone ID: MRT4577_68323C.1
cggacgcgtgggcttctacccctccccaccgcgggccgagagggagttcgtccgccggcgccgcgcgactcaccgatgccgagccatgatgcctgctgcggcaccatgttctgggtgtacc

SEQ ID NO: 149999 - DNA, 385 bp, Zea mays
  unsure (1)..(385): unsure at all n locations
  Clone ID: MRT4577_68324C.1
ggtccggccggaatttattcttgggtcgacgaggnaattacaagtcggcggggccggcccttnnnttttttgttgtttttttttatagatgtgcgggttgttttcttccacnngacaagttgtttttattttattgttcactctagaaaaaatggaagcggggcgactttgaacaacaatttgatgtggcacaagatctgctgagggcaataataggtgaagaaggctgtacccccggatgaaggtaccaaaaacaaattggtcataccaggcatgaagtagaggcctaataccacatggagtatagacaatgttttaaaaacaggagactgaaggcactgaatctaaaattaacaacaacatttctcaaaagaagaccaaaagg

SEQ ID NO: 150000 - DNA, 253 bp, Zea mays
  Clone ID: MRT4577_68325C.1
ctgaagctaacttaagggaaatgagatggccaatggcaacactagtcatcgcttcaagctcttgcttttccttctaactctgcactcttcattcgctgagattttcttcgaagagagattcgaagatggatggaagagccgttgggtgctatccgattggaaaaggagtgaaggtaaagcgggtaccttcaagcacacagcaggaaaatggttcggggatcctgatgacaaaggtcttcagacatataatgac

SEQ ID NO: 150001 - DNA, 750 bp, Zea mays
  unsure (1)..(750): unsure at all n locations
  Clone ID: MRT4577_68326C.1
actcgacgcggcagcagcgcgtggactacgacgtcttcctgacggcggtgaaccccaacaagatgacggcgctgtggtacaggcgcggcgcggcgaggctggcgcaccatgggacgaccctcgccaagggcgacgtcgggcagcccgcggacggcggcgaggacgccaccgacttcagcgtgctgctgcagggggtgaagcacaacgggcgcacgcccagggcggtggagaaggggttcagcgggtccaaggagcacctcgcgctccagctggccgtggaggtcaccgtgcaggtgcacgtcggcgcgctcgggttcgggcagaggaggctagccgtggactgcgggatcaccgccgccgggctgagcaaggacgtgcacattgcgtcgcagagttgcaggagcagcttccggaactgacgacgatcgggggcgcctgtggtctggaactctggatcgtgggggaatggaaattgacgccgcgcgcggtcatgtgtaatgtcaaatgtgtggcggcgtggaagcggatgttggacggaagatcgtgctcgcgcgccttttgtaaaatgttgtgaaattcttgagactttgatgtaaattgtcacgaactgaatcatgggtgttgaaggccggatcacagcaaaaaaaaaaaaaaaaaaaataagaggcagagggctccgtcgcttttattaaatcagngctcgtcgccaggcaccctcgcgttccccagcgtaacaagtgtccttcctcc

SEQ ID NO: 150002 - DNA, 1450 bp, Zea mays
  Clone ID: MRT4577_68327C.1
aaattacaaaaaaaaaaaaaaaaaaaaaaaaaaaaaaaaaaaaaatctagctagcatgtacgccgttccccaacctcgcggggagtcttgttcatcttcgatctgcgggggagctcctccatcttccttcaccctcctctctctcgctgtttgaggagaactgcctgcccctgctccctcttccgctcctccgcgctcccgctcgccatccccaggcttcatttcggacggggatggacgactacgcccgggagatgatggagctgaagacgctcgtcacccgcaccctcgagaagaagggcgttctcgccaagattagggctgagctaagagcaagcgtgtttgaagccattgaagaggaggatcgggtgatggagaatgatgatggcggtaatcctgctttgcttggtagctgtaatgaccgggctaagcaactgcatgcttcaccttcaggtaggttactaactgcacttgtttgcgaatacttggagtgggcgcaattaagtcacacaatgaaagtttacttgccagagtgtaacctgcccaaggacttctggaagaatgaactgaaagacttctctaacaaaagtggagctgaagggagcaggagtgctgaaagtggtccactgcttttagatgttctcgaaggttatctgaaatatgagaatttgtctcaagcaaggatgggcggcaggaggatgatgagttcagaatctgatccatcactaaatgctgaacatcggagcatgaggagggcaccatcagcatcagttgggaatctgcctcctatggggagacctatctcttcgtcgcagcaggcatcagatcgcagagggggatcttcagcttccaacacaaggaaagatgagtacaactggagatacgataccaccgatgatatatctgaagaggtgctacgggcatcgactgctctagaaagtgttcagctagaccgcaaatctcggaatctgccaacatcttggagggcattcaggggatggcgccgagtaacaacaaggctttggagctggttgcttgacttgaccctgtatcatgtaatttgtatgccaatcatttgcagtgatacgatgcttggattgctgctatcttagagaagtggtaaactggttatgcgtgtttgtcttgtaacgaacaaaacaactttagtgttagtctcatgttgcaattttcaaagctctcatgttggaacaaaaaaaaaaaaaaaaaaaaatttcgtgaccctgacccataatgtgaaaacagggttcatttttgcagcttcagattctgtttacttagtaccaataaagaataatgccacagccattcagacttttttttatatgaatagactaaaactatccctaaatactcaatttggtagcaacttcctaatatgttaatacaaattttagcattcccagttaaaaaaaaaaaaaaaaaagcggcc

SEQ ID NO: 150003 - DNA, 533 bp, Zea mays
  unsure (1)..(533): unsure at all n locations
  Clone ID: MRT4577_68328C.1
cccgggctcatcttctacacgacggtgccttcgctgtcgttcgtgacggggcggggcatcgagcagcggcccaccaccatgttctacgtgtacctggccatcgtgctgggcacgctgctgatcctggccgtcctggaggtgaagtgggcgggcgtgacggtgttcgagtggtattcttttggtacatggatcaagagaagtttggtttcaaaaaaaaaaaaaaaaaaaaaaaaaaaaaaaaaaaaaaaaaaaaaaaaaaaaaaaaaaaaaaaaaaaaaaaaaaaaaaaaaaaaaaaaaaaaaaaaaaaaaaaaaaaaaaaaaaaaaaaaaaaannnnnnncccntttaaaaaaatccaantttannaacccnnncatncaannaaaaaattttttttaannncccccaaaataaaattaacncccccnntttttaaaaccnnnnaactnaaaaaaccctnncnaaaccaaattaaaaaccctaaaaaaaaatccccttttnccaannnnnnaaaaaacaaaaaaacccccccc

SEQ ID NO: 150004 - DNA, 1686 bp, Zea mays
  Clone ID: MRT4577_68329C.1
actaaatctcccttcctgtcattgctttgtgagtttttgaccaggatgtgtctgccaggctatgcatacaggtacgctattttttttctctcgaacatgcagagagctgcgtatcgttatattaagaaaggaagaagggtccaaaaatataccaagtacaaatacaaaggaaagtgattaaacaattttagtaactaaaatgattggagtaaacaagtttagatattgtacctacttccctgtcagatatatttctatcatatattttctaaagaatgtgtgatttatacccttggggtagtggaagctacataattatgttttttttcctctctagatctaagatttctttcacttctaatatgttgatggaaagaattttcatggtatgcacgttttcagtttatttaagtactatctttctagctagtataagtattttataacctgtgaaaaaaatcctttataagtagtaattttgtggttgaagtcccagtttcacttccatactgaatgaattaaggaaacactatgttttaagttatttgaaagcacaaagcgttttaagttgtgtgtagtccacctaccttttaacttggtttcctatctgttcctttgcagtatccacagctataccaagaaggagtgcaaaatatattattcagttggcgtcggatacttggctggatgtttaatggtgttatgaatgctgtcttaatctttttcttctgcatcactgccttcgaggaccaggcattccgtcgcgacggtcaagttgcgggcttggatgctcttggtgtcgtcatgtacacttgtattgtatgggttgttaactgtcaaatggcgctctctgtgaactacttcaccataatccagcacatattcatatggggcagcattgcagtatggtacctcttcctcttggtttatggtgccataaacccgaggttctcaactacagcctacatggtcttcatcgaacagctggccccagccctctcattttggctggtgacactttttgttgtggtggcaacacttgtcccctactttagctatgccgccatccagatccgctttttcccgatgttccacaacaagattcagtggaaacggtacttggggaaggctgaagatccagaggtggcaaggcagttgtcatcaaaacaccgcacatcattgcagcacaggatggttggtatctctgctcgtcgtgacggcaaggctgtgcaaataacaaaggagacagagctacaagttcaggagtagcattgtcagtagattttgcgttttgtacagcttataggatcttgtctccagcaagatgacagctgaactgattgggacttgagatgttcctggattgctgcttctgtgatgcctgtcatgggagttgttccagttcagatgatagagcaagaccacagattgcttagataggtcgcaaggaggccaagagaatacctgctgcaaagttcaatttttagcagttcaaggattttgtgggttttttccctgcttctcttacacatgtaaatgcttgtaaccagattggtagaatttctcctttttaccccccttgcctgccctcgactgtttcaaacaataatggtaagacttctgatttgtgtgacttcatgcttttattatttggaaagaatcataaatggggtgtcttacaatcta

SEQ ID NO: 150005 - DNA, 654 bp, Zea mays
  Clone ID: MRT4577_6832C.1
cctcgaggccggccgtcgaagacacggactactcccctatagcatacgcgtctaaactctagaggacatacagagggggaatcgaggatatctatgctgatgactgatagggtgcaggataagatgctgatgctcaccagaagaaactaccacccaattgaaggtgaagaaattggtggtgatactgtctaagatcctgaataacatgaggcgaagtacaattgcacactgcaatgcgcatccactgctccccaacgctgactctcgcacattctcaacaatgtaatcaagtattgctcctatgacctccaggcaaccggacctgttgaactgccatcaccccaactctacgactaggataagctgatatcttcgacgccaacatcgtgaacgaagagaactccgccgtcttggacctcatccatggctgcaaactacccgcaacatcaaggattgtcctgaacctgtgccgctcaaatattacagagttgatcaacgttaagatgtctgacgactgctgcaagatcaacatgatgaacgacttgatcatacctttcacgtcggacttggtgatcacaatgtcctccaccaaattgaagcagatggtacacagattgatcatctatatgctggagactgctagaagataggatg

SEQ ID NO: 150006 - DNA, 286 bp, Zea mays
  Clone ID: MRT4577_68330C.1
cctgtccatctccctgcgcttgctcgctcggatctcattcatggccactgaatcgagcttctctgctgcacgcggctcccgatctctgcttactgctcggatccgccgtcgctttccgcttcctggtggtcgagctcgccctggtcgtgtcgccgtggccgactccaaattttactgaccagtttcttccccagcgccccacggccaagtatttgcgcaccctctcggctccctcggccttaatccctacctcgtcgtcgacccatgttgtgcccacgacgtactc

SEQ ID NO: 150007 - DNA, 307 bp, Zea mays
  Clone ID: MRT4577_68331C.1
ttctttttttttgtttttaacaaaacaataataaattaccaagggctggggtaaaaaaaaaacaaccaaactctattgtttactacaacaggccacccattccattccatccaatccttaaacacacgcaccggacacacatacatttgctgtctccataccgatatcgattctacagcatacctgacccactccttatgacacccttataaaggcgcacttttacacgacaccaaaatcttacccggacaaaaacctatatataccttacgaggggacaccattgaggggagatttatagcatact

SEQ ID NO: 150008 - DNA, 737 bp, Zea mays
  Clone ID: MRT4577_68332C.1
gcgttctgcacgccctggtataaaagagcgagggtcactgatgcaggacctcccgcagccgccacctcaacccaggaacagagcgaggcgacgccgcggcacctcttctccggttgtgaggaagaacaactccttccttgtgaagcagttcggcaacggcaatgccaaggtgcagttcaccaaggagccgaacaacctctacaacatccactccttcaaacactcgggtttggcgaacaagaagactgtgacgatccagccagctgcaaaggactcggctgtggtcctctctactaccaagaccaagaagcagaacgcacctgcgaagctcagccacaagtctgtgatgcgcaaggagttccgcaagatggccaaggctgtgaaaaaccaggttagtgacaactactacaggcctgatctgaccaagccagctcttgctaggctaagctcggtgtaccgcagcctccaggttgccaagtccggtgtcaagaagaagaacaggcagtcctaagcgctaagtttgtgttctgtcagggggcatgttggtgctcgtagtcccagcttatatttatctatgttccaacagttttgagacttgttagaactgagcaaaccatgttaagatgctgctgtgtgtcattccttaaaaaaattgccttggaaaaaaaaaaaaaaaaaaaaaaaaaaaaaaaaaaaaaaaaaaaaaaaaaaaaaaaaaaaaaaaacccccccacacc

SEQ ID NO: 150009 - DNA, 228 bp, Zea mays
  Clone ID: MRT4577_68333C.1
gcaagcctcgctacgtaccatttcaataaaatatatcttccgcaatggctagcatcaccatgggcgtgtctttaacggccttggggggcaagccctaaaacttgcctacttatacctccttcggctagtcccgcttgactattctcaaaactgcgtccaaggccaagccagtatcggcgtccggaagccctttgtaccgcccagaccgcttgctgtacctggtcccac

SEQ ID NO: 150010 - DNA, 385 bp, Zea mays
  Clone ID: MRT4577_68334C.1
attatttttttttttaatcacaaattgcaaggcaatttgtttaatgaatgacacacagtagctttttaacatggtttgctcagttctaacaagtctcaactgttggaacatagataaatataagctgggactacgagcaccatcatgccctctgacagaacacaaacttagcgcttaggactgcctgttctttttcttgacaccggacttgacaacctggaggctggttttttacagccttggccatcttggggaactccttgcgcatcacagacttgtggctgagcttcacaggtgcgttctgcttcttggtcttggtagtagagaggaccacagccgagtcctttgcagctggctggatcgtcacagtcttcggacgcgtggg

SEQ ID NO: 150011 - DNA, 333 bp, Zea mays
  Clone ID: MRT4577_68335C.1
ccgacttgaataatcttatttggactttccaaaacgggccaattttggggcccaaacgggcaaaaccacgttccccactaaattccatttttccgttttgaaagggggtagcgatccatcacaacaggtttttgggtcacggcccccaaaaatgcacatgccggccatgtctaatggtttagccagcagggggggaaaaagcttacccatcacaaggcaaccggccctcctaaagctccattgtacatatgagattttccctttggaaaataaggaactcctgcaactgggggtggctgaacaaatgcattattccaaacttgggtgaaccaa

SEQ ID NO: 150012 - DNA, 337 bp, Zea mays
  Clone ID: MRT4577_68336C.1
cgcagcctccaggtcgccaagtccggtgtcaagaagaagaacaggcagtcctaagcgctaagtttgtgttctgtcagggggcatgttggtgctcgtagtcccagcttatatttatctatgttccaacagttgagacttgttagaactgagcaaaccatgttaagatgctgctgtgtgtcattccttaaaaaaattgccttgcactttgtgattaaaaaaaaaaaaaaaaaaaaaaaaaaaaaaaaaaaaaaaggaaaaaaaaaaaaaaaaaaaaaaaaaaaaaaaaggtccttgcccggcgggccgttcaaaggggcaatttttgaaaatttcctta

SEQ ID NO: 150013 - DNA, 374 bp, Zea mays
  Clone ID: MRT4577_68337C.1
ccggaaaaccaggccctttttgttcccaaacaactacattactcaaaaattttaatggggccctgaaaaccaaaaccgcatttgggtctaaaaaaactttaaacattggaaaaaaaggaaccgatccaactgccaaaaaaaaaaaagtttccagcgcaaagggcaccaaaatacaagctccgttaaacggggggccttggaaacaccccaaatttcgcccttttttttgagggccaaactgttgaataaacccttgggagcgtttatcaactaatttgcaaggccctcggcaatggttttgatgttccgaaaagcactttccctgccaccaggggggaggaggaaaatggcctgttttatcctcctcagggggg

SEQ ID NO: 150014 - DNA, 435 bp, Zea mays
  Clone ID: MRT4577_68338C.1
ttcttattcctttactataattccggggggagggtgctaaattcctcttaatcaaataattggcggtgtatgatcccatgttgatccatttcacatcttcgaatcattttttaaaccctcttttacactacgtggtaaaagcatcatgtgaataatgcaaacgatgggagaagatgtatttaacccacttaaagtttctctagaaaatctttacaaaggcaccttaaataagctctttcttatacgcaatgtcatttgctacaattgcaatgacaatgcctaaaattcttgtacctcaataatgttcccttattaccacttctcacacattaaattcactatcccaaatctagacccttccatgatacattaaatgcaacatccttacaatgaattcaatgagactgtatagagcattaattataatgacctatt

SEQ ID NO: 150015 - DNA, 892 bp, Zea mays
  Clone ID: MRT4577_68339C.1
ccggccgggacctcccgcagccgccacctcaacccaggaacagagcgaggcgacgccgcggcacctcttctccgttgatattgattatttaggcgaagggaaatggcaaccgttccaggggatctgatctggcaggttgtgaggaagaacaactccttccttgtgaagcagttcggcaacggcaatgccaaggtgcagttcaccaaggagccgaacaacctctacaacatccactccttcaaacactcgggtttggcgaacaagaagactgtgacgatccagccagctgcaaaggactcggctgtggtcctctctactaccaagaccaagaagcagaacgcacctgcgaagctcagccacaagtctgtgatgcgcaaggagttccgcaagatggccaaggctgtgaaaaaccaggttagtgacaactactacaggcctgatctgaccaagccagctcttgctaggctaagctcggtgtaccgcagcctccaggttgccaagtccggtgtcaagaagaagaacaggcagtcctaagcgctaagtttgtgttctgtcagggggcatgttggtgctcgtagtcccagcttatatttatctatgttccaacagttttgagacttgttagaactgagcaaaccatgttaagatgctgctgtgtgtcattccttaaaaaaattgccttgcactttgtgattactgtctcgttgctgtgtgtcattctatgacaaatcgtttgtcgcttgattgtgctttgtttgtaaacttgcttgtcgtgactagcacttgttatcgcatttttgattggttctgtaaacaatatccgataaacaagattagtatcctgcacgagtgcatgtttaaactatttttaaaaagaaataaaaaaaaaaaa

SEQ ID NO: 150016 - DNA, 334 bp, Zea mays
  Clone ID: MRT4577_6833C.1
ctcgctcgcaagaacaacagacagagctcagagtaacaatagtcaagaaaagctccagctcgaccacacctgcgcatatagccatggccgccgccggcagctacgcagccctgtcctcctgcctcctggcgctcgccctgctggccgccaccgcgtcggcgcaggagaaggagacgcacctgcgcgtgttctggcacgacgtggtgaccgggggcccgaacgtgtccacgatagtccaggtggccgaggccccctcgtccaacgcctccgccacgggcttcggcaccgtcatcgtcatcgacgacccgctcaccgagggccccaacctgacgat

SEQ ID NO: 150017 - DNA, 268 bp, Zea mays
  Clone ID: MRT4577_68340C.1
gggggaatggcacccggggaattttacccgtgccttcttatggggatttttttttttaaaccccaccgttttcttttttaattgcaccacttgcagttcgctttaaatttgggatttttgcgagggtaaagaaaatccagtgattttccaggcccattttttcagcagcacaaaaaggtttcaaaatttggggacaacacacaaagggttacccccccccccaagcaacccaagcccaggcaaaaggtttttttttacggggaagggg

SEQ ID NO: 150018 - DNA, 447 bp, Zea mays
  Clone ID: MRT4577_68341C.1
cgagcttgccttcattaagttcatcctggagaacgcggatgcactgcaggagatggcgattgtgtgtgtcaatggtagtttctcttcgtgggacgaggctgccgccaaagtgacgaaggatctcacctgtgttaagcgggccagtcagaactgcaatgtggaggtcttggagagttctaattctagaggaagttcgtcttggagctgccaggtggcatccgatccttgtgttattgacccttttgagtactgctactgactactgagctcagtatggccatctgagtgtctcgtgatccaagctagctttctcggcaattggttatggtgttctctagtctgttcattgcagtatctgcatgcatgccactgtcttaacactagggcatgtagatagatagggagtcctctagtagcatatatcatgacaagctgtaatggctgaaa

SEQ ID NO: 150019 - DNA, 1243 bp, Zea mays
  unsure (1)..(1243): unsure at all n locations
  Clone ID: MRT4577_68342C.1
catgcagctctttgaataacagccagtcccacttatcagtgaactcaagtttccatgcatcatcaactgcccacatgtaggcttgagaatgacgattaatgacatatgacctcatatctgaaggtttaagcaagtacctagtaacaccttgtatcttcacaactatacaccacttattggtttctgatagttctagcataacttcggcacctcccgcagccgccacctcaacccaggaacagagcgaggcgacgccgcggcacctcttctccggcgaagggaaatggcaaccgttccaggggatctgatctggcaggttgtgaggaagaacaactccttccttgtgaagcagttcggcaacggcaatgccaaggtgcagttcaccaaggagccgaacaacctctacaacatccactccttcaaacactcgggtttggcgaacaagaagactgtgacgatccagccagctgcaaaggactcggctgtggtcctctctactaccaagaccaagaagcagaacgcacctgcgaagctcagccacaagtctgtgatgcgcaaggagttccgcaagatggccaaggctgtgaaaaaccaggttagtgacaactactacaggcctgatctgaccaagccagctcttgctaggctaagctcggtgtaccgcagcctccaggttgccaagtccggtgtcaagaagaagaacaggcagtcctaagcgctaagtttgtgttctgtcagggggcatgttggtgctcgtagtcccagcttatatttatctatgttccaacagttttgagacttgttagaactgagcaaaccatgttaagatgctgctgtgtgtcattccttaaaaaaattgccttgcactttgtgattactgtctcgttgctgtgtgtcattctatgacaaatcgtttgtcgcttgattgtgctttgtttgtaaacttgcttgtcgtgactagcacttgttatcgcatttttgattggttctgtaaacaatatccgataaacaagattagtatcctgcacgagtgcatgtttaaactatttttaacantanaaaaaaaaaaaaaaaaaaaaaaaaaaaaaaaaaaaaaaaaaaaaaaaaaaaaaaaaaaaaaaaaaaaaanaaaaaaaaaaaaaaaaaaaaaaaaaaaggggaaaaaaaaaaaaaaaaaaataaaaatgccctccccgggggcgtgtttaaagggggcaattttggaaatttacctaaaccgggg

SEQ ID NO: 150020 - DNA, 277 bp, Zea mays
  unsure (1)..(277): unsure at all n locations
  Clone ID: MRT4577_68343C.1
acccacgcgaccggggacccggggccggagtcacaggtataaaccagggccaacgagaacgcgcgaaaccacggggagagcccgacgcagacaaaaaggcccgcacaggagaacaggaacaacaggcgcgacaaggacaccaacaaggtgcaacaanggggaggatagaaaaagcgtgcacaataaagcacgaggaagcaatgacaggcgaccgttgcgcccgaccggaggaaaaagaccatgcaggccaaggaaaaaaggaacgaaaacaaggaag

SEQ ID NO: 150021 - DNA, 647 bp, Zea mays
  Clone ID: MRT4577_68344C.1
ccggccgggcagcccgccgcacgctgagcacaataccctcttgttgttgacactctacacgactcctccttagattcctcgacaatcagatccccctatgcgcgacagccagatatctctcccggcgagcccgccacgctggctgagctatcacaccccaggctataggggagcctggttcgcagatgaccttcaaactttccattttgctgtgcgtggatgctatgtcgatcacccaaggtgtgccctgtattaaggcactaatcaacacctgctccaccatattgctcctgtctgggttggagctttagacatgatctgcgagtccggcgtcgcagaattgttaaagcacgtgtggaaaaaacgtatcttcgagacgttgtttggcacgtaatgcacattggcgacctgaaccatgactacattgacatgcgcattgactgggatactataaacaggatgcttgttgacggacaaccttactagattgacgcggcatgaatgaccacaaggcgttcaaatggggcaaagacggcgcaaacgtgcacatgtgttcctacataatccgagtcaaagtatccgaccacaacgccggaaagatacgacccgtcaatgcaacacgcgactactaagcatactttgagcgc

SEQ ID NO: 150022 - DNA, 578 bp, Zea mays
  Clone ID: MRT4577_68345C.1
ggccgcttttttttttttttttttatttgttttttttttttttttttttttttttttattttttgtttttttaatttaaattcctccttgataacattataattgttcaatcgcttaggtttcaattcaagagctggaggggaacaaaccaaaatgtctcgggcattaaacctgaacaaaccatggggaggggctgaatggacattgccaacgcactcttgggagactaccaaggcggtaaaccgctcattgcggaggaaaaaaccgccaggagtgggtggcaccgaccccggaccggccatgcttgaccggcttaggggggagggggaactcaccagggtggtggccgaccatttcagggttgagctcaacctgaccgaaacactggccgcagtaaaccccagcacagctcccaagcatcgcagggacaatgagcatgtcacggagatgtgaccagactggctatgccttctcaccagcgggagcatcctttttagcgttgcgcagtttcttgttgagcgccatgggctccctcttcagacccgtctggaaccttactctgacacgcgcggcgaaga

SEQ ID NO: 150023 - DNA, 401 bp, Zea mays
  Clone ID: MRT4577_68346C.1
attattcttacactggctctttcgcctatacgcagatgtatagttagtgcattggatgtaaggccgactctaacaggttacccaaaatttacccataagcactgttttgcactgtagactgcactggtcgtagagtgaagattgaatatgggtatgggtaagccgttagagatagtctaaagtgcttgatttgattgttgaccgatttattgtctataaaatagctccttgaggtatggtgtgatttatgtgtttaattattaattcttcaaaccagagcactcaaatgcttttataatggtggttataattttattctgatttcttttaaacctggtatgtttacaaatttcaagaatttgtaaatgtgcagaggtctataattctgtttgatataactg

SEQ ID NO: 150024 - DNA, 467 bp, Zea mays
  Clone ID: MRT4577_68347C.1
aaaacgggaccgatgcggcaactttcatctttacaatagatgccggaacacacctctgaatgatgcacgactgggtacactctccctgcggacacacacccttactaataacacaagcggatacctgcttgatcatggatgcagggcgggcaacaacaacgttcctgcctcggtcatctgataacctagcaccgaagtggcaggcggcgaatactggagccaacctttggcgcacacaagcgcgctgcacagtttgctgacgaaaagagcttttgtagtcatcacccatggggcccccaggtgctgcatagaatatggaacggtcactggtaaccatatactcgggatggccaagatatccttggccatgtctgacagggagggaaacttgagagtgtgaacctcccacaaatcaaggataccaaaccttaggagactgggactgagggattcctccaagcactggt

SEQ ID NO: 150025 - DNA, 1620 bp, Zea mays
  Clone ID: MRT4577_68348C.1
ccggccggtaactcatctatagaatattttgtaagtcactctggaatggctgacttcaaacagcctaaaaatgctatttatttgtgaccggagggagtagttaagacttaagagccgatatccagctcatcaattgttgtattaagtaagaaaatgatgtgaatggaattgttcttttggtaaatgaagtccaaaagtagagtacaaggcccaacatttttttgggccgacgtaaaatgacttacatattttctaggttcggcaaggtttgttttaatcctgtccaaagtagcatagcatctttttcagctggctatatttgctaaggaattggttgaaaggttaatatctcgactgaaagaagcacatatctgagtggtactacccttaagtatggtagctcttagttcagccaaaattatgcgataaaaaatacctgtataagctggataaagcagaagtaagaaaagtcgactccttttgatatgctatcattttcatgtcgagtttgacactacttctcgtgcaggcaagacagatccttatgttatcatgattattgatgatcaagtaataaagagcaagaagaacagtcaaacaactgtgattggactaccgggagaaccaatttggaatcaagatttccatatgcttgtcgcaaatcctcgcaaacagaagttgaccattcaagtgaaggattcaattggtctaactgacatcactattggcaccggagaggtggagctagggtcacttaaagatacagtacctacggacaaaatcgtgactctatatggaggatggggtttgtttgggaagcgagaggctggggaagttctacttcggctgacatacaaggcatatgtcgaggatgaagaggaagaagacgaggcggtgagaagcgagattggtgcgggttacgcctcagacgaggatgtgctggactacgttagtggcatgagcaaggggactgatttcgtgggtaaagaaagggaaactttcatggatcttctcgccgcgctgctggtgagcgaggagttccaaggcatagtgtcatccgaaacaggaagctcgtcaagagaaggtgagcaggcaggcagtggaccagaaggcacagacagcgtcactgtccctactagcgctgcggcggctgatacggaggcatccaccgtgccaaacagctccacagatacggctctggtgtggctggcggccataacgagtgtgatggtgctggtgtcctccaacctcggtggctcaggctacttcaacccgtgaccgtgagtgaaggcaacactggctgtaacttgtaagggtgacaacaagagagttctcttcttgttcttttttttttcttttcttttggaaggctagtgaagagaggcaactgtgtatattcatttttgctgtcacctccttccgatttgctgaacatggaccaggatttctcctgctcgcgtcgcggcaggggtcattgccatcggttactgtttccaaggcaaatgcgattgtagttgtatcgttaaaaaatataccaagaaaatttaaggctgccttgttaggcatcagcttatgattatgacgagctgtttaaataaaaaaaaaaaaaaaaaagcggcc

SEQ ID NO: 150026 - DNA, 270 bp, Zea mays
  Clone ID: MRT4577_68349C.1
aaaaaaaatattttataataaaaaaaaaaaaaaaaaaaaaaaaaaaaaaaaaaaaaaaaaaaagggggaaaaaaaaggtaaagtaaggggtgccggcctgctctttaaatccaaactaacttactcccgcatgcaccccaaaatatattttattggggggcctaaataaaatgtattggctgggctttttcttcctctttccctggttaaaccccttcgttccccaacttattttgtttgctggacatacacctttcatcccctggctta

SEQ ID NO: 150027 - DNA, 680 bp, Zea mays
  Clone ID: MRT4577_6834C.1
atattactatccttagaagatctcattccgctgtgttcactactcatctatatccgcgaatctctccttctgtcattatcctaccagcgtgctggctgctctcgccctatttcatacaagacatatcaggaagggattccgaaacaaatacttgaacacgtgatatattgaccttctgcacatcgattatgtctactgccccttgcacgtgatactaccacatgacccaatgacccacaccttacatacataagggtttgaagtcgtggatttcactacatcgtactcgaatactggagtcagtatactgacgaccactcgacgagtgaataccaagactgtgaactctactgtatatctgaccatgcccagaatcgtctctcgtaccgtctggtacgaccaccacttgagcaagattgataattttttgacttattgaaacgacgactccgcctcggggatacaacctgccctgtttctgaaccctcaagccatctcttactcgcagctggagtcgcgatgactgctgacttggacaccagctcttgcgacataattacagatgttaacagcaagacactatctggactgagatccctccttcccggagactggtctgttatctacccatgtattgcacgactggtaatagcatttgatcctgccacacttttattcac

SEQ ID NO: 150028 - DNA, 420 bp, Zea mays
  Clone ID: MRT4577_68350C.1
ggtgaaactgctgaagatgttgtacgactactacgcttcgggcacatgacatcggttgagtcatggatagcagggaggcatcatccaaaattctgtcagctcgttgaccactatttatatgttccccttttagattgagactatgaatgatcgtatgctaatgatgtctggtgcacagtacattgcgcttgttaaccactatgtacatggcttatttagtgatagtgtaatcactcaactgtcggttgaccgttcaagttcataacattgaggttctttctttgctgcattggtctctaaagagccacaacatctgggcatctggctctatataaggcggcgttccttgtagcttcacactcaccactagcctcggcttatataacctttctactgttagcacaggcttattgcatgtgc

SEQ ID NO: 150029 - DNA, 259 bp, Zea mays
  Clone ID: MRT4577_68351C.1
cagacaagggagtggagagtgttttcgacatcatggagatggaggatgaagaacggaacgcgttgcttcagctgactgacagccagattgcagatgtggctcgcttttgtaaccgctaccctaatatcgaactatcttatgaggtggtagataaggacagcatccgcagtggcgggccagttgtggtgctggtgcagctggagcgagaggaggaactcacaggccctgtcattgcgcctctcttcccgcagaaacgtga

SEQ ID NO: 150030 - DNA, 274 bp, Zea mays
  Clone ID: MRT4577_68352C.1
cgcaagtgacagccatgagctgggagctgctgctctggctgctggcgctgtgcgagtgatcctgcccctggtgcagttcctacgcttcctgcgggcagatgccgacctaaccttgttgtgggccgagtggcaagggcgacgcccagaatgggagctgaccgacatggtggtgtggattactggagcatcaagcggcattggtgaggagctggctttccagttatctaaactgggggtctgtctggtgctgtcagcccgataggggcaggagctg

SEQ ID NO: 150031 - DNA, 323 bp, Zea mays
  Clone ID: MRT4577_68353C.1
gtgttccaataatgcttattttttcttttttgtggcggaaaaccagaagcccacgggggggccccctgaaaacatcttttcgggggggccctaagaaaggttcataggcaacaccttttggttaaacaaaggtttgcacggggtaggccggaattatttacggggttaaaaaaaaaaaacagcccaaaaacaaacctttggttttcaggggggccagaaaaaaaaaacccctttttggttagaaggttgaaaaagggaaaggctggggtggagaatccaacaaaaaggggctagggggggggaaatttgggttttggggaaag

SEQ ID NO: 150032 - DNA, 2154 bp, Zea mays
  Clone ID: MRT4577_68354C.1
ccctgagcagtcactacggctcgcatcactcactcactggtgcactgccatggccatgaacgtgattgcactacttggcctcttggcacttgcatcagtggtgaggacggcttccggcgctggcgggcatgactacgcctcggcattgaagaagaccatcctctacttcgaggcgcagcggtccggcgtgctcccgcccaaccagaggatcacctggagagagaactccggcctcttcgatggaaaggccaacggagtggacctcgtcggagggtactacgacgcaggcgacaacgtgaagttcgggctgcccatggcgttcacggtgaccatgatgtcgtggggcatcctggagtacggcaggcagatggcggcggccggcgagctgcgcaacgccatggacgccgtcaagtggggcaccgactacttcatcaaggcgcacccggagcccgaggtgctgtacggcgaggtgggcgacggcgacacggaccacggctgctggcagcggcccgaggacatgtccacgagccgccaggcgttccgcattgacccacagaaccccgggtccgacctcgctggagagaccgccgcggccatggccgccgcgtcgctcgtgttccgcagcacgtatccgggctacgccaacctgctccttcagcatgccaaggagctgttccagttcgccgacaagtaccgcggcaagtacgacgccagcatcaccgtcgctcgcaactactacggatccttcagcggatacggggacgagcttctgtgggcggcggcatggctgtacgaggcgacagatgaagggtgctacctcgagtacatggcccggaatggcgacgctctcggcggcacgggctggtccatcaaccagttcggctgggacgtcaagtaccccggcgtgcaggtcctggcagccaagttcctcctgcagggccgtgccggcgcgcacgccgcgacgctgcagcggtaccggcagaacgccgagttcttcgtgtgctcgtgcgtgggcaagggcgccgtgaacgtgccgcggacgccgggcggcatgatgtaccaccagcgctggaacaacctccagttcgtgaccagcgcctcgttcctgctgacggtgtacgcggactacgccacggcgctgcccggctccggcggcggcgccttgcggtgccccgcgggcgccgcgcggcccttcgagatcctcgccttcgtcaggtcccaggtgaactacatcctgggcgacaacccgcggggcaccagctacatggtcggctacggcgccagcttcccgcggcaggtgcaccaccgcggcgcctccatcgtgtcggtgaggacggacccgtccttcgtcagctgccaggaggggtactccgcctggtacccgcggcaggccggcaaccccaacgtcctggagggcgccatcgtcggcgggcccgacgagtacgacgacttcgccgacgagcggaacaactacgagcagacggaggccgccacctacaacagcgcgccgctgctcggcgtcctcgcccgcctcgccggcgcctgcggcaccgggctcgaggagtaccagctgcatccgccggaggaggccaccgcgaaccagacgtcgtcgtcgcggttgaggcagccgtcgacgtccccgatcgagatcgagcagaacgtgacgaggacgtgggcgatgcggcgcgcgacgtactaccgctactcggtgacgctgacaaacaggtcgaggaagaccgtccgggggctccacctcggcgtctcggagctccgtggccggctctggggcctcgacaaggcgcgctacgggtacgtcccgcccaagtggctgccggcgttgcgcacaggtaagagcctcaggttcgtgtacgtccagcgcgggacgccggccaacgtccgggtcatcggctacaagctactctgacgtcaccaagtgactgcggcagtgtgctgctactgctagtagcaagctagtttggccggcgaggggctttgagagatggagtaagtgttcgtcctctttgcccctgcgagttatcgattgttacatttggaatgcgaaccaagaggcccgggggagtgaagtctaatgtcaaccgactgtttcttctaaacattctgtccgtgcgagatcaattggaagctgcaaattgc

SEQ ID NO: 150033 - DNA, 342 bp, Zea mays
  Clone ID: MRT4577_68355C.1
cccacgcgttcgtctagttggagcacgcctgtcagtacccgcaagatggcgaactatgcctgagcgcggctaacccagaggaaactgtgctaccagctctacgcgctactgacgtgcagatcgttcgtctgacttgggtataatctccaaagactaatctaaccatatagtagctggctccctacaaaaactccctgatgatacctgtagcccacacgagtcctattgcgtaatgcccatgattaaaaagctcagaggcgcaacgccatcgacctattcttaaactttaaatcacatggactgcactgctgctatcttgaacactgcctcagtatcctaagc

SEQ ID NO: 150034 - DNA, 416 bp, Zea mays
  Clone ID: MRT4577_68356C.1
accggggtatttaacatgttatggaatggatgactttagttcgttgttcttacagtatcatacgggcaaactgaacggtcagcgacaaaccaaaaaaatgttgagcacctaacgaagctacattgaccgtgaacatacaaaggaacacattttgcaaacctaaggaacataccctacaaagcggcggacgcatactaggagcaggcctgctcctacacgtaccaccttctcagcaaaaacatgagctcaggagacacccacaccccccaaaaaagagcctagcaagcagaccatagaagcgagcgccattggcggagcccaaccaaacacgcgtttgaaggccaacccgtagaacaaacaaaaagatgtcgctgcgaagtccggaacaccaactgttaagaaaaagaaccccccct

SEQ ID NO: 150035 - DNA, 226 bp, Zea mays
  Clone ID: MRT4577_68357C.1
gccggccgggcccggatttcgatcatggctcagccagccttactgttgtgtcgaatgttggaatgtttttagattactgtactgtttaagctcatgttgctatccaaatattcatcttgaggaataccaatctgtctctgctctaatattacaattgttaaagttgcgcgtgttgtcatgaattcagtcctattgacacgaaaaaaaaaaaaaaaaaaggccccta

SEQ ID NO: 150036 - DNA, 834 bp, Zea mays
  Clone ID: MRT4577_68358C.1
ccggccgggaaaaaactcccgccgcccccccttcctctccgtcgctcgcctcgcgcctacgccaccacctctgccatggtgcatctgtcgcctcttctctccacgcacctgcggcctaaccgtctgttgctgaccgtttctgtggttctctcaggccccgaagaaggataaggccccgccgccgtcgtccaagccggccaagtccggaggcgggaagcagaagaagaagaagtggagcaagggtaagcaaaaggagaaggtcaacaacgctgtgctcttcgaccaggccacctatgacaagttgctctccgaggtgcccaagtacaagcagatcaccccatccgtcctctccgagcgtctcagggtaatgtacatcgccttctcagcttcacatggagggaactatgtatcggttcctgacgattgagcctcgatgtggtagttttggcctgtatgtttagcatctggtgaatgaactgggcatgatttcccaaatgatatgatactacctccgttctcaaatatttgtcgccagttagtttattttgaactaaaccgtaacaaataaaaaagaacggagagtagtatagtaaatgggtagtgatatatactctagtctcttgtagaattagaccgtcagtttgtgcctcttatgttttgcatggattgggttttttatgttttacatagatttggggtatatttgcttcatacaggtccctagtctgcacattttgcatgcgattaattttctgtgtgcgtgaaaacaatccattgtgcttattttgacgagggctggagaacttgtttagctggtgggataccattatagga

SEQ ID NO: 150037 - DNA, 816 bp, Zea mays
  Clone ID: MRT4577_68359C.1
gcgttgtgacccttctcctttgctttacccttgctccacttctctttcttctgcttcccgcctccggacttggccggcttggacgacggcggcggggccttatccttcttcggggccatggcagaggtggtggcgtaggcgcgaggcgagcgacggagaggaaggggcggcggcaaggggtgttttttttttttttttttttgtcaaaggaaagttttttccatggtccatgttatcaaaaatatttacaccaaatgagggcctcaaaggcagaactaattgatcctttacagcaccgtgtagtatagccaatagaaatcaacagacaaaaggaaagcgagaaacacaccgtggatcactggtcaacctacagtatctactactagctgcctcaagcgcaggctagtgggtgggcggccatggcgggcagtaggctgaaacccctgagaaaaatggagccaataatcagactcgggtggtaacgtggagggcgtgcggcggcggcggcgggggcagaggcggcggcacgaaggggaggctccgcagcatgaggaagcgcatccggcgcgggaacggcgcgtcgttgagcagctgctccagcacccgcgccaccagcgcggtgtactcctcgagcagctccgccactatcgccacaagaatcatcgctgctagctgcaaggaaggaaatgaaactgcttccacttccgctgggattggattggattggattggtcttgtatcgcggactgggaattttggatgtgcccggccggcccggcccggtcgaggctttaaaagggggtcgggattgggagg

SEQ ID NO: 150038 - DNA, 479 bp, Zea mays
  Clone ID: MRT4577_6835C.1
ggatgacaatattcaaaagagaccccacctgtaagaatggttacaagtagagagccaaatagattatggcccaaggaaatgagcaagatatggccataacataaacttgatgaaaggagtacgatgggagactgttaattcagccccaaacatatttctattcccattgtagagatcacaaggtcaaggatttgtatctattagatacggagggaaaacaattagaagattaagttggtatgcctccgagagatatgaggaaaccaaaggcatcaaacttaaaaaaaatgatcggacatgtcttttctaggttaggttgataaagtaacatggcgatccttaaaaacagacaaactagataaggtacatcagcttgcaccaataaacaagggaatgggtttagaaggaaacatgactcgagattcttggttaagcctaggcacaatttatgtgcaacaaagaaattatgtacgcattta

SEQ ID NO: 150039 - DNA, 383 bp, Zea mays
  unsure (1)..(383): unsure at all n locations
  Clone ID: MRT4577_68360C.1
agctcggaatacgactcgagaacctatctttctcacanaagcgcaaccaagacccgttacacaaaacctttttacgggcattactcaacccttcaatcaaacacaactaaccataaaagctacccatcaaactaacaaacagttatcaccataacaaaccgacccagaaaattgatatatactaaatcaatactcaaagatctacccacagaaggttccaaacaaacccacactcaaacttaaccactttaacaatccactaataatccgaataaaacaactcccacaattaactctaaatagacaactgctaacaccaaatatcaagtacataaaaggcaatccatgcctaacaataatacacaatctaacatacacctcac

SEQ ID NO: 150040 - DNA, 792 bp, Zea mays
  Clone ID: MRT4577_68361C.1
cattgggaccctcgaggccggccgggagacggtggagagcaacaccagctcaaaaccctagcgtccaactcatatacctgctgctcgccccgacgcgcatcaactcccgccgccgccccttcctctccgtcgctcgcctcgcgcctacgccaccacctctgccatggccccgaagaaggataaggccccgccgccgtcgtccaagccggccaagtccggaggcgggaagcagaagaagaagaagtggagcaagggtaagcaaaaggagaaggtcaacaacgctgtgctcttcgaccaggccacctatgacaagttgctctccgaggtgcccaagtacaagcagatcaccccatccgtcctctccgagcgtctcaggattaatggatcattggcacggagggcaatcaaggatctgatggcaaggggattcataaggatgatctctgttcattccagccagcagatatacaccagggcaaccaacacatgagggctgttttgcatcttgtcggcgggtctctagacggcttaatgttgctattatatcatgtttatttcaatcatggctcagtcagccttactgttgtgtcggatgttggaatatttttagattactgtactgtttaagctcatgttgctatccaaatatccatcttgaggaataccaatctgtctctgctctaatattacaacaattgttaaagttgcgcgtgttgtcatgaattcagtcctattgacatgcgctcaacgaaaacaagaaaaagtttaaaaaaaaaaaaaaaacccgcggcc

SEQ ID NO: 150041 - DNA, 1712 bp, Zea mays
  Clone ID: MRT4577_68362C.1
cagtgaattccgttgctgtcgaggtaagacctttacagcagctaaacttacaagatatctccgatggttaggtcatgaaacaaaacacttcaatgttggaaagtaccgccggctcaagcatggaactaatcagactgctgatttctttcgtggagataacagggagggtgtggaggcacgtaacgaggtggctgcattagcaatggaagatatgctatcttggatgcaggagggtggtcaggttggtattttcgatgccacaaacagcacaagaatacggaggaacatgctgatgaaaatggctgaaggaaaatgtaagatcatctttttggaaacattatgtaatgaccaagatgttcttgagagaaatatacgattgaaagttcaacaaagtcctgattatgcagagcaaacagattttgaagctggtgtacaagatttcaaagagcgattgacctattatgaaaaggtctatgaaccggtggaagaaggttcttacataaaaatgattgacatggttagtgggaaggggggccaactaaagattaatgacataagtggttacttgcctggacggatcgttttcttcttggttaactgtcatctgacacctcgtcctatcctgctaacaagacatggtgaaagtatggataatgtcagaggaagaatcggtggagactcttctttgagtgaggccggtgagctttattcaaggaagcttgcgagctttgtggagaagcgactgaaatccgagcggactgcctctatatggactagcacactccagagaacaatattaacagcacatccgatcattggttttccaaagatacaatggcgtgctcttgatgagatcaatgctggggtctgtgatgggatgacatacgatgaaataaagaaaagtaaacctgaagaatatgaatcacgaagaaaagacaagctgaggtatcgttatccgagaggagaatcctatcttgacgtcattcaaagactagaacctgtgataattgaacttgaacgacagcgtgctccagttgtagtcatagctcaccaggctgtgttgagagcactttatgcatactttgcggacaaaccgcttgaggaagtcccaaatattgagatacctctacatacaataattgagatacaaatgggtgttgctggtgttcaagagaaacggtacaaactcatggatgcaatccatcccacagcggggttgtaagaaataataaatggagctcgccttctaaaagcaatggtagcacaaataaattttgtgatgatatacgtatcacaacattaatcaattagaagctatagttcgaggtggaatgtcacaccactaggtttagctcatagatgatttgccatttgacttacaagttttggctggttgtgtagtgtgtactcttaattcatgagttctgaagcatgtttaattcagatcgagttctgagcaagtttattcaggccaaagctcgcgccaaagacagttttcacagtcagtttttccagtaacgaagtccctttcgaaaatatttatattttgctgtgcgcctgcctcgcccttggtggtctttgtgatcttggtgatatttgttagagtattgttagggtttcggagatagtccctgtgtatttacttgtatacccttagtgtaatgaccttgatccatatatacacatgggtgtattttagtttgtggatgcac

SEQ ID NO: 150042 - DNA, 855 bp, Zea mays
  Clone ID: MRT4577_68363C.1
agcctgctgcatcaccgaatagcatcgcacccggccggccgcgtcagacggtggagagcaacaccagctcaaaaccctagcctccaactcatatacctgctgctcgccccgacgcgcatcaactcccgccgccgccccttcctctacgtcgctcgcctcgcgcctgcgccaccacctctgccatggccccgaagaaggataaggccccgccgccgtcgtccaagccggccaagtccggaggcgggaagcagaagaagaagaagtggagcaagggtaagcaaaaggagaaggtcaacaacgctgtgctcttcgaccaggccacctatgacaagttgctctccgaggtgcccaagtacaagcagatcaccccatccgtcctctccgagcgtctcaggattaatggatcattggcacggagggcaatcaaggatctgatggcaaggggactcataaggatgatctctgttcattccagccagcagatatacaccagggcaaccaacacatgagggctgttttgcatcttgtcggcgggtctctagacggcttaatgttgctattatttcatgtttatttcgatcatggctcagccagccttactgttgtgtcgaatgttggaatgtttttagattactgtactgtttaagctcatgttgctatccaaatattcatcttgaggaataccaatctgtctctgctctaatattacaaataaaaaagttgcgcgtgttgtcatgaattcagtccaattgacatgcgcccaacaaccaaaaaaaaaacgaccctatcttagttctctttgcaagccagaaggcccccactcaaaagcttgtgaaccaggtgaaatgggcaaga

SEQ ID NO: 150043 - DNA, 1617 bp, Zea mays
  Clone ID: MRT4577_68364C.1
atgggcagaggaagttgcgcgcagaggcgtcgtactcgtgaggtgggtggccacacggccgtggtccgtggattcggtggtatgggagagaagcgaagattttttagcgtcatcgaggggaggaaatcacacctgataaggttgggctaccagctcgagtaccgccggctcaagcatggaactaatcagcttgcacttccagtttctttatggtcctatataaccctatccaataagatttttctaatagcatcttgttattttgagcagactgctgatttctttcgtggagataacagggagggtgtggaggcacgtaacgaggtggctgcattagcaatggaagatatgctatcttggatgcaggagggtggtcaggttggtattttcgatgccacaaacagcacaagaatacggaggaacatgctgatgaaaatggctgaaggaaaatgtaagccgccagaaccacgtatgtgcatggtcggtgaggtgatacgatgccagctaggccttgtcggactccagagtgcgctgactccagaaaaactgctcgcagccgttgaaccaccccagagggtcaccgctaccgtcgtagatggggagggagaggggtgctgcagtcgtcgacatggtagcagcggcgagggtcggcgccaggggatgatacagggtgttacaactacaggtggatgcagggggtggagtgttgtggtgaagaaggcctttgagctgcaacggctccaggagagctgtgcaccatttaatatagaggagaaaaagatcatctttttggaaacattatgtaatgaccaagatgttcttgagagaaatatacgattgaaagttcaacaaagtcctgattatgcagagcaaacagattttgaagctggtgtacaagatttcaaagagcgattggcctattatgaaaaggtctatgaaccggtggaagaaggttcttacataaaaatgattgacatggttagtgggaaggggggccaactaaagattaatgacataagtggttacttgcctggacggatcgttttcttcttggttaactgtcatctgacacctcgtcctatcctgctaacaagacatggtgaaagtatggataatgtcagaggaagaatcggtggagactcttctttgagtgaggccggtgagctttattcaaggaagcttgcgagctttgtggagaagcgactgaaatccgagcggactgcctctatatggactagcacactccagagaacaatattaacagcacatccgatcattggttttccaaagatacaatggcgtgctcttgatgagatcaatgctggggtctgtgatgggatgacatacgatgaaataaagaaaagtaaacctgaagaatatgaatcacgaagaaaagacaagctgaggtatcgttatccgagaggagaatcctatcttgacgtcattcaaagactagaacctgtgataattgaacttgaacgacagcgtgctccagttgtagtcatagctcaccagatacctctacatacaataattgagatacaaatgggtgttgctggtgttcaagagaaacggtacaaactcatggatgcaatccatcccacagcggggttgtaa

SEQ ID NO: 150044 - DNA, 253 bp, Zea mays
  Clone ID: MRT4577_68365C.1
tactcttaccacatatatccaacattaaccaacaactaacatctaattccccactatactctaatacaattccaatctcactacacaagtcctcttatcaataccctttaaaatcatcctaataatcaatctcaaaaatcttaatctttatacccttttcattatatatacaacctcattctctctacaacacacttcttccaaactacacttatattccacatacttacttaacacatcacccacatttcta

SEQ ID NO: 150045 - DNA, 546 bp, Zea mays
  unsure (1)..(546): unsure at all n locations
  Clone ID: MRT4577_68366C.1
gacacaggaacccttgcagccccaaccccccaggggacgagggcgcggcgcgcaaaacccgcccgcgcgggggggcaccaagcgcggccanaacgggaccgggacgacgaccgcgaccccgagcgacaaccggccctgcagcagccgccgcccccagggacaagcccgnngccgagcgggacccgaccggggggggcccccacccggggaagccggcggcaccggcgacgacgggcgaccaggccgccgccgcaccggccacgcccacgncgaccaggacggcggccgcagnnccgacggccaggacggacnggccggcgcccgggacggcgagcnccgccgncgggacccccacaccggccccaccacccgccggnccgggggccacgacaaggacggcaccgacgccgcgcgccccggggacaaccgccagagcggccccgcgggccgcggcaagaccgccaagcccgggaacacncngggcgagngcgagcgcacccancggcggcgaccccggccgggggcgagggccacgaccgggagggg

SEQ ID NO: 150046 - DNA, 296 bp, Zea mays
  Clone ID: MRT4577_68367C.1
ggggggagtaaatttttacccgggagttcattctcaacgggggcttaacgggaggcacccgggaaacagaagaacactgcgtgccccacaaaaaacacaaaaaaaaaaactctgcgaacgggaaacacacaaaccgcgcacagctagcgcccgcttagatacaggggggcaacgacgaggggagacaaaaaccaccccaagaaagggaagcgcaccggcaacaaaaaacacccgggggggggggagaacagacttaacggctgcgaacccacaaacaaaaggaaaggccccccccg

SEQ ID NO: 150047 - DNA, 744 bp, Zea mays
  unsure (1)..(744): unsure at all n locations
  Clone ID: MRT4577_68368C.1
ccacgcgtccgcagatttgtgccagaagcaagaggctgttaaagaagtgcttggatctttagcaaaggttcgtgttttctgttcacctgtcagcacctgttttctttactgtgttggatcaccacacgttcatacctgactccatgcttattggaagtggatttgtatgaaagaagagggtttagcatccattgatctttcacccatccatgctttcatttttccagaaatgttatactattatagttttggcttgattcactgttacatctggtctcctagaagtgttttttcttctaattttagcaacaatataaatagggataaatatggcaataggaaaatattttctagtgtttctgaaagaaaataaacagtcacctagcacagcataaaacatagtcacccagatagtttttattagttacaatttcacaaaagccattagcgagtgtgtttcataagcaggggcggtatatatttatctttttaagcaaaaagtactaaggcactagatgttcccacatttgaaataaggtaactaggattantgttgtctcatatacgttgatatcctcggggaagttctctcttccttttttccacgtgtgtgctgaaacgcaagctgaaagttgcgagcgagtcaagcaagacagatcctgtgcaccgttaagacaacaatttgactgcacccgacgcacttgcatgcacttgntatttttccaggctgcgaagcagcgcgac

SEQ ID NO: 150048 - DNA, 1313 bp, Zea mays
  unsure (1)..(1313): unsure at all n locations
  Clone ID: MRT4577_68369C.1
cattgggtacctcgaggccggccgggaggaaggaacaacgcagacaaaccgaactcgcacctcgcacctcgcatcgtcttgtcgacacacctccagctccgaaaccctactccgccggcgatgtcgtcatccggcgccccggccccggcggcggcaatggccgttgacgacgcggaggacgaccagctcgcctccatgtccacggaggatatcatccgggcctcccgccttcttgacaacgagatccgtgtcctcaaggacgagttgcagcggacgaacctggagttggagtcgttcaaggagaagattaaggaaaaccaagagaaaattaagctcaacaagcagctgccctacctcgttggcaacatcgttgagatcttggaaatgaaccctgaggatgaagctgaggaggatggtgctaacattgatttagactcacaaaggaaaggaaaatgtgttgttctgaagacctccacaagacaaattcaagagcttgtagaggcaattgtactgcccatgacacataaagaccggttccagaagttgggtattcgtcctccaaaaggggttcttttgtacggaccaccaggaactggcaagacactcatggctcgtgcatgtgctgcacagacgaatgcaacgtttcttaaattagctggtccacaacttgtgcagatgtttattggtgatggagcaaagcttgtccgggatgcattccagcttgccaaagagaaagctccttgtattatatttattgatgagatagatgccattggcaccaacgttttgatagtgaagttacggnnggatagagaagttcagcggacaatggttggaattattgaatcaactggatggattcagcagcgatgagagaataaaggtcatagctgcaactaaccgtgctgacatccttgaccctgctctgatgcgatctggacggttggaccgaaagattgagttccctcacccatctgaagaagcaagagctagaatcttgcaaatccattcaagaaaaatgaatgtaaatcccgatgtcaactttgaagaattggctcgctcaactgatgacttcaacggagcacagctaaaggcagtttgtgtagaagctggtatgcttgccctacggcgggatgctacagaggtaactcacgaggatttcaacgaagggatcgtacaggtccaggcgaagaaaaagtcaagcttgaactactatgcttaagctgtttgtcaaaacatatggaccataaggtgtttgtaacactactgtatgaataatcgaagctatgtttttaatgcaagatttttacagc

SEQ ID NO: 150049 - DNA, 1375 bp, Zea mays
  Clone ID: MRT4577_6836C.1
cactcgccagtcgccaccgctcgccgcccacgcgcatggcgtcctcgctcgtctcgcgcccgcacctcacccagcgcccggtccgcgccgccacgctcgcctccgctacccgcccccgcctcgcggccggggcccttagcgggcgctgccaggcgcaggcggcgggggacttggacgacgctcactacatgcggcggtgcgtggagctggcgcgcaaggcggccggccacaccagccccaaccctatggtgggctgcgtcatcgtccgcgacggccgcgtcgtcggagaaggattccaccccaaggccggccaacctcatgccgaggtatttgcactaagagatgcaggtaatctagctgaaaatgcgacggcctatgttagcttggagccctgcaaccactacgggagaacccctccgtgtactgaagcgctcataggtgcaaaagtgaaggaagttgtcgtggggatgactgacccaaatcctatcgtggcatccaaagggattgagaagctccaaggtgctgggataagtgtgagggtgggtgtggaggaagcgttatgccgcaaactaaacgaggcttatatccatcgtatgctcaccgggaaggcttttgcaactctgagagctacactctcaatgaatggaatcatcacgaaccagattgggaagggagctgatcagtcaggtgggtactactcgcagctgatgaaagaatacgacggagtcataatttcaagcgacctggccaagatgtcggccttacctttgtcgcgtgaagccggcacaaaccaacctctctgtatcatcatagcacagggtgaaagctcccggctacacatcccatctctcagccaagagcatgcatccagggccatagtccttgccgatagtccggtcactgtggagccagcaggagtggaagttgcagtttttcgtcagatagacctggagtctattctccagcttcttgcgcagcgagggctctgcagcgtgctggtggacttcagagaggccggcgaaagcttcgcgtcgcttctgaacgacttccaggaggacaagctggtgcagaaggtcgtcgttgaggtcctgcccttttggctcgcgagcgacgggctcagcaacctggcatttggtggcagccaatcgttcccgttgaagaacttggagctcagggatgtgaatgggagtgtgctgctggaaggctatgtgtaatagcctctcttctgtcggagattggcattgtttgttttccctcgtgtaaacagatagccctgtaatatacttgcagagccgcccacgagccatgtggggttttgcttttttatatatatagttgaaaatcaatgccatgcgtccttcattttgctgcccct

SEQ ID NO: 150050 - DNA, 728 bp, Zea mays
  Clone ID: MRT4577_68370C.1
aggacagcgccgcctgcgccgctccaactgctgagccacccgacagagtgaggctgacagcagccaaggccggcctcgggcgtcataggaaacaccgcctcgcccgaccccagggctcggacttgggctcagccctagaagacggcgaactccgctccgcccgacccagggctcggactcgggctcagccccggaagacagtgaactccgctccgcccgacccagggctcggactcgggctcagccccggaagacggcgaactccactccacccgacccagggctcggactcgggctcggacccggaagatcgcgaactccgcctcgcccgaccccagggctcggacatgggctcaaccccggaagacgacgaactccgcctcgcccgaccccagggctcggacatgggctcagccctggaagacggcgaactccactccacccgacccagggctcggacatgggctcaaccccggaagacgacgaactccgcctcgcccgaccccagggctcggacatgggctcaaccccggaagacgacgaactccgcctcgcccgaccccagggctcgaacatgggctcaaccccggaagacgacgaactccgcctcgcccgacccgggggctcgacctcgacctcgacctcggaggagcctccacctcgcccagcctagggcacggaccgaccacgtcaaccggaagcgccatcattaccctaccccgagctga

SEQ ID NO: 150051 - DNA, 1354 bp, Zea mays
  Clone ID: MRT4577_68372C.1
cattgggtacctcggccggggacgggataatctcgacggctcgcgacagagggaaaaaaactcagaaacccaactcgctcgttcccgcaactcgcatctttctcgtcgacagctccaactccggaacccttgtcgccggcgccggcgatgtcgtcatctaccgcccccgccccggcggcggcgatggccgtggacgatgcggaggacgaccagctcgcctccatgtccacggaggacgacatccgggcctcccgcctcctcgacaacgagatccgcgtcctcaaggacgagttgcagcggacgaacctggagttggagtcgttcaaggagaagatcaaggaaaaccaggagaaaattaagctcaacaaacagctaccctacctcgttggcaatttcgttgagatcttggaaatgaatcctgaggatgaagctaaggaggatggtgctaacattgatttagattcacaaaggaaaggaaaatgtgttgttctgaagacctccacaagacaagatccgaaggcagagaatcctaatgagatggttacagctggtgtgctttcaagccttcagaatttcctacgcaagtgcctcatagctagcctctcatatggcccaatgccgaagcacattgcatttattatggatggcaatcgtcgatatgctaaattcagaagcatgcaagaaggagctggtcacaggatgggtttctctacccttattgcaagtctgatgtactgctatgaaatgggtgtgaagtacatcactgtctacgcattcagcatcgacaattttaaaagggacccaagtgaggtggaatccttgatgcagttaatggaggaaaaaatcaacgaactcttagagaattggcctgtatccttcagcataaaaaaagattttggaaggatgcaatgttattgtaagggcaaattggtgtctaattttcattcgggtcattgaagagaagattcaagattttagatgatgcatctcctttcttcccttttccaacacaagtcgatattgttgttgcttgttgtatcattcataattgggtcatacaagatgggagtgatgattttattatacaagattctaattggcctagtcatagccatgctacatctttagttggccaagcaagtgagcatgctgctatggttgctttgaggcaaggaattgcagaccagatgtggacagaccatcagaactacaatgaaaactagtatcttgtaatatttgtaagaactatttgtaaggatgctatgttattgccaggatgtattggctactgtcttttatctgtaagagctatttgtccgcatactatgttaccgcccggccctattggttgcta

SEQ ID NO: 150052 - DNA, 858 bp, Zea mays
  Clone ID: MRT4577_68374C.1
gtggagtgcagcggcgtgaagtgaaacgacctcgacgcggcccgggcacctgccacgaatacccaacccaacacccacacagctctactagctggcttgcttgcttggctgccctgctctctcccgcacccgcactctcgctcggcccatgggcgttggccgcggctcttgctgcagccactgaagacgcccgcccgcggctcctcccccgctgctcatggcaggagctcaatgcgccgccacagctgggccgcgcgccgccgcgccgccgccgctcctcctcgccctactcctgctgtgcgccttcctctgcgccgtgctcgtgctgctcgcgccggcggctcggcagcacggggacgacagcgacgagacggaggagctccacgccgcgtcttctccgtggggccgccgcgacctcccgcgcccggcagccgcggcggcgtggcggccccggccgcgcgggaggtggaactccgcggggcaggggctccgggacggcaagcacgaggtccccagcggccccaacccggactccaatcggtaggcggaggccagagagaggtaggtggtagatccgtgacgtgagccccgcccgccgtccgttttcgttccggcgagcggtgatggtcgaaggctcgaagcccagctcctgttcctcctggtggtcgctcggccgtgtagctaggcgtctcgtgtcagcttgttctttttgcttatatcttctgtcttcttaattcttctccgcctctcctctctttcttctttatcagagatgatgaaaatggatgtacaaaaagatgagcatcgaacgcgcgcgttactactacttgataaacttccgctattgctgctgtgctc

SEQ ID NO: 150053 - DNA, 340 bp, Zea mays
  Clone ID: MRT4577_68375C.1
gccttgtttatgagctgtatcaacgctggcaagcgctaatgcaacaggtacgccatcaagaagaaggatgagattgagcgtgatggcaaggccatccgatgaactgagcttgtatcgctggagcactctgggctggaaacttttatgtaactggcaggcgtatcggctcttgaaaataccaatgttcagagttttttgagacctatatgcggtaatggttctcagagcacaattaatattactgagtaatgtggttgattgggaacaaaaatgtttggtgcctgctttaccgaactacacttttcttgacagttttctttattctataatctgtttatgt

SEQ ID NO: 150054 - DNA, 353 bp, Zea mays
  Clone ID: MRT4577_68376C.1
gggaagctgcgcgctcgcctaaacgctgacgcggcaccagaagcaccgcctcgcctcgcgtcgtcaaagcgcgcgcgttcccgttccggccttcccccaccacgacgcccgcaccccacccaccctctgcctagcgtagcgcaccgtccgcggcgacggcggtgtccacctacccacccaccgccgcacgtttcctcctgcgcgccgcctcggatcagcccgagcccaccgcgtcggcgccgcccccacccgtctaaacaaccacggaggccgcgcacggttgcgtctctctctctcctcgccgaggctaccgcccgtctcctctatccggccgcgtttatgaggcgattatc

SEQ ID NO: 150055 - DNA, 272 bp, Zea mays
  Clone ID: MRT4577_68377C.1
ccatgtgcttatttaaatagatttttatcttgtctcatttggttttattttagcaagaagtatgggaagcctcaatactcccaatttgggggggtaaaaaaaaaaattccggcactccaaaaaagggaactgccccggggtgttgcaattgcccaaccacaaaaacaataagtgtggtataaaaaattgggaaaaaaagaagagcgggaagaacttgggtgtgggacaaccgagcccgtgttttaaccctggtagtaaaatgattccggggc

SEQ ID NO: 150056 - DNA, 1172 bp, Zea mays
  Clone ID: MRT4577_68378C.1
ttctgggaaatttacctcgatcgcggccgggtttcccggccagacctgcctcgcttctcgtctcccgtctcctccgcgttcccgctttccacccgccgccgccgccgccgcccaccttaccgtcccctgccccttgcccagcatgtggggtagcaccgacggcggaacgccggaggtcaccctcgagacctccatgggcgctgtctctgttgagatgtactacaggcacgcgcccaagacttgccggaacttcgtcgagctcgcgcgacgcggctactacgacaacgttatcttccaccgcatcatcaaagatttcattgtgcaaggtggggatcctacaggaaccggcagaggtggcgagtccatctatggagcaaagtttgaggatgagataaagactgagttaaagcacactggggctggaattctgtccatggcaaacgctggcccaaacacgaatggaagccagttcttcataactcttgccccttgtcagtcacttgatgggaaacatacaatttttgggagggtatgcagaggaatggaaattgttaagcgccttggaagtgtgcagactgacaaaaatgacaggcctatccatgaagtgaaaatcttgcgtgccgttgtcaaagactgaagcattatccagatgtaactccgagtgttggtttaggctttaataatggccatgttcatgtaagtggtgcctttgcgaaaaggtgaaaagtgcagctagttccagcctatatgactatggtctctcgatgtggctgacctgaaaccctacctgatgagtagattggaccttttgatcaagaaggtatttgaaacagtttatatgcgtgtgtggtttgagtttctctgcgaggtatttgaaacaaatagtaccaaactatgttcgcttcattttaaagtcaattgtttggactgctgtaagctgcaattcataaagaaaaaatattgtagaagcagtagaagccggtacggattaaagctaagcgaaaataatgcaccacatcgaaagtctgccactgatagctccctagtcggtggaggcatgtggggctttggggtcttgaggttgtctaatgcagttatcctatctcatccctgttcattttctattttaaacttcactatgtaaacaatgatatttcctatttcaactttac

SEQ ID NO: 150057 - DNA, 621 bp, Zea mays
  Clone ID: MRT4577_68379C.1
aaggaaaaaacaatggcggagctgctccgcgcgtgccgcggcgctcctcgtcgctgctggtgtctgctcggacggggcctgcacgttctactacttcgaccccaacctagcatccgcccgggtccgcttgcatacgaattcagacgattttgagtgaggttgctttcctcatgttgcacctaggactgcctagcacattttcaaacttgtgcggattggatgcgtcagcacagatcactacttacgacttgacaagggttgacatggacaagttggtgctgttatgtgaggtcgaaccgcccctatcaatgaggagcaaagaaaggaagcggagaaaacaattgatggcgaatgtaggagagtcaagcatggcaagggaatcctctgcatgggaaggcactctgatgcacacagagccagatcttgcttgtttattcttctgggcaattcaccgcatcttgatggacagtgtgctgcatttgggagggtcactaaaggtgactatacgtggactaacctagagaggcttacaaccggtagagaacgcattagagtgatgccgatcgatcgcatcaacatgctatcaacttactataatgatatagatctagagagctgtga

SEQ ID NO: 150058 - DNA, 355 bp, Zea mays
  Clone ID: MRT4577_6837C.1
ggctctggaacctttgggctgatttatgtgcttgtttatgtgcttgcggggacgaacttcccgaacttcctacgctagagaaggacggcacgtccctactgccggtctggtgcgtaaaggtcccggaagaagtacctaatagcccagaaggaaccatacgtaataaagttgaaggcgtaacgcactcgcctttatgttcctacccattttagaaggtaaccggagtagtttaagtagctggtatcgtgttagacgtacatcatgtaaaatgttcatcggaagttatcggaactgctgctgcttttggcctcgggcccggataggctttcggaatgcggtatcctaggcgtatgac

SEQ ID NO: 150059 - DNA, 564 bp, Zea mays
  Clone ID: MRT4577_68381C.1
tcgaggccggccgggaatattctcgccgttcctgcgctatcccctcgctcgttccaccgtgagatgcgtgcgcgcgtgtgacacgctgattcatacttaatcttatgatgttctgcgacgccgccatcaccggcttgtgcgtcgtggcgttgctccaaacttgatctatcccgacgcgacgcttccgagcgcaggtgacagccatgtcctcctgatttcaccatatcttcttgtgagcttcggatcgccgaagaactcacgtaatcacccgccccgttgggggtgacgaaccgtatcagccacgagcctgtcactacttacactgaagcctaaaagggggagttggtgagagctgtaggtcgggatgaggtggatatatgaatggcatcgacgaaggcctacgctaatagcagattaaagaatgtgagtccttttatcgagatcgtggaggaggataatgactagatgaccgtactggatgagaagcccgacgggattgatgagatgattgagcatctggacaaggagacgaaaatggcacacgttaagagagatcactgtctg

SEQ ID NO: 150060 - DNA, 583 bp, Zea mays
  Clone ID: MRT4577_68382C.1
ctacctgcggacgtttcattctcccatcctagctggggcgggcgtgcacatctcatgctccactcatgctattcgatctgtgcgaacgaatcgcggctctccaccggccccggggtcttcctgcatgctgatcccggtgggggcggcgcaactgctcatgagggatggccacgcagacagcggcggcgggggggggggctggcaactccacgcggagctggacccccgttgctgtggcaactaacctgacactacagctactgtaattgccgcacttgcccggatatatggctggacctgctggagcacttgctgctagctacttagctagctcgagtgagttcttacacgcgcgcaagcagcctttgcataccacccctctcgcttagctatgcatgcccagcacacatcctttgctgggcttgtcgctctcgctcaataacaccgccgccgtcgacgcgatatcggcgtaatctctaccgtggctacgttatcatcagcaacttctaatggcgctcgctcgatctttatttactgcagtgctttgactaataaacaaccaatcgatgcgtctgcaccctca

SEQ ID NO: 150061 - DNA, 432 bp, Zea mays
  Clone ID: MRT4577_68383C.1
cccttctttttttttttttttatctatagcagaacacctatgttatatgtatgtgctagcagcacaaagagccaaagtccagaactgctatccattcacacagagtagaataatgtaagtattgctggccgcaccactctgtgcaaaacgacacaaacgaacaaaacctgggaataacacaggaccaactatcagcaatactacacatgacatctgcgacaccgagcagtcggctcgcatccagcgcaccgtactaaaaatacccatctatatacacagacgagctaaacaagagaataaaaacgcgagagactgggtctttaagattcagacagttaggagctcttcctcgttcactgattccccaggcagaaccgtaccctcagacgaacaggactaacaagatggatattgccatactcgcttaccagc

SEQ ID NO: 150062 - DNA, 334 bp, Zea mays
  Clone ID: MRT4577_68384C.1
cattgggtacctcgaggccggccgggactcgcgttcatttgcttcggctcatctcagatcaagctagcgcacctgacacccacgcacctccctcccagatccaccaccccagacatgggcaccgtctttgactccgccgagctcctcgccccgacgtcgcgccattccgatacgaccatgttcgtacatttcgagcgctcggcccacgcggccgaagacggctgccaggtctcccaggacgcctacgcgcccgcccccttcgtgctgccccactataaccgagatctccacgacgacgcgtgagtggcacctgctgactcgaacggggggcgac

SEQ ID NO: 150063 - DNA, 346 bp, Zea mays
  Clone ID: MRT4577_68385C.1
gcgcgccgttgcagcagatggggagagagtgtggcatagcgagcgagctagagagcgcgggtcatggcgtcactgtctgtcgactcctaggcggccaccatagcgatgccaagcagcaaccttgggagaggtcgccgcttcatggtcttgttcatggccacccataaggtccagaagcccacgcccaataccttgtacggcacgagaagatcgcacactacgacggtgttccctgtgggctagccgatctccctgacggtgacgacgagcgacaaaacgccggataagctgatgacgaacgtgcttaagctgcggttgctgactaaggcggagctctcgggcctgc

SEQ ID NO: 150064 - DNA, 397 bp, Zea mays
  Clone ID: MRT4577_68386C.1
atccggagcaggcgcagtcccaccgaacccgccgccggtcggcctggatctcctgggcggtgcctctcgtttctcttttcaataatcaagatgagccgtggcggtagtgccggcggcggtcaacacctctctggcatgtctattcggaagcggggagccccccaaaccaggagtggcacgagcagcaacagctccacctgttgagaaaccatctgctccaaagactgatgcggccaaacatgttgctgctggcgctaccagacaaaccaataactaccacacggctcatggtcaaaacactggcaactttcttactgaccgtccttaaaccaacgtacacactgcttttgacggtggatataacctgtgctacctgatccgtggcaactgatgcccg

SEQ ID NO: 150065 - DNA, 594 bp, Zea mays
  Clone ID: MRT4577_68387C.1
caagtgccaatgtgggagctcaccatgatggtaaccacctccccacaggcaggcagcctttcaccagagggaagtatcaggttgctgtacttcggctgtgggttgtcactgtctaataatatgaccgttttgccatctctctgcaaataaggcaggagctgctacctgattggtataacatctcactttccctcctcattgattttcttgttctcctcctttgcttcataaaaagagggacaagtggctggtgctgtggacagagaagctttatttttagtatgagacaacctctattttctttcaggagagggaagttggattatcaattcttttgtaaatgtgtatggtgatatttgctccgctttttgcaatctttgcatttgcaacatgcggtggctattctggaggcctgcggctgagtgtggactgtgtcaacaagacggaaagtaacctcagcattgacatagcatttgcctacccattcaggttgcagcaggtgacctttgaggtgcccacgtgcgaggggaaggagcggcagaagctggcactgactggtgactcctcatcttctgctgagttcttcgtcacggt

SEQ ID NO: 150066 - DNA, 248 bp, Zea mays
  unsure (1)..(248): unsure at all n locations
  Clone ID: MRT4577_68388C.1
tatgcaccacacctcttcttcttcttcctcctcctcctagcacagctagcgcctgcttcccttcgcctgtgatcatgtcttgcagcagcggcaagtgcgactgtggctccagctgctcctgcggcagctcatgcaactgcatgtcccctaacgtggagaccgccgcccgcagcagcatcaagaccacggtcctcgncgcgccgaccacaaaggcagcgcgggcgcttcgaggcggccacgagggcggc

SEQ ID NO: 150067 - DNA, 267 bp, Zea mays
  Clone ID: MRT4577_68389C.1
cagaataaaaaaaaaaaaaaaaaaaaaaaaattaaagaaaaaaaataaaaaaaaaaaaaaaaagaaataagaaaaaataaaaaaataaaaaaacgtacatacaaacaaaaagaaaaaaaaataatggaacaaaaatataaataacaaagggtcgtgtaaacaataggttaaccaaacttaataggctatcatcacacaacacttttgttgataaaactccctatattacaggcctttgccgattacgtatcggccccgtttttgaaa

SEQ ID NO: 150068 - DNA, 186 bp, Zea mays
  unsure (1)..(186): unsure at all n locations
  Clone ID: MRT4577_6838C.1
tgcccnnttcctaacantcacaacaagactanctaatantagcatctcagacgctcaggnnatacaaaccgtctgaactatccngcncgccatnatcctagncctcatgggccctcncatccntacncatcctttacatnanagacngnntcaacgtccctcccttagcatcnaatcanttggnca

SEQ ID NO: 150069 - DNA, 418 bp, Zea mays
  Clone ID: MRT4577_68390C.1
aaaccccaccggggttttttgattgaatggctgaataccccttacacaggctggggcccttaggggcttttaaaagcactggccattcgggcccaggaggacatggacaaaaaggaaaaaacccagcaacatatattacccttcttggtttggaaaaagtttttcgaaaccgggggttcccccttttcgcttgcctggggcggctgggaaaaaaaaaaaaaaaatttgacaaggtttttggtgaacgaccaaaaccttttcgccaggtttgaattttttgggacagacggcgggggtggttcattggaatcagggaagtatttaccaaatccacctttgacattagggggcaatgccaagaaacaaggaattgcagccccccggggcacgctttttaaaacaagatttggtacagggg

SEQ ID NO: 150070 - DNA, 577 bp, Zea mays
  unsure (1)..(577): unsure at all n locations
  Clone ID: MRT4577_68391C.1
cgtaatacgactacctanntagggcgcattgggcgatccggctcgccggctccggcctggatccatcttgtctacacatctcttctctaccaaaccacttcttcacttacaccaaaaccctcttcgaaatgcccgagactaccactccccaggttcctgcctctctcggcgagaacagaggtatcaagttctccttcaagactggcaatgcccgttaccagtgcgttcttcaggaccgctccgtctatgagcgcaagaaggcttcccgccagaactcttctgactctgtctcctctaccgagtctacccagactgagaagtcttcccactaaatccgagttggaagattacgggatcatggcaccttggccaataacatcaaccctcaatcaagcctgtctataacaaggcttcgaagggagcaatggtgaccaaagcaaacaaaaatggggggagtttattataccacaattatcgagcattagcgacggttttacagagacatttggcgtctccatgaatcaaaacattcttttttttatcgctaaaaaaaaaaaaaaaaaacccgcgcccggcc

SEQ ID NO: 150071 - DNA, 266 bp, Zea mays
  Clone ID: MRT4577_68392C.1
tgttcgccatcgccgccgtggggctgctgtcgtggccagcgttccatgctaaggtgccagaacatcacctcgccggttggagagtgcctctgtattccgcctcagcgtcgatgaccatctacgaattctaccgccctcaacgatgtgcgtctcgggtcgttggtgagcgcctagtgacgtcaagggcctagctcaatctttgctgcgtcgtagtatttagaaagttgccacaccgctggtaaatattgttgcagtcgttgttgtcg

SEQ ID NO: 150072 - DNA, 315 bp, Zea mays
  Clone ID: MRT4577_68393C.1
ccctcaatctctttacgaatccgggcctgctccctttgcctttgttaattgagaagcctcaccctttcctaatccgcagtttttttttgacggcccattccctttttttcttcttctttttccttccccaaaatttgacgctcaagctcttttttacgtttttaaatgagggacttccttgcaagcagccttttatgttaattctccacttttgcagccaaactaatgagactttcaccgggtttaaatgggtttttcactgggggacaaatatgaaaccttgctttatttaatggatcaaccagaacccttagg

SEQ ID NO: 150073 - DNA, 334 bp, Zea mays
  Clone ID: MRT4577_68394C.1
ggcagggaatccttcaacaattgctttaaaaaaacattgttttaactggcccctaaaatgtccccaaccgcaagttgctcccgggcaaaacttttttgctttgtttcccccatgaaaaacttaggcggggcccccactttgaaacccaggggggggggggctggtatagaattggatctgatttttctcggcccccctcccccctttttaaacatgggcggggaaaaacaagcttttttacagagttctgaacccggccaatcccacccaaccaaggggagaaaaaaaaaaggttggccaaaataatgaaaacctggtcaaaaaaccccccccc

SEQ ID NO: 150074 - DNA, 340 bp, Zea mays
  Clone ID: MRT4577_68395C.1
gtcgttggaactgatggatactggtacgcggggcttcaggtcagaggaaaccctcaactgtttgaagggcatatgagtcgatgtatggcgagggatctgcgtgccgagccgagcgtgctgaatgtatgcgcagacgaagggcagctgatgaaagggagagagatccatggcaggatggcgcggtgccttgcttttagttcagataccgtggtggggaacgcggatatagacatgtacggtaagtgtggtcaggatggctgagcgcatgcgtgtgttcacgagcattgaggataagaacgtggtgagctggtcgacgctgattttttgctacagcgtgcat

SEQ ID NO: 150075 - DNA, 263 bp, Zea mays
  Clone ID: MRT4577_68396C.1
cgagcagagttaggggggttaagttttaggttttaggttgtttatttagggtacatagaagcagaaaggaaaaggttgatgccttttacttagatgtcattaatttggagcactccttttcttgctctatccattttctgtttgtaattttcgttgggcttcggcaaaaaaactaacaaacaagttgtgctccaacttctaatatctgattcaatgtgaaatggaattattcctttaaaaaaaaaagagaggggagaggtggg

SEQ ID NO: 150076 - DNA, 341 bp, Zea mays
  Clone ID: MRT4577_68397C.1
aaaccatacaaatgggaagttttttcatttaaataccattacaaattttttgggattatttaaccattcatttaacacaccaaaaataattgggtaaaataggaacacttgggtagggctacatagcacattacatgttttattacatgggcattaaattgggggtaagccttttatgatattatgggctaaaagggtgttaaattggaaaaaagatgggtgactaaagtccaagttcatgcttgagctaaatttatattgggttttttatacccacgggttaacaggtttggaggaagggggaacgttttaatacttgtttacccattgggtgaaaattt

SEQ ID NO: 150077 - DNA, 1700 bp, Zea mays
  Clone ID: MRT4577_68398C.1
ttgggtacctcgaggccggccggggcaacattctggctctgccagccggtccagctgctctaccgcacggttcgcaccgcgcgcgtactggatccattagccgcgcgcgcgcgcatctctcgtgatatctctctctctctctctccctctctcgcccgagagatcctcctcgtcgggtcctactcctacctcatcagtcctccggtccatctgccctcctccggcacaaggacgacgatgcaggtcacgccggcggcgaccctgcggccggcggcggcgcacgcgttgcggctgtctacagatcactgcagggaagggccaaaaattagggttcggttcggatcgaggaaactatcgtggacagaaacacttgatgatgccactagtctgacgagagccaccggaaggcaacgcaggcattcctcaatcctcaaagtgagctgctgggcagctgctcatcaccaacacaattctaatccccagcactttaaggcgactggcatacgaatcgcaaagacgctgcatgccttctatcagttctgccgaccacacacaatatttggaaccataataggcattacttcggtgtctctcctgccagtgaagagcctggacgattttacgttgatagctatatggggatttctcgaggctttggtcgccgcattatgtatgaacgtttatgtagtaggggctgaccagatatttgacattgagattgacaaggtcaataagccaaccctcccattagcgtccggagagttttcagtgccaactgcagtattgttagtagtggcattcttggtcatgagcattagcatcggaataagatcaaagtgtgcgccattgatgtgtgctttgcttgttagcttccttcttggaagcgcatactccattgacgttccattactccgatggaagcgacatgctttcctagctgcattctgcataatctttgtgagggctgtagtggtccgcaacatgttctgaagaggcccttggcacctacaagggtcggtggtctttgcaacatgtttcatgtgttgcttcgctgcagtaatagcgctattcaaggatattcctgatgtcgatggagatagagatttcggcattcagtccatgactgtacgattaggcccaacagagagtgcataggctctgcattaatattctcatgacagcatacgcagccgcaattttggtaggcgcgtcatctacgaacctgtatcagaagattgtcattgtgtctggtcatggcttgcttgcctccacactctggcaaagagcacaacaatttgacattgagaataaggattgtatcacacaattttatatgttcatttggaagttattctacgccgagtattttcttataccatttgtgtagtaaagaatcatgcgaagaacaacacccctgctatagacatgtgaaggtttattgctaatgttactctaccccctgctatagacatgtgaaggtttattgctaatgttactctaccgaatggtctgaatgtctatgcgtcatttgaatgtaatatgactatttgttgtatcagggtaacaactggagcaaatgtaccatgtatattaagcattaatttaactgcatcatttgtaccatgtatattatgactatgtatgagatattgtctcttattaaaaaaaaaaaaaccaaaaaaaaaaaaaaaaaagcggcc

SEQ ID NO: 150078 - DNA, 233 bp, Zea mays
  Clone ID: MRT4577_68399C.1
gcatacgtcagaacagacatcagcacaaccatggatgcacccagacgcgccgccgccacctgcaacgctcagcacggtgtgcaccacgagaagctcagcgccgtcgcactgcaactgcaggcgtgtagccacaccatcgccggcgattgcgggtcctcgctcacaagcgaaacctacgtgggtccgcgcggctgagccgacgtggcgttctcgcgagcagcggccatgttcct

SEQ ID NO: 150079 - DNA, 381 bp, Zea mays
  Clone ID: MRT4577_6839C.1
gcgcgggcctgtcatctctgaacattgtcgtagagttcaaacagtggaacagcaagcagtttcagattcctgtgaacagcaaaatactccagcagtgcgtgcacttggctttttgccagaagaaggtcatggtgtttatgttgctagatgattctgaactatagctcatttagatatgtctgggaatgagcactaagcaacaatgattttattcagatggtgtcatggaagtccggtacatagatatggcctctatgctctccagtggatcatcgaaattaatgggcaaccaacaactgatctggaaacttttataaaggtggtgaagggtctcgaagatggtgaatttgttagggtgaggacggtccatttaaatggaaa

SEQ ID NO: 150080 - DNA, 372 bp, Zea mays
  Clone ID: MRT4577_683C.1
aataaaatgaatttttttttttttcatttggttattttggcttacacgtttttacaattgggcgcccaaactccaaccacaaagacaagagttacaagaggggaaaaaagggtaacccacaaagaccgcaaaaacagggagagagaacaaagagatggataacccacgtatgccagggtccctggggccttccaattcaggaccaggaacaaatgaaagagacaatcatgaggggcaagcaccctaacagcgcttggcaggcacgcattcctccaagaagtgggccaggtgagagctatacagcccaggatggctccggtaatggcccacatggggcgaagacacaaaggcccaagcccttaccgcatgccc

SEQ ID NO: 150081 - DNA, 1670 bp, Zea mays
  Clone ID: MRT4577_68400C.1
ggaaaaaaggttctctcaggccatttccttgagtcgttccgccgccactcgaccaccaccgccatggcggcgccgacgccgaccacaaccactcgcagagactaccgcctccgcccccgctgcttctcatctccacgcagctgtccgatggccaagcgactcgccggcatcgacaaagaggtgctcgtcgaggtggtgaggttcacgcataagagcggactgaggggctgtgacggtggctggaaggatttcctggcccggaacgatagaaagtttggcgcgtcggtgagcgacccgaggaagcgctccagggacgtgctgttcgccttcctgcaaaccttccccaaggatttccagaagaaacacttgatgccactagtccgacgagagccaccggaaggcaacgcaggcattcctcagtccccaaagtgagctgctgggcagctgctcatcaccaacacaattctaacccccagcagtttcaggcgattggcatacgaatcgcaaagacgctgcatgccttctatcagttctgccgaccacacacaatatttggaaccataatagcattttacttcggtgtctatcctgccagtgaaggagcctggaacgattttacgttgatagtaaattatggggattttctcgaggctttggcccgcgcttaaatgtatggaacgttttatgttagtaggggctgaacaaggtcaataagcccggccgggtttttctatcttatatctggaccatgtaccagataataggcattacttcggtgtctctcctaccagtgaaagagcctggacgattttatgttgatagctatatggggatttctcgaggtataaatgtataattatcatattgaaagctatataccctgggcacgtatttcatattcttttcttcttcttctttttattcctaaaaattaccaacatatatacactatctcattttgacacttttgttcaggctttggccgccgcattatgtatgaacgtttatgtagtagggctgaacaaggtattttttgtgttaattttaatcatgcctgctgtcgatgacattactgtgtatacatattcagagtttcggataaccttttgaaggtcaataagccaaccctcccattagcgtcaggagagttttcagtgccaactccagtattgttagtagtggcattcttggtcatggtaatgttatatgtttcacacagagatctacgaactatctattctggtatccctcatggtcttatattttatatgttcaggtgtctggtcatggcttgcttgcctccacactctggcaaagagcacaacaatttgacattgagaataaggattgtatcacacaattttatatgttcatttggaagttattctacgccgagtattttcttataccatttgtgtagtaaagaatcatgcgaagaacaacacccctgctatagacatgtgaaggtttattgctaatgttactctaccgaatggtctgaatgtctatgcgtcatttgaatgtaatatgactatttgttgtatcagggtaacaactggagcaaatgtaccatgtatattaagcattaatttaactgcatcatttgtaccatgtatattatgactatgtatgagatattgtctcttattattactggatgtgatgtgtct

SEQ ID NO: 150082 - DNA, 549 bp, Zea mays
  Clone ID: MRT4577_68401C.1
aggtttgttaaggaggcaaaataccgccgcattcgtcttgaagagaaaggagaagcaaagcagccagcgagggcaagtgacagatcaccaaggcctgtggttaacaacatcccttctaatgcttaccctgtagaagggccatctgagtgtcataaaaaaccaggattcatatatgctagcggtgagaagggacatctgagtgacaagaatttagatgttcctagcaccagagccggtggccttgagaaagaccgtactgagcttctgcggatgctcgatgagttgagggaccaggtacagagatcctacgagattgctgacaagtcaagtgtgaatgcttcaacaaatagaatggtggatcctgcaagctcctacaatcctcatgagcgtctgagtcgattgcggtatggttcacctcagttgcagcgtaatggttctcagcgctcaccttctttgaatggacaggcacctgttgttcctcctgcttatccttcagtatctgtacagcaggatctccatggatacggacaatcttgtgcacatatggga

SEQ ID NO: 150083 - DNA, 644 bp, Zea mays
  unsure (1)..(644): unsure at all n locations
  Clone ID: MRT4577_68402C.1
tatagaaagaagctatgcaaacgtcgcatggcaacgnccgtacccgtaagnncttggaatnccctctagaagacggcancgcccccttttttttattattttttatttttttattttttttttattttttttttttttttttttttttttttttcggaccccggggcggaccccggggcggaccccggggcggaaccgggggcggacccggggggcgacccgggaggtcaacccgggaacccggaaccggacccggaaggcctacaagtattcccaaaagaaagtggaataaaaacgggcaaaaataaagccaaaagcaaattccaagggaaaaacgataccagccaaaaaaccaacaaaaaacaaaaaccgaaaaccaaaaggggaaaaccgggggggccaaaaaaaaaaaaaaacaaaaataaaaggggcagcgccaaaggcccgaaaccaaaacggaaaaccggattaacaaaaagaaaaaaaaaaagggaaaagccgcgggaaaaggcggctccagaatggggccccatggggcttttaatacggacaagagaaaagggcaaaagaccattgccccctaccacagggccataaaaaagttcaagcaagcgggccacacgggttgaaccaaaaaggcaaaa

SEQ ID NO: 150084 - DNA, 873 bp, Zea mays
  Clone ID: MRT4577_68403C.1
acccaatacaacaaaatttatttgacataattaaataaaatatagaccatgtctagattaaatataacacaccttctcgatctgaccacatacatcccataatcatgtatgacacggatcggagaaacttgaattgaaggagttgaggcagcgcgcgagctaggagggattattaagcggattgggaggagacgaattgaagatccggatctgctccaggaacgtctgcccctgcggccggtccttgcgccggacatacccggccgccacgccgtgggtgtactcggggacgcccttctccccgctgcgccgccacatgtcgttggcgtagctccggtgcgcgaagtaggcgatcgcatccaccgcgccgccgccctcgaggtccacggccacggccagccgctcgtagtgccccgtctccacgccctccagctcgtccagccgcgcaagcccgcgggccgtcaccgcgtacgcctccccgcgcacgcggtgcgccccggcgccggcgccggggaggttcagaaggaacggcacccggtacggcccgcacaccagcggcagccgcgccgacgtcaccgcggggcccaccagcgacgcgtccccgctcgcgaagagctcctccaggaggcggtggttggagaagccgcgcttcagcgtcccgtacgtgaacaccagcgtcgtccgctgcttcgtcgccggggggtgggtacggtggcggtcctgcggatcccccgccggagccggagcgtcgccggtcgtgcccataggaggtgcgggcgttgattaatctgtctgtatctcagatgagagattcttaggaggaggaggaggttgttgttggtgctgcgtctgcctgcccccggcccggccggc

SEQ ID NO: 150085 - DNA, 415 bp, Zea mays
  unsure (1)..(415): unsure at all n locations
  Clone ID: MRT4577_68404C.1
gcgaatncgggcaaactgcttggcactaattggaggatactggctgcgtttagaggtcgcaatgagcttggtactaagtcgtgagtgaatatagtggtcgttgtttatgacgagaggaatacatggtggggggggggggcatcatgtttggcattatcattgatgacaccatgctggggatcatcatcggtggtatcatacttggcatcattatcggtggcatcatactcggcgtcattgccgaaggcatcatactcggnatcatcattggtgaaaccatgtttggcatcattatctggggcatcatactagctatcgttattggggacatcatagtnggcaccattattgatggccttttatttggcatcggcattattgtcatgggtggcttcatacctggaattattattgg

SEQ ID NO: 150086 - DNA, 442 bp, Zea mays
  Clone ID: MRT4577_68405C.1
ggtagcaagtagataacagccttcatcgtgagtccatctacaaatcaatcttttcagcctctaatcttatgacgagttcaaacacctattttaaattaaatacaattagaatgtttgtaacgaggtaggctctaacgaaaagactatagaagaagatcgcccctcagccttctgatgacctgaggtcttctaaagcagcagtaacctgttcgcgcacaagctcaatcctctttagataaacctcaagctccagaatctgctgctgcctccacttatcatcactgggcattccaggatttgggccaggaacccctgtaccaagaccaagaatgtcgaagccgccaatgccgccgaatcctgtgccaagccccaatccgaatccactctgcccaccgacaagcgacagaagtgatgaactccttcagtaacggtgacatgatac

SEQ ID NO: 150087 - DNA, 259 bp, Zea mays
  Clone ID: MRT4577_68406C.1
acccaccactcacccctctccacaaccttacatcaactactaactacccacacacccacacaacaacacatggtcacattcaaacattttatgccctctctaaaacctcttaccaccaccatatttccaaaccattaccacaaacccatactaaccatcattaacaacacatacaacctgaacattaacaatactactaacaatattactcaccttctctcatcaataccaataacaaaccaaacaaaaaattctatca

SEQ ID NO: 150088 - DNA, 393 bp, Zea mays
  Clone ID: MRT4577_68407C.1
ttttttttttttttttttttttttttttttttttttttttttttttttttttttttttttttttttttttttttttttttttttttttggggggaaaacccaaactcatttgttagggaaaatttaactaaaacgggttaattcccccattttaaaaaaaaaaaaaattctccgggcaattaaaaaacccttttttaagaatttggaaaatttattctaaaaaaaccgattggtgtcctaagcgacatttatataaaaaatagggcccaacaagtcccttgaaaaaagtttcatgaaaaaaaacgttcaaatgcaaaaatttgggtttaatccaaattggacctttacaaaaaccattttacccaaaggaaaaaaaggggttttttttttttt

SEQ ID NO: 150089 - DNA, 438 bp, Zea mays
  Clone ID: MRT4577_68408C.1
ctgtgcggcgctcgaggccggccgttatcggagcagccaacgacagccgcctttctcgcagctcggcgcgcctcacctctcctctccttttccccccttcctggctcttgccgcccagaggcaccggaccacagaagcgatcgatggctgaggcacacagacggagaggcccgggatgtgcgggtgatcccccgtgcacgcggcgctgccccgcgagaacggccaccaggccatccaggtcgagcgcttctggtgcgccgagtgccgcgacagaccaacgcgatgcctgaattctagaggatgtggaacgcgacgctccaatgcgagggcgcgaccctgcgccacttgaccgaccagttttttttttgcccccgccccctctcgagactgtacgaggaacagtggagccacacagcgcttcagacccccaaataactg

SEQ ID NO: 150090 - DNA, 363 bp, Zea mays
  unsure (1)..(363): unsure at all n locations
  Clone ID: MRT4577_68409C.1
gcccaacgccacccncgtatggggttaggttttatttttaaatttcaaacaaaccaatatctccaaaatttttgtggcccacatcccacaacaaagcgcacacgggtgaagaaccccccgcttcaaaccacaaaatacgcatccaccccaacagatcgacccaaaaggcaaaccacgaaaacaggaccagccccggagggggctcccgccccctctaaaaacaaatcttctaaccgccccaataaaattaacacaagcggtccccaggctcacaggaactccaccaccaacaccgctttttcctacttgccgcccgcttcaggaccaaagaccagccgcccccacagtgggatcaaccccacg

SEQ ID NO: 150091 - DNA, 315 bp, Zea mays
  Clone ID: MRT4577_6840C.1
tttgttatcttttttttcttctttttttttagcatttatcatgttttgtctactgctgaaagtacatggatgagcgcatcaagaacgctgtctacattggcacccctgacaaaaaaatgggggctgctgatgagtccactggcaccatcggctttcgccttttcaacatcaatgaagacaacgttccatgagaaccgacgagccctccgtgagctcctattgagctgcccttttgctgtccccaaaaaaaaggtgtgatactaaaccacgataccctgttctatatgacggggagggttcccactttgggccacc

SEQ ID NO: 150092 - DNA, 1044 bp, Zea mays
  Clone ID: MRT4577_68410C.1
ctcgaggccggccgggggttcttcgacaccatcacatgggcgcctcctccccttccacctcctcccctaatggcagatgctaggcggcggcgcccctcttgagaagtgaaagggaaagatttgttttgccgcccgcgccctgctcaggcgctcggcctcggacgggccacacaaggtagcgccttccgcctcgttgcctgacccattcctgtttcgttcgaagcactgaagcagccccagaccgacgccaggcgcccaggccagtggtcgacgcctgtggtgagctgataggcgatgtcgtcaccgtctccggtgctggcaagggctgcgcgtctcacgtgtaggcatacactaatgaactggaaaacaaggtttctcgattagaagaggagaataagaagctaaccacgttaaaggagttggaaaatatacttttctctgagcctcttccggaacccaagtaccaactgaggagaaccggctcagcgactttctgattgtatgcagaatatcttgttttgctgtaggttgtaagtcctgtagcttgtaagtttttttgtctctttggtttagaatcatttgctagcttgggagtttttgtttatcctagctcgatggtttgctctctccctccctccctttctctagactagcaggagccgagcatgtgctgtccgaggccttgctaccagtatagtatgtaaaatcttcaggacacatgtaggtggtcggagcttgtttacatggtgtgacttaacagatggatagtatgggagccctttctttggtaaccggagtttcctgtagctagtaagtttttttgtctctttggtttaaaatcatttgctagcttgggagtttttgtttatcctagctcgatggtttgctctctccctccctccctttctctagactagcaggagccgagcatgtgctgtccgaggccttgctaccagtatagtatgtaaaatcttcaggacacatgtaggtggtcggagcttgtttacatggtgtgacttaaggggtgtttggttgctcccgcta

SEQ ID NO: 150093 - DNA, 252 bp, Zea mays
  Clone ID: MRT4577_68411C.1
ggaacactcagatagcagtgttaagtagaatttacctcagaatttactgaatatatttaatcagttagctgaatttgaggaagaaataggacataagtcaataaattaatacgccaaggatatcggcgccattacacgaaatgccattcagtgaagtttttggttgtattagtactaacagttgagtgcagaaatctctgcttctaaaattatctgtgagagttatcggaaacaaatgcttgtaagtaagtt

SEQ ID NO: 150094 - DNA, 760 bp, Zea mays
  Clone ID: MRT4577_68412C.1
gcctgccgccgcatccgcttggcgctcgccagctcctgctcggccagctccgcgtgccgcctcgcctgcgcgcgggcctcgttcgccgccgccttctccgccacagcttgccgcagctgctcccgcgcctccacctcccctttctccctcgccgctgccagcatcgcctcgtccccgaaccccccgccgccgcagacgccgatggacagctgcagctgcatggtggcggggtggctctgtggaggagcggccggagtgcgtggcgcgacgccgtactccgccacccccggcgcgccacggcccaccacgccgctgccggacggcggcatgagctgcagctcgaggttgtgcccgccgcggtgatggtggtccgatggcggtgtccgcggcgacgggacttgttcgaaccggtggaacgcggcggtcgcagggcttggaatcgtcggtgccgacgaaccgggccaggcggccaccgggctgatgacaatgtcgctggacgggctggtgctcgacgcggtcctcgacagtgacatgggcggcggcgcctgcggctgcgacccagcactagcagcagccacaccggtgctcccggcgccacacgccggcgaggggtccgcccgtgcccgcccggcgttgcaagtgtcctggtgctctatgaagctctccacccgcgatcctcgcatgagtgcaaagaccaaggaggcaaggatgcgtgcatggccgcgtgaactcaagaacaaaagccaagagcgtgagtgcg

SEQ ID NO: 150095 - DNA, 518 bp, Zea mays
  Clone ID: MRT4577_68413C.1
cctccttgaagtgggcgtgctgtatgccaggttgtaatccttattggaataaactaatgccctagcttaagagcacgcgcatgtctggagagaccttctcctggcattaatactacatgaatctcaccaaccacggcagtgagcacctaagaacctacctgaacctgcctactgatggggtgcctgccacgctcaataatgtaccaaaacacctagcacgaacatatcggttcctggatcctcccacgtggaccgctccaagaggaaccagctacgcctgagacggcagacaagttcaaggcttgccgtactggatgcctaccccggctctccgccgggggccactgtgaacctagccgtctatgagaggggaacgtcttctgagttccacccaacaatcatgaagtctgctttttggcgatgaccagtcacacgtctctcgaacctacaccacgtctccttgataggggtgtatggcccctgaattggcacatgatatttctctatggcatgtcgac

SEQ ID NO: 150096 - DNA, 572 bp, Zea mays
  Clone ID: MRT4577_68414C.1
ctacaaacacagaagaatttcagagttgatcacctttcttttccattcgtaaattgttggcattgttttcagctttcctgcttatccctactactctataagcacggtgtgtacgcgtccacaccgtgcaccatgttcttagtttaggtagaattctttgtcttaaagctgactggaaacctcagcttaagggccctgatgctcggggaatcaacatacctatggcacaactattgtccctggtctgtatgcaccatgccatctacatcgctttgttgctcgtatggacatggctagtcgattgcaaattgaatgaggctcataaccaggtggggggtgccatctatttgcaccttttttaattgatcagattgcccactaaaatttgtttgcaatctaaatgggaccacaacgaaacgaattctaactttagttattgttctgcctttggactaggtgagggtaccctgttgttcgctttggttgctcccgctattaaacgaatcgagagaagaatgagcaaggtttttgtttgcagctacttttgtccaatgatattgatatattgttcc

SEQ ID NO: 150097 - DNA, 393 bp, Zea mays
  Clone ID: MRT4577_68415C.1
cccacgcatgcgtggactcatatgccttgtccgaatcgaggctatcagagtatacgcgcagggcagagatcacgacctgggggacgactaatctactgttaacgagggctcgaatgcttgagctagctgcaagactgacactgcctttaagttcagcgaaggaatctggtgggacgctaagcttgcccggtacgcaatcggcgccaaactgaagcttgtcggatgagaggtctgcactgaacagcttactatggtaacctaaaaatcagtggcatatgcgataaatgataggtgaaccgagctaatctaacgcgaaggggcacgagtactactccacatatgaaccggagcgttctatgaccacgcttgacatgtgcatggcagagcttgacg

SEQ ID NO: 150098 - DNA, 551 bp, Zea mays
  Clone ID: MRT4577_68416C.1
aactattctctttctctagatttgtcagtaattcttggaacccagcttaattcttcgcgattatggctggacgtctaagctctagctaaggcgctgcagtaatgtcggtggccatcaccacttctcagcgctgccgatgcaacattgacgacatcaccaacccgaccatcctgacgttggagaaaagggccgtggtcaagagcatctccggcgctcatctacgacgaaacactctgcgcgctcaaaatcttccgtgaaaactgcatccgagactgctgcacctacatctagcaagcccgtcgcaagactgtcaccgccatgaaccttctatacgcgctcaagtgccagcgtgcctgcaccctatacagcttccgcggttaagtcgccccctctcccggaggctaattactccgtgtgtgctccggaggacacgccgtattcttagcctaatgtagtctgcgatgtctatatcgctgctgctttctgtggcgagtatactgcatcgttctagtttctagtccatgtgctggaatatgtctcctgatgaaatc

SEQ ID NO: 150099 - DNA, 320 bp, Zea mays
  Clone ID: MRT4577_68417C.1
aaaggaccattgcatgcttcactcatttggccgttaaaatagcttggctttggtcacatgacacctgtagcgggctacaataaactgtcaatattgaaggaataaatgtttgtggacatcgacgggactgcaaatgaaatcagatcaaaccgcgtaaaactagctggctttaaagccatgatcttggccgacctaacgtaaaggctgtacacaacctttccgacattttaaatggtttgcagagtgggagcgaagatttactcggtcttagaatcctctaagatatgaggcagccagcgccttgatctaatgtcccagca

SEQ ID NO: 150100 - DNA, 360 bp, Zea mays
  Clone ID: MRT4577_68418C.1
gctatagaccagctcgcttttactactacacgctacacttaggctggacatccatatcatagctcgtcggaatatgcatgagggacgagaatcaccgataccaccactctgttacagcagaggaagagacgaggagcaattcgacgcctgaacgtcagtgagtgcaccggctcaccatggccacagcgacggacgaggtgtccacgggcgagaacgactcgacgagtactacagtgatgagcatgaacgcagccgctaccagcacctcggccacgccgatggcatcggcggctacggcttcggactctactacaagcacgaggcgaagaacgacccggagcacgcgcacctacacaagat

SEQ ID NO: 150101 - DNA, 578 bp, Zea mays
  Clone ID: MRT4577_68419C.1
cactggtatcattgcacatgtaggtggacgccaacgtcgttcctgcgaggtaacacaatggtggcgaggtgggggctatcacacactacatctgctcaagcggtctggtgcttctaccgcttgcactttaccaggctgctcattgtccctcatagcctgggaagaacacactgtctactcccacaagacgtgctggttatacaatttagatccaccgtactgcatgaagacatcgactcacggtaggagctggtaacacagatcgacctgtatgctcaagacattgaatggcctgatggtgagatagacgagcacggtacattacttgagatagaatcgaggatactgatgatcgactatgtgtacttggaaagcacctgtgctgcactcacgattctgaggacacctacgaaaggctaaaactggttcaacttgctaacatctgacctacagaccaccttggagtgagatgctaacatcgcgaagtctgctattgtggtctaatcactaccggttggatctacttttatgtcgaaacaccatctattaatcacacgtacaacactctaaataggtca

SEQ ID NO: 150102 - DNA, 691 bp, Zea mays
  unsure (1)..(691): unsure at all n locations
  Clone ID: MRT4577_6841C.1
gccggaaaaaaaaaaaaaaaaaaaaaaaaaaaattggtagtttttatttgtttttctttttctttccttctttggctattttttgtgttatttttctgctatattaataaatgtgtactcgcttgtgccatttgtttgagaaattacaatggaactacaagtatatatctctgccaattttgtctcctttgcttttcatctatgcatacaaggttcgctagatgtttgggagaagattaaatcacaaggaatactgaaatagtgacaattgatggttttcattacataggacatgtgaaatactattagaagaacatctgcgtataaataattatcttttagattttttgtcttgttagcatgagctttctcaaatattgtctctgcagaggattacgatgttatttataaattatgtgttgtttttcttactgtaatcactgtgggctaatattttaacgaataatttatgttctgttgtaacgaacagacactcacatagtaatatagtaatatatgaaactccaaatgccgcatgagatccgctgcgttctcaagcgatccagcctacacggttatgtgtacagccctccaatccggccgcacgtgtattaggtagtagataaacccgaggggagcacctcaagaagacgacttgtacaatcatatcacatcacatcacanacgactt

SEQ ID NO: 150103 - DNA, 307 bp, Zea mays
  Clone ID: MRT4577_68420C.1
gaaaaaggaaacgacatatttcatggccagctaaccatattttgttaattcaaatatatgacaaaagggcgggaagggcccaaaacctaagggattatcctttaaattatggagtagcccctcaaaccaacccggttagtggggcctttttgtgagaaagttaaacccttttgttttaaaagctaaaaattccgatggtaggggaaaaccattttccataaactaagctttgggctcctgcgtaaactgctgaaaaaaaaaaggggtacttggtacaatggggataacatgctcatacaggattttt

SEQ ID NO: 150104 - DNA, 362 bp, Zea mays
  Clone ID: MRT4577_68421C.1
gctgatacacacccgccagcaaaacgcccagggggggctttatcgccggtgacgccgaccttggccgcaaccgacaagggagaagcgacggcacccgccacgcccaggaagacggccaacggccgcaaccagacagggaaccggcgcccaaaccgcaggacacgcaccacacgcaggaccgagagccaaaagaaccaagccaacgagggcggacaaagggggcctgacgccacaggaaacgggaccaaagacacagcccccatgcggacgacaaccaaggcggaccagatcaccacggaggaccagaccaagcggagaagaccaccgggagcgcgaacgctgtgagaaccaagacaacaaga

SEQ ID NO: 150105 - DNA, 244 bp, Zea mays
  unsure (1)..(244): unsure at all n locations
  Clone ID: MRT4577_68422C.1
gcttccttcaccccatcccgtcctctcccccccacacnnttcctcgccgacaaaatgccgttggctcgataaacactgccttctttttccgcccgaccttatccgggttatcgggcacggcccctacgtttatgcgacgatgatgttctttcacgagtcccgttcagtgggcatgggggggtcaccgctgctcataaagccactgttagtgtatgggttccctccatgacatcaactagtacgt

SEQ ID NO: 150106 - DNA, 149 bp, Zea mays
  Clone ID: MRT4577_68423C.1
gatgaatcgcgtctacgcacgccgcagcccatatttcctaggtagggggggggcgctgcagccactaatcttacctgcaatatccaaagcagatgtgcgggaccaagatctcgatatccatctatacaagcgaggcgggtgctgttcag

SEQ ID NO: 150107 - DNA, 233 bp, Zea mays
  Clone ID: MRT4577_68424C.1
attgggaaataatgaagattgaatggataaaaagaagcaagtaaaaggaacaaagggggatttaaaacaaaggaggtgtatcaatcaagcaatcataaaaaaggcaagggggccaaatagctttgagcaaataaatataatggcccggctaaaaaaatttgaacagctttttggaaccacacctgcatttagtctaggtaaaaatagataaaacttgcgccgttaacaaggat

SEQ ID NO: 150108 - DNA, 247 bp, Zea mays
  unsure (1)..(247): unsure at all n locations
  Clone ID: MRT4577_68425C.1
gggggtgagttctgatcgctgacagagcagctagcagcctacttctgatggacgcggccatggcgctcgtcttgctcttcttctgcgtcctcctgctggcctccggcgccatcttttttctccncatccgccacngccnngggcgagcgggggctnancgncattgnctggcacagcccgaagcatcgggcaagcagctgcagctgctattgnaactagccttcattttggattcggcaccgccgcg

SEQ ID NO: 150109 - DNA, 312 bp, Zea mays
  Clone ID: MRT4577_68426C.1
ggggaccccggacacgggggggtcaacttttttagggggggggggaaaagaggggcacatttggtctgggggggggggggctcaaacggccttcatattcatctccgggggtttggggtacacggggggtcattgggtcttttggggggcgcccttgggggtcacataggggcgggccaaaaactttggggtgtccttttttttcacaggggatttctgggtgatggggggggcggggcgagatacaagccccacggggtttccggcaagggggagggcatccttggcctttttgggccggggggggggggc

SEQ ID NO: 150110 - DNA, 384 bp, Zea mays
  Clone ID: MRT4577_68427C.1
ggcgctgggcagtgtggaggtcgttggagtcacttccgcgtcaccagctcctgtgcctgccagtcggtgcccctcccgctccagccatgctctccgccctcgcccggcctgtcagcgctgctctccgccgcagcttcagcacctcggcccaggccaccgcggacctggccggccgccgggccgccggaggcgtcgggctgccgctgtcactccgcctggagtcccccccctgcctggcacgccccgccccctccggtttcgcgcccacacccggagtggccgcagatctgagccacatcgagaccaaagccgctgtgaaaggctactcggacctgaacagctgctgactgcctcatgcgtgcagcgactatgagctcgtcgacc

SEQ ID NO: 150111 - DNA, 1024 bp, Zea mays
  Clone ID: MRT4577_68428C.1
ggcgattgggttccacgcgtccgcagaactgagccaacggaagaaaaaaaaagagagctactacagcaatggccggaggagacgacctgaagctgctgggcctgtgggcgagcccgtacgtgctgcgggtgaagctcgcgctcagcctcaagggcctgagctacgagaacgtggaggaggatctgagggacaagagcgagctcctgctcaagtccaaccccgtgcaccagaaggtccccgtgctgatccacggcggcaagcccgtctgcgagtcgcaggtcatcctgcagtacatcgacgaggccttcgccggcaccggcccgtccctcctccccgccgacccctacgagcgcgccgtcgctcgcttctgggccgcctacatcgacgacaagatgctgcccgcctggaaccagtcgacgatgggcaagacggaggaggagagggccgaggggaagaagcagtcggtcctgacggtggagacgctggagggcgcgctgagggactgcggcggccaagggaagcccttcttcggcggggacagcgtcgggtacgtcgacgtcgtgctcggcggcctgctcgggtgggtgcgcgcgtcggaggagctccacggcgtcaggcccttcgaccccgagcggactccgctgctggcggcgtggtcggagcgcttcggcgcgctggatgccgtccagacggtgatgcccgacgtcggcaggctgctcgagttcggcaaggcgttgatggcacgtctggcggctgcggccgccgccggtgcaagcaataactgaaaagggcatggtgtatccgtcatgtgtttcaggttttcgtatagtgaacaaaaaaggaaaaaataatgctagctacgcatcggaacgcggctttgtgctttgccgtctcgccgttagttcagcttatgtgatgtgagtgttgccgtgcatgtgtgtgttacttcagatgtatcctgttcggttcagtgattatatggaacattttattttggttggataaaaaaaaaaaaaaaaaaaaa

SEQ ID NO: 150112 - DNA, 259 bp, Zea mays
  Clone ID: MRT4577_68429C.1
actactttactcagagtctagagctatcttttgctgtgctcgcgagaactagagaagcaccatggtcttctacgatcataggccgccacctgcccgtatgcgccgcgagcaaagacggcgcgtccttgtcctaggggcgcgccgagcgccaatgccgacacctctccgcgcagtcgccgcccccgctggtgatggccggatcaccatgggccacgacctgtggtacggtccgtaccgcgtcaagtacctggcttccttc

SEQ ID NO: 150113 - DNA, 400 bp, Zea mays
  unsure (1)..(400): unsure at all n locations
  Clone ID: MRT4577_6842C.1
ctcggagtaatcattataataagtgttatttgaatttactggtcgttgttttataacttaaatacttataaaatcatgggggtggcagcataatagccttacacctaatctctatattctcagctgtcttattagcgaactagctcacattaattgcctttgctaactttccgctttctatatgtgaaacataccctctcatgttccattaaataatcttcctcggccgtggcggattccctttgcgtgatcgctacacttgccatctctctatcactcactcgttgcgctcgcttgcttccctttntcgccgcgatatgggggttctctctggccagctttcttttcttcactcactttcgtctaccgcccgaaattcttcggtgctcccctccttaaa

SEQ ID NO: 150114 - DNA, 543 bp, Zea mays
  Clone ID: MRT4577_68430C.1
ggccgccccttttttttttttttttttcggatcgaatgtcacatctttactatataataggagttctgtacaaaataaataattatattataaggagacaacggtccagcaacccaaagttgactgggagacgacgacctagacctctcacgaacacatcacagcatcctccacgcgcctcatcctgcggtacctgttcttgacctgggacttgagattccaggtaccaacttgctcttcaggtgacatgtgtcctcaccgcgtgtttcacggcgcaagtacagtcgtctaaaagtctgcagcacgacggcgatccttcaatgctgacaacgaagcactcgcacaatcttcaacgctcggcgaagaggcccggtccgctccacatcgcacgcacaggaagtacctggacgtccagtgcgtgacttgtcgaacaccctctcggcaacaacactcacgttctgtctctgcttcctttgtttctctcggcggctgtgaatatgacggcgcacgcccggtgcttttctctagggcgaccccggccgg

SEQ ID NO: 150115 - DNA, 505 bp, Zea mays
  Clone ID: MRT4577_68432C.1
cccccctctcgagtttttttttttttttttttttttttttttttttttttttttttttttttttccccatcccaaattttaagggttaatatcgaagggaaaaattcagggggttatccttccctaggaccgggggggaaaaaagtttttttccagggcataccaaaagggctaaaaaggcttttcgggacccctactggggcaaaggaaacaaagggtttcatgccccacatgaaaatatagttcaaaaaagggttgatcccccaaaagatgccaaataaaaaaaaaccgggccccataagggaaatcgaatccccaacaaacctttttcacagggcaaaaaacctgccctccttttccaaagggggaatctataaaagtgggggcctgggttttcaaacagctcgaggctcattggattaaatccaaaccagtccttgcccggggataaaaaaccatggcacaaaaaacaacttgacggccgcctgacaagcagggggatgct

SEQ ID NO: 150116 - DNA, 236 bp, Zea mays
  Clone ID: MRT4577_68433C.1
gtagcaagaagactagaaccgaacctgaccatggcctttgtgcgccgcagctacaggttcgagccgatctccctatacaggtgggacccctttgagggcaccaccttgggctccggcggcagcagcagtctgttccgctcgataacgcggacgatatcggagaccgtagccttggctgggaagcggatgcgacagaaaagagactccagaggcacacgtgttcaaggcagacgtac

SEQ ID NO: 150117 - DNA, 3081 bp, Zea mays
  Clone ID: MRT4577_68434C.1
cattggattcctcgagtctggccgggaaaaaagccacggctccggcagggcagagcgtttatccaactcggctctcagcgactgcccaccaccaccactgaggattcctcttccggcggcggcggcggcggcagcgatgctcctcctgcgcgccaacgcgctcgccgccgtaccggtgtccttctccataacgccggcggcctcctatagctgcttcccctggccgtcttcatccaccactgccgcgagctgctccgtcggctcctctgccaggctcgacgccgccgtgcagtacgacccgctccgccccggctccgatgcgtgggcccatcccgacggcatggtcaccgcggagggtgacgaggagaaacagcgctatgacacggagggggagtccaacgactgggaaggggaagggccccaaggatcatcagaccccgagggcatcaacgtgccgcgccagcgctacatcgccgtccccaaggaggccctcctcgatgctgtcctctcgcagtccgcgtccgacgacgaagacgccgctggcatgaatcggtgcggcagatgagttaaccacagatttcacgccgagcacaagaggatgctcgaggatgtgcgcacctcctacatgctcaagctactccaccggtatgaggaaaaagagcaggatgacactaagatcgagtctcgctccggctacgtcatcgagatagtccgcttcggatttttcgacaaagggcagcctctctgtatgatggaactttatcacctgttggtcctcgtgaaagactcttaagaagaccccagaccccgacttcacagacaagagttgcttttgcagctcaatttcagcgctcaatcgtaaccctacttcgtaaaggacaggtgaggccacacttcccaccaagaattatccttacaaatacctgggatcccgcaaacagagtatcttgcaacaacaatatcgggtagatggtgaaagcttcttttcgtattctgtttgggaggtctactcttcaggaaccagcattccaggagttaatactactttacactgatgaagtttttcaatgtgaaatcttgcacaatgtctttttcagcctctccaaacccttgaaaaagccagggaaatggcttaatgagttcctggcaggctttgaaaagatcaacagataaccagggatttcagatctggatagacaaactgagactatggcttaaagagcaaacttatgcagataattcactgctgttgaaagaaaaccctcctcgggacaagcttagttctgatcagttacctgatgcagatgttcccatttggatcgcttcacaaagggctgcctctcgtcatgagggaattatgtcacctgtttgtcctcatgccagactgttaagaagattgcttaaatggactggactaataccttctctgccagaagcaacgataaaatccaacaatgaaactaaacatcttgaaggacatgtgaggccaaactttctaccaagaattacccttgctaatatatgggaacctgcaagcagagaatcttgcaataacaatatctgggagatggtgaaagcttcttttcgtattctgtttgggaggtctacttttgaggaaccagcattccaggagttaatactactttacactgatgaagttgttccaagtgaaagctaggaggagatgggtccgctgcaactgaaaatttatgagaggattccgatcccagatttgccagtaagtgactgagtctcagataaatcggaaaaggaaaatttatggttttcctagatgtttaaggaaaacaatgtttcccagatctaaatacatttcattaatatcatcccagtcagaaggcttgctatctattgccgttactcagatgagaaacctattgtcttgattactttagtaccaatgaagcattaataaacaatcttcacactgttctttgttttgtcatcatagtgacggtcatggtaaaattcgtctgcaggtagttttcccccacaagaaattgtccttccgcatcctagatacagtaattctgtctaaccttatctttttcagtctagtcacctgttgtctgtgtggacccttactatatgattcttttctgttcctgcacataggcttgttgatagtttgcttttaatgcaggtaaggctagatattgctactgtaataggtctattggcatatgtggtgaactacaaatttgagagtttagcctcatctccgtcagcttttcttcttgatatagttgctggtactgcactcgtcatacttgttttccgtgtagcactgggctacaaacagacccgggataggtaccagcttctggtgaataaaaccctctatgagaagacattggcaagtgggttcggctcggtttacttccttctcgatgcttctgagcaacagcagtacaaagaagcacttttggcatatgccatgttgctctgcagaaagaagtatgaggtctcatctcgtgcaagcataagagatgcatgcgagcagtttatgcacgagaaattcgaggcaaagattgagatgccgatcgacaaggcaatggagacactgctgcggttggggctggtgattgagcttcccactgatggtgggtcgagcgtgattggtctcccatgctcggaggcatacaggatcctgaaaagccgttgggacggcttgctggaacaagatacagaacaaggctgattagaacgagacatgtacgttggtggcttggagtggagtgggatgggatgccgtgctggtacatactcgacgcgtcggcaaagctcactcttgtttgtatgtatacgtaccagttgttgcagcaagtgtatatgtgctagctacgtgcatgtataatcgtgatctagtttgttgtacacaaacgattgcagtgtatgtatatgggagcacatgtttttttcggaagactagccatgtgtctgtaagtttttctatttgtaagttggtttccatttataaatatagagcataaacactgttctgttaaaaaaaaaaaaaaaaaaaaaaaaaaaaaaaaaaaaaaaaaaaaactcgagggaggg

SEQ ID NO: 150118 - DNA, 470 bp, Zea mays
  unsure (1)..(470): unsure at all n locations
  Clone ID: MRT4577_68435C.1
naaanaaaagtctggttctgattgctgtttacaggttagaggtgcagcgtatttacaaagagatataagagttatcacttatcatcagactgcttggtttgctaaataaaggtgaatttagttactagattatgagaccccgtgttttgactgccgcaatcgtggttcgcggcagcagaaaggttacctagagtctaaaagtggcatctcattttggtattatggttctgaccaaatgggatatgatgtgacttgtgcggttgttttggacgcctggtgtgttttgctaccatgttccaccagacgacccgggggttctgtagtgtcagggatggatgatgtgtttggtgtacagcatcactggtgcttactgttttaaatcttaaaagtgatgttgccttgccttaatggttgatggtgtctgttctcttgtccattccgtcatgaaagttaaaaaaaaaacatgcttg

SEQ ID NO: 150119 - DNA, 352 bp, Zea mays
  Clone ID: MRT4577_68436C.1
gttttatgatacttcacactcgacgacgattacactcgcataaaatggagtcggcaatttcataacgtgctccggcaccaatgtttagagtgagaagagatggcaggaaagggtgatgggccacagatgggaatctatttcgtcacgacacactgttgacttggggtgtggcaggacgaccgtgcgtagcatgatcgtctaccaccagaggaagggcaccacacgcttgtacggggtcttcaccgactcccagcgcctcatcggagatgcggacatgaaccaggtcgtcatgaacgctactaacaccgtgtttgatgactagcgcctgatgggcaggaggatgagtgatgcc

SEQ ID NO: 150120 - DNA, 840 bp, Zea mays
  unsure (1)..(840): unsure at all n locations
  Clone ID: MRT4577_68437C.1
cttctcccacttgccgcatcggcgccgcggggatgaagcgctccgccgacgcgatgactgagccggtgaagcctgtgttcctcaccaaggcggagcgggagcgcctcgcgcttgagcgccgccaggccgccgtctccgaccagcgccgcaccgcgctcgacctcatccagtccctgccccggccccctccgccgccgacttccggtggtcctcccccgtccggctccaaccccgcacgtcgcgactcctccaactccaaccgcgactccgaccgggacagggaccgggaccaagaccgggaacgccgccgcgacgacgactcccgccgcgaccgagatcgggatcgagatcgagatagggaccgcgaccgagatgactcctcccgccgcgacagggaccgcgaccggcgcgaccgtgatagggaccgggaccgggaccgcgacagggatcgcggggaccgggagagggaccggctggagaagattgcggagcgggagcgtgagaaggagctcgacgcgatcaaggagcagtacctcgggtccaagaagcccaagaagcgggttatcaagccctctgagaagttccgcttctccttcgactgggaaaacaccgaggacaccagccgggacatgaatgcactctaccagtcgccgcacgaggcccggctgctctttggccggggcttccttgccggcattgaccgacgtgagcagaagaaggcggcagctgtgcacgagaaggagacccgtgcagagctgcggcgncaggcncgnntgtggaggaccgtccccgaagatgatgcggtaagataagaaagaagctgctgctgctgaaattatg

SEQ ID NO: 150121 - DNA, 820 bp, Zea mays
  Clone ID: MRT4577_68438C.1
ctcgaggcccggccgggataatcgcaaaccctcctcccctctcgctgcatcggcgccgccgcgatgaagcgctcggccgacgcgatgactgagccggcgaagcctgtgttcctcaccaaggcggaacgggagcgcctcgcgctcgagcgccgccaggccgccgtctccgaccagcgccgcaccgcgctcgacctcctccagtccctgccccgggcccctcctccgccgcctcccagcggcgctcccccgtccggctccaaccccgctcctcgcgactcatccaactctcatcgcgattcctccgaccgggaccgagaccgggaccgggacagagacagagaccgggaacgccgccgcgacgacgattcccgccgcgaccgagatcgggatcgagatagggaccgcgaccgcgaccgagatgactcctcccggcgcgaccgcgaccgagaccgagaccggcgcgaccgcgaccgtgaccgtgaccgtgaccgggatatggagcgggagcgagatcgcgacagggagcgtggggatcgcggggaccgggagagggaccggctggagaagatggcggagcgggagcgcgagaaggagctcgacgcgatcaaggagcagtacctcggctccaagaagcctaagaagcgtgttatcaagccctctgagaagttccgcttctcgtttgactgggaaaacaccgaggacaccagccgcgacatgaacgcgctctaccagtcgccgcacgaggcccgactgctctttggccgggggcttccttgctggcatcgaccgacgtgagcagaagaggcggcagctgcgcatg

SEQ ID NO: 150122 - DNA, 2578 bp, Zea mays
  Clone ID: MRT4577_68439C.1
atgaagcgctcggccgacgcgatgactgagccggcgaagcctgtgttcctcaccaaggcggagcgggagcgcctcgcgctcgagcgccgccggggcgccgtctccgaccagcgccgcaccgcgctcgacctcctccagtccctggcccgggccccccctacctcgcctcccagcggcgctcccccgtccggctccaaccccgctcctcgcgactcatccaactctcatcgcgattcctccgaccgggaccgggaccgggacagagacagagacagagacagagacagagacagagaccgggaacgccgccgcgagggcgattcccgccgcgtcggagatcgggatcgagatagggaccgcgaccgcgaccgcgaccgagatgactcctcccggcgcgaccgcgaccgagaccgagaccggcgcgaccgcgaccgtgaccgtgaccgggatatggagcgggagcgagatcgcgacagggagcgtggggatcgcggggaccgggagagggaccggctggagaagatggcggagcgggagcgcgagaaggagctcgacgcgatcaaggagcagtacctcggctccaagaagcctaagaagcgtgttatcaagccctctgagaagttccgcttctcgtttgactgggaaaacaccgaggacaccagccgcgacatgaacgcgctctaccagtcgccgcacgaggcccgactgctctttggccggggcttccttgctggcatcgaccgacgtgagcagaagaaggcggcagctgcgcatgagaaggagacccgtgcagagctgcggcgcaaggctggtgtggaggaccgtccagaggatgacgctgtagataagaagaaggccgccgctgctgaaatgtatgacgcttttgatatgcgtgtggacaggcactggtctgagaaggcgcttgaggagatgactgagcgagattggcgtattttccgtgaggatttcaatatctcctataagggttctcgcataccccgaccaatgcggaagtggagtgaaagcaagcttggcaccgagttgcttcgcgctattgacaaggctggatatgaaaaaccatcaccaatccagatggctgccattccgctaggtctacagcagcgtgatgttattggtattgctgagacaggttctggaaagactgcagcctttgtactccccatgttgtcttacattacccgattgccgcccataagtgaggagaatgaggctgagggtccctatgccgttgtgatggcacctactcgtgagcttgctcaacaaattgaggaggagactgtgaaatttgcaacctatctaggcatcaaagttgtctcaattgttggtggtcagtcaattgaggaacagggtttcaagattaggcagggctgtgagattgtaattgctacacctggtcggcttcttgattgcttggaaaggaggtatgctgttctcaaccagtgcaactatgttgtgctcgacgaggctgataggatgattgatatgggctttgagccgcaagttgttggtgtccttgacgcgatgccatcgagtaacttgaaacctgaaaatgaggatgaggaacttgatgagaagaggatttacaggactacttatatgttcagtgccaccatgcctcctgctgtggagcgtcttgctaggaagtacctccgaaacccagttgttgtgacaattggtacagctggcaaggccactgatctgatcacccagaatgtgatcatggtgaaggagtctgagaagatgccacggctccagaagaatactcacagatctcggagacaaaacagccattgtgttctgcaatactaagaagacagcggacatgcgtgctaaggatctggacaagtcaggcttccgcgtcacaacccttcatggtgggaagtcacaagaccagagagagatcagccttgatggatttagaaatcgtcggttcaatgttcttgtggctactgatgttgcagggcgtggtattgatattcctgatgttgcacacgtgattaactatgagatgcctagttcagtcgacacatacacacatcgcattggaagaacaggtcgtgctggaaagaagggggtggcaacttcatttttaactttagagaacactgatattttctttgatctgaaacagatgcttatacagagcaacagtcctgtgccacctgaacttgcaaggcatgaggcatcaaaatttaagccaggctcgattcctgatcgacctccaaggcgaaatgatacagtctttgcaaatcattgaagcaatctacctcagaagggactgaagatcttttggactattatgagctcaacttctaccatagagggaggaatctagattagtatttatgaggtataaaacttcgatggttagaaatatgtacttatgaggttgtaaaactatgacgattatctttggttttatttctgtttggaaactggcctcattgtcataactttaatatgttttggtggtgatttagctgtggacatgtgtagcttatcataattttgttctattctgcaagatttgactaaaaaaaaaaaaaaaaaagcggcc

SEQ ID NO: 150123 - DNA, 397 bp, Zea mays
  Clone ID: MRT4577_6843C.1
agcttatgtcgcatgcacgctacgtagctcggaattcggttcggctttggttgattgacaagggtaggaggaaacttctaaaagccgatcagataggaagccactcaggtgttggccgtggaagaggaaggggggacgtcggttctaaacctggaagcagaggcattggacgcggccaagatgatggaggtagaggcagtggtggccgtgaaaggggtggaggcggaccaggtgaaggaccccaacaccatctttgtcttcaagttccgcacccactttggaggaggaaagtccactggtttcggcctcatctacgacaaccttcaggttgtcaagaagttcgagccgaaataccttcttataaggaatggtcttgcttactaatgttgatatctcc

SEQ ID NO: 150124 - DNA, 282 bp, Zea mays
  Clone ID: MRT4577_68440C.1
cggcgccgcacagcccgccgagaggcgacgggaccgaggaacgcgccgagccccacgaaagagaaccgccacccacagcccggggaccgccgcgcacggcgaagacgaaggggagaagagagagaccggcgccagagcacgcgggcgcgcgcgcgaaccggacggcccacacacagccgcgacgcggacgaagagcaagacgaagggagccgaaggggggcaagaagccaaggagaaggcgcaccacgacgaaagaaggccccccaggcgacagcagagagg

SEQ ID NO: 150125 - DNA, 546 bp, Zea mays
  unsure (1)..(546): unsure at all n locations
  Clone ID: MRT4577_68441C.1
cattgggtacctcgagccggccgggaaaaaaaaaaaaatcaacccaccacaagtcgcaattcacaccagcgcgacgacaggaagaagagtttctccgccgcagtcgccgaaccacccggtgccgaggccctaggcgcgcttgcttccccgccgccagcatggcaccgaagcgcccggccgccgcctcgggatcggcgtccgaggcatccgacgcggaggcggacgcgggccaccaccagccatcatccccgtctccgtccaagacgccgccgccgcccaaccctaaccctaagtccaccgccgctggccccacctcggcggcggaggactccaccgcggctggatccggctccgaggccgcctacgactctgacgcggaccaccgcaccgcgccccgtaacgcggcgtcgccctcgagcaagcccaggagcaccaggccccgctcgcgctcccgctcccgctccccggacgccgcctcgtattccgacggcgtggcctcagacgctgacgccgacccagncgccggagacggcgccgactccgccg

SEQ ID NO: 150126 - DNA, 232 bp, Zea mays
  Clone ID: MRT4577_68442C.1
cccactcatcatatcactcgattccttttatatagcccacaccaagctcatgtaacgtggtaaacgcactagggagatcggtccatgtcctctacaaaaagacactgacaatcaatacaatccttgctcatagcacatactgattacaccttggacgaatacctaaccattggggaacttactactcatgatgctataaaacactatgacactgtcacacaaaccatatatg

SEQ ID NO: 150127 - DNA, 562 bp, Zea mays
  Clone ID: MRT4577_68443C.1
aaaccccacaaaaacgggcccaaagaaaacccaaacttttggttcggaaaaaaaagggggggaggggggttcatcaaaacgatttaaactttaaaaaaaaaacacccccctcccggttgggttgaaaaaaggcaaaggcaacctccaaaggggggcccagggcccaaaaggaccccacccttttttttttttccaagcaaagggttttagaaacaggggggggaaaccagggcaccccccaaaaaaaggcccgggggcttaaccatcgaagggggggccatgggggggggcctaaaaaaaacccctttttttttaataatccgaggggtaatttttttttttggggcaaaaaaccccctctccccaacaaaagttgggtttttaaaaccccccattttaaaactggggcggctcctttcaaaaaccgaaaaaaccctgggtcccccccccaaagggttttggtttccggaaaccactaaaaccaaaggcccctttttcctcctaaaaggcctttttctaaaaaccatagccaaaaccaccaatggtttgctcctcgtttttc

SEQ ID NO: 150128 - DNA, 266 bp, Zea mays
  Clone ID: MRT4577_68444C.1
cgggcgcgtgggcgagccggggccggagccagcggtgccgccgtccccgcacaaccatggttccctctccgtacccgtcgctggatagcgcggggagctacagcctcggatccggccatggctccagggacggccagaagctgtaccccgccaagccggcgggcggctggaccgtcgacggaacctgcccttaccaccgctgccacgcgccggagccgtacggctccaggggcaccgcaccgagggcgcgctcgggatccgcgctg

SEQ ID NO: 150129 - DNA, 533 bp, Zea mays
  Clone ID: MRT4577_68445C.1
tttccatagatagagatagcatagtctatcatgaagggagacaagaatgaactgggcggtgcggtgcagaccatactgctggctctgcatgtcatgtcagctccaccgactggcatggccgtccgctcgccgagcggagccgtgtcggatggttccctcgacaccacacccaacgagactatgctgcccgccacgctgcgctacacagaggagacatgaaaatacactccctgcttcagtcctgtttggtcctgcaactgtactgatcggctctgctacatcatatttactcctgttgcttgaggtgatgccattccgccaagactcttatcttacatgcatgcgccgggcgaagaccactacgctgcctctcgtgaggttctgttcaagtgaggcatgattcaaggcatccatgtatgctttactgatatgcatataaactagccgtgtcacggaaccgaacagaagggggtgttgttttatttacctcttctggtgatcaaataaaggtaaaatatatgtgggatgtgtgt

SEQ ID NO: 150130 - DNA, 393 bp, Zea mays
  Clone ID: MRT4577_68446C.1
aaatgccgaaaggatggtgacgctcccagagatcctagcaatgtgccgaaagatcggaatcagccagaaagtcggtcagacgtacccgtcagcatcttccggagacgtctccgtgcagcagaatctgggggataacataagcctgatcgaaatgtattttctgtcaatcgatcacgacggccgtgggtttctggactttgagcagttccgggcgatagtcaaaatgattagatctaatccggatgtcgcagacgtttggcgcaagctgtctagcacggacggtatcagcagacaggcccggaatcacattgccaactttcgcgcaatggctgcgtaatagtcagggttctcgcgctacagatgacgagatcctgcgaatgtttcacgagttca

SEQ ID NO: 150131 - DNA, 364 bp, Zea mays
  unsure (1)..(364): unsure at all n locations
  Clone ID: MRT4577_68447C.1
aaataaaaataaaaaaaaaaacaaacaatataaaaaataacaaaattacgggcacaaaacaaaaggacataatagggttatctataaagtcacctaaaattcaaatcactaacacaacaatttacaacatctatgactgaaaaaacacctgtctttacccatcttaatcaccttgcaacacatcccccttttgccagctggctttatagctaataggcccacacccatcgcccttccnaacttttgctctttctgaatgtcccattgaactctccctgcatcggttcattaaacactgctactgtaatgactactctcatcgcaaccttatcactttcaactacctatctcccgttccttttgc

SEQ ID NO: 150132 - DNA, 932 bp, Zea mays
  Clone ID: MRT4577_68448C.1
gcagcgccgtcgttggcgctttccttctccttggcgccgccaccttcttagtctggctcctcctccgcccgcgcgccccggccttctccctcacctccctggccctctcccgcgtcgcttactcccccgccaactcctcactctccgcctccttcgacgctgccctcctcgccgccaaccccaacgccaagctctccgtcgcctacttctcacccctcgcatccgtctccttcgcgccctcctccccgctcgccgtcgcctcgctcgcgcccttcggccagggccccggcaacaccaccacgatcgccttccgcctcgtcgtagaggatgcctacgtcgggcccgacgacgccgcagcgctcaagaccggcgccgggggcgctgtcgacgtcgaggtcaggctcatggccgttgccgtcttcgacagaggtggctggcgcacgcgccggagggtcatgagggttatgtgcgatggcgtcaaggtggttttccgcgggaagaattccactgaggcggccttcgatgggccgccaagaaggtgcgatgtcgtgttgggaaggagttaaggatcatcataacaggtttgctgactactctggatgctgatcggggggtacaagaagctaactggcacaatgggggtgcgtttatctgcatttgatttgatgagcaatactcaagctgggtaaccatgctttttatctggctgtaataggagtagcgagtgagagaagtctggaatgatccatatgcttggtgggtaatgagtggtctgtgtagcttcaacagaaatgtttgtgaaagttacggtaagaattactgtgcacgcacgcgtggtggttagctggtttatctgggcgtgtgctatggagccttgaaacgaatcgttgtacattgaactagcgcttggaatgaagccccggtattcttgg

SEQ ID NO: 150133 - DNA, 619 bp, Zea mays
  Clone ID: MRT4577_68449C.1
gtcttcctgcccaaatcgttgccggctacgccggtgcctcaatctacttggggccgttcacccggcgacaagcacacaggcttgggtaaccaccaacaaattaaaattgtcagccaacgtccgtgaatcaaccagcggtggcagcaccaacaatacagctcgtgttcgctgtggaggtgggagatgctttgatctgcctcaagagccaatagtgcctttatgtggacacctattttgttggccatgcatttaccggtggctgcacatccatactcattcaccagagagcccagtgagcacagatcttgtggaggaagacacgcttgttccactttatggtacgcggaaaggatcgtgttgactcaaggtacaaagaacatgcccattggtgagattaataaccgcccaactggtcagaggcctgacctagccccccaggccgttgctacacaacaactttgtcactgccaagttcaatgcgactccaggttgattggcacacgcatgcatttggctaatgcgcgctggcgaaactacgcattctgagctgctgtctggggactatatcctatgcttagcttccaagacatgtgtttccacatactgctacttatgcgca

SEQ ID NO: 150134 - DNA, 391 bp, Zea mays
  Clone ID: MRT4577_6844C.1
ccttgccctgcccgcacacaccacctgtccccgcacggccgcaccgctccgctcccgaggcttagggctccggccgcgctcccttcccttcccggcattcccgatctctcgccgccgcccgcctggccttgatctcgatcgccctcccctctccgctctctctccggccggccggcccgggtttgtctcgccgctattgggcctcggcacgctgcgatggtgtcgggcgtgtgcgtggggacggaggggcaggtggaccctgaggcggtggcgcccgctgtcgcggaggaagcggtggtgccagcactccgcagggaagtcgtggtggggtaccccctcactagtaaaaaggccaagaactttcctcaacccaagctccgggggctcgcca

SEQ ID NO: 150135 - DNA, 365 bp, Zea mays
  Clone ID: MRT4577_68450C.1
aaaaaccaaaaaaaaccccccaaaaaactatgggaacaccattcccccccaaaggtaaaattggggggggccggacccccaaaaaacccaccgggaaaaaaaccgccggttggggtaaagaccacaagggaaaaaaaaatttttcctccaccccaactgggcgcggggggggtatgaacatggaaacatcgccccccggtttaacccaagttaaggggggggccctggcccaaaaccccaaaggggcccgggtttccttaaatgggggggaaaaagccattctcccccaccccaggggtctaaaagcaccccccatttccgggtagggggcccgcaccacgggcatcctttaccggagaaaaggg

SEQ ID NO: 150136 - DNA, 382 bp, Zea mays
  Clone ID: MRT4577_68451C.1
acaccaaaaaaccccctgggggacaaatacctataccccccttgggtctgaaacccccctctatttaaatgggcgcagccctatttattagctccacaaaaacatttatccccctgtaatagaaaaaaaaaccttatttttgtcccttaccccaaataaagggggtccccctataaaaaaggcccggccccgcgcttttggaaaggctgcttctatgatttggggcgaaaggttcttttcgcggggaaggcccccccccctggcgggcccaattcctttgtttggcgaatcggttttaaaagaacacaatttgccctgggggaagggtgaggctccattcccaagtgccccttctggggtgggcggcccaccctgtgcaaaa

SEQ ID NO: 150137 - DNA, 754 bp, Zea mays
  Clone ID: MRT4577_68452C.1
aattcggcacgagggtggatgccatcggggcgctcaccgggacaacatactcctcgacagcgacgccgccgcgcttccttgaggaaagctcgtagctgcccccgcgcaaagctccggtctttcttggccctgacccctcctccccgccgccggcgccgcgtgagcacgccgcgcttggcttgatgctcgacttctgcgcgccccacgggcccgccaagctcccggttgcgtctgtcgctggggtgcgagtcgccggcaggtggttgtggcgatcggcggcggttggggcggtgcgccatggcgtctccgcgcgggcctcatccttcggttcccggatcgggctcgattctcagaattttcacacaagggacctctcccagttgttgtggatcggtccggtgccaggtgacatcgcagagattgaggcctactgccgcatattccgtgctgccgagcagctccatactgcagtcatgtcagcactctgtgatccagagacaggagagtgccctgtacgctatgatgttgaatcagaggatctgccggtgctggaagacaaggttgctgccgtccttggctgcatgctggcgttgctgaaccggggaaggaatgaggtgctctcagggagatcaggtgttgcaagtgccttccagggatctgaggacagcactgctgataggatcccaccgctcgccttgttccgtggagacatgaaacgttgctgtgagagtatgcaggtggcgcttgcaagcta

SEQ ID NO: 150138 - DNA, 305 bp, Zea mays
  Clone ID: MRT4577_68453C.1
cgttttgaccaaggagcacgcttgggtgtgtctgtgcgaggtgatgagaccttatgaagaactggacattcttaaaggcagttgatgctactatgcttctgctgaccttgcttatacagaagacaaaattagtacagagcatgcgggcaggcggcgatttgaggacctatacgacaatgctgtaaactagcctgctgtggaccatattgagcagctaaatggtatggatagaaataactgacgtcgtagagggccgctggtgatggatgatggagccctacagatggatgggcagatagatggac

SEQ ID NO: 150139 - DNA, 590 bp, Zea mays
  Clone ID: MRT4577_68454C.1
atataacagatcaattaaatgcttcatgtgtaagcaacaatacataagtattttcaatccaaacgaagtggtcttgaggtagattagacatacaagagtgaataaaatgaggttcctaacacaattaaacaagtagattgacaactagaacttttgatcctagaactactctccactataacacttgctcattcattagttgcatcttcagtcttctaaccattcaagtgcgcttctcagtagttggcttcacccttttaagatgtgtgcgaggccaagcaacacacatgcccacagcatcctccaaagttttaagatctccgtgtggtcgaggtaatctttcatcttcaacattgttaagataatgaaccgcaacagcataatatccatccccaagtacagttcctccaatttcatgagtagtatctctagatataagattaccaacagcaacaacttggcctagttttcttttccttgttgagtacaacaagacagtcttctgtttattctgttgcaatttgctttgttgttgttgcttgctttgagtttccttatcagacatttctttatctagagatagtgatcca

SEQ ID NO: 150140 - DNA, 290 bp, Zea mays
  Clone ID: MRT4577_68455C.1
atgatactgtatgttgtttttactacctttatttttgaatttttatttgttttttatgttatttttaaactaaagggggacaaacattaaaaattggagggagaactaaagactgccgttaaaatgcggggcacaacaaaatgagggggcaaaacaaaagaaacatgcaaaagggggggaaagcccccaaaaaggaatctgggggtctggggggacctcccctgggggataaaataaggagatgggacgggggggtattgccccagggaaaaaaaaaacaaaaaagaggg

SEQ ID NO: 150141 - DNA, 326 bp, Zea mays
  Clone ID: MRT4577_68456C.1
gagcaacaacgtaaacagccataattttttttaataacccgggagcaatgcaggggaattaacaactggtacaacattagggggtggaaaccacacaattttttagaacagacacacataacacggttgcgggggcaacttttggcagatcacgggataagggcagcacactggcctgatgctgcgtaatcagcaaacttttttaggacttgtgacccttggggccattcttgcccttattgaacttagaacccgcctccttgtagttctttttgagcgcccgcaggttcttaagggccttagagaacttacctttcttcataccc

SEQ ID NO: 150142 - DNA, 383 bp, Zea mays
  Clone ID: MRT4577_68457C.1
cgcccagcgaggccggcgagctgctcccgcggatggtcaccgggctcatgaaggagctctgcccgctcaagatgctggacaagttccccgcgatcgacgtcagcaagaacgcgcacctgctcgaggtgctctactatctgctcgtgccgaagccagccctcgacggctgcgcggcggatgccgacgacgcggcccacggcagtcgccgcgaagaccgctacgacatcgaggtgcagctagtggaccgcggcagcgactgcggcgactaaaagcagaaaccagccgcctgctgcgagtacatgaagcagctgctactcaccgggtgcagcatggcgtccggtctcaagacccgccggatgcgcttcttgacgcggacgatcgcg

SEQ ID NO: 150143 - DNA, 443 bp, Zea mays
  unsure (1)..(443): unsure at all n locations
  Clone ID: MRT4577_68458C.1
cgatatggtttgcgtcgcgtgcctgctgccgctcttcttgatcccgctggtcaacgccctcccttacctcgtcgacctcatcatcagcaaggtgtatcggctatttggatgggagtacaggagacctgaaagagccccaccagcttgtccttacaagcctgcagctcagaagaacgatgagggtgcgagtgaatcaaaacccctagtcaatccacatggtgctgcggcagaagataagaaagaggaataattcatgtattggatcctgctcgtgtcagcaggcgcttaattaaaatggagaccactgctctatatgcggacatatcgtaactaagaaataattgctgtgattgatgaatatgtatctggattgacgagtcgatgaatgtatatgtacctgtaatgccactccggatccttaccagttgcgcgactaanaaaaa

SEQ ID NO: 150144 - DNA, 678 bp, Zea mays
  Clone ID: MRT4577_68459C.1
ctaccttcccctacgagtagagagcaactgtcgagtactgatactacacccggacagcgtgatatctcgagaggctgattgacagctacctagtttactaactgagcggcatgagacgccccacgacctgctgttcctccgtcctgccacatcccctggccttctcacttcccccgagctccgcccccggagcccaaccgcgcatccagcgcgcgcgcgagcaatatccctacatcgcctccggccaccctctttcccgcgacaggatctcaccgcgctgcacctactccggtggcgccagcgctcgcgcctggccatgaggagctacccccggtggcgctccgacatctccttgagatgtcgggagaccaccatgcgtccggctgctacgacgggctgtgcgcacgcctcgaccagcgcgccgagctcaggtgctgcttcacgacgcggatcttcaatctctgcctcacggcttggattaccagatgtcgctctcatctcatacggggaaatgatctgatcaggcccgtctgatcactgaagcattttcctcccttgcgatcagagatgcgtataatggtcacggaactgtacgaatgttactaggacagagccaggatttattaatgctgaatttgctgggaatattcttgaagatccggtgccaccaaaggcatg

SEQ ID NO: 150145 - DNA, 528 bp, Zea mays
  Clone ID: MRT4577_6845C.1
cccctcgagttatttcttttttttttttttttttttttttttttttttttttttttttttttttttccccccccaaagagaaaaccaataaaccaaaaaccggaaaaccaggcccttttataaaaaccttggaaataaacctctttttccccaacctcaaggaaaccggggggggcttttttctcccccaggggggccccaggaggggcttccccttggccccaaaattccccaaaaaaaagggcccggcccaggcatcccggccagaaaccacccaaatttggggctggacccaaatttctcaaccaccaggccgggggggggaaaaaaaaaccccttggttgggggaaaacccaaaaggccccaaagcaaaggattggcccccgacggtaaacccacccttttttttaaatccacccggcccctggcaaaaaaaaaatggatcttttaaacccccacaaaccttgaagggctaacccaccgggggttggctaacccttcccccccggggcccctttttttgggttg

SEQ ID NO: 150146 - DNA, 636 bp, Zea mays
  Clone ID: MRT4577_68460C.1
gccggccgggtcgggatatcacgacccatcgaccttctcgtctctctaccgactactgctataaacagaaggcgcctcaactgcctcactcacagaccatgcgacatctcctccatgggcttcaccgatcaggccggtggaacgagctccgggcgccaccgactcccacgagctcagggtcatggatgtcaatcaacggcccgagctctccatgtgcctccatgttcggatgcttcggccagtgcatcggaatcgggaaggggccgctcgacaacctctctgaccacagtgccgaccccgtcaacaacaacgctagagactacgactacaacttcgaccccgaaaaatgagggaggctacgacgagagaccttcttaggtgtcgcggatgcatgtgagctgacgcgggactgcagtttgtaacatgaagctaactattgttctatcgatcacggaataaccgtggtcatagtgaagctactatacctaaaacgccccgagattcccgagagatactaaaactagagtctcccccgctatggagagctgtcgatagctagcgtactatatagcgtcgaccctccatattggggcacgttgcaccattcaccctagatagagattgattacttatatt

SEQ ID NO: 150147 - DNA, 744 bp, Zea mays
  Clone ID: MRT4577_68461C.1
tcggccggggtccgcctctacaagaacgagaccacgtcgcatagtaatgcgcacgtgccacagagctcagctcagtagctcaccatggagttcttctacctctacacgctgatatcttccatcctcatcgtctcctccctgtacctccacttcttcttcgcccgcagccgccacaacctgcccccgggcccccgcccgctgcctctcgtcggcaacctcctcgacctcggctcccgcccacaccgctccctcgcgcgactcgcggcccgccacggcccgctcatggcgctgcgtctcggggtggtcaccacggtcgtcgcgtcctccgcggacgccgcgcgcgacgtcctccagcgccacgacgccgtcttctccacgcgctccgtgccggacgccgcccgggcgtgcgcgcacgaccaccgctccatgggctggctcccgccggggagccccctgtggcgcgccctgcgcaaggtgtgctccgcggagctcttcgcgccgcagcgcctcgacgcgcaccaggccctccgccgcgacaaggtgcagcggctcgtgtcgcacgtggccgggctggcgcgcgaaggcgcggccgtcgacgtccgccgcgtggccttcacgacagccctaaacctgctctcctgcaccatcttctccgacgaccttgcggaccttgatgaccgcggcgcgtcgggtgagttcatggcggtgatcgaggaattcccgatggccgtcggggcgcccaac

SEQ ID NO: 150148 - DNA, 442 bp, Zea mays
  unsure (1)..(442): unsure at all n locations
  Clone ID: MRT4577_68462C.1
gacccgcaccacgccgttaacgggtccagacctcgttatcgttcaatgtgtgtggcgatgccgataatcgacgtcaccagaccggccctttgtgtggggcactcgtcggcacgagcatgcataggaaatgttgtgaggactgatgcaataacataagcttgctggatggacggatgtgatgggatcgaaccaatatggaggggggggtggtcttcttgtcaagtatcagtacatgtnagacttattgatagccctagcgtacttctgtattccgttggagcgtatatgttttgtgaagaaggagtactttttcccgtacagatgggagttgatccagtttggagcgtttataggtgtgtgtgggngaacccatatgataaacttgtggacgttgatcacacatacaaagaccgttggtatggggatgaccataggagaggtt

SEQ ID NO: 150149 - DNA, 335 bp, Zea mays
  Clone ID: MRT4577_68463C.1
aaatgaattatttaacttaaaaagaaaaaagggagttacaggggggcccttaatctaaaaggcaagaggttttagaaagacagccttcattttctacaacttaattttagaagacttaattctttaatactaggcacgaacgagtgatgcactggcagacagtagttgcacactggcctccgcaacctgatacattgggaggaagcgggtatgttgaaaaaagggtgattaagcaccccccgaatgacgattagacaaaaagggggattgggacccagtgtttgggccctaggcgggtgtttccctgcttcgcccgacatggtcgggcttttttt

SEQ ID NO: 150150 - DNA, 345 bp, Zea mays
  unsure (1)..(345): unsure at all n locations
  Clone ID: MRT4577_68464C.1
ccaccctaaataaccaacccaggcnaccaccaccgggggggggcaaaacagacagcaagccccaaaccaagcgagagccgaaaggcgaaaaagcgcaacggcaaaccgaagggccccaccagggccaaggcccacggcaccaggcaccncgccacggagccgccgncccacaaaagacacgaccacaccnacgacccaaaagggggcgggggccggcggcgcggggcaaaaaacggaaagcggccccncccagaacggccaaaacaccgggngcaaaaccaagcccngccccaagcgcacgcacaccgncgcggcacagggaggcacaaaagccgaacnnggaaa

SEQ ID NO: 150151 - DNA, 272 bp, Zea mays
  unsure (1)..(272): unsure at all n locations
  Clone ID: MRT4577_68465C.1
ctcaaaaatttttaatggatattctacgtctttnaaacgctaatttgaaaattttttttttctaccttccactccaaaaactcccttaaatttttcccatcatatgcatacactttgtttcatcacaaccaccttacttaaattttattttccaacacctagaatattcactaaataattttgtgccaaaagaaacaaaaattaaatgactctattaaaattaaaataaaaaacgaaaggagctcccccccttcttggccaattttttccca

SEQ ID NO: 150152 - DNA, 512 bp, Zea mays
  Clone ID: MRT4577_68466C.1
atttcagcccaattagcaaggaacacactatctagctaaacaagcacacaacagaagcagcagggtaccaagctagcaacctggtcttcatggagctcctccaatgcatcgccacgctcctcatcctcctgatctccagctccctggcagcagcgacgtcgcctgtggggacaatcgagcgcgtaactaagcaacagatcctggcaagcattccgccgggcgggggcccgcccgtgctcttcctcacgtcgccttccggcaagtacgcggcctacttcgtgcggacgcacaccgtgccgggcgccggcgggattggcgccgacttctgctacgtcgagatcatcgacaccacgacggccgccggcggacatggcggcaccgtctagggcgagggcgagggcgagggcgaggccgaggctgctggtgcaaccgccggaggaacaagcgtgtgggagtcggagagccgtcccatcagcaccgtcaacacatgcgcgctgctcttgtcgtggcat

SEQ ID NO: 150153 - DNA, 285 bp, Zea mays
  Clone ID: MRT4577_68467C.1
gagacatctcgttttggaaatgcatttcatctgtgtcgtgagattttacgacttacgaagttggctattgatgctaacatccagttccgtctgggaaatgtggatgccttccagttggctgatggtctgcactatatattttctcatgttggacagttaactggtatgtataggtacaagtaccgattgacgaggcggtcgatggggagggcgacggtgacgaggacgacgatggggaaggcggtgacgaggaggatgatgatgaggaggtggatggtgatgaga

SEQ ID NO: 150154 - DNA, 294 bp, Zea mays
  Clone ID: MRT4577_68468C.1
actcattacaagacgttttggcttttttagatacatagtttttgttatgcacttagatatacattatgtctaggtactctgtaaaagcaatgtatctaaaaagacaacatcttaaaatttgtaaatgagggagtagtatattcaagttgatgggggctgacaacaaattactgttagtttactgtactatgccctggttgtaagagttgattaactgattatcctagaaatgattcagttcagcttaatgtttttttgttaaaataatcaagatatttgtaaaacatgtttgat

SEQ ID NO: 150155 - DNA, 643 bp, Zea mays
  Clone ID: MRT4577_68469C.1
gaggaaagcagctgctgcgatttccgcaacaaccactgaacaacaaccaacgggactacaagacccgagttctggggaatggagctgcgcaatctgccaggtgagcgcgaccagcgaggccaacctgaaccagcacctcgaagggaaaaagcacagggcaaagctggcccgatgcggagcgaccaaggcgacgacggatcctcctcctaacagaagcagcgatggcgcagtagcagcaggcccgagcgacgcgccgaagaggatccagatcctggtcgacggggagacgcaccaggtcgtgcagaggagcagctgcgtgttgtgcgagcgatgcagggtcggctgcaccaatgccgccgccatggccgaccatctgcggggcaagatgcacagtttgtcgaataaggtctggacggtgataaaggccgtgaggaggagcagctaatacagcgataaaggccgtgaggaggaggccgcggtgaggaggtacagtctgtcgaatacgttgagcagggaaattatcgataaggtttccttatagctcatctgcttttagaaattttctgtaaattttatctacaaaaaatcaagtcaaaagatttttccttctgcttttggagatgatgattcttatcagaggctg

SEQ ID NO: 150156 - DNA, 399 bp, Zea mays
  Clone ID: MRT4577_6846C.1
ctatgcaaaggttgttgtttgtttagcaaattggatgccgagtgatttgtgacctgtgccggatgtttttaagataacaatgttcttcgctcggtggttcactgctgcttgtgtctatgaaaaaaaaaaaaaaaaaaaaaaaaaaaaaaaaaaaaaaaaaaaaaaaaaaaaaaaaaaaaaaaaaaaaaaaaaaaaaaaaaaaaaaaaaaaaaaaaaaaaaaaaaaaaaaaaaaaaaaaaaaaaaaaaaaggggcgccccttttaaggtaccaagcttaacttccccgtctttcaaaagtaatacctttttaaaggggacccaaaattaaattcaactgcccttgttttaaaaacttcttaccgggaaaacccttgcttttcccaaattaaatccctttg

SEQ ID NO: 150157 - DNA, 336 bp, Zea mays
  Clone ID: MRT4577_68470C.1
cggtctgaattcccggtccgtcgactctttagggcgcgtacgtgctgctgtccaacatctacgcttagaagggtgactggggcgcggtggcgattgttcggctgaagatgcgggggaggcgcgtcaagaaggaggtcgggttcagctgggtggacgcgggcggcgccaacgattccctgcacctgcacaagttctcgtcggacgactctacgcacccgcagagggaagagatataccgagtggcctaggggctaggctgggagatgaagtttttcaagaactgtcttcatgtctagatggaatttctcgattgatgtctcgatcaaattattcttg

SEQ ID NO: 150158 - DNA, 1476 bp, Zea mays
  Clone ID: MRT4577_68471C.1
gaggctcggccgggcagcaagggacagtatccacagatgcacagtctgccgatggaagcgcgggtaaatgcaaatggggccgtgctttctccgtgcgccggaggaagaagcttgctgatataaaggtcgaggctattagttctgttccggacaaccagttggaccattctctatgctcaccattcgctacagttggcagccatgacaacagttcatcagggtttgtccctgataatgcagagggacacccacctgacgtttctatgacagactcttctccggtgattgatgagaccgagacgggccctcccctgggtctgggtgttgatcgctcttgtcctggtctccttaatactggtgattcagacaaccatttgaacatgtcttctctggatcgtcaacctcccagtgttaacaatgaagtggctgacaatagcaaggccaaagatgacggcgaggaggaggagaaggatcctggaactgagcctgcatttctgtggacagccgacaacgagaagaacgtcatggatcttgggtactccgagaccgaacggagccgtcggctggagacgctgatggtgaagagaaaatccaggaaaaacatacagtttgagctggacggcgtgggcggtctagcagacggtctatcacggttccgtccgaaagttcatcctgtttcagttccagcgcgaaggatgaacccgtttactagcgatgacgcggagatcccaggctcggctcctcctattctgcatccacgagacgaccccttcagtttcctcaccgatgaacagccagacgacaacagtggccaccctgcacaccatagtctgggaccccaggaaccgatgccagctctgcatcaggacgcgctgttcagaaggcacgagagcttcagcttcggcaggccgccgcagagacacgggcccgggctccagccatgctttgccctggaggaatccagcctcggcgaagcgagcgcgagcggtttccagaggcagttcagcgacaggagcgtgtcgtccaggctcagcgtcgtctccgagtgcgacacggtctcttcggccggcgaccaggagcacaacgagctcgtacggaactacattcgcggggtgcgcgagtcgcctggcctgctcgggcaggacgtcgacggcgacgctgtgtgtaccagtaccgccggaaacgagtgctcggacgggatcggcttcgtggagaacgagactctgaatgctgtcatctgctgatggtgaatggatggacttggctgcaacgaaacgaaactttgatatatattgtggatgaagagcagacgggattgctgttgtagcccctctacgtttttgtttgtttcttgtttgcactcgtctgtctaagtctaacagggggtttgtattctacctggtacatttgcacagtacaaaacacactgttttgctgtacagtattgcgtttaatttagttgcgtcgtactgtcca

SEQ ID NO: 150159 - DNA, 289 bp, Zea mays
  Clone ID: MRT4577_68472C.1
tgggggggatctcggtaatatatagtgggtatatatatatcagacctctgcccgtatatatatatatgccagcgccctgcactcatccggccgggggcgcgggcctatgagcccaacgcgcgcgcccgcgtgcgcccgaaagcgcggggcgcttgaacgcgcgcgcgcgcgcgcgagagcgcaagtgcgggggggggggcacccgggggggttgagagcgccacacgcccggggacataacaaggccccgctccagaaatccatggtggggcccgtggggggaccccgg

SEQ ID NO: 150160 - DNA, 477 bp, Zea mays
  Clone ID: MRT4577_68473C.1
tttccacgtcattatttcttgaggggtctcttagcacgagctctcgtatcaggtctctcgccccgcgcgccgccggcggcttgcttcgccgctgcccgtgcgccaccgtcctccccgtcgcggcatcatctcgactcgaggcgatgcagatcggaggtggatttggttgagcagcttgcgaggcatttctctaggcctctgaccaaggaacaaatggaggcaattatggagctggcaactcaggggaaggaaaaggaagggatcaagaagaagggcagcaaggtgacacctctcaaggctcctatcattgaggctgctgagatgctctgagttctattatgagatgtgtgggtagttctagtgcatcatgttatgtccccggtgtacttgcctatgagtcgcccaggatcttttgctggctgctttgtgtagcaggttgttgtctgggcagtggtgtttgtttctttggctggcaat

SEQ ID NO: 150161 - DNA, 322 bp, Zea mays
  unsure (1)..(322): unsure at all n locations
  Clone ID: MRT4577_68474C.1
ggtaatccggggccaaccacccagccgagccgnaagcaaaccggcagtgcgtatttagtttcgtctaacagaacaccatgaatagggggggcgttctcgtcgtgtgcctggctctgtcagctgccagcgcctctgcaatgcagatgccctgcccttgcgcggggctgcagggcttgtacggcgctggcgccggcctgacgactatgatgggcgccggcaggctgtacccctacgcgtagtacctgaggcagcctcattgcaccccgctggctgcagttccctactactccttttgcgtgccgcaactaactctcattgtacc

SEQ ID NO: 150162 - DNA, 856 bp, Zea mays
  Clone ID: MRT4577_68475C.1
attgggtacctcgaggccggccgggatagatctttttcactgcatccttcgcttgaaaccctgaggtgcaggatggatcatttccacgtcattatttcttgaggggtctcttagcacgagctctcgtatcaggtctctcgccccgcgcgccgccggcggcttgcttcgccgctgcccgtgcgccaccgtcctccccgtcgcggcatcatctcgactcgaggcgatgcagatcggagctgttgtaggtgagccaggtggtgaaataagtctgaaacctgctagcagatcgacccccggcgacctggcagttcagcaacctctttttgctgctccttcaaaggtggatttggttgagcagcttgcgaggcatttctctaggcctctgaccaaggaacaaatggaggcaattatggagctggcaactcaggggaaggaaaaggaagggatcaagaagaagggcagcaaggtgacacctctcaaggctcctatcattgaggctgctgagatgctctgagttctattatgagatgtgtgggtagttctagtgcatcatgttatgtcgccggtgtacttgcctatgagtcgcccaggatcttttgttggctgctttgtgtagcaggttgttgtctgggcagtggtgtttgtttctttggctggcaatgtctgtgtttctgtctatcttagtttctgttgtaagttgttggttgttcgcttctggaagtgtgttatggacggtggaaggccggttggctcttgttctcctttcctatcctgtgtacctcatgtgtgacattatttgtttaagtaggggagctgtttttgattaatgaatatcaactgttgtattctatcttgg

SEQ ID NO: 150163 - DNA, 514 bp, Zea mays
  Clone ID: MRT4577_68476C.1
gggccgaatccctttggcttattttttcataataaaaggtccctccttggaaaaaaaaaattggctttggtttaacccggggccccctggaaagggggaaaaaggggggtttcctttggacccataaaggggaaaccgggccccgaggtttcgggccaaaaatggggtttttggaaaaaaaaaaaaatgggggggaagtttgggaccaagaagggccttttaaaaaaagggggaaaacccagtggggggtaaattttttccaagtttcacgggggccctttaggggccccaaaaaaggggggggcttcctaagggccccccccggaccccttggggggcccttttcggaaaacccaagggggcccttttttgggcccggggcttttgggagcttaggaacccaattttttttttttttaagctttccccgggaagggggtgatttaaaagcccctggagggggagggaccaaaacaaagtttttgtggaaacagcgggggcccaaggggggggg

SEQ ID NO: 150164 - DNA, 616 bp, Zea mays
  unsure (1)..(616): unsure at all n locations
  Clone ID: MRT4577_68477C.1
caaaccctcacttcacaggccacttactactatcgcccgctaccgctagccgccgtgctgctcatctggtggcgtgcctggcctccctcacctcatgctgcgagcggacgaagtagcatggtctagctggctcgcatacgccgagctttaagatcgagctacctgccaaccaatctggagggagagagagagagagggaacagaggctagatcatcggcaacgacgcagtgtaaccgcaccacaccgtcttacggcgtcttcaccgacaccgagcgccttatcggagatgcgcgcaagaaccaggtcgncatgaaccccatcaacaccgcctttgatgccaagcgtctcattggcaggaggtttagtgatgcctctgtccagagtgatattaagctgaggcccttcaaggtcattcctgggcccggtgagaagccaatgatagttgttcagcacaagggggaggagaaacagcttgcagccgaagagatctcctccatggttctcatcaagatgcgtgagatcgctgaagcttaccttggcagcacgatcaagaatgctgttgtcacggtccctgcctacttcaacgactcacagaggcaggccacgaaagatgct

SEQ ID NO: 150165 - DNA, 692 bp, Zea mays
  Clone ID: MRT4577_68478C.1
ctctctccattgctacgacactgttacttttcaccttgtcgccgatttcctctcgctctcgaacgctcgctactcgcgtatcggtgctcgcgccactcgtctgctggatacgcaagaagatagggccgtcagagaggatgggacgccaatcgacatcgatctcgacactacctactctgtgcgtacctgcgcgccagcacaaatcgtcgtcaagatcgtcaccgacgaccagggtaaccgtagcacaccctcgcacgtcgccttcaccgactccaagcgcctcatctaagatgcgagctggaaccagggcgccatgaaccccatcaacaccgcctttgatggcaagcgtctcattgacaggagggttagagatgcctctgtccagagtgatattaagctgtggaccttcaaggtcattcctgggcccggtgagaagccaatgatagttgttcagcacaagggggaggagaaacagtttgcagccgaagagatctcctccatggttctcatcaagatgcgtgagatcgctgaagcttaccttggcagcacgatcaagaatgctgttgtcacggtccctgcctacttcaacgactcacagaggcaggccacgaaggatgctggggggattgctggcctcaatgtgctgcgtatcatcactgagccaaccgctgctgctattgcctatgcccttg

SEQ ID NO: 150166 - DNA, 185 bp, Zea mays
  Clone ID: MRT4577_68479C.1
tgattagtaacactaatctagagaactgaatttaaacattttaaaactagtaacacgcatagggatctggtgacattcattgtgcacctgtaattatttcattacctataactatattcaacctcatatggtctaattttacgactttcttcacatcttcttttcaatcatatcatttttaaatt

SEQ ID NO: 150167 - DNA, 172 bp, Zea mays
  Clone ID: MRT4577_6847C.1
aagctagagagtacagcaactagggagccgcgcagcaccacaggacacgcagcagagcagctggggaggtcggcggaaggacacacgacaagccctgacaagagagacagcctgtcgctcatagggcacggagggagtggcctcgtgcgaggcgtgaccctcgtgcgcagag

SEQ ID NO: 150168 - DNA, 619 bp, Zea mays
  Clone ID: MRT4577_68480C.1
ccataccgtcctccgccacgctctgctgagagcgagaagagatggctagcaagggagatgggccgccaatcgacatctatctcggcacgacatactcttgcgtcggcgtctggcaacacgaccgtgtccagatcactgccaagggccagggtaacctattcttttcctggtacgccgccttcaccgactccgagcgcctcataggagatgcaagcaagaaccaggtcggcatgaaccccatcaacaccgtctttgatgccaagcgtctcattggcaggaggtttagtgatgcctatgtccagagtgatattaagctgtggcccttcaaggacattccagggcccggagagaagccaatgatagttgctcaacacaagggggaggagaaacagtgtgcagacgaagagatctcctctatggctctcatcaagaagcgtgagatcgctgaagcttaccttggcagcacgatcaagaatgctgttgtcacggtccctgcctatttcaacgactcgcagaggcacgccacaaaggatgctggcgtgattgctggactcaatgtgctgggcatcatcaatgagccaaccgctgctgctattgcctatggtctagacaagaaggc

SEQ ID NO: 150169 - DNA, 989 bp, Zea mays
  Clone ID: MRT4577_68481C.1
gtccgacgtcatactatctgctcctcactccccgctccactggcgagatggggagaggcttgggcgccgctcccagtctcgccgtgcctcagctagtctcgaggcagagaagctggcgctgctcgtggcgagcggcgctgccttccccagcagctggggtcacaagcgactgctggcgctctcggcggtcaccaactccgcgactagatcacggctgatggcgagcactaccgtaccacaccctctgaccgcgacttcaccgactacgatcgcctcatcggagatgcggacaataaccaggtcgccatgaaccccatcaacaccgtctttgatgccaagcgtctcattggcaggaggtttagtgatgcctctgtccagagtgatattaagctgtggcccttcaaggtcattccagggcccggtgagaagccaatgagtagttgttcagcacatggtgggaggagaaacagtttgcagccgaagagatctcctctatggttctcatcaagatgcgtgagatcgctgaagcttaccttggcagcacgatcaagaatgctgttgtcacggtccctgcctatttcaacgactcgcagaggcaggccacaaaggatgctggggtgattgctggcctcaatgtgctgcgtatcatcaatgagccaaccgctgctgctattgcctatggtcttgacaagaaggcaaccagtgtcggtgagaagaatgtcctcatctttgaccttggaggtggtaccttcgatgtctccctccttacaattgaggaaggtatctttgaagtcaaggccacagctggcgacacccatcttggtggtgaggactttgacaacaggatggttaaccactttgtccaggagttcaggagaaagatcaagaagggtatcactgggcaacccgagggctctccgggaggctgaagacctctttgtgagagggccaagagaacttctgttttcccttgcccagaccaccattga

SEQ ID NO: 150170 - DNA, 151 bp, Zea mays
  unsure (1)..(151): unsure at all n locations
  Clone ID: MRT4577_68482C.1
ncgggaaccgacacagctcctcaggagagtaccctgccctaccttcagaccgcatgcatggcgctcgcggaggccgacaacagcgcgcttgtctttggctagggncnngagagtgctggtgctcatttcgtgggccgtcctgaagaaggac

SEQ ID NO: 150171 - DNA, 396 bp, Zea mays
  Clone ID: MRT4577_68484C.1
attgtcccaacaatggcacccacaatattggggttccttatgcgctttgttctgcctgcaggtcctgctaccgcagccattatcccacactgctcacaagctcctatagctgcctttatatctccatacctttcaccatcggtgtctccagtatgtgaaaacccatttcttcaaccatacaggatccaacaggcgatcccagcaggcatcttaccttgatcaccatcgttactacaacaaccgttagacctattacaggagttacctctggagcatccgttggcacataacatgacggcacacctactacaacaacttgtgctacgacaccttgctgcctactctgatgaacagtatcagcttccattcaaccaactagctgcattgaactctgct

SEQ ID NO: 150172 - DNA, 421 bp, Zea mays
  Clone ID: MRT4577_68485C.1
gtgatccttgaacaaaattgttcccttgacatgtcccagatgatgagatgagtgtagccatagtttatctctaacttcctgctaagaaactgacagaaagtactttttttttccttctttcgatcttcgtaagggattgaagctgcactgctgcaggacagcagaaggcttctggtgcaaaatttgcaacctcctcctcgttggagtgcctgttcgcctcgctttaatctgtttctacaatgtttttgttttcatgtattgtagctgtaacagtctaagtagccgcgatggcaatcgtgggaagcaattgaacgaattggtgttgttactgtcgtttcggacactgaaagaccatctttctttgcttgctttgccccgaaaggaggaattttgcattaataattaaatacattcttgagtg

SEQ ID NO: 150173 - DNA, 302 bp, Zea mays
  Clone ID: MRT4577_68486C.1
aaaaaccaagagggccaaaagcgacagacttcaattacaaaggcaaaaaccaaagcaggtcaacaagggaagagggaaggaaacacccaaacattacccagggcacaaacaaagggttttaaaaaccacaaccgggctcgacggccaaaaagaatcaggcaagcaaaacaagattccccccccccggcgccgggataactggcgccctcgggggggacccccccggagtccttccccagggggggcaggaccccgggggccccggaaaaccccccctgccccaagcccccgccgaagggccg

SEQ ID NO: 150174 - DNA, 636 bp, Zea mays
  Clone ID: MRT4577_68487C.1
cgggtgggcattgagcctaatggtgtcacctttgtagccgccttgaacgcctgcatcacttgcgggcttgtcagcggttgtttcaagtacttcgacctaatgaggagcatgggcatcaggccaatgatccaacattatggctgcttggttgatctccttggccgcgctgggttcttgaaggaggccttcaatcttgccagcaatctacctgaagatcctggttttgtaatctggagctcgctactagcagcctgccatagccatggcgatgtcgagatggcagagctcactgcgtcaaagttggcagacgcaaaaccaagtcatggcagttcatatgttctgctatcgaacacatatgcacgagcgaaacaatgggaggacttgaggaggacgcataggaggatggaggaacatggattgaaggaggctttcaatcttggctggatagaggtagatgaacctgtacattccttctggagctcgctactactgcatatgcgtagcgatggcaacgtccagatgttggaggatttgaaacataatttgacatcagctgcatatgaacatggcaggttcgctcttcagctatcgaagcaatatgcacgagcggaacaatgggaggactcgaagaggacg

SEQ ID NO: 150175 - DNA, 238 bp, Zea mays
  Clone ID: MRT4577_68488C.1
cccacgcgtccgctgacacatttccctttatgtaaatcaacaccaggtgtatgaccctgtcacaagtattacatgcgattgacacttaaagtcaaggtgatctctgatcccaaggcctacgcgatcacgcaattactcaccccctcaatattactatctagaaacacatcatgtctttaacaacaccgtctgaacataacgcttccgatgtacaaattataacccttgctcacgataa

SEQ ID NO: 150176 - DNA, 184 bp, Zea mays
  unsure (1)..(184): unsure at all n locations
  Clone ID: MRT4577_68489C.1
ggccgcttttttttttttttttttatccagagcacacccattcttgatgaagtttgaaaagggtacacanntgaaacatattactaattnnnctggctttnngacaacannctcaaaanncaaaatgcntgatnngcaacatgaaaccnaaaaacntaacatgccatcccaccannaaagggac

SEQ ID NO: 150177 - DNA, 606 bp, Zea mays
  unsure (1)..(606): unsure at all n locations
  Clone ID: MRT4577_6848C.1
tccggccggggcactgccccttcctcccccacaagccgccgccgccgccgtgaggactccggcgaatggcgtcccgcgtcgcctcgggcctcctccgccgccgcgccggcgccgtaatgccctacctctcttttctctctccgatgcatgtacgtctgcggctagcttttgttccccctttgttgcgggcagccagctgatttagggttagcgaggtggtctgacgcagcggccctgtccgatggctgtgatcccccttggaggagttcgtcgcggtctgtggctgcgtctggagaataatctgctaccctagtgttgatctggagaataatctgctaccctagtgttggctagggggtttgcgaccagggcattgatacttgagaatggtctgtacgttggtgcttggtgcaccaagctcgcctcctctaggataattgtttggtacgccttgcacagattaggcctgtatcagcttctctttgctattgctgcccattccatgtaaatttttattgcagtttactcaccaaggattatgaggtaggaactccagatggatgtcaagtaatgtttatcagaccaaaaaanaaaaaaaaagcggcc

SEQ ID NO: 150178 - DNA, 524 bp, Zea mays
  Clone ID: MRT4577_68490C.1
tttttttttttttttggggcgcaaagaactggagtgatactattgactgagaatttaaagggaagacatgtaacgaggatgtatgtatgtatgcacctttgctccagaacatgaatgagagaagacgagtgcggaggaccagtgagaggggaggggtgagtgagaatcagctacatgtgatctgccttaattatttttttgtatttggtattcattcagaagtcttcgtccaatgagaacagaccgcctccacccgcttccttggcttcggctccatcctcgcccctagagcgggtcatcacaccagccttggcgtaatcggatacccgcttctcgaagaagttcgtcttcccagataaagagatcatttccatgaagtcaaatggattagtggcgttgtaaaatttttcgttgcccaatctctctatcagtcggtcggcgacgaattcaatgttctggcacatcagttcggcattcatgccgatgagtttgcagggcaacgcatcagagaggaactctttctc

SEQ ID NO: 150179 - DNA, 564 bp, Zea mays
  Clone ID: MRT4577_68491C.1
ggagccggaaccggcctgcgcgtccacgccatgtacggggtcaccgtcgtcgcggacgccagcgtcgccgactgcgccgacgcctcctacgacctcgtcgtcctccccggcggcgtccccggcgcggacaacctgggcggctgcgcggcgctggagggcatcgtgaggcgccacgcgctcgggggcgggctctgcgccgccatctgcgccgcgccgccgctggcgctggcgcgctggggcctgctcgacggcgtcaaggtgacgacgtagtgtgcctctccctcatcgtcgttcgcgccgcgcgcgcgtctagctacatgctctttaggtcctacctagcctacatacacgtacgtgcgtgcaggcaacggctcacccggagttcgtggacaagttcccggcagaggtggccggcgtggacgcgaacgtggtggtcgacggcagggtcgtgacggggcgtggccccgcggcggccatggagttcgctctcgctctcgtggaccagctctacggcaagggcaaggtcgacgagatcgccaaacccatgatggtcaggtacgaacc

SEQ ID NO: 150180 - DNA, 386 bp, Zea mays
  Clone ID: MRT4577_68492C.1
aacaaaaaaggcttcggctcaggcttatcaaaggcaaaactttggggcgaaaaaagttcgacataaaccacccagggggggggcctcatcggggcgggaaaaaaacatttattttggcgaaaacccctttggcctaccctcagggggcaatctttcagcacaaaaaaagcaaagttgaccgacacttgtttttttgctacataaaaaaattttgctgggagaggatcaggcaatgaagtttctgtccctgagctttgaaaaaaatggatgtttagggaccgccccaaaaagttacatgacctatttcaaaggtttcccaccccaccattttttatgccccttgatttcatggcctgggcaaaaaagacatagctcctagcaatcct

SEQ ID NO: 150181 - DNA, 348 bp, Zea mays
  Clone ID: MRT4577_68493C.1
gtcagacaggtaatgtcagttttttaatcaagcacataatgtatgtgctgaatagatatataagtatacagcacattgagcctcctagttctcttcagcatttttttagtgccttagaatcttattcccataggagcttcctgaactgcatatgtatccattgtaggcttgtaaaaataaatatacatgtaggttaagaataaaggttcagcctgaagaccggaagttaaatatactggacatatttagctatttgaatcagttttgtatagatttatttatgtattatgaacttttctgttgcaaaaacttaaatatttcacatgtttccatctaaaataacttaaa

SEQ ID NO: 150182 - DNA, 192 bp, Zea mays
  Clone ID: MRT4577_68494C.1
ctgagactttataccattagctgtatctactccagagcgcaggagacccccatcggcaggatgagggtaatgctctatgcccccccacgcacggctctagctgcgagcgccacctacactcatacaaacatcggttgcggcttccattcaccgaatacctttcatatactgccccttaagcatctgccccct

SEQ ID NO: 150183 - DNA, 272 bp, Zea mays
  unsure (1)..(272): unsure at all n locations
  Clone ID: MRT4577_68495C.1
caacttcccatttatttatcttaaaactatacagttacatcttaattccatccaaagaagatacagtttgaagacagaagtgtactctctacaatgcaatttactgtacagttagccagcanagtgttaaatggagaagatacttgtttttattaaacattttgagatttagataaactacattttaactgaatgtctaaagtgattattttttttccccccaagttagtcttaaatcttttgggtttgaatgaaggttttacataagaaat

SEQ ID NO: 150184 - DNA, 231 bp, Zea mays
  Clone ID: MRT4577_68496C.1
ttgtatgaactttggaggctacttagttatatatgaagtggaattataatgtccccttataatgcctatcctagaaccttaggatatgagatcggccttcctcgagagcattccaattccacatttatatgaactataggaggcctttttgtttatgaggggatgtggaattgattagtccccttagtattgcctatcccagaagcctttaggattcagagatcgcgactt

SEQ ID NO: 150185 - DNA, 529 bp, Zea mays
  unsure (1)..(529): unsure at all n locations
  Clone ID: MRT4577_68497C.1
ggtaccctcggagccggccgggacttcttcatgctcctcgtaacctcctccagtcgtgtcggtggcacagcaggatagatcacctgagcatgttcgtcacaacctcaagatgccgctgaggaagaaggggccgcgagtcccacggaggcatgcggaagatacagaacctactcctacagactatgagaagcagagagcaattacaatcatgaagaacaatcaaatgaggcaacggctagggctttctcaattacgatcaatgatggctagtattctgagtggaaggataaacgatgctcctccttaggaatctggatcgctgtatgatggtgatgatattgagggctctgacgatgagatggttagtaagaagcaagataaatttaaagatatagaacctagtgcaattgatcttttcaagtagatgcaatgcagnaagaaggacttagcgaaactgtccaaaaaggtttatatggaatnaatgggggnagncttagttgaagatggacaccgtatttattaagaagaa

SEQ ID NO: 150186 - DNA, 294 bp, Zea mays
  unsure (1)..(294): unsure at all n locations
  Clone ID: MRT4577_68498C.1
aacgcccaacctaaggcaaaggggggcacattnagccacgaaccaaacagccccgaaanaggacaaacaaacactcccgcaggggcgtgcgtcaaacatgaactcgttccttttttcctgctcccagatccattccattcgtccatctagcctcaaatgggccacatcatgcgacggctactgggctcggggacggcttgtgggtctgctccttggaatctgccaaaacctcgtccttgtaaaccaacgtgaggaatagggaccaccatgggccatcgcgcaatctccttcccc

SEQ ID NO: 150187 - DNA, 257 bp, Zea mays
  Clone ID: MRT4577_68499C.1
gaaaaatatatattgccgtgaatgaggtagtatcaatgttcagcttgtgttttccatacttatagaataatgatcaggataacaaagtaaattgagtttgttttactaaatttattattaagctatatttttttattcttgactatgtgataggtcagagtaattaaaaatatatataacttaccctgtgctagcaaacatactgttgtattatgatccagggtccttcagtttatagttgtaatatggacaaagtg

SEQ ID NO: 150188 - DNA, 530 bp, Zea mays
  Clone ID: MRT4577_6849C.1
tgaaaaagaaagagatgtatctggtattccttaacgccataaaaactgataaatcatttacgaacttccctgagcctggaatccatccaatgtcacatttactgcgcccgattgaacaagagcacgttgcaaatcatcaatcaaatcatccacatcctcaataccaacacacaaccgaatcaaatcttccggaagtgcccgctccgctctcgtcttcgcatcaatgctagcatgactcatccgacaaggcatactaatcaaactatttacacagccaaaactgacactaatagcccagatcttggcactctcgacaattcgttcgctgacattcacatcgcccgtttcaaaggatagtacggcgccggcgccgcgggccatagagttatgtaattcgtactggggatgagatcgcagccccgggtatcggaccttgaatccgtgaccttcgaggaactcggcgatacgctgggcattgctttgctgttgatccatacggaccttcaatgtcttgacaccacggagtaaaa

SEQ ID NO: 150189 - DNA, 400 bp, Zea mays
  Clone ID: MRT4577_684C.1
gtcgtgacgcccttgggcccttggcctcttctctctcttcgtggagccgtcgtagcacgactacgactcggtcatggggacacccccagctctgctattgcgtttggcgtcttcggcatcttatccggcgacatccatgcaggtggaggcagaggtcctcttcaacgactgggacggctacgtgcgagtaccggaccagggggaccgtgcttatgagcacactccatggatccatactccccgaatgggccgacacaggtccgaaacaaggactgggatgaccacagcaagtaaagcgaccaggacagggtgaagattgactaccaccataacatgtactccttgaacgagtatgctgacggcacagaagtcataggcgagtggagttggacaggagttg

SEQ ID NO: 150190 - DNA, 1138 bp, Zea mays
  unsure (1)..(1138): unsure at all n locations
  Clone ID: MRT4577_68500C.1
aaatagtaataccaaaattatatcatcaaacaaaaatccagcacaagtatttaaacaaaaaaaacaaatttagactccaataacataaatcctaataatcatgtaacttaagctcatataactttaatcctcgatctggtatgtgatgaaccttgacaccatcatgttgatatacatatttaaggaggcacttggctacgattgatgcttaaaatcaaacaaaggaggctattattttttgctatgaacttcttcaattctgcaatctcatcagattgcttaggaatggtctcatcagatgtctgtgtcttaaacttcaagctttggacttcatcctgtagtccatctttttcttgcctctcagtctataattaagactcaagttgttgcatctttgctgaaacaatccttaaagagcttctgttggcgacggctaggcctacattatgatggaatcaagttgatttaggcagcgcttgggaaaccacttctattgatgaatacggtgtccatcttcaactgaggctgccgccattgattccatataaacctttttggacagtttcgctaagtccttcttgctgcattgcatctacttgaaaagatcaattgcactaggttctatatctttaaatttatcttgcttcttactaaccatctcatcgtcagagccctcaatatcatcaccatcatacagcgatccagattcctaaggaggagcatcgtttatccttccactcagaatactagccatcattgatcgtaattgagaaagccctagccgttgcctcatttgattgttcttcatgattgtaattgctctctgcttctcatagtctgtaggagtaggttctgtatctttttattgaacttcaaatcttcaatggcccttcgtgcttaggtgcctggagccgctttgcgggtgctagcccgcatgcctccgtgggactccaggcccctttttcctcagcggcatcttgaggttgtgacgaacatgctcaggtgatctatcctgctgtgcccccgacacgactggagggaggttactttttttttttttttttttttttttttttttttttttttttttggggttttttttttttttttttncctggccggccctcgagggtcccaa

SEQ ID NO: 150191 - DNA, 246 bp, Zea mays
  Clone ID: MRT4577_68501C.1
gacaagcacactgtctattcactggcgagcccattcagtggaggccccgcgggacgggtgttgatgaagaattactacaaggcaagcggtggcagcgatgctggcgatgaggatgaggagtgaggatggacaattagcgttacccaatatattgatgttattaagtctgcttgaacttgttcgaatgatgagtgcttaactgtgtgatctgtcgcacagattcctgagctgactttgtgtcatgga

SEQ ID NO: 150192 - DNA, 380 bp, Zea mays
  Clone ID: MRT4577_68502C.1
aggattgtagggttctacggaacaaaaagggggcacattgaaacaaaaggttcttgggggatgttaacacatgacaaccttgtttaggttcttacaggacatgaccacacgcctttaactcaaagatggggctgcctactaacatcgagattctttccagacttcgttgggattccaatgcttgacctttagggacttaaatggacctagtgagggacttggccaccatggtgtcccttcatggacacaattggacctgcaacttatttggccccatgcttacccttggagggagccttgaaagccatttcactttttgatgccttgtttggagatttggaagggattggccccccagaatttggagacttctttttgga

SEQ ID NO: 150193 - DNA, 578 bp, Zea mays
  Clone ID: MRT4577_68503C.1
cccacgcgtccgcggacgcgtgggcggtccggttcggttccgttcggttcgttagggtttagtagcggggaagaggaaggcatggcggacgtcgagtaccgctgcttcgtgggcggcctcgcctgggccaccgacgaccagtccctccagaacgccttctccaagtacggcgacgtcatcgactccaagatcatcactgacagggagacgggccgttcccgcgggttcgggttcgtcaccttcgcgtcggacgaggcgatgcgccaggcgatcgaggccatgaacggccaggacctggacggccgcaacatcaccgtcaacgaggcccagtcccgccgctccggcggaggcggcggcggcttcggcggcggcggcggcggcggcggctacggcggccagcgtcgtgaaggaggaggcggcggcggctacggcggcggcggcggtggctacggaggtggccgcagcggcggcggcggtggctacggcagccgtgagggcggcggcggctacggcagcggcggcgggcgcggcggctaccgcggcagccgcggcggctccggcggcgcaactggagggag

SEQ ID NO: 150194 - DNA, 134 bp, Zea mays
  Clone ID: MRT4577_68504C.1
accacgcgtgcgcgccctcgtgctcgtgtaaggcttgttgttcatccttactgtccttttcaccacctactttcctacccttcgcatagtcgcaccaacatgagaagctaaggtgacaggattaaggagggggg

SEQ ID NO: 150195 - DNA, 670 bp, Zea mays
  unsure (1)..(670): unsure at all n locations
  Clone ID: MRT4577_68505C.1
cctcgagcgcgggattgtcctggccgcgctccgaatcgcccttcgcccacgagctccgataatcagccgatgttgatatgtcgtctatcaggatctcctatctggcgaccagctcctgtcggattctttcacctacaaggagctcgagaacggcgtcctgtgatacgtcgagggaaagaggatcaccccaggccctgttgatgcggacattggtgccaatccatccgccgagggagcggaggacgaaagcgccgatgacacaggtgcgaaggtgcttgatattgttgacacattccgtctacaggagcaacctccttttgacaagaaatcatttgtggcttacatacaaaaatacatcaagaatctcactgctgagttggaggcacagaaagcggcatgagttcaaaaagggccgtccagggagcaaccaagtttctccttagcgagctgaaggacctccaattttttgttggtgagtctcatgaaggatgatgcgtctgtgctattcgcctattacaaggatgctgccacgtaatccgacattcctctatttctctgcatgngcttaaggagatcaagtgctaagcgtgcgacgaaattatgtacccatggcgtgcactatgtatggactatgattacatccatcactatagttggcctggctgaattg

SEQ ID NO: 150196 - DNA, 313 bp, Zea mays
  Clone ID: MRT4577_68506C.1
gcggccgcccttttttttttttttttttttttttttttagggcaagatgattctgggattggtttgtgaaacaatagccggattacataaaaacaagatgggacgctggttcttaatccaaaaaatgggggccttccttcatggggggagacgggtaatacaaccctgggaaagggttatttttcgactggcaagggacaactggaaccggtgggtggatcaatcattttaaccattcattttcaaagaggggtgaaggctttcaaccattccaaaaccctggtggggggtttaaatacccattccccttttt

SEQ ID NO: 150197 - DNA, 568 bp, Zea mays
  Clone ID: MRT4577_68507C.1
tcgagcggccgcccgggcaggtgtacaagctttttttttttttttttttttttttttttttattttttttttttttttttttttttttttttttttttttttttttttttttttttttttttttttttttttttttttaattttttatttatttctttggggggggggggggggcaaccaattttttttcttatttaaatatttataaataattattttttaataaattaaatagataatttacaagaggttattctaaaaaacatagttttttgcgggggggaaaccccccgccgcagggaccttggggggcacaaccctaaaggggaattccgggaaaatgaaagccggtttttttgggtccggggtgggcacccagtttgggggttttttggggaaaaacggtttctgggggaaaaacacaaccggtcgcaatttccagggggataaaatccaaaaacaaaaagggtaaaggacggggctccctaagattgagcgaaaaaaaaataattgcctcgtgctaactgacaaatcttcaggggggaaaaatttagggaaacccccatta

SEQ ID NO: 150198 - DNA, 397 bp, Zea mays
  Clone ID: MRT4577_68508C.1
atgtaaacgtccttgaaaccgtttaaggtggcccaaccctttcatgaacccattaaagggccttggtattaagcctctttttggaccatctgtcattaaaggcctaattggactttcaaggatctgaactagtcaggaagatggaccattgcttatgcttatgctttgcatgatgaatcttgccgacttcaagctatcatcgagcatgtactcatactgtacaaaatcgtacatgatactctttgtaatcataataagcaccatctggtgcaatctacactagctgtagctctgaataaagaattcctttgcatgttaaatatgacagaatcagaaccaatagcaagcacatgtgtatgccaatccaatataacagtcgtgcttctcttatgcccta

SEQ ID NO: 150199 - DNA, 157 bp, Zea mays
  Clone ID: MRT4577_68509C.1
gcacgcctgaccggaccggaacggaatgggtcggacccaacccacgcgttttatttgttataagggggatgacccaaggaggcgaaggattcctgtttgagtgtacccggatcaacggggtggtgctagaggccttaagggtcactcatgtaaggtg

SEQ ID NO: 150200 - DNA, 200 bp, Zea mays
  Clone ID: MRT4577_6850C.1
agcatacgctatctgcgcccatgaatgatcaacgagataggtatgaataacaggatctacctactgtgagccctggtactgagctactacttcctgaactgggccagatccgacgggaactgacgcgcaattcttcaagaggcatcaacagctgctggaccttgctgaaggatcccggcgatggccgagaacaagaacgc

SEQ ID NO: 150201 - DNA, 1888 bp, Zea mays
  Clone ID: MRT4577_68510C.1
ggcacggacggcaccctcgggcctcaggtcccaccctcgcctccgcccgcggccccgggcggtaccctcaccgccgggcccacctcgccccctcgcctccggccgggccgcacaaacagccgaccgccccctggccgcgacccgcgcccagacacacacgagcgcagcgcacgcaggcagaggagggccgcgcgagctctgcgcggtggcctgtggtggggcgagggaagcgaggcgaggcggggcggcccggcagccgcctcctgactcagtcggtgggagctggaggtgcgagctgacggtccgggttaccgaccgggcagcacggcggccacagcggaggcaaacggcgggggcggcgaccccggggccgcggcgaggcggcgctgggacctgccggccggaaacattgcaatggggaaagaagttgttgatatgtctactgatgaagaatcagattgcgtagttatgtgtccacctaacagaaatgctgatcatgaggaagctgtgagtggcagccatgatgaagattcttcaggaaggcaagagaacccttatgctgtgaactcacatatgaaaacccgtggccaggaagatgtgtctgtaaacccagacctgctcaagctgattcatcagcaggagtcttctgtcagcaattcaccatcaaaacctgcaggagctagacagcaagggtctagccatactgtccctgagtcatgcactattgcacctgaaagcaggtcatctggagcaggaacttgtgctccaatttcttatcccaccagcagcggggaaaaactttcagatataagtagctcctcaccaagaagcatgacaaagagtccatcagtcacatgcaggaagcctctccaatctgacaatacttctcacagtcaagaagaggactcatattctgtcacttcttcaactgtaacttcagcgagagctggaaaaactaagaagacaactgttgctgttgcacctacatttgtctgtgataatcgtgctgagaagagaggagagttttacacaaaattagaagaaaagcgcaaggctttggaagaggagaaactccaagcagaggccagaaagcaggaagaggaagaagaagctctaagacaactgaggaagaacttggtcgtccgagcgaaacccgtgccgagcttctaccaagaacccccaccaaaggttgaacttaagaaggtgcctccaactcgtgccaagtcaccaaagctgacgcggaggaagagctgcagcgacacccctcacacaccagagggaggaaacggcggcggcgcagtgtgctgccggctgcaccgccacagcgtcgggaactccaaagacatcggcggcaaggcacaatgctctccaaagactggaccagctgctaagtccagggcgcccccaaatccagggaagacccgagggcttccatgagaagaaagcgggacagcagccaagcgccgccgctgtacaaacctgacccgtgaagcatccattgccatgccgtttttcatcttaattcatataccctcacatcacccggaaatatggcctcatgccccggcagcagacagtgtgcctggtgctggattgttttttttttggcgttgcccttgtaagaacctggctgccactgccagagaccgtgcgctgtgtccgtgtctgtaaatttgctgcaagttttgtatggggtgaccgagtcggtcctgtgtgagaaccaaacggccgggcatattgtcattgcgtgggggcagcattcgctgatactatgtaatgtgacctgagtgagctgttgtaacctgttgtgggcatattggcaaagcgattctgattgctgtcgaaaaatttgaccaggtcatgcatgattctttttttttctaaaact

SEQ ID NO: 150202 - DNA, 183 bp, Zea mays
  Clone ID: MRT4577_68511C.1
caaaaaatgggtggccttcattaaaaaggccccgccggaaacacttcagaccttcacccagggcaggttgggggttaaaaaacctgggacctttttttaaaaccaggttcccctttaatccgagggttaggggtttttcatcccttggccttacccccttttaaaaacctaaaacttgggttc

SEQ ID NO: 150203 - DNA, 283 bp, Zea mays
  Clone ID: MRT4577_68512C.1
gggttcgaacatatagatggagctcttggttgccccaaaaatccttcatccactgaatgcaaatataaagggccagaaaatgagtcccatcaattcctggggttctctttaaaagaacaggtggaatcacatagcacagaaataacacataataatgcgcccccagatcagatgcttcaacttgggagccatcaacaacagtcacactacctatccctccaatcccaaaattcttcagtgctcctgtgccgggacgaccacagtcaagccagcatatgctggc

SEQ ID NO: 150204 - DNA, 196 bp, Zea mays
  Clone ID: MRT4577_68513C.1
gaggatgccgcgtacggagctagttattagcctctagtggtctagcaacagaacatgccatcatggttaattttaggcaagaacttgcgaatgccatgtggcaagaccgtcaacaatattattctaatgcaccatgagtctgtaaaccatctatgtaccattttgtgtgtattactctatgtaccattttctttgc

SEQ ID NO: 150205 - DNA, 1149 bp, Zea mays
  Clone ID: MRT4577_68514C.1
attcctggcattgctaccaccaccggttcattccacagtgagttccactcagagtcagagccaccgtttgtaaacacccgtttgcacggctcgctaattcttcttccgtgccagttgtccttccgtggctactgaatcgggaaacccaacccatccactatcttatactcctcccatccctcgctcaccacagcatcgccactactcgctccaccatcccctgaccccgtgcacccgcaccattagctcggcctagcttgcttcgatcatcggctcgatcggttctctgactctgatctgatctggagatcgatctcggccggccggccggctatggacggttcgaagagcaatgctcaccaacaaggcgcggcggtgactagcaccaccagctcggcgggcaagcgcaagggaaaggcggcttcatcttgcggcggcggaaagaagccacctatcaaggtggtgttcgtcggcaaccccgtgcgggtgaagaccagcgtggcgggcttccgcgcgctggtgcaggagctcaccggccgccacgccgacccgtacaagcacagcgttggcgacgccgacgccgacgacagcagcagcggtggcagtggcagcccggtggagctgcaggtgggcggcgcgctgtcatcggactccgcctctgctgccggcgtggcccaagtcatctcagtgccggcttacgacgacgacgacgacgacggcttcgcgccacagctgatcgacaacagctactccgtgttctcgccgcccacgttcctctacggcccgcacggcggcgagctgtgattccaacagtacatgtatgtatgtgtagttgtgtatcgcattctagctagctccaacgagcatcatgtgtatcgtatgtgcatgcgctgcaggctcggtagcacgcaagtgtaatacgtaattaggattgatttctgcacgctagctagctagcaacgcaaatctctgttatgctgccaccggccggcaaagtagtggtacactaatataatgccctcccggtttgatgggtggtgcttgaaaagtgaaaaaaacacgtaatctttgtttggaagggaattgcgttgtacaatgatgaatcgtcaggtattttgagttaacaattccctttcgtgctccccaacc

SEQ ID NO: 150206 - DNA, 467 bp, Zea mays
  Clone ID: MRT4577_68515C.1
attcggctcgagctatttcttaggaagagggttattttaggatcggcggggccagggctgcggtgggaggaacacctgatgtacagcgttggtcatgttcatgctgaggatcaattctaacgggctgagtggctaataaagaatggcctagcaaaagctggccatataggtatataaggctggagctacggacgatttctttcagcagtgttcctcgcagggttttcagacacagagatgaacttgggtctgcccgggttgcagtgcggatgcttacgagtgcggatcaataccgtgccacgccaagaccctgatagggaagctggtactcatgcatgggatgattgacgagaacttgcatttctggcacaccgtaaggctcatcaaccccctagtggcaaagggcaagcccgacgaaaccttcctttgctctgacgagaggcgcatgctacgatgcctcgatggtc

SEQ ID NO: 150207 - DNA, 332 bp, Zea mays
  Clone ID: MRT4577_68516C.1
gcttgggcgaagtaagtagtatatgagatgacacagagggagggactacggtctctccttgcgttgttgtgctaggagggcctgtgtcgacttcctctgtgcgtcgtagttctactacgtcggtggtggtgctcggtggtggtggtgcggatgatgatggtgctggcggcgataggtcgacgacggattggccttctagtcggtaggtgatgcataattggctgcatttgatggtggaagagaggtagtggtggccttaggcgcattgttgtaataccgagtatactgaggttattaattgggtgggtaattcgatgcatatgtctggtgag

SEQ ID NO: 150208 - DNA, 184 bp, Zea mays
  Clone ID: MRT4577_68517C.1
accatttggtagccatgaatgaagtcacatagaaactatggagaaacaataatgctatgagccgagataccatatcatcatttcttatgtgtttttagcatttgtattatatgacactttcatgacaaagatatatattgctgctcatgttcaccagcaattgaagttatattattttgttttt

SEQ ID NO: 150209 - DNA, 2102 bp, Zea mays
  Clone ID: MRT4577_68518C.1
gtacgctttcattactacgatgtgagatctccttgcaagcgctttcagttgctcggggttctcgcttctcttctcgtggatccccaaatcctctccggccaccggcatcgctcctctcccgcccgccgacgccgaccgctcctatccacgccaccgcgtcggtgctcgagttgcctcagagagggagagagagagagagagagggagggagggagggagggagggaacggcgctcacgctgttccgattcgaacgagctcgcccggcgatttttttttttcctggaacgggctggctccgaatctcggcgaagtgtggggagcggctccaccctccaaccaagcaccgcaggatcaaccaaaaggcgggcgcgcgggcggcaggcggcggtgctgagaacacgggtggcactgtttggacggacgctgtggatctcggcgattcttcgcggcctgcgtcaagggcggatcggcagcgatgagcggcggcggcggcgggagccccaataacacggagtggcgcttcaaccagaccctccgcaacgtgcaaggaatgcttaaaggacgcagctttcctgggaaggttttgctaacccggcgatccgagcctctctcccctcctgattattctccaagctttgagagcgagcacgatgaagatgagcgcaaggagggttctcgtcaggagggagaaggtcaagcatctggaaactcatttgacaatgcaagttcaaagaaatcaaatattctatcaacaagtagttcaaattcattgccagatgctcaggggctagtttctggggctagagctactgattctgcaagaattgctaaattcacaacggaactatctaggccagctgttatattagacaaattgcgtgaactatcttggagtggtgtgcctccatatatgcgacctaatgtatggcggcttcttttgggatatgcaccgcctaataaagatagacgagaaggtgttctaacaaggaaaaggctggagtacgtggaatgtgtttctcaatactatgatattccagatagtgaacgctcagatgaagaaattaccatgcttcgccagattgcagttgattgcccaagaaccgtacctgatgttacattttttcagaatcatcagattcagaaatctcttgaacgcattttgtatacatgggctattcgtcacccagcaagtggctacgtccaaggaataaatgaccttgttacgcctttcttggttgtcttcttatcagagcacctagatggcaacatggatacttggtctgtggacaatctttcagcgcaggccatttccaacatagaagcagactgttattggtgtctctcgaagttccttgatggaatgcaggatcattacacctttgcgcaaccaggaattcagcgcctcgtttttcgattgaaggaactagttcgtcgtatagacgaacctgtttccaagcacattgaagagcaaggattagagtttcttcagtttgccttccgctggttcaactgccttctgatacgagaggtacctttccatctcgtaacgcgcctgtgggatacataccttgccgaaggcgactatctgccagattttctcgtgtacatatcggctagttttttgctgacgtggtcggacaagctgcagaagctggattttcaagagatggtgatgttcctgcagcacctccccacgaggacctgggcgcaccacgagctggagatggtcctctcgagggcatacatgtggcacacgatgttcaaaagctctcccagccacctcgccggctaggacccacccaagtccaccatgcctgtaagcggcagtcagttccttctgttttttttttgttaagcgcgtgcatactatactatcggtcgcgtcgcaccgatttgtatattttccgtttcctaccgaggaatgcttatctataatgaacaccagaggacaagtattagtgctcaatttgatattcagaccggtagttgtattgtattgtttgccgcgctcttggtggcgcaaggccttttttttttccccaccccatgagatgctcgttccctgttttgtgaaacgcagagaagcgctgtggcttgtgt

SEQ ID NO: 150210 - DNA, 246 bp, Zea mays
  Clone ID: MRT4577_68519C.1
cggagtgtttgcacgggatatatagcctttactgccacctctcaaacgcataaatactgacttaatccctcttatcatacactttatcggtcaaggcattgcttacacacgtttctctacaggtgtgcacacagatattggttcagagctcccaagcaggttcttgatatccttctcaaaggtcagagggatggaggttggagcataaaaactcagaacgcgcccattcgtgtttccccacaactt

SEQ ID NO: 150211 - DNA, 476 bp, Zea mays
  Clone ID: MRT4577_6851C.1
cgcccgcaagtaccggttcgacctcacgcgttcggcaggttttccggtacaacctgatagtaccctttgggcgtcagttgtttggtctgaactgggacaaggagctggacaagttgaaggaagaataaaggacaaagaggtggacacattggtgaacatagcatggaggacttttgttgtatcaaaatgacctgtaactaggaatacctgataggacatacacatacttaagaaaaaccatgaagctgagtataggtatttacacgtaggcttttattagtttatatatttttggagaaccaagttttccggtgtttccggtgctgtagccgattttgtgataaaactctgtcacatgggtaaaacctgagataatttcttagcacaaaaaaaaaaaaaaaataaattaaaataaatatattttataataaaaaataaaaattaaattaaaatataatatatattaatattataat

SEQ ID NO: 150212 - DNA, 414 bp, Zea mays
  Clone ID: MRT4577_68520C.1
cccacgcgttcgaccacgcgtgcgcactaccgaagcagcgcgggagcaggcccggcaggcatgggcgtgcttcggagcacgcaaagccttgaggctgaggttgacgagatgagcgccgcgctaatgacgggtggatggcgccagtcggatggacactcaaacgctaatggctcttgctgctgggacttatgtagaacccacgcatgctctattatacgtaagtatcactatatatatacttgtgtctgcgtattgtagcgcctgttctggtgcggttacaccgcgcgaacttggcttatgacacgagaggacgtggactatgtgccgtcacttctaatatatagcaatgactgactagatggtgtgggtaaaacaatacaatctattctacataatcatgttttagcagcgcgt

SEQ ID NO: 150213 - DNA, 207 bp, Zea mays
  unsure (1)..(207): unsure at all n locations
  Clone ID: MRT4577_68521C.1
ggtggacaagggccttgtcccgctcgccggctccaacaacgagtcgtggtgccaggggctggacggcctggcgtcccgcgaggccgnctactaccaacaaggcgcgccggtccgccaagtgccccaccgtggcaagaatccttaacggcccttccaagttcgccgtcaaggaggccccttggggcttggaacgttaggccgcctttt

SEQ ID NO: 150214 - DNA, 676 bp, Zea mays
  unsure (1)..(676): unsure at all n locations
  Clone ID: MRT4577_68522C.1
cgnngtccggaattttcccgggnctgcagctttgtgtgactgtgtcgttgtatagcaaatactgatataatgagacagagtactcgttgcgcatggtcacaccatattatttactgggcgtaatattagggggggctcgcctgaagaaaatacagtggccgctgctgatgtttaatgcgcttacataccacacagaatgtgatacatgagtgtgtatgctgacgtctatgatgctggcaagatcaaataacgctcgacgtagtgataccacctagttcgtatctatgttaccccaaatgaattcctggcttcaaaaaactacatatagggcctgggcggtgtatacgtaccgagcaaacctacgccaccttgccaatacatatctttaatataacagctagctaacctcaccaaaatatggcggaagctatacacattgccctagtctgaaaactcgtgttttacaaaatgacacctttcatgaagcacatagggctcttgcctagttgctagataccaaacacacctgaacagaaagaattctgctacaggacgaataactgaaccaaacctgggtctctcacagctcgttaatatatttcatttttttttcgacacacactctcaaattgaccgttacactggacaaccccataacatcatttgctttcaattt

SEQ ID NO: 150215 - DNA, 181 bp, Zea mays
  Clone ID: MRT4577_68523C.1
ccagacataacgtaaagtagcgctttaaatttgtacgaaaaatttccacccatattattatactaggtgtgtgcccgtgcgtgcaagggagtacgctaggatgatcatcgatacatatctgattggattttatattttcttggaggtctgaagaaagtttgctcggaagccaaacatgtta

SEQ ID NO: 150216 - DNA, 454 bp, Zea mays
  Clone ID: MRT4577_68524C.1
attcggctcgaggtccgaccggctggacttcctttcatacaaatggaaaaactagggcggttggggacagaaaaccctaagcctaaacaggcctactctgatgaggtggatccgcacgagggggagcgcactatgctttcacaagcatgcataggcagagaatcaaatctagaggtttagttgtgcacctgtgggtcaccaagcagacctacgcttgaggcaacacgaatcacacagcggcttttgtgatttcctccacaacaccaaaatagctccaccgagttcttcagaatcttggaatcagagggtggctagcactaccagggcccttgtgtgctccgggaatactgaaacccaaccaggtcccttagctgcattacgcatcatttgtgctagttggctgtgctccgacccactgacaggtaaatctagggtcttttgcgcgtgaacaaaa

SEQ ID NO: 150217 - DNA, 147 bp, Zea mays
  Clone ID: MRT4577_68525C.1
ggggccccccctttttttttttttttggggccacacatgcacaccgctctcacttattacggagcacaagtatagacgccagcagagaaacgaaccgaggacgggagtacaggaacaggccgctctagacgtagccccacgcccacc

SEQ ID NO: 150218 - DNA, 570 bp, Zea mays
  Clone ID: MRT4577_68526C.1
atgtacgatggattcaatagtaacactctggggcactttgatgcatgggtggaggttgctgatgaatttgtggcacacgcatttgctggcgagcctcgtgtggcgaaatgcccgtgtactaggtgtcaaaacctgatccgattgaacaaatttgacctctccattcatatttacaaatatgactttaagccagattatctggtgtggcgcgagcatggagaggtgaatgctccttcggagtcggacgtagaccgaatggatgacatgctagatgacattagacatgagtatccagcactggagaccgaccaacccccgctggaggaagttgtaacaagacttgtgatgatgaagtcaaagtacaacttctcaaataactactacaaagatatcgtgaagctgattattgatcttcttgagccggtatactacttaagttatcatcacccaagcttgaaggtttggtgggttgtctacaaagttaatccagaagtccaccctgagcggtatgataactacaataagatggtgatcagagaaacaatgataaagaaaattatattgatctaa

SEQ ID NO: 150219 - DNA, 318 bp, Zea mays
  Clone ID: MRT4577_68527C.1
tttgctttacggacggcgctgagcaagaaagggaagggtaaattctacccagccttcaaccccgcttaaatgcccgcctgtattcttgcgcgttgaaagatagggctgttttatcggtccgactagtgaactcttgctacaaaaggccagctgctcgtttgctccgtcgcgcgccgtcggaaggctgctcgctcgctctggctgggcggagttggatgctcggatgagtccggccggggagcgagcaatgcacattgtgacctgcttgtggcaagagaaggcgtatgccggcggtatgggcatagctgctactgcagg

SEQ ID NO: 150220 - DNA, 624 bp, Zea mays
  Clone ID: MRT4577_68528C.1
ccaaaaagcaaatttctcagccgtgacaacacatcctgcgctccccttctttcccgttcggctcacagcgaagaaaggaagccggttagggtttccacctcctttcccctcctctccttcagcgacgaccgcgggccacaccctcgatatccttcccctcggacccggaggcgagcagcagcctccagcgcctgccacgcctgcccgtctcgttattgggaggattcgccatgtctgacatggagtccgtcgcagctcttatgaactcgacaagctccaagatacagcagcttcaggaggcatttgctgagcttgagagccagagcacggtttccatgaacctcaagtggaagcagcttgaagaccactttcgtggtcttgaacagtccctcaagaaaaagtttgacgagctaaaagagcaggagaaggagttccaggagactgtcgcaaaatcagatctttagcaagtccaggctttccttacctgttcctaccatcaacccaatgaacaaggcgctgaataatctttggtgtcaagtggccaaaaccggcatctgaggaagagtgtgcacttgcaagttgataatgctgtagtgacgcctcgttctgagcttgttgcactct

SEQ ID NO: 150221 - DNA, 966 bp, Zea mays
  Clone ID: MRT4577_68529C.1
gtgagtgtcctcgaacaagatgtatgtagaggagtagcacatccggtggtgcaacgaccaggtgtactacctcgctgatgagcccggggtgcacttcatttggcagtccagccaagagtgatcggtactcaccatatcgcgcgcgttcgacgactattatatcaaggattgtggcgtcatctcgacaccggagaatgagatgaatgaacgtgagttatctgcgctgaaatctgtcattaagtgcattgaagagcacaaacttgagcagcagtaccctgtggatccacttcagaaaagggttttgcagctagagaaagcaaaggcagacaagaggatggctgttgaagcagcaaagccgcagtccaagaggcctcgtgccaatggatcggcctttgcaacccgtgctacaggctttgctgacaagagcttctactcagcaaccccagagaggcatccattcaatccttgcgagaggcagtttgtgtatggcgctgaggttcatcttcctcccatgatgacctcagcgtcttacacgatgcaacctgcccatggaccttattacggtaatggctacccagttcagtaccaggtctcgtatatccactaatggagacagccaggtgcaggtgctctttcctaacaatctagcttaacctgctgctctttgctgtagtcgtatcagttactctgcaagtttccctagctggaaatatttggaccactcaatgtgtgtgctctgagtggctgttgtggtaattttatgccctaatgacatgacataaattactcctaatatttagctatcgatgaatctcccaatgtacttcattcggcttgtgaaatgcctgtcactgaagaagcgcccaggggcatgaaaatatcatgtcgtcatggacgcctgccaaactgtcagttgcatcctgactggttgttgtttttagtttggtgtatcttttatgcccaagt

SEQ ID NO: 150222 - DNA, 448 bp, Zea mays
  unsure (1)..(448): unsure at all n locations
  Clone ID: MRT4577_6852C.1
gggncggatttccggggcggccccgccgtccgcgaggctaattcgggtggcggcagagggtttcaccaaggttatggctccagaggagggtcctgagcaggattggcagatgcatcctttacggttcaataatcctggagagggggttccgcaatatagccatccggttaaaaatctaattaataagccaggaaaatttgaccttttccccttggagaaagtcaaggtggggagaagtaccacccagcctccaggttccaccaaaaagggtcctgtaaaggctaacactatcgacttccatcctttttggcaaagaccagaagtggtggtgcttattgttgtcccagattttgatagtaccctggattaccatcagtctgttaataccatgagcaaggttccagtggttgaccagtcaacggttgggcaggcttccccaggccctttt

SEQ ID NO: 150223 - DNA, 618 bp, Zea mays
  Clone ID: MRT4577_68530C.1
atgtcatgatttgcatggtctcattattggagagcacgtgccacacctgctggtagaagttctgtcgtacatcgttagtcatcaggcacgcaccaccatacacgcttgcttaaacaaaaaatacaagtgtgtgtttgcgaagagaattaaaggcaggccggcacaaaaggtaccccgacgatggcgagtgatcattgttgtcggtccacctctgctcacctccggtgtcgagatgacgccacaatccttgatataatagtcgtcgaacgcgcgcgatatggtgagtaccgatcactcttggctaggctgccaaatgaagtgcaccccgggctcatcagcgaggtagtacacctggtcgttgcaccaccggatgtgctactcctctacatacatcttgttcgaggacactcacacaacaacaacaatggtcgtcattccagtgcacaagaattcatggccggttgcggtgcccagaacaacccgagagtcgtcgacattggcgacgaccatgaggtccccatgtttgatgatggacagcgcggtgcagccgctctggaccacgtccaagcggcggatgcgtcggagcttgccatacacagcggcgcatgggccatgtag

SEQ ID NO: 150224 - DNA, 894 bp, Zea mays
  Clone ID: MRT4577_68531C.1
agaccttgtccggttattcccatcttatatagattggatgagattagaaaaaaattataaaagattttatcttgtgttgaaattaaaacccacttaatactaccaaatccacatttattaagagcaaaaagaacaagcctagagcctagagccaagtttggatgccacttttgcacagtttagtcaggccactggaagcaatacagggaaaccaaacacctagatttgcatatacttaactagcctggatagctggctgtgcatccaaccaatcagccccttatgcaccattaccaagctcgcgtgagcctcgctgggcacacgcagccataccatatatagttggtaattgatattcatcttgagtttcggatgccccgggcaacatcgatgcaagaagccattgaacagttggtcttgattgtatttgcactaatatgagatctacaagcagaaaacccctccttccgcaatgaattgatgagggtgccgagtgggggagagttaacttttgctcgtctcgaaatctcatcaagtcttatatatccaggaggcaacctcgggtcactctcttcaatcatcatgccaagaagtttttccaaagagacaccattttcaattgtgcatgcccatccccattcgttggccaagcctagcatttcggtaaggaaagaggcatcgtggagaggacctgtccaaagcccccccccaacagtgattgaatcggcatctgttgtgtctgtacatccacaagaaatctgccccagctcatcaaatccaaaagtttgagactgaccacaactcttgcaatgacaaatgaagccatagttactgatgccatctcttttcccgttgcacagtctgtaccattactcgataaataggaccgaacgc

SEQ ID NO: 150225 - DNA, 1550 bp, Zea mays
  Clone ID: MRT4577_68532C.1
gaaggggttgccttctaatttagatgtgtatatgtctttccaaaatgaatttttttccaagatctttatgcaattaagggggctcaacttggtgcttaaatcagttgtcagtgctattttttatagctcagtggattatggaaaagttgatttggagatgaaatcccagctgcataagtttttttaaggtaacactaaacctaacttacttttattttgtccttacaggtctacatgctgctaagtttcttttgtttttcaaccaggcttacttcaaccgcttatttctttaaaatagacataattgctaaaaaaatttctaaatgttctatacgcaagctttctaaatgtttgctacacaagattactgtacatcattactaaatgtttcctacgcgcgcgggacgcgcgctcattcccgctccctgcaaagcccattcacattttcattcccggctatcacgtgtctttctcattctccctcccacagagcctattcccaatcccacgtgcatctcacgcctagctaaaattaaattaaaaaaacaggctctaaggggattcgaacccacgacctctcaaataaatgtgtttgtagctaccactacaccacatgtgtgtttatgtctacatctattatagtaaaaacatataatacatctctcctgaagcccacctgctacccttgcacaatgtgtagtagtagataagtatcactgagattattaaattatatttttggattgagggagtagtatttaaagaagagccttgcatgcaatttcttttgtttgaataatgttttcatcttaaatactttttttgcatgtgtaacatttattctccgtaatattttttgatggatctaacttataaatcattttcataaaccaatgccaaaggtgaatccatgtttcttacttggaaaccccgaacaaacaccactagcacgaggcgctcgcattggcgtcgctcaccgacgacgagaaggaacttggcgactgccagttcgacctctggaagcagtcctacatggcccatgcgccgctgtgtacgacaagctccggcgcagccgtcgcttggacgtggtccagaccggctgcaccgcgctgtccatcgtcaaacatggggacctcatggtcgtcgccaatgtcgacgactctcgggttgttctgggcatcgcaacctacgacgacaccatcacgccgtctagctcatcatccacctgaagcctaacctgccatcccagccaagagtgatcggtactcaccatatcgcgcgcgttcgacgactattatatcaaggattgtggcgtcatctcgacaccggaggtgagcagaggtggaccgacaacaatgaccactcgccatcgtcggggtaccttttgtgccggcctgcctttaattctcttcgcaaacacacacttgtattttttgtttaagcaagcgtgtatggtggtgcgtgcctgatgactaacgatgtacgacagaacttctaccagcaggtgtggcacgtgctctccaataatgagaccatgcaaatcatgacat

SEQ ID NO: 150226 - DNA, 450 bp, Zea mays
  Clone ID: MRT4577_68533C.1
cccggtcgacccagcgtccggcaccgcttttttacgtcatgctgagcaagctgcatggcattcggcgtgagctgacctctctctctatgtctctctgtgtgcctaaacttgtgcaatgcacggagggcaggccaggggaaaggcacagccactggagcttgcgaagttttgtggcctggaaagcggctcggacctgtgagaagcaccgtgttagtcggcgccggggaaaagcacctggggaggcggcggtgcagcagaatgggcagattggtgattagactgcggaatggacttcagactgcaggatatacatgggggatgaatgaacggaaacaaggaccgaaggcaagtccgactcttgtttataagagcgctggttcgggctcaccttaggtcttccataagagtgaaatttaccgtccaatttcccttccctccccccgtccccag

SEQ ID NO: 150227 - DNA, 550 bp, Zea mays
  Clone ID: MRT4577_68534C.1
gaagtacgtagggatatccatcgatagctaaatattaggagtgatttatgtcatgtcattagggcataaaattaacagatttcacaacagccactcagaaacacacatattgagtggtccaactatttccagctaggcaaactagcagagtaactgatgatacgactacaacagtgggcagcaggttaagctagatagttaggaacgagcacctgcacctggctgtctcccattagtggatatacgggacctggtactgaactgggtagccattaccgtaataaggtccgtgggcaggttgcatggtgtaagacgctgagctcaccattggtggaagatgagcctcagcaccatacacaaactgcctctcgtaaggattggagggatgcctctctggggttgctgctgctgggtagaagctcttgtcagcaaagcctgtagcacggtgtgcaaaggccgatccattggcacgaggccgcttggactgtggctttgctgcttcaacagccctcctcttgtctgcctttgctttctctagctgcaaaaccct

SEQ ID NO: 150228 - DNA, 1425 bp, Zea mays
  Clone ID: MRT4577_68535C.1
atggaggagtacacggccctgttggccaaccacacctgggacccggtctcgcatctaccaggcaccaacgtggtcaccagcaagtggatttttcgccacaagctgaccttggatggctctctcgaccactacaagccccgttgggtccttcggggcttcacccagcgcaccgaagtcgactacgacgagaccttcagccccgtcatcaagttcgcgaccgttcggatcgttctcaccctcgcctgctcctgggactgcgcgattcatcagctcgatgtcaagaatgccttcctccacgacactctgacggagactgtctactacagccaacccaccggcttcgttgactccgcttgttcagatctggtttgccggctgaaccgctccctgtacgacctcaaacagacgtcgtgggcatggtacagtcgcttcgcttcctacttggcctccatcggcttcggcgaggccaagtcggacacgtccttgttcatctaccggcgtggacgacatcgtctacctcctgctctacgtcgacgacattcgcagtacaccatcgacatcctggagcgggttggcatgtccggctgcaagccctgctccacgcctgtcgacactgacgggcctccagtcgccgacgcgacgtcctaccgaagcctgaccggagccctccagtacatgaccttctctaggcccgacatcgcctatgacgttcagcaggtgtgcctgcacatgcacaccccacaagagccgcatctcaccactctcaagcggatcctgcgttatctccgtgtctccctcgactacgaccttctacttcgaccctccccaactttggagctcgtggtctacaccgacgctgattgggctggctgtcccaacacgcgccagtccacttctggttacaccatgttcctgggcgccaatctcgtctcctgggccgccaagcgagagcccgtcgtctaccgcttcggcgctgaggctgagtaccgcgctgtggccaacagcgtgacagaggcctcctggctacgcttcaactgctccaggagctccaccgccccttccagcgtgccacccttgtgggtgacaatgggctctaaattttacactataagatttaaggatcggatacgattaggatcacgccctatttgtccctaccactttgtgaagaagtatttggatcgcgatccattaccactcctaggctacaacatcagcgcggtctatctctccaccaatcctgtgcagcatcaacacacgaagcatgtggagatcgacctgcacttcgtacgcggctatgtcgttgtcggtaacgttcgggttctcagcgtcctcatcacgctgcagttcgccaacatcttcaccaaggggctactgtcgagtgtattcaccgattttcgatccagtctgaacatctgtacatga

SEQ ID NO: 150229 - DNA, 2228 bp, Zea mays
  Clone ID: MRT4577_68536C.1
gagttttttttatatgtttttatatttttattattttttttatttttttttttttatcagtacatgcattatttacagcaacggcacggaagtcgaaaaccgccatagttcatttcacaagccgaatgaaagtacatagggagattcatcgatagctaagtattaggagtaatttatgtcatgtcattagggcataaaattaacagatttcacaacagccactcagagcacacacattgagtggtccaactatttccatctaggcaaactagcagagtaactgataggactacaacaaggggcagcaggctaagctagatagttaggaaagagcacctgcacctggctgtctccattagtggatatacgggacctggtactgtactgggtagccattgccgtaataaggtccatgggcaggttgcatcgggtaagacgctgaactcatcattggaggaagatgagcctcagcaccatacacaaactgcctctcgtaagggttggagggatgcctctctggggttgctgggtagaagctcttgtcagcaaagcctgtagcacggggtgcaaaggtcgatccattggcacgaggcctcttggactgtggcttggctgcttcaacagccctcctcttgtctgcctttgctttctctagctgcaaaacccttttctgaagtgggtccacagggtactgctcctcaagtttatgatcttcaatgcacttaatgacagatttcagtgcacacaactcacgctcattcatctcattctgtgcgtccaggagaaattttgacattcctggcatgtgacagttccttaacatccctcagatatgctttaagcagttgcactggttcaaactgttcagtaagctcaaacacgtaagctaaattaattgcatcaatagttcttccacttttcaccagaacttcaatgacacctggcattttctgtgacaacccaagcaatcgacaaagttcaggtgtctgacgacgacgactgacatatggaagcaatttgcacaggtcatcttcattatattcagcagaaataccaaaggttgccaggagttgaagaaatgcatgagcttcaagacagttcccattactagcatcagtctcaagattatctatccgagacttccactcaaaggcaatgttcatggctcgctctatgatattagttgtaagcatgtgaaccttccaaagagaaccaagttatatcagcagtgtgcaactgtccgagtgactccatcaacatcaggcacgtccttctaacacccagaaggtccccatcctttttgccatctaatacaagattatctccagaatagaagtcttccagggaatccaacaccaagccatacggatgagatgttttcttcagtgcactgggaatttcctcgcggatggcagccaagttcttcctgttgtcggatatgaacttatgaagccccttcacattcatttcctcacagagtgcaacaagctcagaacgaggcgtcactacagcattatcaacttgcaagtgcacactctcctcagatgccggttttggccacttgacaccaagattattcagcgccttgttcattgggttgatggtaggaacaggtaaggaaagcctggacttgctaaagatcatagctaatgcagcttccctcttctcctgcaacttctccaaagaggtcagttcctttgccacaacagctgcctcccgctgctccagaatctgctctgattttgcgacagtctcctggaactccttctcctgctcttttagctcgtcaaactttttcttgagggactgttcaagaccacgaaagtggtcttcaagctgcttccacttgaggttcatggaaaccgtgctctggctctcaagctcagcaaatgcctcctgaagctgctgtatcttggagcttgtcgagttcataagagctgcgacggactccatgtcagacatggcgaatcctcccaataacgagacgggcaggcgtggcaggcgctggaggctgctgctcgcctccgggtccgaggggaaggatatcgagggtgtggcccgcggtcgtcgctgaaggagaggaggggaaaggaggtggaaaccctaaccggcttccttcttcgctgtgagccgaacgggaaagaaggggagcgcaggctgagtgttgtcacggctgagaaatttgctattttggcattaggctatctgccccacgacccaactcgagg

SEQ ID NO: 150230 - DNA, 3595 bp, Zea mays
  Clone ID: MRT4577_68537C.1
acgcagaatgccccttttttttttgataactcagcaaatatacttgggcataaaagatacaccaaactaaaaacaacaaccagtcaggatgcaactgacagtttggcaggcgtccatgacgacatgatattttcatgcccctgggcgcttcttcagtgacaggcatttcacaagccgaatgaagtacattgggagattcatcgatagctaaatattaggagtaatttatgtcatgtcattagggcataaaattaccacaacagccactcagagcacacacattgagtggtccaaatatttccagctagggaaacttgcagagtaactgatacgactacagcaaagagcagcaggttaagctagattgttaggaaagagcacctgcacctggctgtctccattagtggatatacgagacctggtactgaactgggtagccattaccgtaataaggtccatgggcaggttgcatcgtgtaagacgctgaggtcatcatgggaggaagatgaacctcagcgccatacacaaactgcctctcgcaaggattgaatggatgcctctctggggttgctgagtagaagctcttgtcagcaaagcctgtagcacgggttgcaaaggccgatccattggcacgaggcctcttggactgcggctttgctgcttcaacagccatcctcttgtctgcctttgctttctctagctgcaaaacccttttctgaagtggatccacagggtactgctgctcaagtttgtgctcttcaatgcacttaatgacagatttcagcgcagataactcacgtacattcatgcggatctgaaaacaaaagtgagcatcaacagtttaacagtaaatactatgtattactacctccattcttgaatatttgtcgctcgctagttcatttttgaactaaaacgtgacaaataaaaaagaacggagagagtatatgtcaaacatccatatgcgcacagccacacagaaaagagaacaaaaaggtaacatgaactgccacagctaattatggtacaggataaaatattgcaagaacagctagcaaactactaatcaattgaaagcaagctaggctagcactcagcaatctcgtatattacttctccacaacctaactgaagcactgtgatagcaaggttcaatgccaaatcacttcagaattaactaggtcagtacccgtgcgttgcaacgggaacatataataccatgataacttatatacaaaatgtgtcttatattgttataagaaaatatttcataatccatttgtgatcctagccatacataaattttgttattttaatttagttgtttcactactacattgcaaccatcagtatcatgtagacttcgatatatgtcatgatttgcatggtctcattattggagagcacgtgccacacctgccggtagaagttccgtcgtacatcgttagtcatcaggcacgcaccaccatacacgcttgcttaaacaaaaaaatgcaagtgtgtgtttgcgaagagaattaaaggcaggccggcacaaaaggtaccccgacgatggcgagtggtcattgttgtcggtccacctctgctcacctccggtgtcgagatgacgccacaatccttgatataatagtcgtcgaacgcgcgcgatatggtgagtaccgatcactcttggctggactgccaaatgaagtgcaccccgggctcatcagcgaggtagtacacctggtcgttgcaccaccggatgtgctactcctctacatacatcttgttcgaggacactcacacaacaacaacaatggtcatcattccagcgcacaagaattcatggtcggtcagtagcgacttacgtggcaggttaggcttcaggtggataatgagctagacggcgtgatggcgtcgtcgtaggttgtgatgcccagaacaacccgagagtcgtcgacattggcgacggccatgaggtccccatgtttgacgatggacagcgcggtgcagccgctctggaccacgtccaagcggcggctgcgccggagcttgccgtacacagcggcgcatgggccatgtaggactgcttccagaggtcgaaatggcagtcgccaagtttcttctcgtcgtcggtgagcgacgccaacgcgagcgcctcgtgctagtggtgtttgttcggggtttccaagtaagaaacatggattcatctgtgctccaggagaagttttgacattcctggcgtgtgacattttcttaacatcccttagatatgctttaagaaggtgtactggttcaaattgttcagtaagctcaaacacataagccaaattaattgcatcaataggtcttccactttccaccagaacttcaatgacacctggcattttctgcgacaacccaagcaatcgacaaagttcaggtgtctgacgacgacgactgacatatggaagcaatttgcacaagtcatcttcattgaattcagcagaaataccaaaggttgccaggagttgaagaaacgcatgagcttcaagacagttcccattgctagcatcaatgtcaagattatctaacttggacttccacttaaatgcaatcgtctttgctcgctctatgatattagttgtaagcatgtgcctctccaaagaagaacaagttatatcattagagtgcagttgtccaagtgactccatcaacatcaaacatgtccttctaacacccagaaggtcaccatccttttttccatctaatacaagattatctccagaataaaagtcttccagggaatccaacaccaggccataaggatgagatgttttcttcagtgcactaggaatttcctcgcggatggctgccaagttcttcctgttgtcggatatgaacttatgaagcccgttcacattcatttcctcacagagtgcaacaagctcagaacgaggcctcactgcagcattatcaacttgcaagtgcacactctcctcagaagccggtttaggccacttgacaccaagattatccagtgccttgttcattgggttgatggaaggaacaggtaaggaaagcctggacttgctaaagatcatagctaatgcagcttccctcttctcctgcaacctctccaaagaggtcagttccttggccacaacagctgcctcccgctgctccagcatctgctctgattttgcgacagtctcctggaactccttctcctgctcttttagctcgtcaaactttttcttgagggattgttcaagaccacgaaagtggtcttcaagctgcttccacttgaagttcatgcagaaagcgctctggctctcaagctcagcgaatgcctcctgaagctgttgtatcttggagcttgtcgagtccataagagccgcgacagactccatttcagacatggcgaacgctccctataacaagacgggcaggcgctggcggccgctgctggcccccgtcctcgcctccgggtcaagagatcgagggggtggccagcggtcgtcgatgaaagagaggaggggaaaggaagatgaaaccctagccggcttccttttccgctgtgagcggaacgggaatgtggggagcgccagtgggagccggcccggccggcctcgag

SEQ ID NO: 150231 - DNA, 370 bp, Zea mays
  Clone ID: MRT4577_68538C.1
gtacgcctgcaggtccggtccggaattcccgggtcgacccacgcgtccgcttagtaggctggctcctaagggtgccattctgtggtgggggcaccatagaatggcacccttagaggctggctcctcaagttttggtgccccagccctgaagcagggccagctacttggaattaggtgaactacccccacgtggcagaccaccagcagcagtgactttgacttctggtcttaagagcaacccccattcagctcaaaaagcgattggtggatttcagatcttttgtgtttttctcctctggttgtttcgcccgtttttctttccctgtgtgatggtctgtctgttgttcgttcctttcccctgggtctcttt

SEQ ID NO: 150232 - DNA, 275 bp, Zea mays
  Clone ID: MRT4577_68539C.1
tcggagtaggggagcaaccaacgacgggctggagagattaagggaggaagcaagagaccaaacggatactctgagcgggaatgcgattacaagcatgaaaaataggaggtccaggatggtaagaggcagagggaaggaccacatggtgtaaagctgttaaggatcaacggggcgctatgccgcttatatacagcacctgatggtagaagcggtaaacggatcgaaagcgcacctagaggggcaatagcgggacaacaaggacagtattctccgtg

SEQ ID NO: 150233 - DNA, 411 bp, Zea mays
  Clone ID: MRT4577_6853C.1
cggacgcgtgggcggacgcgtgggcggacgcgtggggagaccgcctcgttactcaccacaccgtgctcgggccggagcagagaaaggtaactcgcctcctccccttcgacgccacccccgcctccgtccccaccccctgctactccgcccccaccccctccgcctccggcctagccactgtttgcccagtccccgtcactctgaaaggagcagcagcctaaggcatcgctgccaagagtggataacaaatcaaaagggtgatcatctcggtgcccaccaaacctcaacaatcaagtttcatgtctaatctcgacgttcagcttccatctgctttgatttgtttgtcgaggcagatgctgaggctctggttttgctcctggaacgaaggattacgtgcatgttcgcatccta

SEQ ID NO: 150234 - DNA, 385 bp, Zea mays
  Clone ID: MRT4577_68540C.1
ccgggtccaaccaagcctccaatactccggtgctccaccaacattaacaacctccgctccaacaaccgcaaacgggaagaaagggttcccaattggccaaggctgttaccggctcattggtggtaatcatcaccaggggcccccggcatgtcatcaacgtcggatgactaggacgctacagagaccacaaggagctgaacgacatcacggtacgagcactgcgtgctcaaaaatactaacaacggcgtgcgcaacaagtcgtacgtgaatcccgactccgttctgactgattcgcatcgcaccttcgacatcatcatgatggaggacgtagccaaacccatcgtcatccatcagtacttctgcccgcataacgtatgccctggca

SEQ ID NO: 150235 - DNA, 257 bp, Zea mays
  Clone ID: MRT4577_68541C.1
aaaaaaaaaaaaaaaaaaaaaaaaagacacgactctcggaaacggatatctcggttcccgcatcgatgaagaacgtagcaaaatgcgatacctggggggaattggagaatcccgcgaaccatcaagtttttgaacgcaagttgcgcccgaagccttctgggggagggcacgtctgccggggggtcacgcaaatttgatgcacacacatgcaaatcctgcaggttgttgcttctcagcagggccaaaaggtgatcctt

SEQ ID NO: 150236 - DNA, 342 bp, Zea mays
  Clone ID: MRT4577_68542C.1
gatccggagcagccgcagtcccaccgaccccgccgccggtcgccctccatctcctcgccgctgcctctcgtttctcttttcaataatcaagatgagcccgggggggaatggccggggggggcaaaagtctttggggtatttttttgggagccgggaacccccccaacccagcatggcgcccagtgtgagtggctccaccggtgagaaaacaatctgctgcaaagactgatgcggccaaccaggttgctgctggggttaccagccaaaccattaactaccacagggctgatggcagaaacatggcacttccttaggaccgccttaaccaaggtccacgctgtc

SEQ ID NO: 150237 - DNA, 278 bp, Zea mays
  unsure (1)..(278): unsure at all n locations
  Clone ID: MRT4577_68543C.1
ggttttctcactaaatttctattttctgatagcntattacattttacacacgtgcatgcgtgcannnnnnnnnnnnnnnnnnnnnnnnnnnnnnnnnnnnnggagttttttttccaaatgtntaaatcattgcnggtaatgcctngctatgtatgtgttttagactnnntcggnaggagaagacactcngggtccccatctttgnacagnagagactacttncctttgaggtagttctgagtgtgcagagtatgccgatgtaaaaagtatccccagtg

SEQ ID NO: 150238 - DNA, 322 bp, Zea mays
  Clone ID: MRT4577_68544C.1
atttttacttaaatccaaataatctgtttaacaggggcacaattttaccggagctagaattatagtgaaggttggtcatttaatagaagaggtacaaggcgaccaaaaattttacttcatgagacattgcgcgatttattaatgaaatgattacagaatacaaatatgcctggaaccccaacagttttgttttccccaaatgatctgaactgaaccaaacagttatacttagaacctaaaaagggaaaaaatggtgtggttaaccaaaaaaggcttgagggccacaataatcccaaactttgagcttttatagatgggtttt

SEQ ID NO: 150239 - DNA, 560 bp, Zea mays
  Clone ID: MRT4577_68545C.1
cggtcgcgtgggccgagctgaaaggccgagactcgaagacagttcgtgtgatgcgttcttaatcgactgagggctaaggaatgtgacgtactggtatatgtacattagttgaagcggaggctataaagggtgtagagattgtttcatcagtatatatcatctgtcccgatgggttttgttttgtgctaaaaaaaaaaaaaaaaaaaaaaaaaaaaaaaaaaaaaaaaaaaaaaaaaaaaaaaaaaaaaaaaaaaaaaaaaaaaaaaaaaaaaaaaaaaaaaaaaaaaaaaaaaaaaaaaaaaaaaaaagggggggcccttttaaaagaaccaaatttaactacccggggctgggaagaaaaaattttttttttggggccccaaaaataaaataaatggcccgggttttaaaaactttggaatggaaaaaaccttgggttacccaaattaaatccctttgaaaaaatttcctttttcccaagttgggaaaaaacaaaaaggcccccaccaaatcccttttcaaaaaatttccccaccttaataggaaaagggaacccccct

SEQ ID NO: 150240 - DNA, 438 bp, Zea mays
  Clone ID: MRT4577_68546C.1
cgtttgttaatttccagtttcaccatccttttttgctttgctttgaaaaaaaaaaaaaaaaaaaaaaaaaaaaaaaaaaaaaaaaaaaaaaaaaaaaaaaaaaaaaaaaaaaaaaaaaaaaaaaaaaaaaaaaaaaaaaaaaaaaaaaaaaaaaaaaaaaaaaaaaggggcggccccttttaaaaaaaccaaagttaactaccccttccttccaactaaaaactttttttatagggcccccaaaataaaattaacggcccgcgttttaaaaacgtcggaactggaaaaaccctgggttacccaaattaaatccctttgaaaaaaatccccttttccccagttgggtaaaaaccaaaaagcccccacccaatcccctttccaaaaatttgcccaccctaaatggcaaagggaacccccctttaaccggccaataaaccc

SEQ ID NO: 150241 - DNA, 528 bp, Zea mays
  Clone ID: MRT4577_68547C.1
gtcctctgaagtagctgctcacaggacaaagtttggaaatctccatttgtggtttttacattcgcagttgtgttccttggatatatgtaaatcgtatggtttagcaacttcgccctttgatggcttggaaaaaaaaaaaaaaaaaaaaaaaaaaaaaaaaaaaaaaaaaaaaaaaaaaaaaaaaaaaaaaaaaaaaaaaaaaaaaaaaaaaaaaaaaaaaaaaaaaaaaaaaaaaaaaaaaaagggggggccctttttaaaggatcaaagtttacttccccgtgcttgcaacgtaaaagtttttttttggggcccccaaaataaaattaattggccgtgttttaaaaacgtgtgaattggaaaaaccttgggtttcccaaattaaatccctttgaaaaaaatccccttttccccagttggcttaataccaaaaaggcccgaaccattcccctttccaaaaatttccccaccctaaatggcaaatggaaccccccttttagcggcccttaaaccccggggggtgtgggg

SEQ ID NO: 150242 - DNA, 464 bp, Zea mays
  Clone ID: MRT4577_68548C.1
ctgttcttggtttgtaaaagaaagacagttctatagttttattgtagacactggaccatcatatgatctcaatgggtagctttttcctttttatatttaaaaaaaaaaaaaaaaaaaaaaaaaaaaaaaaaaaaaaaaaaaaaaaaaaaaaaaaaaaaaaaaaaaaaaaaaaaaaaaaaaaaaaaaaaaaaaaaaaaaaaaaaaaaaaaaaaagggggggcccgttttaaaaaaaccaaagttaactaccccgggcatgcaacgtaaaagtttttttatggggcccccaaaataaaattaacggcccgggttttaaaaacgtgggaacgggaaaaaccctgggttacccaaattaaatccctttgaaaaaaatccccttttcccaagttggggaaaaaccaaaaaggccccacccaatcccctttccaaaaatttgcccaccctaaagggaaaagggaaccccc

SEQ ID NO: 150243 - DNA, 787 bp, Zea mays
  Clone ID: MRT4577_68549C.1
gggcgattgggactctcgaggccggccgggagccgtgatccatccgaataaacggcagactgtcatccctgccaaaatctgagctcgcgtccgcagaggtccatggcgtccaagtccgtcgagctgcgcatgacgctgctgggcgtggccctgctagggctgctgctgctgagccagcacgcggcgcccgtcgatgctgccgagagcgacggccccagaaaggaaaagactagcttcagcatgaactccgcatacagcgagaagaagcccagcagcaagggcgcaagcgcaactgatcccgcacacgggtgatgttccacatccatgcctataggccactcacctcaccacgcagcgttaccggccgtactactatatctacatacgaccgtgggacaacgtcgaccggagctcgatcggcgcagttgccgcatgggcgtggctgtcaaagttcctttgtttctttcttgatttgtgcttgcgttgggttcggtgttccactttctttttatgtgattattaatcttgttttcagatgcatgtacgcatgtatgtgccggcaccatttggtcttgtgttaagtttattcttggattccaatctctagtgtagggtcgtttggtttgtgtgtgcatgttgtactcataccaacttctgtctttacatcagtatttactaggtgagtgcccgtgcgttgcgacggaagtaaaaaaaaaaaaaaaaaaaaaaaaaaaaaaaaaaaaaaaaaaaaaaaaaagggaaaaaaaaaaaaaaaagggggcgggcc

SEQ ID NO: 150244 - DNA, 1590 bp, Zea mays
  Clone ID: MRT4577_6854C.1
cattgggtacctcgaggccggccggggcctcctgcccggccgggggggatcaccattacatttgatccgccgcgcgcggcccgatcgacgagcgagcctcattcacactccgatctagctagctagctagtttaggaaagagaaatctgaccacagggatgcggtggcggctgcagccggcgccggcgccggcgctgctcctcgtcctggccaccatcgccgccgtcgtggtggtgcgagcggagccccaggtgccgtgctacttcgtgttcggggactccctcgtggacaacggcaacaacaacgacatcgcgtcgctggcgcgggccaactacccgccctacggcatcgacttcgccgccggccccaccggccgtttcagcaatggcctcaccaccgtcgacgctatatctcggcttctgggcttcgacgattacatccccgcgtatgctggcgcgagcggcgatcagctcctcaccggcgtcaacttcgcttccgccgcagccgggatccgtgacgagaccggacagcaactggggcaacggatcagcttcggcgggcagctccagaactaccaggcggcggtgcagcagctggtgagcatcctgggcgacgaggactccgcggccagccacctgagccagtgcatcttcacggtgggcatgggcagcaacgactacctcaacaactacttcatgccggcggtctactccaccagccagcagtacacgccggagcagtacgccgacgtgctcatcaaccagtactcgcagcagctccggaccctgtacagctacggggccaggaaggtggcgctcatgggcgtggggcaggtcgggtgcagccccaacgagctggcgcagcgcagcaccgacggcaccacctgcgtgccgcagatcaacggcgccatcgacatcttcaaccggaagctcgtcgccctcgtcgaccagttcaacgcgctgccgggggcgcacttcacctacataaacgtgtacaggatcttcgaggacatcctcgccaacgcagggtcgcacgggttcacggtgaccaacgccgggtgctgcggggtcggcaggaacaacgggcaggtgacgtgcctgccgtaccaggcgccgtgcgccaacagggaccagcacatcttctgggacgccttccaccagtcggaggcggccaacatcatcgtcggccgccggtcctaccgcgccgagtcgcccaacgacgtctacccgatggacatcagcacgctcgcctccatctgattctgattctcatccctccataaatataaacataaaaatatatgatataatccacccaccactgcgcaaaggctgcaatattaaacagggctccaagaggaggtagccgtgcaattctttcctgtgtacaagctcgcgccttatctgtaatttttcatgctttcatacatttgcatcgggtacttagaaaatatccgatcgaatcacttttttttttcgttttcaattctcatgcacacctgaattccgcgaaagattccacaagtacacccccataaaaaaaaaaaaaaaaaaaaaaaaaaaaaaagtactctgcgttgttaccactgct

SEQ ID NO: 150245 - DNA, 622 bp, Zea mays
  Clone ID: MRT4577_68550C.1
gaagttaaagaatgccgacccgtttattgcgttccaaatgtcctgcctgagtgcaactctggattttgcttaaatattgtaatttttcacgcttcattcgtccctttgtcaaatttacatttgacaggacgccaatgcgatacgatgttgtaccgctattttcagcattgtatattaaactgtacaggtgtaagttgcatttgccagctgaaaaaaaaaaaaaaaaaaaaaaaaaaaaaaaaaaaaaaaaaaaaaaaaaaaaaaaaaaaaaaaaaaaaaaaaaaaaaaaaaaaaaaaaaaaaaaaaaaaaaaaaaaaaaaaaaaaaaaaaggggggggcctttttaaagaaccaaattttactaccccgggcttgaaaagtaaaattttttttttggggcccccaaaataaaattaatggcccgggttttaaaaacgtgggaatggaaaaaaccttgggttacccaaattaaatccctttgaaaaaaatccccttttcccaagtggggtaaaaaaaaaaaagcccccaaccaatcccctttccaaaaatttccccaccctaaatggcaaagggaaccccccttttaccggcccataaaccgcggggggtgtggggtttcccc

SEQ ID NO: 150246 - DNA, 2413 bp, Zea mays
  Clone ID: MRT4577_68551C.1
ggtaccctcggattcggccgggagcacagctagagacctctcttcgtctcatcagtagagagaaaggttaataggggggaaactaatgaagacctccgtagtcgttgctgctctagcagcggtgctgttcgcagcacagtcgtatgcttccctcgccggcgccagcggccccagggtcatcatcgtcggcgccggcatgtccgggatctcggcggggaagacgctgtgggaggccggggtccgggatctgctgatcctggaggcgacggggcgcgtgggcgggcggatgcacaagcacaacttcggcggcatcaacgtggagatcggggccaactgggtggagggcctcggcggcgaccagctcaaccccatctggcccctcgtcaactccacgctcaagctcaggaacttctactccgacttcgacagcgtcgtcggcaacgtctacaaggagaacggcggtgggctgtacgacgaggagtacgtgcagaagagaatggaccgtgcctacgaggtggaagagctgggcgccaaccttaccaagaagatgcaccccagtggccgcgacgacatctctgtcttagccatgcaacggctgttcaaccaccagccgaacgggccgacgacgcctgtggacatggcgctggactacttcatatacgactacgagttcgcagagccgccgcgcgtgacgagcctgcagaacacgcagccgacgcccaccaacgccgacttcggcgaggacaactacttcgtggcggaccagcgggggtacgagtccatcatacactccatcggcagctcctacctctccaccgacggcaacggcaagctcaaggaccgcaggatcctgctcaacaaggtggtgcggcagatcacctacaacaaacaaggggtggtcgtgaagacggaggacgggtcgtcgtaccgtgccgactacgtggtcgtctccaccagcttgggcgtcctgcagaccgatctcatacagttcaagccacagctgcccgtcagttcacatgcatctcactgctctgctatacctgcttaattaattaattataataccatggaggaatggcaactgatcgagtgacccggatggataataatatctagttatatatacactaacaagcaaaaacatcgtatcgtcagttctggaagatcgcggcgatctacagtttcgacatgggggtgtacaccaagatcttcctcaagttccccgagcggttctggcccgtgggcgaggggaagcagttcttcatgtacgcgagcagccggcgcggctactacgcgctgtggcagtcgttcgagcgggagtacccgggcgccaacgtgctcctggccaccgtcaccgacgacgagtcgcggcggatcgagcgccagagcgacgaccagacgaaggcggaggtggcggaggtgctgcgggacatgttccccggcgccgacgtgccgggccccgaccagatcgacatctacgtgccgcgctggtggtccgaccgcttcttcaagggatcctactccaactggcccgtcggcgtcagccgctacgagtacgaccagctcagggcgccggttgggagggtctacttcactggtgagcacaccagcgagcgctacaacggctatgtccatggagcataccttgcaggtatcgactccgcaaacatcctcatcaactacatcttcaagaacgaggagtacaaggtccgtggcaagtacgacgtcgacgacctaatcgcacaggctagatgaacgacgacgagtgcacacgccggatgccctgcgccacgatagagacagaataaactgccacggctttatttgccctgtggagcgatgcatgcttcccccttccctttcgagctagagcaaccccagcaggcgccctgcaccgtctggcgtctgctgttcatgtcccgtgtctctgtgtgtttttggattggatgccaatggaacaagaacgtaggctcgaggcctctgttctgtttggtgtttgtggggtcatctatgcacgtcagtttcacatcagatcaaaatttacaaaaaaaaaaaaaaaaaaaaaaaaaaaaaaaaaaaaaaaaaaaaaaaaaaaaaaaaaaaaaaaaaaaaaaaaaaaaaaaaaaaaaaaaaaaaaaaaaaaaaaaaaaaaaaaaaaaaaaaaagggggggccgttttaaagaatccaattttacttccccgggcttgcaaggtaatagtttttttttagggcccccaaaataaaatcaacgggccggggtttaaaaacgtgggaacgggaaaaaccctgggtttcccaaattaaatcgctttgaaaaaaatccccttttcccaagttgggtaaaaagcaaaaaggcccccaccaatcccctttccaaaaatttgcccaccttaaatggcaaagggaacccc

SEQ ID NO: 150247 - DNA, 401 bp, Zea mays
  Clone ID: MRT4577_68552C.1
actagttctataagagaatttggtcaaaaaaaaaaaaaaaaaaaaaaaaaaaaaaagggaaaaaaaaaaaaaaaaaaaaaaaaaaaaaaaaaataaaaaaaaaaaaaaaaaaaaaaaaaaaaaaaaaaaaaaaaaaaaaaaaaaaaaggggggggccgttttaaaggaccaaagtttactaccccgtgcttgcaaagttatagtttttttttaggggccccaaaattaaattcacgggccggggtttaaaaacgtcggaatgggaaaaaccttgggtttcccaaatttaatcgctttgaaaaaaatccccttttcgccagtgggggtaataacaaaaaggcccgccccaatcccctttccaaaaatttgcccaccttaaatggcaaaggggaccccccctt

SEQ ID NO: 150248 - DNA, 488 bp, Zea mays
  Clone ID: MRT4577_68553C.1
ggccgcgggttttttttttttttttttgcttttaaacgaatgtcacatcattaatatataataggagttccatacaaaataaataaataattacatcatgcgaagacaacgatctagcaacacaaagttgactgggagacgacaacctagaccactcacgaactcatcacagcatccttcgtgcgcctcatcctgcggtacctgttcttgacctaaggactggagcatcagaggatcatggcctcgaggacctgcgacatggtggtggccatacattccgttgagcaattccatgcaccaccggtttcaagttcacctgatgaggtcatgggcgtcccccatgagacacgaggaagaccccctgccaaccgccgagggcacaatgccggtgaaccagatcttcacccaccctgcatggtggccctccatctccttcccagctactcgccgcaacgacgtgctctaaggcggggctcgaccccggccgg

SEQ ID NO: 150249 - DNA, 328 bp, Zea mays
  Clone ID: MRT4577_68554C.1
ccctctcttccgcgcgcctccgagctccatagccccgggccgccggcgccgggccatcgtgatctcgtccggctaccaggatcgagcggacctgcccgcagtccgcgcccaggccatcgcgccgccgacccgagcttcgccaggcgcctaggccgctcgcccgcccggccggcaggacgactgggcgagctcctccccgcggaggcggggacggcggacccgcccccaggccgagtcgccgagctccgtcccgcgcgggcgcccccctgcccagtgccagccgccccgctcctgtcccggccaggctcagctccggcctgttccggtc

SEQ ID NO: 150250 - DNA, 1583 bp, Zea mays
  Clone ID: MRT4577_68555C.1
cgggccgacccaaacgtcaattcatggggaaaagaccagtggtctagttaagcacacgggcgctagttctggtattggtttggcttccattgtcatttctcttagatgctggagtttgtggccaatttatttgcggaaaggggaaaaaaactttcaggtcttgtgcttcactaccatgagggtatttgttacttcccagtgtaaaatttgcataagtagtttaggtggtgtttgaatgcgctaaagctaatagttagccgctaaaattagctgaagacttccaaacagtctagctaatagttcagctattagctacttttagcaaattagctaatagttgctagctaattccactagtaatttttttgtcaactaactattaggtctagtgccttcaaacacccccttagtacatcctgttttgaataaatgttttcacctgatcatcttttattctttctctcgtttgttgtcatatgtgttcgtgaatgattaggctgtagacaatggagcaaactcttttcttcttcttcttgccagcaatatttgtaacagtacggcttccaaagctatatatatagtagtacaggctttggatgctttcctgcttgatgactcaccagtcatcataccgcaaagtgcagtttgaggaggctctcaacacaccggatcccaaggaaggccttcaaagactgattgatccggcgctcggcgaggattaccccatcgactcgatcctcaagatgacggtcctggcaagggcgtgcacgcaggaagaccccaaggcaaggcccacgatgagatccatagtggtggcgctgatgacgctgtcgtcaaccagcgagttctgggacatgaacgcgatccaggagaaccaaggtgtcgtgaacctcatgtccgggagatgactcctgtccctgtggtatatattattgtacgtcctacctgccttcccctgggcaattgtacattagggcccatttgtacgcggcccgttgacggccagagaggagggccactgtaggtatttacaatgtacacgagggttttctcccgtgtttaggctccctttggaacaaaaggaaatttcctgaacctgtgttttttgctgtattttttaactaatttctatgaaattcttatagcattcatgtgaaagaaattcttatagcattcatgtgaaattcctgcaaaaaaaaaaaaaaaaaaaaaaaaaaaaaaaaaaaaaaaaaaaaaaaaaaaaaaaaaaaaaaaaaaaaaaaaaaaaaaaaaaaaaaaaaaaaaaaaaaaaaaaaaaaaggggggggccctttaaaagaaccaaagttaacttccccgggtttgcaaagtaaaaatttttttatggggcccccaaaataaaattaatggcccgggttttaaaaacgtgggaacgggaaaaacccggggttacccaaattaaatcgcttggaaaaaaatccccttttccaaagtggggaaaaaaaaaaaaaggcccaaccaaatccccttcccaaaaattggcccacctaaaagggcaaagggaccccccctttaaagggcaaataaaccccgggggtggtggg

SEQ ID NO: 150251 - DNA, 538 bp, Zea mays
  Clone ID: MRT4577_68556C.1
tctggggcagccgaatcgaaattcactttggcatggcatggccgggcaatgctctgctatgtttggcctcgttttttttcaaaaaaaaaaaaaaaaaaaaaaaaaaaaaaaaaaaaaaaaaaaaaaaaaaaaaaaaaaaaaaaaaaaaaaaaaaaaaaaaaaaaaaaaaaaaaaaaaaaaaaaaaaaaggggggggcccgttttaaaagaaccaaagtttactaccccgtgcatgcaacgaaaaagtttttttatggggccaccaaaattaaattaattggccgtgttttaaaaacgtgggaactggaaaaaccttggctttcccaaattaaatcgctttgaaaaaaatccccttttccccagttggggaaaaagcaaaaaggcccgaaccgatcgcctttccaaaaatttgcccaccctaaatggcaaatggaaccccccttttaggggccaataaaccccggcggttttggtgtttaccccaagggtaacctttacatttgcaagtgccttagggcccgttcttttcgtttttttc

SEQ ID NO: 150252 - DNA, 412 bp, Zea mays
  Clone ID: MRT4577_68557C.1
aaaaaaaaaaaaaaaaaaaaaaaaaaaaaaaaaaaaaaaaaaaaaaaaaaaaaaaaaaaaaaaaaaaaaaaaaaaaaaaaaaaaaaaaaaaaaaaaaaaaaaaaaaaaaaaaaaaaaaaagggggcgcccgttttaaaggatcaaattttacttccccttccttccaacgtaatactttttttttagggcccccaaaattaaattaacggcccgcgttttaaaaactttggaattggaaaaaccctggctttcccaaattaaatccctttgaaaaaaatccccttttccccagttgggtaaataccaaaaaggcccgcaccaatcccctttccaaaaatttgcccaccctaattggaaaatggaaccccccttttaccggcccttaaaccccgggggttgtggtgtttaccc

SEQ ID NO: 150253 - DNA, 427 bp, Zea mays
  Clone ID: MRT4577_68558C.1
attaaatataagtataaaatttatttagagcaagatagtacaaaatatagatgctggcaacgtcaggttttttcattttccttctctagaacatctttccaataccatcctgcctaggaacagattcattgacatccattcgttgccaattcccaacaaaagaagccaactgatcgaccttgtcatacaatcctaggaggccacccgtatgtatgaagaggatctttctcctttcccacttctttggattttcagacatatctttcagcattgcataagcagccttaccactgtatactgggtcaagaacaacaccagtagtggcagcaacttcttttacaaaattaagctcctccgatgtattcattgcatagccaagacccttggcgttttgaatgtggacaatatctcttgagctaacgccagc

SEQ ID NO: 150254 - DNA, 1590 bp, Zea mays
  Clone ID: MRT4577_68559C.1
aggtgacactatagaagagctatgacgtcgcatgcacgcgtacgtaagctcggaattcggctcgagaatcatgttgcgctctagttactgcacactgtatcaataatctgagaaggatctcactgaacttggggagtgtccttatgaccaaggtggttatttcattatcaatggaagcgaaaaggttcttattgcccaggagaagatgagcactaaccatgtctatgtttttaagaagaggcagcctaataaatttgcatatgtggctgaagtccgttccatggctgagaaccagaacagaccagccagcggcatgtttgtacggatgctttcacgagcaggagcaaaagggtgcgttggagaagacattgatgatttgcagtacacacctaaacccgaatttgaggggtattttagagttaagaatgttcaaactgagttggatctacttaaagcatggttttctcacatgcaagaggttaagcctggcatttatgttacatacaacgatgacttttttgactggccatttttagagaagagggctgcacaccatggaataaaaatgaatgaggagattggtttccaatgtgacaataaccagggcgagtgtcgggctaaattttcttgccatcttgactgttttgcttgggtgaagcgagacagttaccttccacaaggaagccaaggtctaaaggctgttacaaaagccaagctacgttacgatcctctggaggttaatccagaagatatggttcgctttgcaatggagcagccacagacaatggcttcgtattctgtatcagacgatgttgcaacatactatctatacatgacttatgtccatcctttcatcttttctcttgcaaccataatacctatgttacctgatgaggtactgtggaaaggaagtgggacactttgtgaaattctgctaatggttcaggcattcaaggctggaggcacacaactatgaatagtgcatcttctaaaatctctcactaaatcagctagctcttctcactaaatcagccagctcttctgcttgtcccattgtcatccagatacttatttgggatgttgaagtacaaccaaatagacatgctgtcctaggagcaagcgagtctcgccctgatctgcacgattactgggggtctaggaatatttgcaacattgtttccaagctggatagccacatgtcagtacttagctgaagatatgctgatggaatgggtttacaagccccatataataaatcataacagtgcgggagcttttttggatgtccttcacacagatgcaggcaatgaaagaaacagaaaatagacaatgttagcgcggagtgagacagataggaattgggatagaatcatccttgttctcagatcagctgtacattctttattatggtagtatatcatacctgtacgagtagactgacggttgcttccaaatactccatgtgtttgaaatatgtattgtatgtgatattctgtgttgcatgtgaaaaaaaaaaaaaaaaaaaaaaaaggaaagacaaaaaaaaaaaaaacaaaataacaaaacacaaacatacaaaaaaaataacta

SEQ ID NO: 150255 - DNA, 259 bp, Zea mays
  Clone ID: MRT4577_6855C.1
atagcatcgggggggggatgcccaattgcaaaagtcatacgaagaggggccgtaaaaaaaataagccgtctaacgaattctctcacgagataccggagtagtacaatacgacaaaaccgcaacaataaaaataaccaaccacgacctgcgaaactcctcgtatggcaaagtaaaatgcgcgttattagttttttgctagtgtacgggtctggagggatgatacgatgctgacgaccacagctaagccccagcagctagg

SEQ ID NO: 150256 - DNA, 601 bp, Zea mays
  Clone ID: MRT4577_68560C.1
atgattcatgttttgttcagtgtgccagatttatggcttcaatgagatgttggtgctagctcatctgttaagtgatgatagataacagtatgtctacatgttgctctagcacgattactgggggtctaggaatatttgcaacattgtttccaagctggatagccacatgtcagtacttagctgaagatatgctgatggtattcatttcctagggcagctagtaaaacactctcgttattccatttgaatagaatttcctactaatgccaattcgctcccgtgaatttcaggaatgggtttacaagccccatataataaatcataacagtgcgggagcattttttggatgtccttcacacagatgcaggcaatgaaagaaacagaaaatagacaatgttagcgcggagtgagacagataggaattgggatagaatcatccttgttctcagatcagctgtacattctttattaaggtagtatatcatacatgtacgagtagactgacggttgcttccaaatactccatgtgtttgaaatatgtattgtatgtgatattctgtgttgcatgtgattttatgtttgtctaattttttatttctgt

SEQ ID NO: 150257 - DNA, 294 bp, Zea mays
  unsure (1)..(294): unsure at all n locations
  Clone ID: MRT4577_68561C.1
cgggccgacccacgcgngcgagcggcgcgccgcagagcccgccagaggaccgcagccggacggaagggcgaacgggcggcccagaagcgcaggcggacacgcacccaccggccagggagccgccgagaagcgagcgccagcccggcccgacacacccagccaggctagccagagggcaccagggcgaagagcagcgagagacacaggacacagacggcgcccacgagcccgccgcgggcagacacgacaaggagagccagagggcagaggaagccccgaaggacagggaggaca

SEQ ID NO: 150258 - DNA, 876 bp, Zea mays
  Clone ID: MRT4577_68562C.1
aattccaaaaaacaatagtcaaatctgttacacatagttgtactcatcatggagatgtgcaggaaatcccttatatggtaggaaagatgcagtctgtttaagaagattataggaatatatatagcaaaatcattatcttggttacccacttttattgattggctgattgctttttcaagatgcagatatttctcaattaagtttatatacaatgcagtatttttattttattttttgtagtgcgttggagaagacattgatgatttgcagtacacacctaaacccgaatttgaggggtattttagagttaagaatgttcaaactgaggtatcaggaactatcgttatattgtttagcataatatcaaccgtatgcatcatacttattttgctataacccctttatttttgttgtctatagttggatctacttaaagcatggttttctcacatgcaagaggttaagcctggcatttatgttacatacaacggtgacttttttgactggccatttttagagaagagggctgcacaccatggaataaaaatgaatgaggagattggtttccaatgtgacaataaccagggcgagtgtcgggctaaattttcttgccatcttgactgttttgcttgggtgaagcgagacagttaccttccacaaggaagccaaggtctaaaggctgttacaaaagccaagctaggttacgatcctctggaggttaatccagaagatatggttcgctttgcaatggagcagccacagacaatggcttcgtattctgtatcagatgctgttgcaacatactatctatacatgacttatgtccatcctttcatcttttctcttgcaaccataatacctatgtcacctgatgag

SEQ ID NO: 150259 - DNA, 550 bp, Zea mays
  Clone ID: MRT4577_68563C.1
ctgctcttccatcgcgccagcgtctttgagaagctggtcggcgctcctagatcccttcgcctctctcgcgttcgaggctaggtagccgccaccatgagccgctcggggcagcctccggatctcaagaagtacatggacaagaagcttcagagtaagtggtactctcgattccgctatccagtcccaatagtacacctgtggttttgcttcaagaaagtttttcttcttcccatgtgcccagtacgtttgttcttagatcataatatacgtgactgttcgttgttagctccgcattagacagatgaagcagcttatgtctgttctggcaatttgaacgtcttcctttgtttcagtttgttcttcagcctgaccatgcaccaaaactgtgtatgttttgtgattttcgtatttgaaaaatgccctaaatgatgaacataatatgaaggctatggatttatctccacatgaagcattatgtcatagttactctgatagggcattcaatcatattttcacatatgtatcatgttgtacattatcgaaatataag

SEQ ID NO: 150260 - DNA, 906 bp, Zea mays
  Clone ID: MRT4577_68564C.1
agtgattctgttgcgtgctttcttagctggaaaagttctgaatattacataagcctctgaagtagattgttttgcacatttaaccctcctcgatctttgcacgggtcaaactaatataatgatgtagcatatcttggggaatccccgagtgaagcaagggacttcatcgagctagcgcagctaccagggggggaaaacacatgcccttagatttttttagatgagcaggcaacctttttcccattgtcatccaggtacttatttgggatgtatgttcaaatcttgggatgttgtttaatccttggggcgcataatgtttactaaatggaatgatgtcaacctttttcccattgtcatccaggtacttatttgggatgttgaagtacaaccaaatagacatgctgtcctaggagcaagcgagtctcgccctgatctggtatgattcattgttttgttcagtgtgccagatttatggcttcaatgagatgttggtgctagctcatctgttaagtgatgatagataacagtatgtctacatgttgctctagcacgattactgggggtctaggaatatttgcaacattgtttccaagctggatagccacatgtcagtacttagctgaagatatgctgatggaatgggtttacaagccccatataataaatcataacagtgcgggagcattttttggatgtccttcacacagatgcaggcaatgaaagaaacagaaaatagacaatgttagcgcggagtgagacagataggaattgggatagaatcatccttgttctcagatcagctgtactgctttctttattatggtagtatatcatacctgtacgagtagactgacggttgcttccaaatactccatgtgtttgaaatatgtattgtatgtgatattc

SEQ ID NO: 150261 - DNA, 435 bp, Zea mays
  Clone ID: MRT4577_68565C.1
ccggggggcccccccattgttaatgcggggggaaacaaaacccccccaattttttgccaaccttcgggtcatggcagaggggctagccaagaacaatcccctcaagtattcaaaaaggggtttttccaaacaatttttgatcaggagttaagcttaacttccgccagctttttttttttttggacgagcttttttttggtttaacggaaaaacattttcctcgggggaatcagcctgacaaaaaacatgcttacggcctgacaaaagtcctcctccaccacaccttaaaccccctttgaaaattggggcaattggggccgagcttaaaaaacctgccgaaccaccccaggagaaaggacctttggtcctccaggggaagggtaaggaaacgtttgcccaatgccgtcctccaaaagcctcctgttaaaccccccc

SEQ ID NO: 150262 - DNA, 285 bp, Zea mays
  unsure (1)..(285): unsure at all n locations
  Clone ID: MRT4577_68566C.1
nttgggaggagtggtgtngaggggttgtggatttttgtttttttgtttttttttttttttttttttttttggaggagganttttttggggcaaacgggattcaacattagctgcaaccaggtacagaatttttcagcaattttgtggtttattggggcgcngntggcccaggtgacaccaaaaattggggggggagacccccaacttattttcccctttcgggcgtctaaaaaggtaccttgacccgacttcgcgtctaccaaaaaattaaatgggggaccccct

SEQ ID NO: 150263 - DNA, 1866 bp, Zea mays
  Clone ID: MRT4577_68567C.1
atggcggcgccatggggtaacaagtcaataagtgagtatacgacgccgacgtctgttcatcgaccaaatcaatgcttggatatcgtagcaatggtgcaggaagaacaacaaggagggaaccagttagcctcagatgcaagtacgcatacaaaatcagctactgctgtagatgcaattactccaccagcagctttgagggccccgggggttgatgatcagaccatatttgaggcatcgaggatgacagtaaatcaaggaggacaacaccttaatactatgcgtactattggtgatcatgaacaggacacaccagtgattctgcagagacatgaagttacaattgatccgagattggtacctaaagttggtatgacattcagtggggtggatgaagcatataaattttatagtaggtatgcatatgaagttggatttccattaaaaagtatagggaacgaaaaaattgataccgaaaagaatcaattacaatgcaacaagacgcatgatcctgaatacatggagttcataagttcaatgcaagagagtcgaatcccgcaacattgtattatggattatgtatcagaaatgcacagtggtcctgagagtgtgcctgtaacaacacagggcatgtataacctgtatatgccttttctaaacgagttgtatgcaagatttgaggaaatggactttaagacacagtttcaatctataatacatcatcctttgactgagttggagcttgagactgcatggtcaatgctacttgaagattttcatctgcacgataacattactctcgataagctgtatggaatacgtaaggattgggtgcctccttttttcaaaaatcattattgtggtctaatgttgtctacacagcgtagcgaaagcatgaacaggcttgtcaaaagtgcacatgtcaatgcaaatactccgcttcatcaattcgccaagcaaatgatgaagcttctacacagtagaaagatgaaagagtcaaaggaagcagtgggaagcatgggtcaaaaggaaacgaacacgctatacatgtttgagataagggttgcaagagcatacacaagggctgtgatggataaattccaggaatctttgaaatatgcaaccgcattcaagataatgcacgacgaagaagggggtgcaaatgattgggtagtgcaacatacaactagatcgaataaaattgtgtggggacaacaccaattcaaagtgacaactgatgaagatgtaggaaagtatacttgtgaatgcaaacattgggaacatacagggctattctgtgtacatgtactacgcgcgtttatgcatcttcagattgaccggataccgaaggaatatattttacaaagatacacctactctgcaaggcaagatgttccgttctcaagagatgataggaatttgaaggggaaggatggagaaacaaagtcatatagacagaagatgttgctaaaaaaggcaatgaaagtagtgcatcatgctagtttatccaaagcaggaaatgatagagccctaacagtaatggatgagcttctcgaggtactttcgcgtttggagacagatatagaagttgaggagacttgtggaactagtggaggagatggtatacaggacgatgatgaagacaatagagacaacgaaaaggatggtgaatttgatgaaaggaataacaaggaaattcaagacgtatctaatatacttgaacagggtgtggccaatgatcaaatacctataccaatacgtccattagaagaggttaatttgcatgatcacacaattatgaatgttagtggtgtcaatgaacaaaatgatcatgccagaaagaaactggattttgcatcgatgggataa

SEQ ID NO: 150264 - DNA, 136 bp, Zea mays
  Clone ID: MRT4577_68568C.1
cacgccaagcgcgtcaccatcatgtttaaggtcatgcagctcgcgcgccttataggatgcgggctcgcctaagcagtacggttgatgcgcatgcttgctactcaatttggtgcttaatttatcatattatggatga

SEQ ID NO: 150265 - DNA, 273 bp, Zea mays
  Clone ID: MRT4577_68569C.1
gcaaatttaaccatgtgtttgtgccctacccaggggactccccagtttctgacttgaagtagactgagaagaatccacgaggtgctatctggccagatttaagtagattctatttccttggttctccctctccctgaggacctcttattttattgtcccctcttctaggttaattctcctttgatttgactttgttgagaaggaggttggacagtagattagcaaagttccaagtgcaaaattacagtgtgttagagtgtggggggaaaatta

SEQ ID NO: 150266 - DNA, 1558 bp, Zea mays
  Clone ID: MRT4577_6856C.1
cctcgaggccggccgggaggagtagtagcaaccaagctaccctatctataagtactacggctcgaatgtgtcggccgacggcaatcaccattacatttgatccgccgcgcgcggcccgatcgacgagcgagagcctcattcacaccccgatctagctagctagctagtttacgaaaaaaaaatctggccacagggatgcggtggcggctgcagccggcgccggcgccgacgctgctcctcgtcctgctggtggccaccgtcgccgccgtcgtcgtggtggtgcgggcggagccccaggtgccgtgctacttcgtgttcggggactcgctcgtggacaacggcaacaacaacgacatcgcgtcgctggcgcgggccaactacccgccctacggcatcgacttcgccgccggccccaccggccgtttcagcaatggcctcaccaccgtcgacgctatatctcggcttctgggcttcgacgattacatccccgcgtacgctggcgcgagcggcgatcagctcctcaccggcgtcaacttcgcttccgccgcagccgggatccgtgccgagaccggccagcaactgggcgggcggatcagcttcgcggggcaggtgcagaactaccaggcggcggtgcagcagctggtgagcatcctgggcgaccaggacacggcgtcgagccacctgagccggtgcatcttcagcgtgggcatgggcagcaacgactacctcaacaactacttcatgccggccttctacaacacgggcagccggtacaccccggagcagttcgccgactcgctcatcgccgactaccgccgccacctgcgggtgctgtacaactacggcgcgcgcaaggtggtgatgatcggggtcggccaggtcgggtgcagccccaacgagctggcccgctacagcgccgacggcgtcacctgcgtcgaccgcatcgacgacgccatccagatgttcaaccgccgcctcgtcggcctcgtcgacgagttcaacgcgctcccaggcgcgcacttcaccttcatcaacgcctacaacatcttcgacgacatcctcgccaacgccgcctcctacgggttcacggtgaccaacgccgggtgctgcggggtcggcaggaacaacgggcaggtgacgtgcctgccgtaccaggcgccgtgcgccaacagggaccagcacatcttctgggacgccttccacccgtcggaggcggccaacatcatcgtcggccgccggtcctaccgcgccgagtcgcccaacgacgtctacccgatggacatcagcacgctcgcctccatctgattctgattctcatccctgcccataaatataaacataaaaatatatgatataatccacccaccactgcgcaaaggctgcaatattaaacagggctccaagaggaggtagccgtgcaattctttcctgtgtacaagctcgcgccttatctgtaatttttcatgctttcatacatttgcatcgggtacttagaaaatatccgatcgaatcacttttttttttcgtttccgaaaaaaaaaaaaaaaaaaggccccta

SEQ ID NO: 150267 - DNA, 647 bp, Zea mays
  Clone ID: MRT4577_68570C.1
cgggtactaggatgagagcaaccataggttacatgatcgttggcggtagggtagccatggctggcatggcccacacaaggtgctttagaggagctcatgattcatagaagacatttatttgcaagaaagtattacatgattcttataattatttacttaataagtgtatctcgaccttcttagaaacaacacgcatggacaatatgattaaaatgaagattaacaagctcaaactcaaatgattaatggataaaaaacatcatataccatctcatttgttatccctcgaaccaaacatgggacataaataacttgttggattggtctcgtctaattcagttagaggaccgagccaaacaccacacttgagtcttgatcgagcacataaaaacatattagttggggtccccttcacaccatgtaaacaaatagggatgagagccgatacatgaaccaacattcttcgtaccttctcaccccacgcactgagatccaatctaatctatctgtggcttgtgaaagaaaggccaccaccatcgtattcatcgcccccatacactagactttgactctcatgattgggcctcctaatcccaaaggatatccatatgtcctacattttctagtggttagggttatgagctaag

SEQ ID NO: 150268 - DNA, 278 bp, Zea mays
  Clone ID: MRT4577_68571C.1
gggcagcaatcattgactatagtgctagaatcggagacagtgttctgatacaggatggtgacgatggtctggaggctgcactggtaaccgactgttactatattaaaggagtaattgtaacagagactaatgatgcataattggctagaggaacagttatatctagtgaacgtatgacatgcacttacatgtctcgacagtcgacaatgatcagtacttgtctatatgacagttctgcatatgattcagccagagatcatgtgtactgtacccgagtc

SEQ ID NO: 150269 - DNA, 250 bp, Zea mays
  Clone ID: MRT4577_68572C.1
gttctcaattactcatactgctataatcaaccttattacactgtactactcgatcttatttctaaatgtgctgtgctctgaactcactacatcacttcaaactcacactgtacctaatacattcgttctaatcacacctttcattaccttaatctatagccatatgttgcccaactaaatacactaccacctaatctctacattcaaacttaccttctctacactaatcagacgttttactcatccttaa

SEQ ID NO: 150270 - DNA, 772 bp, Zea mays
  Clone ID: MRT4577_68573C.1
agcgccactgaaagagtgggaaacggtgcctcttcgctatcatgatttcagattaatcaacgtaatggtcgatgcctactgcagaaaaggtctcgtggaaaaggcagtagctctcgtggatggcgccatcaagaaagggaggaccccttacgctaatacctggtataagttggctggtgggtttttcaaaactggtcaggtaccagaagcagtggacatgacaaggaaggctcttgattccgcgactcctccatggagacctgacctcgccaatgtgctgatgagcctgaacccctttgtggaccagaaggatgtaggagcagctgaggagatggtgagtacgctacagaagctggttcctttgactagggatgtttaccattgtttgctgaagacctatgtccgtgcgggaaagccgccgtccgatctgctggagcgtatgaaggaagatggccttgaggctgatgaggaaacagagagaatcctcgcgggagaatgcgagcgagtagacatgcacccgttgtcgatcactaagtaatcacttttctctgttcatctgttcctttgttcttgaattcttctcattagttgaagccatggccactgcttacataaataagacagcacggtcctttcttgtggtctgcgtgcgtagttcctccattgtaaggctgtgtgtccagcatgttatggatgtcgtcgcgtaaaatatacggtcggccgcgcggtcgcacattttcatggcttctctctcctctacgggagaagttct

SEQ ID NO: 150271 - DNA, 456 bp, Zea mays
  Clone ID: MRT4577_68574C.1
taaaaagaaacatataaaaatcaaaatgatttatttatcactacgaaaaaagaaaacaattagtgagggcttgatacatcatactggaaggagacaaaaagtgaaaaaacactcacagtgcaatgctaactttggactgaaacggatcttagacttaactaaactggtgcatgaatcatgatgtcatgagacctttgcttagctacactgaccgctgtcatttctctagctatacgcgtactcgaatttggatacatgcgttgctagaggattatgcgtatgtttgtcactaggtgtccctctcattcatactttgcaactttacgtcactgggatccatctatctactagataattgagctctctgatagactaaaggtgcgaatgatcgtactagagctaatatatagttgactcactgaaattagctagcttaccaatatctagctaactatt

SEQ ID NO: 150272 - DNA, 501 bp, Zea mays
  Clone ID: MRT4577_68575C.1
cgcttgtgttctccccaatccttgtttagccgcattattatttgtacagaagaaatatgtgtcaaaaaaaaaaaaaaaaaaaaaaaaaaaaaaaaaaaaaaaaaaaaaaaaaaaaaaaaaaaaaaaaaaaaaaaaaaaaaaaaaaaaaaaaaaaaaaaaaaaaaaaaaaaaaaaaaggggggccgtttaaaagaaccaaatttaactaccccgggcttgcaaggtaaaagtttttttatagggcacccaaaattaaattaatgggccgtgttttaaaaacgtgggaatgggaaaaaccttggggtaaccaaattaaatcgctttgaaaaaaatccccttttcccaagttggggaaaaaaaaaaaaggccccaaccaatcccctttccaaaaatttgccaaccctaaagggaaaagggaaccccccctgaacgggccaataaagcccggggggggggggggtaaccccaaggggaaccgttaaatttgcaagggcctaaacc

SEQ ID NO: 150273 - DNA, 2022 bp, Zea mays
  Clone ID: MRT4577_68576C.1
aagagatctcctcgagaggggccgggggcatttcgcccaattctcgacggcttcccttcttagttcttccccttcatccgaaaccctcgcactctagcggcccgcacaaagccgccggagcgccgcgccaccatgtaccggcttttccgccgcagcttctccatggctgccgagggttccgccgccgccgcctcttcctctccacccccctccacctccatgtcctcgaccccgcggcaacatctgccggacgagctgtaccgccgcatcatgaatgtcgggcgcccaagcatcccgttatcccccgtcctggagcaatggaatcaagaaggccataccgccaagaagttcgtcatccaggccatcgtcaagaagctcgtcggcctccgccgcttcgcccacgcactcgagctgtcgttctggatgaccgaccgcaggcacctccacctttcggtcggtgacgtcgcgtaccggctggacctaatcagcaaggtgcacggccttgagaaagccgtcgagtacttcggcatggtaccgaagcagctgaggaagccgcagtgctacggctccctcctgaaatgctatgtggaggcgaaggccgtcgacaaggctgaggagcacttcgcgaagatgcaggagatggggatgacgagttcttacgcatacacttggatgatgaagctttacctacagactgggcagcttgaaagagtgcacgccatgttccaggacatggaagagaaaggtgtgaagcctgatactttcagtgtggaggctatgttagctgcgtacattgctgctgaagatgtccagggggttggtaaggtgctcgacaaggccaatccacacgagaagcttgtgacttggcatgggcatgcttcggcagcgagcttgttcatgaaatctgggatgcaggtgggggctgtcatggctctcgtggaagccgagaggcggatatctccaaagagcagtagaatcgcatacgctttcttactcaagacatatactgaactggggatgcatgctgaggccggacgcatttggagtgtctacaaatccaaagtgccgccgtgcaaattcggctcgatgtacatgtcgaggctaagcgcgttactcaggacgaacgacactgatggggcagaagcgacactgaaagagtgggaaacggtgcctcttcgctatcatgatttcagattaatcaacgtaatggtcgatgcctactgcagagaaggtctcgtggagaaggcagtagctctcgtggatggcgccatcaagaaagggaggacaccttacgctaatacctggtataagttggctggtgggtttttcaaaactggtcaggtaccagaagcagtggacatgacaaggaaggctcttgattccgcgactcctccatggagacctgacctcgcgaatgtgctgatgagcctgaaccactttgtggaccagaaggatgtaggagcagctgaggagatggtgagtacgctacagaagctggttcctttgactagggatgtttaccattgcttgctgaagacctatgtccgtgcgggaaagccgccgtccgatctgctggagcgtatgaaggaagacggccttgaggctgatgaggaaacagagagaatcctcgcgggagaatgcgagcgagtagacatgcacccgttgtcaatcactaaccatctgattggttagtcgcaccgtctcatcctgtatcagtgcatgcattgattttatttaagtctttgtttggttgcctgtatacttaaagcgtgagctgcatgagtggatgcaaactaatttattttgagaccgtttgactgcatctgctcatacgtcaaaatcttcggtttgtaatcacttttctctgttcatctgttcctttgttcttgaattcttctcattagttgaagccatggccactgcttacataaataagacagcacggtcctttcttgtggtctgcgtgcgtagttcctccattgtgaggctgtgtgtccagcatgttatggatgtcgtccgcgt

SEQ ID NO: 150274 - DNA, 339 bp, Zea mays
  unsure (1)..(339): unsure at all n locations
  Clone ID: MRT4577_68577C.1
gttgcagaatcctctgttagacctgatgagaatttgcaccaaaccttgcttgacgggaaggattgctgggtaatcggaccggtccggctggcttaccgctttcttttccgtgtgtttggggtattcaatctccctacctaaaaatgactgggggggggtggatacctcactagtctccttatggattggtgctttcgaatgtgcccngtnggggcttctctgtatctgctggtatattgtgctgtgtgttgatcactgttgccctttgtngtgtttggtttttttgtgtttttgatttttttgggtgttttggttgttgtttcttggtgtgtggcgggt

SEQ ID NO: 150275 - DNA, 1527 bp, Zea mays
  Clone ID: MRT4577_68578C.1
cattgggtacctcgaggccggccagaaaaaaaacccaaaacccgagcgcacccccaacccaagagcgaaaatggatccgcaccagttcgccccctcccagcagtcggcgctgaccatggaatcggcggagagcacggccgccgccgccgcgcgggcgtccaacggcgctgcccgagctgtcgtcgaggacgacgacgaggacgacgacgtccccgaggtggccgcctgcatatcgacgatgctcgaccgcgggggtagcgtggagagccaccgcctcttcctggcgcgccgcaccgcgctggagatgctccgcgaccgcgggtacgccgttccggaggaagagctcgcccgcaccctcccggagttccgcgcctggtgggaatacaggccggagctcgaacgcctcgccttctccactaccctcacctccgacccgtccagcaaggtgaaagttgtgttctgtccacctggacctgtcaaaatcgcagctatccggctgatatataccgaagtcaaagatgagaacttgtccagactgattctgatactgcagggcaaaataatgtctacaaccagagaatccatcaaggagatctttcgatttaaagttgacacattccagatcacggaattactggtgaacatcactaagcatgtcctcaagcccaagcatgaagtgttgactgcagaggggaaagctaagctcctgaaggagtacaatgtggtggattcacagttgcctcgcatgctggagaatgatgctgttgctcgctattatgggctaggcaagggaactgttgttaaggttatatacgacagcgagcttaccgggaaccacgtgacgtaccgatgcattacctgaggggcccatgtgtttcggtggatgaagtctcgtaagcagtctgtaaaaaattacctctaagaggggcaggtgacactgttctgctaggcttttgtaagcacccaattgtgcaggatgaagcttgctgtaagctattggtaaaatcatcttgcgccattgccgtaccttaagtgcttggtgttaatcttggaaacagtgagacaactaatcctgtagtgagttaaaaaaaaaaaaaaaaaaaagccaaaaaggtggaggggggggggaaaaaaaaaaaaccaaaaaaaaaaaaaaaaaaaaaaaaaaaaaaaaaaaaaaaaaaaaaaaaaaaaaaaaaaaaaaaaaaaaaaaaaaaaaaaaaaaaaggggggggccctttttaaaagaaccaaattttacttccccggccttgaaaattaaaattttttttatggggcccccaaaataaaattaatgggccgggttttaaaaacgtggaaatggaaaaacccttgggttacccaaattaaatccctttaaaaaaaatccccttttcccaagttgggtaaaaacaaaaaggcccccccccaatcccctttccaaaaatttgcccaccttaattggaaatgggacccccccttttacggcccattaaaccccggggggtggggggtttcccccaaggg

SEQ ID NO: 150276 - DNA, 432 bp, Zea mays
  Clone ID: MRT4577_68579C.1
tgatatacatatgagaagtaatcgataatggggccctcataccggcatgtgtttcctagaaataatcaatatattgattgacatttactctcgaaaaaaaaaaaaaaaaaaaaaaaaaaaaaaaaaaaaaaaaaaaaaaaaaaaaaaaaaaaaaaaaaaaaaaaaaattaaaaaaaaaaaaaagggggggcgcgtttaaaagaacccaagctaacgtccccgggcatgcaacgtaaaagcttttttatagggccaccaaaattaaattaacgggccggcgtttaaaaacgtcggaacgggaaaaaccctggggtaaccaaactaaatcgccttgaaaaaaatccccttttccccagtgggcgaaaaaccaaaaaggccccccccaatcgcccttccaaacagtggcccaccctaaatggcaaagggaacccc

SEQ ID NO: 150277 - DNA, 1551 bp, Zea mays
  Clone ID: MRT4577_6857C.1
agacgttggccgcccgccattggtccgccgatatctcctttttcctctctccttctctgcttcagaccttcagttcccgtccacgagcaggtagtagctactagtagctagcaagtaggccagctagcacgctcgctcgcagtagtcgctaggtacacagcattggcgccggcccgcgcgcgcgccatggaggaggcgaggcaaaggcggcggctgtgcctgtgcctgctggtggcggccgtgagctgggcgctgctggcggcggtggcgcggtgcgacccgcaggtgccgtgctacttcatcttcggcgactcgctggtggacaacggcaacaacaactacatcgtgtcgctggcgcgcgccaactacccgccctacggcatcgacttcgccgccggcccgtcggggcgcttcaccaacggactcaccaccgtcgatgtcatcgctcaacttctgggtttcgacaacttcatcccgccgttcgccgccacgagcgccgatcagctcctcgccggcgtcaacttcgcttccgccgcagccgggatccgcgacgagaccggccagcaactggggcaacggatcagcttcggcgggcagctccagaactaccaggcggcggtgcagcagctggtgagcatcctgggcgacgaggactccgcggccagccacctgagccagtgcatcttcacggtgggcatgggcagcaacgactacctcaacaactacttcatgccggcggtctactccaccagccagcagtacacgccggagcagtacgccgacgtgctcatcaaccagtactcgcagcagctccggaccctgtacagctacggggccaggaaggtggcgctcatgggcgtggggcaggtcgggtgcagccccaacgagctggcgcagcgcagcaccgacggcaccacctgcgtgccgcagatcaacggcgccatcgacatcttcaaccggaagctcgtcgccctcgtcgaccagttcaacgcgctgccgggggcgcacttcacctacataaacgtgtatgggatcttccaggacatcctcagagccccagggtcgcacggtctgacggtgacgaaccaagggtgctgcggcgtcggacggaataacgggcaggtgacgtgcttgccgttccagacgccgtgcgccaacaggaacgagtacctcttctgggacgccttccaccccaccgaggcggccaacatcctcgtcggtcggagggcgtacagcgcggcgctgccgtccgacgtccaccccatggatctgcgcacgctcgccaggatctagctgtatggatcatgtgaactcgtgaagagaagcaaagcttacagcttcttcctttttttgttctttgtttcccctcgtgattgtattgcttaccactcgcaaaggcacgtatggtctctccatctaaactatatatataaacatgatatatactccctcaatccaaaaaaaaaaacgaaatacgaaagaggcctgaaagctcccgccatatatatactgttcgttgtacctttaaaaaaaaaaaaaaaaaaagcggcc

SEQ ID NO: 150278 - DNA, 1056 bp, Zea mays
  Clone ID: MRT4577_68580C.1
gcacgagcggacaaggacctgctctgtttctcggcgagtttttcccacttccacctctccgtcccttcggcacgggggcggccgcatcgactgttagggcgaaaatccgttctagtctctcggcgattttcggttcgcaggcggaggcagcaggatctgcgggaaggatttcgtgtcgagatggctgggcgcaaggaaactgcactcgacctggcgaagttcgtcgacaagggcgtccaggtgaagctcaccggcggccgccaagtgacaggaactctaaagggatatgaccaactactcaacttagtgctagatgaagcagttgagaatgaaagagagcaagatgatccattgaagctatcagggaaaactagacaacttggcctcattgtgtgcagaggcacggcagtcatgctggtctcaccgactgatgggactgatgagatcgccaaccctttcctcgcggacggagcatagcttgcgcccctcggaacaatatgtccctgtgggaaaagaacccgtttctcgtgtatttgttgtacatgttgctacggttactattgtgctgctgctgagtacttccgttttctttcctcttttctgagttctgttgtatcgtgtgcagctgtgcgtcttattaagggtatttgaatgcactagaaaaaaaaaaaaaaaaaaaaaaaaaaaaaaaaaaaaaaaaaaaaaaaaaaaaaaaaaaaaaaaaaaaaaaaaaaaaaaaaaaaaaaaaaaaaaaaaaaaaaggggggggccgttttaaaaggaccaaagtttacttccccgggcttgcaacgtaaaagtttttttatggggcccccaaaattaaattaatgggccgtggtttaaaaacgtgggaacgggaaaaaccctgggttaaccaaattaaatcgctttgaaaaaaatccccttttccccagttgggtaaaaagcaaaaaggccccccccaatcccctttccaaaaatttgcccaccctaaatggaaaatggaaccccccctttagcggcccataaagcgcggggggggtggggtttcccccc

SEQ ID NO: 150279 - DNA, 233 bp, Zea mays
  Clone ID: MRT4577_68581C.1
gctcgtgcggggtcttcacaccattagctttatctactgcagagcgcagaaaaacccgatcgacaccatgagggtagttgatcgttgacctcgctctcctggctctcgctgcgagcgccacctccacgcatacaagccggcggtttttttttgccagccaggggtcgcccgctcatctaccgccgacggtgcatctggcccctccagttcacctgccacctgcggagcatctc

SEQ ID NO: 150280 - DNA, 2648 bp, Zea mays
  Clone ID: MRT4577_68582C.1
ttgtgtgccgcgcgcgcgcgaggggtcaaactgccgccgcgttgtcgcgctcatcgtcgccgcgtgctgtggtctgctgctcctgctgctcccccccaatctccccgcaccgcacctcacctcccccagctcctcctcttcctctaattggtacacgctttcgaggctagggttgcctcctcctcctcctcgccgtccacatggcgcgaatcctcatgcggctcctcctcctcgccgcggcggcggcggtggcggcgggggacggctgcctcaactccggctgcctcgcgctgggctcctacctcgtctcccggaaccagaacctcacctacatcgccagcctcttcggcatcggcgaccaccacaagctggctccctacaaccccggcaacacaaaacctggacttcattcaggcccgccagagcgtcaccgagtcttccagtgattcaaagggattgtttatctgtttgaggaggctctcaacacaccggattccaaggaaggccttcaaagactgattgatccggcgctcggcgaggatgacccctccgactggctcgagcgtcaacatctccttcacctgcggctgccacacgttccccaactcggacgccacctacctcggcggctccttcccgcacaaggttgtcaccggcgacacctacggcggcatcgcccagaactacaacaacctcacctccgccgcctggcttgccgtcaccaacccgtatcccacgaacaacatccccgacaccaacaccgtggtgaacgtcacggtcaactgcacctgcggggacccgaagatctcgtcggactacgggttcttcctcacctacccgctcatgggccagaccctcgccgccgtcgccgccaactacagcttcaactcgtcgtcgcagttggacctgctccgcaagtataaccccggcatggacaccgctacatccgggctcgttttcatccccgtcaaagatggcaatggaagttaccatcctttaaaaccaccaggaaacggaggttctataggagctatagtaggaggagttgttggtggtgttgctattctggtcctgggcgtcttgttatatatcatgttctataggcgaaaaaaggcaaacaaggctgccttacttccatcttctgaagattctacccaacttgctactacatccatggataaatctgccttgtcaaccagtcaagctgatagtagctctggagttccaggaattactgttgataaatcagtagagttctcgtatgaagaactttttaatgccacagagggatttagcatgagtaacaaaatcgggcaaggtggttttggtgctgtctattatgctgagctcaggggcgagaaagctgccataaagaaaatggatatgcaggcttctcacgagttccttgctgagttaaaagttttgacacatgttcatcatttgaatctggtgcgcttgattggtttttgcaccgaaagttccttgtttcttgtctatgagttcatcgagaatgggaacttaagccagcatttgcgtggaactggttatgagcctctgtcttgggctgccagggttcagattgcactagattcagcaagaggtcttgagtacattcatgaacatactgtcccagtgtacatacatcgggacatcaaatcagcaaatatcttgatagacaagaactaccgtgcaaaggtcgcagattttggtttaacaaaacttacagaagttggtaatacatcactacccacacgtggaatcgtgggcacatttgattacatgcctcctgaatatgctcggtacggtgatgtttctccaaaggtcgatgtttatgcctttggcgttgtcctctacgaacttatttcggccaaagacgccattgtcagatcaaccgagtcttccagtgattcaaagggattggtttatctgtttgaggaggctctcaacacaccggatcccaaggaaggccttcaaagactgattgatccggcgctcggcgaggattaccccatcgactcgatcctcaagatgacggtcctggcaagggcgtgcacgcaggaagaccccaaggcaaggcccacgatgagatccatagtggtggcgctgatgacgctgtcgtcaaccagcgagttctgggacatgaacgcgatccaggagaaccaaggtgtcgtgaacctcatgtccgggagatgactcctgtccctgtgggtatatattattgtacgtcctacctgccttcccctgggcaattgtacattagggctcatttgtacggcccgttgacggccagagaggagggccactgtaggtatttacaatgtaatatcttgtcactcaagggttttctcccgtgtttaggctccctttggaacaaaaaggaaatttcctgaacctgtgttttttgctgtattttttaactaatttctatgaaattcttatagcattcatgtgaaattcctgcattctaaaggatcggaaggtcgttgagagccgcgtgtgagttactggggttatgtacaactctgaagatacttataaaagttattaatatttacttgaacaaaaggaaattttctgaacctgtgtaccttgctgcatttcataactaatacctatgaaattcttatagcattcatgtgaaatttctg

SEQ ID NO: 150281 - DNA, 255 bp, Zea mays
  Clone ID: MRT4577_68583C.1
ataataagtcctctttttgtttttattttttgtatcaaagggccccacccagggccaaaaaaaaaaggtttctgaatccccaagggggccggccaaaatgtttggggcccccctttcttgaggggaaaaactgtcgcctaacattaaaaaagggttttataaataaataaccgggggtttttttaaattacccccccccgctaaaaaaacaatttcaggttttatgctggggctagaactccgtgggccaccccc

SEQ ID NO: 150282 - DNA, 1342 bp, Zea mays
  Clone ID: MRT4577_68584C.1
accacgcgtacgagcagaacaacgacctttacaatcttactcaaccccgcgtccgggcattcagggagccgatatgctgattcttgatctatcaacattgcgagttgctacagatgactttgctgaaagcaaaatgctcggtaaaggagggtttggtatggtttataagggagtcctgcctgatggccaagaaattgcggtaaagaggctttgccagagttctcgacaagggattggagagctgaagagtgagctagtactggtggctaagcttcaccacaagaaccttgtgaggcttattggtgtttgcctgcaagaacaggagaaaatacttgtgtatgagtatatgcccaatcgaagccttgacaccattctgtttgattccgagaggaacagagagctggattggggaaagagattcaagatcataacaggaattgctaaaggcttacaatatctccacgaggattctcaactgaaggtagtccaccgggacctgaaagcaagtaatgttctattagacctggattacgtacctaagatctctgacttcggcctggcaaagatttttggcggagatgagtctaagtgtgtcactcatcgtgttgccgggacatatggatacatggcacctgaatacgcgatgcgtggcctgtattcgatcaagtcggacgtgtttagcttcggtgttttggttctggagattgttaccgggagaaggaacggtggcctatacaacagcgaccaagatgttgacctcttaaatcttgtgtgggagcactgggacagaggaaacgtcatcgagctgatcgacccatcactgagcgaccatcatcatcatcctcccattgagcagatgctcaagtgcctccacatcgggcttctgtgtgtgcagaggaaaccggcggcgaggccgatgatgtcgtgggtcagcgtcatgctctgcagcagcacggtgcgtctcccttcgctgtccaggccagccttgtgcgtccaggaggttgtcactgccactgacgacgacagctcgtcaggagcttcagcgttgttgtgcgcggcagaaagttcagtgatgacgacgataatgtcatgtaacgacgcatcaatcacggagcttttgcctagatgatgataagacgccgtccagggccagggttgtctgaaccaaatggatcttgatgcaccagttttgtgctactcctattactttgtagtattaatctatatttatattctttctttctttcaccgtattgatcaagcattgtgtgcggtaaaaaaaaaaaaaaaaaaaaaaaaaaaaaaaaaaaaaaaaaaaaaaaaaaaaaaaaaaagggcggcc

SEQ ID NO: 150283 - DNA, 2383 bp, Zea mays
  Clone ID: MRT4577_68585C.1
ggaggcaaccctagtcgctctccccgcggcgcaaccacctcgatcgggctccgattccgatggacttcgcggagctggaggccgtggagggcctccggtggccttggcaccctcgaggggctatatatataatagggagaggagcagacggccggggggagcacacacatcctctaagtgctatctaatctacaatctaccaccagacactgtcgtcagtcgtccctcatcaaccgcgcgcgcgcgacttcaagcatcagactaccataatcatggctccgccgccggcaatgcagagcccaggagagctaaacgacggcgcctacgacgcgccgcacatcctattcatcccgagcgccggcataggacacctgacccccgtcttccgcgtcatcgccggcttctcgagccggggcatcgacgtctccgtcgtgaccgtgctgcccaccgtgtctgccgccgagactgactacttcaacggcctcttcgcagattaccccgccgtccgccgcgtcgacatgcacctattgccgctggacgcctccgaattcacgagagaggacccgttcttcctccggtgggaggccctgcgccgctccgtccacctcctccgccccatcatcaccgacgccgcgccgcgcatcacggccatcatcaccgacatcaccctgacctcctgcgtcatccccatcgccaaggagctggacgtcccgtgccacgttctcttccccacagccgccaccatgctctcgctcaacgcctactaccccgtctatctcgagaagctcaagggtggaccggagccaggcgtgatcggcgacgccgtcgacatccccggcgtgttccgcgtcccgcgctccgccctcccgccggcgctcctcgacgtgaacaagctcttcacgaagcagttcatcgacaacggcagagcgatcgtcaaagccgacggcgtcctcgtcaacacgttcgacgccgtggagccggcaccgctggcagccctgagaggcggcaagatcgtccccgggtacccgccggtgtacaccatcggcccactcaagtcgcacgccacgaaagcgggcgacaagccaggtgacgcgttgcttgacgaatggctaggtaagcagcgagcgcgatctgtggtgtacgtggcgttcggcaaccgcagcgctgccaggctggaccagatccgggagatcgccgccgggctggaggacagtggctatcctttcctgtgggtgctcaagaccacgaaggtggaccgggaggacgacgccgagctggcggaggtgcttggagacggataccttgagcgcgtgaaagggcgcggcatcgtgaccaaggggtgggtggagcaggaggagctgctgaaacacccggctgtgggcatgttcgtgagccacggcgggtggaactcggcgctggaggcgtcgtccgccggcgtgccgctgctggtgtggccgcagctcggcgaccaccgcgtgaacgcgatggcggcagtgagggcaggcatcggggcgtgggcggagcactggagctgggacggggaggacacgctggtgaccaggcaggagatcgccgacaaggtgaaggaggttatggccgacgggaagttgagggcgagcgtggcggtggcccgcgaggaggccgcaaaggccgtcgcggagggcggcacgagttaccgtaacatgcatgacttcatcgccaagcttaagggaggagcttgaggcttgaggagatgatgttacgaacgcaacaatcatgcactgcacgtccattcccaccattccgacgagtgaagtgactgctgttacactcagccgtaccactttggttctgggttttcatttcatgttcatgtgtcttctactactatatacaagcatattcagtgtcttatgtgaactaaagatgatttgaaatggagtcaaataatatatatgtaattagagtaaaatgcatctgaagtctttaaagaaaaaaaaaaaaaaaaaaacaaaaaaaaaaaaaaaaaaaaaaaaaaaaaaaaaaaaaaaaaaaaaaaaaaaaaaaaaaaaaaaaaaaaaaaaaaaaaaaaaaaaaaaaaaaaaaaaaaggggggggcccttttaaaggatccaagtttacttccccgtgcttgcaacgtaatagtttttttttggggcccccaaaattaaattaacgggccggggtttaaaaacgtggggacgggaaaaaccctggggtacccaaatttaatcgctttgaaaaaaatccccttttcgccagttgggttaataccaaaaaggcccccaccgatcgcctttccaaaaatttgcccaccctaaatggcaaatggaaccccccctttaccggcccataaagcccggcgggtgtgggggttaccccc

SEQ ID NO: 150284 - DNA, 318 bp, Zea mays
  Clone ID: MRT4577_68586C.1
taatacctactttctagcctaaacactcggattgactgtgttgttggatccctctgcagcctgcatagcgtggcaggccgttgaaacgttattcatagaggaagggtaaggactgacaccccaagccaatgaagtgcatatcaagatactttacaccatgctgtgacacaccgacatgatacttttgggagggcagggggcaaactcctgcttacacaaggattttaggacatcaaggggaagatcttgcttaaatcgtacccgaaggcctaagctagctcgatcaacgctattacgtacttccggagcttacctacc

SEQ ID NO: 150285 - DNA, 493 bp, Zea mays
  Clone ID: MRT4577_68587C.1
tctccagctcttcgttcgttcccctctcgccgcccgtctcccccgcggtcgaggagccgccaatagcaaggagagggtttcctcctcgctccacggctcgaccgagctctccgatgccgccgcgctaaatgctcacacatgcgcctggtcgccggaggccaatggcaataggcccagctcgacgccacgcacgccggcaccggcacggagaactacaccggcagcgacgccgacgtgtactgagacccctgacagagggcccggggcacctggtacggccagcccaacggcgccggccccgacaacaacggtggcgcgcgcggaatcaagcaaaccaaccagtatgccttcatgtccatgagcccctgcggcgaccagtcattgttcaaggatagtaagggctgccacttatgatacaagatttgtacgaggaaagacccgtcctgctccggtcggacggagactcggatcatcaccgatatgaactactacc

SEQ ID NO: 150286 - DNA, 779 bp, Zea mays
  Clone ID: MRT4577_68588C.1
ccattcttcgcataccggtgttcagctccctcctgtttagtctgcacctcctcaagctcttcaggcagcggttgtgccagcaattcaggcaggaccccactaccttcatttggtccttctccctctccgctctcgccggtcactctggatttctcgtcgcctgtaatcggatctgtcggtactcagccactagtgccaccaacgcctgctgttaccactgctgctgtggcggtgtccgtgaccacttcagctccgacaaatcctgcatcacagcctcagcctgagtcagtaccagctccagcttctacgatagatcctggatccgagactgactctgacccccagcttgcgtttgcacttctgccacgaccggatgcgcccctgcctcctccttcctcctctggtctgtaggttcgggttacccttttggtgtttgacgccaaagggggagagatatgagagttgtgagagataggggagttagggagtaagttgagagtgtcttgtgtattttgatgtaatatatgtgctttatactctctatactagctccactttggtatgacgctttaactcacaaactctataatatgatcttgattcttattttgattgtgtgtattgtgttttcacctaatatgttatcaccagtcttttagttcttgttcatcgatttgatttcattcttatacgaacaagaaacttacgtcgtgtatgcgccaatacttattattattttacacgctccttctgtcaaaattattgagtataactagcca

SEQ ID NO: 150287 - DNA, 589 bp, Zea mays
  Clone ID: MRT4577_68589C.1
ctcctactctggctaccaggacgagctgctgtgggcggcggcctggctgcacatggcgacggcggcgcaggggaactcgtcgtcgtcggacatgtacctgtcgtacatctactccaacgggcacatcctaggcgcggagcaggacgacttcaccttcagctgggacgacaagcgcgtgggcaccaaggtcctcctctccaaggcgttcctgcagggcaagggcaagggcaagggccacgcggatgacgacgcgctgcggctctacaaggcgcacgccgacgcctacgtgtgctcgctcgtgccgggcgccgcgggctttcagccgtcgcagttcacgccggggggcctcctgttcaaggagggcgacagcaacatgcagtacgtcacctccacggcgttcctcctcctcgcgcacgccaagtccctcgccggcgcgcgggtctcctgcggcggcggcggcgcgggggtgccggcgtccgcgctggtggccgccgccaagaggcaggtggactacatcctgggcgccaacccggcggggatgtcctacatggtgggggttcggggcgcggtacccgcggcacgtgcacca

SEQ ID NO: 150288 - DNA, 559 bp, Zea mays
  Clone ID: MRT4577_6858C.1
ccggccggggtacccgtcttcttccccctcaggcgacaatctcatctctcctctctcacctaccctctcagcacctagctgccgccggaatccccctcactctgagagacccggcgcaaattgaagcgctaccctgcactaacgcgcgcgcgctccttccccgccgcaacccattgaatttcatgtgcacttcgaactccccgaagcactcgccgccgcacgcctacgacgcggtggtgtgggacgccgagggcagcgtagctgaagaactacgacgcgtccgtcgtggagggcataccaaacctactcagtgcgcactcccgtcggcacgccgtggctcgtccagagggctgagctgcaggtgcccgacgtcgtcgccgagcatgcacacgatccgtagatatagcctatcgataccggtggcgacctcaaggactacgacctgaagtctgatcttgttaagaatatgaaggatgaggaatctgcagcggtgataccacttactaaagatgaacgtgcttgcattggaagattaatagagaagtactgcgatgactac

SEQ ID NO: 150289 - DNA, 474 bp, Zea mays
  Clone ID: MRT4577_68590C.1
gcaggatcaagtttcacacatatggtgacttgtacagaaaacaatgtcacatttttattatataataattatatacaaaatagctaaataaatacacatgtgttgagtgtgtgggggtcggtggagtgtttgtatgtgttcttgcctcttttttcctctctcttattataaagatgcacatgtgtgtttgagaaaaaaatttgcaggtgcacagaaaaccactcgaactgaataatgattggcattcaaagtctgctttggcccagctctgactgcgatgaacagtctaggaagacaacacagagctggtaatttgggcctccacgttacggcgtactactagcttctcatctccaactacgcaccaggtggcgataagaccttatcctgcgcgaccacttggcgccaagggtgttcattcacgtgggaggagcgggctgacctggcgccccttcagctcatcctatctacata

SEQ ID NO: 150290 - DNA, 475 bp, Zea mays
  unsure (1)..(475): unsure at all n locations
  Clone ID: MRT4577_68591C.1
gcgtccgccccgcgtccgnaacgcggcatatgctggagncggcgtgacggagacgcggnagcacctcatcaacctcgacttctacatcccgccggacgagcgcttcagcccgaccaagctggcggaggtgctggcgctggcggtgcaggccgtgacgcacttcgtggtgccagagtccaacgcgctgttccacggcaacgtcaacagcttccgctcgtttgatcagctcaaggacgacctgtacggcaggagaccgccggtcgccgtggatgggcaggtgatggacaagctcaagacgtcggtgccgtcgcacaagacctacaagcaggtgtccaagatggtcaaggagacgcccgtcaagttccccattccttaagttattgagcatgatcaggaggcgtggcgtagcgacgaggagtttgttagggagatgctggcggggcttaactcgggggtgatcagtagactagaggtg

SEQ ID NO: 150291 - DNA, 249 bp, Zea mays
  Clone ID: MRT4577_68592C.1
cgagtcccaacggcggaccagatcatgaaggcgcggcgagcgacgcagccccggatcacgaaggagaggagagcgacggcctagacgcttcgcccgcacgagaggaccagcaagagcgacccagctccgcacagccgtcgccgccgccagaactcttgtgtgcgctgccgcgtaacgtgcggcgcgcggcatccatggatgccgtggcggtgtcaactgcagcgagtgtcgcggagctagaccggctgc

SEQ ID NO: 150292 - DNA, 664 bp, Zea mays
  Clone ID: MRT4577_68593C.1
gggggggggggggggcctctaacggtggccagtgtcacggcagtcccacaactccaacactcacccacggagtttagcgcccagcagtaacttgggacctaactaccctcgtcccaaggtgggtccgtcaaggtcaaacctcctaccgacgtgccacgacgatcctacgcttgaacacgcgccacagacctggtaccgctacagaaccccacccctgttacattcactcccgcgacaaagcttggtgactcgaacgtcgttactgtcaccgtgaaaacggctcctaaggtctttaaggtcactaaggtttaaggtcccactcgtaagtttgacgacaactagaccgtgaaggttaagaccacaactgggatgatcaagaagacgacggtgaagaagtgaaatttaactcatgagagttcggatctcgacgagttagacctgacttctaaggtccagtagagtagtaagtttgagtactagtttctagtcttgaagatcgaggctaagataatccgcgtcacgcatgtgattccggatttagaggtccacacgagttgggttctcgtcaccctctgcgcggaggtaggggagggcactgtcatattagtcacaactgtcgtttaggacgtaacctaggactacgttaaggtattagaggagggca

SEQ ID NO: 150293 - DNA, 151 bp, Zea mays
  Clone ID: MRT4577_68594C.1
atacagtggaccgacgcgagagcggtcttcctttttttttttttttttcaacaacccccctataaggtgtctttagctccacccatctagtgtggggacccattcagtatggagacagactacgtggccaaaggtgctccagtgagctgga

SEQ ID NO: 150294 - DNA, 438 bp, Zea mays
  Clone ID: MRT4577_68595C.1
cacatatttgccagagaaaggccttccaactagtgatcctggtgcatccaatgctagtagacacgagtgatcatccagattgttataatctctcacgaacaagctcatggactgagaatgatactaacacatcttgagtaacaaactgatccagaagttactctgccactgcttcctattgatgggcccacgtttgagagaagaaaaattgacaactggagtgtgtctccccctggaatctaaacgtgactaacacgtctgacaaggatgttgcagatgaaaaccaggacatctaccctgggctacaggattttatgcaatttctgtccctcgaggaacatgattctagaagtgagagtggcagagaagagcgattgactcagtggatagttacagagcttcagcaatgttactctgctataaagcgcatgctgtctg

SEQ ID NO: 150295 - DNA, 1432 bp, Zea mays
  Clone ID: MRT4577_68596C.1
cctcgaggccggccgttttacacctatgttgtaactaacataccgcattctgtgcagcgatgagagccttttatttcaggcactaggactaaatgatgagttacagcgtgttgttcagcgtcatgatgacatagcgaaggggatcctccctcctggtaccggagcacctgtacctgtacctgcttctgcgaatgtcaaccaagggactaccccacctaggcccacggcggtttcattttctccactcctgaatgtacacgaggacgatgaaccggaagacgagttcgtcgtgcttttccgtaggcctgcaagggatggcacagtagcacggaacaatctgccttatgcacgaagaaatgaaaggccgtaccgaagcccacttcttcctccaccaccagcatctaagaggcctgtttacaccgaggcaagcagtatcgactatcttagtggcggctcctacaagtcgtcagaaaaggttccagatgatttcatcaacccaactgctccagctaatgtaactacatcaccccattcgaagccagaagcatatccgccaccgagttacagtagcaggccagacagtgtgtccgacgacttcataaacccaaccgcgcctagcttttctgcgccttctcgccctacagacgaggagccaacccgttcgcctgtgaagcggcaggagagtatacccgacgatgacttgataaacccaactgctctccctggtttttcgtcgtcttcagctactaaggagttcagcgaagatcttccaaaggctccatgggaggaagtacaggctgccgcagcaggttccctgccaccgcctccggagaggtatggtcagagacagcagtacttcgagcaaaacgtgtattctggtgggagcaacggaggtggatatgatgaactgttgacacggactgaaaacctctccctgaaccctgagaagaatgcttcacggccgacagcatcctgccaggctaaacccgaggactcactcttcaaggacctggccgacttcgcgaagaccaagccttcgtctccgtcgaaatcggccaacagccgcaggacccgctaaacggttatccgtttcgcaggttagcagctttagattgcataccccatgaaaaaagggcgttggaaaattatttggttccgtttagaagcagatgtcagaaacgttgcttggtcattgtcctgggcgtgtgtgtggtgtcagttagctgctcctaaatatgtgtcattggcttccatttgtttgtttgtttttttcaatagctgagtatgtatatattacccgattcggcagcaacattcatagttgagtttgcaacttgagtgttgcctattttctttttcgggtattggataaaaaaaaaaaaaaaaaaaaaaaaaaaaaaaaaaaaaaaaaaaacacccccgggcggccgtt

SEQ ID NO: 150296 - DNA, 186 bp, Zea mays
  Clone ID: MRT4577_68597C.1
ccttcttcgggcgcgtgcgcactgtcttcaacattggctgctgccagctgcataatctgttgatcaaaccctctgcttggttgggctgctggtgtctcggtttacatgacgtctttgggttgctgatccggagggggggggcgcctttccggggactaaaaagctgcctagacccgactgctgccc

SEQ ID NO: 150297 - DNA, 332 bp, Zea mays
  Clone ID: MRT4577_68598C.1
cgacccgatcccttccctggcttgcttaccgcattttcgcccccgccgcgcaggggacactgaaaaccagacggggggaaaggccgacggggcagaagagcagcacggggcaaggggccagaagacaccaccacgacaggggggagagccccacagacggagcaagcagccaaggggagccgagctaggaggggaacaccagggggcgcgaccgcgcgcgccgagcggacgcccgcgggcgcggagacaagccgcggcaggccgccgcggacggggggcccgccccggggcgcccggcgggcgcagacacgcccgcgccccgaggccccccc

SEQ ID NO: 150298 - DNA, 690 bp, Zea mays
  Clone ID: MRT4577_68599C.1
gtgggtttcagctttaaaatatctctgtggaacatatctggtcaccatcgactgtggctccgcatgaccattggtgaatctgtgcaacataccttcctagaattttctcgttttgaaggcaatgttgagggatcagcacccaccagggtggacatggaggaccgagtgattgtgtggttcaactctctgatgaactgaatgtttattttgttagtgctagccaatggtgatgattaaaataagcgaccatatgctttccatgctcatcgtcttaaaggcttttgcttgagtggacattcttgatccaggtctcttctggggaaaagggttcagttgtgctgaaatttttgtagttatggcaaaagcaatgcagatgagctgcatgctccatgaccgtatgcatagtgtggagtgcaagtgggttttaacctggtcgaagcactttgagttcgttaggagctacaacttcagacggaaagtgaaggcgtgaagctcaccaagtgacgatggagaaagtgcagcgtgggggtgaagctgacgatggagaaggtgcggcggaccacgctgcgcgggtttttttttgtcaccaatttgtgtggccttggccggcggtgagtgagaaacagccgggtcagaaattcgcaatcctgcagtacggttcatattatattaataatacttccgttttcg

SEQ ID NO: 150299 - DNA, 1268 bp, Zea mays
  Clone ID: MRT4577_6859C.1
acgccgcctcctacggtaggtagtagtagcgatggtctataactggatcggacaaggacgacgacgacgaggacgatcgatcgccttcatctgatccctacatcgtgcacgtgcgcatgcagggttcacggtgaccaacgccgggtgctgcggggtcggcaggaacaacgggcaggtgacgtgcctgccctaccaggcgccgtgcgccaacagggaccagcacatcttctgggacgccttccacccgtcggaggcggccaacatcatcgtcggccgccggtcctaccgcgccgagtcgcccaacgacgtctacccgatggacatcagcacgctccccttcatctgattctcattctgatccctccatgtttgttccatccatgcatgatggcgtacgtacgtggcgacatgtcccttgacgcgcgcgcgcatcgtcatgtactcatgtgtcgtttttcagctcggcttctgggcttcgacgattacatccccgcgtatgctggcgcgagcggcgatcagctcctcaccggcgtcaacttcgcttccgccgcagccgggatccgtgacgagaccggacagcaactggggcaacggatcagcttcggcgggcagctccagaactaccaggcggcggtgcagcagctggtgagcatcctgggcgacgaggactccgcggccagccacctgagccagtgcatcttcacggtgggcatgggcagcaacgactacctcaacaactacttcatgccggcggtctactccaccagccagcagtacacgccggagcagtacgccgacgtgctcatcaaccagtactcgcagcagctccggaccctgtacagctacggcgccaggaaagtggcgctcatcggcgtggggcaggtcgggtgcagccccaacgagctggcgcagcgcagcaccgacggcgtcacctgcgtggccgcagatcaacgggcgccatcgggatgttcaaccgcaggctcgtcgccctggtggacagcttcaacaggatcctccccggcgcgcacttcacgtacgtcaacgtctacggcatcttcgaggacatcatcaagtcacccggagcccatggtgggggggttaattagaagaagatggcacagcagtcgtctgtcggttaataatctctactactatgaagactgtaaggggtaggctgccactctgttctgtcttccctcgttctgccctcccttcaaataatgcccgcgcagtaaaaaaaaacactaccgtggctcaagattcgaacc

SEQ ID NO: 150300 - DNA, 294 bp, Zea mays
  Clone ID: MRT4577_685C.1
caagcccataaggcttagtcttctattgaaaagctgatccatgaggctcggtcattactaaaagcccttacgaaggcactagagtgcagagtccataaggcttggccatctatcataaagtccctatgtggtccttagactaccaagtccatgaggcttggacatctatgataattatcccctattaggattctagagcattgagttcatgtaatttggttatcaatgtgtctctataagactaatggaatactaagcccatgagacttggtcatcaatgaacatggttttcct

SEQ ID NO: 150301 - DNA, 575 bp, Zea mays
  unsure (1)..(575): unsure at all n locations
  Clone ID: MRT4577_68600C.1
ggaaaccagattggtttagcngaacagaggaagcaggacgcttcctcttcgttcacggttccttggcggggccnagcnaaagaacatgcttcaacacactctggaacacaccacgggggggggggcgcagagacccttggcacacgagggctgacggggccccatcagtccagttcaccggctcgggcgctcggagccagatctacgccttggtggccttcttgggggacttggtggccttcttgggcgacttgggggcggtcttctcggccttctcagccttctcgggggccttcttggggagcagcaccgggttggtgttggggatgacgccgccgtgggcgatggtgacgccggacagcagcctcccgagctcctggtcgttgggggtggccngcagcaggtgcctgggcacgatgcgggtctttttgttggccttgggggggttcccggtccgctcctgcccctttggtgggaggttctcgaggacgggggcgaggtagacgggggcgcctggacccacccggctgggcgtaacggccctttttggggagcgcccgatgcggccgtcgggg

SEQ ID NO: 150302 - DNA, 1348 bp, Zea mays
  Clone ID: MRT4577_68601C.1
tctcgagccgattcggctcgagcaatattattcattgttgaaatatggcagttgattcagttggacaagccttatacttgtggcctaacgtcacttgatattttactggagaggttggatatgtctgtaaggaggatgaaatattgttatattggattaaatagagtattggaggtccaagttttggagctttctttgatagctcatttatgtagactctcaaagattgcagtttgtaccaaggtagttctgggtaaggtgctctgggtaattaatcgcttagaggatctgtgcgctgatgggtcctgtgaactgtctgacttcagtggagaaattaagaaggcctgtgataccaaccgtattggtgataatctgattggcaacatcaacaatttgtttcaactcttccatctgaaaccaacaacagactttggaatgcttaaagtgataagtgcaatgttgcgggtctgtgataacgattctgaaaatccattacaatacatctgtggattaccggtgggtgtcagctttaaaatatctctgtggaacatatctggtcaccatcgactgtggctccgcatgaccattggtgaatctgtgcaacataccttcctagaattttctcgttttgaaggcaatgatgaggtgaggagtggctctatggctgttcctttgtatgctactccaaaggcatgttcatttgtgcttcgggtatgtctggtaatggaatgtccatctgcagggatcagcacccaccagggtggacatggaggaccgagtgattgtgtggttcaactctctgatgaactgaatgtttattttgttagtgctagccaatggtgatgattaaaataagtgaccatatgctttccatgctcatcatcttacaggcttttgcttgagtggacattcttgatccaggtctcttctgaggaaaagggttcagttgtgctgacatttttgtagctacagcaaaagcttctgaagggttcagttgtgctgaaatttttgtagctatggcaaaagcaatgcagatgagctccatgctccatgaccgtatgcatagtgtggagtgcaagtggtttttaacctggtcgaagcactttgagttcgttaggagctacagcttcagacggaaagtgaagctcaccaaatgacgatggagaaagtgcagcgtgggggtgaagctgacgatggagaaggtgcagcggaccacgctgcgcgcgttttttttgtcaccaatttgtgtggccttggcctgcggtgagtctaggatgagaaacagctgggtcagaaattcggaatcctacggtacggttcatagtatattaataatactccgttttcg

SEQ ID NO: 150303 - DNA, 1309 bp, Zea mays
  Clone ID: MRT4577_68602C.1
ggtggcgactggcagcacgagtctgacctaggaggatgtcgggtttcggcgatgggtacgtggggacggcgcaggacgcggtgaagatccggcggctggagaagcagcgcgaggcggagcgccgcaagatcgaggagctcaagaacaagtccgcggacgggcagcccggcctcctccagttcggctccagcacctccgagattcttgagactgcatttaagaaggaaacagttggtctcgtcaccagggagcagtatgtcgagaagagggttaacattcgaaccaagattgaggaggaagagaaagagaaacttcaaaagctgcaacaagaagaagaagaattgcaaatgcagaaaaggaaaaagaggagagtgaagagtgatccacgcttatctttctgtgatgacattgagaatggaagtgacgaagatgattttgagaatcaagaaaccaagaaaaatggccctgccaaacttgggaaggatccaactgtggagacaagttttctacctgatagagaaagggaggcagaggaacaagcagaacgagaacgactgaagaagcagtggtcgcatgagcaggaattgattaaaaatgaacctctttcaattacttacagttactgggatgggactgggcacagaagagcaatccaggtccgtaaaggtgacaccattggagaatttctaagggctgttcaacagcagcttgcccctgaattccgtgaagtacggacaacttcagttgagaatctactttatgtgaaggaagatcttatcatccctcatcaacacagcttttatgaattaattatcaacaaagcaaggggcaagagtggaccacttttccattttgacgttcatgaggatgttcgtaccattgccgacgcaacaaaagaaaaggatgagtcccacgcggggaaagttgtagagaggcattggtatgagaaaaataagcatatattcccagcctcaagatgggagatctatgacccaacgaagaagtgggaacgctacacaatccatggggattagcatggaacatcatacatagagagttaaattattttgtactttggatgtccgaaattaccagcactcaagaatatgagaatggcacaagtgacgatttgaatagcataaattattactgttgtttgcaaaaaaaaaaaaaaaaaaaaaaaaaaaaaactcgaggtgactcgatcatgcataagtaagaagtccaggctagcgaccctataaatataatcttctgccgccctgactacaacttggttatttgtacaacattggccttaaccaaattt

SEQ ID NO: 150304 - DNA, 195 bp, Zea mays
  Clone ID: MRT4577_68603C.1
ccatgcttttttgtaaatttttccccacaaaccgttttatttgcccacaggttttaaaaatggtatccaatccctttgacttttcgtaaaatagaaaccccttaagttttaacagccacttgccgttatactaatccccttggttctattggactcccttaaaacttccctaactttaaataaatcctctcgggg

SEQ ID NO: 150305 - DNA, 2101 bp, Zea mays
  Clone ID: MRT4577_68604C.1
cccacgcgtccgaacatggccaaagaaagaggggcccaaattagtatctccttggcaattgaatgatgaaattgagtagcaatacttctttttaaagaaatcttttgatgatggtggctcatgccttggcccttttgaacctccacccgtaataggggtggtaatggatcgcgatccaaatgttccttcacaaattcttaggtccttaaataaattttagttcaaaaatgaatagaaatagagcccgaacctaatccgagccttaaattttatagtgtaaaatttagagtccattgtcacccctccgtacacagctattactaatttgttgctgtattgatcatagcatgttttgacctcaggctatgcatgaataattgttctgaatcttgtgcatgttttgacctccagcagaggtttgtaccactttaatttagcagtttattctacatttgcttatgaacggacttggatagctattgtgtaggaggagattagcatggtgtaagaggcctgattttaatttatcatcaaatcaagtttatgtatcaattttgtttgcgtatctaaatcctaccatgtcatatatctgcagatgcttagtgtgctggaaagtgcaataaagcgagactacttatcatcaaactttgaaacgacaactgagttgcttaattcaagcacacaagattttgctactcagaattcggctggaggttctggatctgccactgcacttccatgggttcctgacactactgctgctgtagccttgagattgttagacttggatgcttccatctcatacacccttcatccaaagttgggttcaaataaggagcaagaatctggagatttcatgaaacttccaccgagatatccttctatgaataagggcaaacaagaaatagaacagttcaggcctattggttttgatcaacaggatggaacgttgctacctaacagcaatggtcgtagaggtcggggaaggggaggtagaggaggcagcaggggaggtagatctcgtggtcgtggtggtagggttcccagaggtattggcagctcttccaggattcagttcagggatgacaatagtatgctctatgggagagccccacgaaagaatgcacgtggtggccgcggccgtggacgtggacgtggacgtggacttcgaactgttagacctcggcaaccatccgagctcagtgccagatcaattccaaaggcaaacctattgggcagttttagcatgttaagtaagacaaatcacactggcactacgcattctcccgagagctcaggtgcagaagagtgggcctttgagaggagggaatatgtgaaggatgatgagaacaatttggtctctcaatccgatgagtctgaggaaaatgtcgaacctatgaatgaggaatatggtgagcatatttcaggctatccaagagacaattccgactccagacccgtacagatgatgggtgatgggagcgacgataatgatgaggatgctgaaggagatgagggtgaggaagatggagaggactatgaagctgaagatcctggtgatgaggatgatgacgttgagatggatggggatgatgatgtcgaggtggatgaggatgatgacattgagatggatgaggatgatgacattgaagatggtgatgacgacgacggtggagatggagcagccaacggagatgaggatggaggtggtacatcatcatattcttcagagtatagtgaatgatgagtgattgaagttgtgcaggcttgtggtaaatgatgtaacagaggctttggtgggctcaccaacgctaatgctgacttgaaaaactatttaggaggttgccagttctaaactgtcttgtgtggcttgttattagatagaagccactcaacattagaagatcggccttgtgtgtatacatacataccaattatcaaaagttgaaaatgagggtcgatcagctgtctgttttatgttcagctacttttttcattgttatatattgggagcgttctctttacttaaataacaatgaaaaaaaaggcttagatcaaaaaaaaaaaaaaaaaaaaaagggcgcccgccgactagaggccc

SEQ ID NO: 150306 - DNA, 358 bp, Zea mays
  Clone ID: MRT4577_68605C.1
aaaaaccatccccgggatgctcatttttaatataacacaatttcccccatttcgatttggacaatcattttttataaaaaggccaaatttactttgggacgggagatgacttgaaaataaagagaaataactccttttacagggttactatgcatcacctggggcaaacaaaaccaaaccgtttgccaaatgactaaataggggggacttatcaaaaacaagcccagggggggggaaaaaacaacaggggcgttatgatactgaagccctataaagacatgtacatagggtggttttatgccataaatttaggattggctgcacaaaaagctggggcctgggggggctggggccttgt

SEQ ID NO: 150307 - DNA, 246 bp, Zea mays
  unsure (1)..(246): unsure at all n locations
  Clone ID: MRT4577_68606C.1
ccaatgtttagagttttttgagacctatatgccggttttggnttttcagtggcacaaattaaaaattactggaggtattggtagttggatttgggaaacaggaaatatgtttgggtggccctggtnttaaccgaaacttccaggttcttcttggtcaattttttcctttaattcttataggtctggtaattatttgtatgcccgtatgaagttatttgaagaaatgatttctgcattttttgaaaa

SEQ ID NO: 150308 - DNA, 890 bp, Zea mays
  Clone ID: MRT4577_68607C.1
cgagatttgaagtcatctaatctgctagtcgacaagaactggactgtgaaggtggcggactttggcctttcacgtctcaagcgcgaaactttcttgacaaccataaaacgggaaaaggaacaccgcaatggatggcgccagaggtgctgcgcaacgaaccttccgatgaaaagtctgatgtgtatagctatggggtgatcctatgggagctcgttactcagaagataccctgggaaaacctgaactcgatgcaggtcattggcgcagtaggttttatgaaccaaaggttggatatcccaagcgaagtagatcctcagtggagatcaattatcctgaactgttgggaaagcgacccgcagcaacggccgtcgttccaggagcttctggagaggctccgcgagctgcagaggcgttacgccatccagcagcggaacgcgaagaacagcgtcgaggagtgaagactgaagaatgcaatgcaactctaccagcggcgcagtgagctggcttgctttgaagcactttgcgagccagcggcatgccaaatctagagaagggcctgagcctcctgtactggggcctgggggctgctaaggctggaagaagtatgttctacagacgaggcgccttctgtcttcttctttttttttttttaaaaaaaagaaagttcttccccatggcaattgtgactgtaattaatttctgggtcctgacagcaagggtcagtagggtagcgagtgagtagtgactgagctcgggcttgcttgctagcgcctctgggttctgattcttgacaacgcaaatgcgtactacgtggttaacagtaacatccaatccagcctccagtttctggcaagggcatgcatgatgatgtgtagattgtctgttctgat

SEQ ID NO: 150309 - DNA, 502 bp, Zea mays
  Clone ID: MRT4577_68608C.1
gggaccctcgaggccggccgggccgggtttacaactgatccccacccagtatcatcgatcccgccgccgactcagaggcaggatacgcacctaggatagcccgcaaggaggagactatgacggccaaggggaagaagaagctatgacgaggctgaagaggaatccccacaaagatgaagcagacatccccggaagctgatgacctatcgccggatggtggtgacgacatgatcgcgatacaattcttccatgcgtgggaattcatgcacagatgtcacatccgagtcctcctaccccgctagacatgagtcctgtagctccactggaaaacccgcacttcaataaggcatctatcgggctatctatatatatccatagtgttgtgataagacaaatcactcaaccgtgttgtgaacctactatgatggagatgtatttgctgctaatatcgacctacctattaggatatgacgaatgagaacaccatcaactgctctatact

SEQ ID NO: 150310 - DNA, 2758 bp, Zea mays
  Clone ID: MRT4577_68609C.1
caggccggcccggcgggggtcttctcgtggttctcccgtgcccctcgcgtgcgctctctgtctctcggggcgacgactaggcggctgctcgccggccgccgacgccgacgcccgccgccagattcccaggtatctatcttcgggaccttgaccggcgacgagcacccaacaggtactgattttgctgaagcaacagaataatgtattagccctcatgtgttaacacctacataaactttgagtatcctagtttcaagtgaaatcatggcacgaaaaggaaatcaaagtaagagtggccccaatcatgcttcacctaagtggaaaaatacaactgatggtgatgcactaagtacaccagaaagaggtgctgcagatagtgaaaatccgagttcacatgttcaaggcagatcaaagggtcctgaaggaagcagtgagaagaaaggaagaggcagcaaaaggaacagcacaaacaacggcatatcatcctctggaaaaaaacaacaaatggacaccggttgtgatataagcagttcagaagaaaaggagattccggtaagaggtactaaaaatagaagaggtagccagaaaccctctaggcgcggttttggtagaagttttttgattgagcaaacaacatcgtctggattggcaggaaatgttttggagaagaccaggtgcattgcttgcatggctgcatccattattagagcttccatgatatatctagttgaagaaggcaaaagatttatcgacaaaagaatgccaacaatcaacacttatatggcttttgtcaacaaagggcatgcatatgtcttaagcaaaattgcatacgtttatcccatagttcgagcttggatgcttaatgctggaagggtgatgctgctcttgtttacagtttggttagactgcaatgtaaggggctttgattctttgctacgattggggacaaactctctcctagcagtactttggtgcagcacgctgtcaacttttgcaatgattgggataaaaaagatgctcatattcatggcgattgcagcttctgcgtttgccttcataggtctaggttttgctatcctgcttatatcagtgcttgcagtggtaatcttatgggtttatggaagtttttggacgaccacttgtgtaatgattcttggaggtgttctctttttcttgaaacgcgaaagaataactcttcttgttgcctgtttatattcgatgtattgcgcgagatgctatgttggatggctcggattgcttttgggcctcaacttatctttcttttctagtgatattctagtgcagttcctaagggacaatgcagacaataaaaaattcaatggttcttcaaggtactcagagcgaagctcaggtagacaaggcaatatctttgaagaatttcagccatcagcagatagcacctcccaagccagatatgctcgagcttcagatcgagatcctggtgatccttcaacaagtggacctgagaaagagctgacctctgaagatgaagtggctcgtttactgaactgcactgaccactattcagcattaggtttccgtcgatatgagaacatagatgtatcatctcttaagagagaatacaagaaaaaggctatgttagtccatcctgataagaatatgggcaatgataaagctgctgatgcatttaaaaagcttcaaaatgcatatgagattcttcttgattcactgaaacgcaagacatatgatgatgagttgaggagggaagacctcttgaactacttcaggcagagtgtttctcaaaagaatggaagaaacagtactttccaacatgggttcagcccttcagaaggtgttgatgaaggtccttatggtctttccagaagaatagcttgtaaaaagtgcagcgactttcatctttggatttatactggaagagctaaatcacaagctagatggtgtcaggactgcaaggagttccatcaagctaaagatggcgatggatgggttgaacagtcctttcaacctgttctatttggcatgctgcagaagcctgatttacctcatgcatatgtttgcgcagaaagctacatatttgatgtcactgagtggttcaactgtcagggaatgagatgcccggcgaacactcacaaggcaaccttccatgtcaatgccaacatggcaaagcagagcagtggcaaggcgagtacctcaacgcagagggctggtaaggccccaagtggtgtaaacatggatggaggaggactcaacgaggaagagttcttcgagtggttccagaatgcagtcaactctggaatgtttgaaactacattcggggcacaaggcgacccgacttctcctggtaacggaagcaatgccaagagtagcggtagcagcagcaacaacagcagcaggaaaaagaagaaaggaaagaaacagtggtaatcaaagcaaagcaggctggggtctggtgatcactactcggggcagagaaaaaaaagaaacaaacagaataagcgttttgggtatgtaaatacaactcggaaaaatcggtccctggcttaaatggttcctaacgagaggccactgtaaatcctggttcatcatggggtgctgacggctgttaaatggccattataaatcctggttcattatgttgtcggatcttaatatatcgtcctggccctcggtaacttgctagcaaaaaaaatgttataaagcaagttactacgaaacaagaatttgcaagattaaagatagtttttttttgactgtc

SEQ ID NO: 150311 - DNA, 2080 bp, Zea mays
  Clone ID: MRT4577_6860C.1
ggtacctcgaggccggccgggccggaggctttcttctcttggcgcgcctctcctccgtcgcggtagggcagagccaaaccctaaccctagcttcccccattgcgccttcctcgtgaggccgtatacatggacgcgaaggacatactagggcttccgaagacccccttctcgtcctcccaggagaagaaatcgcggccgcccaaggagccgcagcgcaagcctgatggcgtctcgcgcgaggtctatgccctcaccggaggggtgggaatgcccccgctcatgccgaccattgaggcatcgcacctgaagaggcggcctgctgcggagaaagagaaggtagcatggcagtggttacctttcacgtcatccgcacgaactgataaccttcaactctatcactgggttagagttgttaatggtattcagccaactggggattatcagtttgcaaaatataacaagagggcggatgttcttaaatatacggatgaagagtatgagaagtatttagttgaccctgtaggcttggagcaaggaagaaacagatcaactatttgaattatgtgaacgatttgaccttcgcttcatagtaatagcagataggtttccaactgctcgcagtgtggaagatctgaaaagtcgttactattctgcttctcgggctcttctaattcatagagctaggtcattcgaagatgtttctgggaatccccttgtgaaggatgcctatgatgctgctcatgagactgagaggaagcgtgcattatcagcacttctctcccaaacaaagcagcaagaacgaaaggacgccgagactttagcagaagcaaaacgtatcatggaatctcgtgctgctagcaaaaatgttgatgtagctgtaatgcctccgaactctgataatgctatggtacctgttgatggtgtatctccttcaagcagtactcatccatctttagcacatccaaatacatcagctaacatcttgatacctaattcactacgaacgcttcgagtgtatttgagaacccatgcgcttgaccaaatggtccaagcagtaggtgcttcagctggccttagagttatcaaaagggttgatcagacactacaagagctagcggtgaatttgaagcctaaggtcccaacgaaagcagtttgcatagagcatattgaactgcggaatgagctactcacattgcttaacctacaaaagcagctgcaaaataaagaggctgaagtttcagctaaccgggaaagttccttcacagaggcaccaagcacacctaagcgttctaatagggacattgatcggcccttcatccctgatacaagtgggtttacaggtgaaagagcaggcaaacgggatcacaagcggaagtccactggaagatttatagatgcgcctccatcaccaccccagtcgaagcggcctagaaaattgaagggatctgactgatagtgctgttcaaatgtcaggatgaaaactctagtcaaacaaccaagcacttgcagtcttacagtagagatgaactagtagaacctaataggtcagcaacggcatcaatggaaatccgttgggctggccagtcatgcaggaaccgactttcgctgcttgccctgacttcgggccatatgctgggtggaccggttttggatttataatgtatctatctattattgtcatgtaatgttacacagataactgagaggtcgaaatcgtcacttttcagcagatttctgaattctgagtatgggagaccggtaagcccgacaattccgtttttgctcctgtccaaccagcacggtcaatcggttcacccaatagacgttcaacaaacaggctttgagagcacgctagtgcctgtttgttcaccatgccttcccggaagctcatctgacagctcctttactttgtttgggtactctattatttatcttaatctatatatattgaggtggattggggtgtaaatttgttaacttacacctcaatacatgggtattgggatgaatactagagtatccaaacaaagccagggtttgtttagtttgattggattggagtggatattgaagattataa

SEQ ID NO: 150312 - DNA, 392 bp, Zea mays
  Clone ID: MRT4577_68610C.1
aaattgaggatgcgagcccctttacgaatcctgctgggagaaagccttacagacagacactttgttcgagcaaaaaaccaaaattactactagacgattcattcattctaatttaattaggcactcaactccactccacggagcagcagtccaagttatcaaacaaacaaacaaacaacacacgcaccggctaatccatgtctaaagtaagctcaccttctcactttcacacacacgcacgcacgcacgccaaccaagggagacgaagcaaagaacgcttcgaaaccttgtgcagtgcagtcctaccagaagcatgcagactcggcggcaccggcggcggcggcggcgcggggcctgccggcgccggcgaggcggccgtagcgggaggaaga

SEQ ID NO: 150313 - DNA, 342 bp, Zea mays
  Clone ID: MRT4577_68611C.1
ggggatcccaggcgcagcagctagcatggccgcgccatgcagggacctcacgggccttcgccgggggcttgccgcggcgaggctggcgccggggcgccggggcgcgaacaagctctgcctcgcgccgttccaccaccgcgcgccgtcgccgcagcagcagcaggggaggaggaggcagcggcaggggctcaaggtggtggctgccatcagcgaggacctgccgaggctcgcggcgcccgggaccgggaagggcgcgccggagggcaagcggcctgagaaggtgctggtgcgggccgcgctcacggtgcgccgcaagcacaagggagacctcaaggaggcgct

SEQ ID NO: 150314 - DNA, 442 bp, Zea mays
  Clone ID: MRT4577_68612C.1
taggggccttttttttttttttttttcttttttttttttttttttgttatgtcaaaaataagtttcataacatatcacacacatgtccatacatagtttcaaacaaacataggtccttacatagatccatacaaattgtgaaatgtattattagattaccataaagcctaaaacttctcattaacgaagtcggtaatcatagagaccttgtaaagcaatggcacatccatgaaagcaatggcacttctcattaacaagccatcattgaaagcaacatatgagcagcagcaacatacactacaagcatatacttcttctccatcttaagctctaaagtcttttttgtcccctgaatacttgcaatcggatgacctgggaggggaatggacgcgctgtcctcacgagcgtacgggttcggtcccgccggcctcgaggtacccaa

SEQ ID NO: 150315 - DNA, 243 bp, Zea mays
  unsure (1)..(243): unsure at all n locations
  Clone ID: MRT4577_68613C.1
agaaccaagagtgcttaaagcgactttactttaatnacaaangcaaanactagagcgagggagcaagngaggatggtaggaaacacccaaacattacccaggacacaaacaaaggtttttcaacaccacaacctggctcgacagccaaacagattcatgcaagcagatcaggattcctcctcctcgttgccgacatcactgccgccctctgcggcgacctcctgngagaccttcaacagggcg

SEQ ID NO: 150316 - DNA, 473 bp, Zea mays
  Clone ID: MRT4577_68614C.1
gccatgaaacagtttgctaccaccattcataattcagccatgttcaagattacaactgcatgacaaaggaaattcagtttgctaccactatctagaaatgattattttgacaaacatacacgaccggaatatcaatcgttccttcgtgaaacctatgctggaatacgcgcaggcgcaatacactagtatattgacaggtcctgggcacttccgtccgtgagggctaggtccagttgggacatttgaaacctgtggacattgcggccacatgtgttgaacatttgcaacctgtgcacaataacagaaactagtaacatgtgcactttaacagattcaacattttcagttctgaatatttgtttcagataacagtacacatccaaaccagaacatctgtttaagataacgtcacacatcaaaataactacgatctccatccaacagcagcttctaacactaggtcatttgatagc

SEQ ID NO: 150317 - DNA, 2408 bp, Zea mays
  Clone ID: MRT4577_68615C.1
atccaggaaggaaagggtggaggtggaagccggaaaccaaaccctctctgcctcgtcctccctcctgcttcgtgcttccccttccccttctcgtctgcggcgccaagctcgagctcatcgccaccgaggtcgtttcgatctgggttttagcctatccgcgaggaaggtaaattagttggagacttcgtgatggctgctgcgaagtcgggcgtagacgtggaaacgagggacggcggcggcggctccttcagcgaggagaggtttgttgataagctcaacaagctcaacaacacaacagcgagcattcagacactttcacattggtgcatttttcaccgcaagagggccagaaggattgtggacacatgggaaaagcatttcagtactgcaacaaatgataagaaaatatcattcctgtttctatcaaatgatatcttgcaaaatagtaagcgcaagggaggagattatgtgcatgagttctggagggttctacccagattattgaaacatttctacgaaaatgggggagaagaagcaaagaaactggttgcaagactaataggaatttgggatgaccgcaaagtttttggaacccgtattgaaagtctgaaagacggcatttttggtgacaaccctcctatattcgatcacagtgggaatactaataattcaaatcctagctctaaccccttaaattccaaagttggaaggaaagattccagtacagtactaaaaaaactgactgttggtggtatgcctgaaaagattgtgactgcataccaatctgtgcttgatcagcattttgatgaagacacagctttgaacaagtgtaagagtactgttagtgttctggaaaagctaaagaaggatatagacgatgctagtaccgaaggtgatccgcctgcctcaacaatgatttctgacctacaagaacaggaaacaatcctgaaacactgcattgcacaacttggaagtgtagatgcagcgaggatatcactgataaaccaattaaaagaagctctcaccgaacaggagtcaaagtcagaggttcttcgcagccagttgcaagttgctcgagcagaggctgaacatgccattcaacttaggcaacggtttggtggtgccgttgtcgcaaatggcacaggatctagttctagtccgctgctgatgtctcctcagttacagtcgctgaatccagcaccctcactcgcccctccaatcggtgcagccggagatgagcccaagagaacggcagcagcaatggccgacaagctggcatctctgtcagcgccggtgcaggtcctgagctccatcttctcatctttcgtcgccacacacggcgcttcgctatcttccatgaacagcggatctcctcccagagaccaactctccggggcaccgccgggcttccaggtcgaaaagaggcccaggcttgagagaaccgtgctggccagcgacatgggcgcgcctccattctccgtgcaagcaccacggctgcagcagccggttggagcgatgcccacacaagcagcggcacagatgaaccaagcgccaggcccattcgcaccaccgcctccaccaccaccgttgccgcctcttctgccaccgctcctgcaacagttcggtcaaagcgctggaggaatgatggggatgggaccgttcgggatgatggctggctccatgccgcctcctccgccgatgtccagcatcatgccagcaggttttccagcgccaagcggtccacctccacctccgcttccaccggctcagacccaaccccagcagcagcagcagcagtctcctcctcagccaccagcgccgcagcagtcagcagggttcttccagccatcagcaggcatggggtacttcccagcagtgcaggtgcagcaatctccgtccgcccaacgacaatgactcgatggtggcatgacatccatcggggcgggcttataaaaggcagcacctcgtgctaaattttgtacattagacataattacctggtgtcgagcttatacgtgactggccctgctgcaagagaagcagcaggaccaatggtcacgattagaaaaaaaaaggttgtagaataggcatgggggcttttgtttggtccgagttgttttaactcttcctggttgtgtcgtgtgtgcagtagttagactttgcattgatcccctgaggcgcaagaaagtggcgctggaattgttgcttaatagagctgccctctgatatagcagttcccttttaggggctgggctgaagcagtgttagaacttaactggtcatagtgtcatagatatgatgtgaactgcaaatacttgtcctttttgtgacttaaatttattttctattttctatttggttttgaatagagagaagattttagccccaaacactggtgatgggcgggc

SEQ ID NO: 150318 - DNA, 823 bp, Zea mays
  unsure (1)..(823): unsure at all n locations
  Clone ID: MRT4577_68616C.1
aaagggtggaggtggaagccgcaaaccaaaccctctctgcctcgtcctccctcctgcttcgtgcttccccttccccttctcgtctgcggcgccaagctcgacctcatcgccaccgaggtacgcatctctcccccgaagaactccgagctctaatctctcaccacaacccccgaatttctgattttctggtatgtttttttctgtttttttgcgcgcaaggtcgtttcgatctgggttttagcctatccgcgaggaaggtaaacgttggagacttcgtgatggctgctgcgaagtcgggcgtagacgtggaaacgagggacggcggcggcggctccttcagcgaggagaggtttgttgataagctcaacaagctcaacaacacaacagcgagcattcagacactttcacattggtgcatttttcaccgcaagagggccagaaggattgtggacacatgggaaaagcatttcagtactgcaacaaatgataagaaaatatcattcctgtttctatcaaatgatatcttgcaaaatagtaagcgcaagggaggagattatgtgcatgagttctggagggttctacccagattattgaaacatttctacgaaaatgggggagaagaagcanagaaactggttgcaagactaataggaatntgggatgaccgcaaagtttttggaacccgtactgaaagtctgaagacggcatttttggtgacaccctnctatattcgatcacagcgggaaatactataattaaaatctagctctaatcccttaaattcaagttggaaggaagatccagtcagtactaaaaactgact

SEQ ID NO: 150319 - DNA, 352 bp, Zea mays
  Clone ID: MRT4577_68617C.1
atctccctgactctggaatggactcgccctttcgtgtagcattacccgctgcgcctatggtgagtcctatcacaattgacctggtcgctggtctacaccgctagtgacctgctacttccctgtctcttacctatcttactcgccttgttgggcatcctcctttgaccagctgttgttctagggattagttcaggaccgaacgcccttcctatcaggtggcctggctggatggcgaatggacacaccctgtattggcacattaaacgctgtccggtgtggagcgtacagcacagcgtgagcggtacacttgcccagagcctaaggcccagtcctttgagtttcttagcttact

SEQ ID NO: 150320 - DNA, 312 bp, Zea mays
  unsure (1)..(312): unsure at all n locations
  Clone ID: MRT4577_68618C.1
gtgccctgcccccgcttctaagcagtgtacggaggcagatgcggcacggcatacccatgatggaggcagcaagggcaagacgtcgcggctcttcctcacgtctctgatcgatgcatagcgggcgcggcacatgagggcaaggcagagcggcgcgagccacgggggcacaggcggggtcctccccggtggcgctcgccctcttcccctactagcggaccatccacctgctggctagcggcngtgcacaacgagctacagagcactgtctccatccttttctcccttttgttttttgcccatgccagtcccttt

SEQ ID NO: 150321 - DNA, 132 bp, Zea mays
  Clone ID: MRT4577_68619C.1
agccgcctgctcttcagcctcgccgtggacatcggggcagacacagtcctcgtagactcactccaccgcagagcgccgactcccgggcttccgcgcaagctggtacgctcctcccacatggcagggactcaa

SEQ ID NO: 150322 - DNA, 541 bp, Zea mays
  Clone ID: MRT4577_6861C.1
ttctttgtcgtgccacgggcgtgcggagctgtgctgcgtggatctccgcgcagacgcggcggcagcggcgtgcgtccctgcttgcgccttcctcgtgaggccgtatacatggacgcgaaggacatactagggcttccgaagacccccttctcgtcctcccaggagaagaaatcgcggccgcccaaggagccgcagcgcaagcctgatggcgtctcgcgcgaggtctatgccctcaccggaggggtgggaatgcccccgctcatgccgaccattgaggcatcgcacctgaagaggcggcctgctgcggagaaagagaaggtagcatggcagtggttacctttcacgtcatccgcacgaactgataaccttcaactctatcactgggttagagttgctaatggtattcagccaactggggattatcagtctgcaaaatataacaagagggcggatgttcttaaatataccgatgaagagtatgagaagtatttagttgaccctgcttggagcaaggaagaaacagatcaactatttgaattat

SEQ ID NO: 150323 - DNA, 287 bp, Zea mays
  Clone ID: MRT4577_68620C.1
ttttccctttactcacgtggctggatgtaaatggccacgtgaaaaattgccagggctgtgagtacctaaactgacggtgctcccataggctcacatgcgagagctgcggggaggacaacttcgggtccacctccaacacattgagcgagcaagaggacctgcccaaaagacacggagccggtaaccacgaccagagatgcgctcattttggatgagatggctcatctctgatgatttctggacagaatacaccacttactatgtgagcatgagcccgatagaataca

SEQ ID NO: 150324 - DNA, 311 bp, Zea mays
  Clone ID: MRT4577_68621C.1
atccggagcagccgcagtcccaccgaccccgccggcggtcgcccttcatcttcttgccggtgcctgttgtttctcttttcaataatcaagatgagccgtggtggtagtgcccgtggtggtcaaagttctctgggttatctctttggaagccgtgagccccccaaaccaacagtggcaccagcttcaagtgcttcacctgttgagaaaccatttgcttcaaagactgattccggccaacaagttgcttcttgggttaccaggccaaccaattacttccacaaggcttattgtcagaacacttgcaactttct

SEQ ID NO: 150325 - DNA, 722 bp, Zea mays
  Clone ID: MRT4577_68622C.1
cgggatggaccctcctcacgcctcagtgggccccaggcctgtgatgctccgtgtcctcattgatgacggcactggtttatttgctccgccgcggctttattgctgtcgatgacgtggaggggatagatgtgtgcccttaacctgaggagtcttgtacttcttctaggtttagcgtttcatttatcgtatattgtatatgtgcttagctttgccaagccaaaaaaaagaaaacacacacacacgctagaacacacctgtggcacactcgcacgaataatacaaacatcggaccaccgtgcctgaaatctggcttgtgaaccacacgtaagaagggtcacagaaggacatctcatcaattgcggcgtgctcgtatgggtcccacacgtcagccggctgttggggattgtcgagctggagccactgacaagtgggtccccgatggacacgtacgtatctgtcgctggcttaggttaggaccacatgattgtggcccggatagagctcatcgagggagaaaaaaaagaaaggagagaaaaaaaaaagaaaagaaaagaaaagaaaagaagaaaagggcggtgcgctcccgtctttgtatcacgtcgctggttccccccaccccctgtttattctgattggcaaattgcaacggccaatttgtcaacagcaaggaccagcgcgaatcttgtaacgtgaaaccctagttgttttgttaacctatacgc

SEQ ID NO: 150326 - DNA, 382 bp, Zea mays
  Clone ID: MRT4577_68623C.1
cggcacaaggggcaattggtccgttggtaaggtgtcgtcatctcccgtccactgccgccggcgtgcctcggagactcaacacgtcgccagactagacgcgccatggccaagaacagctatgtggttaatgtcctagtgctgctcgtcgcgggctacacggcggggctagcctcggccacgacgacgacgttcatcgtcggtgacgaccagggctggatgaccggcgtggactacgtcgcttgggtgaaaggaaagacattcgcgatcggagacaagctaggtgagtggtctgctctgctctgctctcttaatgcagggttcatcgcatcgccctgcgctgcagctgcacacggactggcacgtcgtggcaaataatcgcagt

SEQ ID NO: 150327 - DNA, 399 bp, Zea mays
  Clone ID: MRT4577_68624C.1
ctcacgcgtagcacatctaacatgtggcggcagacaaagatttgtgagggcgatccgcgctgagaagagatggctatgatcgccgcggcggcaggggcggccctttgcttcctggccctggtggccgaggccgactggcaaggccaggtcgatcggcagaggctgagggaccagcactgctgtcaggaggtccaggagagcgcgctcgacgcgtgccgccaggtcctagaccgtcagctaaccgccggcggctgcggcggcggcgttggtccgtttctgtggcggaccggactccgcatgcggtgcttccagcaactacaggacgtgagccgctagagccgcttgcgccgcatcccgagcatgcacagcggctacgaagaggccatgccggcgctggag

SEQ ID NO: 150328 - DNA, 383 bp, Zea mays
  Clone ID: MRT4577_68625C.1
actatgagcatcgagaaacaaatcaagccagggacatgacctacaacctaacagcaatggctgccaatatattatacgtcgttgcgcttattgggcttcgtgcgagagcaagaaaagcattcattattgaacaatgctcactagctacaagttctattattacacatgggctacgactagtaacttcaatgggtgtagaacaacctgctgctcatgattataggctacaacatgcaatagcagcgagcgtgttacgataactatgacggcaactggctgatgaactgttgggagatctaaaaatacagagcattggagctgaacaacatcaacaattactaccaggactgagacacctagtgaaagggaaccctgtcttctac

SEQ ID NO: 150329 - DNA, 1597 bp, Zea mays
  Clone ID: MRT4577_68626C.1
gggtcgaccaggcgtccgctccgaaataccacaaacacccccaatcccacccagaatccggcggaagtcaagccaacctccgtcctccatccatgggcgagcaatccctctcccagcccaaggcccagcctctctccccgttcccgtcgcctcccgcctccgccgcgttgccgccccccgcctctgcctctgcctctgcctctgctgcctccacctcccgcaccaccagcgccgcggcctcgcgccccaagaagaaggtgacgaacccatcgcccgaccggaacccggccaagaagcaccgcctgacgttctcgatcccgggccggcccctgtccgcggccggcgaggtgggcgtggccatccgccacctgcgcgccgtggaccccgccctcgccgccgtcatcgacgcgcacgagccccccgtgttccagtgcccgcaccgcccgttccactccctcgtccgatccatcctgtaccagcagctcgccttcaaggccgccgcctccgtctactcccgcttcctcgcgctcctcggcggcgaggccagcgtggcccccgacgccgtcctcgcgctcagcccgcaccagctccgccagatcggggtctccccgcgcaaggcgtcctacctccacgacctcgcccgcaagtatgcctcagggatcctctccgacgcctcgatcgtcaacatggacgaccgctccctcgccgccatgctcactatggtcaagggcatcggcgcctggagcgtccacatgttcatgatcttctctctcgcgcgccccgacgtgctcccctccgccgacctcggcgtgcgcaagggcgtgcagatgctctacgccctcgaggacgtgcctcgtccgtcgcagatggacaagctgtgcgagcggtggcgcccctatcgctcagttggggcttggtacatgtggcggctcattgaatccaaggtgccccagccagcgccggccatccctgttggatcacttgctttcccttcgccggacggccagagtatgctacagcagcaagaacaacagcaacagcagactgtcatccaaatgatcgacccccttcagatgctcccagggatggggtgaattcggtatcacgtctactaattagttactctactccgtcttagatcaatcaatggttactctgtgcatctgatagtcagctccacacgttgttgttctggaatggaaccgcaggagggtagaattggatatgaaatgaggtttgggcccaacttattaagttgtcaatttggtttgtgttgtttatctgtgtcaagaatctgtgaagatgatggttggctgttgtttacattgtaaaatccacctagcagtattttagaaccttctggaattgttccatgcttgtagttcacctgtgataaaatgattaagaccatgcttaacacaagaatccctctgttgttaagttagcaatgtaattattccatgcttaacacaagacccatctaaccaaaattgagctcctattgtttgctcaggacttttggttttagaaactaaaataacatcacctatggaaagacataagttctgattactacgtccagacttttcaagcttgc

SEQ ID NO: 150330 - DNA, 989 bp, Zea mays
  Clone ID: MRT4577_68627C.1
attgggtacctcgaggccggccggggaagggcccaaagcccagtcggaccacgccactcccaaaccctaagctgagcctgtgacgctttcatccaatggtgcaagagcaagacgcacccaacgcacttgcctccgacgccgatcaccccgccccgccgccccgcctcctttctaagcaccgcccgcgtcgccgcgccgctgcccctcgcccgcccctgccaccacctgcgccaccactgcccgcgcgtcgcctgcccgatctcagccagtgccactgctgcggcttccgcttccgaacgccccagccgggggccaggcccaagcgccgcccgctctgtccactcagttccctatggcgcgtcgtcctcctctgcgccgaatgcctctccctggtccgctgtggcgctgtatgctcttactgcctctccctcgacaacctgccgcccgaggattccgccgtcgtctgtcgccgctgcaaccgctatgtccatcgatcctgtatccctgccgaacaccgcacggccgtgatccagccggtcgatgtggaggatttcctctgcgtcgattgccgtcccaccgtgagatcgaagaacgggggcttcaatttggggctgaatctggatgcttgcatctgggatcgtacatccgttgccagggagaacgctctgaggaaggctgtggaggtgaagcccgcttctaagcgggggaacgacgctgttggcggcagtgggttggtcggaaggggcagtgatgttccagttctgccggacgaagagttagctttgcagctgcacctggcaatgaatggatcacagaggatttcacgttcaggtggtgcctctgccgatccagccaaggggaagaatgatggggttgctagtaggatttgcaacacaaatcaggatatttcgcgtaacaaatatgatggctcagcttgatgaagaagaaccaggttgcaacagggtattaaagggcccttaggaattctg

SEQ ID NO: 150331 - DNA, 271 bp, Zea mays
  unsure (1)..(271): unsure at all n locations
  Clone ID: MRT4577_68628C.1
aaccgaacaagacgaagggataccaaacaactaagagaaggtcaggcacacgactgccggaaattagagacagcttacaaccccagcaggacgggaagttgcacagagaaataaccatgncacaaagcattgcacggggacacacatgaaatgacaacggttgtcacgattcagacatagcacgcagcaggcaggggaggataactttgggagcgcaccacacgggcatagttgcaccgaacaggagcccagggagagccaccgcaggagc

SEQ ID NO: 150332 - DNA, 1177 bp, Zea mays
  Clone ID: MRT4577_68629C.1
tgtgacgcgtgggtgtagaagacgaggaagaggttgatgaagatttagatgagctgatctcacgaatcaagccagaagatgggaacacggagttctggaaacgccgttttctgggagaaactcgaaactatctttgtgaagaagatagtaaagaagacggtcaagatttagatgatgaattggaagatgatgatgacaacgatgatgatgaggatgacgatgaatctgtaaaagaagcagaagaagatgagatagatgatgaagaggttgttgagcaaacagaaaatcaagttggtgatgacactaaagataaaccagcaaaagaacccaaccatcatcttcaaatgataggggtacagttattgaaggatatggagaggacacctgtttcttcaaagaaattaaagcggatgccagagattgatgatgatgaagactggttccctgaagatccaattgaagcctttaaggttatgcgggaggagaggatgttcgatgtatcagacatgtatactactgcagatgcctggggatggacgtgggaaagagaaataaagaacaagatgccccgtaagtggtcacaagaatgggaggttgagttggctatcaagataatgcacaaggtaatagaactgggtggtactccgacaattggtgattgtgccattatattgcgagctgctatgagagcaccactcccatctgcttttataccaatattgcaaacaacacacagtctaggttataagtttggaagcccactgtatgacgaagtagtcctattgtgccttgatctggaagaaattgacgcagccattgcagtagttgcggaaatggagacttgtggggttaaggtgccagatgaaaccttggacaaggtgcttgcgtccaaacggtctggaaattctgccctcccaccacctacggaggtaatcaatttggacatgcgagacttctgctgctcgtgcttgacgtgacaccagaaaatcacaagcaatgcatatgtttggagcttctcctggaaaagaacatgctgtatgatagtttgtcggtgctgtgtccaacgatagaggagatatgaagttgttagtatgatacctggcatggtatatttgattagtccgttgaatttttgtatggatggtgaagcatgagaaaaggtcgagtttttttttat

SEQ ID NO: 150333 - DNA, 345 bp, Zea mays
  Clone ID: MRT4577_6862C.1
cgaaaaccccaaccaatcgcgcctcagatcacgcgagggcgtgagggggaattcgctctcccagcctccggtcacccgtcgatcgatcgtccgggccaggggctctcgcggcggcgaccggggccatgggaggaggacccgctcatcccgctggtgcacgtctggaacaacgccgacttcgaccatgcctccggctccgcctccgcggtggcacgcccattcccctgcgcccgcgagcgcccgcgagggggacaaggagaaccaccgccccgagcccgacgttgaggcggaggtcgacgacgttgaggccgagatttaccacatcgaggcggagatcctgcgcct

SEQ ID NO: 150334 - DNA, 436 bp, Zea mays
  Clone ID: MRT4577_68630C.1
ccctggcggtcgggcggagaaggtgcctgcttgcctcaccaaagaaagggcggcggtgcgcagctgatctgctgtgcgcgaaggccagatacgatgaagatggcgctgcctgttatcttcgtgagctgagagctgacgctaccaatttccatggctacttctggtcatgcattaatacacgcgatgctccgcggacacggcgccgatgcgggcctgagcctccagtggtgcaagcctatggactcactgtgcatctggggacagcgtcttacatccctaagttccgcagctggaaccctagtccttggtacatgtaatacatacgaacgatctgagcgcagcagcaacaacagttactaccagcactgagccacctagtcatggagaatcctgccgactacttgcaacagcagttgcttgcagcaaacccactagc

SEQ ID NO: 150335 - DNA, 173 bp, Zea mays
  Clone ID: MRT4577_68631C.1
gatcaatcccggactcgagctgccggacaaccctagcttgccttcttttccactggccgggtggggaccggcgacaaccagggacagaggggaggaggtggagcctgaagcccgtgccttccttgacgctttcaaaccgcatacctcacacacttaactcaacacccccctaa

SEQ ID NO: 150336 - DNA, 474 bp, Zea mays
  Clone ID: MRT4577_68632C.1
cgctcggtagctcgtccgctgcacccagcgcggcgccgcgaggactgaggctggccacgcgtgctagtggctcggcgctccacagggtttctgggctcttgcatcctaccaacttttgagactgatccataagacgaatgaaaaaagctggctcgtgtacgcgcagttactggtgacgccgcgtctgaagcagtggcgaagttgtaatgtctcacagagcacgaattgatatcatcatcagcttaaagtcatgtatgaaataatatgggtcacaacaacgactccagcttcatatataaagatcactgatgcaatttcagcctgtgaatcctgatagcctgcttgcgcttcaacaagcaggttgtataattatttctcatactatcgactgagtataggctggtgcaagaactcactcaagacttctaactattatgtatcaagtactaagtgcaataacaacaatgtacttgt

SEQ ID NO: 150337 - DNA, 357 bp, Zea mays
  unsure (1)..(357): unsure at all n locations
  Clone ID: MRT4577_68633C.1
actatanaagagctatggcgtcgcatgcacgcgtacgtaagctcggaattcggctcgagtgtattttacacaccaaaaaaccctactggagagtcatactattttagggggccaaatataaaataccaatataatatatcccctaattactcaaaacatccaattcaaaaagaaccacccactatatttatctatatactaacaaaacactttcatattaacccaagatacagacgtctatattatcaaattattgttcatggcatcacattccacaacacttcatataaaaaagattctttatatacaccttcatgaaaccttttaatcacatacattcctcatctacaaactcta

SEQ ID NO: 150338 - DNA, 891 bp, Zea mays
  unsure (1)..(891): unsure at all n locations
  Clone ID: MRT4577_68634C.1
gtctctgatgctgggcggcggcgacgaggcgcacaagttcatgggccggccgcgcctggaccgtgctgacttcgcgaacatgatgaacccgggctcccggcagatttacctgacattcccggccgacagcacgttccgcgaggaggacgtctccaactacttcagcatctacggtccagttcacgacgtgcgcattccctaccagcagaagcgcatgttcgggttcgtcaccttcgtgtacccagagacggtgaagctcatcctggccaagggcaacccgcacttcatctgcgacgcacgcgtgctcgtcaagccctacaaggagaagggcaaggtccccgacaagtgcaggaagccgcagcaaggggacttctccggctgcacgacgcccactggcgggctggacgccgggtaccccttttgatctgcaccagctcggcggcaggatgctgcagcactcgagcagcgccaacgagctgctcctacgccgaaagctggaggaacagcagcaggccattgagctccagagccgtcgcctcatgggtcttcagcttctcgaccttaaggctcgcgctgctgctgcagcagcatcgccactgccgacaccaattggcgatgccttcgcgtccagccaacctgtgagcaccaccgcagtcgagtcgccatcgccgccagagtccgggcagcagctgctcaagctttgaggagcggatttgctctgggaggggaaggtcaacggtggtgataagggaggatctgctcgcgaggcgagcccagacgccgctgatagcgaccaaagcggcggagagcacaatttgccggacagcccattcgcatcccctacgaaatctgctgcgttntttgcatgacagtttcactgccacggagacg

SEQ ID NO: 150339 - DNA, 129 bp, Zea mays
  Clone ID: MRT4577_68635C.1
ggctcggatggatttaatggcaatcgccaactacatatacaatgtgaccggagggaacaaaccttttcttttaacgctaaatgtttggggcggccttttgtttaaccctcccccaaaggaaaaggtttt

SEQ ID NO: 150340 - DNA, 944 bp, Zea mays
  Clone ID: MRT4577_68636C.1
cctcgaggccggccgcgtctctgttgctgggcggcggcgacgaggcgcacaagttcatggcccggccgcgcctggaccgtgccgacttcgccagcatgatgaaccccggctcgcgccagatttatctgaccttcccggccgacagcacgttccgcgaggaggacgtctccaactatttcagcatctacggtccagttcacgacgtgcgcatcccctaccagcagaagcgcatgttcgggttcgtcaccttcgtctacccagagacggtgaagctcatcctggccaagggcaacccgcacttcatctgcgacgcacgcgtgctcgtcaagccgtataaggagaagggcaaggtccccgacaagtacaggaagcagcagcaaggggacttctccggctgcacgacgcccactggcgggctggacgcccgagatccctttgatctgcaccaactcggcgcgaggatgctgcagcattcgaacagcgccaacgagctgctgttgcgccggaagctggaggagcagcagcaggctgccgaactgcagcacgccattgagctccagagccgccgcctcatgggtctccagctgctcgacctcaaggctcgcgcagctgcgacagcagcagcagcatcggcactgccaacaccaattgccaatgccttcgcgtccagccatcctttgagcaccatggcagtcgagtcgccactagagtccggagagcagctcaagctgagcagtgggtttgctctggaggggaagctcaacggtggcgacaaggaagaatctgcttgcgaggcgagccctgacgccgctgatagcgaccaaagtggagatcacaacttgccggacagcccatttgcgtcccctaccaagtctgccgcgctcgtgcacgacagtttcgccgccacggagcctgagaacaccgcgtcctgtgttgggagcaag

SEQ ID NO: 150341 - DNA, 431 bp, Zea mays
  Clone ID: MRT4577_68637C.1
tggcttggaacctttgggctgatttatgtgcttggcctcagactgtgagtgttgtttccccccccccccccctctacacacaggccattccccgggggccgtagcaggccagtagagccccgagtcctaaaatatcttactcgacactacaaaattattcgctcccgacactaacacattctctggtaattaaattaaactgagaaaacgggccctaggatattgactccttacagtagacggaagtcaggcataggcctccggattacccgcttcctatacgtcggtcaggaaatgtagacgcctctagggctcttcgcgccctactatcaggtccctcttccggaacgtctaagacaaaggtcgttcggctttacgcggtagttgccgttgcgacgtgacagttaccgctttaatgtacgcggacgttt

SEQ ID NO: 150342 - DNA, 827 bp, Zea mays
  Clone ID: MRT4577_68638C.1
ggtaccctcggcgggagggcacagctacacagctagctagctagcacctagcagtcgtacacacgggctagcagtcgatcacaaaccaatcgcggagaggcaatcacgtacgtatacgcacgggcacgtagctagttagcagtcgtagtcgtagcgtgacgatgagggttctctctgttgcggtcgctctggtcgtggtggtggccgcggcctgcctcgccgcgccgcggggcgcggacggcgcgggcgagtgcggggcgacgccgccggacacggtggcgctgaggctggcgccgtgcgcgtcggcggcggaggaccccggctccgcgccgtccggctcctgctgcagcgcggtgcacgccatcgggaagcagagccccaggtgcctctgcgccgtcatgctgtccaacaccgccaggagcgccgggatcaaggccgaggtcgccatcaccatccccaaacgctgcaacctcgccgaccgccccgttggctacaagtgcggagattacaccctgccatgagcggcggtgagttctccaggtcggatttgctgcatggcatgcccgagtatcaccaaagcgcgagctcttgtgtcgagcgagtccgtgtctgtcgtcagtcagtctctatgtgttgcccatagtaaacaaagacatgcgagtaccagacatgtgcaactctagtagcatggtgcgtgtatcactaggtacgcgtactcgtatcgttgtgttcagttctgggtctatagagatgtagccctgcattgtcgaaataaatactgtgtccactcgttcgtgaaatgaaaaaaaaaggcttgatggtcgact

SEQ ID NO: 150343 - DNA, 426 bp, Zea mays
  Clone ID: MRT4577_68639C.1
cggacgcgtggggtcgaggacccgacgcttaagcggtcggcgggggcactcttcagcagggtgtggggtcctcacggccgagagatggtccgagagaggtccgaccgggcaatagatcagatggcgcatgacgaagaggttgaggaccttggcgatctagacggcacgctgcccgacagcatgctgcccgaggcctcgggggtggagttggcgccgccgtccgatgcgggcaagggccccttagcgacccccgcaccgactggagctagcgaggaccccgcgccagcccctgcgccgacgggtgaggacgcctcataggcggtgggcgaaccagctgccgaagaccccgcggcgacggctcgggccttcgcaggttccgacgtttgggcctgcccaagcaaccgctggtgacaatactgattttgt

SEQ ID NO: 150344 - DNA, 644 bp, Zea mays
  Clone ID: MRT4577_6863C.1
caagcacacctaagcgttctaatagggacattgatcggcccttcatccctgatacaagtgggtttacaggtgaaagagcaggcaaacgggatcacaagcggaagtccactggaagatttatagatgcgcctccatcaccaccccagtcgaagcggcctagaaaattgaagggatctgactgatagtgctgttcaaatgtcaggatgaaaactctagtcaaacaaccaaggtgtgtcatatcatactaaagttaaactacgtgtttttcatgattatttggtcccgacttaagagctgcagattgacatttacatcacttttttgaataatgtagcacttgcagtcttacagtagagatgaactagtagaacctaataggtcagcaacggcatcaatggaaatccgttgggctggccagtcatgcaggaaccgactttcgctgcttgccctgacttcgggccatatgctgggtggaccggttttggatttataatgtatctatctattattgtcatgtaatgttacacagataactgagaggtcgaaatcgtcactttcagccattttataaattattaaaataaaatgttataaaattattttagaaattattttaaaatagttttgtaataaatgttttgtag

SEQ ID NO: 150345 - DNA, 1410 bp, Zea mays
  Clone ID: MRT4577_68640C.1
tttgggattaggttgtattgtttgctcctgtcctagtgaatgcctatggttcaagttaccattttgtggtaattgtgttagaaaaactatatgtatcgaattatattagtactgtagctttacacagttagttctttacggaagatttatgaggtgtgcgtggtgaagaatcactctatccaaaatgaagtggtgcatcatgggtccattcctcaaatttggtgggatgacttcattccacatattagtactaaacaactaactatgaggaatgaggtggtgatggattaactcactccattccacaaaccaaacaaaaaagtgaggagtgagaagatgatggactatataattcttcaaaccaaacactccataactatttacaactaaccagactccttgctccgacttcgcttcctctttgacctgtgtgctgaaaagttctcactgtttctcgatctaccactccacgaatcagagctcaaatctccaccgcttgaatctgaggtaccctcttcagtgccgctgtgccacctgtttccactgtgatgtttccttctcttgtcatccttcgtacttctacctgacctctgatgccgaacttcaatgcctggatcatcatccttccttcccaacctagtgcctttacagcttgaactctgatatctatctacatccgaatcaacatcactatttgtggctacccaccggtcgtttgattcatggcggttatgctttcgggattcccctcttccgtcatttttttcatcatgataatcttcaatgtcatgtctcctgcgtcttgtagtgctgtgctcatttcttgattgtttttgagctgtagagtggtgtctttcaagattgtaatactctgatgatcccctcctgctccctttggcatcatcatacctgctagtggacttctcacctgaaggacccttgctgatgtctgtaccagtgaagtctggagaccagtcagaatatccaacctccaaacttccacgcctaacagaacagtgcttcctaggcctagttttgctgtcatcttctttttctccattaccatgatcacttctatgccgttcttcatgcttatgcctatgggacttgctgtcatttcccattgttgaaaattgtctgtcatttgtatctccaacatcttgtcttcggtgcttatctgctgctgaagaatctcttttatgtcgtctgtactcataattcatgttgtggctacttcgttcttgcttagaatgtgaataatcttgaggagagtgtcgtgtatgcacatcttcgttcctagatcctcttgaaacatatctgttgctggaaattttaagtttcttcctatcagagcccactgaacttctaaaatctggggtatgactcgccttttcattcatctcatcaacc

SEQ ID NO: 150346 - DNA, 934 bp, Zea mays
  Clone ID: MRT4577_68641C.1
catcgaccaccgggcggggaaggctacccctacccaccagcgcgcaccgagccggctgagacgtgtggcggagcttgcgcgacgccactggcggaggcgccctcgcgctgccacgcgcccacgccgcgtgacggtgcgcggctagtgctcgccgcaccggtcgtcccgggccatcacgaggtcgccgcacgtatacacacggccacacgggcacgtagctagctagcagtcgtagcgtgacgatgagggttctctctgttgcggtcgctctggtcgtggtggtggccgcggcctgcctcgccgcgccgcggggcgcggacggcgcgggcgagtgcggtgcgacgccgccggacacggtggcgctgaggctggcgccgtgcgcgtcggcggcggaggaccccggctccgcgccgtccggctcctgctgcagcgcggtgcacgccatcgggaagcagagccccaggtgcctctgcgccgtcatgctgtccaacaccgccaggagcgccgggatcaaggccgaggtcgccatcaccatccccaaacgctgcaacctcgccgaccgccccgttggctacaagtgcggagattacactctgccatgagcggcggtgaggtctccaggccggatttgctgcatggcatgcccgagtatcaccgaagcgcgagctcttgtgtcgagcgagtccgtgtctgtcagtcagtctctatgtgttgcccataataaacaaagacatgcgagtaccagacatgtgcaactctagtagcatggtgcgtgttatcactaggtacgcgtactcgtatagttgtgttcagttcagggtctatagagatgtagccctgcattgtcgaaataaatactgtgtccactcgttcgtgaaaaaaaaaaaaaaaaatgatgctcgactaaaaaaaaaaaaaaaaaaaaaaaagacct

SEQ ID NO: 150347 - DNA, 2569 bp, Zea mays
  Clone ID: MRT4577_68642C.1
tttttggggaaggcaacagcccttccctgacaagcattcaatgataggactgttatattacaaaaaaggaggccaagagactaatggagtgtgtggtctgctcaagaagtacttgacaaagttgctcaagagactccgaattttggaacagaacaggataaggcccattgtccgtttcatctcaagacaggggcttgtcgctttggattgcgctgcagcagagttcacttttaccctgataaatcaatcacattgctaatgaaaaacatgtataacggtccaggccttgctttggagcaagatgaagggcttgaggtttgttagaggaaattctctaatgcataactttgtatccttaaactactgtttatttacgtttaaggatgctcaattttggtttcatgggcagtgccattttaagttgtgatagtttaatactaaagcaagctcatgtcaaaataacaagtattccactttaagcttgtaagcctttataagaagacatgagtataaataactgactacttggaaccatttgaatttttttaatctactgctcaagataactcttaccccaagttttccttggctactatcagactcgcgacagattgcatgttctttcgtgttatcttcagaacttcgacttgaggcatacagtgatcagaccagttgatttcacttgattgaggacgtcttgaactttgatctgctcatttcacagatgaagagattgaacaaagctatgaagaattttatgaagatgtacatacagaatttctgaaatttggtgaacttgtgaatttcaaggtatgtagaaatgggtctttccatcttcgagggaatgtttatgtgcactataaatcgttggattcagctcttcttgcctacagcagcatgaatggacgctattttgctggaaaacagataacatgtgaatttgttgctgtgacaagatggaaggcggccatatgcggtgagtacatgaggtcaagatacaagacatgttcacatggagttgcttgtaattttattcactgcttccgcaatcctggaggagattatgagtgggctgattgggacaatcatcctcctagatactggattaggaagatggttgctctttttggtccctcagttgatgagatgaatgaaaaggcgagtcataccccagattttagaagttcagtgggctctgataggaagaaacttaaaatttccagcaacagatatgtttcaagaggatctaggaacgaagatgtgcatacacgacactctcctcaagattattcacattctaagcaagaacgaagtagccacaacatgaattatgagtacagacgacataaaagagattcttcagcagcagataagcaccgaagacaagatgttggagatacaaatgacagacaattttcaacaatgggaaatgacagcaagtcccataggcataagcatgaagaacggcatagaagtgatcatggtaatggagaaaaagaagatgacagcaaaactaggcctaggaagcactgttctgttaggcgtggaagtttggaggttggatattctgactggtctccagacttcactggtacagacatcagcaagggcccttcaggtgagaagtccactagcaggtatgatgatgccaaagggagcaggaggggatcatcagagtattacaatcttgaaagacaccactctacagctcaaaaacaatcaagaaatgagcacagcactacaagacgcaggagacatgacattgaagattatcatgatgaaaaaaatgacggaagaggggaatcccgaaagcataaccgccatgaatcaaacgaccggtgggtagccacaaatagtgatgttgattcggatgtagatagatatcagagttcaagctgtaaaggcactaggttgggaaggaaggatgatgatccaggcattgaagttcggcatcagaggtcaggtagaagtacgaaggatgacaagagaaggaaacatcacagtggaaacaggtggcacagcggcactgaagagggtacctcagattcaagcggtggagatttgagctctgattcgtggagtggtagatcgagaaacagtgagaacttttcagcacacaggtcaaagaggaagcgaagtcggagcaaggagtctggttattagttgtaaatagttagcctctttttggagcacatgaattcgtaggaatcgtgcagaaattttacaggaatcggtttaacttcgcacgaaaaatttcccgcactccaaacatgcggtagtggcttcttgatattctactgtatgctttcaccgtttcgcttacaagttctgttactgtacactgcggtagtgcggttcatagcattgctcaattccggacccgttctcaagcgtctggctatgttaatacaggtattatttccgtgctcttctcactcctcacttttttgtttggtttgtggaatggagtgagttaatccatcaccacctcattcctcatagttagttgtttagtactaatatgtggaatgaagtcatcccaccaaatttgaggaatggacccatgatg

SEQ ID NO: 150348 - DNA, 1015 bp, Zea mays
  Clone ID: MRT4577_68643C.1
cggccgcgtgggcaaaaccaatcgcggagaggcaatcaccacgtacgtatacactgcacacgggcacgtagctagctagcagtcgtagagtgacgatgaggggtctctctgttgcggtcgctctggtcgtggtggtggccgcggcctgcctcgccgcgccgcgggtcgcggacggcgcgggcgagtgcggggcgacgccgccggacacggtggcgctgaggctggcgccgtgcgcgtcggcggcggaggaccccggctccgcgccgtccggctcctgctgcagcgcggtgcacgccatcgggaagcagagccccaggtgcctctgcgctgtcatgctgtccaacaccgccaggagcgccgggatcaaggccgaggtcgccatcaccatccccaaacgctgcaacctcgccgaccgccccgttggctacaagtgcggaggtagtctacagaatagtttcttactcctgttgctgctgctgctcttcactctttcactttttgcttggagtgcatgcactaaccgctgattgcatgcgtctctgtctacgattcttcttttatttctttgcagattacaccctgccatgagcggcggtgagttctccaggccggatttgctgcatggcatgcccgagtatcaccgaagcgcgagctcttgtgtcgagcgagtccgtgtctgtcagtcagtctctatgtgttgcccataataaacaaagacatgcgagtaccagacatgtgcaactctagtagtatggtgcgtgttatcactaggcacgcgtactcgtatagttgtgttcagttctgggtctatagagatatgtagccctgcattatcgaaataaatactgtgtccactcgttcgtgaaatgaaaaaaaaaaaaaacagaaaaaaaaaatttaaaaaataaaaacctaaaaaaaggtgtgaattaatttaaagttgttaaagtttataacacctattaaaatagatgaattgtaatggattatttgaacttaaaggggggggcccttt

SEQ ID NO: 150349 - DNA, 201 bp, Zea mays
  unsure (1)..(201): unsure at all n locations
  Clone ID: MRT4577_68644C.1
ccgagaaatggcggcggcagtcgctccgtccggcgatcctccgccgcatccgtctttccccctccccttcgctcgccctcttctccnctnggacangtgcattcggggggcgcngggtggtttttttgctcncccngnccatgtcctctcccgtcgcgcacctctcccgcggcgaagtcctggaccgggtcctcggcgtcc

SEQ ID NO: 150350 - DNA, 1306 bp, Zea mays
  Clone ID: MRT4577_68645C.1
gcgggggcgttgcaactgcttcaacggcagtaaccacgaggaaagcgacgaggagtttgatttcctcccctccgcgcacgcctcggcgacggccgccgctggggcaggggacgccttggaggctctgaagggcctggtgcagagcgcgagcgtcgcggagcggaatctcctggcggacgcgtctaggctcgccgacaagtgcggcaagggctgcaagggcaaggcggagtgccggcgcgcggtggccgacggcctcaggtcgctgggctacgacgcctccgtgtgcacgtcgcggtgggagaaggccccctcccacccagcaggcgagcacgagtacatcgacgccgtggtggggaaggggaaggagcaggaggaggaggaggtgaggctgatcgtggaggtggacttccggtcgcagttcgagctggcgcggtcgaccaaggcgtaccgcgcggcgctccaggcgctgccgccgctgttcgtgggcaccccggaccggctcgggcagatcgtggcggtggtggcggaggcggcgcggcagagcctcaagaagaaggggctccacttcccgccgtgccggccgccaccgccgccgcggcgacgcccgtccaggcggcgagtttttccggcgagttcgagctcgtgttcgacaggaagcgtagcagcggcggcgccgccgcggagggcggcgccgtcggcggcaagaagatcacggtggtggtgtcgccgtggcgcccgacggaggaggcgagcaagaagcagctgccgcccaaggcgaaggtcgtcacggggctcgccgccgtcctctgagcgtggcgtggtgatggacagagaataacgctcctactagtactactactgcctagctagctagtacccgctcttgtcgcaattctcccttcgttttcgtttcttttttgttttccgccgcgcctctcgatccgtttggggatctagttttcggtgttttggtgttttccgggttttattttcggaaaaggagaaaaaacactcgccgccgccttcttccttatggtttcctttttgttttgttttgacgcttgtaagttttggtcttggctggcatctcgaggggctttgtgatccctcccatgcgtccgcccacgcgtccgtgtagcagcagtcgtcgtttcgatacctgcttgtaggcgcaagcgtgatcacgtcctatgtgctgctgcttgtaatttgtgtattgaggagacgaactgtgcgtgccgcttgttatattgttgccacggaaagagaagcagatatatgagcactgcctttcgttgcaggctag

SEQ ID NO: 150351 - DNA, 476 bp, Zea mays
  unsure (1)..(476): unsure at all n locations
  Clone ID: MRT4577_68646C.1
ccgggcggccacgcgtgcgcgagaacncgaacgccaagaacacattaaccttggcacggaagcagaaggctgggagggagggggaggctgagaacacggacgaggccacaacaacgaaaaagctcaaggccgccggggaaggcacaaagcaggcgagggccgcacggaaggcggggaccagaaccaactcgagggtcgagtacgagtacctgagcgggcgcgcggcgctggaccacgaggcggccgacaagaaggtgaacgcggcgcaggcaagggcgcaggcactcaaggccgccgagaaggagccggcggcgcgcgcggaagccacagagcgcgagacagccgagctgcgcaccagagaggccgaggcgggcgccgaggccgagagcgcggccggcgaacagaaggcccctgagcaggaaccatacgacctgaacgccgcggcggaacgggacgggctgctgggcgcgtacccg

SEQ ID NO: 150352 - DNA, 665 bp, Zea mays
  unsure (1)..(665): unsure at all n locations
  Clone ID: MRT4577_68647C.1
ccggccggggacgcttcgctcccnccgcttgcgcccatccccgacctagccttcttcacgactttctcgcgcgatgttcatctctaccaagactgccttcggcttcatcaccgctgccatccttgttgctgccgcacccgttgaggagcgtgcgacctgcaacaaatacattttgatctctactcgcggctctggtcaagctcagggtcaatgccccacacttgagccaatgataaagacgactctctcttcgctgtccggtggtgtcgagtatgataccgtttacgcagcatcatgggaccagaattctgctgctgggaccaaggatatcattaacaagatcaccacggtcctcgccagctgccccagcaccaagttcggtctcctcgggtactcgcaaggcgcctatgcaacggtcgatgctctcaagcaaatctccactaccagcacaaccggcacagcgatcaaggcggtcttcctcatcggtgacccacagcacacaccaggaaagaagagcaacatcgacaacttgggcggcacgagcaatgccaacgcgtacggtattgaggccacctctggttcccgtatcccatcggcatgggatgcatctggaaaggtcactgatcntttgctaaagggtgatggtgtctgcagtggctcgtcaa

SEQ ID NO: 150353 - DNA, 1128 bp, Zea mays
  Clone ID: MRT4577_68648C.1
cattgggtacctcgaggccggccgggcttcccgccgtggcggaagccggagtacatgcgcgccaagtggctgtccccgcacgtccgctgcggcggcgtcggaggcgacatggtcgccgtgccggccgccgccgccgccgcggcgacgcccgtccaggcggcgagtttttccggcgagttcgagctcgtgttcgacaggaagcgtagcagcgccggcgccggcgccgccgcggagggcggcgccgtcggcggcgagaagatcacggtggtggtgtcgccgtggcgcccgacggaggaggcgagcaagaagcagctgccgcccaaggcgaaggtcgtcacggggctcgccgccgtcctctgagcgtggcgtggtgatggacagagaataaacgctcctactagtactactgctgcctagctagctagtacccgctcttgtcgcaattctcccttcgttttcgtttcttttttgttttccgccgcgcctctcgatccgtttggggatctagttttcggtgttttggtgttttccgggttttattttcggaaaaggagaaaaaacactcgccgccgcctgcttcttccttaaaaaaaaaaaaaaggtttcccttttttgtttttgttttgacgcttgtaagttttggtcttggctggcatctcgaggggctttgtgatccctccgctgcccggcggccggtcaatatgtagcagcagtcgtcgtttcgatacctgcttgtaggcgcaagcgtgatcacgtcttatgctactaaagtactggtgctgctgcttgtaatttgtgtattgaggagacgaactgtgcgtgccgcttgttatattgttgccacggaaagagaagcagatatatgagcactgccttattgttgcaaaaaaaaaaaaaaaaaaaaaaaatgttttgacgcttgtaagttttggtcttggctggcatctcgaggggctttgtgatccctccctccagcccggcggccgggcaatatgtagcagcagtcgtcgtttcgatacctgctcgtaggcgcaagcgtgatcacgtcttatgctactaaagtactggtgctgctgcttgtaattggtgtattgaggagacgaactgtgcgtgccgcttgttatattg

SEQ ID NO: 150354 - DNA, 371 bp, Zea mays
  Clone ID: MRT4577_68649C.1
cttatgactgcgctttgcttcactgactaaggagcatagaatgtggagaattttaccttgggccaatcaaaagggcactcataagagactctactgaactaactcaatagaatcaaaggatagaatagaggaaaatgcaaatagaggatgaacggtatgttctcttggaaaactgctgctagaacgtttatgaatcaaacacggtatactagatgtgctcggactaaatgatgacaacatgttataagatctttcatgttaagtctactccttgcatactgaactgtggaacaaattcgttatacagaacattacagggcttatgctagagagcgatggagacatatataacctgtgacacatgtatggtg

SEQ ID NO: 150355 - DNA, 346 bp, Zea mays
  unsure (1)..(346): unsure at all n locations
  Clone ID: MRT4577_68650C.1
gcagtctcnagttacaattcccaatccattaaactttaccagccttttgcaaactcagaggagnacgttattgtacccaaggcggagaagaagcctgtttttaagataccctctgaggacgagcccgtggccccggcggataaagcccccgctgtgaataagcctaatgcggataaactgctcccggcgggaaaatccgacggcaaggaatgccgtgttgacaagaacgtgcggaagaatgccaagaagagcgtggagacgtacaagatctacatcttcaaggtgctgaagcatgtgcacccagacatcggcatctcctccaaagccatgtccatcatgaactcct

SEQ ID NO: 150356 - DNA, 498 bp, Zea mays
  Clone ID: MRT4577_68651C.1
atgacgggatcgctgcgttaccgtgacgttgtagcgagctgtcacgtcgttcgctgcgccggcgagatgttgcgctggctccccacttgcactttccactacgtacgtgctgatgtgacgagcaagagcagagggctgtgccttgtgtacgagcaggagcagagtgacatgggctcatggcgtttgtacgagcaagagcagagagatgtgacgaagaaagagaccgagaaagaagcgctcgcgttggcgtcgctcatcgacgacgagaagaagcttggtgactgccagttcgacctctcgaagcagtactacgtggccacatgcgtcgctgtgttcggcaagctccggcgctgccgctacttggacgcggtccagagcggctgcaccgcgctgtccatcttcaaacatagggacctcatggtcgtcgccaacgccgacgactctcgggttgttctgggcaccacatccgacaacgtgagagaacctagaggggggtga

SEQ ID NO: 150357 - DNA, 1584 bp, Zea mays
  unsure (1)..(1584): unsure at all n locations
  Clone ID: MRT4577_68652C.1
ccacgaaagacatcgtcaatcaagatgagaaattcggcacgcgactcctcgcttcctcccgttccgtcgccgccgcgcgcctcggagaagagatagaggcggccgctgcatcgaccccgcgccacctccgcctgcctcccccggcaccgatcgggtttgatcgatggcgtcgaagaggatcctgaaggagttgaaggacctgcagaaggacccgcccacctcctgcagcgcaggtcctgttggtgaggacatgttccattggcaagcgaccatcatggggccttcggacagcccatttgcaggtggggtattcttggtgaacattcacttcccaccggattaccctttcaagccaccaaaggtgtctttccgcaccaaggttttccacccgaacatcaacagcaacggcagcatttgccttgacattcttaaggaacagtggagccctgctttaactatctcaaaggttctcctgtcaatctgccactgctccctcggaagagccagaggcggccgctgcacccctgagattgctcacatgtaccagaacgacagggccaatcgggtttgatcgatggcgtcgaagaggatcctgaaggagttgaaggacctgcagaaggacccgcccacctcctgcagcgcaggtcctgttggtgaggacatgttccattggcaagcgaccatcatggggccttcggacagcccatttgcaggtggggtattcttggtgaacattcacttcccaccggattaccctttcaagccaccaaaggtgtctttccgcaccaaggttttccacccgaacatcaacagcaacggcagcatttgccttgacattcttaaggaacagtggagtcctgctttaactatctcaaaggttctcctgtcaatctgctcactgctcacggacccaaaccctgatgatcctcttgtccctgagattgctcacatgtacaagaccgacagggccaagtatgagtccaccgcacgctcctggacacagaagtatgccatgggctagaagcaaggctaaaagctggccaaactggtgaatgtgccggaccccaaatcgttatcacctaaataaccagtcaagtcgcaagtatgaatggacttttgaggaccattgtgccctgttgaactcatgtattaccttgtgaagtccgttgtgtctggtttctacctgaccgtttcgttatctgatgctgtttctttaatatctgatgctgcttcattaaccatacttctatatggtttgtggtgttgctgtttgtttaatctgtcagctgcttgacgtttcactgaaagaaagacgtttcagtgagcgcagaaaagtcggtgattcggtgagaaacgttacaaccttatcacatgctctgaaaaagtgggtagatgcttgtgattatataactacatatttgcgtggcaaaaaaaaaaaaaaaaaaaaaaaaaaaaaaaaaaaaaaaaaaaaaaaaaaaaaaaaaaaaaaaaaaaaaaaaaaaaaaaaaaaaaaagggnggacggaaaaaaaggaaccaaattgaaaaacgcgagaaagaaaagaaaaaggntttttatagggaa

SEQ ID NO: 150358 - DNA, 1481 bp, Zea mays
  unsure (1)..(1481): unsure at all n locations
  Clone ID: MRT4577_68653C.1
actccatagggcgattgggttcctcgaggccggccgggatgccaacaagtttctcatccacgaaagacaccgtcgatcaagatgagagccaaatggaggaagaagcgggttcgccgcctcaagcgcaagagaagaaagatgagggccagatccaaataaacgcatcgcatctcaacctgacttgactcatctatcatgatgttacgacctcgcacgcctcaacgataccttggccgaagcagggcacttgccgttctggcgcctctgggatctcccgcaacgcattgagctgggatttgactttgggaattacgtcagggtggttgaaccccgcacttgagcggctgatgtggcacacaatgaatattatggtggatgggattatgacaatcagatggtcaggtacaaggcggtgttggatcgaccactatcaaatgctcaccaacacaaagcatcacaacaacattcaaagataaagaaatacagagattcctctgccaaaaaaaaaaaaaaaaaacccagggccgctgcatcgaccccgcgccacctccgcctgcctcccccggcaccgatcgggtttgatcgatggcgtcgaagaggatcctgaaggagttgaaggacctgcagaaggacccgcccacctcctgcagcgcaggtcctgttggtgaggacatgttccattggcaagcgaccatcatggggccttcggacagcccatttgcaggtggggtattcttggtgaacattcacttcccaccggattaccctttcaagccaccaaaggtgtctttccgcaccaaggttttccacccgaacatcaacagcaacggcagcatttgccttgacattcttaaggaacagtggagtcctgctttaactatctcaaaggttctcctgtcaatctgctcactgctcacggacccaaaccctgatgatcctcttgtccctgagattgctcacatgtacaagaccgacagggccaagtatgagtccaccgcacgctcctggacacagaagtatgccatgggctagaagcaaggctaaaagctggccaaactggtgaatgtgccggaccccaaatcgttatcacctaaataaccagtcaagtcgcaagtatgaatggacttttgaggaccattgtgccctgttgaactcatgtattaccttgtgaagtccgttgtgtctggtttctacctgaccgtttcgttatctgatgctgtttctttaataaaaaaaaaaaaaaaggtctgatgctgcttcattaaccatacttctatatggtttgtggtgttgctgtttgtttaatctgtcagctgcttgacgtttcactgaaagaaagacgttccagtgagcgcagaaaaagttggtgattcggtgagaaacgttacaaccttnnaaaaaaaaaaaaaaaaaaaaaaaaaaaaaaaccaaaaaaaaaaaaaaaaaaaaaaaaaaaaagactctgcgttgttaccactgct

SEQ ID NO: 150359 - DNA, 744 bp, Zea mays
  Clone ID: MRT4577_68654C.1
gccggccggccggcccggggaacgaccgacaacccacgacccaacgaagttccccccatcagctacttcgacaaccgcaaacatggctgacgctgactacgatcccgaggccgcagctgccctcaaggccaagagggcgttccgcaagttctcctaccgcggtgtcgaccttgaccagctcctcgacctcggctctgaggagctccgtgacctcgtccacgcccgcgcccgccgcaggttcaaccgcggtctcaagcgcaagcccatgggtctcatcaagaagcttaggaagtccaagcaggaggcccgccccaacgagaagcccgacctcgtcaagacccacctccgtgacatgatcgttgtccccgagatgattggcagcgttatcggtgtctactccggaaaggagttcaaccaggtcgaaatcaagcccgagatggtcggccactacctcgcagagttctccatttcatacaggccagtcaagcacggaaggcccggtattggtgccactcactcttcccgtttcattcctctcaagtaaacgactgggttatggttgcatgggttctttagtggggcggacaatgtacatgacgacctacaacgaatacaggtgttaggtgcatttactctcgataactatgacgtacacaaaaagacgacggcgagcatgaggatatggtgtagattaccatccatcagattcgagatacctccaaaaaaaaaaaaaaaaaagcggcc

SEQ ID NO: 150360 - DNA, 783 bp, Zea mays
  unsure (1)..(783): unsure at all n locations
  Clone ID: MRT4577_68655C.1
ccggccgggactgagtcgcacccccgtcgtggaaagggaacaacatcgcccccaacaccgagagagatagggggatctgccgcacgagcatcctgcagggatcaccgctctgggctggacagatggtcaaggcaagtctccagagcacgtacgttcgtgacctcatatggtgaggttggtggatgggagcatggttgtttctcaccgaagtttccctccgccaaggaaagccccctgccgcgggccggcgttgctgcttcaccactgtcggtgatggtgtcagagttggcgtgggtggagaggtaggactcccaccaagattgagctgctcccctcaacaaacggggaccatacagaactttctctctgtcatcacactgagcggtgtgcaactcccgctccacggtacgcagccaatcttcagcatccatggggtcagcagagtgagcgaacactaggggatgacctctcatgaattcaacacacttgtccctaggcatctgaggctgaggtgnnggctattgctgctgctgcatagcggctagagtctgaccaatagcttggactgtctgagtctgcatcaagaacatctgctctnatcgtcatcgagggcggtggtggcaactggctgctganggtgctcatctttgcgntgctggnctgctcctggtgagcacaccttcctcatctgctcctattgtctgacatctgcagaatgcnatcacacatcaaaactgatctttgcaaacttgcacataagaaaagagtattagattcctccgc

SEQ ID NO: 150361 - DNA, 447 bp, Zea mays
  Clone ID: MRT4577_68656C.1
cacccgaggccggccgggatccttcaaccgaagcctcacaacgcccgtcgcagacgtccaccaccgactcctagccgtgttccagacgcccaattgcgcaattcagtcaaaatggccttcgccaacaccctctacaggagcctgttctccaccaactacctgatgctcgcgaccgttttctctgccggcttcgcttgggagattggcttcaacaacgtcatggacaaggtctgggataaccacaaccgaggccgacaatggaaggacattcgacacaagttcatcgagggtggcgatgaggacgaggaataaagaggttgaccgggaaattgattatcgagcaacaaacgaggcgagggactgaatccatgtcactagccgtgtacaaattagaagagaattagaggcaggatttcacacaaaaaaaaaaaaaaaaaacccgcggcc

SEQ ID NO: 150362 - DNA, 569 bp, Zea mays
  Clone ID: MRT4577_68657C.1
aaagaaaaaaaaaacgggaagggggggaaaaaaaacaagggggccatttttaacggaaaacacaaagcccggtccaaaaaaccctttttggaaaatttaaggggaacccccccaacccttaggatcaaaaaaaaaaatttgggacagggggggggaaaaaaaaagtacccaacccgggaaaaccaaaaaaaacagggcccaaggaaaaaaacccaatttttactttcccaggaaaacctaggggcccaagttaaagggttttataaccccaaagaattttggggctaaaccctttttttttaaaacaggcttaaaataaatgggcggggggaaaaaggatttgataaatgggggggacaacggttatgttttgcgcccaaaggggctgggccaaaaagcccctaaggagcgggcccgaaaacaattgggggcttggaaggttaatgccaaaacgggggggggccccggggttgccgttgtccccgcccggggggctcccaaagaaaaacaacggggtttgttgggggtttcctccggccccgggggggaggccaagcgtaaggaacccc

SEQ ID NO: 150363 - DNA, 277 bp, Zea mays
  Clone ID: MRT4577_68658C.1
tggaaatctacatgattttatagttttgaattctcatcttttttttaaagtatgctcacttctgttaatcatttttcttatagctttggggtagcttccaagatgagaacgggaaaatgctgaatttacaccacaatgttcaaaccagaatttccctctaggtttttgataacgttttctaattacataggtacctacaagaacaccacaccttttctcccactactctactaccctcttcaggcaagacagcaaaagaaacattttacattaccac

SEQ ID NO: 150364 - DNA, 379 bp, Zea mays
  Clone ID: MRT4577_68659C.1
agagagagagagagagatagagagagagagagagataggcccggagtgtcaaggccgccgcgccggtgagccgacccccagccatggcattgccggctccccccatccgcctggcgctgctgcttctcgtcgcgctgccattctgcgccgcgcatcccgggccgggggccttcaatgctcctcgccacttccagaggcccgcgctccactctggttcgtgcagccccacttctcgcgtttcctgttcacatattactctctgtttttttctctctggtgcatagtatatatatacgtcgatgagaagcaggaaaaaatctcgcctcttcttgacccatccagtgcggtgatttctgttcgtctgcgtgtgcctctctcg

SEQ ID NO: 150365 - DNA, 1718 bp, Zea mays
  Clone ID: MRT4577_6865C.1
tcaggaggcgaggtccagacactgataccccttgtggtcagaggagtagacaaggaagaggcagcgggtggagcgaggagaaagcttatgaggggcagtagcggaagtgttagggtagcaggcacagccgaacacgcgaaggtggtcgtaggtgggggttgtgccgtatagggcgaagtagggagtagggtgtctcaccgccttggagggaagacggttgagaaggtgtgtggccatgtgcagggcctctgcccagtagctagcagggagagacgccgggcggtgaaactgggtggagacccaagcgaagaagtgtgtgagggtggtgaacgtgtcggacttcaatcgaagaggaaaagtccaaagaaaatggaaaaaatcatccaaaatcaccaaatagtatttataatcagaaatactgagtataggagaggtccagagatcacaatgaaccaggtcaaaagcttgctcagcccgagaagaagaggtggtgaatgggagacgagtatgccggcctaactgacaagcatgacataggccctcaaaatgtcccctactacatgaaagatctaggctactggtaatcttggtcataatgtcaggtccgggatgtccgagacgacgatgccaagtggtggagaccagggcaggaggcggagacgcgccggaggtggatggccagagcgtgtagaggggcctcgagctgtcacagcgggcgaggggagtcctggtggccaaatccttcacagagaaaccagaggggtcaaactcaatggaacatgagttgtcagtggtgaaacgacgaacagaaagaagattatgagtgatgtggtgggctacgagaacgtcgttgaggtagaacggtccagggagaaccgaggcacctactgaggtgacaggcagagtggaaccgttttcgacgacgatcgatgaaggatgagaggaatggggggatgggagcgagagagcgttcctgtagtgggagtggtgtggtaggaggcaccagagtcgatcacccagtcggaggaaggaggggtcatcgccatggtgctgaaagcgacggcgagagaggcgttgtcccagcctctagacagcggggaccaagtcatcgtgggggtccccaaggacaggaggtggggcggagccggatgcgatgtaggcacaccgtagggaggcgtgggaggcacgccgtagggtggcgtagttaggagggccgacaccgggggacgggaggtacgcggggcctggcccggccatatggcgatggtcccgatccaggggttatagaatgacggccacacctggccgccaccccggtcggggggaccaccatgagaggacccgccaccgccacggccgcccttgcgggaacgacgacctccgtcggcgatggacaccggacgaggggccgcaggaacagcaggtgtggggcatataggggccccagtcaatggagggcgaggggcctggccccctaaaggtgcctggccaccgagaggagcgccgtagagtgttggagccagagcaggggcctcagacgccatggtgagctcctcgaggagaagctcgttcctgacggcatggaatgtgggaaagggaatgttcctcttgatgagagccttcaggtggccatagcaggggctgaggccacgcagaaggttcaacaccaaggttcggtcggcgataggctcactgagatcgcagagagagtccgccat

SEQ ID NO: 150366 - DNA, 261 bp, Zea mays
  Clone ID: MRT4577_68660C.1
gactgaacctgacactccatttgtagtaatgagacaaacaacacaacgctgagaggcgcatcgaatatacgacgctattacacatactcattcactgtaataaactgctgggtcgtgcaggtgacaatacgagtctatctttaccttcatgagaaaatacctgggaccacaggattcggacctcacgctagcgggaccatgacccgctgacttaccacttggccacgccccatgtacccgcctacctgcccgggcggtcgc

SEQ ID NO: 150367 - DNA, 2296 bp, Zea mays
  Clone ID: MRT4577_68661C.1
tgacctgttccatcccgccagcccttccgctcccacgacccaaccccactgcccggagcccccgagccttctcgaatcttgcgagaaccccaggggcgaggagcagatgtcggcgaggctacgggtggcggacgtccgcgcggagcttcagcgccgcggcctcgatgtatccggcaccaagcctgctctcgtgcggaggctggacgccgcaatttgcgaggcggagaaggccgtggtggctgctgcgccaaccagtgtggcaaatgggtatgacgtagccgtagatggcaaaaggaactgcgggaataataagaggaaaaggtccggggatgggggtgaagagggaaacggcgatacgtgtacagatgtgacaaaactagagggcatgagctatcgtgagctgcagggattggccaaggcacgtggagttgcggcaaatgggggcaagaaagatgttatccagaggttgctctcggcgactgctggtcctgctgcagttgcagatggtggtcctctgggcgccaaggaagtcataaaaggtggtgatgaggaggttccggtgaaaaaggagaagatggttactgccacgaagaagggagctgcagtgctggatcagcacattcccgatcacataaaagtgaactatcatgtcttgcaagtgggcgatgaaatctatgatgccaccttgaaccagactaatgttggagacaacaacaataagttctatatcattcaagttttagaatctgatgctggtggaagctttatggtttacaatagatggggaagagttggggtacgaggtcaagataaactacatggtcccttcccaacacgagaccaagcaatatatgaatttgaggggaagttccacaacaaaaccaataatcattggtctgatcgcaagaacttcaaatgttatgcaaagaaatacacttggcttgaaatggattatggtgaaactgagaaagaaatagagaaaggttccattactgatcagataaaagagacaaaacttgaaactagaattgcgcagttcatatccctgatctgcaatattagcatgatgaagcaaagaatggtggaaataggttataatgctgaaaagcttccccttggaaagctaaggaaagctacaatacttaagggttatcatgttttgaaaaggatatccgatgttatttcaaaggcggacaggagacatcttgagcaattgactggggaattctacaccgtgattcctcatgactttggtttcagaaagatgcgtgaatttattatcgatactcctcagaaactaaaagctaagctggagatggttgaagcccttggtgagattgaaattgcaactaaacttttggaggatgattcaagtgaccaggatgatccgttgtatgctcgatacaagcaacttcattgtgatttcacacctcttgaagctgattcagatgagtactctatgataaaatcatatttgagaaatacacatggaaaaacacactctggttatacggtggacatagtgcaaatatttaaggtttcaaggcatggtgaaacagagcgatttcaaaaatttgctagtacaagaaataggatgcttttgtggcatggttctcggttgagcaactgggctgggatcctttctcagggtctgcgaatcgctcctcctgaagcacctgttactggttacatgtttggcaagggtgtttactttgctgacatgttttcaaagagtgcaaactattgctacgcctctgaagcatgtagatctggagtactgcttttatgtgaggttgcattgggcgatatgaatgagctactgaatgcagattacgatgctaataacctgcccaaaggaaaattaagtaccaagggagttggtcaaacagcacctaacatggtcgagtctaaggtcgctgacgatggtgttgttgttccccttggcgaacccaaacaggaaccttccaaaaggggtggcttgctttataatgagtacatagtgtacaacgtagaccagataagaatgcggtatgtcttacatgttaacttcaatttcaagagacggtagatgttgcaaagagctgaaactgttgctgagatcttagcagaacatatgtggacttatagcaccaggtgccctcagcctcattttctgagcaaatttggtagcctttgcatttcgattttggtttcaggcttctagccccattgatgattgatactgagtgtatatatgaaccattgatatccaccttccatgtacttaagtttttttaacatgtcccatgcataataa

SEQ ID NO: 150368 - DNA, 685 bp, Zea mays
  unsure (1)..(685): unsure at all n locations
  Clone ID: MRT4577_68662C.1
ggccgggtaccggtttccgcacccctcccgaggtaacatcgcaaggtccgtcccggtcccgctcagatccctctcgttcgcatcgagccatctgccctcgacctcgtcttctacaaatacccacatctgctcttggtgaagcgtatggcactctgcacgaatcaagcgtgcatgtgtcatcttcaccttcagaatgcaactgcgtaccatccattcagtgaaggcaacgctggaaatgctcgtgtacgacgctaggcttaatgactacgttcgcgtgcatatccagcaacgaaaaggtcccaagagcctgactaccctccaggcacataacaacgagtgcagctactgcagagatcctcaaagatatcaagaaagaggtctgctgcaatgcgacagtgaccccgaacacataacttgcacaggttattcagctccagggtgatcacaggaagaacggctcgagattcatccccccatccggcatagcgaaaaacgagcacatcaagattcatgcgttctgaacaaccggcggntccataacaaaccaaccctgcgtgcacagccagctcattatatatagtatcagaggtggagcatatctatctggctgtgcactacgagcagtgctactactgcggctgcacgtacctcctatacgcataacacatatagccacgtcactgca

SEQ ID NO: 150369 - DNA, 401 bp, Zea mays
  Clone ID: MRT4577_68663C.1
atccagccagccagcctgtgctctgattccgattccgattgattcgcgtcagccagagccagaggaggcgagaggaggagctgtcctcgaattggcaacgcgccgtcctctctctctctctcgcctccgctccatcctccatgattgcgaggatcgaacgagatccgcgcgcgacagaatcgatcagggagcaaggacgaccgcccgcgccgcggttggttcgttctctgccggcggtgggacgacgcgacgggcagccgcccaggtggtgctctggtctgctctgctccggtggtgccggcgcgaccagagtttgctccatgtatgtacttggtgcttcaaatttcttccaacgaaatcattggttcaaacctcgaattaaccatagcgtttttctctca

SEQ ID NO: 150370 - DNA, 432 bp, Zea mays
  Clone ID: MRT4577_68664C.1
tttctttttttttttttttttttcatcaaacaaaaagggtgaggactcttggtgtttaataaaatgattgattctataataatcctccccaaattattcttctaggtttaatttaaaaagacaaaagaatgcctttttttttttctgtggtgcatacccaatttcaggtcttctgtgctacccatgcttaaaaaataataaggggaccgaagatatcagaaaaatgtgtttcccccccatcccccggggataaagtttgtcgctatgttgtccctggcccaactggtccctttggatacgcacggggatttccggggcggtttcctttttcacccactataatggatgggtggtttcaccctcttttccccaatttgactattttgttgaggagacaactagcgtccaaaaaagcggggaggccctggaaat

SEQ ID NO: 150371 - DNA, 342 bp, Zea mays
  Clone ID: MRT4577_68665C.1
gcgcaaatccataccataaccttgatagtgggttcaaacatgaaaagactatgctacgaaggcaatggctaaaaaaaaagaactagcaggcttacagtgcacacaatggtttcttgacgggaagactttattaaacaccgatcgaaaaaattctattaaccttcaatacagactggctgacaaaccataacaaacatttaaattggaactgaatgcacgttgattgtgggaatccattccccttggggaaattataaaactaagtggagccactgctcgagatcatggacttgcaccacgcgtttgcggaaggcttgattttggtagcccacttcgaggaaa

SEQ ID NO: 150372 - DNA, 549 bp, Zea mays
  Clone ID: MRT4577_68666C.1
gcggcctctcagatctgacccatttacacggatcgcgtgcgccgttgtcgcggatctgcgtgctaggggcatcaggttccgtggatctagtcgcggtggctttgtttctagagttattggtaatcatctgcacactgcgagtggatccataggctgaaccctatgctttcgttcacatctgagcagagatggggctcacgttcacaaagctgttcatgcggctattcacacagaaggatatgaggattctcatggtcggtctcgatgacattggtaagaccactatcctatacaagctaaagctcggggagatcgagaccaccattcacaccattggatttaacggtgaaactgacgagtacaagaacattagtttcactgtttgggatgacggaggtcaggacaagatcccgcccctgtagaggcactacttccagaacacccagggcctcatttgtgttgtatacagctacgacagagagcgtgttggtgacgacagagatgatctacaccgtatgctgaatgatgacgaactccgtgatgctgagc

SEQ ID NO: 150373 - DNA, 582 bp, Zea mays
  Clone ID: MRT4577_68667C.1
gcactctactgttcataccgtggcaccggcctcggcacctcaggacgcccgagagacccgacgactgctgaggaatgactaacaagggcaacggaaggcaacggcccatgcatccagctaatgatgaccactactcatcgccatactagcaccgacgctatgcgacagaactcggggaaaggcgtcctatcgatcatgcgccgtccacatccagaggtgggctgctagagaccacccaccagactactggtcgtgacctgggcgagcgtgagacgatgagcaccaagcgccaaacggcaataggatgaacacggtccttagagcccaagccgtggcgacaaacacaaagctaccatcgacgccacagacagtatgatgggccaccacatactggtgcctagcaacctctatctgacaaagagcgaaggtgtcgctaagaagcactagttgcctgtgctgcaccataacatgaaacacatgtaaccaaaggggagtaaggaacacagaaacgtccttgagttcaatacgaaagcaggagacaacaagtagctgaagagttcaaacaggaaagactcccatgag

SEQ ID NO: 150374 - DNA, 222 bp, Zea mays
  unsure (1)..(222): unsure at all n locations
  Clone ID: MRT4577_68668C.1
aaaaggaaggagcccgcaccacacacacccaaaaaacagaacacgccacaccccgggggggccaagaaaaaaaacagagccacagacgggcgaaaccaacacagggcacaacagccggacacaggaaacaacacggggaaccaaacaacaaaaaaccacaaaaccgaacagacccaaccccncaagggacacaggaagcccgcccggaaggcncgggcaccc

SEQ ID NO: 150375 - DNA, 477 bp, Zea mays
  Clone ID: MRT4577_68669C.1
ggggtacaaaaaatagagacaggccggggtttaacatttagggatggaacatacaacgggaccgttcccagtcttgacagaaaaaaaaaggttcaactgtacaccctaacagctgctaacagcgggagggaggaatggctaccagaacccaatcgtctcctctactttttaaagagcgtgaactgaaggctttttttataccggtttagaagtgaacctacagggcagagggctgaattgacaattttcaatgcttcaggctccatatgggagactgtgcacagtttggaaccttctgggaggagacaatcacttgagctaaccctaaaaaacctttttaattaattgcatgccgtgaaccaacgcaccggtgcaatgtgctacagcttacctgattgctgtggtctaaacatctgctccagatgtgcaatattgaaacgccacaactgaacttggactttttgggtttggatgagt

SEQ ID NO: 150376 - DNA, 776 bp, Zea mays
  unsure (1)..(776): unsure at all n locations
  Clone ID: MRT4577_6866C.1
aattcggcacgaggcttgcctttgacgatgaagaaaccttgcagtgtgctgcacaagcatgaaattgtctaagataaatcttttcttaatgaacgttgtttgattcggagaaaccatatcattcaaatgccgagccaatctgttggccatcatctttgttactaactttgcaaaactatggacaaggctgattggacgaaaatctttcacttgggctgcaccctcaaccttaggcaaaagagtgataaacgctgaattgagcagccccatgtttctaaattttcgagcccaaacacaagagatcgctgccataacatcatctttgattgttacccaacaaaccttgtagaaacgaccggtgaaaccatccgggcccggagctttatccgacggcatagattttacagtaccccaaacttcttcctctgagaaaggcacatctagctcattgagattgaaagaaggcatcccaagggcatcaagattaagagaattttctctccccaaagcagtcccgagcaaggcatcatagaaatggaacaaatcatcagccttatcctcatgtgatgtcaaaataagcccttcacttgtagataatgaaccaataaaattcttcttctttcttaatctagcctgagcatggaacaggggaagtatggagcgtnccccttctttcaaccaattaattctggaccgaagacggggctatagatctcgacagggangaaagcacccagatgtgcttcttaagggtacgccttaaccaatcctcactt

SEQ ID NO: 150377 - DNA, 593 bp, Zea mays
  unsure (1)..(593): unsure at all n locations
  Clone ID: MRT4577_68670C.1
aaagcagtggtaacaacgcagagtacgcggggtgttcatgtttgatttgcttatttgaaatgattgttggtgtattgtgtgacttttgtccacaatgacatcagttagctaggtaaaaccttagatagatgagttttctctgctctctataatctgtctttgctcaaccctttcgtcccttccattcttccatacctatacagatgtcagtccttggaatgtcaactgcaagtgatgtcactaagtgcaaagaatacattgtgttggcaactcctctagctaaggatcagatggaacagttcaagaaggcgcatgctcggtttctacaagcaacatctcaagtggtagctagactccaacaagttgatttagcagaaattatagcacatgagcagactaccgataaccatatgacatcaaccacaacatcaccctcgatagttgacttagaaaagctgttacatgcacaagctcttgntatacagaatgtatcgtaactcaccttctcataccagcaagtgttggcaagacaaaacgtcactagaaatgaaacaactgatgaacaaagggtgcacaccaacagacaaatgatc

SEQ ID NO: 150378 - DNA, 488 bp, Zea mays
  Clone ID: MRT4577_68671C.1
ggcgggccaccctggaaaaagaggatcgatccatcagctagctatccattggacgcagtccgtgagtgaaaatgagccatagccatagcactaagacatcgtggccggaggtggaggggatgcctgctgaggtggcgaagcgcaagatccaggaggaccgcccggacatccaggtgatccttgtgcctgtcgactccgccgtgaccgatgacttcaacaccaagcgcgtccgcgtcttcttcgacaaggccggcaacgtggcacaagtccccaagatcggctagggcaaatagtgtcgttacttcagttctatccagtcgaagctcatcttagttgtatgcggtgttatatacagtattatgcactcgtattttaactttcaaaaaaaagctttacgaccatattattcaaaaacggccgagttatatataacccgtatatatttgggagtacttctatcagaaaaaaaaaaaaaaaaaaggccccta

SEQ ID NO: 150379 - DNA, 782 bp, Zea mays
  Clone ID: MRT4577_68672C.1
tttccagatatcaagattgtctcttgaagcaaaggatctcatttgtcggttattatgtgatgttgatcacagaattggcagcggaggagcagatcaaataaaagctcatccttggtttcgaggagttgaatgggacaagctgtatgagatggaggcagcatttaagcccctagttaatgatgaactggatacacagaatttcatgaagtttccagatttaaaccctgctccagcaagagcaagttctggggcttcaaggaagatgatgcttaattctaaagatcttagctttgtggggtatacatacaagaattttgaggccgtgaaaggtttgcatcagtttgcagatcttcagagaagttcctcatttacaaggcactctgctggctccccatctgatacagcagacatggacgcctcgatggaagctaacgggaccgacacacacatgcgcactggttcagctggcgaccctatggcgccataatctgccctgttgttttcgtgaagtaccctgccctacaccggcatcatgcatgcacctcgacaacatggctacatctgaagagacctggttgtggacttgcatttattcaggtctggtgcccttctactatttggcgagcatcttcgtagttgtacaaaccagaggtatttgtgtagtatgtttcaggtgagacaagttgggcaggtctggccctgggtatatacttcttgacgctggttgcccagttggcatagtattagggtcgtcgccttccttgtggcagctctttgcccgt

SEQ ID NO: 150380 - DNA, 376 bp, Zea mays
  Clone ID: MRT4577_68673C.1
atgaaattgtcagattttggattgtgtaagccaattgattgttcgaagttgtcaacactgaatgaaaatgaaccaatgactgatgaaaaccttagggagtctatggacatcgatcattctctctctgatactgcaaatggtaggaggtggagaagtccaaatgaacagcttcagcattggcagaacaacaggagaaaattggcattttcaacagtcgggacacctgattatattgctccagaggttctactaaagaagggatatggactagagtgtgactggtggactcttggtgcaatcatgtatgaaatgcttgctggttatccaccattttattcagatgatccactagttacatgccaaaagattgtgcatt

SEQ ID NO: 150381 - DNA, 1756 bp, Zea mays
  Clone ID: MRT4577_68674C.1
ctggtagacaagaatggtcatatgaaattgtcagattttggattgtgtaagccaatgattgttcgaagttgtcaacgctgaatgaaaatgaaccaatgactgatgaaaaccttagggagtctatggacatcgatcattctctctctgatactgcaaatggtagcttgcctgcgatttggttagtgcttgagcggcctgcgatttagctagctaaatctcacgtgagggcgactgatcgaggtgtccgacctgcaaccaggcgattggaggcgcttgattttggaacaacagctagcttcttcacaagttccgagggaggagcagataaacttaataaaggatttggagagaaaggagactgaatacatgagacttaaaagacacagaatttgtgtggatgactttgatctgctcactatcattggaaaaggtgcttatggacaggttcaactatgtcgggaaaaatccactggtaacatttatgccatgaaaaagctgaagaaaactgatatgcttgtgaggggtcagtttaaaagtctgcgccaagtcaaaatttgccttataaaaggggcagaggaagcactagaggtggagaagtccaaatgaacagcttcagcattggcagaacaacaggagaaaattggcattttcaacagtcgggacacctgattatattgctccagaggttctactaaagaagggatatggactagagtgtgactggtggtctcttggtgcaatcatgtatgaaatgcttgttggttatccaccattttattcagatgatccactagttacatgccaaaagattgtgcattggagaagctatttgaattttccagataatccaagattgtctcttgaagcaaaggatctcatttgtcggttattatgtgatgttgatcacagaattggcagcggaggagcagatcaaataaaagctcatccttggtttcgaggagttgaatgggacaagctgtatgagatggaggcagcatttaagcccctagttaatgatgaactggatacacagaatttcatgaagtttccagatttaaaccctgctccagcaagagcaagttctggggcttcaaggaagatgatgcttaattctaaagatcttagctttgtggggtatacatacaagaattttgaggccgtgaaaggtttgcatcagtttgcaggcagtagttgccataatattctgaatactgagtccttttcagatccacattttctattctctgcaatcttcagagaagttcctcatttacaaggcactctgctggctccccatctgatacagcagatatggacgcctcaatggaagctaacgggaccgacacacacatgcgcactggttcagctggcgaccctatggcgccataatctgccctgttgttttcgtgaagtaccctgccctacaccggcatcatgcatgcacctcgacaacatggctacatctgaagagacctggttgtggacttgcatttattcaggtctggtgcccttctactatttggcgagcaccttcgtagttgtacaaaccagaggtatttgtgtagtatgtttcaggtgagacaagttgggcaggtctggccctgggtatatacttcttgacgctggttgcccaggttggcatagtattaggtcgtcgccttccttgtggcagctctttgcccgtttatttaacaataatatatattatatatggtcatgaggaagaggaaatggagacataaaaacggacgcgtgg

SEQ ID NO: 150382 - DNA, 336 bp, Zea mays
  Clone ID: MRT4577_68675C.1
tttaaaatttgtgttgtttttttaaacggtttttagcccaacaaccaacttttaaaagcccacctaaattttatagaacattgaaacatcaaccttggaaacctcaacattaaatcccaacgctatcaacaaaatcagttctaacaaaatctcaaacaacctaataaaaatttttacccccctccttatactcgaaaaaataccattctcttaaaattacattcattcatatcccccctcaataatgtaatctcaaacctttaaatttatacaccaatcatacctcaactcccctaaacacccaaaaacctttaaaatcccattcttaacccctta

SEQ ID NO: 150383 - DNA, 2241 bp, Zea mays
  Clone ID: MRT4577_68676C.1
cctcgaggccggccgggatcgtctctccttaggtttcgctccccgccgccgccgccatgatgccgcagcagcagcagcccggcatggcccctcctcctccacaggccgcccccggagcgccgccacactggggcggcatcccgccgcctatggcccctcagcatcagtacgcgccaccaccgacccatcaggtcccgccccagcttcacatgtgggtccaggcgcgcggcgccctctcactgacggtcgccggatacgggcactccttaggacctcatcatctcgcgtagatgctggagggggagctgatccagatgatgatggggcaccaggtgttggagtagcagctgttttagtcccgttttgtccccacactcgtgaagggggcgacctggcggacgcgtggggagggctctgaaatactcggaggtctgcagttgatcttgagaaaggataccaacaggctcttcatataggacttgagctgcgatgcgtgtcttgtgtaatgcatgacctctgttagtaccaagtgctcagggagttcagtctgacaatgatcctaacaatacaaccatttttgttggtggtcttgaccccaatgtcactgaagatatgttgaaacaagttttcaccccttatggggacgtagtccatgttaagattcctgttggcaaaagatgtggttttgttcaatatgctaacagatcttcggcaggggcggcattggtaattctgcaaggcacccggggtggagcacaacaggtgaggcgataattagatctcaggccgcttcacatacacggtggagctgcacaatatgacgataagtggtccgaggcttatgctacaacttcaggcctagggttaggttaaattcataagccgcgctcctgcgcgacgagttcttcagacttacaacgggacaatgatgccaaatgttgagttgccattccggttgaattgggctagtgctggtgaaaaacgtgatgacacccccgactatacaatatttgttggtgatttggctgctgatgttacagactatgtattacaagagacatttagggcacattacccttctgtgaagggtgcaaaagttgtaacagacaagctgacaatgcgcacaaagggttatggttttgtgaagtttggtgatcctaatgagcaagctcgtgcaatgactgagatgaatggcatgctatgttcttctaggcctatgcgtattgggcctgctgcaaacaagaaagctactgttgttcaggagaaagtaccaagtgctcagggagttcagtctgacaatgatcctaacaatacaaccatttttgttggtggtcttgaccccaatgtcactgaagatatgttgaaacaagttttcaccccttatggggacgtagtccatgttaagattcctgttggcaaaagatgtggttttgttcaatatgctaacagatcttcggcagaggaggcattggtaattctgcaaggcaccttggttggagggcagaatgtgaggctttcatggggtcgcagcccttcaaacaaacaagttcagcctcaacaggactccaaccagtgggccggggctaatgctggatattatggctacggtcaaggctatgaggcctatgggtacccccagtctcaggaccctaatatgtataattatggagctggagcttatgctggctatccaaattaccaacaacaaccagtagcacagcaaccgccgcagcaacagtgagaggtccagtgacgctactgtcatttgggtgattgacgtggaaatatttatgagttgtaagatgagcttcggatgcaagctggattaggtatacagacatgattttcgtagtactcagattctgagttgccctcgtatcagagcttgtggtcccaatagcctgcagctgcagctaaaacgatctattttggtagcggaatgttttatctgcttattttgtaccgtgtcttccgctactgcggagccttgataacttgctatgttggatttttcccgagtgttatcgcatgaatgttgtcatttgccttggtgccctgttggtgttggcaaacggacgaacagaacctgcagttcaaacagcccctgagaaaaaaaaaaaaaaaaaaaaaaaaagatccgtttcaaatgcatgctttgattgtacggagagtgggttgtttggcatatagctccgctccataattctctaatagagtgatttcgagtgattctctagtaac

SEQ ID NO: 150384 - DNA, 405 bp, Zea mays
  Clone ID: MRT4577_68677C.1
cacccacttttgtatgcatcatcatcagcagctgctggcagcccagggctcacatactcccatggccactgatgatggcgcagaacactgccggccatgggtggactctaccagtaccagtaccagctgcccagctaccgcaccaacccctgtggcgtctccgctgccattccgccctactactgattcatgatatttgggaaatctcctctatgcatccctgcctatctatatctgctataacgcagtctgacgacacacattctcgtgcgtggtgtgacccaccatctttgcgtccttgtaataggtaccctgtgctgccagcatctgctgtttctgctgaatcaaagggggggggccctgggcgcggcccccctggggggatttgcgggtttcccctccccg

SEQ ID NO: 150385 - DNA, 433 bp, Zea mays
  Clone ID: MRT4577_68678C.1
ggccccaccaggtgccagggggccagatattgataagataagatctgtttacattgggggaagcgtcccgtgcaagcaacttaagatgggtaaccaaattaaaacgaggggggagcttgccatttttctgatttttggctgaattctcctctcccttcccgggcaaggcaagcagcgtcccgtcggttcggccagtggccctcggggacgagccgatggagattcccccgcttgaagatcgacgccgagacgttgcattttctgcgcaacctgctggcgttgtggcgctggaacaaaacaacctggcggaggcgggcagccatggtcgccgtctgcgtcctctcattcatgtccgccacgcctgcgcaccgcgtcgtcgacatctttgccttaatttaccaccgggcggtttcaactttaccggccttgtaca

SEQ ID NO: 150386 - DNA, 1404 bp, Zea mays
  Clone ID: MRT4577_68679C.1
tagtcggcacgaggcttctccaccgctcttgctcgtccaaccttctccatcgtctcaccttaggtttcgctccccgccgccgccgccatgatgccgcagcagcagcagcccggcatggcccctcctcctccacaggccgcccccggagcgccgccacactggggcggcatcccgccgcctatggcccctcagcatcagtacgcgccaccaccgacccatcaggccccgcccccgccgcagatgtggggccaggcgcccccgcccccgcccccgcctcaggccgcgtacggtcaggcgcccccgccgccccaggccgcgtatggccaggcgctcccaccaccccaggccgcgtacggccaggcgcctcccccgccacaggccgcctactacggggcggtacccgcgcccgcggcggtggccgcggcacctgtcgggcccagcgaggtcaggacgctctggatcggggatctgcagtactggatggacgataactacatctacgggtgcttcgcatccacgggggaggtgcaaaatgtgaagctaattcgtgacaagcatactggacaacttcagggctatggttttattgaattcataagccgcgctgctgctgaaagagttcttcagacttacaacgggacaatgatgccaaatgttgagttgccattccggttgaattgggctagtgctggggaaaaacgtgatgacacccccgactatacaatatttgttggtgatttggctgctgatgttacagactatgtattacaagagacatttagggcacattacccttctgtgaagggtgcaaaagttgtaacagacaagctgacaatgcgcacaaagggttatggttttgtgaagtttggtgatcctaatgagcaagctcgtgcaatgactgagatgaatggcatgctatgttcttctaggcctatgcgtattgggcctgctgcaaacaagaaagctactgttgttcaggagaaaggagggttctggaatactcgtaaaactgctgttgtcttgatgttaaataccaacaggctcttcgtataggacttgagctgcgatgcgtgtcttttgtaatacattcccttatttcctggtttgttggttaaacttgaattcaacacgtttactcatgtatcacttctgttatatgcatttagatcttcggcagaggaggcattggtaattctgcaaggcaccttggttggagggcagaatgtgaggctttcatggggtcgcagcccttcaaacaaacaagttcagcctcaacaggactccaaccagtgggccggggctaatgctggatattatggctacggtcaaggctatgaggcctatgggtacccccagtctcaggaccctaatatgtataattatggagctggagcttatgctggc

SEQ ID NO: 150387 - DNA, 431 bp, Zea mays
  Clone ID: MRT4577_6867C.1
gccggccgggtcgggtaatctacatgcaccatcctccttaagatgtatgtgtggacaagacagattgacagattctgcaaatacgacatcctcgcaacatctgtgtgatcgtcgtctcgtcaattactgctccctcaggctgctcactaatgtgctgcttggcgactgaggaatccatgaggttgcatccttttgtctagacgtccatttgtattgctgaagcgcaaaacattttcatgcctgtactgcatctccatcatgaatatatacattcgaacctctctcttttttatgtggctccacaatatttttggagatataaaacgcgcgacgaaccatgacatgaccacagtcgtgcctccttggagaaatcatttggatgtaaacagtctctatcttatatacatactgctcgtcgacgcaatgaactg

SEQ ID NO: 150388 - DNA, 542 bp, Zea mays
  Clone ID: MRT4577_68680C.1
ttttttttttttttttgataaaacataacacattgcaattttcttaagtacttaagttctattattacagaacaacatgtctcatgtctcaaattctcaaatataggaaagtaacaaaaggcattcaggctcgcatccagttcctatttcctcatttgcttaattctcgtccacaagatccatcatgctgcaaatcacccaaaccaaaagacagcttgcaattcaggctcatcaagggggagagatcaaggcagaggggttagccgttttgagaacgccaataccaccaagtgaatcaaaagaattccctcccacatcccactgtcctgtatgtatcagttcatgaccgatgcatcagtggggagcaaagaaatcaagcaataatagagtagatcgagaagtgagaacagggaagggaatgaactcaggagttggagggtcgctggatcgacatcgcgggggtgaagactcgtcactggcagtccgtgcgcaggacgaggcgtgcattaccgcacgagtttccgggaggcggcatgagggtg

SEQ ID NO: 150389 - DNA, 2604 bp, Zea mays
  Clone ID: MRT4577_68681C.1
atgtctgaggagaagaaggttgctgccgaaatgaagctgagcctttctgaagagatgcatctgggttttcttgagtcaatagcaaagacgaatacgaagaagattacaagggagattttagaaggtttatctgaagatactggtgatagtgacagttatgatgcagatagtgggggtgaagattccgaagatcggccatggcgaccaagccattcagtcttcggaaaatcaactattgggcaaagtcaccttgaaaacaagagggggagatattttcgagatatgtcttttgtgagagcagatgtcagagaaaaaactgtgccgactcccgaagatgatgaagccgttatcttccgaagctttttaaaagctgggctacgattccctataagcagatttgtggtagaagttctgaaaatatatcaggttcgacaggatattaaggatgtcatcatgtgccccatctggcagcgcttcagactccggaaaccgaaggtagaaatggatgaagtagccgaagaatgccaacgggccttcggcgtagtctgctcttttattgggacaagggatttaatacaagaacacattgccttcagagtgtggcctcttgcagataattgggaaatgccgaaagaaactgttaaagaaactaacgaaggtgggctagtcaggctgaagtatacattcaagtacggagacaagttcgttgaaccagatgatgattggttaaagagcattgagactgtaagtgatgaattgcttggggtatattcgaaggccgaagatactgcattgtcagcagccttcggaggccgaaaaaagaaaagactgaaccgagtttttgatgcaattgggttcgtgtaccctgactaccattatccagtgcgggggcagaaaaggaaaggtacggcttctgcgaaagaaactgcttcagctgctcctagcgagccagcgccgaagagaaaaagggtgaaagttctcacacaccggtcacgttacattgaactagccacagtgcctgagttcggcagtgaaacgtcttcggcccccgaaattaaggaatcaactctgctgccaggagccgaagagctggccgaagtgccaacaacaaaagaattggaggaactaaagactctgttaccagaaaccaaagagctggccgaagcgccatcgacagaaaagatggaagaagcgaaagcatcaactgagggagcgaaaatatcagaaattttaagtcctttagaagaaattgaagcagcaaaaattaaaaaggggccaacagtgaccccaaaaagaaaaagaatggttaatgtgttagatgttttggaaacaattaaacttccaagcacaaccccaaagaagactgctgaaacttctgaggcgcttgctgaagtatccgttgctaaagctctgaagcaacagactggagttgaaaccgggccttcagaaccaaccaaggtaatacctttggaagcagaagaagcaaaaattgcaaaggcaaccgaagaaatgaaagtgtcagagccaactttggtcgaagaaattgatatcgctgcccccgaagcatcttccaaaatatgcgattttatcgtgcgacatgcttcggggaaaaagttatcggaagaagaagtttttgaagctaatcactatgccaaagaattgaaatatccgaaggggacactagtgttcaatgggacgaacgaagaagatttcctataccgcctcccagacaacaaagaattatctgtctgtcgggagatggctagaagtatggggtttccgaagctcgaagctggattatgtgctataacgaaggaggatctcgcggatagtcttgcgtacaatagcctgaagggtttaattctaagcaacgcattgagagctcaaaagaatgccgaagatgagagctatgaaattgcgttcaacaacctacgatcagaagttattaaactgagaaacgaagctctggaaaaggataaaattctgcttacattggtagacaaggtaaaaaaggacgaagctgcctcaaaggcccaggccgaagcccaaaaacatgaaattaaagatcttcagaaacaactagctagagctaaagaagaacgtatacttgaagaaacaaaacgggagcttagtgatcaactggccaatcatttagagataagtgttaaggagcttcgtgcatcccagagaaaatgctatgtgaaatccatagagtgcgtcaagaagataaaatccagcttcgccagcgttggcgcattctctagtgaagagaatttctcaagaggcaatcctgaaggtccaatggaatggattagtcacgaagcagaggccttcgaggaaatcctgagtagccgcggtgacatctgcgctttttcgggtgctagagggattgctgctgttttggagaggaaaggctgcgagcacgtaaaatccttagcgcagtccgaagctaccttgtcctctgaagacattaaagacccctcacccgaagcaagcatggtcggcgggaaattcttcaccgatatctgggataacgacggccgagaattggcgcaagaaattattcaaatagtgaaaaaggcatccacgatgctagaaaagtaa

SEQ ID NO: 150390 - DNA, 542 bp, Zea mays
  unsure (1)..(542): unsure at all n locations
  Clone ID: MRT4577_68682C.1
tgcgcttctagcttgcctgcccttggcctgccngtctccgnggctggtggtgttgttctgacccngattagcgcgtgtgctgtnccctatgcncctatcctatcgtgtncggatgctgcttaaaattccctgnggagagaggttgnnntcttatnttcgaagcctcnttggtccccagcttacttctatttgtgggatgagccgttgggtgtggcactgtttgacttgttttgcnncatctcttatgagcttcggtcatatgcncctgatgtgcgaattttgacaacttactattgtggtccacgtggctctgttctggctccctctacctttgaagcttttgcataagttccaaatgttctgcgtccgcncccgcctatcttttgctcccgtgaatgggttcttgattcncgagatgacctagtgtaggatattgttgctgtgttacggcctgatcttggtgaggggtggtggccatatgtttgtttgggtccttctgatgctctgcccaactggccccttgggatgcgtggaacccacct

SEQ ID NO: 150391 - DNA, 532 bp, Zea mays
  Clone ID: MRT4577_68683C.1
ctggtccgctcccttatatttctgcatggctccagcataaggcaatgtttctgacgacgcccccaagttgatgttacaattcttcagcacaaaataccatacaggttattgcattgtttataatctacttacaagtcaatggtgacatgctagcatcatatccttccctggggatctagctcggggccaagacaaatgaggagaaaaagggctaaactaaagcagtcagccttcaattccaacagagatagtatgtaatcatattccattttaagatagaacacttctgaaaataatccaggactcggaactgatcaacttgaaagttcccagcattcacatagttgcccctgaaaatgaaagaatggaaacctaaccttccaaaggtgaacatgaatccatgtactatgtgacaatcagctgacggttgaattacatcatggttgcactgcgctgcagagttagcgcatggggaacaagcaggcccatgaaatttcatatcataaacagatagaagtaggtttgtctccaa

SEQ ID NO: 150392 - DNA, 270 bp, Zea mays
  Clone ID: MRT4577_68684C.1
ttgccctccatccgaacaacagcaggagcccgagcccgaacccgatattccgcattcctacccagcaatggtggcccttgtctaggtggacgcggtgcaagaggcgaagcggggggcgatggatgaggaggggcagcgaacgccgcagccgatggtggtcgcgcggaagcgtgccaagccacgccggatcacccaccctactgctggatgatcggcgaggcaaccgacgcgctggccgaggacggcggctcggaggaggactccatctct

SEQ ID NO: 150393 - DNA, 142 bp, Zea mays
  Clone ID: MRT4577_68685C.1
cccaccctaacttcgaattcggattcaggtcaaaccttcaccttgtgcttcgccctaaggggggggctcaaatattttgttaaacccttactttgaagacaattaccctttagggggggcgcttaaacaccaattacaattt

SEQ ID NO: 150394 - DNA, 746 bp, Zea mays
  Clone ID: MRT4577_68686C.1
aaggggttgcctttgttgcagatcggtgctcctctccaggccggccgccacagctcgccggctttcccctccctgccatcgagcaccacctgagcaaacagagcaaggaaatagtttaagaatggctgcgcggagcagttctatggttgccgaggatgactacgagacggatcagaagaagcaagctgctgcagatgttctttttcactattcacaatttgttatggtttgcattggtgaggatgttcgccctactgatctcaggttacatcttatgaaggaagtttcaggaatgtccacttctctgaaggagcctcaacaggctgctgcctcaccggcttccagtggggaaccgtcttcctctggaacgatgaaaggtgacaagaatgaaatctcctaagcttcataaattattatccaactcaggacttcttctgttccttacgcactgagaagattgtaatgttcagaacttcggatgatgaggcttacttgcaatataggaatgtaaatatgttaggaacattgttcatagctgtctgctgttctgctgctttagcttctttcgtgacagcctgcttcatgtatgaaactttgaatccatttttattcagggggcagtaacgtaaatgctgctgtattttttttaaatggcaggtgaatattgtattctgaataagtcatgtttactagatgcgttccccggcgcttcggaaattattatccaactcaggacttcttctgtt

SEQ ID NO: 150395 - DNA, 267 bp, Zea mays
  Clone ID: MRT4577_68687C.1
aaccaaaaaggttattggtcaaaaaaagaatggtgggggccagcatacaagggtaagccttgggtttacaagggtaccccaacatggggatgaattaagtaggcaccttttggcccccccctgggcatacaaattaaacccttcaaaaaggttttcccctttagccatgtacatgacgggcaaaaatttgggggaacctttcggatttattggcaaaaaaaattgccaacgggtttttttttcttaaagagaggtaaaatttttttg

SEQ ID NO: 150396 - DNA, 691 bp, Zea mays
  Clone ID: MRT4577_68688C.1
gccgttgacttcgttgcagatcggtgctcctctcaccactaggccgccacagctcgccggctttcccctccctgccatcgagcaccacctggtacgctctccgcttgatctccccttcctgctgcggagccgtgcgagcaaaccttaacgtagtccgtaggtacgccctccccttgttcttcccttcctcctgtgcgaaaccgtgcgtccaaaccctaacatactattcgtactcggacctaaatctaatgacaagtgtatatgcatgcattacgcctacagccaactaacttcgattgctctgcaaaaattatggagtgtagtgtacatgtgtatacccatgtccttcactgagtccacccctgcttgacagagcaaacagagcaaggaaatagtttaagaatggctgcgcggagcagttctatggttgccgaggatgactacgagacggatcagaagaagcaagctgctgcagatgttctttttcactattcacaatttgttatggtttgcattggtgaggatgttcgccctactgatctcaggttacatgttatgaaggaagttgcaggaatgtccacttgtctgaaggagcctgaacaggctgctggctgaccggcttgcagtggggaaccggcttactgtggaacgatgaaaggagggcaggatgatggatgaccacaggggaaat

SEQ ID NO: 150397 - DNA, 646 bp, Zea mays
  Clone ID: MRT4577_68689C.1
ccccctgggtcgacccagcgtccgcgtcgtcttggcttcatcctctcgcccgccgtctcgactgtagcaagcggggctgctgtccgccgcattcaggagccatgcgtgaggggatgagggagagggacagaggcgggagcccggatgcgtcaggtcctccgcccttccgcggcccggcgtacaagacgaagctgtgcgcgctttggaggggcaggggcggctgcccccgccccaactgcggtttcgcccacggcgaggctgagctccgaaggccgccccctcgcgcctccttccagcctcgcccacgacctgggagaagggattacagagatcatgagtttagactcaggcctgatagaagacactcaccccatgggaggtattcccctgaaagagatatcaggcgtcgttcatttcatgataagagaccaagttctgaagataggggatctagtcattcaagatcacctattaggaagagtgagagaaaacatagtaaaagtcctgatggtggagaaaccgattcatccgtaagtgttcgaagtcctgataacgaagacagaggaaaagatgaaaggtacttaagcagtgatgagaaaaatggtcatgaagatcatctgaaacaaatgcatctggacatggaaaa

SEQ ID NO: 150398 - DNA, 762 bp, Zea mays
  Clone ID: MRT4577_6868C.1
gcgaaccacagacgcacacaacaccactcaagcttgctgctgcactactgccgaatcgtacgtgagacacatggctgctccgaagggcgcgacgctggcgctggccgtgctcctggcggcgaccgtggtggctccgccggccgcggtgcgcgcggcgatgtcgtgctccacggtgtacagcacgctgatgccgtgcctgccgttcgtccagatgggcggggccatgccgccgcagccctgctgcggcggcatccgcagcctgctggcgcaggccaacaacaccccggaccgacgcaccatctgcggctgcctcaagaacgtcgccaacggcgccaacggcagcgacacctacatcaaccgcgccgccgcgctgcccagcaagtgcggcgtctccctgccatacaagatcagcaccaacgtcaactgtaacacgattaactgaggcgtcgtcctgtgcgaggaatgcatcatggctgattgagagtaataaaataatgctactggtttggtatttgaagctagatcgagtgtgggctagatcgagttgtgcctgtgtctcgagtcatttatggtgtttaggaatcgtctacacagtttgtaaccgtgtgtcgtggatgcatgttgccgcgagcagagtagccatgaactggtgtgtgccggtgtgccctgctgtgtaatttctatgtaatgtgttggtgcttcgatccagatgtatcccctcgtggtcttggaaatgttagattgttgcagtatcattaccgt

SEQ ID NO: 150399 - DNA, 392 bp, Zea mays
  Clone ID: MRT4577_68690C.1
ggggaaaaattaatttttttcccataaaaaacataaaggggccctccccttttttgctaccccctttaaaggcttaagtttgacttttgggtttatttttttgggcaattttttctaaatttttaacagaaatttgccccatttttaattcggcgggcctttttttttggcatttggggatgcccccctgttacgagttaactttgggtccaaaaaattaatgggcttttatgttttttgggggaaatgttttaaaatgggctgggtggaaaatatcaaaaaaaaattctggggcaaaaaatttcctggatgcccttggggggtcaaaaagccacggtttttaaacaaaattttttttttttggtggggcttgggaacccgtttcctttttt

SEQ ID NO: 150400 - DNA, 457 bp, Zea mays
  Clone ID: MRT4577_68691C.1
tttatgccaaatatggagcccgaagaaccagtcgggggttttgatacagttggccagctgatactgctgacacgaatgcctatgctgactgtgctaggcaaggaagagggtgcacgtgcagatgtcacagatagtatacgaatgcacttgcatgtagcataagtaggatgcacattctcactcgcaccaagagcgcactactaccgtcgtgctatgctccatgggggagctaaagaccggcctaccaggacgaaaactgtcgtgttccatgcgagctgtactgagaattatgagctggaatccagaagtcaatcagtcagaggatatgagatgatcttacgttcgataggataccacatttttaggagatcttatgctgacaatgacgcgcacgtgacgatcatatactcaacatggattatggctgtggcatggctgttaacgcgttttatttaca

SEQ ID NO: 150401 - DNA, 307 bp, Zea mays
  Clone ID: MRT4577_68692C.1
cggctcgagggcatgcgtcgaggttccttgcgcttcagtcaggcgaggtggtcctgcagaggcgcgcatggattcagccgaacacatcttgcagttctactggcatctatattagcaataagttctatgatcgattcatgttgataccatttgtatggagccggagttttcatgctacagatcaccgttgttcgaaacacaaggactactacaaaattcttggtgttcccaaggatgcatcgcaggatgacatcaagaaggcatttcattctcttgcaaaaaagtatcatccagacacaaatagagg

SEQ ID NO: 150402 - DNA, 302 bp, Zea mays
  Clone ID: MRT4577_68693C.1
ggttgggttgttttttttttttttttttttcccttccaaaccatgttggcgtccttagggatgctgggttggcctgcctttcctaaaaataaatgggccaaaaaaaatggaaatttggggccagatattccccatttttttgggaacggccatggctcaaaacaaagggggggctgtacaaaagggggcaatgctttttacaaaattgttaaaacaaaccccgaaacaaaaggtgcccaattttgggttccaagattaaaaacaacaggccctaccaaattaatgagggggaagggggggtt

SEQ ID NO: 150403 - DNA, 340 bp, Zea mays
  Clone ID: MRT4577_68694C.1
caaacaaaatgaaatactatattaagaaaactggtacatgtaagacagccatcccattcatttttgttacatgtagcacttgaatcattctaatcctacctgcctatattccttacatcaagatacattgcagggaaacaatgtgcatcactggtaggaacttcatctctgctccaaccatcagcttattcaacaagctttctggcacataaaatggaggatgataacacaagtccgaataatttagttcatctgagggggctgcatctccagaaccctcgtattcaccgtcgccagccgggacgtccagatagcgctcgcgatcgggctcggtctcagt

SEQ ID NO: 150404 - DNA, 349 bp, Zea mays
  Clone ID: MRT4577_68695C.1
gcgtgaaaatattagtacaacagcatggagcagatgcaagaatacaccagggggacagggcactacactactggaaacacaagacgcgaggaacacaacgaacgcacaggaacaggcaccacagaacactgattacgaccagtgaaacttaaaccacaggggaacacaacgacgagggcaggttgacgagggccgacaccaggtacttactaaagagggcccagttaacatggaagatgaaccgggtggcctgcagtaccagtaggacgaccgacaacaaccgaaacgcgcccgggtgcgacacaccggggcaaacctaggcggactacatcgcaacgtgggtcgaacc

SEQ ID NO: 150405 - DNA, 937 bp, Zea mays
  unsure (1)..(937): unsure at all n locations
  Clone ID: MRT4577_68696C.1
ggtaccctncgnggtctccgccgacgcgtgggcggacgcgtgggcaaaccaaacaatttcacctcacgcacgaaaccgggaagcaagcaaggtcctcccaactcccagcaacccaaggtagcgcgcggcagcagcaagcagctcgacggcgacgatggcggcaacagcggttactactccagtaggcacgggcggcgctgcggcagcgagaagccggttcgcggcggcgtgcggggcgctcagccagtacgtcaaggcggccgaatccgagaggatgcacgcgaggccgcccgcgcctctgcggccgctcccgctcatgccgggcgccgacctcgccgccagccctgccgacctagacctgcctcaggcggcgccggcgccggcgccggcgcagttgaccatcgtgtacggagggcgtgtgctggtgctcgctgacgtccccgccgacaaggcggcgggcctgcttcgcctcgccgccggcgcagcagcggaacgtgcagaaacagaggcgatcggtgccaagcgccgcgaccatgtctccggctctgcgtctgcgggcgctgacctgccagttgcgaggaaggcgtcgctgcagcggttcatggagaagcgcaaggctcgggtcgccgccgtccgcacggagccgtaccgacggccggacgtcagcgactcctgtcctgacaacctcaagcttgcgctctgattcctgttccgtgtccctacgcactttctataattttgtaggcgaggtataggattataggaagagcagcgaaacatgggtgtaccaagtgaaatccagatctgaacaaagttttctgaaaaacacagttgcacgtgctttctacggcattattttgtaaatctccagctttaaccacaacacaactgtttctcaataaaacagctttttgtagcttcaactataggtgtacat

SEQ ID NO: 150406 - DNA, 135 bp, Zea mays
  Clone ID: MRT4577_68697C.1
atatgattttgaagacaatacaaatcataagcacatgctctcatcctgttcctcaaccagccggagctcgcctgctcctgaaatctcgatcgaccatggcagtaagctacaaccagcgacgaaatggcgtccact

SEQ ID NO: 150407 - DNA, 337 bp, Zea mays
  unsure (1)..(337): unsure at all n locations
  Clone ID: MRT4577_68698C.1
tgctcgagtttnttttttttttttttttttcacnannnnncggcgggcccaatcaccagaatttttgacatagagaaagacaagaggccaagcaaggcaacacaggtttttaagccacgcaggacgctgcactaggaggacgatgggatgcatcatgatccagaacaagctcagaggaccctgagaacgccccttttttctagtgcagggccaggcccgggaacaaagatcaataccactgattgcgaacaatcccgaaaggatcagataggccatactctgcctgcgtggncctccttacgagccaggtccctnccgatatcctttncaaccacca

SEQ ID NO: 150408 - DNA, 937 bp, Zea mays
  unsure (1)..(937): unsure at all n locations
  Clone ID: MRT4577_68699C.1
tctcaaagtggggtatttgagatatggcagangcaacattgagcggactagtcgcaaggcactacgatagaccgctcaatgttgcctctgccatatctcaaagtggggtatttgactgctcctccagctaacaattccatcgcaccacacggggattgggaggtatcacagttcattttgaatcatgagggcctccagcaggctgatgcttctgaccagcctccatcgcaatcccctgggcatttggacaggggcagaaagcctgtcagaataaacgttgcagatattgtttcagtgtcagcatgtgccgatttaactttaccaagtggtgctggcctctgtatagaaactattcatggtcctacgttcttggttgcccatagttgggaggctcttgacggctggctagatgccatacgccttgtctacactatttttgcgagagggaagagcgatgtgcttgccggtattattactggttaaatggcttgctgcaggagggaagagcgatgaactagccgggtgttgttactgccactggagaggcgcgaagttttggtgattcagcgtcagccttatcagttaaatgcccccttcgatttgttagtatgcctcccatctgtgatgtcagtcttcctagatatagggtatatcaatcatatattcggttgtaactcgtactttccagtgattggcgataggtccgttttttctttgtaaaagtggccgtgttactgtattatgcattcacagcatatgtatcggacattctttaagtttgattatatttctctgtaacaatgaatcgaggcaagatgggctctggccctgctgggctccacctccaatatgtagagccgaggaacaggagggaaagaacaatgatatactccctcattccaaattataatgtgtttttgtttgcttttctaaaaaa

SEQ ID NO: 150409 - DNA, 608 bp, Zea mays
  Clone ID: MRT4577_6869C.1
tgtgcggcgctcgaggcggccgggccgggatataaaactatagttgcactggttagatgaatgtgtttaagcctcttatgcattaggttgtgggttcaaacccctacaattacatatttttaaaaaaaaaaaaaaaaaaaaaaaaaaaaaaaaaaaaaaaaaaaaaaaaaaaaaaaaaaaaaaaaaaaaaaaaaaaaaaaaaaaaaaaaaaaaaaaaaaaaaaaaaacaaaaaaacaaaaaaaaaaggaaaccgaagctcaaaaaaaacgaaaaacaaaaaggggggggaggggaaaaaaaaacggggccccccggggccccgcccccccccaaacggggggcccccccggggcgccgggtcccggaaaaaacactgcgaaaccccggcccccccgggggggggcccccccctaccccccccgggggggggccctataaacgcccgcccccggggccccttcccaaccccccggggggcggaaaaccccgggggaacgccaattgaaagccgtggggaaaacccccccttcccctccgggggaaaaaaaaaaagaacccccccaaaacccccccccccaaagcggccacccccaaaagggggaaaaaa

SEQ ID NO: 150410 - DNA, 377 bp, Zea mays
  Clone ID: MRT4577_686C.1
ctccatcaacaattcgggttcttgggtggtttttttttcttgcttgctcggtttcttgtggggcgggcccggaaccggcgaggcgggggcgcggggcaactcaaagcagctcagcgcagctcattgcagcaaaagcttcgatctttatccggcggattcctctcctcccctttcctcatctctccgtctccccgcttgctttgtgcttctttgttcagaggaggggagaggataggagacccacatccacttgcctttctcctcttttctattgcagccctcctgccaactcctcctggtgcctgggaaaaaaggagacctgttggagcaagatttgatctgctgcggctgccttcgacttgctgaaagcgcggaga

SEQ ID NO: 150411 - DNA, 519 bp, Zea mays
  unsure (1)..(519): unsure at all n locations
  Clone ID: MRT4577_68700C.1
gcgtagctcggaattcggctcgaggcatatcccatcaatatccagagagtttgagagagcgagcattgcgagagcaccatccgacatggaccgcttcatcacccagaccgaggggaggagggaccgcaagcatatcccatctgtatctagagagtttgcgggagcgagcgctgcgagagcatcgcctggcatggaacgctccatcgccaagtctgaggtgaggtgggaccgctttgtcgagactggtaagggggagatggtgcaggatccactgaccacggagactgggggcaagatggagcacgacctgctcatgtacagcccgcgcagcgccgcgagggccaccgcaaccggcatccccatcggcgaccaaggtgtggccgtgctacggnggcccctcatcgttggcgctggaccagcagggctagcatgcgcngcgatgctcaccatgggattggtgccctacgtgatccctgaacgtgacatgtgcatcgcatcaacgtggcaccaccgcacgta

SEQ ID NO: 150412 - DNA, 142 bp, Zea mays
  Clone ID: MRT4577_68701C.1
tcgtcgatcataggcagcgcagcaatgtctgcgggagtagtactcaacggccaaatgctgcctctaacctcgtcgctacccctgtccctgctgctgctcctccaactaagctgctcctgcacctcgtggggatggagcacga

SEQ ID NO: 150413 - DNA, 475 bp, Zea mays
  Clone ID: MRT4577_68702C.1
attgtttcagtgtcagcatgtgccgatttaactttaccaagtggtgctggcctctgtatagaagctattcatggtcctacgttcttggtatgtgtctgatagctcatgctacctttcgtttgttcatcttttttctatcatattttgttgtgttcaagtgggtaacatctgttctacagtatctagacataggttacactttaaaatccgcttgttcttcaatcaactgactgaacagtccaaccttctagagttaatgggcggcaaatgtgcaattctctactatagtcaagttgacgaccgctagtgaagataaatggtgtggagtaccgtaattcacccgattcctttttctctcccacaacaggttgcccatagttgggaggctcttgacggctggctagatgccatacgccttgtctacactatttttgcgagagggaagagcgatgtgcttgccggtattattactggt

SEQ ID NO: 150414 - DNA, 275 bp, Zea mays
  Clone ID: MRT4577_68703C.1
tcgggggttctcttttttggccgggaccgctggtcaagtttcggccgtccggtcaaggttcattgagcccttccccacgacggattattctttagatggaaggcaccatgggttggggcatgcaatttttataacttgctgctaccaatggggtcccttctaagggttacggcgccaagggcccatctgtgtacatttcaattgtctttcacgggcgtgcggaatcctttgaatatcgggatgcacccttagataaaaagcttgtccttaatgat

SEQ ID NO: 150415 - DNA, 218 bp, Zea mays
  Clone ID: MRT4577_68704C.1
acacttcctcccactccttttagcattacaccactaccaacatccataagctcttatgaaaaatccattactcattacccccacatctatacacacaactcaactataccacattattccatccacacacataaactcatcaaattataaatcaccttataccactactccacatctatacttactaccatactaataccaatcatcatcaacacact

SEQ ID NO: 150416 - DNA, 419 bp, Zea mays
  Clone ID: MRT4577_68705C.1
cggccggcaggccgtttgatctaagaacacatgacctgtactagcgaaacgacgaacacagtcagtgcacggctgagaccgtttcgtgcaaacaccgccaaactagggagtcctgtcgcacctccattgaccaaagcccaagaaggcagggagatgggggaaattccctcgacatgggcgcctggggcgggcctcctatggcgcaatccgctaactgctccatgtaacactccaagaagttcactgagagccctctttctgaagatggaattcagacggacctgagtgattccagctgtgccctacgcaggtggaggtcgatgcaccacctttccactattccctcgaacatctacaacggctcactgatcatcgtcggttccccatgagagtacatagcctcctggacccccgatcat

SEQ ID NO: 150417 - DNA, 222 bp, Zea mays
  Clone ID: MRT4577_68706C.1
gtggggggtgttattttttttttttttttttttttttttttttttttttttttttttttttttttttttttgctagtcgggcaaggcgtcaaaggcccccccaacccgaatttggggagtttattgggatttggggcaatgcaaaaacgcgcgcggaaagcccagagaactttagaaccacaaagtggccttaaagcgacagacttcaattacaaatgcaaa

SEQ ID NO: 150418 - DNA, 261 bp, Zea mays
  Clone ID: MRT4577_68707C.1
aggaactcctgcaataacttcatctatggaggctgccggggcaataagaacagctaccgctctgaggaggcctgcatgctccgctgcttccgccagcaggagaatcctcccctgccccttggctcaaaggtggtggttctggcggggctgttcgtgatggtgttgatcctcttcctgggagcctccatggtctacctgatccgggtggcacggaggaaccaggagcgtgccctgcgcaccgtctggagctccggagatgac

SEQ ID NO: 150419 - DNA, 187 bp, Zea mays
  Clone ID: MRT4577_68708C.1
cctgagccctagagctgagagggatcgtcatccctctggaactcgcgcgcttacgtgcgggggattaccacggttaatcagctgaggcatgccacgatcctataatatactgagaaacatgacacggcgaccctacgggcgtaacgagaatgcttccaaacttgaacacattgcgggaccttgcgcg

SEQ ID NO: 150420 - DNA, 581 bp, Zea mays
  Clone ID: MRT4577_68709C.1
gtgctgcgctcgagacagcagtgtgcaccaatctgcgtgctacgtgtagtagctatagctagagatagtgtgatcacgcagacacacacgcacacgcaaatatcttacatgcgttacgtagctgccactccgaccatgccgtcccttgtcgcggagagcgccgccgaaccgcctctggtggacagctacctggagctgctccggcgcggcggcggcggcggcggcattgcggcggcgaccgagggctgcgtgcaggagcgcgagctgcccttgatcgacctgacgtgcctgcagggcagcgcgggcgaggcggcgaggacgacgtgcgcggacgccatggcgagggcggcctcggagtggggctttttccaggtgaccgggcacggcgtgagccgggcgctgttggagcggctgcgggcggagcaggcgcggatgttccggctgccgttcgaaaccaaggccaaggccgggcttctcaacggcttctaccgatggggcgcccccacggccacgtcgctccgccacctatcgtggtcggaggcgttccacgtcccgctcgccagcatctccggaactgcctg

SEQ ID NO: 150421 - DNA, 868 bp, Zea mays
  Clone ID: MRT4577_6870C.1
gggtaccctcgggtttggccgggacaacaccagaatccgcgaatcacagacgcgcctatctcagcttgctgcactgccctgccatcatatcaatatcatatcgtacgtgagcccggccgagagcgagggagaggcatggctgctccgaagctcgcgacgctggcgctggccgtgctcctggcggcgaccgtggtggctcccccggccgcggtgcgcgcggcgatgtcgtgctccaccgtgtacagcacgctgatgccgtgcctgccgttcgtccagatgggcggggccatgccgccccagccgtgctgcggcggcatccgcagcctgctgcagcaggccaacaacacccccgaccgccgcaccatctgcggctgcctcaagaacgtcgccaacggcgccaacgggagcggcacctacatcagccgcgccgccgcgctgcccagcaagtgcggcgtcgccctgccgtacaagatcagcaccaacgttaactgcaacacgattaattaaatgaggcgtcctgtgcgcgtccgggcgaggaatgcatgcatggcggagagtaataaagtaatgctactggtattttaagctagatcgaggtgtgcctgtctctagtcatttatggtgtttagcaatcgtctacacagttcgtaaacggtgtatcgtggatgcatgttgccgccgagcagagtacgtaggcatgaaccgatgtgtgcgcttctgtctgtgtactctctctatgtagtaatgtgtggccagtgggtgctttgatccagatgtattcgctcgtgagtggtgagtcgtggaagttgatcgtttcagtatcattaccgtgtattctttcttttacatgcgatctgaaaagggactg

SEQ ID NO: 150422 - DNA, 166 bp, Zea mays
  Clone ID: MRT4577_68710C.1
cgtgaagatgtattgtgaacccgtttttattatggacaattccgatggcccctacgtagggaatgaaccgaacctccaatcgtctattgatgatgctgaacatacagagaaacggtgtcacacaaaacagcacattccatttctttgtacggcttgtttatcaaat

SEQ ID NO: 150423 - DNA, 280 bp, Zea mays
  Clone ID: MRT4577_68711C.1
cagaaactaatctcattacactctacttattattcgaccttatgctttactacgccagatactaacatgtatcagacagcctatcaacatctctactaaattactggtcccttcgatcgagctctaacaataatttcttcataacatatccatcctacaatcaaacattcagctccacacgacacaagtacaatcatagcctcagtaaatacaattaaacacaaggagggcatatagacccatctatatacaatcttacgtactcaattaccttcaaaat

SEQ ID NO: 150424 - DNA, 147 bp, Zea mays
  Clone ID: MRT4577_68712C.1
ctgaggagccggtccaccactctcggtgcggaggcggagtctgtagcctgctgtacgtgtacggagggggtatacgtagcgtgcacgctcgccttaacattcagaatgcagacacctgcagcatacacacacgcacgcacacacaac

SEQ ID NO: 150425 - DNA, 761 bp, Zea mays
  Clone ID: MRT4577_68713C.1
gccaagtacctgggccccgtctccgcccagacgccctcgtacctcacgggcgagttccccggcgactacggctgggacaccgcggggctgtccgcggacccggaggcgttcgccgttcgcgtcgcgcggaacaggacgctggatctggaggtgatccactggcggtgagcgatgctgagggcgctgggctgcgtcaccccggaggtgctccagagctgggtgcgcgtggacttcagggagcccgtgtggtaagttcaaggcccgcgcgcagatcttctccgagggcgggctggattacctgggcaaccccaacccggtgcacgcgcagagcatcctcgccgtgctcggctcccaggtcgtcctcatgggcctcgtcgagggcttccgcgtcaacggccacgacggcgtcggcgacggcgacggcctctaccccggcggccagtacttcgacccctcggcctcgccgacgaccccgtcaccttcgccgagctcaaggtcaaggagatcaagaacggccgcctcgtcatgttctctatgttcggcttcttcgtccaggccatcgtcaccggcaagggacccctcgagaacctgctcgacgaccccgtggccaacaacgcctgggtctacgccaccaagttcgcgccagggtcttgtgagctagcgggccacgtacggcgtgcccacattttagactagtcgtttgtgttgtgacattacatttgtacgatgaaaggatgcaaatattcttgtgcttctctcaa

SEQ ID NO: 150426 - DNA, 1265 bp, Zea mays
  Clone ID: MRT4577_68714C.1
ggccgggcccgggaattacaaaaaaaaaaaaaaaaaaaaaaaaaaaaaaaaaaaaaaaaaaaaaaaaaaaaaaaaaaaaaaaaaagcctgagcactctatccactactttactcaaagtctagagctagcttttgctttgctcaccagacaaacagcagcagatggcgtcgacgatcatggccgccacctcccgcatcgtcgcggccaagacgccgtttcttggccagggtcgcgccgccgccgccgccgccaatgccagccccctccgcgacgtcgccgccgccgctgctggcggccggatcaccatgggcaacgacctgtggtacggcccggaccgcgtcaagtacctgggccccttctccgcccagacgccctcgtacctgaccggcgagttccccggcgactacggctgggacaccgccgggctgtccgcggacccggaggcgttcgcgcggaacagggcgctggaggtgatccacgggcggtgggcgatgctgggtgcgctgggctgcatcaccccggaggtgctggagaagtgggtgcgcgtggacttcaaggagcccgtgtggttcaaggccggcgcgcagatcttctcggagggcgggctggactacctgggcaaccccaacctggtgcacgcgcagagcatcctggccgtgctcggcttccaggtcatcctcatgggcctcgtcgagggcttccgcatcaacggcctcgacggcgtcggcgagggcaacaacctctaccccggcggccagtacttcgacccgctgggcctcgccgacgaccccgtcaccttcgccgagctcaaggtcaaggagatcaagaacggccgcctcgccatgttctccatgttcggcttcttcgtccaggccatcgtcaccggcaaggggcccctcgagaacctgctcgaccacctcgacgaccccgtcgccaacaacgcctgggtctacgccaccaagttcgcaccagggtcttaagctagctaccgggccgcggcgtgccaggacattgtgttgtacactactcgtttctgtcgtgatctgtaccatgaacgaatgcaaatattcttgtgctctcccagaaggaacgaactggactagttttgctcttccattccatgtatactctgcttcagcatatatgtagttgtgtctactggtttttgcagttgttaactgatttgcgtccattaaaaaaaaaaaaaaaaaaaaaaaaaaaaaaaaaaaaagggcggccgcccttttttattttattttttatt

SEQ ID NO: 150427 - DNA, 300 bp, Zea mays
  Clone ID: MRT4577_68715C.1
tgggtttttttaaacagggtttctcatttatatgatccgtggtgcgagcttcaaatatgggccggcaatggaatattaagacttactaaagaacagccatgtggggacgaaccaagccgtctgctcggtcttccaggaaggctctgtcaagaagccagtgaaaactgcggttggagcatctgttacacgaacggcactctgtgcaagcacggaggccgatggaagatatgatccggatggggctgagccgcaaggctacaagccaagctcagcaagcttgttgcgagactcagggtaact

SEQ ID NO: 150428 - DNA, 411 bp, Zea mays
  unsure (1)..(411): unsure at all n locations
  Clone ID: MRT4577_68716C.1
nnaaaaatttttttttttaaattttttttttttgtaaattttaaggaaataacccgtttttcccccntaggggganaaaaaaanaaacacacaaaaaaaaaggggagccaagaaaaccaagaaaaaaaaccaacacaaagcgaggaaagccacatcaatgctgaaaattaacaaaaaaacaaggggtacaaaaaaaaccctacaaaaaaagaggaaaaaaacaattttaccccctttcaggccccctaaaacaaacggttgtataatattctaaccccttgcagacgcacattaaaaaacacttttggaccaaaccgtaaattcaaaaacgaaaacttcagaaaccccagtttcacccaaaaaaacccaaaaaaaaacctggagaaaaaaaagttatacaataaggcagtg

SEQ ID NO: 150429 - DNA, 579 bp, Zea mays
  Clone ID: MRT4577_68717C.1
tgagcgagatttacctcatccgggcaaacctcagccaagcggatttggtcaaagctaatctatccaggacagtgctatacgaggctaatcttgatggggctgacctcaagggaactaggctattctacggcacctgggaccaggctagtccccgcagccgcaaccatattcccaactacgaaaccggcgaatatacgggcgcagtggtggaaaatgccaattttagtaagactaagaacatgagtgaggagcagaggtgctattgctgtgcctggggaggaacgttaaccagaaaaactatccccggcggctgtgaaggaatcgaaaatcgtcttgatcgatgaatgattgaaagagcaaaaaggttaggtagagaattaatgaaacaattttcaacctgttagcttctcctacgaatgaagggaatgatcgcctttgttatttgttgcggtttgtcgcagtagggccaaggagttgatgtacaaaatacagccccccagggcccataccccttcggcaaagacattaatgcggtgggtcatttcccggctgtaaaggtaatctgccctagcgggggaa

SEQ ID NO: 150430 - DNA, 573 bp, Zea mays
  unsure (1)..(573): unsure at all n locations
  Clone ID: MRT4577_68718C.1
tttttttcccccgtttgaattggtcttgtgtttgatttcaacgtatctaccatgtaatttgcataaatacattttatatgccaagtgaaaaatcacaattttaatcatcgcgttgtttctcgtgaggcagctaagatataaaatacgatgctacttgtgccgcttgaaaaagaaagcatgagaatttgacaatctggaaagcgcacacatccatggagcataattgacggatggaccttgtatggaaggtagaaagggagctagctagctagaaagccaaccacagcatacctgagaaaaaggcaatccaggatgcagggattgcaagtggctgcctcatcttcgtcactggcctgatctctctctcgcctatccttttcactaccttttcctttccacctgagatagagtatcccagctgcatacatatcaggaaatggtgactgtacaataaatttgggttggctacaaaaaaaaataggcttttttcggnggtctctgtagaagcgccaaaatgtatgctttatttttgggggcttacttagccgccgaaaattactggttttcggcggc

SEQ ID NO: 150431 - DNA, 551 bp, Zea mays
  Clone ID: MRT4577_68719C.1
ggtaccctccgggtttggccgggcgctatcaaacggctggatgtggtggtggcattaggtccacgaggtgggctattgaggcttaacacatttgtgcttgtccctggctttatggaaggatcctagtacacatgatcttttccatctttgtaatgattttggctaagattggtgtcatcgaagttaagaaagatctcttaagtattgttggggcgaagtgtcaaccatggtaggactctgaaccaagacatcaacatgtccaatgctcgaggcatacgtgagggcatgcttcacatttgaatgccacaagtcggagcacctacaacatctggcaatccggatatcaatgtggtccaatgtcatgatggacttcatcgagagacttcccaaggttgattacaaattaatgatcctcaacctcgattggtcaaggacttcccaaggtcgatggcaaataattgattctcaaccatgattgatcggtggagacggtggcatgattcttctttgttgaggtcatatacttgaatggcatcccatcttccattgcc

SEQ ID NO: 150432 - DNA, 898 bp, Zea mays
  Clone ID: MRT4577_6871C.1
gaaaaaaaaaaaaaaaaaaaaaaaaaacaacaccagaatccgcgaatcacagacgcgcctatctcagcttgctgcactgccctgccatcatatcaatatcatatcgtacgtgagcccggccgagagcgagggagaggcatggctgctccgaagctcgcgacgctggcgctggccgtgctcctggcggcgaccgtggtggctcccccggccgcggtgcgcgcggcgatgtcgtgctccaccgtgtacagcacgctgatgccgtgcctgccgttcgtccagatgggcggggccatgccgccccagccgtgctgcggcggcatccgcagcctgctgcagcaggccaacaacacccccgaccgccgcaccatctgcggctgcctcaagaacgtcgccaacggcgccaacgggagcggcacctacatcagccgcgccgccgcgctgcccagcaagtgcggcgtcgccctgccgtacaagatcagcaccaacgttaactgcaacacgattaattaagtgaggcgtcctgtgcgcgtcccgggcgaggaatgcatgcatggcgctggcggagagtaataaaataatgctactggtattttaagctatatcgaggtgtgcctgtctctagtcatttatggtgtttaggaatcgtctacacagttcgtaacggtgtatcgtggtcggatgcatgttgccgcgagcagagtacgtaggcatgaaccgacgtgtgcgcttctgtctgtgtactctctctatgttgtaatgtgtgggtgctttgatccagatgtattcgctcgtgagtcgtggaagtagatcgtttcagtatccaaaaaaaaaaaaaaaaaaaaaaaaaaaaaaaaaaaaaaaaaaaaaaaaaaaaaaaaaaaaaaaaaaaaggccccta

SEQ ID NO: 150433 - DNA, 681 bp, Zea mays
  Clone ID: MRT4577_68720C.1
tcgagtttttttttttttttttttttttttttttttttttttttttttttttttttttttttttttttttttttttttttttttttttttttttttggggaccccaggggaaagtttttttaaaaaaaaaccccgggagggcttttttccaaacaattaaggggtttgtaccaaaaaagcggccccccccaaaggcccccaatttttgcaaaaaaaaaccgggggggggacaaacaacccccccaaaaaagagggggttttttcctttccccgggggggggggcccccgtttaaaccaaggggttttatagggggaggaccctttgggaaaaagggcctttcaataaaaccaaacccccaggccttaaaagggggggggggggaaaccccaaaggcgggggggggaaaaaaccgggggggggggcccaaccccgggttcaggggggggggggggagaaagccccccccaggggccttcccttggggaggggggccccttacccccttaaacccctttttaagttttgaagggggttcacccccaattttggggggggggggccccccaaccattggcctgaaggggccccgaaaaagggggggatccccgcccggggggaccgggtaaccccccccccgaacccaaaaatcccccatgggggccccccggggggtttcttc

SEQ ID NO: 150434 - DNA, 357 bp, Zea mays
  Clone ID: MRT4577_68721C.1
accacgcgtccgcggacgcctaggcggacgcgtgggtttggacaagtgtgccatgatcagttgccaatagatcggcacagtgggcgatgcaaaagttttggttttgtacagtttgcacgtcatcaagatgcacatgctgtccagagtttaagtgggcaacttgacattgctggtagagtaatcaaggtttcacctgtgacacagcagccatgcattcaactaagtggaagcacaggagatttgggtcatgataaatcttgatgcgtggcacagaatgccagttccagagctcgtcgaatgcagaaattgcgccgcaatggcattacgaccactttgactggtgggaagggcagtgct

SEQ ID NO: 150435 - DNA, 238 bp, Zea mays
  unsure (1)..(238): unsure at all n locations
  Clone ID: MRT4577_68722C.1
gtgatatatgangcgtggnatagcctctcgtacgtctgctaagtattctcgtcgagctgacccgcagctagtccgcctcttacattattttcacgtaagagactcagacgggtcttatatagcggactttttgaagacctaagtagccagtgagagctactggagcactgtagcagacttgccctttcttcgcttacagaaagggctcttcacttctctgtgggtatggctttggcaa

SEQ ID NO: 150436 - DNA, 162 bp, Zea mays
  Clone ID: MRT4577_68723C.1
cgcatgcattgtgtagatttttatatacatatctgtacgcccttgcaatggagagggcgggacatgtgcaacacgttgtggatgaacgggccaggatgctgcttaggtgtgatctatcctatccatccatggataataaagaagtttgtggattgctgtttt

SEQ ID NO: 150437 - DNA, 1836 bp, Zea mays
  Clone ID: MRT4577_68724C.1
ctcacgcgtccgtcaccgcgcgcgagggtggagtagacgcaatcccacgcgaatcccatgggatcgagtccatctgcacgccgaagaataaaccgtcgtcgaggaggaagtagggggccgcgaggtggacttcaggatgcaggcgcagaggtccccggcgatggcgggaggtggcggcgccgccacggcggtggcggctggggcggcggttgggatgccgtcccaggccacgctgccggtgcggcggcggtgcgagggcacggccatgggagccatcacgcttgacctccgccccgggctcggcgtcggccccttcaccctcgggatgccgatatcggatgcgtttacacagatagagcggcagccgaatatctacgacgttgtccacgtgaaatactttgacgaggagcctctcaagctggactttgtcattagctttccggaccatggatttcacctacgctttgatccttggtcccagaggctccgtctcgtagagatttatgatgttaagagattgcaattgcgatatgcgacatctttaattggtggcccgtcaacattagccacttttgcggctgtgtatgcactctttggaccaactttccctggcatatatgacaaagagaggggaatttatacgctgttctacccaggtttatccttcgcattccctattcccagccagtatacaaatctattcactaatggagaagtggcagatttgccactggaattcccagatggtacaacccctgttacttgtcgggtttgtatatatgatagctcgacagatagcaaggttggggttggatctttgatggacaaagcaatggtacctgcactgcctgcaggcagcctgtatatggaggaggtgcacgcgaagcttggtgaagaactttggttcacaataggggggcaacatattccttttggtgcatcaccacaggatgtctggactgacttgggtcgtccttgtggtatccatcagaagcaggtggaccaaatggtcatacactccgcatcagaagccaggcctcggacgaccctttgtggagattacttttacaactacttctcgcgtggaattgatatcttatttaatggacagacacataggataaagaagtttgttttgcatacaaacttccctggccactcagatttcaattcatataagaaatgcaactttgttatatacgacgctgaagctgaaggtacatgtcagcctaataatgcctcaaaaaattgcataacacctagtacaaaatgggaacaagtcaaggagatcctcggtgactgtggccgagctgcaatccagacacaaggctccatgaacaatccatttggatcaacttttgtatatggttatcagaatatcgctttcgaggtgatgaaaaacggatatattgcaactgtcaccctcttccaatcatgagtgtgccactacatgtgctgctgctctgagctctggctgcaacaatggtggttaacctgcagaaaggaagtatgccgtacttttgtgcttcagcagcagcaatttcgagtcgaagccaactctatggggcctggtgacggtgcttggtttatggaatgggatgcagctgcgcagtcgatatggatcagcaccgtgacttgtatttgtgctgtacatcccggccgttgtacatgaactaactgtaccctgtgacctcaccttgtgtacataaatggtctttatttattgaaaaagaaaatgtacatactgccatgtggtcgcctaatggaactgtgctagttaaacatctcatgtgggtactgatatgatttgtccagtagtttgatattcaaatataa

SEQ ID NO: 150438 - DNA, 1240 bp, Zea mays
  unsure (1)..(1240): unsure at all n locations
  Clone ID: MRT4577_68725C.1
acagacacataggataaagaagtttgttttgcatacaaacttccctggccactcagatttcaattcatataagaaatgcaactttgttatatacgacgctgaaggtctgaactacttgtaatnnnnnnntagtttgctgtgatggaataatccaatccaatcatccatctgctcttttctcagctgaaggtacatgtcagcctaataatgcctcnnnnnnttgcataacacctagtacaaaatgggaacaagtcaaggtatggcgttctacatgacttattaacactgttgatggtaccactggtagtccttgatgtgttatttgccttcagaatgccgtttgnnnnnngccatgtagttctagaattatcatctttgatttgaaatgccttatgctacaannnnngcaccccnnnnncatcttatttcgttggcttcatggattactttcatgaatcctttatatccttcttaaatagtgaatgttaaacttatgacataataatgatatactaggttttattttgcatagttgggctgttagcataatctcactaatgttcttgcactaagaatgtcagctttgcctttgcnnnnnctagagcccttaccttttaagtagatatttgtcgggtctgtattatcaacctagcaacgcttcaagtgccggtatgctatcttattgcgtgccatctgttagatttttctgttcttttaacaaccctttggtattactatattaggagatcctcggtgactgtggccgagctgcaatccagacacaaggctccatgaacaatccatttggatcaacttttgtatatggttatcagaatatcgctttcgaggtgatgaaaaacggatatattgcaactgtcaccctcttccaatcatgagtgtgccactacatgtgctgctgctctgagctctggctgcaacaatggtggttaacctgcagaaaggaaggatgccgtacttttgtgcttcagcagcagcaatttcgagtcgaagccaactctatggggcctggtgacggtgcttggtttatggaatgcgatgcagctgcgcagtcgatatggatcagcaccgtgacttgtatttgtgctgtacatcccggccgttgtacatgaactaactgtaccctgtgacctcaccttgtgtacataaatggtcnnnnnnnnnnnnnnnnnnnnnnntacatactgccatgggtcgcctnnnnnnnctgtgctagtttatc

SEQ ID NO: 150439 - DNA, 470 bp, Zea mays
  Clone ID: MRT4577_68726C.1
attcggctcgagggataggcaatttttttaaatttcgtagcaatcactaaattaataagtaaaattaataaaagaatggtggcctcgaggataggacgagaaccaaggttgcgtctagaatgttcttgccttgctgggaagggatggcgtcggaagcggaggacgaggctgttacaccattgctcgtcaacggtgcatccgacatccgccggagggtgcgccgtcacgccgcttgctgtcattcgattttcgatatctctttactcggatttggctgtttatatgatccctgatcttgtccggcggtcgtccaggtgtgctaagggaccacccgaaggcatttttgttcacgcaggccgttaggatcgccaccaaggccttcctgtatgagcgcttcatctttaaggtcacacacttgatgggagatcttcgatttggtggattccgctatccttaggtgccataccaca

SEQ ID NO: 150440 - DNA, 110 bp, Zea mays
  Clone ID: MRT4577_68727C.1
gcgtacggaacgttctgtgtggcctgtattaacacggattgtactcctcaccatatcggctcggggggctacatgtctatagccttacgcgctaggggacgtcagaggcc

SEQ ID NO: 150441 - DNA, 215 bp, Zea mays
  Clone ID: MRT4577_68728C.1
ataaaacaaaataaatttacaaaggatcttattaataaaaaaaaataaaaaaaaaaaaagggacttcttattaaagctgatagtaaaaccaactttaactactcggaacacatatacactccctatttctttaaaatagcttattcatccccaaacaacatgggcgtgccgctttcggaactttttgaccattcaagccttacacgcccttttat

SEQ ID NO: 150442 - DNA, 395 bp, Zea mays
  Clone ID: MRT4577_68729C.1
gcaagctaatgatgagttacagaagaacatctacactttgacggagcaatcacaacgagacaaggcggagatgcaggatgagttgaaggcaatacaagaagataaggatgcagtgctaacacaactgaagcagtcagagacttcagtacaaaatctagaggatgagttgacacgactgaaagaggagctttccgtccagctagaaaacaattccaccttggacaagcagtttgcagaagccaggagcaatctgcatgctgaaatttcagacctacatacagagaaggacacatctctacgggaattacagacgtctcaagcttgtgtcaggaatcttgagattgtggttgaaaagcaaactgagaacatttcaactctacagcaagctaatgatg

SEQ ID NO: 150443 - DNA, 118 bp, Zea mays
  Clone ID: MRT4577_6872C.1
acatcggcaagcgcgacaccaacgagtggacgtcggacgccaaggcgcaggaggtgttcaagcggttcggcacgcggctgagcgacatcttgaaaagcgtcgtgagcatgtacgcgga

SEQ ID NO: 150444 - DNA, 349 bp, Zea mays
  Clone ID: MRT4577_68730C.1
aaccaaaaaatttcatgcctaaattgatattaattaaaggtacccatgaaacaccttaaacattcatgggggtacatttacaaaagttgtctttaggaataataaaaaataaaagcccttggccttagttttcatcggcatcatataaaaaataaaaacttagatttttttttgatttcacaacattggatacaaaacaaaacctaaaaacatttgccatgctttggggccctataacttattgatctggagggggttgtttccttggagggaattggggaaaggagctgttcctgggcagcaacggggcggggattttggcccccggttccaccgttttggaaaaggc

SEQ ID NO: 150445 - DNA, 382 bp, Zea mays
  Clone ID: MRT4577_68731C.1
tccgtcctcgccagtccaatcttcaacgtcggaactccgaagaaccacgcccaaattacgcagtagcccgtacgaatctccgctcgccatggacgccgtggcctcatcccggaacaccgttgcactggcggcgcccgcggcggtgccgctggaggctcatgcccaaaaccctagcattgccatcgctaacccgccgtcgccggagatggaggctacagcggaggcgctcacgcaggaggaggtccttcgccggcgccggcgccgcgcggcccggctagctggtgtgtaccgccggctctactgggccatggccgaggaggtgcgcgcgcggcaccggcagtacgtctgggatctcgcccggagcccactggaggcagagcag

SEQ ID NO: 150446 - DNA, 192 bp, Zea mays
  unsure (1)..(192): unsure at all n locations
  Clone ID: MRT4577_68732C.1
cttgacgtagactgccgcctcgtaagctaggatcctcttcctcgacccacgcgggcggcgagacccgccgnacccagngacggagagaccccgccccccagcgaaaaagccaaaccgcgagcgccggaagcaagaacagcggcccccggaggaggacgccgcggcgacgacccaagagaagcacagggcaga

SEQ ID NO: 150447 - DNA, 270 bp, Zea mays
  unsure (1)..(270): unsure at all n locations
  Clone ID: MRT4577_68733C.1
tttttnnttttagaaacaacagcatgcaggcaaatcatatgcaacgcaacggcagatcatcttctccccaatatatacaagatgcaacaattaaccagtcacacagcaacctctgacaagaaaatacataaattatattttttttttacaacaggcggctcttgatgaggctctcgcgaatgacactacacttccttttccaccgctcgccaccgaccgccacccccccttggcggcctcttggaacccctcctccaacagacacccctc

SEQ ID NO: 150448 - DNA, 266 bp, Zea mays
  Clone ID: MRT4577_68734C.1
ttcacttgtttggtatcctttcattgtgatattcttgtaccatccctatcaaatctatagtttattcatatttgatgcagatttctactttttttgtactggtattttgttcttaagacatacatcttgttattatcgatcaattattcagctacactagtctgacctcaaccagaattataagagcttagctagttagcaatcataaatattggaaagccatgttagcaatgagagagctatcggtgagtggtcttggaactttg

SEQ ID NO: 150449 - DNA, 142 bp, Zea mays
  Clone ID: MRT4577_68735C.1
aaatgggggataacctatagcacacatgtatatgtatgtatagcttattaacattgtcttaacggctcgggcagcgactaattgtcctacccttcattggctacaaaaaaatttaacctgttgataaccgcgcgagcgaggg

SEQ ID NO: 150450 - DNA, 285 bp, Zea mays
  Clone ID: MRT4577_68736C.1
cccacgcgtgcgtccttttttttttttgctcgattccataaacgaacggggattctagtatagggtaggggcttcattataagattaatgatgactttgttttggtggatcaacattgaatttactgattttgaatccaaatcactagaaatcgttaaatcaattaacattaattaacatttagattattaaatcactattaaatgaaagatactagttctatttcatttaaaatctgtaccatctctatagattatttaacaatattgataattatataacaaa

SEQ ID NO: 150451 - DNA, 415 bp, Zea mays
  Clone ID: MRT4577_68737C.1
ttaggcactctccggcagcttacctataaccatactcatattcaaactatactctataaccagtgcaatctacaatataaaacgatgcaaaacggtgttttttgtgatcatataggtgcaatgtacagtagttcacccgtatggtcacaaaaaacatattttgcactgtagattgtattattcgtagagtgtagtttaaatatgggtatgggtaagctgctttagctgattctggggtacatggtgtcatggtgtcccagatttgtgacagtctatgttcaaatcagagttattgcagacttacaactgaagttgattagttttagagtcaaatgcatgttgtaaacttgtgattttattagatattcataattgatgcagctaagttaatggttccttgttctgattattagag

SEQ ID NO: 150452 - DNA, 154 bp, Zea mays
  Clone ID: MRT4577_68738C.1
ctatggtgtctacttatgctcacatgttatgttaagaaacattcgattcatcattccggtgccattctaaggaagttggggaggtaagaattactgactatgatgttattcctgtgaaaggcacaaaaaacaccatcgcggtctttataatact

SEQ ID NO: 150453 - DNA, 499 bp, Zea mays
  Clone ID: MRT4577_68739C.1
aaaaaaaacaaagggattagggccaaatgcggcaacaacgatgggaataaagtcatcgcattttttttggggggcacaggggccttttatttaccagccccccaggggggtccagggatgtacacccacgttttgggtgattggttctgaaaaaacatcatttgagtttttgacaactcccaaatccaccaatgctccgttttttatgaaaaaaccaacgttccggtcattaagtgcgaaggggggaccccacaatttacattatcacacccagcgacacaacaggggctgggactgggaaccttatagccaaacagccgggctggttctttgtaagggggtttttgagcaaaaaaacagcaatgaaggatgccaccatgggcgccatcctccgggtcgatttcctctcaaaaacattttgaacttgtccaccggccctgaaaaaaatcctctcgaagcggccatgttattacccattctgtccaacatccgggtatgg

SEQ ID NO: 150454 - DNA, 1749 bp, Zea mays
  Clone ID: MRT4577_6873C.1
atggaggcgctcccggctgatgaccaaaggccctttgaagacctcgtaatgcgcgaggagaaggaggtgatgcggcaatggaacgaacaacgcgacaaggaagaggcggaactgctgcataaactctccgaacggagcaaggaggcggcggacaagtacttgtcacacttcacggtggatcgccaccagaagatcgtccgtcaaggggagatcgatatggaatctctcctacctccactgcagggtcccgctccgcaaccactaggcacgcgacaggcactggacgcgaccggaccgtccgagcatcatctcagacagtccggttataccgcggaccgtccgacgtatttcgccggaccgtccgaccagatgcaggcccgcacacaaaacactcaagtcgcaccgtacatggccggaccatcagggtacaaccctgaacacttcggccccatcacggaccgtccggtgcatcacgccggaccgtccggatatgttgcggaccgtccgccatcttacgccggaccgtccggatatgacatgaaccggccgacgtattacgctggaccatccgactctacacgagtccatgcgcagactgcccaagtcacgccatatatggccgatccatccgggtacaaccctggaccattcggctcgatcgcggaccgtccagttctttacgacagacggtctgggtacgagactacccacgtggcaccatatacgactggacaatccggatataccttcagaccatttggccaggtcgcggaccattcggcctcttacgccagaccgtccggatatgcatacgcagagccgagagctgcgcaatacgcacagttcccgcattcatcgcagcaacattatggtgccccaccagcaacacattataatcatgccataccacctcatggacatagggctgaatactattcggccacaagagagcctgaggggtataaggcaggagctggtgacattaataggacacctaacacacacctcaaacatacctgggaggaaagccgacagagtaatgtcaggcaacctgaaatctccacccacaaactcaatggatggtcgccagacatggcagagagggtcagagatgaggtagctgggatgttcagggacaaactcggtgttagtgtgtcaggtacagggcaatcgtatcggaagccttatagtcaccgattcgacactgtgccatacccacaggggactagaataccagacttctctaagttttctggtgaaagtgggaaaagcacacacgaacatataagccaattcatagcacacttgggagagttggctgatggggaagcctaccgcgttcgtttattctcgttgtcccttactgatactgcatttgcatggtacgcagctttgccaccaaactctattaactcttgggaagaattagagcagaaatttcatgaacacttcttctcaggagaacacgagttagaaatggctgacttagcttcaatacaatcggccataaatgagggtcgattggcttttcaggagatgcaagtagacacacaaccctttcctgttaatacaatagaactcacatgcaaaaaggtcttggttcgacccgaaatggccgataaaggcaaaggcaagggcatcgtcatcagcaatcctcgcatgtcagatatatcacaaaaggagattgttcgaaaggcttcggacgagaaggctaaaaggtccgaagacgccgggggcaggcacagttaa

SEQ ID NO: 150455 - DNA, 374 bp, Zea mays
  Clone ID: MRT4577_68740C.1
gttgccttcaacctctctgcctgccttccaccgcagagcattgctcttccttccttccttcgcgtaacaacctagactccactccacttaaggtccaccggtccgctccccatggaggacgaggacaccgggcccggggatgggggcgagggctctactccggaacaagtagacgcgacacagagaccgggccagcaacatgggggggtccccgaccagctcgcggtctgcgaagcacacggaggaactactcccaccagttcgggatgcaggggtaatccctcactaagggaatggcgaatgggaaagaccctccgcagcaggagattcaccatgagcggctacaccaggccgatctacctataccccgacgg

SEQ ID NO: 150456 - DNA, 188 bp, Zea mays
  Clone ID: MRT4577_68741C.1
cgctctgcccggctgcaaggatggcggggaggggtaggctcatcgcagtgatcggagacgaggacacggtgactggtttcctgctgggcggcataggggagcttaacaagaaccgccatcccaatttcctggtggtggagaaggatacaaccatcaatgagatcgaagacactttccggcaatttcta

SEQ ID NO: 150457 - DNA, 340 bp, Zea mays
  unsure (1)..(340): unsure at all n locations
  Clone ID: MRT4577_68742C.1
gcgggccgtggtagggtcgctgtgnggaggctggtggcctgcgggtagcggtgcggggttgccgggtgggcgcgcncgtccgcgcgcgcgtccgcgcgggggtgcgcgtgacctgttcgtgtgtgngggcgtgcgcgttcgggggtgttgggctggggggcccttgggcggccgggcgtgttgtgcggcctgtgggcgtgtggggttcgtgttcgggtctccgggtcgagtcgggcccggaccctgctccgggcgggtctccgtgtccgccggcgctgccggcgtgagcacagcgtcgggtgcgctgtgatggcgttccgcgcgtcctgtccggcgcggt

SEQ ID NO: 150458 - DNA, 820 bp, Zea mays
  Clone ID: MRT4577_68743C.1
ccggccgggaggaatctggccaaataaatatctaatcactacaattactatctcattcactatttcaaccgactcaatcatcaaaatggcgtctaaatccctctacgctatcattgctggcgtcggtccaggcacaggtcgatctgtcgctttacgctttgcccagaaatatcccgttgttcttttcgcccgtcgcccagagagctatgagagtactgtcgcagacgtcgagaaagcaggtggcaaagccatcggcatcactgctgatgtcgctgacccagcgtctctgaagaaggcctttgacgacatcaacaagcaatttcccaacagtcatctcgcagcagcagtctacaacgtcggcagcggtggattcgccaaaaagcccttcttggaacagacagagaaggaccttgatgccagcattgacggctccatcaggtcattcttccactttgcgcaggctactattcctcaccttttggaggctgtgccggagtcacactacccgcccactctcatccttaccggtgctacggcttccatcaagggaagcccgcagtttagcacttttgcagcgggtaaatggggacagcgtgcgatgcatcagtctctggcgagggagtttgggccaaaaggtgttcatattgcgcatgccatcatcgacggagtcattaatatcccgagaacgaaggagtgggcagcgaacgatggtgctgatgatgggaagatagtcccgatgcgattgcagaggcatactgggatcttccacgcagcatcgatctgcttttacacaggagattgatatccgacctttatgttg

SEQ ID NO: 150459 - DNA, 332 bp, Zea mays
  unsure (1)..(332): unsure at all n locations
  Clone ID: MRT4577_68744C.1
tttctttttcacaatccctccccatcaaagagctgggttttctcgaagccactgtggtgcatcnatcactgcaagattcctcgagcctaccccaggcgagccgacaaataaaccttgctacatgcgcaccgctcacaaagctattcctgcagctgataactcaaattccacctataaaaaaagcctttcccgcatcaatatctatatcgtcgaaatttacagcagatccatccaagagctactgttctgacatcctttatccctccaatacaataaaaatgtgaacctgttattaaataccctgtaccagcataccatatacttacatattc

SEQ ID NO: 150460 - DNA, 241 bp, Zea mays
  Clone ID: MRT4577_68745C.1
tcgattgcgcacaaaaagacaaccggatctcaccgaataccaccagtgggcacatgaggtagaggcgcggatcttatgcaaatctctgactggacagactatgagaactacgatgtggactcgagtgacaacattgacaacgttacggccaagatacagtacaatgaaggcatacgaatggaccagcagaggctcatctttactgacatacagtttgaagacggtcgcacacttactgact

SEQ ID NO: 150461 - DNA, 411 bp, Zea mays
  Clone ID: MRT4577_68746C.1
gccacgcgttcggttttgatccttaaagctgagcttcccttacccgagcgccacctccggccgtcctaccatggcgctggctataatgtgatacgcggaggtgcggacggtcggtcgtgactcgtgaggaataggaagagggtaggagaggagaagaagagccaacgccgggcgggaggggagatggccagcggctagggggagatgcgggcgctggcgctcacgcccacgtggtccgtcaacaccgtgctcaccctcctcgtcgtggactcgctcctcatggaacgctccatccaccgcctcattaattggctgaagaaaactcatcggaatccactttacaaagcaatggagaagatgaaagaagaaatgatgctgctagggttcatatctctgattgtggctgcgacg

SEQ ID NO: 150462 - DNA, 570 bp, Zea mays
  unsure (1)..(570): unsure at all n locations
  Clone ID: MRT4577_68747C.1
tttttnnttttttttgtttctttaaacgttgaaagaataaacatatatttctattaagatcaagacacataacaggggctacaccagtgaaattgtactatctatatcgttgcattacgtcacttgacggcaagtacgacaggctgaaacaccataaaggcggcactactctactctattacaaactcgatacaacacgtggcgacacagacaaggcatatgcttacggacgagaaatttcaatgccactaaccagagttgggtgtttgacatactaaccaaacgacaaccacaaactttcgacgattttaaataaacaactcaggaagcaattttaccccaaaaccccgtcttactgatcaagaacttgaccattctcctggatggcatccgctttctcctaccagcacataagatcatccaagttttccctctttttcataggaggaggacctctctccacgatgtaaacatcaaagtactggaaaacagatttgagcgatgaaacaacaccgaattcaccaacccagaagctctggtgcacaaggagcccgcccccaagcagctact

SEQ ID NO: 150463 - DNA, 143 bp, Zea mays
  Clone ID: MRT4577_68748C.1
cccacgcgtccgggcatcacgaatgtgtaacctcaaagccctggtcacctcactactgtgcatctcggcgttgtcgtcgtcgccatggccatgcaccgcaaccggtcaactgggccgcaagcccctggtcaccggcgtcacca

SEQ ID NO: 150464 - DNA, 580 bp, Zea mays
  Clone ID: MRT4577_68749C.1
cctcgaggccggccgggccgggattctcccagggtgacctatcagcgatgcagattgcaatgagatcaggtgcatggagagcccccccttgagcttacgctacttttctttttcctggccattgaaaaaagagaggaggagagagccagtcccagagcttgaagagaaccaaaccatgctttgctgggctacacgccttctgttctcggagctgcggcccgtttctttcccatctttccacaaaatgaggcccaagaggacgctttcaccatcagaatcagaaaacactgcttccgattcgccaatcagaatacatacagatacagcagcgcttgtcgacgacaaggaccgcttgagttaagaggtggcggtagagagagacggttggctcaggaaagctcctgcgtgcaccgccgacgcagcagcgggagtggttgcaaagagagatcattacctgatagatcagtaatagaaaactaaacatagatctatattctatcatgtttgttttggtctggtgctctgctacttattaatgcaaattatctgaaaaaaaaaaaaaaaaaaggcccctagggcc

SEQ ID NO: 150465 - DNA, 915 bp, Zea mays
  Clone ID: MRT4577_6874C.1
gggtacctcgaggccggccgggaaaaaaaaacacaccagaatccgcgaatcgacgcgcctatctcagcttgctgcactgcactgcactgccctgccatcatatcgtacgtgagcccggccgagagcgagggagaggcatggctgctccgaagctcgcgacgctggcgctggccgtgctcctggcggcgaccgcggtggctcccccggccgcggtgcgcgcggcgatgtcgtgctccaccgtgtacagcacgctgatgccgtgcctgccgttcgtccagatgggcggggccatgccgccccagccgtgctgcggcggcatccgcagcctgctgcagcaggccaacaacacccccgaccgccgcaccatctgcggctgcctcaagaacgtcgccaacggcgccaacgggagcggcacctacatcagccgcgccgccgcgctgcccagcaagtgcggcgtcgccctgccgtacaagatcagcaccaacgttaactgcaacacgattaattaaatgaggcgtcctgtgcgcgtccgggcgaggaatgcatgcatggcggagagtaataaagtaatgctactggtattttaagctagatcgaggtgtgcctgtctctagtcatttatggtgtttagcaatcgtctacacagttcgtaaacggtgtatcgtggatgcatgttgccgcgagcagagtacgtaggcatgaaccgatgtgtgcgcttctgtctgtgtactctctctatgtagtaatgtgtggccagtgggtgctttgatccagatgtattcgctcgtgagtggtgagtcgtggaagttgatcgtttcagtatcattaccgtgtattctttcttttacatgcgattctgaaaagggacctgcacgaagttccagtaaaaagaaaaaaaaaaaaaaaaaagcggcc

SEQ ID NO: 150466 - DNA, 415 bp, Zea mays
  Clone ID: MRT4577_68750C.1
aaaaccacccccccggctttaaatttttggcattccttcgccaaaggctggcggggaacccccaaaaccctaaaatggttaaaaaacccgggaaccggttcaaccaaacctttaacccgaaaaattccaagccaacaaaaaaccaaggcccggccaacctccaacccacttgggaaaaagcccttgatcctgttcccaaggggaacccaacaaaacttcaccccaaaggggggcccccccccgaaaccaaaaacggggggattttaaaaaccccccccgggccccttcctaagggggccccgggaaaacttgcaaccccaaaccccggacccgcctggaccgggcctccgggggcccaaaaaatcgcccgggacccccaaaaaacctcgggttacaaattaaaaaaggggggggg

SEQ ID NO: 150467 - DNA, 584 bp, Zea mays
  Clone ID: MRT4577_68751C.1
ttgggattttccaagggtgacctatcagcgatgcagattgcaatgagatcaggtgcatggagagcccccccttgagcttacgctacttttctttttcctggccattgaaaaaagagaggaggagagagccagtcccagagcttgaagagaaccaaaccatgctttgctgggctacacgccttctgttctcggagctgcggcccgtttctttcccatctttccacaaaatgaggcccaagaggacgctttcaccatcagaatcagaaaacactgcttccgattcgccaatcagaatacatacagatacagcagcgcttgtcgacgacaaggaccgcttgagttaaggtctgttccacttccacctatttttaacccatcgtcaattaatcattgctcctggtaaagaattagatcaccaaaacactactaagcaaaagctttttcagaggtggcggtagagagagacggttggctcaggaaagctcctgcgtgcaccgccgacgcagcagcgggagtggttgcaaagagagatcattacctgatagatcagtaatagaaaactaaacatagatctatattctaac

SEQ ID NO: 150468 - DNA, 452 bp, Zea mays
  Clone ID: MRT4577_68752C.1
aaaacaagcccccccagggggggggggttttaattaatttttccaaaacagccggccgatgggccgaggtttattattacaattgggaaaaaaggccaagattttccactgggccttgccaccaggggggaatttaagggggggggaaattccctttgcctggggaaaacagaccctgccagttcggcttttccatccaaaacggacaaaacccccccctccggaagctgattatgggggggccctctgcaggggagagaaaaaaacccccctacccagggtttttcatgccgggggggatcccctttaggggggggaggagcgggttttccagggcggggggggcctcgctcgccgggttcaacttgaccagcccggcgggcttttttttgggggggaaaccccttggacagggggggggggggggacacccttgaagggggggggccctt

SEQ ID NO: 150469 - DNA, 486 bp, Zea mays
  unsure (1)..(486): unsure at all n locations
  Clone ID: MRT4577_68753C.1
aaataattgttcccgtggttttttctgggaattctggaggggtaccagttggcccaaaaaagaggcctataaggagggggaggaaaaacggggaaaggaaggggcagaggaaaatcctgagcaaaaaagaattccacaaaaattaggacaaaaaagaaaaaaaggaaaaagcaaggggaaaaatagagggggcaaaagaaaaaaaaaaaagacaagagggaaggcgaaaggacaaaccggaagccagcaaaaaaagcagccaaaaaaaaaaaattaaagaaccggcaaaggcggcgggaaaagnaggaaaccgggggggccccatggttaaaaaaaagaccaccaaagggagggggagcggtttagggacgtccaccgagagggcctgatagatgtacaagagggagggcccccaggggggaccaaccaggcggaaagggttaaaaaagggggaaaaacgggagaaatcttttgagccgccttagg

SEQ ID NO: 150470 - DNA, 1956 bp, Zea mays
  Clone ID: MRT4577_68754C.1
ctcgaggccgggcggggcaaagcctgccgctccttgttggcagcttcggctcgccttcactaccaggcggccaggcgggaccccagagaattccatagtctaacctgccaaccacttccaccgccaccgccgagcgcggtggcaccgacacgacacacgtagctgcagacctgcagtgccagcacggctgccaatccctgctggcgctgttcccggctccgagatcatttggactcggcactcggcagggatggggatggggacggaatggccgccgacgcctgcgcagcagaggaaagcggtggtgagcgccgggtcggcgctgaagctggtactgttcgtgattctcgcgggcctcgcactgcggctgctggtggggcccccagcctacctcctgccgcccaccgccgcgccagagggggccgctcgtcttttcgcggtgccggagagggaaagaaccgccggcggcggcggcggcgggataccttccgtcgaaacggatgatgcggtttttactttgaccgattcagaacctctaacagctttaggcaagaaggaaggttccacaaaaccagaagaaagttgtgatcttttccatggcgagtgggttcccaattcatcaggaccagcttatactaatgcaagctgccgcttcattgagtctcctcagaactgtatgacaaatggaagacctgacacagattatctcaattggagatggaagccatatggttgtgaggtatcaccatttgacggcaagaagtttttggatggcatgaaaggcaagcattgggcactcattggtgattccatccttcgcaaccacgtccagtcattgctttgtcttctttccaaggtcgaagatgctactgaggtttaccacgacgatacattcagatccagaagatggcacttcccttcgtacaattttacgatctcccttgtctgggcaccattcctggtcaaagctaaaatatttgaggacgacgatggagtttctactgctgatctccagctgcaccttgacgttctcgagacagactggactagtcaatgggagaagttcgattacgcggtgatatccacgggccaatggttcttcaagactgcagtgtactgggagaatggagctgcgattggctgccactcctgccagaacaaaaccctggaagagaggcctccggagtactccttccgcagggcactcagggtggccttccagttcatcacatcctcacctcacaagccagtagtcttctacagaacgtgggctccctcgcattttgagaacggcgagtggttcagcggcgggacttgcaacaggacggccccattcaagccaggggaggccggtgacagagaatgggacaatagtatgtggaggattgagagagaagagtttcacaacgcggtgcctatcggtggtgaccgtctgaaactgctcgatacatttgagctctctctcctcaggcctgatggtcatccagggccttatagagcataccatccttacgagaagggcgtgacagccaaagtccagaatgactgcctccactggtgcttgcctgggcctattgatgcgtggaacgatgtaattatgaagatggtggcaaaggactgaagcattatcaggtggtagtgtggtaccctaggcatggcatctgatctgaacaccagtattgtctcaagtctcattttcatacatatgtatgtttctgggcattgcatggcgtctcctctatctggtgtcaagaaactcatgtagattcggacttctcttcatggtgggtatgtttttttatgttaacagctttttaaaactatttctaaatgtaacataagaggtttttttttaaaaaaaacaaaaaagtattgccgcgtcaaaaaaaaaaaaaaaaaaaagggcggccgccgactagtgagctcgtcgacccgggaattaattccggtccggta

SEQ ID NO: 150471 - DNA, 182 bp, Zea mays
  Clone ID: MRT4577_68755C.1
ataaatttatcctgttgaagtttgtctggtaagattgctgtatagagtaattagtaattcatatatagttctgaagttgaatagtatttatgttattctaagctattaatttcactgccttgtataggtggacccagataatgtgaggctgcttgaggaagaagcagctgatgccttgggac

SEQ ID NO: 150472 - DNA, 275 bp, Zea mays
  Clone ID: MRT4577_68756C.1
ttttgttggtttttttaagaaccaccgtgtggatttactcagagcatactgaagctaacagagggtaccgcgcatgcctcatttggagtacaaccacatttgcacgatgccactcatgtatgaaacgatcgccaggagacgacacgataaatcggatgaaagcttctggatgacacgccatgatcagatggaacatatgtcgaactgccatccactactgaacacgctgtgcataagagaagcatgctgtggccctatcatttacacggtgaaag

SEQ ID NO: 150473 - DNA, 517 bp, Zea mays
  Clone ID: MRT4577_68757C.1
gttacccacccttttatttaaaacaaaaaaacaaaccaaaaaaccaaaaacaaaacacgggaaaaaaccccccccccggcagagaggggggggaaaaccccaccacctccaaaacacccccccacccccccaccccggcgcccccccccccccccccccccccaacagccacccccccccccccccccccccgcccccccaaaaccccccgaggctccccgaagtccccttccaccctaccccccccgccacaccggcccaccaaaccacgattttttccaaagcggccgaaaatctgggggatgcggaggaaaacatctggcccacaaagccggaaagggggggcagggggacaagacccccccccctagccaggggggcaccaaggccgcccccagggggaagccccccccaaccccggggggggagggaaaaatagcaaaccgcggcccgcacggggggatgggggcccccgggggccacaccagcagggccggtcttgggggccccctttaaa

SEQ ID NO: 150474 - DNA, 144 bp, Zea mays
  Clone ID: MRT4577_68758C.1
ggacgcggcaccggtggcgagaagagtggaatgcttgttcaagatccaacactaagaaatgatgtggatgcgatatttgaacaagccagacaagcgggtatcaaaggaatgcctcctcctcttgatggcgagtcttccagctct

SEQ ID NO: 150475 - DNA, 1346 bp, Zea mays
  Clone ID: MRT4577_68759C.1
ccggggctgtgcagcgcgtgcccctcatcgcgcgtgggcgcgcggtcgcccttctcgctgcgccggtgggactcgaagaagctgctggtgtggctggtcgtcctcctcaccctgctggtcctggcggtcctgggcgcgcggaaggcgcacgaggcgtggcgcgaggcggcgcggcggcggtcgggggcctggaagatgacggcgttccagaagctggacttctcggcggacgacgtggtggagtgtctcaaggaggacaacatcatcggcaagggcggcgccgggatcgtgtaccacggcgtgacccgcggcggcgcggagctggcgatcaagcggctggtggggagagggtgcggcgaccacgaccgcgggttcaccgcagaggtcaccacgctgggccgcatccggcaccgcaacatcgtgcgcctgctcggcttcgtctccaaccgggaggccaacctgctgctgtacgagtacatgcccaacgggtcgctaggcgagatgctgcacggcggcaaggggggccacctcgggtgggaggcccgggcgcgcgttgcggcggaggcggcgcgcgggctctgctacctgcaccacgactgcgcgccccggatcatccaccgcgacgtcaagtccaacaacatcctcctcgactccgccttcgaggcgcacgtcgcggactttggcctcgccaagttcctcggcggcggcggcgccacgtccgagtgcatgtctgccatcgccggctcctacggctacatcgccccagagtacgcgtacacccttcgcgtggacgagaagagtgacgtgtacagcttcggcgtggtgctgctggagctcatcacggggcggcgccccgtgggcagcttcggcgacggcgtggacatcgtgcactgggtgcgcaaggtgaccgcggacgccgccgccgcggaggagcccgtcctgctggtggcggaccgtcggctggcgccggagccggtgccgctgctggcggacctctacagggtggccatggcgtgcgtggaggaggccagcacggcccggcccaccatgcgcgaggtcgtgcacatgctctccacctccgccacggcccagcccgacgtcccccacgccttgtgcaaggtcgtcgattaatttgccttatatatgacgattatgtatatgatccgggcagggttagcgcctgtgatctatttagcggctgcctttttggcgtcactcgtctcgtgtgtgatgatggctggatggatgtgtaaaacaaataaccagcaggtggctactcgtgaatgaaagttgccggttcttattctcatgcatatatattagcaacacacaaagtgagatggcat

SEQ ID NO: 150476 - DNA, 307 bp, Zea mays
  Clone ID: MRT4577_6875C.1
tgccatgctgtggacaactgtttcactggagcaagatagcgatctcataggacggagggggaaatggctttccctccaagcttgggtcagtgtgttaactgcttatcagctattcagacatctccatggtttctccatgaaactctgtggtttcatcattccttcttagttgacctgcacagcttggttagacctagatttaaccctaaggtaagatgctggggtatagaacgctaagaattttcccccaaggactcttgcttccttaagcccttctggcttcgtttatggtcttcattacaagtat

SEQ ID NO: 150477 - DNA, 424 bp, Zea mays
  Clone ID: MRT4577_68760C.1
cccacgcgtccggcggccgcctttattttttttttttttttttttttttttttttttttttggtttttttttttttttttttttttttttttttttggggaacttatttttcttttgaacaatataacctctggcttaaaaattttgatattttaagttggaaattgtttaaccccataaagtggaacatttgaatgggccaatgttgaaatacctgttactagacccggtttcagtgaaaataaaatttcaagtcctgccaacaaaaaatatccccggggtggaaatttatggcccccataaactgcaactcattaaacggcttccaatggcaatcctaatttaaaaattggccttctaactaaggggactcttgttgcgccaagttgaccgcttaatacccttcagtgggttctttttcaag

SEQ ID NO: 150478 - DNA, 1379 bp, Zea mays
  Clone ID: MRT4577_68761C.1
ctcgaggccggccggggtgcacgtcacctcaagctctgctcctccttttcactgctctgcgtctgcgtctgcgtctgcactgcttcgcgtctccctccccccgcctccgcccccgccccggcaaaaagcaaaacgcggccatgaaaggctacgaccgcgagttctaccagttcagcgaccagctgcgcctgcgccggaggcggcggcaccaacaaggccgaccgctacaacaacaacaacctccccaacaccgacaacaagaccgtgtacaacaccagcaacagcttcatgggcaacggcagcagctacgccaagaacaacaacaacaacgccgacatgctggcgttcgacaagatggggagctacggctacaacggcggcggtaataccaacaacaacagcaacggcgtggaggtgaagagctacttcaacaagtccgccgggagggcggcgagcaacaacaacaacagcagccacgccggcggcggcaacaagaagggcggcgccggggagtacggcaggaagaagcacgccaagagcgagggcgcggcggcggccacggacaagcagcggttcaagacgctgccggcgtcggaggcgctgccgcggggccaggccatcggcgggtacatcttcgtttgcaacaacgacaccatggacgagaacctcaggagggagctgttcgggctgccgtccaggtacagggactcggtgcgtgccatccgccctgggctgcccctcttcctctacaactactccacccaccaactccacggcatcttcgaggccgtgagctttggcgggaccaacatcgacccgacggcgtgggaggacaagaagtgccccggcgagtcgcgcttccctgcacaggtgcgggtagcaacgcggaagatctacgaccccctggaggaggacgccttccgccccatcctccaccactacgacgggcccaagttccggctcgagctctccgtcaccgaggccctcgcactcctcgacatcttcgccgacaaggacgacgcctgatcctagatcctcctcatcggatcgtcagggactcgaggcttggaacttggatgaaccaacaataatggatggacatgtatcccgtcctacgagacgggagtatacacaccaccacggtgtagtagtagtatattaataattaatataatatatccacctttgtttgatgttatgggctatgtatgaggcacgcgtccaattgttttgtttttataacacttgtgcgatgattgcagaggactagccctcgtttttgtaagatatactatgatatctgtattgttcgggtctaactgacatgtataaacatctgtgaaataatctgttcttgtgcgaatggtcgttcaagcacc

SEQ ID NO: 150479 - DNA, 310 bp, Zea mays
  Clone ID: MRT4577_68762C.1
gcgtcatctcgtaagtccactcgtccatgctgctttcgataccatccttttgcaaaatctccttggggcccgatttcacggaactcggagtacactccggcgatgagattgcctcaatatgatgaacctgaggccctgatagaaacagttgacaatgggaattatccgtacgcttctaatcttctaccgtggcgataattcgactgctaggcacgctgcttcgacaagaatgggctagactaggtcaaaatatatcgtggtgacgtaccatacctacatcttcatagtgctcaagctgttgatcatatac

SEQ ID NO: 150480 - DNA, 443 bp, Zea mays
  Clone ID: MRT4577_68763C.1
ctcgccggcgacgagatccaccgcaccgccttccttcccgtcttcccttggcattccgctgtgtcttgagaatgagtagggtaggagctccaggagcagttcttccccttctcacagaatcgccctccctgaggcaaccatcttaacaacaaaagaggctcgtacaatcacagctgcaactgctaaaccacttgtgcatgcaaagtatcaaaaaggaggccagacacaggttgatgaaacatctaaaaaggcaataaggatgtcaaatctgcagctttgccaacatgagtagtctatattcgcttccccgcaccctccacttccttgtcgtcgtgctgattccagatcaaggggtagtgatccggaaggtggctatggtttttgtaagtacgaggcttaagatcttgttcaaggaaggtggctatggtacttttgatcctctg

SEQ ID NO: 150481 - DNA, 587 bp, Zea mays
  Clone ID: MRT4577_68764C.1
gcgttcggaaatacaaacagtatacaagggggggggggtttccaaacacaaacttcatacaggccttatgactataatgacctaacggtactttacacgaaccacagcagagtttgatacccaatactgtaacataatcttctagaagcatattatattgcaactaccagctgctacacgggggggggggtatacactgactgtgtaatatcttcttgaaacgacaacaactggaactttaggcctgatcaagctaataacatatatccgatgactagtatgatattttctatggaacagctaccattacttatgaacatgttgtatattaatttcctagatgcttttaatggtaataaattggaaatgattagcctattgagagtaaaccacttgtcttaggttataagctaaggactgtctggactgacataacatattcaatatttatacctgatgacagaagataactggtgcccacctattatttttaattactgaggggactagtctgtgcactagaaaccattatcaatcaaggtcttatgcatccacatgctttaggtaactgattacctctgctatga

SEQ ID NO: 150482 - DNA, 1535 bp, Zea mays
  Clone ID: MRT4577_68765C.1
ggcggcgcggcacctcacgcccctcctttccattgctctgcgtctgcgtctgcgtctgcgtctgcactgcttcgcgtctccctccccccgcctccgcccccgccccggcaaaaaagcaaaacacggccatggaaggctacgaccgcgagttctaccagttcagcgaccagctgcgcctgcagacggccgccttctcgggcctctccctcggcgactccatctggtcccccgccggccggcgcaacaacagcaacgacgtcctcttcgccgcctccgcgtcgcccgccgacgccgccgccaagagcaacgccgtcgtcgggctcaagctcaacgacggagggcccggcctcatcggctccgggaagctggccttcggcggcggcgccggaggcggcggcaccaacaaggccgaccgctacaacaacaacaacctccccaacaccgacaacaagaccgtgtacaacaccagcagcagcagcttcatgggcaacggcagcagctacgccaagaacaacaacaacaacgccgacatgctggcgttcgacaagatggggagctacggctacaacggcggcggtaataccaacaacaacagcaacggcgtggaggtgaagagctacttcaacaagtccgccaggagggcggcgagcaacaacaacaacagcagccacgccggcggcggcaacaagaagggcggcgccggggagtacggcaggaagaacacgccaagagcgagggcgcggcggcggccacggacaagcagcggttcaagacgctgccggcgtcggaggcgctgccgcggggccaggccatcggcgggtattgcttcgtctgcaacgacgacaccatggacgagaacctcaggagggagctgttcgggctgccgtccaggtacagggactcggtgcgggctatccgcccgggactgcccctcttcctctacaactactccacgcaccagctccacggcatcttcgaggccgcgagcttcggcgggaccaacatcgacccgacggcgtgggaggacaagaagtgccccggcgagtcgcgctttcctgcgcaggtgcgggtggcaacgcggaagatctacgacccgctggaggaggacgccttccgccccatcctgcaccactacgacgggcccaagttccggctcgagctctccgtcaccgaggccctcgccctcctcgacatcttcgccgacaaggacgacgcctgatccccatcggatctgtcgtcgggccactcgaagctcggatgcacgaatgaatgaacaaacaataataacgaatggatgggcatgtatatcgtcatgcgcatgtcccacgacgagacgggagtataccacggtgtagtagtattatattaataattaatatagtatgtccacctttgtttgatactactaagggctatgtgttgaggcacgcgtcccattgttttgtttttataacacttgtgcgatggttgcaaaaaaaaaaaaaaaaaatatttttttggtaaatgtctgtattattattcgggttcactgacat

SEQ ID NO: 150483 - DNA, 1659 bp, Zea mays
  unsure (1)..(1659): unsure at all n locations
  Clone ID: MRT4577_68766C.1
aattcggcaccggggctccactccaagctcctgcttttccattgctctgcgtctgcgtctgcgtctgcgtctgcactgcttcgcgtctccctccccccgcctccgcccccgccccggcaaaaaagcaaaacacggccatggaaggctacgaccgcgagttctaccagttcagcgaccagctgcgcctgcagacggccgccttctcgggcctctccctcggcgactccatctggtcccccgccggccggcgcaacaacagcaacgacgtcctcttcgccgcctccgcgtcgcccgccgacgccgccaagagcaacgccgtcgtcgggctcaagctcaacgacggagggcccggcctcatcggctccgggaagctggccttcggcggcgccggaggcggcggcaccaaggccgatcgctacaacaacaacaacaacctccccaacaccgacaacaagaccgtgtacaacagcagcagcagcttcatgggcaacggcagcagctacgccaagaacaacaacaacaacgccggcatgctggcgttcgacaagatggggagctacggctacaacagcaacaacggcggcggtaataccaacaacaacagcaacggcgtggaggtgaagagctacttcaacaagtccgccgggagggcggcgagcaacaacaacaacaacaacaacagccacgccggcggcggcaacaagaagggcggcgccggggagtacggcaggaagaagcacgccaagagcgagggcgcggcggcggccacggacaagcagcggttcaagacgctgccggcgtcggaggcgctgccgcggggccaggccatcggcgggtacatcttcgtctgcaacaacgacaccatggacgagaacctcaggagggagctgttcgggctgccgtccaggtacagggactctgtgcgtgctatccgcccgggactgcccctcttcctctacaactactccacgcacagtctccactccctcttcgggtgcgagtggcaacgcggaagatctacgatccactggaggaggacgccttgcgccccatccttcaccactacgacgggcccaagtttcggctcgagccctccgtcgccgagaccctcgcccttctcgacatcttcgccgacaaggatgacgcctgagccttccttgccgtcctctcgccgccagtgcccatccattaatccacagcccttaaaatggctggagggacaaagcacattacatgattggtcccccatatcatctgtctttgttccattcgatattatgtggtacgaatgtatgaataagcaataattccgaatggatgggcatgtatatggtcatgcgcatgtcccacgactagacgggagtattccccggtggagtagtattatattaataattaatatagtatgtccacctttgtttgatactactaagggctatgtattgaggcacgcgtcccattgttttgtttttataacacttgtgcgatggttgcagacagactagccctcgtttttttttttaataatatgtctgccgaaaccatgttcgggttccnctggcgtggattgtncccgtctgtgnnatagtttgctcttgtgctgcgcggcgtctccctcgtaagcccccggttcggtctgttnggnggnaattgagtngg

SEQ ID NO: 150484 - DNA, 242 bp, Zea mays
  Clone ID: MRT4577_68767C.1
tatcttgcgtagcagacgacagcgcactgggacagaggcgctacgtacgacgacgacgacgaacgggccacagatgggagagcagttctgcgacgccgagaccggccttcacatcctcagggtgtacgccgcgcccatgaccgcggtggcagcgctgacggacgggagggacggcatgaagaggtcgccatctcagagcatgcgctgggactacatggggtgcgacaccgacctgagcatgg

SEQ ID NO: 150485 - DNA, 437 bp, Zea mays
  unsure (1)..(437): unsure at all n locations
  Clone ID: MRT4577_68768C.1
tgntgaaggctacgaccgcgagttctaccttttcagcgaccagctgcgcctgcagacggccgccttctcgggcctctccctcggcgactccatctggtcccccgccggccggcgcaacaacagcaacgacgtcctcttcgccgcctccgcgtcgcccgccgacgccgccaagaccaacgccgtcgtcggcctcaagctcaacgacggagggcccggcctcatcggctccgcgaagctggccttcgcgcggcggcggcggcaccaaggccgaccgctacaacaacaacaacctcaacaccagcagcagcttcacgggcaacggcagcagctacgccaagaacaacaacaacaacaacgccggcatgctggcgttcgacaagatggggagctacggctacaacggcgggggtaataccaacaacacagcacggcgtgga

SEQ ID NO: 150486 - DNA, 1512 bp, Zea mays
  Clone ID: MRT4577_68769C.1
gggtacgcgtccagcaccgccaggccctgcgcccccttttccctgctctgcgtctgcgtctgcgtctgcgtctgcactgcttcgcgtctccctccccccgcctccgcctccgccccggcaaaaagcaaaacacggccatggaaggctacgaccgcgagttctaccagttcagcgaccagctgcgcctgcagacggccgccttctcgggcctctccctcggcgactccatctggtcccccgccggccggcgcaacaacagcaacgacgtcctcttcgccgcctccgcgtcgcccgccgacgccgccaagagcaacgccgtcgtcgggctcaagctcaacgacggagggcccggcctcattggctccgggaagctggccttcggcggcgccggcaccggcggcaccaaggccgaccgctacaacaacaacaacctccccaacaccgacaacaagaccgtgtacaacaccagcaacagcttcatgggcaacggcagcagctacgccaagaacaacaacaacaacgccggcatgctggcgttcgacaagatggggagctacggctacaacagcaacaacggcggcggtaataccaacaacaacagcaacggcgtggaggtgaagagctacttcaacaagtccgccgggagggcggcgagcaacaacaacaacaacaacaacagccacgccggcggcggcaacaagaagggcggcgccggggagtacggcaggaagaagcacgccaagagcgagggcgcggcggcggcggcggccacggacaagcagcggttcaagacgctgccggcgtcggaggcgctgccgcggggccaggccatcggcgggtacatcttcgtctgcaacaacgacaccatgggccgggacctcaggagggagctgttcgggctgccgtccaggtacagggactcggtgcgggctatccgcccgggactgcccctcttcctctacaactactccacgcaccagctccacggcatcttcgaggccgcgagcttcggcgggaccaacatcgacccgacggcgtgggaggacaagaagtgccccggcgagtcgcgctttcctgcgcaggtgcgggtggcaacgcggaagatctacgacccgctggaggaggacgccttccgccccatcctgcaccactacgacgggcccaagttccggctcgagctctccgtcaccgaggccctcgccctcctcgacatcttcgccgacaaggacgacgcctgatccccatcggatctgtcgtcgggccactcgaagctcggatgcatgaatgaatgaacaaacaataaaaacggatggatgggcatgtatatcgtcatgcgcatgtcccacgacgagacgggagtataccacggtggagtagtatattaataattaatatagtatgtccacctttgtttgatactactaagggctatgtattgaggcacgcgtcccattgttttgtttttataacacttgtgcgatggttgcagaaaaaaaaaaaaaaaaagcgggc

SEQ ID NO: 150487 - DNA, 2061 bp, Zea mays
  Clone ID: MRT4577_6876C.1
atgcacgatgagaaggaggtgatgcggcaatggaacgaacaacgcgacaagaaagaggcggaactgctgcataaactctccgaacggcgcaaggaggcggcggacaagtacttgtcacacttcacggtagatcgccaccagaagatcgtccgtcaaggggagatcgatatggaatctctcctacctccacttcagggtcccgctggtacaaccctgaacacttcggccccatcacggaccgtccggtacatcacgccggaccgtccgccgtcttacgccggaccgtccggatatggcatgaaccggccaacgtattacgctggaccatccgactctacacgagtccacgcgcagactgcccaagtcgcgccatatatggtcgatccgtccgggtacaaccctggaccattcggcccgatcacggactgtccagttctttatgacagacggtctgggtatgagactacccacgtagcaccatatacggctggacaatccggatataccttcggaccgtttggccaggtcgcggaccatccggcttcttatgccggaccgtccagatatgcatatgcagaaccgagagctgcgcaatacgcacagttcccacattcatcgcagcaacattatggtgccccaccagcaacacattataatcatgccataccgcctcatggacatagggctaaatactattcagccacaagagagcctgagaggtatagggcaggagcttgtgacattaataggacacctaacacacacctcaaacatccctgggaggaaagccgacagagtgatgtcaggcaacctgagatttctacccacaaactcaatggatggtcgccagacatggcggagagggtcagagacgaggtagctgggatgttcagggacaaactcggtgttagtgtgtcaggtacagggcaatcgtatcggaagccttatagccaccgattcgacaccgtgccatatccacagggaactagaataccagacttctctaaattttctggtgaaggtgggaagagcacacacgaacatattagccaattcatagcacacttgggagaattggctgatggggaagcctaccgcgttcgtttattctcgttgtcccttactgatactgcatttgcatggtacacagctttgccaccaaactctattaactcttgggaagaattagagcagaaatttcatgaacacttcttctcaggagaacatgagttagaattggctgacttagcttcagtccgacaggggcctgaagaatcggttaatgaatatatccggagattccgggacactagaaaccgatgctttcagattcatgtcgcagaaaaacaactaacaggcctagctttcaatgggttgcgaccctacttaaaagaaaaattagatggcacccaattcttttcgctagtgcacttacaccagcgagctatgacctgtgaaagccgaagtaaggaaacatcaaaattggctagccataagatgcatctagtgggatacgataattcggacgatgaatccacggatgtatacaccgccgaactggtttggccaggacaggctaaaccttcagcgtgttctgctttacagtcgattcgaaagaatcgacaagaagaagttaagtttacttttaatgttgccaaatacgataaaatatttgatgagttactgaaaaacagcaacattaaattaactcatactattcctcctcctgatgaattaaagaggcgtgcttattgtaagtggcataattccttttctcatgccaccaatgattgtaatgtttttcgtcgacagatacaatcggccataaatgagggtcgattggcttttcaggagatgcaagtagacacacaaccttttcctgttaatacaatagaactcacatgcaaaaaggtcttggttcggcccgaaatggccgataaaggcaagggcatcgtcattggcgatccccgcacgtcagataaatcacaaaaggagattgctcgaaaggcttcggacgagaaggctaaaaagtccgaagacgccgggggcaggcatagttaa

SEQ ID NO: 150488 - DNA, 342 bp, Zea mays
  unsure (1)..(342): unsure at all n locations
  Clone ID: MRT4577_68770C.1
gggggccacgccncccggcaaaacctcttattttaactgtttttaatgatgctgaaaccgaaacaacacactccgtgattaaaatacggtggtggggcaaccctttattaatttaagctgtccagctaacgccgcaagcaacatgatggatggtccaaaacttcggcctccaagccaaatacaagtcggcgcgcatcatgtaccccgacttctactccgccgtctacgacatggtcaaaaatccaagcagctacggggtcaacacggcgttccatacgtgctggcggttcggaagcggcaagtacaactaccaaaacaacgcgcggtgcgacatgccgggcg

SEQ ID NO: 150489 - DNA, 392 bp, Zea mays
  unsure (1)..(392): unsure at all n locations
  Clone ID: MRT4577_68771C.1
aaaaaacaccggggggaattgtgcgacgggaagagcggcgaatagccncggacccaaaaaagcacacgacaaaagaccaacagncagcnaacggggccacagaggccngaggacaaacggaaacaaaancaggccgggcaccaaccggagagcaacaaggnncaaccgcagaaaagggagaaaacaggacccgcaaaacnncaaagagggggaaaaccggccaaaaaaacaaccccagncaggggcaaaccaccaagggcaaccccagggggaccggcgagacgaganacaagggagccgcaacanaagcagacaaggacgcggcggaggccgngacccccacgagccacggccggagcnggcgcgcgaagcggcggaagagggcgccagac

SEQ ID NO: 150490 - DNA, 511 bp, Zea mays
  Clone ID: MRT4577_68772C.1
ggtaccgggcccccttctcgagttttttttttttttttttttttttttttttttttttttttttttttttttttttttttttttttttgaaaaaaggctttgggttaacagttaacggccactttacccaaaaaaacggccacaaaccctgccaaaggtccggccacatttaaacgggtgcttaacccttggccaggccaccctacaaggctaaagctggctatatagttttttaaagcaaaaccccttgaaattaacctccttcctacaagggccaggggaaaggtaaaaaacccaaggctgggaattttatttcaacccaggggggttctaactaaagtttttgggtggagcccagggggggcctaaatttttggcctctccatccaaccttaaaggagcttccccttcaggctttgcctttgaaccttttcctggcaacctttgaaaccccggtggagctggttgttcttcgaacccggggggctcctttggggggcggctggggggg

SEQ ID NO: 150491 - DNA, 262 bp, Zea mays
  Clone ID: MRT4577_68773C.1
tcgaggccggccgggtcgcaccatcgccgcgccgcccaaccctagccgccgccgccgccgccgccgccatggtcgccgtcaaccgccccctcgtctccgtgaaggctctagagggagacatggtaagcgacgcccgcgggatcgccttaccgtgcgggatgacgccggggatcgcgcgccttgaggtgcagcctaatgcgcgagaggttctggtagggctctacgagcgcacgttccaagagatcaatgccgccccccaaga

SEQ ID NO: 150492 - DNA, 288 bp, Zea mays
  Clone ID: MRT4577_68774C.1
gccgcgccctctattcccaaaaccctaccctttaaacgtccgtgacgcacattcttcctggggctctagggctaatccgcctgccaaggtctcgacccatccatgaacactgatgtaagatatatctgcagtattacatcaaaaagaacggggacaatggctacaccaccaaaaatgagtgacctcttgtcgtgccaacgccagctgatcacacagctgccttctcaccataagacaaaccttctcgccagccaaacctgttgaccaaaagatctgcacttctgacaa

SEQ ID NO: 150493 - DNA, 447 bp, Zea mays
  Clone ID: MRT4577_68775C.1
taaaatgctgatgctcatccgcggtgcggccgctcataatcatgtgawtcccccggagctgatgratttcggatcatggrtaaatccmattmtatccaattgggatccgtttmtccgrtctccggcrtcctwttcrtggtggggccggcrtggccgggattctccggwtgccgtggtatcattmatccggccttckgcgctmarcgcgctrbcrakgccmrtrataatctcmttggcggctgcgttccggcggctgggtgccracaacgccgtggargcggtggtgctcgmgggccgcggtcgcgcgtatctgctccggggtgadcctaacggcggcggcgawggtgttaaagggcaatgtaaggagcgtcgcakcgrgccccgtcgtgasagtgakgctctgccgaakgccagtcgtcggcgcagtcgccgggttcgccgtakctg

SEQ ID NO: 150494 - DNA, 138 bp, Zea mays
  Clone ID: MRT4577_68776C.1
accaacagatgatggatggagtcctgatgaagatactggaagaataaatgtgaagtgataaagaaatgaggctgacgatgctgacgtgacagatgtagctaagtacatgaactgtgtcatagacattggcggggggga

SEQ ID NO: 150495 - DNA, 578 bp, Zea mays
  Clone ID: MRT4577_68777C.1
atccaccactcagctcgcgagaccggagacggactgggggaagaagaagcggcagcgccaaaaccctactgcccccgcgcgctgccgcctcagatctccgatcctagccgccggtccagatggcgggcacggggcggtccatgctgctgtcgctcctgctgttcgcggtgacgctgtcgctgctggagatgtaccggggctggttcgccgcgtccgagctcaagaccatcgccggcggattcgtcagctccctcctcttcctcctcctcctcacctttatcggtaattaccaagaagctagtggtgttagaactgggtggggtgcagttgttgtagcacaacttgttgctcttattgtagctggcactgtccaccgcgtttgcatcacaacatgcttcctgttctctgccgggatcctttacgaggtcgacaagctctccgggatgatcctcgcgaggagcgagtccaaggcgaggcggtactgaggacgcaacacatgttttatgtaaggttgacctgttttgtagatcgaatcagaaactaatgcccacaccctccgtcagacttctcaacccaat

SEQ ID NO: 150496 - DNA, 352 bp, Zea mays
  Clone ID: MRT4577_68778C.1
attttctcatcacttaacccttctatcggggcagtgcctattcttaacatgggtgcattctcacctggatttctagttgatttatgggaggcactagaaatgcccatttttgggccacctatccagaattcacaagaaacaggacacgagaaacagttggctacaagtagttcaagtgtgcaagtatcctccgtgaggcaaaaaaggaatgccaaggacacagcaaacaggtggtcaaatgtgctccacaagattactggaaaattcaatgattcaaaggagggcactttatctgatagtattttattttctcatgagtctaatgatgatgcattaacttcatgggatattg

SEQ ID NO: 150497 - DNA, 387 bp, Zea mays
  Clone ID: MRT4577_68779C.1
acatgttgcagcacagaatatgtaaagtggtgccttatgatccggcctttgaggccgctcgcgcccttctcatggcgacaatgctgcacagatggttcttgcatctcctcaccactcatcgcctgtcgagcacctgacaacttctagcagcccgggtcttataggaccgtgaccctaggtcatctcggcggttcatgcctttggacgccccaaccataagaagaacaaggaggaggccgatgtgcgtaccaaactggtgtcactcccttcactggaacctacagaccttgccccattggtagttattaccatgccttcgctcctgttgcatctgcaggtcttctactgtgagcctgtgtgtgccgtcactcgttcccgcctttctct

SEQ ID NO: 150498 - DNA, 1093 bp, Zea mays
  Clone ID: MRT4577_6877C.1
aaaaaaaaaaaaaaaaaaaaaaaaaaaaaaaaaaaaacacgacttctcggcaacggatattctcggctctcgcatcgatgaagaacgtagcaaaatgcgatacctggtgtgaattgcagaatcccgcgaaccatcgagtttttgaacgcaagttgcgcccgaagccttctggcggagggcacgtctgcctgggcgtcacgcaaaaaaaaaaaaaaaaacacaacaccagaatccgcgaatcacagacgcgtctatctcagcttgctgcactgcactaccctgccctgccatcatatcgtacgtgagcccggccgagcgagagcgagggagaggcatggctgctccgaagctcgcgacgctggcgctggccgtgctcctggcggcgaccgtggtggctccccccggccgcggtgcgcgcggcgatgtcgtgctccaccgtgtacagcacgctgatgccgtgcctgccgttcgtccagatgggcggggccatgccgccccagccgtgctgcggcggcatccgcagcctgctgcagcaggccaacaacacccccgaccgccgcaccatctgcggctgcctcaagaacgtcgccaacggcgccaacgggagcggcacctacatcagccgcgccgccgcgctgcccagcaagtgcggcgtcgccctgccgtacaagatcagcaccaacgttaactgcaacacgattaattaagtgatgaggcgtcctgtgcgcgtccgggcgaggaatgcatgcatggcgctggcggagagtaataaaataatgctactggtattttaagctatatcgaggtgtgcctgtctctagtcatttattacggtgtttaggaatggtctacacagttcgtaacggtgtatcgtggatgcatgttgccgcgagcagagtacgtaggcatgaaccgatgtgtgcgcttctgtctgtttactctctctatgtagtaatgtgtgggtgctttgatccagatgtattcgctcgtgagtcgtggaagtagatcgtttcagtatgaaaaaaaaaaaaaaaaaaaaaaaaaaaaaaaaaaaaaaaaaaaaaaaaaaaaaaaaaaaaaaaaaaaaaaaaaa

SEQ ID NO: 150499 - DNA, 514 bp, Zea mays
  unsure (1)..(514): unsure at all n locations
  Clone ID: MRT4577_68780C.1
tatttggtttagcagagtttgattggttcacagacgaaaaaaaaaaaccccgcccaagttgttgtgcctgtgtaaaacccgtcgaaataaaccacccgcatgcagagtattcttctcaaacgcaaacatgcagatggaatgcagaaaaaccaagcttgcaatccttgccgttccagagagtgaaagtgaacggcaggatttgtatcacgtgaccaaaaaaaccatagtagtaaaacgaaaatcagattgttttgtttgcgggcacgcacagggttcgttaatcctctgccctactcctaactcggggggcggcttgagctaggcgcctagtcccacaggtccatgtcaccagcgccggcgcaaccggcatgctgctcctcggggcactccacggcgggcggcggggggtcgttgtgccccccctgcccccggctngcgttgtcgggacccggcgtcctgcctgccgtgcggcccctgtcctctgctcccctttgttcctttctcctttcccccg

SEQ ID NO: 150500 - DNA, 469 bp, Zea mays
  Clone ID: MRT4577_68781C.1
ggcaaatggtctcatgggttggcttttcctttccctactcctacgccgacatgccagtggttgtcaaagacagggtatgtaagagaagaattgacgaagatgctcaagatgatatctaccactgggtgggggtagcaggggcagcagtctcagcaccccagccctcgttgccagtctgagcatcgccagacgcagcccagtcaggggtatcagcgtcccaactggtgccgggggcagcggcggcctgggcagtgaaagcaccatcagatgcgccggagacctcccactcgctagtgaagccatcaacgacggcaccagggccaacctcgtcggcaccagggaccttggccttctcaacaccagcgctgtccttgttctccttagcctcggggtcgcggtagaagtacaagtcagtcatgacgtcccactcggtctttcggttggcgagggtgccgcggaggccgaggac

SEQ ID NO: 150501 - DNA, 285 bp, Zea mays
  Clone ID: MRT4577_68782C.1
cgagttttgattcgaaggcccgctgaatccaggggggggtgctatgatctgacgaccagcctcaacagaaccaccagctgataggctttattagcacaaaaaacagctctctacagaacttgaggatctctacaaacgacacaaagcacatacacaacgtgatgccatgcttgctattcacccagctaccaatccacatgactaagtcatccaatactaagaacctatttcaatgcagtgaacaaaaacagctgaggtgaggtgtgcacaagttgaaccaatcca

SEQ ID NO: 150502 - DNA, 895 bp, Zea mays
  Clone ID: MRT4577_68783C.1
gcccatgcgatcgccacgcttgcgggcgccgccgcgcgatgggctccgcccgctacctcgggctcgcttgccaccgcgccgtgggctgccacccagcgccgcggcgccaagatgctcggctccgacgtgaaacttggaaatgtaatacaaagaagaggccacatttatcaggtaataaaagcacaacattcacatcaaggaagaggaggggccacaatacaggtcgaactgagggatgttgacactggaaacaaaataacagaaagatttcgtactgatgaggcccttgagagagtttttgttgaggagaagtcattcacatatctgtatcaggaaggagatgctgtgactcttatggagcctgaaacgtttgagcaacttgaagtttcgaaggaactgtttggcaaagctgctgcatacctaaaagatgaaatgaaagtgaatctacaatactttgatggccggccaatgtctgggacagttcctcaacgagtgacttgcactgttgttgaagcacaaccaaatacaaaagggctaactgctcaaccacagtataaaagggtcttgctggataatggtcttacagtgcttgcaccaccttttattgaagcgggtgagaatattgtaatcagtacagccgatgattcttatatgacgagagcgtaaggggtatcgtggatgacgttttgttctaccaaatggggatcgattacaatgtggctaccagaataattttatttacactcagttgtggagttgccgtaaacagtgagccttggcggacaccaaccaagaacttttagttcttagctaataacccacacattttgtactcacatgtcttttcgttttgttcctcgcttcaaatatttatgcaacagaatccattcatggc

SEQ ID NO: 150503 - DNA, 239 bp, Zea mays
  unsure (1)..(239): unsure at all n locations
  Clone ID: MRT4577_68784C.1
tctcatctcaacaagctctccgtaccatcgccatggaccccnccaccggcaactgttccttctctccgctgggcatcctaatcttcccattgctcgcgttcttccacatgctcccatgcctggaactctcggagcgtctggcttcgcggagccaccgcatgtccttcgtttncaccccattcaaacttgctccccttccgtcctagatccacgacctgcaccttttgccccttcccctt

SEQ ID NO: 150504 - DNA, 365 bp, Zea mays
  Clone ID: MRT4577_68785C.1
agcgggttggccgaggtcgaggccgggaatggtggcgggtggcggcgtggcaaaagctactgctctgctctgctcgctgcccgctcccagagtctgatccaaacgcctcgctggtgtcatgctgatgcgccctcccctcagttaactattctactcttctgctctgtcagcagaccacgagacgcgcgcgcgaaactcttctctctcctttgcgcacctctttcgtcgtcgtcgtcgtcgatcttcctccggtcagttttcaccgcttttactttacagtccactcgtacccgcgccagccatttctctgtttgactgccgccttccttgcgcccccacccgtttctcttttgtttcgcacccct

SEQ ID NO: 150505 - DNA, 1572 bp, Zea mays
  Clone ID: MRT4577_68786C.1
ctcgaggccggccgggaggctgtcgcgtccgacgcttcgcttacgccttcgggcgagcggcgctgctctcccgttctaatggtgaggtctgacggaaatcgagatcccaaccaaattcgttttttttagcgtgggagaagcgcggcgccaagacggcattgagctcgtcggcggcgctttcgaaagctggagcacgcgaagagcacattgccagaactagggttcaacaaattactttccatgatgtcagcgtgtccactgcttgaaccgaaatcaagattagaccggtgaagtgcaagcaaaagaaccccttctggaagatggaatcaagaacccaccgagttacatttgctagggaatcttgcaaaggccggtgtggcccgggattggagatcggtgaaaggcgaatatgaggggctggaaacagaccgacaatcgcttcgtgaaaactgtgcgcgtgaattggctccagtagagcatcaaaagcattaatggaaagagccccatagtggttggaccttggggagggacaggagggtacccttgggatgacggcgtgtactcaacaatacgccagatcgtgattggccatggtgcagctattgactcaataaggattgaatatgatctgaaaggaaggtcggtttggtcagaaacgcatggaggtactgatggtggctccgaaacagataaggtgaaactagattttccagatgaagtcctcgtgtctgtaagtggacactacggatctgtctgcgggacaccggtcatcataagatcgttgacgtttcagagcaacagctcgacgtacggacccttcggcaccgaggatggcacacctttctcactcccagttagcagtggcaagatcattggattccatgggcggtctgggtcgtatctcaactcaatcggtttctacctgaagcaggtgcattttccaactccagtgaatccttctccagcttcacctctgagcctcccgagtccacaaagtagaaacagcgcctatggcctcaccggtggcgacgctagacctgacatggttctcgccgtgcgagatagaggtgacagctatgctgtctacgcgagcaatcaccccaaacagcagtacacaaacccgtcaccggacggagcaatctggaacaagatggtttctgtccccagttactacggagatactacaggagctgcagccgtgggcggcagccctcagacctatggcccctggggtgggagcggcggcaccatatttgacgacggcgtgtacactggcgtgtggcagatcaacttgacgcgcgcagtgggaatctcttctatcaaggttctgtatgatcggaacgggcaggccgtgtggggtaacaagcatggtttcagcagcggtgtcataccagacaagataatattcgacttcccgtcagaggtgctgactcacataaccgggttctacgattcagcaataatatggggcccaaccgtggtcaggtctttgacgtttcacacgaacaagcggacgtactggccgtacggcgataagtacagtacgtactttttcacgagctttaccaatgg

SEQ ID NO: 150506 - DNA, 658 bp, Zea mays
  Clone ID: MRT4577_68787C.1
catccttcgacacctggtccgtcgcgtgccgtgcccacccgctaaggccagggcgccccgactcgagctcaccgcgtcgaactcgaaccgctgctgttcctcggtaagctcatcgcttccctagtttcctccggtcagtttatgcaaaagcaagccccttttcagctcgtttttggccggccggccggccgcttggttggttgctttagccttttgtgcgtcctgaataaagaatccgccgtggaggtggacaaaaaggaaggagaggctgagctgttcagattccgattcttttggttagagttcctgagctgttcaggatccaggctattgattcagagtggagagaaatacgtgggccatggttaatctcttgttcagctagtaatcgccccagcagctcctgggactgggagggagctatttttcatgtcaagggcgtatctgtaactctgtaagctttttttttcggcctttgtgcactcagcaggcctgtttgtttgagagagagaaaaaaaaccacaggtagcagcaagaagctgaagcatatcacggctctgactaccccacactgtcactgactgactctgcatctaacctgtacgcgcacgcacgtgtttcgtggttctggggattcaagggcagggtcgtcgaggat

SEQ ID NO: 150507 - DNA, 312 bp, Zea mays
  Clone ID: MRT4577_68788C.1
tcgttatctgatggaatatggaagatcatgcacatgtgctggaagtatcgaaatacagacaggacgacttactagggttataatagttagcaccgagagaccagggtcatgcacgtgagttacagtattaaccgcacagaaaaatgtatatgtgaatactagaaatgacaatggacagaatagaaaactgttgagtcctggtgctatagattgtaagtgtaagcatgtcacaccagcatcagtattgcaagtttcctatgttgcatatgtcatggagagtgtgctgacatgcctatgcatctttatatgtat

SEQ ID NO: 150508 - DNA, 568 bp, Zea mays
  Clone ID: MRT4577_68789C.1
agggcgattggtgtcctcgaggccggccgggaacccttcgactaacccatccagcaaaaatggccgctgatacccccgcgaagtccggtctggccgttggcctcaacaagggccacaaaactaccccccgtgttgtcaagccccgtgtttcccgaaccaagggtcacctgagcaagcgcaccgctttcgttcgcgaggttgtcaaggaggttgctggcctcgccccctacgagcgccgagtcatcgagttgctccgcaactccaaggacaagcgtgcccgtaagctcgctaagaagagactcggtaccttcggccgtgccaaggccaaggtcgacgagctccagcgtgtcatcgctgagtctcgccgtgctggtcactaaatcgcttaatctgatttctgggaatctggaaccgaatggggttcgcatggattggcgtggtcacggtatgatctaaaaaattaacggctttgatgctccgtggcaaagaagctgcggctcaccggaataccaacactttcaaacaaaaaaaaaaaaaaagaacaaaaaaacaaaaaaaacccgcggcc

SEQ ID NO: 150509 - DNA, 561 bp, Zea mays
  Clone ID: MRT4577_6878C.1
aaaaaaaaaaaaaaaaaaaaaaaaaaaaaaaaaaaaaaaaaaaaaaaaaaaaaaaaaaaaaaaaaaaaaaaaaaaaaaaaaaaaaaaaaaaaaaaaaaaaaccacccgggcccttgttatattttttccaaaggggggggaaaaccatcggggggccctccctttttggccaccctgaacaaagggttttttgtcccgggggcccttgggcccccatcccccgggggccaatttttccaagggcccaataacccctttggtaggttcccatttaatcctttctttgcccttgaatacccccccgggggggcaaaacccaaacccgggcccccccaaggggggaaccaccccgtttgggaaccgggcaaccttgcccccccccgcgggggccttttaaaggccctgccccctaaccgtcccgttatgggggggcttggggggcaacgggggccagaaattggaaagggcttttttccccccaccctcggtgaaaccgggggggcccacccccggaacgtctttaagggccttattaaaaaggcccggcttgaccggggggac

SEQ ID NO: 150510 - DNA, 1259 bp, Zea mays
  Clone ID: MRT4577_68790C.1
atgctgtgttgctccgacccaaacgggatgttcccgtgaagcggcgtgccgcgaccgaccgcaaagggcaggtccacgaaggtaaagcgcgaaggaaagagcagcagcgttgcagcgacgagcacaaaaagaaaaaggaaattcctctcaacatcaccagaccacgacctccctgccgagctccctccctctccgttggtgatggcatctcagagctccaagaccgcggacaccgccgcgcctccgccggaggttgcagccaccggagaggcggctccgggcgcggcttcttcaacaccggcacaaaaccctaacgctgctgcaaccgcagtggccggggccacggatctagagaagaagatgcgccgcgcggagcggtttgggatgccagtactgatgtcagaggaggaaaagcgcagcagtcgcgccgagagatttgggactggctcttcaagtgtaaaggaggaagagaagaagaagtccagggctgagaggtttggccttgcctcgccctcttcttcagatgaggaagctaagaaaaaggcccgtttggaacgatttggtcagagcgcaaatgtcgacaaggcggaagaagaaaaaagaaaggcccgagctgcccgatttgcagaagcgtctggtggatcagcagctcgggaaaacggcaaagacagctcgaagccggacgcagccgctgttaccggcacagcttgatttgagcactctgccttgggcgaggttcgttaggcaatgctgttaccctcccagaacgacgttttccttaccaaaacctgctgctgcagtttccctaacatgaaaagaatcgacttggtctcctgcaggtctcagatatattgtctcctaggagactttggtgaagccatagcttttgtacaccactaaccgcatggacgggggcgtcctgtgtttcccagtcatgttcagtgatgtttaccgcgtatgactttattagttgctgggcacactggcagtgtagctagatttgctgcctggtttgtggatggtcatgtaccttcggttggctatttggtgacgatgatttcgtttccatgtaccacccagtcgccctcctctgtttgtaccccgtgtttttgttgctagaatgctacgcgatgggtgtttaaacccataatcatggagcatttgcatcacattgcgcgcgataaactagtcagtaaacagaagcaagcaaagcacctagagattcactctttttttaataaaatagtgagtccacatcc

SEQ ID NO: 150511 - DNA, 233 bp, Zea mays
  Clone ID: MRT4577_68791C.1
tacaggacccttaagccctggacataccgacggacgaaacaacttataccgaaaccttgcctgaccgtaccacctcgggtcatgggcgactcttcggcgaccgagccttgctgcagccacctgtcggcccacctctcggtaatagtagccacaaaatgcgctcaatgaaccttgcctgtcccactgcgataacatcgcgagagacagcgcagaagacatatacgcatcgaaaa

SEQ ID NO: 150512 - DNA, 373 bp, Zea mays
  Clone ID: MRT4577_68792C.1
aataggtctaattccagcacaccggcgggcccggcgagggggcccggggggggcaccaagcggggggcaaggggggccacagggggggggggggggaaacccaaagccgggcccaacccgggaaacccggcgacccgcaaacacaaggcgaaaacaccggaaagcccaacgagggagcaaaaaaaaaaaaaggggaaagagcaaaaaaaaaacagggcagcccaaaaaacaaaaaaaccagcggccccaaagaaggccccaaaccccaaaaaaaagcgggggacaaaaagggcgcaattccgggtaaaaacccaccggccccctgggcccaagaaaccccccaccccccccggggccccccccccccacgggg

SEQ ID NO: 150513 - DNA, 283 bp, Zea mays
  Clone ID: MRT4577_68793C.1
ttcccttcttcacctttcgggtgttagtaaaattacacagatttccctctctctgtggtctctgtctctgtctctgactctttttagggatgttagcaaaattacacagatttcccttctcttccattcaccttcgggagatgtattagcttgagatttctgcggggtatcatcattactatgactaggtgtaataattattgccgatctgttataacttgtaatgctgctttgaaattttcaacatttctttgccacctatttatagaattttattcttaag

SEQ ID NO: 150514 - DNA, 353 bp, Zea mays
  Clone ID: MRT4577_68794C.1
cttggaatctcacttagatgaccaaatgatctcataccccaaattcctttctatcaagtcagtttattcatagaatgacatccactctcatatacaaagatcactcaagcagtagcaacaagtaaattcgcaaatgcaaacttgggtatcatcaggaggacctcaaattcttactcacacacacactactcactctaacacctttctagaccccactcaagaataatatcagctcatataaatttataatttttacccccaccctttttttatgcctcccctcgatccactactcattactaacctttatattgatttttctataaaaaaaattctaccacaatccttttttt

SEQ ID NO: 150515 - DNA, 814 bp, Zea mays
  unsure (1)..(814): unsure at all n locations
  Clone ID: MRT4577_68795C.1
ttgggtacctcgaggccggccggggccctacccttcgatcctatctccgtgggatttttacagccgcgctcgccttgccgtcttcatctccccgccgacggaagcctgctcccagcaagccccagccgcgtctcgtctccctctcccttgtctccctcacacacgtttctctctccctcctcttcttccttgctgcgctccacctcgccccaggtgctcggccgctcatctccctgctgccgcgtccctgcgcccggccttcgtccccgtcgcgccgatccgcgctcgcccaggtcgcccgccgtcgcccagctcggtgccttccctgctcctccaagccggcgtcctctgccctcatcttcttcctcagccggccgaggtccttcccatggcgcccctccctgctcccgtgcacgtgcccccctggtggtcggagctcgccaacgccagttgttcctccacacacacctcctgctcccctcgccatggcatggatgaccgctgtatctgctcctgtcgtgctcaagtcgtcacaggttggtgggttgtgcgcgcctagcggagtttaaaacacaagcaaccacattggcatcgcttcagcatcccaatttatgtaaactgatcggctattatgcaaaagaagattctaatgaaaggatgttggtctatgaacggctttatcatggaagcttagataagctactctttggaagatcagatggtcatttcatggactggtctaaacgtttgaaggttgccctgngtgctgccagaggtctagcttcttgcatgatgaaagacccttttcagccat

SEQ ID NO: 150516 - DNA, 191 bp, Zea mays
  Clone ID: MRT4577_68796C.1
attcggctcgagctaaagccggttctttgttttgaccctgggactgatcgctggaggaatgtggtgaatgcaccactggtgcaagccgaggaaaactagatgactgtactacatgcttgacaagggcccgatcagcgatgggacactggagtgattaatacgtggcaccaaagaagatttgtcattcagat

SEQ ID NO: 150517 - DNA, 1073 bp, Zea mays
  Clone ID: MRT4577_68797C.1
cttccagaaaataggggaagaaaccgctatactgatgtgttgccatttgatcaaagcagggtacagttagagtcttcaacaggcaatgattacatcaatgccagccatatagagattgctggcagaaatctaacgaagttcatttctactcaaggaccacttgccaatacaattgaggatttttggcagatggtatatgagaaccactgtcctgtgattgttatgctcaccaaatttgatggtcttaagtgtgatgagtatctaccattgagcaagggacaggctgtttttggaaaatttaccattaagatcacaaagttcaggaaagatggtcagttattgttgcgtggtgtggagattcgacaggatgagtcagatgaagtgcgatctcttctccacattgagtatccggagtggcctgaccatggggtgccaaacagcagtgctgatgtaagaagaattctaaaaagattgtatcacattccaagagagaggccaatagttgcacattgcagcgcaggcattggaagaacaggtgcttataccaccatccataatacaatagagaggattttacttggagaacagggggctgctgatcttgttgaaactgtcaaaaaatttagatcacagcgacctggaatggtccaaacagaggagcaatacaaatgttgccaccatgcaatcagagatgaactggaagatcttgtatcgagttcaaaaattgagccgctttcgaggaacgggtaacgctagcagtgatgttctactgacctatctgacagcgtgatacctctttacttgctccattcttcaagcttcggcgatagccgttatgaacatcatgacttctgaaatgttgcgttttatctggagttttaaagcctttacaacattcttcaaccttctatgatctaacattcattgtggtgtatgcatgaaattagaatttagattgatgatatattattgattgtgcccgcccccacacccccacagattgtatttttggttaatggtgtatgcatgaaatatgatgcacaggaaagatttgattttggtgtgttgttgtt

SEQ ID NO: 150518 - DNA, 2734 bp, Zea mays
  Clone ID: MRT4577_68798C.1
cctgccgggaggatttttacagccgcgctcgccttgctcgcccaggtcgcccgccgtcgcccagctcggtgccttccctgcttctccagccggcgtcctctgccctcatattcttcctcaggtccgaccggtgccctcatccccctggctggcgctcggcttcctcctcctgaagtccctccgcgcgccggatttcgagctccattcatggcgcgctccattcctgctcctcgacctccctttgccctcttccatggtcggtgccctcttcagctccagctcggcctccagctcccgtgtcgcgcgccgtggagctccctgcgcgcgccctggcccctgcttagatttagcccagccgagtcccatattccatggctgccgcgctctctgctcctcccagtcggccgaggtccttcccatggcgctcctccctgctcccatgcacgcgtgcccctggtggtcggagctctccaacgccagttgttcctccactgcgctggtcgtgtgttccctccacacacacctcctgctcccctcgccatggcatggatgaccgctgtatctgctcctgtcgtgctcaagtcgtcataggttggtggggttgtgcgcgcccagcgtgggttggcggccatcggcgggttcttccaatcccccctcccccggcgtgcgctccctcgtgtctctcttggcgacgactgggcaacggtcgcagctgtatgttcgagcccttcgccgacgacgttcaccaccaggaattttctcagctgtgccaatgatgggttgcttcactgttctcagatccaagaagaagaaaagccattttgataatcctcttgtcccaagcaagaaatcagttgatgcaagggaaagtacgtcctctagacttccggagccagaagttcatgtgccatctttgcaatcagctcctcctagttttaggaacagggtcaagatatccgagtcatcaaatgaagtttcaaacagaaacagcagggctcgcgtgctgtctgctccatcagcccttattgtggtcgatcagtttggctttccatattcggaataccgagatcaagatgactccagggataaggaaggtttgacaaaggggcatcgcttttcaaatcctttgccccttcctcttccttcacgcgaaggacattcttttaggaactctggtagtttcaaagccagcaacgtaagcgggccattggagatgtctggccctctcccattgcctctaaagaaatgtgatggacttagaatcttctcttatgaggagatttcatctgcctgccaacggttttctagtgatcagtgtgtttcagaaacacttggttcaacatcatacaaggcaacatttagagatgaatttattgatacgaggaccactgaagcaacagtagctcgattactcccctccactcagagtttgaaggagtttaaaacgcaagcgaccacattggcatcgcttcagcatcccaatttatgtaaactgattggctattatgcaaaagaagattctaatgaaaggatgttggtctatgaacggctttatcatggaagcttagataagctactctttggaagatcagatggtcgtttcatggactggtctaaacgtttgaaggttgccctgggtgctgccagaggtctagctttcttgcatgatgaaggaccctttcaggccatgtacagcgagttctcaactttgaacatccaaatagataaaggtttcactgctaagctttcaggatatggttgtgttggcttcaataccgaggagatatctaatgcacctgtgtctgcagcaaacctttcggtggagaccttggagaagggtttactcactcccaagagcaacgtctggagctttggagtcgtgttactggagctaataactggaaggaagaaccttgatcccaattattccaaagaagaacgcaacattgtcagctggagtaggcctttccttactgatgacagtcgcctatctcttatcatggactcccgtataaaagggcgctttcccactaaggctgctcggatagtagcagacatcattttgaaatgcctgcgtaaggatccatcggagaggcctaccatgagggatgttgtggaggccctagcaagagtccaggaaataaaggttccgtgcagatatcctctgcaagaaccttctgctgcaccaagaaaagtgatgttgaaatctacatccctcaatgggattgtgcctcaccatcctgtcataaccttctctccatcgccgccttcacataaccagcacttgatttcaccaaggtcgtcgacatctgccttgtttcatccaagggcatgctcttctaccctggacgatccgagtgtaagttctataaagaaaacaccacctattatgcgaaggtctagcgtcgaaggcttttgattgtccatattgttcctttatttccttttcttggatttatttgtttctttgttagtagtgtagcggtttttagctgtgttctgtattgtaagacaagtggcctcatatgtagtgcccttgggtctggagtaaagcagaacaggatgaattgtaaataggaccaggttgtagataccttttttttgtgctcgaattgggtggaagcagcgtgccgagtgggccttgtaacctcataatgcaataaactccgtttcccagtttctgttaaaaaaaaaaaaaaaacccaaaaaaaaaaaacgaaaaaaaaaaaaaaaa

SEQ ID NO: 150519 - DNA, 555 bp, Zea mays
  Clone ID: MRT4577_68799C.1
cattgggtacctcgaggccggccgggacgcacgatctacacatcactgcttgcgtcggcaatggcacttgattccttctcctcgagctccacagacgccgcaacggcggtccccagccaatgggcagcgaccgtcaccctccttcctccgtggaaatacgctgctgacacagggcgaggggggccggccgcagtttcgcgcgcgcgcagctgaggacccgcaacactgctatctggctccccggaagaacccctccgccgtgactacaccctggacttcccggagacttcctctttgatccctgtggcctacgatctgaccctgaaagactgaccgtggaacgctgagggggtacctggagcactgcgcgagtggacaatgctcggagcggtgcaatcttgatgccggagctgcttgctgacatccacgggctcgacaccgccttcttgtacaccggccgacaccacgatgactttaccgacacgcagccaccctcttcatgatggagctcatcatcatcagctgttcacgagggccgccggtgggctgatgtca

SEQ ID NO: 150520 - DNA, 1287 bp, Zea mays
  Clone ID: MRT4577_6879C.1
atggaggcgctcccggctgatgaccaaagaccctttgaggacctcataatgcgcgatgagaaggaggtgatgcggcaatggaacgaacaatgtgacaaggaggaggaggaattgctgcataaactctccgaacgacgcaaggaggcagcaaaaaaatcgtccgctatcttacgccgaaccgtccggatatggcatgaatcgaccggcgtattacgccggaccatccgactctacacgagtccacgcgcagaccgcccaagtcgcgccatatatgaccgaatcatccgggcagcaccatatacatctggacagtccggacacaccttcggaccgtttggcccggttgcggaccatccggccccttacgccggaccgtccgggtatgcgtacgcagaaccaagagctgcacaaccattcccacactcatcgcagcaacaatatggtgccccaccagcaacacattataaccatgccatgccacttcatggacacagggctgaatactgttcggccactagagagcccgagagatatccctgggaaagccgacagagtgatgtcaggcaacttgagatttccacccacaaacttaatgggtggtcgccagacatggcggagaggattagagatgaagtagccggaatgttcagggacaaactcggtgttagtatgtcaagtacaggtcaatcgtatcggaagccttataaccaccgattcgacactgtgccgtatccacaagggactaggataccagacttctctaaattttttggtgaaggtgggaaaagcacgcacgaacatataagccaattcatagcacacttgggagaattggctaatggggaagcttaccacgttcgtttattctcgttgtcccttactgataccgcattcgcatggtacgcagccttgccaccgaattctattaactcttgggaagaattagagcggaaatttcatgaacacttcttcttaggagaacatgagttagaattggctgacttagcttttgtccaacaggggcctgaagaatcgatacaattggccataaatgagggccagttggcttttcaagagatgcaagtagacacacaaccatttcctgttaatacaatagaactcacatgcaaaaaagttttggttcgacccgaaatgaccgataaaggcaaaggcaaggacatcgtcattggcgatcctcacatgtcaaatatatcacaaaaggagattgctcgaaaggctccggacgagaaggctaaaaagtccgaaggcaccggggggcaggcataa

SEQ ID NO: 150521 - DNA, 1833 bp, Zea mays
  Clone ID: MRT4577_687C.1
aattcaccacttccgcaccgactctcccgaaatgtcttgctgggcagcagggcgccgctcatcggcgtcggccatggcggagaacgccggcgcgcggggcgccaaggaggcagtggtgacgtccggcaagcgcgtcgccctcgggaacatcagtaacgtcttccgcggcagctgggggtccggcgcggcgaattctgcgtccgatgcgaaattgagttctaccaaaccagatgatgttaagaaaggatcctatgcttgcctgcgcaatgtgaacacggaacggggttctagcagaaggctggcctctgaacagtttgatcaggcagtatcacttcttcagaagaacacatctcttccttctgtgccagacgttgtatcaacaggttgcagctcacccggcctgtctcaggattgctcggtctccatggaggatgctatgtcaacatgcaactcaacagaaagctctgatgttgagtacctcaataataatgacgacccctcaatgacatcttcttcgcattggtgggccagtgatagacctcatttctctgatagtatggatgttgcagaattcaactggaggaaacatagtcctaatcattacacctataaggatccacgactttctacaactcttgcctgtgaaatttacgagagcttgcgagaggctgagactaggaaaatgcctccaacaaactttttggaaaccactcagacagatatgagcaaaaccatgagggcaatattaatagactggcttgtagaagtcacagaagaatatcgtcttgttcctgaaaccttatacctcactgtcaattacattgaccgttatctttctgtcaaagagatcagtcggcacagactgcaattagttggtgttgcttgcttgcttatagctgcaaagtatgaagaaatatgcccacctctggtagaagaactctgttatattactgactattcatacaccaaggaagaggttttgcaaatggaagcttctgttctgaataacttgaaatttgagatgacagtacctacagcaaaatgtttcttaaggagatttgtacgtgttgctcaagttcctgacaagggctcatctctgcatcttgagttcttagtcaactacatttgtgagctgtcacttctggagtacagcttactttgctatttaccttcaatggtagctgcctcttctgttttcttggcgaagtttatccttatgccaataaaaaacccatggaattcctcactttcttactacacgcggtatacaccatctgagttgcgtggttgtgtaagggtactgcaccggctcttccgtttgggccctggaagcaatcttcctgcaattagagaaaaatacagtcagcataagtacaaatttgtagcaaagaagtactgcccacagtcaatccctactaagttcttccaggatctgacaagttagaagccaagattacttctagttactcaatgaaaccttcctgaggtacttagtgtgatactatgatattgatttgacagatagttttgaatgcaaggcatgcgcgaggccttgcgtttagcagataaacaggttcaagtaaactgtatgtcacttgtggcaatgttgtttcagtgttgtgctttgattgcttccagcatcgtcttatacgttgctgttgtggtcttctcacgctgtctagaacttttattgtatagttctggaccttgctcataacaagggtagatagtttggctaaagataaagtgtactcattctctcattgttatctacgtgttgcttctgtattccgaagattctgctctgaaacccagcaccctgtattatcaggc

SEQ ID NO: 150522 - DNA, 631 bp, Zea mays
  Clone ID: MRT4577_68800C.1
gagttgaagtcggcctcgtccttcaatggagtcggactgccatgagaaagatgcgtcttccctgccagatgaagcagaaagaaggactgccgcgtggagtaatgtagagacttgatcgaccagatgcaatgggagagcagtaaggtcgtcgtcatgaagttagaaactgagtcgcatgagtgagttaatgcatgggataaagctagatggatctagtatagtagctagctttcatcatccgaagggaccttgggtgagaaagatgcgtcttctctgactaatggagcagtaagctagagtgcgagttggacgcatgtgatcacccatttgctcgtgcatggcgggggttggtgttcattctggtctcgttcttgttggttttcccttcctttgtagttggataatctttgttggatcaagtatagtttttctagtgatagaacctataaggatgttatttgtagctagcttataaaggggcgtgatttgcatcttaatttgctccattcccctcctcctattttttatttccttttctcttgtatcaaaacaatatcccccttacaatgtcattaatcatgctagctgaaattcatcaaaaaaaaaaaaaaaaaaaaaactcgagggggaa

SEQ ID NO: 150523 - DNA, 839 bp, Zea mays
  Clone ID: MRT4577_68801C.1
tttgggttcgccgttgctccgccggaccgttctcattgctcgtcgtggtcgagccgttctcagttactccccgtggtcgtcgcgcgcctgcgcgtagctcgcgccctactagcccctgctgcgggttgtcgagctctctgcgcacgcacaactcgctctttctttgtttgccgcgcacacgaaaattctctgctcgcaatggcgtgtcgagtttccgcgtcgagctcctctcttgcgtgccggtcatcgtctccgagccgattcttggctgtcacagtatttttagttatccggctgcgtcggtagttgtcaagtgtgtctgttgccgtgaactcgccccaggtgcccactctgtctctggtccgcgcttccttcagctcggccagacagggcattgtttcgtgctgtgcacgagcagtttcctgctcgccagcgtgccctctcggctcactcggccttaattcccaacgcgtcgtcaacctcgctggttgccgtcgttcatcgtagcgtcgtgtatgcagcagccccagacctatgcagctctaagtcactcttccgtcgagtcgtcgaacccatcatcccttgctcgacccccctcaccagctcgctccaaaaacgatctcgtcgtcgttccgcgagtcatcagaaaaatccccaaaatcgggtgaagacgaaattagcagcgtggtattcaccaagtgcgtgacaaaagctcggatatcctgcgcgactcaagttcgactcgtcagaattattcagtcgaggaaaagatctttagcaattgattaccgaaagaaagaaagcccctagatggcgtcaaccggaacccgtcgtcgtgc

SEQ ID NO: 150524 - DNA, 225 bp, Zea mays
  Clone ID: MRT4577_68802C.1
agcaggtctggaggataagaaggttaccaagtcttagaagcaactccaaactgggtgggctaccctttttcaattttttttagtgacgtgctgtggacagcatgttcttataatggaccgatggatttgattaatcgacttgctttgctgccaagtacagccgtcactgcgacagtcatacagaatccaatatataagactttctatgacaatgttatactttgt

SEQ ID NO: 150525 - DNA, 406 bp, Zea mays
  Clone ID: MRT4577_68803C.1
atgatgcgctttctgagtgtctgaagagaaacctctatgtgcccacaacttcaagcagcaatgaagatggtgacatcaaatgcatcatatgtctggaggagtactcttctggtgtggaggtggccaagatggcatgcgagcattactaccataccacttgtatccaacagtggcttcagcaaaagaactggtgcccgatttgtaaatgtgacgcttctgccattagctcatagtgttcttgacagtaacagaagtatcagttcattgtaatcaaataggattacacaagtttttttggttctagaacaaattattcacttcaatcctatactgctcttcaattaacactaaaaaaatcataaaaaaaaggaaaaaaaaaaatagaagaaaaaaatttctctaaaaa

SEQ ID NO: 150526 - DNA, 546 bp, Zea mays
  unsure (1)..(546): unsure at all n locations
  Clone ID: MRT4577_68804C.1
ggattcggaattctccgaggtcgaccctacgcgtcgcgaacagctaacagacttgctttcattctatgccctgctcgctttatgggnctaatgcactctacgtgagccgtgcatacaacagtatgtgtgcaaccaaccagttgcatgcnatacaaagttgtaccagcttcttaactcagcgtagcttgtggcagaacgccttgctgcgctaacttgacaacaacttgacttccatttcaacgcaacatgacctgtgtacgaacttctgactgcgtacacttacaacagcgacatacagcttacttaatccacttagcggtggcataaacccattnnggtcgctgacctgtcctatcagcagcaacatattgctcgccatacnatccagtatctcttttgatgatacacctgccttgtcgttggcagcaaccccatcgcttggtggtgccaatcttttagattacatatgangatgtactcgataatggtgccctcatagcggcatgtgtttcctaaaaataatcaatatattgattgagatttatc

SEQ ID NO: 150527 - DNA, 172 bp, Zea mays
  unsure (1)..(172): unsure at all n locations
  Clone ID: MRT4577_68805C.1
tttttnntnttttttttttttnnnnnnnnnnntttcacttttagtttttgtttttttttttttgggggcgaaagcgcaaacagatccttattcataacataagaataccacgtggggttttacagacaaggcaaccacccggtggggttccaggcccagcagctgcctgttt

SEQ ID NO: 150528 - DNA, 409 bp, Zea mays
  Clone ID: MRT4577_68806C.1
cccacgcgtccgaaaaaaaaaaaaaaaaaaatataaaaaaaaaaccaacacataaataggcacatttaacaactcatgcatggcaaagtcaaatctcaaatatacatatacctaccaagcaatctactggccgctccatattcaactactctactctgtaacacccttgcctttccttacttaatcccatttcaacccatccgcctttcgccagccaacagcaataactaaaatacccattcctttccccatttcaaacattttcgcagcctttatagcacatgctactcaccctatcgctaatcttcatgcgcggctctcctttccactaacttcagcttctccattacactatgtaacgccctctgaccctctcctttaccttcattacttccctttttccccacct

SEQ ID NO: 150529 - DNA, 460 bp, Zea mays
  Clone ID: MRT4577_68807C.1
acgcatacggagccagctccgtgctgatgtacggccccaccctaatcctggccctggggaaccatagtgcctacagaaccacgcggcgaccctgaacggccacatcgtccacggctttgtggagttcatgccaagggacaaagacagtataaagtgcgctccatgcggctgccaccgaagcttccaccgcaaagactactgcgcgctcgtagccaccaccaactcatgctcccggtgaccacgacggcctctcggatcctgctgttcttgcctgcaccccacccgaactatgcgccgacatcgtcgctcccgtaccacggcacgcccagcggtggtggttgcaccgccaccgattcttctatcggtacaggtagatctcggttcgaggattaagcttttggcatggagtgatttgtgggcattcttttaagatgctgaacttgtgctcgggttagttttt

SEQ ID NO: 150530 - DNA, 515 bp, Zea mays
  Clone ID: MRT4577_68808C.1
caacaagcagatcaaaggaaacaagagggagatcatacagcttggtgtaccgttatttcaacctaccacagaggatgctaattgtcacacagaaccaatcccccttgtcctgcaggctgtcattgaccaccttgttctttggcgtttaataccagaaagcaggaaaccaaatagtgtcgtcatcaacttcttcgatgaggatgaacattcgcagccctacttcaagcctccccatcttgacaaccccatttgcactcttctgctgtctgaaaccacgatggcatttggcaggtcacttgtcactgacagcaacgtgccgacatggcgcgacatgtggtgtgcccgtcgtccaaccggcgcgtgagcatcacgttcgcaagggtgaggccatcgacgccggtggacatgagcccactcccgtcccccaccaaggccatgacaccctggcagccgcagccggtcacggcctcccaggtgccgtcgcccgtgagcatgacgcagaagcccccgtcagc

SEQ ID NO: 150531 - DNA, 384 bp, Zea mays
  unsure (1)..(384): unsure at all n locations
  Clone ID: MRT4577_68809C.1
ccccttcgactcacgcgtccggcggattgggctttccccttcggaaacgagagtgcaaaaagcaacancacancnccacccctcctntcccnccnagttcnnnaccccacncaaggcggngggaggagcaagaagccgccggcctccctcctccggctcaccaccaggcttactccncacctttcttccacgggtatgatcggcntcaaattctttattcccaaacaaattcancccnnannttcanccaaanctattttctaanaaaaatnncnncaatnattttnncnatnacttcnannancaanaacancatattacccctnnanaanaancannncttttctattcanctaccananctcccnttcccttnnnattcac

SEQ ID NO: 150532 - DNA, 937 bp, Zea mays
  Clone ID: MRT4577_6880C.1
cattgggacctcgagccggccgaaaaaaaaaaaaaaaaaaaaacacaccagaatccgcgaatcacagacgcgtctatctcagcttgctgcactgcactaccctgccctgccatcatatcgtacgtgagcccggccgagcgagagcgagggagaggcatggctgctccgaagctcgcgacgctggcgctggccgtgctcctggcggcgaccgtggtggctcccccggccgcggtgcgcgcggcgatgtcgtgttccaccgtgtacagcacgctgatgccgtgcctgccgttcgtccagatgggcggggccatgccgccccagcccgtgctgcggcggcatccgcagcctgctgcagcaggccaacaacacccccgaccgccgcaccatctgcggctgcctcaagaacgtcgccaacggcgccaacgggagcggcacctacatcagccgcgccgccgcgctgcccagcaagtgcggcgtcgccctgccgtacaagatcagcaccaacgttaactgcaacacgattaattaagtgatgaggcgtcctgtgcgcgtcccgggcgaggaatgcatgcatgagcatggcgctggcggagagtaataaaataatgctactggtattttaagctatatcgaggtgtgcctgtctctagtcatttattatggtgtttaggaatggtctacacagttcgtaacggtgtatcgtggatgcatgttgccgcgagcagagtacgtaggcatgaaccgatgtgtgcgcttctgtctgtttactctctctatgtagtaatgtgtgggtgctttgatccagatgtattcgctcgtgagtcgtggaagtagatcgtttcagtatcattaccgtgtgttctttcttaattttacattcgattctgaaaatgaacatgcacgaagctggactggtccagtatacgttgccgcatgc

SEQ ID NO: 150533 - DNA, 548 bp, Zea mays
  Clone ID: MRT4577_68810C.1
aggagtgcattgcccgtgctgggaggatgcaagatccagaaggtttcgtggccaaggaatccgtgaaggggcacatggttaatgtcgtgaaaggcttgaagatatatgaagatgcgtttacgacatcagagatcatgagggtggcgagatttcatcaacgaaattcgtcaggctggcagaaatggagaactttcaggtgagactttcatattcttcaacaagcagatcaaaggaaacaagagggagatcatacagcttggtgtaccgttatttcaacctaccacagaggatgctaattgtcacacagaaccaatcccccttgtcctgcaggctgtcattgaccaccttgttctttggcgtttaataccagaaagcaggaaaccaaatagtgtcgtcatcaacttcttcgatgaggtcacttgtcactgacagcaacggtaactacaaaggacctctcacactttcactaaagcaagggtccttactagtgatgcgtgggaacagtgccgacatggcgcgacatgtggtgtgcccgtcgtccaaccggc

SEQ ID NO: 150534 - DNA, 345 bp, Zea mays
  Clone ID: MRT4577_68811C.1
atcataagcaaatgtcggcaagttgggactattctgtcaagcaaccttctcaaagaattggtcagcaaaactcagggaactgggaagtgtacaaggaacagcaggatcaagccagcaaccggggggagcagacgaatctttgcagtaccaactgggtcatggatggctcccaggatgcttggaagcatggctatggctggggtcctgcagctattcagaccgatccatgggacaactgtcaatatagctatcaggttcctgacagccagggctcgtatggacactggactcactggagaaggtgaaacattggactttttttggaaccctttgggggttaagggg

SEQ ID NO: 150535 - DNA, 1163 bp, Zea mays
  Clone ID: MRT4577_68812C.1
cgtgggctagcatggatagatgatagcacagttttacaaacatcaaatatcccttgcattgcttgggcaagtgtcatttttaggctctccaagtcagttaatctgcttcgcaggatgaacattcgcagccctacttcaagcctccccatcttgacaaccccatttgcactcttctgctgtctgaaaccacgatggcatttggcaggtcacttgtcactgacagcaacggtaactacaaaggacctctcacactttcactaaagcaagggtaagcgtaacaattgcgttatttatttgatcatactactgtataagatgaaacataaggcttatggtcatggaatcgcgttccaaaaatctgcaggtccttactagtgatgcgtgggaacagtgccgacatggcgcgacatgtggtgtgcccgtcgtccaaccggcgcgtgagcatcacgttcgcaagggtgaggccatcgacgccggtggacatgagcccactcccgtcccccaccaaggccatgacaccctggcagccgcagccggtcacggcctcccaggtgccggcgcccgcgtgcatgacgcagaagcccccggtcagcggcgccatcatcggttatgccccgaccccgcagaccgtgctggcgcccgcggcctggggcatggccatgcgagcgcccgtcatgatggtggccgcagcgcctgcgaggcccatggtgatggcctcgttgggcaccggcggcggcaacatcagcaagcggatgagccgcagcggcaccggtgtgttcctgccgtggacggtcgggccgaagcggtacaacaagcaccttccgccgcgcatccagaagcgccggttctctgcgatgatgtcgcccatcgaggcgcagggctgaggacctgcccgacttcacgtcgccgtcgaacctgtgttttttttttccttgagggctttcggtccgcctgtaatttagccgggtttgtgacttgtgacaatgtgagtgagtagcggtttagcggagttcagaaccggtagaggagtacgagcgtagggataggtgaaggcagaatcagggcagggttttccctttgttttcatcctgtccccctttttcccgttccgagtaaaacttatggatgttgttgtcatacatgcatcagcagctgagtttgga

SEQ ID NO: 150536 - DNA, 327 bp, Zea mays
  unsure (1)..(327): unsure at all n locations
  Clone ID: MRT4577_68813C.1
accngggatggtgtgggaaggccctaggcaaggtgtattgtttagcgcatcctcaaaaaagacccctttgttggcctgcaccggaggggagaggctcagctgggaaaaatggttactgctaggggccacaacgttaggcctaactagacggggggcgtctttcgagaacacggcggggagactccttgtgtggccatctccaagaacgcggggcggtgttacgtatgacgctccgctatcagggttccgcttgctaggcgagctgctgcctcggcgctcggctgaggctgcctactgcttcgcaatcgggttgcctgctgctggcgg

SEQ ID NO: 150537 - DNA, 1310 bp, Zea mays
  Clone ID: MRT4577_68814C.1
agactcactccaaatgaaaatgcattgcaatggcagcaccggattgggattacgggtccacccacccgtccggctaattgtcacacagaaccaatcccccttgtcctgcaggctgtcattgaccaccttgttctttggcgtttaataccagaaagcaggaaaccaaatagtgtcgtcatcaacttcttcgatgaggatgaacattcgcagccctacttcaagcctccccatcttgacaaccccatttgcactcttctgctgtctgaaaccacgatggcatttggcaggtcacttgtcactgacagcaacggtaactacaaaggacctctcacactttcactaaagcaagggtccttactagtgatgcgtgggaacagtgccgacatggcgcgacatgtggtgtgcccgtcgtccaaccggcgcgtgagcatcacgttcgcaagggtgaggccatcgacgccggtggacatgagcccactcccgtcccccaccaaggccatgacaccctggcagccgcagccggtcacggcctcccaggtgccgtcgcccgtgagcatgacgcagaagcccccggtcagcggtgccataatcggttatgccccgaccccgcaggccgtgctggcgcccgcagcctggggcatggccatgcgcgcgcccgtcatgatggtggctgcagcgcctgcgaggcccatggtgatggcctcatcgggcaccggcggcggcaacatcagcaagcggatgggccgcagcggcaccggcgtgttcctgccttggacggtcggcccgaagcggtacaacaagcaccttccgccgcgcatccagaagcgccggttctcggcgatgatgtcgcccatcgaggcgcagggctgaggacctgcccgacgtcacgtcgccgtcaaaccgaacggccaagatcaagtaggacccggtgcaacgagccaccgtttaattcctagggttcttggagtgttttttttttctctctcgtcgtcgagtcaaaaaaagaaaaaagaaaagaaatggtcaaaacgcgcggacagtgagtttggtgtgttttttttttttttcgttgagggctttcggtccgcctgtaatttagccgggtttgtgacttgtgcggacgcgtgggcggacgcgtggggcggagttcagaaccggtagaggagtacgagcgtagggataggtgaaggcagaatcagggcagggttttccttttgtttgcatcctgtccccctattttccgttccgagaaaaacttatggatgttgttgtcatacatgcatcagcagctgagtttggattcccccccc

SEQ ID NO: 150538 - DNA, 2672 bp, Zea mays
  Clone ID: MRT4577_68815C.1
gcgggctgccatccgccacctccgtctgtggccgtgcggtccgggaggcaggccgccgttcgctgtcggcatctccggcctcgaggggcgggtacagtcgcccccctacctcgagcccgcccatctggacaaccccatttgcactcttctgctgtctgaaactacgatggcatttggcaggtcacttgtcactgacagcaacggcaactacaagggacctctcacactctcactagagccagggtccctagtggtgatgcgcggctgctgccccggcgtggccccccccggaacgccatgattgacgcgctgtgcggccacctggcgcatttcggcggcggcgggcccgagtacgatcccgtcttcgccgcgatccaccgccgccgcgccaactggttccccgtcctccacatgcagaagttctaccccgtcgcggacgtcgccgccgagctgcgccgagttgcggacgcccgcgccgccgcagggtcctgctgctactccgaggaggccgcgtccacggtgatccacgagcccatggaagaggctgaggctgaggctgaggctgagcccgaacccgagcaggagcacgagcaggatccggcaccggcggccgagctggctgacggcgccgtggagtaccacgagccggacgtggaagttgattcatcgggagattcgtcggagcggaagcccccctccaccgaagatgacaccgtcgcagacggacatcatactgatcaaggatctcaaggggaacacagcctaccagagagctatcccatctgctctgaccacgaggagtgcattgcccgtcctgagaggatcaagatccagaaaggtttcgtggccaaggaatccgtgaaggggcacatggttaatgtcgtgaaaggcttgaagatatatgaagatgcgtttacgacatcagagatcatgaaagttgcagatttcatcaacgaaattcgtcaggctggcagaaatggagaactttcaggtgagactttcatattcttcaacaagcagatcaaaggaaacaagagggagatcatacagcttggtgtaccgttatttcaacctaccacagaggatgctaattgtcacacagaaccaatcccccttgtcctgcaggctgtcattgaccaccttgttctttggcgtttaataccagaaagcaggaaaccaaatagtgtcgtcatcaacttcttcgatgaggatgaacattcgcagccctacttcaagcctccccatcttgacaaccccatttgcactcttctgctgtctgaaaccacgatggcatttggcaggtcacttgtcactgacagcaacggtaactacaaaggacctctcacactttcactaaagcaagggtccttactagtgatgcgtgggaacagtgccgacatggcgcgacatgtggtgtgcccgtcgtccaaccggcgcgtgagcatcacgttcgcaagggtgaggccatcgacgccggtggacatgagcccactcccgtcccccaccaaggccatgacaccctggcagccgcagccggtcacggcctcccaggtgccgtcgcccgtgagcatgacgcagaagcccccggtcagcggtgccataatcggttatgccccgaccccgcaggccgtgctggcgcccgcagcctggggcatggccatgcgcgcgcccgtcatgatggtggctgcagcgcctgcgaggcccatggtgatggcctcatcgggcaccggcggcggcaacatcagcaagcggatgggccgcagcggcaccggcgtgttcctgccttggacggtcggcccgaagcggtacaacaagcaccttccaccgcgcatccagaagcgccggttctcggcgatgatgtcgcccatcgaggcgcagggctgaggacccgcccgacgtcatgtcgccgtcaaaccgaacggccaagatcaagtaggacccggtgcaacgagccaccgtttaattcctagggttcttggagtgttttttttttctctctcgtcgtcgagtcaaaaaaagaaaaaagaaaagaaatggtcaaaacgcgcggacagtgagtttggacgtctgtgtatttcggtgacctgtgtttttttttttctctggagggcttttggtccgcatgtaatttagccgggtttgtgacttgtgactttgtgagtgagtagcggagtttagaagcggtagaagaatatgggtctagggataggtgaagtcagaatcaggacaaggtttttcgtttgttttcatccttcttttttcagttttttaagatgatgcttttagttttgctaaaaaaaaaaaaaaaaaaaaaaaaaaaaaaaaaaaaaaaaaaaaaaaaaaaaaaactcgagaggggcccgcaccgagaagaatgttgacatgcatatatgcatttcatgctgagtttgaagttctataagcaaaagatgcatcttgtgttgcccacttactggacgtcaatctttttgcttatatctttaatcttgaggtcttgtttggttatttcgaattgaaacccccccccctcccaatatttttttaaatcgattttggagtttgacgtccattataaatcacatggactaactaatttggctaattgctattttctcatgtgcataaagttccacatacacatccaccccagagttttatttttcccccccccc

SEQ ID NO: 150539 - DNA, 526 bp, Zea mays
  Clone ID: MRT4577_68816C.1
cccacgcgttcgtttaatagattactctctggcggccggctgtcttggtcaccgccgtctcccagtctccttctactacctcggatctcttcctctgctctccccttctccaccacgcgctaacagattggtgcctacggtttgaaccataatcccaactaatttatttatctcaacgatatggatttgtgtctgcagtttgttcttgtctggctgaaatgcttgaagttctcacttcgttgcacatggtactaaatcagacctaagatgtattcatgtttcatactcatttacatgagcctttgcacatggttagtgatgaactcttcccgtcacatggtactgggaggcgaactgtatgtggtcgtagctgtgccatattttgtctaaaatgttcgttatagtctagtaaaagcaccactttttgcaactaatttgggtattaattgcaaaatatagacatggatctcgctactatgaggagggtgcttattaggggtgcttctatagttgagggttatggtta

SEQ ID NO: 150540 - DNA, 432 bp, Zea mays
  Clone ID: MRT4577_68817C.1
atgacgcgatcaagtccagttgtgtcagaaggagctgttgctgaaggtgaaactgccgaagctgagcagattgtagttgaggacaggagtgatgatgaaaatgaagaagacaacagtattctaaacacatcaaaacttagccatattgaattcggaaaacccaagacgtctctagtcgacgtagagtcaaagagcttagagatggcaattatgacccgattcttccccttgagaaattcttctattagaagatatggatggggtaatttagtccatatggaaatcgaatcgaggaaaactttgtctctgtcagggtcaagggaacgaggatgggaactgttcctcgtccccgttctccgcatacccgccccggataggaatgaggagctgttccctgatgagaaattccccgttactctttatgttacttag

SEQ ID NO: 150541 - DNA, 212 bp, Zea mays
  Clone ID: MRT4577_68818C.1
cccacgcgtccggccatgcataccgacagtgcttgcggacaagcactatgtgattgcgcattcccaagtgtgccggctcgaatcatgctatcattggatactttgacaccccaaaacatatccgtatcatctgacacgttacacacaactgacgtcatgaagctggtggcgttattgtcgtccatgtctataaagatgacaggctgacttac

SEQ ID NO: 150542 - DNA, 298 bp, Zea mays
  Clone ID: MRT4577_68819C.1
acggacgggctcatagcctgtcctttccagacttttgaacacaacgtaccaaaagagcgactgtggacaacacaatcatgcactccatgccccgcctcgcccgtgtgaaccacttgactgacctgagcgagctactcgtccggaacaagcgactgtagcagctggtgaacctgaacgccgtctgccgctaccatggcatcccttccaaggacaaagaggagcagacctagttcacaatgatgttagacctgatagagcagtacaacctgaacaggcacatctgctggatctccaccca

SEQ ID NO: 150543 - DNA, 2784 bp, Zea mays
  Clone ID: MRT4577_6881C.1
tcaaaaggaatagaatggaggtgccccccagtctggatagacgaagggattatacatgtaccatggattcatcatcgtgccattccatgtttgaacaggataatataccgacgatgagtaaataggtggaaagtaccctggtctcatagaatgaataggcgatgcttgttgtgtcgccttttgggccattttgtttaaccgttttgttttagcaggtggccagggtttctttgttgaccgatcacgtggaacagtctttttgctagcatttttggagagcaactgatcaaaagtaggatcgtctttgatcagccgattatatgtgctttgaccttgcgtcttttttcttgctttatgtagaggttgacgcctttggtcatagggggactgtccggctgagttagccggaccgtttgtctgagcaccggatcgtccgcacgtaggtgccggaccatctacgatgttcgggctaggctgatgtgtttggttcattaactgtgcctgtccccccggcgtcttcggactttttagccttctcgtccgaagcctttcgagcaatctccttttgtgatatatctgacatgcggggatcgccaatgacgatgcccttgcctttgcctttatcggccatttcgggtcgaaccaagacctttttgcatgtgagttttcggctttcataggtcatagcccgctggtgtaagtgcactagcgaaaagaattgggtgccatctaatttttcttttaagtagggtcccaacccattgaaagctaaccctgttagttgtttttctgcgacatggatttgaaagcatcggtttctagtgtcccggaacctccggatatagtcgttaaccgattcttcaggcccctgtcggactgaggctaagtcagccaattctaattcatgttctcctgagaagaagtgttcatgaaatttctgctctagttcttcccaagagttaatagagtttggtggcaaggctgcgtaccatgcgaatgcagtatcagtaagggacaacgagaataaacgaacacggtaggcttccccatcagccaattctcctaagtgtgctatgaattggctaatatgttcgtgtgtgcttttcccaccttcaccagaaaacttagagaagtcaggtattctagttccagctcctgccctatacctctcaggctctcttgtggccgaacagtattcagccctatgtccatgaggtggtatggtatgattataatgtgttgctggtggggcaccataatgttgctgcgatgaatgtggaaactgtgcgtattgcacagctcttggctctgcgtacgcatatccggacggtccggcataagaggccggatggtctgtgaccaggccaaacggtccaaaggtatatccggattgtccagccgtatatggtgctacatgggtagtctcgtacctagaccgtctatcgtaaagaattggacggtccgcgatcggtccgaatggtccagggctgtacccggacggatcggtcatatatggcgcgacttgggcagtctgcgcgtggactcgtgtagagtcggatggtccggcataatatgtcggccggttcatgccatatccggatggtccgacgtaagatggcggacggtccgcaacatatctggacggtccggcgtgatgcaccggacggtccgtgatggggccgaattgttcggggttgtaccgtggtggtctggccatatacggtgcgacctgagtgttttgtgtgcgggcctgcatctcgtcggacggtccggcgaaatacgccggacggtccgcggtataacctgactgtctgagatgatgctcggacggtccggttgcgtccagtacctgccgcgtgcctagtggttgcggagcggaaccctgaagtggaggtaggagagattccatatcgatctccccttgacggatgatcttctggtggcgatccaccgtgaagtgcggcgggtccttgtccgccgcctccttgcgtcgttcggagagtttatgcagcagttccgcctcttccttgtcgcgttgttcgttccattgccgcatcacctccttctcatcgtgcattacgaggtcttcaaagggcctttggtcctcagccgggagcgcctccatactgtttaggcaaaagctcggacgatctggccgtgtccagggccatcgatctaccaagtaggaacgtcggtggtggtatttgccctagatatgagtttatcggcataccatataatggctgaggctacgaatccccatttgttgccgatatattagacacagacattctgttactagttttaaatgatggaaaactaggagcaactgacttctccaacgaacgtgttaattttctaattgattcctctgaccctccaatctgttgtttcatttgatcttgctgctgatctacatactgtttaatagattgaatgtcgtcggatttgcttacattggagatttgaagcgaaggtagaagagatgcgacctcgatctctccattttttacaaccttatggtgacgatccaccgtgaattgtgacaagaatctctccttcgcttgacgcatgaagtcttcatattgctgttgttcatcggccgacaggctctctacaaccgacctatggatattgtctgaggagatatcagtgtgatctttagaaccaaccatttgagggcctgattttagtaggtctagacacctatcctcggcggagtcgccaaacactagaacggatcgcctggtggtgctctctgcagagacgagggatggtccgccc

SEQ ID NO: 150544 - DNA, 1431 bp, Zea mays
  unsure (1)..(1431): unsure at all n locations
  Clone ID: MRT4577_68820C.1
tgtggacggtgcccatgttccactgcaacgggtggtgcctggtgtggggcgtgncggcgcaggncggcaccaacgtgtgcctgcgcaaggtgaactcgggcgccatcttcgcggccgctccggcgcacggggtgacgcccctctgcggcgcgccgacggtgctgagcatggtggtgaacgccacggcggaggagagggcgccgctgggcgcggggaggaagaggccggtgactgtgatgacgggcggcgcgccgccggcgccgcaggtgctgttccggatggaggagctcgggttcctggtgatccactcgtacgggctgacggagacgtacgggccagcgacggtgtgcacgtggcggcccgagtgggacgcgctgccggcggcggagcgcgcggccatcaaggcccggcaggggctccaccacctggggctggaggtggacgtgaaggacccggccacgatggccagcgtgcccgcggacgggcgcaccatgggcgaggtgatgttccgcgggaacacggtgatgggcgggtactacaaggacgcggccgcgacggcggaggccatggccggcgggtggctgcggtcgggcgacctggcggtgcggcacgccggcgacggctacgtgcggatcctggaccggtccaaggacatcatcatctccggcggggagaacatcagcaccatcgaggtggaggcggcgctgttcgcgcacccggccgtggcggaggccgcagtggtggggcggcccgacgagtactggggcgagacgccgtgcgcattcgtgacgctcagggagggcgcggccggcagcgtgcgcgccgaggaggtggtggcgttctgccaggcgcgcctgccgcggtacatggcgccccggacggtggtgttcgtggccgagctgcccaagacagccacggggaaggtgcagaagttcgcgctccgggagcaggccagggccatgggcagcatctccagctccgagcagcaggatggggcagggacgaggagcaagctctgatctgaactcgcatgcccacatggatgtctcctccattccactgacgagtagttgagcagcaacgaacctaagtgtgctgagctgtgctgtgctgtgcttggacatgtagagaaagagaatcaccacactcagtgatacagattcgtcatttcagtaatataatttacagtatcaaccttcaatgctctcaataaaaatgggggcaagcaaaaaaatctgcatgttcgtttatgcgtgtgtccgattctgacctcgctgtgtgaatgtgatgctgcctgtagtttttttttaaaggtatggcgagatgctgcctgtagtagtagtgacaacggaatggcgttggcacttggcaataacatggacccatcaactaaaaaaaaaaaaaaaaaaaaaaaaagtcgacgcggccgcg

SEQ ID NO: 150545 - DNA, 328 bp, Zea mays
  Clone ID: MRT4577_68821C.1
cgataatccgccggcgttgagatgttggtttatcaggatctcctatctggcgacgagctcctgtcggattcattcacctacaaggagctcgagaacggcgtactgtgggaggtcgagggaaagcgggccacccaagggcctgttgatgtggacattggtgccaatccatacgtcgagggtggtgaggcccaaagcggtgctgacacatctgctacagcgggcgatattggtgagacatttacaacaccggagcaacctgcttttgccacgaaactagttgcgtcttacattacaaactacatcaacacatcaactgctgcgttggata

SEQ ID NO: 150546 - DNA, 277 bp, Zea mays
  Clone ID: MRT4577_68822C.1
atctcaaaacctgacaagacatttcaaagaaagtattagattcattcacgagtgccggctccgcggtgaaagctgacttgtacactgcctggccggggtctccaggagcgtgacactggtgatcgcatacatcatgaccgtcactgactttggctgggaggatgccctgcacaccgtgcgtgctgggagatcctgtgccaaccccaacgtgggcttccagagacagctccaggagtttgataagcatgatgtccatcagtatcggcagtggctgaag

SEQ ID NO: 150547 - DNA, 1018 bp, Zea mays
  Clone ID: MRT4577_68823C.1
cgggttccatatcacctcaccgccacaccccggtagggcaagtcgtttgccacccaggccaaccctctgccgccgctacgccaccgcacgtccatccctcgccgacacgtctcgcacgctgacgggccaacccactccaccccgagtccgggcataaaagcaagcaccctcacacacgctcgggacttccaccccggaccgacaaagcagagcacgcgctggcagccaagtgcacacagacacgtctctctgttcgttctcagcttgctatagcaacctctagtaggtagccatggagatggtcctggactggcgctcgctgggctccctgctggcgaccgtcgtggtgttccgcaccgcgctgcgtaacttcctgccgccggaggccgagatgctcctgcgccgcttcctcgcgtgggtcgccgccgcgttccgcccgcccagcgacaccatcctcatcgacgaggcggacgggcccacggggagcgccaacgacctctacgagtcggcgcagctctacctcagcgcgcgctgcctcgccaccgcgcccgccgtgcgcctgcacaagccgcgccagtcgccgcgccccgtggcgtcgctcccggactcgcacaccaccgacgacaccttccgcggggtccgcgtcaagtggacctccaccacgcgcaccgtcgaccgcagcggcagcggcggcggcggtaacccgtacaacatattcggccgcggcggcgaccagcgcggcctcgagctccagttcccgcgccagcaccgggacctcgtccaccaccactacatcccgcacctcatcgacgaggccacccggatgcggctcaagtcgcgggagcgccgcctctacaccaaccgcgccacggggccctgcgacgaccacaccgcctctggacgtcgcacgccttcgcgcacccgtccacgttcgacacgctggcgctcgacccggcgctttgcgcgacgaggtccgcgccgacctgctgcgcttcgccgcgcgccgggaccactacgc

SEQ ID NO: 150548 - DNA, 1723 bp, Zea mays
  Clone ID: MRT4577_68824C.1
attgggtacctcgaggccggccggggtcctggtcccagccctccctcgcactcctatggcgatccctccccggatcacggcggccggtggcggcggtcgcaagacgagggtgccgccgctcccaccggcgagaactctcctgacagcctttgccgcggcggtggcgctggctatcctttgcttcctctcctcgtcccccaccgccacgctgtcgggttcatggagatccggggccagaagcggtgacaagtacctctactggggcagccgcgtggactgccccggtaaacactgcggctcctgcgcggggctcgggcaccaggagtccagcctccgctgtgctctcgaggaggcccttttcctcggcagaatatttgtgatgccctcaagaatgtgcctaagttcactgcataacaccaagggaattatccaaagtggtgcaactacaaaacagagatgggaagaaagttcatgtgcaatggaatctctatatgatatagatcagatctcaagaacagtaccagttattctggacaactcaaaaaactggcacgatatagtatcaagaagcatgaaactagaagtgggaggtgtggcacatgtgcaaggaattagcagaggtgaactcaaacaaaattccatatactcaacagctctcataataaatcgcactgcaagtccccttgcttggtttatggagtgcaaggatcgcaagaatcgtagctcagtgatgttatcctacaactttttgccaagtatgccagcggaaaaactgaggaatgcagcaaataagatgaaagaaatacttggtgattatgatgctattcatgtgagacgtggtgatctattgaaaaatcggaaagatagatttggtgttgaacggagccttcatcctcatctagacagagacacccgacctgagtacattagaaaaagaattgcacaatggattccaccaggtcgaacattattcattgcatcaaatgaaagaactccaggcttcttttcccctctgtcagacaggtacaagttagcgtactcgtccaacttcagtagcatattggagccaataattgagaataactatcagttattcatggtagagaggctaatgatgcaaggagcaaagacatttatcaagacaatgcgagaatttgggagtgatttaaccctttgtgatgatcccaaaaagaacaccaaagtctggcaaaagccagtatatacagatgattgacgttagttggtcgtcaaatataatgcagacttgcagagctcactcttttagcaacctgatggcctgacatggacagctgattaaacctgaagctggcatggtagtgtttgctgttattgcagaagccgtctaaaatcagccagcagtggtggacactacacctacggttcatttcagcgcatctgttcatactaccacgtgtacttataatctggaaaaagccaaaagtcatgacctttttttcataattttacaattaggaagtagttcacaacttacaagagaagatttgtttgcagatttagaatgcatatacatgtcacatccttctgtacagcatgtgtaagaatgaaccagcactgtgaggcttatgtgtggagaatatcagtaattgttattatcttttaattcgtatgggtgtgtaagaaacaacctgcacagtgaggcttatgttggagaatatcatgaattggttgttatcttcttttg

SEQ ID NO: 150549 - DNA, 342 bp, Zea mays
  Clone ID: MRT4577_68825C.1
aaaaaaaaaggggccccctcattgttcattgggtaaaatttttttacctttaagaaaattttaaataaaaattgccctcccccccgtttttaggatccccccctgaaaaaagaaagttcccccccccccagaccaaggggcccccccccgtcccgggggttttatcccccgacccaaagggcttaaaccgcccatttgggggggccgcttattgtttttcccccccaacccgattgctaaataccggccccggtttctacccccgttgttaatgcccccccggatcccagttttaccaaaacccttttgaagtttaggccctttacccggggcaggcctttt

SEQ ID NO: 150550 - DNA, 738 bp, Zea mays
  Clone ID: MRT4577_68826C.1
cggccgggccgggggcatccacatccgtgacagactgacagcccttgacactggtcctggtcccagccctccctcgcactcctatggcgatccctccccggatcacggcggccggtggcggcggtcgcaagatgagggtgccgccgctcccaccggcgagaactctcctgacagcctttgccgcggcggtggcgctggctatcctttgcttcctctcctcgtcccccaccgccacgctgtcgggttcatggagatccggggccagaagcggtgacaagtacctctactggggcagccgcgtggactgccccggcaaacactgcggctcctgcgcggggctcgggcaccaggagtccagcctccgctgtgctctcgaggaggcccttttcctcggcaggtaagtaataactaataactaccttactgtgcttatgctcactggatagttcctctttcttttggatcagctcaattttcatctagttgaaattcggaatgtggagactagaaaactgatgctagaaggaagataggtcatgctaatgtcttgaaccggctaatgtgctgctggtttgtgactacacaagaaaaaaagtggcaaagctactgacttttgtctcattgcagaatatttgtgatgccctcaaagatgtgcctaagttcactgcataacaccaagggaattattcaaagtggtgcaactacaaaacagagatgggaagaaagttcatgtgcaat

SEQ ID NO: 150551 - DNA, 518 bp, Zea mays
  Clone ID: MRT4577_68827C.1
cagtaaggtacataacggcattgcggttaaggttcatacagccgacctggttcccggatatgcgggccgaagaaagctgctggatttgcccatccacgcgacacctatcccctatgtctgtgctcgctaaagacctctggctcagaaaaagatccctcgtatgggctaaaagaattgtacactcatacagacaaactgtgccgacatacatctagaaaaaccctacgcattacaggctacccggcggtgaatacatacctactctactataccaaagagcccacagaactcctatttgataaatgtgtagtgatacataagtaaacgcatagtctgaatcaatctatcaagcaaatagggaataaccactatacactggcctcaaaactaccatgatttatatcccaagggtgatagatgtaagggacatatggaagttacatactagttcatgcaagacatcgaatagatggaacacaggattagtactcctgcatacacgatgatgtgaacatgga

SEQ ID NO: 150552 - DNA, 199 bp, Zea mays
  Clone ID: MRT4577_68828C.1
ccccaacaattaaaaaaacatccccaagttaatgcggcggaaaaagcgccaaacacgaccacctaaaaattctggacacagttgacagctgccaacggccctctgctgctcaaacggagatgctgccgggaatgccacggagcaccagaccgggctgagccgccggcttgagcagcgaatagggcacctccaccggccc

SEQ ID NO: 150553 - DNA, 447 bp, Zea mays
  Clone ID: MRT4577_68829C.1
cccacgcgtccggttgacagaaagccggctggagcaactgaacaacaggcgttgggatatgtctagccttcaggaagctatctctgtgccttggaatagtatacctatgaacacggcgaggtcatactctgctatgagagttctggaggatcatgaattatctgaaggtcgcaatcctggctaaacagcactttctgatatagatgcagttctggctcggaggatggatatgcgtgataaaatgtctttgaatgagtctcgtatgactactactctcgaggaacgactgctatgatctggaaagactgagcatgctcctgtatgtgctatcctgggtggcattgttggtcacgaggcgatcaaatcgatatcctgcaagggcgatccatgtatgaatttgttctatatcgatgtggctgacggtaaaagtgtgatcgacgatatacc

SEQ ID NO: 150554 - DNA, 288 bp, Zea mays
  Clone ID: MRT4577_6882C.1
aattcaaccaagaatcatatagcttcaaaacatatatctacaaatcctttatacataagagccaacagaaaaccctatacctctaatctaaggaatcaaacattaacgcttaattgaaaataatcctataactaaaaatccagagctactatgcaactacagacctatggtcactagctactctagaacccgtaccgccagcccatcctaattgggttagcaagacctgatagggctggactagccctctatggaagctcaacagcggactaaggagatatgaatttt

SEQ ID NO: 150555 - DNA, 269 bp, Zea mays
  Clone ID: MRT4577_68830C.1
agagtggtaacaacgcagagtactttttttttttttttttttttttttttttggtttttttttttttttttttttttttttaagacgcaagcatgcagatcaacactttattagtacaagctagcagcaccgggcagcagccataatttaagtaggagggtacaagatcacatgggaaacaaaccatccctgagtggtatttcttttttttttatgaatataagaggaggaagcatgcaagcttgatgcaagggaaacaatacataagc

SEQ ID NO: 150556 - DNA, 385 bp, Zea mays
  unsure (1)..(385): unsure at all n locations
  Clone ID: MRT4577_68831C.1
ctgcgggagccgggccggaagttatatagcgggctcgacagcttttattctgagggcgcccttcangcgctttccgggcgttttctacgaccgtgaggagggcgactctaccttcggttacaccttactctggacgccgagcgcctaatacctcttcgagctccacctcaggatcgagttcgcgggactaaacgcacggcaaggggcccatgctgctcatgaaaccataagagaagctcatgctgatcgtgaaggtcgcgcacccaaagcacgacctcgagctatccgcctaattccacgacaccgtatgcctcaggtacccatagtactatctcgcaccacggatggacctgggcccagcgctcgaattaaagaactgggactc

SEQ ID NO: 150557 - DNA, 131 bp, Zea mays
  unsure (1)..(131): unsure at all n locations
  Clone ID: MRT4577_68832C.1
gatgatggggatagagtgtaaatttgccaaatttacccacgcaacagacatgattttacctaatacatgtgaattatgtngtngcnaactgatgaaaatagtttgggaatataanncttaagaatacttgc

SEQ ID NO: 150558 - DNA, 2239 bp, Zea mays
  Clone ID: MRT4577_68833C.1
aattcggcacgaggggacgagggagagggagggagggagagagagagagagagaggaaagacggacagcgccattgctgccatcgcattcacagcgctaccgtctgcgtcgctttcctttcctccctttccccgccgtaccaccacccgctcctcctctccgcctctgcctccccctgcagaagccgccgcacaaaacccaaaccctaaccgccgcccctccgaggcgcgccagatcggcggcggcgcccactgctgctgctccggatccaatgcagcggctgccgtagcgcgggagctgccgatctgaggcggcggcggcggcggcggcggcggcgctggcgcaggtgggacagggatgtcgtctgcgccggtggcgggggcggcgttcgagcggtatcagcagcgcggaggtggcggccccgcggcggccaacggcaacacggttttcaagagtgggcctcttttcatatcatccaaagggattggatggaaatcatggaagaaacgttggttcatcctcacaagaacatcattggttttcttcaagagtgatcctagtaccttgccccagagaggtggtgaagtgaatgttactctaggagggattgatttgaacaattctgggagtgtggtagtcagagaagacaagaagttattgactgtacttttcccagatggccgtgatggtcgtgcattcactcttaaggcagaaacttctgaagacttgtttgagtggaaaacagcattggaagaagctcttgcacaagctccaaatgcagctcttgtgatgggacataatgggatatttcgtaatgacacagctgacacatatgaaggagctattccaatttggagagagaagagaccgatcaagtcattggtgacaggcaggccaattctgcttgcacttgaggatattgatggcagcccttcttttttagaaaaagccctgcgctttcttgagaaacatggaataaaggtggaaggaattttgaggcagtctgcagatgtggaagaagttgacaggaggttgcaagaatatgaacaaggaaggactgagttttcagcagatgaagacgctcatgttgtcggtgactgtgtaaagcatgttctccgagagctgccatcatcccccgtgcctgcttcttgctgtacagcattattggaagcgtttcgcctggagactaaggatgctaggataaatgctatgcgttcagctatatctgagacatttcctgagcccaatcggaggttgctgcagagaattttaaaaatgatgcacactgttgcatctcacacctctgaaaatcgaatgactgcatcggcagttgctgcctgtatggcgcctcttctgttgcgtccacttctggctggtgaatgtgagatggatgaggtatttgatatggatggtgatgattctgcacagcttcttgctgcagcaaacgccgcaaacagtgctcaaggaattgtcgcaactctcttggaggaatatgagggcatttttcatgatgaacacctcagatgttccttgtcacctgaatctcaaattgaagatagtggtactgaagcatcaactgatgatggtaatttggaagccaagggcaatggatttcatgatgcagaaaatgatgtagatcaagaaatggatgatgacaatggcgtggagcgtatacttagtgggaaattgagtgagagcagtggatatgctggcagtgacctctatgactacaaggcagtcaatgctgaggagtcagatgctgaacgccctgtgaagatgttggaaggaaatttgaatttgagcaaagtacagaacagcctttcaactgaaaacggttcagcgaatgtggatagcttactaagcgaaaataatccttctaacccaacagttggtcatgagactttgtctatgggggagatcctttcttcttttgatcctggaatttctgtaccgacccatagtcctgaatattctgtagagagacagacaaacaaaactaatggatctcacccacatgtgaaacggagtaatttttgggggaggaataatgcaaggaagggccaaaactctgaatcagtcgattcatctggagaagaagagcttgctattcaaagactagagattgcgaagaatgatctgcaaaacagaattgcaaaagaggctagagggaatgcaattctacaggcgagtttggaaagaagaaaacaagcgctacatgaacgcagattggctttggaac

SEQ ID NO: 150559 - DNA, 463 bp, Zea mays
  Clone ID: MRT4577_68834C.1
cccgcccggactctggacgcatcggccccgcccccagccagctcggacgtaacgcggcatgcaggagaagcatgaccgcggggaagaagcactggagactgggagagctcggcctctggccgggcagctaccaccgactctacactgccactgccgccgccgccgagaagcatatgaaacagagcgtcccgacggactggccggtggggcggttgacgatgcacccagaacagaggctcaagggatatgaccatgatcaccgatccgatgcaaaaggaagcctaccaagaagaatccgatgagcctgatccaaacgaaggcatccgaaagctgaatgcgccggtgccagaaacgcagcacacatccgaactagcaattcggggggagcagagagaaacagacacgcagttcagcacaacatgctgagacagacccacaaagatctttcatggacaaagaggtg

SEQ ID NO: 150560 - DNA, 226 bp, Zea mays
  Clone ID: MRT4577_68835C.1
ccgcgactgaacccttccagctccgcccaccctactctgcccgcttctccatgacgttggttcctctacaccccgtcgtcttcgctctgctctgcccgtggcggctgccatgtccactcctgtgacgtgccgatatggtggcgctgtggccgggtgtgatctggagaaccagcgggcggtggtgcacggcctgggcggcggcgacctgcgcgaccccggtgctgca

SEQ ID NO: 150561 - DNA, 427 bp, Zea mays
  Clone ID: MRT4577_68836C.1
ccaaaatcatacatacaattagtattgtgtgattttaatcaaatatacattacagaaagtatgatttatgcgatcaacaatttttttaccctttgaaattttgaatactcggtctcaaattggtagattcagcatatagttgccttttcagggaatgcatcacaaggtggtaccacattacccatgatctacgtgctcggagactccctggcgcctgtctgagaacaacaataacctggtgacactgctcaaggccaacttactacgaaacaacatcgactacctatggcacaaggccaccggctgtttcagcaatggcaagaactccatcgacttcctcggaagaaggtatgggaaaagcatggaagtacgtcgtaccacggtgcctcgtgctatcgtcaacgatggagctcgctcaacaaccaca

SEQ ID NO: 150562 - DNA, 273 bp, Zea mays
  Clone ID: MRT4577_68837C.1
attttattgggcgtgaacttttagtgccaatataatacagcaatatctttagaaatttaattcaaaaacaaatgaagtgtaaaaatattgctgtattttattgggcgtgaacttttagtggcaataatgggggtaaaataagttcccaataaaatgggcccccaatggtccgaaggcaatttgcaatccggaatgtaatccaaacacagaaaatttggtttggttaatttgaaccatctcaaggggcaatcacagaaaaaagaaagagcgaag

SEQ ID NO: 150563 - DNA, 708 bp, Zea mays
  Clone ID: MRT4577_68838C.1
atggccaacaccggtggttctgattcacaagcactgcaagattcaagatcacaaaggccctcctcaaacaggtcaagtgctacaccgaccaatgttgcagcttcttcaaatgttgttgcagctgctacacctacatcgaatgcccattcgtcaagtgctgctaatgctactccatgctcaagtgcacaagctcaacctccaacagaagaagttatggaataccaaggatctatggaaggcatggcaacaactgatggagtaggtgcaaccaataggaatgttgtcctcaatgaaggagatgatcttgtctttggcatgtttgacaaatatttgtcagaggaaactaaagaaagttcaacctttgtgcgtactgaattagatttgtatttggaggaaccaacaatgctaagaactcaagaacttgacatcattcattggtggcaatatgtcggggttaaatacccaactttgagaaatatagctcaagatatcatggcaattcctgttacaactatggcatctgagtcagtctttaacactgggggaagggtaattagcccacatcgtagtaggcttgctccaaaaacagttgaaggattgatgtgcatgcaagcgtggtcacgtgctgacatgctaggtgataaatcttgctttattaatgcattgatgacttgtttggaagatgaggaggatgaaatggtcacctag

SEQ ID NO: 150564 - DNA, 363 bp, Zea mays
  Clone ID: MRT4577_68839C.1
accaggaaaaatttgccttgtttgggggggaaaaattttttgtccaaaaaaaactgggggcatttttcctgtttgacccctaaacgggccaaaattttccccccccgggggccttgaaattttcccccgggggggaaaagttttttccaccttttgacagccccctttttgttgcctgaacccaatttttggttaaacaagttgaagggtccccccccgggttttgggtcacaagggccccctgaaaaatttggagttccccccgggagttggtttttgggggtaaaaccggaaaccgggctcctttgttggaccatttccggcccaacctgttttcaaaaacgggttttttttttgaaaaac

SEQ ID NO: 150565 - DNA, 671 bp, Zea mays
  Clone ID: MRT4577_6883C.1
atatattacaggcgatatttcgaatttacatatatttacaagagtgacagtttatgttggttcacttcagtagataaacaaaccaaacagatcctgaaagctgaccacgtaaaaaagccatggaggactctttcgtccggccttattttgaaagaagctttatttacagtttcttcagcaaataatccgaagaagagcatagcttttgacgatatatctaagagcagtgtcttagtctgagaccagaggagatcgatctatttacagagttcgtgaatttgcctttgaacatattattttattcaggacggaagttgaccaagtttggcagatcagtcgcctgaagcttcctgatgtcattagcagagagcttgcaggactccaaggtcagagatctcaagttcttcaatggcttcaggtgacgtagtcctgagcttgatactcgagagtttgagacgttcagagagaccaatccggtcaatccagaaatcaactccagtgttttgtctgtgagattggagttttgtgatagattgaggagagtgagggatgaaagatcttttatgttcttgacaccagtatcggttaatccaccaccacatatttcaagtgactgcagtttcttcaggtttcgtaggtgatttgttccagaatctgtgatacgagcaccg

SEQ ID NO: 150566 - DNA, 678 bp, Zea mays
  Clone ID: MRT4577_68840C.1
actttccccacgccgccaccaccgccgctgcggcttacggctacgcagctctcgcgcccctcgacgccgccgccgccctccgaggtttccggccgctaacttcgtctcgtctaggattgacccgctcctccgcacgatcgcctactcctccgcctccccccgagggtttccccgccgccatgtccggcctgagcgcgccgccgttcgacggcctcgcgtcggggcccgatccgtgggacgtcgtcgtcaaggtcaaatatggtgacacacttaagaggttcaatggttatgtcaacggaacgcacttcactttgaatctgtctgctctccgttccaaaattgcaagtgcttttaagtttgcccctgatgctgacttcattctcacttacactgatgaggatggggatgttgttatgctggatgatgacgaggacttgcatgatgcagctatccatcagaaattgaaccctctaaggattaatgttcagttaaagaatagccacgctggggcatctcacattaaccggcaggattcaagccctaaacctcttgaggccaccactcaggatccgatagctcagatcaaatctgttattgatgaagctttaaagcccatatcaaaacctttgagatccactgcaagggaagatccactagctccactaaaatcagctcttg

SEQ ID NO: 150567 - DNA, 790 bp, Zea mays
  unsure (1)..(790): unsure at all n locations
  Clone ID: MRT4577_68841C.1
tcgaggccggccgggccgggctcctgtcattcaacctcccctagtccattatggtggcagtcaaggccttcctaatctctaccgtccttgccttgccctttgcaggagcagcgaccgttcatgtggcacgcgacagtcacgaacacgcttctcgcagcgcgctacctgaccaatggtatcacgacgatagccatcctgcccacttgttgttcaaacgtggacctgacgatgggactggcttcgccccaattggctctccgacctggtctgctggattcccaaagacaacaccagaccccaatcagctccctaagccttgggtcgatgccttgaacgcagccgttaatgctggcaaaatccccaatattcctcaaaccacttcgattaacgtcggagtccctcagtatcctgcaggttacgacccgaatggccctcaagtctgctcggcttactacaagacttgcaggaataaggctgatatctgggatgcacctgacggctacttgggtacttcattcgacgacggcccccttcccgatcaagtcaccctcaacaatttcttggcgcaaaataatgagaagactacttacttttttgatcggtgttaacatgctggcgaaccctcaagtccttcaggatactatcaaccaaggcaatggacatcgctgttcacacctggacacatccccagatgaccacctggnncnacctcgatgtccttggtcagcttggctggaccgttgaactcattcgcaactctactggcggcaaaatccccaagtactggcgt

SEQ ID NO: 150568 - DNA, 758 bp, Zea mays
  unsure (1)..(758): unsure at all n locations
  Clone ID: MRT4577_68842C.1
ttgggaccctcgaggccggccgggacagttccccagcactctccccgaccttgccgtccagtcgtccaccccaccgccgcagcctcgccccgaggagacaggagaacagcaggatgccggcgacgccgacgatcatcggcgccctcctgggactgggcactcagatgtactccaacgccctccgcaagcttccctacatgcgccatccttgggagcatgtgttggggatgggtctcggtgcagtatttgtgaaccagctggtaaaatttgacgagaagctcaaggaggacctcgacaagatgcttgagcgcgccaggctagccaacgagcaacgctacattggtacagtgctaacttgcttatggcatcttaacaacagcaaagactttgcccaagttagaagtctacatcggatatatccaaacaatctcaattctcaattggtgttggacaaactttttttcaattggtgctacctgtactcatgtatatcatcgtttgaagccacaaattaagggtttatacacgtcgatagctgttctctattcatttctgttcagagttagatctttagtatattccatcttttctagtctcctctttccatattaacttcggtcttctcctatctctcttcctattactatcatgtattagtatcccactatatattggtgtctctggaggtctacatcggatatatccaaacaatctcaattgatgntgtacaatctttttttttcaatttggtgctacct

SEQ ID NO: 150569 - DNA, 271 bp, Zea mays
  Clone ID: MRT4577_68843C.1
cccacccagaacgtgagttttaacttctagtcatggcgaatgatcgcaggagagcacagactggaccctgctacgatctctcttggagtggatcagactgatgatcaccaacaaccaactcattcccggataaggaagaagagagtgtcacctacttcagtgtggtttcaaccctacttctgcatcttaaagacactgtgtacaacgttggacactgtgcaggatgatgccacttcatcttggatgctaatctgccatgttgacttctgat

SEQ ID NO: 150570 - DNA, 147 bp, Zea mays
  Clone ID: MRT4577_68844C.1
tttattgttggaaaggagcaacgccaggccgggggaattttattactagcggcggccggacaaacaaggatagggataaactgattattgataagaatgccaatcgaaatgggatgtcatccatgaaaagaaatgaagaaactacgg

SEQ ID NO: 150571 - DNA, 493 bp, Zea mays
  Clone ID: MRT4577_68845C.1
gagcaagcgtgttcgttcaggttcttcctgacgggatccaaagatccatggtatgcataacgactcttgtacaagaatattccaaaaagctggactcttctttttgtatgagctccccgccccggatataatacctgaaacctggagcacttgaaggggatcacccgtcctattgattgaaaaaatctgcctgaggggttacatccccacctccgacggttggttggaaagggccacactgaatgcacaaccggtgttgtttttttatcaaaaaccccgttatgtcgccgactttttttcctgttttattctgggaggagaaaatgtggccgaaaggcgttcttattggagaaccttcatacactagtgggtaatggccaggccctttggtcacctccacaaaggtcacgcgcccagggactgccgagtatcacatggaccacacccggtgctctgaatgtgtgaagggggacagtcgccaatcgggggactt

SEQ ID NO: 150572 - DNA, 329 bp, Zea mays
  unsure (1)..(329): unsure at all n locations
  Clone ID: MRT4577_68846C.1
ccctccgcgaccccttggccgacacccttggccgacaccctggtaagaagttgaagccctaatnataccggccgtcttttaaatttctttggtgcccaataccctcaactagaaaatttaaccaagtccaataggttttgaaatttaataaagtccaattcctcaaagttacctaccccattctcccttgccttccttaaccctcttaccaacctcaatatttttaccctattaaaccaaatctatatgaattgtaaatctatttataaaccctttaatttaaacctaccaattttaataatctccacccatttaaagttttccttacc

SEQ ID NO: 150573 - DNA, 157 bp, Zea mays
  Clone ID: MRT4577_68847C.1
acagcttcttggactggaccaaagagaaaggactttgtggaccctcggtgatggcttggggtgatgaatggtatttctatggacgctgccaaatgtctcatgttgtcatagctagaagtggtggtgtttttgtgattgtctcttgaactgcactggt

SEQ ID NO: 150574 - DNA, 478 bp, Zea mays
  Clone ID: MRT4577_68848C.1
cgcataagaaaagggttgcaagccaccatgggccttttttacagagcacttctgatccctgcatcaaatgcagctctactccaggctgactacacatcctacaggcctacacgatcctctaatattacactacgaaccctacttacttctctttagactgctaaacgcgacacccagacccctgattgctcacgacctaaacaagaccctgaaaggaatctctatgaaaaaaaacatggacttaaactacttccaatcaacaaacaggactctaatccttacctcttccagactgaatactatgatagaactagaatatcggttacttacagctcacttcgtttgcctcctattgtttaagcacccaacacatctgtttccgctgtgacgcataactactctgaagcgctcttcctccatggccttgggctccgtgctggccttgttgaccagctccagcccgatcagcttgtacacg

SEQ ID NO: 150575 - DNA, 645 bp, Zea mays
  Clone ID: MRT4577_68849C.1
gtcgccgcgggagctggcgcgcgtcaccgccgagggcgtcgcggatatggtggacgagtcggtggccatggcgttcggagacgcgtgtggatgcaagtacgtgcgcatccaggcccgcaaggcgccggcgccgctccgcgcggcagcgcgggagcgcgatgctcgcagcgcgcagcgttggagtcggtgctgtgggggcggcgaatgctggcgcggaccaacgacgcggagaaggacgcgctcgccgcggagcttgttaaggagcaggagcggcggcggcacagcccgcttccgaacgtagccataaagcaggtggccacgccgcggctgtcgtcggcgaccgcgacgtcaggcaccgcgacggcaaggaccgcatcgacgatgccgtcgccggcgtcgtgggattctcgtcgatagttgtgttaattagggcatgtacaatgcttagacagttgccgtctgtaagcgcttagaagttcgcatatagataacataatagacagtgggttgtctgtttacactgtctacgtagttttaaatttgtataatgtcttttattgctataagagatcccatgtataaactgtctttgttactattgtgtttcttatttatgaactacaataaaataaatgaattaggaat

SEQ ID NO: 150576 - DNA, 579 bp, Zea mays
  Clone ID: MRT4577_6884C.1
gccgcttagctgctcagacttgttgttggctgtgcgttggatatctctttaggcacaggatgcacggagagggtcacacacagctagccgtcatcggtgagtatctctagcaccaagcccccagatctgatccacaccgagggagccagcaggggcagatagctacctagccacgcgcctgcgccatgatgaacctgaccctgaatcacgctgtcgtgctggccgcacaccacagaagtgcaacttggctcgccccatgtcgtcgtccgcaagcctcgggagacgcctccagcaggaggaccgcaacagcgggtgcactctcgcggctgctgccattgccaccagcgggtggctatgatcagctgccaaggcaccgaggaggtcagccaagtactgccgttcgctaacgcaggacaggcatgcatcacggtgacggcgtacgaggaggaggagacctacatcgcgcatatgagcttccatcgcatagtgaaccacatcgacaatctgctcggaggatgctcatgctcgagctgaacatgtccgagctcatgacaaaggccaacgtgctgaatactcgcc

SEQ ID NO: 150577 - DNA, 263 bp, Zea mays
  Clone ID: MRT4577_68850C.1
attcggctcgaggtggtagttgcaaagtgtgtctgtgtgtgtggatggtctaggcgcctaccatattgaataaacgataaagaaatcagcttcggctgcgtgattatgttcagcacgatcacgctaaaaaaaaaaaaaaaaaaaaaagggccgacaaaaactaaacgagcaagtttacccaacctacaacctaaaccctaagcggacgaccgccagtggcgggagcggcaacccgaaatttagaccaggacgctggcgcgcac

SEQ ID NO: 150578 - DNA, 397 bp, Zea mays
  Clone ID: MRT4577_68851C.1
tggctctggaacctttgggctgatttatgtgcttgcgctactagtacactaggcaatcctcgcctcgataagaagctagtcgtcgcgaatcggaccgacggttgcgggaagctggcggcccgcgaggtagcaactaaggaagaagccgcgaaaaaggcctctaaaataaacgcctaggtctccgcagaaccgaatgcgactaagaattctgtcggcctagtcgccgtcggtgtctccgggggccctaacgtttacgtaagcaataccgcggtggttactcctaccgttatcggctaggatttcgtatagaatgcggagagcctttagcgcactattacgccggaagtcacaaacgacggtaaagactcgtatgctcttgccatcacgttactcaccg

SEQ ID NO: 150579 - DNA, 261 bp, Zea mays
  unsure (1)..(261): unsure at all n locations
  Clone ID: MRT4577_68852C.1
nctgctgccgccctttttttttttttttttgggggttttttttagagacgaggggttagctcttaatctgaaagcgtttataagaagcaaagccaaacccccttgcacccatatatggacacaccacctttattctacatcaggggagatggaaactaactgtagtagggaaatgatgcatccgagacacatacaccacacatgggctgctaaacaatcttctcaagtgctatgggcacacatgactgagggacttcacat

SEQ ID NO: 150580 - DNA, 345 bp, Zea mays
  Clone ID: MRT4577_68853C.1
gggcacacgcgtccgggtgtcttcaccatgtctatctactacacggtgatggatcggcacccgggatgaaggtgggtgcctctagcaaggggcgcctcaccattttcaagagcgaggctgagtccatcgaggcattgtgctgaacccattggtactgacgaaaacatgtaaagaacctccacaaattatctgttgagccgccgaggttccatacctgggagtactcaagtgactgcaggagggacacgtcctggctgagaaacaaccacaatacattcgacacaaaccgatagctgcatgtgaacaactctctgagctgcatgctctgaacacaatggctctttt

SEQ ID NO: 150581 - DNA, 431 bp, Zea mays
  Clone ID: MRT4577_68854C.1
aaaagggtattcgggggcaaaaaagttacagggggtcaggggccaaatacggggggttttcctgctcatcgccaacgctttttgcgccctaacaagaatacaaatttacattcccgaggggttctttttttttttaccaaggggggaaccatttaaaaaaatacccccgggccaaaaaacaattttctgggaagggcaaacaatacgtccgttttacaaaacgaaaaccgggggggttaagcataccctgttggggtgttacccaaactggacaacctgggagtttactgccaaacagccgtttatagccgacgcaggtcctaacccccaagggtccctttgggggacaaaaagcgcccatccataactggatttgtttgacgcccaaacgggacagggggatccaagccacttatccggaaaaaaactga

SEQ ID NO: 150582 - DNA, 269 bp, Zea mays
  Clone ID: MRT4577_68855C.1
gcatccgcagagagcttgttccgtccaggcaaccaaaaagcaagttcgcccgccgcgcatatgaagaagtgagctagaggacgttgactcgtacgaagcataccgcccgcaagtccacaggatgcaaggcctcccgcaagcagatcgccacgaatgcggcgaggaagtcggcgccgacgaccggcggcgtgaagaagcccacaggtacatgtccgggaccgtggggctgcgctagatccgcaagtaccagaagggcacggagctgctga

SEQ ID NO: 150583 - DNA, 376 bp, Zea mays
  Clone ID: MRT4577_68856C.1
acccacgcgtccgaaaaaaaaaaaaaaaaaaaaaaaaaaaaaaaaaaaaaaaaaaaaaaaaaaaaaaaaaagaaaaaaaaaaaaaaagataaaaaaaaaaaaaaaaaaagaaagaaaaaaaaaaaaaacaaaaaaaaaaaaaaaaaaaaaaaagggggggccccccaaagggttcaagccttatttcccgttgcaggcgattttaaaccccttcaaaggtttccccaaatttcatttcaggggccttctttttaaaagttcttaaggggaaaaacctgggctttacccaatttatcccctttgcaacaaatccccttttccccagtgggcttaatcctaaaaaggccccaacgttttgcctttccaaaaatttgcc

SEQ ID NO: 150584 - DNA, 437 bp, Zea mays
  Clone ID: MRT4577_68857C.1
agcagcaacccaaatttaaaaggggaccaaaatcaggggcaaaaatcaacccgacagaaacaccactcacgaacaccacggggaagcaggaggactatctacaaggggggggggagaaaaaaaaaccgacaccgggaaaggggaaaaaaaccccccctgccccaaggaaaccaaaacccaccaaaaggggaagacaacacgaaaggaccgaaaaaaattcactactactaggaccacgggaaagcaccccaaaaaaaaaaactaagcggcggcggcggcggcgggggaaaaaccgctagggaacctgcaggcacaaggccccaatggttaaaagggggacgggggaaaaaaaaaaagcggcggcggaagccaaaagggccccggcaaaaggcgaaaaacccccaaaggggggggaaaaaagggctgggcccgggccc

SEQ ID NO: 150585 - DNA, 1278 bp, Zea mays
  unsure (1)..(1278): unsure at all n locations
  Clone ID: MRT4577_68858C.1
catcccacactagtcacaagtacaccaactagccagggctacacgagctgagcttgctccgctagcagctcaatctcacaaagcctcagagccaccaccaccagtgtgttctagccagctagctctagctccgctctctgatctcaaagctngataacgaacgggcaaacaagagctcagaggtgggagctagctagctagagagagagagaggacgacggagagggaaaaaaaaccagctagcgagcgcgcgtgcgtggcgatgatgcatgtcatgtgttaacatgtacaatccagagcagcaccaggccgcgccgcccttcatggcgccgcgcatgtccttctccagcgactccgccgtggagccgccgcccccggcggccgcgcgcgggggcgcggcggggccgggggacgccgacttcgagttctccgtcggcagccacccgatgatggccgccgaccagctcttctccaagggccggctcctgccgctgagggaggcgccgcagcaggcaggcggcggcgcgcggcccgtgacgctgcgcgaggagctgcgcgccgacgagcgccacggccgcgtgccccgcgcgccgaacatccggtggaaggagctgctcgggctgaagaaggcgcccaagaagcaggccgccgccgacgccgccgccggcacgtccgccgacgcccatatggatctcggaggccagcagggaagcacgagagactgaaaagccgcaggatatatatcagattcagctgtgacttgtgagcgggtgaaatatattgcattgttaggcgtggccatcgaagtgtatctttcagcgcgctctggctgtttggcatcgagctagctgatctgtacctctcgatgtcgatcatcatgtcattggcttagccctacgggagatgatgaaaccacacacatacgaagacgtacgtacgtacgtctatggcggtggctcacaccaccaatgcgcatttcctctttacctctttattgccggccgcagcttgtttcctctctctttaatttatcctgggtgtataagggaattttgaccatttgtttcacgtacggcagtaattcgttcgtgtcgagtagctagatgtatcatgtatccaaccatgcatggataatgatggatgtttcatgctttgcattattgtaatggtcgtcgcgtgtagtgtagcagtagtagtgaaattagctctccgcttgctgtgtgccgtgcctatctactagtatatttccgcgggtgtgaaaggggccgggccgggccg

SEQ ID NO: 150586 - DNA, 153 bp, Zea mays
  unsure (1)..(153): unsure at all n locations
  Clone ID: MRT4577_68859C.1
tgggatttttagaaaaatctaacattaaggccaaacatcttgcagaattatcttcgtgtctatatatttcgtgttccgattcttgttttcatgttgcatccanacacccaactagaaactttcccacgctcttanactcctgatgcatgggtt

SEQ ID NO: 150587 - DNA, 3048 bp, Zea mays
  Clone ID: MRT4577_6885C.1
tcaaaaggaatagaatggaggtgccccccagtctggatagacgaagggactatacatgtaccatggattcatcatcgttccattccctgtttgaacaggataatagaccgacgatgagtaaataggtggaaagtaccctggtctcatataatgaataggcgatgcttgttgtgccgcgcttcgcgtcgttttgtttgactgttttgttttagcaggtgaccggggtgtctttgttgaccgatcacgtggaacagtctttttgctagtatttttggagagcaacggatcaaaagtaggatcggctttgatccgccgattatatttgctttgaccttgcgtctttttccgacttcttgctttgtgtagaggttgacgcctttggtcataggtggactgtccggctgagttagccggaccgtttgtctgagcaccggattgtccgtacgtaggtgtcggaccatctacgatgctggggctaggctgatgtgtttgttttattaactgtgcctgccccccggcgtcttcggaccttttagccttctcgtccgaagcctttcgagcaatctccttttgtgatatatctgacatgcgaggattgctgatgacgatgcccttgcctttgcctttatcggccatttcgggccgaaccaagacctttttgcatgtgagttctattgtattaacaggaaagggttgtgtgtctacttgcatctcctgaaaagccaatcgaccctcatttatggccgattgtatctgtcgacgaaaaacattacaatcattggtggcatgagaaaaggaattatgccacttacaataagcacgcctctttaattcatcaggaggaggaatagtatgagttaatttaatgttgccgtttttcagtaactcgtcaaatattttatcgcatttggcaacattaaaagtaaacttaacttcctcttgtcgattctttcgaatcgactgtaaagcagaacacgctgaaggtttagcctgtcctggccaaaccagttcggcggtgtatacatccgtggattcatcgtccgaattatcgtatcccactagatgcatcttatggctagccgattttgatgtttccttatttcggctttcacaggtcatagcccgctggtgtaagtgcactagtgaaaagaattgggtgccatctaatttttcttttaagtagggtcgcaacccattgaaagctagccctgtcagttgtttttctgcgacatgaatctgaaagcatcggtttctagtgtcccggaatctccggatatagtcattaaccgattcttcaggcccctgtcggactgaagctaagtcagccaattctaactcatgttttcctgagaagaagtgttcatgaaatttctgctctaattcttcccaagagttaatagaatttggtggcaaagctgcgtaccatgcaaatgcagtatcagtaagggacaacgagaataaacgaacgcggtaggcttccccatcagccaattctcccaagagtgctatgaattggcttatatgttcgtgtgtgcttttcccactttcaccagaaaacttagagaagtctggtattctagttccctgtgggtattgcacggtgtcgaatcggtggctataaggcttccgatacgattgccctgtacctgacacactaacaccgagtttgtccctgaacatcccggctacctcgtctctgaccctctctgccatgtctggcgaccatccattgagtttgtgggtggagatttcaggttgcctgacattactctgtcggctttcctcccaggtatgtttaaggtgtgtgttaggtgtcctattaatgtcaccagctcctgccctatacccctcaggctctcttgtggccgaatagtattcagccctatgtccatgaggtggtatggcatgattataatgtgttgctggtggggcaccataatgttgctgcgatgaatgtgggaactgtgcgtattgcgcagctctcggctctgcgtatgcatatccggacggtccggcgtaagaggccgaatggtccgcgacctggccaaatggtctgaaggtatatccggattgtccagccgtatatggtgctacgtgggtagtctcgtacccagaccgtctgtcgtaaagaaccggacggtccgcgatcgggccgaatggtccagggctgtacccggatggatcggccatatatggcgtgacttgggcagtctgcgcatggactcgtgtagagtcggatggtccagcgtaatacgtcatccggttcatgccatatccggacggtccagcgtaagatggcggacggtccgcaacatatccggacggtccggcgtgatgcaccggacggtccgtgatggggccgaagtgttcagggttgtatcctgatggtccggccatgtacggtgcgacctgagtgttttgtgtgcgggcctgcatctggtcggacggtccggcgaaatacgccggacggtccgcggtataaccggactgtctgagatgatgctcggatggtccggtcgcgtccagtacctgtcgcgtgcctagtggttgcggctgtgatggtgacacgaaagcgtgcatcggcataccatatgatggctgggtcaaaggtgacccgtttaaagccgatgtgtttgacgtgggtggcactgtattagactcccgcgatggaaaattaggagcagttgatttctcatatgcacgtaaatgcattttaatagattcatctacatattgctttaactgatctcctcgttgatccatgaaagtcgtaagagatagatctggagtacttacagcgggaccctgcagtggaggtaggagagattccatatcgatctccccttgacggacgatcttctggtggcgatccaccgtgaagtgtgacaagtacttgtccgccgcctccttgcgccgttcggagagtttatgcagcagttccgcctcttccttgtcgcgttgttcgttccattgccgcatcacctccttctcatcgcgcattacgaggtcttcaaagggccttcggtcatcagccgggagcgcctccat

SEQ ID NO: 150588 - DNA, 330 bp, Zea mays
  unsure (1)..(330): unsure at all n locations
  Clone ID: MRT4577_68860C.1
gacgatcttctctacgtccgcccggcgncggggggggggggcggggccgcaccnccgcccggcgcgatctccgcgccctcgtgggtccatgttgcggatcttcgtggtgaccctcgctgggccgactgtcnccctcgnggtggagtcttctgacgcctttgtctncntcaaggccgggggggggggggggggggggttttccttcggtcctgcngcggctcgtctttgctggcgngctgctcggggtcgggcgctcncttgccggctgcggcgtcccgggggcgggcgccctcctccttgttctgcgcctgcgggggggcgtgccgttct

SEQ ID NO: 150589 - DNA, 1168 bp, Zea mays
  Clone ID: MRT4577_68861C.1
ctcgaggccggccgggagaacgtttcaacggatagtccaaagttccaagaaactcgagactacagactactcacagctcactgtctcacttgaagctctaacacagcgcaagccatggcaggacgagtagcggacaaagacccagagctgaaggtgctcggcgtgtggtcgagcccgttcgttatcagggcccgcgtcgcgctaaacctcaagggcctcgcctaccgatacgtggaggacaacctggacagcaagagcgagctcctcctcgcctccaaccccgtgcacgggaaggtgccggtgctcctccacgacggcaggcccgtctgcgagtcctgggtcatcgtggagtatatcgacgaggccttcccggccagcggcccctgcctcctccccgccgacccgtaccgccgcgcggtcgaccgcttctgggcctcctacgccgacgacaagctctttcccacctggatacccgtctacaacggcaggacgagcgaggacagggtcgcggcggcgaggcaggtcgtggccgtgctggagaagtttgagcgggcgttcgatgagtgctccgggtccgggggcaaggcgttcttcggcggggacgctgctggcctcgtggacgtcgtgctaggcggcttcctcgggtggctgcgcgcgtctgaggcgatgtgtggcgtgagggtcatcgaccccgccaagacgccgctgctggcggcgtgggcggaccggttcgccgcgctcgacggcgtcagggaggtgatacctgacgtgcagaggctgctggagtataacaagattaggcgagctcgtcgtgggctgccgtaggtgctgggccttgggccatctatctgtcaccatgtggtcagtcaactctaagcaggagactttgacaaggttgaaagttagttcatgaaggtgggcaatctaattaggatgctcatgctttagctaggagtgccattagttttcctgttgaaaggcatgtttggttcctctttcctactgaaagagtttgtaatataatctatgatgctttgagtttgagaaaagaactatgaataaaacatggatatcttccgatatttcagttcaaattaaaaaaaaaaaaaaaaaaaaaaaaaaaaaaaaaaaaaaaaaaaaaaaaaaaaaaaaaaaaaaaaaaaaaaaa

SEQ ID NO: 150590 - DNA, 378 bp, Zea mays
  unsure (1)..(378): unsure at all n locations
  Clone ID: MRT4577_68862C.1
cggaannaatgggaagacccacgcgagaaaaaaaacccccccgccagcgccgcaccggggttgaataacaccaacggggcgggaagggcaccaaaccacaggngaacggaccgaagaaggaagacgacgaaaaaccggagaggatgtcaagcacaagagcacaaaggacgcatgccagcagacccgtaagaaggaaggccacaagcgccagaacaagggagcaggcgcaaacaaacaacgcgccaacgaaggagcaggagagcaaacgggcaacaaccagatcaagaaccacggatacggaaagaagaacggcaccggcggagccaaaaaggagaaaaaagaagacgaacaagaacagcgcgctcccgggccagccca

SEQ ID NO: 150591 - DNA, 811 bp, Zea mays
  unsure (1)..(811): unsure at all n locations
  Clone ID: MRT4577_68863C.1
agagagaagctgcgagccatccaggaggtggatggaccaccgtcgccgtcgccgccgccgccgcgagtgtgcgtgaccggcggcggcgggttcatcgcctcgtggctcgtcaagctgctcctctcccggggctacgccgtccacgccacgctccgcgacccgagtgatccgaagaacgcgcatctgatgcagctggacggcgcggcggagagcctgagcttgttcaaggccgacgtgctcgaccgcgccgcgctggccgccgccgtcgcgggttgccagggcgtcttccatgtcgcctcccctgtgcccgcggagaagatcgtcgatcctgagtcagaagtcatggtgcctgccgtgaagggcaccttaaatattcttgaagtttgttcatctctgaaggttcagaaagttgtggtggtgtcatccactgctgccgttcattatgatcccaactggcctcagggtaaacccaaagacgagagttgctggtcggacagaaaagtatgcaaggataatgagatctggtatagtcttgctaaaactgttgctgaagagacagtttgggaatatgcagagaagtacaggctaaatgctgttgcagtatgcccttgtattgttctggggccacaattgcaatgtgctgtcaatactacaagcgaactcctcctctatgtcataacaggaggtcctaatgcgttgaatgacgtgctgtggcacatagtcgatgtccgtgatgtggccgatgccctgcttctgctatacgagaaacccgaatcatccgngagatatatctgcgcaccaaatacattag

SEQ ID NO: 150592 - DNA, 218 bp, Zea mays
  Clone ID: MRT4577_68864C.1
attcggctcgagctgaaactggggctctactgtcttctattccgactgctagctcacccacctgctgtgctcttgtggacacactgggctatacccattcatcttacgacactggccatacttattcatggcgcgagggccaccgtccagctatacacacactacgctgagctagtgaccccactgtgcactatacggccacaggtacagaacctgcc

SEQ ID NO: 150593 - DNA, 262 bp, Zea mays
  Clone ID: MRT4577_68865C.1
ggctgccagattccccttcggcgagagatccgttgttttctgcaggtccaagtgctctcatgatggcaacctcgacctgctgcttcttatcttcaatttcccgtttgcgggttgagaattcatgagctgttttctgttcgctttccagagccgctctatttgaatccagcatcttctccagccctgagatcaggctttcccgagcctttacgcactcagccactgcgctctctgcgttcgcaagggtcttgagcaagccatt

SEQ ID NO: 150594 - DNA, 711 bp, Zea mays
  Clone ID: MRT4577_68866C.1
gtctgccggccagagcctaagccacctcatctccatgctggagttcgccgcgatgtgcctccgtcgcggcctcgcggtgaccgtcgccgtcccggacccgtccctcaccgccccggccttccgctccaccatcggccggtacgcctcccggctccccaccctctccgtccactccctccctccccctcccgccctcgacgccgcctccgctgccgcccacccgttcatccgcatgcaggccgcctcccgctcccaggcacctgtcctgcgggacttcctccatagcctccccgacgtccacgcgctcgtggccgacatgctcgccgtctgtgacctcgacgtagccacggagctgggcatcccggggcacctgttcttctccacaggcgccgccagcctctccgtcttcctccaattgcctttgttttgctccgggcgcgccggaaacttgaaagatctcggcgacacgcccgtgtcgttccccggcatgtccccgatgccggcgtctcacttggtcgacgcggtgctcgacagagggacggacctctacgcgactgtgctggacgtattcggtcggatcgcgggtgcgcgcggcattctggtgaataccttcgacgcgctggagggctcagcggtgtcggcgcttagagacgggcgctgcctgcgcgggcgcgccacgccgccagtttactgcgtcggggcgttgatcgc

SEQ ID NO: 150595 - DNA, 600 bp, Zea mays
  Clone ID: MRT4577_68867C.1
gccggccgttccgggatcccgactcacctacacaagcaaatatcccacaaagtgactccacagacctagctactgtacactcgcaacatggtcctcaacatcggaaagatcgcccatcatcgcgcgagcctgagagacatgaacatacaatgctcagctcaggggaaactgggtggatcacagcgtaagtatcgcgctcgtgctagtacgtgcaccaatatactgcatatccctcctcgactttacctgatacaaccgcaaccgtcacagcacctggcaaataatcactaccatgggattcaaccctaacatcgtgaaccgggcaagactcaattgtcgtcacgtcagactgcagaaacgtctgctgaacccgccgcctcttctgaccattgacaaccatatccgtctctcattccactgtgaggagtaaaaaaaatctcttccgggcgtcatcatctccaagaactaccactccatacgattgcttactagagagcatcgccctgatctatgttgccggtcacggtagcatgcaacttctacttgaacgtcatgcatcgatccacatttcaaaactgcttacatctgctctgtcttctc

SEQ ID NO: 150596 - DNA, 320 bp, Zea mays
  Clone ID: MRT4577_68868C.1
cccacgcgttcgggggagaaagactcgatccaggcggcggccatgtccatgcgcggcaagggcggcaagggtctatgcaagggttgaaccaaaccccaccgaaaggtgctccgcgacaacatccagggcatcaccaagccggcgatcctgacgctggctcgtaagggcggtgtgaagcgcatctcggagctcatctactaagagacccgcggcgtgctcaagatcttactcgagaacgtcatactctactcctacacactacacctagcacgcgcgcacagaagaccgacaccgacatgagatgatctatactcgctcaa

SEQ ID NO: 150597 - DNA, 229 bp, Zea mays
  Clone ID: MRT4577_68869C.1
agcacctgacaaacagccttgtttgggcaaatttaacaaaaattactgtgtgtggctggacaaagattaaaagccctggggggggggaccctttataacaggtgattgatccctgtataatagggccacatgccaagggggaggggaattcatcggtttaatcggcgccatgcaaccttgggggcattttatttatacctgagccacattcaaacaaaaatttattttg

SEQ ID NO: 150598 - DNA, 181 bp, Zea mays
  Clone ID: MRT4577_6886C.1
tttatgctattttttgccactatttatgttttcttatgtcgtccatttttttgatttgaaagaacgggttcctgtttccatgatcagttctcttttcgcaagacaggaaaaacccccttttattttttaaaaaaagagggcggcctcaaccacggtatcgtgatccttccaccacccccct

SEQ ID NO: 150599 - DNA, 428 bp, Zea mays
  Clone ID: MRT4577_68870C.1
gggggttcaccggtcccaggtttattttttataaaaaaacccttcaaaaaaaaattgaaaggggggggggccatgttcaaaaaatatttactttactaaaatcgggaaacccaaaaactttgaaaaaaaaatagcaatttaaaaacattttttaaaggtccaaaaaaacgggaaaaaaagttcccaacgggtttgggggaagggggccggcccctaaaccggtttaggtttttaccccccggaaaaacccttttattgaaccaggatgggggaaaggcccccaaaatcctggggggggtccttgaaagggaaccctggaaggggggggggaaacggaaccggtggaagttttcaaggggtggaaaacccttttctttaacccaaccaggatgggggaaaagggcttaaaatttttgggggggtccttg

SEQ ID NO: 150600 - DNA, 245 bp, Zea mays
  Clone ID: MRT4577_68871C.1
ggaacccaccggaactgttccacaagatccttaacatccccaaggacacctttccaaaagatctccccgcctcgtacaagagcctagacaagaaatggcaccccgacaagcacccgcctgtctccaggccagaggccgaggcgcgcttcaaggccatcagcgaggtctacgaagcgcttctggaccaacaagaaaacagtgccttgtttgggcctcgcaactgtcaccgggctggtggaagctcc

SEQ ID NO: 150601 - DNA, 365 bp, Zea mays
  Clone ID: MRT4577_68872C.1
cggacgcgtgggctgtaaagaggaaaatggtggaaaaaaaaaaaaaaaaacaaaaaaggaaaaaattaacagaaaggtgtggaatctcgaacatcttatctgatcccacctacgttatctttcatccgatgtgctacctcatttatactgtccacctgacaatgtctactggccggattgttacaacgacgccattcctaaaacccttaatttacctaaattaatcgctttggacaccatgcatatttcaactgatgccataataactaatattcccctaccgcacgtacgcttaaactagtactacactctgaatgtcatatggcacactctttctagcgtcacattaaactcggcctattttg

SEQ ID NO: 150602 - DNA, 593 bp, Zea mays
  Clone ID: MRT4577_68873C.1
cattgggtacctcgaggccgggccgggatgtcccacccacgggtctagactattgtagctcatatcatctgtcacccatggcgaagtgcagcagcttccaaggattattctggttgctttccatgattcttctagcatcctttgttgctcatgcacgcacaacaagtgggcacaccaaagaggacagcaatgctaggaacatgacgatgaccaagacgagggcatcgggcaacatacttgttagccgtaatgacgacgggccatgctatctagattccggtcttaatgagtacgtctgcagaaagactaataagtgctataagagcttggtgctctgcgtggcgagttgtcaaccatcatcatgaattcatgatactgcggagacatcatgatactgcggagacagacggcgagagatgaggctagctagatgctgtttcaccaaaatattatgtaacacccaaatctcccattttaagaaataaataagattttcgaaaaaaaaaaaaaaaaaaaaaaaaataaaaaaaaaaaaaaaaaaaaaaaagaaagaaaaaaaaaaaacccaaaaaaaaaaaaaaaaaaggccccta

SEQ ID NO: 150603 - DNA, 389 bp, Zea mays
  Clone ID: MRT4577_68874C.1
cttggtacagctccctttgaatggtttggtccctggtggtgggcccccaacatcttagtcttggggggggggttgttcgggatgggcttattgccaaaaagggggaagttccccgtaaaaacggggggttgggtcatcttttagctggggtcaattggcgtggggccggagtcctttgggggtggtgaaagggccctcataagggggggacaggttatgtttggccttcctcctttggatcttgggttgccctagatcgtcaacagcccaacttttattttaaacgtgtcttgcttggccgccaagcccttggcctttttgagtttgtcgggggccgggattcggtcctttctctaaaacgggcccctcggaagtttaacccttgaaag

SEQ ID NO: 150604 - DNA, 289 bp, Zea mays
  Clone ID: MRT4577_68875C.1
agctcggaattcggctcgaggtttacgtggcaagggctttatctgtttagagtaccaaaggtcaagaacgggataatgagaagctgctccaactatcaaccaccgactgctgcacaaaaggggtacaccaacaacatcaggtgcccgtctctgtacttgattaccgaaaacgacttactgaaagtgcatagagaaaagcttataaaagcatgcgtgtacacattcgtgattctgaagctaaaggaccacacagttaccacgctgaaagacaagagatgaatggtcatgc

SEQ ID NO: 150605 - DNA, 271 bp, Zea mays
  Clone ID: MRT4577_68876C.1
ggctactaaacctggatcagccttctagaccggcgaggcaagatgatgttaaaagcacaacagaaccgtgtcctcccactgccaagtcttcagaaacttctgcgggcaatgatgctcgtaacaacgggagcgaacaatggggactctaacaagtgatttcgatttggatgctttcatcaagaagaggctggccctcgacccatcggagctggatgccgtgctcgagggctctgacccgaggggtgttgtttctcagaggaggaaacagcgg

SEQ ID NO: 150606 - DNA, 166 bp, Zea mays
  Clone ID: MRT4577_68877C.1
tatccagttggctctgatttgtggaacatactattctacagagcgattcaatattccttatcgatgctggagaatgccatcatggtatgtcactttggcaatgtgttgcgccgtgcagtcatcgaggatacctggcactatctcctgcacagactcctgcaccaca

SEQ ID NO: 150607 - DNA, 991 bp, Zea mays
  Clone ID: MRT4577_68878C.1
gggtacctcgaggccggccgggccggggacttctcttcaggatgacaccggttccttcttccgtcttcttcagcttcgtcactttaccgtcttcacttatcagatctagtaacgctgacattgtggtcccggggtggtgccttggctgacctgaccagcaagcaaataggcccagccaactccgatccaccaagcccagccccccggcaccagccgcccgcaacccgcaaagctgcttcccggactagctagggtttcgtctacgccgcttgatctagtcctctctcccggcacgcgaggggcgcagcgttgatggcggcggcaccggcggacgctaaggcggaggccgccaagatggacctcctcgaggacgatgacgagttcgaagagttcgagatcgaccaagaatgggatgaccaggaagaaggcaacgaagccgtccagcagtgggaggatgattgggatgacgatgacgtgaacgatgatttctcgctgcagcttaaggaagagctggacggaagcaacggccagaagagctgaagtattatttctctactttatataaatgatttttatatggcagctacttttggaaccgttgatgtgctttggatgtgaaagtttttggacatcagtcggcaatttgacagcactgtacgtgttagttgtcgttaggatatgtctctagccgaaacgctagaatccgccacaatgtctacgccccaactgtttctcttaaaagagtgccgcaactgtttttgtacctacgcccgacctcgttctttagcagtaatccaacagttctgtatatccactccgaaaaaaaaaaaaaaaacaaatgaggattgcttgcgtatctttcccttacaatcacggtttagtggatgaaaaccgatcttcccgtgcgataacactttggttcacggtgaatgataacgtttaaccatgtttgtaagtccaaccataatcagatactgatatcgtcttattt

SEQ ID NO: 150608 - DNA, 421 bp, Zea mays
  Clone ID: MRT4577_68879C.1
tcgggcgaggcaaaagcattgcgaccacagacagcgcgcgcttcaaggccttttttttttgagataacaaggaggagaggaggagatggcggtcacgatcacgtgggtgaaggcgaggcagatctttgacagccgtggtaaccccaccgtcgaggtggacgtgggtcttatcgacggcagctacacaaggggggccgtacctagttgtgcatacattggtatatatgtggccttgttgatgatgttcggatgattatatatttcttcgctaagtggggggggggggggggtgttttatatatacataatatttttttaattttcattacttatttattaccatttatttgttatttttttataaatttcttaaattttttatcactttcttctataaacttttttatcttttttttttctt

SEQ ID NO: 150609 - DNA, 2928 bp, Zea mays
  Clone ID: MRT4577_6887C.1
tcaaaatgaatagaatggaggtgccccccagcctggatagacaaagggactatacatgtaccatagattcatcgtcatgccattccatgtttgaacaggataatataccgacgatgagtaaataggtggaaagtaccctggtctcatagaatgaataggcgatgcttgttgtgtcgcctttcgggtcgttttgtttgaccgttttgttttagcaggtgaccggggtttctttgttgaccgatcacgtggaacagtctttttgctagtatttttggagagcaactgatcaaaagtaggatcggctttgatcagccgattatatgtgctttgaccttgcgtctttttccttgctttgtgtagaggttgacgcctttggtcataggtggactgtccggctgagttagccggaccgtttgtctgagcaccggattgtccacacgtaggtgtcggaccatctacgatgctggggctaggctgatgtgtttggtttattaactgtgcctgccccccggcgtcttcggaccttttagccttcacgtccgaagcctttcgagcaatctccttttgtgatatatctgacatgcgaggattgctgatgacgatgcccttgcctttgcctttatcggccatttcgggccgaaccaagacctttttgcatgtgagttctattgtattaacaggaaagggttgtgtgtctacttgcatctcctgaaaagccaatcgaccctcatttatggccgattgtatctgtcgacgaaaaacattacaatcattggtggcatgagaaaaggaattatgccacttacaataagcacgcctctttaattcatcaggaggaggaatagtatgagttaatttaatgttgccgttttttagtaactcgtcaaatattttatcgcatttggcaacattaaaagtaaacttaacttcctcttgtcgattctttcgaatcgactgtaaagcagaacacactgaaggtttagcctgtcctggccaaaccagttcggcggtgtatacatccgtggattcatcgtccgaattatcgtatcccactagatgcatcttatggctagccgattttgatgtttccttactttggctttcacaggtcatagcccgctggtgtaagtgcactagtgaaaagaattgggtgccatctaatttttcttttaagtagggtcgcaacccattgaaagctagccctgtcagttgtttttctgcgacatgaatctgaaagcatcggtttctagtgtcccggaatctccggatatagtcattaaccgattcttcaggcccctgtcggactgaagctaagtcagccaattctaactcatgttctcctgagaagaagtgttcatgaaatttctgctctaattcttcccaagagttaatagagtttggtggcaaagctgcgtaccatgcaaatgcagtatcagtaagggacaacgagaataaacgaacgcggtaggcttccccatcagccaattctcccaagtgtgctatgaattggcttatatgttcgtgtgtgcttttcccactttcaccagaaaacttagagaagtctggtattctagttccctgtgggtatggcacggtgtcgaatcggtggctataaggcttccgatacgattgccctgtacctgacacactaacgccgagtttgtccctgaacatcccggctacctcatctctgaccctctctgccatgtcagctcctgccctatacccctcaggctcttttgtggctgaatagtattcagccctatgtccatgaggtggtatggcatgattataatgtgttgctggtggggcaccataatgttgctgcgatgaatgtgggaactgtgcgtattgcgcagctctcgactctgcgtatgcatatccggacggtccggcgtaagaggctgaatggtccgcgacctggccaaatggtctgaaggtatatccggattgtccagccgtatatggtgctacgtgggtagtctcgtacccagaccgtctgtcgtaaagaactggacggtccgcgatcgggccgaatggtccagggctgtacccggatggatcggccatatatggcgtgacttgggcagtctgcgcatggactcgtgtagagtcggatggtccagcgtaatacgtcggccggttcatgccatatccggacggtccggcgtaagatggcggacggtccgcaacatatccggacggtccggcgtgatgcaccggacggtccgtgatggggctgaagtgttcagggttgtaccctgatggtccggccatgtacggtgcgacctgagtgttttgtgtgcgggcttgcatctggtcagacggtccggcgaaatacgccggacggtccgcggtataaccggactgtctgagatgatgcccggacggtccggtcgcgtccagtacttgccgcgtgcctagtggttgcggctgtgatggtgacacgaaagtgtgcatcggcataccatatgatggctgggtcaaaggtgacccgttcatagccgatgtgtttgacgtgggtggcactgtattagactctcgcgatggaaaattaggagcagctgatttctcgtatgcacgtaaatgcattttaatagattcatctacatattgctttaactgatctcctcgttgatccatgaaagtcgtaagagatagatctggagtacttacagcgggaccctgcagtggaggtaggagagattccatatcgatctccccttgacggacgatcttctggtggcgatccaccgtaaagtgtgacaagtacttgtccgccgcctccttgcgccgttcggagagtttatgcagcagttctgcctcttccttgtcgcgttgttcgttccattgccgcatcacctctttctcatcgcgcattacgaggtcttcaaagggcctttggtcatcagtcgggagcgcctccat

SEQ ID NO: 150610 - DNA, 434 bp, Zea mays
  Clone ID: MRT4577_68880C.1
ggaaaaaaatttgcctggttgggcaggggtccatttaacatgggggtcggaccacccaaggggggccccccccggggcggagaaaaagaactttggcccctaaacaaggatttgggggcaaatttaaacaagggtaaaaccccctttttccttttttttggaaaacacccccatgggggtttctagcaagggggtcctgaaaaaagacggggggccccccgccggggggggttggcaacgggcttgtcctttgggacgagggaaacaatgcgttgatgccatgggggggacccaaaagacggggtcgtttgtccagggggggctcgttcacgggtcccaagcgggggcggcaaaaccggggggggggggcatggcacagggtccccccccatttggggggcctgtgggggggcgggtccttgggggggaggggg

SEQ ID NO: 150611 - DNA, 421 bp, Zea mays
  unsure (1)..(421): unsure at all n locations
  Clone ID: MRT4577_68881C.1
gatcgaagagaagnggaggagggcccagcactagcgccggcccgncgccgnatcagacatggngctggccgctcgcctcggctcgcgctcccggcagcaatattcggatcaagccaatttggggaaaggaggtgtcactcaagctcgctcctttgccaaggaagcagctccagctgaccgacctcctgtcggaggggatgatctcctgaagggcatattcttagaggtaaagaagaagtaagagacagatctagaagatcttaaaaaggaaaagaccactatagatccagatgacccaccggaagaaaactacgctatgcccaagccatgaagactgcaagggaaaacgcggaccctctcccctgcacctccaaggcataacacacacccactgagaccttcaccaagcgccactccccct

SEQ ID NO: 150612 - DNA, 665 bp, Zea mays
  Clone ID: MRT4577_68882C.1
aacagacgctccccggctgccgcgttccctaccccccgcatcatcctagatcgtgggggccatgatgggccttcgggaaggaggagcaccacttactagccgagctcgtcctcgcgcagcgcaaccacacgcgcagctcgcatgcggcagcgagaggtgcatcaggacccagcgtcgcctccacgagtccggaccaacaatcaggacatcgcggaagtggtggagtggtccgagaacgactactaggaggccatgtccgtctggttcgatgacgacaagacaaggatggagagtcctgctcaaaagcgaggacacatcgggtacgccaatccgtgatgcactgagagccaagctccatcactcttgcgaagcttgtgacagttgagatgtggaacatgtcttcctgaagggatcggtgaggtccaagaaatccctgacgtgtgcgactatgctgtggaagtaactcaccgactaagtggatccatgataccatccgaccgaccaaaccatatgatgatggacgtgcggaatccccttgtagttgcgggagtgataacgacatgtaatttcccttgagctgtgcttggatgtgatgcctgcattgctttggtctgcggacattgtgtcgcactggataggagctccgacaactccactgatcacta

SEQ ID NO: 150613 - DNA, 445 bp, Zea mays
  Clone ID: MRT4577_68883C.1
gcctgcaggccgactatagaggatcctctcggtgacttccacttccacgattggccagatatagagacgcataaatgctcatctttgaagagcaattatgcgttctcatattaggcctatgctgaatccgaaggacatgagatcggactttctcggggaatttcaattccacattttgcctaaatagagaacgcaaaatgcccatatatgaatagcaattatgtgctctcttattatgcctatcctgaatccagaggaacccagagcagactttctcggggaatttcgacttcacgttttgccgaaatagagaagcaaaaatttccatttatgaatgggaattttttgcttccttattatggctaatctggaaccggaagaaacgaaagggggactcctcagggggaccgcgcgcgaattaccttttgtgagcctttttaaaagg

SEQ ID NO: 150614 - DNA, 535 bp, Zea mays
  Clone ID: MRT4577_68884C.1
accataagaccaaataataaactttaatttgagtatattgcagtacaatataataattcttttgaagtacaaaaataattttaaaaattttccatttgcaagtaaaatttgctaccaactattaatagtacattgatgttctgaactgtacatatgacactacattcctaagcctgtaccctcttctctcctgtatcatcacatataagaaaaactgccaagcaatcttgagaccccgccaatagtttaaaagtagctatccttactaacagaattggatggtatccctcttaaactagactatgcttttttggctcaatactatagattaaaaactttttagaaattagtttaaaattccaggaattgctagttttggagtatctgcttttctcaaaagacaggacaatggcagggagaagctagattgttaaattccacaaaaactcatttaacagtaaatcaccatcaatgtaaaagcttattaagtctaggaaatttgaaaataatagcaattaactggaagacaaatttc

SEQ ID NO: 150615 - DNA, 649 bp, Zea mays
  Clone ID: MRT4577_68885C.1
ccggccacgaacgcctcgctctctgcttttctgcaccggatcctcctctcgtccccggatcgatagctagcggacaccactcgaagctcggttgcaggggtagccgccctcgcttccggctctcgtatggctctagtccaccgacaagagcggcctacgaaaggacgccgacgtggactacttacacctcgccaggcacaacatacttttgggactaccgacggcggaggtcggcgaaataggaagaatcggcacgccaacatacactggagtctaatcttacgaaggtcgggtactacgtgagaggaaggagaagagcagagatgcggacggaggagacgaacaacccgcgggaagggacgacggctgagaggaggaattggacgggctagcggcatgtagcaggagcattggcagtaggacgaaggacgagatcataggagatcgacacggtgcactgcgggtggtccgaggagtactaccgggagaagaccatcctgcaggtcaaggggaagtcgcagaagctgatgcggctgtcacaggtgtacaacgtggagacgaaggatgagacacggcggaacgacaactggacactggaggaggaggccgagagtcgccgcctgcaggagttcaggtacagactcgagga

SEQ ID NO: 150616 - DNA, 283 bp, Zea mays
  unsure (1)..(283): unsure at all n locations
  Clone ID: MRT4577_68886C.1
aaggaacgaaagcaagcactctttttatttatttttttcttggccttccacaagggggggaactttttacatcacttttggtcttacaaaaattgggaagcaaacccaggtggggggggttgggaactttcccaggggaatgttaagcctagaattgcttgggcttttaagttctgccaatgtttgcctccgntttcacaagctccgacctgaagtggggtgggggtcatcggtcaaacctcagaaatttagtttagccgctcctgacccttgtctaaaccag

SEQ ID NO: 150617 - DNA, 261 bp, Zea mays
  Clone ID: MRT4577_68887C.1
tgctcggaattcggctcgagcgttatcgcaatcattctcaaagtcttcccacagccagatcttgagataagctggtgagaaaatagctgaaccaaacaggccctttgaccctatgctgtttctgctttgcaagaactttactttagatcacaatcacaagaggatgagatcctggtgcctccgcaggaaaattgctgatgcatctctcaaggagctgagattactgggtgatacacatattctgagaggaggctcacagac

SEQ ID NO: 150618 - DNA, 1466 bp, Zea mays
  unsure (1)..(1466): unsure at all n locations
  Clone ID: MRT4577_68888C.1
agnatatgatgatttacctcctttaagcgtctcacaaaactcagcttgccaactgaacaggagcagaggaaggcctatcttgaggagctagattacagagagaagttgttctatcaaaaacagctgaaagagaaagaaacgtcgtaaattgatgaagaaaaggcagcagaagccagtgctcgtgcaaatgatttcagcaacagcaacctagaagatgatgctactactccaactaatgtttcagtgcctatgcctgacatggtactgccctcatcttttgattctgactaccctagccatcgctatcgtttcctgggatacaccaagtgaatggcttgtcagacctgtattggaaacacagggctgggaccatgatgttggttacgagggacttaatgttgaaattttttttgccgtaaaaggtaaagttcctctatcagtgtctggccagcttacaaaagacaagaaggattgctccctgcaaatggaggttgcaagttcaattaagcatgctgaaggtaagactacttcacttgggcttgatttgcagtctgtcggcagggatatggcatacacaatccgtggcgaatcgagatttaagaacttcaggcgcaacaatacatctgctgggatatctgctacgcttcttggggattcagtatcagctggtatgaagattgaggacaaactgatagtgaacaagcagcttagggtcctggttagcagcggggccatgagtgggaggggagacatggcctatggaggccgccttgaagcaacgatgagagacaaagattacccgattgggcggatgctttccactgttgcattatctgttgtggattggcacggggatctggcaattggctgcaacatccagtctcagatccccgctggaagagctagcaacttggttggccacgctaatctaagcaacaaggggactggccaagtcgggattcgcctcaacagctcggagcatcttgagatcgcactcgtggccctcgtgccgatattccagaacatcatgaagctgttacagaattactcggaatctggctagtccctcgtgccgatgttccagaacatcatgaagctgttacagaattactgagaatccggctagtactttttttttcatgtaagcctgagaaaacagagcatcataggttaaaatctagcttaagctagaactttacttccaattattattttgttcttttgttggaaaaaaaaaaaaaaaaaaggcccctaggcttttttttttaagttggagtagcattcttagggctagtttgggagctacaaaaccgaataggattggagtgactaaaatccccttattcaaatttaaataagaagtggattttagcccctctaatccattttggttttgtagctcctagactagaccttataatgtaagattccccctgagctctttttgatgaagctgggttggagaa

SEQ ID NO: 150619 - DNA, 713 bp, Zea mays
  unsure (1)..(713): unsure at all n locations
  Clone ID: MRT4577_68889C.1
ttgggtaccccctcgaggggccggcccgggccggatggtaaacatcttgtctggcctcaagggctttccctacacgttctctctccctcgttcgatgtcgtgccgctgctctgcagtctgcacccacgccaccttcccgaaggcggaaatcctgactcagacccctaatctcatattcctatgcacttcgcaaccgttaatccgttataggatcaaggatcctaccaccagatgctattgtcgatgagcgcctggtactcgtactccatggcagcattctagttgaggtcagccaacgcgttgcagtatttgctagggagtgaagatgtcgacatggcagagcgacccttgtagttagtagttacacaacacaagtctgtaatcgaatcaccgcctgttggaggaggggagttgtcgacgtcgtgccttgcataggccgtggatgcggcgagcgaaggcaacagctcaacagcatgaagaggccggccagatgtcctagttggtgttgtggctgtggagtacaagtaacatgtatagatatacatgtgttaaactatatatatctcttatataatagttttattagtgtgtctaaaccttgtaaaactttgtaaggctgtgtgcatcctaattatacagaggccgngagtgtttcaggatccttgtattatcgtatcaactcaatataataaacttggaattaataaagcttc

SEQ ID NO: 150620 - DNA, 1695 bp, Zea mays
  Clone ID: MRT4577_6888C.1
ctagtgtaagtgcactagtgaaaagaattgggtgccatctaatttttcttttaagtagggtcgcaacccattgaaagctagccctgtcagttgtttttctgcgacatgaatctgaaagcatcggtttctagtgtcccggaatctccggatatagtcattaaccgattcttcaggcccctgtcggactgaagctaagtcagccaattctagctcatgttttcctgagaagaagtgttcatgaaatttctgctctaattcttcccaagagttaatagaatttggtggcaaagctgcgtaccatgcaaatgcagtatcagtaagggacaacgagaataaacgaacgcggtaggcttccccatcagccaattctcctaagtgtgctatgaattggcttatatgttcgtgtgtgcttttcccactttcaccagaaaacttagagaagtctggtattctagttccctgtgggtatggcacgatgtcgaatcggtggctataaggcttccgatacgattgccctgtacctgacacactaacaccgagtttgtccctgaacatcccggctacctcgtctctgaccctctctgccatgtctggcgaccatccattgagtttgtgggtggagatttcaggttgcctgacattactctgtcggctttcctcccaggtatgtttaaggtgtgtgttaggtgtcctattaatgtcaccagctcctgccctatacccctcaggctctcttgtggccgaatagtattcagccccagaccgtctgtcgtaaagaaccggacggtccgcgatcgggccgaatggtccagggctgtacccggatggatcggccatatatggcgtgacttgggtagtctgcgcatggactcgtgtagagtcggatggtccagcgtaatacgtcatccggttcatgccatatccggacggtccagcgtaagatggcggacggtccgcaacatatccggacggtccggcgtgatgcaccggacggtccgtgatggggccgaagtgttcagggttgtatcctgatggtccggccatgtacggtgcgacctgagtgttttgtgtgcgggcctgcatctggtcggacggtccggcgaaatacgccggacggtccgcggtataaccggactgtctgagatgatgctcggatggtccggtcgcgtccagtacctgccgcgtgcctagtggttgcggctgtgatggtgacacgaaagcgtgcatcggcataccatatgatggctgggtcaaaggtgacccgtttacagccgatgtgtttgacgtgggtggcactgtattagactcccgcgatggaaaattaggagcagttgatttctcgtatgcacgtaaatgcattttaatagattcatctacatattgctttaactgatctcctcgttgatccatgaaagtcgtaagagatagatctggagtacttacagcgggaccctgcagtggaggtaggagagattccatatcgatctccccttgacggacgatcttttggtggcgatccaccgtgaagtgtgacaagtacttgtccgccgcctccttgcgccgttcggagagtttatgcagcagttccgcctcttccttgtcgcgttgttcgttccattgccgcatcacctccttctcatcgcgcattacgaggtcttcaaagggccttcggtcatcagccgggagcgcctccat

SEQ ID NO: 150621 - DNA, 277 bp, Zea mays
  Clone ID: MRT4577_68890C.1
gcggacacggaccgggagctgaagcggttgttgtcttcccccctcgtctccgtcaactgccagccgccgccgctggattctttccgaattgctctgtctatcctgtgccgtggatcgagttgcttccggaggcgacggcgacgcggtgatgttctgctcgtgcgcgcgatgcagctgggagccctgctttctcgactctgtttctccttgcactgattcagcacccccccacaagccagcaagatggacgggttcgtggaccccttcgtcccggaac

SEQ ID NO: 150622 - DNA, 121 bp, Zea mays
  Clone ID: MRT4577_68891C.1
ccgggtcttccccgccatgtcacgctcagcagcggtggcgacgtggtcaatagcggtaacaagccagtacgaggaagaggtcttgttgatcgtagttgttggttaatgatggttgttggtg

SEQ ID NO: 150623 - DNA, 336 bp, Zea mays
  unsure (1)..(336): unsure at all n locations
  Clone ID: MRT4577_68892C.1
ggcctgttggggtccgccgcggcgcgcacggagaacgacgggcgagccgcctttttctgcctgagggctcggatttgtccctgataggctggggtggaacgtgcaagcggagctggtgcacttgcggggggctatgcttggcgcggggggcatttttattccggagttcctgaccaagatcggggttcttaacacgcccttttgggaccccggcggcgagcagcattactttaccgacaccaccccccttttcattattcatcttattcttattgggtgggcccngggccggcgctgggctggccttctctggcccgggngcgttgcccccgtccc

SEQ ID NO: 150624 - DNA, 144 bp, Zea mays
  Clone ID: MRT4577_68893C.1
atggggaagaaatgccccccgcaagagttcgtggggatcctcgcggggtttttttgtcgcggggacaggtacggggagccaaaacccgacggggatttccccgttgccatccctattcacggctcgccggagaccaacccataa

SEQ ID NO: 150625 - DNA, 171 bp, Zea mays
  Clone ID: MRT4577_68894C.1
tcattgcagccgttcttttcgcagcagctgccctgcgcccggcctggcgatgccccaacgaccatggcagcaaactccaacctcttccgcgactacatcggcgccatcttcaacggtgaccagctcagcgacgagacgatgaacaccgacgcgacgaagaaacatgtggaa

SEQ ID NO: 150626 - DNA, 313 bp, Zea mays
  unsure (1)..(313): unsure at all n locations
  Clone ID: MRT4577_68895C.1
gggtacgcgtgggacgcgctagnccgaccgtgctggtagccggagatggccgactgctgcaccggcgctctgttagcgggagatgtcttatggcctcgtgacgcctcgcgcttgagtgctataagccgccggtcgatcgccggtacgtaacgttacgtaccctaacgctgctgtgctgtcatgctgacgtgactcgagaacatgcactgatcgtagacttgcccgtatgcccgactgaataaaaggccttcatgcatgcgtacatgtggagaagcggcggggcctgtctggaggatccaacatgaatgcgctt

SEQ ID NO: 150627 - DNA, 1295 bp, Zea mays
  Clone ID: MRT4577_68896C.1
ggtgggactagtccaaatgttgtagttactagttactagagttagcaagcagaggaattggtaatggtgatgcgttctcaacttcttatgtgtgcttgtcgttcgatcgtccatcagtttttagatgtacaaaacatatcaccgcattgacgtccatggctgcgagtacagtacagtggtcggccggttccaagtttacaaacagcaagcagtactagtgagtaggtgacattagcagtacaaacccttaaacctgcaactaagcacgacagagagtaggggcggagctcaggcccgttcatctcggttaggtggaagaaatggccggcatatgtgtttctttcatgctttactgcatcctgcatttttattttgttgcactggcacgacagcctggcactggcaccccgcgtactgatctgatgctgtaatagcaattagcatgcgttcagattagttaggatatggagctgagctcgctgccaacaaggtcaatactagcatccatttttttgcaaactaggacacaatcaggtgaaaaggttgagctgcattctttgtctatttaacttcactagttctgtttgtttcatggtatgctgttatttacaagtaagcccaggagattcttttattgatgttaaacaattactgttggatgctcctgaaacatgcttctatgcatgatacaatttgatattgcatactaaagatgggttagctcatcagttagaagactacaaggaaatatctgaaatagcagatataacttctagtggatgttcactggagatggttgctagtatgtaacaacttctagtttcttctctattgtcatatatacttatatagtgcttattttctggagctaaagtaaaagttctttcagcaacatacaatgagaggtctattaggtcacatctccgacgtgtgaaggggctactatctctgtctagtctttatgtttccctatcaacgtccttagctctgcttcaggagtccgctcaaggaaaatttgcaggacttatatatgtgttctctgttcactgatgcggctggagcgtcatgtcaactgctcaccctccccctaacaaattaaactagactgatgagtggagcttcatgttgggatgatccatgcaccttttaagttttggaacgtcgtactcaaatgtagcttgtgttagttgaacctatcgtactttcttttggaattaaattatatgatatttaaacattttgatgtttaatacttgtgttggatgctttatgcttcaaatatatatgcattatac

SEQ ID NO: 150628 - DNA, 307 bp, Zea mays
  Clone ID: MRT4577_68897C.1
cagtagcacacagcaccatcgcaatcctagacgatcttcttcctctcctcaagagcgtgcacaagggtgcccaaggttgtctaggagacttaattactgtaatttgggatggtttgaaggaataaaagaagctgaaccatggggaagagaaagtcagctgctaagccacctcctactaagcggatggacaagcttaacactgtctatatcctgccattctgcaaccacgggagtagtgctgagtgccgcattgacatgaagaatctgattggcgaacatcttgtataatctgtccaggaaacttcag

SEQ ID NO: 150629 - DNA, 334 bp, Zea mays
  unsure (1)..(334): unsure at all n locations
  Clone ID: MRT4577_68898C.1
gcaggcctccgtgacgggagccgagcggacgccgcggcgctcctcaaccgccgcctctgctctgctttggnttgggggtccctccttcttcttctctgtctctgcgctggcggcctgtggtttctggtggcggcctgtcttgggggcgggtgccggtgaccgtgtgctgagccgcctccacagcgtcagaggagagcattgttggactcactactctgaccgacctccaatgagccttgataggccgtcttgacacaggctgacaaaacctgtggaaagggtatgactagcagccctacctagatcatgtgtttgagtgacaacaatagcgatc

SEQ ID NO: 150630 - DNA, 494 bp, Zea mays
  Clone ID: MRT4577_68899C.1
ataaacagggggagcctgtatttatattatgagtcttgccaacatgacaaagaatggatcctccccgccgcctgaaaaaaatcctaaaaatctgctttctgctagggggtgtttgatctaccccgaactggggggggtcgtcgtcacctaggaactggactcttcccaacagggggccaaaattaacagtgtattgtttatagttgagagctgacggacaagcaattttggattgagcgatcgcccgcgcccagttccaaaaaaacaagaagattgaccttatttgcggggggggcgggggatgctttttattttcccctcctggagggaaaccgggggccccccaattctcttgttttgggggggatttctctccccgaaatattttttttttttttcgggggaaagggggggccctttttttttctttttcggggcccttggagaacccctttcctttaggggggaaaaatcgggggttttttttggggggg

SEQ ID NO: 150631 - DNA, 1503 bp, Zea mays
  Clone ID: MRT4577_6889C.1
atggagacgctcccggctgatgaccaaaggccctttgaagacctcataatgcgcgatgagaaggaggtgatgcggcaatggaacgaacaacgcgacaaggaagaggcagaactgctgcataaactctccgaacggcgcaaggaggcggcggacaagtacttgtcacacttcacagtggatcgccaccagaagatcgtccgtcaaggggagatcgatatggaatctctcctaccttcactacagggtcccgctccgcaaccactaggcacgcggcaggtactggacgcgaccggaccgtccgagcatcatctcagacagtccggttataccgcggaccgtccggcgtatttcgccggaccgtccgaccagatgcaggcccgcacacaaaacactcaggtcgcaccgtacatggccggaccatcagggtacaaccctgaacacttcggccccatcacggaccgtccggtgcatcacgccggaccgtccggatatgttgcggaccgtccgccatcttacgccggaccgtctggatatggcatgaaccggccgacgtattacgctggaccatccgactctacacgggtccatgcgcagactgcccaagtcacgccatatatggccgatccatccgggtacagccctggaccattcggcccgatcgcggaccgtccagttctttacgacagacggtctgggtacgagactacccacgtagcaccatatacggctggacaatctggatataccttcagaccatttggccaggtcgcggaccattcggcctcttacgccggaccgtccggatatgcatacgcagagccaagagctgcgcaatacgcacagttcccacattcatcgcagcaacattatggtgccccaccagcaacacattataatcatgccataccacctcatggacatagggctgaatactattcggccacaagagagcctgaggggtatagggcaggagctggtgacattaataggacacctaacacacacctcaaacatacctgggaggaaagccgacagagtaatgtcaagcaacctgaaatctccacccacaaactcaatggatggtcgccagacatggcagagagggtcagagacgaggtagccgggatgttcagggacaaactcggtgttagtgtgtcaggtacagggcaatcgtatcggaagccttatagccaccgattcgacatcgtgccatacccacagggaactagaataccggacttctctaagttttctggtgaaagtgggaaaagcacacacgaacatataagccaattcgtagcacacttgggagaattggctgatggggaagcctaccgcgttcgtttattctcgttgtcccttactgatactgcatttgcatggtacgctgctttgccaccaaattctattaactcttgggaagaattagagcagaaatttcatgagcacttcttctcaggagaacatgagttagaattggctgacttagcttcagtccgatag

SEQ ID NO: 150632 - DNA, 1380 bp, Zea mays
  Clone ID: MRT4577_688C.1
ccgggacacaaacagcacatctgtttagccaagctgtggccaacctctgcgaggaatggagatggagtcgactcctctcttgacaccatacaagatgggcgatttcaacctggcacacagggttgtgctggcgccgctgacgaggtgccgggcgttcgggaacgtgccgcagccggagcacatggctctctactaccgccagcgggcgacgcccggcggcttcctcatcgccgaggcctgcgccgtgtcggagagcgcgcgcgggtacccggacgttccggggctgtggacccaccaacaggtcgtggcctggaagccgatcgtcgacgccgtccacgccagcggtgccgtcttcttcgcccagctctggcacaccggccgggcctccccctcagcgcatcgtccggtcatcttgtggcccagtgccagtggccactgctggctacagcaattccaaccaaatgggcaggcaccgatctctagcacggacaagcaaatcccagcacaggtgaaccattccggtgacgtcaacacgttcgcggtgcctcggagactagagacagaggagataccacacgtcgtcaatgacttccgggttgccgccagaaacgccatcaaagcaggctttgatggagtggagatccacgcggcaaacgggtacctgttcgatcagttcatgaaggacagcaccaatgaccgagacgactcctacgggggcagcttggagaaccggtgccgtttcacagccgaggtgatggcagccgtcgcggacgaggtcggtgccaaccgcctcggtgtgcgcctctctccgttcgcggattatatggactgccacgactccaacccagaggcgctcgcgcttcatgtcatcgacgagacgctgaacccgctcggcgtgctttactgccacatggtagagccaaggatgcgggtgaacccagacgacggtattatgactctcgagcacatgctgctaccgttcaggagggcgtttcgcgggacgttcattgctaatggaggctacgaccgtgaggaaggcaatgacgccattgcccgtggccgtggctatgcagatctcatcgcatacggccggatattccttgccaacccggaccttccgatgcgttttgccaagaatgccccgctgaacaagtatgataggagcaccttctatacctctgatccggtggttgggtacacagattatccatttctcgatcaactctaggatgattggcttataaacaatttccccacctggagtactatcttgaccttaaaataaaatgagtgtcactatagtattagtgtcgatcaaagttttctaagtttaactaaatctacaaaaattacttattaagcatttgtcaaagtatctat

SEQ ID NO: 150633 - DNA, 450 bp, Zea mays
  Clone ID: MRT4577_68900C.1
ggaaattaactgcacccagcaccttagtggattgatatcgtgcactgaagaacgagaacctaatcgaaccaaggatagatggatggattagattagattagcagggaaccaagcatcaaagaaaattggaaccaattgagcgaaatgaaatggacttgcttgctctcaaacataacagaaattagtagttcctgcgacagtgaagtgcagaagacaaaaaacgtcgaggaccagcagctatgtagtaattagtacaggaattggcaagaacggagaaaaaaaatcacactcctgcggggacgggaatctcaaaatgataaaatacaaaagaataaacaaaaacacaaaattacctttgcagcagcttcagctgaaacaaattcaacatagcaaaatcctttacgattgtcctcagttgtttgaaaggatcgacagcaacggaattcgagc

SEQ ID NO: 150634 - DNA, 375 bp, Zea mays
  unsure (1)..(375): unsure at all n locations
  Clone ID: MRT4577_68901C.1
agagtgtttggctaatcacagtgtgagtgtgaaaagttgtgttttgtttaggaggcacggagcaataagacacaacttgcttacagtatgtagaggccgcccaagaatggtttatcgacacaacaaaatacagttctacgtgactacatgggacgagcccaggcaactggagaaaagcactgcaaaanccttaccacagcagtgactactgtgctgaatgagatgaacggaaggaccctggctttgattggcctagtaacaacaataacagctccttctacaaggagagcaaccaaaacaggacatgccgtgtcacattcaaaacagaacgccgcttgcgctgaaaccagtgtctcctccatagagcgatacttt

SEQ ID NO: 150635 - DNA, 286 bp, Zea mays
  Clone ID: MRT4577_68902C.1
tcggataggggtgggggagaggcaaggaaggggaataggagcgaatgcacgagggccgacgacagcggcaccgtcgggatggccatcggcaccgcggtcggcggcacctccattgccctcttcaccggcgtgagctgctggttgggcatgaaggcttaccgtgacggccgattctcgagaggatggtggcggatgcgcgtctgcacgctcggcggcgtcaccaccctggggcaggcgctggcctacgactgcgccatgtgcggccgcagcctggaccagcgggagg

SEQ ID NO: 150636 - DNA, 285 bp, Zea mays
  Clone ID: MRT4577_68903C.1
gccgtcagctgggaattcggctcgtggtctgggtgctcaatgtttccgactccatgcccgacgacgtcaaggagtggttgcgtgagagcttggccgacaagcagtgcttggtggtgcgaggctgggctcccgaggtcgccatccttgctcaccgggccttgcgcgggttactgacacactgacgttgcgactggactatagaggccgttgccgtcggcatgcccatgggcagctgtgacgtctctgccgagcagctcatcaatgaatggctcgccctggacctgc

SEQ ID NO: 150637 - DNA, 503 bp, Zea mays
  Clone ID: MRT4577_68904C.1
gaggaaactttctttatacttgtacggtaagacagtgaaaccaaggacacccatttgtttaaaacacaaaaagactactctttaacgtgcgacccacaataattgttgatacaagccaaagcctaaatcgcaggactgtttatctggtcagctcataatctcacaactacaccatctgccttgagagcctactcactcagggggaacgtccagtacaccttctttctgcctataggcgataaaaaaaagcgggagctagcaaccacagggggcaaggtgctgggcttcacataggcctgggcgcacaccacaccaggttcttcttcttgtgcggttagggattgtgcatttctgtgtctgcgaaaacagtgggctctctcacgagagagatcacctcaccaacctgatctatcatacacctgttgccctcccacggggaccctcccttccgcagatgaggcagagattacacttcagcttctttagatgcccctctcaggtcg

SEQ ID NO: 150638 - DNA, 598 bp, Zea mays
  Clone ID: MRT4577_68905C.1
cggaaactgaccaagaacagccactgccaatttcgagttcagactccagactccatcgatgctatacatagttaaaagagaaaagaaattaaaaaaaataggaaaatatctttctcccaccgctcgacatcactctatttctcttatccagttatccagttatcctctccagccatcgacttcatctgtcgctggattttttttgccgcgccgctcatctgctgttcttatccctacaccgctcagttctgaagaaaaatcccgccgctcaagcacttggatactacagccgtcacactggatttttcttccccgcggtgcttcttctgcttctcccctagtgcgtctcctctatctctccctcagcgcgctccccggccgagcgctccttgtgccgcgtccggctccctggctcgccggcgccccatctcctctcaagctcgcgaacgccaatggcgcgggtccttctctcccttgcttctctctttcctcccccaagcgccctcgcttcctccctctgtccgctcgccaggcgcccaatccatggcgtacccagtcgcgtccctggccatctgctcggccgcgagcttccctgctt

SEQ ID NO: 150639 - DNA, 481 bp, Zea mays
  unsure (1)..(481): unsure at all n locations
  Clone ID: MRT4577_68906C.1
taaaaaaaaaaaaaaacaaagatagatacaaaacatttaatttaaaaaaaaaaaaaaaaaaaaaaaaattttttttttttttttttttttttttttttttatttttttaatttaaaattttctttaaaacttggcggcaatttgggcctttttggaaattccctaatgggccctatagtggccctatttgggttcaatttacgggagtgtcactttttttttactgggattaaccttgaaaaataacccagcttaatcttttttaaaacacttttgggaggaaaaaccctttgtggttacttcgtgtaaaggccaaataaaaatcccccctttttttcctttttggcaccttttataacactttgtaccccccttgtcccccctctttaagccctttataaagaggtggttgggggggttttaaaggagatganttaaaattcccttacatccccatcttcccgcttttttcccttttttt

SEQ ID NO: 150640 - DNA, 549 bp, Zea mays
  Clone ID: MRT4577_68907C.1
cccgtggacgagttgagccccacctagagcgctaggcaccacgttacgggatgggcgctaaggcctggcccgagccaggaggtttgaggtgatcggccaccctagattgaactggccattgggaggaggggagctgaaaaggtgggcgctccacgggctcgaatgagaccatgacaggccggagcttccggctcgatgtctgaggaggttcagctggtaaagggagagtctgctgaaaagctcgacagcctggaaaacgactgactgttcaagcctgggggtggctcgttccagggctcagactgcgtaggctagggccacgggaggagcccccgatcagatggtgggatacgagaggtggtggattctagccagacagtttactcactaagctattgagcggtattggcagtagctggctccgttagaagagagtagctcactgcctgtgggagaaacctgtgtcgatcagagggttacatgagtgggtaattcttggtaataccgagttaatacaggagtttcatgtggcatttctcctatgtgact

SEQ ID NO: 150641 - DNA, 1428 bp, Zea mays
  Clone ID: MRT4577_68908C.1
cttttttctcccgaaggaacagggttagttagtaacttttggattctttatgtgccatgcttagtttccctaccaaaaatgcgaaggtgaggggggtatttccaatggtttcacttctccattcgatacctgatgagacgagttgttagcaacataaacacaaacattgaaggaatgttataattgtactgaggaacagctaacatgtaggattcgtcttttccatgcttgcaattggtgttagtgctgttgcataactagaataagttgttcatgaaactatataaaaaactgttcataaaatgatactttgggccatattcattggaacaaatcaagttacatgaatgaactatagtctagttcgacacatcattcaacaatgtgaggtagaatgatgacagaacagtcataactgagaaaatgattaacatgttttatttattggcaaaactatctttttttatgaaagggcatctagttgagttggtttgagtagcactactcaggtcctgcgttttactcctcgtgccaaagcacaagtctaaggtctcagccttggtccaatggttccagtcgtcctcacatgagctcggcctatgtgagaaggttttctcttatagagtgcaagggtgttgtcttaccccaatcatgtagaatcctcgaacactagatctatcctgtctagttagttatgtttcctactgaacatatgcccgtcagataaggtggcatcagtccagtttgtgaccttgattttccctgactcagaaattcagttgcgtcccttgttggtgacaacataatcttatttggcaggtcctgttggtgaagatatattccactggcaggcaacaataatgggtccatctgatagcccatattctggtggagttttcctagttacaatccattttcctcccgattatcctttcaaaccaccaaaggtggcattccgcaccaaggtgttccatccaaacatcaacagcaacgggagcatctgccttgacatcctgaaggaccagtggagcccggcgctaaccatctccaaggtgctgctgtccatctgctccctgctgaccgatccgaaccccgacgatcctctggtccccgagatagcgcacatgtacaagacggaccggaacaagtacgagaacaccgcgaggacctggacccagaggtacgccatgtagggagggggtaccctacctggccctttgggggtccgccggaattgccgctgctgcgttgtgttcctggacctggacctggactggagactggacgtgtctccgtgtattcgatcctgtgctgtataatgatgcatcagattgggtttgcagtgcagtgcgccgtgtggtgctgaatgctgtattgtgccgcttggaggctgtaattctgaatgccaaaaaactggtgattggaacc

SEQ ID NO: 150642 - DNA, 586 bp, Zea mays
  Clone ID: MRT4577_68909C.1
gccggccgggtcgggttgatttttcttcactcaaaagttcaattgcatcccttgttggtgacaacgtaatcttctttgacaggtcctgttggtgaagacatgttccactggcaggcaacaataatgggtccatctgatagcccatattctggtggagttttcctagttacaatccattttcctcctgattatcctttcaaaccaccaaaggtggcatttcgtactaaggtgttccatccaaacatcaacagcaacgggagcatttgccttgacatcctgaaggaccagtggagcccggcgctaaccatctccaaggttggtgactgctctcacggatagcatcatcttctccacggttgtttgtaggtttgggagctacctacctaccagcaacctgagcctgctcggtttcaggtgctgctgtccatctgctccctgctgaccgatccgaaccccgacgatcctctggtccccgagatagcgcacatgtacaagacggaccggaacaagtacgagaacaccgcgaggacctggacccagaggtacgccatgtaaggaggggtaccctacctggccctttgggggt

SEQ ID NO: 150643 - DNA, 258 bp, Zea mays
  Clone ID: MRT4577_6890C.1
cttcaagcttcccaagggtttaggaccggcttcgatggcggcgaagctggcccagctgcgcgcgcaggcggcgcgtgcggcggagttcgcctcgaagcacggcggcgcctactacaaggaggtcatggagaagaacaagcagtacgtcgttcagccccctaccgtcgagaagtgccaggagctctccaagcagctcttctacacccgcctcgcaagcctaccaggtcgctatgaggcattctggaaggagtttgatag

SEQ ID NO: 150644 - DNA, 258 bp, Zea mays
  Clone ID: MRT4577_68910C.1
agagcacagggcacacgcactacacgtacggcacgcagatagcatatagagagaggtgagctatagctggcgcatctagttaactacctaactaactggctagctagctcgatccgcagagcagagcgaaagcagcaagaagcaaagcaatggtgaaccctgcgagtgtgctagttctaccagcgcagttcaccatactcacgttcggaaatctgtagcatccgcaggctcgggtcgtgcagcagggatatacccgag

SEQ ID NO: 150645 - DNA, 296 bp, Zea mays
  Clone ID: MRT4577_68911C.1
gggggcaaaaaaacaaagcttttttgcaaaccggggccttgttacaaaaaaccttttttgacgggccccttacaacatatacatttaaaatcttaaggggcccgttgggccaaaatccccctttttaaaatcttaacctcgtatgtttgggaaagccccactattccggcaaaaccatttatacctatgagctttcctggggccccccggaaattgccggtcaaaattttgatcccggcgctttttttgggcccgatgacccccacctcgttcgcaaaggccgctaccactttttc

SEQ ID NO: 150646 - DNA, 468 bp, Zea mays
  Clone ID: MRT4577_68912C.1
gggtacctcgaggccggccgggacggctttcgacgacagcgccgcaaagactccggattacctaaaccgtggccgcggagctcgcgcatcgcctgtttgctccccgggaaattatgtgcgcagtcgtcacgcgatagcgtagcacccataaggctagccacccggaggtgctgtggtcacaggcaccggtcccggtacatagaagcgcacaagagatagatataggaatggatagtctgcgtcggcaattcacgtagatggcgattctagttccagtggacgtgagtgatggggatcgaacggagccggtacctcgctaagatggggattccgcatcaatctgtggatggcgtacgtgatcttctatgagcagaccactgtggattctgaggctcagttgctagagacggctgagtgggagctcgtgcaaggataaaagcaggtgtttcatgatgagcgacgaggcca

SEQ ID NO: 150647 - DNA, 406 bp, Zea mays
  Clone ID: MRT4577_68913C.1
cgcagacggggaagcggaccaacatgccagtggcccggagctgggtttgtcgcaaaacttatgtgaccccgcggagacccttcgacaaatctcgtctcgaccaagagctgaagctgatcggcgagtatgggctccggaacaaacgtgaggtctggagggtcaaatttaccctggccaagatccgcaaggccgcccgggaactgctgacgcttgatgagaaggacccacggcgtctgttcgaaggcaacgccctgctgcggcggctggtccgcattggggtgctggatgagggcaagatgaagctggattacatcctgggcctgaagatagaggatttcttagagagacgcctgcagacccaggtcttcaggctgggcttggccaagtccaccaccacgctcgcgtg

SEQ ID NO: 150648 - DNA, 806 bp, Zea mays
  Clone ID: MRT4577_68914C.1
agaaagcagttttttttttttttaaaactccgcaagtttgtttgctaaggcaaagggcatgataacccagaagtggcatggtaagcatcgccagtccaaccacaagtaaccgaagcattatcccatcactcaagtctacaactacaactttttgctaaggcagatggaacagttaaaataaaacgaacagttgaacagcaagggccagtccctgagacatctgtttcggcctggctaatcatacaatacttttctagccacagcaaaccataagaacagttaaatcatccgcccaagattgtccaccctcaggaagggcaggttgtgcaaattccccaatatatcctcggttgcatcaacatcgatatggaagttgcccatatcttcaactccaccagcaccgctaacattaaccctaccagtgccgtctgtagcttgcgccgcctcatttatgttaattcccctcacctcctcggtccttccatctccaccgtcctcatccccagcccagccttcctgcccgagcatcgaagaatcaatgccactctccacaccaccaccaagagaacgcctcctcaaccctgccccgaccttcttgcgggcggtagtcttcttgatcctacctctagaggagccaccacgagcactgtcattctgtgcctgcctgccaccacggttgccatggctcctaccatcagcaccttgaccactgggagccgtgttccaagggaacgccttgtagaatggcttccagttggcgcccaggtcggccgcgttgggaaatccgagggggacccacgcgtccg

SEQ ID NO: 150649 - DNA, 449 bp, Zea mays
  Clone ID: MRT4577_68915C.1
cggggggggggggttggttaaaaaaattttttttttttttttttttttttttttttggccagcgggggaggccccctttccactttttttcaaaattggggcgtcaaatttaaaaggccccttacattttttttttttttatgaaactgggggggggggggggggcctttggccacccggggggggccttaaccatttaaaaaaacatcccttcgcgggggggggttgggggccccaccaaaaacccttgtgagaagggggggcccaacaaatcccggggccctgcgggctgttcaattgctggggaacttgggggcgggcttggttccctcggggaccgcttttttgggcagctctcctgggggggccgggccccccggggttttgatctccggggggggggtggggggctttttttttgtccccgcgggcttgggcggctccccggg

SEQ ID NO: 150650 - DNA, 403 bp, Zea mays
  Clone ID: MRT4577_68916C.1
gaaaaaaagggcccccaggccccaaaggatttttattgggggaccacccccccaccaaaaaaaaaagggggccccccccccggggggaccccaccccaccaccacaaagtttccttttaaaccgagggagggcaaattaaaagaggtcctttaacctttaaaaaaggcgccccccgatctatgggggaaaaaagcccttgccagggccgcgaatttaacttttggaaacaaaaatttcaaccaaccccccgccaaaaaaaaaaaaaaacttttttttttcccccccggaagggaaaaaaaaaaaaaaaggggcggggaaaaaaacacaaccttccgggggcccccttccctttatggagggatcgggcctggggccccggggcccaattcttggggggggggc

SEQ ID NO: 150651 - DNA, 464 bp, Zea mays
  unsure (1)..(464): unsure at all n locations
  Clone ID: MRT4577_68917C.1
cattgggtacctcgaggccggccggggctccgtcatcagcgccagcaattgcgccgccaccaatcaacgcccgtggatccccgaccctcctccccaccgccgccgcaatcaacgcggtcctccccaccaccaccgtcgccgcaatggaagggcgtctgtaccattcgcttccccggcatcccttccttccgcggcagcctgcccccgccagccatcacagtgatgccgcccttccttccccggtagcccgccacctccgcgcccccaccaaaccgaaaggcgagatccactgctagctccgcgctccgcgcgccccgccagccgtcactgtgatgtcgcgcaagtcggggaaggaaggtcgcgcgagtcaccgtcgggatacctgcgtccgccgccgcgtcatcccggccttccccctgctcagccccctccgtgcccccgcccncncgccccnnncccncccc

SEQ ID NO: 150652 - DNA, 231 bp, Zea mays
  Clone ID: MRT4577_68918C.1
cccacgcgtgcgcgatgcagctgtctgtcttcaaatatatagctcactcgccggttggtgcggtacggattgatgtgtgcgtacgtgattgaagacggaggcccataagtgcgctgtcagcactggccatgtgcctggctcgatacgactccaacgtcctgctgaccgatgtgaccgcactctcggcggctgtcactttcgtcgcggcgcatgacctctactcgcggtgcc

SEQ ID NO: 150653 - DNA, 399 bp, Zea mays
  Clone ID: MRT4577_68919C.1
aggacctccatccgggcctcagccgtgtccgcagccggggccgttcgtggcctcccgcgacacgcttccgtggccgggatggaaatattttaaattgtactaaatgtctgttgcaatctgaatttctggttgttcagcaaagcactggaagttatagggttggtgatgttatgaccaaaagggaagagctccatgttgtgaaaccaacaacttcagttgatgacgcccttgagatgctggtgaagcataggatctctggctttcctgttattgatgatgactggaatttggttggcgttgtgtcagattatgatttattggcactggatacaatatcaggagctggaccggctgaagcagacatatttcctgaggtggatagcacttggaaggaatgct

SEQ ID NO: 150654 - DNA, 1869 bp, Zea mays
  Clone ID: MRT4577_6891C.1
atggccggttctaaggatcacaccaagatctccaccaccaacatcatcaagccgtccatggaggcgctcccggctgatgaccaaaggccctttgaagacctcgtaatgcgcgatgagaaggaggtgatgcggcaatggaacgaacaacgcgacaaggaagaggcggaactgctgcataaactctccgaatggcgcaaggaggcggcggacaagtacttgtcacacttcacggtagatcgccaccagaagatcgtccatcaaggggagatcgatatggaatctctcctacctccacttcagggtcccgctgtaagtactccagatctatctcttacgactttcatggatcaacgaggagatcagttaaagcaatatgtagatgaatctattaaaatgcatttacgtgcacacgagaaatcagttgctcctagctttccatcgcgagagtctaatacagaaccacctgcgtcaaacacatcgactataaatgagtcacccttgacccagccatcatatggtatgccaatgcacgctttcgtgtcaccatcacagccgcaactactaggcacgcgacaggtactagacgcgaccggaccgtccgagcatcatcttagacagtccggttataccgcggaccgtccggcgtgttttgccggaccgtccgacccgatgcagatccgcacacaaaacactcaggtcgcaccgtacatggccggaccatcagggtacaaccccgaacaattcggccccatcacggaccgtccagcgcatcacgtcggaccgtccggatatgttgcggaccgtccgccatcttacgtcggaccgtccggatatggaatgaaccggccgacgtattacgtcggaccatccgactctacacgagtccacgtgcagactgcccaagtcgcgccatatatgaccgatccgtccgggtacaaccctggaccattcggaccgatcgcggaccgtccagttctttacgacagacggtctgggtacgagactacccacgtaacaccttatacggctgggcattccggatataccttcggaccgtttggccaggtcgcggaccatccgacctcttacgccggaccatccggatatgcgtacgcagagccgagaactgcgcaatatgcacagtttccacattcatcgcagcaacattatggtgccccaccagcaacacattataatcataccataccacctcatggacatagggttgaatattgttcggccacaagagagcctgagaggtatagggcaggagctggtgacattaataggacacctaacacacacctcaaacatccctgggaggaaagccgacagagtgatgtcaggcaacctgagatttccacccacaaactcaatggatggtcgccagacatggcggagaggatcagagacgaagtagctggggtgttcagggacaaactcggtgttagtgtgtcaggtacagggcaatcgtatcggaagccttatagccaccgattcgacaccgtgccatatccacagggaactagaacaccagacttctctaagttttctagtgaaggtgggaaaagcacacacgaacatataagccaattcatagcacacttgggagaattggctgatggggaagcctaccgcgttcgtttattctcgttgtcccttactgatactacatttgcatggtacgcagctttgccaccaaactctattaactcttgggaagaattagagcagaaatttcatgaacacttcttctcaggagaacatgagttagaattggctgacttagcttcagtccgacaggggcctgaagaatcggttaatgactatatccggagattccgggacactagaaaccgatgcttttag

SEQ ID NO: 150655 - DNA, 261 bp, Zea mays
  unsure (1)..(261): unsure at all n locations
  Clone ID: MRT4577_68920C.1
tcgaattgctgccattcaatcaacttgctgtgatanacgcgacagtggtctgccaacaacccatcattggtggtgccctcttttataagncnnatgacttatagttcaataatgaagatctttggatgatgttcgtggcgtcccagaaataagaaagtacatttcttaaaatattaaaaaacccactttatcaacccttacaagaatccacacgtacattcctccagcatattatcaatattaaccttgattcttctacaa

SEQ ID NO: 150656 - DNA, 1370 bp, Zea mays
  Clone ID: MRT4577_68921C.1
ggattgggaccctcgaggccgcgccgggaaaaaaaaaaaaaatcgaggccggcccgccggcccgtgcggccgtgccctctgcctcctctgccactcctcgcccaaagcgccagaggcgcagcccgagccacaggttgcctcctctccctctcctcgtggcctcgtccttctcgttcaagacgaaaccgtacgcgagcgagctggtgagggaggaagagcagggaggtgggatcaggccggctccatggacgccacgctcctcctcctccccgccaactgcacggccgccgccagcgggcggatgcggcctcgactgcctgcaggcccacatgtggcttcccctggtccctccgcgcggccaaggacctccatccgggcctcagccgtgtccgcagccctcgccgttcgtggcctcccgcaacacgcttccgtggccgggcaaagcactggaagttatagggttggtgatgttatgaccaaaagggaagagctcccatgttgtgaaaccaacaacttcagttgatgacgcccttgagatgctggtgaagcataggatctctggctttcctgttattgatgatgactggaatttggttggcgttgtgtcagattatgatttattggcactggatacaatatcaggagctggaccggctgaagcagacatatttcctgaggtggatagcacttggaagacatttcatgagatacagaagcttttgagcaaaaccaacgggaaggttattgctgatgttatgaccccagcgcctctcgtggtgcgtgaaacaactaaccttgaagatgctgcaaggttactccttgtgactaagtaccgcaggcttccagtggtcgatagctcaggcaaactggttgggatcattacaagagggaacgtcgtccaagccgccctcgaaatcaagaaaaaggttgaagggacactctgagatgactacctccaggtatcctttttgctgccacatggggggcttaggacttggacacatctctagttggcaactgatcaatcaaagcgactgtcagagtgagcgatgaaagtcgctatgtttatgaagatttgcccggagaagcacaggtgtatgtgtagtgtttgttatatatgctgatgcagtccttgctggccaaaacacaggttaccgattgttctggtttcctgggcttctttggacaccaaattcttaacctaggtcttgtttgggtgcacacgtatctagttcaacttacttgtattgaggttcattgaagtggaaaatcaactagttttcgcacttcaaaacaaaaaaaaaaaaaaaaaagaaaacaaaaaaaaaaaaaaaaaaaaaaaagaaaaaaaaaaaaaaaaagggccctaa

SEQ ID NO: 150657 - DNA, 269 bp, Zea mays
  unsure (1)..(269): unsure at all n locations
  Clone ID: MRT4577_68922C.1
gcgctccctgcctctatgtctgaccagctaggatcagcgtgagcgagcaatggcgatggcgtcgtcgagcgggctgaggagctgcagcgccgcgggcgtgcccagcctgctggcgccgaggttccggaccggccgactggcgccgttctgcgccaacggcaccagctctggccgcgtcaccatgtngcgggaggggatgcgcgtacaggcacgccctgctgacttcgtacgttgctctgccgcggactcaccacaagaacacgctggtc

SEQ ID NO: 150658 - DNA, 306 bp, Zea mays
  Clone ID: MRT4577_68923C.1
aaatgatcagaaatctgctaaagggattcaaccatctggggtttctcctagcaatgaacctgatgataatctgccatttcatggtgatatatgtggacctgttgcggccacgttgaatgaagacatgttcaatatagtcatttccaggtggcgtgagacgtatgaggctcttaaggaaactaacgactacaaaactctttcagcagctgggtctttaatgaagaacatgattgacatgatatatttggtgctaaaagtactccctgaagattcaagggaatctcaaacagctcgtgttttgctcta

SEQ ID NO: 150659 - DNA, 354 bp, Zea mays
  Clone ID: MRT4577_68924C.1
agcttatatattctagagagggtgcaaaggatatgcgtgatatttaagggggggcgctgaccaaaacatgttcaccctgaggatgatgggaaaaacattgaaattacggaggatgcagaaggtgtgaatgtactgaatatccctagctacatgggtggcgtgcatatgaggcacaacgactatgaccataatgatgatttcagacagcaactaatcaaagacaaaataattgtgggggttcggatatacagcacatgacatctagagagactacagctccaacttataagcgctcatcagtgatagtcctacaaaaggttatatgatggaaaatttccgtagagctataggttt

SEQ ID NO: 150660 - DNA, 339 bp, Zea mays
  Clone ID: MRT4577_68925C.1
aaggggaaatttcgaaattctatttttctggctttcttcactacttggccaggatttggattacaacactaggccaatacggcccacttctaataccaccattatagggcccaaacccacaaatgggttacaaatgaatcacattttcccgcttccataaaacaaggcagtttggcacgtccctgacataattgcaacaaaatagccccctcaatatacaaaatggggcatgggtgctaaaacaaaatgttggggaaaaagagcttttttttttaaacggaaacgcggttgcaaacaaccaaggggtggaacctggggggctttttcagacaacaaaaa

SEQ ID NO: 150661 - DNA, 146 bp, Zea mays
  Clone ID: MRT4577_68926C.1
attctacaaggggggacgcggcgagctcttttgatgaatccttggattggcccgagccacgcaggtcctttaaaatctgaacagaatgcaggcacaatcgagcatttcaggagacacgtttcgaaagcactaatcagcattactta

SEQ ID NO: 150662 - DNA, 193 bp, Zea mays
  unsure (1)..(193): unsure at all n locations
  Clone ID: MRT4577_68927C.1
ttntnntttttttnnttgnnnttnganaaggttgcgggtatgagccgcaaattatattgnncctttcnagcaatacttancccgctaggntacttatagtagtaccaccattctganacatagtagcgccaggncgaaatataggntcgtccnanaacatatccttaacaagngttaattcatgagaccncgc

SEQ ID NO: 150663 - DNA, 689 bp, Zea mays
  unsure (1)..(689): unsure at all n locations
  Clone ID: MRT4577_68928C.1
gatgattcataggtctcttattaagggaggacctatttatataaagtcaatgaccaaaccttcgctagtgatgctgcttaattnctcgcctgtgctgatgcgagtgagtctctgctgtgtgctgtgtataatgcgcactggcgangcaagcgatgcggtcgacgctgtgcctcgccacgaacctgacgccgtgcgccatggccatcatctgcggtaggaactgcaccacgccgagctcgaccaccctgaagaagccgaacccgacgccgtgctcgtacgcgaagtacccacatcatcagctctacctgaactcgtgcaaccaacaatgaatggcattgatcaaggccaaggtggccggaccgcccagctaaccaagtttgtgctgtgctggaggcgctcgactacctcgacgtcggctgtgtgcactatgaaccagcatcaatggagaggtcactcagaatgaagctcaattctgtgcgtcgaacttacccacatgctaaaccactgcggatagaccgtgcccaccggtattcaatgcctttaatgctaagcacacattaatccgtgcgctcgtacctgaacagaggaactgaatctatatgaatatcgatttatttgagatgtatacaattgtactgaactgtgcgcgtagctcttgtctgatcagatttaggttcccttgattgcat

SEQ ID NO: 150664 - DNA, 298 bp, Zea mays
  Clone ID: MRT4577_68929C.1
agatacatacacaatcactatatgaacttcaatctactgaacagcatgagggcaccacacctttattatgaggcaatcataaggaaaaaccctgacgacagtaacagcatccatcaaaccagcatgaatactgtttgatgcatggatctgtatccagcccacgatgaacacaggactaacaactagacacagagccaccttgcaatgcaacacacagaaggacaccaacacacacgacaccaacgaagataaaccctgtggactaggctaaacatcacgagaccaaacacgataactt

SEQ ID NO: 150665 - DNA, 348 bp, Zea mays
  Clone ID: MRT4577_6892C.1
ttcgtccggtttctctcgctctgagaccactggggcgccggcggttggtgctgaggctttcgctggtcggttcggcggccacgagcacccaccaacagctctggaaaaatggctgatggtgaggacattccttctcttgcctgcgacaatggcaccggcatgaacaaggctggttttgctggggacgacgcaccaaaggccgatttccctagcattgacggccgtccttgccacactggtgtcatggtatggatgggacagaaggatgcatatgctggcgatgaggcacagtccaatgaaggtattctcacgctcagtacccgattgagcacggtattgggagcaact

SEQ ID NO: 150666 - DNA, 1658 bp, Zea mays
  Clone ID: MRT4577_68930C.1
aattcggcacgacggtcacacgactgcataattgtgctcgctcgccgggccccgggacgtgacacatcgcacggccgaagcagcttgccggctgccgcgtttcgcctcccgcctgccgtgccgcccgtgaccgcgagaaggccggcagctttgcatgaggaggaggaggatgggggcactgcacgtcgtcggcgagcccaggatcagcttccgccagcagcctgcagcagtcgtcgcgaagaacggcggccacggcgccgtcgtcgaggagatccacggcctgatccgcgtctacaaggacggacacgtggagcggctcccggcgatcccagccgtgccctgcacgtggggcggcacggcggccccggacgcgccgggcggcgtcgtcgcgagggacgtggtggtggaccccgcgacgggggtgtgggcgcggctgtacgcgccgacgtcggcgggggacggtgccaggcgccccgtcgtggtgtacttctacggcggcgggttctgcgtcgggtccgcggcctggagctgctaccacgagttcctcgcccagctcgcggcgcgcgcgggctgcgccgtgatgtccgtggactaccgcctggcgcccgagcaccgcctgccggccgcgttcgacgacgggctggccgcggtgcggtggctgcggcaccaggccgcagcgtcagcgtcagcgtcagcgtgcagcaacgacgacctgtcgtggtggcgggcccgctgcggctttgaccgcgtgttcctcatgggcgacagcgcgggcgccagcatcgccttgcacgtggccgcgaggctcgggcagggccagcttggcgcgctgccccccttgaccgtcaggggcgccgtcctgatccagccattcctgggcggcgaggggcgtaccgcgtcggagaagaacgtggcgcagccgccacggtcggcgctgacgctgcccacctccgactgctactggcggctggcgctgccggccggagccagccgcgagcacccctggtgcaacccgctgtcgggccgcgccgcgccgcgcctggagaccactccgctgcccccgctcctggtgtgcgtctcggagacggacatcctgcgggaccgcaacctggagctgtgcagggcgttgcgcgaggcgggcaagcgcgtggagcaggccgtgtacggcggcgtcgggcacgcgttccaggtgctccacaactgccacctgtcccagccgcggacgcaggagatgctcgcgcacatcaaggccttcgtcagcgccaggtagcaggcgcctccgccgcagcagccgcctcctccattcatcgttcgtccctaacaaacagacagtcgccatgttaaaatccactacctaatcctaatccaatcgaagagtagatgccgtgtaagcaaccagaaccagccttgtgcagtactgtatcagtagtgtgtgacttggagctacccacgtgttactggagcagaaagcgtccaatgcccagcccgggttgttgttgttgtaacggtgtcggaaagcaaaagcttaaaactaccctaccccggttgtttggccgcttcatatacatgtatgatcccccgttcatttcataaaaaaaaaaaaaaaaaaaaaaaaaaaaaaaaaaaaaaaaaaaactcgagggggggccgcgtgtacc

SEQ ID NO: 150667 - DNA, 326 bp, Zea mays
  Clone ID: MRT4577_68931C.1
accgacgcgtccgcagacgcgtgggcggactcgttggaaggagagtacgtggaggagcagccatggcttcatcggtggccgccacggtaagcacattcctgggcacccgcctggcggtgccggagccacagaacgggtgcatcgtggtccggttcgggttcgggttggtcggcagggctaaacctgctccgaaaaatgtggcaactatatcgaactcctctgaccgaccgctgtagttcccccgggccgtggcgcccgagtatctggatgggtcactggtcagcaattacgggttcgatccgttcggtctcgggaagcccgtgggg

SEQ ID NO: 150668 - DNA, 344 bp, Zea mays
  Clone ID: MRT4577_68932C.1
cgcggcgtggatcccctgagcggtcgcgtttacaccccgggatgtaacccacgaagaaagcgggggcagccgggggcaatttttcaggacacacaccagttttcacaaaaacaatggtcaaaccggggcctgattaccttagttgtactgacacggaaaagagagggagagagagacaagagggcacacctgaatgaggcagggataaagagaagaaaggatagaccctggaaaccagggtgttacaccgacgaacataggcgagctggcggacgtgcggcgcgttactgtcgcgggaggccacaggacagcaggcaaatgggcaatgaagggacgagagaaaa

SEQ ID NO: 150669 - DNA, 505 bp, Zea mays
  unsure (1)..(505): unsure at all n locations
  Clone ID: MRT4577_68933C.1
cggtaccggaaatacccgggcgggnaccgcacctggnactgtgcagggcgttgcgcgaggcgggcaagcgcgtggagcaggccgtgtacggcggcgtcgggcacgcgttccaggtgctccacaactgccacctgtcccagccgcggacgcaggagatgctcgcgcacatcaaggccttcgtcagcgccaggtagcaggcgccgcagcagcagccgcctcctccattcgtcgttggtccctaacaaacagacactcgccatgttaattaatccactacctaatcctaatccaatcgaagagtagatgccgtgtaagcaaccagaaccagccttgtgcagtactgtatcagtagtgtgtgacttggagcagaaagcgtccaatgcccagcccgggttgttgttgtagcggtgtcggaaagcaaaagcttatcactacactaccccggtcgtctggccgcttcatatacatgtatgatccgccgttcatttcatttcatcttgttaag

SEQ ID NO: 150670 - DNA, 120 bp, Zea mays
  Clone ID: MRT4577_68934C.1
cttacacatgcacttgcactagctgcggggagcatacagcgatgcgtagactgccaaggtgccagtcaaagtgtcgattgtgtacttggcagtgtcatgtgcactaacttatatagtatg

SEQ ID NO: 150671 - DNA, 1072 bp, Zea mays
  Clone ID: MRT4577_68935C.1
gccgggcacagtccagagtgacacacacttacacttgaagctctcattggtcctccgtcctcctcctctcctacggtcctaccactctaccagcgacgatggccgcgcagcggcgtcggtcgggggcggcggacgtggcgtcgtggtgcgccctgctggcgctcgtgatggttgtcggatcgctcgccgggtcggggaaggaggaggagcagcaatacaacagagccaggctggtggtggtgcgcgggccgcggctggccgcgcggccgtgcgacgagctgtacgtggtggcggagggggagacgctgcacagcatcagcgccaggtgcggcgacccctacatcctggagcggaacccgcacgtccacgaccccgacgacgtcttccccggcctcgtcatcaagatcacgccgcgcgccggcggcagccccaactccggcgacgctaactagtaaaacagagatcgcgcgcgcaatcatacctgcatgtgtgtcgccccggaacctcctgccgggttgaacgcggcgccgacgtgagcggtcggggcgtcgggcacgggcaggagcgcagagcgctctctcgttgagttccagtcgtgtcgtcctgtacatactgcatgtgggaaagggctcgagactacgagcagaaataagagaggtcacaacacattgctgcaaatccctgatcgatcgacaaaaaaaaaaggcgggacactatcgttcgtcctgatttcttttgttcggtttcctacctcctttgttcagctaagcgacgaagagaggaagtggaacgcgggaggacgataggtggctgcgcacccgcgcctgccatgaacgccacttcgcatacggcagctgtgccatggctaggtgtcgatcgacatcagtacgggagagacaaactttgtctagccctaaatattttaccaagtataaaatcacgggcactagacaaagatcttctttaccgagtgttacgctggataaagcaggcatttagcaaatcaatcgaacgtccgtccctgggcaagcaaaggccaaatcgaagtttgtctagtggccgacccttggcc

SEQ ID NO: 150672 - DNA, 676 bp, Zea mays
  Clone ID: MRT4577_68936C.1
agcagtggtaacaacgcagagtacgcgggatatcatcaacatatagaagaatgagggtgcgacctcgagatgaagtgtgaacaaagagagcaagatcatgttggctagcaacaaaaccgacaaaagtgacaacagaggtgaagtgctcaaaccaggcgcgaggggcctgcttgaggccatagagagaacgacgaagctgacatacatgaccatcagggacaaaataaccaagaggagggtgcatgtagacttcctcacaactcaccatgaagaaaagcattcttcatgtcaatttgtgagatagcccaccgacgatcagaggcaacaacaacaagagtatgaacaatggttcgatgggcaacaggagtaaggtctcatagtcacgtccatactcctgttgaaaaccacgggcaacaagtcacgctttgtagcgctcaatggagccatcagagcgggtattaatcttatagaaccacttgcatgtgataggagaagcagcgaaagtgggacaagataccaagtgccagtgcgctcaagagcagcaatctcctcaaccatagctaattgccactcaggacgggaaagcacatcacggcaggaagtaggctcagagagaatagaagcaaaaaaaaaaaaaaaaaaaaaaaaaaaagtactctgcgttgttaccactgct

SEQ ID NO: 150673 - DNA, 366 bp, Zea mays
  Clone ID: MRT4577_68937C.1
attcttactattttctctagaccctcaacagtaactacggttcacatacatctatcacaggctgaaacacgccatcacgggaatattggacaacatgtgaacaacatttctccaaatgcctctaaccctgaataaatactggtattcacacgcaaggggacaaagctgctactgttgacccctaggggttgtacatcgaaccatattgacatatgcttaggtgaacagaaggcactgacaaaacactaatggactgccatgcggggcagggcctggatggagggaataaagctgctggaaccttccctatcctactcctggaaaaccggctcccatttaagctgtttgttccagaccttcatcttt

SEQ ID NO: 150674 - DNA, 539 bp, Zea mays
  Clone ID: MRT4577_68938C.1
gcgcgcaaaaactgtggtgcggcatgtacgttctcccatttgttaatgtaaacagctaagggtgtcccttctcaaagacaagatgagaaaactagacatgtagtcatgacgaacaaaacagacatgaacatcagttgtgtacggagagcacatagctacatcagcaccgcaccatccgccgaacgaatatgcttcgaaaacatcaaacgcttctccttcatcaggccctttaccaggtatagaattattggatcaaaagtaaatgaacatctgcatatcaaggaggtcaaatgagaagaaaatcttccgagaaaacatgaacccaatggttttagtttaagatcatatactagcttaactgtgacaggtgcgtgcaaggactgattccaaaaaaaaataaatcaaaatatcaatcacggactggcctctgcaagaaaatgatactttgcagggagaaatcttatgtgttccctacaagttcctttgcttgagaagagatcgaccagcaacattgcggttaaatgttcaagtgagaaatt

SEQ ID NO: 150675 - DNA, 433 bp, Zea mays
  Clone ID: MRT4577_68939C.1
tggaaaccgtcaattggcaaggatgatgaagcttgcgatcgccttcgtcgcgctgctctcttctttcctcgccgactcgtccaccgcggaggagttcgatttcttctaccttgtccaacaggtgctgcggcatgtcgtcgagaccggagcggagatcgaccgaccgatcggccagcctctcctctgaccaatttaacccagcgacgacgacgcacgaatctaatctaactctaacggcgtgttctgttccttgtcgatcgatgcatgcatgcagtggccgggctcgttctgcgacacgcggcagggttgctgcttcccggacggcgcgggcaagccggcggcggcgctcggcatccacgggctgtggcccaactacgccaagtgccgcggccgccaccaccgcgagggcggcggcctcgcccgcgcggtgctc

SEQ ID NO: 150676 - DNA, 640 bp, Zea mays
  unsure (1)..(640): unsure at all n locations
  Clone ID: MRT4577_6893C.1
cgggcacactctttttttttttttttttttttttggctgttcatggtgattattaacgcccatgtcctgggtctctatccttgggcttcgggtcttaccagcataactgctgtagcacacacggactccccgactccccctgtatgtggggggggggggcgggcggccgttcccaagggcgatttcctccgcactggggggcgttgccagtggatccgcccctcgggccgggccgggcgctggcctggtggtacctggtccctgtccgcacttggggcgcgttcccgctccctcgcggccttctctccggaatcctggcgcggtccccctggggggcctatcgtgggcgctgcctctcctctgttgcgttgggctcactgtcccctttcccgtncggtaccctgccgggccctctgcgtttatgcctcgggcgccgcgcgggggggggcgcttcccttattgggggctctttctctgcctggttccctgtcggggttcccttccgggccccctgctttgttggctgggtcagctcccctggggggggggttccggtattgcggcgcttttcggggttccccgcggccggcccttgtgcgcctcgggccttcgttgggccctgggccttttagttttactc

SEQ ID NO: 150677 - DNA, 237 bp, Zea mays
  unsure (1)..(237): unsure at all n locations
  Clone ID: MRT4577_68940C.1
cggacgcgtggtcgcgagcggcctccctttttttttttttttttttttntttnaggaagggtttttttttatcccccctttcttacaaagggggcttccatgacccaccatataactgggaagcataactttcccttgattgaagtgaaattagtaaaaaattaaaattaaccctttgtgcgattacttcatgtttacccatggaacataaatttcatgataccttctttttttttg

SEQ ID NO: 150678 - DNA, 919 bp, Zea mays
  Clone ID: MRT4577_68941C.1
ccaatggcatctcccaagtggtgccaagccacagcccacaggtaacgcccaatcgatcggcgctagccgctagcacgcctataaaatgccacttcattgaagtagatccatgcagcgccgagccatagccacagcccaccgcgcgagcaacgatgttcaggtgccccagcaatggctacggccaaccgcaccccaccgcgaactaccaccgcacccactccggcgaacacgtcaccaccaaggtcgcccagaaaccctgccatgccggcggcgccgtgcagcagcaccacgttgtccacaaggagtcgtcgttcaaggagctggacgggggtaataaggccccagcggccaaccgccgctgcttcgacaactatcccatgaacgctgctaacaacgcgaaccaccaccgctacgaggcctacgaggaaacctacgaggaaaccaactgcgaggaggagacgtacgcgtacggcgccggccgccaccatggtcacggcagcggcggcggcgggcgccgcttccagtaccagacccacgaggagacctacgaggaggaggaagaggaggtcgtcgtgggcgggggcgacggcgccggcgccggctgggcccagctcaggcgcccatcctgccgcgcatgagcagcaggcacctgctcgtacgtggaatgtgtggatgcgatgcgagtccggattggtggacgccacgcgttggttcatgggtacaattgcaaattctaataataacctgcaggtgacaacctagctaatctcgtacgtaaataaattgtactcctagtcccaatccccattaatccatcgatgctctgcatccaccgtatgtattccatgtatggctgtgagttgtgacacaagtaaaaccaaattgacaaaaaaatatcatgaaattgcgtgaaccccta

SEQ ID NO: 150679 - DNA, 564 bp, Zea mays
  unsure (1)..(564): unsure at all n locations
  Clone ID: MRT4577_68942C.1
ggcgtggactttatcggagacggccgcggccggagttgagctgcgggaggtccggctgggcgccgtggacgaaggcgttgagaagctggtccctgtcaagaagaccggcgtgacgatggcggtcaaggtatgtatgatcgacgacatgcatggttaaattaaaccgcgtgaacgtaagaaggttgctttcccgtaaaagacgttccttttcccgtatgatgcgtttatttgcattgcatgacgtcccgcgcgcatagaattatcttatatataatcatgtaacgcaacgcaacgttctttttgagtcttgatgaccgtgttgttgcatggcgcatggcatgcacgcaacgtccgtagctgagcaagttcacgtgcggcggcgcccgtcgtcggctgcaccttcgaccaccgcgtctgcgacgcctattccttaacatgtncctcgtcgcgtgggccgcagccgcccgtggcagctctgcgccaccaccgccggacccgtgctttcgncgctcnctagtcgccccacgcgacacaccactttcgcgcgcgccgtncaccgacgcc

SEQ ID NO: 150680 - DNA, 863 bp, Zea mays
  Clone ID: MRT4577_68943C.1
gatatcattctgggggtcgcgcggggtctgcagtacctgcacgaggattcgaggttcaggatcgtccacagggatctcaaggcgagcaacgtgttgctggacacgaacatggtccccaaaatttcggacttcggcatcgcaaggatgttcggaggtgaccagaccacggcatacacattgaaggtcattgggacatacggctacatgtccccggagtatgcgatggacggcgtgttttccatgaagtccgacgtctacagcttcggcgtgctggttctagagatcatcaccggcaagagaacccgaggcttctacgaagaagagctcgacctcaacctcctccgatatgcatggatgatgtggaaagaaggcagaggcgctgatctgctggacccggtcatggacggcggcggcagcgtcaaccacagcgaggtgctgcggtgcgtccaggtcgccctgctgtgcgtcgaagtgctgcccaggaacaggcccctcatgtcgtcggcggtcatgatgctggccagcgagaacgcgacggtcgccgagccgaacgagcccggggtcaacgtcgggaagaacacgtcggacacggagtcgtctcacggcttcacggccaacagcgtcaccataaccgccattgacgctaggtagcttttggatagatttgccctcaccagagcgcgaccaccggcaggtgattattctaatgacgacgcagtctgttgtcttgtattaactgtgtattttgtacagcaaaggttccgttgccgaaggcctacatctctcactcgaagcctccagtaatatgtaaagttcagagcttgtaaagatttacattcaaaagccacccggttcagtcgacg

SEQ ID NO: 150681 - DNA, 395 bp, Zea mays
  Clone ID: MRT4577_68944C.1
actaacctactgccctcctttttgatttatccatgcatatcttcataccgctcattgtcaacttatacacaagtaccacctatcttttccctttttttttttctttaattttcttctccccatcctcttctccactctgctctccatttatcatcactctaatttctttctctcattctttgtctaatcaacccctatatcacatatctacttacctaacataccctattacatcccttccttctcatttcatactcctatctctctcttttatatttctttctttcactgcttacttattttttatattactaactcacatttatcttcaatacaccccatatttccctccttatccttctctcattcccatcccacctactttcactttcctt

SEQ ID NO: 150682 - DNA, 385 bp, Zea mays
  unsure (1)..(385): unsure at all n locations
  Clone ID: MRT4577_68945C.1
agccgccgcccaggggtggaaggggactctgcgagttcaagagcatcgtgggtggcggatgcaacaacatgatcatgggggcgcgcgcgttcggcagcgcggcggggaactggactgggccgcccgtcgactacgcgggccacggtgcgctacactgtcagtactgccgcctacaactttgtggagaacgccaacatcaggggcaacgcggacgggacggattccgagatgtgtccggacgcgcacctttacatttacatggtgtgctcgcgcagccgttgctctatcatggacattatcgcctggctggacgccgcgatcattgacggcttcgacatgctgcccttctccatgggggcctactcgngcacgcagttcaagtacg

SEQ ID NO: 150683 - DNA, 285 bp, Zea mays
  Clone ID: MRT4577_68946C.1
aacagaacacaatggggtcttaatttaacattacccaaactggcattttgacaatgttagcccatgatgaccaccatggaaacaggaatttagggacaaggaggggcctttgttgggtggcaagggggaccccccacaaaccccccagaccggggggggaaccccccgccaggggcgccaacggggaggggtttccgtttttgcccgccaaaaggaaaaataaaacatcccgatggggggggaaactgaaaaatttttggccaggggtttaggctccttttttgg

SEQ ID NO: 150684 - DNA, 258 bp, Zea mays
  Clone ID: MRT4577_68947C.1
atggcgacctccggtttgatggtggggaaagcgagccaggctgcggcctctacccctccctcggcctcaaggattttcgtcatccaggccaagatgaaggatgaggcgagtcggggggctgcccccgcatgggtcgactgctttttcttcccccgcgcctgggggagaatggcatccctcagtcccacggggacttcctccagccatgccgggataggtagggcgccagtagccctgggtctccgtctcccgacctga

SEQ ID NO: 150685 - DNA, 311 bp, Zea mays
  Clone ID: MRT4577_68948C.1
gggcggcgcgtggtctacgccgagtgacagagacgctcaggctgtgttctcaggatgaccgagtgggagacagcagcaccagcggtggcagagaccccagacatcaagctctttgggaagtggagcaccgatgatgtgcagatcaatgacatttccctgcaggattacattgcagtgaaggagaagtatgccaagtacctgcctcacagtgcagggcggtatgccgccaaacgcttccgcaaagctcagtgtcccattgtggagcgcctcactaactccatgatgatgcgccgcagcaacaacggcaagaa

SEQ ID NO: 150686 - DNA, 394 bp, Zea mays
  Clone ID: MRT4577_68949C.1
tgcgcccgcgcggacccctccgcaaaaaacccgggggagccacacgcgtgctgatcatggaaagcaccatcgtgtgccggcagtggttttgaaaataatgagcgctcggatgctcctcgggctttctgaatgtgctgttaccggaaccattcatccacattggtcacaagctcctatggcttcctgtctttccacgtacctatcaccaacggttgtgatcagtttgtgaaaacccaattcttcaaccctacaggatccacacaggcggggctcagtaggcatctaacactacatcacccttgaagcctgcaacaatacatcaggccctattacataagggccactttggtgcatctattggcgcagaacactatggtaaagcgactacaaaaag

SEQ ID NO: 150687 - DNA, 346 bp, Zea mays
  Clone ID: MRT4577_6894C.1
tcttcctttctaggatagcatgattacctaatacctatccttgcgttggctctttacggtaactggacagggcgcccaaaatctcagaggcgtgggggcccttccgccctttcccgtctactctttgttcttgccggccgtgccccaccttcgccctcttctactccaaggggatcggatacaccacatgctttgcgattgtgcttgtggatcttttgctacggctccctcatttggaaccccgtcttttactttgacgacaaaatcctccgcttcatcaagggctacaagcccacctataatcttgcttgcattgtccacataaggcacacctttatcattcttc

SEQ ID NO: 150688 - DNA, 380 bp, Zea mays
  unsure (1)..(380): unsure at all n locations
  Clone ID: MRT4577_68950C.1
gggtccgacccacgcccgtccggtctccaaacgcttccacactctctacagagaaacacgtttctctcctctgtaaagtctcgaagagacttttactgggggcgaacgcgctcttcgtgacgtagagcccaatcgggagaaggacctcgctcgtccgatctgccacaggacggtctaccgagtttgatctgggaacacagcgcgctggtgtacactcaacaagtgtgtaccgatgcggtgcagtacggccgcgtctcacgtcaagactcgagtccatgtgagccctgctccagcgtcaaggataggattggcnncnncatgatcacggacgcagaggagaaagggctgattactccaggcgtgagtgttctgattgaacc

SEQ ID NO: 150689 - DNA, 411 bp, Zea mays
  Clone ID: MRT4577_68951C.1
atacaatattttagtttgactaaacatgctttacaggatcaactgcaagatatacaatacacacttctttctacatgttctggagctctgaatggttacttcgcaacaacgcctgaacatttattagccgaaggcctcatatatagagcaaacaccagccaaacaactgccacattttttttattgcaaaaagagcatatgctacaaaattcacacaaacaaaactatgtttagaaccagaaaaggatccaattgaaaaccataaacacatacacctttgcaatgaacatacagccagcacccgaataatgccaaataaatgataagcaaaaagagtctcctccacaacctggcattgatgctaaatggtactcgggaagaaagaggtttgggaacagactgcgaatgtgc

SEQ ID NO: 150690 - DNA, 366 bp, Zea mays
  Clone ID: MRT4577_68952C.1
tcgtggggagcgacgcgtgcggaccaattctatcattagatcactgcacacagtccttatcaccaggcattgctgcaaggggaggaccatttatgtgggggggggtctactttatttacccttctacgccggtagggctttgtttgatccactctactacctaatgggtgctttgagggatcacagaggcttggctctcgttgatgctccctggtcaactggcagccagcttgcactatacaagcccataccatattgggggacagaacgttaacttcatggtgaggtagcaacagatgggaatttataggttgcttgaaccagatttgtgtctttctctatttgtatccactgctgtgcctgact

SEQ ID NO: 150691 - DNA, 103 bp, Zea mays
  Clone ID: MRT4577_68953C.1
aattgtaaataaataaaagggatcttgacctctgaattcaacattaggcgtttaacacggtaaaacaagctcaaaggttggcctggagcctattctaaattcc

SEQ ID NO: 150692 - DNA, 213 bp, Zea mays
  Clone ID: MRT4577_68954C.1
ctctcgctgcctgtgcccaagtgaatggtctgatcgccgtgacgagcaacacgaaaaccgatccttccctgggcctgcgtgctgctacagtggacaagaaccatgatctcacgatggattccccgcactctgtaacaatgaaacatggcgccaagtcaactcaatttagaagctcatctacagaccaagaccagacctgagggggtgaaaaat

SEQ ID NO: 150693 - DNA, 1162 bp, Zea mays
  Clone ID: MRT4577_68955C.1
agcgagcgaatggtacataagaatttgttatcagcgaagtagacaaagtaggatggccccgaattcttttgacttgaggcatcatcaccatcaccatcctagacccttgtagcaaaaaaacgagggtgttttttttttcctgacatgggaaaatgagcgccgttggattatcttcacctttccctccccctctttctgagatctgctttttaaacactgattgtatgatggtggttgcatgcagcctttggccgggttcgtgcgccacgatgacacagacacagatctggagacagatgggttggctacttcctcctccagtgcttctgcaacctttgccgagcggcaggacgacgaagcggaggagttgctgtgcggggtgaaggaagaggagtcggctcaggtacaagaaccggccaagaatccgtcaggccgtcccaccccactaccccaggaaggggtcgaaacagcggccggccccggcctcacttcacctcggcagcactgggttaattccatggagccacgttttctacaagtttcgtgattggtggtgtggggttgatgaacaaaggacttgaagcattactcatccggtcagacgtgtttcgtagaccttgacgctgagctatcggagttgggtttccaaaaaaaggtggagctctgagaagttccgcattcttctaaaggaagtaggagatacccaggaagcagcatggcattttcttacagcaatgggaggacattgccctcgaaatgggaggatgcagagaggtggatcttcagtcccaattccagcgacatgcgtggaagaactacggttgctcatggtcggaggccaaagtctaaaagtggccccctggggcctccaggaagacttggtggacagtattcatctgtttcttcggtgtcattgcttgatagtgggagagttggacctattacatcaaattctcatttttcagcaggagtactaatgccaggacatgtttgtggaggaaaaaatacaaatggggcctattcaggtagaccaattggtgacgaaatcaacattggagaaagagtcagaatttgtccactgaatggtgggtctcatcctattcgaactcccagaggtcgcaagcgattagaatctgcagtcggatcatctgcttcattggct

SEQ ID NO: 150694 - DNA, 638 bp, Zea mays
  Clone ID: MRT4577_68956C.1
ccggccgggccgggctctctctcttcctgtctctcctttcaccagctcccgtctacgcgctccgtctcctccaaaccccaccttcctcgatgggagacctacccccccgctcatcttcccttctcgatccacatcctcctcatgtcccttcggacagtgcggtgaccagattggtgctatattctggcaggcgatctgacacgagcacggccatgcacaacacaccagcgagtattgccgagactcctcacctcccttctatccgatcaacgcgtactacaacgaggctcactatggcgtcgcttccacccacgcgcccgactcatgcaccttgaacctcgaatactgcactacgatggactcctcgccttcgaacgagacttccgccccgacatttcctcttgggtcacgactgcatctgcagcaactgggccaaggaccattacaccgaaggcgtctagctcatcaactccgtgcctggacgccctgagcaaggaggccgagaatctgctaactgcctccaatgcctccaggtctgccactcactgcgaggaggcactggatctagaatgctcaccctgctcatctctaagatcactcaggatcaccagaatcgtatgatgttaacattctctgtt

SEQ ID NO: 150695 - DNA, 1876 bp, Zea mays
  Clone ID: MRT4577_68957C.1
cattggaattcggcacgaggccgaccataaaccccgcgccgcccgccagcaaccttcagtctcatttctcacgcgtagctcggacaggcagcttgaagctcgcgaaccagccatggcgaatggggacgcggccgtggaggtcggcgggaacggggagcaggaagccgcggcgcgccaggcgtcgacgttcgcggagctgggtatctgcgcggagctggtggaggcgtgcgacgccatggggtggaaggagcccaccaggatccaggccgaggccatcccccacgcgctccaagggaaggacctgatcgctctggcgcagacggggtccgggaagacgggcgcgttcgcgctgcccatcctgcaggagctgctcagcaaccgccaggctgaacagtctttcttcgcttgcgtgctctcgccaacaagagagctggcgattcagatcgcagagcagtttgaggcgcttggatcagctattggtttgcgttgctcagtgcttgttggaggagtggatcgggtgcagcaagtgttatccatcggaaaacgtccacatattgtagttggaactcctggccgtcttttggaccatttgacagagactaaaggttttagccttaagaaaatcaagtatttggtattggatgaagctgataaattacttaatgtggagtttgagaaatcccttgatgacattctaagcgagatgcctaaagacaggaggactttccttttttcagcgactatgaccaaaaaggtaaataaactgcaacgtgcttgtctcaggaatcctgctaaggttgaagtgtcctccaaatattctacagtagattcacttaaacaagagttctattttgttcctgcagatgacaaggattgctatcttcttcatgttctgaacgagaggctggagagcatgatcatgatctttgtgcgcacctgtgaatctactagactccttgctcttatgttgaggaatcttggtttgaaagctatgtctatcagtggccagatgagtcaggacaagagattaggtgctttgaacagattcaaagcgaaagattgcaatatccttatttgcactgatgtagcaagtcgcggcctcgacattcaaggagttgatatggtcatcaactatgatattccaatgaattctaaggattatgttcatcgggtgggcaggactgcacgtgcagggcgatcaggatacgctgtatctttggtgaaccaatatgaagcccagtggttcgtgctgatcgagcagctccttggcaagaaaattgaccagtgtaaggtggacagagatgaagtccttatacttaaagggcccatatccgatgcaaagagaattgcgctgacgaaattgaaggattccggtggccacaagaagcggagaaatgtgggagatgacgatgaagaggttgaagatcattcttctcattctagaagaccgaaatccttgaagagatcaaacagacgatgaaggctctggagcatgtctggactgcctcgtttcgtgcaagtcctttgtggttcagcgcagatccaccctgtggtggtttggagtgatgctttgcctatttatactagggccagttaagacgttcacttgacaccattccttgggttgaaagcaagtctcccccaattttgtcatcccgacccaaaccatgcttacataaggaatcattttttgctgatggctgccattggtgtattgtagcttctgagtcgcatgtgcggttttgcccaaggcacaggcagccgttgctttgtgtcaacacggaagtgctagcttgacgttttaccggccatatcaccgtatgtccggtatggctataaagtttttaataatgctataaaaatatcgtctcagtcg

SEQ ID NO: 150696 - DNA, 565 bp, Zea mays
  Clone ID: MRT4577_68958C.1
gaaaacaaaataaaatgatatactaacctgccaactaatcctttacaaggaactgcaactaacaacaaactaaacttttatgtttcccccccacggtcttccgaaaaaaaaaaacactttcttggtgaaaaaggaaattttttccttcgaaccgaattttccgaaggccagaaaggcccatgtccttaaaaccacccaggatccaatggtaaacggccacacttccatcggaggagtcggccttttaatttccactccaaccaatgcccccgtaaaacaggatgtagccatgatcagggttgcccgaattttcacaagaagaaccataaaaggtttgtagggtaaaccccggaatcatttcgacattgtcatcatcaaaggacacccaatggtcatggcttttgatcatggctccgtagtgcccctggttggggccgttccccaggtggaccaccacggcaaaaagggagtactaacagtcggcatcagcggagttgctgttgagcttaagctccaaggggtacaccactcggtacgacagctttttgggccggttaagctgctc

SEQ ID NO: 150697 - DNA, 264 bp, Zea mays
  Clone ID: MRT4577_68959C.1
cccacgcgtccgcgcggcgacgcaggcccgttccgttgcgctggagcgcgacctgtgcacggtggactgctacaacgcggtgctgcgcgcccgacacgccgagctggccggccgactgcagtcgctgggcggcgttctctaggtgctgcagatggccggcgccgacggcgacatgcacgagatggtcactgacgacgacatgctcctccttgacagacgtgctactgcctgatgcaagttatcgtactctgagaatcttagcct

SEQ ID NO: 150698 - DNA, 416 bp, Zea mays
  Clone ID: MRT4577_6895C.1
gcggtacacaagaagagaaagtaaagcacaaaaaatgcgcaggggagcgaggccggccatggagatgggcggcgacgagatgatgatgacgtcgggcgccacgggccggatcgtgcccgtcttccgctccgtgatgtcccgccgcgcgctgctccgcctcgccgtcgcgctccactcgctcttcctctggctcctcctcctcgtcggccgccgccgccgccccgacgccgcgagcccggcggagcccggccgcctggggaaggccaggagcaggcgcagggccgcggaggaggaggacgtgcgccgccgccgggcgctcgcggaggaggtgcccatggcggaggacgacgcggacgtggacagaaggaccagagacacgttcgaccatctcccgaaagagaagaaacgcactcatc

SEQ ID NO: 150699 - DNA, 1341 bp, Zea mays
  Clone ID: MRT4577_68960C.1
cgcacgcgtccgcccacgcgtccgcccacgcgtccgcccacgcgtccgcggacgcgtggggggggcatccatactagcttcctgaaggatctgtggccagactcgcggtacacttacaggcttggccacaggctaatgaatgggacccgcgtctggagcaaatcatacagcttcagagcatcaccttaccctggacaagattctttgcagcgagttgtcatatttggagacatgggaaaggcagaggcagatggttcaaatgagttcaacaacttccagccaggttcactgaatactacgtaccagatcacgagtgacatagaaaacatcgacatggtggtccacatcggggacatctgctacgcgaacggctacttgtctcagtgggatcagttcactgcacagatcgaaccgattgcttcgacggtgccatacatgattggcatcggtaaccatgagagggattggcctggcaccggttcattctacgggaaccttgactccggcggagagtgcggcgtccctgcccaaactgtgttctacactccggctgagaaccgtgcaaaattctggtacgcgacggactacggcatgttcaggttctgcatcgcaaacacggaagaggactggaggccggggaccgagcagtacaagttcatcgagcaatgcctgtcgtcggtcgacaggcagaagcagccgtggctcatcttcctcgcgcaccgcgttctcggctactcctcctgcacctactacgaatcggagggcacgttcgaggagcccatggggcgggaagcgctgcaggagctctggcagaagtacaaggtggacatcgccttctatggccacgtccacagctacgaaaggacatgcccggtctaccagtctcagtgcgtcgtcgatggatccgaccactacagcggcccgttccaggcgacgacgcacgtcgttgtcggcggcgcaggagccagcattctcgattctgagttcaccacctcgaagatccagtggagccacttcaccgacttcgaccacgggttcgtcaagctcacggccctcaaccattcctccctgctgttcgagtacaagaagagccgcgacggcaacgtgtatgaccatttcacagtctcacgcgactaccgggacatcctcgcttgctccatcgacaactgcccccggagcacactggcttcctgaagtcccacagtagttgcagaccagaaattttagttcttagcttttctgtactgcaccgaccaataaatgaggccttttctttttttaataaaatataattatatgcatgcactattttcttgcaaaaaaaaaaaaaaaaaagcggcc

SEQ ID NO: 150700 - DNA, 271 bp, Zea mays
  Clone ID: MRT4577_68961C.1
cctgccttaactattcctcccacaccacctagcctgcgatcttcgtagcctgcgccgcgtcgagcatcgatcatgtcggcctactgcggaaagtacatcgacgagctcataaagaatgctgcctacattggcacacttgccaagggtatccttgctgctgaagagtccactggcaccattggcaagcgccttttcaggatcaatgcccttatcgttgcagagaaccgccgtgccctccctgagctcctattatgtccacctggtgctctcc

SEQ ID NO: 150701 - DNA, 483 bp, Zea mays
  Clone ID: MRT4577_68962C.1
gtagacagagaacacaagattacattacttgccaaccgaaccctgaagcggccagatacttacatgatgggactaagactgtgaaccactgcgcactaacgtctcatccgaacacctagctgtaggaagactgagggcgtcgaaggagggccgggggcttcctaacgtacaccaactcacttgcacggacaacggaaaaccaaggccacaggcgccatgccattgaacgtgtgacggggaacaagcacagggcgcctagcataggtgtctctaagcggcactccttggccgtgctacgactgggcatgaaacgacagaactccgatacctgggagaacatggctgaggtcgagacgcatcttgaactgcaatgacctcgtagctccgcgaaagaagggggcgtaagacagggaagccaaccggcataaacctgacgacgatgtagagggaagggacaaccttttccatcagaggatctgcaac

SEQ ID NO: 150702 - DNA, 1893 bp, Zea mays
  Clone ID: MRT4577_68963C.1
tattttgcctgaagccctggtcccgtcctcttcagggcctcgccgtcgcctcctcttttttcccccctcgtcgacggctcctcctcacaggctcacagcctcacactcacgcggagagcgctcgcgcgggcgcacacgcggaggggacgttcacaggagggggagggaggagatgccggggagccagaacggggggccgaggcctcggccggtcaaagccgagaccatccacgatcttgcgcgcgccggcgacctcgccggcgtccagaggaagctgctggagaacccctccctcctcaatgacaaaaatcccgtgatgtgtcaaacaccacttcatgttgctgctggctacaataatacagaaatagtcaagttcttgcttaaccagcaaggtacagaaacagttgatctggaggcaaagaacatgtatggggagactcctctgcatatggcagtgaagaacagttcttgtggatcaacaaatctactccttgaacatggtgcacacatagaagccaaagccaataatggcatgacaccattgcatttagctgtctggcatgcaattcaagctggagacttcagcacagttagcgtgttactaagctacaaccctgattgctttgtgaaagatgatgaaggcaaaatgcccttaaatcatattccaggaggagctggtagtgagaagctgctgaaactcctcactcatcatatggaagagcaaagaaaacggaaagctctcatgtcatgcctcgaagggaaagcaatgtcagagtttgaagaggcaatgtcacaaattgttggattgcaggagctaaaaatgcaattgcgccgatgggcacggggaatgttttttgatgagaagcgacgggctatgggcttggggattgctaaaaggagagctccccatatggcatttcttggcaatccgggaactggcaaaactatggttgctcgaattcttggaaagctcctccacatggttggaattctccctactgacaaagtaactgaagttcagcgaactgatcttgttggagaatttgtggggcataccggaccaaagactaggaggaagatacatgatgcagagggaggtattctcttcgtggatgaagcttacaggttgataccaatgcaaaaatccgatgacaaggattatggtttagaagccttggaggagataatgtctgtaatggacagtggcaagatagttgtcgtatttgcggggtactgtgagccaatgaagcgagtcatcgcctcgaatgatggcttctgcaggcgggtcacgaaattcttctatttcgatgatttcagtacgacagaactagcagagatcctacatatgaagatgaagatcccaagtgactgtagcttgctttacgggtttaagctgcacccaagctgcagcattgaagccattggagagctgattgccagggagatcactgaagagcagaggaagcagatgaatggaggccttgtagacacgctgctcatcaatgcccgcgagaacctggattcgcggcttgatttcagctgcaacgatgccgatactatgatcacgatcacgttggaagacctggaggcagggcttcgtcagatttccagacaacgtcagctgcagtgacatgtaaatttaggagaattttttctcgatgatctcatgcttgtctccaagggcgaagttatggctgtatcgtctcatccaacgtttttggctattctgactgtctgttgtatgtagtcgttgctatatagcagtaaaatgcatgtggtatatacaattatacatcatgccctaacattatttgacatctgtggaatagccagtaccacatacggatttcagtacgtgcataaaaaattcagatttgacggttgaagtgattg

SEQ ID NO: 150703 - DNA, 975 bp, Zea mays
  Clone ID: MRT4577_68964C.1
cccacgcgtccgcccacgcgtccgcccacgcgtccgcccacgcgtccggtcagagtcttagagaacgaacacttcttctccctgtagctagctgctcctacttgtgtccagatcttctgttcgatcgggtttgggactagccagggagtgggcgacgcttcggccttctgcaaggaggcttctcgagatctctggtggtggtccccgcgcggcgcctgaaattccatgctgacatgtgcatgcttcggaccggaggcggagtcaaaatctcttcgccttcggaggtgatgggcttataaccgtccctgggccgaaagataaaagaacctctattttttttgttggcgatgggctgttgttgcaatagttctatgtaggtaagggagagttgtcccgtggtctggtatcctctagcgcaaaataaaccgatctttagaatcacctcacgaagtcaattttatagaaaaactataatatctataacaccaaataaataaaatataaatatagatctttatttatatataagtatatctatttaataatattaatttggtgttggttgaggacaagtctctggccgaaggatcaccgtttggttcacgaacggtaatgattcacactcgagtaccatcgataataagtttgaataggtcaatatcagtttctaatatgatatcttattacgattagatttaaacaaacatggtttaactttagatattttcttaggctaagattcttaagcaaagctgagcaacatgtttagatcttagagttgagcattgatggccagcattgtagaactgttaggatctacgagtgtcatagattgatcgggcgatttctagtgactacaaccctagataggagattgagtcctttttgttttgtggcggctaggatttaatggaaatgttgggaatgcggaatacgctcatcagtttcgttggattgtttgttactgagcaacat

SEQ ID NO: 150704 - DNA, 1223 bp, Zea mays
  Clone ID: MRT4577_68965C.1
gcaaaatatgggataacactacacctgtaaacaatgtcgattctgccaatgttgtcctgcagggtggtgaagctccccgcacaacggtcaaatactattaacatggaatgcatccaacaggtaaaaaaacctcaaacccctgccctccacacatacacaacggcgccgtagcctatgtgagtacgaccatgaccgagacgggctttagacttgtgctttgacgtgggacatacaagggggtttttttaaccacaacctaaaattcgctcctagaaggagccaaactcaggacctaaggagggctactcagaccacctaaccaactcagctagaggtcctttcgcagctactgttcattgataagcactgaaacatgtttgctgcagtttattgcacatatgttacgtaagatcacatttgtgttgtctgctgcagatgtctgttatttccagttgcttcactgaaaattgttattatgtttgtaggttgtttggcaagacaacattgagcctgataatatgacatatgaggaactgttggatttgggtgaggcagttggaacccaaagccgtggtctctcccaagaacgcatttcatcgcttcctgtcacgaagtataagtgtggttttttttcaaggaagaaaacacgccgtgagaggtgtgtgatttgccaaatggagtacaggagaggaaatttgcagatgacacttccatgcaagcatgtataccatgccagctgcgtgacaagatggcttggcataaacaaggtatgccctgtttgctttgctgaagttcctggcgaggatcctgaggcaatgagtcaacagttatgaggccaccgggaagttgttgcactttgaagctgagtactgcccccaatgaacgcatgatgtttgcttgaaggcagcttattgtccccactttataattgtgtattagcaccgtattaccaaatgtaggttattgttagatcagatgtatttagtgtttggttcagcgttttgtaacgtaatcaaatcaggaacagagagataccgttacttgcgtttggttggacgaggcccataatgcaaatctataactaaaaaaggctccccctagggggtaaaaaaaaaaaaaaaaaaaaaaaaaaaaaaaaaaaaaaaaaaaaaaaattccgttcaaggaaggaaacacacctttcacggcttgcacggtccctgctgttgtcgaccgtggtgacc

SEQ ID NO: 150705 - DNA, 825 bp, Zea mays
  Clone ID: MRT4577_68966C.1
gcagaatatgggataacactacacctgtaaacaatgtcgattctgccaatgttgtcctgcagggtggtgaagctccccgcacaacggcaaatactattaacaaggaatgcatccaacaggtacaccaaagtccaggtagtcctcaggtaattcggcacgaggcaacattgaccctgacaatatgacatatgaggaactcttggatttgggtgaggcagttggaacccagagccgtggtctctcccaagaatgcatttcattgcttcccatcactaagtataagtgtggattcttttcaaggaagaaaacacgccgtgaaaggtgtgtgatttgccaaatggagtacaggagaggaaatttgcagattacgcttccatgcaagcatgtataccatgccagctgcgtgacaagatggcttagcataaacaaggtatgccctgtttgctttgctgaagttcctggcgaggattctcagaggcaatgattcatcagttgtgatgccactatgaagttgctgctctgggtactgcgcccccaatggacgcatgatttctttgaaggcagcttgttgtccccactttagaattgtgtattagcgccatattaccaaataggttattacttatcagatgtatttaggtagtgtttggtttcggaatatggtaggatggagtcactttgctcctaatttattgttgtttgaattgattttatgtaggacatagtaactctaaaattggaaaaactatgcttaaatactgaatcatctgactccccaaaaaaaaaaaaaaaaaaaaaaaaaaaaaaaaaaaacacccaacaaac

SEQ ID NO: 150706 - DNA, 358 bp, Zea mays
  Clone ID: MRT4577_68967C.1
ggaacaaatcaatatgtaaggtgtgatttatgtatggatgttccaccctacactgtctggtaatgaaaacattaatattgccacttttaaagttttgaattgctgatataaattttcttcaaaaattatgagaaatacgccgcagccattggctttatgttacaatgagcctgacacgatttttatctgtcacaaaaataatgtgcgtctatgacatgataaatcatctgtttccaaaaatatcttgtctaacaaatttcgcccatctccaggtcacaacaacggataatcattcaatttataccacaactcaattcttcgaagtaaactatcattccctctagtggaatctttttgc

SEQ ID NO: 150707 - DNA, 170 bp, Zea mays
  Clone ID: MRT4577_68968C.1
acccgtcctagttggcccatctaatggtggcaatttgacatggattcctcccaataaggggggtaactcaaataaacttaatccttcgagaaaccaaaggccaactaggtttttccagtccaattctaagtctttccataatgagagctctggaagttttgaaccctgaa

SEQ ID NO: 150708 - DNA, 354 bp, Zea mays
  Clone ID: MRT4577_68969C.1
cttatgcgtgcgcagaggcacttgtgatgctggaagtgcctgtgctagcaggtcagaatcttgagtcatagatgctgaaacacggagtatacaagagacacctgtcactgagtctgaggcagcactatgtactggggatttgagtgacggaactaacagcacacgtggtgactgagttcatggcacatcactgtgaacgttagatgctagatctgataaagacccttgcgactatcgtaccaccgactgcctttaataaacatctagtgagcttgctggtgatgaacatactcgagaatctactgaggagaaccaatacatcatagatgcagaagcgatcatggatgcctgaag

SEQ ID NO: 150709 - DNA, 421 bp, Zea mays
  Clone ID: MRT4577_6896C.1
gccggccgggccgggagcagcgagcgaacagggaaaaaggagaggccgagaagcgctttagcgataagactggtgcacccgctgctccccaagatcctggagctcgtcggcctcggctacaccggctggttcgtgtaccgctacctcctcttcaaggaaagcaggaaagagctggtcgacgacattgagaccctcaagaaaaagattgctggaacggcggaataagcgctagctctcgtggaaagctttagaaccaacgacgagaggggccgtttcttcttctttgcaaattaagatatcaaccgaggaacgtacgtaccaatgcagctactgtcgcccatgtcatgtgttgtgtgatgcataccttaccttctgtatacataacgaaattaaacaaaaaaaaaaaaaaaaaaggccccta

SEQ ID NO: 150710 - DNA, 138 bp, Zea mays
  Clone ID: MRT4577_68970C.1
cggacgcgtgggcggacgcgtggggatacaccgattttatcagtacacttgtttactcccaaaatgctaagttattatgcgaggaaacaagtgtactgataaaatcggtgtatcaattcgcttatgcccccgcgtacg

SEQ ID NO: 150711 - DNA, 529 bp, Zea mays
  Clone ID: MRT4577_68971C.1
tttttttttttttttttttttttttttttttttttttttttttttttttttaaaaacagccaaattgatttgccaaaaacatcggtccccgattgcaggacaaaaagcgataaagtccatcgcctatttcaaactttacaaaaacaggaaaacagagcagcaatcaggccctttcccccctgatgcggcgcgcgagctggatgtccttgggcatgagggggacccttttggcggggatggcccaaaggttggtgtcctaaaaaaaacccaccaaatacccctggggggcctcctgcagcgggggaacaggggaggactggaaccaaaggtcggtcttgaatttttgcgcgatctcacccaccacccgttggaagggcagtttccggatgaacagctccgggcttttttggtacttgcggatctcgcggaaagcaacggtgccggggcggaacctgtgcggttttttcaccccgccgggggccggagccgacttgcgcaatcgaaggatttgaaattggaaatcggatgc

SEQ ID NO: 150712 - DNA, 844 bp, Zea mays
  unsure (1)..(844): unsure at all n locations
  Clone ID: MRT4577_68972C.1
tcgggatcccagagccccaacagcaagacacaccaccgtaacaccacctgacaagcccaattgacttgctacccccatcaattgtagctacaatgaacaccactcttctccgcacatccgccctccgctcggctgcccgagccgccgcgcccgtcgcctcgcgggctggactggctggtgccacttttgttcgcggaaaggctactctgcccgacctcccatacgactatggcgcgctcgagccctccatctcgggcaagatcatggagctacaccacaagaaccaccacaacacctacgtgacctcgttcaacaacttcagcgagcagatcgccgaggccaagcagaagcaggatatccaggctcagattgccctgcagcccctcatcaactttcacggtggtggccacatcaaccacactctcttctgggagaacctcgcgcccaccaaccaggngtggtggtgagccaccatctggcgctctcgcagctgccatcaacaccaactatggcagccttgacgctttcaaggagaagttcaacaccgcgctcgcaggtatccaaggcagtggatgggcatggctggtacaggacacgcagactggcggcatccagatcaagacatatgccaaccaggacccctgtggtgggccagttccgccccattctcgntgtcgacgcgtgggagcacgcttactacctcgaccaccagaaccgcaaggctgagtacttcaaggccatctggaacgtcatcaactggaaggcggccgagaagcgtttcaagtaagcgtttggacccaccgcaaaggcagagccgatagcttgttcactgggctgggccttt

SEQ ID NO: 150713 - DNA, 235 bp, Zea mays
  Clone ID: MRT4577_68973C.1
aggcgacgccacaaggacgcgggactggatacagaagctactcattttcacccttacaaagatggcgttgaaacccgtattcgaagaagcccccccatttcggcaccggcacaataacactcatgggggagaaagactggatattctgaagcgcatgacttcgtcctgcaaggccgccgccgaggacccatggaacgccccatgcggcggcactgcccatggcgcacggcaaccc

SEQ ID NO: 150714 - DNA, 148 bp, Zea mays
  Clone ID: MRT4577_68974C.1
atcaaatatggtttaaagattttaaaaaccgaaactctcttcggctttccgtaaatttaacatgacatacgcacactacatcatcttattacattctcataatcacatacaaactaccaccaaaaaatcctacaaattcttaatcaac

SEQ ID NO: 150715 - DNA, 548 bp, Zea mays
  Clone ID: MRT4577_68975C.1
ccacgcgtccggcggcgcaagtacgaggcggcggtggcggagctggagctggccaaggccgcggagcaggaccgggtcgctggggcccgagtacggcagctccatcggcgggaagctgatgagctcgccattctcggacgacgtggacgaggagtcacccaagcggcgcaacggcggcggcggcggcggcggcggcgtgctgcgcaggatgagcgggctctggaagaagagccccaagtgagtgagactgagatggggtggacggggtccgggatagccgtaggtgcgaggtgatgcaatagcagcagtatgagtaggagggatactggtgaatgctgcagggaagacgacgacgctctttctggacaagacacggagacacagctctagtctaggtggtaggaagcatgatcgtctctgtctgataacatttggctggtacttgagtgaacctcgtgtcgaggagcagctgcttttggctgcctgttctgtaccttactatgcttcattcagtcaaaaaaattcccacaaacaaaaaaaaaaaaaaa

SEQ ID NO: 150716 - DNA, 2392 bp, Zea mays
  Clone ID: MRT4577_68976C.1
gtccgcccacgcgtccggagaggagacccacacactgtacccggccacagaagcagctactacagcaggagagggagaggaggccggcccccaagatctccgtccgagaagaagcgagcggcgacggcgagacgaggcagagagtttggtgactgcagaaggattcggtgaggaatctcgtcatgcagacttcaaaaccaaggagtgggtcttcagatgccccgcagaggacttctccaaggacaccgcgggcatctcgtgtggccaaaaccggagggaatgaaaccgattctacaggagttaccccgacaagaacgcctacggagaggagccctaaggttactgagaggcggtctccacggagcccaattactgagaagaagcgcccaagcaggctatcggaactggagtccaaggtcagccagctgcaagatgaactgaagaaggccaaggagcaacttagctcgtcagaggcacggaggcgccatgcgcagcaggaagccgaggaagcaaagacgcaagagcaggctgcagccgcctcgaagctggaggagttgcagcgccagcttgacgagttctcagctgcggaggaatcccgtctccaggaactgcgcaagatctcgcaggaacgtgaccgtgcctggtgggcggaactcgaggcagtgcagaggcagaaatcagcggacgcagccgcgctcggctcggccatgtccgagatccagcggctgaagcagcagctggaagcttcagcagagtctgacgcggcccgcgcgaagcagtgcgagtacgtggaagctgagatcgagggcttgaagcaggagatggagatccgcctagcgaccattgagggcctgaaggtgaatgtcagcgagagtgacagggctgcggctgaggcaaatgccacggtaaatgagaccaagcagcagctggagacagcgaaggccaccattgactcacttgtagctgagggcgtccgcatgcaggaatgcctgaggtcgaaggacatggagctcaatgagtccaaggctctcgtggcatcgctccaggaagatatgaagaagtcacatgacacggacaatgccaaggccaaggccaatactgatgtccgctctgagactgaggctctgcagaaggtgctggtgaccacaagtgccgccgacgccaatgggagctgtggaagctatgacccagagatcgaacagttgcggactgctcttgaggtcgctgagatcaggtaccaggagcagcaaactcggatgactatcgagactggaggcttgtacgagacattggagagtgtgagggccgagtgcgcccgcgaactgtgcgagctcaggctggagctgaagaacaagaacgatgcactcatggaggcaatggcaggagccgccgcagatcctcacaggccagacgcgatgcagcagccggagctggaggcgaagctgatgaggtccatcaccgacgcggcggagctgaaggcatgcctgatggacaaggagaacgcgctgcagagcctggcggaggagaacgaggcgctgaaggcgggggcgggcagggcggaggcggagctgcggcgcaagtacgaggcggcggtggcggagctggagctggccaaggccgcggagcaggacgtgcggatgcggctggggctggtgacggacgaggcggacaggagcagccggcgcgctgcgcgggcgtcggagcagctggacgcggcccaggcggcctggcggagatggaggcggagctgcggcgcctgcgcgtgcagtccgaccagtggcgcaaggccgcggaggcggctgcagccgcgctcggtgggggtggggggaaggacggcaacggcggcacggtggagaggaccgggtcgctggggcccgagtacggcagctccatcggcgggaagctgatgagctcgccattctcggacgacgtggacgaggagtcacccaagcggcgcaacggcggcggcggcggcggcggcggcgtgctgcgcaggatgagcgggctctggaagaagagccccaagtgagtgagactgagatggggtggacggggtccgggatagccgtaggtgcgaggtgatgcaatagcagcagtatgagtaggagggatactggtgaatgctgcagggaagacgacgacgctctttctggacaagacacggagacacagctctagtctaggtggtaggaagcatgatcgtctctgtctgataacatttggctggtacttgagtgaacctcgtgtcgaggagcagctgcttttggctgcctgttctgtaccttactatgcttcattcagtcaaaaaaattcccacatgtgacatgttcttggttcttttttctttttgaagcgtttttatttcaaaaaaaaaaaaaaaaaaaaaaaaaaa

SEQ ID NO: 150717 - DNA, 655 bp, Zea mays
  Clone ID: MRT4577_68977C.1
ccggccggaaactgccgtaaagccgctccttatctccgagtacgcggcccagtggctcgttacggaagcttccagaaggtcaccgccatgaacgcgaccgtcgtttgcacctcctattccagcgcctacacaataccagatgccagaaagcgatctcgtgtacgatcgcctcagatatccacgacaacaagggcactcccctgacacggcgatagctcgaaatcatcgaggacgaacctgacctgcagaacaccgaccaagcagatgtggctactgtgtctgcggaacatgacaacgaacaacccttacttgactgcatatgcagcaggcagtgcggcagaggattcttgtgacacttgtacccagcaccactgttcctgaatatctggatgctgatgatgcagatcgtctctattgctgcaccatttcctgacacgatactggcgggacatctaacaaacatgtaccgtacaacttctatgacatcaagatgcttttccatgctaccctcatgatatctccgaactctagaacacgagaaccacgggcacggaatatacaaattcgtgcagaaatgatacttaaacaccaacttactggaagagcgacggcttatcttgcaggtggtctatctggactgcagaggatccttgct

SEQ ID NO: 150718 - DNA, 297 bp, Zea mays
  Clone ID: MRT4577_68978C.1
ggcggctcaggcaccccagtggacgacttagacaggtgctgccagactcatgaccactgctacaatcaggccaagaagctggaaagctgtaaattcctcatcgacaacccctacaccaacacgtactcatacaagtgctccgggaacgtgatcacctgcagcgaaaaaaacaacgactgtgagagcttcatctgcaactgtgaccggcaggccgccatctgtttctccaaggtcccctacaacaaggaatacaaagaccttgacaccaagatacactgttaggctgtcaccccactt

SEQ ID NO: 150719 - DNA, 250 bp, Zea mays
  Clone ID: MRT4577_68979C.1
ctcggaattcggctcgaggtcgctcactgtttattattggctatggtggaccatcggaccaggggggcctatctgactgtactgcactgcctacgccaacacgtgcatgccacctcctgctcccataccaatggaactgatagcactctcatccagtgctgtgcactgtagcaagggaaggcttaagcgccatctgacgcttgctgagtttgatgccctgttcgatagtgactacgacaaatacggaccc

SEQ ID NO: 150720 - DNA, 270 bp, Zea mays
  Clone ID: MRT4577_6897C.1
ctaatcgacccaggcgttccgaccctactacaagggttgcattgcatcgttaatttaaggaggaccttttttcttaagaggaaggttaatgtgggactgaggtcggtgaaagatatggaaatcgaaccttatgtaacctgttacacaatattgattgattgacttgtcaaagcataatatctaaaagaagcaccaatgatttttttatgaaattttaacaaaaggacttatccctgatgttcacacatacacatcttttatataatgata

SEQ ID NO: 150721 - DNA, 414 bp, Zea mays
  Clone ID: MRT4577_68980C.1
ttggggtgctttacattttttaaggaagaaagcgcatattggattgggccagtgggcaatcaacccaaccatactatcacgggggcaacctaaatgataagctggttacaaagacgactcctgatgagggtgcatgcaccccattagccctgagatctagacgcagtttaatgacccacacggtacgcgaggttagggttccatatgaaatgactaaggatgatcaccattgagaaaagggatgacgcacactcttggtgagaggaggcgatagattgcggagcggcatcagctgccactcaagcaggcattccaaggaagaggcaccgcgcctgagtaagttggaccgtgacctaagggcggtctcacacgaagtagccggcgttctgacacgccccccctgtgctagttaat

SEQ ID NO: 150722 - DNA, 768 bp, Zea mays
  Clone ID: MRT4577_68981C.1
atggctagtagggatttaagagcagtaaggcgagctatcgttgtaaagaagaagactagtgtgctagcagccgcattgatatcagagctagatataacagctaagacggaatataataatgcactattagctaaaatgcagccccctgctaaaaaaggggttgtgattacacctgatattatagacaaactctatctcttctgggataacttcctaggaagttacgaaaaagaaggggaaacctcaaagcaaacatccttcttcggacaagaactggcccatctgcatcgaactattcgaaatcttgaatcccatttccctaatcaaaagggagggaaggcacttatagcaaagcaggcagtgataccacttctctgcaaggccaaaaggaaggaagctggttttattaaggaagtagtagcaaccactcctcttttcattaggttataccaatcacccataccagatacgaaggaagctgtacctgtaccaattccctgcaaggcatcttcaaaacctagcaacaaaaaccaataccagccccgcaccttcaccaaaacccattcttctcaaggaaggttcctgtacctttccattactagtaaaaagatagctataatgatagcacttcccttcaaggaaccaaccattaacaatacctgtaccaatacttatcaagcttgtaaagctaggataaatgatgccacgcttcttcccttccctgaacgatccattacaggctaccactactggctacctttactttaa

SEQ ID NO: 150723 - DNA, 482 bp, Zea mays
  unsure (1)..(482): unsure at all n locations
  Clone ID: MRT4577_68982C.1
gccggccgggnnaaaaaaaaaaaaaaaaaaaaaaaaaaaaaaaaaaaaaaaaaaaaaaaaaaaccctcccaacccctttcctccgccggccgccggaagccgcccgcgatgtcaaaggccggggaagggtccctcccgccgccgccgccaaagggggggcaccttgggaagaagttccagggccaccacctcgccccgaaggggtccctcctctccagttccgggaattccgacctcctcaaggggcgcggagaaggtcgcggcgaagcgcgcgttgtacctcaaggaactgggggtgtacgcgaaggcggggcccatggggaaggagaaccatgcggttgccggcgccggaaaaaagctcaactgctccccgaaggggaacgagtctttgaagaaccggttggccgtgacaaaggaagcacaaaggcttaggttccacatgctctctaagaacgggaaggtccatgagcaggaaatcaaaa

SEQ ID NO: 150724 - DNA, 342 bp, Zea mays
  unsure (1)..(342): unsure at all n locations
  Clone ID: MRT4577_68983C.1
ccttttctttatctcgtccatagtatttctcaaaagttgttttcccatacagaaaaaaaactccatagtccatacagaaattatgggtactacattcatcaggtactgaaaaactactctcatcaattttgatgtcagactaaatcttatagggnctttgtattctagattcttcataaactccccaacaaaaggcgctgccgctaattaggaatatgaaagtgtctttcagcctgactttgtgtgcccatctatcaaatcctgtatttaaacagtgngatacatcatagatcatacctgaccaccttgggttggatagaggagcaaaataatggggacgaa

SEQ ID NO: 150725 - DNA, 323 bp, Zea mays
  Clone ID: MRT4577_68984C.1
aaatattctatagtagacgggatagtgccgtcgttctccgactcctggggacttgtctgacatgaagttttgtctctgcagatgcagagagctacgcacgacgaatctgccgccgatctatggtggaatgagataaccaggacggtggcgagtgtggagggcctctttgactgcgccctgggactccgaggacatcgatttcctctcaacctcgtactcatttgtgatccttacctgtcagacatggagagtacaatagacctgtcacaaatgcaaacaggaaatcatacagaatggaacgacaccttaacgatcaccgtctc

SEQ ID NO: 150726 - DNA, 206 bp, Zea mays
  Clone ID: MRT4577_68985C.1
gaacatagagactttaactatggactatcatcgtgggggtggtgttgaggtgcgtattggccgtatatccaatacatatggtcctagtatgtgcctcgacgatagtcctgtggacagaaatattgttgcacaggtacttcgaaagccaccgctaacagtccatggtgaccgaaaacaaactcgaatactccaatatgtcgctgatc

SEQ ID NO: 150727 - DNA, 185 bp, Zea mays
  unsure (1)..(185): unsure at all n locations
  Clone ID: MRT4577_68986C.1
cgcgtccggcagacaacatgggtgctcatcttcttgcctanncccnancnaaccgnacccctttatgcccggcagtgttctctaatcgttcctggcctatcacaaatgcaaacggctgcttcctttgggtatgcagcgggacggggacctttgaagcgagctacaacgacgtcatttttttttat

SEQ ID NO: 150728 - DNA, 291 bp, Zea mays
  Clone ID: MRT4577_68987C.1
acccgggcgagctagcttgcgcgctgacagaacaacagcaaccattttaattttcaggcgggcaaacaagacacagggggggagaggcgtcagctgcaactggatgtaccgcgtaaacgaagatcaaatggtacagatggtgatattgcgtgacccacgatacaaaggctagacaatagatcttgcctccgtccatagaagactaagaggagcacaatgagaaggaactcaaaaacggacgacttggggcggcctccatataagagccaatcttacataccatcgcctccg

SEQ ID NO: 150729 - DNA, 245 bp, Zea mays
  Clone ID: MRT4577_68988C.1
gttgctgccatcacaaaccgggtcggtccgaagctttgctttttcgttgagcacccagtatggaacacactcctaggatcctggcactccaactgatagcgcttatagacagttgccgccagtactggctctctgcaaaagtgtgcttgccaggcaaacttttgatgaatcaagtctggatactgcagcacgacctacccctactggggcgactggagccagtcttctccttgccagtagcgctg

SEQ ID NO: 150730 - DNA, 635 bp, Zea mays
  Clone ID: MRT4577_68989C.1
atcccctgatatttgcaacccatgacaggtgctgaaaatatttgccttcatgtgcgtaaagataactttcccgcatgggggctttatgatcaggttggattcaagatcgttgatcaggatgacgcttgttcatcagacctgggcttactttccttcagttcataaggcctgctggctagataggaatagaaggggcatgggccctagttccctttccctgtccaggggaaagccctccgtcctcccgatttagaaaggggggatggtatgtgcccagtaataccttcccccccttgtatatgatgaaagtgttttcccaagtttgcggcctttgagattgtccctagatcgggggccgttccgatacccccgaatgtttgagggatttgaattcctccaaagcttttgttggggatagtttgggcagcccccaaaaagccaatgtttttttgttgcccctgtggttcggccatgaaaaattggaaaaacctgatgtcgggtcctgatactggggctgggctcttggtgctggccctatactattgtccagtccttgagccccccctggaaaaaaaaaaaaaaaaaaaaaaaaaaaaaaaaaaaaaaaaaaaactcgagagagggccgcgggtacc

SEQ ID NO: 150731 - DNA, 151 bp, Zea mays
  Clone ID: MRT4577_6898C.1
cccaatttggatgggagaaactgcttttctcctcttagtacaacagtaacccctgtatctttcatgatatgatttatgtactgatcctatatgataacaaaagaccacaatctccaacatcagaaaagcagtttctcccatccaaattggg

SEQ ID NO: 150732 - DNA, 295 bp, Zea mays
  Clone ID: MRT4577_68990C.1
gtggaaggcagatcacgggcaccaatgataaagttgatgatgcggagtaatcctggcttcgagctgcgacaacgtcgtctctgggttttgtgtgctactgctttctggtgttatctctctgggtttcagcccctttgtgactgtagtatgtagacttcatcgcccagtctaggtggatgcttgattgatgtgttgtcgcacttgttgtggtctgatggttgtgatgcctcaatcaggtactccaccatgatgtaataatgggttctgaacttggccaccatgctgttatgcgctg

SEQ ID NO: 150733 - DNA, 239 bp, Zea mays
  Clone ID: MRT4577_68991C.1
agctcggaattcggctcgaggcgccagcaggcctcgactgctctttcgccgacaggaacggcagtccccagcgctcccgtaccgccaggttcccgccaccacccccacaccttaccccgctctcggctgccgcgtccccgggcgggctaccgctccgtcgagccaggtccgacgccaaggtcgcctacttagcgagacccaccgtactctggcgtcacgctccgatccccgccattatc

SEQ ID NO: 150734 - DNA, 436 bp, Zea mays
  Clone ID: MRT4577_68992C.1
gcgcgctcgtcagcaagccggcgaccagcactagggacgtattcggcgatgggcgcgtgaccaggcgcaagactggtggcaagcccaagccagcggggtccggcagcccctcgtacggagccgaccgaatcctgtacctgtgcccgatgtgcggtcagccaccaagctacctgaccagcgagttccccaggggactacggctgggacaccaaggcgctgtccgccgacccggagactttcgccaagaaccgcgagattgaggccagccactgcctgtggaccatgctaagcgcgctcggttgcatgacaccggagctgctcgtactgaacgtcgtcatgatactctaggccaattggatcaaggccgggtgacagatctttagcgaaagccgacttgactacctaggtgatcctagcctgatccacgcgcatagca

SEQ ID NO: 150735 - DNA, 130 bp, Zea mays
  Clone ID: MRT4577_68993C.1
attcaacaaagttacagcgcaagtccatcatggctcaattaattgaacatgctcacagagaagcatattgtgctgttactatgcctaggattaaaacatacatgcaacaatctcaattagaaacaaatcg

SEQ ID NO: 150736 - DNA, 273 bp, Zea mays
  unsure (1)..(273): unsure at all n locations
  Clone ID: MRT4577_68994C.1
gaatcactttattgtaaacactagcagaactcttctccctatacaaggtggatggctgattttaacctgaaattttaaatccacagattgagagctagtgtagaattgtctgtgtttattgtttttatgagtanatacatgcattgtcataataaaatgcatttcagagaatatgcattttacctttgggaatatgttaatttcaggcagcattccctatgggaaaggtgataccagctctgatatgcaaagcatatgataatttatcattct

SEQ ID NO: 150737 - DNA, 551 bp, Zea mays
  unsure (1)..(551): unsure at all n locations
  Clone ID: MRT4577_68995C.1
aaacggaatactaaattcacttccatccttgatatgtttatgccaaccaaaaaaaacaaataagcaggggctttttactcatttttggggccaactattaaatttgggacctacataagccacagggatctacaatcatccagcatgcacatgcagggaaaaaacagagttaccaccaaattgctgggctccagaccccaatgaatatacttcaaacatgaacaagagggggctgaaaagccattattgccccccaaaaaaacagacatcatataccctactacagttttgtaggaatgtaagcataccccacaaattctgaagggaatagggttgaccaccaaacctaacaatttttgttatgagcataaagtatcactgggagcaaaaaaacgttgaggatttcctctacttttttggagggaaaaggggggggggggaaaaannaaaacatntttccttttattcaccgcctggaagggaagcattgccccaaaacagaaactaccaaaaagttgctgaaaaacgaggggtgaaaacttgacaacaag

SEQ ID NO: 150738 - DNA, 321 bp, Zea mays
  Clone ID: MRT4577_68996C.1
agaaccttaactcaacttacctgctgtttctatcttccatgcagcattcccaccaaagcagcatctttaggatgagctagaatggcctacatttccacacgcattcattcttacataatcatgcagaatcacgtttcttgcattcatcgatataaacgaattcttattatatatctacatcttgctgtaaaaattctgttatctaccacaccacttcaatattttctctctctacacttttggttttgtgttaattctatttactatttttttatttattttatttttttatcatttctttttaatcatatatattttatt

SEQ ID NO: 150739 - DNA, 296 bp, Zea mays
  Clone ID: MRT4577_68997C.1
aaaacgggaatttcagttctcatagctttatcaggaatctcaaaacctaacaggggaaaccccaatcaagccggggccccttggggttcacagatccccccctaaactgggggcgatccatgataaactaagaccccccctcagatccccccctttttattcaaatccaaaggaatggcccccgggggggtcccccattaccgggggggggcggccccaccccccctatcagagggatcttggggagctgtccccagtcagggatcttgacccccttggggggggagcccttgggg

SEQ ID NO: 150740 - DNA, 186 bp, Zea mays
  Clone ID: MRT4577_68998C.1
ctcaaactatgcctagggttccacggaaaaaaaaaccccgacggggggcacaacacacaacgctcctaatcccatgtgttgagttgtagggggatcagcaaggcccggtataacgccagagtaacaaccgatacacatagaccttaaattaaaaacacttatgggcaacagcagactggaggtgaa

SEQ ID NO: 150741 - DNA, 506 bp, Zea mays
  Clone ID: MRT4577_68999C.1
gggggggcaaacaatttaggggaaacattggtataaaaaaccccttgggataccaaaatctggttaccacaaaatggggggaacaaacaaaaagggcccattaagcccaaaagccctcttagcaaccggtaataagaggatcatatagaaggctgaacatattccaacaaggtctcaaacgagggggtttggtgggctagcaatcctaggccaaaaaacaacacactccttgccgatagggccagggaaaggggaacctttcatttcacccttgggattcaaaaacaccccaacattattttcgaaggacaaggaaacacccgccttggggggccacggtttgggctgggggacaaaaacggggggcataacctttttcctgagggggggcttcccctttttgacggggggcaagaacatgttcccaacccaagcggacgggagggggttgaggcggcccttgatgcccttgacggaaaaaagtaaagggttttgggccccgtgtt

SEQ ID NO: 150742 - DNA, 901 bp, Zea mays
  Clone ID: MRT4577_6899C.1
cattgggtacctcgaggccggccgggccgttggggggactccatggcgggccggcccgccgggcggggcgtcgtgctatccattccacctgcttggtccatcagcagcgagcgaacagggaaaaaggagaggccgagaagcgctttagcgataagactggtgcacccgtagcggcacggcatggcggccacggcgtactccgtggcgctcctcggcggcgcacgcctgccggccgccctcctccctcggcgcagcagcgtgtgccaccagcagcttcgcctccaagacgcgcccgaggctctccctgcaccgtgccagggccgcttccgaggacacgtcggcctccggcggcgacgagctcatcgaagacctcaaggcaaagtgggacgccgttgaggacaagcccaccgtcctcctgtacggcggcggcgccgtcgtggcgctatggttgacgtccgttgttgtcggcgccatcaacgccgtgccgctgctccccaagatcctggagctcgttggcctcggctacaccggctggttcgtgtaccgctacctcctcttcaagcaaagcaggaaagagctggtcgacgacattgagaccctcaagaaaaagattgctggaacggcggaataagcgctagctctcgtggaaagctttagaaccaacgacgagaggggccgttttcttctttgcaaattaagatatcaaaccgaggaacgtacccaatgcagctactgtcgcccatgtcatgtgttgtgtgatgcataccttaccttctgtatacataacgaaattaaagagaggagagcattttgccttgccaaaaaaaaaaaaaaaaaaaaaaaaaaaaaaaaaaaaaccaccctttaatattgatatcccgttataaaatatattttcgtg

SEQ ID NO: 150743 - DNA, 1190 bp, Zea mays
  Clone ID: MRT4577_689C.1
cactcagacagatatgagcaaaaccatgagggcaatattaatagactggcttgtagaagtcacagaagaatatcgtcttgttcctgaaaccttatacctcactgtcaattacattgaccgttatctttctgtcaaagagatcagtcggcacagactgcaattagttggtgttgcttgcttgcttatagctgctatgaagaaatatgcccacctctggtagaagaactctgttatattactgactattcatacaccaaggaagaggttttgcaaatggaagcttctgttctgaataacttgaaatttgagatgacagtaactacagcaaaatgtttcttaaggagatttgtacgtgttgctcaagttcctgacaaggtacatgtttcactgttttgctgttcctaccaattccatgtgctggttgattttttttttctttctgcagggctcatctctgcatcttgagttcttagtcaactacatttgtgagctgtcacttctggagtacagcttactttgctatttaccttcaatggtagctgcctcttctgttttcttggcgaagtttatccttatgccaataaaaaacccatggaattcctcactttcttactacacgcggtatacaccatctgagttgcgtggttgtgtaagggtactgcaccggctcttccgtttgggccctggaagcaatcttcctgcaattagagaaaaatacagtcagcataagtacaaatttgtagcaaagaagtactgcccacagtcaatccctactaagttcttccaggatctgacaagttagaagccaagattacttctagttactcaatgaaaccttcctgaggtacttagtgtgatactatgatattgatttgacagatagttttgaatgcaaggcatgcacgaggccttgcgtttagcagataaacaggttcaagtaaactgtatgtcacttgtggcaatgttgtttcagtgttgtgctttgattgcttccagcatcgtcttatacgttgctgttgtggtcttctcacgctgtctagaacttctattgtatagttctggaccttgctcataacaagggtagatagtttggctaaagataaagtgtactcattctctcattgttatctacgtgttgcttctgtattctgaagattctgctctgaaacccagcaaatgtattatcaggc

SEQ ID NO: 150744 - DNA, 209 bp, Zea mays
  Clone ID: MRT4577_68C.1
cgttggttgctatttcgtagatccgcgaagtagagagcacggggaagacaaagtaggcctgaccctcagtcagactctccagctttttgacgaaagaccagactagacacctaagacttacatacgcttcatgagtgcgagcgaagtgttatcactcaacgtgccaggcttagaagatcagtagacgcaggactgaaaaatacgcagat

SEQ ID NO: 150745 - DNA, 2839 bp, Zea mays
  Clone ID: MRT4577_69000C.1
ggtctagtgtagccgggccgagcgagccgccgtcgcctccgcttggtctcgctctcgctgcattcgtcttccccgcccgtccgtccgcccgctgatctcagatccagaccaaacgaactccacactaccctctgcccagctcgcgcacgcatgaaaccctagtgaccccgtccagatctcggcgtccggatcactgcgcggcgccgccatggcgccccccgcgctggactctctcccggcgccgctccggtcgctgcggctcaagacgaagcagcaggagctcctgctccgcgtctcggcgctggcgctcatctacgtgctcgccttcgccgtccgcctcttctccgtcctccgctacgagtccatgatccacgagttcgacccttacttcaactaccgcaccacgctcttcctcaccgagaacggcttcagcgagttctggaactggttcgacttcgagagctggtacccgctcgggcgcgttgtcggggggacgctctacccgggtctgatggtgaccgccgcgctgctccaccgcctcctccgcgcgctctacctcaccgtccacatccgtgaggtctgcgtcctcaccgcgcccttcttcgctgccaacaccacgctcgtcgcctacgccttcggccgcgagatatgggactccggggcggggctcgtcgccgctgcgctgatcgccatcgtccctggctacatctcccgctccgtcgcggggtcctacgacaacgagggcgtcgccatcttcgcgctgctgctcaccttctacctcttcgtgcgcgccgttaacactgggtcgctcgcctgggcgctcgcctcggcgttcggttacttctatatggtgtcggcatggggaggctacgtgttcatcatcaatctcgtcccgctttatgtgcttgtgttgcttgtcactgggaggtactcgcagaggctctacgtggcctacaattgcatgtatgtgcttgggatgttgcttgcaatgcagattcgttttgttggattccagcatgtgcagtccggagagcacatggctgctatgggagtcttcttcctgttgcaggttttcttcttcttggactgggtgaaatatctgctaaatgatgccagactattcaagtcattccttcgaattaccctcacatgtgtgattactattggcaccctggctcttggacttggtactgcatctggttacatctccccttggacaggacggttttactccctgcttgatcctacctacgcaaaggaccatataccaatcatcgcatctgtttctgagcatcagccaacagcatggtcctctttcatgtttgacttccacatcctacttttcttgttcccagctggcctttatttctgtttcaagcgcctgtcagatgccacaatatttattgttatgtatggcctcacaagtatgtactttgctggtgtgatggtccggttaattcttgtggcagcaccagccgtttgccttattagtgctattgctgcatctgctacaataaaaaacctaaccactttgatcaggacaaagagcagaagtccacagactacttctgggaaaacaactggctcaaagtcagctgcaaagggtgcagttgatcaatctttaccattccaacacaatgctgctattggtcttcttctgggtgccttttacttgctcagtaggtatgccatacactgcacttgggtgacatctgaggcttactcttctccatctatagttttggccgcaaggggtcataatggtggaagagtcatctttgatgattatcgtgaggcatactattggcttcgtcagaacacgcctcctgatgctaagattatgtcttggtgggactatggataccaaattacagctatgggtaacagaactgttattgttgataacaatacatggaataacacacacatagctacagttggacgagctatgtcatcttatgaagatgaagcatatgagatcatgcagtcacttgatgtgaactatgtgcttgttgtgtttggaggtgttactggatattcttcagatgatatcaacaagttcttatggatggtacgtattggtggaggagtttttcctgtaatcaaagagccagattaccttgttaatggggagtatcgtattgacaagggggcagcacccaaaatgctgaactgcctaatgtacaagctttgttactaccgatttggagaacttaccacagaatatggaaaacctccagggtatgatcgtgtacgaggagtggagattggcaacaaagacataaagcttgaatacttggaggaggcatttacaacttcaaactggatagtgcgcatatacaaggtgaaacccccaaagaacaggtcctgaggtagttggtattacctcaggcaagtaaattattgtcaaaaatctgagtgtccagaggagacggcagagtggttattatgggcacctgcgttggcgagacttgctgtagtggccatagcatcagttcaggtcgaaggtcctcatttggtttaggtgtggtcggtgccattcagaagaaccaattgtgacaacagcgagtactttttgattgttaagcatttcttgacctaactctggaagtttttgtaggcgcaatgacatatttgagtagagaaacttgtctttgatcaatgcgcaaggcaaggacaaagtttccggcactaaacgcaaaatatgactgttgattctgttcgctgttatgtgtttacatcatccaatgtaggcgctagtgcagtttttaggtcccctttggaacaaaaaaaaagtgcagggattttggaggattaaaatttaagggggatttttcct

SEQ ID NO: 150746 - DNA, 328 bp, Zea mays
  Clone ID: MRT4577_69001C.1
aaaaaagcaagcaaagtaattgggcttggtgttttgtctccaacggaatcatacaatcttgggggaagaaagatgatttgcttgcactccaaaataggaccagcaagggggaaggggggggcgccccaccaaatggccaaaccctaacagattttttttctcttcctcttttttctgctggaggcgaccgccggaaattccttccttttgctggggggggcatctcgaagggttttttttttttcctcccaatgcaacaaggtagcgggggccgtggcccggagagctaatgggcggtttaatatggacagggcaaccacctgggccc

SEQ ID NO: 150747 - DNA, 330 bp, Zea mays
  Clone ID: MRT4577_69002C.1
caggtatccaataatcttctatgggagtgcagtcttatatgttactttattgatagagatgtcttgtttttgaatctcatgataaagcttaccttggtttgatggtttcagttagcataactctctgattccatcgacttgctttaaggaaaaaagaattgcatgcatgtttcagcagtaccaactatactaagttactaacttatgtggatatgaaccttctatgcatttgtttttgtagaatttgtaagaaatatccgttttgctgttatttacttttgcttattattgtatgaagtttgaatggatgtgaggccctgtaatattctt

SEQ ID NO: 150748 - DNA, 179 bp, Zea mays
  unsure (1)..(179): unsure at all n locations
  Clone ID: MRT4577_69003C.1
accggcgcgacccacgcgnccggtgtaattaattcaattaccctcattttatactaccaacagaatcccaaccgccgttgtatttaaccatacaacttctcaaatcctaaatccccccaaacacaccctacattagacaacatctccaaagcaccaaaaacgacacatttaattcatca

SEQ ID NO: 150749 - DNA, 532 bp, Zea mays
  Clone ID: MRT4577_69004C.1
cgcggccgtctcctttgtcatcatcatcaggtcagatttagcagctttgccttttcagcgctaagcgagcaagtaacggcggccggcaacggcacgggggcaccgttgctgtccgcgcaacataagggtcaggcggcgctgcggcgtcttgtggtgggcagggcgctgggcgcagggcagctgcgagccgccactgcaatccggcagcgtgtcggcgccgacaggagctcaccagcagcggcaggggcgctcggggccgcgcgtccggcggacggcaacaccagcgcagaaacgattagcgagacgcgagtccgaatttccctcattctgtaagttcaaattgaaacattcagtttgttagggacagcaacttgtgaatcgcttagcctgaattagagtttgtctccaaattactttagtcaaatatgcgttaagcaatttcagattcatgctcagttatgtgttatcatatatatcctatatatatatataatgcaatttgaactatgcggcattatacatgtcaaatatt

SEQ ID NO: 150750 - DNA, 536 bp, Zea mays
  Clone ID: MRT4577_69005C.1
ctagcctccacccctcacccgccgcagccaaaccctctccagcagccgtcgtcgccaccgctgcagcgcggaggcgacccccatcgccgccaagatgcagatcttcgtgaagaccctgacggggaaaaccatcacgttggaggtggagtcctcggacaccatcgacaacgtgaaggccaagatacaggacaaggagggcatcccgccggaccagcagcggctcatcttcgccggcaagcagctcgaggacggccgcaccctcgccgactacaacatccagaaggagtccaccctccacctggtgctccgcctccgaggtggcgccaagaagcgcaaggagtgccccacttcgaccgccactactgcggcaagtgcggcctcacctacgtctacaatcagaaggcgtaatcccatgcgccgctttgcttcacccgcctacctatcaagcattcacctgttggttactcgatttgaatatcatttagatctgtttgaggttggaacataaatgcagcagtagtttctgtcttattatg

SEQ ID NO: 150751 - DNA, 430 bp, Zea mays
  Clone ID: MRT4577_69006C.1
cctccaccccatcaaccctacctagccgccgccgccgccgcaggcggcccccgcttcgtcgccaagatgcagatctttgtgaagactctgacggggaagaccatcactttggaggtggagtcctcggacactatcgacaatgtgaaggccaagatccaggacaaggagggcatccccccaactcatggccaaccacttcgaccgccactactgcggcaagtgcggcctcacatatgtctacaaccagaaggcgtaattgcttgccccgatttgctttatccgcctaccctatcgagcatccagctgttggttactcgaattgtatctcatgtagatctgtctgaggttgaaacttaaatggagcagtagtatctgtcatattgatacccctgttactgaattgatgtgatgctgagtttaattttgttct

SEQ ID NO: 150752 - DNA, 832 bp, Zea mays
  Clone ID: MRT4577_69007C.1
gccgggaccgtcctccaccccatcaaccctacctagccgccgccgccgccgcaggcggcccccgcttcgtcgccaagatgcagatctttgtgaagactctgacggggaagaccatcactttggaggtggagtcctcggacactatcgacaatgtgaaggccaagatccaggacaaggagggcatccccccggaccagcagcggctcatcttcgccggcaagcagctcgaggacggtcgtaccctcgccgactacaacatccagaaggagtccacactccacctggtgctccgcctccgcggcggcgccaagaagcgtaagaagaagacgtacaccaagcccaagaagatcaagcacaagcacaagaaggtgaagctctccgtgctgcagttctataaggtggacgacaccactagcaaggtgacccgcctccgcaaggagtgccccaactcagagtgcggcgcgggcgtcttcatggccaaccacttcgaccgccactactgcggcaagtgcggcctcacatatgtctacaaccagaaggcgtaattgcttgccccgatttgctttatccgcctaccctatcgagcatccagctgttggttactcgaattgtatctcatgtagatctgtctgaggttgaaacttaaatggagcagtagtatctgtcatattgatacccctgttactgaattgatgtgatgctgagtttaattttgttttcatatctatcctttcagaccattgcactctttgcccgtttcaccatgctaagtacttgttgatgtaattttgatgtggatttattaatgagtaactaatacaaataatagtat

SEQ ID NO: 150753 - DNA, 490 bp, Zea mays
  Clone ID: MRT4577_69008C.1
gcaggcaaaacctattttacccgccgccgcaggcggccccccatcgccgccaagatgcagacctttcgtgaagactcctgacggggcaagaccatcactttggaggcggagtcctcggacaccattgacaatgtcgcacgccaagatccaggacaaggagggcatccccccggaccagcagcggatcatcttcgccggcaagcagctcgaggagggtcgtaccctcgccgactacaacattcagaatgagtccaccctccacctggtgatccgcctccgcggtggcgccacgaagcgtaagaagaagacgtacaccaagcccaagaagatcgagcacaagcacaaaaaggtgcagctctccgcgctgcagttctataaagtggacgacgccactggcaaggtgaaccgcctccgaaaggagtgcccccaccaccgagtgcggccgcgggcggtcttccatggcccaaccaacttctacccgccacctact

SEQ ID NO: 150754 - DNA, 684 bp, Zea mays
  Clone ID: MRT4577_69009C.1
agatgctccccatcccgcagcagccaaaacctacctagccgccgctgcaggcggccccccatcgccgccaagatgcagatctttgtgaagactctgacggagaagaccatcactttgcaggtggagtcctcggacaccattgacgatgtgaaggccaacatccaggacaaggagggcattgccccggaccagcagcggatcatcttcgccggcaagcagctcgaggacgggcgcaccctcgccgactacaacattcagaaggagtccaccctccacctggtgctccggctccgcgggggcgccaagaagcgtacgaagaatacgtacaccaagcccaagaagatcaagcacaggcacaagaaggtgaagctctccgtgctgcagatctataaggcggacgacgccactggcaaggtgacccgcctccgcaaggagtgccccaacacatagagcggcgcgggcgtcttcatggacaaccacttcgaccgccactactgcaggaagtgcggcctcacctatgtctaccaccataatgtgtaattgcttgccccgatttgcgttatccgccaacctatcaagcattcagatgttggttactcaagctggatctcattcagatctgtctgaggttgaaacttaaatggagcagtagtatctatcatattggtacccctgttactgagc

SEQ ID NO: 150755 - DNA, 895 bp, Zea mays
  unsure (1)..(895): unsure at all n locations
  Clone ID: MRT4577_6900C.1
cattgggtacctcgaggccggccgggggtgagcacccacgtccgtctgcagtcaccactcaacagggccacaagacatcagtgcgtccattccacctgcttggtccatcagcagcgagcgaacagggaaaaaggagaggccgagaagcgctttagcgataagactggtgcacccgtagcggcacggcatggcggccacggcgtactccgtggcgctcctcggcggcgcacgcctgccggccgccctcctccctcggcgcagcagcgtgtgccaccagcagcttcgcctccaagacgcgccgaggctctccctgcaccgtgccagggccgcttccgaggacacgtcggcgtcggccctccggcggcgacgagctcatcgaagacctcaaggcaaagtgggacgccgttgaggacaagcccaccgtcctcttgtacggcggcggcgccgtcgtcgcgctatggttgacgtccgttgtcgtcggcgccatcaacgccgtgccgctgctccccaagatcctggagctcgtcggcctcggctacaccggctggttcgtgtaccgctacctcctcttcaagcaaagcaggaaagagctggtcgacgacattgagaccctcaagaaaaagattgctggaacggcggaataagcgctagctctcgtggaaagctttagaaccaacgacgagaggggccgtttcttcttctttgcaaattaagatatcaaaccgaggaacgtacgtaccaatgcagctactgtcgcccatgtgttgtgtgatgcataccttaccttctgtatacataacgaaattaaagagaggacagcattttgccttgccagccatttctcaattagttcttcagttacgacttcccaaaaanaaaaaaaaaaagggcccta

SEQ ID NO: 150756 - DNA, 435 bp, Zea mays
  Clone ID: MRT4577_69010C.1
gcacccccatcccgcagcggccaaaacctacctagccgccgccgcaggcgggcccccatcgccgccaagatgcagatctttgtgaagactctgacggggaagacatcactttggaggtggagtcctcggacaccattgacaatgtgaaggccaagatccaggacaaggagggcatccccccggaccatcagcggctcatcttcgtcgggggggggctcgaggacggtcgcaccctcgccgactacaacattcagaaggagtccaccctccacctggtgctccgcctccgcggcggcgccaagaagcgtacgaataagacgtacacgaagcccaagaagattatgcgcaagcacaagaagggtaagctctccgtgctgcagatctataaggtggacgacaccactgacaatgttacccgccgtcgtaaggagagcc

SEQ ID NO: 150757 - DNA, 330 bp, Zea mays
  Clone ID: MRT4577_69011C.1
gcgacgcctggacgaaaccacgggcggcactcaccgcgaacagcttcttcggtaggtaaactcttcttcgttgctgcctacatatataggcgccattatatccaataccagggaagagcaccaatgaccttacgcgtccgttcaagatctacatattgcaaaacgagtattctggtgacctatttcctcttagaaccacattctaaggtgttggaggatcttgccactctacccaaaaaagtttacatgtgtgatctgaacattcatatacagactgtgttcgattccatggttgaggtcaatgacagggacatctatgcggaacgatgg

SEQ ID NO: 150758 - DNA, 350 bp, Zea mays
  Clone ID: MRT4577_69012C.1
acgggcagcagccaaaccctacataggcgccgtttcatgcggccgccccgcatcgtcgccaaaggtgcggatctttgtgaagactgtgacggggaagaccatcactttggaggtggagtcctcggacaccatcgacaatgtgaaagccaagatccatgacaaggagggcattcccccggaccagcagcggctcatcttcatcggcaagcagctctaggacggtcgcaccctcgccgactacaacatccacaaggagtccacactacacctggtgctccggctacgcggcggcgccaagaagcgttagaagaagacgtacacctagcccaaagcagaaactttgatgaatc

SEQ ID NO: 150759 - DNA, 365 bp, Zea mays
  Clone ID: MRT4577_69013C.1
ctcgatccgtttaactaaatcctacaatacataccttgccagtaccaatcttgtgaatgacagaaacacaaagcatatttattttctgatggactgcctggtagagctgtattctcttgatgttcagaaatcatatgagagggcaataatctccgtggagcaactgaatgctattcttagacaggcttctaaaaccaaggaaaagtgtcatagggcctcattaggtatctatattatatcttctccaggcagatccttggggccttcttgattattattaggtccttcttaagtattttggagaattggagactgggacccttcatccaaataggacccaaaatgtgtccggatgcgttatatta

SEQ ID NO: 150760 - DNA, 197 bp, Zea mays
  Clone ID: MRT4577_69014C.1
aaagggcaattctttatattttcaaagttcccattctacaaaaacgcccgccacaggatatccacagggagaaggcgggaagcccctcccttattctttaccgagagccgagagggcctcccccccttacagatgcaacgttattaaaagcggggcattgtgattagcagctcaccccccacacaaaaagggcttcc

SEQ ID NO: 150761 - DNA, 704 bp, Zea mays
  Clone ID: MRT4577_69015C.1
gtttcctagactacacccccatcccgcagctttcaaaacctacctagccgccggcgcaggcggccccccatcgccgccaagatgcagatcttgtgtgaagactctgaaggtgaagaccatcactttggaggtggagccctcggacaccattgacaatgtgaaggccaagatccaggacaaggagggcatccccccggaccatcagtggttcatcttcgccggcaagtagttcgaggacggtcgcaccctcgccgactacaacattcagaaggagaccaccctccacctggcgttccgcctccgcggtggcgccaagaagcgcacgaagaagacgtacacctagcccaagaagatcaagtacaagcacaagaaggtgaagctctccgtgctgcagttctataaagtgtacgacgccacaggcaaggtgacccgcctccgcaaggagtgccccaacacagagtgcggagcgggcgccttcatggtcaaacacttcgaccgccactactgcggcaagtgcggcctcacctatgtctacaaccagaaggcgaaattgcttgccacgatttgatttatccgccaacctatcaagcattcagatgttggttactcaaattgtatctcctttagatctgtctgaggctgaaacttaaatggagcagtaggatctatcatattggtaccccagacaaaaaaaatacaagaaa

SEQ ID NO: 150762 - DNA, 873 bp, Zea mays
  Clone ID: MRT4577_69016C.1
ggaatgactcgtgatgatttattcaacacaaatgctagcatcgtagctgctttagctgatgcttgtgctcaatattgtccaaaagcttttttggctataatttcaaatccagttaactcaacagttccaattgcaagtgaagtgtttaagaagcgcggtgtgtacgatccaaaacgtatttttggtgtaactacacttgatgtggttcgtgctaatacttttgttgcagaacttaaaaagttggatgttgcatccacaaaagttgatgtgattggaggacatgccggcatcactatcattcctttattgtctcgtgttcaaccttcagtttcttttagcgatgaggaacgtgcaagtttaactactcgtattcaagatgctggcacagaagttgttaaagccaaagccggaactggttctgctactttgtcaatggcctttgccggtgctaaatttgcattctctcttttggaagcattgaatggaaaggaagtagttgaatgttcttatgttaaatctgatgtaaccgaagcttcttatttctcaactccagttaaaattgataaaaatggagttaaagaaaatttgggtcttggtaaactatcttcttatgaagaaggattagttaaagcttctattgctgaactgaaggctagcattaaaaaaggagaggaatttgtaaacaaaaactaaattaatctattaaatttaatttgtaaattaaatttagtttaatagattacatagaatctttaaattaaggcattacttgtttttcgacgtttgttgcaatattggttttttattaatttaagtaattagaaatgttgttttatctttacttaaaattataaaaaataaattaattttttt

SEQ ID NO: 150763 - DNA, 701 bp, Zea mays
  Clone ID: MRT4577_69017C.1
gccggccgggtcgggagactacacccccatcccgcagcagccaaaacctacctagccgccgccgcaggcggccccccatcgccgccaagatgcagatctttgtgaagactctgacggggaagaccatcactttggaggtggagtcctcggacaccattgacaatgtgaaggccaagatccaggacaaggagggcatccccccggaccagcagcggctcatcttcgccggcaagcagctcgaggacggtcgcaccctcgccgactacaacattcagaaggagtccaccctccacctggtgctccgcctccgcggtggcgccaggaagcgtaagaagaagacgtacaccaagcccaagaagatcaagcacaagcacaagaaggtgaagctctccgtgctgcagttctataaggtggacgacgccacaggcaaggtgacccgcctccgcaaggagtggcccaacacagagtgcggcgcgggcggcttcatgggcaaccacttcgaacggcactactgggggaagtgcgggctcacctatggctaccaacagaaagcggaattgcttggccccaattgctttatccgcccacctatccagcattcagaaggtgggtactccaaatggatctcctttagaactggctggaggtggaacttaaatggagcaggagtatctattctattggtacccctggtactgggt

SEQ ID NO: 150764 - DNA, 410 bp, Zea mays
  Clone ID: MRT4577_69018C.1
ggtctaaaattcacgggccgacccacgcgtccaacgtaactttcatcaactcacacatcaaacattatgcctcgcaacggagatggttcgggcaacaagggccccaattgagggtcacaacctacttcagggggcttcaggcgataaaacgctgcaacacaccaagcatgtagcacctatgcccgagcaggaagcacgagatgcccttcccggcatgggcgccggcggtgccgcagcacccatcgccgacgacgcggaacaattcggcgtcaacgagcccaagaaagaccccactgaagaagaggacgaagaacccatcccagaccatctgaagaccgacacctcgtccaagatctccaagaagcgggaccaaccggaccactcagctacctcccccgagcgctctcacc

SEQ ID NO: 150765 - DNA, 144 bp, Zea mays
  unsure (1)..(144): unsure at all n locations
  Clone ID: MRT4577_69019C.1
tgctcatcctctgcctgccccgcttgcgcagcgcgtctgctctagtgaggggagacggagatccgccagagattgaggagagggagggaggctgcctnnccggggagcgtttgctgcgagggatggactgncactttttttttt

SEQ ID NO: 150766 - DNA, 1134 bp, Zea mays
  Clone ID: MRT4577_6901C.1
tcatcgaggccggccggggagcacccacgtccgtctgcagtcaccactcaacagggccacaaccacaagacatcagtgcgtccattccacctgtttggtccatcagcagcgagcgaacagggaaaaaggacaggccgagaagcgctttagcgataagactggtgcaccccccgtagcggcacggcatggcggccacggcgtactccgtggcgctcctcggcggcgcacgcctgccggccgccctcctccctcggcgcagcagcgtgtgccaccagcagcttcgcctccaagacgcgccgaggctctccctgcaccgtgccagggccgcttccgaggacacgtcggcgtcggcctccggcggcgacgagctcatcgaagacctcaaggcaaagtgggacgccgttgaggacaagcccaccgtcctcttgtacggcggcggcgccgtcgtggcgctatggttgacgtccgttgtcgtcggcgccatcaacgccgtgccactgctccccaagatcctggagctcgttggcctcggctacaccggctggttcgtgtaccgctacctcctcttcaaggaaagcaggaaagagctggtcgacgacatcgagaccctcaagaaaaagattgctggaacggcggaataagcgctagctctcgtggaaagctttagaaccaacgacgagctcaaggcaaagtgggacgccgttgaggacaagcccaccgtcctcttgtacggcggcggcgccgtcgtcgcgctatggttgacgtccgttgtcgtcggcgccatcaacgccgtgccactgctccccaagatcctggagctcgttggcctcggctacaccggctggttcgtgtaccgctacctcctcttcaagcaaagcaggaaagagctggtcgacgacattgagaccctcaagaaaaagattgctggaacggcggaataagcactatagctctcgtggaaagctttagaaccaacgacgagaggggccgtttcttcttctttgcaaattaagataccaaccgaggaacgtaccaatgcagctactgtcgcccatgtcatgtgttgtgtgatgcatacccttacccttctgtatacataacgaaattaaagagaggagagcattttgccccgcc

SEQ ID NO: 150767 - DNA, 327 bp, Zea mays
  Clone ID: MRT4577_69020C.1
cggctctctatgcaatttccgtttccttaaactcgatttgggggtagattgtcgctgcgagtacagacatctagcgtgggcaggcacacacagcgataggatggatagtagtactggtgtgtcctcctcctcctctacgcagagtttgtctgtcagacagacagattagcaaattacacactggcacactgcactgcactatctctcagggaaaggaaaaaaaaagaagtacatctgacgaccgacgctctgcattatattattactgtgcaaaaaactaactcattcgtggacgtggtgcacgcacgtacagtccgggtgctgcaa

SEQ ID NO: 150768 - DNA, 304 bp, Zea mays
  Clone ID: MRT4577_69021C.1
gcgaactccgccaatttgagcgaatgaattctatactcagcgcagacaacgatgaattccgatcaaagctctacaaatacgcagactacgaggacatcgagagagacctcgaggttatcgaatctatcgaattctctacaggcgatgatgacgataccggtactttgcaggaagaggccactagcactaacagctctgcgagatccgcagagtattcgttggagcagttactgatggctcgcaacgagagactcagcaacgagcttacagtacttcgggtatctcatcgagatcatcagagtca

SEQ ID NO: 150769 - DNA, 325 bp, Zea mays
  Clone ID: MRT4577_69022C.1
caaggtgtggcgcgtgtccgactcccggtgcctcgagtccgtggtgcgcgcccacggggacgccgtcaacgccgtcgccgccgcgggcttcgacgcgctcgtgctcacgggctccgccgacggcacggtcaaggcgtggcggcggcgcgcggccgagggcaagggccgggccacgcggcacgccatggagcgcgtgctgcgggagggcgaccgagccgataccgccatcatagtgtgagctcaagtcaatgtagtgtacgccggcttacaacacggtgactgggacactgctgtcgttcgccaagtgaatcgcctagcagcacat

SEQ ID NO: 150770 - DNA, 321 bp, Zea mays
  Clone ID: MRT4577_69023C.1
atcttacttgtactaaatatattttgtccaccggcctatataacaggagggttgtaagtgtggtggttagcgaaaaccaaagccctgggtatcaccatcagctctgaagcgttcagtttaggaggtggctagttaagtaaagtaaaccttgttttctgtaaaaatgctatatataaaacttgcagataatcttaagatcttgcttatatcaaaatctcatgaccataagctcagtagttgaagagttatgatgtttatcaagtacagtttcagaatctggccagactctcgactgatttccaaaatgaccttgtttgccca

SEQ ID NO: 150771 - DNA, 339 bp, Zea mays
  Clone ID: MRT4577_69024C.1
gggggccccccgccaaatcaaaaaattttttttttggggggggtttgtcccccccccagggttttagttcaattttttaggggtaaaaagggtttcccccgacccaacaaacctggaaccttttttaaccaaatttagggttcttgccaatttttgtttttggtcaaaggggggttgttccctatttgggggggtaaaaaaaaagcaaccccccttcaagcttgtaactttggtgggtcatctcctcttaagggcccctggggaacaaaacaaaaaaaaaacttttgtccttgggcaattggttgctttggaagaccttcattaacgataaattttttt

SEQ ID NO: 150772 - DNA, 560 bp, Zea mays
  Clone ID: MRT4577_69025C.1
aacttaaatctatattcatcagtttcattcatgtgaggttcctgaagatatagtctctttctttttccccaagataacaaggagcacataataactttactaggacacatataaatacaaaatcaagattacacgtgcagctgattgctggagaaattgacctccgtccctgaatcctgccctaccccatgaaggccaaaaatatgcggccacgagagaaggatgctgaatttaatgttctagcaattcaaatttccttttcttctgaaacaacaatgtgtcattttgcaaaaacaagaaccatttcaaacacgaattccgttccaacacgtattctactcccaggctcgctacatcatcatcggcatgttaaacaagtctgccagacgaagaagatttcacccgcatatgcctcttcgtctttactccccttggtttttgagatttccaacaagggaaaaggccatggcatctcgattttccaagctcagagcatacgctctctttgtcgcaatcaaccatgtcatccttcctgtgcattctgcttggtgaaacggaaa

SEQ ID NO: 150773 - DNA, 352 bp, Zea mays
  Clone ID: MRT4577_69026C.1
aacccattgtgatttttacccagggaactaagggccgctctgttaaatattacgtgttttatttgtcacatgacacgtgaacgacaaaagagaccaaaattgaaacgcggcgggcctttcttttttaaaatgggattaaataaatggagctgcattctcttgttgcatatcctataaaccctccggttacgagcatgctacaacatatgattcaggggccgaaaagggtaacgacagcgattattgcgcaatggtacaagtggcacacgctggcttggatcaaaacaagaacacttaatgcccatcccgggtttggacacacaacaggaccatcctccaaacaagtctacaa

SEQ ID NO: 150774 - DNA, 833 bp, Zea mays
  Clone ID: MRT4577_69027C.1
ttgggtacctcgaggccggccgggaaactctctctctttcgcgtggcatttcttcctgccagcgacgaattggcgcgcgccgccgccgcctgcccaggcccttcgcccacccaccagacggacgtgtataagcgagaggaatttatctgccggccattttcgctgacagctggtggaatccgagagacctaaatagatgaagctgcatcaagtttggcaattaggcgttaaggatatgaaggccgttccacttcctcgcccgagatcagctccaaaaagacgtgcgtggatccctgccgttgcagcttttatctccatcgcgctagtctgggcttatctgtatcctcccccgcattacacttcttccgtgagggattggcttcctgcggaaccagccagggaattgactgatgaggagagggcctcgcgtgttgtttttagacagatcctaacaacacctcctgttctatccaagaattcaaaaatagctttcatgttcttgactccggggacattgccatttgaaagattgtgggaaaagttctttgagggccatgagggaaggtacaccatatatattcatgcctcaagagagaagccagaacatgtcagtcccatatttgttggtcgagagatacacagtgaaaaggtaacttggggtaaaatttctatggttgatgctgagaggaggttgctggcaaatgctctacaagacattgacaatcagcattttgttttgctatctgatagttgtgtacctttgcacaattttgactatgtatatggactacctgatgggtgccaatctcagttttattgactgcttttatgat

SEQ ID NO: 150775 - DNA, 1853 bp, Zea mays
  Clone ID: MRT4577_69028C.1
aatagaaatccaaccgcctcgttccttccctcgtctctcccagtctccccccttccgtttttctcgtcgcggtcgcgggtcacagccgccgcgccggtcgcgcccccttcccaagacctcacgctgtcacgcacgtaaatcaatcagagcgttggaccttggcacgacctgattcctgatcctcttgcgcgttggaccgcgcccgccgaagctctctctcgcgtcctcttgtttctgccagcgacgacttcgcgcgcggccgcggcgccgcctcctcctgcccaggcccttcgccggcgacaagcacccaccagacggacttgtacaagcgagaaggaattatctgccgaccatttttcaccacactggtggagtccgagagtaatgggagctgtgaagcttaaatagatgaagttgcatcaagtttggcagctgggcattaaggatatgaaggccgtcccacttcctcgcccgagggcagccacgagaaggcgcgcgtggatgctcgccgttgcagcttttatcttcgtcgcactagtctgggcttatctgaggctccctgcggaaccagccagggaattcactgatgaggagagggcctcgcgtgttgttttcagacagatcctaacaacacctcctgttcgactaagaactcaaaaatagctttcatgttcttgactccggggacactgccatttgaaaggttgtgggaaaagttctttgagggccatgagggaaggtataccatatatgttcatgcctcaagagagaagccagaacatgtcagtcccatatttgttggtcgagagatacacagtgaaaaggtaacttggggtacaatttctatggttgatgctgagagaaggttgctggcaaatgctctacaagacatggacaatcagcattttattttgctatctgatagttgtgtacctttgcacaattttgactatgtatatgactacctgatgggtgcaaatctcagttttattgactgcttttatgatcctggaccgcatggaaattttagatattcaaagaatatgttacctgaggtcacagaggctgattttaggaagggttcacagtggttctcagttaagcgccagcatgcgttgatgatcattgcagatagtctttactataccaagttcaagcttcattgcaggcctgggatggaagatggtcgcaactgctatgctgatgaacattatttgccaacagtattccatatgatggacccagatggaattgctaattggtctgtaacccatgttgactggtctgaagggaagtggcacccgaaagcttacagggcaaaggatgtcactttcgagcttctgaagaatataacatcaattgacataagtcaccatgtcactagtgatagaaagaaagtggttacagagaaggcctgcctatggaatggagcaaagagaccatgctacctgtttgcgagaaagttctaccctgagtccataaacaatctcttgacctcgttcgcgaattatacacttatttgagcttctaggtggcgcttagaggctacacaggaaacattttgttatacaaaaccttgtacattggatagcaacagagtaggacattaattaacagaatagcaatagctattggtgaggagaaggctttcgctgcagcaacacagtggcttcagatttatcacgacaggccattggtactcctttagcctcgttactttcatagtttatcctctccacatatctttagctgtggttttaccatgtacatcaagcttatttggacaagaaatggtcattaaatggaaaatcagagatcatggtctaccaaaaaaaaaaaaaaataagtatatt

SEQ ID NO: 150776 - DNA, 172 bp, Zea mays
  Clone ID: MRT4577_69029C.1
gtccttttccttaggacttgagctgggatgctgcttctacatgcccacagcaagcgctgctgggcgcccgccgccatccagtgggtgaagcagtgcaaggccttctacgacccgtctggacgcttgaagtagttccactactcctccgtcaacgagaacaccggcggaaagt

SEQ ID NO: 150777 - DNA, 371 bp, Zea mays
  Clone ID: MRT4577_6902C.1
cgaattcccggtcggccccgcgtccggtatctcgctttcgatcaggattgtggtcggtgcgtcgttctgcggtgcttatcgtggtttcggtttatcggtgcggggggttcacggtcaaattcgctgctgcgtggcgcttttgacattgtagccaattttatcattgctcctgcgtggagacaaagccggatggtctaaaagctgatggaactggctaaactccacagaatgtactgacatgtactgatggcttacaaccagtcatggcggctgatctgttgagaagactaccatgcttgcatcacgttcacgtgaactgcatctacaccatggctgcaccaacagggtccatgcccaatctgcacgcacca

SEQ ID NO: 150778 - DNA, 507 bp, Zea mays
  Clone ID: MRT4577_69030C.1
gtttccctctgctattctccacccgctctctctctttcgcgtggcatttcttcctgccagcgacgaattggcgcgcgccgccgccgccgcctgcccaggcccgtcgcccacccaccagacggacgtgtataagcgagaggaaattatctgccggccattttcactgacagctggtggagtccgagagtaatgagataagaaactggtttatgaaaactgatgtggttccaaacataccggtttatgcctcagtttataggaattagattttcagtttttttaaaaaccaagaaactagtctcacctagctaaaaaataaaaactggtttcttagaaactatgttgcttccaaacaggacctaaatagatgaagctgcatcaagtttggcagttaggcgttaaggatatgaaggccgttccacttccacgtccgagatcagctgcaaaaagacgtgcgtggatccctgccgttgcagcttctatttccatcgcgctagtttgggctta

SEQ ID NO: 150779 - DNA, 655 bp, Zea mays
  Clone ID: MRT4577_69031C.1
ccggccgggaagcgcgtctgtcttgtaccagctatcgtgtttcttctatcgagtaccgcgcctcttatcagctcttgtctctattgtaccagttctcgtctctcgtctatcagctcttgtctctattgtaccagttctcgtctctcgtctatcagctctcgtcaactgcctctacatatcttgcgataaatctccaaccaaccaaccacctactcaccgttcaaactattaaagatgggccttttcggactcgctactaccggctttgtcggcgccttacatagctacattatgttgctcgaggttgctctttggactactccccgcggaagaaagacctttaagctcacacccgaattcgccgagcagaccaagaccatggctgctaatcagggcttgtacaacggctttctatccgctggtttggtttggtctcttctccacccgaaccccgtgtttgcgaagcagctgcagatcttcttcaacggctgtgtcgtagttgcgggtgccttcggcagcatcacaactgccaacacgcgtattctctacgttcaggccgcccctgctgctcttgctcttggacttattctcttgggtatttagaaaaataatattattattacatttgcaaaaaaaaaaaaaaaaacccgcggcc

SEQ ID NO: 150780 - DNA, 358 bp, Zea mays
  Clone ID: MRT4577_69032C.1
ggtgtaccaaattggaggcttttcgtgtcaattagagatgcttcagtagcgttaaagcagtgcaaagaaacactgtaccatggcatcgataaatattatcttcaccaaaagatgcattacggcggacttgaaggttagagggacacattgtaacgtccgtagacgtcaactcgtggcggtgactggggcagtcaccaaatgcagccttctcaaggctgacggcaaaacgcttattgcaactattggatagttgggcccaggacatggtatgacgctgggtgcatactagttgatgatcgacagaacacgagatggctacacgcctcctcatagtgcgtatcagaaagatcggggtgac

SEQ ID NO: 150781 - DNA, 232 bp, Zea mays
  Clone ID: MRT4577_69033C.1
ttggatcctctagagtcgacccccgcgttcgcgccaggctcatcgtcgctcgtaaaatggaggtcgcgacggcgacggaggcgtctgcgccagcggcaagcgtcggcgcgtcgcgtcagagccacccgttctcgtgactagacgctgcatatcttcaccctactacttctagcctttttgaacttcttcttttactttatggcccagaactagttattatttgttctcaacc

SEQ ID NO: 150782 - DNA, 371 bp, Zea mays
  Clone ID: MRT4577_69034C.1
gcaagactgcccgcaccgctgctaacttgctagcatacttcctctacacgcacgcacctccaaagacaggcgatcatgatatggctgccgatggtcaacctgtaatcgataaacacaaaccacactccttggataatcctatatatttggctggggatcgtccagctctaatggacaaagataaaccaaattctttggcgcatcctctccaacacagttatgacgaattaccagctcaagtgcattcagctattgcacgaccatgtggcactaattatcatgctactaaaacacgatcgcttccacgttcatcacccaacaagtaatcctggaaaggtaaacctggatctaaaaataatgttgcatttttt

SEQ ID NO: 150783 - DNA, 868 bp, Zea mays
  Clone ID: MRT4577_69035C.1
aggaaatcccctgttaaatcggaaatggtttcaaacagggatttacagaatgttgccatacaaactgctcaactggggttccatatgtttactgtgaaacggtttgtttgtgagaaaacggtttgaaaaattttaaactaaaatgttagctttgtgctagtaaatttaaaattatgtcgcatgacctagtcacatctgatgaggggtgctcagcaatgaaattaggatatatgttcacatagtcttcattaaggtgtcatgttgtattcgcaatgcgtaaatggacaagcatgtgctggttaatcctggatatccttatcttgctggcgatatacctgtaatgtggggaaaaaaaactcattcagaataagcattatttctgctttcttgggctaccactcaccagcaaccaacattttcctaagtataagcttcatatttcaatttcaggaagacgtgaatgccatacaagatttccatcacaaattctccttgagcatccaagggaaactgtaaaccaccaactttaacagctccttctttcatggacatggtaaaggtgtttccactcccatttttgcatatgttgcctgttgcattaagagtgagacctgggaaggggctagctgaattctttaatttcccatcttctcttataatctggaagtccttgagaccggcagatgcaacagatgaccaactttcaccttcagtctgtgagcaccacaatagttgccattcacccaccagaatgcttagatcagcctttgttccattttggcttgaaataaaatcattgatgacctcttctactcctgttcttgcagatatagctgacaataagattgtcttgcccggccggcctcga

SEQ ID NO: 150784 - DNA, 143 bp, Zea mays
  Clone ID: MRT4577_69036C.1
agactatcgcgcgctcttccgctttctcgctcacttactcgttgcgctcggacgctcttactgctggagcaggtagctgccttctcacaggcttgcttacacatatccacagactttctacctaccgcccgtcatagcatgtg

SEQ ID NO: 150785 - DNA, 187 bp, Zea mays
  unsure (1)..(187): unsure at all n locations
  Clone ID: MRT4577_69037C.1
aattccaaaagacccatttaatttctttaacagatacccannctttctccaagtactctcttataaacaaacatagaatcacatttcacactttacttacaaacattctcacaaaacatacaatactcatatcttactcttaacacaataatcctctctttctctttacctctccccttcccatcac

SEQ ID NO: 150786 - DNA, 338 bp, Zea mays
  unsure (1)..(338): unsure at all n locations
  Clone ID: MRT4577_69038C.1
gtgcgggtggtggagaggaaggacggcgagggcgaggtcctgatcctggccggcgacgggctgngggacttggtgagcaacgacgtggacgtgcaaggtcatgcacacctgccttcggaacaaggcgccacgcggtggccgggagcaatcgagcccgacctccaacctgagccctacgcagaccagcgccagcggcggcagcaacagcattagcggggacgaggaggctggtgcgcccatcggcgacggcccggcgtgctagagcgaccgttagagcagctatgacagggtatgcgccgaggcggctatcctgctaaccaagctagcgctggctcggc

SEQ ID NO: 150787 - DNA, 478 bp, Zea mays
  Clone ID: MRT4577_69039C.1
attcggctcgagcgacgattgccggcgcgtttatcataaacagatggaggacaacttgctgtcggtgcttcaccacccgaagatcatcatgtgctacggctgcacgaccagccgctgcctggagctcatggtggagtaggaggacatgggcaccggtacgtgcgtcgaccacctgaaggtgcagcgcaccccattgcacatattgtcaaggcggctcggcctaattgttaccgtggagaccgtcacaatgctgacctacctgcacgcaatggagataactgacacgcacggcgaggtgaagagcaccagcattctactggtcgcagactaccacgtacaggccggctacttcgggctctgcctgttctggccccttgacgctacagcacgttataaccggtgagcagggcacgccaggagatgttgacccagaatccctcaagtgctaccagacaacggacaagaccgacgagtgcag

SEQ ID NO: 150788 - DNA, 836 bp, Zea mays
  unsure (1)..(836): unsure at all n locations
  Clone ID: MRT4577_6903C.1
ttgggaccctcgaggctcgccgggggccgggaggaggccggcagactggaggcctactacgtgcacacaatatccattccacattggtccatcggcagcgagcgaacaggcaaaaaggagaggccgagaagcgctttagcgataagagtggtgcacccgtagcggcacggcatggcggccacggcgtactccgtggcgctcctcggcggcgcacgcctgccggccgccctcctccctcggcgcagcagcgtgtgccaccaccagcttcgcctccaagacgcaccgaggctctccctgcaccgtgccagggccgcttccgaggacacgtcggcctccggcggcgacgagctcatcgaagacctcaaggcaaagtgggacgccgttgaggacaagcccaccgtcctcctgtacggcggcggcgccgtcgtggcgctatggttgacgtccgttgttgtcggcgccatcaacgccgtgccgctgctccccaagatcctggagctcgttggcctcggctacaccggctggttcgtgtaccgctacctcctcttcaaggaaagcaggaaagagctggtcgacgacattgagaccctcaagaaaaagattgctggaacggcggaataagcgctagctctcgtggaaagctttagaaccaacgacgagaggggccgtttcttccttgcagattaagatatcaaccgaggaacgtacgtaccaatgcagctactgtcngccatgtcaagtggttgtgtgatgcataccttaccttctgtatacataacgaaatttaagaggagaccattttgccttgacaaaaaaaaaaaaaaaaaaggccccta

SEQ ID NO: 150789 - DNA, 422 bp, Zea mays
  Clone ID: MRT4577_69040C.1
gggcccaaatccctacccttatccaaataattgggtcgaacatgcaaattctttggtcccacgggaatggggaaataaaacgaacatgccgggttaaaggccacaaattgggaacttggtgggaaaatgccggataaaacaaattggtaaaaaactttttcggcttaatacaaggtcaggggcccaacttataaaaacttaactgggggttaaagggcggtttaatgggttacttcgagccacttggggaaatttttaaacccgggggagtcactggcccaaaacatgggtttgtaccaacccttggcgggaggcttgaccttgggaggtttctcccagggaagcttgggccttttggaaaaaaactttttctttcggggcttgacttggggaagcttaacaagggggggcatttttcgggc

SEQ ID NO: 150790 - DNA, 1258 bp, Zea mays
  Clone ID: MRT4577_69041C.1
gcaatgtctacgagctcgacgtcgtcacagggaagggagaggtggtgacctgctcggagacggagaacccggacctattcttcggcgtgctgggcgggctgggccagttcggcatcatcacaagggcgcgcatcgccctggaacgtgctccccaaagggttcggtggatccgggcgctctactccaacttcaccgagttcacggcggaccaggagcgcctcatctccctgggcagccgccggttcgactacgtggagggcttcgtcgtcgccgccgagggcctcatcaacaactggaggtcctccttcttctcgccgcagaacccggtgaagctcagctcgctcaagcaccactccggcgtcctctactgcctcgaggtcaccaagaactacgacgacgccaccgccgggtcggtcgagcaggatgtggatgcgctgttgggcgagctgaacttcatcccaggcacggtgttcacgacggacctgccgtacgtggatttcctggaccgcgtgcacaaggcggagctgaagctgcgcgccaaggggatgtgggaggtgccgcacccgtggctgaacctcttcgtgccggcgtcccgcatcgccgacttcgaccgcggcgtcttccgtggcgtgctggggggcggcaccgccggcgccggcggtcccatcctcatctaccccatgaacaagcacaggtgggacccgaggagctcggtggtgaccccggacgaggacgtgttctacctgggggcgttcctgcggtcggcgctgccgggcgcgccggagagcctggaggcgctggcgcggcagaaccggcgggtcctcgacttctgcgcggaggccggcatcggcgccaagcagtacctgcccaaccacaaggcgccgggcgagtgggcggagcacttcggcgccgcgcggtgggagcggttcgccaggctcaaggcccagttcgacccgcgggccatcctggccgccgggcagggcatcttccggccgccgggctcgccgccgctcgtcgccgactcgtgatcggtactactgactgattattaggcgcgttttagtgtaggtagtagctacagcggtaaccgtacaggattatttagtttgtttgttattattattattattatttagctccggttgatgtacaaatgtgggtcacgtgattctgtacatgtacatgggagtcaaatatgaatgtcgccaagtgatgctcttctcttctaatggttaaaaacaggtgcctgactctctct

SEQ ID NO: 150791 - DNA, 1196 bp, Zea mays
  Clone ID: MRT4577_69042C.1
cattgggtacctcgaggccggccgggaaagattgacgggcgggaatgcatgggtggtggtggttgccttgcaggttcggtggatccgggcgctctactccaacttcagcgagttcacggcggaccaggagcgcctcatctccctcggcagcggcggcggcggcggacgccggttcgactacgtggagggcttcgtcgtcgccgcccagggcctcatcaacaactggaggtcctccttcttctcgccgcagaaccccgtgaagctcacctcgctcaagcaccattccggcgtcctctactgcctcgaggtcaccaagaactacgacgacgaaaccgcagggtcggtggaccaggacgtggatacgctgctgggcgagctgaacttcctccctggcacggtgttcactacggacctgccgtacgtggacttcctggaccgcgtgcacaaggcggagctgaagctgcgcgccaaggggatgtgggaggtgccgcacccgtggctcaacctcttcgtgccggcgtcccgcatcgccgacttcgaccgcggcgtcttccgtggcgtgctggggggccgcaccgccggcgccggcggccccgtcctcatctaccccatgaacaagcacaagtgggacccgaggagctcggcggtgaccccggacgaggaggtgttctacctggtggcgttcctgcggtcggcgctgccgggcgcgccggagagcctggaggcgctggcgcggcagaaccagcggatcctcgacttctgcgcgggcgcgggcatcggcgccaagcagtacctgccgggccacaaggcgcggcacgagtgggcggagcacttcggcgccgcgaggtgggaccggttcgcgaggctcaaggccgagttcgacccgcgggccatcctggcggcggggcagggcatcttcaggccgcccggctcgccggcgctcgcggccgactcgtaacgtaatccagctgcttatactaattattaggcgcgtttagtgtaaggtagaggtactagctacagcagtaaccatacaggattgtttagttagctccggttggttcatgtacaaatgtggggttgttaatcgcgtgctctgccatggctgctgtgatcggttctgtacaggggatgaggggagccaaatatgaacgtggcaaaatcgatacttcttataaagaaaaaatatctatggt

SEQ ID NO: 150792 - DNA, 389 bp, Zea mays
  unsure (1)..(389): unsure at all n locations
  Clone ID: MRT4577_69043C.1
cgttacacttttgtccacaacatatctttttgcagagatccagcacacaatttttttttttttttttttnaccacaccanaacatgggggggggggggggtttttttttttnnnncaaaanccaacnaggggggggggggggaataagcntagngcaacccaaacttcttcctgggcctcggtctcagcactggtgaagtagcggagctcatagacttttcggtccttgttggcagcaaccacgcgtggccaatatcgcacggngggcttctttaagtactgtttggcaagggctttaggtaccttttggagaagggtccgtccgtggtgacggtgacctttgctctctccccgcgagatggtgactggagtctcttgggtgccagcct

SEQ ID NO: 150793 - DNA, 820 bp, Zea mays
  Clone ID: MRT4577_69044C.1
gcaaggaatggcaatgcatcaattgtttcatcactcaactcctatcacctaatgcagcatataagtgataaaagttttaaaacaacaatgaggtggcaaatgcaccggggcttgcctgggataaaactatgttagtgttgttaattgacgaccacttggtgagcatcttccatcctggcacttggttgattcatccattttagcttcgtccatcagcatcacttggagatcaattccactcgtcttccatagcacatgatcaattaatgtaccaaaccaacgacggatctggttcacacaatacatcaaacatctggtgcacgtcgtggacataggtctgcccagcgtgctgctactcgcatagagacagagaggggcgagcagaggtggcgccgagttgcagagatgagggagagagaggagcagcagccatggggtggcgatctgtgagctacggcgagggagcaagggttgggctgagcgcggccaaggaaaaagagcagggactgcgcggtacagaggctgggcaccacataggaaggaaaatggggttgctgacttactgcaggagggggagggcatccatggttggggcaggaacaaacgccatgggaggggcaacctgaggatgaggactggcgtccatgggagagctcgaccaccagggtgaggagcggcgtcccgcagggggggcgagcaccagggagggcgccgtgagggagatagggctgggcgagtggaggggtctcagctgggcgctgctgccgctggagaccgagcagagcggcgactagcggcatcccggcaggcccgagggtcc

SEQ ID NO: 150794 - DNA, 336 bp, Zea mays
  Clone ID: MRT4577_69045C.1
catgagacatgggtgaaattaacacttatgcctgctgaaattcacttgccaggcacagggtatgtggacgtggataagggaattcacatgacccaaaaagaaacgagccttagaaaacttaaaataagcggtggaacgacataacgaactgcaggtaccgcaccgtcatggcaccaacaacactagtgagggtgctgcgttcaggaaaaaatcaagggcagatgcgcgccttgtaccagaataaaccagggacggatggatgtgaaccaagccaaccaggggaaaagacaggaacgtaggggggagacacaagccaacaatcgaactacttaaggc

SEQ ID NO: 150795 - DNA, 289 bp, Zea mays
  Clone ID: MRT4577_69046C.1
acatacactcttgtgaagcatgctgagttatcggcatactccggtgggggggggacgcccctttagtgatttcggccgatgattcatctgtggagagctatataagaactataggagcggctccagaaccgccgacggcaggggaagatgctgagacagtctaaataccgacgtgagatactgcagggcactaacggtcgaggaccatgacaggatgctactacagtgcggctcaaggaatcattagacgagtatgatgtaacatgaccagcagaactgtaacactaaa

SEQ ID NO: 150796 - DNA, 351 bp, Zea mays
  unsure (1)..(351): unsure at all n locations
  Clone ID: MRT4577_69047C.1
acaacacaagtgtgccatcccttttttgcatgcatgtaacgagnccattattaaacgtttggacggatacaaccaatagccgggccaaaaccgggttttcgcgaactttattatgtacacttcaatttttcaattttccatacaaatttacaaaacattttctactacgacttcgacccttcacagtaaacctttgtacaaaacttgtaataaccgaggcactctaaagccccccaaatttttgccattaaaacggcgcactggtccgttcatcctgttgcacgccttgatgcagtacatgcagcaaaggcagtttgtgactcggtttgaacagacccattttttttggag

SEQ ID NO: 150797 - DNA, 128 bp, Zea mays
  Clone ID: MRT4577_69048C.1
ttatgactacccagggacattcggagctgtgttcgcctcaatatcctgcaccaactttgcagctatgtattgtatcgactctgcttatgccggtgagtgaagaccttgaacctacttgtgattgttct

SEQ ID NO: 150798 - DNA, 975 bp, Zea mays
  Clone ID: MRT4577_69049C.1
cattgggtacctcgaggcccgaaacggcagccgtgacggatccagccgaaccccctcgcagtcgcagccccctcacgccacgcgacatgggcaagatcaggatgcccgtgccgtccctgttccgccgccgctcctccaagccgccgccgccgcagccgcagcagcaggcgcctgccgcgggcgacggcgacggcagcgggtccccggagcgggcgacggcggaggaggagatggcgcgcgtgttccgcaagttcgacgcgaacggcgacgggcggatctcgcggtcggagctggcggcgctgttcgagagcctgggccacggcgcgtcggacgacgaggtggcgcgcatgatggccgaggcggacgcggacggcgacggcttcatcagcctgcccgagttcgcggccctcaacgccacggtggccggcgacgcggccgccgtcgaggaggacctgcgccacgccttccgcgtcttcgacgccgacggcagcggcgccatctccgccgccgagctcgcgcgcgtcctcaggggcctcggcgagtccgcctccgtcgcgcagtgccgccgcatgatcgagggcgtcgaccagaacggcgacggactcatctcctgagttcaagagagggaggaaatgatagatcttcatgtatctcatgaactctagtgatgtgatagtatttacccttgatgagctgaaggctgccgggattccatagaatcttgtcccaaccattgtcatttctgtggatcacctcctcatgaacaaatttctcgagggactgcatgccaatgtccagaggtttaagacgtacaatgccaagctggttatcttcccaaggcgtgctcgcaaggtcaatgtcggggactctactccgtaggagtttgtcacggccacccatgtccagggtgactacatgcctattactcttgttgagaattgctcagtcgatgttgtgatgattactgatgagatg

SEQ ID NO: 150799 - DNA, 892 bp, Zea mays
  Clone ID: MRT4577_6904C.1
cattgggtacctcgatcttgggcgctactacgtgtgcgggcacacaatatccattccaccttggtccatcagcagcgagcgaacaggcaaaaaggaaaggccgagaagcgctttatccggccgtacgtagcgataagagtggtgcacccgtagcggcacggcatggcggccacggcgtactccgtggcgctcctcggcggcgcacgcctgccggccgccttcctccctcgacgcagcagcgtgtgccaccaccagcttcgcctccaagacgcaccgaggctgatctccctgcaccgtgccagggccgcttccgaggacacgtcggcctccggcggcgacgagctcatcgaagacctcaaggcaaagtgggacgccgttgaggacaagcccaccgtcctcctgtacggcggcggcgccgtcgtcgcgctatggttgacgtccgttgtcgtcggcgccatcaacgccgtgccgctgctccccaagatcctggagctcgttggcctcggctacaccggctggttcgtctaccgctacctcctcttcaagcaaagcaggaaagagctggtcgacgacattgagaccctcaagaaaaagattgctggaacggcggaataagcgctagctctcgtggaaagctttagaaaaccaacgacgagaggggccgtttcttctttgcaaattaagatatcaaaccgaggaacgtaccaatgcagctactgtcgcccatgtcatgtgttgtgtgatgcatacccttaccttctgtatacataacgaaattaaagagaggacagcattttgccttgccaaaaaaaaaaaaaaaagaaaaaaaaaaaaaaaaaaaaaaaaaaaaaaaaaaaaaaaaaaaaagaaaaaaaaaaaaaaaaaagcggcc

SEQ ID NO: 150800 - DNA, 282 bp, Zea mays
  Clone ID: MRT4577_69050C.1
cggacgcgtgggttttttaaaaatttttgcattactggaagaatcagcgcgatgataagaagtgcagctttgaataaatgacatgtggatcattttgggatgtatgtaacatactaggactatgttgatgtaactagttgaggctataagcctataacaattctgtacctgggtatgttgtatgaatctatgattaaaaacgatgattgtttatttgtcgtgctgttgtgcggtgaaagggaaatggtcaatgggagaagggacaagccttgaactaaccat

SEQ ID NO: 150801 - DNA, 392 bp, Zea mays
  unsure (1)..(392): unsure at all n locations
  Clone ID: MRT4577_69051C.1
ccagttagtatttcaagagggcaatcaccaaanaccaggccgctctttttgaaaaactccgcggggttaaaaacccnnncaccncatggcaccgcggagtgccggagagcctccgcccacagggcggccccaaggatggcgccatgcatctcggctgccgacgacccccattccacgcccaccagcagctgctgctcctccgcgcacaccatcgcgcaccgccccagctgcctgagcgcccgcctactaggcacccccaccagggctcccggaaacaagcccgaagtcgccataaccatccccaagcgctgcaacatggccaaccgccccgacgatacaaatgccgagactacaccctaccctacctgaacaagacgccaataacgagaccc

SEQ ID NO: 150802 - DNA, 492 bp, Zea mays
  Clone ID: MRT4577_69052C.1
cgagggacagtaacatttttttatttagcactaacaacatatgtagagccgtaaaagcatgcatatctaaaataagtttattatgaaaatatattcaatgattcatctaatgatactaattatgcactataaatattattttttcttataaattgggtcaaaattcagtcattgttcaaagatgttgttttggcagtctttcctattgaagttttgtcttaagtaattatatgtcactagggctactaaatacaaactctggcaggttgcttcattaacactcttgaagaggaaaattatcaattatctatagtacaaggggcattccatcttgaagcgtcaatttatgtaaacaattgggacaataatataaatgacatggatacatgatcagcatatacaacaacagactcactgggagtacatacaaatgacaaaaaaaacatcacaaggattaatcccaatcatagacatgtccatctacgtaacatg

SEQ ID NO: 150803 - DNA, 306 bp, Zea mays
  unsure (1)..(306): unsure at all n locations
  Clone ID: MRT4577_69053C.1
gagcggacgcgtgggtcatgatacaaattcttagtggaattatgaccttggtaaaactgtgcgtgtttcaatacacagagtgctgagcctgtcttattatacaaaggggaccggaaggagctaaagctcaagatcaccggacgggtctggaaagagcagcagacaccagacggggcatgtacttcaaatctgggcagctaattaagcaatcttcaaacaaacaaaaacacacaccttgcctgtactttctttctaattaaacgnggtgggggtgctcaaagggatttatttatttattactaatta

SEQ ID NO: 150804 - DNA, 244 bp, Zea mays
  Clone ID: MRT4577_69054C.1
tctcttggcctcgccttggtgatgcgccgtcagtactgcctgcagccgtggcgcaagcttgtgccaaccctggtctgcaccttccccactcgtgggcgaggagtatggctggggccctcaggctactgcatctgcacaggccttttctggctttcttgccagaggtgcacagcgcgaataggaggagaccgcccactagaagaactacccacactggtatttccctcttcattatcccggtatg

SEQ ID NO: 150805 - DNA, 284 bp, Zea mays
  Clone ID: MRT4577_69055C.1
aaagggggaatatcctataatttgggatacatcctaaaatttgggatgggggacgaatttaaaatggggcatgattttggaacttcaatccttgggcaaaggggaggaggcccaaagaacattcaacagtttagtaggggagaataaacgttgaaccggaaaattattacatattccaaaaaaaaaatattattgggccgggggaaaaaaactaaaaggggggagaggggattctggcctaagggtccatgaaaaatccggagctcctaggaaggtcggatttg

SEQ ID NO: 150806 - DNA, 309 bp, Zea mays
  Clone ID: MRT4577_69056C.1
attcggctcgagggaactcacgtggctatggttgttggcatcagacaacctttgttagtgcaggggggaaagtctggggcgtccgaattgtagttagcctcccttgccaatctatgacacggggtcgggccctgctgctgtgcaaagttcgcgtctagtatgtagtatgggagctaggcacactgatggtgttacacaatacccattggacagtcacatggcatctcccaggcagccaagggacccacctctaggaaagagtcttaaccatggcttgatatccgcgttccttgacagacagctcattgc

SEQ ID NO: 150807 - DNA, 282 bp, Zea mays
  Clone ID: MRT4577_69057C.1
ccccccccagtattttattatttttgggggcaacttgattgggactatcgacaaaagcaaccccaacccacaatgtcctatatacaacacactaacaatgggctaagcaccaccccaagttgccccccccctcaccgatcaaaacggcctctctaggcaacaaaaaccaaagaatccgtaaacctaagacataatgccaagcacaaacgcagacaacggcctcccctctctgaaaaaggcccaacaacgaccacaggcctaacctggaccccttttttgcct

SEQ ID NO: 150808 - DNA, 211 bp, Zea mays
  Clone ID: MRT4577_69058C.1
acctactcttttaattaattcggggggcgacccacacgttcgttaatccctcctactcagaaactaatatattcctctcctcatcctcctctctggggagatctttaaaggaggataagccggcctcactacacccccttgggccggctatccaacacaccttccaacgtgcacacatgctgaaccttatcttacctactccttctccccc

SEQ ID NO: 150809 - DNA, 281 bp, Zea mays
  Clone ID: MRT4577_69059C.1
tgggtcctggatgttgatgtcctgcatctaacgcggtgtaacccccgaagccgagcgagctccggaggaatttcagtatctgctacggtaacttcatcagcccgccaagatggcgatgcaagctgccaagagggcgaacatgctacttccacctgaagtaaatcggatattgtatataagagattttccatacaaaatcacagctgaagacatgtatgatatatttgggagatatggacctattcgtcaaatcagagtggggaacacacctgatactagag

SEQ ID NO: 150810 - DNA, 461 bp, Zea mays
  Clone ID: MRT4577_6905C.1
ccggcccatcatcccatgcgcacctgcctcggcactacctacctatcaacctcatttcggtgaggatacagacggagctcacgaacgtgaagctgaaccaccacctcactccacttgaccgcgccgctgtaggtggagattctgtccacgatgaacatagctggacctctgctacaagcgcctgtgcggtcccttccccacaagcccacataggcatcacacccgcctgcaatgccaacgatgacaactcactgtgaatgacagcactccgctactgactgatggcaggacatgccaatgagagatgcgatggacacggttatctatactctagtctctgactgctgcctgcgttctgcgtgtctatttcgtgtcgacatcattcaaaatgacggtgctgtgtctcatgtagctagtaacatccaaatgtacagccctatgtggataattgctaatatgct

SEQ ID NO: 150811 - DNA, 511 bp, Zea mays
  unsure (1)..(511): unsure at all n locations
  Clone ID: MRT4577_69060C.1
taaatgtaatcctcgttttaagtctagtacaagtgacaagttcctctgtcttttaataaatcaacttctagaatggtcccaaatcaagtttccttaagtttgggcgatgttatatgaagtattagtatctatcacagcaaaaaaagtataatatgaaaatatatttcatgttttatctaactgagtttgtgtcaaattttaaatatttttttcttataaatttcagcgaaacctgaaaaaaggttaactgaaaacaactatagaagttgatttatttagggacaggaattttaaccagttctccacgaactcactcaagcggaattgaggtacccctgataatttgatgttggcagttccatattcaatgccttataatgacgtctgaagctccattgtatatgcaattacaaaggcttcctttgtattnttttttgtacacgaaattttttcaaacactgtaaagtgtattactgaatcaagcagtcaggcatcacaggcttggntcatg

SEQ ID NO: 150812 - DNA, 159 bp, Zea mays
  Clone ID: MRT4577_69061C.1
gcttggctctctgaatttgaaaattagatccataccaatagcctggatgtaataaacacatagacctaggaggctaggatcatctgcaacgccttctgttctggcaccaaaaaccaaaatatgatattttttccaaaaaaatatcatgcgagctgatgt

SEQ ID NO: 150813 - DNA, 804 bp, Zea mays
  Clone ID: MRT4577_69062C.1
cattgggtacctcgaggccggccgggcagacggatttatcgttcttctcgggacaaggcacctcacgagcccttctcatccacatcagatctagcgccgcctccttcatcccgctggccggcgagctcctcagcgcggaaagaaatggaagctcaaggcttcactaatgggcatgctacctggacatcagcaatgtcctctttcatgttgtcctacctgtccaatgtggtgtcaattggcgaaaggacatcgtctggttttaagaaagttcactacaatagttgtgcaaaagctatcaatgaaaagttccaaatcaccctcaatggcgagcagattaaaaatcatctgaaaacttggtccagaaggtttgccaagataaataggataagaaaagtgagtggtacaggctgggatgaagatagttttactattactatggatgaagagcactataatggctatgttaagttatgtgcacataacagtaagatttcagatttcagacttatgtacacctttaggcgaagatgatgaagttgataatgaagaggtgatggcacatgctttcactaaaaggatgtccacttgtgatgataatgccataacatcttgtacaagcaagaccaggaagaaggcaaaaaaaacgtgatagtgaagatgaggggttgattgctgcattcaaaagtgtcggggataccttatccagtgctattgagaaggtcgccacaggggacactgatgtgccagatgatctttttgacagtttgataacccttcccagtgtgtgtgctctgttcttaactt

SEQ ID NO: 150814 - DNA, 841 bp, Zea mays
  unsure (1)..(841): unsure at all n locations
  Clone ID: MRT4577_69063C.1
acctcgaggcggcggggagcccttctctccactcagatctagcgccgcctccttcatcccgctggccggcgagctcctcagcgcggaaagaaatggaagctcaaggcttcactaatgggcatgctacctggacatcagcaatgtcctctttcatgttgtcctacctgtccaatgtggtgtcaattggcgaaaggacatcgtctggttttaagaaagttcactacaatagttgtgcaaaagctatcaatgaaaagttccaaatcaccctcaatggcgagcagattaaaaatcatctgaaaacttggtccagaaggtttgccaagataaataggataagaaaagtgagtggtacaggctgggatgaagatagttttactattactatggatgaagagcactataatggctatgttaagtgcagctttaggcgaagatgatgaagttgataatgaagaggtgatggcacatgctttcactaaaaggatgtccacttgtgatgataatgccataacatcttgtacaagcaagaccaggaagaaggcaaaaaaacgtgatagtgaagatgaggngttgattgctgcattcaaaagtgtcggggataccttatccagtgctattgagaaggttgccacaggggacactgatgtgccagatgatctttttgacagtttgataaaccttcccagtgtgtgtgctctgttcttaacttcagatgttgnaaccctattttctattatctgttcgnccaataaaaactattgtaacctaaaacctgaaaactattgtaacatattttttgacaatttgctaaactttgtaaaaaaaaaaaaaaaaagcggcc

SEQ ID NO: 150815 - DNA, 596 bp, Zea mays
  Clone ID: MRT4577_69064C.1
ttttgccggggtggtgtcaagtggcgaaaggacatcgtctggttttaagaaagttactacaatagttgtgcaaaagctatcaatgaaaagttccaaattgccctcaatggcgagcagattaaaaatcatctgaaaacttggtccagaaggtttgccaagataaataggataagaaaagtgagtggtacaggctgggatgaagatagttttactattaatatggatgaagagcactatattgtttatgttaaggtaagtttgcaaaggattctagtgcaactttaggcgaagatgatgaagttgataatgaagaggtgatggcacatgctttcactaaaaggatgtccacttgtgatgataatgctacaacttcttgtacaagcaagaccaggaagaaggcaaaaaacgtgatagtgaagatgaggggttgattgctgcattcaaaagtgtcggggataccttatccaatgctattgagaaggttgccacaggggacactgatgtgccagatgatctttttgacagtttgataaaccttccaggtgtgtgtgctctgttcttaacttcagatgttgtaacctattttctattgatct

SEQ ID NO: 150816 - DNA, 582 bp, Zea mays
  Clone ID: MRT4577_69065C.1
cattgggtacctcgaggccggccggggcgtttgttcgcgaccttgctactgcatgccggcgacaattgtatccacgaccgagacgacgacacaagtgtcagctccatccttctttactcctcatcccatatccccctctccgaaccccgccgcctgccgcagatgcgagggtcatcgagcaggcatgatctcatgcagaaagatcaagcacggcaatttctactggacaatacgtagatgtatgtccgagggatcactatcggaggctggattatccattgcagcaacgttaccaacggctacttcgcctggaacggagctgctcagaaacttaccaggcaaaactaccacatctgggatcagtgataggagttcagatggcgcagctttaaagacatatttcagtatgagctgtcctgcattttcgtgagcattcggatcatccggtgctactgacgtgctgtcaacaaacagattgaacataacgacaactggtcgaaagtattcaagtgctccgaatgtagaagcaactggatcagaattccaccctgcgtctatccccattatcaataagcatggaga

SEQ ID NO: 150817 - DNA, 561 bp, Zea mays
  Clone ID: MRT4577_69066C.1
ccggccgggctccaccctcgcccgcacgcctggcctgggctggccgcttcgcttccctgcgtctcccctccaccgcgtcgcgtgggccctctgcgctacgagggcttcaaatggccctctgcgccgtcccttccgtctagcgccctgccataatgcacacccagccatcttctgatcctcctgacacctccaacatgaaggtcaagctggagatccctaggcagcaggccatgccgtcgtcgcggtccctgccgcggagcagccgcggcgccgggaggtggctcggagcaacgacgtgatcgaggcggcacgcaccaagctgatgcagaagcgccagtgcagcagggtcaaggcgctcgtcggcgccttcgagactgtcatagacacccagaaggacgccgccgtcggcaggccacatcacatctaccgcaagtcagcttaaaacatactgcggcggcggtgacgcatcgatcctccacgcttcgtgtcttcgccttaattaattaattaattggtatgatcatgtcggccagcccaacgccgtatgcatgcatgcacacg

SEQ ID NO: 150818 - DNA, 232 bp, Zea mays
  unsure (1)..(232): unsure at all n locations
  Clone ID: MRT4577_69067C.1
attattggcaaacacctgagagactccgtgattctcatatgggnccctgcnagcgacggccttattaaaacctgtgttgctaccaaaccggacggcagggggcatattgtagcctatcctgctttcattttttacaaattccttaacccattatcatctactgtagtgaggtagtattatattttccttgtctccttttcttcatcttctatgattggtcatctctcatctt

SEQ ID NO: 150819 - DNA, 244 bp, Zea mays
  Clone ID: MRT4577_69068C.1
gctcgggcctcagtctaatttattatcgtcctaaacacctcactacctagcaaatcttactaacgtgcataattattatattacatatgtcagtaatgtcaatgccctggttggtgttataacccacgggaagttgaatcaccctgtgaacagagactgtccgtgggttggcgcccatcttgttggccgacacactgggcatgatctgtgccgtgctcccccggtccttggcttgggtgggggg

SEQ ID NO: 150820 - DNA, 1364 bp, Zea mays
  Clone ID: MRT4577_69069C.1
gccgcgtactacgcgtcgctgttgtcgtttcaggcgcctcatgcagcgctggcccgcgccttccgccgcagcaggtcacgcggcggtgtcgtcaggacggtcaaggacctcgccgaggaacgggcggcggtgctcgccgccagcagcaaggtctccgacgcggcgtcggcggtgccgccgctgcctcctggtgtcgagaccgccagcagcaacggtgcccgcggcggcagcgtggaggtggaggataagcagcggcagcgccacgacgactgccaccccgaggtcgttcccgagaagatcatacgggaggacgcgccgccagttgttgcggagaccgctgccgcccccaccaccacggaggtggaggtggagtcccccaagaaaggagcggcgccggtgccagagcccatcgtcgttgtcgccgcagtggaggacgtggtggcggacaagttcgtggcggtggtgaaggaggcgatcaagaagccggagatggacgagaaggaggtggcgatgcggagattcctgggcagccgggtgaagacagcgatggagccgcggtcagagtcggagcagccgcggcgccgggaggtggctcggagcaacgacgtgatcgaggcggcacgcaccaagctgatgcagaagcgccagtgcagcagggtcaaggcgctcgtcggcgccttcgagactgtcatagacacccagaaggacgccgccgccggcaggccacaacacatctaccgcaagtcagcttaaaacatactgcggcggcggggacgcatcgatcctccacgcttcgtgtcttcgccttaattaattaattaattgttatgatcatgtcggccagcccaacgccgtatgcatgcatgcacacggcgctaattaatccctgtttatttactactccgtgaaatgtagtttctccgtatacacggagcagtagtattctgtaaagaggaaaatggtggaaaccgatgttgcattctgcataaatttattaatagggctagtttcacaaccttattttttctaagaggttttattttttcaagggaatttaattcattttctcttgaaaaaataggattcacttgagaaaatgaagttgtcaaactagcctttataattatataattcatcggggttttcatcttgtttagaaaaaaaaaaaaaaggggcaacacgaacccacgcgtccgcccacaccacggcgaacccgttactgcttcaagagtaagacgcaacttgccgcgctattgcttcagggtggctttttgagaaaaaatgagagaatttagtttagtttggatttgagtgtggtttaatttcgaatttcacataataattttcagcatgttcgtttggct

SEQ ID NO: 150821 - DNA, 359 bp, Zea mays
  Clone ID: MRT4577_6906C.1
ccgggcgcgggccccggcccggaatttcggggtagccacacgcgcttccacgcgttcggggctgacggagaagggggcttggttgatatgcggtcgatgaatggataggaaccgagcagattcacgtatgcccgagctgatgccgagacagacatggccatcgaggaagctgcaggggcccctggttggcgaatggacagaggaacatcacgaatagggaggcaggcaatatgccatggctatggcgcaagcagggcaaggatgtaaatagttcactgggggagcagactctcagacctaacaaaatggaggccaactgaaaccacaagggtgaacaaaagctcagactgcgtgcatga

SEQ ID NO: 150822 - DNA, 283 bp, Zea mays
  Clone ID: MRT4577_69070C.1
agccctttgctatcgtagaccagctcattgcttctgtgcaaagggtccctaccatggggattggccactcacggggctggggggtaattaatttgtagggtagggccaaggccaagcacgctgcgttgaaggaaaggggcattgagatgccccttaatgatatgcttacaagcaacgatgacgatttcaggtaagcctgtggtcaacgcgacgctgtcagacacttgggcacggcattgagctggcatatatatgcaccgtaagccctgtctctgtattgctt

SEQ ID NO: 150823 - DNA, 644 bp, Zea mays
  Clone ID: MRT4577_69071C.1
aacttgcgtagagagttgggcgcatagaatccccaagcaaacaaacagggtagagggagaggagaggatgaggagatggagaggttgcgtctgggacaccatggctccgatgatcctgtacgtggcggtgatgccgtgacaacgagatccacgcgcgcgacgtggctgcgaggaggctgtgtccgtctaccacatcgtgcacatcaacttcgccgccgacgagtccaagagccccgtgcacctcgtccgcaacccggttgggcaggctccggctctggacgacggcgacttggacctcttcctgtcactggcgatctgcgagtacgctggtctgagaatcgagccacagctgtcgagggcaggaaacctccacgacgcagcgatgatggacgtcctcctcgaggaggccggttcgctggacaccgctgcactgaaccccattctcttccaggtcctcatcagtccgatgcttggtggatcctccgaccagcaagtggtgcatcgcgagccttgacatactcgacaaagcgttagatgtgaacgagggacgcctgtacttctggactcaccgtggtggagacttcctcagcctcggcgatctgaggcatgtgactggcgctctctgcctgatctgtgcgccctat

SEQ ID NO: 150824 - DNA, 291 bp, Zea mays
  unsure (1)..(291): unsure at all n locations
  Clone ID: MRT4577_69072C.1
ttctanagttagaataagctcagttccaatcaaataggggtaatacatggaatagatgaactaccaatagttctactctttggataagttctaaataccctcaggaatcctttcaacacatatagaaaggttggaaagctcaaaatcaacatatcactattgtggagcaagtattgagcaaaagaagatatatgagtaaaagaatcaaaatgcaaagaggattggactaaaaagatgagaatacaacacctcaaaatgaagacataaaaagaagcaaaagtacaagactcc

SEQ ID NO: 150825 - DNA, 320 bp, Zea mays
  Clone ID: MRT4577_69073C.1
aggacaatctgtcttcgcgacgctgagccacaagaatctcgagagaactgacgctcgaaatgctgcaggaaataccataggtgcaagtcggaagggttttgcaagtggaacggaagcaatggcttctactgcagtaattggggcatctgtcatgcaggctgcaaactccactgtatacgtactgagtcataaggtactcatcgggcttattgtccgtgctatgctcgtgtactggatcacatcacagctcatgaacagtgtgcagcagtgaagctctaaagatcgtggtagaagttcatcagcagttcaacatgagccct

SEQ ID NO: 150826 - DNA, 652 bp, Zea mays
  Clone ID: MRT4577_69074C.1
ttctgcttcaatgctgtgctgccctatcttctccagagttatttgtgcggacaattcaagagcgatttggtttgtccagttatacagatttgggacttgcagagcaaaatgagtttgagtcagttttaatgcaagaaatgctgatttttcttatacaactggttaaagaacgccgtttttgtgggctttccacagcagacaacttgaggagagaattgatttacaagttagctattggagacgccactcatagccaaattgttaagtctcttcctcgcgatctttcgtcaagtgaccaacttcaaaatgttctagattcgttggcagcttattctaatccatctggcatgaagcagggtaagtatgtacttcgcaaatcatgctggaaggaattggacttgtatcacccccgctggaattccagggaattgcaaattgctgaggaaagatattaccgtttctgcgaaatttctgcccttaatgctcagctacctcggtggactcatgtttttaaccccctcagaagtatttctaacattgcaacctcgaaggctgtccttcagattgttcgtgccgttcttttttatgctgtttacagtgatgcatcatcggcatcacgtgcccctgataatgttcttgtgacgggtttgca

SEQ ID NO: 150827 - DNA, 274 bp, Zea mays
  Clone ID: MRT4577_69075C.1
gtattcgtaaggcgggcatcgtgttcaacatgcggctctgctagggctgcaatggtgcaccctgaacctttgctggtgaaacatgtcgcgcgtggaaatgaagatcgctggaaaacgttctaccgtggtaattacctgatatcttgcagtgctatatgagaggcctacacagacacccagatgacttctaacctgggatggtacatctagacacgcttgaccattcttcgaccctcaacagatttgcacgtcgttacgaataacacagactttg

SEQ ID NO: 150828 - DNA, 432 bp, Zea mays
  unsure (1)..(432): unsure at all n locations
  Clone ID: MRT4577_69076C.1
ctttcctttttttttcttctttttctttctttttttttttcggggcnngggttttttttttttttggaacccaataaaatctggaaaagggaaaccgaaaaaaaatgcatgcaaatgcaagggcatccaacaaacaaggcaatccagggcccggaggcttcccttggcgggtcccttggcgttgctgcacacaaccatgggcttgttgttcttgccggcgtactcgaccttgacatcaaaaaaccaaacccccctgcaccggtgctttttggaacaaaacaagctgaccgcttcgggcctggaccacctgcccgaaaagttgcggaaggggaccttcttgaaggaaacatgccaggagtttctttccttgcccggccaaaccttttgggggcaaaaaaaccggtccaaaataatgggggtggcccccccccc

SEQ ID NO: 150829 - DNA, 392 bp, Zea mays
  Clone ID: MRT4577_69077C.1
attaacatagggtttttgttttttttattttttttttttttttttttttttattatatcttgttttttattttttttttatattttaatttttttttttttttttattttttttttttttttttccacccaggaaaaaaaaaaattttggaaaggaagataaatgtccgaaaaaaaaaaaccttttaaaacacccccctaaaaagggggtttggggacaataaaaccttaaactaaaaaaactatattttaaactgggccataatggtgcgctccatgatctcacgaagagcatcttttttagcagaataacggaacttaagattgttaggttttttcttctggatcactttcaaggaagcacccacaatggacctcgagtatggcttcttg

SEQ ID NO: 150830 - DNA, 343 bp, Zea mays
  Clone ID: MRT4577_69078C.1
attctgggcacccagctcaactttggggctccctccgctacgccacccgaagggccaccgggggggctcaagaaggattgtcttccttttcaagcaagaaggctggccaaaaggcccaaggcccgctgggggtatcgtcggtctttcttcagacatcagcgacgagctcgccaggtggttgggtcctgacaggagggatctactgcgatggctgtggaccggtcggagggccgagtacctaccgagagtcctgagactatgctacaccctttggcctgggcaggaagccagaggactttgccaagtaccaggcctacgagctgatccatgccagatgggccat

SEQ ID NO: 150831 - DNA, 479 bp, Zea mays
  Clone ID: MRT4577_69079C.1
aatgcgggggcggcacatactagagtcattctcatgctgccgaacatccgggggcacagcaccgagaacgcggaggcgtatcctgaccgacgaatgcgacgcgcgccactgcgctggccttgatgaccctcaagcacacatgagcaagcgcgaggtatacacttacgagcatcccgactggctgcatgctcatgactgtggttgatcttgaccagggcctggcgcggagcgcctacgagcactactacagtttcatctctatcatattcgaggcccgccggtctgagaacattgacgacttgcacgacaacgaggacattgccgagctttaggtctacaaccccaacgggtgtcatgatgctctggaacgaaatcccatgccctgcgcgatggcatcctgaggatctggacggaggacaacatggtgaatggactgaccataacattgccattcctgactcccggggaccatgacaaca

SEQ ID NO: 150832 - DNA, 329 bp, Zea mays
  Clone ID: MRT4577_6907C.1
ataaagatgttttttaaaaaaaatctacacaaaaaccctctttccctttataaaaattattaccaaatggaggcattcaccaaataaaccttaaaactcatcccaaaccgacaaaatcaataattcattgtactttcacactctctcccctcttggcatttgcgaaaagaacaatacctaccattgatcatttcacctagtttttacaacaacaggaaccttataaccaaacatccataatcaatttgcctacattgcttaaattcccgatatcaacgatcctgaaacagatgatcatgttcttaaccaaccttccctttctacaaaca

SEQ ID NO: 150833 - DNA, 269 bp, Zea mays
  unsure (1)..(269): unsure at all n locations
  Clone ID: MRT4577_69080C.1
catgaatgttcatcagctccagtgcttctgtgtagtagattaggagtttagagaagaggaggaggacccgcgcntggactacagcacgcgtctacctattgcgatacggcacgttgtggttgcgtgcgtggactcttcttccctcgtcgtccatccgtgaaaaatacctatgatgaactatccctcgcttttttggcttctgcctagccttttctgccttttttcgctttcctaaagccacccccccccccctttttcttttttttttt

SEQ ID NO: 150834 - DNA, 295 bp, Zea mays
  Clone ID: MRT4577_69081C.1
gagctcactagtcggtggccgcccttttttttttttttttgtgtgtggagtattaatttcaggctgttaggaacaaggtgaattttgtctaacagaactagacactatttgatcgggctactgggaggttacatgagaacagtcgactggctgaaacagaagcgcaatggagtcgggaggttcctggttcagctcggtaccaacggaactaaactttccactttaagggtggactacgggccaaggaggtggtgttgcgtctaagtcttgggatcattgttggacagttggggaa

SEQ ID NO: 150835 - DNA, 2251 bp, Zea mays
  Clone ID: MRT4577_69082C.1
cccacgcgtccgcagaaatttgagctttgtcattgcaggtgcctatgagctagtctgaagcaaaggttcataaaacaagatgacagtttgtaactaaattgggtcacatgttatgtattccttaatattttgtaatgtttatgtaaaaaagataatggtttgtcactagcatctgtttccatggaccaaatgttctagattctaaaaggtcaaccaaaaaatattttaagattttttgataaatttagttataccaatttgatggaccattctacctttcacagcattcctctctctttcctcaacctcatccgagtggctctccgtgtgctgtggcggcggcggcgcccggctctgctcggacggactccaccgaaggctcggctcccctcggactccacctgcgacggccggccctctgcctgcaccgacggtgcccggctccctcggcatccaccagcggtgcccgactccaagaaatgtacaagtcacggctgcaggagctgtgccagaagcggcgatgggcgccgccgttgtacgagcctacccgagagggtcctgcccacgcgcccctcttccgcgccactgtcgtcgtgaatggcgagaggttcagttcccgggatgaaggggagaagtcactcaaggaggcgtacaacctcgcggcgatggccgccttcgacaacctcatcgcgctcccggccgcggcccttgcccctgccccggctgctccagcgccgccctcatccgagacccagcttccttacaagagtcagttacaaatttatgctcagaagcgaggcaaactcctgccttcatatcgtcccattcatggaggttctcttcatgcacctctatttaagtcagaagtaaccatagatggtcaaacatttgagagcccagagtactgtcacacaatgaaggaagctgaaacagttgctgcaaaagttgctctgatgtccttacctcaagaagcaaacccaacacagcaattactgcttccatctgtaaactataagaatcttctacaagaactagttcagaaggaaggctttcccttgcctatctataatacagcctcggatgtctcgaactattctgctgccttcgtatcaactgtggaaatccatggtgtaacttttcatggaaagccagggaacaccaaaaagcaagcagagatgaatgctgcaaagtctgcttttgaacatttcaaaaacataaatcatgatgctggatcatctggctctgctaacccacttcctgttgccgctacaaaacagtctgttgatggaaacactctacgtgcaaagctggaagttaacaaatcacaccttgcagagccaagcacagaagttgaagcaatatattcatctacagaagttgacaaactgccacttccagggccaagcatggatatcgaagtaatggactcaactcttgaagttgacaaactgccccttccagagcgaagcatggatgttaaagttgtgaattcgtctctgaaagttgacaaactgcactttgcagagccaatcacagaagctgaagtgatccactcatctctgcaagttgatgaaccgctcattccaaagccaggcatgagctcatctctagagaacacacctgctgtgaatggccactcagcccccatatccccaaccattactcctactctaataagcgtgccaacagcaaccatgcctgtcagcaatgacagatgcggttgctacatgtcaaccaacagaatccaagtctaccctcgccacactgatatggttatcccggaaggcgcggccgtgcttcccatcagcgataatcagtgggtagctgtcagcctaccttattccatggaacaaagggatttctgttgccgtaatccggactgccacttaggaagataaaagcagacaaaaggatggatgctttgtgatgattatatagcttgtgatgctgagcattgcccgtgatgtactaaaatctagtgtaacaagactgccttgcgctggactacgattagtgtccctaatgcggagacttgtgtgactcctattgtatctagattaagctgtacttgtttgactatgtgcggaagtcttgagttacactcctatagtagaggacttgaactctggatggaccatccgcaacatttatcatgatcagacttttttcatacttcctaataaaaaaaaaaaacaatcggcgaaactagttcctcgtgcatcatgatcagacttttttcataaaaaaaaaa

SEQ ID NO: 150836 - DNA, 194 bp, Zea mays
  Clone ID: MRT4577_69083C.1
ctatgttgaagttgaatgccaaaaatactgacaatgcaaaaggaagactgggactacactcctctctttcatccatcgcaaggcactccatagaggatggcagaggaaaaatacttcgaatatacaaacggtggaggataaacgaacggacgaatacgaaccatccgggccgtcccaagcaacaaacccatgaa

SEQ ID NO: 150837 - DNA, 521 bp, Zea mays
  Clone ID: MRT4577_69084C.1
cccacgcgtccgcagaaatttgagctttgtcattgcaggtgcctatgagctagtctgaagcaaaggttcataaaacaagatgacagtttgtaactaaattgggtcacatgttatgtattccttaatattttgtaatgtttatgtaaaaaagataatggtttgtcactagcatctgtttccatggaccaaatgttctagattctaaaaggtcaaccaaaaaatattttaagattttttgataaatttagttataccaatttgatggaccattctacctttcacagcttccatctgtaaactataagaatcttctacaagaactagttcagaaggaaggctttcccttgcctatctataatacagcctcggatgtctcgaactattctgctgccttcgtatcaactgtggaaatccatggtgtaacttttcatggaaagccagggaacaccaaaaagcaagcagagatgaatgctgcaaagtttgcttttgaacatttaaaaacatctgttgatggaacactt

SEQ ID NO: 150838 - DNA, 665 bp, Zea mays
  Clone ID: MRT4577_69085C.1
tatcatagaactacaagccttaatgaatagcataatttataaaatagtataattgatagttcataaaactaacaaacagtagttcataaaactaacaagtccaaaatacatagttcataattttgtaaactaacaagtccataaaagaacacaaggcaacattaaatttagattctcaacacttagataggtctgggccgcctctcttggacagctgccccctctagggctccacccatgtgccgcgtcgccgcaacaaagtgcacatatcttctccctcctcttttatgcatccatgacagggacctcacgcgctcgtgtcaaagaggaggccatggccttccgcaagaagatggcatgcttgttacggctcaaggtgcagacaaggaggctgtcaacgcacacactcgcgcccaagtaggatggcaacgcgcaatcccccgtcggggaatacctccccatccccgcgacgatttttttccgtagggattcccacgaatacttgcgggaaacatttcttctctatccctgtttttcgcgggataaatctccaaaagtgacccatctccgtttaaattataattaaaataagcgttatttattattaatgttaaacattgtcacttatacacattgtcatatgtaagaaatcattatgcacacgt

SEQ ID NO: 150839 - DNA, 1035 bp, Zea mays
  Clone ID: MRT4577_69086C.1
ctctgcctgcaccgacggtgcccggctccctcggcatccaccagcggtgcccgactccaaggagctgtgccagaagcggcgatgggcgccgccgttgtacgagcctacccgagagggtcctgcccacgcgcccctcttccgcgccactgtcgtcgtgaatggcgagaggttcagttcccgggatgaaggggagaagtcactcaaggaggcgtacaacctcgcggcgatggccgccttcgacaacctcatcgcgctcccggccgcggcccttgcccctgccccggctgctccagcgccgccctcatccgagacccagcttccttacaagagtcagttacaaatttatgctcagaagcgaggcaaactcctgccttcatatcgtcccattcatggaggttctcttcatgcacctctatttaagtcagaagtaaccatagatggtcaaacatttgagagcccagagtactgtcacacaatgaaggaagctgaaacagttgctgcaaaagttgctctgatgtccttacctcaagaagcaaacccaacacagcaattactgcttccatctgtaaactataagaatcttctacaagaactagttcagaaggaaggctttcccttgcctatctataatacagcctcggatgtctcgaactattctgctgccttcgtatcaactgtggaaatccatggtgtaacttttcatggaaagccagggaacaccaaaaagcaagcagagatgaatgctgcaaagtctgcttttgaacatttcaaaaacatctgttgatggaaacactctacgtgcaaagctggaagttaacaaatcacaccttgcagagccaagcacagaagttgaagcaatatattcatctacagaagttgacaaactgccacttccagggccaagcatggatatcgaagtaatggactcaactcttgaagttgacaaactgccccttccagagcgaagcatggatgttaaagttgtgaattcgtctctgaaggttgacaaactgcactttgcagagccaatcacag

SEQ ID NO: 150840 - DNA, 213 bp, Zea mays
  Clone ID: MRT4577_69087C.1
gatacgcgtaccgattgcacgtggataggaactcctatctgaacagactgacgaccgtgaacgtcttgtgaatgtgactagttatgtgatctatcatcgacggttcgatacagatgcacagcgtgtgcatattgctgcaaacattatcccactctctcgccatgctgaagacaatgatccacgacgcatgactatgccaactaccaggagtta

SEQ ID NO: 150841 - DNA, 1995 bp, Zea mays
  Clone ID: MRT4577_69088C.1
ctccgtgtgctgtggcggcggcggcgcccggctctgctcggacggactccaccgaaggctcggctcccctcggactccacctgcgacggccggccctctgcctgcaccgacggtgcccggctccctcggcatccaccagcggtgcccgactccaagaaatgtacaagtcacggctgcaggagctgtgccagaagcggcgatgggcgccgccgttgtacgagcctacccgagagggtcctgcccacgcgcccctcttccgcgccactgtcgtcgtgaatggcgagaggttcagttcccgggatgaaggggagaagtcactcaaggaggcgtacaacctcgcggcgatggccgccttcgacaacctcatcgcgctcccggccgcggcccttgcccctgccccggctgctccagcgccgccctcatccgagacccagcttccttacaagagtcagttacaaatttatgctcagaagcgaggcaaactcctgccttcatatcgtcccattcatggaggttctcttcatgcacctctatttaagtcagaagtaaccatagatggtcaaacatttgagagcccagagtactgtcacacaatgaaggaagctgaaacagttgctgcaaaagttgctctgatgtccttacctcaagaagcaaacccaacacagcaattactgcttccatctgtaaactataagaatcttctacaagaactagttcagaaggaaggctttcccttgcctatctataatacagcctcggatgtctcgaactattctgctgccttcgtatcaactgtggaaatccatggtgtaacttttcatggaaagccagggaacaccaaaaagcaagcagagatgaatgctgcaaagtctgcttttgaacatttcaaaaacataaatcatgatgctggatcatctggctctgctaacccacttcctgttgccgctacaaaacagtctgttgatggaaacactctacgtgcaaagctggaagttaacaaatcacaccttgcagagccaagcacagaagttgaagcaatatattcatctacagaagttgacaaactgccacttccagggccaagcatggatatcgaagtaatggactcaactcttgaagttgacaaactgccccttccagagcgaagcatggatgttaaagttgtgaattcgtctctgaaagttgacaaactgcactttgcagagccaatcacagaagctgaagtgatccactcatctctgcaagttgatgaaccgctcattccaaagccaggcatgagctcatctctagagaacacacctgctgtgaatggccactcagcccccatatccccaaccattactcctactctaataagcgtgccaacagcaaccatgcctgtcagcaatgacagatgcggttgctacatgtcaaccaacagaatccaagtctaccctcgccacactgatatggttatcccggaaggcgcggccgtgcttcccatcagcgataatcagtgggtagctgtcagcctaccttattccatggaacaaaggtgagacaaacccagggagacaaaaccatccataaataactaaatatcttatgcaaataatatctctgaaccccacgttataagtttactggatttgggtttcaaaataatatctctgggattgctcacaccgggaaaatgcagggatttctgttgccgtaatccggactgccacttaggaagataaaagcagacaaaaggatggatgctttgtgatgattatatagcttgtgatgctgagcattgcccgtgatgtactaaaatctagtgtaacaagactgccttgcgctggactacgattagtgtccctaatgcggagacttgtgtgactcctattgtatctagattaagctgtacttgtttgactatgtgcggaagtcttgagttacactcctatagtagaggacttgaactctggatggaccatccgcaacatttatcatgatcagacttttttcatg

SEQ ID NO: 150842 - DNA, 630 bp, Zea mays
  Clone ID: MRT4577_69089C.1
tgggacctcgagccggccggggaacagatgccctgttggggtccgccgcggcgcgtatggagacttcccggcgaattccggttttattcctgggggctccgatctgaaccggaaaagctggggtggaacggggaagctgaagtggtgcactggcggggggctatgctcggcggggagggtattttcattccggaggtcctgaacaagaatcggggactcaacacgcccttttgggaccccggcggggaagaacagtactttacccacaccacccccctcttcattattcaacttcttctcatcggctggggccaagggccgccctgggcttacattatccaggccggaaagggcaaaacccaacccatctttcccaaaaatcagcttaaccgaaaccaagtacggtaacctggtgggctttgggttgaaccgcttgggtgggggatcggcttccccgaaaaaaacaaggggcttcgcacccaagagaaccagaaacgacgccttgccctggttcccggcatggggggccgggtccaaggcgaataaaaccggaaccggcccaatagacaactctttcgccaacttgccggacctgggcaccgcaacatttttcaaggcttcaacccccaa

SEQ ID NO: 150843 - DNA, 768 bp, Zea mays
  Clone ID: MRT4577_6908C.1
gatatccgcgccgctgtctgctgcccccgccctgcgtccccgttccccattcgcacccctccccactgcccgcatctattccaccgccgccgccgccgccccgctccgctcggttccggctctccctccgcgctgctgtgctctgtggggcgccgggccgcgtgatccgccgctgcctccgtcgattcggctccagtttcggggcgctgcggcgaccccccgaggtgaagccgctcccggtactgcggttcagcgcctaattggcatgtgacgtcctccaacggtgaaggagaggagctctttatgtgatagtgcagcagatggaaattgggtttcaaaattcaaaagaaagcgaagcaagttaacagctagctcgtcaaatgagcatgaggctacatcaccaacatcggactctataatgaacaatggttccataaaaaagaggtccaagcatgacactagcatttctacatcagccaagaagataagaggacacgatgggtatttctatgagtgtgtagaatgtgaccttggtggcaatttgttgtgttgcgatagctgtccacggacataccacttggaatgtcttaaccccccccttaagcgtgcaccgcctgggaactggcaatggccaagatgtcgtacgaaacaagttagcttgaagttgttaggaaatgcggatgctgacacttccaaacgtgaaagaaccaagagaatgcgtacaagcaccatagcagatagcccatctccccataacaagtctctctg

SEQ ID NO: 150844 - DNA, 235 bp, Zea mays
  Clone ID: MRT4577_69090C.1
acggtaggaacaaatggaacttacgcgttttatgaggtgcaaggaagtttgtgaagaccatgctactgacgagatggcatataacggtggcaggtatgcttccccaccgggccaatgtacatttgttggagacataagcataagcggaaggcttgatgaagatggcaagaatcaatgtgtgtgttcaaaataggaggcacatgctggactggactaggaaataaccaatgaaacg

SEQ ID NO: 150845 - DNA, 284 bp, Zea mays
  Clone ID: MRT4577_69091C.1
gagctttttgtcggcggccgccctatcgtttttacctgggcgctccatgaagaggtgttcgctcaccctgactaacgtgggtttcttatcacagccgatggaactccaccgtggacgccatatctgagggcgtgcgcacgtgctgctgtccgctggtccaggaccagttaatgcacatgatgtacccgcgcgacttgtgtaaagtggttacggagcttgaggcggaacagctggagagtggccatgtcaatgccgtcatcaagaggctctttaagacctaacaa

SEQ ID NO: 150846 - DNA, 580 bp, Zea mays
  Clone ID: MRT4577_69092C.1
caaccacacacaatacagaaaaaaaaaaaacaaaaatggcagttaagatgatcatattcgccgcctgcgttgccaccacactcgcccaatacgccgcaccggcttacccagcacaccacgcttacgccccagagcactcgtacgagtccccgaccccgtacaacttcgagtacagcgtaaacgacccacactcctacgacgtcaagagtccaatccgaacacagcgacggacacggcaacgtcaagggatcgtacagccttctggaatccgacggttccacccgcgtcgtcgaatacaccgccgaccacagcggtttcaacgccgaagtcaagaaaatcgaaggacatagccatggttacagcgcacccgcttcggcttacaaatctgccccggcctacaaaccagcatacgctgccccagctcactcttacgccgctccagctcactcttacgccgctccagctcactcttacgctgctccagctcactcttacgccgccccagctcactcatacgctgcacctgccgcatacgccaaacactcgtatgctgccccagctcactcttacgctgccccag

SEQ ID NO: 150847 - DNA, 297 bp, Zea mays
  Clone ID: MRT4577_69093C.1
gaaacattggcagatcgtttatccatagaccaactactgcaggctgaggcctcacttgcaagtgttttggagtccctggtgtttgggtctattagttgtggtgatggcatgtgctttacttgaagattctagttagaaaacttgttgagaagatatgctcaaaacttcgatataaaaatattttagtgtcaaaatttgaataaatgtgtttagattgtcttaaatactgaatattgtcaaacacatttttatacctttctgacgcatgcctttgtcttcagtataaactggatcatc

SEQ ID NO: 150848 - DNA, 311 bp, Zea mays
  Clone ID: MRT4577_69094C.1
ggggaaaaaacaaagggggggaggaagggttttttttaaaaaaaacccacccgggggtaaccaggcctttttttaaaaaaaaccttccgtgtttttccccagaactttattatggctagttttttaggagattggcgctagaacagaaattgttcccgctaaaaaaaccggggatggtggggggtgccaaaagtcacccaaaaaaaggggttgttggggggtttcgtaataaaacccaaccaaggcgttgccggggagccttttctaaggtggttggcctcccccccaagggaggccacttgattaccccc

SEQ ID NO: 150849 - DNA, 420 bp, Zea mays
  Clone ID: MRT4577_69095C.1
cggacacgtgcgcgacctgacggcctacacaaacaatgcgatcagatccttgctgctactggtactcttttgcgtagggcatggtgataaggaagagtcaaagggcatgcatgctaaagcccacgcacctggggggtccttggacatcacataccctacgcgcctccggaattggcactacacacagcacgaaggttgagcaggaagcatgaccatccgcgggcgatggcactggcaagcagacaattctaatgccgaagggcgacttccttgttgaacaactcaacttcacatgcccttgcctgggcgacgtgactcatccacgaggatcgcaatctgctggccaccacaggcctactccaatgcaaggaccatgttaattggatcgagattctacgcgtggataacctgcttatgacc

SEQ ID NO: 150850 - DNA, 191 bp, Zea mays
  Clone ID: MRT4577_69096C.1
ggcatccaggaatcaggatgtgagttttttcaatccaggggagagggtatcctcctatactagggatgtcctgaattgatttgcaatcgaccgaggacattttttagggggccagaaaccataaacaaacaaatggcccaaaattgtctagaatcgaaaaccatgagttttatgctctccccgtccgtttt

SEQ ID NO: 150851 - DNA, 441 bp, Zea mays
  Clone ID: MRT4577_69097C.1
ggggaaacaagcgggcccgggatcaaccctccctccccaaaataccctaccaacccccgaaaacctgcaaaggaatataaggggttccctaccccaaaacccaaaaaaaaataaccagattttaaaccttaagggttcctggaaggggcccttcaaaagcccacccggaaagggccgcttattatcccccaaattggggggggcccccccgccttggaaggatgccccccggcaatttatcccggggggggcccccaatcttgtttttgtacaaatgatgcttctgccaagggcaggggaatgcaaaaaagctagcgggggtcaacaaaagggtttgtcaaaaaaaccacggcccctttcaggggatccacggcaacaaataccttgtaaaatgcaagagccccgaccgaaaacctgggtgccttgtgagccccaacaatt

SEQ ID NO: 150852 - DNA, 376 bp, Zea mays
  Clone ID: MRT4577_69098C.1
tcggtacccctgctagctgccacatgatcatgtagcatttcttagttgactggatcttcatagaatacgagcggcacaaacaagagaagatcacacgtcctcgttgaataggggggagatagagaggaagaaatccttctggacataaactcgccggcttgcgcgaaatgcttgaactttaagcaggaattaggatagtcagttaaactcgacatggtcagccctagccaacatttattcagcactcacatctattttaaggacacaatatagtctaggatccggtgctgacattgaggattatctgttctgtgatcacgctcctcgatccaccaccacccgctattgccaacagatgaccaatttacatctgcag

SEQ ID NO: 150853 - DNA, 672 bp, Zea mays
  unsure (1)..(672): unsure at all n locations
  Clone ID: MRT4577_69099C.1
cggacgcgtggggaaattagagacgttgctggtgatagtctaagagttcttttttctcagaatggtgccttgctccccttcataagattatgccagaagaactccctgctttttcctcttttgctattaacacaacattgtggaagtatatatatatatatattaaaaccaagtgtcataaaacagcctatctttcttcagctggatgctgtaacatgatcatgtagatttcttaattgactggattttcatagaataagagtggaacaaacaagagaagatcagaagtcctcgttgaaaaggggggagatagagaggaagaaatccttctggacataagctgccggcttgtccgaaatgcttgaactttaggcaggaattaggatagtcagttaaattcgagatggtcagccctagtcaacatttattcagcactcacatctattttaaggacacaatatagtatagtatccggtgctgacattgtggattatctgttctgtgatcacgcccctcgatccacaccaccagctattgccaacagatgaccaatttacatctgcagttccaagatattaacttactaccttagatttctttttttttttgaggaaattgctaccacctttcatactgngtgtngcttccgtaccctccatctncttgcgtgca

SEQ ID NO: 150854 - DNA, 198 bp, Zea mays
  Clone ID: MRT4577_6909C.1
atcccgcacgtctcgtctcccggccctccccaaaaaaaaactgctcggttgctgctcctgctccgccgcgccggcagtcatgtgtggcatcttagccgtgctcgggtgctccgactgctctcaggcaaagagggctgcaatcctccgctgctccgcaccggcgcagcacaggcctccagccggcgctgcaccaccacc

SEQ ID NO: 150855 - DNA, 1052 bp, Zea mays
  Clone ID: MRT4577_690C.1
ttcgacgccagccgcggcaaccgccacacggacggccatctcaaccgccacactagctacaagcgagctttccaaatcccgcggacgggacaccaatggggctgtgcatgtcgcgcggcgagaccacgccgacgcgggcggccccgccgcccagcaaggacacggcgctggtgctgatgccgagcggcgagatgcgggagtacccgccgcacacggccacggccgcgcgggtgctgcaggacgcctccgcctccgcctccgcagactggttcctgtgcgacgcggacagggtggggttcgagggccccgtcccggcgctgggcggcgcggaggcgctgcgcgcggggcagatctacttcgtgctcccggccgccgcgcgccgccgcggcctgcggcgcgaggacgtcgcggcgctcgccgtccgggcctccgccgcgctctccgctcgccactcctgcgcgcgcggcaagcggagcaggcgctgcggcgccgtcgcgcccctcgtcttcgcgccgccgcctccgccggaggcggaggaggagcacgggcggtgggagacattcgtcgcggcgcgcaaggctcctccggtgcgccggccctcgcgctccggcaggcggctccagcggttcgcgtccgacctcacggcgatccccgagtgcgagatggcgagcgagtagcgagggctcagactggcggggatgatggaacagtcacttggccgtgtgtttgttggcaagacttggactcttctggaagcagaggacgctagcaggaagtcgggaacgcaggaaggaagaactccacgagacacatcttcaacatctccacgctggccatgttcagcggcaaaaccaacgaaggaaacgcgacaccaatccgcaccatgtttgtaacacgcacgcatttatttttgttataaaatattgtatttgtgatcaatccaaggggtgcgacagattattcccaagggacacccccttgagaacgcaacccttcacctgtatataaacagagttctccctgcaataaagaacacaactgtcatttgcact

SEQ ID NO: 150856 - DNA, 583 bp, Zea mays
  unsure (1)..(583): unsure at all n locations
  Clone ID: MRT4577_69100C.1
ggccgggccggactccctttcctgcgccagcgacgatcaaagtgacgacgacattcagatccagacgcatccgaatccctctctcctcggcgtcctctcccagcaccaacccccagatcgcataatcgggcgtggggcagatcgtcctctgggactggctctacggggtgctgtcctccctcggcctgtggcagaaggaggccaagatcctcttccttggactcgtcaacgccgggaagagcacgctgctccatatggtcgaggacgatggtatgtggcagttcccgtctacgcaggacccgaattcggatgagctcagcatccttaacatcaagtgcaattcgtgnctatcacacgcggcccccagactcgcgcgtcgctggatggaaggagtactacgctaaggtctatgctgaagaatacctggcagatgcatatgatacggaacgatttgctgaatctgagacggacctcgatgttctcctgtctgacgatatctttgctcaaggttccatttctcatccttgtcatgaagattgatatcccatatgttgcctctgtggaggacctacgtgatcaccta

SEQ ID NO: 150857 - DNA, 2191 bp, Zea mays
  Clone ID: MRT4577_69101C.1
ttttttttcttttgggaattgtgatgtccgttcttttgagccaaacagcaaccggatatggccgcttgcctcctgcacccttatcctccggggctccattcctctcgtgcaaatccctattccgcctcccgtcaacccacccacctcaaatgggagcttgggcgatggcgccgccacctcctcctgtgcgtcgccgcctccgcgggcatcttgcagcgagaactcatcatgctgcccagtgcaagaaccacccagaaccccggcccagtgaacccacgtaaccagttcgacataatgcctgagaggagcactgagaacactaagagcgcagctaacccgttggacgaaagccttgggacgggcggacagattgcaagcggacgtgatccccatgaggtcggcgagaagagcgagagcgcggtcttcgtggcgctggcgcacgctggccggcatgcggaggtcgtcgagctcttccgcagtatgcggagggagggagtcccggtgaacaggtttgtgctcccgagtgtgttcagagcctgcgccgacctatgggacagcaggatgctccgagccgtgcacggcctggtcatcaactgctcgttgtgtcagcatgtggtggtaggcactgcgttggctgctgcgtatattgatcttggcttggtagatgatgctagcccggtgttcgatgatataagccagcccaatgtggtctcttggagcgtgatcattggcggctatgcccgttcttctcagtgggacaaagcctgggatgcattctcggccatgcagtgttcgggtttgcctccgaatggttctgttctcgtaatggcaattcaagcatgcggcgcattgggctgcctggtccgagggaagcaggcgcacacggtggcagttgtccttggatttgaaaggaatgccaccgtgtggaactgcctcattgacatgtatgggaaatgcggcagcgtggagagttgcaggagggtgtttgacacaacggtcagcagggatcaagtgagctggaatacgatcatctcgtgctatgctcgtctcggactctgtgaagaggcactggaaacgatcgttcggatgcaggagtctggtttcactattgatcgtttcgttcttggcagcggagttgcagcatgtgccaacttggctgacatagacagtggccgtgcgtttcatggctatttgattagaagagcgttagatactgatgtcatccagggcagtgcacttgttgacatgtatgggaaatgcggatacatggacctcgctcgattggtattcgatcggatggatgagaggaatgatgtttcatgggacgcgctcttatccgggttcgtcgaaaacgggcttgttgatgcagcacttgacacttttagacaaatggagtccgcaaaaataaagtctaaccagcatacctttgtgaaccttctgaggctctgtggtgatagaaggtacagagagtacggaaggcaaatccatggccatgccataagggtcataaaccagatgaatgtagtgctggaaaccgagctcatcgatatgtacgccaagtgtgggtgtattgaagtctctcagctactgtttctcaggatgaacgagcggaacctggtgtcatggaacacgttgctctcaggttacgttggggatggacagcctgttgccacggtaaacatttaccgtcagatggagctggcgcgtgttgggcctgaccactacactttggcgggtcttctgaacatgtgccggttccaagggctgctgcgctatggaaggcagatacatgcccacctcatcaagacaggctctgaaatgaacgttgtgttacagactttgcttgtccatatgtacttcaagtgtagacggtggcgggacgctcacaatgtttgcaccttgatcagagagaggaattcccatgtttatgaggcgtttttcaaggtttatggagacgactacttgatctaaggattacgcactagagtctgaatatgcgagatactgtggatagacatcttaaatgcacatactttgttgggtgcaagcaagcagtagtttcaagtcttttttaatcgctaacatcagtgacttgtatgacaaaagtatattttcaccaatactgtttttcaagttatgtgtttatactggttaacagtgccgaaaaaaaaaaaaaaaaaaaaaaaccaaa

SEQ ID NO: 150858 - DNA, 1370 bp, Zea mays
  Clone ID: MRT4577_69102C.1
cccacgcgtccgacttgtttgattatttgcctctcacagctcttatagaaaatcaggggccctgcctacatggtggtctctctccatcactggatactttggataatgtccgctcccttgatcgcatacaagaggtcccgcatgaaggacctatgtgtgatcttttgtggtctgacccggatgacagatgtggatggggaatttcaccaaggggtgctggatacacatttggccaagatattgcacaacaattcaaccatacaaatgggctaagtcttatttcaagagctcatcaacttgtaatggaagggttcaattggtgccaggataagaacgttgtgacagtgttcagcgcgcctaactattgctaccgatgcgggaacatggctgcgatcctcgaaattggcgagaacatggatcagaacttcctccaattcgacccagctccgcggcagattgagccggacatgacgcgcaagaccccagactactttttgtaatcagcatgctggctttctttcaacttgtctactgcagcgccagcacctgtagatctccttagaaaatggtgtttcctctagccgccttgtacccccatcattcttttggtgtggagattttattgccgcttctcagaatttgcctcttgcagaaagttcgaaaaattgggttctgcctactttttggtctctctccatcactggatacattgattcatatccgcgcccttgatcgcatacaagaggtcccacttgaaggacctatgtgtgatcttttgtggtctgacccagatgaccgatgtgggtggggaatttcaccaaggggtgctggatacacatttggccaagatattgcacaacaattcaaccatacaaatgggctaagtcttatttcaagggcacatcaacttgtaatggaaggcttcaattggtgtcaggataagaacgttgtgacagtgttcagcgcgcctaactactgctaccgatgcggaaacatggctgccatcctcgaaattggcgagaacatggatcagaacttcctccaattcgacccagctccgaggcaaattgagccggacatgacgcgcaagacaccagactactttttgtagaaaaaacaggtgtggctaaaaaaaaaagagaagagacgaggggaagatgcaggaaatggacccgatgttctgttgtgtctgtattgtgatgccttgctaggtgagatttttcgtttctgttttgactcaacctggtcgttcaacctacgtcggctcatcgtcgaacgttgcccaggctgttaaagatgatttcactttttatgtgtagacatcgttgtacactaggcttttgcaatgctttcatataggacatcactgt

SEQ ID NO: 150859 - DNA, 954 bp, Zea mays
  Clone ID: MRT4577_69103C.1
gttgcggcgctcgatgttgtcaaatcaccatgggttcttatacgcgtactagcgccctatattccccctttttacatatacatattcgcgcagatgaggacttgggtctctgtctcggaaggaaccggagcggaagcctccggtaaggagggtgaagtccaagcggccgttcaagaaatctgtgctggagcaacagattcagcaaaagggtgcgagctcatcctgttccgctaacacgaatcagcagttggagaaccacaagctgaagcaacagattcagccaaagggtgggaactcatcctggttctttgacaccgatcagctgtctgagaaccacgagagtatgtcaaggggggtcagcttcagcggtgtcaaaaagagaggaaagatttgaacaacccaacagctatttgactgcagtgtcgtatttggtgaagaatcggtgtccaaaaagtcatttatttttttatgcaaaagcgctggaggatggggctgctctgaacatttttctagctctgccgcactatttcgctaggaaaaaacacctcgatcacttgctagataatcaatatgtcttgctgacaccagagaacaggaggcagtggcatgagctacgtcgtcgtagaaatcctgatgatgatcatcatgatgctcctgctcccaatgctcctgctgagcaggctcctgcttgaccaccatggagactcaacctgatggcgctgccagttctttctgtagtttagagtcgcagtcgttagtgctgtgtccctatttgattcatgtggacctgcagtaatgtggattatggacttactgtaatgttgagacttaatatgtgtactatttgtctatttgtgacttatttgtgttgagatctcacttatgtattgtctatttgatctagctatttgttaatgtcatgtactcatgttcatgtatgattatcccatggct

SEQ ID NO: 150860 - DNA, 2544 bp, Zea mays
  Clone ID: MRT4577_69104C.1
ttcgcgcagttagctagacataaaagggacaacctgaacttcaagttagcagaaatggagcgtcagcaacatgatctgcttgcacaattttgtcagcttctaagaaatatggttggtaagagttgtatcgtttgggttgtcaagcaagtgttcactgccactacacaggtcttcaattcgatcccaccatggataagtgacattagctctgggatgtatagagtagaagctggttgtttatttctaggtgcagtatcatcttgtctacaaagtggcttcagtccatggattcaaatcaccgaaacaatgctggaggccactttaacatggaaacatggtgctcttgatcatggagtatgtgagaatcatcctgtattgcacattactgctacaggacagtgggttcgtccaggcagtgaagtgtcaaaaattaaaaggtggaattgtcataagctttatcttgccttgtttgcacaagagattcgagagattgagctttctgaaaattcagtgatggagcacctgagcttatttgatcataaggtacagtcatctttgcaattatatgagggcaagcaatctcttgcattatatttacaagccagtctagtgattactctagcactctcatgctatacaagtgctggacataaaatagtgagtgtcaaggaattgcaagttccatgggatcctggtggtacgagttgcacatataaagttacaaaacgtcaacttgaggacaagctgaattttcagggggcggtaatgtcatgcccggcaagtgtcatagttcattttattgggcccatcagaagacagcccattgggccaagaacaaaccaaacccgtgaacaagggcagcggcgggcaggtggttggggacagaaaatcagaaaccaaagacattctcaccgtcttcctcatggaggcatggttcaggtgattctcgatctcctcacgtcccggtcttcaccgccggcggccacggggcgtgacatgctgttcgggaccaaggttccacaacagctctccaagtattcctgtcctgtgcccatgtcttaagttcagggttccactgacttctacctttagcgaagatgactcctatggcttgctctatcttccctatgggagcagacctaccctgtcctatggcttgctctgccttccctgtggtgacctctgctgttcttgctaggagtcaaaactctgcttgcagttgtagagatgagaattcatgagatgcaggcacattattggctgcttgagattctgggctgatgcacatcagcaaagtgaaggcaaatgcagaggctgggctagccgctgaggtgggtgccactagcagattcccatgggtagctggctgctgcgtgggccagtttttagcagagctccaagagcaacttccagactgaatcactgaattcatgagaagctgtgccaaacagtattttttttttctgtgaagtgattatttgctgattcattgaagtgattttctgaaatgaaccaggagactgggaaaacaattcttgtgattcactccgcgcacagaattattagtaaattattgagaatcaaataatcacttttcacaagagaatcaggttccacagaaaatctggagcgggaggagctctaccaaactggcccttaaatcactttcatcttctccatctccaactccaaagtgcacaaggataagaacgttgtgacagtgttcagcgcgcctaactactgctaccgatgcggaaacatggctgccatcctcgaaattggcgagaacatggatcagaacttcctccaattcgacccagctccgaggcaaattgagccggacatgacgcgcaagacaccagactactttttgtagtaagcatgttggcttcttttaacttctctaccgcagcgtctgccgtctgcctgtagatcttcaaaaatgtgttccctctagccgctctgtagcacctctcattctttggtgttgagattttttttctcctcttgtacccccattctgtatgattctgagatagcagagaagagaagctgcaatagaattgtcccgaaatatattctgcttttgtttttttttcaggaaaaaacaggtgtggctaaaaaaaagagaagagacgaggggaagatgcaggaaatggacccgatgttctgttgtgtctgtattgtgatgccttgctagacatcgttgtacactaggcttttgcaatgctttcatataggacgtcactgtatgaggtcaggcaccatgccgcgcccatgccaaccggtgctaatgccatgctggatctggatgagtaagcctgctttggcatagagttcaacagtccgatgaggacgtgggaggcgaaggaccgtgacttttgaaagggagatggacgaggttaaaaagattgtaacatctaagaggtgaattatgaaagttagaaggtttggtgattaacgacaacataagattattataactaatgtatgttttgtagagataatttaagtcaggttaataataataacaattgtttaagc

SEQ ID NO: 150861 - DNA, 2497 bp, Zea mays
  unsure (1)..(2497): unsure at all n locations
  Clone ID: MRT4577_69105C.1
cattgggtacctcgaggccggccgggacacgaatctagatcgacctgctcgctctgcacacctggaacgacgtgttcctcgtcccgagaagaatcgaggaaaaatctcgcattcgcaaaccaagcaaatggaggcatgagctccgccgcctccccgtctctcgccgatctcccccaaaccctagcctcgacctgaccgccagcgggcccgcaggccggagaggaggtcggagtcgcccccacccacccaccctctcctctgccgcgggcggngagcgggcggcggacgagatgccgtcgcacggggatctggaccggcagatcgcgcagctgcgcgactgcaagtacctgcccgagtcggaggtcaaggcgctctgcgagcaggccaaggccatcctcatggaggaatggaacgtgcagcccgtgcgctgccccgtcaccgtctgcggcgacatccacggccagttctatgacctcatcgagctcttccgcatcggcggcgactctcccgacaccaactacctcttcatgggcgactacgtcgatcgtggctactattcagttgaaacagtttctctgttagtggctttgaaagtccgttacagagatagaattacaatacttcgaggaaatcatgagagcagacaaatcactcaagtgtacggcttctatgatgaatgctcatccacgtataaacatgcaaatgtttggaagtccacctccgacctcgtcgatcccatccacccccagcgctcctcctcgccggcgggcttgctgggtctcgcgatcgtcctcctcctcggctgtgtcttctggggcggcggcggcaggaattaggtaagtggaggcaagggaaggggaggtttgaggtcagagcggagccgcagcggcgatgccggcgcacgcggatctggaccaccagatctcgcagctgtgggattgcaagttcgtgcgagccgtggagctcaagacgatggggaagtagaccaaggggtgctggatacacatttggccaagatattgcacacgaattcaaccatacaaatgggctaagtcttatttcaagagctcatcaacttgtaatggaagggttcaattggtgccaggataagaacgttgtgacagtgttcagcgcgcctaactattgctaccgatgcgggaacatggctgcgatcctcgaaattggcgagaacatggatcagaacttcctccaattcgacccagctccgcggcagattgagccggacatgacgcgcaagaccccagactactttttgtaatcagcatgctggctttctttcaacttgtctactgcagcgccagcacctgtagatctccttagaaaatggtgtttcctctagccgccttgtacccccatcattcttttggtgtggagattttattgccgcttctcagaacattgaggttgttgaaagtacatggcattgggtcttcctttttacaaatgggctaagtcttatttcaagggcacatcaacttgtaatggaaggcttcaattggtgtcaggagactgggaaaacaattcttgtgattcactccgcacacagaattattagtaaatcatggagaatcaaataatcacttttcacaagagaatcaggttccacagaaaatctggagcgggaggggctctaccaaactggcccttaaatcactttcatcttctccatctccaactccaaagtgcataaggataagaacgttgtgacagtgttcagcgcgcctaactactgcgcgtcctgcggaaacatggctgccatcctcgaaattggcgagaacatggatcagaacttcctccaattcgacccagctccgaggcaaattgagccggacatgacgcgcaagacaccagactactttttgtagtaagcatgttggcttcttttaacttctctaccgcagcgtctgccgtctgcctgtagatcttcaaaaatgtgttccctctagccgctctgtagcacctctcattctttggtgttgagatttttttctcctcttgtacccccattctgtatgattctgagatagcagagaagagaagctgcaatagaattgtcccaaaatgttaaagatgatttcactttttatgtgtagacatcgtcgtacactaggcttttgcaatgctttcatataggacgtcactgtataaggtcagtcaccatgccgcgcccatgccaaccggacgaccggtgctaatgccatgctggatcgggatgagtaagcctgctttggcataagagttcagcaggccgatgaggacgtgggaggcgaaggtccgtgacgtttgaaagggagatggacgagattaaaaagatcgtaacttctaagaggtgaattatgaaagttagaactctttctaagttttggtagactgtttgttgttttggttattaatgacaacataagattattttaactaatgtatgttttgtacagataattgaagtcaggctaataataataccgattgtttaagc

SEQ ID NO: 150862 - DNA, 434 bp, Zea mays
  Clone ID: MRT4577_69106C.1
ggccgtggtccggcggcggcgggtctggggaacccctgcctcccccccccttaatccccgggcggggctttccctttgggccccctaacttaatatcgggggggcccgttcccaacgccctggccgggaaaaccccgggctgcccccccaataggccccgccctgcaaccccccttttcccccggggggggtatgggaaaaggcccccccccccccctctttcccaagtgtcctacccccgatggcgtaagggcccccccccttttccgggccataaaccccgggggtgggggggtttccccccagggggccctcccttttgggcgccgccctagcgcccgaccgttccgtttccccccctttcttgttccccgcgttggccggcttcccccgccatcttctaaatggggggctccttttggggtcccgtttgg

SEQ ID NO: 150863 - DNA, 314 bp, Zea mays
  Clone ID: MRT4577_69107C.1
gggcacagcaccactgctcgtgcaatgatggacgagtacttagtcggcgaaattgatgcagccacaatacccaccaaggtgaagtacacgccccccaagcagccacactacaaccaggataagaccccagagttcgtcatcaagatcctccagtttttggtccccctggcaatattgggcttggctgtcgctgtaaggatctacaccaagtcggaatctgcctagtttgctgtcaatgcttaaatgaaagatcatgaactgaataagttagtgaggattgcatcgtgtaccagcatcgcctgtcattaattcag

SEQ ID NO: 150864 - DNA, 580 bp, Zea mays
  unsure (1)..(580): unsure at all n locations
  Clone ID: MRT4577_69108C.1
aacatccacggcaccaccgcttctccttgtaataatccttcttcttctgtctcccgagctctcgccattaattgtccatcgatccatatacagttagtcagccaattctccgaatgagctaccgcttgcggctatatatatggccatccccgtgattgacctctccaagctggagggacctgagagggccgagaccatggcggccatcgccgccgggttcgagcacgtggggttcttccaactggtgaacaccggcatccccgacgagctgctagagagagtgaagaaggtgtgcagcgactgctacatgttgcgggacgaggcgttcatggactccaacctcgcggtgaaggcgctcgccgagctcgtggagaaggaaagcgagggcggcgtccctgtgagaaagatcgagggcatggactgggaggacgtcttcaccctccacgacgacctgccatggncttccaaccctcccgccttcaaggagacgatgatggagtaccgcaaggagctgaggaagctggcggagaagatgctgggcgtgatggaagagctgctggggctggaggaggggcacatc

SEQ ID NO: 150865 - DNA, 415 bp, Zea mays
  Clone ID: MRT4577_69109C.1
gaaaacaccccagtgcgctcgcacgcaagctcgcaaaacggctctaggaagcttataacggcggcggggccacccatcctgacgcgctaaaaattttttgggcgtaaccaccatcagccaggccaacatcggacacatcagcgccacggaactcgccgcctacgcgctcgactgcaccgagctcatgacgtccatcaacggcatcctcctggccatggctagcgcgctggagacgtccagcagacagtcggacagcgcgaggcattaccacatgctggacatctaccagcagcgcccctgaatcatccaggtcgcgtgcgccctgccactgctccccatgtacctgttcactgagccaacacaagtggcacaggtgcaggacccggatatccctgcccttaaccaaaccatctac

SEQ ID NO: 150866 - DNA, 1256 bp, Zea mays
  Clone ID: MRT4577_6910C.1
aagggcatcctgaaggcgcaggcggcgtcgagcctggcgcggtcgccgagcaggccgcgcgtgtccatcaacgtccaggacaacgagatctccctggagcggacccggctgtggcgcggcgtcggcggcaacggcaagaggcagcagcagcagcagcagcagcaggcggggccgcggaggcggagcgtggaggaggtgctgcgcgaggccggcgccgacatcatcgggctgcagaacgtgcgcgccgaggaggagcgcgggatgcggccgctgtcggagctggccgagggcctgggcatgcgctacgtgttcgccgagagctgggcgccccagtacggcaacgccgtgctctcccgctggcccatcaagcgctggaaggcgcaccgcgtcgccgaccagtcggacttccggaacgtgctgcgcgtgacgatcgaggtgccggacgccggcgaggtgaacttccactgcacgcacctggaccacctggacgaggggtggaggatgaagcaggtggacgccatcatgcgctccggcggcgacggcccgcacatcctcgccggcggcctcaacgcgctcgacggcaccgactactccgccgaccgatgggccgacatcgtcaagtactacgaggagatcggcaagccgacgcccaaggtggaggtgatgcagtacctcaaggcgaagcagtacgtcgacgccaaggacttcgcgggagaatgcgaggcggtggtggtcgtggccaaagggcaagacgtgcaggggacgtgcaagtacggcacgagggtggactacatcatggcgtcgcccaactgcccctacaagttcgtgcccggatcctacacggtcgtctcctccaaagggacgtcggaccatcacgtcgtccgggtcgacgtcgccgtacctcacgccagagagcccgatgacgccgaggccaccgcgaacgggcagcgcagcagagtggtcaagatgaccaagaagagctcgagaaaggggatatggggagctaaatgaatgaacagggtagttttgtgtgtgtgtgtgtttttttctctcaaagtttcttttggccgcgttctttctttttttatctgggggtgatgtggagggtgggttgcttggaattgtgtatatgcctgtggtggttgctttgaggccgaaggtgcctggtttgcagtggctgctgcgatagatgtggccaacgagtggaaactggaaagcaacgtatttttggcccggtttcacttttacctactact

SEQ ID NO: 150867 - DNA, 902 bp, Zea mays
  Clone ID: MRT4577_69110C.1
ctatagaccacagccagtcagccacatcactagctatctgtgcagaggcaatggcgtccaaggttgagctggtggtggaggtcaagtccccggctgacaagctgtgggcggcgctgcgtgactccacggagctgttccccaagatcttccccgagcagtacaagagcatcgagaccgtcgaggtaaaaggacagcatggtgagggtcagcgtgctcaatgatgctctcaagtccatgtacaatgctgaaaagatagggaaacgtcaggtcatgatcaggccgtcatccaaggtgatcatcaagttcctgacggtcatgcagcgccatggctacattggcgagttcgagtacgtggatgaccacagagctgggaagatcgtggtggagctgaatggaagactgaataaatgtggtgttattagcccacgttttgatgtaggtgttaaggagatcgagggatggacggcgaggcttcttccatctcgccagtttggctacatcgtcctaacaacttctgctggaattatggcccatgaggaggccccccgtaaaaatgttggtggcaaggttttaggtttcttttattgaaaaggtgttttttttgagcgacacatgcttccaagaacttgtttgatcttttgaggtttgttaagactgggggtttgagcctttgtggtttgttaaaagtgggatgtgtcatgtatttcagaaattgaaatttttatgagatgtccctgcgagatccctgtttgtttcgattttcaaatattggttttgatttatgcgatacaaacaggtccttagtccaaaaaaaaaaaaaaaaaaaaaaaaaaaaaaaaaaaaaaagcaaaaaaaaaaaaaaaaaaaaaaaaaaaaaagtactctgcgttgttaccactgct

SEQ ID NO: 150868 - DNA, 792 bp, Zea mays
  unsure (1)..(792): unsure at all n locations
  Clone ID: MRT4577_69111C.1
agcatccaccactcgaggacttgcagagtctgcagcagcagcttcagctggccagactccgtccgccgatcaacacacgggcacaacgcctcccgtttcctcgtttcgaggctgcaccgcgccgcctccaagacgccgggagcctcatcgcctcctctggcgaaaaaccgcttctctccggcgagctgcctccgtttccgggtgatcgagtctacgcgcgcatcgcctcttcccaaggcaggataggatcccttatcggcctgacgcgattcgtggatccgacggcgaggtcttggaggtagtgccgtcgacgaggcatctccacccctccggcgagctccccttccaaaaagtggtgaggtacacagttgggaagattacaccaattcaaaaacgtgaagttcatgcttcagattttggaccaacagcaagtttctggatgaatttctcaaaagaaggatctcggcttactccttcacattcagcggaagattttaaatggaaagactactgtcccatggttttcaggaatttgagagagatgttcaagattgatgctgcagactatatgatctccatatgcggaaattctgctcttaggcaactatcttcccctggaaagagtggaagtgtctttttcttgtcacaagatgatagattcatgattaagactctccgagaatctgaagtgcaggttcttttacgaatgcttccaaagtattattgatcatgtccgtacctatgagaacccctcataaaccagttttttggccntcacaggggtgaaactct

SEQ ID NO: 150869 - DNA, 308 bp, Zea mays
  Clone ID: MRT4577_69112C.1
aaaaaaaaaaaaaaaaaaaaaaaaaaaaaaaaaaaaaaaaaaaaaaaaaaaaaaaaagagaaaggaaaaaaaaaaaaaaaaaaggggcggcggctttccggtttccaggctcccggcctcgtgcctccggcttgctacctcttcttttttgtatcctgaacaccaatttactggccgtggctctacattttacagcctgggaaagccaagcccttcccatcccaatcttattgcgccttgtcccctttccctttttgcggttgggcaataaggcccgggccgctcccctttccccttgttgcacattc

SEQ ID NO: 150870 - DNA, 441 bp, Zea mays
  unsure (1)..(441): unsure at all n locations
  Clone ID: MRT4577_69113C.1
ctcatatcgctttagcttcaccacacacacaccccgcacgacacccccgaatctgcaagcggcgggcgtcgtcgcatgccttcgcctttaagcttccttccagtgatggggtatgcgcagcgcagggaagcttctccctttgtgctgctacgtcgtttctcggtggtggcaggcagtataccggccggcgcatctctccctctctctctctgtctctctatttcgtcccacatttaattcgcggcgtggagtagaagtagacacgacgttgtcaatcgatcagcggcgcagcaagcgaccagctcgttttgacccagaccacatggccaccgcccaccggcgtatagtataatgcacggccgcgccacctactgcgtactgcccccggcagcaggcgacgcgacgacccgactcgcactcacagttntgttgtattcatgt

SEQ ID NO: 150871 - DNA, 418 bp, Zea mays
  Clone ID: MRT4577_69114C.1
tggctctggaacctttgggctgatttatgtgcttgtacagagacaagcggcggagaccggattactctcggtaattgcccggacccatacgacttcagaacaccggtaacggtcgtcgtctaatattgcccatccgaagatgagcatgacgaacacatcgtaataaataacaatgtcgtcgcgccccgttgtctcacaccctcgaccccgacggtttcctcgtcttcgaggtacataccgattaccatcaatagcgacgacgaagacgacgtactcgtcacccctctgtcaccctccccgagagttgtcggacccccgtcgttacgtcacaccacggtccgggtcaccagcactacgtagtgctaaagataaagataggaagaagtaacgtcgccattaatggaagcggtgactacct

SEQ ID NO: 150872 - DNA, 322 bp, Zea mays
  Clone ID: MRT4577_69115C.1
atagctacatacaaagcacattcgtggtccaacactgtctgaccaaatattcagccttggtatgctcctatggtcgttatgcaagcgctgctaccgctaccattatgccgcaatgctggcacgcttatataactatgcttataacaatgtacctctcaccagacgtgtgttagatatgtgtaaacccctttactatactacacgcgatacaacaggctatcacagatggtatcacagctgtatgaaccgtgctgctaccacacttatgagctatagtacatgagatacctaaggagcatatatcggcacagaacatcagggc

SEQ ID NO: 150873 - DNA, 408 bp, Zea mays
  Clone ID: MRT4577_69116C.1
atttatttctttgataatgtttaaaaattttacttaacattcaatccatctccaacactaaatggctatctattattttacagcttcttccaaatataataatatccactgggccttaggaaagcatgcaacgtcatgtgctctaacacatgggcatacataaatacctcatgcacacccaccctgtttatttatgacatcataacaccgagccacgcaaggcagctacacacgtacatagatgtatgtaaatatatattggagtgcagaacaacctcacggagtgactatctaggcaacacaaggttcaaaattcttgacgataatgtatatgacaaaccctgctttggtgaagagctcgctccaatctttatcatatatatgcccccctttcttcatggtcattat

SEQ ID NO: 150874 - DNA, 345 bp, Zea mays
  Clone ID: MRT4577_69117C.1
ccactgtatctggaaccggtgtgcttggttctttgggtgataaaaaaacaacggatatattcttgaacccctattttacgcagggggtaaaagggcgaaacgctacccgggtttccattttattttaagaatcatgaaacaaaaaggaagtggaataacatgttaaacggttctggcccaatcatggtgggataatattgggggttaacccggccacggtgttaacggccccaattgaaagcaggtcggcttcgctgttttaataggctatgaatgaggcgcccaaaatttgccgatcccaggtccgcaatttcttccccgtttttgtccccatacagggggccg

SEQ ID NO: 150875 - DNA, 397 bp, Zea mays
  Clone ID: MRT4577_69118C.1
ccggccgggtcttgagtgactgagcgaggtcgcctcgccaccgcccactccgtcgccaaccaatggcctccgccatggagctctcgctcctcaaccccgccgcgacgcaccgccaccgcggcggcctcgccggcctgcccctcgcgcggcgctccgtgtgccgctactgcgtgttcgcctccgacggacacagagagcgacacaaacgctcgcattccaactaaccagcagaatcaggagatgcaggacaaccgggtcagtgctgtgactatgtcaccaaagtaccaattatcagaaggccgccccggtggcgatacaacgacgtggagaacaagtgctccgccgactgccatgagtgcgaagagtcgctggccgaccacgccttccactgcgatga

SEQ ID NO: 150876 - DNA, 377 bp, Zea mays
  Clone ID: MRT4577_69119C.1
ggacactcaaccctttttttttttttttctctttttttttttttttccgggaccaacaaccgggtggcggaaaaaaccccgtaaaacaaaccacacgagcgggggggggggggaacccaacaaaaacccggcctaccacggaaaaaaacacgctaaggggggaaaccaggacactgcccgggggcctctaggggagacccacctaggggccaaacccagcccactgggggccatacctagggcagccgaaaacgggcccccgctcgcggtaacacaggacaaacgggccgccaggggaaaatggaaaacccgggacaactccagagaaaaccaaccccaaaacataaaggggaaagcctggggggcctaaagggggg

SEQ ID NO: 150877 - DNA, 2712 bp, Zea mays
  Clone ID: MRT4577_6911C.1
gccggccgggctgcggagaggagagagagagagagagagagtgcgtgcgaatgcggagttactcggggactggtacgagcggagcaggggtgggcggtgggggaagcgagtggaagattgggagccaagagcacggagagtgccccgggatcttcacctcccatcattcgagtgtggagtttgtcctacttccgggagtgcttcgcttggtggcgcccagaattagtctggaagcagggtggagtgctgtctgcgcagaaatctgctcaccgggtgccaggaaacaggtggctgtagagaattgcttggggattcgtcaagaaacgacccagtaggtggttgtgcacttgttatgctgagactgaatggaggctgtagacaagattgctgagcccaaagacccttttgtgctcactgcccagaaggttcagagctcggagccaccgatacctataaaggcgtcatgtgaagggaatgactcccaacagcaagaagagacggatttgccagatgatggcgaagagagcttccggagcatggattcctctgatgaaggtgtccggagctccttctctggggctagtcaccctccagagcctattgacatggatatcatgaagacagtctatgttgcaatcgacgagaagtccgagccaccggttagtttagtgcgaggagtctcggtgaaggggcctttcatagatgacctctcgatccgtgttacaggcgcaaaggcaaatctggtggtaggtgcaggcggtgctgaaggtatggctgaagagaggaaggtatctgcttctgcagtggcatcagtcaccacagcaaggtcgtctcaggctacctctttgcctcaggactcggaggagaaggagtgcgtctgggacgcttcgctccctgcgagtggcaatgttagccctcatagtagtattgacagcatgggtgtggtcactgctatgagcaccctcaacagctgcacgagcacatataaaagcgagaccatagctggtgaagcaatgctcaatgttgagaggaactgtgagagtgtaaagggtgttcgaggtgacttactagaaagtgcaaaaactagcatgagtcgagcaagtgatagcagtgttgttagtgatgacagcagctggagccacatcactggaggtgcccgcaagcctcacaaggggaatgatcctagatggaaggcaattcatgctgtacgaactcgtgatagcgtgcttggaatgagccattttagactactaaagcgtcttggttgtggtgatattggcagtgtttacctctcagaattaagtggaactcggtgctactttgcaatgaaggtaatggacaaggcatccttggcaagtaggaaaaagttaaatagggctcaaactgaaagggagattctacagcttcttgaccacccattcctcccaacgttgtatacacattttgaaaccgacaggttctcttgtttggtgatggaattctgtccaggtggtgatctgcatactttgcgacagagacaaccaggaaagcatttctctgagtatgctgcaaggttttatgccgcagaagtacttctagctctggagtatctacacatgttgggagtggtctatagagatctgaagcctgaaaatgttcttgtgcgcgatgatgggcacataatgctttcagactttgacctctcgctgagatgtgcagtctcacctacactcatcagaacatcagctttcgattctgatcccagaagagcaggtggttctttctgtgtacagcctgcttgcatagaacctacttcagcttgtatccagcctgcgtgcttcctccccaaattcttcggacagaagagcaagaagaagactcgaaaggcaaggtctgagttgggacataacgccggcaccctgcccgagcttgttgccgagccaacatcagctcggtcgatgtcatttgtcgggacccatgaatacttggcccctgaaatcatcaaaggcgaagggcacggaagcgctgtcgactggtggaccttcggcatcttcctgcatgagctgctgtacggcaagaccccgttcaaggggtcagggaaccgcgccaccctgttcaacgtggtaggccagcaactgaaatttccggagtcgccgtccacaagctactcgagcagagacctcatccgtgggctcttggtcaaggagccgcagagccgcctgggcgtgaagcggggagcgacagagataaagcagcatgccttcttcgagggtgtgaactgggctctcatccggtgcagcactcctcccgaggtcccgaggcctgttgaggctgagctgcctgtgaagtatggggtggcggaggcgatcgggagcaacagcaagcgggtagtcggagcagacgtgaagtcggccggaaaatacctggactttgagttcttttaagagcagtgcgtgcccagtggcagctattgtttgcgtactgtccgtgtatggtcggttttgatgtttgtgtgattcgatatggtgatttgtgcctcgccgtcgatgcacaattgtcaggtttgaatcgaccaaaattagataggtgtgtgttgccatttgcctgctttggcacatttcgagtttatgtatggaactatgtatagagtatgcattgcaatttgcagcaaacctgaaaagcagctaagaaggccctttcctccttgtttatgcaaaaaaaaaaaactcgtgc

SEQ ID NO: 150878 - DNA, 1710 bp, Zea mays
  unsure (1)..(1710): unsure at all n locations
  Clone ID: MRT4577_69120C.1
caacgccaagaccctttccgccgtggatctggggtacccggtgaggtcccccgtgatccgctgccgccatcaatgccctcctcccctcccagatcccgtgatctgctacgaagctgccatcaacgccctcctccccctccgctcagctccccctcgcgccttcgatccgctgccgtgacccgctgcgaggcggccatcaacgcccatgccccccttcgcgcagctaccttcccaggatctcgggtgctccttcgtcgccatactttttggtccacaacacccgccatcaacgccctcctcccctcttccccaatctattcaggagatttgcaagaatatcatttgatgtttttagctcttagagcccgacgacaagatgggcgaggagtggatttttgagacgtggttgacagcaatggatagtaggttgccattttccttgcccaacgtctaggcacggctcccagatcccctcgccttcgccggggcagagcccctgcgcggccccagcgccgccagggacactccatgcgcgccatccgctccgctctgctgcagccggactccntccccggggtccccatcctcgcgcgatggcggcaccaacgcgggcgactcggacattgagaacctcaccgaatccgtcatcgacttccacccccgcgagctcgccgccagagcagcttcacaacaatacgtgcctgcctgccctgcctctctcgcctccccctcctacgccgccccttcctcggcccccacgcgctcgcagcggcgcacgaggcgacgaacccgtgcgctcgggccccgggtacgagcagctccacaacaattcgtgcctgcctgccctgcctctcggccacctccctcgtcctccccctcctacgccgcccccgtcctcggcccccacgcgctcgcgcggcgcacgaggcgacgaacccgacctcctcctccgcgcccgtccctgccaccggtcgccgatattggaaggagctcggagggctggggcgctgacctgagttttatggagagaggatgccagagctgcgaagcagtactcgccaagcatgcctaaggtcgaagaagcttgaagatctgcagctaggagagccgcctgcgaaaccggtgtcacctgctccgccgagggcaggaaagcgtgctcctacacgtgctgctaggggcagaaagggtgccactgggaaaggagtgccccccgcacctaagactagaagaaagcggggtaatattgtcgacttggaagctgatccagcttgtgaagacccccctaaagctgtcaagggactggaagttgctgctgctgctgcacccaagaaccttcctttgaaggaggtagccgaggttggtgttctgaaaatgaatggtgtgagtgcagagaagattattggggctgaagatgaatcaacagcgacacctgtgccagagagggttcaagtaggtaattctccagagtacataactgacaggaagttaggtaaaggtggttttggtcaggtctatgttggtcgaagggttctggtggagctgcccgcactggtcctgatgcatatgaggtcgcattgaaattagagcatcgaaatagtaaatgatgcaattatggccccccatatgagtggcaagtttataacactctcaatggttgctatggcataccatcggtccactacagggggtcgtcagggcgaatactatata

SEQ ID NO: 150879 - DNA, 527 bp, Zea mays
  Clone ID: MRT4577_69121C.1
gtggcccatatatgggggaaacaggcttggggactagcaaaaaaagggagaaaaagaaggggggacacaaaaagggggggggggctcaaggacggaagaacaaaaggggacaacaaccggggggttccacccggggaatggccaaaggaacaaatcaaaggcgggaaacccttggggaagtcccggaaacaaggaaaaagcatcaacagcaaaccggataatcggggcgggaaaacactgggggagggcactgatggggcaagttacagggggaagccccaaatggccccgcccagtaatcttggcggaagaaagccgaaaaagtgatcccagttgcattccccctttaaaaatttaaaacaaggacccctaaattgggacccccaaagggggggcccgagggggaacacagagggggaccaatcccctagggggaaaaccggggggctcaaaattgggaccccactttgggggcccacgggggaaagacgggggggaaacataaggggccccccttggggggaaga

SEQ ID NO: 150880 - DNA, 342 bp, Zea mays
  Clone ID: MRT4577_69122C.1
cgtcgctggtcgagcgcgcgaggcagcaggcaccggctaggcaggcagggaataatggcccccaaggccgcccgtggcacgggcaggggcggcggcggcagaggcggcgacaggaggaagaaggaagagaaaggtacgggcgttgttctgcgcaccacctacgcaacctactacctcctcagtctccacctcctttctcgttgtatgcacgcacgtacgtacgtgcatggggaagactgaagaacccttggtgttctgcttgacaccatggatggatggacggacacgacagacactgtgttgccgatcgcagtagcacttgcatgattgtagttttggctg

SEQ ID NO: 150881 - DNA, 266 bp, Zea mays
  unsure (1)..(266): unsure at all n locations
  Clone ID: MRT4577_69123C.1
gggcggggggggggtnanaaaacaaaaaattcctaattgcctcttattatctttatccgatcagctaattccaccctgggctgtctatttttatgcaagggggggccctttttaattaatttttaagaccaaggtaaattcatcatacacaagagaggggtaatgttcaattatacacgacttcttcatttagtttttttaaatacaacagaccacttgcattctttcctcctacaccaaaagccatgtttcccacgtacaagaac

SEQ ID NO: 150882 - DNA, 891 bp, Zea mays
  Clone ID: MRT4577_69124C.1
ctctcttctctccccgcggcccgtgactcatccacccacagtccactcgccactccccccggaacggcggcggcggcgacggcggaggagtaacgcaagatggcgaggaaacctctcgactacgaggagctgaacgagaacgtcaagagggtgcagtacgcggtgcgcggggagctgtacctccgcgcctccgagctgcagaaggagggcaagaagatcatcttcaccaacgtcggcaacccgcacgccctcggccagaaaccgctcaccttcccgcgccaggtggtggcgctgtgccaggctccgttcctcctcgacgatccccacgtcggcctcatgttcccggcggacgccatcgctagggccaagcactatctcgccatggcgcccggcggtctaggtgcgtacagtgactcccgcggcatcccgggaatcaggaaggaagttgccgacttcatccaccttcggaccactatccttccagcggaggaagacttccctgccatcatgtcgagcttcaagaagttcaacgactcgttcatggaacagtacgagggctactccaggctgtgagcaggaagagaaacaagagattacagatctgaagaagagattattgattggaagcttattagttattgtaactcccttgaaaagcaggttgtgcggggattattgtttattgaataaaaagtccgccatttgattctactgccataccagtatatataattgtgaattggcttgtacttgctgctggtggggagaggtggaaatagctagccctccttgaccgcgcgcgacaagaatgtcgcctctcgttctggagattattggagagttgaatagttcataatcagtctacctacaatatattgcagaaaaagaaaa

SEQ ID NO: 150883 - DNA, 847 bp, Zea mays
  Clone ID: MRT4577_69125C.1
ggccggccgggagaaaccggcaaggggatcgaagcggagagcaagggagcggtcgagcgggtgacatcatcgtcatccagggtttctcaatcggcagcgatggcgaccagggcggcggcgaggagaaggccgccgagaacgtgtacatcaagaaagtggaacaagagaagctggagaagctcgcacgcaagggccccagctcaggagagcaaccctcgtcaaccacaggctctgcagcaagtgatgtgaaggccgatgctgggccaacggagtcagcatctgcaagtgtgtcgacggacaagaacaagaactatgctgttctggcaggcgcagttgctgccctgggtggcttgggttggtatctattgttaaagcctaagaagtcggaggaggttgtggactgaagagggaggttgtgaatgcggatggtcggccttatatctcaccatggttttactttctgcgcatagacctgcaacttctgaaaataattgttgaaatttactctgcactacttgttcttaggcctgttgcatcacagaaccttgaagtatatactcgagttgttcagtagttctctccctcgcttggcaggttgcaatgttgagtgatgcttgtagtgctgcctgcatcgttgctggataggtttttggatagcttggtttagaaggggaggcactaaaccaggcctcaatctacttcaatttctttctcccaaacaatctttctgattcaattccaaaagtacgctctacttcccaatatagattattacatgtgttgcgtatgttgtgggattcataattttattccatggtttacacagaactgtccaaagtgttctgtc

SEQ ID NO: 150884 - DNA, 422 bp, Zea mays
  Clone ID: MRT4577_69126C.1
cctcgaggccggccgggccgggttccactgcctcagctcctggaggcaacggggatttccactgttccgggatctggttttgggcagaaggaaggggtgttccaccttcggacaactatccttccagccgaggaagacttccctaccatcatgtcgagcttcaagaagttcaacgactcattcatggagcaatacgaggtctactccaggatgtgatgtgaacatgaaaagaagcgaccgctgccttaatttcactagctaccattttgcttctactgcccatactagtagaacagtgatcggtgcactatgtgatatttgctgctgcaactgcggccttagtctgctatgtatgtgttgcctgttctgaaagagtaaagaagcgaccgataaaaaaaaaaaaaaaaaaggcccctagggcc

SEQ ID NO: 150885 - DNA, 318 bp, Zea mays
  Clone ID: MRT4577_69127C.1
tcggaattcggctcgagtattcatataagagctgtcataaaatttggctttcaattctgtatgttagacagctgggttgggagtaatggaggggactgagagggccaaaatattttagggcttgttcggttattttcaattcatatgtattgggagagattgatttagattggaggagatttgatgtactataaattgaaacttcctcaatccatatagattggagtaaaactgaatatatctttagggcttgttcggttttaggtgaaaaaaaaaaataatataaaatttaaaattaaaaaaaaaaaaaagaaaagg

SEQ ID NO: 150886 - DNA, 917 bp, Zea mays
  Clone ID: MRT4577_69128C.1
cattgggtacctcgaggccggccgggcgcagttccacttcaaggtccgagggctccagaaaccggcaaggggatcgaagcggagagcaagggagcggtcgagcgggtgacatcatcgtcatccagggtttctcaatcggcagcgatggcgaccagggcggcggcgaggttcctgcagcgcaggtttctgtcttccggcggcaaggtcctcagcgaggaggagaaggccgccgagaacgtgtacatcaagaaagtggaacaagagaagctggagaagctcgcacgcaagggccccagctcaggagagcaaccctcgtcaaccacaggctctgcagcaagtgatgtgaaggccgatgctgggccaacggagtcagcatctgcaagtgtgtcgacggacaagaacaggaactatgctgttctggcaggcgcagttgctgccctgggtggcttgggttggtatctattgtcaaagcctaagaagtcggaggaggttgtggactgaagagggaggttgtgaatgcgatctgcggatggtcggccttatatctcaccatggttttactttctgcgcatagacctgcaacttctggaaataattgttgaaatttactctgcactacttgttcttaggcctgttgcatcacagaaccttgaagtatgcactcgagttgttcagtagttctctccctcgcttggcaggttgcaatgttgagtgatgcttgtagtgctgcctacatcgttgctggataggtttttggatagtttggtttagaaggggaggcactaaaccaggcctcaatctacttcaatttctttctcccaaacaatctttctgattcaattccaaaagtacgctctactttccaatatagatatacaggactttcctatataaaaaaaaaaaaaaaatgcgggatt

SEQ ID NO: 150887 - DNA, 1281 bp, Zea mays
  unsure (1)..(1281): unsure at all n locations
  Clone ID: MRT4577_69129C.1
tgttgcaaaagttgcagggtcaggctgccgcggcaacgggtcgtcgtctcctcacctcgccggggctttacttatccaccgcagggccaccgagcgaggcgataacccaaccagtatcagccagctcgcagtccctccgccaccaatttttttcccctcattctcgtttccaaattatccgccgctgaaacaatctgcacccccacgcacaagcacgaagcagtcagcagtggagtacaaatcctcgcctgcttcctggttttctctccccgccactccagcggaacggcggcgagggagtgagtgacggcagcgaggcaagatggcgaggaggaggccgatggactacgaggagctgaacgagaaagtcaagaaggcgcagtacgcggtgcgcggggagctgtacctccgcgcctccgagctccagaaggagggcaagaagatcatcttcaccaacgtcggcaacccgcacgccctcggccagaagccgctcaccttcccgcgccaggtggtggcgctgtgccaggctccgttcctcctcgatgaccccaatgtcggcctcatgttcccgcccgatgccatcgtgcgggccaagcgctatctcgccatggcgccgggaggtctaggtgcgtacagtgatgcccgtggtatccccggaatcaggaaggaagttgctgacttcatccacaagcgtgatggatatccgagtgatccagaactcatttacctcacagacggcgccagcaaaggtgtgatgcaaatgctgaatgccatcattagaaacgagagggatgggatcttggtccctgttcctcagtacccactttattctgctatcatttccctctttggtggttctctggtcccatactacttggaagaagaggctaactggagcctcgactttgtgaatatccggcaaacagtggcggacgagcgatggtgatgataaatccaggaaatcccactggccaatgccttagtgaagcgaatataaaggaacttctgcaattttgctaccatgaaaacttagttctgctagcagatgaagtgtatcaacagaacatttatcaagatgaacggccatttataagcgcaagaaaggttatgttcgacatgggtccaccaataagcagtgagcttcaggttgtttctttccacactgtgtcgaaagggtactggggagagtgcggacaacgtggtggatacttcgaaatgacaaatcttcctnccaagacagtagatgagatctacaggttgcatcgatagcactgagtccaa

SEQ ID NO: 150888 - DNA, 1429 bp, Zea mays
  Clone ID: MRT4577_6912C.1
ctagtacaagtcgctaccggttgctatgactctttactaccgaccgaccgttacagaggctctttcctccgttcaatatataatgacggaggccaactttggttggttaatccgatcggttcatcgatggtcagcaagtatgatggttctaatgatgatcctgcacgtatttcgtgtgtatctcacaggtggatttaaaaaaccccgtgaattaacttgggtcacaggcgtggttttggctgtattgactgcatcatttggtgtaactggttattctttgccttgggatcaaattggttattgggcagtcaaaattgttacaggtgtacccgaagctattccggtaatagggtcccctttagtggaattattacgtggaagtgctagtgtgggccaatccactttgactcgtttttatagtttacatacctttgtactacctctgcttactgccgtatttatgttaatgcactttccaatgatacgtaagcaaggtatttcgggtccgttatagggaaggcatagcatagagaattctaattctcatatatcatatcgggtaggttgtggtatttcattgctacaaacatgggttattgtaaaataagacatgtcatttggatacttctcttcaacttcgaagtatttttatacgaatagttgaagtgaattttacgaaagaaaataaggcggattatgggagtgtgtgacttgaattattaatttggccatgcagatagagaattggatctgccacattagaattcacgaccaaaggtgtctccgcatccaatcaacacgtaagtcccctatctaggaaggataggctggttcactcgaggagaatattttctatgatcataccccaccaaccatgtcatccatgaacaggctccgtaagatcctatagagtataaatggaataagtcatgtgatatgatccaattcaatttttattacacttactttttattatagtatggaaatgcattcattttctttgcatcgattttgatccgcaatactatcggagtaaaagaagggatctaaggaagaacgcaggctaaactttttgattttttattagtaacaagtaaatactttgtttggacataagaaacttgcgatatcgaggggaggaaatacgtggaaaaaaaaaataaaacctgtacacgtgtatgtccagatcgcgtgccgtcgatcgttcttcgttgttgatttttggttgtattgatcgatccgtatgtgtgcgtgcgtgtgtggcgttgctctttcttcttttgtgtagctgccctgccaccggccgacgtgcatgccatggtggcggacagcgttttctaaggtcatatactgttgttgtgtttaagtacatcttgcgtactcaattccttctaagtaagtatcctaatactagaatgttcctctacta

SEQ ID NO: 150889 - DNA, 1969 bp, Zea mays
  Clone ID: MRT4577_69130C.1
ttattattatctattccaaacctttctgcctccggccagcagtcagcacagcagcggtagagtacaaatcctcacctgctcccctgcttcctgcttttcgtcctcacctcccttctctccccgcggcccgtgactcatccacccagtccactcgccactccccccggaacggcggcggcggcgacggcggaggagtaacgcaagatggcgaggaaacctctcgactacgaggagctgaacgagaacgtcaagagggtgcagtacgcggtgcgcggggagctgtacctccgcgcctccgagctgcagaaggagggcaagaagatcatcttcaccaacgtcggcaacccgcacgccctcggccagaaaccgctcaccttcccgcgccaggtggtggcgctgtgccaggctccgttcctcctcgacgatccccacgtcggcctcatgttcccggcggacgccatcgctagggccaaacactatctcgccatggcgcccggcggtctaggtgcgtacagtgactcccgcggcatcccgggaatcaggaaggaagttgccgacttcatccacaagcgtgatggatatcccagtgatccggaactcatctacctcacagacggtgccagcaaaggtgtgatgcagatcctgaacaccatcattagaaacgagatggatgggatcttggtccctgttcctcagtacccactttattccgccaccatttccctctatggtggttctctggtcccgtactacttggaagaagaggctaactggagcctcgactttgtgaatatccggcaaacagtggcggaggcacggtccaagggaatctctgttcgagcgatggtgatgataaatccaggaaatcccactggccaatgccttagtgaagcgaatataaaggaacttctgcaattttgctaccatgaaaacttagttctgcttgcagatgaagtgtatcaacagaacatttatcaagatgagcggccatttataagcgcaagaaaggttatgttcgacatgggtccgccaataagcagtgagcttcaggttgtttctttccacactgtgtcgaaagggtactggggagagtgcggacaacgtggtggatacttcgaaatgacaaatcttcctcccaagacagtagatgagatctacaaggttgcatcaatagcactgagtccaaacgttcctgggcaaatttttatgggagtaatggttaaccctcctaaacctggagatatctcgtacctgaagttcgctgctgaaagcaagtccatccatgaatctttgaggaggagagcacgcatgatgacagatggtttcaacagttgccgaaacgtcgtgtgcaatttcactgaaggagctatgtactctttcccccaaatacgtctgccaccgagagctattgaggcggcaagaagagccggcaaatcagcggacgtcttctactgcctcaagctcctggaggcgacaggaatctccactgtcccgggctctggttttgggcaaaaggaaggggtgttccaccttcggaccactatccttccagcggaggaagacttccctgccatcatgtcgagcttcaagaagttcaacgactcgttcatggaacagtacgagggctactccaggctgtgagcaggaagagaaacaagagattacagatctgaagaagagattattgattggaagcttattagttattgtaactcccttgaaaagcaggttgtgcggggattattgtttattgaataaaaagtccgccatttgattctactgccataccagtatatataattgtgaattgttttgtacttgctgctggtggggagaggtggaaatagctagccctccttgaccgcgcgcgataagaatgtcgcctctcgttctggagattattggagagttgaatagttcataatcaaaaaaaacggacgcgtgggcagaaaaagtactgatcagtccg

SEQ ID NO: 150890 - DNA, 211 bp, Zea mays
  unsure (1)..(211): unsure at all n locations
  Clone ID: MRT4577_69131C.1
cgctcgagccacgcgtccgggcctacttgcttttcttcccagatgtctacttttacacactcatatgcaacgtgacganatttgcgcaacatcacaagcaaccaccacctgcattacaacacctgtgacaacccaccgaaccaactccctcactacttcactctcgtcgacttcaacggcatgcttaacactaacgccccctctacaagga

SEQ ID NO: 150891 - DNA, 1884 bp, Zea mays
  Clone ID: MRT4577_69132C.1
cattgggtacctcgaggccggccggggcttcctgctctttcgtcctcacctcccttcccccactctcttctctccccgcggcccgtgactcatccacccacagtccactcgccactccccccggaacggcggcggcggcgacggcggaggagtaacgcaagatggcgaggaaacctctcgactacgaggagctgaacgagaacgtcaagagggtgcagtacgcggtgcgcggggagctgtacctccgcgcctccgagctgcagaaggagggcaagaagatcatcttcaccaacgtcggcaacccgcacgccctcggccagaaaccgctcaccttcccgcgccaggtggtggcgctgtgccaggctccgttcctcctcgacgatccccacgtcggcctcatgttcccggcggacgccatcgctagggccaagcactatctcgccatggcgcccggcggtctaggtgcgtacagtgactcccgcggcatcccgggaatcaggaaggaagttgccgacttcatccacaagcgtgatggatatcccagtgatccggaactcatctacctcacagacggtgccagcaaaggtgtgatgcagatcctgaacaccatcattagaaacgagatggacgggatcttggtccctgttcctcagtacccactttattccgccaccatttccctctatggtggttctctggtcccgtactacttggaagaagaggctaactggagcctcgactttgcaaatatccgacaagcagtggccgaggcacgttcgaagggaatctctgttcgagcgatggtgatgataaatccaggaaatcccactggccagtgccttagtgaagcaaatataagggaacttctgcgatattgctaccatgaaaacttagttctgcttgcagacgaagtgtatcagcagaacgtttatcaagatgagcgcccatttataagcgcaagaaaggttatgttcgacatgggtccgccaataagcagggaggttcagcttgtttctttccacactgtgtccaaagggtactggggagagtgtggacaacgtggtggatacttcgaaatgacaaatcttcctccaaagacagtagatgagatctacaaggttgcatcaatagtactgagtccgaatgttcccgggcaaatctttatgggagtgatggttaaccctcctaaacctggagatatctcatacccgaagttcactggccgaaagcaagtccatcctcgaatctttgaggaggagagcgcgcatgatgacagacggtttcaacagctgccgaaatgtggtgtgcaatttcacagaaggagctatgtactctttcccccaaatacagctgccagcaagagccatcgaggcggcaaagagagccggcaaagcagcagacgttttctactgcctcaagctcctggaggcaacggggatttccactgttccgggatctggttttgggcagaaggaaggggtgttccaccttcggacaactatccttccagccgaggaagacttccctaccatcatgtcgagcttcaagaagttcaacgactcattcatggagcaatacgagggctactccaggatgtgatgtcaacatgaaaagaagcgaccgcgccaccattttgcttctactgcccatactagtagaacagtgatcggtgcactatgtgatttttgtgacactacatatttgctgctgctgctgcaactgcaactgcaactgcggccttagtctgctatgtatgtgttgcctgttctgaaagagtaaagaagcgaccgataatattgtatcctgagccgcgcggcagtccaaaacagttatcaagagaaagggaagcatcagcagcgccgccgccgctagagcccttgacag

SEQ ID NO: 150892 - DNA, 2207 bp, Zea mays
  unsure (1)..(2207): unsure at all n locations
  Clone ID: MRT4577_69133C.1
tgggaccctcgaggccaggcggtgtggatatccgcgcctgcccccccccttcctcctccccgacctcgcctcccttccccactctcttctctccccgcggcccgtgactcagccacccagtccactcgccactcccccggtccgcccgcggcgggtgccgcaatctttttccgcccactcgcgtgacggcgacgaccgccgctgaaacaatctgcacccccacgcacaagcacgaagcagtcagcagtggagtacaaatcctcgcctgcttcctggttttctctctccccgccactccagcggaacggcggcgagggagtgagtgacggcagcgaggcaagatggcgaggaggaggccgatggactacgaggagctgaacgagaaagtcaagaaggcgcagtacgcggtgcgcggggagctgtacctccgcgcctccgagctccagaaggagggcaagaagatcatcttcaccaacgtcggcaacccgcacgccctcggccagaagccgctcaccttcccgcgccagacggcacttcatcccgttcccgtgcgcaggtggtggcgctgtgccaggctccgttcctcctcgatgaccccaatgtcggcctcatgttcccgcccgatgccatcgtgcgggccaagcgctatctcgccatggcgccgggaggtctaggtgcgtacagtgatgcccgtggtatccccggaatcaggaaggaagttgctgacttcatccacaagcgtgatggatatccgagtgatccagaactcatttacctgacagacggcgccagcaaaggtgtgatgcaaatgctgaatgccatcattagaaacgagagggatgggatcttggttcctgttcctcagtacccactttattctgctatcatttccctctttggtgggtctctggtcccatactacttggaagaagaggctaactggaaccttgactttgcaaacatccgacaagcagtggccgaggcacgttcgaagggaatcactgttcgagcgacggtgattataaatccaggaaatcccactggccagtgccttagtgaagcaaatataagggaacttgtgcgattttgctaccatgaaaacttagttctgcttgcagatgaagtgtatcaacagaacatttatcaagatgagcggccatttataagcgcaagaaaggttatgttcgacatgggtccaccaataagcagtgagcttcaggttgtttctttccacactgtgtcgaaagggtactggggagagtgtggacaacgtggtggatacttcgaaatgacaaatcttcctcccaagacagtagatgagatctacaaggttgcatcaatagcactgagtccaaacgttcctgggcaaatttttatgggagtaatggttaaccctcctaaacctggagatatctcgtacctgaagttcgctgccgaaagcaagtccatccttgaatctttgaggaggagagcacgcatgatgacagatggtttcaacagttgccgaaatgtcgtgtgcaatttcacagaaggagctatgtactctttcccccaaatacggctgccagcaagagccattgaggcggcaaaaagagccggcaaagcagcagacgttttctactgcctcaagctcctggaggcaacaggaatctccactgttccgggctctggttttgggcaaaaggaaggggtgttccaccttcggacaactatccttccagccgaggaagacttccctaccatcatgtcgagcttcaagaagttcaacgactcattcatggagcaatacgagggctactccaggatgtgatgtcaacatgaaaagaagcgaccgcgccaccattttgcttctactgcccatactagtagaacagtgatcggtgcactatgtgatatttgctgctgctgctgaactgcggccttttctcactcaacactctgcttagtctgctatgtatgtgttgcctgttctgaaagagtaaagaagcgaccgatattgattgcaagcttattagttattgtaactcccttgaaaagcaggttgtgcggggattattgtttattgaataaaaagtccgccatttgattctactgccataccagtatatataattggagagttgaatagttgagagttgaatagttnanaaaaaaaaaaaaaaannaaaaaaaaaaaaaaaaaaaaaaaaaaaaaaaaaaanaaaaaa

SEQ ID NO: 150893 - DNA, 741 bp, Zea mays
  unsure (1)..(741): unsure at all n locations
  Clone ID: MRT4577_69134C.1
gtacgcctgcaggtatcggtccggaattcccgggtcgacccacgcgtccgctgggaagaaagaggacctatacctgaagcctatccagagaaccattctgatgatgggccgctacgtggagccgattgaggacgtgccatgtggaaacattgtggggctggtcggagtggaccagttccttgtgaagacggggaccatcactacctttgagcacgctcacaacatgcgcgtgatgaagttcagcgtcagccctgtcgtccgtgtggcagtggaggccaagaacccagctgacctgcccaagctggtggaggggctgaagcggctggctaagtctgaccctatggtgcagtgcatcattgaggagtctggagaacatattattgctggcgccggtgagctgcacctggagatctgccttaaggacctggaggaggaccatgcctgcatccccatcaagaaatctgaccctgttgtgtcatatcgggagacagtcagtgaggaatccaacgtgctgtgtctgtccaagtcccccaataagcacaaccggctgtacatgaaggccaggcccttccctgatggcctggcagaggacatcgataagggtgaaggtgtctgcctgccaggagctcaaggcacgtgcccgctacctggccgaaagtatgagtggggacgntgctgaagcccggcagatctggntgctttggccctgatggcactgggccccacattctcaccgacata

SEQ ID NO: 150894 - DNA, 672 bp, Zea mays
  Clone ID: MRT4577_69135C.1
tattcggcacgcggcctccctcctcctcggtccactccaacgtccaaccccaggcctgccgcggccacagacgggccgcgccgccgccgcagcttccgattccgcttccgccggccgttctgccccgcgcgcgcctgtggcgcttgagcgggcggatttgttcggcccgttctttggccgccgccgttgcgctgcgccgtgttggcttccagttcccatccaggcgtcttgagattccccggccggagatctgcttaattcgtacctctctctggttctgaggcccctccgaggtggaggaggagctcgtgggtcgacgaaagaacaatcgtttctttgcccactcctgcggctgcttctccgtcccaggctttccagccatggaggaggtggaggtggccaacatggccgcggtggagagctgccaccgggtgctggctctgctctcgcagcagcaggacccagccctgctcaagagcgtagcttcagagacggctgaagcctgcgccaagttcaggaaggtagcggccctcctcggcagtgccagtggcggaggtggctgtggccatgctagaggcaggttctccagacgagtccggcctctggggctcgtcaaccagaagagccccttggggatcgccaccggcagcggcaacccgctggagatgatgc

SEQ ID NO: 150895 - DNA, 421 bp, Zea mays
  Clone ID: MRT4577_69136C.1
gggaaggaacaaattccaattttttgctgcctgagcattgtttaaaaaacccatcaaaaccctttttagttccccctttcaaggcaagggttttaaagccctaaaaaccgtccacttaaaatgttagccataaccaaaaaaaaaaaaatttcctcccaaatgatttgcaaattccaatcaatgttgctgttttatccccaataataaatagctcaaatgcttgttggatgggtgaattcataccccaattttggttacaactttagttttaaaaattttttttgggcgacaaacaagccccatgactttttgccctttgttttcaaacctttgcaactggcaatacggggaaacatgagggccataccaaagggttcttatgggcttttgccccttccccgcaaaggtgttttttgctttt

SEQ ID NO: 150896 - DNA, 2339 bp, Zea mays
  Clone ID: MRT4577_69137C.1
ctgccttcttgcccccgcggggggggctggccgctgctctcttcctccctcctcctcggtccactccaaccccaggcctgccgcggccacagacgggccgcgccgccgccgcagcttccgattccgcttccgccggccgttctgccgcgcgcgcgcctgtggcgcttgagcgggcggatttgttcggcccgttctttggccgccgccgttgcgctgcgccgtgttggcttccaggtgcgcaatccggtcccgtgctctgttcgtgagctgaggatttgggtagtccgccaccctggatcctgatgggccgttcctgtgcagttcccatccaggcgtcttgagattccccggccggagatctgcttaattcgtacctctctctggttctgaggcccctccgaggtggaggaggagctcgtgggtcgacgaaagaacaatcgtttctttgcccactcctgcggctgcttctccgtcccaggctttccagccatggaggaggtggaggtggccaacatggccgcggtggagagctgccaccgggtgctggctctgctctcgcagcagcaggacccagccctgctcaagagcgtagcttcagagacggctgaagcctgcgccaagttcaggaaggtagcggccctcctcggcagtgccagtggcggaggtggctgtggccatgctagaggcaggttctccagacgagtccggcctctggggctcgtcaaccagaagagccccttggggatcgccaccggcagcggcaacccgctggagatgatgcccagcacagctgctgctgctgggtctccatctccacctcagtcgactagctatgcgcaaatgcgcgctcggcttagcagtgcgccagagtcctcacgagggctggatttggcctgctccagcagcaggtgtagccctcatccatttggagcccccaagctggtccagccactgtctgtgcagttccagattgggagtgttgcgcataggtacccgttccaccagcagcagtcgaggcagaagctgcaggccgagatgttcaggaggagcaacagtgggatcagcctcaagttcgatagccctagccccagcggtggtgctgctggcaccatgtcgtctgcgagatcattcatgtcgtcgttgagtatagacaggagcatggcgagcttggatgggaagcggccgttccatttggtaggcaccccggtggcgagcgacccagcagatgcgcaccgtgcgcccaaacggcgatgcacgggtagaggggaggatggaagaggcaagtgtgccaccactggcagatgccattgctcaaagagaaggaaactgcggattaagaggtcgattagagtgccagccattagcaacaaaatcgctgatatccctcctgatgagtactcgtggcgcaagtacgggcagaagccaattacggctcgagcacacccgaggggttactacaaatgcagcagcgtcaggggctgcccagcaaggaagcacgtcgagcgatgtgtagacgacccggcgatgctaatcgtgacatacgaaggcgagcacagccacacccagctgccagcacagcctgcccagacctagaagatcagtaaatcgtcgctccattctggaagcgcggggagcatgcctttgcacctagatggtcatgtagaatctcaggccttcgattttcgattgcagcagcagcaatgaccatggagagaatcttatgagctgcttggcccccctcctgagtcactctgttacagatgcaagagtggggactgctgccaagttgttcatctttcttgtgagctgtggcatgtatgtataattgaaagatggtgcaggaaggaaggaaaatgcagcgtccgacagcgaccggtgagctttgccggtgagcctgaagggttgaaagcaaagactgacaagaggaagtgaacaaccgcgcattgttgtgagggtggattaggatgggaagatttggcttttagcgtgcacaagttcacttgccatggactagcctctgtatgttgcttttgctttttctgaaatatcgcatcacctcttttgttgacaaaataaaaaagggtggggttgcatcccagtatcaaaggagggagctccgtactgaccccgctgcaagttaggaccatctgggttttccaggtgtaagcattccagaagggaaggtgcaaagctgttgttggtgtgatttgccacccccagtactgttgctcttgtgtaaagcattctgtgtaattaatgatttgtgccatctgcaatcttgaggatgaatggatgctctaactgaaacataaaaaaaagaaaaaagattatttattttg

SEQ ID NO: 150897 - DNA, 326 bp, Zea mays
  Clone ID: MRT4577_69138C.1
ggcatttctttctgatgtactgcaaaaaccaggcgcgggactatgagggcggggggggcaaccggctcggaaaggagaacgaggacagcgtcaacctcttcccttcctagaagcaatgcgagggccaccactacctgcaaagcattcagcagttcgtccatgcttgcgagcgccggccacatcatcgctgaagcagccgttacttcaacgttcacaaggacgacagctaccgactatgccagatgaaatgccggcgccacagtgatcggcaggcgatgcattggtacgtgcaccgctgcgagcgtaagcaacaggaagaggacgcc

SEQ ID NO: 150898 - DNA, 635 bp, Zea mays
  Clone ID: MRT4577_69139C.1
gccggccggtccgggaaacttcgaacgggacgagaaggaagcggacgcgagaggagactaaccgacctcggatccatcgacgcgtgaagatgtcttcgcccgccgagtgagtcccttcgactattacagcggtttcatctgattccaagcttcgcgatctcagattccgacacgtagatgttgtatggtaggccccgtgattcgggttcgggatctctagaggaattcgagctgaactgttccgagtaatcgatggatcccatcatttttatcagaatagagtgggcttatccttgggctgccagagtcgaggtctgtggcggcggattcgtggtgccactttgatcccttaggcttccgcttcgaaattggtctggcatttgagctgatatgtccatgttcgtcggtgctgtatgttgctggactggtacagcgttacatacatatacatcggctttgtactgcacctttgtactgtcacgaacacgagatgaagggttagttttctctgttgataaatagtctttcaacctggaagtagagttgagtgaactatggcctttatcccaaaaaaattatagtacctgaattggtttgttcagttggagcaaaaaaaaaaaaaaaaaaggccccta

SEQ ID NO: 150899 - DNA, 862 bp, Zea mays
  Clone ID: MRT4577_6913C.1
cgagttttttttttttttttttttgacatagcaagatagatggattacgcaaattgattaggacatcattacacagaactacatatgtccattctacgggattccattcagcaagatacattacataatccatcctcggtgtaaaaatgatcgaacttttttggcacaagaacaggcataggcaatggcagaacaaaatcaaacacaaaacagattcaagctacaaaactttcatttagccaaaagtcgaccaacaccccagaacaaatgtcaggcattggaatttggatacatagcatggtctgctttcattgctacattaacattgaaatttggcgacatgtttttataacagtagtagtagacccacagcttcaactcaacaaccagacaggtggacgagaagcttagaaaagagatgtgcccttgcccttcttgtctccaccaatctcaaaatgcttgcatctcttgatggcgtgctgtgagtagtgcttgcagctctggcactgcagcttcagaacaatcttcttggtggtcttggccttcttgtggaagacaggcttggtctgaccaccatatcctgactgcttgcggtcataacggcgctttccctgggcagacaggctatccttgcccttcttatactgagtcaccttgtggagtgtgtgcttcttgcactctttgttcttgcagtacgtcttcttggtcttaggaacgttcaccatcttggcggcggcggaaggggcttgtgcagcgttctacctgctccggtgctacctatccagttgagaagctgcaccgagtggcggcggcggggacacaagagctgtgcttttatgggaaggcgcccgccgcagtctaa

SEQ ID NO: 150900 - DNA, 490 bp, Zea mays
  Clone ID: MRT4577_69140C.1
cgcccgctaccccacgctctgcgcctctgcctagggttacgagcgacgctgcgccgtcggctggtgcattgacgagcgacgccgcgcggggttacgagcgacgccgtcggctggtgcgttactctcgtgtgcacagcaatggcgaatctccagagaggagaggaacccaagtgtacaagtgaaagaaatcaaaggattaaggtttaaggatgtcatcagaaactgcagctgcaccttctgaaactgaagcagctagagtgaatctcctaaaaagaaattcagatgatgttggatgggaatatggtgttcttgttgatgctaacaacaaagacaaggtgaagtgtaagttctgtgacaaggagatgaggggagggatttataggttgaaggagcatcttgcccatgttggaaagaatgtgaagaaatgcacgtctgcaacaccgcaggctctagaggctaaagagaagtgcaagaaagcaatagaggctgc

SEQ ID NO: 150901 - DNA, 138 bp, Zea mays
  Clone ID: MRT4577_69141C.1
cttgagatccacacagaaacgcggctcccggcgcatacctcatggagaaggatgacacgtccctgcatcattcattatcatgtcttctcagaaccgacgtaggccaaatgtccgttctagacaagatcgatggtacac

SEQ ID NO: 150902 - DNA, 354 bp, Zea mays
  unsure (1)..(354): unsure at all n locations
  Clone ID: MRT4577_69142C.1
natccagacacacctccctctccgaattaaggtagcatactccgttgtagtttatagagccctatctgcactcgagatcctactagtgaagaagcctgacctcgcgaagccctgcctcgcgcaatcccaagaccgacgcggctacgaagcccaagcctgctgtcaatcaatcggaatgccatcaccgctggtggctcaaacccgccttacttgcagaagatcatggaggctatcgcggaactaatagaaaggaccggctgcagctcacaagcgattgacatgtatgtgggtgacaacgcacgactcctatctgagcgacatcttaaaaagcatgctttacattcaactccgtgg

SEQ ID NO: 150903 - DNA, 153 bp, Zea mays
  Clone ID: MRT4577_69143C.1
gcgctatttctatcccaccccaattaacccttcagagtagcttgcaacgccctcgggggtatcacctaacacatacactatcctcaacttaaaatccctagtctaaaccgacgaggatcatgtcgtcttttgtcgtctttctcaccttcctta

SEQ ID NO: 150904 - DNA, 650 bp, Zea mays
  unsure (1)..(650): unsure at all n locations
  Clone ID: MRT4577_69144C.1
ctttcaagcctcgcacacacgtacgctagtcgtagcgtgtacacacaccacttgcccgagagtcgaaggtgccaagccaacgcaggtgcagatggcggccgagcaccacctcccgccggagcacgcggaccaccacagaggcgggaggaagggggtccacgccgacgacctgaagccgcgctggtggcgccgcagcccccggtacagctactactacggcgggggcgagggcgggggcgcggtccgcgccctctgcttcgccgtcctcgtcctgctcctggccgcggggatcaccctgctggtgctctacgtcgtgtaccgcccgtcccaccccaccttcgccgtcacctcggccgccgtgctggcgctgtacaacgccaccgccaacgtcgccgtgttcgccggcgccgcttctgggctggtagccgtgctggccgtcgcggtgctgtttacgctggtgctgctgctcggtcgcgttcggttcgtgcacgaaccgttccacctgggggtggtgctggttttcttccgtctgcgacctccttcttggtgttcgtaagattgggannnnnnnnnnnnnnnnnnnnnnnnnnnnnnnnnnnnnnnnnnnnnnnnnnnnnnnnnnnnnnnnnnnnnnnnnnnnnnnnnnnnnn

SEQ ID NO: 150905 - DNA, 311 bp, Zea mays
  unsure (1)..(311): unsure at all n locations
  Clone ID: MRT4577_69145C.1
ccgggttggatcccaaatctcaacccaagaacaaaatcggccaccgccaccactgaagccgaagtccgtgagtccctcggcacgaagttcggtcgcctcaaggaacaggcgaaagacatggcctccaggcaccccgtcgctggagccgcggccgtcatcgctgtcagcgccgtgggcgcctacttcttgtggcccgtggcggccccggccgtggncgtgctgaaggcgcctggctttggngttgttctcttgcttggtgccgtgctncttcccgtccttcgcctctgctgcctcttgttgctcttcttctc

SEQ ID NO: 150906 - DNA, 398 bp, Zea mays
  Clone ID: MRT4577_69146C.1
cggacgcgtgggtttttgtttcactagtcaaaaggtttgatttagaagatactccattggagccagatggtcaagaatgcaaaactgatgaagaagataggatggatgaacttgtcaaaaagaaagataggaaggatgcagaaagtactgaattcaaaaccgatgaagtagacatgaaggatggagaaagtactgaatgcaaaactgttgagataggtaggaaggacgaaaaaagtactgatgcaacagtggagctaaataataagaggtctcttctactagaactcatttccacatttgttgaaattgctgatgaggatctgcttgataaacttttcggatttatcaagacttggttgctggacagcagcatgttttgtcacagcaaagttctcttt

SEQ ID NO: 150907 - DNA, 1176 bp, Zea mays
  Clone ID: MRT4577_69147C.1
gcctacggggcgtttccctcggggcagcggattccttggcggcgtgcaccgcaccgaggagcgcgtcgctccgcgggcgccccacgcggcggcacgcgacgccgaggtggtgaggccgctctcaaagctcccgaacagcagcattgggctctacgattcctcattcgagcgtgacgcttgcggcgttgggtttgtcgctgagctatctggcgattacaaacgcgagactgttaatgatgctattgagatgcttgagagaatggctcaccgtggtgcctgcggctgcgagaagaatacaggagatggtgccggcatcatggtcgctctaccacatgacttcttcaaagaggtcgcaaaggatgctgggtttgagctacccccaccaggcgagtatgctgttggaatgttttttatgccaacagatgaaaagcgtcgtgagaaaggcaaagctgagtttatgaaggttgcagaatcactgggacatgtaatactcgggtggcgtctggttccgactgacaactcagacttgggtgaatctgcactcgagactgagccagtcattgagcaggttttcgttaccaagagctcaagatcagaggctgagtttgagcaacagctatatatccttaggagactctcaatcatctctgttcgagcctctctgaacattaagcgtggtggagagagggatttctacatgtgctctctatcttctaggactattgtttacaagggccagcttaaaccgtcccagcttaaggggtactactatgcagacctaggtcatgaaaacttcatgagttatatggctctggttcactcaaggttctccacaaacacctttcccagctgggaccgtgcacaaccaatgcgtgttttaggtcataatggagagatcaatactcttagaggaaacaagaattggatgacagcacgtgagggtctcttagaggctgagaagcttggattatcaaaggagcagctctcaagaattctgccaattgttgatgctacctcttccgattctggcgcattttgtcaaaaacgataatgttcttgagcttcttgtccgaggtgggcgaagcctgccagaagctgtgatgatgatgatccctgaggcatggcagaatgatgttgacatggcgacagcaacggcgacagcaacggaattcgagc

SEQ ID NO: 150908 - DNA, 393 bp, Zea mays
  Clone ID: MRT4577_69148C.1
ctataccagacccggagaggcgcagagactggtgtctacgtagtcgactatctccgcgactcaaagcttcttccatttcctaccgccgccgctggagctgcacaccccgttccggcgactccatgaagggagcgcatctcgatccacatcggtcaagccggaatccaagtaggaaacacacgctgggagctctactgcctcgagcatggaacttccgccgacggacagatgcccggtgacaacaccattggaggtggcgatgatgatttcagcacacttcttcagagagactggaggtggggagccccaccctcgtgctggtttagctgacctagaaccaaatgacctcgaagaggagagggaaggcacctacccgccagcgcctccacccag

SEQ ID NO: 150909 - DNA, 749 bp, Zea mays
  Clone ID: MRT4577_69149C.1
agtggctgcatgtgccttgaataagtgcggactacctcttgaagcactagaatgcttgtctactaactcgagcatagatggcaaggatagcataatcgcacatggtgatggagaccacaagattttttatggaatactgagccctgtctctgcttctaagaattggctgtcttcatctgtcattagtggcattgagtccaaccttaaactaactatggcttcaaaatatctatctagccttctgagaaagcactcactctgttcacaattgaacgcaccattatctgaagaaaaggtccttaatgagtacaacaatcatcaaattgaaaaactgacgtgtgatattacaacagtaatctcaatatttgataaaaggttctccctcaaatttgctgatatagctgagaagatcctaatcttttgtagccatgatggtttattgtttctagcgtatgttttgttatggggtactaggtcaccagatgttgcaactgataattatattcttgaatgtcaccctctctgcccaattgattatctgttattgttttcattcaaagagagctgcaagttttttagtcgatatgttgtcctctcctccatgtgttctgttctgaatatggaggacaccaattctactgcatgggcacttaaagagagacataagtacattgtaataagtttgtcaaattacctgaatgtcagcaggttacttcttaaacatgacaaaagtggaaattatattctgg

SEQ ID NO: 150910 - DNA, 223 bp, Zea mays
  Clone ID: MRT4577_6914C.1
cccacgcgttcggacgagttcaagaaggaggagaagcagcacaagcacgggcagcacctgggcgaggcccgcaccattgccgactgcgccttagcactctacgagaagcaccaagctaaaaacgaccctgaacactcgcaccgacacaagatcgaagaagaagtcccagcggctgctgccctcggcttcagcggctttgcctttcacgagcaccactagaaga

SEQ ID NO: 150911 - DNA, 652 bp, Zea mays
  Clone ID: MRT4577_69150C.1
ctcgggataacaactcatccaacctcagcgactatctaccgctatcagcaaacaatctaactttttttataatctcaaattcctcatacaaacacaatggctcgtggcgacgctgctcagaccaaggtccactacaagggcaaggctgaagacttcatcgtcttcgtcgacagctccgaggctgtccaggaatggaagaaggactccagcgttcctctcgcccaggttgtcagcggtttcaagatcctcgtcaccgacaaccacggcacccagggtattctgaacactgccagcaagggcactcttgagaacgagttcggcacctcgaacgaagatgaggttattaagcagatccttcagaagggagatgtccagacaacacagaactctgagcgccagggcgataccaacgacagcaagggttccatgctggctcactaagcaaatcgagacatgttccgacaattcacgattcaatgacaatgcggggcgaatgccagaaagagcataagctacatgggtcttgtggtctgcgcctggaatatcggctggacactacctgcataggctgcacttcctctgctggaatgcgagggcagcatcatacctttgagatatccaatgaaagtattcaagacacacagccaacccc

SEQ ID NO: 150912 - DNA, 273 bp, Zea mays
  Clone ID: MRT4577_69151C.1
cgccgccgcttgctgctagcagcatctggtcaccacgcgtaggcaaacgtccccaatctcgtatactttcgtgctcagcggggggacggcttcaccaatagtgtcggcggtggcgccgcctaacattccggtgatatcctaccccgacaggtgcgagccactgtcggccgcagcagctcggcacgcatcggcatcagaatcgctatgtgactggaaactcagacattgccttgcaatagaaggatggtgagaaggtggcatgtgaccctggag

SEQ ID NO: 150913 - DNA, 854 bp, Zea mays
  unsure (1)..(854): unsure at all n locations
  Clone ID: MRT4577_69152C.1
gagaaaaaatatcactgaggcgttgtccctattcatcccaccgaatcgggcggataatttcatcctccgcgggacaagcccctcacaagcccttctcgtcctcttcctcagatccgtctccttcaccccactggccggcgagcagcaaactccaggtgcagagcggacaagttcctcacgagcgattgctacaactacctgtttggtcgttggcgaagtgagccagtcacccttgatgtgaagggaggagagaggaggtaggagggtgaactggagccgtggaggagttgaagtcaccgtgcagctgtagctttgtggccaccggatctgctattcaacaggaggagcactggaaagtgggcacagagacttgtgatggggacaggagcgtgccggcgagccccctcccctatagcgagacgttggcgaaggcaccaaggccgtcgcacgcgacatcctagaatctttcgtgtgacgccctcgaatcctccggacggcgccggcatgccggtgttgcgaccaggcgcccacgacgaaagcaggcagcctgtcgggtgcaacgggatccgcaggggcagcggcgtgcacaagtggccgttgtccgccacgcaggcctcgcccgggcatagggcgtagagtagaaggaagcgaaggcggcggctcttcgtttggaggcggctgggccagtggacctagaaagaccgacgcttcaagaaagggagttcggctgcagtctgtggccgttcaaatgcatcggacgctcccaagttttttttgctgacgtagacgtacgagagcacacgtttacgtcgcgcttttgtatataaggatatctanaccctgacatgttgcac

SEQ ID NO: 150914 - DNA, 225 bp, Zea mays
  Clone ID: MRT4577_69153C.1
atccctccaaatcaaatccaacccgaaaacaagagagaagccctcaaaatgcacctcgacaaagagcttctatctgctatttgccttatgcactgtaacctttactgttgctactcctcacccaggtccggtggacgattctttagagcggggggtatgatggagatgatcaacgccatgttgaacttgacactgacggtgctgccagcagcgatcggtgatgat

SEQ ID NO: 150915 - DNA, 201 bp, Zea mays
  unsure (1)..(201): unsure at all n locations
  Clone ID: MRT4577_69154C.1
ggtacctcgaggacggccgggccggggggtcactaacttccgaagctcgncgttcgggatacctcagctccaataaacntcggcgggcgggcggtggagggcgagcgaagacgaggtgcttgcctcgctcggctcacaccccttttcgtctcttctctgcctttcctccgcaatcacagagcgcaagaggcgacagagaga

SEQ ID NO: 150916 - DNA, 293 bp, Zea mays
  unsure (1)..(293): unsure at all n locations
  Clone ID: MRT4577_69155C.1
agctcgaggtgcntgtttttggagagccgattgccgccatctttttattgcctttttccaaacactgccatatttggggaaaacgagatgctaaacacacaaaacaagggggcctcttttttgacgcaagcaaattttcttttctcctttctttctttttcccccttgaatcaacagggctacagcctacaggacaggaaaaaaaccatgtttacatgtctccttgaaaagaattgatcaggcccgttacagaaggcatattggacacctggttggaaacaaccacaaaaatt

SEQ ID NO: 150917 - DNA, 284 bp, Zea mays
  Clone ID: MRT4577_69156C.1
tgtctgcgccgagatcagaatccgacacatggggatttttgaaatgattgtcctacaaacggttgagagcggagaacgaattcgcgcacaagatcgcggaagagaaggcattgaaactggtgaggagaaccatggggccacatgctcggccggtgcacaagcacgggaggtcattgagaccacagaaatggactaatcatgcgctgcaccgtgtgtggtcccagatggctcttatgatcgaggggcgaggaggcacgctttgatcagatccggatgggaaaata

SEQ ID NO: 150918 - DNA, 295 bp, Zea mays
  Clone ID: MRT4577_69157C.1
ggggggggaagactatcagcccccgcccacttttgttataatttacccatggggagaacccgggcagaaaacgagggggcttttaaaaaaacgggccccacaaaaaaagcacccctgcatggcggggctaaaaggcccaacaaaacccgaagggttatacattttttacgaacaagaaagaccgcccaaaaaaaaaaaatttgccgacgatgtatttcctttacaaaaaaatacatatttcattggactggcaaggggaagctgcttaattggaccacccctgggcaagaacggg

SEQ ID NO: 150919 - DNA, 287 bp, Zea mays
  Clone ID: MRT4577_69158C.1
cactaggggctgagtaagaatcgcaaaccgggtgcttgattaggcggatactttcttcaagtttacctaaactacggaatctaaaagtaacatatggctatcaaggacccacaccttattttttaaatttggtataggtgaagatacaactgccactgggatccattatgcttacttaaacaaccgaagtatgctttgatagcgataccactcgcgcacatcgtaaatgatcagatttaaatacaggagttggtaaacttgagcacattaaatgttatatactgcat

SEQ ID NO: 150920 - DNA, 453 bp, Zea mays
  unsure (1)..(453): unsure at all n locations
  Clone ID: MRT4577_69159C.1
ggccgaaccacgcgggcggaacacgggacccagcacccccancanacccggctttccatttgcggaactaggcaccacaccaaggggccgngggggaacaacaaacagcggacaacggcgacgggcaagggcagagcacgggggcccgcaacaccgccaaaggggagccacaganggccaaagccaacggggctgagccaagggacgagccgtgcggcaagggcaacatcccggcgcccggccttgccgacgacttcgccaacaccgctgccggagcacggaacatcatgctgccaaagcagcccaagaccagccaacgggccgtcaccatgggaggaggccatggatgaccacaacactaggatgcacggcccactgtggtccacgaaacttttacctgtgggagcaggacggccaggcgatagacctcaaagccgctgccgaagcctaaac

SEQ ID NO: 150921 - DNA, 353 bp, Zea mays
  Clone ID: MRT4577_6915C.1
cccacgcgtgcgccgccgcttgatgattacgcgatgcaatgctcggagaaggcataggttactgccgacgaggtcgtgaaggcgctcgccaacatccgcactttcgagcgtgtttcgacagatctctgttactacatgtgcctacatggtgcatacagagcataaactaaagcatgtgatgatggcctcttagacgcttactatagaggcacaaatatgaaactaccagcatgtactatagctctaatcctagatcttttacctactatgagcactgaatgatggcataagtagctatcaaatacttagaagactttaaaattgactcaatggatctgaagataaatatcatt

SEQ ID NO: 150922 - DNA, 715 bp, Zea mays
  unsure (1)..(715): unsure at all n locations
  Clone ID: MRT4577_69160C.1
cagcactctgcactcatgtgtttccgcccctcctaagccaaaccccgaatcctccgtcgcccagcagccgccggtgacggcgacgctgggcaatggggactgaggtagcagccgtagtggatctccgggcgctgacacagtcggatctcgtggccctagctgccgcatcgccctacgccgtcgactcccgccggggccggcgccggcgccgcgatagcgagttcctctctcccccgaagatcgaccgcgccgttttcaacgagagcgcaggttcccgcaaacaaaccttctcccgtcgccgcgtcgccaccaacatatcccacaaactaacgcccaccaccaccggggcctcctccttgtctacgccagctgcccccaccgaggaggaccccgacaaccgcctcattgtgttctacctccaacgcctcttcgcgcgtgacgacccctcgtaccctgctccgcctacgattccaccccgaccgcaaaccctagccgcgcccgcgataacagcacctgcgccgcccgcgccgtctctgccgccgccgtctgctggcgcggcagaccccgatagggtagtgctgaatccaaagggtttggtggntgacctggtgagactcgccgatcttgtggatccgtatggggaagagctacgtcagcgtacggcagggatgggggtcagagtccgagctgctgggattcatgaatgcgctggaag

SEQ ID NO: 150923 - DNA, 552 bp, Zea mays
  unsure (1)..(552): unsure at all n locations
  Clone ID: MRT4577_69161C.1
cgttgccaatgccatgggnatgaggtttttaacaggaataggaattgaatgctgggttatttaggagccaatacttgctattgtgttatgctagactgttgcttgctctctgtataatgaccttttctttaatatgttggggtttgtagggggttanaatttttctctttattttatctgctttttatctgtttggtatatatgtgcttctgactgaagtgacctgtatatttattttggtctctattatacttactttttgtttattcttgtgtttttttgtatgtgttgacacttttttttttttgttctgatctatttttttttttttgtgttttgggttgtttttttgtgttgcttttgtatttttatagttttgattgttttttttttcattgcttttcttttttctttttttttttttatttgccccattctttcctttttttttttttctcgccgccgcgcctttttttttttatttttttttcgtttatggggtttattttttttgtatttgcaccgcccttacaatttttttttttttttttt

SEQ ID NO: 150924 - DNA, 335 bp, Zea mays
  Clone ID: MRT4577_69162C.1
acttataaaaatgctgactacaccctgaacattatcatacgagccttacaggcttcatgcgctaagctgaccctgtgtcgggtccaacaaataaaatacaaaacgcgcacgggaggggggggcgcaaaagaaaatcaaagccaacacatccaactaatctgcctttagtccttggcagcctctcatatcagtgagccaccccttgggtacttgactccagacatgtgtcttggggccagccaagcacccagcgtcgccagcgtcgggacctgggcggaccgtgggtcaccggaattcgccgtcctgagcgtaccacttccttaggagggattaga

SEQ ID NO: 150925 - DNA, 561 bp, Zea mays
  unsure (1)..(561): unsure at all n locations
  Clone ID: MRT4577_69163C.1
aacggacaaaaaacaaagccactttattcctggcattattaaatcttggccccgggccagctagcaaaacccaagttttacagagggaggattatcaggaagcaatccttggaacaaggaaaaatttttccttccgggaaagggtcaccccaaaggactcgcccatggacccccctggtggaaagcccggaacctcccaataaaaagggtacatgaaatgggccagcatgatctccatgggcggaaatccaaagttaatcccggggcaaatcccccggccggagccgaacgggaagaacctgaggcccttgcccttcatggggacgcccacggggcccggttcctgcacaaaccggtccgggaagaactcccccggtttctcccagggggggcggcccctcccgagcccccaagcgttgaaaaggacccccgccccggttgggacaaagaacccgtcaatctcgaagtcggggggggagtaaggcggaaggagaaaccggcgccgggggtgcagccccancgtctccttggaggcccccttggggaagggcatgccggccg

SEQ ID NO: 150926 - DNA, 305 bp, Zea mays
  Clone ID: MRT4577_69164C.1
ttttaatcctcactctaagatacatggcggtccatcggatgaagagaggcatgttggagacctgggcaatgtggctgctggaaaggtcggtgtggccaatgtgtccattgaagatcgtgtgatctcactctcaggagagcattccatcattggccgtactatggtggtccacgagaaacaagatgacttgggcaaaggtggaaatgaggaaattccaaggcttgaaatgtctggaagcgctttggcttgtggtgtgattgggattgcccaataaacattccctatgtggtctgagtctcagactc

SEQ ID NO: 150927 - DNA, 426 bp, Zea mays
  Clone ID: MRT4577_69165C.1
gcctgcaggaagccgggccggacagttatatagctggggcgacgagactctagtcggcggccgcccttttgtgctttgtttcactgttgggggtaggagagcgaaccaggatcattctgagttcagatccgatccatcagatgctagtatgagatcacggccatcgtgctcaccggagaggactctctaagcgacgaatggcgtgagtgacactaacaatataaggaaagagggaccacgttggatacactccgggcctctcttgttgctaaattcactaacgctggaacgcgagaggacatactgacatggcgcaagagattcacgcgctgctgacactgaataaccagacctggatgcggcaaaggagatcagcttgctggaatgcacccctgaagattatcattgcgagacggtgggtaaaca

SEQ ID NO: 150928 - DNA, 441 bp, Zea mays
  Clone ID: MRT4577_69166C.1
tcgacccacgcgggccgggccgccaatataccttgttgataaccaagggtgcattaagctagcaaattttggggcatttaaaccaggagaaaagttggccacttgccactggtggccaaaagattaaagggtccccattttggatggcacccaaaggtattggtggaagccggcaccattggtcttgttaattttggaatggtgggtgcccgggaattgaaaagggcaatgggcaacccccattggagccttgattttaaaaaggttcctttactttataatggtgggaccaacaaattcacacccacctatcccaaaccatttgtccacaaaggccaaggattttctgttaaaaggcttacagaaggacccggaattgagatctgttggttcaaacttgtggcaacacccattggttacacaagtattggaaaaattttt

SEQ ID NO: 150929 - DNA, 225 bp, Zea mays
  Clone ID: MRT4577_69167C.1
ttccccgtgcttgcaacttaatactttttttttagggccacctaaattaaatgggggggggggggtttaacaacgtcggaactggaaaaaccctggggttccccaattaaatccctttgcagaaaatccccttttccccagttggggaaatagcaaaaaggccccaaccgatcccctttcccaacatttgcccaccctgaatggcaaatggaaccccccttttaa

SEQ ID NO: 150930 - DNA, 2220 bp, Zea mays
  Clone ID: MRT4577_69168C.1
gggccggccgggtttagtcggtagaaggacccctggattacacttgattcaacaccactaccaccgagggaatcgtctctgaaacgccggaggttgggctcgaagatgggcacactcaagaggaaagtgcaaatagacgatgccatggtcctgcatgctgatactatacggcaacagttgatcaacactgaggatatacggcgcattcgtaaaaaagctccatgcactcgttccgaaatatggatgattgagaaaggttcactggaagatgatatattccacgagcccatcttttcctgcctatctgaggagctaaacaaattacacaatcggacatatgaggctattgtacatcctgctgtacagaacatggaactgcaaagtcaattagacatgcctgaagcaattccagaagatagcaatattgctgggtttggtgctgctactattgatggcccacttcacataccagatgggattcaatcagatgccatgctgccacgtgccaatgatgcatatggcgctacagctgcttttagtttgcaagttcctcctaacaaccaggttaacggtgcatctaatgattttgttattggcactctgtttcaaggattgactggaccttttattggtaatgagaaagaagtggcacttgctgacagagagcgtgctcaagtaaatacactgtatagtgaccattttcaagatgtcccatctgatttgcatagtactgatgcaaacatttctagtcaagatgtgactctagataactctggccaagcttgcgctcacgcaacggacggcatgacaagggagcttactcattttgttcatagtaatgctaatattttcgagagtaatgaggtccctgcttctgagattactggggtggaatataatcaaggtgcctctggtttccctcaaccaacggaggatgaaaatgcggtggggtataatcaagatgtctctggttttcctcgaccaacggaggatgaaaatgcggtagattataatcaagatgcctctggtttttctcgaccaacggaagatgttcaagatgcctctggttttcctcgaccaacggaggatgaaaatgtggtagattataatcaagatgcctctggttttcctcgaccaacagaagatgtaaatgcggtgggatataatcaagatgcctctggttttgctcgaccaacggaagatgtaaatgcggtgggatgtaatcaagatgcctctggttttcctcgatcaatgaaggatgaaaatgcggtggaatataatcaagatggctctggttttcctcgaccagctgaaaatgatgtgtctgctatgggagataattctggcttccatgaaaacaacatgggttctcttacggacctggatatggtgaatgactatgaactgaaggaaagcaatgattttgggagtgcaattaatggtgttgatacagattttctgaactacgacgatgatgacggcggggacttcgacgacgccaacgacgatgagccaaatcccaacgagtttcagtctctcgacaacagtggttggtcttctcgcaccaggggcgtcgcaagatacctcaaggctttattcgacgacgagtctggtctggagaggaagagcgttgctatcgaccatctggtgcgcgggaagacgcggaaggaagcgtcgagaatgttcttcgagaccttggtgctgacgacgaaggactacatcagcgtggaccaaccgaaccccttcgacttggtgagaataaagccaggctcaaagctgctgatgtcggaattctagaccgtccaagccagcttttacccctggcgccatacatacgtcttaccaattgtatccatcacaccgacctaccgcaccccctcctttacccctccaaatccatttttgtttgtttgtttgtttgtttgtttgttgttgttgctgttaagttatcctcctctgtgtagcatctcccgcgcgctagggctcgagtaggatggctgctatgttgtaccgttggctgtatatatgatttagtgacacctgtgaagcctgccatgtaatctgatagcgctggctccctcccctccgatcccctaaagctattgtataattgtatttgcttggctaaagcccgtaggaattgcgtattggtaacaagacgatatgatgacctgtattatgtcaggattgacagctttaactcagctattattggactga

SEQ ID NO: 150931 - DNA, 1438 bp, Zea mays
  Clone ID: MRT4577_69169C.1
gggaaaaaaaaaaaaaaaaaaaaaaaaaaaaaaaaaaaaaaaaaaaaaaaaaaaaaaaaaaaaaaagcctcgagccggccgggaaatgtggcctatcctcttcaccagtgtgctgcttgcttatctcgttctgtcgttcactcgacgcgttctccgctactcctcgtcctcctgccgaggaaaattttgcagcgggagctactactagctagagctagcatgggaggtacaagcgccgcagtcccgagccacggcctcgcctgcgcgcccccggcagccgtcactctgaatccgcgggcgcggcggcggcgcgcttcctcgggcagcggcggccacaggagcagcccccagcagccactgaggagcgacctgctacccccggctaccgtcgcctgccgagctcgctctcagtctgcttcctcgtctaatgtgaactttgggagaggggatgacgcggacaagttgctcgaggatttgctcaaacagcatggcgaggtggtgtacagctccggtggacctccggatcccaccgttgaggccgacgacgatgccgagtgcttgtcctttgccgtctcgttggctaaagctgcaagtgagataaaggctactgatatccgtgtactttgtgtgaggcggcttgtctactggactaggttcttcatcatcctcactgccttctcaaatgctcagatagatgctatcagttccaaaatgagggatattggtgagaagcagtttagcaaagttgcatctggtgatacaaaaccgaattcttggacattactggattttggtgatgttgtggtccatatattccttccgcagcagcgagcattctacaacctggaagagttctacggcaacgctacacccatcgaactcccttttgacacccaacggcagtgatcgttgatcgttacatccgagccagcgctaggaagcatcccagtgaaaagtgagattttttcgtgaagccagccagaagacattgttacggcaactcttgacatcgtcatctcactagccatcagatgtggtgagctgcccagagaaaagaaacctgcggtgcgaggtcgcaactgacaaaacgctgcctacaaccgaagcggcgcgctgctcgcagcctccgatgcagtgctgaaacggcaacttgatgcgaaaattctaggtttctgttgtgtcatgtcatgctctgcataccctgtgtgaactatcgaataatgttggcaaccgcaccgcaccgcacttggcttcccatgaccgggaggatcagtgtgtcgatccagaaattgttcactggctcctggctcgctaatattaacaccatctgactgatctgacagcttgtaaaatttcaatgctggtttacgcaaggctgcactgaacaagcttgctagactgaggcaagttgctagaagaggcaagttaaagcactaaa

SEQ ID NO: 150932 - DNA, 754 bp, Zea mays
  unsure (1)..(754): unsure at all n locations
  Clone ID: MRT4577_6916C.1
cattgggtacctcgaggccggccgggaaccactccggcccaaatgccccgccgcctagctacgacctacgccggccgcatcgccgccgcgacgccgtccccctcgggcccttccatcaccgtcaccgtctcgccgacaccggcccccaccccgcttgacacgcgcggatattcgctaccgcgccgccacctcatctgcgccgtcgcccgaatcctccgctccccggtgtcacccaccccgctgcttgacctcgatgactacctccgctctctccgcctcactctcaccaccgcggaggcttctgaggtcatgaaggcgcttgcccccgacacctctctcgcgctcggcttcttccgcttcgccgccacctccctccccggcttccggcacgatgccttctcctacaaccgcatcctggtcctcctattcggcaaccgcgccgatcccgccgaggccatgcggctcatcgcggagatggagcgcgacggcgtgcccggcaacatctccaccgtgaatttgctggtcgggatgggcgtggangttgggggaggtgcctggacctggcaagtaagtgggggctcaggctgaacgggtacacctacaagtgccttgtgcaggcgcatctgaggagtcggaaggtgtggaaggggttcgaggtatatgagaagatgcggaggaagggctacaagctggacatatttgcatataacatgctgcttgatgcgcttggcaaggctggaatggttgaccaagc

SEQ ID NO: 150933 - DNA, 401 bp, Zea mays
  Clone ID: MRT4577_69170C.1
cccacgcgtccgcccacgcgttcgtggacgcgtgggcggacgcgtgggctttcggggaactgctactggggggtacctccggagatacacccagatccaccaccgagtgacacggtaatgggcggcgctccgaccaccgtaaccaagtactctgcttacctggtcccaccggcggggcccacgccaggcgggtctttaccgatctcttccatggacaagactgccggcgtgaggatctccgtcgactttatacaagtcttcctatgccctaggtctgtgaacgaggaccggagccgttcttccacgatcgcggctatgtgcgagggcttagccaaggagatgctgacatactactctgaagtcaggtgtatgggcgagcccattccgggggaacctgatat

SEQ ID NO: 150934 - DNA, 385 bp, Zea mays
  Clone ID: MRT4577_69171C.1
agaaaaccttgtgccagaaatattctttggcggatgtggtaacgatgctttactatgtatttccatgtgttccattgcagttgtcagttatattacataattaattacgatataggcaagcaagttgagtgtatattcatagtaataaaatagaagtgcgtacccagttaaccaggatctgttcacttgctggcctggaggtatccactgctcttcttcctgtgatcaactccagtaggaaaaccccaaaactgtacacgtcggtcttgacaggtagctggcctgttcttatgtattccggagcgcagtacccatacgttcccatcacccgagtggagatgtgtgtcttttcctcaactgggccaaacttttcgagcccaaaatc

SEQ ID NO: 150935 - DNA, 490 bp, Zea mays
  Clone ID: MRT4577_69172C.1
cagcgggcgggttgaagaaggatcaataatattgttgtgccgttttttttaatttcaaacgggcctaaggcagcaaaactatgggggggaaagcacaacattaccccctcacatttctcattgcccactgatctatatgcacaccaaaaaaaaacaaaacaggggggaaaaggcctaaggggttccttttctacccccccaatacaaaagcaaaacgcatccgaacaaatattttcaaatccccctcccacaaacaaactcgccctcctctcctttcaggagaacaaaaaaactgcgcccaaacagggcccttaaatttcccttgaaaatctcagcccacacccgtggccaggagggaactttaacccccccaacaaggtgggggccccaaccatccgaggagggagctccggggccctaaacaccgcttttcttagagaaactttggagccccaccaaacaaaaaacaaaggttgcaaagtcaccaaaa

SEQ ID NO: 150936 - DNA, 494 bp, Zea mays
  Clone ID: MRT4577_69173C.1
aaaaaaagcgaccccatccttgaatttacggggctaaagaggccccatcagaagagggggaaggggaatcccactaacggcccaggggttacagcaaaaaacaatctggggtcggtttacaaggaattcaggcctcatcaaaaggctaagcatggggatggggggaaattttttcgaaacaagggacattggggcgaggtttttattccttcggggggagcattggacaaatccgaaatcccttttaagccaagcataagaacattgggaacttctccttagtcttttaaaaaacctgctcggggataagggccccattgccggcggcctttttgatctccatgggggcctttgggaaaaacccagggcctttaaaagcatttgcaatgaagtcgccaaacccaagggggagggcagcctccgccttggccccaaaaaccaaccttttgattcgggagagaagaactgcaccaaaccacattgggcatggctcg

SEQ ID NO: 150937 - DNA, 1013 bp, Zea mays
  Clone ID: MRT4577_69174C.1
cctcgaggccggccgggccgggttgaagcacagctcgcattccttgtgcatgggttgtgagcttttgggactcaagcagagctatagcttcggatggcgtttcttctaacgctgctactaccgtggtggccgctgtcgccgtggctcagccccgctgcggcgtggttcatcttcttcaacgccgtcgtcagcgccattgccgtcatgtctaccagcggcagcggcagcggcggcgccggggccacgccgccgtcgcctcggcgcaggctctgccgcagcgggtcgtctatggtcctggatcgcctcctgtccttgttcatttttcccgtggaggtggagcagctgccgatcgatgaaagcagcagtgctgccgcggcctcgcactgttgctggccagaagcagaggcggcgtccgcgactcaggtggctgcggccgcaacaaccggcgagacggcagcgatcagcagcaccgcgcaaccgagcgcctctgtggcggtggcaacagccgtggtccacgcgcctccggcaccgccaacggaggaggagggcaatgcagagaaggagcaagaacatgatgagtctgctattagcttggacgaggcctacgcgctagcccatcgccatcgcacgaagccgctggcgtcgccgccgccgtcagcagcagcctctgccaccgctgcgttgccgacggagcacaagaaggtggtggcggactggcggagggtacccaaagcaggggaggcgcttgaggggaaggcggagttgaacgcgcgcgcagacctgttcatccggcagttccgcgaggaactcaagctgcagaggctcaactccgtcctcaaccacacccacgcccttggctaacggcggcgctgtagccggtgtgctacaatgtgcttgctccattgttcacatggccatttttggattaatgtttttttgtaattaattagtttatacagagtatatataagagcaactcgttcgctcggctccgatttgcgcggccgcgtggg

SEQ ID NO: 150938 - DNA, 816 bp, Zea mays
  Clone ID: MRT4577_69175C.1
aaaaaccatatatttcaataccacagtctggtaattctcatgatataatcataaatttcttttacagcaatcaattgaacacctgtttggtgccatcaagttcaattcaaaagcgtacaaaccaaataacacacaatagttcatacggactaaaaaagactaaaataaatgccaaatgttatattctctagtttcgcagctctcatcccatttcactagctactgcttctttccgtagagcaaaatacttttataaatcggattgtaaatctcatgcaggtcttcatagtatgggaaggctttatccttccatttctgtaacttttgtggtaggtcttgccaattttatgatactgtagtagccatctttaggttggggtcccaaccaaatccactctttgataaaatcagatgcactgcattatggtccttcttgagcctttgttctctatccttcagttgagatacaatgaagtttgctgatacagatttttcattcatacgctgcgtcttgctattccaagcttccttggtccaacccttttgtgcacgatgtcttggtaaattgtactctttaaggatgctcaaaaaaaactggttcgtgcttgactccactgtgtccttgtgtcttttgtccgtgataaatacaatatatcatatcaatacagagatgcgtgtcttttttgccggccacggaatctgaggcgagatcagcgtccgggaccgacgacatctgcggcgaagctaggtcctccagttttgcgatggggattagagaaaggggaaaagagtgtctgtattagaacggacgcgtgg

SEQ ID NO: 150939 - DNA, 602 bp, Zea mays
  Clone ID: MRT4577_69176C.1
attagcgtagtagctcggacatattgatgataccttattggctcaagaatcacagtatggtggccagatgacaacatgttctatgcgggtgttgttgaatcattcgatgcctcttacaagaagcacaaggtttcgtatgatgatggtgatgttgaggtactaatgcttaagaagcgtgggtgggagttcatttctgaggtacaagacactgatcctgatgcggtatctaatatgccacgtggcagaaaagctaaggggagctcgggtccacaaatgaagggagggaaaacaggaacacctcaaagtgatgttaagaatcctcccaagaagagagggcgtccaaaaggcatgcacgacagcaataatatgccaaatgctgatagctctgtgactccagccagactgaagggaaaaagtattgagaaggatactcaagtgacacctaagactggcaataactccaaaaaggaaggtccagggccttttgatctactactggaaagctcagaatgcttgtgtcaaagcaagcagcaaggatgaacctgatagcaccgacaacttaaaagatgatgcttgcagtgaagacaagaattcaaaagatg

SEQ ID NO: 150940 - DNA, 570 bp, Zea mays
  unsure (1)..(570): unsure at all n locations
  Clone ID: MRT4577_69177C.1
ggtgccatcaagttccattcaaaagcgtacaaaccaaataacacacaacagtttcataacggactaaaaaaaagactaaaataaatgccaaatggtatattctctagtttcgcagctctcatcccatttcactagctactgcttctttccgtagagcaaaatacttttataaatccctaatagcttgcaccctccctatcagtttgtggcagactgcaactacgcacctccttagttttttgttcttcgcccattgctctatattgactatggtgtacatcatagttcaatccatgctgagtattcaaatcaatctcttcttgaaagaaatcagtccatgaattttgcatagtaggtgtggttgggctaggtgtactcataagttcatcctcatccaaaacaatgagttcagacttatatgccttctctaaagaacttctacaattcttcccggtagcattgtaaatctcatgcaggtcttcatagtatngggaaggctttatccttccatttctgtaacttttgtgggtaggtcttgccaattttatgatactgtagtagccatcttta

SEQ ID NO: 150941 - DNA, 681 bp, Zea mays
  Clone ID: MRT4577_69178C.1
tacatgcagaactatgggccacttgtggagcaagagggaaatgccagcaagtatgtaaggtacactgtcgatggtttggagaagatgctcagtgccctctacatgccccggcccaggagggctgggagcttccagatcaagcactcgagcggtaagattgccagtgcaatgactggcttgcatcggagtgcttctgcagtgaaatagcctccatggaataacccaaagattggatcaaaatgatgcaataaccgctatgtggcaaatgattcatttgacccagtcggcaaagaggcccgcactagataggtgacccaataaggcaataatgaacccatggtcggagtagtggtgtcattacatgaacataagttactatttaattagcatcgagaatagaaggtggcgatcatttccttagctcctgttagtgtccctgaacataagttacccatggtctgagatgttacatctttctgagctatcttctctcggtttgtacttctgttagtgtccctggcaccatatcattcatttggagatattcaatcagctgtgtggctatgtaaaattggttgtattttaggtgatctgtgagcattaactttcaatgtaccaaaaatcgatcttaatatatgagatggattatatggggggaaaaaactagggcggcgatttttc

SEQ ID NO: 150942 - DNA, 280 bp, Zea mays
  Clone ID: MRT4577_69179C.1
ttcctgggttgacccacgcgtccgcatgggttctctccatctgttctgatggacaatggagatcgcgtactcggactactacgagcgaacgctgatgagcggtgagctaaacatccaaaggggcctggaccctggagagaatatcttcatgctgccccaccgcccaggcagatccaatgcgatcagctaccatgggtgtggaactcatgaccaatcgtacaggtgctggtatggcacatgggatagacatcgctctacaagctgggagagtacatttact

SEQ ID NO: 150943 - DNA, 806 bp, Zea mays
  unsure (1)..(806): unsure at all n locations
  Clone ID: MRT4577_6917C.1
ttgggtacctcgaggccggccgggacaccactctaggcactagcacacctcccctctctcaggctctcagcgccccgccgccgccactcaattgccagtcctcgcgatatgggcgcgcaagaggaggcagtggacgagatgctgcgcgccgccgccgccgaggtttcaacctcctcggtgaagcgccgcctccgcatcttccaccacaccctacctcctctcatcgcgaaggccataggtactcatactcaccccaccatcgtctccgctgtcctatgtcggtaccgcgcccaccatcatctgcgggtttcggtcttcctcctgtgcctcgcgtgaggggctcagggctctgcgaccggacggacttttgacgatgtttgcgcgcgctggatctcctcgtagactgtgacggtgttgcgtgtttgttttcatgtgcaattccgctcgaactgcagcggatcgaggcttgttagctcagagctctcatgcttgtgcagacgtgcatgtgctccccggtcctatgattttgagggcacccgggcgggcgaactgatcgcggtggacactctagactataaaaaaattctatattatgcagcggggcatattaatacttcgtaaataaatgatgatgtgtattgaaattattttttttaaaaatataagaagctagataatatacatcgatacagattagcgcttcgcagtttgaaaaataagaacgacgatcgccgaataacctaaattctgattgctcgaccgtgcgtgtctggangctagcgcagtggttccagctccctggatct

SEQ ID NO: 150944 - DNA, 630 bp, Zea mays
  Clone ID: MRT4577_69180C.1
cccccgggctgaggaactgccgtgccccctccttacacgcccctgcctccgtccccttgcccgtgatcccgccggcaaacccgatcgtcatcctcctcccccgactcccttccatcctcgcccgccccttccatactcctcccgtgccccttccatccccacccgtgctccaccattccacacgcgcgtcctttccatcctcgcccgtgctcctcccacgacctatgcggcggcggatccgaagcacaacatccacgacgaggtcttctctgtgctgcacgagggtggccacctccgtcgacgccggcgaggccaccaccatggtcttggcgcagcacgcgccgttgtccaacgtgtcatcgctaatcaacagcctcggcaactcccgcgagggcaaccctgaccgcgacgacggcctgtctatgctcttctccaagaagcccctggcgcaggccggccgggcaaccggtcccgcgatggcggcggctcgacgaggggggcccctccctcgggcgaggatagaagggaggcggggtgtgtctgccgcgcgatgaacgcgctgcagatcttgcgggagacggtgcgggtgctgtgcggagacccacacacattcacgggcatcctcttcct

SEQ ID NO: 150945 - DNA, 410 bp, Zea mays
  unsure (1)..(410): unsure at all n locations
  Clone ID: MRT4577_69181C.1
cttccncttcgtcgctgctcccacctctagcccgacatgtgaagccgccgccgctgcagtgtccatagccaccgcaggagactgagatgggtggtttcgcagatgtcctcgcagctgatcgtggatcaccggtcggccgcggaggtgcacgttgggcactagctgtgcgagcgcaagtcgcgcgagttcctgctgcagctgggcctccccgacgggctcctcccgctgcccagcctgcacgaggtgggttacaatcggtcgacggttttcgtgtggttgtggtaggccgccgctctgacccacaccttcggccttatcggctagcaggtgtggttttttttttttgtgacgccccccgcgcagcccggtcgcatgcacgccctcgcctgcgtgaagagcaaggagctcct

SEQ ID NO: 150946 - DNA, 1547 bp, Zea mays
  Clone ID: MRT4577_69182C.1
acgacaattcttacgcaacaaactcgagagatcccaggatcccagatcaggcgtagcaacctaaggattcttccccagttcctatcttgcaaacgcgatcagaacagtcagcattcagggagaacggactgtatggccccttttttttttttttctatccaaaataagactgatgagatattatctcatatgatctattcgaacacaactgtatttaatacatcaaccgaaaatacctacttgaggtgttagaccctgctcaagatatcacgggccaaagcaaaaaaaaacgttctacatctcacattgcaacctgaaaactactatcaactcactaaggaactagcatttccaactccataaacgtgaaacaagcaaagaaaaagccgatggattgtacaagctatttgaagcatgataccatgtttataactcctgcaagactttgcgctaacatggaaacacaaagatctcttacttcaagaaggtcgacgatatgaaaaggagcacataagtaacacacgcggtgctcacttccaagtttcttggaccggggagtatagggggaattacagataccatcaagaaggtgccaaggaaccaggaagcaaagaaagaaccaaacccataaaagaatgctcgccatccacttttgaccctctgataaatgaaatagatatttgctgcacaagagatggccacctggagggttggcccttcttcggtagggaaagcaagggtaagcactccaagcaagacaaaagcaatagctgtctgccaaatgactttgctacgtggtgtttgaaatctgccttgaatagccttcactgcacgtgactgactaagttccctaaattttttcttgagattcatttttggttttttcctatcaaagaaactctgcatgataatcctgtcatgggcagactcaattgcatcaacacttggcttgtggcctgcatacttgcttatcagatagttcctagcagctcgaatttcttcttctgatgcttccctgctgattccgagacgctgatatggatcttttacatggattcggggaaagataggagttgaagaatcagccatatccccaaatgatgcagttgctagtggtgtgattctggcatttcttggcgcataacagaaagaagtactatacttggtgtgtctatccacattgaatattttgttctttcccttgcatcccctgttgaaattcaacgaagaaacaagccccaagggtgcacttgatacccttgaattaactggacatcgtaaggttcttgagggatcagttactagaccatgacccaacatcttagcaatctgaatattttagacacgacttgtgctcccaccggattaaaccagcttctgagtgcagacgggttctctcccgctccacactgggatagaaggtggcggcgacgatggcaatgctccggggcggctaagcggatggcgtgctggagggtcgttcgctgggatgagaggaatgggcagcagtggggcggggaccccggccggcctcgccggccgcaatg

SEQ ID NO: 150947 - DNA, 1118 bp, Zea mays
  Clone ID: MRT4577_69183C.1
actgctcatatatccgcctcccctcgccctccctctctctctctctctcactcacaaacaaacaaacaaacaagcctggatcgagcgaattcagccgagcttcagaaacccttgcaagctcgtagcaacttctctcaaccttattcggctttcttctagctatataacgaccctaaattagtctgcttcattcggttcttgcgaattgccaagaccgaaagaacagcttattactcttctgttagaaagactcgaagaggccggccgagatagactatcagctagctagagggagctaactacctacctagctagccatgtgtgactacttcctgcaaaggatggatcagggcgaccaccaccaccaccaccaggccggagacctcacggacgtcgtccgagccggcggcggcgcgatgcatcaggcagctgtcgcggagctctcctccgcggacacggggtggcagctcccggccgagccagcagctggagcaagcctcttcccgccaccccagccctcgtcgtcggactgcgacggcttcgcggacgcgttcgccggcctcccggacccgtttgccagcgactttcgcacctcctcctcctcctccggcgtgggccttggccctgccgacttcttcgacttcgaggcgcctgctgctgctgctgctgccggtggcggcgctcgaagaggcggaggcgtactggcgggcgcgcagatgcccgcgctgtcgccgagagagatacggccgtacccggtgacgatgggcggcgacaccgtgaagatcggcgcgccgacgatgatgcccgggctggccgttgggccgccctgctgtgcgttcgacgctgtcgccgggatgcagatgccgagcgcgcacgcgcacggtgaggggatgaagcgcaagaaaaaccaggcaaggaaggtggtctgcatcccagctcctgcaccatgatcgggaggaggaaggaccactggggagggtgttcgttctgatctctgggcttggaggaagtatggacagaagcctattaaaggagcacgctacccaagagggggctacagatgcagcagctctaaaggatggccggcgcggaagcaagtggagcgcaagcgaaccgac

SEQ ID NO: 150948 - DNA, 360 bp, Zea mays
  unsure (1)..(360): unsure at all n locations
  Clone ID: MRT4577_69184C.1
ttnggcagttcaagtatgattttttttgccacacggcacaaaacagattggcataagccaatgggatatgggtatagaaacatgagtaaaaaggtaaacacaaatcatgaataaactcggctctttatgatttgctttaaaaccatatgacagtattttaattaataaaaattttgatgtcctttttgttcatacatatatctcttaatgtttattataatattttttgatattatgtacttcttttattataccattatgatgatataatatcattatttttttattattctaattttttccataaaatttttttttgattattctattttgtgtatttttttattgttattttataat

SEQ ID NO: 150949 - DNA, 242 bp, Zea mays
  unsure (1)..(242): unsure at all n locations
  Clone ID: MRT4577_69185C.1
gacgtaagctcggaacccggagagcggccgaccagccgccttgtgtgcggcagcgaaaccgggccgcagacgaggaagagatggtgaacagagacgagacacaaccaccgncggcgcaggaagagcaacgaacaaacgagccagcgacaaacaacaacgggcccacgaaagaagaaaagcccagggcccaggcacgaaacacggacacacccgaagcgaaacccagaccaggtgaagacggg

SEQ ID NO: 150950 - DNA, 684 bp, Zea mays
  unsure (1)..(684): unsure at all n locations
  Clone ID: MRT4577_69186C.1
catgtgggtgtggaagtggcggattagcctccgcagaagcgttggctgctatcggccgtagttaaggttgatggcgctgaaaataatgaatatgacacaaaggatgccgatggggaggggcaagaggcgggttcaggtgccactgaaggcagtgataggaggaattttactaaatcgtgttagtagtggcatatagagtaggatcgcaacgtcaacgccgacgtcgacaacaacaagtcagtgggggtagtcactagattgctccgccacatcaagacctaggactatatatcagagtattcaattatccgatccacttacctccagctcatgggaaaggtgcaaaaatttgtggaggcaattcaaagctaaaactgaatatacagttgctcaagcgataactgctcaggaagcaaataagaggaacaacaactggctgccaccttcatgggcacttattgcaatgtctatccttggattcaacgagtttatgacactattgaggaatccactntacgtgtttgccatattttgtgatttatcttgttggaaaagccctttgggtgcaatcaaaaattggcagggaattccaacatggatttcttcctaccattctttcactggtcatgaaatttggtccctctataatgaacattctgaagagattaactgacctgggtcaag

SEQ ID NO: 150951 - DNA, 133 bp, Zea mays
  unsure (1)..(133): unsure at all n locations
  Clone ID: MRT4577_69187C.1
agacaagagagcacactacaactcancacgcgccaacggggagagagcagggaagcagcacactacaaccacggaccgcgcacggcgaggacgcaccaaaacgacaccgagggcggcgccgcacgagcacgcg

SEQ ID NO: 150952 - DNA, 609 bp, Zea mays
  Clone ID: MRT4577_69188C.1
tggactcgaggccgctttttttttttttttttttttttttttttttaaccatagtgcttaatgcgacgacttaattacaaagcaaactagagctttataagtgatgatggaaggaaacacccaaacattaccagggggccaggacacaaacttttttttaacacaacctggtcgacggccaaacaatatgcagcagatcagattactcctctgcaccgaatactgccgcctctggggacctctcgtatccttatcagggcggccaggtcctacgtgccttggagaactccccctgctactgccctcgccgacgtaccagggcacgaacgcccgcttgggtcatgaagcgaccttgctgatgatgcgggagacacctcgcgacgctggtggagttggagatatgcacaccgcacgctgaccttggcgaggacacccccggcaccactgtcggcgcctggtatttgatgccgcacttgaaccccgtagggcaccagtccaccaactggatggtgcgcttcgtcttgatggtggccaccgtggagttcacgtccttgggcaccacgtaactcgcgggacatcatgcagcaagccatgtacttgccgtgccgt

SEQ ID NO: 150953 - DNA, 376 bp, Zea mays
  Clone ID: MRT4577_69189C.1
gaattcccgcacactcttccttccatcgtgcctcacttctcttctgagctatttcgtctcccttccctttctcttctcgacgtcgcttcagtcttgttggtgtgggcttcctcgcctactccgcttcagcacaaacgcttcatctagtaccatttgggcttcatttgttttgtgaggtacagtttcctttgttcctcgtcgtctgattcgtctaggtaggtctctagttccacattcctctagatatagattgcagatccaacgtcttgtaactaagaacttcttgctttgttttattttggctcattcactgactatttctgttcttcatatttttgcccaaaggttagggtttagggtcttccctgattttcgc

SEQ ID NO: 150954 - DNA, 802 bp, Zea mays
  Clone ID: MRT4577_6918C.1
cattggcctggtcgacgacgacctcacagcgcacagcgcagttgtgatcgttcttggctggtatcctgttgctcgacatgggcaccggaggtgtagggctggtcgccgccgccctcaccgtggtggtggttacgatgctgtggacggtgctggtgcgcctggtgtggcggccgtacgccgtcgcgagggcgttcgcgcggcagggcatccacgggccgccgtaccgggtcttcgtgggcagtagcaaggaggttcaggcgatgcgggcggcgacgagcggcgacacgatggaccggacctcccacgacttcatcccgcgcgtgatgccgcagtaccacgcgtggatgacacctacggcaaggtgttcctgatgtggtccggctcgactccgacgctggccgtgggcagctacgacatggtaaagcgggtcctcttcgacaagtccgggctgtacagcaagacggacccgggccccactatcctgtccttgatggggatgggtctcaccttcaccaacggcgaggactggtcgcgccaccgccgcgtcgtgcacccggcgttcgccatggacaagctcaagtcgatgacgggggcgatggtggcgtgcgccgcggagctgatccgggcgtgggaagcgcgcgccgcggctagaggggagaaggtgacgacggttggaggtggggcagcagttcaaggagctcaccgccgacgtgatctcgccagacggcgttcggcagcagctacaggcaggggaaaggaggtgttcgtggcgcagtgggagctccagtacatcgccttcagc

SEQ ID NO: 150955 - DNA, 605 bp, Zea mays
  Clone ID: MRT4577_69190C.1
gtcctttatttttctatgaatcccgaatattgtatattcatttcaagagtgaaaacaactatttcgggattcatatgaaaaataaaggacagttggttgaagaagtctaagaaaagttgttttcacctcttgaaatgaatatacaaatataaaccagctacttggtataaatgagaatttgtgtgggtatttatttaaatgacttacacatataattctgagagaatttaaaattacattcaaataaaataatatgcttatagaatttaaaagaaagtagaaattattcctccaagattaactggtggttacttgcaaatgaacttctcagaatctgttactcaaataactttggaaaactgtatcgagtaactgaaataagtgtatatatgtaaaatatggtttctagtgagatatgtgccaaagtccatttatcaccaagtcctgtctgaaaggaagagtgagagacattggtgtaagcagttgggagagccaaaagagtaaagtggtcatttctacttggataaagtaaaaaatgttcagtgtgtacaaaagtgttctgttttttccacccagtgttgtctcatgtataatagaaagtccta

SEQ ID NO: 150956 - DNA, 443 bp, Zea mays
  Clone ID: MRT4577_69191C.1
ggaacaacgggggggatctataaagaaagacacccaaacggccaaacatgagaggggggggacagaaaacatgaagcaaaacagagacccaagctggaggggcacaaagggggcaccgggccccactacccccaccagaccagacgacgcacactttatttagcccatggcactcgcaggccgcaccgggcagtccacgcgaaagccactggtatagctacaacacactggcacacacacagagagggagaaaaaccggcacgttcgggttgaactgaaaaaaaagcccgggccatgtaggccccccccccctgaaccattaatctcccgacccgttgtcccccccccaagggcgcgcacggggcacggcctaactcgggggccttttgggccacctaagggggcgggtgggccttttggggctcctaaagggccggctcggc

SEQ ID NO: 150957 - DNA, 801 bp, Zea mays
  Clone ID: MRT4577_69192C.1
ccggccggggcgcccacagccccgcccatggccccgcctggccggcgcgcctgcgccgtccagcgtgcgtcccagccgttgcccagcgtcgctgcccactcgcccacctctctctcccctatttccccacgacgcgcgtagcagccacatcacccacttcgtctttctctcgcccaaaactgtcgtccgccagaggccgcgtcgaacccatgtcgttcgtctccgtccgcccatggtgatcccctctcattcctctctccatccccatttcctctcgctctctctcgccaggtgtggcgcgcccgcggctcgctggcgtggctagccagcgcagcttgccgacagcagcctggtcgacctgcgcgagcgcgcgcctaggcgtgtccccacttcctcgtacagccgcgcccgctatgccctcaccactgcgccattcgccgtgcccgatcctgcgcattcgaccttcgccatggtcgtgcattgcttgcctcgccccgtcgtcgccctcagtcctcgctggggcctgtcgctgccgtctcggaaggttgcctttggtgcaatctatgctcaggtaaagaagaaagcgtcgcggcggatccccaggagtgctaggatttcgacgagttcgaggattaggctagcgacctcgcccagtcagctgcctatggtgggtttgtttacgttggctacgtttcgattctatgtgctttgattgatattatgtaaatgactctagtctgtaatattattacttactttttattactaaaaaaaaaaaaaaacaatttgcggccctcgagc

SEQ ID NO: 150958 - DNA, 305 bp, Zea mays
  Clone ID: MRT4577_69193C.1
attccctatagtaagtcgtattattgctcatgtcaagacaacacctcatccacccttagctcaagtacctgcataactgtcaccctggacggcttcagtgccacggacttccatcgggggtgcgacttccagggcccctgcgtcgccggtgggtacatccacggcggcttccctttcggccggttcagcccggcggggtacccaagcaccgactatcactacgaaacgctggatgctttcctcttccactgcgcggaatctacgtgaggtccccgcgccccccgttgagcttcccaacgtgggcg

SEQ ID NO: 150959 - DNA, 779 bp, Zea mays
  Clone ID: MRT4577_69194C.1
cctcgaggccggccggggggcaggtcgatctaaaaatttgtgtgttgcccctgagagcccaacgacgatggtgttgtcgtcgttaagtgaggctagcactagcactgcagctttgcactatgaggttgtcgattttatcaagccagctttggggaagcttgaaggataaaatcattgttggttcaacatcatgaatgacacttggaggaacttccgaacttgaaccatgaaggaatatatcttattttatatcaatcttgtggcacataaacaatggcgacaaacatccaattgctttcgagagcttgaaacatctccaatagaggtttgctcaatttcccatgtttgtttgggaaagggaggctcatggagctatacagtgtactcggggccttctttcatcttaacgctattcgagatcgtgagtttgccagcaagccttatgtggggagcaagaggtggaagtgtccagcgctatatctgctccggcgtcgagttgctgctgtgcgtgacctgcacttgacctgcaagtgcggcatccacaaggagtttagcttcaaccaccgtgtcagatcaagtagctcatgtccatcctcatctttgggtttcagattgtccctactcttgtgagagtcgcgaggacaagctttccccctcttgagatccggtgtctaatccatttttcaagataagatggttagaggttctcctaagatagtagctttacctaaagctgctcaaaagaaggcttctcctaaagctgcaaaatcaaagaaatg

SEQ ID NO: 150960 - DNA, 454 bp, Zea mays
  Clone ID: MRT4577_69195C.1
gccccagcggcaaacccaaaatttggaacaaaagggaccaacaacaaaggggtggggggggggagggaaacaagcccttgctagggtacatgacccaattcctacaaaaacaaagcagcgcccacagaaaaaccagcaacatttaactacaacacaaggggaacatcaacccaagaaaagcccacaaagggcgagcgggcaagcctaggaggaggggaacttggggaccgccttggggcccccaaaaacggggtgcttggcgagctccccggggagcaccaggcccacggaggtctggatctcgcgggaggggaaggggggctttttgttgtaacgcgcgaacttgggggcctccccggccaccttttcaaaaatgtcgttgatgaaggagttcatgatggacatggccctggaggaaatgcccatgtccgggtgcacctgcttcaacaccttg

SEQ ID NO: 150961 - DNA, 243 bp, Zea mays
  Clone ID: MRT4577_69196C.1
gattagagaggtgttttatactgcacatcggtgaggcctaataagaaagtagaatagacgtaaaccattgttttcatcatcctttaagacagggatttcagactcaagaaccaggcagctacctatttaaatgagtcaagtgggccctaatgtaagacaatgtgatgggtaaggattgattctgagggaacaggagcaggcatgccctctctaacaaaggccgtcagttctgctgtacctgaa

SEQ ID NO: 150962 - DNA, 568 bp, Zea mays
  Clone ID: MRT4577_69197C.1
ctgtttttcagtactatcatagtatttgaagattgttatcagttcatacttcataggctttaagaaaaagggataaggtgcattaaactcagattccaattataagacgttttaggcatttttgatatatagtttttgttgtgcccccggtttgtttttgtaactgttcctcttctttaatatattatcacgcaattctcctgcgttttcaagaaaaaaagtttttgctgtgcacttacatacacacactgtctacatacatagtaaaagcaatatacctagaagaggcaaatatatctgcgttgtgatgctgaaagttgtagatttcctgggggttctatttggtgtattgcattctagtccctgttctaaattatgggctaatttggaaaatcaaaccccctccaatctccggaggagatttgagtttccaaactagccctataagtcgttttgggttttctatacttagccttttgcaatacacctagatattacgctatgtctatatacatagcaaagaccatgtgtacttctaatttagaattagaatggagggagcaattgc

SEQ ID NO: 150963 - DNA, 194 bp, Zea mays
  Clone ID: MRT4577_69198C.1
ctgatcttagcctgcggtgcaaacctattacacctagcgagcgcacactgaaacatttcaaaggatgccagatcccagactacctatgcacaaggacacgcctacacacaaggctcttggcacaacgacgctctttcggcaagactcagccatccgacgaccacgaggttgctggctttgggcccaaggcgaaa

SEQ ID NO: 150964 - DNA, 1316 bp, Zea mays
  Clone ID: MRT4577_69199C.1
ggtaattcggctcgtgcggctcgagcggctcgaggaccgtatgcggtcacattttctgccagccgtgcatcaaggctgccattaaggcccagaagaagtgccctacctgccggaggaagctcactccaagacagcaacaccgggtgtacctcccatcgccttagtagcccagtgcagagtcattttgctacaagttctgccgtaccgggcacgaggggcgggaggctactgggggccgggggccgagctccacccccacccacccacacgcacacactttgccggcggcgagcaccaccaggacagcagtatcttttattgcaacaccatgaactcccatggtgctggttcgcattcacggcttttggacctcaactatccccctgctgaaggggctggtgagggggcttcacgtttcagcagtatccctgtctctcatagagagggttcaagcagcatgcctgtacaacacatccaggcttcgagtagtacaccaccggctactggtgagcctcgcattggtatgcgtagttgccccatcgatgtggaagccatcgatgatgatgccgttatctattcttcaagaccactgcctcgagcaagacagcagttgaccacgacagaaagtattactatcataatagatgatgattccgaaacaaacctagaaacagcaggcgatgctcttgacgagcatgtgaacttactgctatctctgggcatagaacgctcgcatgagcctacaagtgcaaccaacaccttccctggaataagcatggtggacacaccaaaagtaaacaccttcaagtggatccaggtgcctcctgaacctgtgaaggaggttccgaaggaaccgaagctcagctgcccgatctgtatgaacgagataaccgaagcggcgtcgaccgtatgcggtcacattttctgccagccgtgcatcaaggctgccattaaggcccagaagaagtgccctacctgccggaggaagctcactccaagacagcaacaccgggtgtacctcccatcgccttagtagcccagtgcagagtcattttgctacaagttctgccgtgccgggggctgtatgttggaggcaactgggggggggggggggggagcatagaggtcctgtttggttcgttcatttagtgtcataatcagttaacagggtaatctattaccattgctttatgtttggttagactatactgtaaacgattgcagtgggatgcaataccagccaatacaaaattattgccgctgctttttgactgtttaaaaaaaaaaaagaagggcggccgccgacaagagagctc

SEQ ID NO: 150965 - DNA, 702 bp, Zea mays
  Clone ID: MRT4577_6919C.1
tttttaaaattttttttttttttttttttttttttttttttttttttttttttttttttttggaaaaacaacacaaggaggtttaagcttgtttccgcttttttttcgcccctaccgggggggacattaacattaaccctccctactttgccacagatgctcaaatttgaaaaccctgaaaacaatcccagaccaatttgggtcacataccaaaaacaagattaccatacgggttttttttaaacataaaggacataaacttaaccctaacaaggccggaactgcactatacatttggtaaatgcaacatttgggattacaagttgggcttttgattttttgaaaaacaactagggcgagggaaaaccaccaggtttagggggggggcatgcccaaatcagcgcctccaaaaaaaccacccacgatgggggcaacattttcaaagcctaccccgatgcaaagggggttcccctttgcaaaacctttcgaaaagggaccgttccttaaccttacgttgggacctaagccgcacttccccaagcacttggagccgaaaaccgggccaccggggcccacaacctttttaaactcctggaggaaaacaagcccccctgattttttggatttgccccccatgcaaacctaaattttggtggggggggatggctaaattactggaacgctggtgactctgggggcttg

SEQ ID NO: 150966 - DNA, 1475 bp, Zea mays
  Clone ID: MRT4577_691C.1
gggacacaaacagcacatctgtttagcacggctgtggccacgctctgcgaggaatggagatggagtcgactcctctcttgacaccatacaagatgggcgattggtcctggcggacagggttgtgcggagggcgattgggtacctcgaggccggccgggacacaaacagcacatctgtttagccaagctgtggccaacctctgcgaggaatggagatggagtcgactcctctcttgacaccatacaagatgggcgatttcaacctggcacacagggttgtgctggcgccgctgacgaggtgccgggcgttcgggaacgtgccgcagccggagcacatggctctctactaccgccagcgggcgacgcccggcggcttcctcatcgccgaggcctgcgccgtgtcggagagcgcgcgcgggtacccggacgttccggggctgtggacccaccaacaggtcgtggcctggaagccgatcgtcgacgccgtccacgccagcggtgccgtcttcttcgcccagctctggcacaccggccgggcctccccctcagaattccaaccaaatgggcaggcaccgatctctagcacggacaagcaaatcccagcacaggtgaaccattccggtgacgtcaacacgttcgcggtgcctcggagactagagacagaggagataccacacgtcgtcaatgacttccgggttgccgccagaaacgccatcaaagcaggctttgatggagtggagatccacgcggcaaacgggtacctgttcgatcagttcatgaaggacagcaccaatgaccgagacgactcctacgggggcagcttggagaaccggtgccgtttcacagccgaggtgatggcagccgtcgcggacgaggtcggtgccaaccgcctcggtgtgcgcctctctccgttcgcggattatatggactgccacgactccaacccagaggcgctcgcgcttcatgtcatcgacgagacgctgaacccgctcggcgtgctttactgccacatggtagagccaaggatgcgggtgaacccagacgacggtattatgactctcgagcacatgctgctaccgttcaggagggcgtttcgcgggacgttcattgctaatggaggctacgaccgtgaggaaggcaatgacgccattgcccgtggccgtggctatgcagatctcatcgcatacggccggatattccttgccaacccggaccttccgatgcgttttgccaagaatgccccgctgaacaagtatgataggagcaccttctatacctctgatccggtggttgggtacacagattatccatttctcgatcaactctaggatgattggcttataaacaatttccccacctggagtactatcttgaccttaaaataaaatgagtgtcactataatattaatgtaaaaaaaaaaaaaaaaaaaaaaaaaaaaaaaaattataaaaaaaaaaaaaaaggcccctagggcc

SEQ ID NO: 150967 - DNA, 287 bp, Zea mays
  Clone ID: MRT4577_69200C.1
caacaacatctaccatattgccaggttcctgctgcactacccgcagcaattatagtttcattcatccaactggcaaggtcgaactctcctgcttatttacagcagcaacatctactaccattcatccagctagctggtgtgagccctgctaccttgttgatacaaccacagatgttgccgatctaccagcacgctgtgcctaacgctggcacccttttacaactgcaacattagctgtcattcaacctacttgctttgtcaaacccagcaccattttacctacaacc

SEQ ID NO: 150968 - DNA, 483 bp, Zea mays
  unsure (1)..(483): unsure at all n locations
  Clone ID: MRT4577_69201C.1
cgctcaacccccgagcgagacgaggcaccaacccgggcactaaacaggaggagggggacgacccccccaccaaggccagggcgaacggccccaccgcaagccgcgccgccaacgcacggcgccgccagccgcacacccgcagcacgccgaacaactacaaggcggaccaaccggcgacggaggagaganccggaagcacccggacaaagcaggagaacgcgccgcaggaagaggccgaccccgagagtgcggacatcatcgagcacgagaaggcccgccaagggaagggactggagctcaccccggcggagaaaagcacggcgggggcagggacgcaggcagggggcaccggcatgaccaacaaggacagcgagggggccccaggcgcaagacaccaccggggaaacgaagcgaaagaaacggcagagccccagggccagaaacccgccccgggaggcacccgcgaggacccggcgaaacggg

SEQ ID NO: 150969 - DNA, 699 bp, Zea mays
  Clone ID: MRT4577_69202C.1
tctgtctcgtcaaggtgctgatatcctggctttcgtaccatatgcgtgcttgcttgatcacctaaagtatcctgaacatcgcttgtgactgccaggaccttgcctggtactgccgctggtggctgccatgatgtctagactgcagtgagcagaggcttgcaccgcgaatcttcttttagcagtactgtattgtaccaagccctttttctgtagtttcttaattgcctgctaacatttgatttgaccggttgattgctggttggaacatctgccggtgccgggtcacgagctgcttgtttaagcacgttcccgtttgtccagaaagcttgtgagtgtgatgttgtttcccttcttttagcagggatcgagagagctgtcggctcttgggcgacgctctaagataaactaaaccaggggaagctaagctacccgtctaccccagcaggctgcagcaagctaatcttgacagccaaagcccaaaggggattgtgaattgtgactggagagtgcttctgccgctacgctactactgctacgcggcacggcctttgaccctttgtcagccttgggtgcttttgaggggaaaagaatagtacatgatctgatgatcacggttgtttttgtctttgtgattgtgccccagatgaccgttatgcccgttgtttcactaccttttgctgctagaatagtctgcctgct

SEQ ID NO: 150970 - DNA, 599 bp, Zea mays
  Clone ID: MRT4577_69203C.1
acctcgaggccggccggggaacatatacagaacacaagttgccgttatgcagcggcgggctctcctctcgcacacatcgcgacaaggaagagagatagatctccgcttccccttctacgggtgcgggaagggggtgacctccctcctccagcaagatctggctggtaacagatgctatctgacaaagatgtctgaagcatctgctggatcgccgcgggctatgtgggtgggccaaccatgaccgtcattgcgcacgagtgtccagagattgacgtcaccgtcgtggacatctccaagctccgcattgaggacaggaacagcgacatcctgccgatctacgagccgggactcgaggatgatgtgaagcagcgaagatgcatgaacctcttcgtcagaactgatggtgtgaagcacgctgcatgagttgacattatcttggtgtcgacgaagacccccaccatatccgagggctgggaactggctgggctgccgaactcacatactgggagagcgctgcgcgcgtgattgcagatgtctccaaggcttgacaagaatgttggtgagatgtcgactgtccctgtgaagaccgcctgaggtat

SEQ ID NO: 150971 - DNA, 432 bp, Zea mays
  Clone ID: MRT4577_69204C.1
gtcgagcgcaaggcaactaggaggaagcgctgtccagcgtgggagaatccaccaacgaccatggccatgcgtcgacgatggaatgctcaactaccgtctcctcgcatgagccctaccactcgcaataagcgcggggcgttcatgctattcagggcgatgttactgcccttccgacggagcgacgacggcaatgaagaatacagacgaccacgccacgaccaccaaaaagtagagccatcatggctgctgatgaccaatgacagcctgacggcgacgaatcaaccatggggaagcgcctcatagactgtatgcgcccgactccgcctctcagggcagatggagtactacccggcgacaccgccgccaccggcagtgggacacgccgatgcgtaccatgacactggatcctatccttcgccagactcgatgcac

SEQ ID NO: 150972 - DNA, 590 bp, Zea mays
  Clone ID: MRT4577_69205C.1
gtgtccacctgatgaagtcacatacaatgcatttcttattgggttatgcaaggctggcagagttgacgaggccattgagcggctcgaggcactccgtcatactgggacctttgtacttggtttgaaggggtacagttgcttgattgacggtttgtttctggcaggtaggtatgaagagggattccagtgttacatggaggtcttggagcaagctgatgtctcaccggacattgttctgtacactataatgatccgtgggtgtgcggaggctggaagaaccaatgatgcatttgcgttctttgacgagatgaaagagaaaggttttactcctgataccttctgctacaacacgctgctgaaggccctctgtgatgctggtgatctggatggagctcgctcgttgatgtcagagatggtgcggaataatgtagtcctagacatccatacatatactaccatgataattgggttgtgcaaagaacagcttgtagatgaggcaatgcaggtttttgatgggatggtggaagttggctgtcatccaagtgttatgacatacaacgtgctcatcgatggactctaccgggcacaca

SEQ ID NO: 150973 - DNA, 280 bp, Zea mays
  unsure (1)..(280): unsure at all n locations
  Clone ID: MRT4577_69206C.1
cgtgggcggncgcgtgggggggggggggggcccaanaaatatcaacacntntntctcttaaattggctccncccgagtgtacaatgttgatgacctgaaagagtggtggaagccaacaaggaagaccgtctcaggaaggcttgtttgcgcagacaatcatcaccgaagaggtgggggggggganncatnncnnnactcnctngagaccgttccaaccatcaagaagctgaggtcatatgccgacaggatccgagcctcagagctcgagaagtgcctacag

SEQ ID NO: 150974 - DNA, 298 bp, Zea mays
  Clone ID: MRT4577_69207C.1
attcggctcgaggcttcatatacggtttctgctctccaaaacgggcaacacacaccttggaggaagtcgagggaagaagccaggctcaggttgaagggctgtgctcacctgcttgcttcacgacacgcgatgattgtatacataccagccagtgttttcgatttaaatatcacggatacgtgcactgctcctcgagaaccttaataggatccatgcctctgtgattgttggagagagctggaaaacattctcgctcctggaaactatacatcatgactacctggaacttttactccaa

SEQ ID NO: 150975 - DNA, 208 bp, Zea mays
  Clone ID: MRT4577_69208C.1
gactctgcacgaagcctggcaccatcgctgacgctagcacctgtgccgatctcattaggacatatacggagatgcctggagcctctgcgcagtgcagctggctgtgatgccaaaatatcgtgggctcgactccgttgtttatatcagggtgctgtggtatattcaggttctacaactaccatatgttgtggagtcaaactgaaatcta

SEQ ID NO: 150976 - DNA, 449 bp, Zea mays
  unsure (1)..(449): unsure at all n locations
  Clone ID: MRT4577_69209C.1
gcggccgggccgacggactctaaccctcgcaagggctgagtacagcacaccacccagcacggaggcactagtactgttgatcagctgcgccaatcctaccaccagagtgaggtgcctcgtctgtaggagagaagctccctttcgcctgccagagggcngacggctccaaaaactgcatgttcagttgggccgcatgagccaactgtgcaagatccatcacaggctacatcagtaccctgcctagcattggcaaaccacgccgatgacgtttccaagatacaggcgaccataccaatgtgatcgagccgagcttgacgtaccctggaaaccctatagactgccaccggacccacgttattcaccaaacaaccagtcattggagcacgcgaatgatataccattgctactgacttcaggagcactagagcagggagcttgacttgacttct

SEQ ID NO: 150977 - DNA, 1293 bp, Zea mays
  Clone ID: MRT4577_6920C.1
cctcgtcaggctcaagctaagtagtccaccggcatttggaacttgttcgcgagtcgcgactcgcccagccgccccttccgagttccgacgccgataccgtgactccgctcgctccattccgctcctaccgccgctggccgccgcaccattcgatccctgtttcttaatccggcggccggcctggagccctcagctcaacactcggcagatcatctcggctgttcgcctacttccttcttccccacggtcgttcgcgtgcagcacggccggcggtaccggaacagggcccagccggagcagcggtgccgtcccggcccggctgccttttgctactgctaacatcccagggcgcagtccggaagctgtagctcctttccggtggtctggtcttcacgctccaccatgaagatagcctggggtaagaaatctaaggttaagaagcagtcagtggttgtatcaactataccaggcctaccatttggagcggggagtgacaacgatgaggttgaaagggaggcggacgcgtgggcggacgcgtggggtcctggaacaaagccagttgaaactgctgagttgctccagagtcagggagacaagctagccgaggaagggaagtaccatgaagcacttgctaaatgggaggctgctctgatcttgatgcctgataatgcgatacttcatgagcagaaagctcaggttttacttgaagtgggagatgcatggcgtgcactgacagcagcaaccagagcaacagaactggatccattttggcctgaggcttgggttacacttggtagagctcaattaaattttggggagccagattcagctatactgacttttgacaaggcgttagctatgaagcctgactacaccgacgcaaaagctgaccgtgaaactgctgctcgcctagtcaagaaacgaggacagctgcatacgtcaggtttaagtgctaacaaaagacgcttcacagttggggagtacccaaaggagggaggtgcagagggtgaagaaaaagggaaagaaacagccgagcaactccaaaagatcacccaagaaaattagctaaattaactgattttgttactgtgtaaaatagatattacaaaaaaatattacattagtgttggtcacctgctttaattcgtaaagggaaccataacaaggcaatacaattaaagataaaaaaaaaaagttttcctaatctatctaatagataaattaagggaggaggattatggtaatccaagaccttcgaataataaaataggcgacagcaacggaattcgagct

SEQ ID NO: 150978 - DNA, 797 bp, Zea mays
  Clone ID: MRT4577_69210C.1
gccggccgggttcgggaacgcaagcagaagctacaatcctaaaaccatctgcttcagccttcagctagccccaagtttagtcggccgatcgatcactgaagtagtaatggcctccgccaacagctggaccctcgagatcgcgtcgccggtggccccgcagcgcctgttccgcgccgccgtgatggactggcacaccctggcgcccaaggtcgcctcccacgtcgtcgccagcgcgcagcccgtggagggcgacggcggcgttggcagcgtcaggcagttcaacttcacctcagtcatgccgttcagcttcatgaaggaggcggcatcggcgtcgccatcgaaacggcgacgtcgcacatcaaggtggagcccgcggccggcggcgggagcgtggtgaaggtcgaatccacttacaagctgctgccgggcgtggaggtgaaggacgagatcgccaaggccaaggagtccgtcaccgccatcttcaagggtgccgaggcctacctcgtcgccaaccccgacgcctacaactaaaccagtggactgggatgagcttcatttcccttgcggcttgtttggatatagaagggtattgtgtacggagattgggttttctttccccttctttttttttcatacaaaataaaataaagctgctctaaagcagcgtgcggtttttggactcgagatggtatgagtatatgtacgtgctgtccttgtgtgatatgtataccgtcatgtttttctgtgtgggaagaaaaaggacattctgttttagaatcctatgcacgtttgactta

SEQ ID NO: 150979 - DNA, 112 bp, Zea mays
  Clone ID: MRT4577_69211C.1
ggcacgcgtccgattctaggtcacatacagtcgcccgggagagtctttgcgatcgtccaatcctgggactccatcaataggcgcatagtacataggaatgacatccttgcga

SEQ ID NO: 150980 - DNA, 3615 bp, Zea mays
  unsure (1)..(3615): unsure at all n locations
  Clone ID: MRT4577_69212C.1
gcccggcccgtgccaccttacggnaaagcggacggggttcgtgccggagcggccgggggacttcggggatggcggcgcctttccggagatccacgtcgcgcagtatccgctcggcatgggacgccgtgatgataagggcggatccaagatccttgcgctcaccgtcgacgcacacggcagcgtcgccttcgacgccgtcgtcaagcagggggagaacgcaggcaagatcgtctactctaagcatagcgacctcgtgccgaagatagccactgccgattcccaggcgacgtcggacgacgacgaggagcagaagcagatcgaggagacaactgaacggaccaaggccgccttggagaaggttgtcaacgtccgcctctctgcagctcagcccaagaatgtgccgactcatgattctgagtccaagttcatcaagtataagccgtcacagcaatccgcggccttcaattcaggtgcaaaggagaggatcattaggatgtcagagatggcggtggatcctcttgagccaccaaagttcaagcacaagcgtgtgccccgggcgtctgggtcaccacctgtaccagtgatgcactcgccgccacggccagttacagtgaaggaccagcaggattggaagatcccaccttgtatttcaaattgggaaaatccaaagggttacacgattccgcttgataagaagttggcggttgttttttttttttttttttataacgaagagagcaagcaaaattccttattctcagtcaaacgtgcataggattctaaaacagaatgtcctttttcttcccacaaagaaaaacatgacggtatacataatcacacaaggacagcacgtacatatactcataccatctcgagtccaaaaaccgcacgctgctttagagcagctttattttattttgtatgaaaaaaaaagaaggggaaagaaaacccaatctccgtacacaatacccttctatatccaaacaagccggaagggaaatgaagctcatcccagtccaatggtttagttgtaggcgtcggggttggcgacgaggtaggcctcggcacccttgaagatggcggtgacggactccttggccttggcgatctcgtccttcacctccacgcccggcagcagcttgtaagtggactcgaccttcaccacgctcccgccgccggccgcgggctccaccttgatgtgcgacgtcgccgtttcgatggcgacgccgatgccgccgccctcgatgagcgtgttcttgcactcgcacttgtccgcgtccaggaactcgagacgctccttcatgaagctgaacggcatgactgatacatatatttaaactttaaatacttttttttttaagcacaatttcctttgtaatcattaattttataacgaagagagcaagtaaaattccttattcataaaacctacatagtattctaaaacagaatgcccttctgtacactcagatagagtggctgtatttaatacatggacagcacgtacatgtgtataatcctcccatcccgagtccaaaaaccgcacgatgctttagagcagcttgattttattttgtatgaaaacaaaaaagaaggggaaagaagccccaatctccgtacacactacccttgtatatcccaacaagaccgaagggaaaggaagctcatcccagtccaatggtgtagttgtaggcgtcggggttggccatgaggtaggcctcggcacccttgaagagggcggtgacggactcgctggcctgggggatctcgtccttcacctccacgcccggcagcagcttgtaagtggattcgaccttcactacgccgcgacggccggcccggggctccaccttgatgtgctgaggggaagttgcactgcctgacgctgccaaccccgccgtccccctccacgggctgcgcgctggcgacgacgtgggaggcggaccttgggcgccagggtgtgccagtccatcacggcggcgcggaacaggcgctgcggggccaccggcgacgcgatctcgagggtccagctgttggcggaggccattactacttcagtgatcgatcggccgactaaacttggggctagctgaaggctgaagcagatggtttttaggattgtagccccgcggtggccggtgtctcgtgggacgaggttgggggctgatgggaggagtctgcaggaggtgcagatcaaggataactttgcgaagctttctgaagcattgtacgtggcagagcagaaggcgagggaggcagtgcagatgcgctccaaggttcagagggaacttatgctgaaggagaaggagaggaaggagcaagagctaagggcacttgcacagagggcacgtatggagaggactggtgccccacctgcaccatcaggtgtgcctgctggtggtggcaggggagcaattcaggatgttgatgaagttatggatatggagcaaccgcgtgaaccacgggaatcgcgtgagcagcgcagggaatctagagaagagagggaaggaaggattgagcgtgatagaatccgtgaggagcgcagacgcgagagggagagggagaggaggctggaagccaaggatgctgcaatgggcaagaagagtaagatcacaagggacagggatcgtgatatcagtgagaagattgctcttggtatggcaagcactggtggtgcaaaaggtggtgaggttatgtatgaccagcgtctgttcaaccaggacaagggaatggactctggttttgccacagatgatcagtacaatatctactctaagggtctcttcacagcgcagtccacgatgtccacgctatacaggcctaagaaggatggggattctgatgtatatggtgatgcagatgaacagctggagaaggttatgaagactgagaggttcaagcccgacaagggatttactggtgcttcagagaggactggcaagcgagacaggcctgtggagttcgataagcaggaagaaaatgatccatttggtctggatcagttcttgactgaggtgaagaagggtaagaaagctgtggagaagattggaggtggaggaaccatgaaggcgagtggtgggtcctcaatgagggatgattatgatggtggatctgggaggtcccgcatcaactttgaaagggggcgctgaggtatttgctctgcttctgcaggtttggaatgctttctcaaatatcttctagcagaatgtcataagaagctgaactctgataagaaagagcatggctcctgtgctgttatatgctcatgtgcctactttcagtggttgtgcttaaggtgtactatatggatcctatgatgtctatgtactatgcgtgtatctgttcattataggagctatgaacttcgtttatccatgttccatcaattgttacgaacttatgatacatgttattgggctctattatttcatcagttaccattttgggatatggatggactcaacgtggctatttgttgccatggttgctgcacatgtgctcattctgtttatgaatttcttggtggtgcctattagattatttctttgctgcttttattgtggggatgtattcatggttcactgatgtactcaataagattttgctgtgtcatgg

SEQ ID NO: 150981 - DNA, 1087 bp, Zea mays
  Clone ID: MRT4577_69213C.1
gcacgaggcaaaaccagagtccattcccttgtcctggttgaacagacgctggtcatacataacctcaccaccttttgcaccaccagtgcttgccataccaagagcaatcttctcactgatatcacgatccctgtcccttgtgatcttactcttcttgcccattgcagcatccttggcttcaagcctcctctccctctccctctcgcgtctgcgtaaaaccatctgcttcagccttcagctagccccaagtttagtcggccgatcgatcactgaagtagtaatggcctccgccaacagctggaccctcgagatcgcgtcgccggtggccccacagcgcctgttccgcgccgccgtgatggactggcacaccctggcgcccaaggtcgcctcccacgtcgtcgccagcgcgcagcccgtggagggcgacggcggcgttggcagcgtcaggcagttcaacttcacctcagtcatgccgttcagcttcatgaaggagcgtctcgagttcctggacgcggacaagtgcgagtgcaagaacacgctcatcgagggcggcggcatcggcgtcgccatcgaaacggcgacgtcgcacatcaaggtggagcccgcggccggcggcgggagtgtggtgaaggtcgagtccacttacaagctgctgccgggcgtggaggtgaaggacgagatcgccaaggccaaggagtccgtcaccgccatcttcaagggtgccgaggcctacctcgtcgccaaccccgacgcctacaactaaaccattggactgggatgagcttcatttcccttccgtcttgtttggatatagaagggtattgtgtacggagattgggttttctttccccttcttttttgttttcatacaaaataaaataaagctgctctaaagcagcgtgcggtttttggactcgagatggtatgagtatatgtacgtgctgtccttgtgtgattatgtataccgtcatggttttctttgtgggaagaaaaaggacattctgttttagaatcctatgcaggtttgactgagaataaggaattttgcttgctctcaaaaaaaaaaaaaaaaaaaaaaaaaaaaaaa

SEQ ID NO: 150982 - DNA, 244 bp, Zea mays
  Clone ID: MRT4577_69214C.1
ctccttggcttttactctagctctcctcctctgtcgcataccaccgcatcacaaccacgacttcctcccgccggcggttggcttcactgatcatacacctccgcccgggccgtaaaacaaatggggactaataaaagtcacctgtgggctttggatatcggcgagcgaatggctgcgtgcgtacataggagatggcctatatgatgctatagcacgggtggaaaaggcgtcggagaaagggaaa

SEQ ID NO: 150983 - DNA, 743 bp, Zea mays
  Clone ID: MRT4577_69215C.1
gccggccgggctgcgagaaaaacagaattcactctctcacgtatgtagtcatcactactcacgtgtcgtccaccatagacaacaatgtccatggagacgtgcttcagagagtgtggctgcacgcccccgctgtgaggaaggacaggctcctcggctgcaatctgcaggtgctgccgtcgaactgggcgctcgcgacgatgtccgtcggccgctgcaccacttgccggacgaggtacgtcatggcagaccaacaacacagtggacgaagttgtcgaggcggacgagaagaactgcgacgcgttgctgatggtgtgcgacaccacggtgatggaggagttctggacgccgaggtgcgggccgagccggatgatcgcgccgcggatcgacgagttgtacatggagtacgccgacaagatctcctggtgcatggtgaacaccgaccagatgctcaacgtggcgtacacctacggcatccgcatcatccccaccgtgctcatcttacaagggcggcgaaaataaggaaagtctcatccgtgccgtcccaaagtccacgctcaacagccctcatcgataagtacatcggaagctcatgagcatgacatgcatgcatgctatcgacgactaaacacatatgtgtatctctagtcacctttgcatacgcggatatgatcaattcaagcagccatccgtctgctactgctgagttatatataaccatacctccatgactaatccagagtaca

SEQ ID NO: 150984 - DNA, 1289 bp, Zea mays
  Clone ID: MRT4577_69216C.1
cggggtacggggttcgtgccgcgacggccggaggacttcgtgggatggcggcgcctttccggagatccacgtcgcgcagtacccgctcggcatgggacgccgtgatgataagggcggatccaagatccttgcgctcaccgtcgacgcacacggcagcgtcgccttcgacgccgtcgtcaagcagggggagaacgcaggcaagatcgtctactccaagcatagcgacctcgtgccgaaaatagccactgctgattcacaggcgacgtcggacgacgacgaggagcagaagcagatcgaggagacaactgaacggaccaaggccgccttggagaaggttgtcaacgtccgcctctctgcagctcagcccaagaatgtgccgactcatgattctgagtccaagttcatcaagtataagccgtcacagcaatccgcggccttcaattcaggtgcaaaggagaggatcattaggatgtcagagatggcggtggatcctcttgagccaccaaagttcaagcacaagcgtgtgccccgggcgtctgggtcaccacctgtaccagtgatgcactcgccgccacggccagttacagtgaaggaccagcaggattggaagatcccaccttgtatttcaaattggaaaaatccaaagggttacacgattccgcttgataagaggttggcggctgatgggaggggtctgcaggaggtgcagatcaatgataactttgcaaagctttctgaagcattgtacgtggcagagcagaaggcgagggaggcagtgcagatgcgctccaaggttcagagggaacttatgctgaaggagaaggagagaaaggagcaagagctaagggcacttgcacagagggcacgtatggagaggactggtgccccacctgcaccatcaggtgtgcctgctggtggtggcaggggagcaattcaggatgttgatgaagttatggatatggagcaaccgcgtgaaccacgggaatcacgtgagcagcgcagggagtctagagaagagagggaaggaaggattgagcgtgatagaatccgtgaggagcgcagacgcgagagggagagggagaggaggcttgaagccaaggatgctgcaatgggcaagaagagtaagatcacaagggacagggatcgtgatatcagtgagaagattgctcttggtatggcaagcactggtggtgcaaaaagtggtgaggttatgtatgaccagcgtctgttcaacaggacaaggaatggactctggttttgccacagatgatcagtacatatctactcta

SEQ ID NO: 150985 - DNA, 312 bp, Zea mays
  Clone ID: MRT4577_69217C.1
acagactgcgtcgccgcctgctctgcccagcacccggagctcgaccgaacgccgctcaccattatcgtccccgcgaagatccgcagtgaggtctgcaagtacctcatcgatgatggcgtgctgtatgccaagaaggactacgacctggcgaacagcccgcagatcggtgtgaccagcctccaggtgatcgagctcatgcagagctttaggtccaaggagtatgctagggagaccttctcctggcagtagtagtactggtatctcaccagcgatggcattgagcagctacgcaactacctgaacctcccgtct

SEQ ID NO: 150986 - DNA, 802 bp, Zea mays
  Clone ID: MRT4577_69218C.1
cttcataattccaagccggaagaacaagggcgagaaactgatggactgggacaagtgtaggaagctccagtgggacattatcctcctcctgggggcaggattcgccatcgctgaaggcttcaggtcaagcggcctgaccgacatcctctctgacgggctccggttcctgaagggcgcagagacggtggtcattgtacctgtggcctgcgtcgtcagcggtgtcgtcacagagttcacgtcggacgacgcgaccacgacgctgctgctccctctgtttgctgaattggccaaggcgatcgatgtgcacccagcgctgctcatggtttctggagcagttggggctcagctttcgtacttgttacctactggatcaccgtcaaacgtaattgggttcagcactggccacattaccatcaaggatctcgtcaccacagggcttcccctgaaacttgtcggaatcgcggctctgacagtcttgatgccaactctaggatcacaggtttttggcacaaacagcaagttctaggagcggaatgcatattggacggttcattcctccaagcccaagttctaggagcggaatgcatattttggaccgttcattcctcgaagcccagttgtatatatgtacagtactttcccttatcttgtatctacggcctagtcaaggttagtgggagggtatactctttgatctgtacaaggttaaacattgaggattgtatgcaatgctccaatctgtgtggaaatagctacaggagtgctccttgagagcgaaatgaagtaaaagggagagcaattt

SEQ ID NO: 150987 - DNA, 1075 bp, Zea mays
  Clone ID: MRT4577_69219C.1
taggggcctttttttttttttttctaggaataaggagagcaagtaaaatcttatttcagtcaaacttgcataggatttaaaacagaatgtcctttttcttcccacaaagaaaaccatgacggtatacataatcacacaaggacagcacgtacatatactcataccatctcgagtccaaaaaccgcacgctgctttagagcagctttattttattttgtatgaaaacaaaaaagaaggggaaagaaaacccaatctccgtacacaatacccttgtatatccaaacaagccggaagggaaatgaagctcatcccagtccaatggtttagttgtaggcgtcggggttggcgacgaggtaggcctcggcacccttgaagatggcggtgacggactccttggccttggcgatctcgtccttcacctccacgcccggcagcagcttgtaagtggactcgaccttcaccacgctcccgccgccggccgcgggctccaccttgatgtgcgacgtcgccgtttcgatggcgacgccgatgccgccgccctcgatgagcgtgttcttgcactcgcacttgtccgcgtccaggaactcgagacgctccttcatgaagctgaacggcatgactgaggtgaagttgaactgcctgacgctgccaacgccgccgtcgccctccacgggctgcgcgctggcgacgacgtgggaggcgaccttgggcgccagggtgtgccagtccatcacggcggcgcggaacaggcgctgcggagccaccggcgacgcgatctcgagggtccagctgttggcggaggccattactacttcagtgatcgatcggccgactaaacttggggctagctgaaggctgaagcagatggttttaggattgtagcttctgcttgcgttgcgtgacgcccaggcagacgtgccctccgccagaaggcttcgggcgcaacttgcgttcaaaaactcgatggttcgcgggattctgcaattcacaccaggtatcgcattttgctacgttcttcatcgatgcgagagccgagatatccgttgccgagagtcgttcgcccggaccggccggc

SEQ ID NO: 150988 - DNA, 809 bp, Zea mays
  unsure (1)..(809): unsure at all n locations
  Clone ID: MRT4577_6921C.1
cctcgaggccggcctggagccctcagctcacactcggcagatcatctcggctgttcgcctactttcttcttccccacggtcgttcgcgtgcagcacggccggcggtaccggaacagggcccagccggagcagcggtgccgtcccggcccggctgccttttgctactgctaacatcccaggacgcagtccggaagctgtagctcctttccggtggtctggtcttcacggttctactcctattcgtctgcttcaatccagctgcgtcatctaatttatgctccaccatgaagatagcctggggtaagaaatctaaggttaagaagcagtcagtggttgtatcaactataccaggcctaccatttggagcggggagtgacaacgatgaggttgaaacggaggaaaaatcagatgcaaacacaaactgtcctggaacaaagccagttgaaactgctgagttgctccagagtcagggagacaagctagccgaggaagggaagtaccatgaagcacttgctaaatgggaggctgctctgatcttgatgcctgataatgcgatacttcatgagcagaaagctcaggttttacttgaagtgngagatgcatggcgtgcactgacagcagcaaccagagcaacagaactggatccattttggcctgaggcttgggttacacttggtagagctcaattanattttggggagccagattcagctatactgacttttgacnaggcgttagctatgaagcctgactacaccgacgcaaaagctgacccgtgaactgctgctcgcctagtcaagaaacgagga

SEQ ID NO: 150989 - DNA, 270 bp, Zea mays
  Clone ID: MRT4577_69220C.1
cccacgcgtcccctatcaccacgtcaagaactactggaacaccaagctcaagaagaaggccatgggggccaggagcatccgaacatacttcgcggcgcccgccacgccggcgctctcgcccggctcctcgtgcgtcaccagctccagcggcgacttgcgcctcggcgcgaagtacaccgagccggcgccgactcggcagtaggcccggctcgtacgctctggcgctacgcggaccgagctcgcgcccgtgccggcagtcgcgcacctgga

SEQ ID NO: 150990 - DNA, 141 bp, Zea mays
  Clone ID: MRT4577_69221C.1
aaaaatcattgggtaaacgatgtaatgatggctatcacggggaatcgggtgtgctggaagctaggcatcaagtagaacggcacactagctaagcaggaaggagcgagctcctgtctgatctgctcggaatatatgaagaac

SEQ ID NO: 150991 - DNA, 770 bp, Zea mays
  Clone ID: MRT4577_69222C.1
cattgggtacctcgaggccggccgggattctgttcagagagtttcaatagtattcaatctctctctctctttctctggattgtgccattgcaagacaccccgccgacacccatttgattggcgtcgcgtctccccgcaccccgactgtgcatccccaacaccttctttgaaaccacgtttgcacgctgcatacaccgacagctgtatacacaatggcttatcttcttcgtactgccggccgctcgcgggcaattcttcctcgcgtgaatgctcacacagcctcaagggtgccaacggcgctcaacagacgatatgctaccgcagccgccgcagtcgctacggacagcggagagcagtcattcttccccgatgagcccaagcagccaattgtgaagacacagattcccgggcccaacagccaaaaggctattgagaagctcggcaaggtgtttgatatccgaagcttgaacatgatggccgactattcacgaagctacggcaactatattgccgacctagacggcaatgtacttctcgatgtgtatgcccagattgcctctatcccagttggctacaacaacccatctcttcttctcgcagccacctccccggaaatggcctcagccatcatcaaccgacccgctctcggaaacttccctcagcacgactgggccgacatcctcgagagcggcatcctctccgtagcacccaaaggcctcaaccaagtcttcaccgcacaagccggttccgacgccaacgagcttgcctac

SEQ ID NO: 150992 - DNA, 481 bp, Zea mays
  Clone ID: MRT4577_69223C.1
cgatgacctccgctccgcgcccgcttcggtccgctagtacgtcaccgagttcgatccgtttcaaaccctaggcgtcatgagcgcggaaaacgccggtttcatatggaaggcgcctcttgacaaggtacgcattgaagagcgcttaaactggatcagagagtgtgaacctccaattgaggcgctctatcaaaatatctccagtgcgttgcatgaagctcgtatctggggtgaagagtatttcaatgacctgtctggacgcttaaatagtgcactggttagagtcttgcttgagcgtccagatgtcagttgtcaggactgccaggcctgatggtgggcaattttgacagacgatgcacttggccatccatcgtgtctagccctcgtgtctaatgcctcgtgagggagtgttgttttgctcgccttctttacggacctttttactggcacgcgccttgatttgcgcgttttgctggcacgagct

SEQ ID NO: 150993 - DNA, 339 bp, Zea mays
  Clone ID: MRT4577_69224C.1
aacaaaacaattcggcggtcaaaaaaccaaaaagggtgatccggtggtgggggaaaccaacaccaactctttttggcaacaattttaaattttaaaacattgtcggattggagaactttctaccactcgtccacttcgggggaatttttcgaattcgaacccccacaaatgttacttccacaaaaaggaagcattgaacagatgcaaaccatacttcggggcccctcccaggtgcagtaaacagagaatttaggccctttcaccacgggtccttctaaccagttgaatgtccttgggcatgatgggcacccccttggcatgggtgggccacaaattttg

SEQ ID NO: 150994 - DNA, 162 bp, Zea mays
  Clone ID: MRT4577_69225C.1
gcgctaaccacggaatccggctcgagatatggtcctgaagacggaaatctgtcgcttcagtggccatacgatctatcctaggtaaggcatacggagtattcgtagcacttctcaggttcacctttatgccagctcgaagtgcaagcgctacatccacaaacg

SEQ ID NO: 150995 - DNA, 145 bp, Zea mays
  unsure (1)..(145): unsure at all n locations
  Clone ID: MRT4577_69226C.1
ccaacctnataaaggctaaatgggtaaaaaagtatgttcgattcctgccgccaacctnataaaggctaaatgggtaaaaaagtatgttcgattcctgccgagggaacttgcttttggattcttatcgaaagtgaatccctctaac

SEQ ID NO: 150996 - DNA, 226 bp, Zea mays
  Clone ID: MRT4577_69227C.1
cttaaacatcacatctgataaatggagctgcccagaatgtgtaagtccattaacagagatggagaggattctagatattgaagtgctggaagcacctcgtgaagattctagttccacagagcctcgatcaaagaagatggagcgatatcttatcaagtggaaaggattatcatacattcactgctcttgggtttcagaaaagagaatattcagaagccgcgaatat

SEQ ID NO: 150997 - DNA, 185 bp, Zea mays
  Clone ID: MRT4577_69228C.1
aaagaggcaacatatattattattattattattatgtacgggaatacattgacgaacatacatactcacgtcacaactaacgtaccaaatgcaacaaaattaaatgaaaatagaagtacacaccttacagagacaatgacaagagagagagagagcacaactcaatctcctgcattacagcctag

SEQ ID NO: 150998 - DNA, 542 bp, Zea mays
  Clone ID: MRT4577_69229C.1
taacccggttttggtcatagtcaaagaaagaataccaaaattttgacatccgaaaaaggttccggatctattcttaatcaaaccccgacgggaccaaacttttacaacgaaatagagaaaattgttgtatgactgggcttagaacaggaagtttggaattatggaaaggggaggtgctttaaaaatttacgcccttttaaacactaacaaccctaccaaccctgttcaggttcaccatgcgggcacttgcatcctgaaatcgtggtattgcccccgttgcccccgggggaaacatgattgtccctgcgcccttgggggaccacctttttgacacagtggttgcaccttttccgggggttctcaaaccgggtggcaacaccctggcgccctttggttgggacaaaattttcctgcacttggaggagtctgagcctcgtcctgggcccgggggggaccccccttagggggccccccctttttaccctggcgccctttggtgggtcccccggcccgtttttttttgcaccgggagagaaccccct

SEQ ID NO: 150999 - DNA, 206 bp, Zea mays
  Clone ID: MRT4577_6922C.1
cattaagggacacaatttttcagtatctttcatatcgggtaaaatgagttgaaaactatctcaaacacccggtgggggcatacgtgcgtctgtttacactgtaaccataagagacggagtcgacctgtctctgctggagacggcgaatttttagagggctaggaccccttgtgtactgagtgcagaactaatcatattcgttgagg

SEQ ID NO: 151000 - DNA, 163 bp, Zea mays
  Clone ID: MRT4577_69230C.1
tcgtcacgtcccacagccgtccgctcactgcagccaccacgcacgcaagcgtcaacgaacagaccagcgtcgcgtaaaatagagtgaagagcgcgcagcatgaggatcatacagctcgagcatcttgggtgctacgccgctcggcgctagtcggcagggcact

SEQ ID NO: 151001 - DNA, 598 bp, Zea mays
  unsure (1)..(598): unsure at all n locations
  Clone ID: MRT4577_69231C.1
ccccccctcgagttttttttttttttttttacccattgagtgaatgtttttattcaataaaaaacatatggatagaacatttagctcatatacatatctaacaaagtaaataatcatcattgagtatcgggtcgcagttacctattgccatctctacccactgtacagggccacctgctctgatggcacacagcacacgctctgcattccgcagcttctccagagcagagcgctggacaacggaggcaatcaatgcgggaagcaatcggcggccccctcggtcggtacttggtagaggagcatcgtccggccagtaccgctaacggtggtccgtacgccaacggtggcgcgcaagcaacgcatgcttgctttggttccgctaccagtttgtccaggcatgccgcatgccacagccgcggtggtgaatcggatgaatggacaaagttctgtcgaaacagtggaactgtggaagcccgtagccctgtcatgacgctcaagtcatacctgaacatgaaccccgaagctgcttcgatttgacggggntctcttaatcagaaaaaaaatccttactgaaactacgaaacaaaacaaaacagct

SEQ ID NO: 151002 - DNA, 249 bp, Zea mays
  Clone ID: MRT4577_69232C.1
gcggcgcctggaacgcctcccgatttcgactttttcacgagagagcgatggcgctgactaagcggatcgtgacggtcgccgtggttctcccggcagtagcttctcttcaccaccgacatgctcatgctctgggccctgttgcgcaccaacgcgcgccagttccggcactggctcgaggacgacacggcctacgccgcatacaagtctgcacaagaagcatctgcaaagaaactcgactcgacgtgcccc

SEQ ID NO: 151003 - DNA, 643 bp, Zea mays
  Clone ID: MRT4577_69233C.1
tataacgaaatgcgaatccgctgccttcgcctctcgagtctcgtccacgccgtacggactcctagctcctgtactcggcagtcgccatgggccaagattactattgtgaattaacggcttctgaaggaatggcaggtttgcggccagggcctccttttacagagaggatgtcgatgtcgtcgctgcaaacgaccccttcatgaccacggactacttgatctacatgctcaaggatgacaccgtacgcggccactgtaagcacggtgacattacactcaaagactgcaagacccttatctttcgagataagatgggcaccgcctttggcatcaggaactctgaggaaatcccgtgtggtgaggatggcgctaactacctcctggagaccaccggcgtcttcactgacaaggacgaggctggtgcacagtctcgaaggtgtagccaagaaggatgatatctctgccccaagcaaagacgcacccatgcttgttgctggtgggaatgaggacaaggacacctcccatgttaacattgtgtcccatgctaattgcaccacaggatgacttgcttgccttgttaactgccattcatgacaacttccgaattgttcatggtttgatgacaactgtacgtggccttactg

SEQ ID NO: 151004 - DNA, 419 bp, Zea mays
  Clone ID: MRT4577_69234C.1
agatcccccaatgtcggacggccgatgggttcacccgcaaccctcgctggcggatcccccaagaactccattcacctccccccacgctgccaggagctccgcccgggccccgggtgccggacggccaccaggttcacccgtgcctgccacaggcggatgccccctcccccggtggctaggagctccctctgtgttgtcgtcgtgtgctgctgggcgtctccccaatggtgttacaacatggacattagagcactcgatgacggatggggagctactctagcgcgcgtcgttcatcccggtggtacctattctgacgcgtatggaaggtggccttcatgttcctcacgcgacctactgccactgcgggtggcggatgctgccgcggccgagcgcgacgaagcgctcgcccaggcgtcgat

SEQ ID NO: 151005 - DNA, 734 bp, Zea mays
  Clone ID: MRT4577_69235C.1
ccggccgggcactttaaagacacaaagcgaataagaaccgaccgcgagccagcttgttgtccacctttcgttcttgccttgctttgctggcgccgacgtgtgcaccagcggcgcggcccggaatgacttgccaggacttcggaggcgacgagcgtgcaccaggctgaccggagcacaacgtacaggagaacgcgttgaccacgtcgacactgtgcgcgaagaacggcgagagcgacacggacctctatgcgtgcgacaagctcaccgacaagattgacatgatcaacgctaaacggacatgggcgaagaaggcgcttgaatggagcgatgacgttgacaaggacaacccctaaacatatcggcagtccgtccagccggtatggccaacgggctaggatgaggatggctcagacactgtgactgatgccatcgctgggaggcacaccacctggtaccttaactaagcagatccagagctgcttcagcgagccttgcctgatgatgcttaccgacccaaggactgaccatgaaacaattaacgagactgctctggggaacatgcccaccattgccttctgtgatactgactctcccatgcggtatgtcgatatctgcatacaagcgaacaacaaggggaggaacagcataggatgcctgttctggcttttggccaggatggttgtgcagatgaggggcactatacttcctgggcacaagtgggaggtcatggtgga

SEQ ID NO: 151006 - DNA, 359 bp, Zea mays
  Clone ID: MRT4577_69236C.1
cccacgcgtccgcccacgcgtccgcccacgcgtccgcttggtatgaaaccacatgtgtgtgatgttattttgtcaaaaaaaaaaaaaaaaaaaaaaaaaaaaaaaaaaaaaaaaaaaaaaaaaaaaaaaaaaaaaaaaaaaaaaaaaaaaaaaaaaaaaaaaaaaaaaaaaaaaaaaaaaaaaaaaaaaaaagggggcgccccttttaaagaatcaaagtttacgtccccgtgcttgcaacgtaaaagcttttttatagggcccccaaattcaaattaactgcccgtcttttaaaaacgtgtgaactggaaaaaccctgggtttcccaaattaaatcgctttgaaaaaaatcccctttt

SEQ ID NO: 151007 - DNA, 819 bp, Zea mays
  Clone ID: MRT4577_69237C.1
atggtggtcaacgacaaggagaaggagtccatcttcaacgagccaagagacgaaaagcccactgactcagggtcgagtcacaagaagagggacaggaagaagaggcgcatcaagaagatcatctactatgacagcaacacctcctcttcttcaccaagggatgatgacgatgacgactcctcgtcgaaaaagaaaacagtcaatcagaattactcttttgactattctcgcattccttacaattcaaatgcacatttactatcaattccgcttggaaaacctccacactttgatggagaggactattctttttggagtcataaaatgcgtagtcatttattctctctccatcctagtatatgggaaattgtagaaaatgggatgcattttgatagttctgataatcctatgtttatcaatgagcaaattcataaaaatgcccaagccactactgttttgctagcatctctgtgcagggatgaatataacaaggacaccctcaagatatctcatgagggaaatgttgccaccatgattaccaaaatggaactggtggaaggcgagctagggaggtcatttacaattactgacccccatattgtcaaccttattcgtgaaaaccccaggtacaccaagatgacgcccgaggaaatcctcggaaaattcgtgagcaagcgcatgatggtgaaggaggcacgatacgtggacgatgcactaaacggtccactacccgtctacgagccacaacccattgctctcaaagcaaccagcagcagggaggcgctacccatcaagatagcacaagtggaggctgcctag

SEQ ID NO: 151008 - DNA, 103 bp, Zea mays
  Clone ID: MRT4577_69238C.1
ggtcctgaatagcgggcgccctccatgcgtccgcacccaaaaccactcatatccacatcgcccgaaatggtgcatcactgccacttcctccggatcctgaaca

SEQ ID NO: 151009 - DNA, 1056 bp, Zea mays
  Clone ID: MRT4577_69239C.1
atggatcctaagggtaaggggatggtggtcaatgacaaggagaaggagttcatcttcaacgagccaagagacgacaagcccactgactcaggctcgagtcacaagaagaaggacaggaagaagaagaggcgcatcaagaagatcatctactacaactgcgatgcctcctcttcttcaccaagggatgacgatgacgacgactccttgtcgaaaaagaaaacggtcaatcagaattactcttttgactattctcgcattccatacaactcaaatgcgcatttactatcaattcctcttggaaaacctccacattttgacggagaggactattcgttttggagtcataaaatgcgtagtcatttattctctctccatcctagtatatgggaaattgtagaaaatgggatgcattttgatagtactgataatcctgtgtttataaatgagcaaattcataaaaatgcccaagccactactgttttgctggcattgctgtgcagggatgaatataacaaggttagtgtcttggataacgccaaacaaatctgggacaccctcaagatatcttatgagggaaacgatgccaccatgattaccaaaatggaactggtggaaggcgagctggagaggtttgcgatgatcaggggagaggagccaacacaaacctacaacaggattaagaccctggtcaacaaaatccgaagctacggaagcacaagatggacagatcatgatgtcgtccgactcatgctcaggtacaccaagatgacgcccgaggaaatcctcggaaaattcgtgagcgggcgcatgatggtgaaggaggcacgatacgtggatgatgcactaaacgatccactacccgtctacgtgccacagtccattgctctcaaagcaaccagcagcagggaggcgctacccagcaaggtagcacaagtggaggctgccgggctcaatgaggacgaaatgacgctcatcactaagcgcttcaaaaccgtcttgaaagaacgcaaggaatacccaacaagaataaaacaaggggaaagtgctcctgcttaa

SEQ ID NO: 151010 - DNA, 324 bp, Zea mays
  Clone ID: MRT4577_6923C.1
atatgacacaggttcgaatacagcgagcacaactgcattctcagcattgaatgcagcaagggcaacccgccacgggactacgggagcgctgccacgacgacctaccataactacttgcactgcagcgtaagtagatcaacgtctacagatatcacgcgcatcgacgatccaagaacaacagcagcaacatgaattgcataggagacctcaccatcacatcatgaggaagcctctgctgactcaatagctaaattactgacaccatgcatgcatgccatatcactatgaatggtccagcggtacccctaccatgcgtgcctttta

SEQ ID NO: 151011 - DNA, 244 bp, Zea mays
  Clone ID: MRT4577_69240C.1
attactagtgacacagtcacacttgaaccgctgcccgcagcggtgggagcttgcacgggccaacgcacacataacacaagctcgtcgtcgatggcgcggtgggctgcggtgctggctcttgccggggccaccgttcatggcggtacttttcatagtggcttatgtggcttttccctgtcctagctaattgtgtgtgtaggaaatttttacactgtttcccttcacatggattagtgtccggttc

SEQ ID NO: 151012 - DNA, 577 bp, Zea mays
  Clone ID: MRT4577_69241C.1
accacgcgtccgcggacgcgtgggcacggttcaagcacatcgacacacacgagcacagaagagaaacgggcacacgcaactgatcaaggcaggcaaccaatattcaccgtcggcaatgggcgacctgatccctgggctgccggatgaagtggcgagggagtgcctcgtccgggtgggcttcgaccagctgccggtggtgcgccgcatctcgcgccagtggaagtcggcggctgggacccggagacgtgggcgccgacggacgcggtgctcgtctacgacttcctgtcgggcgcgtggcggcgcggcgcgcccatgcccggcccgcgcaggtccttcttcgcctgcgcggccgtgggcggcgccgtgtacgtggccggcggccacgacgccgagaagaacgcgctgcgctcggcgctggcctacgacccgggcgccgacgcgtgggcggggctcccggacatggcggaggagcgcgacgagccgcgcgggctctgcgtcgccggacgcttcgtcgtcgtcggcgggtactcgacgcgggcgcagggccgcttcgtcgcctccgcggagtccttcgacc

SEQ ID NO: 151013 - DNA, 304 bp, Zea mays
  unsure (1)..(304): unsure at all n locations
  Clone ID: MRT4577_69242C.1
gaggctcggaattcggctcgaggaacatgtgccttgctaaagttaanctggaccaccaagaaggcccggggtcacggctacaaaaaccttggagaactgacaaatgcaccgcactacggaagaagagaccctcccctgcgtctttgccaagcccttcctccagaatgacgagagggactacaatgaacaacagattaaggacgattgccgacgacgggcatgattccgtatgacagtttctgggctgactcagaggaggcgactagatcacactcacagctaagacatactaaactgggctcaa

SEQ ID NO: 151014 - DNA, 1731 bp, Zea mays
  Clone ID: MRT4577_69243C.1
gtcccacgcgtccgaacacacggttcaagcacatcgacacacacgagcacagaagagaaacgggcacacgcaactgatcaaggcaaccaatattcaccgtcggcaatgggcgacctgatccctgggctgccggatgaagtggccagggagtgcctcgtccgggtgggcttcgaccagctgccggtggtgcgccgcatctcgcgccagtggaagtcggaggtggagtcgccggactaccaccgccagcgccgggcggaggggctggcgcgcccggtgctcgcgctggtccaggcgcagccgacagcgccgccggatgacgacgacgacgccggccccgcgcacaagcgctcgacggcggccaactcgtaccggctggtgctgctggaaccggccgagggacggtggacgccgctgccgcccccgcctgggccaagccagagcctgcctctgttctgccaggtggccgccgccgtggacggcggcgggcaggggaggaagaggctggtggtggtcggcggctgggacccggagacgtgggcgccgacggacgcggtgctcgtctacgacttcctgtcgggcgcgtggcggcgcggcgcgcccatgcccggcccgcgcaggtccttcttcgcctgcgcggccgtgggcggcgccgtgtacgtggccggcggccacgacgccgagaagaacgcgctgcgctcggcgctggcctacgacccgggcgccgacgcgtgggcggggctcccggacatggcggaggagcgcgacgagccgcgcgggctctgcgtcgccggacgcttcgtcgtcgtcggcgggtacccgacgcgggcgcagggccgcttcgtcgcctccgcggagtccttcgacccggcggcggcggcgtcgcccgcctggggctgggcgcccgtccacgaccgcctgctgcccgaggacggcgcgtgcccgaggacctgctgcgccgcgccgcggtccgtcggccgcatgtacatgctccgtgacgggcacctcgtggcgcgcgacggcgccgcggcttggcgccccgtggcgcgggtgccagacgacgcgctcaccgcgccggtcgttttcgccttccctgacggccgcgtcgtggtcgttgggtccgggtgccacggcggggaccagaccgtgtacgtgctccgcgaggagggcgggagacctgcgtcctggtcgcgcgcgccgccgccgccgccggagttcgccgggcacgtgcaggcctcctgcttccttgaactctgaactctgaagtggagggtgtgtacctacacgtacgtggtggctgtgcatacatgacggaactacgctaccgtacttgttgtgccactgctgcagtgctgctagtctgctactcatcacggttgtatatacttagcaaataaatcatcacggttgtatgtacttagcaaataaagcagcggaacgggaatgatgtttattaaagaacatttccaggctagtgtaattaattagcgatgtcttcgttggattggatcacaatttgtttgatccgatctgcatgtaggggactagggacaggaaactgctgctaccggcgcgcttgcaaatggatgctgaaaatgctgtgcactaacagcggaccccggccccagtttagctcagtggtttcagtttctagaaccttttgatggaactgttttggcgggacatgaaaggagagtttctgtttttgggacctcatcttttgtcccaatcctt

SEQ ID NO: 151015 - DNA, 321 bp, Zea mays
  Clone ID: MRT4577_69244C.1
cgctgacaatgctccgttgcctccggggcatggcccggctcttctgggtgcccttctaccaggagaggaacaggtatggcctgctgatggcggctgcccttctggcacgcgctccaaccggaccctttgctaagctcgaccgcgcattcgacccaagcatgctggtgaccgcactcttggggactgccatcccgttcgcgggcttcaccggcgcgtccatggttgccaagcgcacggagtacctatacctaggtgggctgctatggtcctggctctccatcctgctctagctgcatctagccggctgcatattcagccact

SEQ ID NO: 151016 - DNA, 1952 bp, Zea mays
  Clone ID: MRT4577_69245C.1
tgggtacctcgaggccggccgggccggggcacacacacacacaagacacaacacaactcgtaggcagcgagcgtctctcctcttcctctcccacgcaccgcgccaaggaagacagcgagagatcgacgctcctcttctctccgtcggtggtgcggttgaccgccctactcgagcgagatctcgctgcagtccctcgagatctggtcacagatctatccgacaagatggtgaagatctgctgcatcggtgctggctatgtcggtggcccaaccatggctgtcattgccctaaagtgcccagacattgaggttgtcgttgttgacatctccaagccccgcattgaggcatggaacagcgacaccctcccgatctacgagcccggcctcgatgatgttgtgaagcagtgcaggggcaggaacctcttcttcagcactgatgttgagaagcacgtcgctgaggctgacatcatcttcgtctcggtgaacacccccaccaagacccgtgggcttggagctggcaaggctgccgacctcacctactgggagagcgctgctcgtatgatcgccgatgtctccaagtctgacaagatcgttgtcgagaagtccaccgtccctgtcaagaccgctgaggctattgagaagatcttgacccacaacagcaagggcatcaactaccagatcctttccaacccggagttccttgcagagggcactgctattgaggacctgttcaagcctgacagagtgctcatcggtggccgggagacccccgagggcaggaaagccgtccaggctctcaaggatgtgtatgctcactgggttcccgaggacaggatcctcaccaccaacctgtggtccgctgagctctccaagcttgccgccaatgcgttcttggcacagaggatctcctctgtcaatgccatctccgctctctgcgaggcaaccggagccaatgtctctgaggtggcttacgccgtgggcaaggacacgagaattggccccaagttcctgaacgccagtgttgggttcggtggctcatgcttccagaaggacatcctgaacctggtgtacatctgcgagtgcaacggcctgcccgaggtggccaactactggaagcaggtgatcaagatcaacgactaccagaagagccggttcgtgaaccgcgtcgtggcctccatgttcaacaccgtcgccggcaagaagatcgccgtcctcggcttcgccttcaagaaagacaccggtgacaccagggagaccccggccattgacgtctgcaagggcctgctgggcgacaaggcccagatcagcatctacgacccccaggtgacggaggaccagatccagcgggacctggccatgaacaagttcgactgggaccacccgatgcacctgcaaccgacgagccccacggccattaagcaggtgagctgcgtgtgggacgcgtacgaggccaccaagggcgcccacggggtgtgcatcctgaccgagtgggacgagttcaagaccctggactaccagaagatcttcgacaacatgcagaagcccgccttcgtcttcgacggccgcaacatcgtcgacccggagaagctgagggagatcggcttcatcgtctactccatcggcaagccgctcgacgcctggcttaaggacatgcccgcggtcgcttaattcgtctgaggattcttaaaagttggacggcgctgctagtattccatgtttcgtgttttcatattggaggacgtctgtagatgtaaaaaatcctcgggcgcttgtgctcggcttgaggaaatatgcttgtacggttgtaccctggacccgctatagctggttggttcttcaagttgtgttcctatagaagccaaagttactacacgatcgatatgttctttttgcataataacaatacttgtctcacgtttcatcctttcggaaaaaaaaaaaaaaaaagcggcc

SEQ ID NO: 151017 - DNA, 544 bp, Zea mays
  Clone ID: MRT4577_69246C.1
acacacacaagacacaacacaactcgtaggcagcgagcgtctctcctcttcctctcccacgcaccgcgccaaggtaaggcagagagagatcgccgctcctcttctctccgtcggaggtgcggatgaccggcctcctcgagcgagatctcgctgcagtccctcgagatctggtcacagatctatccgacatgcatggcgaagatctgctgcatcggcgctggctatgtccgcggcccaaccatggctgtcattgccctaaagtgcccagacattgatgttgagcgatgctgacatctgcaagccccgcattgaggcctggaacagcgacaccctcccgatctacgatcccggactcgatgatggtgggaagcagtgcaggggcaggaacctcttgttcagcactgatgatgaaaaacacgtccctgaggctgacatcatgtgcgtctcgatgaacaccctcaccaagacccctgggcttggagctggcaaggatgccgacctcacctactgggagagcgctggtcgtatgatcgccgatggctgc

SEQ ID NO: 151018 - DNA, 740 bp, Zea mays
  unsure (1)..(740): unsure at all n locations
  Clone ID: MRT4577_69247C.1
ggccgcttttttttttttttttttatagaaaccacataacatttcaaaaattggtatctcaagaagacgtactagtacatactgcagacctgcagaacagaagcgcaaactggatcaaggccgtgcaatggcctcggagtatctttgaaagaatacaaccaaaacagaaaaataaaaggcgaatactacgggaaatagggctgcaagactattccgtgacactgaagctccatgtcgaacattaccgtatcataccaaaccacacatagccaggacagattatagagtagcagtggggaagtagtactgatcccagaggaactcgtagtcttcaataacaccaccgaccatgtcaagaagaggcttgcccttgagcttggaggttatcgagtggctccaggccttggtgatgttctcgtagaatgcgccgcgcatcgcccaccaacccatggaccagccccgcttacgtagctcttctctctctaggccagtcaaaccacggagtcctccagccaagcgctcctggaaatccttctttgcaagttgacgagcgccatactcgatgctgacgccaatcaaccacggccgccagctcttcctgtcgccgctaaagtgctgcatggccaaggcataggcaacgggtcgcagaatgtaaaggacctcggcaagctcgccctttccactcactcggtgcagaagcgccttgggtggtnttgatgtcgtctgctgtaagtaccttg

SEQ ID NO: 151019 - DNA, 1683 bp, Zea mays
  Clone ID: MRT4577_69248C.1
cattgggtacctcgaggccgggccgggacacacacacacaagacacaacacaactcgtaggcagcgagcgtctctcctcttcctctcccacgcaccgcgccaaggaagacagcgagagatcgacgctcctcttctctccgtcggtggtgcggttgaccgccctactcgagcgagatctcgctgcagtccctcgagatctggtcacagatatatccgacaagatggtgaagatctgctgcatcggtgctggctatgtcggtggcccaaccatggctgtcattgccctcaagtgcccagacattgaggttgtcgttgttgacatctccaagccccgcattgaggcctggaacagcgacaccctcccgatctacgagcccggcctcgatgatgttgtgaagcagtgcaggggcaggaacctcttcttcagcactgatgttgagaagcacgtcgctgaggctgacatcatcttcgtctcggtgaacacccccaccaagacccgtgggcttggagctggcaaggctgccgacctcacctactgggagagcgctgctcgtatgatcgccgatgtctccaagtctgacaagatcgttgtcgagaagtccaccgtccctgtcaagaccgctgaggctattgagaagatcttgacccacaacagcaagggcatcaactaccagatcctttccaacccggagttccttgcagagggcactgctattgaggacctgttcaagcctgacagagtgctcatcggtggccgggagacccccgagggcaggaaagccgtccaggctctcaaggatgtgtatgctcactgggttcccgaggacaggatcctcaccaccaacctgtggtccgctgagctctccaagctcgccgtcctcggcttcgccttcaagaaagacaccggtgacaccagggagaccccggccattgacgtctgcaagggcctgctgggcgacaaggcccagatcagcatctacgaccctcaggtgacggaggaccagatccagcgggacctggccatgaacaagttcgactgggaccacccgatgcacctgcagccgacgagccccacggccattaagcaggtgagctgcgtgtgggacgcgtacgaggccaccaagggcgcccacggggtgtgcatcctgaccgagcgggacgagttcaagaccctggactaccagaagatcttcgacaacatgcagaagcccgccttcgtcttcgacggccgcaacatcatcgacccggagaagctgagggagatcggcttcatcgtctactccatcggcaagccgctcgacgcctggcttaaggacatgcccgcggtcgcttaattcgtctgagtttgtttttttttgcaggattcttaaaagttggacggcgctgctagtattccctgtttcgtgttttcatattggaggacgtctgtagatgtaaaaaaaatcctcgggcgcttgtgctcggcttgaggaaatatccttgtacggttgtaccctggacccgctatagctggttggttcttcaaattgtgttcctatagaagccaaagttactacaaaaaaaaaaaaaaaaaaaaaaaggcaaactgaaactggcggtttcatgatcacccctttgcctggcgcctggcctcaaaaaccaggttctgcaacctttcctttctttggtgttcagccggtcatt

SEQ ID NO: 151020 - DNA, 745 bp, Zea mays
  Clone ID: MRT4577_69249C.1
caagtagcaatccttcaacatgccgtacaatgaagccaatcttacgaagaacacctggtagttccagagagaagatagtgtcaagtagaaatgtcaacaactcaactattgatgacattgtggcatatgaggtgcacagagagttcatccgaactgattgtccatccacagaacatagtgcgacacctagtgatgaaagctgccagagtgctgattgggacacagaaccttccatcgatgatgcccatgaagattttagcgggtccagtgaagcttcactgatttccagccaaagcagcccaccaataaacataacaccaaaaaaggaagttgaaataaaagatgagatgagtttgtttctcctaagcagcaagtcattcgttaaccaagcagcacagctcataggcactgacgcatacgattacgaccatctgatcgagcaatacaaggataccggcaaggctgaaatgggagaccatgaactctacgtggacatagcaatggagcagctggaacgaaaacatcgtcagcagaacagcctatattacactggatacaggacccagaaatgcggagcaacaccatacttctccctggaggcattgctaggtgatatcggcgatgggactcggaagctgaagagctacaccgacgacaaagacgaccatggcagtggcaccaaagacagcatgtccatgaagctggagagggatctcggatgcgcagacccgtcgatcaacagcgc

SEQ ID NO: 151021 - DNA, 376 bp, Zea mays
  Clone ID: MRT4577_6924C.1
caaggaaaaaagcactgaagtaacggttacgggcaaacaccgactgttccaatggcgacgcccgcgctggtgctcctaccggagtgggggtccggccacctcatgtccatgctcgagtcctgtaagcgcgtcctcctcagcagcagcggcggcaaggccttctccatcaccctgctcgtgatgcgcccgccgacggccgaggccacctccgaggtggaggcgcacgtgcggcgcgaggccgcgtgcgggctggacatccgcttccaccgcctccccgccgtggaggcccccaccgacgccgtcggggtcgaggagttcatcgcgcgctacatcggcctccacgcgccgcacgtccgtgacgccgtggccgtcatgg

SEQ ID NO: 151022 - DNA, 2617 bp, Zea mays
  unsure (1)..(2617): unsure at all n locations
  Clone ID: MRT4577_69250C.1
ccggccgggcttcgtcttcctcattcaccaaccaccagttgccagacaaacagaaccgaggattcagtcggttcttcgcgaagagcaaagagtgaaactattccggatcgcggtgttaggtttgttgatttttggcgccaattgggtgggatggtggtcatgaatttctgtagagctagtgagggatgcttgcttgtgcgttctctcaggtcaggtgattcctttgggttgctggaataatactcagcttgcagtcgagcgggttgtggcgagagtgtgtgggggaatatttaagttgtcagtctcttctgctagagcttttctgggtttctgtgtgctcgaaacctcactaaaacctcactgtacatgtgcttacttgcttgaaggagcttggctgttggtttgtgtttaaaaaaaaaaaaaaattaacacacacaagacacaacacaactcgtaggcagcgagcgtctctcctcttcctctcccacgcaccgcgccaaggaaggcagagagagatcgccgctcctcttctctccgtcggtggtgcggttgaccgccctcctcgagcgagatctcgctgcagtccctcgagatctggtcacagatctatccgacaagatggtgaagatctgctgcatcggtgctggctatgtcggtggcccaaccatggctgtcattgccctaaagtgcccagacattgaggttgtcgttgttgacatctccaagccccgcattgaggcatggaacagcgacaccctcccgatctacgagcccggcctcgatgatgttgtgaagcagtgcaggggcaggaacctcttcttcagcactgatgttgagaagcacgtcgctgaggctgacatcatcttcgtctcggtgaacacccccaccaagacccgtgggcttggagctggcaaggctgccgacctcacctactgggagagcgctgctcgtatgatcgccgatgtctccaagtctgacaagatcgttgtcgagaagtccaccgtccctgtcaagaccgctgaggctattgagaagatcttgacccacaacagcaagggcatcaactaccagatcctttccaacccggagttccttgcagagggcactgctattgaggacctgttcaagcctgacagagtgctcatcggtggccgggagacccccgagggcaggaaagccgtccaggctctcaaggatgtgtatgctcactgggttcccgaggacaggatcctcaccaccaacctgtggtccgctgagctctccaagctcgccgccaatgcgttcttggcacagaggatctcctctgtcaatgccatctccgctctctgcgaggcaaccggagccaatgtctctgaggtggcttacgccgtgggcaaggacacgagaattggccccaagttcctgaacgccagtgttgggttcggtggctcatgcttccagaaggacatcctgaacctggtgtacatctgcgagtgcaacggcctgcccgaggtggccaactactggaagcaggtgatcaggatcaacgactaccagaagagccggttcgtgaaccgcgtcgtggcctccatgttcaacaccgtcgccggcaagaagatcgccgtcctcggcttcgccttcaagaaagacaccggtgacaccagggagaccccggccattgacgtctgcaagggcctgctgggcgacaaggcccagatcagcatctacgaccctcaggtgacggaggaccagatccagcgggacctggccatgaacaagttcgactgggaccacccgatgcacctgcagccgacgagccccacggccattaagcaggtgagctgcgtgtgggacgcgtacgaggccaccaagggcgcccacggggtgtgcatcctgaccgaatgggacgagttcaagaccctggactaccagaagatcttcgacaacatgcagaagcccgccttcgtcttcgacggccgcaacatcgtcgacccggagaagctgagggagatcggcttcatcgtctactccatcggcaagccgctcgacgcctggcttaaggacatgcccgcggtcgcttaattcgtctgaggtgctccattggattggatccggggaaggaagaggaactggttgaccgttcttcattacagtttgtttttttgcaggattcttaaaagttggacggcgctgctagtattccatgtttcgtgttttcatattggaggacgtctgtagatgtaaaaaatcctcgggcgcttgtgctcggcttgaggaaatatccttgtacggttgtaccctggacccgctatagctggttggttcttcaaattgtgttcctatagaagccaaagttactacacgatcgatatgttctttttgcagaataacaatacttgtctcacatttcaaaaaaaaaaaaaaaaaaaaaaaaaaaaaaaaaaaaaaaaaaaaaaaaaaaaaaaaaaaaaaaaaaaaaaaaaaaaaaaaaaaaaaaaaaaaaaaaaaaaaaaaaaaaaaaaaaaaaaaaaaaaaaaaaaaaaaaaaaaaaggaaaaaaaaaaaaaaanagggggggccccttttaaaaaacccaattttaacacccgggggttgaaaaaaatattttttttttttgg

SEQ ID NO: 151023 - DNA, 102 bp, Zea mays
  Clone ID: MRT4577_69251C.1
ccccgtggcgccgacaggaagggcaagtatcgtggacgtcgcactgctacgaagctccgaactcaccgaggagaccagtagtcgcatgatatacagtataag

SEQ ID NO: 151024 - DNA, 587 bp, Zea mays
  unsure (1)..(587): unsure at all n locations
  Clone ID: MRT4577_69252C.1
gngccgctcacacatttataattatagcacacgacgtggagacacaggtgaagggatatgggcggcaaatcgcgcgcatcagcgaagcctagcagcagcggtcagcagaggaacggggcacaaaattgcacggcgccatcgacgaggtggagctggcacacggctgacgagctggagggatgcgagccaggagctccgaccgacgagcactcgcaggaaacttcggctggacgcgagcacagggagcgagcagggctgagcgcgcagagctgcacggcgcggtggccatggcgaacgccaaggcgcacggtcgagcaggagcaagcaccgcggcagaagaacaaacttgggaggggaacgccgagctggaagccagtgagccgcaggagagagagatgggcgcgcagcgagccagggagccggacgcggcacgagcgagcagagcaggcagctgggactgcacggacctgagcgggcgcatgacagggagggctaggggagcacggagggatgagccagggaggagcgcgcagccaacgaggaaccttgcgcgcggcgaggaagctccagggagcagggatagagcg

SEQ ID NO: 151025 - DNA, 485 bp, Zea mays
  Clone ID: MRT4577_69253C.1
attctccttttttttttttttttcttgtgttttttttttttttttcgttgttttttcctatccccttttttttttgtacaaacacgcaacaccaactccagggggaaagaaaacccccaactcgaaggggggcccgccccaagccccccccccatggatcccccaggcgggaaaaaaagcccaacccccccccggaaatacaagcccagacaacccccctctagaaaaaaccgaaacccagccccaaccccaattttagaacagccccccccacccccccaaactggccagggagggggtacccctaaaggcacccctggactgaacccccaagtgcccccccaagcacctctgcagcccaagggaaagccgtgaaagaaaccgccccccccccggcaaaggggcacctaagggccccaacccaaacaccccctggagaccccccgggccccgggcaaccccccagacccaaaaacaaccccccc

SEQ ID NO: 151026 - DNA, 171 bp, Zea mays
  Clone ID: MRT4577_69254C.1
cggactcgtaggtcgactcagcgctttagttctgcttccagcagccgtaacgactgggtggggtgcatttacatacacggctggcctttcgagtgtctggctacgcacgcacatgttgtggatcttgtgttcgtaacactatatggactccctgagtctattatagaaatg

SEQ ID NO: 151027 - DNA, 287 bp, Zea mays
  Clone ID: MRT4577_69255C.1
ctgattgttcagttttttatgtgaaatacctcaactgtttttttcaagagctctcatgatattttgagccttgacaacagttctatataaattcacttgtaaatgctgctgttgtgtaattctaaatattttctaagataatttgaaagcaagggaaatagtggccccttaatgagtatttttttattggggtggggaaaggggcaaaaagaatgatcttagtgtctttacctttctcatattaactcacctctttattctgtggtcttttctgaatagaaatgtat

SEQ ID NO: 151028 - DNA, 447 bp, Zea mays
  unsure (1)..(447): unsure at all n locations
  Clone ID: MRT4577_69256C.1
gggggaaaagtttttttcccccctaatatttttggattggtctaaaacaccgaccccaccacaccaggggttaaaacccgaaccgccataaaaaaaacccggtttggttaacaaagggcaggcaaacaccccattttttggaagggggattggtaaactacggccaaaggaaaccacacaccagggagggggacatgtaaaaaaacacttttccagccaactgaggggaacggttaaatcgcggaagggaactaaattaaaaatgcttgtttcccaaggttttcctggccacctccactccccggggcagggncggttccctggtaaggaggggggccctggaaaaccttgtaacaccccaggctgcaaaaagggaacaacgttttggagtcccggtacttgtacgggtttgggcacaaagggcctgcacacttttcccttggaggg

SEQ ID NO: 151029 - DNA, 310 bp, Zea mays
  Clone ID: MRT4577_69257C.1
agcagtggtaacaacgcagagtactttttttttttttttttttttttttttttggttttttttttttttttttttttttttttttttttaacccatgatcttttagcttcatttccattacagggacccgatcggagtacgcgggacaagctcgccttatctgttacacctagctcgatggatattacaaattcagctttctgaatcctgacaaaaacctaaaacccagggacactctataaaacttttttttcttctcaaaagttacctcctctgtctatcccgcgtactctgggttgttcccactgct

SEQ ID NO: 151030 - DNA, 590 bp, Zea mays
  Clone ID: MRT4577_69258C.1
taattttttttttttttttttttttttattttttttttttttttttttttttttttttttttttttttttttttttttttttttttttttttttttttaatttttttttgtttaaaaaaattttttatttgtttattttttttttaaaaaaaaaaaaatcacttgttaggtattgggatgacatgtgccatgaagaatgaactgggggagcgccatttgcgttttattctaattgatgcaggtggtggaagaaattttcattaagactagttcaatttttttgttttgacacccaaaattgttttggtttcagttggtccaatttaatttgtgggggtttccaaaaaaaaaaaatttttttaacaggcctccccgggggagggggggaaacacaacccgttatttttaaaatttttattgggcaccgtatttttttttccaaaaggggtgaccctaaaaaaattaacttggagggaaaaatatttttttttttttcttataaaaaaaggaaaaaaaaaaaaaccttttttcagaaaaaagagggagaagtctctcctgggagggtgttttaaaaaaaaaaggggtctatc

SEQ ID NO: 151031 - DNA, 168 bp, Zea mays
  Clone ID: MRT4577_69259C.1
gccttgcattcgtgaccgagtgcaccacaagagggtgctcatgtataggcctatcaccatccggatggccgctcgagaatcacgccgtcataaatgagctcctcgttacgtctctcatgcggaaagaaagaaacagacgacctcccctggggatgttaatagaaatga

SEQ ID NO: 151032 - DNA, 706 bp, Zea mays
  unsure (1)..(706): unsure at all n locations
  Clone ID: MRT4577_6925C.1
cgagcatcctagcggatcctggcccgatccctcttcccacctacctccgcttctctccaagtgaggaaccccaagccctcgccatggcgtcgcggatcctggcccgatccaagtcccttcacctcgtcgccgccctcacccctgccgctgccaaagcagcaacgcctatcgccggagcccgcgcgctctcgtccctgccccgctacccgtctgccccgtcgccccatgggctcggcaaggttctgggatatgaaccaaaagttgtggcgttcagtccgctagaagcagctatcgctaaacctagaagtagtcccctgacaagtgagagttctaaagtaaggcgatcagagatagcaacccaagtcaccttttacatgatcccagccctgcttcttgcctccaagaacagcataagtacctcccttctggtcggcgccgtgttccatcaagtatacatgttccacaaggagattcttctggactacgtgcaccatgatatcaccagaaagtgggctttgatttacttcaagctgcttttgctggtgatggcgaaggacaccatcatgtacttcaatctgttctaagctcaccttttcagtttctcaaatatccagcaatgcatccgtctctgcactcgtagaataatgatgatggatgaattatgcagcctttcgttcttgnattctccctaatgagcttgcttttt

SEQ ID NO: 151033 - DNA, 217 bp, Zea mays
  Clone ID: MRT4577_69260C.1
gcagtatatataccgggaacaacggagcctgttctgcagagcgcgtgctggaccgacgcgggtggtttcacttcgtcgaatgtggtgaactatcttctatttgggggactatacacagagcaccgtgccctgcgcgaccctgttgctagcaataatgcgcattatactgtgcacgaacgagctgagacatgggtgcagacttcaatgctgatctgat

SEQ ID NO: 151034 - DNA, 381 bp, Zea mays
  Clone ID: MRT4577_69261C.1
gctacgcgtgcgtgttttcgaggggagaatttttacgaaccgttaaacaacacgaggaagagtctgggacgggaacatctggagcaaacggcgagcaccgccgatggcgagaacccggacgacgaccgccgtcgctggaggaagtacgtggcagaaagaaattctaggagccaatcacctaaggggctactaccgctgttcacaccgatactcgcaggggtgccacgcgacgaaccaggtgccccgcaccgacaaggaccagacgctgtactacattatctaccactgtgaacacaccagggccccccacaggccggcgggggggtaacacaacccagactcgcgcaggcacctgcgaaccctgaacgccgggccgacggg

SEQ ID NO: 151035 - DNA, 312 bp, Zea mays
  Clone ID: MRT4577_69262C.1
attcgtatagagccggttctaccagcttttttttcggcccacgccctttttttttttggggggggttttttcaaccatggggggccccacaacaaatacaagacggcggccgcttgttaaatacaccatcatcaaagggcgacatgtagaccccatgctgctgatttcaagcgacgcgaattctcaagtctcctatcgagatgaaaccacactgtacctgtatgcaatggatagaaccacctttgaggacaaaggcgaactcggtctgttagcggaccaaccatgatcaatcacttttttgtaacaacccaa

SEQ ID NO: 151036 - DNA, 287 bp, Zea mays
  Clone ID: MRT4577_69263C.1
caagtctcaacctcttgcagaggtgcaagattctgttggaggaaaagtgaacacatcctctgttgcatctgctgccattaataatgcaaagtcatccctttttgggttccatcttctcccatcatcagtcaagtttggagtgcttaaggaaggacatacctatgccacagttgtaaagctcaagaatgttggagtggacttctgcaggtttaaagtaaagcagcccccaccctgcacaggactgaaagtgacttacaaacctggacctgtggcagctggtatgcaga

SEQ ID NO: 151037 - DNA, 514 bp, Zea mays
  Clone ID: MRT4577_69264C.1
cctgggccgttccatttttaacctccctttaaggggtttttccggggggggcaggtaaaagccaaaaattgggaatttcccattttgcccccccggggggttgaaagttttaaccccccaaaaaacttgaaccgggggcatttttgggttgttttttaggcggcctccttttcgtaaaaatttccctaaacaggagttttgtccttttccaacatttttttggaacccttttggggttggggggtggtttcttgaaggctccgggaaaattccaaccaaaaacttttccccttggtttcggcgccccctccaaaaattttttttgcagcgttaacaatgccttttgggcgggtaatttccaaaggtttaaatttttttatcttggtctttggggaaacccttcctttcccctgggttatacaaaggtttttttggaaaactcaggggggtttttttatataaagttgtggcccttcctttttttaccctccaaaaaacaccccggaaccaaagg

SEQ ID NO: 151038 - DNA, 293 bp, Zea mays
  Clone ID: MRT4577_69265C.1
ctcaggttgtcactgactagtatgaaccattataaacccatgtgacagaatattgctgacaattgtcaatttagactagtagaagtaataactttaaaattattcttgctttaagtgttcctttaaaatattgattgcttttcaaagctttccatttatcctttgtcatcctctttgtatatgatgtagattgttgctgtaagaaatgctaataaggtaccaaactcttgtaagtgatgtaaataggaaggtgggtatatcatgttttcaggatactctactacctcagtttt

SEQ ID NO: 151039 - DNA, 250 bp, Zea mays
  Clone ID: MRT4577_69266C.1
atttgggtgttttttttttttttttggggggggattttaacttcctaggggttagaaattctttccaacaaataaaatggggggaaacccaacataacctttttgggcccaaattttttttaaaaaagttttttaaaaaaaaaattttccaacaattggtgggaataaggcaaaccccttttatgggtgggctgtaaacccagggtaaggggggggaaattgttaccccggaaaattattgggatggggg

SEQ ID NO: 151040 - DNA, 452 bp, Zea mays
  Clone ID: MRT4577_69267C.1
ggcttggaacctttgggctgatttatgtgcttgcttatgtgcttgcttatgtgcctgtgctgttaatgttaacaaacatatttgtgggcgtgagtttacagaatgtcgtaggggtgtgtgtcgactattaagtacacatacacagtatactgaccctccaccaccgtacgtatgcccacacaagcgtctaccgctccgtcgccgcaagcgttagtataagtacacacatggtgcccacacacatcatacatcttgactgcctaaaaaaaaaaaaaaaaaaaaaaaaaaaaaaaaaaaaaaaaaagaaaaaaaaaaaaaaaaaaagaaaaaaaacagaaacgaaataaagaaaacacaaaacaaaaaaaaaaaaaaaaaaacaaaccaaacgacaacacaaaaccaaaccaaccgaaagcaaaccgggtggcggcccgacgggaaaaatccgc

SEQ ID NO: 151041 - DNA, 532 bp, Zea mays
  Clone ID: MRT4577_69268C.1
gtacaagtatattacattgtttacaacatttaccctatacatatttacatccacatagtgtgtgagacaatgtgagccacgtactgtatctgtacatgcgtgcccaagacgtagaaaaaagaagaaaaaaataatcaaggtatgcaagaaagaaccaggtgtcctgcactcctactaccctacaatactctgctcctggtctgggacacgtgtgcacgcgcatcggctcacggttgcccaaagacatcctaacgaaaagtgtgcgcaccggcttagaccgcgcccacgcgtccggagcagccagacgtcgatgcacggcaggtggaacgtgtgcccgcactccggcaagctccgcgccgtctcgcctgcctcgaagtcctgcaaaatcaaaccaccgaccgggtcgatgtcgaccatcaaaaactgtgcagaaacgacacgaaaatcggccatgcacagcctgcactcgctgcaagcatgcgcggcggcggggatctataggtagctgacctgaaggcagacggagcagccg

SEQ ID NO: 151042 - DNA, 522 bp, Zea mays
  unsure (1)..(522): unsure at all n locations
  Clone ID: MRT4577_69269C.1
gacatcagacatacccacctgcctatctatctatctctaacacacaggcaacctatctactcacaatatagtgatggagtaagaaaacaacaagtcgagccgctagtgcgctgatacttctccgaatagatgtcatgttccaaatactccgacggacagactcctgaaggacgtcaacctccaccgcgaggtgttcgtgaacatcatagcgaggagagcttcgggcattcaccgagaagaatcactctgtgatgaaacctcgtgacttcctaccatgatatacattgaatcatgcgttgccaatgcattggacaatctgcagtgatgtcatatcaggactatcgctatttataattattgtcttcagaaacacaacgacagtaatactgtgtgctacttattggatgtgcatgangaccttgtacttgaaatctaatatgaaccgatatctggtatgtgtggcatggacttttacgtcgttctggaacgagctggttattttggtgcatctcggcgcaggtg

SEQ ID NO: 151043 - DNA, 1113 bp, Zea mays
  Clone ID: MRT4577_6926C.1
aattcggcacgaggttaccatccaccgccgcctctctccctcctccaacagaagaccccaacccctcggcatggcgtcgtggatcctggcccgatccaaagcccttcccctcgcggccgccctcacccgcggcgccgcctacgcagcgccgccgatcgccggagcccgggcgctctcgtccctgccccgctacccgtccgccccgtcctcccatgggctcggcaaggttctgggatatgaaccaacatctcacgtcagtggagcacaagttttacctcgttggttttcctctctagcatccaatggatctcagatctctgagacatacaagtctggtggtgaaatgaagcagtctgatgcacggaaatcaagtgaggaagccacacccacaccaaaggttgtggccttcagcccgcaagaagcagctatagctgaatccagaagtagtccactgacaattgagagttggaaagtaaggcgatcagagatagcaaccaaagtcaccttctacatgatcccagctctgcttctcgtctccaagaacatcatgagtacctccgttctggtgggcgccgtgttccatcaagtgtacatgttccagaaggagattctcctggactacgtgcaccatgatatcaccagaaagtgggctttgatatacctgaagctgcttctgctggtgatggcgaaggacaccatcatgtactttcatccgttctaagctcacccaccgtgtcagttcctcaaataatcccagcaacccatccgtctgcgcactcagagaataatggtggtggacgaatcctggagccctcgttcgtgtattccccctcatgagcttgcttcttgccatcttctttttttttttcctgctgcaagttggttcctctcttgttaagtataattcatcagcctgaggggttgattagtgaccagtcagatgacatccctgattctgcacctcagtttgcaattgcaataacggttgatccatagttgatatggatcgtgcagctaaatgtttactgctgttatgatcgccggtttaagttctcaacagtttttatgccatgtgcttatcatggactgccagcatgtttgctttcctgctgc

SEQ ID NO: 151044 - DNA, 179 bp, Zea mays
  unsure (1)..(179): unsure at all n locations
  Clone ID: MRT4577_69270C.1
aactgaaacttaacccttctttggtgtatgaggtatccaccttcggcgggaaaattcttgagaacggtttcatcttgcanaataaaagaaactaaatttaatgaaggaaatattgacaaggcaaggaaagctgaaaaggaataaaaaaaggcaacaagcaatagcgcaagaacaataaa

SEQ ID NO: 151045 - DNA, 352 bp, Zea mays
  Clone ID: MRT4577_69271C.1
cccacgcgtccgcccacgcgtccgcccacgcgttcgcccacgcgtccgcccacgcgtccgtgtatgaggagttgaagaagcatgctactaaagcaattccttttgggtcaacacccaagaataatgatggcacatctgatgctgggacaaattggttaatgtttgagttgctgtggagagatttcttcaggttcatcacaaagaagtccagctctgtacagaagacatctgaagttgccactggctgaactccaaccccagggcttgcatgaacatacttagacaagctgattgccagctgcttttttggggggataaacctaatggccttttcaagggaggcttttttttt

SEQ ID NO: 151046 - DNA, 203 bp, Zea mays
  Clone ID: MRT4577_69272C.1
ggttcagactcgagctattatttgtaaaggcacattagagggacacactacacactgccatgacgagggcgggattggtatctaacaggcgaaccaaacatgcacacaccaacagtgtataaacatcattaagactaaaacggggctcttcactgacgcaccttgatcaggaacaagacaccaaggtgacgatccaacaacct

SEQ ID NO: 151047 - DNA, 350 bp, Zea mays
  unsure (1)..(350): unsure at all n locations
  Clone ID: MRT4577_69273C.1
acacagcacaaaccccacaggccacgccaaagagcaggggggggacgcgaagagcacaccaacaacggaaagagccccaacancggcgaccagacgggcagcaacaagaacgcgcaccgcaagggcaacggggagcccgngcgcaagaccgagcacggcgcggacgccaccagcancgccggcaccccccgcgagggggggggggagnnccccggccgcggcgncaccggccagcggancagcgccaccgccgnccacccnaacaacggcaaccgcgggaaggcgggcgcggaggcgagcccggagcagaggccgcggaacccggcgcccgcgccgnccagccagaacca

SEQ ID NO: 151048 - DNA, 337 bp, Zea mays
  Clone ID: MRT4577_69274C.1
agttgggaaccaattttcccattttaatattaaaccccctttaacagaaatcccaaggaggaaaacaaaggggcaaaaaaacccccaaaggaggtcggcaaaacgaaaaacctccgagggcccaacaataatcacccaccggccatgcacaaaatctcgcaagagaccggagctaaatctgcgaaaacggaggctatctaactccaaaaatgcaaatcacccgccctggaaaaccaccaaaacggacggtacacagcccctgcggctactgccacgaaaatcccccctcccccaacttaaaccgtcgaaactgaagccaaccccgacagccgaattg

SEQ ID NO: 151049 - DNA, 593 bp, Zea mays
  Clone ID: MRT4577_69275C.1
ttttttttttttttttactctaatactgattattgaacagatgaaggaacaaacaaaggcggcataatataaataataaataaaatgaagcctgcaccaccatctagctctaggtcttggacttggagtggcggcattgtggtcctggtcgtccgtgcagcggcctggacgaggaggacttgtggtggttgtgatgctgcagctgctcgagcaccggcaggacttcgtcggccatcgcgggtcggttcttggggtcggtctggaggcagcgcagcgcgagcgctgccacctcctgcgcctgcttctttgggtactgtccgcccagcctggtgtccatgatccggctgagcctccgtggatccccgagctgcgggtacgcccagtccacgagcgtggtgtccgcggacgaggcggcgtcgacggcgcggcggcccgtgatgagctcgagcagcacgacgccgaagctgtagacgtcgctcttggtggacaggtggcccgtggcgacgtactcgggcgcggcgtacccgcgggtgccgacgacgcgcgtggagacgtgggtcctgtcgcccgtgggcccgttcctggcgaggccg

SEQ ID NO: 151050 - DNA, 283 bp, Zea mays
  Clone ID: MRT4577_69276C.1
cttgtttttgcgtgagtttgcattatcagcaaaagtttggagccgaaagtacgatcacatatgtctaggtatctcattgatgtaggagcgctaaacataatttctgatgtgttacagagtcaggataaagaactcttttcagctggggcaaacatactcgggtattttgttgatctgcatcctgacttagttagaacatttattgccaatcatgaagagaacctggaaggcagttctcttcttgagtttctggttcaagggatggtagttgactccgccaatg

SEQ ID NO: 151051 - DNA, 271 bp, Zea mays
  Clone ID: MRT4577_69277C.1
gcggccgcccgggcaggtacaagctttttttttttttttttttttttttttttgtttttttttttttttttttttttttttttttttccaaacatcctttttccctatatattaagcccatccattacaatgccacacacagggaatggctaacactgccacccaaggggaggggaaacactcaactacccatcgccgctaaaccagggaaccaattatatgaagccaacaagcccttccattacattattactacagcacctccccccac

SEQ ID NO: 151052 - DNA, 603 bp, Zea mays
  Clone ID: MRT4577_69278C.1
cagcagatcacccgggcgtaccgcgacctgctcaactacaagtgctcccaggggtccaacccgcctgtggacaacaacgtccgcgacgaggactacgacgtggtggcgaggttcatgccggggttcaccagccgggtgcgcaagatccccgacttcctggacaactccttctaccacaacaacctggccaagatcgtcaccttccactccgactggacgctgctcacgcacaaggaggcgttcggccacgtcgtggagtacgccgagaacgccacgctatgggacgaggacttctcggactcgctgctcaagctcagcaagctgcccatgccgaaaggaagcaagggagagatcaggaagaagtgcagcgtcgttaaccaccgcttatactaagcctgccagatgccgtggaaatcgaagaaagaggtcgtgccagcacaacacatatatatcaaccatcggagatcagaaagccataaggttgcgcttttttgtttcatccattcttttgattatcattcgtttgtgctacactcatctttttgtgtatttctcatgcatatctgtcaaactgcaataaaactttgttcctgatatgtgcaa

SEQ ID NO: 151053 - DNA, 307 bp, Zea mays
  Clone ID: MRT4577_69279C.1
aaaaaaaaattctgaatcgattccccttgggtgaaaccccgctgtttgttttaaacccccgttttcacatgatttttgcccttttttgccccgatcccaacccataaaagggggcgggaccccttgcaacaaacccggggggagaaaaaaaaaacctcccccccggtgggtccaggggtccccaaagttttgggttcaaataacaaagcagtgcaccagtgggccttcttgaggggaaggggggtgggagtttccccagaaaaactaggggggggcaaacaagggtttccccccccaaggaagaccc

SEQ ID NO: 151054 - DNA, 1661 bp, Zea mays
  unsure (1)..(1661): unsure at all n locations
  Clone ID: MRT4577_6927C.1
tcagtctggaatgggatgatagtgaccagtcagnatgatatccctgatctgcacctcattaataatatgattaatgtcaattgtgcaaaaaaaaaaaaaaaaaaaaaaacaaaaaaaaaaaaaaaaaaaaaaaaaaaaaaaaaaaaaaaaaaaaaaaaaaaaaaaaccaaaaaaaaaaaaaaaaaaaaaaaaaaaaattgcctctctcgcggccggccgggttccggtgttgcagtgtatcagatactagcgtgagtagttttcattttcacccctgcctctgtatccgaggatactagcggatcctggcccgatccctcttcccaccccacccacctccgcttctctccaagtgaggaaccccaagccctcgccatggcgtcgcggatcctggcccgatccaaggcccttcccctcgtcgccgccctcacccctgccgctgccaaagcagcaacgcctatcgccggagcccgcgcgctctcgtccctgccccgctacccgtctgccccgtcgccccatgggctcggcaaggttctgggatatgaaccaacatctcacctcagtggaccacaagttttacctcgttggttttcctctctagcatccaatggatctcaggtgcagaagtcacagatctctgagacatacaagtcaggtggtgaaatgaaacagtctgagacacggaaatcaagtgaggaagccacaccaaaagttgtggcgttcagtccgctagaagcagctatcgctaaacctagaagtagtcccctgacaagtgagagttctaaagtaaggcgatcagagatagcaacccaagtcaccttttacatgatcccagccctgcttcttgcctccaagaacagcataagtacctcccttctggtcggcgccgtgttccatcaagtatacatgttccacaaggagattcttctggactacgtgcaccatgatatcaccagaaagtgggctttgatttacttcaagctgcttttgctggtgatggcgaaggacaccatcatgtacttcaatctgttctaagctcaccttctcagtttctcaaatatccagcaatgcatccgtctctgcactcgtagaataatgatgatggatgaattatgcagccttcgttcttgtattctccctaatgagcttgcttttttccagctgccagtttcactcttattaagtatatcagtctggatgggattgatagtgaccagtcagatgatatccctgattctgcacctcattaataatatgattaatgtcaaaaaaaaaaaaaaaaaaaaaaaggcggccgccaccgcggaacccatccgtttgggcactcaaaaaaaaatggtggtgggcgaatcctggagccctcgtttgtgtattccccctcatgagcttggtttttgccatttttttttttttttcctgctgcaagttggttcctctcttgttaagaaaaattcaccagcctgaggggttgattagtgcccagtcaaatgacatccctgattttgccccccagtttgcaattgcaaaaacggttgatccaaagttgatatgggtcgggcagctaaatgtttactgctgttatgatccccggtttaagttttccccagtttttatgccatgtgcttatcatgggccgccagcaggtttgctttcctgctgcc

SEQ ID NO: 151055 - DNA, 1420 bp, Zea mays
  Clone ID: MRT4577_69280C.1
cattgggtacctcgagcccggccggatcagcatcagcgtggctgttcctgagccagcagcatctgtctcttgcttcatcagctaggcgcccggccgcgcggaccaggctccaggagaccaaaaatgaagctctcggtggcagtcctctgcgcgcttctggctgtccaggcggcggtgctcctcgccaccgtgccgacgtcgcaggccagcgagctggaggtcgggtactacagcaagaaatgcaagggcgtggagaacgtggtgaagtggcacgtgatcaaggcgctcaaggccagccgccgcaccggcgccgctctcgtccgccttctcttccatgactgcttcgtcaggggatgcgatggttctgtcctcctggacgcttcctacgacaaccctcatccggagaaggaggcgccggtgaacatcggcctcgccgccttcgacctcctggaggagatcaaggccgctgtcgagaagaggtgccccggcgtcgtctcctgctcggacatcctcatctacgcggcccgcgacgcggccagcgtcctcagcaacggccacgtccacttcgccgtccccgccggccgcctggacggcttcgtctccaaggccgaggaggcccaggcggagctcccggactccaaccaagacgtgcagcagctcatcgacaacttcgccaggaagaacttcaccgtggaggagctcgtcatcctcaccggggcgcactccatcggccagggccactgctcgtccttcaccggccgcctctccgagccaccgcaccagatcaccccggcgtaccgcgacctgctcaactacaagtgcccccaggggtccaaccctcccgtggccaacaacgtccgcgacgaggactacggcgtggtggcgaggtacatgccggggttcaccagccgggtgcgcaagatccccgacttcctggacaactccttctaccacaacaacctcgccaagatcgtcaccttccactccgactggacgctgctcaccaacaaggaggcgttcggccacgtcgtggagtacgccgagaacgccacgctgtgggacgaggacttctccgactcgctgctcaagctcagcaagctgcccatgccagcgggaagcaagggagagatcaggaacaagtgcagcgtcgtcaaccaccgcctatactaagccagctcccgtacctgcaacaatggaaatcgaagaaagaggtcgatcgtgtccgcacaaccacatatcaaacattgtaaatcaaaatgagccataagatttttgttgtttttgtttcatccattcttttgattctcattcgttttactacacactcatcttttttgtgtatctctcgtaatctgtcaaactgcaataaaactttgttcctgactattggcaaaaaaaaaaaaaaaaaaagcccctaggg

SEQ ID NO: 151056 - DNA, 206 bp, Zea mays
  Clone ID: MRT4577_69281C.1
cttaccgtgcccacggtctacgggaaattttgctgtattctggcccatatcatgaattcccccacaaatcccgcaacctgcctaaggaccttgcgcgcgccccgacccacagcgggggggaggggctgggcttcttttttggccgcacaacattttaccgggactcagcaagggccccagcaccagactcaagaccgggcaaacaa

SEQ ID NO: 151057 - DNA, 786 bp, Zea mays
  Clone ID: MRT4577_69282C.1
ggccgcaaatttttggtcgcttttttttttttttttttgctttagagtgtgagttgatttgaaataaatgtaaagattttttcaaaaaataagaccatgaaaactgatattttaatattatagagacagagaccaggacgtagtataacgaagtggatattcaagatagatagatagatagagaacaagagaatcccttaattggtgacgtcatggagtgacggtggtcatcatcttgtgcacgttggcgcgcacctcctggtctcttcgcgtcatctccctgatgtgacggtcggtaaagggcggcggcagcgtgcagggctggtagtcggcgatgtacctctccctggactgcatcatgaagtcgaactccctcctgttgctgtggtgcgcagcggggcaggcgacggtctcggcgcacagctctacggcgttctccggcacggtgggcttgtagcggagcaggccggcgtactgggtgagcaggtgcagcatgtagtcgtagacgtagtccatgctgagctggtggcgcgcgaagccgctgccttcctccgccatccggcgcgcctgctccgggtgcgcgttgccccagtcgtggacggcgaagttgcccggccggcacttgcgggctccggggtcgaccggccagtagtgcctgccggcgacgaggccccgggagaaagaagtccttgaagggcgtggcgatgagcagcaccggcgagtcgcaggcgaggatgtacttgaggctgaccgaccaggaccggccacgcacgtagatcttgtagc

SEQ ID NO: 151058 - DNA, 516 bp, Zea mays
  Clone ID: MRT4577_69283C.1
gcaacaaccaaacactcatttctccacatcttgagagaaaaaaacagagcaagtatattagagatctcatggcgatggcggtctccggagctgtcctcagtgggcttggttcttcgttcctcaccggaggcaagagaggtgccaccgcattggcaagtggcgtaggcactggagctcacagagttggcaggaaaactcttattgtcgctgctgcggctgctcagcctaagaaatcttggatccctgccgttaaaggtggtggcaacttccttgaccctgaatggctcgatggctcgctaccaggagatttcgggttcgacccattgggtttggggaaagacccggcttttctgaaatggtacagagaggctgagctgatccatggccgatgggcgatggcagcggttcttgggatcttcgtcggccaggcctggagcggtgtggcatggtttgaagctggagcccagccagacgcgatcgctcctttctcgttcgggtcgcttcttggaacccaat

SEQ ID NO: 151059 - DNA, 132 bp, Zea mays
  Clone ID: MRT4577_69284C.1
tcaacaataaccttcgagattccctacgttacgatgaataacgctgggaactggtgagtgttgtaacaacatgatagaactactcctcgaatcacttcagtcacatggctatacacgtgcggtcatcctccg

SEQ ID NO: 151060 - DNA, 426 bp, Zea mays
  unsure (1)..(426): unsure at all n locations
  Clone ID: MRT4577_69285C.1
ggtatccctacgaggcnncggccgggaaaaaaaaaaaaaaaaaaaaaactctcacctcgacgcgcctccanagttcggagccgccggcccgtccgcctccctctccgnctcncgnnccccaaggcaataatttccaagtgggaatggcggaccaggctaacnaacccactgtccttcataagcncgntggccagttncanctgagttcnantttntctgaaggtgtncgggnccgtnnaatttgccctnctgtctnatctnatgaaagnggatntgccacnagnaanaacntgaccccnggcctttggggnccttcgatgtctggtagcgntggggtcaatggggcagtgatgcagacccccgctctgggctaatgctcctgctgagaaaggagganagaacttcatgattgatttcatgntgggc

SEQ ID NO: 151061 - DNA, 554 bp, Zea mays
  Clone ID: MRT4577_69286C.1
gattaattaaatcgattgtaaatgctggtcagagctgaatcttaataaggaagttttttgctccttttttctttttagtcttccatcacagatcaatttcttgtaaaaaactccaactgattcttctcattagatcgaatcaattaaatttactgtttttattgattggattcatttaatttgttttaacaaagacaataagaacttaattatcactttttggatcaaagagaaaagcgcaattagtcgaacgacagtgttagcgacatatacaaaaccaatacaacaggcaccatttaaagaagtttattaatacagactttaattgatctcctcatattaacatcgctaaggaaaaattattataatattatcaaaacatcattctattttagatttaaacatgttcgcttttgtgaaccgtttctttgagtggatacgtagtcttttctggaaagaagaactcgaacttacattagttggccctcaaaatcagggaagactacatttggaatgttattgctgccgccagtttcaagagacatgattccaac

SEQ ID NO: 151062 - DNA, 275 bp, Zea mays
  Clone ID: MRT4577_69287C.1
cacacgtccgcgactgatatggccgctgaagacctagaccttgctttgtcggacaaccctgccaagcagccgcgtggtctgtttgcagatcaattcgaggcaatatgattccatttgggcccgaaattttagcatgctaagagtcctcgatgtctacagaatctcgccaacttcgatgcccattacaacgggactggcccggagatactgcgccagacgaatggcgagatcgacgctttcgtagcaggggctgggacatgcggtacgctacctgg

SEQ ID NO: 151063 - DNA, 369 bp, Zea mays
  Clone ID: MRT4577_69288C.1
gcaaaggacaaatagtcttgttaagcacgtagaacgttcaagcaataatgcaccgtggaaggcacaattcacacaccctgctgcacgacaaatccctccatggcaggctggtgcttcccacaacaaaggccggagacgccgctaacacccaaatagaaagggcacgtgtcaaccaaccggacagcagatgccagcatgagtgattccgaaaaacataccgcgggccccccgcagagccaacaaactgcttaactccccattttttacgcagctaccgcagcccacccaaaagaagccactttcacgtccaaagaccctaccctgacgccatcgaaacgaactaaactccccagatctatcagaggagct

SEQ ID NO: 151064 - DNA, 513 bp, Zea mays
  Clone ID: MRT4577_69289C.1
gcagcacgcgtacgtaacttggaccttaaacggcgccttgtggtttggtttcttacctccttcgctggctgcctacatactagcttcattcctgtgccttgctattgggtgttatatcatagtatcaatacaacgatggttattgcacagcgacctacattgggggggggggggatgacgagtccctcaagaaaccctgaaatgttcctgcttcccgtctggtgatgcagctccatatcaatcgctagtgttgccgcttaatgatgggggcggaaaaggagacgaaaaagggtgcatatgctctacactgtggcgggtagctagctccggttgtctctctcttctggacatacactttgtcatgcgtgtattgtctctagatgtgtgtctcccctggccccgctgtggacggcatcgccctgggattttggacacctttcttggcagcttcgctttgtgctgtggactaccgccgcttggcccctcggaagcagtcccatggtttactaaaac

SEQ ID NO: 151065 - DNA, 261 bp, Zea mays
  Clone ID: MRT4577_6928C.1
cttcttaaaacttggatccctatttgattttttctatgaacactccctatccacaaattacaactacgagcacccctaatactatggctcaagtgcaagccatcacaagacctcaaactctatacctacctaccatgatactaaagcctcaagacatacctgcatacaagatagcctttaaccgagcaagctacatctgcctatgtacgagcaagggggctatatggataccacaatgtgaaacccatcatactatcaaac

SEQ ID NO: 151066 - DNA, 435 bp, Zea mays
  Clone ID: MRT4577_69290C.1
aaaaaaaacggtttttttaaaaaaaaaaaacccaaaaacaggggccaaaaatgggttttacccagggggaagggaataaaaacaaccgggggggcattgggcagaaaaaattaaaaacggaaaagggtttttttgggggggggaaaaaaaaaaaattttcccaaaggaaaaaaccccccttttaaacggaaaattttttgggggggcgggaatcccgggggaaaaaaaaaaaacccccaaaagtttaatttggctaatcccaagggccggaatttttgggaaaattttggccatttcaaagtttgaaggttcccctaaaaattttttgggagctttaaaaattggggcaaaatttggggcttttaaaaagggaaacttttcccgggaactttttttaaacccaacttcaaaaaggcaagttttaattttggcctt

SEQ ID NO: 151067 - DNA, 602 bp, Zea mays
  Clone ID: MRT4577_69291C.1
tacaagctttttttttttttttttttttttttttttctttttttttttttttttttttttttttttttgttttttttttggtgttaccgaacaccctgacccccaaggggaaggcccacacaagggaaccggcccacccagggggggggggcgagggccacccaggggggggggggacccaccggggcaaaacgccggaaacggggggggcggccgaagggaagggggaaagggggcccacggccggacaacaacagggccggcccgggggggccggggggggggggaatcccggggaaaggggggccccgggggggggcgccggccagggacccaccctgggggaaaccagggggaaagcagatcccgggggaaaagggagcccggagagagacccaacaaacaaaaaacccggaacaaaaaaggggaacccccgggggggcaaaggggggggccaaccgacataaatggggaggccaacacgggccgagagccagggggaaaaccgggcgcgccaccgggaacaaggaaacggacaacccacggggagaggcggctcggaaaggaggggttttaccgcacccccaggcacggacacgggg

SEQ ID NO: 151068 - DNA, 576 bp, Zea mays
  Clone ID: MRT4577_69292C.1
gagccgtccgcccagtctattcccctccgctttgccatctcgtcctttcagctcgaaggtgatctgcttgtgtatggcgtgattttgaatcgaagttacgtcaaatcccatggtgataaacttgatttgggcagcaccgacctcaagcttgatagcggtccatcgtgctgacattacaccatggtggtcaggtggaacaacgagctgggagatgtcattttgcattgactcagttgcgtattcaagactttctcttccccaacaatttttttaagatgagagaatgttgatctacataggttctatgaggatgcgacaacaacacgaggctatatcaagactctgggtacatgaggagaatcgtcttccatgtggtttgcctcgtcaggcatggggggaattggctgagatgcccccgtatagctggtcttgttggcactggtgtcgtcaggcatggagagaattgggtgagattgagagaaacgagaagaagaatgctaatctaattacccttccgtatctagatgataatttgatggaaccaactattataattagcgccatttttcacaggct

SEQ ID NO: 151069 - DNA, 275 bp, Zea mays
  Clone ID: MRT4577_69293C.1
ctccctctgcctctcagtccagtcccccacccacccaccaccactcctccccccgccgccgaccgttaccgagcgattcggccggatcgccccgccatggaccagtacgagaaggtgtagaagatcggggagggatcgtagtggggatggcgtactaggggatggaccgccactccagcgagatgatagcgctctaaaagagccgcctcctgcaagaggacgaagacgtccactatgccgccagccgctagcacgtgccgccgcaatgagatcgc

SEQ ID NO: 151070 - DNA, 204 bp, Zea mays
  unsure (1)..(204): unsure at all n locations
  Clone ID: MRT4577_69294C.1
gagcatacctctcacggtctccgttcccttgccgacgagtgggcggccgctgccgccggcttacggaaggtgtgatctccatcttcgggacgttcgccaccggagcacccactccttttcttccgttcacgctgtgcgaaacggatcatccaaaaaccagcttatntntgggttaaaattttccccctttgggggggggggggg

SEQ ID NO: 151071 - DNA, 512 bp, Zea mays
  Clone ID: MRT4577_69295C.1
ggaacaaaaaattggtctataaaacccaacccccgcctaaggggttgcctttggctcaagacaaaaaaaaagatgttacccggggaagttgaccccatactagctgtgggtcaaaaaaagctttgaaaaaagacccaattatgctgctgatctggttgggaggaccctgcttttaacccctttattttggacgtaaaaccccggcatcaccatgattttcatttgacaaggaccctgcacttgctgcctgtcatggaggaggtcttccatgtacatttaataaaaggcgcggccgttttggatgcccaggatcgtcagcgggggcccgaaggaaaaggccaccaaatggagcacccaaacccccttgggggcgacaaaaaagctttgcagaagttgttcggcccacggccggaaccagccaagcgtggccacgacgccgttcattttccggtcgaaaaaacgggtgaagccctcgctgtagaactggggccccttccgaaaaacctcgttcc

SEQ ID NO: 151072 - DNA, 221 bp, Zea mays
  Clone ID: MRT4577_69296C.1
ccagcgagtttttattcccgggagacccagccgcggccctttaggcgtgccggttctgcatagcatgagtcaccgtatagccgggtctcatagcagactgcctgatcgaaagtcgcatgcgtttacattactccacaacagacgacccgaaagcatcatgggtaaagactcaggcgcctactaagtgcgctgacacacattcatagaggtgagctctctgt

SEQ ID NO: 151073 - DNA, 289 bp, Zea mays
  Clone ID: MRT4577_69297C.1
agtcctcactcctcagcatttcccacaccctacccataccccccgccgccacctccacgtacgatctccttcccggtcacccaccacgccgcgggcctgctctcctcgcccgcgcccgggtctctgcgccgccgggacgccgccgccatggtctccgcgccgccggacgccggaccgccatggcgtcgctcgacttcgacacctccgtcttccacaaggagaaggcctcctctcgtcggccaaacgagtacatcatgcgcgccgacaggaacctgctcccgctgctccc

SEQ ID NO: 151074 - DNA, 1870 bp, Zea mays
  Clone ID: MRT4577_69298C.1
atggagaggataactgcggggagatggtcacctctagtcacggttcaaaggacacgcgcaccggtccggtcatgtccttgaggcagcagtgaaccggacagaggaagagagagagagaagtagagaacgcccgccgcggcgccgccgacgccccacccggccgagccgaaaccgagactgcatcctccttcgcggcgcgccgagatgagcggcatgagcctctcccatcgtctccctcccgccgcggcggcggtggacccctactacgtgtatgcggcgcacccggacccacagcggcagggcgtgctcacgctcttcgtcgcggggctccccgacgacgtgaagccccgcgagatccacaacctcttctcccaccgccccgccttcgatcactgcctcctcgagtacaccggccgtggcaaccaggcggttgcttttgtgacgttcttcacccatgaggcggccctgtcggcaatgagttccctaaatggaacaatttttgatccggagagtggcgaccgtttgcacattgagctagctaaatcaacttcacgcagacctcgtggaggtgtcgaaggctaccgagttattgacaaacgggctaacaaaacagaaggaaatgctgaccatgagaatgttggtgatgaagatgatgacgaagtatggggggaagatgaggatggaggcaatgacaataatggtgatggaggatcagatgagccatcgggcacagaaaatgaaaatcccagtaataagaatgaattgcctacggataagagtgatcaaccagggcacaagcagcagaatgggcaatctctctcaaatgaaggacgagacaaatcttcaagtgatataccaccttgctctactatcttcattgcaaatttgggacatacatgcacagaggacgaactcaaggaagttttatccaaggaacctggatttcatgtccttaaaatgcgtcgccgtggtggaatgcctgtagcttttgctgattttacggatattgaatcgtctaccgctgctatgaatagactccaaggcactgtactggcatcttctgataacgatggattgcacattgagtacgcaaggtcgaagatgaggaaaagctaagttgttggactgcaaggattggcagtggcatctcctgtctgtcttcctggaggctaccagtaggcatccctgcacacgtagctgcgtgtagctgcttgcttagtcgttttatccatgtaagcgtgagaatccagaacggtgctaattgtcctgtatgccattatacaatactccctcttttaaatcatgagatactctcttcgtttcaaattcaaattacacccttttgaatcattggaattgaattctattctaataatagtaatttagtcacatatcaattaagctgatacggttttatacaaaatatatttatatattattattagtaagatattagaaatatttgtgttatgttttactaaagacgagtgagctgaaaagcgtcctgtaaattgtagagtgaaaatatattgtactgatatataaaattatttttcatcaaaaaaaaaaaaaaaagctcagcagcagcagcagcagcagttcccggctcagcagcaggagtcccagccggggaaggagcacgcgatggacccccggcccgaggccatcgtccaggactacaaggcccgcaacaagctcaaggacaaggtggcgctcgtgaccggcggcaactcctgcatagggcgcgccgcgtgcctgtgctttccgaaggagggcgcgacggtggccttcaccttcgtgaggcggcaggaagagaaggacgcggaggatacgctgcgtgcgctgggcgacatctggtccgagacgggcg

SEQ ID NO: 151075 - DNA, 165 bp, Zea mays
  Clone ID: MRT4577_69299C.1
acctaacattttggggttttgggggtttttatttttaaacaacacattattgtaaggaaccaggtaaaacccaaaaaacagaggaatcaaaggggccaaggataacccctggggtgtatactacaaaacggctcaacaattacaaccacccggacgcgaggaaaa

SEQ ID NO: 151076 - DNA, 810 bp, Zea mays
  Clone ID: MRT4577_6929C.1
ggtacccacctattctccctccctacccgcgtgctccgctccaaaatccaaccaatcccgcaattcccttcgaggttgtttttccgctcgacttgtcgacgagatcatggccggaaaaggagacgggccggcgatcggcatcgatctcggcacgacctactcctgcgtcggcgtctggcagcatgaccgtgtggagatcatcgccaacgaccagggcaaccgcaccacgccgtcctatgtcgccttcaccgacaccgagcggctcatcggcgacgccgcgaagaaccaggtcgccatgaacccgatcaacaccgtcttcgatgcgaagcggctcatcggccggcgtttctcggactcgtcggtccagagcgacgccaagctgtggccgttcaaggtgatccccggtcccgctgacaagccgatgatcggggtacagtacagaggcgaggacaagcagttctcggccgaggagatctcctccatggtgctcaacaagatgaaggagacggccgaggcctacctcggtacaaccatcaagaacgcagtcgtcaccgtccctgcctacttcaacgactcccagcgccaggccaccaaggatgcaggcgtcatctctggcctcaacgtcatgcggatcatcaacgagcctaccgccgccgccatcgcctatggtctcgacaagaagtccaccagcgtcggcgagaagaacgtgctcatctttgatctcggcggcggtaccttcgatgtctccctcctcaccattgaggagggtatcttcgaggtcaaggccactgccggagaccccacctggga

SEQ ID NO: 151077 - DNA, 280 bp, Zea mays
  Clone ID: MRT4577_692C.1
actcaggttcaccatcaccaacgtcttttaaactttttaacccttgaattttacagaaccaaaaaaataccttggtttagcctaaaaattcatcatttcctaaaacaaggtttccaatacaaatcccctaccatcaaaaacaacaaaaggcttttacaaaacaaaatttctaccaacaccccggttccaacaagtttatctttttttttcaacaatcatttaaataaggggccgtctcaaaaccgccccatccgcggcatccctttcttttcactcccct

SEQ ID NO: 151078 - DNA, 335 bp, Zea mays
  Clone ID: MRT4577_69300C.1
tttttttttttttttcttttcggctgcttcgatcaaataaggtcgccacccccacgtggtggtgatggtgtgcggtgcgggtgggatcattattgtttttcaccgccgttgcgtggtcactcatccggcttttcccgctttgcaacaccgtggcagcggcagcggcagcgttaatgaaaagggtaatcggggtacaccctggcgagcgttaatgaaaagggtcgtggggcccaccctggcacaggcggtacagacggacactctggtgattcagactgaacaattgcagcctattctgtagtatttacgtttcaaaaataatttataactctaaa

SEQ ID NO: 151079 - DNA, 187 bp, Zea mays
  Clone ID: MRT4577_69301C.1
tggctcattcatcgaaacgcaaatcatagagacaggaaaataaaagggagttttgatcagatcgatataagggaggatcccttacctgatttgaatttcatcctccgttagataggatatgctctaagtcttcccgtactttcctataatgactgcggcgattttgtccattttgcgaattcctatt

SEQ ID NO: 151080 - DNA, 1075 bp, Zea mays
  Clone ID: MRT4577_69302C.1
cttcggggttatctgtcagcctctcacacagttattgaagaaaggtgtgcacttcatttggacatctgagcatgacaccgccttttccaccctcaagcaagctcttacgtcggctcctgtgttatcattaccagattttgcttctcccttcacagtggaaacggacgccagtgcagtcggtattggagctgtattgatgcagcatgggcacccagttgcattcctcagcaaggctttgggccctaagacccgtggtctctccacttatgaaaaggaatacatggcgattattgtcgcagtccagcagtggcgttcctacctccaacatggcgaattcacaatcctcacggaccacaaaagccttactcagcttaacgagcagcgcctgcacacgccctggcaacacaaagtcttcaccaaacttttgggcttgaattaccgcatccagtacagaagtggctctgacaaccgtgctgctgacgccctgtcacggcatagttttgcagaatgtcaagccgtctccgttattgttcctcaatggctggttgccgtccaagatagttatcaccaagataaacaagcactttccctcatctctaaattggctgttgacccagcggctgtacccaattttaccctgcatgatggtctactccgatacaaggaacgcatttgggtgggtgaggacacacatctgcagcaccgcattgtcgaagctttacacagttccccattgggcggacattctggcataccagtgacatacagccgtgtgaaaaaactctttgcctggactaagttgaagccctttgtgcagaagttcgtgcaggaatgtcaggtctgtctgcaagcaaagccagatcgagctgcttatcccgggttgctgcaaccgcttcctgtgtgtaacacctcaaatccatcaattaaaataatacattattagttgctaaactaagtagagagtaaattaaaaatttatcaagtgtttgaatgcattcattatcggtgcatgatttctttgtttgttaatgaattgcaacacctttattttaatttattctctttgtgaagctct

SEQ ID NO: 151081 - DNA, 445 bp, Zea mays
  unsure (1)..(445): unsure at all n locations
  Clone ID: MRT4577_69303C.1
ttttttttttttttttataattttgnnaggggganccaaccngnaccaaantttttttttttntgtacatnaattnggggaaagntaatgcccagggacaaatcaataaatcttcggtttctgaaactgggatcggagggagggcnaaaaccaaccaatcacggagtatttttttagacataaaacaaaccaaatcatacacattttgcagcacaaaaggagcacaaaacgaaaagctagctaggggggatcatactgnactttacaagcaggggntgncataacgggctgaagggcttcggnaggggtttgaaccgggggnaaaacagggggttttgggcgggtttggcgtcaaatccatgcagccagnttgggttccgcaagtcctggntcaacannattgttttatagggggagctaccataaatgnccagtttgaacaggg

SEQ ID NO: 151082 - DNA, 172 bp, Zea mays
  Clone ID: MRT4577_69304C.1
atcaacaaacacacgggtgcgggattacttttgttagaagcatccaaaaaggccacctctacataactaaggtgccaataacatcaagatataagctccatccggctcacatgcattacacacctctgaccatcacaggtattaagcctcaggcttcttgtgcatgtaacac

SEQ ID NO: 151083 - DNA, 421 bp, Zea mays
  Clone ID: MRT4577_69305C.1
gcccaacaagttccaccaaagccaaagggggcaattggggacatggttggtaaaattcgccgtttgaaaagaaaacccatttcgccagctttttggccacaattaataggccatgacctcttcaaaggaccgaattgggtgacaaaaactagcccctttaaacaacaaacccccccttcccctgggggcccggaacagaaacaaaccccccacccccctggggccccccactgaggcataaagcaccccgccctttaaggaaggccctcctccttggggggggggaagacccatcccgccttggggcaggaaatgcaggtgagggggccccctttggccatcgggcccgaggaaaggaaggacccctccgacgggggaacctcgcgggacaaaatcctccgggaccagggggaggaggacc

SEQ ID NO: 151084 - DNA, 819 bp, Zea mays
  Clone ID: MRT4577_69306C.1
tgatcctgccaggtggtcgtcggccacgtcgtcgccctccgcctcctcctcctcctccagcagctcctcgtcctcgcggtcggccttctcctcctcggcgtcggcgtcgttccgcagcgcgcggtcgcccgccgcgtgctcgtcgatgaccatgcggagccgggtgttcgcgttctcggccgcggacgaggacggcggcgaggaggaggaggagcaggcggcggcgccgatgtgcttcagcgtcgtccgccacgagagcttccgggcgttcaggggctgccgcgtcgccatgacggtgaagagcgcgctggcgtccgtcggcgccggcggcggccacgggcacggtgctgggcccgccgctgcacagaaggtgtagtggtaccctttagcctcactgcatgcatgcatgcatgcatgcgtgttgccgctgttgcttggattggattggattgatcgagagctgcgtgttttaacggcgtgccttgttgtgtgtctctttcacggagtaatgttggaatgtgtctcaagaaaaggagttcatcaaagtattttatatactatattatatgatatggtgaattaagtctgatgtaataacagtgtgtaaattaatgtataacgagcgaataacacgcagcatctgtatgtgatgttaattagatccgctcgcaaatcatgtgtactactagtgtgtggactgctttggtttatgcaaatgattcagttcagacatgatccaaaaaaaaaaaaaaaaaaaaaaaaaaaaaagtactctgcgttgttaccactgcttaagggtcgaattttggatatattcat

SEQ ID NO: 151085 - DNA, 713 bp, Zea mays
  Clone ID: MRT4577_69307C.1
tttattagtggtcggattctgagtcacgaaatgaatgatcatctgatcttgtagttttgggggacttcgtctctcgtaggagggattctttggctgaggtagtgaggttgccctcggattggtccaaaaacgaaaaagttagccctcttcctcaggtccaatttggcatttttttcagaacacatacgatttctgccagtctgaagttttggactttatgtgagctgttgccaattcaactgcttctgctacacgatccattaactgctttccgatccgtgttctgtgatgtttgccctcttcctcagggccaatttggcaatttgtcagaacacacacaggcaacctttggggaactacacgtgtatggagttttattagtattccaggggcgtcacaatggcatactttcctgatgaagtagtagggtatatccttggttatgtaacgtcgcatcaggaccgcaacgcggtgtccttggtctgccgggcatggtacgacattgagcgtcatggccgccattcagtgcttgtaagaaactgttatgcggtgtgcccagagcgtgtacacatgcggtttcccaacatgcgtgcactgagcttgaagggcaaaccgcactttgctgaattccaccttgtcccggcgggttggggtgccactgcaaatccatgggtggatgcgtgcgcccgtgcatgccccagtcttgaggagct

SEQ ID NO: 151086 - DNA, 268 bp, Zea mays
  unsure (1)..(268): unsure at all n locations
  Clone ID: MRT4577_69308C.1
gcattataccgcggtgcctctccgatttggtgggcttcgagttgaaggcctggtatgtggcctgcatggtatcgccgtatcgtagtagctctctgcggaggtcggagtccagcgggtcgatgattccctcccagccgccgtccgtgtggaggttgctgcagcgcggcgtgatgttgcacctcggcgaggtccgccggtagttggcggagaggaggtgctncatgtgtatggtgctgctgtgcgagttttgctcgtcggcggtcttgcg

SEQ ID NO: 151087 - DNA, 301 bp, Zea mays
  Clone ID: MRT4577_6930C.1
ggccaattgggtaccgggccccccctctaggcgaccgctattttctttttttgctttctttttctttattttttattcctttttttttggggttaggggtataatattgttttcacaataacaaacaactgctctaatttctttttccaaaacccttttaataattgaagacacccctggccctcacaaggaaaacaaattaatcccttattcaccaccaaatttaaaactcttttaagagtccaaagctcttaattagtttaattaacgcatccaactcattctttattaacattattcc

SEQ ID NO: 151088 - DNA, 444 bp, Zea mays
  Clone ID: MRT4577_69312C.1
gacggttatggggaacaaagggctcgcctatctgacggggaaatttcccctttttttccttaagggaacgaaacagacgaaaccgaggacctgtcagactagaaaaagaacaaccagaagacacaggcggtaggggccgggggggccatgcggcacaggtggggggggacaggaagtctcagcgcggaccggggggcccagagcagagacccccggaccacgggggccagggcggccgcgagcacaggcgagacgcgccaatcccaccagacccggaagaggcggagagggccgcccgcatcgacgtctccttgagcgccgtgagtggcgcgaacgccagtgggaacagccgttccaggctatcaatcagcagagcgagcgccgcgagaacggggagaaccgcgaacacagagaacattgctcccactgaccctagcgcccgaa

SEQ ID NO: 151089 - DNA, 665 bp, Zea mays
  Clone ID: MRT4577_69314C.1
cccacgcgtccgcccacgcgtccgcgccaaacgaccgcaccagccagtccacttcgccagtgatctgtctcagctcgtcgcgtctccggcgccgacagacacgggcgagtgggcaacgcggctccgagatcggcgggcaggatgatgatgctgatcgactgctcgaggtgccgtaccccgctgcagctgccgcacggggctccctgtatccgatgcgccatctgtggggctatcacgcacgtcgcccccgcccctcctgtcgagcccaaccgcggtgccgtacagccgccgccggggtggggtccaccgccgccgccggtgcacgggcgaaagcgagccgtggtgtgcgggatatcgtatcggcactcgcggtatgagctgaagggctgcatcaacgacgtcaagtgcatgcgccacctcctcatgacgcgcttcaacttccccgacgactccatcattatgctcaacggccgtttaaaaaaaaaggataagtacatgaatatgcttgcttggccattttggatcatatatgatgttcaggttgagaattgagataatcagaaggaagaagaacaaaccgacccctacaaaatcccaacaaagcataacatagggatggccatgtattggcttgtgcaaggttgtcaacctggagactcattggt

SEQ ID NO: 151090 - DNA, 535 bp, Zea mays
  unsure (1)..(535): unsure at all n locations
  Clone ID: MRT4577_69315C.1
aaanatacgagaggagccggctcgactgcctgtcgctctcctcctctcttccctccattcactccaccttccatcacgccaccacccccgcccccgcgccctcaatttccgccagcccgccttctctctccccttcctcgccgcgcatgcgccggcgcggctgctgctaggcggcgcagacgacaaacccagcgaccagcggcccgtccgtccaccctaggaggccccagccatggcgacgctgcaggacctcggggtgtcggccttcatcaacatcctgggggccttcgtcttcctcctgctcttcgccgtgctccgcatccagcccatcaacgaccgcgtctacttccccaagctctacatcgccgggaagcgcgccgccgaccaccgcggcgcccgcagggccatcaacctcaacctctgcacctacttcaagttcctcagctgggtgcccggagcgctccgcatgacccagaccgagctcatacaccacgtcggactcgactccggcgtctacctccgaatctacacgctc

SEQ ID NO: 151091 - DNA, 774 bp, Zea mays
  unsure (1)..(774): unsure at all n locations
  Clone ID: MRT4577_69316C.1
tttctcacctgttggcagggtccggttcctccgcggcggctcgactggactcccctcgtcatggccggcgtcagcggccgcggggccgcggagagggtggccgccgccgtggaggcggtgggatccggtggctgggagttccgaaacgcgtacaggcgccagctgctcgcgctgtcgcggcggatccggctccttggcccctttgtcgaggagctccgggaggtaccctgtgtacccgcggtggaaccggagcgggcgctggcggtgctcgccgacgcgctggaggaggcgctcgacctgctccagctcggccgcgacgggagcaggatattcctggtccttgatagggataaagtaatgaagaagtttcatgaatcaattgttcagctggagcaagctttgtgtgatttttcatatgataaattggacatatctgatgaagttagagagcaggttgagttagtgcatgtacagctcaaaagagccaaagaacgggttgacatgcctgatgatgagttctacaatgaattactttcactgtataacaagagccacgacccaagtgctgaattggatatccttggaagattgtcagaaaagctgcacctgacgaccatcaccgatctcacacaagaatcgcttgctttgcatgagatggtggcatccggtggcggtaatgatcctggagaacacattgaaaaaatgtcgatgctactgaaagaagatcaggactttgtgcaaactcagaaccctgaaatgggcccgncgatgact

SEQ ID NO: 151092 - DNA, 726 bp, Zea mays
  Clone ID: MRT4577_69317C.1
gggtacctcgaggccggccgggaaaatctcgtcagctctctctccatctcgcctcccccgcgtctccggctgcgtttgctccgccggcgctccactcgcctcccccgcgtctccggccgcgtttgcttcgcggcgctctaaggttccaggcaagcacacttcctccccagctctcctccacccccacacttctagttcccattgctagggttcgtcgtgctagggtttagggcttgcgaccgcctgcccaataagtctgcggcctcctccgtcctgcagaacccgtcgtcgcggcggtgtcctcgcgccatgcccttcttcctggaccagcgccgcgacccgcgcctgttgtcggtgccaccgccgcagtcccactcccgctgcagcaactggtgcagcgcgctgccgttgtcgctcgagctcagctgccccaggaagtgctcgcagctgctccccgctgctccccatcgatccactcccgctaccgccgcgaggtgcgtgtgcgcgtggcttggtgcgtgcgcgctctgtggtggtgtcgagagctgggcttggctttggtgcacatcaaatgtggttcatcctctcatttgaagccctacatgaaaataataaaacgtgtcacacatcaacatattacaatggcatctctgttttgctttgatatttatagcttccctcttaattatatgaagcccacatggttcaaattctgtattgctctgc

SEQ ID NO: 151093 - DNA, 466 bp, Zea mays
  Clone ID: MRT4577_69318C.1
gggttaaaaaaacaggcccggggcctcaaaaaaaaacaaaggcccggggcctaaaaaaaaaacaccatccccgggaggggggggcccaaaagcaaaccccccctggggggttcaggtctttgggggaccccttgggggggaaaaaccccgggggatcactttggtacctccaaggggggggggggaagggaaaaaagggggtcttttggttggggaacccggccctaagccacaacaatcggacccggggcccctgggtggtaaaaaatatttttttggtttccccacacttaaacacccccattgggggggccctctccttttaaggtaacttttccatggactttaacacacaaacaccctttccaaaacaaaatttttcctttttggtacaccccccagctggggggtcaatctggtttaccccatcaagccacttatcattttggggccttttggaaaccaa

SEQ ID NO: 151094 - DNA, 255 bp, Zea mays
  unsure (1)..(255): unsure at all n locations
  Clone ID: MRT4577_69319C.1
cccacgcgtnncgnacacacgcgctctctccccttcccatctccttcctccgccccagatccgagcccggcgcccgagttcatggcgagcgacagcgacgtcgacgaggacgagctcctgcagattgcgctgcaggagcaggcggcgcgggacctcagtcaccagtgcccgtccgtcggcaacaagcccgttgtcaacctcgttcgtccacccgtccccaatgcaagaagagggaacgccagtgttgggggcttt

SEQ ID NO: 151095 - DNA, 182 bp, Zea mays
  Clone ID: MRT4577_6931C.1
atctccgccgccgctaaggccttcggggggtttgcccaaaagaagagctggccgcgccggcgccgtaccgtgcgggctttagccgtcggtcctagccgtgccgcgttcgtctcgtggggtttttcttgtgtgctctgctggttttttttttttcctttttttccttcttttggggggggggg

SEQ ID NO: 151096 - DNA, 401 bp, Zea mays
  Clone ID: MRT4577_69320C.1
ggccaaccagaaataagaagttacatttccaaaaaaaaaaaaaaaaaaaaaaaaaaaaaaatagaacctagaccggacagacaaatcaaagggaaaaattatgcttgtatctatcccggtggccgccggtccgggcgtgcctttcggggggcctgtccttgtatttcgttcccccttgcgtttcgtgggccctctttttcctgggccgagtctggtttaattgggggggtcttcattttacttggctggggttggataacccttggcctggccaacctttgtgggttcgggcctcatccgctttgtcctacctgccgttttacccactgggcgcactccggtcgcgccccccaccagttgcccttcctgaatggggagtggccgctccgtgcattgggccc

SEQ ID NO: 151097 - DNA, 687 bp, Zea mays
  Clone ID: MRT4577_69321C.1
agtcgaccgttggtcccagagagtcgttgctccgctggcacaccgaacagtcggttaattatagcggagcacaccctgaaactcccgagagtggctggattgaagttgtacaacctggtgcaccggatattgtctggtggcacaccggacagtccggttattgggaacaagtgggatctatacctcgacctcctccaggccgactactcagaaggggatgctctggatgctttggaattgttccgctactgctgcaggcgaatgctcatgacacatgttgacctcattgagaagttgctcaactacaacagagatattgctgtctctatatccgaagcgatggcgttacttgccagtaccagacaaccaaacatcaatcaacgaaagagacttgaaagggcaagggcaatatcgagagtttaccttgagactgtctttgttgcctcgccaactcatcttgagcattgccgtctgccagtgcaagaagctcagatgcttgaatctgtgcgggtgcgtgagggcagcttcggacaggtcgctacaggccatcgcctggactgtaactgtggccagctgcagtcgttgaacctggctgctgtgatagcatcactgacaagggagtcaccagcttggcttcaggatgtcctgagctcagggctgtggacttgtgccgctgtgtccttataa

SEQ ID NO: 151098 - DNA, 281 bp, Zea mays
  Clone ID: MRT4577_69322C.1
cggccgaatccgtcgccacgcgtccgacagtgaccgatcctgctgaatcttctcgtgctcatggccgacaacaacagaggagtcaccgcggagggccccggagcactgctctaagctggcgcagtggccggcacgcgggtgagaagcccaccgtttcgcccggaccgtcgcgctccgcgagatccgcaggtaccagaagagcactgagctgctcatccgcaagctccccttccagcgcctcgtccgcgagatcgcgcaggaacttcaaagactggatctga

SEQ ID NO: 151099 - DNA, 551 bp, Zea mays
  unsure (1)..(551): unsure at all n locations
  Clone ID: MRT4577_69323C.1
ccggtccgaaatccgggctaaaaaaatcaatatattgattgaaattatctcgnaaaaaaagagagggggaaaaaaaaaaaaaaaaaaaaaaaaaaaaaaaaaaaaaaaaaaaaaaaaaaaaaaaaaaaaaaaaaaaaaagggggggcccgctctaaaagaaccaaacctaacgtccccggccatgcaacgaaaaacctttcttaaagggcaaccaaagggggggaggggccccccttttaaaaacgcggaaacgggaaaaacccgggcgtaaccaaactaaatgccctggaaaaaaacccccctttcccaagtgggggaaaaaccaaaaaggccccacccaatcccctttccaaaaagtggccaaccctaaagggcaaagggaaccccccctgaaccgggccataaagcgcgcggggggggggggtaaccccaaggggacccgtaaaattggcaaggccccaagcccccgctctttgggtttttttccctccctttctcgcaacttcgcccggttttccccgaaaaccttaaaaagggggcctcccttaag

SEQ ID NO: 151100 - DNA, 333 bp, Zea mays
  Clone ID: MRT4577_69324C.1
gagctctttatgtcggcggccgcccttgactcttgttgacatgagcatggactgcaaagtcatcctgagatctgcatctactaacgaacgttcactccttcggcaaacgctgagaccgctcacccaaaggatgcgcggaactggctaagctgcatgagattggaggtagagaaccacttctgacattcattcatgctcaaaaaacggggctacgagacatattgtatgcacgtcctgcgacctttacaccatggtatgggggtgttgatgaccaaccaaaagttcacaaacgcgttcactcacattaatcattcccagatcctgacaaccttt

SEQ ID NO: 151101 - DNA, 476 bp, Zea mays
  Clone ID: MRT4577_69325C.1
agggccaaaacgaggcccaaaaatatcaggggaataaaggaacagaattccgttttttctacttaaattaaggatcaaaacacccgggccccaccttttaaggggggtataggagctagttataaaaaaaacatttaaaaaggggaaaattccggggccaaacggggttaaacaaaaactggaaaacccgacccgagggttgcttcccaaaagcccaaccggtcgagtcattttttaagaaactggttaaacacattttttgggggccgctccattttagggaaaacccaatcatgctgcatgaaatccaaggtgtctttttttggccccaaacccattgggggggtaaaaccaaatcccccccccatttgcataaatttttgggcaaaaaaaaggggggtttcttcaccaagggtcaaactgaaaaaaccccccaagcccaataaattggggaaataccatgaccgggtacaaaa

SEQ ID NO: 151102 - DNA, 203 bp, Zea mays
  unsure (1)..(203): unsure at all n locations
  Clone ID: MRT4577_69326C.1
ttttctctgtcggtcaaagttggtggagtccttttctctctctcctctccgagacccaacatagatgagggggaagttgtggagtaaagggatggaaccatntcagttggttctggatttgttgctcatcaagaagatggacaagaaagggattagaaattgttgagaaaagaagtggaagaagaataccgaggagtagattg

SEQ ID NO: 151103 - DNA, 187 bp, Zea mays
  Clone ID: MRT4577_69327C.1
ggggggttctttttaattttttcttcgaaaaaacccgaagcaaaaaggggcgcgagcacacacaaccaggggaaaacatccgggagggcaacaaagatatgaaaactgcttaacacggggcagccctggcctccagtgctcgcaaagtaccggatacagatggagcaaacggaggcgcttttcggaa

SEQ ID NO: 151104 - DNA, 1536 bp, Zea mays
  Clone ID: MRT4577_69328C.1
ggacgctgctcttgttgccacgtgaaagctgaggagttgcttatacaagaaaagggaagttaatatgtgctctcgatgaggcaaaatttaccctttctgagaggaacaatgagctgaccgaattcaagatcaattttcatcagcaaaagcaagcactggcgaatttagagaaggtgaaggttgatatggaaactgaactcaaaatatgtattgatgaaaattgtgtgctgaagagagatttggatgttgctctcattgccaaaatggaggctgatgagtgtcatacaaaagaaaaggaggagttttgtggtataattaaagagaaaggaatgatgattgataaacttcagcaatacgtcgctgtgctagaagaagaaaacatggtcaagaaacttgatttgggaagtcttatcaagatggagtgtgacaagtccattcgtgaagtgaagaactggtattctgaaattgctgagatctctgacaaaaagcttttggagctggaagaaaggcttagattcgccgagcagaaattttcatgcaaggagcaggagatcatgaatatgtttgatcaagaggaatcagattggtatacactaattgcagagaaagaaattgctatttctgatattcaacgaactgttgaatctgttcagcttgacatcaagcaccttcttgaggcagcagcagcaaaagtggcagaagttcagctagaggtgaatcaactttatggttttgctgaaactctgaattcacttaacatcatccaagagcatgatactgttttcaaggatatgctcattgcagagtgcgaaagagaacttgactccctgcaggtgaatttagtgcaagagaagcatcagtcaagaaatttgaagaatcttattgaacagctcgaagctcaaactgcttcagaaatgtcagaaaaggcagaggagcatctagaagttacgaataagctgaaatcattggaggagagaaatgaaacattagatgagcatctgcgagagcttaagtctagaacaactgatatgtctaatgctgtactacaagagaggaatcagttggtcaatgagctgactggactaaccaataccattggggaggtaatttatggaggtgaaagtatgatgtcaaatttgagaaggatctcgcagaaaattaatgaggaggaaccatgcaatgataggcttacctcagagaaaactaacgatagaagttctgcacctgtgattaggaagaaaccaaggcatgacccagttagaagatcgcccctgaaggagcaaaactactagtcttttttaccattataaaactactagccttggtactcggtagataggtcagatcgtgtacagacatttgtgtaacagttactcagttcttccaaggatccttgacatgccatctgtggggttgtgccttttccttgacatctgtgttacgttatttgaaacacagcagctgtgttatccaatacttattttatggactgaatttgaataacatagtttcccaagtgttgaatgaaatgaagcc

SEQ ID NO: 151105 - DNA, 568 bp, Zea mays
  Clone ID: MRT4577_69329C.1
cctcgaccggagcaacaaaccagacttctctcagaaaggaaacagtaagaggccaaaatctggcaacgcaacttctgagaaccccctgagtgaaggtgctagtgctagcatggtgttcttgaagggctctgtcaagaggaagtccccaggtttcctttcagataaaccgagcttcaagaaacaaaaacctcacaaacccgattctggtagaccagacggcaaacgttttgttcgagatagtgatactagcgcaccgttcgtcaagaatgccggcaaacagaaacagtccattgctgagctcgcggacctggctggtaaggagaagctgactgcgtctgaagttcgcaaattgctgaagcctgaaatgtcaggcaagagctaatgagtttagggtgagcagaggcagcaattttgttggtcgtttttcctcgtatgttgcggaaagaaactgtggcacgtgatatgggtttgtttcagtagaaacgtattcgtgatacctgtcctgataccggtttctcttgctagcgaatctctttggctttgcaaaaaaaagtttgaaaaatataaa

SEQ ID NO: 151106 - DNA, 293 bp, Zea mays
  Clone ID: MRT4577_6932C.1
attgtgtatctatttttgtttgggggggggcgaccgaaccctaaaatagaaaaaggggggccgaaataaatagtgaacacctcaaatattgcaaacaaaaaaaagtagttgccctggataccgttgacgaagcagcaccaagggaaaaggggggggggtaaaaaataaaaaaaacggggaacaaaaactaagggctgtggaccgacacccccctgaaaaatttgaagttggcccccatttcccccaaagaattgaactacccccacaagctgaaaatcatgttcagccctggg

SEQ ID NO: 151107 - DNA, 374 bp, Zea mays
  unsure (1)..(374): unsure at all n locations
  Clone ID: MRT4577_69330C.1
ggggccaacgncagaccaaacgcggcccccngccctctcccaaccncccccccggggggcggcagggccccccacacaccncaccaccggagggccgccgcccacaaggccaacaggcgaagcagcaccggaaggagaaggagagaagcgagaggcgccccagccaaagcaagccgaaaacgaagcnagcgcaaaggagagagggcngaggggggggggcgacggnnaccngcaacgcaagcaacgcgaggaacgacgacgaggagcaacaacaacnacacaaccgcaccaaaggacaccgaaacaaccacaagcacaaggcggaagaaagaaccagaggagacaaagagcangaaaanagacaaacaagcggc

SEQ ID NO: 151108 - DNA, 731 bp, Zea mays
  unsure (1)..(731): unsure at all n locations
  Clone ID: MRT4577_69331C.1
cctgcagtatccggtccggaattcccgggtcgaccccgcgtccgcaagcgctggggcttatgtacagctcaacatgcctggctcagatctggagcgccgcgctcaccttctcctggcccagctggaggacctggagcccagtgaggctgagtctgaggccctgtccccagctccagtgctgtctctgaagccagcttcacagctagaacctgcactgctgctgacgcccagccaagtggtgacatcaactccagtacgagagcccgctgcggccccagtgccagtgctggcctccagcccagtggtggcaccagctcctgagctagaaccagttccagagccacctcaagagcctgagccatccctagcactggctccagagctggagcccgccgtctcacagagcctggaactggagtcagctcctgtgcccactcctgccttagagccttcctggtctctgcctgaagccacggagaatggactaaccgagaagcctcaccttctgctgttccctcctgacttggtggctgaacagtttactctgatggatgcagaactattcaagaaagtcgtgccctaccactgcctgngctccatctggtcccaacgggacaagaagggcaaggagcacctcgcgcctaccatccgcgccactgtcgcccagttcaacaacgtggccaactgtgtcattactacctgccttgnngaccagagtatgaaggctccgg

SEQ ID NO: 151109 - DNA, 394 bp, Zea mays
  unsure (1)..(394): unsure at all n locations
  Clone ID: MRT4577_69332C.1
gcagtggtaacaacgcagagtacgcgggaatataatgtatcttcatcgtacttttacatgcgagtgtaatagcttatttcttgtggtaggaaacagctttgctgtgttttcgggaatgaaaaaaaaaaaaaaaaaaaaaaaaaaaaaaaaaaaaaaaaaaaaaaaaaaaaaaaagaaaaaaaaaaaaaaaaaaaaaaaaaaaaaaaaaaaaannnaaaaaaaaaaaaaaaaaaaaaaaaaaaaaagnacccccgccgtggaaccccccgtttaaagggcaaatcccaccaaactgggggcccttttttggggtccccacttgggccccaattggggctaaattttggccaagccgttcccctgggggaaattgtttcccccaaactcttccccc

SEQ ID NO: 151110 - DNA, 387 bp, Zea mays
  Clone ID: MRT4577_69333C.1
cccgggtccatccaagcccccaaattaacttcctacaaggcgagggatgggaccattggactgcataaggaattgcgtccaaatggcatggggcccggcaacaatacgccgtcagccgcagtcaaccagatggttgccgacgccagacactacatcgacaaagactacaatgagcatatgaagcatctgcatgacacgaaacacagactgtgtagtctagaaaacaaactaacggacgtctgatgtgtccgaccaggaggtcaacagcatcctgaagcagttcgataagaaggatatggagtacatgcagttgcagaggcacattgttaacgtcaaagatttcgagctgctaacaatgatatggaacggagcttttggcgacgtcag

SEQ ID NO: 151111 - DNA, 438 bp, Zea mays
  Clone ID: MRT4577_69334C.1
aagggtctgaaccatccattgaaggcagatacagaaccaattacgcactaacttagagctgcgttcccaagaggtctactgtactgaacaacaaaaaaactgcatcggactcatcggtcacgatttacgtttacagagaatcgttacatcggccgtaacaggttcctttgtcataacactttgacaaggtataaggagcaacacaagggattagggctcggggcaacacaggtttctttcggaagtggtcatgcatgcaaatcttgcgctaacttatttacctgcctgaggagctaagtaactgccaacattggagcctgcttgcccattatgcataagcatttatgctgtgacaggccacccatagggtgaggacccctgcgcagggcagaagggagactgcacctgtgctatactggaggatgatagtagctgagc

SEQ ID NO: 151112 - DNA, 659 bp, Zea mays
  Clone ID: MRT4577_69335C.1
ggacagtaggatatttagctgtatttattcaaactttggcacacaggctgcacacgaatatacaagagagaaataaaaggcacagaaattgaaatacaaaagagagcaaaaataacagagcaaaggctgccccgttcgcctattgcttgtttatcaccaagcgcacaggaaaagagcaaagtcggggagaaagaaaagaaacaaacactttagcagacgaagtcagaaacgattctcagtactcgagcaggcggagctttttgccaatgttgcgccgcctcgacgcaagctcaaatggcttaggctcgcccgcatcgaggctctcgttgcgggccttgagcgcctgcaaaagcataccggcatcaaagaagccatagccaccaagctcgtcgtcttcgctcatggttacactatccgtagtcggcgattcggagccacctgccttggtcgtcttaatcagctcaccacccgtaatgagacggccacgggatttgattcaattggcggggcgcgggcgcatgtggtcgatctcacgggcccgggattgctgcttggactgcgagccaaagcgccggctcgtgatgcgcaggatacgccggatttcgagaaggtagctctcgagtgtatcgatgaatcgcttggtctggcggggcttgctc

SEQ ID NO: 151113 - DNA, 320 bp, Zea mays
  unsure (1)..(320): unsure at all n locations
  Clone ID: MRT4577_69336C.1
gttttgggttttcttactaataccaacaactgccgcccctggtcttgtgcttcggccccttttgatcgtcctcccccttgtcgctgacgatcaccccggcggtgtccgcttggctgcgctccacctgcttcctcgctgggcacccccccgggtgagcggggctagtatccccntnnctcnncccatcccttgatgtncttctgcccatacttgcgccaccccctcgaactccgactgtggctgcccctccccgctggcccctctgggccggcccccgcactcccccagccgcgctgacccaacccgcttcctccccgatc

SEQ ID NO: 151114 - DNA, 226 bp, Zea mays
  Clone ID: MRT4577_69337C.1
ggcggccgccctcctttttttttggtggatttatataaagttttggggggttttttcctcccttaggaggaacaacataacagtctttattcacagaaggtgctcacggtccatcgcaccaacatcaaaacaacgtttcagaggtaccaaataccctacgcacatcatgaatagaacaacgtcctcggcctgccccctttaagacccaatgctctgattccgccgc

SEQ ID NO: 151115 - DNA, 2714 bp, Zea mays
  Clone ID: MRT4577_69338C.1
cgggagactaagaggagtccccacgctgccggcaaatgcgtctcctgcacaaatctgttcccctccgcctgctccttccacgccgtcctctcaaaacctttctcctcccgccgccgtctcgcccccgctgtctctcgctcctcccacgcgctgccatgggctccgtagctggagacaccgccgcccgcctcgcgtacccgccggcccgccgcgacgattcggtcgtcgacgactaccacggcgttcggatcccagatccctatcgctggctggaggacccggactcggaggagacgaaagagttcgtggcgcggcaggcggagctggcggagacggtgctcgccgggtgccccgacagggagaacctgcgccgcgaggttacgcggctcttcgaccacccgcgccacgccgcgccgttccgccgcgggaacaagtacttctacttccacaactccggcctccaggcccagagcgtgctctacatgctggatgatttggacgggaaggcagaggttcttttggatccaaatactctaagcaaggatgggacggttgctctttcaacatattctatcagcgaggatggaaactacattgcttatgggctaagtgaaagtggtagtgattgggtctctattcatgtgatgagcattactaacaagcagcctatgcctgataaattatcctgggtaaagttctcatctatcagctggacgcatgacgggaaaggttttttctatggtcggtatccagcacctagaggaggggaagtggatgctggaactgagacaaacatcaatcttaatcatcagatatattaccatgttttgggatctgatcagtcagaggatatattgtgctggaaagatcccgaacacccaaagtattcctttggtgcctcagtcactgaagatggaaagtacatcatattgggcatctatgaaggttgtgaccctgtcaacaaattatactattgtgaaatttcttctcttcctcaaggaatagagggctttagagggacacaggatttgcttccgtttgtcaagcttattgacaattttgatgctcaatatcaagttgtggccaatgatggtgatgaatttacatttttgaccaataaaagtgcccctaagaataagctggtaagggtaaatatcaaaaatccagagctgtggactgatgttctctcagagcatgaaaaagatgtgctcgaatcagccgacgccgttaacaataaccaacttttggtgaattatatgtcagatgttaagcatattctgcagataagagaccttagaactggaaactttattcatcagttgcctttggagatcggttctgtttcagagatctcgtgcagacgagaagacaaggaagtatttattggcttcacaagctttctttctccaggcattattttcaggtgtaacttagcatctacaatccctgaaatgaagatgtttcgagaaatttcagttcctggatttgatcgcacaagttttcaagttaagcaggtttttgttcctagcaaggatggaaccaaaattcccatgttcataatgtcgaagaaagatatcgatcttaatggatcgcatccaactttgctatatggttatggaggattcaacataagcataacaccttcatttagtgttggtcgcgttgtgctatgcaagaacatgggctttgttgtctgtgtagcaaacattcggggtggtggagagtacggggaggagtggcacaaagctggagcacttgcaatgaaacaaaattgttttgatgactttgctgcctgtgctgaattcctcatttctaatggttacaccagttccagacgtttatgtattgaaggcggaagcaatggtggtcttctggttgctgcttccattaatcagaggcctgatctctttggatgtgctctcgctcatgttggcgtcatggacatgctccgttttcacaagtttacaattggtcatgcatggactacagactatggttgttcagataaggaagaagagttccagtggctcattaaatattctccccttcataatgtacggagaccttgggagcaaagctctggtaataactgccagtatccagcaaccatgttgttgacagctgatcatgacgatcgtgttgtgccattgcattcactgaagttattagcaactttgcagcatgtcctgtgtaccagcactgaggacagcccgcagacgaatccaataattggtcgcattgatcggaagtcagggcatggagctggcaggccaactcaaaaaatgattgacgaagctgcagacagatatagctttatggcaaaaatgttaggggcttcgtggactgaatagtgaattttgtccagcttagtgtggagatggtgagcaagattactctatgcagtcaaagtaaagtggctgtaaaagttatattgcttatgttttgctcttgcttggatgatcatccaccaaatagtatagtgtttatgcttcggtttgagataagggttcagggagcattgtcatgcttggcgttggtgcaccatttctttcatatatatcttttgattgttaaattttatacgttactacttcattgattctaaattataagatgttttggttttttcagatatattgtttttgttatgctatattgctatgtatactatatgtctaaaagaaaggtgaattgagattttttctttctttcat

SEQ ID NO: 151116 - DNA, 1795 bp, Zea mays
  Clone ID: MRT4577_69339C.1
catatttgcaaacactttacaaaatcattcacaaaagtactaaggcttcaggtgattcgcaaaagccttcacaaaagcactccaacttcttgtatcctcttgttttagggcacaagcttgtaggggttatgatgtcgccacttacttgatgctaacaagacatttccttcactaaagccatcttcaacacttcgcccataaaaaagatcaattatcattttcaattgcatgtctgcaagacaagtgataattgcaataagtaaattataatctacatttatataatctagactaccaaacagctacatatagtagattataatctggattatataatttagattataatctagattatataaacaagagcttcctagcttttgcagagctctatcctccacaagccggtcatgatacaacattacacacttaggtaaatttacagaagttattatagagtactgagtacttaccttatattcatcaattgcatcttgagcaaaattgatatctgtatctttttccctgaaacaacgcaccaacagcaaggtcaagtcagactaatgcatactaattaaacagtaaaggcatattcctatttcctacaataaaaaattaacatacaaagtaaaaaatatatatccagaaagataagatatattataatttaacgaagggattattaaacatcatctaattcttatatcttttaaattatagtccaattaagagcatggattgatggacgactataaatatttgataatttagaataaaggaatttttaaaatcaccgaattgttatacccactggaattctaacgggttaatggactagtatatatagtgtcagtgtctacacccagagtacaagcaatatctgttttcagaaattgtaaggcattaatatcacgaaaggggtacagacgtacagtgacccaaacctaacgcaagtgcgggcaaatccttgcagtggaaaagcgcccgtctaggatcaaatctgaataaaatgatttagtacctgacgcgcattggttaaaggccaaatctaaaggacgcgtcagaccactcaaatgcaacagtgcaaaagggtaaggagatgaatgaacagcaggaaagaggtttgaaataaaatcgtaaaaggcgaatctgaaagcatgctggaatgctaaagcagtgctgaacgtctagcgttcggaagaaattgccccggtgaagaccatcaaatcaaatggactgaaacagctgaaaaccatctacagataactgatggaacacagctaatgtgatatctaattcatcttctctcgagagaaaaaaggatccgaattcaatttgaaaggggaaccgggtgaaaaaataatccgaattggagaattcacgagcccaaaccgcaaatgaaagcgcaagcagaagtcccatgccagcgacacactgcttcaaacccaggcatgatgaacccaaaccaaagcagatacaccgcactccgcagaactcccttgcaaaaaccaaaatctgacggcgagctcggcagcgcgagtgggttgttcttctccccccaaacaattgagagctccgccacagacacatccaaagcagggaacgaaaactagacgctgcttcaaacccagccacaatgagcccaacccactggagacacgccacactgtgcagagctagacatcacgcacgccacgccgccggaatgcgctcgcgacaacaaacggcggctaccaggagagtggcacgcgctaggttgaagggcggcccccggccggcctcgaggtacccaatg

SEQ ID NO: 151117 - DNA, 598 bp, Zea mays
  unsure (1)..(598): unsure at all n locations
  Clone ID: MRT4577_6933C.1
ccggggngcacatttctcctggttaaataaaaggccataaagtatgtgactacgctctagctacgcatcttaaaagagccactagatatttgtcaaagttggctctcgtaaccttagctgggcagcttatagataggaatctcgttttagtttaatactgtatacatgtatctaagcagataatgtgccgggggtgaaatcaagaaacggtgggcgttggttattaaaagaaagaagaagaagaagaagaagaaaaggcgtcttcactagatcttcgtgtgccgactggtgtcttgtctgcctcacccataacgcaacgcagcagatcttgataaacaagtcgcttcggagtaacgtcatttatgttggactgctgcatgtggatctataaagacaaaaaaaaaacaatgtagaaatagtaaaggacggtacgatttaaaactaaccgaacatgcaaccacaaaaaagggctaatcaataaataaaatggtttcgtaaggtggttagtggtagagtaccagtagtgccgctaaccgcgtcgtacgcgctcgagcctttgagtaactgttgttgctttgcaaagcaaaaaggaacccct

SEQ ID NO: 151118 - DNA, 599 bp, Zea mays
  unsure (1)..(599): unsure at all n locations
  Clone ID: MRT4577_69340C.1
aattcggcacgaggatgacacccagatttttgttcacgggggaaggagttcaggctgtccagataatgcaggagctgctggaactctttatgaagcagtaccaaaaagtcttacttgtcagtaacaacaatctgagtacacaaacagacactcttcttttggagtttccaaatcaaccactgtggacaaatgtttttgtaagaaatcgtgccaaagttgctgtccccttgctctggagtcgcgttcaggtcgaagggcaacttagccttctttctggtgctattctaacttttggtctcactcgttatccatactcggagtttgaactgatggctgaggagcttcttatgagtgactcaacaatcaaggtgttcggtgctttgagaatgtctgtaaagatgctccttatgtggaactccagaatggaaattgatggcggtggagattcgatagttgcaacgtctttgttggatgctagcaacctgatagttctgaaggaatcatctgtgatacactctaatgctaatctttggagttcggngccaaggtctcctaaatttgtctggggacggagacacaattgaggcgcaacgccttat

SEQ ID NO: 151119 - DNA, 423 bp, Zea mays
  unsure (1)..(423): unsure at all n locations
  Clone ID: MRT4577_69341C.1
actnnnnnnnnnnnnnnnnnnnnnnnnnnnnnnnnnnnnnnngtttcccaatgcatcacacaaatatatggaaagagatagtacactctggtctaatggcgaggaacgctcaccgaacagcctgtttgggatggtgcaatcctgacccattacatgttggcgggccagaaatttagttcagattcgtagcccagccacgtgaagtgggccaggatcaatggctctcacaaacacgaattcaatgggccaaaaggacaagagagagccattctaataatcgaatagcatatgcctcgcctcacctctaataattgaagagcgccaacctacagaaaggtttattcatcccgttctcatggctcgactgtaacctggtttgctcgtttgcttccagttctagggtaaactatttcctatctcaaa

SEQ ID NO: 151120 - DNA, 282 bp, Zea mays
  Clone ID: MRT4577_69342C.1
aagtcacgtaggctgcaggtgttaaagaggggtggctcagtaacttctggaaattgccttcagagaagattaggcctgagagtactaagatttaaataatcaccctggggactggaatctctaaggccaagacttcactttacataaaccgccacctttggggagttcatgcatattattggccacatgttgatgagcgatgaacatgtgtgagaccacccttgttctattacaaccccccattatataataacaggtggttcaagaggaggctcacattga

SEQ ID NO: 151121 - DNA, 309 bp, Zea mays
  Clone ID: MRT4577_69343C.1
aaaaacaattaccccccgttaaaaagggtaaaatcgcaaatttttggggcttctactggtccaaagggacagaaacccattaaacgcccacccccacccccacgggggaaattggacagtccgggacaatccaaaccctgcccaaaaagccctcacgggggcacagtttcccgaagcatttttggaagacaccaaccactttttaaaaaaaaaaaaagtgtgaaacgacttctactccccgactttttgggtttccaagggttcgggggaagcatccccccacttttttaccttgtgggggttcccccc

SEQ ID NO: 151122 - DNA, 1156 bp, Zea mays
  unsure (1)..(1156): unsure at all n locations
  Clone ID: MRT4577_69344C.1
ccggccggggatttattctgatccttcttttcgtttgttcttatgtcattgtttggccaccagcggtggggtatcgatctgctctagttggacggcggcatccctgattctaccctgatcgatcccatggatgcccaagacggcgatgagagaccgctgatcatccatcgcctgccactactccaggatgaaagtacttccgaattcactagcgacgggacggttgatcttcgcaatcagcctgctcggaagcagagaactgggaagtggaaagcatgcttcttcatcttaggtgccgagtttgctgaatgtgtggccttcttcgcgatctcgaagaacctggtgacgtacctcacgggcgttctgcacgagagcaacgtggacgccgcgacgactgtgtccacctggatcgggacctcgttcttcacgccgctcgtcggcgcgttcttggccgacacattctgggggcgatactggacgatactggccttcctctccgtgtacgtcacggggatgacggtcctgactgcttcagctcttctcccgctgctcatgggcgcgtcctacagccgtagcgcccaccgcctcttcgcgtacctgggcctctacctcgccgctctcggcaccggcggaatcaagccgtgcgtctgcgcgctcggtgccgaccagttcgacgcgtctgaccccgtggagcggcgggccaagggctccttcttcaactggtactacttctccatcaacatcggctccctgctgtccgcgacggtggtcgtctgggtgcaggacaacgttgggtggggagtcgggttcgcgatcccgaccctgctcatgctgtcgggactcgtgctgttcgtcgccggtaggaaggtttacaggtaccagagagtgggagggagccctctgacaagagcctcgcaagtggtggttgctgctgtcaggaactaccgtttggtgctgcctgagcctgacgacagctcggcggccctgctgcatcaggcgcctcccggaacgacggaaggaaattattccacgatgcagcatacgagtcaattcaggttccttgacaaggctgccattgtagcgccatcctccggcgagtaaggagcgacggcaagcccatggcggctctgcacggtctnccaggtcgaggagctga

SEQ ID NO: 151123 - DNA, 1591 bp, Zea mays
  Clone ID: MRT4577_69345C.1
gcgctccctctccgactctccttctctccctgccctgccaatactcatctacaaaagagagagagagagattatattcatcctctttgtgcactgatttaattatgatccttcttttcgtttgttcttatgccattgtttggccacaagcggtggggtatcgatctgaaatagttggacggcatccctgattccaccctgatcgatcccatggatgcccaagacgacgatgagaggccgctgatcatccatcgcctgccactactccaggatgaaagtacttccggattcactagcgacgggacggttgatcttcgcaatcagcctgcccggaagcagagaactgggaactggagagcatgcttcttcatcttaggtgccgagttcgctgaatgtgtggccttcttcgcgatctcaaagaacctggtgacgtacctcacgggcgttctgcacgagagcaacgttgacgccgcgacgactgtgtccacctggatcgggacctcgttcttcacgccgctcgtcggcgcgttcttggccgacacattctgggggcgatactggacgatactggccttcctctccgtgtacgtcacggggatgacggtcctgactgcttcagctcttctcccgctgctcatgggcgcgtcctacagccgtagcgcccaccgcctctccgcgtacctgggcctctacctcgccgctctcggcaccggcggaatcaagccgtgcgtctgcgcgctcggtgccgaccagttcgacgcgtctgaccccgtggagcggcgggccaagggctccttcttcaactggtactacttctccatcaacatcggctccctgctgtccgcgacggtggtcgtctgggtgcaggacaacgttgggtggggagtcgggttcgcgatcccgaccctgctcatgctgtcggggctcgtgctgttcgtcgccggtaggaaggtttacaggtaccagagagtgggagggagccctctgacaagagcctcgcaggtggtggttgctgctgtcaggaactaccgtttggtgctgcctgagcctgacgacagctcggccctgtgctgcatcaggcgcctcccggaacgacggaaggaaattattccacgatgcagcatacgagtcaattcaggttccttgacaaggctgccattgtagcgccatcctccggcgagaaaggagcgacggcaagcccatggcggctctgcacggtctcccaggtcgaggagctgaagacggtgctgcggatgttccccgtgtgggtgtcgatggtgctcttcttcgcggccaccgcgcagatgtcgtccaccttcatcgagcaaggcgagaccatggacaaccgcgtggggccgttcaccgtgccgccggcgtccctctccaccttcgacgtcatcagcgtcatggtctgcatacccatctacgacaaagcgctggtgccgctggcccggcgcgccacgggcaaggagcggggcctgtcgcagctgcagcggctgggcgtcggcctcgcgctgtccgtggccggcatggtgtacgcggcgctgctcgaggccaggcggctgtcgctcgcccgcgcagcggcggaccga

SEQ ID NO: 151124 - DNA, 400 bp, Zea mays
  Clone ID: MRT4577_69346C.1
ctcgttctactagtccaagtatttttacaaggaccaaagcaataaatgccggtgtgggaatgtgcgaagtgccaagttaaaccttatggctatgcatttgggggaatgacctaccatcaccatgatgaaaccgtccataagaacctgttactaatggatatgcaccacccctgcacagtagagggggattataactgaaatgatcgtgacggatggcatgccgatacccactttgaggttatagacatagtggatgctaaaaatctcgatgatagtgtaccttagaggtacgaactgtgtaattcctcatgtgaaccgtactgagcacctgcaactggatctatcacaggatggtgacgtgattctaaatactttacacggcaatcttgtggatgatctt

SEQ ID NO: 151125 - DNA, 542 bp, Zea mays
  Clone ID: MRT4577_69347C.1
ttttttttttttttttttttttttttttttttttttttttttttttttttttttttttttttttttttttttttttttttttgggggacccatttaaagatgccctacgtttcgtttaactcggaaaaaaccgacttaacaatacacaggcccataaataggtccccaggaaaaacaattgctgcaactggtcaaaaggagcatgctaatcactctgatctaaaatatttgaaaatttcaactttggcccactgataaaacaaaaaaaaactttttgctgacccaagggaacaaaatcccttggtgctggggggggggttccccatcacgggttttttaaccatggaaaaacctccggggatgagggtaaccgggccggaaaaacttcaaattctgtttttggcaccaaaagggtttgttcaaaatgagcactccgtttaccatttgcaggcactggagtccaatcgtcaggccacaaacgatcattccaaacccctacaaaatatgaacacttttacaggaatgctcaatgctcaggggtt

SEQ ID NO: 151126 - DNA, 474 bp, Zea mays
  Clone ID: MRT4577_69348C.1
tttttcttttgttctttgtttttttttggggggttttgccttttacccaggtggggttttatttcaaattttttgtttggaagattgccgacgatgcccaagacccggacctactcccggggcaggcaaatgcccttttagctaaccttatgggttccttgttacggtctggggggcctaaggggggatcggcctttacaaagggcaaagcaaggacaaaggatttgaaaaggaatgtttatcctggtccagattccagggaagcggtgagggttcaagaggaatccctggtttcctgctttgggcattgaacataagcctttagattgcccctttgatggccctttggaggacccaccggtggcaattctattggacatactcctagagcgactggaactaggaccccaaatttcacggctaggggcgcccttgggggggtttttttgaactagccggttacccattttgggg

SEQ ID NO: 151127 - DNA, 360 bp, Zea mays
  Clone ID: MRT4577_69349C.1
aaaaaaacaaaaataactaacaaactatacaatacataactcaggccttctaaacatccaggctgacttacacatgcgggcgacttcataactattctatactaccacctaacttcaattcactgcccacctttttacaacatcatcactctaaaaaccctgtcattacccaactaaatccccttacaccacatccccctttatccaattaacattataacgaatatccctccaccaatctccctatcaacacttccccaaactaaataacgaattagactctccctttaaccgatcattaacctcaacatgtcttgtagttacacgcatacttacccctacacttgcaatcaccctaac

SEQ ID NO: 151128 - DNA, 260 bp, Zea mays
  unsure (1)..(260): unsure at all n locations
  Clone ID: MRT4577_6934C.1
cgagcgnctctcctctccccgcatcgcgccaaggaagagagagagatcgccgctccccttctcgccgncggtggcgcgggcgccctccctcctcgagcgagatctgtctcggccancgatctatctcgacacaatcggcgaagatctgctcgcatccgncgctcggctatcnacgcgcggcccaaccatgcnccgacattcgccctcaagtcgcccccacattcgagcgccgccgccccccgccctcctccaacgccccg

SEQ ID NO: 151129 - DNA, 308 bp, Zea mays
  Clone ID: MRT4577_69350C.1
gtcacgcgtacagcgaggcgaagtagatgagcgagatcacgagagtagcagtgaaacccaaacattagcaagtacacagagaccgaatgcgtagagaaagtacagtttattacaacagctcaagggcaaggacgcgaacgccaagatgtggaacatactggcctacacatttaccacgtatcgaatcaaaaagataatgctagcacatgaagattttggaaagattgcactagaactcgctgtatgagattccagatctcatgaatcgtgttgacaagatcatattgaccttacttatgaagaacctc

SEQ ID NO: 151130 - DNA, 233 bp, Zea mays
  Clone ID: MRT4577_69351C.1
atgcgaccttttttgtggcaggaggcgagcttcccatgccatactaatagcccgaggacggtcctcataacaagaccatcgcataaacaatgtccctgggaacacgggtgccctatccaccgttcccagaccctcacttgatcctggaacacaaccggccgtgtctgagcacaaaggtgacagggtctgacacaagtaaactgagggccacagcgcaagcattcatgatgttg

SEQ ID NO: 151131 - DNA, 1831 bp, Zea mays
  Clone ID: MRT4577_69352C.1
attctaccgataggcttagataatttttggaacacaacattgctccaaaaagtttttctgaagaaaggtatcaatctgcagtttgaagaagttgagctttaagaggaacgtggtgtcattgtcatctgagctcaagggtgtgaggagcaagcttgcttcctaggagcagctgtttgtaagggaatctcaaactagaaagcttgcggagacaaaaacaaggagcatggaagaggaagtaatcaagctgcagaaatgcttacaggacaaggatgagcaactgtgttcatccacaagtagcacggaacagctacaggagaagcaggtgttgcatcagctaagttagctcggatgtagtgcatgtcattgctgaaagagctgaatgagaaggacagctcactcaaagaccatagacttcgagtgaacaatctaggtgagcagcttgatcttctccagaaggatgtacaagcaagggaggtcacacaaatgcaacttaaagatatagttataaggatcgagaccaacatcatggatgaagttgccaaagcttttgaaattgcgatattgagaggggaaatcggaatattatctactcactggacgaacaaaaccaagaaccttgaatcacagttaaaaaagcaccagagaactgatcaggagctgaagaagagggttctgaagcttgaattttgtctctggtcctgtcatcccctggaccatgctaacaggatgctcaacttttacgctccagtcgaacttctgatagaatgaactgaaagacttctctaacaaaagtggagctgaggggagcaagagtgctgaaagcctgaaagtggtccaatgtttttagatgttctcgaatgttatctgaaatatgaggtttatctcttgcttgatcaacaatagaagcaaaaaatcatccttttgtttatttatgtttcccaatataaaggaaaaaggggaaatattttggtgcagtgtgcccaattcttttgtccctagaaaactgtgtagtcacctatagcaggcactatagtcagttttagctattttagacaccactactatttgtacacacatttctattagcctattttagcctgctatatccatgtatgagccttatgggaactctgcaattactatggatcctcttatacattatgtttgacatggagacaaggtagtatattgagttggaccaataatccttcatatttatttatgtgaattatgttgtactggtgtcctgtccttttgtttgtgctttataatttgtaattcttagctattgatatggtatgatggatgggaggtggctgaaatcgttcagataagtgccaatttgttgttttcttttttaatgaatggttttctatttcagctgatgaaccttttatagttcttttattatatgctgccactgattgctaatagggtgcatgtcttctatttctaggtatggtgcataaaaaagtaggaaccacaatgagattgtaatgctgcacatggcacatcaaggtgcgcaagatatgtaccgtagaaattatcgtaaagtgcacacagctgtatgtatagatgtttagaagtggccgaagttaggcttgctcaaccggggcaatgatttacttagcctgctgaaatgtactataggtagcattcaagtttgtgaccatcatgcaagtacatgtgggtttgttgaaattgagtggtcatcggagaagtagcaaaatgttccctatcgagagctcgtgtactatatttgttttatgaacttaatttttattacaacataacatgtggtctatgttattgctacacccaacaacccaac

SEQ ID NO: 151132 - DNA, 672 bp, Zea mays
  Clone ID: MRT4577_69353C.1
cggacgcgtgggcggacgcgtgggcggactcgtgggcggacgcgtgggttttctcagaaggatgtacaagcaagggaggtcacacaaatgcaacttaaagaatagttataaggatcgagaccaacatcatggatgaagttgccaaagcttttgaaattgcgatgttgagaggggaaatcagaatattgtctactcactggacgaacaaaaccaagaaccttgaatcacagttaaaaaagcaccagagaactgatcaggagctgaagaagaggttctgaagcttgaattttgtctctggtcctgtcatccactggtatggtgcataaaaaagtaggaaccacaatgagattgtgatgctgcacatggcacatcaaggtgcgcaagatatgtaccgtagaaattatcgtaaagtgcacacagctgtatgtatagatgtttagaagtggccgaagttaggcttgctcaaccagggcaatgatttacttagcctgctgaaatgtactataggtagcattcaagtttgtgaccatcatgcaagtacatgtgggtttgttgaaattgagtggtcatcggagaagtagcaaaatgttccctatcgagagctcgtgtactatatttgttttatgaacttaatttttattacaacaaataaaaaattaattcaaaaaataa

SEQ ID NO: 151133 - DNA, 1628 bp, Zea mays
  Clone ID: MRT4577_69354C.1
gcttgcggagacaaaaacaaggagcatggaagaggaagtaatcaagctgcagaaatgcttacaggacaaggatgggcaactgtgttcatccacaagtagcacggaacagtaccatcatgagttggatgatcttagaacacatctgtcatttactcaagctacaggagaagcaggtgttgcatcagctaagttagctcggatgtagtgcatgtcattgctgaaagagctgaatgagaaggacaactcactcaaagaccatagacttcgagtgaacaatctaggtgagcagcttgatcttctccagaaggatgtacaagcaagggaggtcacacaaatgcaacttaaagatatagttataaggatcgagaccaacatcatggatgaagttgccaaagcttttgaaattgcgatgttgagaggggaaatcagaatattgtctactcactggacgaacaaaaccaagaaccttgaatcacaggtatgctacatttcttttatttgttcataagaggccccaataacttggttacaaatgctttgtttcctataacgttgaactgaagtatatttacatgagatttattgatatttgatcagttaaaaaagcaccagagaactgatcaggagctgaagaagagggttctgaagcttgaattttgtctctggtcctgtcatccactggtgcgttcgccaccgcacctaccgctgttactagctcccttgctcttctcttgctgcgactgggatatagcatcgtggatcttgaacctaggccagaatttaggcaggtctagaaccaccatgatgcctggaacatactcctattttatccatgtatgagccttatgggaactctgcaattactatggatcctcttatacattatgttcgacatggagacaaggtagtatattgagttggaccaataatccttcatatttatttatgtgaattatgttgtactggtgtcctgtccttttgtttgtgctttataatttgtaattcttagctattgatatggtatgatggatgggaggtggctgaaatcgttcagataagtgccaatttgttgttttcttttttaatgaatggttttctatttcagctgatgaaccttttatagttcttttattatatgctgccactgattgctaatagggtgcatgtcttctatttctaggtatggtgcataaaaaagtaggaaccacaatgagattgtaatgctgcacatggcacatcaaggtgcgcaagatatgtaccgtagaaattatcgtaaagtgcacacagctgtatgtatagatgtttagaagtggtcgaagttaggcttgctcaaccggggcaatgatttacttagcctgctgaaatgtactataggtagcattcaagtttgtgaccatcatgcaagtacatgtgggtttgttgaaattgagtggtcatcggagaagtagcaaaatgttccctatcgagagctcgtgtactatatttgttttatgaacttaatttttattacaacataacatgtggtcatacatatgttattgctccaatattttttccgttgcaacgcacgggtatttacctagtacccaaaatatataaagtgatactatattggatctcaaaacccc

SEQ ID NO: 151134 - DNA, 262 bp, Zea mays
  Clone ID: MRT4577_69355C.1
ggcctgccaggaggtccaggacgagatcaagctcgcgaaggagaggaatggagagcttggtggtggctgggaatggagtcatgttgtcggatgaaggacggtctgaggttgcaaattggggaagtgtgtgctcagatgccaagggatgagctcgagactaggctggagcagatgaaagaggatggcggtgggggagtgggggagggtagaggaggagaaggaatggatcctggcccagatggccgagctgaggaagatgact

SEQ ID NO: 151135 - DNA, 273 bp, Zea mays
  Clone ID: MRT4577_69356C.1
aagaacatccaacagtttatttgggtaataagcgttgaacagttacattagttcacatcatacaaaaaacatattttgtgccggtagaagacatttaacaggttggaactgctgatctgttctgagtttccaagatacacccggagctcctagtcagttcgtagattatattaaatgtaggcctcaagccttgcttgcatagttgcttgtcagacatttcaggcccttatacaatcccttggcagttgtggaacatgatctttatttgtacca

SEQ ID NO: 151136 - DNA, 554 bp, Zea mays
  unsure (1)..(554): unsure at all n locations
  Clone ID: MRT4577_69358C.1
cccacgcgtccgcgctgcttctctctccctctgctcgctctccccagccgaagcgcccttcttccctggtctcccatggcgtcggtcgctcctccctgagctcgcccctgcgcgctctgctctcttccccacggcgcgccctctccctcttgtttctctgctggccgccgctcctgctcgttcttctggcagccgcgcgcagccagcttctcctccagtcgcgcctgctgcccgctcggcacccatctccctgcggccactctcctttgacacgcgcctgctcccttcgccgcgcgctcctcagctccgcccggtgctcctccatggcgctcggcttcttcctcctaaagtcccttcgtcgccatgtcacctttgctatttccatttcttccttctccgtactttctgctttgactttgagctagggcggtttgtactccggttgatcttttctgctgctggtgagcttacgtgctcttgcagatcaccttggggcgtttagctttcaagccatacaggagtgggccctgagttgtggcagggntgttgggttt

SEQ ID NO: 151137 - DNA, 362 bp, Zea mays
  unsure (1)..(362): unsure at all n locations
  Clone ID: MRT4577_69359C.1
aagcagtggtaacaacgcagaggactttnttttttttttttttgtttttttttnggnnntttggttttttttttttttttttttttttttttttttaanaataatacagacattttaccaaaaaaaaagagggctagtcgtttgcaaccattgcacaagtgttataaaaacaaaacaatgggacgcgtgccttaatacatagcccttagtagtatcaaacaaagggggacagggtatattaattattaatatactactccaccgaccacttttttttttcggatactcccgtcttttttggttttgtcgtgggattgacatgcgcatgacgatcccgcgtactttgggttgttaccactgtt

SEQ ID NO: 151138 - DNA, 276 bp, Zea mays
  Clone ID: MRT4577_6935C.1
ctcgagccgaataagatcgagcaaaagaggacgcgcgaaggacgtatgcagagactttcttttctgcacagggctatctctaatgggagagcatatgaaaaaggtaccccagtctagtgttgatttagcagactgtccatacggtgatagtcagcggcttagataccgctatgttagcagcacatataaggaatctaacaggactgtcagaaggattgattttctttggaaggggagcgtatctgacgatctatcctagaatagatgggatctatg

SEQ ID NO: 151139 - DNA, 517 bp, Zea mays
  Clone ID: MRT4577_69360C.1
ggccgcttttttttttttttttttgttggttttttttttttttttttttttttttttttttttttttttttttttttttttttaaaaaaggcctttcttatttctgggaagccacaaacctcaaaaaaaaaactttattattgaactataacccaaaaaaaatctaaaagagggccccccccaggggggggggggggtaaaacactgctgggtttgacaaaacaagggggttgaagggcagcaattgttgcagttgaaaaagggggccagcgttaggcccaacgggctggtaaaacggcaacaactggggttgggtcaaaaagggagcagggctcacaccaactagccggctgaaagggaaaagatgttgctgctgtaaaaaaacaggaaaggtcaatgctgctagctggtagaaaggaaaaaattgctgggggtaggcaccaagcaactggccgaagggaaactagctgcccggcaaaaaaaaacccaagttcaacgaacctaattgggggaatgg

SEQ ID NO: 151140 - DNA, 178 bp, Zea mays
  unsure (1)..(178): unsure at all n locations
  Clone ID: MRT4577_69361C.1
cggccgcgtgggcggncgcgtgggcgttgctgctcaccaacccatccgccgccaagaagcgacggcggagatcgacgccgtcgtgggcacgtcgcgtctgctccgggaatccgacctcgccggcctgccctacctccggtgcgtcgtctccgagacgctgcggctgtaccctctcgcc

SEQ ID NO: 151141 - DNA, 103 bp, Zea mays
  Clone ID: MRT4577_69362C.1
gtagccacggcccttggttcccctccgtgtattcggcctcacctcagcttgccgaccagccatggctgccgtgaccgccgcagccatctctctgtcctcctcc

SEQ ID NO: 151142 - DNA, 691 bp, Zea mays
  Clone ID: MRT4577_69363C.1
cggcaagcacattcaacactagactgaggttgtacaggctatactgctgcatacccctgggcagagagttgggcgggctcaagaaatggatactaatcatccatggccagaagagacacaaatgatgtgaagagtaacctcaaggcctacttacaagactgaatgtacgacctatagggacccgtgcatagggtgtgaaaacattctctatgtattcaggagctgtaacgcctttattaacaacatgcatgttataagccaaccttatatttttcacaacacgacgaatctgcagctctattaaagtattgacaacagcaacttcaacttatagaaaccattgctggactttggaaggtagctggctgtcgatcggaaccatgactctattgaagctatcactcttaagtctcctgaagataccatcgacatggatatagaggatcaacatgaagctgagcttgctgcagcattgtgcacaaccatcttggcatgatgacggatgatgatctcgactgagtagaaaggatcatgattcttggactagagcacgagttatgtctatcacgagttaagatgttctaaggtggactgtctagttgatcatgagtgtctggatcaacagtccctacttgaactaaatgtacatgttgaatgttatactggcacggtatagagcccatgaatttgt

SEQ ID NO: 151143 - DNA, 171 bp, Zea mays
  Clone ID: MRT4577_69364C.1
cgtgctgaagatgtcatttagcctgcaaggatctggtgacccagaggtagaagataattttaaagcgacagagaccatccccaaggatgaatttcgtggatgggttaggatataagagctccagaaacccacccaacaactgccgattgcaagatatagctaaagccaacc

SEQ ID NO: 151144 - DNA, 319 bp, Zea mays
  Clone ID: MRT4577_69365C.1
gtttttctctggtaggtgctgttgttgcaagagcagactggttgagcggctctgctgagaaatcggcttaaggcatcatcggttctggacttgtggtctgtgcggcaaagtgtacacacatgaagcactttcgcccatatctgacatagggctaggcatggatggagcggattccatcacttttaccaacgcctgcaagcacacctggtgtgtgggtacgctccacgatactcagctggccgatcgtcgtgcggtcagactcctacctggtggcgtctcgcaccttcagtatggacgcaccccttgctgggacatggtc

SEQ ID NO: 151145 - DNA, 676 bp, Zea mays
  Clone ID: MRT4577_69366C.1
cctcgaggccggccgggctctctgtctctctagagtttttgattttagccgtcgccgctgctcatctcacatccctcgagaagacgcctgctcctcggcgtatcgataccatgaccggcttctccgacctccacaccgtcgacgaggctcaagtccctcaaagctcacctcgccagaataaacctatgtgccatgtggtactccattactaaagatgacattaatgtcttcgacgaggtgccgtcacatactctagtggctgagtttcctaatgccgccctgctgatacgagaccgtctctgcgactgcatgctcaagattccctgataaggctgttgatataaatctgcctgcgatatcagttcctgcgtgatctgctccatgcacatgacgctgaagacgatgatgactcttgatctttttggcgatgaaactgataactacacagaatgcaggtgaagatcgcgtcgccgatgccaatgcctcttctaaaaagaaacgaaagaggtacatcctccgtaccttatggatgtcaaaccatgggacgatgagactgatatgaacaatctgcaagaggcttaccgcaaagtccagacgtagggactgaattgaggaccatcgaagcttgtgcctggtagtatagcgaatcaagaacatgactatcatgatgacaatt

SEQ ID NO: 151146 - DNA, 688 bp, Zea mays
  Clone ID: MRT4577_69367C.1
ggaccctcgaggccggccggggatagagagttccatagacaagctccgcggacatggaagaccgcataccgaactgtcgacaccttcctctcctctttccccagtcagcatcccggccccttttcatgcgcttgcctcgggacacatcctgccctaaccgcctcccttcggcgcgctgtctgacgcgcgctacgggtcgcctcccgtctccagatccacgagtcggggccgtcgtgcacctgcttccgcaccactgatccggatcgatcttctcgcttatgatgatatgatatgtccatctgggtgtgcgcgcgcttttgcgatggcagagctggaagaccggaaaatgacgtacacctaccacagggcaccgagggactcctcatgccccttcttggtgaacgaaataacggcgcacccgaactgtcgcgtggtaatgtgaccacacttctccaagcgctggaggaagaaccgaatgatcttgggaaatcagaactgtttgactttagtgccatgacactccaccattgtagcgaagctgcacaaacaagccttgattgaagctgcctctgaaaaatcgccatcaggagaagatgcacaagcactagccaatcattcggtactgccgatatgagctaacatagaggcatctggacagaacatcctgaattctcttgtatgtgacgat

SEQ ID NO: 151147 - DNA, 155 bp, Zea mays
  Clone ID: MRT4577_69368C.1
ccacgacacaaccaaccatcatctgaacaacaccgatgcagacctgcccaatcctcaccctcaccctgatcacgctcactacgaccaccaccacgctattcatctccaatcccaaacaatacactgcactcaacattaatccgactaccaaaaat

SEQ ID NO: 151148 - DNA, 713 bp, Zea mays
  Clone ID: MRT4577_69369C.1
ataaacggagcgttgcgacgagagcgaccgccctttccctcttccctcccgtcgtcttcactccgacgcctcccctgccgccaccgctattgcctattggaaggccgatccctgtcgcgcgcgacgcacgaggcttcaagacgacgacacgctgctaatgtgtaccgcaccacacgccggctcggcctcggtagagcctcgcctcgcctcgccaggagatactggcggctaccgctcgtgcttgatgtgcatccggcgagggcctgctcgccgcctgcggcgatgaggcaagacctcgccaagatccacccgcgccaactccagtgcacattgtcgaggtgaagaaacaacgtcatgcgtggactgcctaaccaacaaactcaaccaatatgccgctgttaaggagacaaccacgtcccctagaagatactgagcctccccaaaataccgacgatatccctgcggggactgcatgagaattcacgagtaaccatgtcagagctccctgctgctccaccaaacatggaatcatgggacaaggtgttacgacacaccacgagatgttcctgatgacacatctgatgaagaaccgatcctgccggtttctccaaagaaactggcagatacatcgaggaaagcatattgagagctgatcttgctagttcataccaatccctcgaagacaagccactattgcaattcatgacactgag

SEQ ID NO: 151149 - DNA, 167 bp, Zea mays
  Clone ID: MRT4577_6936C.1
attcggctcgaggttccccgagccctttttttttcatgtgcagattcgccctaccggccgtgcgactattgaaaacagcgctcctcatggcctgaggagctgctccagccccatgtgctcagactgtggtgctggacgacaccatccaccgtcatgactgcaacacg

SEQ ID NO: 151150 - DNA, 433 bp, Zea mays
  Clone ID: MRT4577_69370C.1
gccggccgggtcggacctgctttgtcctcgagccgactacaccgccgatgacaacggagcgtgacgaggactgaacatcgctccacgtacacagagagcacacgactctcactctcgacgagaattcccacaactccagcaagctaccggagccgtgtatccgcatcgactagcaaatgctcgctcggagcaccgtcccagcactgatgctcgacccacttctctgatggacctcttcgaccccttcgacagcatgctccgctcacatcgtgccgccgacgttgccgtcaacaggccactgtgctgctgtggagaacttcctacatcaaagaaatgggtccttcattagaaggcctaatttatgcgctttagctttttgttcagaacttgagactcatgtgttaaactcgacttgttaaagttttgatggcta

SEQ ID NO: 151151 - DNA, 453 bp, Zea mays
  Clone ID: MRT4577_69371C.1
cggactcttgggcgcggcggccgtggccatggcatcaccgccatggcctagactgtgcacatacaacagccagcaccctgagaccctcctcccccgcccctccatccatggcacgcaagagccaggagcacctggttggaggtagaagaagaggggggggtgtgcttttaggggaggaattgagagggatcggtttgtcctaaatcttaacccccctaaaaagtaaaaagaaactagtacttttatataaacccgtcccatcctcccacccccaacaattacagggagtttaggtaattttatcacagatccttttttgtatgtaaataaagctcgaggcccagaaattatgcagaaaaaatgtagaggggaggaggagcaaggacaaaagggcttacaaaaagcagagaagggatgattaatcagagttccctgtttattgtgcactgcccc

SEQ ID NO: 151152 - DNA, 462 bp, Zea mays
  Clone ID: MRT4577_69372C.1
acaaataactatctaaatagcccgaaaggaatgacaaaaacccagaacaaccgacacaaaacagaaacccaagggaaaaacacccaaaaaaaaagggcaaagaaaagggaacggaaaaacaatcagaaaaaaagcaaaagaaagcgagcggcaacaagcaagggaaaaacagggggggccctgcacgcaggggcgagccccaagaaagcttcccgacggggggggcccccctgagggggatcgcccggggattcccgcggaggaatgctggcacgcaacgggtgacaaaccccggggggggaacccagggggctaccgtagcggggagaacccggggggaccccccccccgatcaagggggacgaaccaggggccccccccctgcactgaaagatcatgggagaccgcccctcaaacaccgacacccataccccggaggaggaaaccgaaaaaggaaccccc

SEQ ID NO: 151153 - DNA, 758 bp, Zea mays
  unsure (1)..(758): unsure at all n locations
  Clone ID: MRT4577_69373C.1
ccggccggggccttttcgttactgctatgctacagcaacatataacccatagagataattcagtagatctagtagtttaactccataattgttggatttcaatacattcaggaacgccacctctcctaggttagggcgtgttggacctgccatgggggacaggccggcgccgatcgagaaggtcgcggtgccggagaagatggccttgttcctccacgccgccgtcacgtcaccgggacaccagcagcagcacggcgcctcgtcgcacgaggcgcccgccgccgcgaacatcacgccgcggacaacaacagccaggaataagcagcagcacctgccggtgagccccggggcgtgcctctgctcgccgaccgtgcacgagggctcgttccggtgcaggctccaccgcggcagcggcagcggctccggactccacgagatgaagatgagcaagaaggccggcgtatgacgacgcgacgcagcgggcggcgacaagcgttcgtactacgccttaccgcaaatgcgcaggtgcctttgcctgcatttcggcctctgtttttcccccctcatttgttttcgctgcatacagtaatacagaaggggaagagtacctttttttgttccttgtacatacctttccttgtaaagggtctgtcatgtcgatgatgacttcttgccaaaaaaaaaaaaaaaatttgacaagtgngagcccagtttacctaagacataaaacaaaaaaaaaaaaaaaaaatttgcggccc

SEQ ID NO: 151154 - DNA, 654 bp, Zea mays
  Clone ID: MRT4577_69374C.1
aattcggcacgaggcgcgaaggaaaggcgcattattacatcctgggcaaacgagatgcatcatgtggcagagtacaaaccgagcctgacgctgtacgtactggaaggccaccggctatgaccgggccgtcatggcccccacggacgatccctgaccggtcgcaatgcgcacaacattgcacttactaccgctgcgcacgcaacccacaagtgaggacagacggagtggtgtatgcacgactttggctccactccgatgcgtcgtcgtgactgttaacaacgtgtgcctcaaacaaagtatctgattaatctttgcatacgcgccgatcaagttattctcacaaaacccacacctgatggagttgtgaacatcaaaatatcagtccaatcgacctttgcttgctactctttgatgaagatttctcaaggacttgaaaaggttttctaaagaacaacgagaaaaaaaatggtctcaaaagtagtctctggcacctctgtgatgatactgaagaacctctttacttattggggtgtaaacaaatacaagcatgtatgcgtctctttcaacatgcattctctcatgacaaatgctacctgctcaccctgattatcgtactcagggtgcgtctagtctctccattcgttactatctttc

SEQ ID NO: 151155 - DNA, 739 bp, Zea mays
  unsure (1)..(739): unsure at all n locations
  Clone ID: MRT4577_69375C.1
acccacgcgtccggagataattcagtagatctagtagtttaactccataattgttggatttcaatacattcaggaccgaggccggcgaatcaatcaagaacgccaccctcctaggttagggcgtgttggacctgccatgggggacaggccggcgccgatcgagaaggtcgcggtgccggagaagatggccttgttcctccacgccgccgtcacgtcaccgggacgccagcagcagcagcacggcgcctcgtcgcacgaggcgcccgccgcgagcatcacgccgcggacaacagccaggaataagcagcagcacctgccggtgagccccggggcgtgcctctgctcgccgaccgtgcacgagggttcgttccggtgcaggctccaccgcggcagcggcagcggctccggcctccacgagatgaagatgagcaagaaggccggcgtatgacgacgcgacgcagcgggaggcgacaagccgacaagcgttcgtactacgccttaccgcaaatgcgcagacttcttgccactcttgaagctcatgaaacacaggtggaggccaagtttacctaagacataaaacaacacgaatgttgtattacctgttggtcacttattctncattattatggatcaagaataagacaacacaattgttatacattaaggacctttgtccttcgaagcattatctgctttcgatatatataatgatcttcagatttagatcatcattcatanc

SEQ ID NO: 151156 - DNA, 731 bp, Zea mays
  Clone ID: MRT4577_69376C.1
aaaaaaaaaggtactcttccccttctgtattactgtatgcagcgaaaacaaatgaggggacaaaaacagaggccgaaatgcaggcaaaggcacctgtgcatttgcggtaaggcgtagtacgaacgcttgtcggcttgtcgcctcccgctgcgtcgcgtcgtcatacgccggccttcttgctcatcttcatctcgtggaggccggagccgctgccgctgccgcggtggagcctgcaccggaacgagccctcgtgaacggtcggcgagcagaggcacgccccggggctcaccggcaggtgctgctgcttattcctggctgttgtccgcggcgtgatgttcgcggcgggcgcctcgtgcgacgaggcgccgtgctgctgctgctgctggcgtcccggtgacgtgacggcggcgtggaggaacaaggccatcttctccggcaccgcgaccttctcgatcggcgccggcctgtcccccatggcaggtccaacacaccctaacctaggagatggcgttcttgattgattcgccggcctcggtccacagtccaaccgattccatcaaacatttaaaaccgatcaaattagcaagaacctgaatgtattgaaatccaacaattatggagttaaactactagatctactgaattatctctatgggttatatgttgctgtagcatagcagggtaacgaaaatcccggccggcctcgaggaacccaatcgcccttaggagtg

SEQ ID NO: 151157 - DNA, 1462 bp, Zea mays
  Clone ID: MRT4577_69377C.1
atcaaaactcactacacggatcgagctatagggtagctaacagaagctctatcaagtactgtgtatgccatggtcggagccctcgtcttcgacgctgatctcctcgccgcaagagtcggcgctactacggctgaccacgactgaccatccacaacctctgcccccacgcggggtggccgctggtgaccccgagctcgggcttcccctccatgctccaccaacaccgagcggctgggactcgcaacgcgctgctctccctctccttcccgcaccaccttctccggccctcgagcggcgggccgggccggggatctattcgatcgacaagccgtgtgttgagtcgtttaaaaacaaccagagaaacacatggccaacatccccaagtgtcgttggacccaaaaccccttaatccttctatcttacgctgctgtagtgctggcagtactttctactctgacactgccactgcttgcttcatcagatctagatgctgtaaatttcaagaaattctgccttgttttgaagaaccaatacctatgtctaggtcaaaatgccgaaccacgcgcgaggaacgctatggcgctcctgcttaacagtgagggtatatctgggccacttcccacggccttgggcgccttctccaacttgagttacctcgccctcgccaacaacaagctcaccgggccaatcccaccatcagtcgggcacctgcaccactccctccgcgagattgtcctcctcaacaaccagctctccggctgcctccccggcgagctagggatgctcagcaaggcggtcgtcatcgacgccggcatgaatcagctcaccggcccaatccctccgctcttttcctgcctcagcagagtcgagcagctcaacctggccgggaaccgcctctatggccatgttcccgacgctctctgcaggctcgcggggccggctggccgcctttccaatctaaccttgtctggcaactactttgtcgccgtcgggccggcatgcgcagcgctgatcaaagacggcgtcctggacgtgaagaacaactgcatttcgggctttgccaaccagaggccagcggcggagtgtgcggttttccagagccatccaaagacgtgcccggaggaggcaagcactcaggtgtcatgccctgccgcagctaccatgcacatgaacgctgcgccgccgagggatcagcggaagaccaccagggactactacagctacgtgacgtacgctagcctgcgttagtgaggcgccacgtacggccatgcaatgacgcgccaccagtgcctatagctggaacttggctatatatgttatctttttgtatcattattaattattttgtaccatgcatgtgttggtgtgctgtttgtgattgttgtttgttcgtttgtatcacgtgctagtggcacatcttatatattacacgccacttgttagtaaaaaaaacccccccccc

SEQ ID NO: 151158 - DNA, 201 bp, Zea mays
  Clone ID: MRT4577_69378C.1
gttccgatcactacgcacccgccgtgtggggggaacctacacgccgtgcacaaccgctctccggcctgaatcccgcctgcgcttacgcggagactgctctgctgtcgagacctcatccagccgtgctagggaagtggcacggagttcgatcaaattctgattggccgaaaatgactagggtctcaagcgggaaaacataat

SEQ ID NO: 151159 - DNA, 1194 bp, Zea mays
  Clone ID: MRT4577_69379C.1
cccacgcgtccgcggacgcgtgggaacctggtaagattcaagtgttctatatgatccaagtgatggcccccgatcgcgtaggcgtaggcgatggcggcaagccgtgtgttgagtcgtttcaaaacaaccagagaaacacatggccaacatccccaagtatcgttggacccaaaaccccttaatccttctatcttacgctgctgtagtgctggcagtactttctactctgacgctgccactgcttgcttcatcagattcagatgctgtaaatttcgacacattctgccctggtttcaaaaacttatatttatgtgtgggtgccaagaagtcccccggactacgcaacaatgtcctcctagcatctatggccggtgcgaggaacgctagggcgctcctgcttaacagtgagggtatatctgggccacttcccacgggtttgggcgccttctccaacttgagttacgtcgccctcgccaacaacaagctcaccgggccaatcccaccatcagtcgggcacctccacgactccctccgcgagattgtcctcctcaacaaccagctctccggctgcctccccggcgagctagggatgctcagcaaggcggtcgtcattgacgccggcatgaatcagctcaccggcccaatccctccgctcttttcctgcctcagcagagtcgagcagctcaacctggccgggaaccgcctctatggccatgttcccgacgctctctgcaggctggcggggccggctggccgcctttccaatctaaccttgtctggcaactactttgtcgccgtcggaccggcatgcgcagcgctgatcaaagacggcggcgtgctggacgtgaagcacaactgcatttcgggctttcccaaccaaaggccagcggcggagtgtgcagcgttccagagccagcgaaagacgtgcccggaggaggcgagcactcaggtgtcatgcccagccgcagctaccatgcacatgaacgctgcgccgccgagggatcagcggaagaccaccagggactactacagctacgtgacgtacgctagcctgcgttagtgaggcgccacgtacggccatgcaatgacgcgccaccagtacctatagctggaacttggctatatatgttatcttcttgtatcatcattaattttttttttggaaacgacattattaattattttgtactatgc

SEQ ID NO: 151160 - DNA, 185 bp, Zea mays
  Clone ID: MRT4577_6937C.1
ctaactggaaggaaagcacgcccgcctgcacgaacccggacggaatagccgggacgacccacgcttttcttacagaacaccgaatggggaaggaagggagagggtcagagaataagggatgactcggatgaaggaaagaaccgcgggtaaaaaaactgaaaagaaggcaggtgggcactggggaa

SEQ ID NO: 151161 - DNA, 865 bp, Zea mays
  unsure (1)..(865): unsure at all n locations
  Clone ID: MRT4577_69380C.1
aattcggcacgaggtccttccggcgcctctctagtctattctccttcctcgtcgagtcgtcgtcttcttcgatccactctttcccccatccctatctccctactttccacgcaactgcgtttcccccggactgttcttccacgattccgttggacccctagcgctcctcagtcagtcctcgcccctcccagcaccggccaacaatccctcaccttattccctgtagctactatgctgccctcttggatccctttttcacttgtctgagatttagccgccgcccggtaggaagaagaaggggaagcaccatattttctgttcctggcctggcgcagcgccggtgagatttcagtccgggatcggcaacgctgggaggactcgcgtgtgatttacgccgacttccgtgccgctctaggaagggtcacgtcgaggaggcttttgccgacgcggatttgcctggagccagccaagcagagcgcagaattgggggtgtttggccgtgcaaagccagaaagctctcggtttggctgccgaaaccgcttgaggcgaccaccatctcatggtcgtagtggtccgggtccggcacaagtaggggctcgcgtcttgcgcttggcagttgtgggaagccatggagccgtcgtcgtccatcacgttcgcgtcgtcgtcgtcgtacctgtccaacggctccagcccctgttccgtcgcgctgccgccgccagggccgccccagactcccccgttgcctgccggcccaagggtggggtgctggagtcgctgccgcaggnagcggaggcagcgtggnaaggcggtgaagcctgaaccggctcagcaaaaacctcgagcggctgctcctcgacccggacct

SEQ ID NO: 151162 - DNA, 280 bp, Zea mays
  Clone ID: MRT4577_69381C.1
gcaaaatattgttttgtattgtaaagggcattgtttataatggggggtttaaatattgagataaagatgagttagttgctagagatagtctaaaaccacaatatctaaaagaattacgcaaacaggcagcacaacttttaggaaaagcttttatgccaaaaccaatccttggttcaatttggccatccgccattgatagggatctttttttttggtcgccaatgtcaaggattttgatttaaaaaggattcaaaatttcaacaacatgatctattttggg

SEQ ID NO: 151163 - DNA, 375 bp, Zea mays
  Clone ID: MRT4577_69382C.1
gcgaacgacgagggagagcagacctagatcagacactatctatccagagacaatactgatacagcatgggagggacggttcacatgtcaaggccagctatgcggcgcgaaggcgcatttcgggctcgtccacgagcaggctactcgtgacctttcctatggacactaccttgccgtgcgtcttgtcaagtacccaaaacaggtgatccttgaggacttcgacaagaatactgcaaacaagtcttgcggcacgggcttgataacgctcgtgaagttaacttaacttatgccctgcaccttgacccattgcagcaattacaacgatgacaacagccgtgggctctactgactctatatctacaactagaaaggcggc

SEQ ID NO: 151164 - DNA, 3551 bp, Zea mays
  Clone ID: MRT4577_69383C.1
aaagaaaatcccagccacaagatgttgcttcacagttgctgctacctgtaaaccaagaaaatgcagcaaatagaacgcaagatattgtcaatctaattacagtgattgcgcgcttgcaaggctctaacgttggtaaagtgcctagcatccctcccataccagataaacagaatctggtggaaattataagcaaaataaattcattgaacaacgcaacctctccggcaaagtctccttcgccagaagtcggcgttttgaatacttcacaggatctggctgcacactcttcatatgtataaagtcagtactattgtagcttatgcagtctatctatttctgttgttcagaatttattggaaatgatatgcaaaagaaaaaaaaaaaaaaagaggggcgggaccccacaccaaaagaaaccaactaaaatcccaaaagagaggaaaggcacaaacagacggtacaaagaaagggacgctcgtctcgtctcgtcacgtgccgccgccatggctgctctgggccgtggcctgcccctcctcctcctgctcctcctcctcgccgtatcgggggccgccaacgccgcggcggcgcccggcggcatgtccatcatcacctacaacgaggagcacggcgcgcgggggctggagcggacggagccggaggtgcgggccatgtacgacctctggctcgcggagcacggccgcgcctacaacgcgctgggcgagggcgagggcgagcgcgaccgccgcttcctcgtcttctgggacaacctccgcttcgtcgacgcgcacaacgagcgcgccggcgcccgcggcttccgcctcgggatgaaccagttcgccgacctcaccaacgacgagttccgcgccgcgtacctcggcgccatggtccccgccgcccgccggggagccgtcgtgggggagaggtaccgccacgacggcgccgccgaggagctgccggagagcgtcgactggagggagaagggcgccgtcgcgcccgtcaagaaccaggggcaatgcggaagttgctgggctttctctgcagtaagctcagtggaaagcgttaaccagatcgtcaccggtgagatggtgacactgtctgaacaggagctcgtagagtgctcgactgacggagggaacagcggctgcaacggcgggctcatggacgccgctttcgatttcatcataaagaacgggggcatcgataccgaagatgactacccttacagagccgtggacgggaagtgcgacatgaacaggaaaaagccagggttgtgagcatcgatggctttgaagatgtgcctgagaacgacgagaagtcgctgcagaaggcggttgctcaccagccagttagcgttgccattgaggccggtggccgggagttccagctctacaaatcgggtgtcttcagcggaagctgcaccacgaaccttgaccatggtgtcgtcgcggtcggctacggcgccgagaacgggaaggactactggatcgtccgcaactcgtggggcccgaagtggggcgaggctggttacatccgtatggagaggaacgtcaacgccagcactgggaagtgcgggatcgcgatgatggcgtcctacccgacgaagaagggcgcgaaccctcccaggccgtctccaaccccgccaacaccgccggctgcccctgacaatgtctgcgacgagaacttctcgtgctccgcgggcagcacctgctgctgcgcgtttggcttcaggaacgtctgcttggtctggggctgctgcccggtcgagggcgccacctgctgcaaggatcacgccagctgctgcccgccgggctaccctgtctgcaacgtcagagctggaacttgctcggtgagcaagaacagcccactgagcgtcaaggccttgaagcgcaccctcgccaagctgagcaccgcatgaggacctcgatctgggactgcccagtgcttttctgactcaccaagagcaagatttcatagattatctatatgtttgtataagtactgttaccgttccatgaatccgctgtaaataactagtacctcttattaaaaggataatattatttgtcacggatggagtttttcgagccccacccagtgtcatgaatgcagcagtggaacttattcctccccccaaaaaggctaccaaatcaccatgggtggccatggatcagttcccacccccatggccttggtgaggatggccgtgcgccgtgtacccaggcagctcgcaggggatgtgcgggatgaaggggcagtgcttgctggggtcgacgtagaaggcggcgcactcgagcgggggccgctggtcggggaaccccagaatgcagttgcgccgcacgtccaggacacggctgcgcaccagctccatgcagtggtgccccaccgagtggaagaagttgtccgacagcgacaggttctgcagcttccccgtccgcgccagcaggcacaccacgtcgggcacctgcccgtacagctggttccccgccaggttgagctcctccacgtcgcggaggcagccgaacgacagcggcacgggccccgtgatctcgttcccgccggcgtcgaacacggccagcccctccaccagcccgatctcgtaggggaggcacccggacaggcggttgttgaggaacagcacctccgacagcgtggccgacgcgttgtagatggagcgcgggatggggcccgtgaactggttgttggccaccaccaggtactgcgcgcccgtgctgccgagcgtgtccgggatccgcccgccaaagccgttgttgttgaggaagagcgcctccaccgtgagcgcgaacaccggcgctggcacctcccccgcgtaccggttgaagcggaggtccaggaacagcagcccgcccagcggcaccacggcctccgggaacgcgcccgagaagttgttgttggacaggtccagctcgtagaagtagcgcagctgggtcaggtccggcacgtcgccggagaagttgttggagttggcgtggaacagcgccaggtccgggaacgcgtcgatgaacccggccagcgacggcgcgcacagcccgaacccgttgaagtcgatggacgccaccgtcagcacgcccggcgcgtccggcgggtagtcgcagtagaatcccctgtagtacgtggtggtgctgccgttgttgaagaagctgtcgcagagctccgtgcccgtccacgtcgccgtcacgcccagcgggtcgcacgtgatcgcctgcttgaacgcctggatcaccgggtacagcgccctcagcttgtcgttcctgaacctccacggcggcggcggcgacggctcgcacccgcaaccctccagcgccgccgtgctgttcgtcccgcggtggtcccaggacggcgacggcgctggcgcgacgaactcgacgtggctcgagccgcagagcgcgccgtgcgccgcggcgagcaccagcacagctactgccgccgccccccgccattatcgtctcgggcacggagcagtagtgccagtggggattcgctgtcggatacaagggcgtcgcacgcccgggcggacgcgggggcgacccggg

SEQ ID NO: 151165 - DNA, 491 bp, Zea mays
  Clone ID: MRT4577_69384C.1
cctcgaggccggccgggttctgttccaaagccttctctctgctttctgcatccacgacgactcctgtggaggcgctggaaagataccactgcgatggccagcagatcccacgagaacaagaagcctactgcctcctagacgagctgtgaaccccaatatgcccttgcctcggacaagaaatcccagccggcgaagaccaccgacggatagcgcgagcaagagccgtgggacaataatcccaagaacaacagggggacgtactagatccatgagatcttgaccgactctaaggcgcaaaataaacgcaagccgtcgcagaggcaggacgctgagacccatggagactgcaggaatatacccaaggatagggtcgaccggagcagtatctagaagaagaacgacgaggcatcgagatgactaaggggaagggtcgggcagctgctgcatgactacgaccatgaagaggcagttctgaggagtaattgcccctg

SEQ ID NO: 151166 - DNA, 171 bp, Zea mays
  Clone ID: MRT4577_69385C.1
atagtacttgattggtcccctttttcttcgaaggaagaacttctgcagcagtttcaggatgttggtagtcatggaactaaagtggtagtgtacaatttatggatgaatgatgatggccttttggaacttgactttgaggatgatgatgaggacatattacttagagatcag

SEQ ID NO: 151167 - DNA, 103 bp, Zea mays
  Clone ID: MRT4577_69386C.1
ggtttccaaaagatatgaagaccatcaattttagatctccttacatattacataagcttgtgggtagactcagaatctccattcagcacgactggtgatagat

SEQ ID NO: 151168 - DNA, 778 bp, Zea mays
  Clone ID: MRT4577_69387C.1
cattgggccggctcgccacactttacgtctctgtcgccttactcggggtatgttttggtatctcgctctccgtgataatctcaacctcctcagagctcttcggactcaagcactttggaaagatattcaacttcatcgcattggcgaatccggtaggcgcgttcctgtttaacaccctcgcgggatatgtctacgatctcgaggtggaaaagcagcacgccacagcatcagggtcggacgttgcatgtcatggccctaattgcttcagactaacattctttgtcctctccggcgtggcatgcttgggcacactgctgagcacggttctcacggtgagggtccggccagtgtatcagatgctctatgcaggcgggtccttcagccagcccaggaaccctgcacattgacccatggcgataaagctgttttctgcatctattctctccaataaatccagtatgacgtcggtctgaatagcctcacaaatggtttattgtaattcatgagcacgccccttattttgtgtgctctgtgttgtaatttttggtctaatatgaggagagagcgacggtctcgtgctgctacttgtaccagatgctcgtgatgttgctccaggttaaccagctgatgcccgagttttaggggcgtataactgaaatatcaacttatgtaaaacaatggtgcttgtacacgacacatgtttatcggacaatttggcagattccgtggtaaaaaaaaaaaaaaaagaaaaaaaaaaaaaaaaaacaaccaccacccc

SEQ ID NO: 151169 - DNA, 965 bp, Zea mays
  Clone ID: MRT4577_69388C.1
gcggggaactgcaactgatggagcggtacaaatggcgccgttagggccggctgcggtgaagccgccattgtcgcgctggccacagacgacgacgacagtgtgggctgcggctgggtgcccgccaggtggagcttgatctcggacagaccagcttgcaacgctgccaagttcgtggagaaatggaggatggccgctgtgagctgttcgttcgtcatcgtgggcagattgtatgatgacccggtggtgggaaggcccagcgtggaggtcagggcgagcgtggcagcggtggagggtggcacggtggctggaggccggtggggattgcgacgaagaactcatggtggccggaggatcgaaggtctctggtaccaaattggtaggattgcggatcctagcagggatctcccttagcctataaggatgaacagctgcgcgagggagatgggggcggcggcgctggggcgccgtggctgacctaggctgcgcgggcaagagagattgattccaactcctggctccctcagggaagccagaataatctgattctgcttaattccatagatgacctcttacaagtatttatatcccaactgatgcttatctgatctaaggattagagctatgagatctcttctaatccttatccaactaactagagataatctctcctttttattagctaatccttatctaatcttatctaactaactagagataatctctcctttttattagctaatccttatctaatccgcatgtggcctgtggcttggccgtgggccttagccctcctagccactaatgtccctgcgcctggtgtaggggatgtcggtcataacattaacattagaaaattttgatgcagcaagcaaaccaaaagaaagataccattgatggggaaaacgaagatcaattggagcctttaacaacataagagcacgaagagaaggagcagttattagaag

SEQ ID NO: 151170 - DNA, 277 bp, Zea mays
  Clone ID: MRT4577_69389C.1
ccgggtctggatgttagcgcggacgttcgcacagcagctgcgagggcgctcctcagtcccctacctcaaataagacaaccctgcacaaacggaggggtgcttaatgccccccggccggcccgaacagggcagcgctagccaggcgcccgtgcctgccattaaggcccggggaggaacctgtccctgcgctcgtgaacatcccgggggcaggaactaataaccccctccaccctggtttaccacaacaagaaggcggggccgccgcggcgaccatgga

SEQ ID NO: 151171 - DNA, 637 bp, Zea mays
  Clone ID: MRT4577_6938C.1
tcgggggccggcccgacgggcacatctacacccttcctaattgcgaataacgaagtcctagggaaagcaacgttggaaaaagtggtgtagttaaagatagccatatttagtaattaagccttttttactttctttcttctttttcaaaaccaatgaatgcggttggcttctcagaactcacctctcaggttccagaccttccttgaaggcacagtcgagtaactagcgttctaaggcctgttttccgaatggagcacggcagtaggaattacagacttgggtcttggaatggtgggtagggatttcataggctgggtggtgtgtcgagaagcttacattcgtcgatcctgtttttcaacttcatgcatttgtctggactgcctcggtcggatcggcatacgtgttccaatctcctgcaagtatccacgcctctttaacgcaaccagctatctgtttgaggtccttcggctctctgattctcttttggttttcgcgcagacggctgggaagaggaagatgatagggatgatcaagactaccattacttatctgagatggattataaagagatatatctagagatagagcgggcgcggaaaaggcggacataggaactaggtgaataaacaaacaaata

SEQ ID NO: 151172 - DNA, 2568 bp, Zea mays
  Clone ID: MRT4577_69390C.1
tgagaaataactcaataactgagatttgatcaagatgcaaagttaatgaaatgtaatacattctgggataggggtagtatttagatctgcatgtgtttctaagctacaaataacatggagtgcgagggtattgtttgcatatagtgaactaaattaggatgcagcaatgccagtccaatcctgtttccataagcattgttgaagtagccatgcactgttcagtcatgcatctgtactcaggtaatacaaagttcagttttgttcatgcattgaaatggtctgctctagaacatgtagcttttggtttaatttagatccactgcatgtcacttgggcgaaatcttctgttcatcgattcctttcatctgtcttcctaaagatgtactctctctgttcttttttatttgttgcattttagttcaaaaatgaactagcggaccacaaatattcgagaacggaagtagtatatgccaatccgtgtcattttactaattaaattcttggtattatttgtgttcattctcagatggctgttatattgtatatgcgtattgcttaatgggttgaatgttttacgaattgcttcacatgatgtgttgaaactggctgtgcaatttatttacccaataggtatgcttattccttcacagtttaatgcatggccttatgtgtttactgcagtggtttgcattaataactacatttcggtgtgtgctaatttgcctttctaacccctgtcgacctatcggaatgtgctaatttgcctttttaacccccgttgacctattggattgtgccttcgccttttgcaattctttgaagtccctgcttattgcgtgccagatgtgtgttgctcttgccattttttcgactgctttgtcgtttctgcgtcagtctgtgtttgcatgtctgctgcgtcgtgaacgtttttttgtatcagccgtgcgttattgcactttgcctgttccattttttttatattcagggctagttttagtttgacaaccctattttcccaaaggattttaataaatggaagggaaattagttcgttttcgttttctcaagggaaaatgggaatcccttggaggaattgagtttccaaaatagccctggtacgatatttacatgtgtttgccagcagtgtgaatcttcatactaagggttagtttagaaacttaaatcccctttccgattcctagagattgagtggaaattgactaatatcgcactcaatccccggaatcccctgtgttctggaactagccctaaatggtttatatgaatattctgttctaccgagttgtgaactgctgaactctagttctgtgtatttgttacgacacctagcactagcaggcatcaggactctataggtgtgacacttgaaattgttacagattaagacgcactgacggtaccctgcgctcagttgctcgatactcgaggcttgtaggtgattgtatccagtagtttgaagaactggttatctaattatttattttccgtggatccaccattttggatacgcttcatcaatatataaaagagctccaattatgaaagttaggagaaaatgacgatctctaaactattcttgagttgtcgtccagctcccaagactaatggaattgcagtttaatgtctctgatatattgtaacgtgtcatctcgctccaaacttatacgttggtctgctgttacatgccagttctgtaaggagaaatggcaccgattactggaaattttacaaattggccctactacttgtttagattggacaagctctctcctcgtctctatttaatctcttcctctgtttttctctatttgccccttcgttcactctttctccccccttttcttgtctcgttatcgtctgctacgccaaaccctagccccaaatcagtagcttgaagctgcccacagcgctccaaattgggatccacagattctgcattcatgacgaattggggaattgtgtgtgctatcgtcatttaggcgcaggacgaaagggaagccaccgttgattactcctagactgaattgtaggcaaattgttgaggttcacgcggccatggtcgctatgacaatttctacatggccccagacacagggtaagttgaactgaagagctctgctccaaagaagctttgttaactacgttgtgttctttttaatgtgacgtgacctgaatgcagcaagattgaacctcctgcccattttggcaccgggaggaaagttgcttgtatgctttgcaggatagctaaggaaaaggacattcttgcactgggacgacaacaaaggaagcgcacggagctgggcaattctcagtttagatgctcaagttgggactttggtgggtttaggttatggtcgtcaaaatgcctcgtatttgctaggcagagctgttctttggatgttgttggctgtggtgattgagaaggaataaatgtcatgtaatataaagagtactatgtaacgcacaccaccttttgttagaatgtgaactaccttttgctacaatgtgagatcaaatgtttgagtgaaaaaatgccttgccattagc

SEQ ID NO: 151173 - DNA, 247 bp, Zea mays
  unsure (1)..(247): unsure at all n locations
  Clone ID: MRT4577_69391C.1
acgcgatcgggctctacgtgaaccccaactaataactaaaacgatggatcggatcatctgcatgcatgcatatgcagtatgcatgctagctatgcgctgcctgtatncgagatatgaagtgcatanaaataacggcccctgctgctcccatgcatcagcagtgtgtaccattatgttatatatatacatatatactgtatttcgctaccgaataaaaacatagataaaagatccagtgtcgtctgat

SEQ ID NO: 151174 - DNA, 205 bp, Zea mays
  Clone ID: MRT4577_69392C.1
tcatttatcaaattagttaaagcattacatttcaatatttctatatcacatcttgggacaggtatattacctcttaccatctctcccctcccaatccatctctctactttaactatcaccttcactcaattcactacccaccatcttacatcttcctaactcttcaaaccctgacaataccctatctactcaccttatatcacat

SEQ ID NO: 151175 - DNA, 160 bp, Zea mays
  Clone ID: MRT4577_69393C.1
ccccccctcgagatttttttttttttttttttatgctcagatgttactatgttgtttgtggatatgtaaatgtgcatgtattttgatactggaggctttcttagcagtgcagtctgtttttgttaaggaacgcaggagggaagctatagagatcagcgat

SEQ ID NO: 151176 - DNA, 134 bp, Zea mays
  Clone ID: MRT4577_69394C.1
gagcccgccggcaggaaccgggccggaacccccgggaacgaccgcaccccagaagccaagggaagcgacgcaagaaaccgacgagccgcgaagacgacccgccccggcacgagccagaggaggcagacagagcg

SEQ ID NO: 151177 - DNA, 420 bp, Zea mays
  Clone ID: MRT4577_69395C.1
tcaaggtgccattacaaacggaactccggttccacccccgcaggtacgaacaaccccccacattggagggcctgcggggcgacgaaacccttggtgactcgccggcgacctctgcagcagcagcgatggtcccaggacggacgctgttgccggaaggctctcgttcgcgtccccactcaaggggcacgaaccaaacattaaagccaaagagccggaggtcggtccgcgggtagcgctgatgggctcgtcggtggagaagctttctccagctgccaccacatcagcaccgacggcggcgtccaccaacaccgcaccaaagcgcaccggcaggtcctcactcccgtcctcgccacgaaagcgaggacagaggacggaatgttgcatcctagctgggcagcaacagttcgccttccccggcat

SEQ ID NO: 151178 - DNA, 1071 bp, Zea mays
  Clone ID: MRT4577_69396C.1
ccggccggggaccttcgggagctgttccgcagccgtctccaacaggaccctctgcgggggccacggcgctgtctgcgcgcgcggggtgctcgctctcggttcccacagcagtaggaggagggcgaggcgcaggcacgcggtggtcttcgctaagaggaggcggcggcgtctcagcaaatggcagcggccgtggtggaagaccttcttttctgactggaacgaagacgacgagagcctggccgggtggagggaggaggacgagctcttggaggagattggcgccaaccaggagctgtcggacaatgaaaagttcaaggtgtggaggagtaaggccgaggcaatcgttgagatgcgcgaggcccagcaggatgcgatgaacgccgaggagcgatcgtgggaggattggatcagtggtggcggcacgtcagggactggaggaggtggggactggaatcgggaggacagcttgttggaccagataactgatgatccttcagagattgtgagggacaagagcattattcggattttcagagattccatcaatgaggattacgaggacatgctgttcgaagatcgagtgtttatgtatgcctcgacaaactcggccaaatttctagcattgttgattgtggttccatgggtgatagattttctagtgcatgactatgttatgatgccctttttagagaggtatgtccagaaggtgccacttgcagctgagctactcgatgtaaggcgcagccaaaagctgcagatggttaaagacctaaatattgaaaaggcaagatatcgtcttgaagtagagattggcaaatctcctccactttctgatgaggaggtctggcatgagttgcgggaaaaagcgatagagttgagggatgattggaggctagaaaatcgaaatgctttcgcaaatatatggtccgatactgtttatggaattgtgctatttcttcttatgtgcttcaaccagagcaaagttgcaatgctgaagttcacgggatataaggtgctaaataacatttcagacagtgggaaagcctttcttattattttagtatcggacat

SEQ ID NO: 151179 - DNA, 285 bp, Zea mays
  Clone ID: MRT4577_69397C.1
acgggaacattctccgcattagaagggacataccgttaccaaaacgatgtgcaggtcctaggcaaacataccggttgtggggtattcataaatcaaagggagccaccatacacaagccctttctttttaaaccggtacaagcaactacgggaatccggtcacccacaccctaaaaaaaaggcagctagagaaatactggcatgaccattaccgttaagaacaacggcgggggccgggtttgtacaaatagatgatgaaaccctattaaaaaagcacggtttttta

SEQ ID NO: 151180 - DNA, 222 bp, Zea mays
  Clone ID: MRT4577_69398C.1
cgtccgattccgtcgcccaccgtcgattagattcaaacacaccagcgaatcgcactacaacacctacacatggcgccagaattaccctcttgcgcttttgcctttatgagcgcacaagcgtcattattccacaggctacttgtcctatgccattattcacagtcgtccaccagtctaaatgggcttctaacatccaaccgtgcagcctacaagctcaactag

SEQ ID NO: 151181 - DNA, 691 bp, Zea mays
  Clone ID: MRT4577_69399C.1
ccggccgggctcgcccgcaagtatgcctcagggatcctctccgacgcctcgatcgtcaacatggacgaccgctccctcgccgccatgctcactatggtcaagggcatcggcgcctggagcgtccacatgttcatgatcttctccctcgcgcgccccgacgtgctcccctccgccgacctcggcgtgcgcaagggcgttcagatgctctacgccctccaagacgtgcctcgcccctcgcagatggacaggctgtgcgagcggtggcgcccctaccgctctgttggggcctggtacatgtggcggctcattgagtccaaggtgccccagccggcgccgcccatccctgccctcccttcgccggacggccagattatgctacagcagcagcagcagcaatctgtcatccaaatgatcattcccttttagatgctcccagggatggggtgaattcggtatcacttctgcccattagtcactccatcttagatcaatgtttactctgcgcatccgatagtcagttccgcactttgttgttctggaatggaacggcaggagggtggacatgaaatgagtattttcgtccaaacttattaagttttcaatttggtttgtgttgcgaaaaaaaaaaaaaaaaaagcggccatcatggttggctgttgtttacaatgtaaaaatcacctagtagaatttt

SEQ ID NO: 151182 - DNA, 828 bp, Zea mays
  Clone ID: MRT4577_6939C.1
atccagacactgcactttgcctgttgctgtacttcttgctagtagtagctcctgtgctgtgcttcaactgagagctgaggagtagtagtgaaggtgcactagcgtgtcctcttctagcggcatgcagatgaggaggactgctactgcttccttgccactggccaccgccgccgtcttcctgctcgtgtttctggcggcgacgaccgtggaggttgaagccatacggttgttggacgccgagagccgcgcggcagccaaccggcagcaagcgatcgtgccttctgcttctgttcttgtgacgactcagcagcagcagcagcagcacggacgacgacaaggcgagaccggcttgacgcgaacggtcgacgcgcccgccagcagggaggagaggtcgtcgtcgtcgtcgcctgcgcctgcggctgcggctgcgggcgagaacagcgaggcggggagaagcgtcgtcgctgtcgctgtcgctgggcagcaggatcaggccgtcgaggcagcggcgcacaggcttcctgaattccacgaggactactacggcgccagcgtccatgaaccgaggcaccactgacgaccgactgagcgatagatgcatcatgcagctagctgcagctgcaacgttttcccgatccccccctttgtgcaaagaggatgtagtaggctaggtactagcttataattagtcgtcagcatgcagctgtaggctgctcttcattatttaccctcagcctgagtaccgagctacttagctgaaaccgaaatgtaacagttttgatacgctaactcccacttggcaatgcaaagccaaagaaagcctcgggc

SEQ ID NO: 151183 - DNA, 555 bp, Zea mays
  unsure (1)..(555): unsure at all n locations
  Clone ID: MRT4577_693C.1
cccacgcgtccgcccagcgtccggaacaaactctccaagagatctcaagtctttctgatgcttactctcaaggcttctaaatagattgacacaagctctaaaaagtcgggagtagacccatctcaagctagtatatctgtagagatcagtatggacagaagagcaacagaacctaataatatacatgacaatttgaaggatcatgaatgtgaagatattatacatgtgaccaagaagcttcggggcgagagaagcaagatctccagctcaaactgaaattcaaactgtggcgacaagccgacaacagaccaggactttgtcgacgaaattgacaattgatgganatgctcttatttatattgaaatcacaattactgacctaagcctccattcaggtacaaaggaagctgctcaggggagggtagtcataaagctccccaattcagacattcctcctcatttgtaaatgcaattcagattgtaaaacagtgtacatgtactgctctctcaaaatttgtcaattcaacaaatatggtagtattgcaacgtttttgt

SEQ ID NO: 151184 - DNA, 317 bp, Zea mays
  Clone ID: MRT4577_69400C.1
aacccccacctttaccctcctttattggggggtccgggacccggacattttgataccggaaaacaaccccttgttaaaaaccggggagggggccccaggaatcaaggccccttggttaaccccaaacaagccccgtgcgtgggggggggcccccctggggaaaccccccaagctccgagccccggagggatgaaaagaccccggtttttttttggtccggggggttcccccgggggggggggccctcccgttggttctccccgccttttttttgggccccgggggtttcgccccacttggcgggggggggcgggggg

SEQ ID NO: 151185 - DNA, 151 bp, Zea mays
  Clone ID: MRT4577_69401C.1
ccttcgctttcgatcgaccagcgcgcggaggcgcgggagcagcctaggcgcggccatggcggtcggactagcgcctgcgcgggggacccggcccaacggcgcgaggcacgggtcgagggggctaatttgagattactgctcgaagaagaca

SEQ ID NO: 151186 - DNA, 461 bp, Zea mays
  unsure (1)..(461): unsure at all n locations
  Clone ID: MRT4577_69402C.1
acacaacggcggcgatgtcgttggcctcctcctccgccgccgccaacgccggtcgaaggaagcgggggtgcggaggagggcgtggagatcacttacaagatttttttttgggtgctttttcngccgcnggngatttttttggcgggcggggaacaaaacnagccctattccatcttcttttgggggggggggggggtacctccggggggaggggaacatcctggcgnncgangccagggatggcaagtgcgnggggacagtcgtgtgcatgatgggggagcttaggggtgcattcaggggctgcgtcgccttgctcgncgncctcacgccctacctggggagggggaacgcacccgggctagtttctttttttttttgggcaatgacggaatctgtttttggggcggggacacccgccgcccttgtttcttttttgggtgcccttgttctccatggccgcc

SEQ ID NO: 151187 - DNA, 234 bp, Zea mays
  Clone ID: MRT4577_69403C.1
gaatacccgacccgacccactcatacgactggataaccatatctacaatatttcctttaacactgtatcctttaatccaagggcgagatctaatacacacaaggcatcgcctcacttaacatagataaattcacttaatgcatctaatacttaaaacttgaatgtttatcatgaattactcaataaactattaaatgaaaaaaatatctattaaatttacaaataacacttata

SEQ ID NO: 151188 - DNA, 268 bp, Zea mays
  Clone ID: MRT4577_69404C.1
cgtcgcccataatgtcgcccaccaacgcagccgccgaattgggacatcaggggggcgcccgaggggcgtctctcttgtctatcgcgtgccagagcgcccgttgcgagcgccgtggccggcccggacgcggcttaagggggtctgcatgtccgaccacaactgcgcgcaagtgtgcttgcacgaggctacgccgcggcactgcgcggcatcatgcccaggcaagtgcataggaggctagtagctgcagctataccggctttattaaatt

SEQ ID NO: 151189 - DNA, 616 bp, Zea mays
  Clone ID: MRT4577_69405C.1
ccggccgggagtgggcccggggatatccatcccccacacgcagcgcctggggtcggcgacgaggagggtgcgctggtatcggctgaagacgtccttgacctccttcttggcggcctcgacgacgtaattctggtagtatgcgacgagccccttggcgacggcctggcggatggcgaagacctgcgacgtcttcccgccgccgcggacgcggacccgcatgtccacgtccttgaaccgcgaccgccccgccagacattgttgcagtgggggctgctgggttttggcggcggcggcgttagggtttgcgatgtggatttggcggcttgcgggagggggcggcggacaggggaaaaaattgtctgccgccggctgtaggccaacgtctatgctagactgtttcatatgtggcatttgtttttcagaaccattcagagtttgccggtctattcatgtgtatttcttcagttgtccatatactctgtactagtgattgtagtgatcagttgtgacttctattgtcatcaaaaccatggaaattgattattataggtctagttacatcggaaaaaaaaaaaaaaaaaatttgcggcctaattttttaaaaaaaaaaaaaaaa

SEQ ID NO: 151190 - DNA, 2243 bp, Zea mays
  unsure (1)..(2243): unsure at all n locations
  Clone ID: MRT4577_69406C.1
gggtagtatattaaggttttttttaaccccgctctgaaatgattattggacatcattgtttggcagcttagaatgctgcaaaaggaagaaccataaatagcatttccattcctttttgtgattctatcttagtaatccaaacatagttgtgctagcaaaacgaggctttagaaaccttcgttttttcacctatgctgcagcgtcggttcgtttgtaggcttcattacttgtcatcgttcttatcggttcctagaatctctcatcgtcaccgagcttcaagcacagagtcgttttccccgcatctgcttgtatttagctgggggggggggggggaaggcgcgaaccggcaccttctccttttttttaagctgaatccccatcttcgacttccgcacctcgcctgaatcgctcattcgctccccaccccaacgctccgtccccgcggcccaccaaccgccgccgccgccgccacagccatgcacggccgccggcacctcgcggcgtcccttacccgggccctgatccaggcgccatcccgctccatctcctccaccccgtctctcctccaaaccctcgacccctcagtgccgtcgcctcccgccgcgggagcagggcggctcgcggagctgcggcggcggctgcaggcggacgcgccgtcgctgggtgacttcacgtactcggtggaggtggggacgcggcagcgcccgctgcccaagcccaagtggatgaaggagaccgtgcctggcggcgccaagtacgcggccatcaaggccaagctgcgggagctgaagctgcacaccgtctgcgaggaggcccggtgccccaacctcggcgagtgctggtccggcggcgagactggcaccgccaccgccacaattatgatccttggggacacctgcacgcgcggatgcaggttctgtaacgtcaagacatctcgaacaccccctccaccggatcctgatgagccttccaatgttgctcaagctattgcctcatggggccttgaatatatagtaatcacgagtgttgaccgggatgatctacctgatcagggcagtggtcactttgctgaaacagtacagaagctaaaggctttgaagccagaaatgcttattgaagcgcttgtacctgatttccgtggagatccaagctgcgtagagaaggttgcgacttctggattgcatgtttttgcgcacaacattgaaactgtggaagagcttcaaaggaatgtcagagactaccgtgcaaatttcaagcaatctatagatgttctggaaatggcgaaagagtatgctcctcccggtacccttacaaagacatcgataatgctgggatgcggggagactccagatcaggttattaggaccatggaaaaagtgagggctgctgatgttgatgtcataacatttggccagtacatgaggccatcaaaacgtcacatgcctgtttctgagtatgttacgcctgaagcttttgagaagtatcgggcccttggtgtcgaaatggggttccgctacgttgcgtctgggccaatggtccggtcttcgtacaaggcaggtgaattctacatcaaggctatgatcgaagcggagcgagccaagggaaccgctgcagactcaagtgcataaccgagatagcacctcccggccccacccaccccttgacttggttgtgctgcaaataagctcctcactgcttttgtagtcagagagacatgtcgattttttacgtcataattgtaaccacacattcacttctattttttttggtcaattgaacagttccggcgccttcgtgccttggttcatcctccctctcaagtccaagaaaaaaaaagaggtatttgttgtagcagtatatttaggcgaccgcttcctttgtatctcgctcgtacagaacatgaatacagggcgtggggtttctgtgccgttggtagatccaatctgccgcagatctgaatcagatatccagatcacacacacacacaagaggcagacggagcttgcaggtagtgcggaaatcctggagcactccgcgcgtggctgggacggagtcaatttgaccatcttttgcgcggtcaaccgactcgacatgncaaaagcaggaacgctgctgccctgccactggctcgtacgtgaacgatctgggattatggctggatgatcgtccgtcagatggccgtggcccccagtgnaggagcagctgggcagtgttgcttgcaatatgctaggacatgtagtgat

SEQ ID NO: 151191 - DNA, 500 bp, Zea mays
  Clone ID: MRT4577_69407C.1
gccggccgggccggacctctctacaaaactctacccctcgcgccgtcgcctcctccgccccctcagttcctattcctcgcgtcatcgcgagcgcgctccccaacgccaccatgaacatgaacaccgcggacccctcctcgcgcctgccacaacacactgcacatgcgatcgacgacctcaacatgcccgccttttatgaccgcacgatatcccaaggacggtcaacagtcgatggctctaggccgactgagttccaaggctctatcgtctatcaatcatcgatggaatgcgatagtgatagagcaatcgattccctctgcaagaaagatgtttgacttctggctccgttcgccgtctgctccatagatgcactcgctgcttcctgggctagtccctgctgcaaaggagaacacaggagaaaccctgtccgagtctgcatcctgcatcaacacctatctgttatcacagttacccactgtacacaaccatgagaatgatct

SEQ ID NO: 151192 - DNA, 416 bp, Zea mays
  Clone ID: MRT4577_69408C.1
gaacaggtcgagcgcctggtagcgacctgctcgagcatcataatagagaggccttaggtgtaagtcgatattgatggctggccgcaccgagcatggcgacgccgatgatggaaatgaccgggaatttggtgggcctggtggtggtacatttaaaggcgatattggcgattatcagggaccagtagctgtaccacacgcgatatcccaggatacggagggttctggatatggatacatgggggacatagatgcgggaccggatgttgaaacctgtgaagaggtctttacaggagaccctgctcggattgacttaccagcgaatggtgttgagggcgtgatgaatgcacgtggaagccaccatcagctaagggagctcaaacgtcggatcgaacgcataaggagtgcatcccaaacat

SEQ ID NO: 151193 - DNA, 383 bp, Zea mays
  unsure (1)..(383): unsure at all n locations
  Clone ID: MRT4577_69409C.1
gtcgaggacctcaagcacgcgctcgctctctctcctgctgcaagcacacaatcgaggcccaggttatcactagtaagagctgcgggtgccgtagcccaagccgtgccatactgtactgagtcaccactgcagagcgcgcgaagccaacgagcgtaccggtgacggtatcaagtatcgccagacctgattcattctgcaagacttcgtcaccgactacaactactgaaatatgatacaacgcataacggtacgtactgcagatggacaatggatgttatctaattactcacttattcgttcaacggcgnccttgactatgccgatgatatatggatgtgatgcgaacgtgaacctaccgatatgagcggctggattacatatgc

SEQ ID NO: 151194 - DNA, 643 bp, Zea mays
  Clone ID: MRT4577_6940C.1
aactgagaggccaagtatgattggcattacacaggctggttcccatcctatcacatctgtatcctggcttcctacactgcggctgcttgttactatttcaaaggatggagcactccaagtgtggaagacacgagttataataaaccctaacagacaaccaatggaaactcatttctttgagcgtgcagctgttgaaacaatggatatcacaaaaatactaactcttcaaggtggagaagcagtgtacccattaccccgaattaaaaatttggcagtgcatcccaaattcaatttggctgcagtaatttttgcggatatgtctgggacagaagctgcaaagaacaaagctgcatacacaagagaagggaggagacaactttttgctcttcttcagggagctaggggatcaactgctgctgttttaaaggagaaactattagccttgggatcatctggaatattagcagagcatcaacttcaggcacaactacaagagcagcacttgaagggccagagccagctgactatttcagatgttgcaaggaaggcattccttcacagtcatttcatggaagggcatgctcaaagcggtccaatccctcgcctacctcttgttacaatttcagattctagcaaccttttg

SEQ ID NO: 151195 - DNA, 765 bp, Zea mays
  Clone ID: MRT4577_69410C.1
gccggccgggctgggatcaccgattcaccatcaacaacatctccagcaacaaacctgcagcagggatgaggactagtcgcctggtgttcctatttgccatcgtccccctcctgctactgctagcatcttcagatttgacgccgacgaaggcgtcggccgccggatgcccgcatccccgttcgatgatcctgtacccagacctgccctgtgatcccgacgtgtgcgccaagagctgcgccaagggactgaacaacggcaacggcacctgcatgaggccgcttggatgtgattgcgagtactgcgtgccagctgcaaccgtcgcaaaacgcccggctgctgtctctacgcgtttgacgacgacgacgacgacaatggcgtcggccggatgcccgcacccccgttcgacgatcctgtacccagacctgccatgcgatcccgacgtgtgtgccaagagttgcgccaagggattgaacaacggcaacggcacctgcatgaggccgattggatgtgattgcgtgttctgcgtgccagaaaccgtcgcaaaacgcccggctgtctctacgcgtttgacgacgacgacgacgacaatggcgtcggccggatgcccgcacccccgttcgacgatcctgtacccagacctgccatgcgatcccgacgtgtgtgccaagagttgcgccaagggattgaacaacggcaacggcacctgcgtgaggccgattggatgtgattgggtgttctgcgtgccaaaaaccgccccaaaacgcc

SEQ ID NO: 151196 - DNA, 452 bp, Zea mays
  Clone ID: MRT4577_69411C.1
aaaaaaaaacaaacccggacccccttaaattatggtcccgggggaacgacccgaaaagagcatccatcttctggcggggcttataatccaaacataggagctagctacaagctaattcctaaggccctaggcttttcgcagttactgggggggaatcgtccccccgccgaaaatccaggggcattcggcaaccccggtgaggggggccaggttgcactcggcctccgggacaagggggggggaaaatcccctttgcacctcccgggggcagcccggcaggtccttaagggggccctcaagttgcgcgtccgggcccggggggatccccccccccatgaggatgctaagccccgggcaccggaagaaccccgggatgtcccccagctcccggaagaatttccttttaagctccggccacgggaggggcggcccaatgccaaaggtccgggtgg

SEQ ID NO: 151197 - DNA, 262 bp, Zea mays
  Clone ID: MRT4577_69412C.1
ccctcgggcctcgcgcgggcagcgaccccagtcagtcgggactacccgctgagtttaagcatataaataagcggaggagaagaaaaaaatcgacctagctaggcacaagagcgctagacgccgcagcgcagcacgcaccacccaccgagcggcggcggaggcagggcaatccgcagggagcagaggccgcgcgcgcaggcatgggcgcgccggtgcacggcgccctcgccggggggggggtgctcctggtgggggcaggggc

SEQ ID NO: 151198 - DNA, 1573 bp, Zea mays
  Clone ID: MRT4577_69413C.1
acgtaagctcggaattcggctcgagcgcctttgttgatggatctcaggcgtgtttcttgatggatctcaggcatttgatgagagaaactggggttgtcagtgtcctgccgtgcacgatgttgatgtcgtcaatggttgagatccatcaagaaacacgcctttgttgcatctccctatcctgtcatcataacacttgaagaccacctcccctctcaactccaggagaaagttgccaagatggttgttgaagtatttggcaacatactgtactacccgccagacgacacccatgagctcaaagaattaccatcacctgaacaactcaaaggacgtgtcctcctctcaacaaagccccccaaggagtacctcgaaaccaagcttagtgactccacgaaggagggtgatgctgacctccatcttggcaaaggaaccggtgatgacgctgtgtggggaaaagaagtaccggattttcggaccgagatccagtctgctgaaaaggacgacgagaacgacgacgttgatgatgaggaagaacaaaaactgcagccccatatagctccacagtataaacaccttattactatcagagcagggaagccaaaagactctctagctgatgccttgaagagtgatccagaaaaagttcggcgtctcagtttgagcgagcaacaacttgccaaagcggcaaaggatcatgccacagaaattgtgaggttcacacagagaaacatactgaggatataccccaagggcactcgagtcacttcatcgaactacaatccgttcgttggttgggtgcatggtgctcaaatggtggcattcaatatgcagggatacgggagagcgctgtggctaatgcacggattttacaaagcgaatggcgggtgcggttatgtgaagaaaccagatttcttgatgcagacagaaccacaagtcttcgacccaagagaaccccagcctgtgaagaaaacgttgaaggtgaaggtgtacatgggcgatgggtggcgaatggacttcaagcagacacacttcgatcagtactctcctccagatttctacacacgggttgggattgctggagtcccagcagactcggtgatgaagaagaccaacgcgatcgaggacaactggaccccggtgtgggagaaggagttcagcttcccgctgactgtcccggagctcgctctgctgcgggtggaggtgcacgagtacgacatgtcggagaaggacgacttcggcagcactgtctggccaccggtgtcggagctgcggcccgggatccgggcggtagcgctcttcgaccgcaaagggatgaagtacaaccatgtgaagcttctcatgcgtttcgagtttgcctagcctgaccctgaccatgcatgccccccccccccccccctcctgttgtgtgaatggatattgcagtctcagtgtgcttcctttgtacatagattgcttggcttggatgatatgtgcaacagacaattccttcagttgttatgatcaaataataaagaggcagcgtccttatgaacaaaaaaaaaaaaaaaaagggcggccaccgactagtgagctc

SEQ ID NO: 151199 - DNA, 227 bp, Zea mays
  Clone ID: MRT4577_69414C.1
cgctcctgttttgttcgcccgccatgatgtaaatgatcatcacccaactggaacccctgttatctcgttacatgcttaggcctctgatcgtttcgtagttgctgtgatggagctctgacaagtctgagcacgaaagtgggtagaacttcccactgtcgaagcggaattgcttctggtgaaatctggacaagttttgccgaatacagattcatctgccgattgatcgt

SEQ ID NO: 151200 - DNA, 133 bp, Zea mays
  Clone ID: MRT4577_69415C.1
gatgccccccggcggcgccggtagcgcttcttcatggactcgaccttgttcttgcactggttggaggtcttggcgctgctacagatgcctccagaggccttcccttcgggagctctatagtatccatgcttac

SEQ ID NO: 151201 - DNA, 272 bp, Zea mays
  Clone ID: MRT4577_69416C.1
gccagccgcatgtcgagtcggtacacgcgcccgccacacttatcgcagcgagcgggagatctcatacgacagtgaatagtggatggactcatgggccgctctcgatgctacaggctcatctacccctgcctctgaaccaatctttctgctattgctgctgctgctgctactgctgtggctgcgaatggggaacaggaaggctacatcaacgctgacatagctaacgttaatctcctggcagctgatataccatatgacagataccacatgat

SEQ ID NO: 151202 - DNA, 388 bp, Zea mays
  Clone ID: MRT4577_69417C.1
cgatggtgtccggctgaaactttggaaactttacacatccattgagttctcgatctgggagcagtaaatttatcttttttgaagtagagattgtacatggcattcttgttttatctattttgtttcgattaaccttgtttgtcttaaactgcttacattccatatataggttactgcctccattctacagggtattgctagtatgatgattgaaatacacaatttattgatattcagacttaatatattcttgtgagcctttccagccataactgttgtacatggttttccttcttttgtttggccataaccagtgtgtgctaatattgtatattggtgtcatgctttcaagtttcaagaatttattaagatttttgtttctaaaacc

SEQ ID NO: 151203 - DNA, 806 bp, Zea mays
  unsure (1)..(806): unsure at all n locations
  Clone ID: MRT4577_69418C.1
ttccgcattcctctctgtcacctccgcggcgccgccagcccgccatacataacttcggcttctatcccttcgtaaacccttctctcttcttcccgcggcctgctcgttctatctgtccagcagacttgaggttccgagcggccggaaaccagcggcaaccgtcggcatggcgctcgtattgcattctggggctggaaacaaaaatgccttcaaggcacttattgctgcagaatacagtggggtcaaggttgagttgaccaaggattttgagatgggtgtctcgaacaagacccctgagtttctaaagttgaacccccttgggaaggttcctgttctggagactcctgatggccctgtttttgagagtaatgctattgcgcgctatgttgctcgcttgaaggatgacaaccctcttttcgggtcttcccgtattgaacaagcccacgttgagcagtggatggactttgctgcaacagaagttgatcctggtgttggatggtacttgtatccaaggcttgggtacatcccttatgctcacacgactgaggaaacagctattgcttcattgaagagatggtccttgatgactggaagaggctatactcaaacacaaagaccaacttccgggaggttgccatcaaaggtttctgggacatgtatgacccagagggctactctctgtggttctgtgactacaagtacaatgacgagaacaccgtctnctttgtgaccctgaacaaggttggtggattcctgcagcggatggacctgtgccgcaagtacgcctttggcagatgctcgtggta

SEQ ID NO: 151204 - DNA, 134 bp, Zea mays
  unsure (1)..(134): unsure at all n locations
  Clone ID: MRT4577_69419C.1
ccgtcgctctcaccctagagaggagggctcncntttgctgcggtgntggcatgctctctgtctacgagtggatgctcgtggagcgtatgttgagttgtgagagatggggtgggcgtgatcttgannncctgann

SEQ ID NO: 151205 - DNA, 355 bp, Zea mays
  Clone ID: MRT4577_6941C.1
ctctttattttctctctcccttttttttttttttttttggttctttttttgggtcatttcccgacctccccgggggggaacaacacaaattccgcaacagtttattgccccctctttattccccctctacaaaaggccaaaccgccaggggggttcaagcaacccggcccaaaaagctcttgcaaacaatcccggaaggggaaaaaaaacaaaaaactgaaattaaaccccagcccccagacgccccaataccccaaaaattgcccggcccccgagacatacacaaaaaacctggcctcatcaccaaaaaaaaatgggccccgccccccccaaaaaccagggaaaaggcccaaaa

SEQ ID NO: 151206 - DNA, 482 bp, Zea mays
  Clone ID: MRT4577_69420C.1
aaagggcaaactcttccataggcaaattcaagggctaaacagttctgtctccaggcaagcacactcacttgaagcatttcgcgtcaagcaaggcctcgccctcaaagggctcctggtcctcaatcatcgcattgacacgctccttctgggcctcatcagagatgtccaccttggtccactcgtagagctccatgtcatagacctcgtccattacaaacttgggaacatcctggccacggaagagccaaaggcccttcagcttgaaggggggctcagagcctatcacgagcatcttcccaaaggcgtacttgcggcacaggtccatccgctttgatggcaacctcccggaagttagtctttgtgtttgagtatagcctcttccagtcatcaaggaccatcttgcttggtggcagcaagtcaagaggattctttggctttggctttggtgcttcctcttctgctggtctcgtgccgaattcgat

SEQ ID NO: 151207 - DNA, 1486 bp, Zea mays
  Clone ID: MRT4577_69421C.1
ttctctcttcttcccgcggcctgctcgttctatctgtccagcagacttgaggttccgagcggccggaaaccagcggcaaccgtcggcatggcgctcgtattgcattctggggctggaaacaaaaatgccttcaaggcacttattgctgcagaatacagtggggtcaaggttgagttgaccaaggattttgaaatgggtgtctcgaacgagacccctgagtttctaaagatgaacccccttgggaaggttcctgttctggagactcctgatggccctgtttttgagagtaatgctattgcgcgctatgttgctcgcttgaaggatgacaaccctcttttcgggtcttcccgtattgaacaagcccacgttgagcagtggatggactttgctgcaacagaagttgatcctggtgttggatggtacttgtatccaaggcttgggtacatcccttatgctcacacgactgaggaaacagctattgcttcattgaagagatcccttggtgctctgaacacacatcttgccttgaacacataccttgttggacattctgttactctagctgacattgtattgacatgcaacctctaccatggcaattgcacggcatcttgaccaaggagcttcacttctgatttccctcatgtcgagaggtatttctggaccatggttaaccagcctaacttcaagaaggtcattggtgaggtcaagcaggcagagtctgtacctcctgttcagaaaaaggccgctcctcctaaggagcctaaggcaaaggatgtcaagaaagaagccccaaaggaggcccccaagccaaaggtggttgaggcaccagcagaagaggaagcaccaaagccaaagccaaagaatcctcttgacttgctgccaccaagcaagatggtccttgatgactggaagaggctatactcaaacacaaagaccaacttccgggaggttgccatcaaaggtttctgggacatgtacgacccagagggctactctctgtggttctgtgactacaagtacaacgatgagaacacggtgtcctttgtgaccctgaacaaggttggtgggttcctgcagcggatggacctggctcgcaagtatgcctttgggaagatgctcgtgataggctctgaggcacccttcaagttgaagggcctttggctcttccgtggccaggaggttcccaagtttgtaatggatgaggtctatgacatggagctctacgagtggaccaaggtggacatctctgatgaggcccagaaggagcgtgtcaatgctatgattgaggaccaggagccctttgagggtgaggccttgcttgacgcgaaatgcttcaagtgagtgtgcttgcctggagccagaactgtttaggccttgaattggatgtttatggaggagtttgcccttttacttgtgtctatgttgatctggtataccttgctgtgaactggttaaagtttgtgttggtttgagaatttttgtc

SEQ ID NO: 151208 - DNA, 492 bp, Zea mays
  Clone ID: MRT4577_69422C.1
tgctcggaattcggctcgagctctcaatggcaccttcttgccgagctatactagtactggccgctctacccctctgcctgtcccttggggccgcctgcttgcattccgacgagcttattcttaacgatgacgaagagttatagggcgtattagtccgcccatacccccgctccttaccggacggcccggtggtatcatgctcccgtactatatcacatggactcgccattccacctgtcaggcgaggccatcactgtgcagttcacgctcacacacgaccttgtcaacagcaatggcgtgaacactttggaaccttgttggacagcctgaagacccagggccacgggacgcataccctcactaatactcgctttacaaggtatgatgatactgaggatgataaatcaccgtacaactaagtgctgcatgaagacggcttttatacaattaggctgccatataatgtgttggacactacaaataaacatcatg

SEQ ID NO: 151209 - DNA, 2016 bp, Zea mays
  unsure (1)..(2016): unsure at all n locations
  Clone ID: MRT4577_69423C.1
cacgaggcttctatcccttcgtaaacccctctcttcttcccgcggtctgctcgttcgatctgtgcagcagatctgaggtcccgagcgaccgtgaagcagcggcaaccgtcggcatggcgctcgtattgcatagtctgggctggaaaaccaagaatgcccttcaacttattgctgcagaatacagtgggatcaaggttgagttgaccaaggattttgagatnnnnnnagatgggtgtctcgaacaagacccctgagtttctaaagatgaannnnnttgggaaggtcctgttctggagactcctgatggccctgttttgagagtaatgctatcgcgctatgttgctcgcttgaaggatgacaaccctctgtttgggtcttcccgtattgaacaagcccacgttgagcaatggatggattttgccgcaacagaagttgatcctggtgttgcatggtacttgtatccaaggcttgggtacctcccttatgttagcacaactgaggaaacagctatttcttcattgaagaggtcgcttggtgctctgaacacacaccttgcctcaaacacataccttgttgggcatgctgttactctagctgacattgtaatgacatgcaacctctaccatggaattgcacggatcttgaccaagaccttcacgtctgatttccctcatgtcgagaggtatttctggaccatggttaaccagcctaacttcaagaaggtcattggtgaggtcaagcaggcagagtctgcacctcttattccgaaaaaggctgctccttctaaggagccaaaggcaaaggatgtcaagaaggaggctccaaaggaggcccccaagccaaaggtggttgaggcaccagcagaagaggaagcaccaaagccaaagccaaagaatcctcttgacttgctgccaccaagcaagatggtccttgatgactggaagaggctatactcaaacacaaagaccaacttccgagaggttgccatcaaaggtttctgggacatgtacgacccagagggctactctttgtggttctgtgactacaagtacaatgatgagaacaccgtctcctttgtgaccctgaacaaggttggtggattcctgcagcggatggacctgtgccgcaagtacgcctttgggaagatgctcgtgataggctctgagccacccttcaagctgaagggcctttggctcttccgtggccaggatgttcccaagtttgtaatggacgaggtctatgacatggagctctacgagtggaccaaggtggacatctctgatgaggcccagaaggagcgtgtcaatgcgatgattgaggaccaggagccctttgagggcgaggccttgcttgacgcgaaatgcttcaagtgagtgtgcttgcctggagacagaactgtttagcccttgaatttgcctatggaagagtttgcccttttactagtgtcgatgttgatctggtataccttgctatgaactggttaaagtttgtgctggtttgggattttttgtgcatcttgtgatacctcaagtcttcatcatttaaatgtttagccgtaataaaaaaaaaaaaaaaaaaaaaaaaaaaaaaaaaaaaaaaaaaaaaaaaaaaaaaaaaaaaaaaaaaaaaaaaaaaaaaaaaaaaaaaaaaaaaaaaaaaaaaaaccccttccagggagggggtttccattttcccccccaccgggggaaccccaaaaaaaaaaaaaccccccccccaggggggggggaaaaactaaaattcccccccgtttttgaaattgggttccccccttccaaaaaaattggggagggaaaaattcccccccccccaaaaaacaaggaaaaggggaaggcccctttttttggcatccccggggggccccccaaaattcacccttatggcccccaccggggaacccccggttcggggggcgggtttttttttttttggccccacgggacaaaggcacccccccttggggatcggcccccccaattgaaaaaaaaaggggggggg

SEQ ID NO: 151210 - DNA, 254 bp, Zea mays
  Clone ID: MRT4577_69424C.1
gaaaggctgacaacaacatatgacgacacagattccatgcaagggacatttaacactaatgcacagatgcacgtaggaagaaataatcagcaccttataaacggatgcaacgggaacccagcaacgttacctccgactgaactatcagtactggaagactccacgtttaaggtcgttcgcttgtcgcctgaagagagaaaggaaaagatccataggttcataaagaaactgaacgagagaaatttcctccaaaa

SEQ ID NO: 151211 - DNA, 375 bp, Zea mays
  unsure (1)..(375): unsure at all n locations
  Clone ID: MRT4577_69425C.1
ggccatggccgccgccgagccgccgtcgccctccgggatgggcttcttcggcatgctcaggttccgccgcagcgccaccgccgtcgcctccttcgacccggcgcaggacgatgagctcctcgcgctcgacgccctccagtcccacgttgccgcccgcctccaggcgctctccgcgcacgccacccctggccctggctccccgtcgctcctcaccctccctttcctctcggagctcctcgacgccgtcgtctcctctgacgacgccttccgcggagtgctcgcgctggccccagtcgccgncgcgatcgccaggccccccgccgaccgcctcgccggcgacctcctcgaccgcgccgtcaagacgctcgacgttct

SEQ ID NO: 151212 - DNA, 249 bp, Zea mays
  Clone ID: MRT4577_69426C.1
ggggggggtttagaaacccaaaaccaaaccggggcaattttaatcaaccacaaaacggtttgaaacggggtccttggggggggggttggtttcgggcttaaacgggaaaggggccacccagggcctttgggggccatgaaacttaatggcgggcgaaaaaaaaagggacggggcaatgggggcagggcttaaatggggaggaaattgaattttaaggaagtgtaataatgggcgggggggggggatgga

SEQ ID NO: 151213 - DNA, 694 bp, Zea mays
  Clone ID: MRT4577_69427C.1
ccggccgggtccgctgcgccgctcatcacataagtccgcccccctctccctcagcaaacccctctcttcttcccgtggcctgctcgttcgatctgagcagcacatctgaggtctcgagcgacgcgcgaagcagtttctatcgttcgttatggcgctcgcattgcatagaggggctggaaacaagaatgccttcgaagcacttattgctgcacaatacagagcgatacaaggctgagttgaccaacgattttgagatgggcgtctccaacaagacccctgagtttcttaagatgaacccccttgggaaggctcctgctctggagactcctgatgcccctgtttttgagagtaatgctatcgcacgctatgttgctcgcttgaaagatgacaaccctctttttgcgtcttcccggattgaacaagcccacgctgagcaatggatggattttgccgcaacagaagctgatcctggtgttgcatggtacttgtatccaagggttgcgtacctcccttatgctaccacaactgaggaaacagctatttcttcattgaagaggtcgcttggtgctctgaacacacaccttgcctcaaacacatactttgctgggcatgctgctactctagctgaccttgtattgacatgccacctctaccatggaattgcacgcatcttgaccaagaccttcacgtctga

SEQ ID NO: 151214 - DNA, 245 bp, Zea mays
  Clone ID: MRT4577_69428C.1
acccacgcgtccggccaagacgtgcaggaacggagtcagcgattgcgaggcgcgagagccagcaccgcgacaggacgacctcccagggcgccacggagagcatggacccaggcgagccacgccgcggggaacaagccgagggcgtccgacgggagcagaaggcgacatcgcgcaacaagcagggcgaggagcaaagcgagagcacaaacgagcgcaagcccaagagccacgcgaggccgggccca

SEQ ID NO: 151215 - DNA, 412 bp, Zea mays
  Clone ID: MRT4577_69429C.1
catattgtaatggatgaggtctatgacatggagctctacgagtggaccaaggtggacatctctgatgaggcccagaaggagcgtgtcaatgccatgatcgaggaccaggaaccctttgagggcgaggccttgcttgacgcgaaatgcttcaagtgagtgctgtatccagagctgtttagccctctaattggatgtctatgttgatctggtatatcttgctatgaactggttaaagtttgtgctggtttgagaatttttgtttatcttgtcatcatttaagtgtttcgctgtaacaattttggtcatgtttttgaaagcctgtttgtatccgcgttgtagttggggctatttatgcagactattcgcgctaagtagattcaagtggtattattctttatgattttaaccttcc

SEQ ID NO: 151216 - DNA, 390 bp, Zea mays
  Clone ID: MRT4577_6942C.1
gagatactagccatcatgcgcctgtcgtccctcctcctcgccgaggccggcctgtgggctctctcctttgttcagcaagtgcctcactttttctgtagcactctcattccctactactacatacagtcattcccgctcgcggagctaatcatatttaagttgatacatactaatcatatggcaaaccctactactgtcatgtacattctgcacatattcttccactactgcttattcaccgggtgcgactcatctgtgctgatagcgtctcacccatttacataagtcggagcacgactcgttaatcaaccactctcttccctttgactccttatacgccttattgcgcaccaagttgacccttaatcttataattgcccctatttattt

SEQ ID NO: 151217 - DNA, 2688 bp, Zea mays
  Clone ID: MRT4577_69430C.1
gggaaccgcaaccctagatttcgcttcctctctgtcccctccgctgcgccgccataacataaatccgccgcccctctccctcagtaaacccctctcttcttcccgcggtctgctcgttcgatctgtgcagcagatctgaggtcccgggcgaccgtgaagcagcttcaatcgtcggcatggcgctcgtattgcatagtggggctggaaacaagaatgccttcaaagcacttattgctgcagaatacagtgggatcaaggttgagttaaccaaggattttgtgatgggtgtctccaacaagacccctgagtttcttaagatgaacccccttgggaaggttcctgttctggagactcctgatggccctgtttttgagagtaatgctatcgcacgctatgttgctcgcttgaaggatgacaaccctctgtttgggtcttcccgtattgaacaagcccacgttgagcaatggatggattttgccgcaacagaagttgatcctggtgttgcatggtacttgtatccaaggcttgggtacctcccttatgtcagcacaactgaggaaacagctatttcttcattgaagaggtcgcttggtgctctgaacacacaccttgcctcaaacacataccttgttgggcatgctgttactctagctgacattgtattgacatgcaacctctaccatggaattgcacggatcttgaccaagaccttcacgtctgatttccctcatgtcgagaggtatttctggacaatggttaaccagcctaacttcaagaaggtcattggtgaggtcaagcaggcagagtctgcacctcctattccgaaaaaggctgctccttctaaggagccaaaggcaaaggatgtcaagaaggaggctccaaaggaggcccccaagccaaaggtggttgaggcaccagcagaagaggaagcaccaaagccaaagccaaagaatcctcttgacttgctgccaccaagcaagatggtccttgatgactggaagaggctatactcaaacacaaagaccaacttccgggaggttgccatcaaaggtttctgggacatgtacgacccagagggctactctttgtggttctgtgactacaagtacaatgatgagaacaccgtctcctttgtgaccctgaacaaggttggtggattcctgcagcggatggacctgtgccgcaagtacgcctttgggaagatgctcgtgataggctctgagccacccttcaagctgaagggccattgacacgctccttctgggcctcatcagagatgtccaccttggtccactcgtagagctccatgtcatagacctcgtccattacaaacttgggaacatcctggccacggaagagccaaaggcccttcagcttgaagggtggctcagagcctatcacgagcatcttcccaaaggcgtacttgcggcacaggtccatccgctgcaggaatccaccaaccttgttcagggtcacaaaggagacggtgttctcatcattgtacttgtagtcacagaaccacaaagagtagccctctgggtcgtacatgtcccagaaacctttgatggcaacctcccggaagttagtctttgtgtttgagtatagcctcttccagtcatcaaggaccatcttgcttggtggcagcaagtcaagaggattctttggctttggctttggtgcttcctcttctgctggtgcctcaaccacctttggcttgggggcctcctttggagcctccttcttgacatcctttgcctttggctccttagaaggagcagcctttttcggaataggaggtgcagactctgcctgcttgacctcaccaatgaccttcttgaagttaggctggttaaccatggtccagaaatacctctcgacatgagggaaatcagacgtgaaggtcttggtcaagatccgtgcaattccatggtagaggttgcatgtcattacaatgtcagctagagtaacagcatgcccaacaaggtatgtgtttgaagcaaggtgtgtgttcagagcaccaagcgacctcttcaatgaagaaatagctgtttcctcagttgtgctaacataagggaggtacccaagccttggatacaagtaccatgcaacaccaggatcaacttctgttgcggcaaaatccatccattgctcaacgtgggcttgttcaatacgggaagacccaaaaagagggttgtcatccttcaagcgagcaacatagcgtgcgatagcattactctcaaaaacagggccatcaggagtctccagaacaggaaccttcccaagggggttcatcttaagaaactcaggggtcttgttggagacacccatctcaaaatccttggtcaactcaaccttgatcccactgtattctgcagcaataagtgctttgaaggcattcttgtttccagccccactatgcaatacgagcgccatgccgacgattgaagctgcttcacggtcgcccgggacctcagatctgctgcacagatcgaacgagcagaccgcgggaagaagagaggggtttactgagggagaggggcggcggatttatgttatggcggcgcagcggaggggacagagaggaagcgaaatctagggttgcggttcggatggcaagggttggacggactggattgatcgcaagatgacccggattcgtggggcctcggtggactggaccccggccgg

SEQ ID NO: 151218 - DNA, 2848 bp, Zea mays
  Clone ID: MRT4577_69431C.1
ccctcgaggccttccgggacccggctcatcttgcgcttaatccagtccgttcaattcttgacatccgaacaccccgccgacgcagccctagattccgcattcctctctgtcacctccgcggcgccgccagcccgccatcacataacttcggcttctatcccttcgtaaacccttctctcttcttcccgcggcctgctcgttctatctgtccagcagacttgaggttccgagcggccggaaaccagcggcaaccgtcggcatggcgctcgtattgcattctggggctggaaacaaaaatgccttcaaggcacttattgctgcagaatacagtggggtcaaggttgagttgaccaaggattttgagatgggtgtctccaacaagacccctgagtttctaaagatgaacccccttgggaaggttcctgttctggagactcctgatggccctgtttttgagagtaatgctattgcgcgctatgttgctcgcttgaaggatgacaaccctcttttaaaaaaaaaaacgggtcttcccgtattgaacaagcccacgttgagcagtggatggactttgctgcaacagaagttgatcctggtgttggatggtacttgtatccaaggcttgggtacatcccttatgctcacacgactgaggaaacagctattgcttcattgaagagatcccttggtgctctgaacacacatcttgccttgaacacataccttgttggacattctgttactctagctgacattgtattgacatgcaacctctaccatggaattgcacggatcttgaccaaaagcttcacttctgatttccctcatgttgagaggtatttctggaccatggttaaccaacctaatttcaagaaggtcattggtgaggtcaagcaggcagagtctgtacctcctgttcttaaaaagggtgttcctcctaaggagtcaaaggcaaaggatgtgaagaaagaaactccaaaggaggcccccaagccaaaggtggttgaggtaccagcagaagaggaagcaccaaagccaaagccaaagaatcctcttgacttgctgccaccaagcaagatggtccttgatgactggaagaggctatactcaaacacaaagaccaacttccgggaggttgccatcaaaggtttctgggacatgtatgacccagagggctactctctgtggttctgtgactacaagtacaatgacgagaacaccgtctcctttgtgaccctgaacaaggttggtggattcctgcagcggatggacctgtgccgcaagtacgcctttggcaagatgctcgtggtaggttctgagccacccttcaagctgaagggcctttggctcttccgtggccaggaggttcccaagtttgtaatggatgaggtctatgacatggagctctacgagtggaccaaggtcgacatctctgatgaggcccagaaggagcgtgtcaatgccatgatcgaggaccaggaacccttcgagggcgaggccttgcttgacgcgaaatgcttcaagtgagtgtgctgtatccagagctgtttagccctctaattggatgtctatgttgatctggtatatcttgctatgaactggttaaagtttgtgctggtttgagaatttttgtttaccttgtcatcatttaagtgtttcgccgtaacaattttggtcatgtttttgaatgcctgtttgtattcgcgtcgtagttggggctatttatgcagactatccgatttaagtagattcaagtggcattattctctcggacgcgtgggcgccgccgacgtccaccttggcaccaagaactgcgatttccagatggagcgctatgcctttaagcgccgcaccgacggcatctacatcatcaaccttggcaagacatgggagaaactgcagcttgcagcgagggttatcgttgccatcgagaacccgcaggacatcatcgtccagtccgcccgcccctatggccagcgtgctgtcctcaagttcgctcagtacactggcgctcatgccatcgctgggaggcacacccctggtaccttcactaaccagctccagacctccttcagcgagcctcggctgctcatccttaccgacccaaggactgaccatcagccaattaaggagtctgctctggggaacatccccaccattgccttctgtgatactgactctcccatgcggtatgtcgatatcggcatcccagcgaacaacaaggggaggaacagcattggatgcctgttctggcttttggccaggatggttctgcagatgaggggcactatcctccctgggcacaagtgggaggtcatggtggatttgttcttctacagggacccagaggaagcaaaggagcaggaggaggaagctgctgttgcccctgagtttgccgcaatcactgattaccaaggagctgatcagtggggtggtgaccagtggacctctgatgtgactgcgccgcctgttgctcctactggtgctgattggggtgctgctccagctccggttcctactggtgatggctgggatcaagctggggcccctgcacctgtggtggacggcactgtacctcctgtggttgctcctactggttgggaccaagcagccccgccaccgactgcccaaggctgggagtaggcgttgtccactctgagacctgtcttctgcggctgaagttcagtatttttctgtggtctgaatgtccaaaatctggtggcatcttctatagctctgctttgctttgaacacttatgttttagggctttctagctgaacccgttgtccaatattgctgacattgaatttttttggttaatcttaaaactggaaatgatgcttgcggttc

SEQ ID NO: 151219 - DNA, 1848 bp, Zea mays
  Clone ID: MRT4577_69432C.1
gggtccgttgtaaacaaaaaaaaaaaaaaagaaaaacgaatttgggtcatcttgcgatcaatccagtccgtccaacccttgccatccgaaccgcaaccctagaataaataaaaatattcggctcctctctgtcccctccgctgcgccgccatcacataagtccgccgcccctctccctcagtaaacccccctctcttcttcccgcggtctgctcgttcgatctgtgcagcagatctgaggtctcgagcgaccgtgaagcagcttcaatcgtcggcatggcgctcgtattgcatagtggggctggaaacaagaatgccttcaaagcacttattgctgcagaatacagtgggatcaaggttgagttgaccaaggattttgagatgggtgtctccaacaagacccctgagtttcttaagatgaacccccttgggaaggttcctgttctggagactcctgatggccctgtttttgagagtaatgctatcgcacgctatgttgctcgcttgaaggatgacaaccctctttttgggtcttcccgtattgaacaagcccacgttgagcaatggatggattttgccgcaacagaagttgatcctggtgttgcatggtacttgtatccaaggcttgggtacctcccttatgttagcacaactgaggaaacagctatttcttcattgaagaggtcgcttggtgctctgaacacacaccttgcttcaaacacataccttgttgggcatgctgttactctagctgacattgtaatgacatgcaacctctaccatggaattgcacggatcttgaccaagaccttcacgtctgatttccctcatgtcgagaggtatttctggaccatggttaaccagcctaacttcaagaaggtcattggtgaggtcaagcaggcagagtctgcacctcctattccgaaaaaggctgctccttctaaggagccaaaggcaaaggatgtcaagaaggaggctccaaaggaggcccccaagccaaaggtggttgaggcaccagcagaagaggaagcaccaaagccaaagccaaagaatcctcttgacttgctgccaccaagcaagatggtccttgatgactggaagaggctatactcaaacacaaagactaacttccgggaggttgccatcaaaggtttctgggacatgtacgacccagagggctactctttgtggttctgtgactacaagtacaatgatgagaacaccgtctcctttgtgaccctgaacaaggttggtggattcctgcagcggatggacctgtgccgcaagtacgcctttgggaagatgctcgtgataggctctgagccacccttcaagctgaagggcctttggctcttccgtggccaggatgttcccaagtttgtaatggacgaggtctatgacatggagctctacgagtggaccaaggtggacatctctgatgaggcccagaaggagcgtgtcaatgcgatgattgaggaccaggagccctttgagggcgaggccttgcttgacgcgaaatgcttcaagtgagtgtgcttgcctggagacagaactgtttagcccttgaatttgcctatggaagagtttgcccttttactagtgtcgatgttgatctggtataccttgctatgaactggttaaagtttgtgctggtttgggattttttgtgcatcttgtgatacctcaagtcttcatcatttaaatgtttagccgtaataatctggttattttttcttttcaagactgagatgttgtgattatgtttttgttttatacccgccataaatttccaaaaaaaaaaaaaaaaaaaaaaaaaaaaaaaaaaaaaaactcgagaaaagggccggtc

SEQ ID NO: 151220 - DNA, 331 bp, Zea mays
  unsure (1)..(331): unsure at all n locations
  Clone ID: MRT4577_69433C.1
cgggctccttnctcactaggaatccataggtgtaggcccagagagatctagctagagttncctgcatccgcctccgccccccaccgnctccacctccgccccccaccgccccgccccacagcangaacgatggaaaccccgnnctccccctacgcctcctcaccggaatccgcccccaagcgcgccccacgctcccctccgcagcagcagcagtctccctccgaggcacgacatgaccagcaaaaaccatcccctgtgacactcccaccgcccaataccgcaccagggcgcatccttgccacgggtggatcaaccattaatgattttcagt

SEQ ID NO: 151221 - DNA, 452 bp, Zea mays
  Clone ID: MRT4577_69434C.1
ggggttcattctcatattttttaggggtaaatacattgtttaaaaggccccctctcataaaaaacaaaccccccaccctggtcaacccaaaaaccagggcagaagggcccagggggaaaaaaaaaacaaaaagggcaaaaagggggggacccaaaaaacaggggcccacccccaaaaaaaacaagcaccggggaaaccaagggggggggggaacaaccagaggcaaaccccccaaggggaggacccccaaagaggaaaaaaacccggcacccccccggggtgggaaaacccaccccaggggggccccccgcggggaggcccggaactcgccaatctttacaaaagacaacaaggccggggggcccccaaaagagacacgcaccacaccggtcaacagaaaaaaagaggagggggggccccccccccctagccacccagaaaaatggggggcg

SEQ ID NO: 151222 - DNA, 505 bp, Zea mays
  Clone ID: MRT4577_69435C.1
attttctctgtccccttcctagctcgcccctgacgtttcacgaggacagatagattacacttctccatccatagcctggcactaaccagccttgcttgccgcactatataggccaagacctggcatccaaggaggagtcccttgctctccgcgaggtgctccgcaaccaccttgcgtccacgatctcatcctctgcccgcgacgatacacccaacctcgtgctgccaacatgagctccaaaagggcaacgatgacaagacctaacagcgagaaatacgctgtcaacgagatgatcctgattgagctgggaacaacgaagtcatgcgcatctgttatgcaggagaagaatcaaaaagatattgagaatgctgccatggagataacaaccccccttgcccatgataaaactcttaaaggaggcaagacttgctccaactcctgttccccgccaggaagaaaccaatactgccaatactttctttgcaaaaaaaatggaaaacctttg

SEQ ID NO: 151223 - DNA, 308 bp, Zea mays
  Clone ID: MRT4577_69436C.1
aaaatcaataccctggatgacacatatatagcgagaggcaaagatccttgcgaagagtgtatcaatcacagacaatctcataagctagctcctcacaggctcgtcattcttcacaccgaagtacctgtactatatctcgcgggtcctacaatgtcaccatgtgccacatattcatcatgaagcttatgcagctgaaaatagtagaattccacataccttgccttgtcacgatcctagaactgcttaacattacactgtcaaccacacaacttgtcgtactgatgcagatctacaaaggccagactgtc

SEQ ID NO: 151224 - DNA, 161 bp, Zea mays
  unsure (1)..(161): unsure at all n locations
  Clone ID: MRT4577_69437C.1
ccgggtcgacctcgcgnccgcnccactttacagaggcacaacacacggcaccgggctgcacaagctcgaccaggcggcgagcgagcgannncccncancncggggggggcacngggnnccgggnaaacangngcgagggnggaaggccggaagcagcancc

SEQ ID NO: 151225 - DNA, 265 bp, Zea mays
  Clone ID: MRT4577_69438C.1
actattgattaacaaaagcaaaatttggaggggagcggcttaattttgcggtgcgtattaaactaacacaaggccagcgtatacagcatgttaactaatgacagcaaaaattaaaaagaggagtcgtttggctacaaaattaaagaaacaacactgctaactgatatctttacatcgcgagaatggttaggatggcatgcaattacgaggcatatatatatttatatagttggtcagcttaagcttctcctgacactccgtaaga

SEQ ID NO: 151226 - DNA, 260 bp, Zea mays
  Clone ID: MRT4577_69439C.1
gcttacacggatttcagcaagccttaactacatttttctccacctttcagttcccacatatttttttttttaagttgctagctgtttacactggtgtcccgggtccacagcggttcgagagagtaagggttgaaaaagaggaaaattatctcttggaagtgtgctactgattaaatcaggtggtgcacgttcaggctaaaagaacgagtggcggttagtgagcgtcacagggggctcatgcgcgcgcgagagctactgca

SEQ ID NO: 151227 - DNA, 367 bp, Zea mays
  Clone ID: MRT4577_6943C.1
gaaggatgtttatatagcatttgtttcagtttcttaagcaatacatggcattcagaaatttacaattacaccatttgggcattgcctggcatactaactgtcattcatcaggctactcacaaaatactatagttagcccacaaaatattgttgttagctctatccaaaatactatccaatcaacttgcaaatctagaacagatcttcatcataaaaattttcatcatgactagccatagatgttaggagcctggtaaaatcaccaatgaccctgtactcatggaggtccacatttgcttctttgttgcttgctgtattctccacttgtacatgtggtggtgcaccatcttctttctttgctcccttt

SEQ ID NO: 151228 - DNA, 348 bp, Zea mays
  Clone ID: MRT4577_69440C.1
atgttcacaatgaaagatgaccataaatactgggggactttatatacaggagaacttattttttatggcctcatgcctctacagagaacaaagggggcttaaagaaatcaaattcaaaagaaaatggaaatcaactatttgaggaaatgcctatgtctacaacatatgggagtccgtcaaactcactttgctctatgctttaggaaaagggttttgggtatattaaccccatgtcagcactagacaaacattgctttgtctgtatgtactacttcaaagcactaccttgtccaagccgccaaacaaaaaccagctcctgcaggacgtcatgaagagaaccattctaca

SEQ ID NO: 151229 - DNA, 402 bp, Zea mays
  Clone ID: MRT4577_69441C.1
agtataaggtgaagctccaaagtcgttcctaaggggatgcagagcttaaagactccaatgacgtccctaaggggatgcagagtcttgtttgttccagtgtgggcgtgtgtgtgtgtgtgttcggcgtcaccatcatattgtatcatatcatcgcatcattccacataacattatgtaacaccctaaagttcactcttgtgaaaatgaggaaaattctccaatcaaacacctttccttgagaatattcataatttcaaagttgctactccaaaaattaacataattttgttttaaactaaaataaaagatacctaaataaactaaattacccttagagtgaaattataagaattatgattaaactatttcttaatatataatctacaatataaattatattcc

SEQ ID NO: 151230 - DNA, 244 bp, Zea mays
  Clone ID: MRT4577_69442C.1
gtaggagttatgacagtgctgattccgacgatcattatcattgccaccaagaagtagcatgtgtgcggtacctactcggacaagcagcctgttgtactgatccaggtctacgagggttagaggacccgtacacgcgtcaacaacctgctgtgcaagttcgagctctccggcattcctgctgcaccccgtggtgtgccacatatcatcgtgtgcttatacatcgacgcctacggcatactgaacg

SEQ ID NO: 151231 - DNA, 700 bp, Zea mays
  Clone ID: MRT4577_69443C.1
ccgggaaaaaaaaaaaaaaaaaaaaaaaaaaaaaaaaaaaaaaaaaaaaaaaaaaaaaaaaaaaaaaaaaaaaaaaaaaaaaaaaaaaaaaaaaaaaaaaaaaaaaaaaaccttgcccccttttgggaatgttggaaaagggggaaaaatttggggccctgttttaaagggggggggagttggaaattaaaatttcggggttgaacgaagggttttttttggaaaaaccctaaagtttgcaatttttaaaaattttggccgggggcggggcccaaaaatttaaattggggggaggtttaaaattgggggggggggaaaatttcaaaggggtttccttttttcccccccaaaaaaaaaaaaaaaattgggggggtccttgggaaaaaaggggttccccccctttttttgggggggaaaaggaaaatttggccatggaaaattttttgggaaggggaaccggtggggaatttttggggaaactaaggaaaagttttgaaaattttctaaggaaagggggtttaaattaaagggggcccccaaaaagaagggccttaaaattggtaaaaaaggtagggccccttttctaaggggaaagtttgaccaggtcccgggcaacttgccaaagggggacagggtgggcccccctggggaatttggggcccccggttgtgttttaaagggcttttaaaaaacttttaaa

SEQ ID NO: 151232 - DNA, 102 bp, Zea mays
  Clone ID: MRT4577_69444C.1
ggtactcagggagctggccaaagacgacgaggccaagagactcggtgtgctcctcgacgacaaggatgcatttgccaagaccattattgagcatcggacaag

SEQ ID NO: 151233 - DNA, 1008 bp, Zea mays
  Clone ID: MRT4577_69445C.1
ccgactccgagccccgccgcgccgcgctacctccgctcctctcttcgcccctgccggcgtcgaggccgaagcgaaggcgagcatgcatcacgaccccaaccccttcgacgagggcagcgccgaggacaaccccttctcagatatcaagaggagggaagaggcgctgaagaatgctggcgtgccaatggaggagaagaactggccaccattcttccccatcatccaccatgatattgccaatgagataccagcaaatgtgcagaagttgcagtatcttgcatttgcaagctggcttggaattgtgctttgtttgtcctggaacttcgttgctgtcatagtctgctggatcaaggagggagattcaaagttgtttttccttgcaacaatctatgctttgcttggaattcctctgtcatatttgatatggtacaggccactctaccgtgcaatgaggactaacagtgctttcagttttggatggtttttcctgtgttacctgatccacattggtttttgcataattgctgccattgctccaccaattgtatttcatgggaaatcattaactggtattctggctgcgattgacactttctctgaacatgtgataattgggatcttttactttgtggggtttgcactgttttgtctggagacactgctgagcattggggttcttcagaaagtgtacatgtacttcagagggaacaagtgaagccagtcatgatggagagttacgtttgttgagaaaatttggagttacttgtggctacttgtagcacatgttcattcgatggttttgtgcatacctgtcagtacaccttgaatctataatttcttatgtcagttattggtgccgagaattgttttttaaggtggtatgggagtataggtttgcttacggatgggtgctgtggttcttcactagctattcttgaaacgcagaagatcatgcgcccaagtcatgtttcagagtcagtctggcatgctggtgaccgttacggctcc

SEQ ID NO: 151234 - DNA, 962 bp, Zea mays
  Clone ID: MRT4577_69446C.1
cgaccccagccccttcgacgagggcagcgccgaagacaaccccttctccaatggaggaggcggaggcggcgagcagcagtacggctaccggccgactgagcccgtcgggttcggcggcaccggcaggggcgacgccgtcgtcgacgttccgctcgagaacatgggggcgagtgagctctcatcgtgggaatcagatctgaagcggtgagaggcggatattaagaggaggtaggaggcgctgaagaatgctggcgtgccgatggaggagatgatctggccaccattcttccctatcatccaccatgatattgccaatgagataccagccaatgtgcagaaattgcagtatcttgcattcgcaagctggcttggcatgttgtcatggaccattctgttgcaagtgtgatttagtaatagcaagtcattttcttatctaggtggtggtgcgtaaggccataagcatgcaattaggggtacaagtctactagatatggtgtatttgaaaggtggctagtagtgattgttcatgctttttggttgtgttaatataaaattgcaggaattgtgctttgcctgtcctggaacttcattgctgtcatagtctgttggatcaaggagggagattcaaagttgtttttccttgcaacaatttatgctgtgcttggaattcctctatcatatttgatatggtacaggccactctaccgtgcaatgagaaagtgtacatgtacttcagagggaacaagtgaagccagtcatgatggagtattacatttgttgaggaaatggagagttacttgtggctactagtagcacatgttcactcaatggttttgcgcatacctgtcagtacatcttgagtttatcttgcatacctgttagtacatcttgagtttatcttgcatacctgtcagtacatatgtgtttatcttctcaatgattttatcctctcgtatgtcagt

SEQ ID NO: 151235 - DNA, 1529 bp, Zea mays
  unsure (1)..(1529): unsure at all n locations
  Clone ID: MRT4577_69447C.1
gcgactctggaccccgccgcggccggcgtgtcgccactcgccgccatccgctccgcaggtcacgtgaaaagcagtgcaggcgcaagggcaccgccgaggcagaaaagggcggataaactgcttgaactggaagcgaccctagtccaaaccaccgcaccgacaccgactccgagccccgccgcgccgcgctacctccgctcctctcttcgcccctgccggcgtcgaggccgaagcgaaggcgagcatgcatcacgaccccaaccccttcgacgagggcagcgccgaggacaaccccttctcaaatggaggagccggaggcggcaagcagcagtacggcttccggccgactgagcccgtcgggttcggcggcgctagcaggggcgacgccgtcgttgacgtcccgctcgagaccatgggggactctcggagcaaggtgaaggagctctcgtcgtgggaatcagatctgaagcggcgagaggcggatatcaagaggagggaagaggcgctgaagaatgctggcgtgccaatggaggagaagaactggccaccattcttccccatcatccaccatgatattgccaatgagataccagcaaatgtgcagaagttgcagtatcttgcatttgcaagctggcttggaattgtgctttgtttgtcctggaacttcgttgctgtcatagtctgctggatcaaggagggagattcaaagttgtttttccttgcaacaatctatgctttgcttggaattcctctgtcatatttgatatggtacaggccactctaccgtgcaatgaggactaacagtgctttcagttttggatggtttttcctgtgttacctgatccacattggtttttgcataattgctgccattgctccaccaattgtatttcatgggaaatcattaactggtattctggctgcgattgacactttctctgaacatgtgataattgggatcttttactttgtggggtttgcactgttttgtctggagacactgctgagcattggggttcttcagaaagtgtacatgtacttcagagggaacaagtgaagccagtcatgatggagagttacgtttgttgagaaaatttggagttacttgtggctacttgtagcacatgttcattcgatggttttgtgcatacctgtcagtacaccttgaatctataatttcttatgtcagttattggtgccgagaattgtttttttaaggtggtatgggagtataggtttgcttacggatgggtgctgtggttcttcactagctattcttgaaacgcagaagatcatgcgcccaagtcatgtttcagaattaatttactgtactcataaaaaaaaaaaaaaaaaaaaggcccctagtgcaggnggggggggagtttggctagccagncacccacccacacaccacccatagnagncagtcgcccgcacgactctntcccggctacccacaccgcgcgagatctccgatccccgnccaaaatccacgacgccnngcggcggcatgggcggcaaggactgac

SEQ ID NO: 151236 - DNA, 490 bp, Zea mays
  Clone ID: MRT4577_69448C.1
ggccgggaagcgtttcacacccggactacaagagtgcggcaaggctgtcctctagctcaccctctaccactcatgcacccgactccacttcactttctctcgacgcaccgcgaacattttatctctctctctggcaaatgagaacagttgcatgcaactatggtggacataggacatcgacctctccgtgaagacaaccaacgctggcgagatgatctacgacatcagccaccttgaccacgacgggaatgtcagggatctgaaataggatgtggagatgaagcaagagagactgtctagcttgtcgtgggcgcttgacaagatccacggcctgaagagtgataggtatcgccattgatattgattagtgattgcaggagaccaccaaggactacttgctctgcaattgatgaccctgaaaacagctgatacatcaagaagatgattactgctacttcccaagctgactgagatgatcttatcattgact

SEQ ID NO: 151237 - DNA, 1621 bp, Zea mays
  Clone ID: MRT4577_69449C.1
cagatgactaccgagacagcgatggtgaacaagaaaatgaggcacttgatcgcagcaaccggcggaggaaaagatctcagagatacacacaagactttgttgaggctgtctcagatgttgatcctaactttgacagtgacgacgatatcatgggagaggcagtgtatgttgacgaatacctgagaagtcgcaaacagaataagccatcaagtgcttctgaagaggatgaggagttccggttggaagaagatggcgaagatgatgatgaagaggaatattcattgagtaccagtgaagatctagaggagccacaacggcataaaaagctggaaactcgtggccggcgaggtaccaagctgagatcagttggtgaaatccaagcaggtcttagacgcagcaagcgttcttctcgtcctcgtattaactatcaccaatatgatttttctgactcggatacggggcctggaaaggcaaagaaatctgatgcatcagattctgatgctggctctgatgccgagaatgatatggagctctcgacatcgagtcaagagcaagaggaagaagaggatgatagtcatgatgaagaaaatggtaataatgtgaatgataaaatggaggaggaccacactgtggcagaaaataaaatagaaccagaggaggagagaaggagcagccacagcagcagcctgtagagaagatggatgctcccagcagggaaagtagaagtgtaggaagaacattcctagatctaaacgagcttgcacctggaggtggctttgatgatggcccaagcttgacagtgagagatgacatggacaacatctagggaataaagttttgttttgatacatttcgggtgctgttggccagttttctgacttccaggcaagggcagatccatggtcctgatggcctgtgatgaatggtgcaactatggtttggcggtgtgagcttatggttatggctgcttcactgatttgcagcagcaggacaggcgatgttccacttgaagcgactttgagcttctccggtgcttatgttatacgtggagaccatgaggaggtagttttatgtatactacatgaaggtcgcaatcgatcatagctgtattgcggccaggctgctgctgcgttgcggccggtctctaggatataaatttattgcctccatttatttagtcttaggcattgtgatgtcaatgagaacatggagggaaacctgtacaccgagtgcggtccgtcggcattcgcccgaccttttccacttgtagattgtaggttttttaaagtccgggcgggattagttctgtatctatacctgacagtctgtttttttctgtcacacctgtgtagctgacattgagcttgtccctgaatgcacaccggcaatgcctctcgttcgctctatatggagaagatgctgcatgtattcagctgatgttgtagcctatggacatgtccattactcagagtggctggcctggtgattgctaatttgatgtatggtttataaaaccaaattcctgtgtgcgtattggttagttgcaaaactttgcaaagataaataatttgggggtgttctgttccattaaacattgcaaaattatgtgaaatgtttggtg

SEQ ID NO: 151238 - DNA, 740 bp, Zea mays
  Clone ID: MRT4577_6944C.1
ggggttcttcctggctctgccggaagaaaaaaaaaaaaaaaaaaaccggccaccaccagaatcccagttccaccgtatctatcactatcagtcgacgccgacgctcctccatcctctgccagtaccaggtcgcctttttttttgcagttcttcctcgctctgctccaaggccggcgcagcgcaggagatcgaaggggaaggatgatggcggcgatgggcggcgcggtgcgggtgctgtgcggcgcggagaaggagcgggtggtgggcacgcgcaaggcgcccggggcgtgcccgcgctgcggcggggccgtggtggccgtcgacgtggagagcgagcgccgcttcctcggcctgccgctgtgcctccagagcaagcgcaagtactcctgcacccgctgcctccgccggctcgtcaccctctacagctgagagctcaagaacgagctacactacgctacacatgcacccctcgatctcttcttgccaagcgcccgccggcccgcccgtcgccgatgacaaaagctccggtggctacagctcgatcggcctcttggaacttcgacaagaattaataatctgcttcgatttttattgaccaaggataactgtgtaggatcgtcggatttcaaataacgaccgtcaacgagccggagccgcgcgcgatggccagtgtacgagttacgttcttcgtgcctacatattagctaagcgaaagaagaaatagtaaattattagtgtac

SEQ ID NO: 151239 - DNA, 530 bp, Zea mays
  Clone ID: MRT4577_69450C.1
tggtgcgccacgctgacgcttctgctcggccaacatccgtaaatggcgcgggaggtgacgtgcgcgccggagctgatgccacgcaatcagggagcttccatgcactgctactagcccggatgatcaccatggacaaccaactgaggcacagactggaccgtgtgaaaaactatggacacttctaccgccagacaccgtgataactaaccgaggagtttaccctggaataccactgggacaccgcagggctgtaccaggtcccatatgtgggtcgcgcggaacaaggcgctgtacgggatccacatgctgtggtctatgctgggcgcgctagagtgcctcatccccgacgtgttacagaagatcacgcgcctggacttgaatgaccccgagggcgtcaacgtcttcgcgcacatcttctaggaggtcggcctgaatacctacgcaacccgaacctggtagccgcgcatggaattctgggagggctccgtttgcaagtcatactaatggctcttggcgatgacttccgcatc

SEQ ID NO: 151240 - DNA, 894 bp, Zea mays
  unsure (1)..(894): unsure at all n locations
  Clone ID: MRT4577_69451C.1
ctcggntacggggcctggaaagcaaagaaatctgatgcatcagattctgaagctggctctgatgccgagaatgatatggagctctcgacatcgagtcaagagcaagaggaagaagaggatgatagtcatgatgngagaaaatggtaataatgtgaatgataaaatggatgaggaccacaccgtggcagaaaataaagtagaaccagaggaggaggagcagaaggagcagccacagcagccgcctatagagaagatggatgttcccagcacggagagtagacgtgtaggaagaacattcctagatctaaacgagcttgcacctggaggtggctttgatgagagcccaagcttgacagtgaaagatgacatagacaacatttagggaataaagtttttttctttgatacatttgagtgctgttggtcagttttctgacttcgaagcaagggcggcagatcaatgggtttgagcttatggctgtttcattgatttgcagtaacaggacaagcgaggttccacttgaagtgactttgagcttctccggtgcttatgtcatactcggaggtgcttatgttatacttggaggccatgaggagggtagttttgcttttgattatgtatactacatgaaggtcgcaatcgatcacagctgtattgtggccaggctgatgctgcattgaggccggtctgtaggatataaatttattgcctccacttatttagtcttaggcatggtgatgtcaatgagatcatggagggaaacctgtactccgagtgcagtgcagttcgtccgtcggcattcgcgagaccttttccacttgtagattgtaggttttgagaccgagcaggattagttctgtatctaaatctgacagtctgattttttcccccgtc

SEQ ID NO: 151241 - DNA, 517 bp, Zea mays
  Clone ID: MRT4577_69452C.1
cacccaaatttcgccaccttcttaatataaattaaaagggcctttatttcttcacattccaacccaacccagatttaggttgggagggacccaactggcaacaaatagttgttggaaaccaacttagggaaaattttatttaagggcagttcaggacgctggtttcgggcataaaccaaaattggaaaaccacatccgttttagtctcctttccgggggaaagagcacccctaagggagccttgcttttcctccggggggtgggaaaaggacagttgggcacccagggcacacaaaaacggttggggaggggttgaaaacaggggttttgctaaacccccccgggcccttaacatccataaaaaaggagtggggcaacgggacaagtctttttttttggggctggaccttctcaagttctgccggggggtggaccaaataaaggtcttttgggaaaaccattttgcctggggctgggggggaggaaactggtttaaatgcggggggggggggggagg

SEQ ID NO: 151242 - DNA, 509 bp, Zea mays
  Clone ID: MRT4577_69453C.1
ttgctgtcggggggggtcttttcatgagcgaacaaacaacacttttttttgcaataagggttgaacaatcacaataccacctagatagcaagacaagagaaacacataacacaacctagcaagacttactaattaaacaagagataagaccttttttgcagttcatagcaatacagcacattattcacaagttattattattggaataaaggtgagagaagcatgttgatgcgcaagagacaactataatgtgacaatcatgatgcatgctcattctagtcgtcttctcagacctaactagtttttcggatgcttctacaacatctctactaatagtagtaataatagcctttatggcctatataaatatagccacctagctacccatctatttcctaaggcttcacgtcctaggtctaaccttatcgtcctgacgatctatccaacatgggtttctagcaatttttacttttagaaaaggttggtaatcatgacttattgattcctct

SEQ ID NO: 151243 - DNA, 2877 bp, Zea mays
  Clone ID: MRT4577_69454C.1
ccggccgggttcttcgcctttacttttggcactcaccgtctaactgtaggggcagcctcgatgccggccgggcatttcacggttcttcgtcaaccgtcatcgctttctccccctcccccgtctcttctccctcgagggaataagcccgccgcgtgaagcttcttcttgcatccgagtgcggattcacctccaatctgcccctcgggccgccggcgccgatggagaaggtgaagaacatgctcaagccgcggccaacgccgcagcagcagctgcgcgagtggcagcgccgcctccgcaacgagtgccgcgtcctcgaccgtcagatccgagatgtgcagagggaggagaagaacgtggagaaagccatcagggaggctgccaagcgcaatgacatgggatctgcaaaggctcttgctaaggaacttgtaagatcaagacgtgctgttaatcgtctttatgagaacaaggctcaactaaattcagtatcaatgcaccttggagaaattgtcgcaactgcaagaacagtgggtcatctgtccaaaagcactgaagtgatgaaaattgttaacaatctaatgaaagctccagagttggctaccacgatgcaagaatttagcaaagaaatgaccaaggcaggtgtgatggaagagatggtgaacgaggcagttgattcagctttggactctgaggacatggaggaggaaatcgaagaggaggttgacaaggttcttgcttcagtagcaggggagactgcctcccagctaccagatgctgccagaacacagaagatacatgaggcttcaacaagcagggttccagaagagcgacaagctgttgcagagggtgctgatgacgacgaggaagacctagaagagatcagggcacggcttgctaaagtgaggtctccggccgggaacttcctagtataaagtgacagtagcgggggagaagggaaccgaaaccaagcaacccaatccaaaccagacaagcaaggaatcccccgatggctcatcgcgttctcctcctcctctctctcgggccgccgcggttaccgccgccgtcgacgcggaggacccgctgatccggcaggtggttcccggtggagatgacaacgatctggagctgaacgcggagtcccacttcctgagcttcgtgcagcggttcggcaagtcctacaaggacgccgacgagcacgcgtaccggctgtccgttttcaaggccaacctgcgccggaaaaaaaaaaaaaaaaaaaaaaaaaaaaaaaaaaaaaaaaaaaaaaaaaaaaaaggcgggccgggccgatcacgttgctcccgcggctggactagccccacgacctccagctcgaccattcccgatcccgtggactcccaattgcctgcctcctctacctgtccggctgtcccggctccagcatttccaccctcgcgcggcggtcgccggagcgagcagagctgccggaaggcccgtcggatccgccgccgccaagatgaatgacgccgatgtagccaagcagatccagcagatggtgcggttcatccgccaggaggccgacgagaaggccaacgagatctccgtctccgccgaggaggaattcaacattgagaagctgcagcttgttgaagctgagaaaaagaagattagacaagagtatgaacgcaaagagaagcaggttgaagtacggaagaaaattgagtactctatgcagttgaatgcttctcgcatcaaagttcttcaagctcaggatgatctagtaaacaaaatgaaagacgatgcgatgaaggaactcctccttgtcagccacaaccaccatgaatacaagaaccttttgaaagatctaattattcagggcttgctccgtttgaaagagccagctgtattgctccgttgccgcaaggaagatcaccatcatgtggaatcagtactgcattcagcaaagcacgagtatgcatcaaaagcagatgtccatgaaccagagatatttgttgatcatgatgtatacctaccacctgccccaagccatcatgatgctcatggccagttttgctctggaggtattgtattggcttctcgagatggaaagattgtgtttgagagtacacttgacgcaagactagaagttgttttccgcaagaaattgccagagatccggaagcttctttttggccagactgcagcctaatcgactcatctgccgatggtacggctgcttctatgtaatggttgccggctgcacgcctgcactgcagccataaggaactccgcctgtttttgtcaaattgattgtttaaggtattcatcccctatgtacaaactacctattggttcattattgtcgccgagagcaccgactgtttgtactctgtttgctccgaggaataagaataaagcaccgccagactttccatcgcgaagctgaataaacgttgtaaatgcatttgttgcgctgaacattccgtttatggtttctccatgtgtatatttagttaatgtcggatgtggttcttatggaaaatagtttgtttgggctgtcgtttacggtattcatccccaatgtacaaactaccttatttgttcattactgtcgccgagcaccgactgtttgtacttcgttcgctccgaggaataagaataaagcactgctagacttccctgaaaaaaaaaaaaaaaaaaaaaaaaaaaaaaaaaaaaaaaaagggcgccgctcgagttttaaaaaaaaaaaaaaaaaaggggtcttttgttaactacatcatcctaaatcatatacatatctgacttttctaacctggggagcccatggctcacaaaatatcgtgccaaaacccgtgtattgtgaactgagtcgatagcaatgcaattttttttttttggccc

SEQ ID NO: 151244 - DNA, 987 bp, Zea mays
  Clone ID: MRT4577_69455C.1
ctcctataaacctaatgcacctttcactagacttaatgtgtgtaaaaatcatttaaaaacacaaggaaggggttgcatgcaccggggcttgcctagaataacactaggttagtgtttgttagatgacgtccacttggcgatcagcttttggtctaacacttgtccgggtcatccatccttaagttcgtccatcagcatcgccttgcgaagaagcccacgcttaacaacatcttgtggttgactcagctcgtcttctacatcacgtgatcaactagcacaccaaagctaaatccgatttgaaaccatgaaatcgacgacgctgtctagcttgcgcatatcaccgatacttgacgagagttgcactggtgcttctctttcgtcttccggtgcgaacacaaggtgcgacaaagctgctgaaacgacgacgatgccggggatggctagagagggagctcgcacgctagaggaccatgacagcgaggtaaggcaaaactcaacggcatgctgaagcgggatgggatggccgtgcgccatggcctagcggcggtgctgagctcggcaagacacaagggccgagcgacgacatccgcgacctcgcacagggaagccggcgagctgtggactgggagcggcgtcgcggaacgagcatgaggacgacgatatgagcgcagcgagcagggagaaaactaggatgcaaacgactgcgtgcgcgggccttcaccgttgatgtccgagctcaaccgcccacggtttggtgaagaacaacgacgttgctgtggaagtccaagacggcaaggtgtgcgctacacagctggagcgaggccgagtagtggtgcaggaaatggcaacgcagcacgacaaggtcgaccggcgcggttcatgacagggagcacgcacgcgcacagtgtgccatgtcctagagaaaactcagacgtcgagagggagatggaaggcaaagagctagaggcaagcaccaaagattcccgg

SEQ ID NO: 151245 - DNA, 730 bp, Zea mays
  Clone ID: MRT4577_69456C.1
ggtaccgctcaggtcggccgggtatcaatgcaccttggagaaattgtcgcaactgcaagaacagtgggtcatctgtccaaaagcactgaagtgatgaaaattgttaacaatctaatgaaagctccagagttggctaccacgatgcaagaatttagcaaagaaatgaccaaggcaggtgtgatggaagagatggtgaacgaggcagttgattcagctttggactctgaggacatggaggaggaaatcgaagaggaggttgacaaggttcttgcttcagtagctggggagactgcctcccagctaccagatgctgccagaacacagaagatacatgaggcttcaacaagcagggttccagaagaacgacaagctgttgcagagggtgctgatgacgacgaggaagacctagaagagatcagggcacggcttgctaaagtgaggtcgtaaatcatatacatatctgagttttctaacctggggagccccatggctcacaaaatatggtgccaaaacccgtgtattgtgaactgagtcgatagcaatgcaattttttttttaattggccctcgagtcgaccatatatgaagtggcagtctattgttgtacaacgctacgagagtggcatggaatatcggaatatggatagcgaaatgcctctgatttcataaagcgatgtaaaatttattagcaggaaaacaaaaaaaaaaaagaacactagggcccgttgaac

SEQ ID NO: 151246 - DNA, 130 bp, Zea mays
  unsure (1)..(130): unsure at all n locations
  Clone ID: MRT4577_69457C.1
cgtacactcataatccctggtccatacccactaacgaggtgcctggtcgcatctagcggcatacaaaacaaaagatcnagtgataggacggttgtaagcgcatcctcgacggtgactacgtcgacattac

SEQ ID NO: 151247 - DNA, 839 bp, Zea mays
  Clone ID: MRT4577_69458C.1
cagcagctacgtcgccaaactcgcgggagggatagagaaaggtgaccgagggtgctgcggctgaacgaggagctcaaggcgagggacgacgcgtggcagttccacgacaggatgcagaggttcctgaagaaggcggacgacgagatcatccgggtgcagtgccaggagagcgtggcgctgtcgctggtgaaggagatcaccgagtacttccacggcgactccgccaaggaggaggcgcaccctttccggatcttcatggtcgtgagggacttcctggcggtgctggagcaggtctgcaaggaggtgggcaggatcaacgagcgcaccatcgccagctccgcgcgccacttcccggtgcccgtgaacccgatgatgccgcagctgttcccgcggctgcacgcgctgagagccgggttctccgacgacgagagctcagccgcttcggtgtcgtcgccatgaccgatcgatcgctggtagttgttgttagtctgccaacatgattttttgttcgcgcggaccgtcggtggtagaagaacaccgcgccaggcggtagagggggattcgagtggtagcgggctgtcccttttttttttcttctcttcttcttcttctcaccttttgtacctgtagattatatagaatgtacaatgtttttttttgttgttgttgcaaatatttatttttatatataagaagggatacaaatctagatcagaagaggaaaaaaaaaaaaaaaaaaaaaaaaaaaaaaaaaaaaaaaaaaaaaaaaaaaaaaaaactcgtatatgaatgtatgcagcttttcagtctgtacatccatccatcttatataacgacag

SEQ ID NO: 151248 - DNA, 473 bp, Zea mays
  Clone ID: MRT4577_69459C.1
gttcaataataaagttttttgtctgaaaaaaaaaaaaaaaaaaaaaaaaaaaaaaaaaaaaaaaaaaaaaaaaataaaaaaaaaaaaaaaaaaaaaaaaaaaaaaaaattttgaacctaagacccaaaccacccttaagggcgaaattttgaaaatttccataaaacttggggggcttttttcccttgcctgggaaccgccccagggggcctttttgggattttttttcccgtgggggggcgttggtttttcttttggggggccccgtaacccctttggggggcccattttaatttccttggggcgttttttcctttgggggggtgggggaaacccgggggggccccccctttttgccttttccaacatttcccttttttaattgggggtttttccccccttggcccccccccttacccttttcaaaatgtgggggttccccgcagggagacggctcccctttttagcgccct

SEQ ID NO: 151249 - DNA, 217 bp, Zea mays
  Clone ID: MRT4577_6945C.1
cacctcactgcatcatatatactaactgacgacagcaactaactaactaaccgagaggggttttccgacgcatgcatgcaggtgttcgggttcgtgaagctggcggagctctactacgccggcagccacggcatggacatcaagggtccggccaattgcaaggcctcttcttcccggcacgagaaggccaaggtgacacatcatcgcgtcgcctagc

SEQ ID NO: 151250 - DNA, 1567 bp, Zea mays
  Clone ID: MRT4577_69460C.1
actaccagggtttcggaaaccgtctctctccctctctagtctctactgcttctccgccgtcggcggctctccgagtccggtatccccgtctccccatcggcgtcgtcgggtttaggttcatcacagcgtcccgttctcctatgcacgccgtcacgcgcaaaggcacgaagcgccggtcgtcgagcaacaaggctgttgggcccaggcacgcagccaacggaggggccactaccacacggcgtgcattccgccacccgtgaagccacatcgtggttacttcccccagccgccagccaatcaaacctaccagtcccagccagagccagccttccccttcgccatggcggcctccgccgcagctcaacgtagatctgcaggaagtaggacgacgtacgagagggcagagctcgaggcgctcagggacgccccgtcgaaggaggctcacgcgcggctctgggccgacgtccgcgctacccttgtcgcctccgggttctccggtgagtatgacgggctgctcgttgccgaggaggacgtgaggagcaggaggggtaatagggggatgaaggctatgagcgtgaggaagtggcccgaagaggcggcggcggcggcccggtttttgggcgtggcagagattggtgcacacagaaatggggatctggcggtttgtcacgaacaccgatttgtatctgctcatgaccatgctgggacgtctggagtggttgaagagtcgtttcatcaaggtgaagatgttgaatgtgaagatgacagtgatgatgactataacggaattctgaagcctgcatttgctgtggatggagatccagattttgagtctggtgagccacttgatggctttgagtaccttcggcgtgtcaggtgggaagctaaccaaattcctagagtcaaggtggccaagatatattcaagtgcagctagaaatgagcaaactccttatatgccagaaattccggatataccaaagtgcttacctgatttgcgtgcgtcaaaacaatgggaggacagatttatcgtcgactttgaggaaaccaggatggtgctctctgagcttgacagttctgatgaaccatctgtatctagtgggacaaaaatctcaacaaaacctggcagcgggacggagccacagactgacccgacgctgacaatgattcgcagcatggatgcagtgtcaagagctgcgacacttcggaactacatcgatatgattcagagcttggatgcactatcaaggaacaactgcatgtggctcttcgcactctgtgttgccgttcacactcccctggacgcggagacatgtgcctcactgaggtccttgctgcgcaagtgcgccagcatccttgccaccaagactgagatggacgatgaagtcgtaatgctgaatatactgatgacaatttcgggaaggtattttggacaggacgaaagctgaaaacagcaattgaaattggagatcaggataacaccattgcaatgctgaattctcaccgatagtttgatgtcagaatatattatatttattattatatatgtgaaagttatgtttcatttt

SEQ ID NO: 151251 - DNA, 1342 bp, Zea mays
  Clone ID: MRT4577_69461C.1
agactggtaggttggtagctgttactgaaaaactaagagaaggcaggacggggaaaggagatggagctcaacagcatcccctatattgcgtcgtggtcttcctcctcgagctgcttctactacagctacagtcgctgcgcctgcagaggtacaagagatgggaagctggtaacaaaagcttctgcagctggtcgtaagcgtgctgctgattcagtatgttcacaactctctgagcagggaactgaagattccatttcaggtcctagatcttcctggcgtataaggaggagagaccttgcttctgccattttactcccttttctgattcctcgtgttaacatctctatcgcggctgagatatacgacgcatcaattattcgaagtggtgtgaggagtgttttaaccaagggcaaggctgctggtgtgcttcggttggttttccatgatgcagggacttttgaaattggggacggatcaggtggcatgaatggctctataatttatgaagttgacaggcctgaaaacattggcctaaatagatccataaagatactaagaaaagcaaaagaaggaatcgacaacgttcagaaagtgtcgtgggcggatctgattgccgtggctggcgctgaggcagttgcgctctgtggcgggcctgagattccagtaaggctaggaagagtagattctagcagtgctgaccctagtggtaaacttcctgaagaaacattggacgcagcttccttgaagacattattcagcaagaagggcttttcggcgcaggagctggttgttttgtcgggagcgcacacgattggagggaaagggttcgggagtccagttgttttcgacaacacctatttcaaggtgctgctcgataataggccgccgcagacatcttcgaaagctggcaatggcatggcggcgatggttgggctgcgcacggactgggcgctcactgaagacgacgagtgcttgagatggatcaggatctacgcagaggaccaagctaggttcttcgacgacttcagggacacgtacatcaagctcgtagacagcggagcctcgtggagaacagcttgactagaactgcctgtttctctacagtgttaggccttgttcggttataagggaataaatcccaccatggatttaatccggatctggattggatgaatccatatgtcacacccaatcctatggtgggattaaatacaccatttaatccatgtatctcttaaaactagctattcttttgattcatggattctaatataaacttgtgcaacatcttaaaaaaaaaagcggccaaaaaaaaaaaaaaaaaaaaaaaaaaaaaaaaaaa

SEQ ID NO: 151252 - DNA, 175 bp, Zea mays
  Clone ID: MRT4577_69462C.1
ctgacgcgtggacctgaacatgtcagggacgccctgctcatcacgtcccgcattcttcgctgccgtcatggatgccctgtttctgctcctcctcctcctcttcgtctctggttctgtcaacgccgtggcgcctggctgcagaacttctatcatctcctacaacgatgagcacgct

SEQ ID NO: 151253 - DNA, 155 bp, Zea mays
  unsure (1)..(155): unsure at all n locations
  Clone ID: MRT4577_69463C.1
catcctgtagaggtttggagcagtcgcccttccccccccttgcactggcctgtgtgancgtgtggaagtgggaggaggtacaattgggataaaattcggaataaatttgtgaaaattccacgtcatttttttctcctttaggcccaaatcggcaa

SEQ ID NO: 151254 - DNA, 401 bp, Zea mays
  Clone ID: MRT4577_69464C.1
ttttttttttttttttttttttttttttttggtttttttttttttttttttttttttttttttttttttttttttttttttttttttttttttttttttttttttgggaaaaaaaaagggggcttttttcatttgcggggcccgggttttttttttaaaaaaggccccaaaaatccccaagccaaaagttgcccgggttttttccccccaatttttgggacggggggccctccccccctggaaccattttttaaaacccccggaagagctagttttgggaaccgagggccccgccccaaacctttttttgggcctcaggggaaaattgggcccccccagcccttttttttcctaagggggttggccccccaacggtgaaaaaaaagggggggcgccccccc

SEQ ID NO: 151255 - DNA, 395 bp, Zea mays
  Clone ID: MRT4577_69465C.1
gcgggactgtacatattgctctttatataaaaagacaaccacaaaatggaggagggtgacatttatttttatttcgactccaccaacaccacctagaatacaagatcggctaccgtatctcccaatcctcccaaagcctacatcattacgagttcataccgaacaaaatgcttaaacacaaaatccacatgaaatgtttagacaacatgtaccagacctcaagatttcccataaaccttcagttccacaatgcctaacaatactctgcactaatatcatcaccccatgatcataacattcaacattaaaacatccaacatcacttaggaccagaattttaaatcaaatgccataaaattatgacttgcaaagctgaccacatacacctacacaca

SEQ ID NO: 151256 - DNA, 166 bp, Zea mays
  Clone ID: MRT4577_69466C.1
ggggcccaaacaaagaacaaatttggttttagaagaatcagatgggctccagtcccaaatattgagattccccagacgggatcagacttaccttccctaaaaatgccctttcattttcgggggacagggtcatgatctaaaaaaggatgtcccttaccaaaacaaa

SEQ ID NO: 151257 - DNA, 314 bp, Zea mays
  Clone ID: MRT4577_69467C.1
gggtcccccctcaatttttttaaactagattatttaatttaagcggggggggggaaaaaaacaggcccaagtcaacggatttgaaaaatttgttaaaaagggcgaaactccaaatggggggggaggggagaccaaacccccataatttacggaaatttaaactcccggatatttattttaggggtaaggcctttcatgttgggaaaatcccccccaaaaaaaatcctagctccccccccaaaattaatttcttttcaaaaggtgccccgaaaaacttacccgggaacacatggcccatatggccaccggaggct

SEQ ID NO: 151258 - DNA, 293 bp, Zea mays
  Clone ID: MRT4577_69468C.1
cacaaagaggggtttatttttattcaggcaagggaatcaccattcgactggaaacacccacacccccccccccagactggcagacatgttttggcttccccttcccttcaggcaactgcttgtatggaacggggatcctgtcgggacccgacttaatgtccccccacaacaaaacaaacaaccccggcataagcttcccaaccttcccgtctccgatgggtttgcccccccactcaaccacgggcaacacggggaggccctttccgacaaaccccatttcggcgctgcccttg

SEQ ID NO: 151259 - DNA, 421 bp, Zea mays
  Clone ID: MRT4577_69469C.1
gcctccgagagcagcagccgcagtaccaccagtccagtccagcctccagctaggggaagggggcgaggaaggagccagagcagacccaaaccctcaatggcttcctctcgcgctctcgctctcttcctcctctgcgccctgctgcccgcgcccccagtctcggccacattgctgttcggcggcggcgagtcggccaagaaggcgggcgtcgacgcggagtggcggccggccaccgcgacgtggtacggcgaggccgagggcgacggcagcgacggtgagcgctctcagctctgctcctcaactccctatcatggccggtcttattatcctagcaggcgtttactgggctccgggactctggcggggggtaggtatgtataccagcaaatacttaaggggtggctggacaacgacactggca

SEQ ID NO: 151260 - DNA, 700 bp, Zea mays
  Clone ID: MRT4577_6946C.1
atccacccctcccagccgcgctccgcctcccgttcgcctgcacgccgcggcgccgccgtctccgtccccgcctccgcccccggcgcccgtcaccatgatcatctccaagaagaaccgccgcgagatctgcaagtacctcttccaggagggagtcttgtacgccaagaaggactacaacctggccaagcacccccaggtcgatgcctcgaacctcgaggtcatcaagctcatgcagagcttcaagtccaaggagtacgtcagggagaccttctcgtggcagcactactactggtacctgaccaacgacggcattgagttcctccgcaccttcctcaacctgccgtctgagatcgtgcccaacaccctcaagaagtccgccaagcccccgtcccgccccttcggctctggcccaccgggtgaccgccccaggggtcctcctcgttttgagggtgacaggcccaggtatggtgacagggatggttacagaggaggcccacgtggtgctccaggtgattttgctggtgagaagggtggagctcctgctgagtaccagccagctttcaggggtgctggtggtgctgccaggccctttggccgtggaggcggcggcggcactttcggttctggagctaccatggagtgaagaagcgactcttcagcaagtgggagcacccaacaggtcttcagatccaatgcgcgc

SEQ ID NO: 151261 - DNA, 345 bp, Zea mays
  Clone ID: MRT4577_69470C.1
aaaaaaccttttgttccggggggggagtgaaaaggggtttccccgttcccttgttgggcctgagggtgtccctgatgctgcccccccaaaatttttccaaacaaaatgaggtgttgaagttttgaacctccaagcgtacaaacaaaaatttcttccctgttttgaaaagggatcccgaggggtaagtttttcagcgttggccctgggtggtatctaaagggtttaacccttttatataaagaagccggggagggtattttcagggcttgggctatccctaaaaaaaaggctaaaaagggctactggatgccttcccacaagagctaatttaaaaatagcctttgg

SEQ ID NO: 151262 - DNA, 343 bp, Zea mays
  Clone ID: MRT4577_69471C.1
cggacgcgtgcgcgcaggcactcacgatcaggttctgaagccgccccttacgacataggtgtggagccccatttgatcgagtgctgatggcgcccaagggcgagaagaagcccgcggagaagaagccggcggtggagaagggctataagaagccaacggcggtgaaacgcgtgtcgagctaggtgggcggcgagaagaagggaaagtagatggcgaagaagatcgtggagacgtacaagatctacatgattaaggtgctcaagcatgtgcacccggtcattggcatcttgatcaatgccatgtccatcatgaactgcttcatcaacgacatcttctagaagct

SEQ ID NO: 151263 - DNA, 504 bp, Zea mays
  Clone ID: MRT4577_69472C.1
gagagacacatgtactgctgcttattatcccatggatggaatgatggatgcatctgatccgatcaccggccgtctgccgaggtgaaagactcggcgaagccggcggggcgggcggggatgctgcccttgctgtcgtccaggctcatagacgctcccgccgccgtccgtcaggccgccggcctccgcgtcctgccagctcttcaccatctgcagcagcggcaggtgcaggtcgatgcccaggtagtcctcggcctcgtccttgacttggcgctggaaagatgaagctcaacaactttatggagaaatggaagagaagcattccttcaagaatgtgctgtccggatcttgagatgcttgaaagggaagtgttgtgtgaaaagcttggggctgagacctgagtgcatgctttcagtgttactgatctgccactggcgcctgctgagatgttcgcagcacttttccgtgatcaggacattggaatggtagaaaaaatagctatggacc

SEQ ID NO: 151264 - DNA, 1036 bp, Zea mays
  Clone ID: MRT4577_69473C.1
agtcgctggtcctcgcctcagctcagccgcgccccatgccagctccctgcgtgcgccggccgccaggtcgtcttctccatctctcccatggcgctcagcttcctcttcctgccctctcctatggcgcccgttcttcccctggtcgcccatggcgcgcccccgctccctggtttctccagctcagcctcctctccattttcctcagccgcgcctcgagtcgtcggattcgttcctcccctgctcaccccatggccgacgtctcctctaccagtgctccttccagcgctcggcctccagctcctacgcgcgctccgtcttcccctgccgcgaccccgtggaactcccagctcgtgctcacaatccccatcacctatgcgtccactctagcatctccctcatgcgtcctctgcgcgagcgagtccgccttggtccgaccagcgatacctccgccggctccctgatgctcgcgcgcgtcagctgcttctccgcctatcgcacttgattcctgtaggtctcgccctccgagctcctctcggtcgccagacatgcatcgctgctgacctccctcatctgatcgggccctacaacagtagcatgtcttctcgtcaagctcgtggccgcggctccctgatgcctcgtcatccctgttctccctcacatctgagctcgcctctgcgtgttcgtatggcgccacagcggtctcataccagcaaccactgctgatgtccgtggttaggacagcaagtatggtgttcggaaaatacataatgatcgacaaaatctcaatccgtgtgtagtgatctgtatttccctgtggtggtatggtatgtgtgtgtagcagtatacaactgtcgtggaaggctagagtgtgtaggcagtgaaggtccatgcagcgtccgttatgtgttcggcaaaacgcccaaaccatgattcaccgtcgatttgcaatttatcaaatcgttttggtcatggtgagcggatgggtattcgtgataattagatcattaaataaattaatgggttagtgtggtgatcc

SEQ ID NO: 151265 - DNA, 309 bp, Zea mays
  Clone ID: MRT4577_69474C.1
attccctcttctctttcgctagggttaggtctcccccggcgcggcgcaatccgcaaatctcgacgacggtgtcaagcagcgagcggatccagtcgatctagtcccgcgccgacgagcctatggcgacggcggtgctcagatcccacgacgcgctcgccaacaggatgcatctcgccgccttcgccgcgtccccccaggccgccaagcagcgccgccggcgccaccccaagccggcctcgccgccgcccaaggtggccgttgttgccggttcttcgccgccaaagccggctcttttggcgtcgccggcga

SEQ ID NO: 151266 - DNA, 206 bp, Zea mays
  Clone ID: MRT4577_69476C.1
atcgttgccctagctctcctggcactcgctgcaagcgccgtctccagtacaagcggcagctgaggctgccatacaccaccgtttcatctaccgcctccgatctatatgccgcctccgatctatctgccaccacagcatcagccgcagccatggcaataccccactcaaccaccgtaactaagcccgtgccagcatttcagatcctg

SEQ ID NO: 151267 - DNA, 354 bp, Zea mays
  Clone ID: MRT4577_69477C.1
ggttggctggctcagccaagtggtgccctgctctgagcattcaggccaagcccatcctgcaccatggccaggtacagatgctgtcgcagccagagccggagcagatattaccgccagagacaaagaagtcgcagacgaaggaggcggagctgccagacacggaggagagccatgaggtgctgccgccccaggtacagaccgagatgtagaagacactaattgcacaaaatagcacatccaccaaactcctgcctgagaatgttaccagacttcaagatcctcttgccacatcttgaaaatgccaccatccaataaaaatcaggagcctgctaaggaacaatgccgcctgtcaat

SEQ ID NO: 151268 - DNA, 851 bp, Zea mays
  unsure (1)..(851): unsure at all n locations
  Clone ID: MRT4577_69478C.1
gtctgtatttccttcacgcgccgccgctctgttggttttctctcgctcgactgctcttccccagccctcctcgatcacgcgagcctgttccgtgctactccttcccgcaccaccgtatgctcgaccccaactcgcctctgtccatgacaacactcagcagcggcccaaatcgagcggaggatcccctcaggtccgacgaggtcatggatgcttctggctcgggtggagaatatcctactccatctccttcggatctgccttcaaatattgaggaacttcgtgaagttggtccgtctgtggtaactattgaattttctcctccccctactgccaacaaaccagttgtatatgggacgggtacagttcttatggttgagaataatgacagtctagtagtgactataattccaaagctgctgtcagatggtaaattgtttatagacgaattaacaatatctgtctggttccacaatgagaaagaaaaaattcctgctatagtagttgttgacgataatattgaacttgcgatccttctggtcaaaggggacagcccacgataaatccatttctttgggcgaatttgccaaggaacagaagtaccaatatgatgttgtctatgccattgctacaatggccgcaacgaaattacatccagactcaaccgaactgctanatgagccgtttgggagtcttggaatttatgagggtcatatcactacacctaattgcactgcgtctactcttcaaaatagtgttgtttctgagagtaaacggtatttcaagttgtcctgcatgtatatggatcacatgcttacacttgatacattgatgatgaaagaaggcgtcagtct

SEQ ID NO: 151269 - DNA, 195 bp, Zea mays
  Clone ID: MRT4577_69479C.1
aatttgttaagtatttgaatttttccttaccacaaataaacctgtggggtttcacactgtcattacgaacacctcattggaactgacaaagagagatccggcttacaagcaagaaacaacggtctaggggcgcataattacctgtaacgttttttacgggctaaaaaggtgaactgaaactaccaaaaccaaccg

SEQ ID NO: 151270 - DNA, 309 bp, Zea mays
  unsure (1)..(309): unsure at all n locations
  Clone ID: MRT4577_6947C.1
aatttaatctttatatagtgaagtgttttattttttttttttgttttcttntaaatcaattcttataacaaaaacgtatcccaaaaaaaaaaacattttaccaaaactactgcgagacaaatacaaaaatatttcgaaaaaccaactcaatttaacctaaccccaccccttaggtcaagatcatactaaaaactttatgatcctcaattgtttatcaaacaaaaacccccacataaaagttaaaaaacctcttacacaacatcagcaagaatttatctttataaaaaaacatgaaccccaaacttttta

SEQ ID NO: 151271 - DNA, 332 bp, Zea mays
  Clone ID: MRT4577_69480C.1
cgtgccatttcattaagagagagataggcctccactataaaaagtagatataaagctaggctggtgatgattaacacatcaacatattagcctctcaccctgagatggcaggctttattcaaaggttgcttgaaggctatctagtagtattaggcgatactcaatgtgcttcagctacacttaatcttcattgaaaccctaatttctgtgagattacaaggtaaggtattattgctgtcgtttgctcgtttaattctctacggtcacacccatccgccttcatgtgatggagaattctacatcttctagtcattcttctgttagtactgttt

SEQ ID NO: 151272 - DNA, 1239 bp, Zea mays
  Clone ID: MRT4577_69481C.1
atgggtggaaggatttggccaattgttagagatggttttgttgtgttcaagcaagatgaaccaatagttagtgacaatgaaaatattctaactaatgatcaagctatgaatgtgttttatgatgctctagacatcaatgagttcaatcgaatcaagaatctcacaaccgctcatgtgccaaactatatgtgcaaagggaagtttgagaaattcatcatgaaagaagatgaaagcatatccgacatgttcaaccagttaaatgagattgtgaatgagctcaaaggacttggtcttgatgtacccgatgtggactctactcataagtttcttagatccctttcagagaaatatgacactattgtgaccatgctaaagaaggatggcaaggcctatctagtggaatgggatttgaatacaagctcggatgatgatgatgacacttcatccaagctcaatgccgacatcgccatcaaggaggccccttcactcttctcatctccacattgtcttatggcaaagggtgatgttaaggccctatttgggatagctccagctctagaaaatttggtggagttggtggagcaggtcattaggtgctccagaaaaatcttggagctggagcttcctacaagtgaaccacatactactaacattctttctggtaaatgtaatacgtctctcataaatgataatgttgttgatgatgagtctcaagttattgttgagaatgaaatattagtaggtaaagtaaatgctctaactcatgatttggataaggcatatggcgagaaagccaagttgggtttcattttaggaagccaacattgctcacttaaacgtgagggacttggttatgttcctaaaaagggtaagaatgcttttgcaaagcaaaagaccatatttgtgaaggaatgtgacaaagtgtgtcacaagtgccacaataagagacatatcaagaaagattgtcctaagtccaagaatgtatcctccactcattttgatcaatgttgtgttcttaattataatgcaaagggtgttcatgctaaatttgttggtacctcaattgttggcaacaaaaataaagccatttgggtgccaaagaccttggtcactaacatccaaggacccaaacaagtttgggtgaactacaaggagggagggaatcattgggtgttggataatgggtgtactcaacacatgaccggggatataaggattgtaggaaacggtgacgcctaa

SEQ ID NO: 151273 - DNA, 822 bp, Zea mays
  Clone ID: MRT4577_69482C.1
cgacgatagtcgaatcggcaacagagcgttggcgagttcgacgaacacgaccacggtcgcgtgctggcgcgggtaggacaatggtggctggcgagcccaacagaggagcttgcacgatgataaccaaatagtgaagcacgcgcgcgcagccagggacaaggcacggagctgaaggtcgacggcgttggggttcggcgacaaggtaaggtcgagcatacagagcgacaagctacgaatctggagtaggccgagcatgaggccatgtcgatctgggcctggggtacagacacagtcgaccagagcagtttcgcgcgcacggcaaccagaacaacagggagcagcgcacggtcagcagaggagccgagcagggagccggcgtcatgggcgagcaggaaaaagacagaggagttggggctgggcgagctgatacacgtagaggtggaaaaagagggggcgcgagtaggaagatgggctcggccaccaagaagggctgcagatcgtcatgtccatggttgaggggaggggcgagctcgactggggcgctcggggaagcggtgccaaggtcgacgctaggaagggcgatgcatcggcgctggccaccggcgaggacgtggccgggtggaggtacgagcaagggatgtatgccgtggcaagagctggaggcgagggcttggggatccgagtggagaggatgttgtgctctgctgttgggcggagagggcggctggaagatgagcccaggtgagcggcgtcgcagggataaggagacggctggcttgaagatggatacgtgaatcccggccggcctcgaggtacccaatg

SEQ ID NO: 151274 - DNA, 1088 bp, Zea mays
  Clone ID: MRT4577_69483C.1
aaaaccacccgcgctccgccaatccagagagccagccagcccgaggtcacacagcagcgagctcggtcttctcgccaggacacgaacacgaccccagcaggcggcaggcaagccacgctctctcgacggacggacgttaatcgagacatggggcgctctccgtgctgcgagaagatggggctgaagaggggtccgtggacggccgaggaggacaggattctggtggcgcacgtcgagcgccacggccacagcaactggcgcgcgctgcccaagctaagcaggcgggcctgctccgctgcggcaagagctgccgcctccgctggatcaactacctgcgccccgacatcaagcgcggcaacttcagccgggaggaggaggacgccatcatacagctccaccaaatgctcggcaacagatggtcgacaatcgctgccaggctgccggggaggacggacaacgagatcaagaacgtctggcacacccacctcaagaagcgcctggagccaaagccagccagccagcaggcgcccaagcgcaagcccacgaagaagcagcagccgcagccggagcccgagcccgtaacgacgctcgaggggccggccggagccgtgccgccggtgtcgccggagcggtcactctccacgacgacgtcgaccaccaccagcaccgcggactactcggccgcctcgtcgctggagaacgcgggcgacagcttcacgtcggaggaggactactaccagatcgacgacagcttctggtccgagacgctggcgatgacgacgacggtggacagcttcgagtccggggtgcagcaggcggagggcagcttcggcaagtcggcggcggcgccgtcgtcgaccaacgacgacatggacttctggctcaagctgttcatgcaggccagcgacatgcagaatttgccccagattatttaggcgggaaacggacctagacggtttgttatctctcggctgatgatgatattctttggcgcgcgctcacgattctttgaatctttgttctgctccgttttcggtggatgtatatatcccactgaaaccttgtgaagcggaaagcaattgcttcgt

SEQ ID NO: 151275 - DNA, 262 bp, Zea mays
  unsure (1)..(262): unsure at all n locations
  Clone ID: MRT4577_69484C.1
cccaggcggagtcgacggngccgcgtatggtggggtgcctggatcgccccccgtgtggggagaggccccagccgaagaatcattggtggaagatcaaaatcatactcaaggggtgagttcagatcaagaggcaaggtggaaccagcaagaagaaaaacgtttttgtcgagaatgacattacgagagaccattacacgatgagagaggaggtcaaggcagtggtaccccttttggttcggggagttacccaaggaaagggcac

SEQ ID NO: 151276 - DNA, 178 bp, Zea mays
  Clone ID: MRT4577_69485C.1
aaggcgaatcttatctctccattagacttgatagaaaaaagttgaactacaaattagtacaaactgtttgcagttcaaacacatcttacaatagtgcagctgtgcaggatgcaagtacagcaaatcccttaacctacaaaacactttgaatgccagtccactatcgcaactacttcca

SEQ ID NO: 151277 - DNA, 461 bp, Zea mays
  Clone ID: MRT4577_69486C.1
aaaagaaacgccagttgctccacccttttgccgaagaacacgggggacagaggtcaattaaaagtttgggccctggcaggagttgcaaaaggggaaacacgggggttacagcacccccgaattgtaacagcttttaatcaaccaaaatttttggacaaaccccaaggaaaactttttggcccggactaccggttcgggggggggggccccaagcttacaacacgggacggaaaatttttggttggggaaacctactttgaccgcccgtaaaagaaaatgaaaaacgggccaacagatgcaacgggggaaaaaagggggggacccagggattttttccttttgaacgaagaaaggacggggttaattgggggaagctggctggtgacgttttttatctttgtggggaccccaccaaatgttaaccggggggcaaaaaaaaaacctaggggtgcccgggcttg

SEQ ID NO: 151278 - DNA, 335 bp, Zea mays
  Clone ID: MRT4577_69487C.1
tgcaactgcaccctcaacctagcacatggcacgtcaaggtggaacagcaccaacaacaaccctgacctggaggagacaagcaccgccgacgaccaaccaccgccggccctcgcagtgcccccgcgacaagcaagacccgccccagctcgtcgaggacccgcccccagccccccaaggcctaccaccactgggaatgccctggcccctgacacagcaacccctgcaactgctgatcacacgcatcgacgaccatcgccatgcctattacctatctagctcgtgaacgaggccggcactacactcaccgagaccgctatgactgccatacatatgtc

SEQ ID NO: 151279 - DNA, 338 bp, Zea mays
  Clone ID: MRT4577_69488C.1
ctatagtgaaggctggcccccctgcgggccccggcccggtatcccgggggatgtcacacgcgcgcggtgatgttcaaggcgcaagtacgtcaaggggggggccatgcaagcacggatggtgaacttccacagagacgaatgtacacctgtaaacgcctcgcatgaggacacatatttcatgacctcatcggagctatcagcggaagaatgcggatctacagagctaatactccacgatgacagactgggcatacgcgtacgatgaacaggactattcattcagcagcagatacgatctagaggagccgcaaccgaaggatcaactttagactccgacc

SEQ ID NO: 151280 - DNA, 312 bp, Zea mays
  unsure (1)..(312): unsure at all n locations
  Clone ID: MRT4577_69489C.1
ctcattaaacaaatctaattaaattatttgaatggtaacatctgtaaattgtccatatgatgcaggtttccagtctgagagattttttggcccattgaaatcatctcatgggcctcaaaggataacgtctttctacatacaacatgtgcaaagcctacttgggtttgcccctcatcttcttcaaattctaagaccaccctcggaactgggaagtctttccctatccccagtttcttcagccgggttggattcccccaaaaagcgtcgctgcggccnggggcaaaattattgctcctcctaccaggccagcca

SEQ ID NO: 151281 - DNA, 379 bp, Zea mays
  Clone ID: MRT4577_6948C.1
gattcagttgcctgagaaacgcaacaatcaccagtttaaaatcgtaacttccgaagttacgacccgacccttcacttgccttaaagagtaacaaattgggtttcaaggtcgatttccaacattcgatgcccacataatttcatcactggttcatgattcagggaagcctgcttgccttgcgatttaaataaacctacttgtcttaccattcaaataaaccttccacagcttgagatgaacttaccagagtttcttaaactttttttaccgcaagacttttgggcacggccagaaaacgttgcatttgcagaaggggagaacattgcgaggaggccattatcctaaccgccgaagccctaaagggtgcggcccttgggct

SEQ ID NO: 151282 - DNA, 484 bp, Zea mays
  Clone ID: MRT4577_69490C.1
ccagaatcattttcttaggttagaatcactgccaaaaaatcccgggggttgagttggtttccatgacaaaaaaacgctttggatccatttttcctgttttcagccgagggtttttccaggcgggctggttctttaaaacaccgttgtccttccaaagggtgggcgaccggaacctggcatttccttaagggggctggccagccagtccaagccctcataaaggccttaacctttgaccgcccaaaacccttggttgtgccaaatccggtttttcaattggtaaaggccaaaaccttaacacacctccttgggggtaatggcccttttcttatttggtttattggcaagtcccagttttacattgttaaccttcaaaggatttttgttttttgcttgaatttaacttttggtttttcaaattttttcccgatccaccgattaacctacgtgaaatcaacccttcatttttgttgaaagtagggcc

SEQ ID NO: 151283 - DNA, 641 bp, Zea mays
  Clone ID: MRT4577_69491C.1
cacatccaaggccacgctctccgacaagaacccgaacgagagcaaacacgcgtccaacgcatcgccagcgccagcccagccccgtagtaggaacgactcgcaagccaagcagcagtaaccctagaataacggcggccccgggcatggggatgccgaaggtgctgctgctgctcgtcctcttcatccaaatcatcaacgtgctcaccatctctgcgtctgcgaggccgttcaaggcggaacccgggacgacgatccagatggtggtggacatgttcggcggcgacaagcagtcaaactccaatcgctcctcgcattgctgcaattagcagtagtagctatagccggttgcattgcatgaacgtatatatgatggcgataattaacaggcttttttctgcaataaactgaagctaagctaatcacagggttgcaagatcaggccagtagagtagtagtttgtctcttcgtcacggtcacggatggaggggatcgtcgtttttttcttcttttagacgacgtctggatcaagatgtctagatcaagaaaaggaagatgtatagttgtggtgcagggacatgcaaggccacgctgctctgtattggatttattttttcccccctttttaaaaaaaaaaaaaaaaa

SEQ ID NO: 151284 - DNA, 229 bp, Zea mays
  Clone ID: MRT4577_69492C.1
ctggatgtcaaacttttaccacgaggggtggttctgaaaaggttggttgaatgttgcacctcaaacaaaaaaacaaaaaatataaaaaaaaaaaaaaaacaaaaaaaaaaaaaaacaaaataaatcataaacaaacaactatatcaaacaaaaaataacaagaacaaaaaccggggggaacaccatcaaaattacgaaccggaacctcaaggcgccccactatttccta

SEQ ID NO: 151285 - DNA, 622 bp, Zea mays
  unsure (1)..(622): unsure at all n locations
  Clone ID: MRT4577_69493C.1
ggtaaagggaanaaaacaagccaatggtggtcactgtttagtggcgtggggtaaggtcactaggcctaaagctctgggcggccttgggatcactgatctttggcttttgagcgtggcgcttcgagctaggtggccttggctccagagaaccgatcactctaagccttggtcggttctccctgttcaggcctgtggtacggtggaagccttgatcaatgttgcagttgtgtcttaattgggtgatggacaggatatcctattttggaaggatcggtggctgaatggtagaagcattagtgaggtggaacctgaggttcttgagcatgtatctaagtgtgttgtttccaaaaggctggtaaaagatgctctaacaaatctgaattgggtggctgatataaggggtgcactttcagttagggcgcttgcacaggttttggatctctgtgacttgctggagggcttagtttttcaacctgggattcctgataagcattcttggaagttcagcgcgtcgggggattactccccctagtcctgctaccaggttcctccccttggaacttttgagtttaggccgggtgaacggatttggaagaactgggcaccaaggaaatgcaaattt

SEQ ID NO: 151286 - DNA, 444 bp, Zea mays
  unsure (1)..(444): unsure at all n locations
  Clone ID: MRT4577_69494C.1
tttcttaagcagtggtaacaacgcagagtacttttttttttttttttttttttttttttttttactttttttttttttttttttttttttttttttttttttttttttttttggnctnnganttggttnnntggtttttggggggtaaagttttttttttacagnttgtttttttttggggggggggggttttttttttttttgaaaaaggganccattcttaaacagggttaataaaaaatcgcccgggaagggggtggttattaaaggtaatattttggccggagggtttgtccaaagtccccttctgaacattggggaacaaatggggggggtttttaactttttaattaaggttttgggggggggggggggggttttttcccgttttgggggggggggttttgggctttcggggtgccacggtgtttgggcctatttggg

SEQ ID NO: 151287 - DNA, 530 bp, Zea mays
  Clone ID: MRT4577_69495C.1
tttatccatttaatgttctcttctatgctcttcacattccaattgcacttgaagattgctgcactacctgtgttttgctgggcgcttgaccatgttgccagattcttaaggcgtaattttgcgcgatcctctttctataggagatacctggaagaaccttgtctttgggtagagacaaataacactacactaagcctccttagttcgaatgcggagattgccttgggtggcgccgtagcatagttcagacattcatgtactggcaggtgttgaagctgatgtaccatgctcccgtgacatccagctatcaccagagtacctgggcgaaaatcggccggattgtgaacccgtacatccaccgctacgctccgttcctccagacgcccatttctgcgatccaaagatggtggttcaggtagagagacaggccgagctgcaaacatagcacagtcgagtcgccgcgttcttatgtaatgctgtaaccttttcccagaattctggagggccattatcataacaagaagcttttt

SEQ ID NO: 151288 - DNA, 2123 bp, Zea mays
  unsure (1)..(2123): unsure at all n locations
  Clone ID: MRT4577_69496C.1
tttttttttttttttttttttttttttttttttttttttttttttttttttttttttttttttttttttttttttttttttttttttttttttttttttttttttttttttttttttttttttttgaagcaaagattgcaagcaaatctacgaaggcaggcatcggtgcccaacaaaaaaaaaaacacggaacatttttgctgagttttgcaattcggcgttggtggccctgcagctaaaaaccttcttgttatgataatggccctccagaattctgggaaaaggttacagcattacataagaacgcggcgactcgactgtgctatgtttgcagctcggcctgtctctctacctgaaccaccatctttggatcgcagaaatgggcgtctggaggaacggagcgtagcggtggatgtacgggttcacaatccggccgattttcgcccaggtactctggtgatagctggatgtcacgggagcatggtacatcagcttcaacacctgccagtacatgaatgtctgaactatgctacggcgccacgagaacagtgatatgatcagaagaaaacccaaggcaatctccgcattcgaactaaggaggcttagtgtagtgttatttgtctctacccaaagacaaggttcttccaggtatctcctatagaaagaggatcgcgcaaaattacgccttaagaatctggcaacatggtcaagcgcccagcaaaacacaggtagtgcagcaatcttcaagtgcaattgggatgtgaagagcatagaagagaacattaaatggataaaatcctttgttgcaagtatagactgcaaccaagcttgaattgctggcatgttccatgctcttggtttcccataagtactgtatagagaataccctgatgacaatattgttcccagaagtgaaagtttgcaagctctgtcggcaaggtgttttggcaaaataggaagcattcccagaccagcaaccacaagtatccatgcgttgatggagaaatgtatagtgcgtgcgtcgaaccgtaaagggttgacggcactgtctgtatgtgttggtggcggtggtggaggcgctgaccttgcagtagatcctgaattacgctccctgacgttctcggtggatgacgaagacgaagaccttacatctggcctgctggcctgagtggaactggtgaatgaccttggctcaacgaccagatcatggtcgatgtagcgctggtagaacttgcgcttcaagtggtcgacgacgtcggggcgggaggcgaggttcggcgggacgagtacgttggaccagtactcggcccagcgcgcgtcgccctcgtagtcgtacgccgccgccgctgcccgcttttgctcctgctccgcgtcggccgcggaccccgccatcggttgccggggctgggggttgggtgcggggggtttgggccggaggactggcacgcacactgacgacgcgacgcgagttggggaattttagcttggcagcaccggcacgccgatgccgatgcgaggcagtgggtaggcgactggttgtgggggagacagccgagtacacgaggtacgacgtacgaccggaccccggccggcctcgagaaaaggtaaaagcatnacattaggnngggggcgnctngnctgtactatgtttacagcacggcctgtctctcaacctaaaccaccatctttggatcgcagaaatgggcgtctgcagaaacgaagcgtaacggtgaatgtacgggttcacaatccggccgattttcgcccaggtactctggtgatagctggatgtcacgggagcatggtacatcagcttcaacacctgccagtacatgaatgtctgaactatgctacggcgccacgagaacagtgatatgatcagaagaaaacccaaggcaatctccgcattcgaactaaggaggcttagtgtagtgttatttgtctccacccaaagacaaggttcttccaggtatctcctatagaaagaggatcgcgcaaaattacgccttaagaatctggcaacatggtcaagcgcccagcaaaacacaggtagtgcagcaatcttcaagtgcaatttaatgttctcttctatgctcctcacatcccaattgcacttgaagatt

SEQ ID NO: 151289 - DNA, 406 bp, Zea mays
  Clone ID: MRT4577_69497C.1
tcgaccggtcttcctttttttgatctcccacatgaacacttatactacaagagtcacattcgatacggacacattccaaatcgaacggaccacttttccatagtacactttacattccataacttaaggcttccattcacacaatgagatatatgtattacagggcttggaagttcctagaccacgtactcttttacattatagacgcaggatggacccttttcatctgacataaaaagagccatcacaggcttcaattcctgaatagccttcctctaccctacgatcctgttcagctgctgatgcacaaaaacaacttacagggggtccttgggttcactggtactacacaccagttagcgactacacacaacgcactcaacttgatactaacgttagtgatcac

SEQ ID NO: 151290 - DNA, 265 bp, Zea mays
  Clone ID: MRT4577_69498C.1
tagcgctatacatggttgggccccatcttgtatcaagtccgccgaatcctgttcacttatgattgaaaaagactgataaggccattgctttttcacgaccagacataccaacacctgtgatccatagtccggaactgtcacaggagtatcgtctgcctctgattgaatgtaacagtgcaaaatgctccactacactctctggcagaggcacaccgttagggctacggccttctaggctgcagcgagctcattggcgtacagtttt

SEQ ID NO: 151291 - DNA, 590 bp, Zea mays
  unsure (1)..(590): unsure at all n locations
  Clone ID: MRT4577_6949C.1
cccccctctcgagttttttttttttttttttttttttttttttttttttttttttttttttttttttttttttttttttttaaaccaaaaaagggaaaggggggccaaaaaaaaaattccggggtatttatttttcccgcaaacttaagggtttcagccaaacaaaatcagttagcagtttacctagcaggattcatgaccttggaacgaccaaaccctccaaaggcccccgttgttggcggccctgttgttggggggggggcccccccaatcggaaaactgggggggggcatcggggggaaacatgccccggacctttttcctgagggcccaaagccccctgaaaaagtcgttaaggggggccctgtcctgcctgaggggccccatgccccggaacgggagctccaaccccgcctccagcgcggggtnggggggggccgtccggccaaggggcggtcccagcacgtgggccgaggcccccccgaaaaacctgcccagggcccagcgcgggggggggccctccttaatctcgcgctgggcctcaatggggcggccccccgaggcaacctccacgaggagcaccccaaagg

SEQ ID NO: 151292 - DNA, 356 bp, Zea mays
  Clone ID: MRT4577_694C.1
caccttaatcccaaaaaaaaggaaagccacaaagaaaggccacaaaaggcccaggaagccccctgacccgccaggacagggcaggaaccaagggcgagcaaaaaagaaggcgcgatagaacgcaagaccccaccaacatccaggcgccgaagggggaaggaaaaccggaaaccccaataaagaggaaccaggcatcaccggggaccagacccaaatgcacgttttaacggaaaacataaaaacccacaaaaccaaatcggcgcccctggaaacacggaaaggccaaacaacctgtagaccgaccacaatgccaagcggagcctggacatctttcaacgggatcaccgcaagggaca

SEQ ID NO: 151293 - DNA, 389 bp, Zea mays
  Clone ID: MRT4577_69500C.1
gcatgcaattttcaacgtcaacattcatgggcaaagagattttaggccaaaattcactgaagcatgttaacacttacacaaactgatatggcaacgaatatactacttgaaacctcaaaagcacaagaaataagacatctaactttgagggacgctatgtaaaggaaccaatgtacccttaacatactcacactggtacatattcttagaaaaacattgaaaagaaaactacttcagctaattactgttccaactgaaatacggaattacttgctggtttacataacagagcaggcatttgggttctcgtcgctgaaaatctcggggtcataagcatagtcgatgtagtttttggatggccagtattcacttcgtttgatttcagtttt

SEQ ID NO: 151294 - DNA, 414 bp, Zea mays
  Clone ID: MRT4577_69501C.1
aaacagggtactaatcaaaactgaaaacatggcaaaaccctctgaacttgaaacgactaaccaaaaaaagtgtactcatcaggacacacatttcggcgcaagacaaccaatgagaatgctctaaactacagcgctcttgcccttcttcctctggagcttcttcatgtaaaactcaagctctttaccctcaaggatgtacccatcaactcggccacactgaccaaggcgggaaaaaatgcatgccaacaaccgtccactgccaaattgctcctcaatgggtgggtcaagggtacgtccctccttgcccttctcaagcttccccgtgacatgggcgctctttttcgtttacaaaactgctgcctaaaccccttgtccctaaaaaatatccttctttgcaacaagggattttttttt

SEQ ID NO: 151295 - DNA, 313 bp, Zea mays
  Clone ID: MRT4577_69502C.1
ggttgctctagatccgttcatcctggtggtgggtgtgaggtctaaagcggcgagcgaattaaaagatgctggacaagctgtgggacgacgtggtggccgggcctcgcccggagacgggcctcgagaagcttctcaaggccaccaccgcccgtaccgcttgttataaacaaagacacgcaccggcgacagttacaagcggccccagtcaatgcctgttaaccccacacaactctgtgaccccctcctcgtcgtcctcatcgacgacgccgcgcggggcctgctacgtttggcacagaccttttcatccggggag

SEQ ID NO: 151296 - DNA, 563 bp, Zea mays
  Clone ID: MRT4577_69503C.1
ccggccgggatccaacgatcgaacctagacagtcatactgcctgctatcactacctaattctaccaacatgacacgctcgcaaaaataatggaagagccgcagcatgggatcgtcggtcgcgctcttggtgctagccctcgtgctagtggcggacaccgccccacaggtatgggaggcaaataagaagacacggcggacagtcgggaggcggcggaggcgaagaacgatccacgacgacttctgctcgacgctgtgcgagggcaataatgggacggacctgactcgtgtgcaaggagtgctgcgcgctctcccagcagttcaagctggtggtgtacggcaagatccagtgcaaagggaagtgcaccgagcagaacggcatcactgtgctcggacatgaaggtctgccaggaggagtgcgacaaagcgtacgtggtgaaggcggccgatgtcaccaaagcctgcatggtcacctgcgtcaaggagaagaacacgggcctcatcgagaactggaagaggtcctgcacccctcctacttcttgaagccccttgaaatgaatgaacc

SEQ ID NO: 151297 - DNA, 272 bp, Zea mays
  Clone ID: MRT4577_69504C.1
gctacatcgatcaagaaaatgatcagtttagggcttcctcagtggccaggaccagtaccagccgacacagcatgtccagagcaagtccaatgccactaacaccagctgccttaaaggaaaatgattctgatgttcatccacctgcaccatctttctccaggcttcttgcaatgaacgcacctgagtggaggcaggcagtcgtaggcagtttatccgcattggtatatggttccttgcagcctatctatgccataaccatcggaggaatgatt

SEQ ID NO: 151298 - DNA, 508 bp, Zea mays
  Clone ID: MRT4577_69505C.1
cggccgcgtcgacggcactccacgatcaacaacgagaagaaaggcagcgttcagtccagcaagagctccagacatatttggtagcccggggccactaaccaggagaagggcagcagctcaaaatgtacctacagggaactcataataggaactcgtaataggcggctcttatctacaagccaaaacgccttataatttggttggaacagagagagccatgtgtttgtacactgtagtgttgttcgctgttgatgtagctagaaaatccaaaacaactactcacttcgttcttttttatttgtcgcattttattacaaaaatgaactagtggaccacaaatattcaagaacggaggtagtagttcagaattgggggagtgacttttttttggctagtgttgttactactttagccatcaattgaacatcttgtgtatttgtgaagttccagccgcagatggtatttaatgtgcaaaaaaaaaaaaaaaaaaaaaagtcgacgcggccgc

SEQ ID NO: 151299 - DNA, 151 bp, Zea mays
  unsure (1)..(151): unsure at all n locations
  Clone ID: MRT4577_69506C.1
cggtgnaaaccgcgccaaacccttcgctccggatcccccntgctcctcggtctcctcgncgggaagtagtagnnagcaggggccgcaggccatnngtggcccggctgcggtgggcggnttctactggngcgccggnaatcggcgcccgccg

SEQ ID NO: 151300 - DNA, 239 bp, Zea mays
  Clone ID: MRT4577_69507C.1
aaaaaagaagaaaacatctatttggcccatctataataatatgatattggatggcatgagaaccgtttaagcaagcccagaaatataagggttctggatttataaaacaggcccccatttaagcgggtaaattttttattgggaactccactggtggaacctggacccgtacatgattgaacaattcggtatgagcttggaggggggcttgtccatggacggggaaggggcatagctgc

SEQ ID NO: 151301 - DNA, 292 bp, Zea mays
  Clone ID: MRT4577_69508C.1
cccaaaccaaccatttggtcgagcgaactgggtcctccgggaaaaatctgtgttgaaccatgagcccgaatgccttgggatactttgaacgcaacaaaccctactccaacgggcaattaaagggtcgccatctaaacactcgaacatgacatcatagaacccaactttgagattgttcaagtttaaacaggcacccttccaggcccctgaagcaaatcaccccttccctgagagggaaggcgccgtccacccttggaatcaacatcaatgctgcccatctccggtagctgtt

SEQ ID NO: 151302 - DNA, 179 bp, Zea mays
  unsure (1)..(179): unsure at all n locations
  Clone ID: MRT4577_69509C.1
aaaaaaaaccctttgtattttgtttttttnatccctgcctggttttgacatgtcacggtcccaataatatggcttgaccgaaatgcgaaacctgtttgtttcaatggcttgactgttggggtacactcccccaatttctttcccaaccctgggaccagtaacaagcctttatcagggtt

SEQ ID NO: 151303 - DNA, 275 bp, Zea mays
  Clone ID: MRT4577_6950C.1
atgactatttactgatgcattgttgagatgatatgcactatagagcgaccactcatgtcaacactacgcctgctttatcaaatgcggaaacaaccaccaccacacacatacatgtacgcacatacatacgcacgacatcaatgaatttttataaaatacagtgaaccatcactgcagtcaccctggaagaacagagactatgtgcgcgcattgcccactcgtggacacttcactgatcaagcatagcgccatacatgatggcgacacgctatcga

SEQ ID NO: 151304 - DNA, 573 bp, Zea mays
  Clone ID: MRT4577_69511C.1
acaaactgggatgcttgcgctcggttttttgcacgcaattaggcataaggtctaaaatctctaccacaggaaaattgttcagtaaatttcagcttcaatatttgcacagcatgacgtgtcgacaatgtcagagttaaagaggaagaggaaggccaccttctcatctcgcgcaaagggatgaaggctacgacatgcctgcactctggaactgaaagcaaatgctagtctagcacgcagtgacgtgcagcaacttagttgaactgagaaagcgagcaggacgaacctaaggtcgcggagcagggctccgcgtgctccatctcttccaaggatgacgatgtggtggtggacgactcgtcatgagcctccagcacgaacaacgagctagagtagtgtttcctcccgtggaggcaagcgtggcccgccaacatcgacagctactcagccttgttggcggcgaactgtagcctgcatcggcgcccattcctcagcctactcctgggcgtgcccaacctcgctagctcgccgtgcatcatggctgtggtggcaagcaggaactcgcgctcgacagcaacg

SEQ ID NO: 151305 - DNA, 432 bp, Zea mays
  Clone ID: MRT4577_69512C.1
attcggctcgaggggcgaccgaacattttgttgtcgaccttgctaatatctgtgtggcaagcaacacacgtaggacagattctgctatgtcatactctatcacaaagtagcgtggattcacttcggagtttttagggtcgcgtgaagactcgcaagcctcagttgcatccctggttggtgtggcactctacaactctgacaatgaaggaagttgttctgaggaagatttttcttgtggcaaccattatgggttcagctcttgggatgacacaggtgcttctggtaactggactaaatgggcagcttgcgatcagcgacgggtggctttctatgggcgattcattaatgagcacagctcttggtcaggcatgttttataccacacttgcagctagatgtgacgatgtgccctccaggactggaagccacttta

SEQ ID NO: 151306 - DNA, 421 bp, Zea mays
  Clone ID: MRT4577_69513C.1
tcgaaatcctctccctctgagctagatctttgttcccatccatgctgacgcacctgcgctacgcattccgtgctgaaatccttccctgccctaaattccgtcgatggaagtccgaagggagcacagagtagaggtgaaattcatgccaactcatgccaactcgttctagccgtggagccgcgcccgaggaggaccgctgtggtctgccgaggccggccggttgggcacgcgccgcgttgggatgcatggttgctggggccagaccgcgcccgcccctgcgccggatccgaggccgaggccgcgcccttgcccggaggcagagcagttcgctgctcgtggccacgcggaggccgagcgggcctgcctgcgcgcgccgggtggcgaggccgaacactactcacatctgtgtacatgcagtcgc

SEQ ID NO: 151307 - DNA, 225 bp, Zea mays
  unsure (1)..(225): unsure at all n locations
  Clone ID: MRT4577_69514C.1
atnnnnnatttttttttttttgatggctaaaaatggaactgtcattcaatgaaagcacttaggagacgttatacgttgcccagtgaaggaactacgagggctagtgcctgccaggggcccacgcttctctatttgacataccaaagaacaagaggaacacttcaacataccactgcatgcatgcactcaggcacagcaatggaccatggatgacagaacactcta

SEQ ID NO: 151308 - DNA, 506 bp, Zea mays
  unsure (1)..(506): unsure at all n locations
  Clone ID: MRT4577_69515C.1
tttttttttttttttttttttttttttttttttttttttttttttttttttttttttttttttttttttttttagggaaggaaaaaataatggtggggatttaaggggtcaaatataataaaaaggggggggatattaacttggtagatgtgggcctggccanccaacccaaccaaataagaagccaaaaaaataaaacatgggaggaaaaaaaaatttttttcatacggaaggaaaaaaccagttaaatccaaaaaaaaaggaggtttatggtatggggttggcaaaagaaagggttatgaaaaaaaggatgcccaaaaaaaatttttaattatttgttggcaagggaaagttatttaaaaaaaatgggtcaccgatgaaaaaggaaaagcaagggtctgaaatttgggtaaacccagctaaaaaaaaaaaaaatagggagtaatttcctgaaaaaaagggaaaaggtaaataaatgcttaccaattagctttcagcccccttat

SEQ ID NO: 151309 - DNA, 350 bp, Zea mays
  Clone ID: MRT4577_69516C.1
aaaaaaaaaaaacctccattttttttcggagggcccaccgctcccattttttctggaaaaaatattttggggggggaaggccccttaaagtttgggggggacaaaaatgggctggccttcctacccccagggcggggactggaattaccagcccttacaaaaatactgggtctttttgggttaaaaactaatcaagggggggaccgaaaccctggactgaaccaataatggaccgggtggttttggccaggcacacacacacatgccggggacgaaccaccccacccgaagcactgggccatccggtttcggttccggatccggttccctttcgggggggcccagcgggt

SEQ ID NO: 151310 - DNA, 274 bp, Zea mays
  Clone ID: MRT4577_69517C.1
agcaccacgctgatgcgatacaaatattcctgactaacaagggtcacccgctgaaaaacagtatcaaacggttcaccatcacacactggataattgataataatacagtacatcgtacaggtatccaaaaggacaaatatgttacagaggcgcgagagccaaacaccaggcccagggagccataacgcaaatgacacccaaggacttggttggagatgaactgacgggaccaagaactgctagcgaacacaaaaagtgttcacctccttacttt

SEQ ID NO: 151311 - DNA, 557 bp, Zea mays
  unsure (1)..(557): unsure at all n locations
  Clone ID: MRT4577_69518C.1
ttcctaccctaaaactgttttggtgaaacatggcgcccaagcgaacccccttcagtgttgtcctcctgatcgccgtggccgtggcgtccatgctgtccgcgcacgccactcgcaccctgcggnaggaggacgtgaacctaccggtgcgtgtggcctcttcttcttcgccgacgtcgtgcgtcaccttcttcgacgacgccccggcagaagagatggaggcagacggtcctagtcctgcggcgcccgggcctgacgacgcgtggaactacgatgatgataaaacacctataacgggaccgtagttatagacagccacccttttatcatatagttttgacagcaacgacgaacacggccgggtgtgtccagcatatatgaactggtgctgtatttgttatatgctgcgtcaaccatgtaagctagcgttcaaataaatgtcgagcacacgaccacacgtgatcattcaacatcaacaaaatgggggactctcagtattacaactgagccaagaaggaatcgaccacccaaaaaaaaaaaaaaaaaaggccccctagggc

SEQ ID NO: 151312 - DNA, 219 bp, Zea mays
  Clone ID: MRT4577_69519C.1
cctttctttctatttttcttgttttcttttttttttttgggttggttgttagttccttgctttgctagaaggagtgctcccaccagaaagaaaaactggtcctaaaggccgaacggccccgcccgaccatatataacttgcccccaggattaagacagcacccaagatggggggccaccgcacaacctttcacgcacgcgaaaaggacccaacccaagc

SEQ ID NO: 151313 - DNA, 685 bp, Zea mays
  unsure (1)..(685): unsure at all n locations
  Clone ID: MRT4577_6951C.1
ccggccgggatcatcccagtcacatacgtatcttgcttcttggagcctttctcaagtgcataccgtttgagaagcaatggcaggtcgacccagagccacagaactcttgcctaccagctatcacatatatacagaccatttatgttatggccatgaataccgccactgacttctttctgatgtcaattccccttcctatgatttggaaggctaggatgccttggcgcaagaaggtcgtcatcatgttcatgttcagtggcgcactcttggagatggtgttcggaatcttgagggccgtgtctattctcacaaaaggaaacacggatccagctcagtcgggctactggtctgttcgcgaatcattcgtcagttttgtcgtcacaaatctccccatggtctatccacttctcaagcgagtcgtcgagaaaacggtctcagcttccaagagtggcacccgtactccaggcctaggcgacagtcagggttaccgtctcggggactacaaaaacaaagccaattcacgatcacgacctgatgaaactgatctcggagacacggtctgngggatcgaaggatcatattgtgcccgctgatgngcaagcaaagtggtgatgacacctcgattcaaagtgctagcaaagcatatcgagattcacatccttggtataaagtctcaaaatatcgc

SEQ ID NO: 151314 - DNA, 464 bp, Zea mays
  Clone ID: MRT4577_69520C.1
atagctggcaatctttgggagaactgccactgcagaggaccaagacaaatggcggacccagaaaaaagattatccgtttgaaacacgacggaatgaactattaaaaccggccgcatccgaccacggtagtatcactggcagggtataaacctaaaaccaaaaacaggtgccgcgggaactagacatcctcagcaccacagggaccatgcggtgaacccccaaccaaaaattttttcctgtcaacgcccagccaggaaacggactaatacggctggcaaaaaaccctcacccccggaaaagcataccaggaggccaaagaataaaaagctgctgccctgccctcttatgatttggcacccctagagagccttgcaaaggagaaatccttaaaatcagcccacgaacttgaaggcatcctaaaggaacctatcctccttgggctcccagtcagagggacctcttgc

SEQ ID NO: 151315 - DNA, 301 bp, Zea mays
  Clone ID: MRT4577_69521C.1
ggaaggactgacacccatgctgcttctgtcaagttcaggttcagctcctcgctaaagaatgttggtagccaagacaaacaagtataatgcccccaacttccacaaaagtgtgcatatatcattgcccacaccgccttgcttttgaaaaatgccccccaaggcacatcttaataggctttttttgtcaccgaaccgttgcactataagagattcaaatcctaagcaccaaacaatcccaagaagggcaaatatgtaaaagacagactcccagccaaagttctgaatgatgggaggggcaaac

SEQ ID NO: 151316 - DNA, 2019 bp, Zea mays
  Clone ID: MRT4577_69522C.1
cattgggtacctcgaggccggccggcgccggtccgcgccccggggcgtgagggtgtcacccggcgacggcgagggcgcgggagggttcgcgagcgccgtggagaagcgctcgataccggggatagttgaggaggaagggcatggagcgaggggagaggagttggaaggggacgtggccggggctttggagcagaggtggcctccgtgggatgggttggccgagcggtacaagctcatcggcgccacctccctcgccttcgtcatctgcaacatggacaaggttaacttgagtgtcgcaattattccaatgtcacatcaatatggttggaactcatcaactgctggcttagttcagtcctcattcttttggggttatgcattgagtcaactaccaggaggatggctggcaaaattatttggcggaaggaaagtgcttgaggtcggtgttgtgacatggtctttggccactgctataattcctgttgtagcaggttttatgccagggcttgtactatcgaggattctggtattggagaaggtgtttcaccatcagctgctacagatttaattgctaggtccattccttggcaagaacgatcaagagcagttgctgttgtttttggtgggttgagctttggcagtgtcttaggactcctgtttgcccctcccatcattcagaactttggctgggagtctgtcttttacatatttggccttcttgggattgtttggtgcttaggatttgaatctcttatagtgcaacggttcggtgacaaaaaaagcctattaaatcttggacaaagttctactggatctgatggtcttatctcatatgctatgtcttcggaatcatcacactcgtcattggaagatctgcaaaattcactaaaggatgtgccttggggggcatttttcaaaagcaaggcggtctgggcaatgatatatgcacacttttgtggaagttgggggcattatacttgtttgtcttggctaccaacattctttagcgaggagctgaacctgaacttgacagaagcagcatgggtgtcagtccttcctcctttgggttcaatgatcattacatctattgcagcaccttttgcagacaacttgatatcaaatggagttgacaccacgaaggtgcgaaaaatttgccaaacaattgcctttgtgtcacctgcgactttcatgatgctttcctctgtggatcttggactgcctccctgggaaattgttgcttttcttacaagtggtgtagcactctccagcttcgcattgtcagggctttattgcacacatcaagacatctctagtgaatatgcaagcattctcctgggaatcacaaacactgtaggcgcggtgccaggaattgtaggcgttgcactcacaggctttcttcttgattcaactcattcttggagtatatcactctttgcgccttctatcttcttttacttaactggtactgttgtatggttggcatttgcaagcagtaagccccaggatttttccaagtcaggacctgagtctgagccgtgaatcgtgatgtatggtactcctctgcacataaggatcgtttcacaaggaaaattcgttttgagtttagacaaaagaatggagctctagggcagagaatagatgttatgttcctcttcagtcagtagcagacaagaggaagcccctgataaggggacaatgcttgcgtgtatatagtataatgatgataggcttttttttctggttagttttcacattttgatatggttttgatttttgaatgtgtgcagtcaggtccgccagtttgtagtatcctgttgctgttggtttcgggtgtcttggttgttgagtgagatttagaatgtgctgatacttcgtttcagtgcttgtactttagattcgacctgttacgaaaaaaatgaagagtacccactgaattttaaattaaaagtcataaaaaaaaaaaaaaagaaaaaaaaaaaaaaaaaagcggcccctcagttttaaatgccaagccatttt

SEQ ID NO: 151317 - DNA, 1961 bp, Zea mays
  Clone ID: MRT4577_69523C.1
ccggcaggccatctatccgtctagacgccggcactccgcagctggttcattccgtcgcggccgggtcggcggtccccagttctcctccgcttcttcctccacgctcccgtccccgccgcgcgaggaacttcccacttccaggcccagcttgtctggttaggattagggtcgtcgcttcgcacgtgtccggtgtgccgccgtcggagatgtcgcggacgctggtgcagccggtggggcagaaacacctcaccagcgtggccgcgcacctatcggccgcgagctaaacgaggatcctaaccttaaccctgggcagactgatactctactcctggatgacaatactaaactacttcggcaacaacattcccatcaacggatctatgtctggctgtcatcgcgaagatcatcctcgtcatcggtgccccagtgggccctttaacatcctaggcctggccaacgacccctaccaaactgccatcctcaaggtgaaggagatcaagaacggccgactgaccatgttctccatgttcgccttcttcatctaagcctatgtcaccgacgaaggcccccgtgtagaacctcgccaagcagaaggttcttcttgagggtgttgagacgtacaacaagttgcaaaacgaccatattacagcaaaagaacgactttagtaagtttgatccatttatatattatgagttagcttcgatcgacaaaattgtgtgcttatatttgcaggtaagagcatggtactaatatggcatgttgtgtttagtggaaacctccctatcttgaggtttcttcttgatcatggtgatgatctccatgaagaaggcagcctggaaggtcatgacaggttcaccgttctacatatagctacagagaaagatataatgtagactcatattttctattatttatgttgcttattctgttaatcaataaactgcatgcaattttttgtttataactatttttagaaaaaaacatacttcatgtgcaaaacattgcctggcgaattttcatgctttacttgtatatttgtggatcatactatgttcttgtaactacagtttaatgtcagtggaacacaaacacatgaagttgttctgataacgataatccttcttgaataattcctatatgtaagttagcatagcatgtgtgtgggtgtttgttttcttagtagtggcaatggtttattcttttttttgccatcctgttagtattttgtagttcattatcaagtatcaacctatctctttgctttgtctaatccgagatcaaggacttccttttgaccgtgaggaggaaggatgcccgatcagtgaaggtcaagaggagcaaggatgttgttaaattcaaggtctgctgatccaagtatttgtacaccctctacgtctttgatgctgagaaaacaaacaagttgaagcaatctcttcccctaggtagcttagctttaattcacatccatcggcccctctcagccatacacagtgctcccaaccatccacgccaagtccgcgccaaatccgccaaatccgagccaaatccgcccttccatcttcagcgtctcccttccttatgccgcgacatgaacaggatcccctaccatcgagaaaccccctatgcatcctccatacacggcgccataaaccctatataccacaccagcgtgatcctcctcgcgtttgtaagttctgggagtgaacggattaggatcaggtgcatcaggcgcaacaaggcactgaggtgtgacaccatcgctggagttcctctccttactgctactcctctgggaatcacaaacactgtaggcgtggtgccaagaattgtaggcgttgcactcacaggctttcttcttgattcaactcattcttggagtgtacgacgtcaatccatcttcataatctatattgcattttatgaatcactctggtcaccataatggtactgctttgtgtgc

SEQ ID NO: 151318 - DNA, 393 bp, Zea mays
  unsure (1)..(393): unsure at all n locations
  Clone ID: MRT4577_69524C.1
gggagggggggggggacgaccacancgtgnccgaggggcgtgtgaagaacatcgatactacgcgcagccgcggagcgcgccaagacgacgggtgtcaatggggaaagcgagacgcggggggggaggcgntcttcttcttgctacanatcctgngccanaaccgccaccacacgaaggggcgcggcgggcactcgcatatcgggctgaagcaggtgggagtcctgacggggggggcgccacaccgccgtgggccgtgcagcagcttcttgagggggggctcccgcgtgangaaggagctcatcggcaagggcgacgtgttcatgtgcagaggcgaccaggggttctgcggcgaggggggccggggcgagcagatcccgggacacgaggggaggg

SEQ ID NO: 151319 - DNA, 472 bp, Zea mays
  Clone ID: MRT4577_69525C.1
gcgtgcattttatgaatcactctggtcacccatggtactgctttgtgtgcagatatcactctttgcgccttctatctgcttttacttaactggtactgttgtatggttggcatttgcaagcaataagccccaggatttttccaagtcaggacctgagtctgagccgtgaatcgtgatgtatggtactcctctgaacataagaacctaaacattaatttgatgtgcatctaacaaataggttcttccttcttaatactacataggccatagttttatattccagcctatatgtgtagttgcaggtcaagcctcttaacaaaataggttttgctgtgtctagagtatcactaaccaataaaatgattcctgggctcattgttctgagacttcagaactgcaattttcattcaagctcatgggtcctgaacgaagatgcaatggtagaagttcatctccttttaaggcgcatatt

SEQ ID NO: 151320 - DNA, 1254 bp, Zea mays
  unsure (1)..(1254): unsure at all n locations
  Clone ID: MRT4577_69526C.1
agtggttggagtaggtcgccgaggaggaggaggaggacaaggcacaacaagccgcacgagaaggcaggcagggcagggcagggcagggcagaggggaattcgaaagaggggaggaggagaagaagcgcgtggaggagcgggatgcggcgggcgaggctgccgccggtcccagtcccgacggcgccgggggacgcggggccggaggtgaagtaccgcggggtgaggcggcggccgtcggggcggtacgcggccgagatccgggacccggccaggaagaccccgatctggctgggcacgttcgactcggccgaggccgcggcccgcgcctacgacgccgcagccaggaccatccgcggcgccgccgcgcggaccaacttcccctccgcgcccacctccgccgcggtcgcgccgccgccgccgctgccactccccgcgtcaaccgccgccgcggcgggcgcggcgacgtccagcctcagcagcgccgttgccgttcgatctgaacgtgccggacccggcggccgacgacatggactggcgctgcgacacgctgctccgcctctagccgccgcagggccgcaaccactcctccccagactggtgcccccaggatactcgctcgcttcgtgtggccgacgctgatccggcggaacggagcggagcaatgcgtgcgtgcgtaccccaccgccatgaagtgctatcgtgctattttgctattctctccatagaaattgataattttagtctctctcttttttttttaccactgccaagactcggtaattactctgtgataatgtgaataactcattatgtaatccgtggggagtggagggagcctggtctcgcgaaaccttcctgtctcctcctgctgtgtgtgtatctgtagcagcagcagcagcagcacgatgtaatactgtctgtcttgctgtaattctcaagagataatggaattaagagtgatttacagaaaaaaaaaaaaaaaaaaaaaaaaaaaaaaaaaaaaaaaaaaaaaaaaaaaaaaaaaaaaaaaaaaaggccgctcggaaaaaaaaacttccgtcgttcaatggggaaaaggggggttgaacctttaattgaaatttttttgctgggtttccgggcnaaaaaaaaaaaaaaaaaaanaccnnnaaccccggcggggaaaaaaatcttccctttttcattggccaaatgggggaaaaaacttttatagaaatttttttgtcgggttaccccccccgttcaaaattaaaa

SEQ ID NO: 151321 - DNA, 247 bp, Zea mays
  Clone ID: MRT4577_69527C.1
tcgtcgcgtgaggtgcgcacgtactcaccggcggttcatgcgagcggagcgcatgggccgtcaaattctggtccgtgcactccatgacgtcggcgtctgccacctccaccctgagcctcccgccgttgtcggtgccagcgccgcccgcgctcgtggccgtgcgcccgccgccccggtgcgatcccagaaacccaatgactgcgacgtggccgaggaggctgagcacgatgcccctcatccaggtcgt

SEQ ID NO: 151322 - DNA, 110 bp, Zea mays
  Clone ID: MRT4577_69528C.1
gggatctccaaccctcgcgtgagcgcgggtgccgactcggcgccgtggtcatggtaacagaagaatgtgagctgcaagtaagaggacgcctacgcctaccaatttgagtt

SEQ ID NO: 151323 - DNA, 1101 bp, Zea mays
  Clone ID: MRT4577_69529C.1
tgacactatagaagagctatgacgtcgcatgcacgcgtacgtaagctcggaattcggctcgagccgagatcaaggacttcattttgatcgtgaggaggaaggatgcccgatcagtgaagatcaagaggagcaaggatgttgtcaaattcaaggtctgctgatccaagtatttgtacaccctctacgtctttgatgctgagaaaacaaacaagttgaagcaatctcttcccctaggtagcttagctttaattcacattcatcaaaaatttgccgccatacagcctttgtgcaacctgcaacttcaatgatgctttcctctgtggatcttggactgcctccctgggaaattgttgcttttcttacaagtggtgtagcactctccagcttcgcattgtcaggtcatgttgttaagattgcaaccaagtttccatttttacacggttctgaggtccaaacctaaatattttcgttggtaaacagggctttattgcacacatcaagacatctctagtgaatatgcaagcattctcctgggaatcacaaacactgtaggcgcggtgccaggaattgtaggcgttgcactcacaggctttcttcttgattcaactcattcttggagtgtacgacatcaatccatcttcataatctatattgcattttatgaatcactctgatcaccataatggtactgctttgtgtgcagatatcactctttgcgccttctatcttcttttacttaactggtactgttgtatggttggcatttgcaagcaataagccccaggatttttccaagtcaggacctgagtctgagccgtgaatcggatgtatggtactcctctgcacataagaacctaaacattaatttgatgtgcatctaacaattaggttcttccttcttaatactacataggccatagttttatattccagcctatatgtttagttgcaggtcaagcctcttaacaaaataggttttgctgtgtctagagtatcactaaccatcaaattgattcctgagctcattgttctgagacttcagaactgcaattttcattccaagctcatgggtctgtaacgaagatgcattgttagaagttc

SEQ ID NO: 151324 - DNA, 338 bp, Zea mays
  Clone ID: MRT4577_6952C.1
ccaacccgtccgaaggacatcgtgccattttacctcgagcacagtcctcgcatcttcccatgcaaaactgggattttggcctgatcataatcaaaactatcacgtggattttgaagaacaagttcttggggccagacacagccttttaggcgtgaagacaaacggaaagggggactggtggaacatatggcgcaagtacctgcagacgcggacgcccacgcatgtgggcggccacgcgcataactactgtatcaggctcaactccggggggaaggacaacatgaagtgcagcatccacgacatcaccaccgttaatttgaccgacgatgagcgggcgc

SEQ ID NO: 151325 - DNA, 354 bp, Zea mays
  Clone ID: MRT4577_69530C.1
acttttactctttctctgtaatactttcatgattatgcaactttcgctactgttgttggcactaaggctactcctgtaagggatctttgtgtgacagtatgttctcaaggagttgcattttgtgcaaaagctatgtatgacactgctacacgaaaatttaccaagtactctgcttcaattggtgtaaccaagtcagtctaccatgcttcattcattctagacgacaatggtgacaccattaaagtttcatgtgtttatcaccttgatgataaacataatgcctcagctgtatctgatctaactctgaagctctcaacaaatcagaacaaacttacattccttgtactttacaca

SEQ ID NO: 151326 - DNA, 528 bp, Zea mays
  unsure (1)..(528): unsure at all n locations
  Clone ID: MRT4577_69531C.1
ctggtgattaataatactactatngacagagccatatgctctgtngaanagtattagtagcagcgctcataaaagctacagttccatctattttctcagctatgtaaaacttccaaactgttcatgcttaaaactgagggttttcttaaaaaaaaaaaaaaaaaaaaaaaaaaaaaaaaaaaaaaaaaaaaaaaaaaaaaaaaaaaaaaaaaaaaaaaaaaaaaaaaaaaaaaaaaaaaaaaaaaaaaaaaaaaaaaaaaaaaaaaaaagggggggtaaaaaaaaaaaaaaaaaaagtttttttcctggggcggaacccccttggggggaaattttggaaatttccaaaaaaagggggggggtttggactttcttttagggggcccaatccccccttaaggggggggtttaaaaaaaaagggggcgggttttaaaaccggtggggggggaaaaacctgggggttcccaaattaaatgcgttgaaaaaaaaacccctttttccaggtgggggaaaaaaaaaaagggccc

SEQ ID NO: 151327 - DNA, 510 bp, Zea mays
  Clone ID: MRT4577_69532C.1
aacaaatattccacacaactgactaataatcagcgagtgaccctactagctaacacatcgtgccaagtaagacagacagatcctgcaatactcttactctgcgttcgtagctcggagcagctcttcctgcttgagtgatatctgaaaggggacacttctactggacaaaatgctcagaaaacggccgcctcgcagctagacatgtgcgaggtgaagccatggctgccatgtgtgctcagtgaccagatgatgatgtcgccgtctcagacatctgcatgccgcagcaatgaggactgcgcacgagaacaccctgtctgactacgcggacggtgtcgacgatggtgtgaaccacaggaggggacgctccatcgtcttcatcgatgatgttgagaagcactgtcgccgaggctgacatcatctatgtctccaagaaggaccccaacaagagtcgcgggcttgaagctagcaaggctgtcgatcccacgaacagtgaaagcgatgcctgcatga

SEQ ID NO: 151328 - DNA, 579 bp, Zea mays
  Clone ID: MRT4577_69533C.1
tcggacaggtctccgccggacgtgacgcaacctcgcgggaagcgcaagcacaatccggcgtctgcgcgcgtgccatcatgatgatgaggcgccagttatcggtctgcgtcctcctcctgctcctgctcgcggggcagcaggcggcggccaagaagtacgccgccatcttcaacttcggggactccctggtggacgccggcaacctcgtcgtggacggcatcccggagtacctcgccacggccaagctgccctacggcatgacctacttcgggtaccccaccggccgctgctccgacggccgctgctgccgccgtcgaaggcgcgcaacgccacgttccaccacggcgccaacttcgccatcaccggcgccacggcgctggacaccagctacttcgtggcgaaggggctgggcaagacggtgtggaactccggctccctgcacacccagatcaagtggctgcaggagatgaagcccaaaatctgcagctcccccgaagagtgcaggggcctgttccggcggtcgctgttcatcgtgggcgagttcggcggcaacgactactactcgccgctcttcgcgtt

SEQ ID NO: 151329 - DNA, 959 bp, Zea mays
  unsure (1)..(959): unsure at all n locations
  Clone ID: MRT4577_69534C.1
attcatcgcgctcacgactaaatcattcggccccaccctctcgccggagcccgagacttgatcaaacaattaaacgagccaataccgtcgcactttgatcaaaagatccttccattactttaaccaccaccaccgtaccggagaccatctccgcgcaaggatttaaacgggcgcgccgatcgagcgaagccattaagctcggccaggtctccgccggtacgtacgtgcgtgacaccaacctcgccgggcgcgcgtgcgatcatgacgatgaggcgccggttatcggcctgcgtcctcctcctgctcgtgctcgcggggcagcaggcggcggccaagaagtacgccgccatcttcaacttcggggactccctggtggacgccggcaacctcgtcgtggacggcatcccggagtacctcgccaccgcgaagctgccctacggcatgacctacttcggctaccccaccggccgctgctccgacggccgcctcgtcgtcgacttcatcgcgcaggagctggggctgccgctgctgccgccgtccaaggcgcacaacgccacgttccaccacggcgccaacttcgccatcaccggcgccacggcgctggacaccagctacttcgtggccaaggggctgggcaagacggtgtggaactccggctccctgcacacccagatcaagtggctgcaggagatgaagcccaaaatctgcagctcccccgaagagtgcaggggccctgttccggcggtcgctgttcatcgtgggcgagttcggcggcaacgactacaactcgccgctcttcgcgttccggccgctggaggaggtgcacgagttccgtnggggacgtcgtcaactccatcggcgagggaatcgagaagctgatcgcggagggcgccgtggacctggtggtgcccggggtgctgccgatcggctgcttcccggtgtacctgtccatcttccgg

SEQ ID NO: 151330 - DNA, 392 bp, Zea mays
  Clone ID: MRT4577_69535C.1
cctatcctcgcgtgcacctcaaagcctgtctgccatttcactaccgcacgcacgtatgcagctcaaccccattgcgacgacaccatgagggagcgcatttagatccacattggccaagccggtatccaggttggaaacgtgtgctgggagctctactgtctcgagcatggcatctaggcttgatggtaagatgcccggggacaagaccatagggggaggcgatgacgcagcaaatataggtgcaagcgagaccggcgatgggaagatcgtgcctaaggttgtgatggcagatgcggcattaactgcgacccttgagcacagtactgggacataccgctagctattcaaacctgaggaggggatcattggttaggaggaagcagacatcaaca

SEQ ID NO: 151331 - DNA, 158 bp, Zea mays
  Clone ID: MRT4577_69536C.1
cgtccggcaaaggattcagcacgccgcccgttgggaagggagcttcgaggccggccggtttggggggtccgcccggccggcttaaccggttgccccggcccttggggccccaaacccctaaccttggtcggggccggccggtagccaaagcccccggt

SEQ ID NO: 151332 - DNA, 398 bp, Zea mays
  Clone ID: MRT4577_69537C.1
cactattgaggtttttgttctgcgggaatgagcaagggacaatccaggctggaagatgttccctggggcacagggaatgtgtaactgagcctgaacgagagagaactcctgccgtaatcagtgaattgattgttgctgaacgtcatggaaataagaggctgttctaagaagacagtttgtgtgagtattagtgtgtccatgacactttcttgataatgaaacgcattgattatgaatatatgtaatgtgatgctacagtgtttgggaacattggtatatattacctagaattaataacccattgctggagctctaactgttactagtgatgagccgatgtatgaacctttacttgatgtatatgctcttctgctcctaccgtgggcttctatgagtcg

SEQ ID NO: 151333 - DNA, 358 bp, Zea mays
  Clone ID: MRT4577_69538C.1
gccacttaggcttgcgatcgcgtggcacgatctttgcgaaaaagcaccctggtctgctgccgaccgagtcgctaacaatcgatttccatgacacgtccccgcgtgggtgtcccatggcactggcgctgctgctctgtcggaggtccgcgcctgtgcgagcgtccgactcagcggtcactacgtgcaacccggcacgcaagcggcaagcccagcggggggggctgcgcggggatcactcacgggacggacagacagctgcgagttcagccactagatctggctggcatgagaggtaaggtgtggtggcgtctagcgactactgacacacatgcgcacattggtcgaattctttgtaatg

SEQ ID NO: 151334 - DNA, 571 bp, Zea mays
  unsure (1)..(571): unsure at all n locations
  Clone ID: MRT4577_69539C.1
ngacacacaagtagagnatgcatacaaaatctgaccactgggnaacccagctggttactgaagtccttgttcgctcttggatttaattgttttttctacatattcttgtaactacataacaagctttcatttcctgaaacacttgtttctcttaattccagggcctgattccaaggctgcgaatgaacttattggtatcgacggcatactgaatgcaatcgctcggaacttggaaaagcggatgaagaacttgcaactgaggtggcatgggtggttgtctacctttcagcactttcagaaaagctaccagcctaatagtaagaagttcggtgccacagttgctgattgggcgccttctagcatctgaaaacttgcagttgctcattccgatcaagccttatcaagtcttatcaagtgtttgaagagcgaccatagggttctcaagaaggaggcatcatgggccatgtcaaatatagcagcgggcagttttgagcacaaaaaactgatatttgctagtgaggcgactcctttgctgatgcacctcctcaggactgcacagtttgacatccgc

SEQ ID NO: 151335 - DNA, 426 bp, Zea mays
  Clone ID: MRT4577_6953C.1
tggacctttgggctgatttatgtgcttgaccgacggagaatacggggttacccacgcctgtacacccgacccgagagtcggaggagataagactatgtaggtcccgaaactcacacgtcggaggagtaaggttacttaagcagaggtcggcaagtaagtatgattggagaagcccgagacttcagtcaaaactaagtcgatatcgtagttacggatgctgagtccaagaggcggctactaagaaggtacatgagacggattccgtttagccgcatagttaacgatatcactatcataaccctctaaggacaggggcgccgtccagtccgcagtaattgacgataacgcccacccccgcatcctgaatcacgcccgaaagtacgctccctcccctagatagcggccgatcggcaaactaaccgtaga

SEQ ID NO: 151336 - DNA, 754 bp, Zea mays
  Clone ID: MRT4577_69540C.1
cattgggtacctcgaggccggccgggaatccagccggcaaagagctcgaggcctcgagcaatagtaagatctgactgatctcgtgagctgcctctccagtgtgctctgtagcccgcgcagatcagtgatgccttcggcggcgatgacggtagcggcgggtctggcgaccgggccgggcagccgtgtgactcggttcgccaagtcgacggcggcgtcggtgacgcccgtgaggccgggcaagacgcacgcgctgtcgcccctggacaacgccatggagcggcacacggtgcacgtggtggtctacctccgcgccgcgccgggcctggacagggagcagctcaaggagtcgctctccgaggtgctgtcgctctacccggccatgaccggccggctcacgcgcggcgaaggcagcgcggacgccgaacctgcgcaccggggttgggtcgtgaagtgcaacgacgccggcgtgcgcatggtggatgccagggcggccgtcacgctcgacgagtggctcgccacggcgaccggcgacgaggagatggacctcctctattacgagcccatgggggccgagccttacatctggtctccgttctacgtccagctgacagagttcaccgacaagtcgtacgcgctggggctgagctgcatccacatccacaacgaccccactgctgccgctctcttcttccacgcctgggcagccgcccaccgtcggaccaccagcacgtacccgccttttggggacatttac

SEQ ID NO: 151337 - DNA, 362 bp, Zea mays
  Clone ID: MRT4577_69541C.1
ttttcatgcgtccggagaaatgatgtatagcttgtatgccgagatagattttatagtacaggctaaaaatctatgacaacgtgtataaatatatattgtaacgaacatcggggctcaaattagccaccatttgtggccctgatatcaacctgacgggctgagcctttattttggttagcaagtaagggactgtactgcgggctggactactgatccagagagaaacatgcttatcttcctctggcggagcccatcatatacaattcctgcccatctctcttatcaaagctatggatgcgtgcttctgattttgtggtaaaattctaagatttattgtgatcttttttaacctatatcatgca

SEQ ID NO: 151338 - DNA, 361 bp, Zea mays
  unsure (1)..(361): unsure at all n locations
  Clone ID: MRT4577_69542C.1
cgggaaggggggcgagggccggcccagcgcggccgcgaggaggaaccccagggaccgcnggccnnggnnccanggcaacggcgcaaaccccaaaggcgccnnaaggcacccgccannagacaacanggccggagcaccaacgacnccacggccagcncaacaggcgggaccccagcaagcgncagccncgcgggccagcncagccccagggaccnngnnccngccacngccaagcaggggggcccaggccacaaccnncagaagggcacgggcacgaaaggggacaggcgngccccnccgcccgcgccccggncggcgggaaaccccgcnccacagcccccggccaaggncgccaccaccc

SEQ ID NO: 151339 - DNA, 2089 bp, Zea mays
  Clone ID: MRT4577_69543C.1
gggacgaattttcggatacggaaaatagcgggcctagaacgtgttgaccccaccactgccgtttccgtcccgtttgcttacgtcaccaatccgctgcgccgagaaccagagacagacagagaagaaaaactgcagccgccgagctcagcctcagccgccgcgacggggacagagaaagatggccgacggcagtgcctccgcctcgccgccttccgtttctccgcaccagtaccaccgcgacgccatcaagtcctcagtgcgcaatacagctgctaataggaggagagaacatgctattgcaatagggaaggaaagaagggaagccttgatgcgtgcaaagcgtgtatgccgagctcctctttctggcagtgatgaggctgcagcagaagagggggacatggttgttgatgaggagaaagcagatcttgagactagaacgactcaggctgttgaggagctgaaatctgctttgtcaagccagggaaaaggtgcacagaataggaagacagaagtgcttcgtgctttaaggcgtttgttgtcccagtctgaagtacctccagttgatgcagcaattaaagctggagcagtccctctattagtgcagtctctgtcgtttggatcaccagatgaacaattgctagaggcagcttggtgccttacaaacatagcggcagggaaacctgaggaaactaaatccttacttcctgctctaccattgctcattgctcaccttggtgagaacagctctacacttgtcgcggaacaatgtgcatgggccattggtaatgttgctggtgaaggagcagagctgagaaacacattacttgctcaaggtgctttgtggcctcttgcccgtttaatgctgtcaaataagggttccacaacaaggactgctgcttgggcattgtcaaatctcatcaaggggcctgattccaaggctgcgaatgaacttattggtatcgacggcatactgaatgcaatcattcggaacttggaaaaggcggatgaagaacttgtaactgaggtggcatgggtggttgtctatctttcagcactttcagaaaaagctaccagcctaatagtaagaagttcgatgccacagttgctgatcgggcgccttctagcatctgaaaacttgcagttgctcattccggtacttcgcggtttaggaaatcttgtagccggtgatggttacatggttgattcagtcctaattgttggaaacagtgtcacagatcaagccttatcaagtcttatcaagtgtttgaagagcgaccatagggttctcaagaaggaggcatcatgggccatgtcaaatatagcagcgggcagttttgagcacaaaaaactgatatttgctagtgaggcgactcctttgctgatgcacctcctcaggactgcacagtttgacatccgcagggaagcagcatacacgctgggcaacctgtgtgttgtcccagcaggcagtggtaaccccccaagtataatcgttgagcatttagttgccatcgtagatggtggagcccttccaggatttataaatttggtgaggtcggccgatatagagagtgcgagacttgggcttcagttcctggaactggtgatgagaggataccctgacagccagggcccaaagctcgtggagacagaggacggcattgaggccatggagaggttccagttccatgagaacgagatgatgaggaatatggcgaatggtttggttgataaatactttggcgaagactatggcctgtgagttgtgccgccgatacatctgggtaaacgcgtggagctatttgtgggtttgaaatgtaacgatcctggaacagaaggatgcgccgttcatcatggtttccatgcaatttagcccctaatatatagctggaaatgtgaatgtgttgaaactgaccgtgaactggagatgttaagtgtggataccttagatagacatagactgacatcttgcacagtacttcctctatctcaaaatatttttcgtctcgtattttaagtgtggaaatgttggagatgctcttagagtacaaatatatgactgattaatctgatgatgtttataatctaccat

SEQ ID NO: 151340 - DNA, 597 bp, Zea mays
  Clone ID: MRT4577_69544C.1
tacgtcgtgtatgccgctcatgagagccactgcgcagacgcgcagagatagacattagcgagagacaaaacctcccagataacgccctggcgcgcaccccatggcgtcaccagcgcccgagcgtaggagatctcccggcaacgacttacacgagacccgtcactcgcgtctcgctgcagactcatgcgcgcaccatctatggattcgctccgctgaaacaaatccagcccgcaccctgtcgcgcatctccacttgctacacgagacgacatgtcggcgcgcaggtgccaacaacaccacttctgcgcgcacctgaacgaggacccgccgtagtgtgctcatcttccacgtgaccgatgcccccgcgcacctcgtccgcgtgcaccacatccgctccgatacacccttcctgacgctgcccgacgaagagaagccggtgtgggacacgcacgagctccacgagcaggacgccctgctgctcatgcccgacgaggccaacgtcaagtatactcgcgacctggacaacgtgtgtgatacctacggcaacacccctcgacttcgtgtctgcggaccacgactacgcgctctcgctcgatct

SEQ ID NO: 151341 - DNA, 412 bp, Zea mays
  Clone ID: MRT4577_69545C.1
aactccacctcccgctcctttctcactcacggtgttcagcttcacatgtctgacccctacacttttttccaaaatgtcaaggttgcgcatgattcggaccaccaacgacatcatgcgctccctggagttccaggcctcggtccccgctcgcttttgggctgaggcgctgcataccgccacctacctgctcaatcgccttcccaccatggcgattagtgctcccactccccaccttgctctctttggtactcctccctcctatgacacctttttgcattcgaatgtgcttgctataccaacctctcagccactgacccgcataagcttgcaccccgatagtctttttgtgccttccttgggtagtcgcctgatcataaggggtattagtgttatgatctttccgacagcaacg

SEQ ID NO: 151342 - DNA, 416 bp, Zea mays
  Clone ID: MRT4577_69546C.1
gtttcgaatccctgctattgcatttacttcgtacgccgtcctcttgtgtccccgggaattggagatagttgaagatgatctcctcctattatcggagacgatggatatccctcccggtggcacggagatgtcctactacaatcttgtgcacgaagcgagcatgccccacaaggaacttcctatatgaatgcctgttccctgagcgctgctgcttctgctgctatcgagacccgtgagctgctggctgcgaggccagtctgctgctgctgctaatcatggttggagggcatggcggcctctcctcggggagatgcctccttgcgggacacccaccggcgaatagattgctgaacttatatgcacacaccctttaaatgctttaggggctgattgatgtgatcttgagcgtgtgcgag

SEQ ID NO: 151343 - DNA, 472 bp, Zea mays
  Clone ID: MRT4577_69547C.1
gaactcaaaagaagacctgcttaaataatagaagccttacagatattcatatgccggatcattggcctcgcgtgacaaaatcaaacactgtctgacactgacgccaacattctatcaggaaatcaccaaactaatttaaaatgcgctacgaacataaagggttggaataccagctaagcagagcgacctatggccagattcaagaacccaaaaaaaaaatatggacccaactttccgatgctacttgctacctcattcacaagcatcttccctagtggtccacctatgcgtcaggctgtaactgggtcattgatggtccaccattgccaacatttggaattgggctgtatgcaggatccatgcatatgagcaggcttccgctcgtaacctggaccagagcttgcagcactgcttgattccagaacattccatcagtttgtagtgcccatgacttgagatgcggagttgacaa

SEQ ID NO: 151344 - DNA, 654 bp, Zea mays
  Clone ID: MRT4577_69548C.1
tctcgatctataacttttgacccacaaattttatttctaggtctaggcagaccacagccatgtgcgagcatccccaagggtataagagtcacatgccactctaaccagtgaagacaaaatgtctgacttggagattaacattccaactgcctaccatccctatgttgacgtcaatggtggggacattggctgggaagaaaggctaaaggactaacatcacctgcgcatcctggcttgtcataggtggcccgatccatgactaccgagacagcgattgatagaccgagttccagctacctgggagatccttactagattctcagagagagcatgcctgatgctgcaggaacatgcgggccaaagacccataactgggaccggtcattgaggtgcagagcgaccagaggaagaacgcttggaattttgtcgttcagaccggcattgtgaataaggagcacattgagacccatggctcttgagcaaccgccgggtccatagcatagcaaccctgcgtgcagggtcggcttatgatatataatatctgaggcggagcatatgtatctggttgagaactacaagcatgcctagaacgccctctgcacgttgctcctagtacacatgacacatatagccccctccatgcgcggatgcttg

SEQ ID NO: 151345 - DNA, 277 bp, Zea mays
  unsure (1)..(277): unsure at all n locations
  Clone ID: MRT4577_69549C.1
ccgacccgacccacgccgaacctaacttccttaaaacctatcctttanccttttatatcctacattatacctcttgtctatgtgatcatttcactttcaaactcttcaccataccttatcacttatttaaaatttatctccactattacatcaaccagaaattcgacaacttctacaccaccaaaaatcaatcatctctttctcttccaacccactctactaacccaaatcgcatttcaccaaataacaattactctagacaaccataccttcttaa

SEQ ID NO: 151346 - DNA, 558 bp, Zea mays
  Clone ID: MRT4577_6954C.1
ggccgcaaattttttttttttttttttctaatagaatatagattaccccactgatctactcctagagatcctgtaaatcttaacattggtaccggagccataatctaggtgttgatctagttgggaaaagttttaatcgatgaaaatgaaaagaggtcgaatctgtttggattcatagataaaacaacagaaaagaaagccaaatggcgactggatttacccgtgcaggtgcaggggcgaaggctcctttctttgccgttcggctgtctgctggccgccgttcggctgtctggtggccgtgcgcaggcagcgccgctgggtgcagaccgccgcgtgattttttgtttcctcccagcgctggacagaggatggcggcgctcttggacccggcgtccatgcgtctgctgtcgagggcgtgtgagctggagctccgggcgcacaagggccatggcggcatgcccgaatatagggccgaacgaggcctgcgtgacgcgagccgccagctgcgccatcgagccgaattccgagcttacttggcggcattgccctaaggactgt

SEQ ID NO: 151347 - DNA, 1254 bp, Zea mays
  Clone ID: MRT4577_69550C.1
cattgggtacctcgaggccggccgggatcaagcggacccgcaggtcagaatcttctctcttgacaaggagcaagcctaatcccagaaccccacggtcgtgagaccctagctgccgtcgccgccgccgccgccgccggtgaccggcgacggcgatctagatgggggcgtcggcctccgtgctctcgttcccaacggccgccgcgttcccagcagccgccaccgccgtcgccggggccgccggctgcttcgcgctcggctacctcctggccttcacccgcctcccgcgccacgccgccggcccaggttcgggagggacctccgatgacgattccgaggatgactcggaagaagatgatgacgaaaactccggccgcagtcgcgcggcgaagcgggcgggagggcagaagagggccgggctccggctgctctactgggcacggaacgtggtgaccaagtccgactctgccagggaggcggaaaggtcccggtctcaggccgcggccagtcccctggagatcgagaaccttgctgagataatagaagatttcaaaatggtgttggttgtgaggaatgatctgaagatggggaaggggaagattgccgcacagtgcagtcatgcaactcttgggctattcaaaaaactccaacagagagctccaaaatcactaagaaggtgggagcggtgtgggcaagttaaagtggttgtgaaaatagaaagcgaggaagacatgctagttttacaagggagagcaaagtctttaaatctgccaactcacataaccatagacgctggaagaacacagattgctccaaattcaaggacagtcatggctattctggggccagctgatatggttgatgatgttactggcggtctgaagcttttgtagaaaaccaccttgtcagcattttcaacttgggtcttcatagagcagtgctgggactttgcaggccacagtggtctctgcacttgtactgatgtgcggcagaagaatgaaccttggccccgttggttgacctgagtttcttgtccatgaatttatttggaaggagagcttgcattcttttttcacttgtaccgaccgttatctttggagttgtgatgttagcagttcgaattctggtgttgacaacttatagaccatcatttcttctgtaacatagataagaaaatactatttgactataaaaaaaaaaaaaaaaaaaaaaaaaaaaaaaaaaaaaaaaaaaaaaaaaaaaaaaaaaaaaaaaaaa

SEQ ID NO: 151348 - DNA, 137 bp, Zea mays
  Clone ID: MRT4577_69551C.1
aacaaaggctatgcgctggggctgaacgccctgtaccctcatgggttctctaagctaaagcacaaatggtgacatctggtgagcgacacctgacgccaaaccgtgtatgcatatctaccccatgaacgtatggcttg

SEQ ID NO: 151349 - DNA, 192 bp, Zea mays
  Clone ID: MRT4577_69552C.1
caaaatacgtttcagtccacttcgaaccaggtgaattataacaaacagaaatagacactatttgatcgggctaccgggacgttacctgataacagtcgatgggctgaaacaaaagcgccacggattcgggaatttcatttgtgagtaaagtaccaacacaactaaaattcgccttaaagggtagactacggg

SEQ ID NO: 151350 - DNA, 384 bp, Zea mays
  Clone ID: MRT4577_69553C.1
ggtagtttatggtggacctttccccctctcgtcctcgggtggcgcgcgtctggcccccggggggggggggggggggaccccgcggggccgaaatctgatgaagactccgtccccgacctgtgcaccaggacggcggggaacacgccaacaagtacaagggggtggacccggtgacggtgctaaagatgcaggtggacgctttcaaaaagcccgtgaagggggcgcggaggcctcccaaggaggatttcaagaccgccccgaggcccggggggcggagggcgctgaacctctgcaagacctactacctggacccccccgacaacctcggcgcctgcaagggcgccatcggcttccgcgacgccgtcaccatccgcgccacgatga

SEQ ID NO: 151351 - DNA, 162 bp, Zea mays
  Clone ID: MRT4577_69554C.1
aaagaaatgaactgatgaaaaaagaaagcagtcgactccagaagactggacatcgtgtacatactcacctcgtaaagagaaagcactaaaaatatatctggatggcgcccaaataaagatcctgactcaagactgactctgatagtgtagcattcccggggg

SEQ ID NO: 151352 - DNA, 255 bp, Zea mays
  Clone ID: MRT4577_69555C.1
gtcacctctgcatccttccaacctaactaatttccatacatccaaggacctttggggcggactgaattctgggtggcgcagaccatcttttcacctaacggtgatggactaagacgagatcatgccctaccgctcggagctatgacatggagatcgctgaaatatgtgctccaccacaagagcacaactgcatgctcatgaacaggattgtgcacaacattgctcgtggggaacaagaggactggtacaggcgcc

SEQ ID NO: 151353 - DNA, 1310 bp, Zea mays
  Clone ID: MRT4577_69556C.1
ctacatacaacaatactattatataatatgtaaatattcactgattttgcagggtatgcgggtgcatacccagcataccctgtgcatccgccactgagttggggtggaggtatgcaggtgcttgccataattataaacagttaacatcttttgtttgactatacattctatttgctgaaaccactaggtgtgaagacacacaagttgcatataaacttcttaggctcggctgctcagcatggagaaaagaatagtttgcaccactgtaagcacaactgaatcagagctcaaaggattcaagagtgctcactgctcagagtaatgtaaccacgatatgacattagacaaggcaaaacgatgttgcgccgaattcaaactagctttgatacaaggtgcacaaagaaggcaaagcaaaaaaaaaaaaaccagagctgtgaacacagcaccttcgatgcgactgagacatggtcccgaattgccactctaccacccaatgtaacatagtcccccagtgttgcagaaccagcaatccctacttgcccacatattatgcagcacttcccgatgaccacattgtggcctatctggaccagattatcaatcttggtatgatttccgaccgttgtctctcaccagctgcctctgtcaatgcatgtatttgcccctatttctacatggtctccaattcttgcgcacagcatctgtggtttcttcttaacttgtccagcctcatccacaaaaaagccaaaaccatcttgaccaatggaggatccattgtggataatacagaactcacccactgagcaattgcttaagacaacattgtacccgaccctagttgattgacctatggaaactgaaggcccaaccacagccccagaaccaacgacgacctctttgccgaggacggcaccagagtgcacaaccgctccagcctccaccacagcagtggggtcaacggaggccgcccggtgcaggatgcccccgccattttgccacgacacgaactccatgctgcaagcagaagagacgccgcccaaagaccgcgcaaagtgacaggcggcgcgcggcggtacggagtgtagtgacaacgctgcctccgccgccctgcggacggtcctaggcaggatgactgccatcatttaccaaattagtagatcctgatggatgagcctgctgtggcggatggcaaggcaagcttcctcgagctccaaagcgaaaagacacagtcgagggatcagcagtgagcaagcacgagcttaacggcttaaccacgagaaaaacctaggttttcaaacagcattcgcacc

SEQ ID NO: 151354 - DNA, 301 bp, Zea mays
  Clone ID: MRT4577_69557C.1
cttttgttgatgatgatccatcgacggcgggcggggcaactcttggtacaaatcatacacgccgatccatatcatttgtagcaagattctactgtacctgcgtacctccaagcaaaaagaagagacagaggttggtctgaaaacgcaatacctaatggctgtaggaaagtgagcatggcattacatcacgtaggtagagaggtagcgaggatgtgtaatgctgacgagggagaaccaaatattgtactggtacacataaatttatatggctgcggaaggaggaggctacactcagatatta

SEQ ID NO: 151355 - DNA, 420 bp, Zea mays
  unsure (1)..(420): unsure at all n locations
  Clone ID: MRT4577_69558C.1
cggcccggaaggcccggggcgacccacgcgaccggcgacaatggcacnggaatgtgcatagttgganangcnggcgacgaagcaccaagggcggggggggggagcatagagggccgaccgcgccacaccgcagccacggaagggatgggacagaaggacgcacatgctggcgatgaggcacagaccaagagaggtattctcacgctcaaggacccgaaggagcacggtattgagagcaactgggacgacacggagaaaatctggcagcacacttcctacaacgagctgcgtgttgccccagaggagcaccccgtgaggcacaccgaggcaaccaagaacccaaaggccaacagggagaagaggacccaacacaggggagagacgtgcaacgcgcccgccaagcaagaagcaaaccaagcg

SEQ ID NO: 151356 - DNA, 391 bp, Zea mays
  Clone ID: MRT4577_69559C.1
cggacgcgtgggaaaaaaaaaaaaaaaaaaaaaaaaaaaaaaaaaaaaaaaaaaagggggggaaaaataaattttttaggtaaacaagattaaaaacaaaagggtgctaaagttttgagtttattttttttctattcgtgggcgtgcttgtcctttttttgtggggggggcgcttctttgggccctccttttttgcgggtggtgtgccaagattaggtttttcctgggggccccctaatttgatttgcggggggggtggtttccccggtcgggcggggaaaaccgtgggtgtgccccattgtggtcggcggggtcattccccttttggcgggggggggtaataggtgggggcgccaatctactcctctttttgctggtgctgccttttttt

SEQ ID NO: 151357 - DNA, 2449 bp, Zea mays
  unsure (1)..(2449): unsure at all n locations
  Clone ID: MRT4577_6955C.1
aaaaaatgcaaggtctggctcgtactcctggcactcttcctagcctccgccgtcctgttatacgtgttcttcgagcgatcaaacacgttctggaactttcccatggggcggcaccagccggagaagccatggaacgtgctcaaggagtctcctccggtccccgaggaccagactccatggtgacggtattgcccccatcgcggcgtctgtgaagaaaaaatcgatactgtcccagacccaacaaagccacngggtcccccttctgccgtacgccgcgaacacccgtgccggtgccgccgcagacttgtcctccgggcgccggatccaggccgcgcacgccaccttcccgcctgcagccgcaggagcgtctcctctgtccatggggggcggttgtggtggcccgcctaggttctcagaggggtttagaccttttcaagggagccccgcgagtgtctacctcgatgcgaggcgtctggcattaggaagccacgatggtgacttttgtgctgttgatatgaagaaaatggcatcgtccacctggagcaagaaggccaatctcggccgcctagtccacgcgaaacccctaggaataatcaaacgcacatgatttggtcgtcgttttcggctcgccctcgccgtctgatccccacctccacccttccctctcctcaaacaacagcggcacagcgctcgattcggcttcgcctcgactcgcgggctcccctcgcaaagctctaaacccctctgagagaacctatccgggccaccacaaccgccacccatggacggcggcgacgctccggcggcgggaggcgggaaggtggcgtgcgcggcgtggatccggcgccgggaggacaagtcggcggcggcgccggcgcgggtgttcgcggcgtacggccgggcgggggcggccggctccccggccgctctcgaggtgcttggcttcgacgccaaggagtgctccctctccccctctcccctggcgagggccgtgatcggggacggcggcgcgggtgacgcgccgcgcggcatcgcggtgcaccccgccggtgacgagctcgtctgcgccacggcgaagggctgcaggttattcaaactgatatttgatgagttcacagtacgcattattccaagagatgctcctctactagaatctgttggaccacaaaagtgtcttgctttcagcacagatggtgcaaaatttgcaattggtggagaggatggacatctcagaatattccattggccaagcataaaagtgcttttggatgagcccaaagctcataaatccttccgagacatggatatcagcttagactcagagttcttagtttcaacatccattgatggatctgcgagaatatggaagatagatgagggcgcaccactggtcaatttgactcgatcctcggatgagaagatcgagtgctgccgcttttctagggatggcatgaaaccgttcctgttttgcactgttgcaaaaggtcccaaagttgttactgttgtctggaacataagcgattgggagagaattgggtacaaaagacttctggggaagcctatctccacactctcagttagcttggatgggaagtatctggcattaggaagccacgatggtgacttctgtgctgttgatgtgaagaaaatggaagtttcccactggagcaagaaggtccatcttggctccccagtcacctccattgaattttgtcctagtgaaagggttgtaatctccacatcacatcagtggggagcagagctcacgaaactgaacgtgcctgccgactggaaagaatggcaggtctggctcgtactcctggcgctcttcctagcctccgccgtcctgttctacgtgttcttcgagcgatcagacacgttctggaactttcccatggggcggcaccagccggcgaagccatggaacgtgctcaaggagtctcctccggtccccgaggaccagactccatggtgatggtattgcttccatcgcgtcatctgtgaagagaagagcgatactgtcccagacccaacaaagccaccgcgtgctgtttatcttgttacaattacaaatcgtccatgcttgttctaccactctcagccagtgaccacgcaagtttgtaaccctggactgccataaaccaggtgatagtaattgaacacattctgtcttcgtgcgagtgtctgagtgtatccaggtattaccatgccgaccactgtcctgcttcctgatgacgaggtggctgatttcctcgtctttatttatacgttttgggatcaagagaaataaaggagctaaaacctctttgctattcaattttgaatagcaagatgattttgtcccctagctcccaaagaagcccggtttggaaaccctaatcgagattggagggcatggaattgaattgagttcaataccaaatcaaccactggtatttaaatgcgatgt

SEQ ID NO: 151358 - DNA, 314 bp, Zea mays
  Clone ID: MRT4577_69560C.1
acttgaatatttgtaaccggaaaaatcctacaaaaaaccagccccaaatggccaaaccctatccgggttttacaaccccgggtgcgaaaaaaccggaccggggttgaccaaaaggggacccaaaatacatttacgcaaaaggatgggtccacaagccttaaatggccaaccgggaaggggaatacccaacggccggttaaaaaacaaaggttggttgggaaacgggtagaactttaaactgggaaccttttgggtggggcccccttgtcccaccccattatatcccgcaaaatggccgggaaaaaacagaaagg

SEQ ID NO: 151359 - DNA, 1243 bp, Zea mays
  Clone ID: MRT4577_69561C.1
ccacatattccattttacatacatataagcaatggcaatggagggctatagcaagatctatatcaagccatgaagcaacacatgcaaaaaaaaaaagagaaagaaagaaaagagcaaaatgccaaacaagggggcaccaaaaaaataataaaaaacagagaagcggggcggggcaagtggaacggcagcgcaacaggaagggggcaggggggcaccgaagcgtcaaaattagtgttacaacttacaaccatgccagcccttgcgcctgcgtcctaccgtgatgagcttctgccagtgacacggccatggaaaacatcatctgctcctcgacgctctccgggcggaagtggcttggacccatggcgaagttctcggcgaaaggcagcggctgcatggcccctgcatccgccatgatgtccgatccggcgtagcttgttcctgcctccgcgccctccgaccagtggtcggccgagcactctccctcgtctcttaccacttccctgctgcaacttggcgctatcccgctccaggtgtccagtgaactgttctcggcgccgcacaggcttccactggacatgttgcatggccgtcggatcatgtcaaagactgggtatgtgctactgccactcatgtaagagaaatccatgcttggtgcctggtgctcagccaaagccgcaactgcacacgaatatccacctggatgaggcatttctagaggagcagccggaacaaatgcctgcctctcacgtgatggtggctcgattacaggaaagtagctgccacagacaggatttactagatgcccttgttcctgctgaatggaacgccaaattgcttccataaccatcatatcctccagattcatgtcaacattatcatcacggttgtgcctagaatggaaaggccgcatgttagcctggctagagcatgaaggttcagatgaacagcattcatttccttgttcagtacattgatatgatggcactgaaaaggatgtgctgcaaatatctcgatactcaacttctgttgttggggttactgttctgctagaagaacacctgctctgttttcttttcattttagcctcttcatcttggagttctttttggcgcatcctcaattgtgcttctatgactttctgttcttcaaactgctctatgctcctttcctcctttgttttgacgccacgatactccacagcataattggccgttttgcagaatgggcactgtgtaaaccgagc

SEQ ID NO: 151360 - DNA, 134 bp, Zea mays
  Clone ID: MRT4577_69562C.1
acgcgtcggccacgcgtccgcgagaacgagtacagcatatggaagcggcgttcaaagatgagggcgacaagtacatcaactgggcagcgaagatggccatctccaccaacatcggcataccgtggatcatgtgc

SEQ ID NO: 151361 - DNA, 272 bp, Zea mays
  Clone ID: MRT4577_69563C.1
tttgtcggcttacaaggcaagtcaggcccgtgtgatcctgtctgacgtccacagtcagatcactcagcgcgggggcctattgctacctggtccatgcgttatgcgtccaataccggagcgggtgctacagccgtgcttgagctgcgcgacatcgggcgatgatgtgtacgaagagtccgtgctgaagctaggcgcacgagatacgacaaagcttgaccagttcataagtctaaagatgctctaccattaccatgacatagttgaggaccaac

SEQ ID NO: 151362 - DNA, 1558 bp, Zea mays
  Clone ID: MRT4577_69564C.1
gtgttgctcaaggggatatgtacaggtaatgcatgcatcctactgttgatttagccatcccacatctgcaaataacctttgcatatcctgtttggcatttttacagagtgttttcttcaaatgaaaccaactcatactgctcgacctacacagtgcccattctgcaaaacgcctaattatgctgtggagtatcgtggtgtgaaaacaaaggaggaaaggagcatagagcagtttgaagaacagaaagtcatagaagcacagttgaggatgcgccaaaaagaactccaagatgaagaagctaaaatgagaagaaaacagggcaggtgttcttctagcagaacggtaacaccaacaacagaagttgagtatcgagatatttgcagcacatccttttcagtgccatcatatcaatgtactgagcaaggaaatgaatgctgttcatctgaaccttcatgctctagccaggctaacaggcggcctttccattctagacaaccgtgatgataatgttgacatgaatctggagaacatgatggttatggaagcaatttggcgttccattcagcaggaacaaggacatctagtaaatcctgtttgtggcagctactttcctgtaattgagccaccatcacgtgaaaggcaggcatttcttccggctgctcctctagaaatgcctcatccaggtggatactcttgtgttgcggctttggctgagcaccagccaccaagcatggatttctcttacatggctggcagtagcacatacccagtctttgacatgatccgccgaccgtgcaacatgtctagtggaagcttgtgcagcgtcgagaacagttcactagacacctggagcgggatggcaccaaattgcagcagaggagtggtaagagaggagggagagtgctcaaccgaccactggtcggagggtgcggaggcgggaacaagctatgccggatcggacatcatggtggatgcaggggccatgcaaccgctgcctttcgctgagaatttcaccatggctccaagccccttcagcccggagagcatcgaggagcagatgatgttttccatggccgtgtcactagcagaaggtcatcatggtaggacgcaagcgcaaggtctggcatggttgtaagttgtataacactaattttgacgccttgatccctgcccctttctgttggttcgacctgcttcccctgcacctctgcttttttgcccctttgtttagctttttgccccctttttttttcttttctttcttttttgcatgtgttgcttcatggcttgatatagatcttgctatagtcctccattgtcattgcttatatgtatgtaaaatggaatatgtggaaataggaaagaaaatgggtcgaaagttcttttgccggtaggatgcccagtgtgttttcgcattgcaaagcattccaagattttgcaaagttgacctggaacaggcattttagctattttttccgttgacatgttcttggggtgtaaaaatgtttgattttatgggaaaaaacaactagactctgggccggctgaggttaatttc

SEQ ID NO: 151363 - DNA, 137 bp, Zea mays
  unsure (1)..(137): unsure at all n locations
  Clone ID: MRT4577_69565C.1
gtaacctggtttttccgtccgcaccaatcatcatctccataaccaacctaccaaaacttattgactttccgtcatatgctgcttcatcaattaaattctcattcctccttagcctcttacctttactactattctng

SEQ ID NO: 151364 - DNA, 310 bp, Zea mays
  Clone ID: MRT4577_69566C.1
ccggttgcccaacccttgcaaccgcctgggctgctttcgggttgacgggccatcggcagcgcccgccggggctcctgggccgacattgaaggccgccgtgcgcgcgctcttcgacctccccgacgacgccaagcgccgcaacgccgacgtcatccccggcagcggctacgtcgcgccctgcccgccaacccgctctacgaggccttctggctcctcgacgccgccgcgcccgccgacgtcgacgccttctgcgcgccgctcgacgcgccgcccatagtcaaggagaccgttaagacctacgcggagaaga

SEQ ID NO: 151365 - DNA, 475 bp, Zea mays
  Clone ID: MRT4577_69567C.1
cacacacaacaaccacactcttgcaccgagctagcagccaagatggcgaccaaacacctggctctttgcctccttgttctctttagcataggcatgggcatggccaccgctgctgcaaaccgcaaactgggttatggccccgggggaggaggtggcggtggtggtagcggtggcggtggtggcggcggctacggaggcggtggcggctacggcggtcggcgcgagggtggtggtggcggctacggcggcggcggcggcggctggagggactgatgtgtgggcccatcctggcttcggccgagttatcttatctatctatagtatcgtgttaccgttcgcttctgtcaccgtgttagtgtccgttctacctttggattaggtgttggtacccctgttgttccctttgtttgctcccgctatgaaacgagacgagagaagaatgagcaaaaaaaaaaaaaaaaaaactcgagcccgg

SEQ ID NO: 151366 - DNA, 1351 bp, Zea mays
  unsure (1)..(1351): unsure at all n locations
  Clone ID: MRT4577_69568C.1
agcagtggtaacaacgcagagtacgcggtgtaatcatcaaacaacaatacagatgcaaaatgaaatgtagaaggtacataaaattaagtggcatcatacaaaacatccgccttaggatcattgtagctcttaacccaaacagctccacaacatgtggttccatgattacattagacgaatcaggtgcacatttaagaaataaaatcaaggactgtttaggaacaatggctaatagtaaatttcaaattacgcgcaaataaggaactttgaaacttctaagataacatatagagtgcaaaaaataagtttcgcattcgccacactcctccagttccccaattttattggcaacttactcctgctttggttcatcacatttcacatctgaaccaacaactacatgataacaaaaccagcatcaaatgttgcccctcgaaatcgaacaacagaaccaaagcaattggaaaagtgaaatcatctaaccttttagtttgctgcaccttgccctcctcttttgggttgtcgcatttcacatctgagataacaactacataataacagaattagcataaaaacttgtccacaaacaatcggcagtagaagcaagatgactaccagtgagggattcctttttgagatanagatactcagaccagtaccaagcttcaggtgtaataaaataaaaagtatcagtataactgctaaatctaccaacaaccccttgaaccaagcttcaggctccagatttcatacctgatgacgatttaggcatgatcctaggtgccttaataccttttattttattacacctgatgaggttacaagcacgaaagaactacaaatatgtcactatttcaggaagagttgagtataaaaataggggcatttaaacttacatggcatgtatcgactataacagaatcattttgagctagatggttgctccagtactcatatgctagtatttccaagattctacatgtatcatctgctagaatcatttcgcctttatgaattgaattgttcataaagcaagtattttcgagattctccaatcctattaaccccatagaaccagctcttccaaagcttctgtaatacgaatcagaattcatatcactaacatctccataattttctttattagtaccaccgattttggatgttaaggagttagacattgcatagacttgcacttccaaaaggttttgcacatacactgaaaaggataagtacatctggcaagaaaatattaggctatgctataagacgataaaccataaattaataccatctccaaaaaaaaaaaaaaaaaaaaaaaaaaaaagtactctgcgttgttaccactgct

SEQ ID NO: 151367 - DNA, 300 bp, Zea mays
  Clone ID: MRT4577_69569C.1
ttgaagagcagcagttaaagatatatctagtgaaaaaacaggaagcgtattgaagcttggactagaatttgctcttggtattaaagagacaagtttatcacagaattttttttacctgctggcctattgctataccaatgatgttgagtggcattttctttttagtttttcattaaaatatattccatatctacgactataatatcaaataaagtgattattttttacaaccctcttaacattttttggagatgacattctgattttcagaattaacataaatccagaagcaagttccgt

SEQ ID NO: 151368 - DNA, 332 bp, Zea mays
  Clone ID: MRT4577_6956C.1
aggggggaagggaacaaatttttttaagggctcgtcaggcccactggaccctacaaggtttggtggtggtgacttgttttttacgagcagttcccaaatccaggtgttaaaggaacacaagcttttaccgggacaaaaaaagggcaacgttttcacaggcattgggaatcgggggaggacaaatattggttttgacctaacatatttccataataaggtctaaaggttggagagggagccttttcaggttaacgttttgggggaccaaaaagggcataaaagcttgggcacaattccaacttaagttgacgaataaattaggggctctcctt

SEQ ID NO: 151369 - DNA, 226 bp, Zea mays
  unsure (1)..(226): unsure at all n locations
  Clone ID: MRT4577_69570C.1
ccagcagcagcgagaagaagacgncgnggccggagggggngggcangaccancaaggaggcgacggaggggaggcncaaggacangcccaacgcgnacanccaggngcngccnngagggacgaccgngacgcaggaccaaggacccgaccgcgagcgaaacaacggggacaccgacgacacgacaccgacaggggggggaaacaaaccaaaagcaaaaaacaaacc

SEQ ID NO: 151370 - DNA, 118 bp, Zea mays
  Clone ID: MRT4577_69571C.1
agctcaaggcggtgctgtattccaggttaacggaaaccacgaaactatgaatgtggaaggtgatttccggtactgtgatccgggaggctttgatgagtgcatgcgcttccttgactac

SEQ ID NO: 151371 - DNA, 268 bp, Zea mays
  Clone ID: MRT4577_69572C.1
ctctgtttcaaggtggattgtttgggtcaaaagaatgaaattttgctgctgaaggtcggtcaaagcgatatggtggtgggatccatgggaggaacagacttcaatcacgccggtcaacaagtctggaaactgcacatatactggtggggactcgctcgggaaaacaacgctgactacacttctggcttgcatatacaattatgagagctggcagaggtacaagaaaaagatggtggcttgcgagagttgattgttgcgaaagctgatt

SEQ ID NO: 151372 - DNA, 1572 bp, Zea mays
  Clone ID: MRT4577_69573C.1
gaaatgacgaatctagttttttcagggttctagaatcaatgataaaattctgtggggggcgtaaataataatgacatggcaggaactgtaatttgggctggaatggaatcccgtgagaagtcttgggactgcctgctaatctcgattctctctctgcagctctctcttcaccacacttctcacgcatggagttcgaggatcgctgccacaaggtccaggagcccaagttcgactgtctgctcttcggtaagccgctgctccgcttcctgcagatacgccgccgcctggcccgttgctgtctcgtttttgtatcgttctgttgtcgcctcctcctccttcttcttctgcctcttcacggaatgcaagggttttctgacctgttctcgcctacagacctcgacgacaccctgtatccgctgagctccgggatcgcgggccatgtcaagaagaacattgaacgtccggttcctcttctcctgctgttactgaccgctgcttgtttttttttacctcatctgaactttcagcgaactgaatgcctgcttgcaccttctcgcttctgtcattcactccagattacatggtcgagaagctgggtattgacgagagcaagatcgagaacctgggaaatctgctgtacaagaactacggcaccacgatggctggcctcagggcgatcggctacagcttcgattacgatgagtaccacgccttcgtccacgggaggctgccgtacgacaacatcaagcccgaccctgttctcaagcacattctcaagaacctgcgcatccgcaaactcatattcaccaacggcgacaaggtccacgccgtgagagccctggagaggctgggcctggaggactgcttcgaggggatcatctgcttcgagaccctgaacccgccgtgcccgccgcagggagaccgggagcccgagatcttcgacatcgccggccacttcgcccgctccggcgccgccgccgagcttcccaagacccccgtcctgtgcaagcccaacgtcgacgccatggaggaggcgctcaggatcgccaacgtcaacccgcacaaggcgattttcttcgacgacagcgtacgcaacatccaggccgggaagcagatcggccttcacacagtgctggtgggcaagtcgcagcgggtgaaaggcgcggaccacgcgctggagagcatccacaacgtcagggaggcgctgccggggctgtgggaggaggccgagaaggcggaggacgtgctctacgccgagcgcgtcgccatggagacctcggtcaccgcgtaaaccccccctctcgaatcctccggtgcaccgttagcccaaccttctcgacatccaggaccgggacgatcgcataccactctctccccgagccagctagggctggtggtctcacgctggaactgaatccagccatggccgggctgagaatttccgacagcaggaaggggtgcagcatgtaaaggggggagcagatgagatcatgtttgggatgctcccagatatgtatagttatgtatcagccagttgtttgtaaattaccaataaatattagaagtaataag

SEQ ID NO: 151373 - DNA, 255 bp, Zea mays
  Clone ID: MRT4577_69574C.1
gaacccaaaacaaatttaaaaaccttaatttttaaccgggcccggggccccttaatttttcacatttttttttaccccgttaagctggagttggccccatcccacatacttctggggggggcttgtgagtcaattccaccacacatttcccacttttccacttgttttgccccccccttttaaacgttttttccccattttttctcagttataggaatttttatgcttaaaaatccactcgaaaccccccttttt

SEQ ID NO: 151374 - DNA, 486 bp, Zea mays
  Clone ID: MRT4577_69575C.1
tgttttctcccagtggaagtgccacattttcattgaaataaccaaggcagagttgtgaatacatcttttcagtgttttcagcctgtatgcttttgtgatcactcatcttgttttcatattttgttttttatgtttctctgtcatttacttttctttctttttttcttttattttcctctatatttctatctttatttttttttttatttctttttattcttacctatttttcatccttcttcttttctttttttatattcttttcttttttctctttttttttttctttattttactcatttatcttctttttctttatattttattttattattttctctttctttattttatttcttattttctttctatttaatctttctattttctttttttctttctctttcttttttttactttatcttctcttctatttctatactttattattcatttctatcatttttcctcttttttcccattttc

SEQ ID NO: 151375 - DNA, 814 bp, Zea mays
  Clone ID: MRT4577_69576C.1
gaaatgacgaatctagttttttcagggttctagaatcaatgataaaattctgagtggggggcgtaaataatgacatgacaggaactgtaatttgggctggaatggattcccgtgagaagtcttgggactgcctgctaatctcgattctctctctgcagctctctcttcaccacagttcacaggcatggagttcgaggatcgctgccacaaggtccaggagcccaagttcgactgcctgctcttcggtaagccgctgctccgcttcctgcagatacgccgccgcccggctcgtttttgtatcgttctgttgttgcctcctcctccttcttcttctgcctcttcacggaatgcaagggttttctgacctgttctcgcctacagaccttgacgacaccctgtatccgctgagctccgggatcgcgggccatgtcaagaagaacattgaagattacatggtcgagaagctgggtattgacgagagcaagatcgagaacctgggaaatctgctgtacaagaactacggcaccacgatggctggcctcagggcgatcggctacagtttcgattacgatgagtaccacgccttcgtccacggaaggctgccgtacgacaacatcaagcccgaccctgttctcaagcacattctcaagaacctgcccatccgcaaactcatattcaccaacggcgacaaggtccacgccgtgagagccctggagaggctgggcctggagaactgcttcaggggatcatctgcttcgagaccctgaacccgccgtgcccgccgagggagaccgggagccagagatcttcgaca

SEQ ID NO: 151376 - DNA, 532 bp, Zea mays
  Clone ID: MRT4577_69577C.1
aagtaaataacagtggcatacatttttttggacctagaaccacgatcatacacaagcacatgcatacacacacttttacatacgatagattacgtagacacgcttattcgtgcatgacacgagcgcatacatacgtacgcgcgcacaacacggggggcgcttgatatgactctaacacgcacgcgtagcacacggggagggacgacgatacgggaggatcaataagccgaagaagaggtgcttattttggccgacggcctactggggctacttggggcccttttttttatgggggtgctcgtggaaggggaatccatcagagccgacaggcgcagacgacgggacctacttgtcaatattatggcgatgctcttgctgccggatcttacatgcactagcgcttgatggtacatagagaaggcgcctgcatgtgatagctgcggactggccgatgcgctgtttgtacttgagcttcatctcctccttgttgtacttgcataacgacggatgattcacgaacaccatttttttt

SEQ ID NO: 151377 - DNA, 230 bp, Zea mays
  Clone ID: MRT4577_69578C.1
aatgtatcttgtggtgagcataagcggggccgcctcagcaggaaatgaccgccagactcgggcctgaaataaaccagacactggttggccataaaaaggccacaccatgggcacactacactgacaaaacaagcggggcaatatttgtaagaacaggaatggagcacctggatggggaccgaggtcacgacaaggtccagcgaactgagcccagtggagggtgggagggt

SEQ ID NO: 151378 - DNA, 456 bp, Zea mays
  Clone ID: MRT4577_69579C.1
ggccgcttttttttttttttttttcttttttttttttttttttttttttttttttttttttttttttcattttaaaacgatggtttagggttttttatacctttgtcttacccactttttaaaacctacaaaactcgagtcctgtgaagaaccaatccctacagaccaaacgaaagaaaagtctcggacggcctaagccactttgctaatggatgggaaaggagggtttaagctaaacagggtgaaccccatggggaaattaaacaccgccttgggcttttcctttttctcccgcgcacaagggccaacaagacttggagaacccccagttggggcggaaccaacaactggagcagggccaccaccagatcccagggagcggaatggatccccaagggtgcatttctgcagaagcttacccaacaccgccggccagtgggactcgaccctggggac

SEQ ID NO: 151379 - DNA, 511 bp, Zea mays
  Clone ID: MRT4577_6957C.1
ctgtcttagtgccctctggttttcgggatatggatggagagctgtctaatcagaacatctaacctggtgccggcctactcctctgcttaacgaagccgacggaccacctcctatcgttgccaaactataagcgccaatggtgcctgggtgagcaccgtcgacgccgttgcttaccttcatcatcaatgcggtagatctgctcaggcgagtcggagtttacgtaacgccaatgctcgggtagagaaattaagatcgccctgggtggtatctttctcactcgcgagatgtatggatggatggcctgggacatggtgttcccttgccgttgcgggttttgacgggacgccaactcctcgacgaggacagatattatgttaaccttgtagatgactagcaagctacataggattctgatgttaatgatggtagagactgctcaccacgatcttggtcaaggagaacattacgaggttgaagaggaggcaaatgtccatgagtcagattcgatcta

SEQ ID NO: 151380 - DNA, 374 bp, Zea mays
  Clone ID: MRT4577_69580C.1
ccccgcgtgcgttcttcccccatacctttcataaatgatagcttcaggtatggagaaaacccagctcttcaaccctataggctccaacaagcattcgcagaaagcagcatacctttatcacccttgtttcaacaatgcgccagccttatctttggtgcagtcattggcacaaaccatcaaggcacagcagctgccgcaactcgcgctacctgtgatcaaccaagtagctatggccaagctttctgcttactatgagaagcaacagtttcttccgttcacccagctgtctacactgaaccttgctggtattctagcagacctactgttgctattaagccaggtaggtactgcctaatgaaagcaagaccactttt

SEQ ID NO: 151381 - DNA, 666 bp, Zea mays
  unsure (1)..(666): unsure at all n locations
  Clone ID: MRT4577_69581C.1
cgccggttccgagaatccancganggaaatgccgtccccgtccctcctcctccgcgctcctcctctctgcccctccccgtccaaccccccgcgccgcttcgctcccccctccctcatcacctcgtccccgcctgcccacctccgccctctgcgcctgccctctgccgcgtcccgccacacgcctcgcgccggtgacacgcgcgtgcccgacgacctcatcccgatcgcgcgctgctacgagggtcgcctcgctcgactcgagctcgccggcgccgcgcgccgggaacaggccgtcgcggcagcggccgcggccggcggaggggcttcggcggaggaccacctcgccgccggctccgacgccatggtcgtcgaggcattcctccccgggccccatggaggcgggacgaccgcttcctccacgcgagtgattttgcaagccaaggaagttaaagataaggccaggaagatagagaaacaattcggatctgattttttctttgcaaatcaacctgattcagacaggatgatggctatggcctttaagcaagttgcaattcagcggctctcaaactttcggctcaaggtcttccccccaaggccagagagagacttccaagatcttggcgaaccccgaaagggggcttttggattgtagtatcggctcat

SEQ ID NO: 151382 - DNA, 441 bp, Zea mays
  Clone ID: MRT4577_69582C.1
cggcggcggccacgtgcgcgccgtcgtccaagctgcccgacggcgccggctccggcggagtgccggggctagcgccctgctgcagcaggcagcagtcgatgacggcgcaggtggcgcgcacgcagaaggtagcggacaaggtcgcgctgagcctgccgagcgacggcaggtacacgtcgggcgacagcgtcggcgtgaccatcttcagcggagggccgctgttattggtaccgacagaccgcagagacttcaccacgatgctggccgggacggcgccgctccacgccggagccggagccggtgcccacgggtactacgattactacatcggcattgacgtggagcatgcacaagttggcggccccggcggggcgctcgtcgcggcgctgcactacacggtccattacacggcgctacagcccgacgtgtacgcgtcgttcg

SEQ ID NO: 151383 - DNA, 920 bp, Zea mays
  unsure (1)..(920): unsure at all n locations
  Clone ID: MRT4577_69583C.1
ggggggtacccccgggtctggccgccacgcgcccgcccactttctgcttctcccgtattgccgtgccctcctccctctccctgctcgctctctccctctcgtcgctttctttcctggtcgcgccgcccttcatcaggtctcctccgccttagccggtgaagagcgaccaggcccaataaataatcaccatggctcatcaaaagcgtgaaggcagctacgccgatgatgatagtacatccaagcgcatcaaaggcaccgacactgcttctgaaacgggggacagtgtagagtctagtgtttcacagcaaatggatgctgaagctaggaggacctgccaaaaggaaagcgaagcaccatcggacaaatgcgtttcagatggggaatgcgctgcaaactctaaggttttgggtgagcagaagatggtattgactgttgtcgaggctgatgcggcggacgacaagggttgcaggcacactatggaggacgcctgggtggtgctccccaatgctggtgcagaatccccaggaagcttgaggtgcgtacattttgcgatttatgacgggcatggtggtcgcttggcggcagattatgcacagaagcatttgcatcagaatgtcatcgctgcaggattaccacgtgagttgatggatattaaagctgcaaagaaggctgtaattgaaggtttccgtagaactgatgaatctttactgcaagaaagtactaagggaaattggcaagatggtgcaacagctgtatgcgtttggatcctgggacagacggttgtagttgcgaatgttggagatgctaaagcagtattggctcgttctatttcactgaggnttgaaaggtgtggttgatgagaaccaaagtcactaaaggctattgttttgacaagagaacataaagccatcttttccagg

SEQ ID NO: 151384 - DNA, 311 bp, Zea mays
  Clone ID: MRT4577_69584C.1
ttactttataaaacttatcaacaattgggttccatggattaatctcacttttacctctttccccatttcaaaacccaacacatactctcataaacccacaattcatacactctcttacatctattttaccacaaattcttatatccattaccataattagccttaaacaacttaatatcccaatctaccacctaaaataaaccctttccatcaacttctttcctccacccatttaaccatttccaccaccatcctttgccaattctaccatttcaaacatttccacacaaccccaacaacaatttcttaca

SEQ ID NO: 151385 - DNA, 671 bp, Zea mays
  Clone ID: MRT4577_69585C.1
ccgggccggcccccgggtcgacccagcgttcggtcggctacccgggtatcggcgcgaggtatgccggggcccccatccccctgccaatctcggcgtcggcgcgccgctcgccatccccgcaggccacgcccatgcccccgcctccatagtccctgtcatcggcgacctcagatccaacaggttggtctgcttgcgccgtgatcggggggtcgacgggggcttcgtctccgtggatgtggtcctggatttgtgtgtcactggcgcggaatgtgagccgcggttggttaacgatgccggcttgtgtgtgtgtgtgtgtccgttcgtcacgatggtacgggcaggaggatcaggccaccgtcgaggaacgcgctctccgctgtgttccagcgagaagatgagggatcgagggcggcgcaggcggcgagctcgtgggcggaacagactggtgagagcaagaggatggatcaggagcttgagccccaagaggggagctgtttgagcggatgcccaccaggaacaatgtttcctagatcacgatgtttgggccacttttggaagaggtcagggatgacatgttttcaagcttggaggacatcaccaacgcaccatatgcagatctgctctctattaattcaatgaggaaaggaaaggggtcatagaaattagtcttg

SEQ ID NO: 151386 - DNA, 811 bp, Zea mays
  Clone ID: MRT4577_69586C.1
aacaatgaagaagcaatgatgcatgtatcgtctctgcccatgcctagctaagctagtaccaaccatatgatacacgcgcacatacttccatcagtcacatcatgtaccttgcttcgttccttttcgtccacggaacggacagccgggaaggacaaggacagcccgccagccaactaaactggaaacaatgaagaagcaatgatgcatgtatcgtctctgcccatgcctagctaagctagtaccaaccatatgatacacgcgcacatacttccatcagtcacatcatgtaccttgcttcgttccttttcgttccacggaacggacagccgggaaggacaaggacagccccgaccagccagccgccgttcctgctgcacttcatccggccagcagcttgcattggcagatctccgatgtctcaacaacacactactcacatcacaaggcggcgtgggcgtttgggtcctccggcggctgctgtagcggctccagcgacgcgacgacgtcgcgcatgagcggcctcgccttggggttgcggttgaggcagtggtacgcgagcatggccgtcttctgcacggccctggcgggcggcgggtcgtcccagccggcgcccgccagcctggggtccacgatgccctgcacgcgcttcttgtgcggcagcgccgggagcgcccagtcggtgagcgcctgctcccgcggcgggcgtgagcggtccagcgagcgccgtccccgtgagcagctcgagcagcacgacgccgtagctgtagacgtcgctggacgccgtgaggtggcccgtcatcatgtactcggg

SEQ ID NO: 151387 - DNA, 618 bp, Zea mays
  Clone ID: MRT4577_69587C.1
gaggttatcactgacctctcctcgcgatagatcatctcaacaacgcctgcttacctgctcgctgccggtgtgctgtatcgtcttcctgtacatcatcaagaaccgcacgagtacaaagctcccggcatccccgacgacggctaccgctgcataagacaccttcacctcatcggtcggggcccgcaacgatccttgctaaaactgcagagtacgctagtgggacgatggcggtcgcctcttcctgcaactgcgggcgcagacacgatcttggtcgcgtacactgcggacgcggacgaggatcggtttgagaagcactacctcactttcgactcccgaccactcagcgcgggaggtgataagctgaagcatgagtgcggaaacgagtcgttcgtgcctaacgacgagaactggcgccactgcaataagatgcgcgatggaccaactcctctctgcgggtggagcgatgatcttgtgctgacgattatagacagcataggtagacgcgctcgcctcacggacgcgccgcgccgcggaggctggggagggcgcgtagttcacggagctcctgaatggttaccccaacgcggagggcaccctgcgcgccagcggtgacgctgg

SEQ ID NO: 151388 - DNA, 666 bp, Zea mays
  Clone ID: MRT4577_69588C.1
cttccgaaataatacatagccgtcgattgatgctatgtaaatagggctcagcatactcctatgacctatgctacatatggacttttttttttttttttttgcaaggaagaaatcgacacacaagacgttggtcgtacttacagcatccacttattagagacggtgcaatcgataccccgctgcatgaacagatctgcatctgcaagaggcattcctctgctcagactctgaagtcctggaattccagaaaggaaaggagcactcccaaccgtaagatctggggggggtggcacgctgatacaccctaccagaagtaggcgccgttgctcgcagtcccagacgaaaccctgagccacaggcggtgcctgagaacatcttctcatccactggaaacgagtctactgccagccgaaacataccgcgaatgcctatggcgatcctcatgtaatcctcggcctccttgcggttgcggtactcgtctcctggcgcggggagcgccagcatttcctcgcgtggaaggctcgaggtgcttgctttctctacatgcgaaaccagcggcgagccctccctttcatggccatggtaatcctccggtgccgggagcgccagcatctcctggcactggcaggcaggacttgagccgctcagcttttcatcaccgtacga

SEQ ID NO: 151389 - DNA, 184 bp, Zea mays
  Clone ID: MRT4577_69589C.1
acacatcaactaccaaattttattcgcttaccattctctctattaataccgcactccaccgtcgtcggcttatatcaataacccagccaactcaccgaaaaacttcattccatgcacaccacgctcacccgtgtagacgaccagcccctcctcaattattgaatcccgcccgacattcgacacc

SEQ ID NO: 151390 - DNA, 436 bp, Zea mays
  Clone ID: MRT4577_6958C.1
gcaaattaaaaggtccgatgcattaagtgtttccatgctgcccttgtggatcaaattctgagcttgcaaagggatcggctttgtaagaaggtacgcgagatttagttagatttaatgttccacaaggctcttgcagaacgcaatacatttcacaagttgatggcagtcctgtactgttgtatatcatcgccaattggtcggaccctgctgagtgctgatgctaggatacgtggagctggatccagatgattcaaattcaaacttctctatgttacctttggaaaacatatttcatgtatgctactgaattcagtttcccgttaagggcctttctggattgaaggatttttttaggaaaagtgtaggattctaattcctataggaaaaaaaaacttattcatgcctttggaatatatatatgataaatatttgatct

SEQ ID NO: 151391 - DNA, 170 bp, Zea mays
  Clone ID: MRT4577_69590C.1
cccacgcgtccgacctctgatacttcagctggagctgcaatggcaacgcccgatgtgggcccggtcttcgcggggcggggggacgacaaggcatgggcgccattcttcttggtgggcacaattttgagagtgcaagacgcgttcgggggcgatgcgttcgaacagtacct

SEQ ID NO: 151392 - DNA, 416 bp, Zea mays
  Clone ID: MRT4577_69591C.1
aaaaaaaaaaaaaaaaaaaaaaaaacaaaataaaaaaaaacaaaaatacatacaaaaataagacaacattatatccgggaatataaatatctcctaaattaaattctctatccaatatttttcatctttttggcccgcgttttttttttcccaacccttcttattccccttctctaccattttccttttttttcctgtccccaaaactaattttcttcccccgttttttcccccctttcagcctttgaaaacctttatggcttccccaatttaatcttttttccaccccaatcccctttttcacatttggcttattagcccaaaaggccccccctaattcccctttcaaatattgtccccccctttatggcaatttgaccccccctttcccccttcttttaatcctcgggtttttt

SEQ ID NO: 151393 - DNA, 332 bp, Zea mays
  Clone ID: MRT4577_69592C.1
gtatagccatgcggcggtgtgacttattatgttgtaccaacaaaccaatgctcgaaagttaagacgttcacgcaaaacctgaacatgcttgcgtagcgaaccaaacacagattgagggttgggaagacaggataccgtcttacattaccttagaaggatgcatgatgcccacataaactgtgcaccttactagagggttctggaccgacctggagttttataatgtatggtggagcacgcacggatcgcgatgagccgcccaatagaggatagagcatcaggtcctgcacgaacgtggttttgacgcggacttgctttcggttcaggttcct

SEQ ID NO: 151394 - DNA, 986 bp, Zea mays
  Clone ID: MRT4577_69593C.1
actcctatgggcgattgccacgcccgaggccggccgggaaaatctcaacacatcgcaacgcgccgctcccaaatctaggttgcttggccatggccgactcgccggcccccgacgcacagctggaacaggcgtcacccgccgctgcccccgctgaccctgccgagaacgccccggtcgagaagagccccgcggcgcccctcacgctggagccggacgccgctgcggtgtcggatggggcagcgggtgaggtggaggatgaggagtacgtgagcgaccccgacgatgaggcgcttcctacgatgcggcgccgagaggccagtgacgacgaggggtccgaggacgggaggcccacggcgcggatgggccctgaccaggacgacgacggacaaggggcccccgaggcgtacgacgacgaggtggacgaggaggataaggagtactacgacgaggaagacatgggagaggggttcgaggaggagtacgaagggcgcgtggcacttcccatggacgacggcggcggcagccaggtctcgcgcggagaggatggcgtggctatggaggaggggttgacggagggggaggccaagggcgaggggggagagaaggagcaggagccgtttgcggtgcccacttccggcgccttctacatgcacgatgaccggtttcaggaggagaaccgtggcagacgcaggcgaatgtttggtgtgaggaagttatgggatgttaaagacaatcaagcttgggtgcatgacagatttgaggagatgaacttgcatgatgatttctatgaagaccagcggatgtcaagaggtcgttttagaggtcgtggtggtcgaggtaaagcaagaggtggtggccgtggtttttccagaggtggaaagcagcgtaattaccatgaagatagcaacacccaaaatcgcaccccaaaggtagtgagagggcgaggacctcgacgttatgaagctgctgcaaggaacaacagagag

SEQ ID NO: 151395 - DNA, 161 bp, Zea mays
  Clone ID: MRT4577_69594C.1
tcatgacagcatggtggcgggggagggcagagtacatgaccttgagagagttgttgaggaaatggctgggaaattcactctcgtcaggcaggagaggtggtggtccagcgctacgctttgattcgtctcctggctgatcatctaacaatggtttccatcaa

SEQ ID NO: 151396 - DNA, 179 bp, Zea mays
  unsure (1)..(179): unsure at all n locations
  Clone ID: MRT4577_69595C.1
aactcgactcgncaaaaggaaaagaaacacgtcggtgcagctgcttgacagaccactcagagcaaaatgggtatactggtgattacggcggacctagactgctggcgctgcagagccacgatcaccaagggcctggactgtctcaaagaggagctctgcatcgagaaaggggagtccga

SEQ ID NO: 151397 - DNA, 689 bp, Zea mays
  unsure (1)..(689): unsure at all n locations
  Clone ID: MRT4577_69596C.1
cctcgaggccggccgggccgggctctcctatagcaacgaccgctcgacctccggcggcgcactaaatcctactccatgtacccagccgcagcacatctcccttgccatctatgacaacccgtcagttccaaagatgcatcacccggcatagatggacacaccacttaaccatactaggatgtgacgaagattcacccctctgctacactgaatacattctcatcgtgcaacgcaacaatacaatcatcggatgacacattgccgcatcgcggctcatggaaactcccactgaatggtaaagctatatctgatggtccgactgttcagctgcacatcaatgacttgcaactgaacattactataaacctgggttacactaatgtgaatgtctacattgtcaggatgacctaggtacgctaccactgcgtctacgatgcctatgccatccaaaaagaagatcaacctctatgcgacgtggctgcacttgaaaacaccacaatgaactcctcagacatggttcgtttatgatgatgcccgggacaccacattctcatggatacnatgcctaatgaagctgctattcagcatggagctcttcttttgatcgcacagatgatagtgtccacagccccagacatcaaaacatcttgctgctgctgaatcatgcgccttcacatatcatcttctgc

SEQ ID NO: 151398 - DNA, 653 bp, Zea mays
  Clone ID: MRT4577_69597C.1
ctcctttagttgatactgcatctagtggtattgtagattgtactttatggattaactttaagaatattaaaattaagtatccgacggctatgcctatcgctgcaactgctcaagttggaactgaagcaattcaggattcagctggagcaggagttattagctctgcagcagcaagcgtatcgtcggttttgtcccccctacaagatgtccctttagtaagtaattatgcgcgtcctgcactgtgggtttcgaatacaattcgagatgttgcaaaacattttggttggtcgaagcctacaactgcggaagcgcctcaccttaataaattaacagggagtagatttatggctaatgcagacggtctcgacatgagtcattcacttggtattagtgctattaatgagttggaagtaaatcctgcattaactcgcactgatattgacgaaatgactgtcgcacatatagcacgtacgccatgctttattaaaagattccaatggacttctaatggtaaagctggtgccgtactatatgctacacctattacaccttcggttttttctatagccgtagatgatactagagtagcaccgagccacttagcttatatttcctcgccattcaccatgtggagaggaggtataaattttcac

SEQ ID NO: 151399 - DNA, 780 bp, Zea mays
  unsure (1)..(780): unsure at all n locations
  Clone ID: MRT4577_69598C.1
atggaggaggacccctccgagccctgccacggccacatcacctccctcgcggtcctccgctcccaccgcaagctcgggctcgccactaagctcatgtccgccgcgcaagccgccatggaccaggtcttcggcgctgaatccaggacatcgaggccaagtactatgccgatggggaggacgcgttcgacatgcgcaagctgctccggcagccacagccgaagaagcaccaccaccaccatcacggccccggtgggtgctgctcccacgacgcaccagttgcggcgactggttcttctccccagtcttctagttcacccgataagaaggctaccacttgatgtaggggtccatttggccgcacacatctctggctctgctggcagctgtggcctgtgagcagatggaggtgcaccaagtgcatatgggcgtctagcagaggatctggagccttaggtttatgtaagcggagccactcttgacacgtatctacagagaggaatcaccaagccaattgtactcatctttcctctcactgggtatacaatattgtagcgnnagcggtctttccgtagtagaacggagaaagacctgtacggtgagcatttgtgtacttggccgatggctcgaatcgtctgaccttatcagcgagaatggcaaccaaatatgcttcgtacttgatacccgtgttgccttgagacatgtgcgagttctcacagttcatttgattggtgatcatggtttttaaagcggtaaggcgtccaangcgttggaggaccgttt

SEQ ID NO: 151400 - DNA, 426 bp, Zea mays
  Clone ID: MRT4577_69599C.1
ttaaataaaaaatttgtctaaaaaattaaaaaattaaataaagggggaaaaaatagttataaaataaaaaaaaaatgggggggccgtttttggggttccaggtttccttcccctttcttgccaggtattactttttttttggtggcccttaatttcatttctttggcgttggttttccaccgtttggtctggaaaacccttggttttccccattttattgtctttgttgccctccccctttttgccggctggtgtattgggaaatgggccgtaacggttcctctttcccaaccttttgccctcttgatgggattttggcccccccctttgttcgcgcctttaagcccggtggttttggtgtttcccctctttttgtcggtttcttttgctggtttctctaggccggtttttttcgtttttttcctt

SEQ ID NO: 151401 - DNA, 752 bp, Zea mays
  Clone ID: MRT4577_6959C.1
tacgcccgcaggtctggtccggaattcccgggtcgacccacgcgtccggttctcgcgagagagcgctcaggccagctaggcgttgtgtgatccgcagctggcgcggaagcttcaggtggcaagcgatcgctgcggaagatgtcggacagcgaagacagcaacttctccgaggaggaggacagcgagcgcagcagcgaggcggaggaggccgaggttgaggaagaccagcgaagtgctgcaggcagtgaaaaagaggaggagcctgaggaagaggaggaggaagaggaagaatacgatgaggaagaagaggaggaagatgatgataggccccccaagaaaccacgccatgggggcttcattttagatgaggctgatgtagatgatgaatatgaagatgaagaccagtgggaagatggagctgaagatatcctggagaaagcctccaatattgataacgttgtgctggatgaagaccgctctggggctcgtcgtctgcagaatctctggagggaccagagagaagaagaactgggcgagtattacatgaagaaatatgctaagtcgtctgtgggagagacggtgtatggaggggtctgacgagctctcagatgacatcactcagcagcagctgctcccaggagtcaaggaccccaacctgtggactgtcaagtgtaagattgggggaggaacgagccacggcaatttccttgatgcgggaattcatcgcttaccagttcacagacacacccctg

SEQ ID NO: 151402 - DNA, 1835 bp, Zea mays
  Clone ID: MRT4577_695C.1
cgcctgctttttttttttgttctctcatctcgctcatatatatcctttgcacctgcgctgatccgttccaatcgatcttgcacctcctcacctcctcagctcggcgcctcagctgatcatggggggagcttctgattctaaccttcttccccctggcttccacttcttcccgtcagacgaagagctcgtcgtccacttcctccgccgcaaagcctcgctcctcccatgccagccggacatcgtgcccacggtgtgcatgaatcaccacgatccatgggaactgaatggcaaagcgcttgaggctggtagccagtggtacttcttcagccacgcgaagcaaagtagggccacgccgaacgggtactggagctctgtttgtgctgacgagacggtgctgagcggcggcggcggctgcagcgtcgtcgtcggcctgaagaagacgctcgtcttctccactggagagccctctgatggggccgaaacaaactggatcatgcatgagtatcacttgctggatgggaggaaggggggtagcagcagcagcagtagcacttcatcaatccatagttcgagcaagaaatcgcatcacccaaacacagtaagatcaagctagctacttgtgcgtgtgtgtaggcagtaggcactactgtatttatacatgtatataactatatatacggcatgcatgattatcttgacaagggtaatataaaatacttccatgaccattacaggagttcagtaactgggtgatatgccgagtgtttgattcgacgggcggcgggtcgcaggcgaactgccatgacgacgagggcatggagctttcatgcttggatgagttgttcctatccctcgacgactatgatgaagtcagcttgtcaagtaattagaagcctagtatcaccagaaccggcagtactagtaggcgctccctacgaattttacagaagatcaaatgattccataggtgtgtttagccttaaacactgcgtctaattaaaccacagatgtggattgctctcctcatcaaattggagtcggtcgaggcacatgcatgtaacaagctgagttagttttatataaatatgggcatagtgtgtggataatctcctgtactacaaggttcgaggtatctatgttcgagcataaaaaggggatagacaaggcatgtataactctatttaatataagatctcttgagcgatctttagagagttaattaaaaaaacaagcaaataagacgacttgtttcattgattcttgaagagatcgagcttcttttgcaccacaaggtcgaggatgtcttgcaactgcggatcaagctgcggctgcggctcaagctgcaagtgcggcaagaagtaccctgacctgtaggagacgagcaccgccgcgcaggccaccgtcgtcctcggcgtggccccggagaacaacgccgcgcccgagttcgcctagggcgcgacgaagtccggcgaggccgcccacggatgcacctgcggtgtcaactgcaagagcgacccctgcaactgctgatcacatcgatcgacgaccatggatatgattattatctatctagcttgggggggcgggtgaacaataataaccgaggccgagctggttgccatacatacgtattgcgcggcgcgggcgacagatagagaaacagagttcttcacgttgctatctctctctgcatgtctggcgtcagtctttgcgctcatgcacgcacgagtgtctacctgcatgttggatgatccgattgcatctgctgcaaccatatattaattggtccacgatgatatgatttgatacccaaaaaaaaaatcaaaaccgcggcc

SEQ ID NO: 151403 - DNA, 1147 bp, Zea mays
  Clone ID: MRT4577_69600C.1
ggccctaggggccttttttttttttttttttggagagaaatagaacataacaataaagcagcactacaatctcagtctctgaattcatgtcacattcgatgctgtttctccaagtaggttctgcctaaaacagggacttggatacatagcacatccattttgcagacagaaacatcactgaaagacaactgcttggatcgttatatgacctcaaccaagctttacggttctttatgaccaagcagaaaaactttcagaatacaaggaaagagcacgaagcaaaaactgacaaggaaataaggttcttctgtaatgcctcagtttaatcagatgatgtcatattatgtaccatgtttcctcgagtaggttctccctgaaacaggggacttgagtccacaggacatccattttgcagacaaatcatcactggcagtgccacaaagtaatttgttttgctgataaaacactagacacaagaaaaggcataaacacctcaacaacaaataatcattacatgaacaataacacacagctacctaagcatactaaatcagtcatcaaagaacaattctcaaacagaataatgcatgcaacaaaccaagacaaaacattaggccttatttataaacctcagtaaatgcccaggtatctcatttgaatgtaggaccccaagtaggttctccctgaaacagggcttggagttacctacacctcacatgttgggacaactcgtcattggctactgtgatggtgaaaattgaaggcgtccaagtttcacaatctttcaaatgtaacagtgaaagataagaaagagctgaacataacatcagcgaaaatttaaacaagaactacagtgcacgcaaaaaatacatatcagaaaatgcctcagatctcatttgattgtaggactccaagtaggttctccctggagagcagcgacttggagttgtctgcaccgtggaaccccaagtaggtcatctatgatctacatctaagatcgtgtttgggcaggctccgtgcaggcaatcctaccaagccagaagggcggcggagcaccaagagtggctccgcttacataaacctaaggctccagatcctctgctagacgcccatatgcacttggtgcacctccatctgctcacaggcc

SEQ ID NO: 151404 - DNA, 740 bp, Zea mays
  unsure (1)..(740): unsure at all n locations
  Clone ID: MRT4577_69601C.1
atctcatcccatcccgccggcgaaggctccccaccaccaccaaaccctagattacagtagatagatctcgttctccggcggcggcgaagatggtgtgcatccggcaggcgacgatcgacgacctgctggcgatgcaggcgtgcaacctgatgtgcctgccggagaactaccagatgaagtactacttctaccacatgctgtcgtggccgcagctgctgttcgtcgccgaggactacggcggccgcatcgtcggctacgtgctggccaagatggaggaggacccctcggagccctgccacggccacatcacctcgctcgccgtgctccgctcccaccgcaagctcggcctcgccaccaagctcatgtcggcggcccaggccgccatggaccaggtcttcggcgccgagtacgtctcgctccacgtccgccgctccaaccgcgccgccttcaacctctacacctccaccctcggctaccagatccacgacatcgaggccaagtactacgccgacggcgaggacgcctacgacatgcgcaagatgctgcgccagcccgtgcccaagaagcaccaccaccaccaccacgccggcggcggctgctgctcccacgacgctcctgctgccgcggcggccggctcgtccccagcgtccgcttncgccggagaagtaggccgactcattagatgaaagccatttcaaaaacaaggagctgctgaacctcctggataatatgaatcatat

SEQ ID NO: 151405 - DNA, 284 bp, Zea mays
  Clone ID: MRT4577_69602C.1
cggatgtcatttttctctttaaaagcgacccttcagaatctgggtggtttaaatataagaacggctcgggtaacactacacctatttttcctgtaaatgggaaacccctccccataattgctttcttaaagatttctggttatagggcttctatatcccatcatatcaagttcaaaatatcccatctattttgtctttataattatttcctttatttatttcttgtcttcataatctttaacccttcatcttttctcaattctatattgtatatacttatttta

SEQ ID NO: 151406 - DNA, 2020 bp, Zea mays
  Clone ID: MRT4577_69603C.1
gttattcgtcatgtaatgattattcattggtttgatgtttataccttttcttctgcctagtgatttaccatcaaaataaattactttgtgtgactgccaatgatgattagtctgcaaaatggatgtcctgtggaaacatggtacataatatgacaccatttgataacactgaggcattacagaagaaccctatttccgttcagtttttgcttcgtgctggcaatatcagaatccaggcctcatctttcagtgatggttctgtctgcaatatggactatgtatccaaatccaagtccccgcttcagggaaaacctccttggagaaacatcatctaatatgatatgaattctgatagacagatacagatatatctatgcattattgtatcattttttctagtttcaaggaatcataattattttctatttagaaatctttggtttgcatttgcccaatttaagctcaaattctggtttgtgcacttaataagttgcttctgaatcttgcagaagcatatctacagagaggagtcaccaagcccattggacttccgatacgcagctttttctaatagaatgggaaacgaattgtactgtaattgtttgtgtactttactttggctcaatcgtccgaccgtatctttgtaatcagtgagaatggcaagcaaatgtccttgacatctattgttattgtaaaaacatgtgttataacgctgattctcagattacatttgattattcgagctgacaatttcttcaggtttttttaaaacacctaactagcttttgaaccttgcgggagaaaaaaaaaaaaaaaaaaaaaaaaaaaaaaaaaaaaaaaaaatgcgctgacccgggccggggtccggccgggatcaccatcaccacctatcgtcggagaaccaccgaatccaccgcatcgcagagacgagtagaggttagatttaggctgaggtaagatggtgtgcatccggcaggcgaccatcgaagacctgctggcgatgcaggcgtgcaacctgatgtgcctgccggagaactaccagatgaagtactacttctaccacatgctctcgtggccgcagctcctcttcgtcgccgaggactacggaggcagcatcgtcggctacgtgctcgccaagatggaggaggacccctccgagccctgccacggccacatcacctccctcgcggtcctccgctcccaccgcaagctcgggctcgccactaagctcatgtccgccgcgcaggccgccatggaccaggtcttcggcgctgagtacgtgtcactccacgtccgccgatccaaccgcgctgccttcaacctctacacctctaccctcgggtaccagatccaggacatcgaggccaagtactatgccgatggggaggacgcgttcgacatgcgcaagctgctccggcagccacagcccaagaagcaccaccaccaccaccatcacggccccggtgggtgctgctcccacgacgcaccagttgcggcgactggttcttctccccagtcttctggttcacccgataagaaggctatcacttgatgtaggactcgtatctacagagaggaatcaccaagccaattgtactcatctttcctctcactgggtatacaatatagtagttgtagcggtctttccgtagtagaacggagaaagacctgtgcagtgagtatttgtgtacttggccgatggctcgaatcgtctgacctaatcagcgagaatggcaaccaaatatgcttcgtacttgaaacctgtgttgtttttagacatgtgcgaatttggatacgcagctttttctaatagaatgggaaacgacccagggagaagggctctttccgtagtagaacggagaaaaacctgtacagtgagtatttgtgtacttggccgatggctcgaatcgtctgaccgaatcagcgagaatggcaaccaaatatgcttcgtacttgatacccgtgttgccttgagacatgtgcgagttctcacagttcatttgattggtgatcatggttt

SEQ ID NO: 151407 - DNA, 236 bp, Zea mays
  Clone ID: MRT4577_69604C.1
gtcgttgtagcggtttagttcagcccctcaaattttccaagctccatccctgtctggtggtgctggttattgtagtctttatgttgaccaatttagtctattcagttcagtttttattgaggatttctcatgtgaagtttttacccagtttccccttagttcctttgatttgaggtggttgatactgagaaactgaaagagctttcagcctgattgtctgcgcttctggcagtgct

SEQ ID NO: 151408 - DNA, 937 bp, Zea mays
  Clone ID: MRT4577_69605C.1
cgaggaaacatggtacataatatgacttcatctgattaaactgaggcattacagaagaaccttatttccttgtcagtttttgcttcgtgctctttccttgtattctgaaagtttttctgcttggtcataaagaatcgtaaagcttggttgaggtcatataacgatccaagcagttgtctttcagtgatgtttctgtctgcaaaatggatgtgctatgtatccaagtccctgttttaggcagaacctacttggagaaacagcatcgaatgtgacatgaattcagagactgagattgtagtgctgctttattgttatgttctatttctctctttcagttgaagtttcgtggaatcgtagttattttctgtcttgactatgcatcgtgcaatttaaatattgattgatgaacctggaattcatttttttgtgcacctaactagcttctgaaccttgcagactcgtatctacagagaggaatcaccaagccaattgtactcatctttcctctcactgggtatacaatatagtagttgtagcgagcggtctttccgtagtagaacggagaaagacctgtgcagtgagtatttgtgtacttggccgatggctcgaatcgtctgaccgaatcagcgagaatggcaaccaaatatgcttcgtacttgatacccgtgttgccttgagacatgtgcgagttctcacagttcatttgattggtgatcatggtttttaaagcggtaaggcgtccaaagcgttggaagaccgcttggacgcctaagcggcgcctaggcgacccctaagccaggtaagccggcaagggccctaagccttaaaacaccggccggacgcctaagcgtcgcctaaaccaccccttaaaaacagaattggtgatgcctgacaatttggtcagatctgataccggtgactatataatgcaaggttg

SEQ ID NO: 151409 - DNA, 943 bp, Zea mays
  Clone ID: MRT4577_69606C.1
gatcaccatcaccacctatcgtcggagaaccaccgaatccaccgcatcgcagagaagagtagaggttagatttaggctgaggtaagatggtgtgcatccggcaggcgaccatcgaagacctgctggcgatgcaggcgtgcaacctgatgtgcctgccggagaactaccagatgaagtactacttctaccacatgctctcgtggccgcagctcctcttcgtcgccgaggactacggaggcagcatcgtcggctacgtgctcgccaagatggaggaggacccctccgagccctgccacggccacatcacctccctcgcggtcctccgctcccaccgcaagctcgggctcgccactaagctcatgtccgccgcgcaggccgccatggaccaggtcttcggcgctgagtacgtgtcactccacgtccgccgatccaaccgcgctgccttcaacctctacacctctaccctcgggtaccagatccaggacatcgaggccaagtactatgccgatggggaggacgcgttcgacatgcgcaagctgctccggcagccacagcccaagaagcaccaccaccaccaccatcacggcccaggggggtgctgctcccacgacgcaccagttgcggcgactggttcttctccccagtcttctggttcacccgataagaaggctatcacttgatgtagggtaagccttttcctttcaagctctagatgttatgcgctctattgctggtcaccaccgcgttttcggtgattatgctgtgattttgtttgacagatcaaactagtagtttcgttgtagaatatgtagtatgtaaatgtgcctctcctcacctttggtttcttgagaatgttcactctcaaggcagcccagtcatggaggcacatatcaattattggtgagtttaacgtggaagcttactgttttgttgtggtattgct

SEQ ID NO: 151410 - DNA, 1298 bp, Zea mays
  unsure (1)..(1298): unsure at all n locations
  Clone ID: MRT4577_69607C.1
cattgggaccctcgaggccggccgggatcccatcacctcctatcgtcggactgtcggagaaccaccgaatccaccgcatcgcagagacgagtagaggttagatttaggctgaggtaagatggtgtgcatccggcaggcgaccatcgaagacctgctggcgatgcaggcgtgcaacctgatgtgcctgccggagaactaccagatgaagtactacttctaccacatgctctcgtggccgcagctcctcttcgtcgccgaggactacggaggcagcatcgtcggctacgtgctcgccaagatggaggaggacccctccgagccctgccacggccacatcacctccctcgcggtcctccgctcccaccgcaagctcgggctcgccactaagctcatgtccgccgcgcaggccgccatggaccaggtcttcggcgctgagtacgtctcactccacgtccgccgatccaaccgcgctgccttcaacctctacacctctaccctcgggtaccagatccaggacatcgaggccaagtactatgccgatggggaagacgcgttcgacatgcgcaagctgctccggcagccacagccgaagaagcaccaccaccaccatccgggncccggtgggtgctgctcccacgacgcaccagttgcggcgactggttcttctccccagtcttctggttcacccgataagaaggctatcctttgatataggggtccatttggccgcacacatctctggctctgctggcagctgtggcctgtgagcagatggaggtgcaccaagtgcatatgggcgtctagcagaggatctggagccttaggtttatgtaagcggagccactcttggtgctccgtcgccctcctttggttggaggattggctgcacggagcctgcccaaacacgatcttagatgtagatcatagatgacctacttggggttccacatgagtgattttacaacattttgaactagattgtgatttattgttcttgacttcaattttcaatatttatatatcnnncagatcgtagatggnnnnnntgtgcttaaaattttcttgcttttgatgatgtgttgcttaattgtgaggtgcaggacaactccaagtcgctgctctccagggagaacctacttggagtcctacaatcaaatgagatctgaggcnnnnnnnnnnnnnnnnnnnnngcgtgcactgtagttcttgtttaaattttcgctgatgttatgttcagctctttcttatctttcactgttacatttgaaagattgtgaaacttggacgccttcaatttt

SEQ ID NO: 151411 - DNA, 425 bp, Zea mays
  Clone ID: MRT4577_69608C.1
atgagtgcctcccgaccgccttcggcctcctcttctctgccaataccgcaattccatctctctcgtctccactgccgcctctccgactgcagctatccaccgccgtcgctggatggctacacaatacatccaagaccctgatctccgcgaagagattcccctcggcatgacatgaatccatcgtttatgaatatccactgttaacacagacgccacgatcgctacttctcacctctaccgccatcacgcgaatatatggaagctatcagtaagctagatcctcagtctaaaaacatgatactgattgagctgaaaacctacaaggctactcaccactctttgcctgcgatcactgacctggctggcgccactcacgatggacgcaccataccttctaatcatgctaacgagaagacaggcgcctt

SEQ ID NO: 151412 - DNA, 632 bp, Zea mays
  Clone ID: MRT4577_69609C.1
aattcccgggctttttgttgagtacatacatatatggtatgttgatttgatatagtgatggacacatgctttgaccatgaatattcaaatcagttgtacttgcacgaagcaaaacataatataagtttaggagtaaacttataactgtgtccaaacatgctcacacaaattcataccacattataattttttggtaaatattccacacatgtattttttacaagaaactaaattttgcacacaaatgtagcattgtagacatgtataattctatgaacccgtgaacttaacaacaccaaggtcattaaatcaactggaccctatgagtaacaatttcgatatggcaaacaccaaattattgaacttattggctgaaaattatgaccaacgtaaagtttaaattattatacgataaatatatcaaagaattttttttgagggacgtaaaaattgcatggaatcggctgctgttgggggccttcgtcctccgaaggtcctcaaaaacatgatttgacaatgttttccgagtggattatgtgaacaggtattttcggatccagaattatgaatatggagcacggccaggacgaagcctgaaccagacgaaagtcgagtgtagccgaagctgtgcg

SEQ ID NO: 151413 - DNA, 724 bp, Zea mays
  unsure (1)..(724): unsure at all n locations
  Clone ID: MRT4577_6960C.1
aacaggatgcagaccatcttccagatggtaattcagtcagcgaggatctggttgttcagccaatggagggccaggaaaatgcagcggcagcaccccaaatcaagaagggtattgtggaagttgctgctggagccagtctttacattctctgtggtcaactataggctcctttggtctaaggcgcaaaagtatagtattctgtcctatgtcagcagtccactggatgagtgcctccgcagattggatgcctgtgccaccctgctgcatgacatcgcaccagcagtgactactcatgagctaggtattgctgcagataatgcgaggcgccgtctcacccttgttcttatggagaattatgcagatggcattttaggcgcagatccacatgatgctctccttgccatgtttccagaaacacacaatgaagtttaccgagatcaatgccgctgtcatcctgagctctacccnattgagggagaccctcccactgccaccctaacaaggattcagtcagctatgcatgatctgggatatgaagaccaagacattgatgatcagttatccatacgccaagcagagtatgacctgatgaatgcagaaggggctgtggagtttcacgactacagcacaaatatccatgcaaggttcttggattccaggaacaaaattgccagcgccgtcaatcctactcgagactatgttagagaggcaactatgagccact

SEQ ID NO: 151414 - DNA, 2104 bp, Zea mays
  Clone ID: MRT4577_69610C.1
cctaaaccctaagcacagagctccccatggcagcatccacggcggcggcggccgcgcggaagggagcgctgacggatcagaggttctcggagctttcccccgcgctatccccggaggtggtggaggcactggaccgcggcggcttccagcggtgcacgcccgtgcaggcggcggccatcccgcacctgctgtcgcacaaggacgtcgccgtcgacgccgccacaggctccgggaagacccttgccttcatcgtccccgtcgttgagatcctccgccgccgctcctccccgcccaagtcacacgaggtccttgctctgattatctctcccacgagagaattgtcctcgcaaatattcaatgtggcccagcccttcttcgcgaccctgaatggcgtgtcgtccatgctcctggtgggtgggctggatatcaaagcagagctcaagaaggtagaggaagagggcgcaaacatattggtgggcactcccgggaagctgtttgatataatgcacactgatgctctagagtacaagaatcttgagattttgatcctagatgaggctgataggctcttggatatgggattccagaaacatattaacttcatactttcaatgttgccaaagctgaggaggactgggcttttctcagctacccagacgaaagctgttgcggacctatccaaagcagggttgagaaatcctataagggttgaggttaagacagaggcaaagtccacaagcaaagatgctggacagcaagagcttggtccatccataacaccattagggcttcggttggagtatatgatatgtgaagcatcaaagaagtcatctcagcttgttgatttccttgtgcagaatagtgggaagaaaataatggtatattttgcaacatgtgcttgtgtagattattgggctgttgttcttccactaattaagtcgcttaaaggttctccaataattgcttaccatgggaagatgaaacagagccttcgagagaaagctttggcatcattttctgctctttcaagtggcgttctagtctgcactgatgttgcagcaaggggtcttgacataccaagtgttgatctgattgtgcagtatgatccacctcaagatcccaacgttttcatacatagagctggccgtacagcacgctatgatcaagaaggggatgctattgtttttctcttaccaaaggaggatacttatgttgagttcttgaagcttcgaggtgttcctctcacagaaagggaatgcctcgcaaacactgatgatgtcataccgcagattagaagtgctgcgctcgaagatcgtaatgtcatggagaaaggacttagagcgtttgtttcgtttgtccgagcatacaaggagcaccactgctcttacatttttaggtggaaagatctcgagattggaaaactagctatggagtatggtttactccagatcccatccatgccagaagtgaagcatcattctctttcactagagggatttatttctgttgatgatgttgatattacacaaatcaagtacaaggataaagctcgagaaaaacaacgcaagaaggcgctgaaaaggaaagcagaagaggaggctcaaaatccaaagccggagaggaagagacctccagagaagccggagaagccaaagcggaagaagacgggcaagcagcgtcagtcaatccaaactaaggaggacctggatgagctggcgcacgagtaccggcttctgaagaagctcaaacgtggagacatcgatgaagaggagtacgagaagctcactgggttcggagattttgatggcgaagcttccgatggggatgggagcaacttggacgaaaggaagaagggcaacaaggcgcagaaaaagcccaagcagagaggaaaatgcaaaagtgggtttaaaaagttcgaagggaggagtaaattgaggagcaaaagaagatagggaaccataaaaatgttgttggatttttttttttttggaaatgctgatccaattttacagcaataggaattttgcacagaagctgtgcatgccccccggctaggtagtgcctttttctttggtttgatgattaatgatgggtggtgactgcc

SEQ ID NO: 151415 - DNA, 128 bp, Zea mays
  Clone ID: MRT4577_69611C.1
aagaggctagggggaatatatcggacatcatcatcgtgccaaccgacaacgtcgtctgcctctgtcagcaggcttcgcagttacgatgtgtacgttggatttcacggccgcaaggcgtcactgctgag

SEQ ID NO: 151416 - DNA, 306 bp, Zea mays
  Clone ID: MRT4577_69612C.1
cggacgcgtggggcgatgcctggatttggagaaccacttcatcgtgacattgtcctaacaatacgtactttatatatgatctctctcagtgctattactggagtaaccagcaggatactcacactgcttagaggtgacaaagtccgcatacacttacaggcacatgaataaatgagaagcagtcagcgcctgttacgacgaagagccataccatccgtttcgttgtagttgtagctggatacgtcagttttgcactatcgaacgacaactaagtcgaagctgatagagtaagtgtaacacgtttat

SEQ ID NO: 151417 - DNA, 469 bp, Zea mays
  Clone ID: MRT4577_69613C.1
cacccatggcggcgatgtcgctgaggttgaccatgacgccgcaatagccggcgaaatacggatcggccgcgacgaagctgtcgaggaagccttcgatggcgaacagcaggtggccgtcgccatccggtatggcggcacaatcgtcaccgaccggcaccgcggcgcgccggctggtcaggccgagccgcgcgaccacggcatcgatgtcgcgcttatgggcgacgccgcgcgcgtcacggatctggccggccagggcctggaggtcgaagcccgccgtcatcacgcggccttgcggaacgtgacgagcccgtgctccggatcgtgcatcggcgggtaggccgcgaggtctgcctgcatcaggtgatgggctcgcccgtgcaaggcgacttcctcgaggctcgtccagtgcagggcccggaacaacgggacgttccggtcctgcacatgggccaggaaccgcgtgcagccc

SEQ ID NO: 151418 - DNA, 119 bp, Zea mays
  Clone ID: MRT4577_69614C.1
gttgcaccatagaggtttgagaacaataactttttctggaagaaccaggttcacaaggattggtgaattctttaaggcggaaagactctcgttcgaaacattatggacataaatgctaa

SEQ ID NO: 151419 - DNA, 590 bp, Zea mays
  Clone ID: MRT4577_69615C.1
cttgatgctggtatatgatctaatacagggcctgtcttcctgctgcttgtaaccatccgtgaagatgttcttggagcgcctacattcgccctcgctgtgcaccatggtgggccagtgttgtgactactcgattgcgtatggccgaggctgacaaatggattcgccttctcaagcaaagtgatgaaacttggaagatgggtggtcttgcgcacacactggctccaaggttgtgtgccgagaagtgcgacacttatgctgtaatgtatgatcacccattagcaattcgactgagacgtattgcgttcatcgttgatggccaaggatacgtttgatttcctggccctagatagaccttcaactactaccattgatcgtgctatcgcattacctaagatgactggacctatcacactgtgcttaggaggagagggctgtcttaattttgtgggacgcgcttttgtgcatcctgaatggttgcttttttcatgaggtccgcatagtctggcccgtggggggtcgatggcgcggggtggccgcggggggggcgggtgggggggggaggtggaggcgcggggggggggggcgggggg

SEQ ID NO: 151420 - DNA, 1275 bp, Zea mays
  Clone ID: MRT4577_69616C.1
gcacgagaaccgcgagtaccttttttccgtccaaatgttcataagcagtgctcagcggcagcactgaagcaggccagctggctcagctgtaatactacaaatttgagcaagttgcagagcagaactgaggttggttaactaggaacgcagccatggcaagcagtgccgtcatcgtccctgcctctccaagaaagttggagggaaaggtggccgtgatcactggcggggcgagcgggataggggagcgcacggcccggctgttcgtggagcacggcgcccacgtcgtggtggccgacatccaggacgaggccggcgcgcgcgtctgcgccgatctcggcgcgggtgccgccagctacgtccactgcgacgtcaccagcgaggacgacgccgtggccgcggtggaccacgccgtggcgacgttcggcgcgctggacatcatgttcaacaacgcgggcgtcagcgggccggcgtgctacagcgtccgggagagcggcaaggctgacttcgagcgcgtgctggccgtgaatctggtgggcccgttcctcggcaccaagcacgcggcgcgggtgatggtgccctcgcgccgcggtggctgcatcatagggacgtcgagcgtggcggcggcagtgactggcgtgtcgtcgtacgcgtacgcgtgcgcgaagcgcgcgatggtgactctgacggagaacgcggctgcggagctcggccagcacggcattcgcgtgaactgcgtctcccccgcgggggtcgccacgccgctgaccatgaggtacatgggcctcgaggcggaggcgttggagcaggcaatggagggcatggccaacctcaagggcgtgggcgcactgcgggtgcacgacgtcgccgccgccgtgctcttcctggccagcgatgacgcgaggtacatcagcggccacaacctgttcgtcgacggcgggatctccgtcgcgaatccatccactggaacgtccaaagattgaagtcactgcgcggtacatcagtgggacccgtcgcagtcacgtcgctgcgtggcagcgtgggtgatctatcatcatcagtcgtcgttctagacatcagtgggggcacactgcacactacagtgtgctccgtaaattcatgattgctcaccggcaccggctttgtaaggtccgcccgtcgcccttcggttttctaaactaaaaataaatgtacctcgctcgtccccattgtaaggtttacttataatacaaatgagattggacctctacttctaataaaaatatattgttagaattt

SEQ ID NO: 151421 - DNA, 1689 bp, Zea mays
  Clone ID: MRT4577_69617C.1
caccgatccaacggggacgggaccgacgcgacgcgctccagtcccctccatcgctgcgtccaccttctgtagtccagttgtagccgcttgccgatggcgcggccggcggcgaaggcgcgggtgccgaagcacttggtggcgctcgccgtcgtcgccatcctcggcctcgtactcgtcgctgactacctctgggcttcgtcctccgcgtcgtcctcggccgtctggtcctccaggcttaatctccacaccggacccgccggttcgacgccgcccgtcgcgaagaagattaaggaggacaagaaatctgtaggttcgactggcataaatgcaacttttgcggacttgccagctccagaactgaaatgggaggagatggctgaagcacctgtggcccgtttggatggcgctgctatacagattaagaatctcttatatgtatttgctgggtatggcaccattaaccatgtgcattctcatgttgatatatacaatttctcggataatacatggggtggaagatttgacatgcccgaagacatggcacattcacatttggggatggttactgatggaagattcatctatgtggtaactggacagtatggtccacaatgtaggggaccaacaactcgaaattttgtattggacacagaaacaaaagaatggcgtggcatgccaccattgccagttcctagatatgctccagcaacacaactttggagaggcagacttcatgtgatgggtggcagcaaggaggataggcatgaacctgcgcttgaacactggagtctcgcggtaaaggatgggaaagcattggagaaagagtggaggagcgagaaaccaataccgcgtggaggtcctcatagggcttgtgtagttgcaaatgataaactccttgttattggtggtcaagaaggtgatttcatggccaagcctgggtctcctatatttaaatgtgttagaagaagtgaggttgtgtatagtaatgtttatatgcttgatgatggaacgacttggaaggaacttccacctatgccaaaaccagattcacacatagaatttgcttgggtgaatgtcgacaattctcttgttattgctggaggaacgacagataagcacccaataactaaaaagatggtgttggttggtgaagtatttcggttcaatctgggtacgctggaatggagtgtgattgggcggttacctttccgaatcaagaccacattggtaggatactgggatggctggctgtatttcacttctgggcaacgagacaaaggaccaaaagacccgtctcctaaaaaggttgttgggtgcatgtggagaactaaattgcacttgtgatttcctttaaaagaactaagccgttctttggttttatggtttacaaaactgtttcaatcccctcatgggcgagttctttcttggttatatatcgtaggtgaaatgggtggcgttggggactgtctgccattgccaccggtgtgttgtatgtttattcttttagttaggatcaccaacttttgcaccattttgtacagagagaatcgatctgtccaggtgctgtcgcaatcttgtaagttgtagcgtgtacctttttttttattgagctcttacactcatcttctaaaattaatcacaacttcaacttgagccaaaggaaaaaaaaaaaaaaacaaaaaactcgag

SEQ ID NO: 151422 - DNA, 1251 bp, Zea mays
  Clone ID: MRT4577_69618C.1
gtgagaacctcgacgccggccgggaattgcatttttctgagcagatgcagatcgatcccgagttccgctgactgcagaggagagagatctagagcgagggagggagggaaatgggccacgaggctgcggcgccggggtcgtcggtgctcggccgcgcggtggaggaggtgcgctcggccctcaacgagcacgccgacgtggttgccgacctcttcggtcgcgtctcctccgaagtgcgcaccggcttcgcgcccgccgtcgactccttcgttggcttcttccacgccgtcgactggaaggagccttggctgatcagcatactatctttccatgccattctgctactggttaccatcatctcgaggaggaatatcaatttccagctcatcttgtcagctctaacattttctggtgtattccttgctgagagattaaatacgttcctggcgcaaaactggaagagcttctctacccaaaactattttgatccccagggccttttcatttcggtcatctggtctggccctctcctcctgataacgatccttattctggtgaacactctcgtgacgctctgcacgctaatggtaaggtggaaaagggcagagctcaggcatcgcgctcggcaagctcgtgacaagcaggactgatctgaaacctgcgtctatgtatcattcggtggcaagtagaaagtcgtgttcttgctacggttggtctaaccaagaatcacatccctggaaacggtgcccatttcattaggtagcagaatataacgttaagatggtcagattttgctcttgtggacccttttggtgcccggatagccatttactacgctgcaatattatcacgtcacgcgatttctttgggcgaggacactaggcctgtgataatgatgtgtccatttgttcgatgctgaacctctgaacctcggaaccggttgatagttgttgttttcctagctgtgtcgggtcgggtgcagcatgctctgattgttgattacctcaagaataattcgttggactgctgaattttagccatctttacagatgttccgatctgaaactgtcgctcgaatttcactgcatctggtgtcggtgtgcaagctattcctgatgtttgtgggcacttgaaaatgttctctggttgtactatggactgaatgatgcatggcatccgttgtcagcttcgtgtgtgaaagggggatgctttcttgttttgccagaaaaaaaaaaaaaaaaaaaagcggcc

SEQ ID NO: 151423 - DNA, 403 bp, Zea mays
  Clone ID: MRT4577_6961C.1
cgtgttgtgttttttttttttttttgttgtttttttgttcatcggtttctaaaaaaaccccagcgcccgggggaattttattttacatatacagtcgtccggggaaaaattttgggccccgcccgggggttaacagaagggagaaaagcccttaacataatgccctataaattttcaaaacgccggaggatccgtgaaaatctggggggcacacgggccgggcaaccagatcctctttttttacttgccgggatccaatccatgggtgagggggggacagactcaaaaatgggcatgtgcttgagccaggcgggacaacgctttttttttgaagtgacaatggatcttgcgcaaacgcagctttgccttaaccacattgttgggggcggccttcccacttggg

SEQ ID NO: 151424 - DNA, 247 bp, Zea mays
  Clone ID: MRT4577_69620C.1
gggagcaccaagatgtacctagatctcagaaccagatactggtggagaggaacgtagggagagctagcacaatatgtaggcacggtgtgacacttgccagtgacactaaggccgagcatcagaagcctgcaggtctactgcagccccttctagtgcccaaatggaagtgcgaagaaataggcatggattttgtaactggactgcctcggacccaaaaagggaacgactctatctaggtgataataga

SEQ ID NO: 151425 - DNA, 343 bp, Zea mays
  Clone ID: MRT4577_69621C.1
caccacacaggaaaaaacccgggccgagccccacaaaaaaaacatcccgcaaacccggccatattcccggggggcaggcgaggggtgttttttcccatatggggaagccaccacccgggcccagtgttcaccggttggcccccccaaacccccaggctaaaggggaacaagggcccccttttaggcccaagtctagggccgggggacattgcggttttcagacaaaggggctgatccaaaaagccacccccttggggggggaccggccggcggtaaagcccccaaggacaatcctggggtgggagaaacccccgactcccccgtggtgtttgtgggggaaaag

SEQ ID NO: 151426 - DNA, 267 bp, Zea mays
  Clone ID: MRT4577_69622C.1
tttcttatttttgttatgcctctttcattttatttaatactttttttttgaactataactcattatgaaatcaaaaagagggccccaccaatgaagggttgcctggtagaacactgctgggggggccaaaccaaggagggtgtatggcaaaaacagttgcggttttagcaaatgccagcggtaggaagcccgtgctggttagacgggtacaagggtggccacgttaagaacggaggccgggtaaaaccagataaatggttgcttggt

SEQ ID NO: 151427 - DNA, 622 bp, Zea mays
  Clone ID: MRT4577_69623C.1
aaaaaaaaaaacgttttaaaaaagcccgaatgtttggtaaaaaagggtttgccccccaaaaaatttttgggaaagggaaattaaagggttaaaattggctttgggggaaaacaaatcctgggggaggggggcccgggggaaaaaaaaaaaggggaaatttttgcctaagggggggaaaaaaagattggttttgcccggaccccggggacccatttttttaaggggggggttaaaaaaccccggacaaaattttggaccccagcccacctaaaatcccgggaaccaaaaatgtttttttttaaaccggccccccaaagggggggcttctaaaagccccatttttggaaaaaaaaaaaggggccggggaaaaattttgggccaaaaaagggggaacggcccccaggaatccgggcaccctctaaaggggggggggggccccccccatggcctttgggaaaaagggggggaacccccccgcggggggaacccccggggaacccccgggggggccgaccaatcccgggggaaggggggcaaggggagccaaacccgaaccaaaggcaatggccccgggacctggatttggcgcccccggttttttgcctgggacgggacggggggg

SEQ ID NO: 151428 - DNA, 170 bp, Zea mays
  unsure (1)..(170): unsure at all n locations
  Clone ID: MRT4577_69624C.1
acaactgtaatcgttgcatctgtttggcatatccgcggtgcgggtattgccaataacgcccccccccnnaaaaatcagcggcaccgacactgccataaaagatgtcgcctgtcagaatgtctgtcatgtcctgtcatgtcctgtcggaaggcatcacttactgaaggtga

SEQ ID NO: 151429 - DNA, 231 bp, Zea mays
  Clone ID: MRT4577_69625C.1
aaacatggctgcctttttccttagcgaagagtctgtaacggctgggcaagttgctgccatctaaccacaccctcccatgactagcatagtatgttacacccttcccattattaacatacatgttggaatccattccataagttgtccatggcactttcctgaatccaatggctgtagaccatgctggtttatactttgttttatgcaatcttatatttccgatttcaaatt

SEQ ID NO: 151430 - DNA, 228 bp, Zea mays
  Clone ID: MRT4577_69626C.1
ggtctcctcctcactgcggatagagcagcagaggaagcagcacgatcatgagcgagcgcacgtaagcacgtggtcggaagctcgagttagaagaagaaccaatgcctgatcgatggcggcccagcttgtcctctccgctcggcacgtgctgggccgccccgcgcagtcaaccgtgtctaggccggcggcgaggaaggcggccgtgcgctcccagggccagctccagcc

SEQ ID NO: 151431 - DNA, 220 bp, Zea mays
  unsure (1)..(220): unsure at all n locations
  Clone ID: MRT4577_69627C.1
gctcgaggcggcggggcggggattctgtgatcagagttcaagcagacatatcgtgcgaccnccaggcatcaccaagacctggaccggcaccgccatctgcagcgacacctcgtacttgggcttcttctgcgagaagccgcccaacgtcaacgagcgggcgctcgcgtccgtcgacttcaatggcttcaagctggaggcgcccaccgtggaggggttcgtg

SEQ ID NO: 151432 - DNA, 228 bp, Zea mays
  Clone ID: MRT4577_69628C.1
taataatactattctaacttgttcttttgtttttcagagtttcgtaaaaaggagcaacaaattaaacaatgcaagggcacagcaggacaagcactcattaaggaatgaggagggaacagaactccaggccattgtgagatagatacccatttaggtatctgtacctggaaaacatttccttctaagagccatttacagaatagaagatgagaccactagagaaaagtt

SEQ ID NO: 151433 - DNA, 267 bp, Zea mays
  Clone ID: MRT4577_69629C.1
ccaaggccgtcttgaacccaatttctttgttgggaacaaccaccccaacggggccgaattgtcactcgttctgggtggaaacaatcttaaccttaaacatgatgttcggaacctttgccgttgccacggacacaaaaccggtggttaagttggcggttttacaatttattccccaattttaaatccttttaactttttaatggctatttcctttttaaaccaatacttttttgaggtcaattttatttttaaaactttttttttaaa

SEQ ID NO: 151434 - DNA, 171 bp, Zea mays
  Clone ID: MRT4577_6962C.1
cagcggcacgacctttttttcgagtcagtttacacacatgagagcaggcgcgttcattcagctaatcattacatgactcatcctcttcgacctccaaaggtacctaaggtccgtggttatcagcatctattactcgccaagcgaatccggggacacccgaaatttagggca

SEQ ID NO: 151435 - DNA, 252 bp, Zea mays
  Clone ID: MRT4577_69630C.1
accgtcggtttaacggcccaccaaccccgctacaccccacgctcacttcgggtcctacgttccaccgaacgctcacaattcaacgttgcaccccaggtgcactaccttgcacccacccctgcgacactgggtcgtcggggtctcccgtttcaggatagtacaatactacaaggcataaggtctaggtaaccctccaagagtaggagacgattgctgagttcctatcaatgtaaacccgggttcatcgtgtga

SEQ ID NO: 151436 - DNA, 722 bp, Zea mays
  Clone ID: MRT4577_69632C.1
ttgggtacctcgaggccggccgggtaacatctatctggacctctccctccagaatttgctgaagcgcctgccatgaaaatatttcaggctgataacaataacttcagtggaagttccatccctactacatataacaacatatccacactactaaagctgagtcttagaaattgcagcttgcaaggagatattccagatttgagtagcatacctcaacttggctatttggatattagctggaaccagttgacaggatctataccaactaataagctcgcttccaatatcactacaattgatttgtcgcacaacatgctcaatggaactatcccacagaacttctcagggctccccaagcttcagatattgtcacttgaggataattatctaaatggttctgttccctcgacaatctggaatggcatcgagcttactggaaatagaagccttattctagacttccaaaacaattctctcaagacaattccggacacatttgatcctcccccaaataccactgtaatacctcctttttccctttgagaccaagctttgtatctatgtaacagtgagactatgttttaagtatttgacgacaggtcttcatatcctatacttgaatcattatgcatgtgtgaaaatcataactataagattgcacttttctcagtggcaaataaattttttccaattccctttcgaaaaaaaaaaaaaaagcggcc

SEQ ID NO: 151437 - DNA, 275 bp, Zea mays
  Clone ID: MRT4577_69633C.1
aacagacgtgcggccacacgtaaactgacgagctgacaatgtctactgaccggatcggcacggctaggtcacgaaatgaagcccaaacgtggtgcgacattcacagttgggacaggagattaagtgacatggcctcaaatgcagcgacaacctacttggtcatggtatctgtcacttattgtacagctgttaagacatttcacaaaatcggactagagtgatacttaatacagtgtcgtttctactgtgacacctgcaagcgccggtgttcttga

SEQ ID NO: 151438 - DNA, 357 bp, Zea mays
  Clone ID: MRT4577_69634C.1
cacgcgtacgcgggcacgtttctagatctagaacgctatcgtttgatctcatagatccaagcctgcgtgctcgggccagcgatgtcataggtcttctatagcgtcaactgcattcaatatagtggccgtcacagtacatcgtcgatactgctaaaacacttatactacccaactgaaccaccttgcaccacatgcatatttatgcagctggcactatagcgactaggccctctccactcgatcttcccaacacttgaacagcctcaatagctaatgtgacgcgcactcttacagaaccttcagcaactgcttcgaagaagatccctgcaacgtgaccattacactctgcagcaccat

SEQ ID NO: 151439 - DNA, 357 bp, Zea mays
  Clone ID: MRT4577_69635C.1
ggcacgaggcatgaggtacgttaattaatcacgtgatccggaggaccaaagctgagtcgaccacaagaggctggaaagcgtgagccactcgcaaggtgatgctgttggatccacctgaagatggataggctgaacaagtgccaacacaaaaggctgttcgccaagtggtagccacctaacaaacactaacctagtgttattccaggtactagatttgtgctgctgtggatggtgttaagcgccggtgggcacgaccttcttataggttaaagtagctcttctatacttcttattggaggttgtcactgagctagcatatttttcaaacttataaataaattattacatctttaagtt

SEQ ID NO: 151440 - DNA, 448 bp, Zea mays
  Clone ID: MRT4577_69636C.1
acggcctgtccttttttttttttttttttttttttttttttttttttttttttttttttttttttttttttttttttttttttttttttttttttgtttgggggaaaaccaaaacggggttccaccaaaacatttgccccagggtggaaaaaatacgcccaaaaacacttgggaaaaaaaacttttctacatttcccaacatgaaaaacgggaaaagaggtttttacagatttctggcaggtgggttttggaacaccaaaaggggggggggcccccaaaaatagggcctaaaactagaaaaccccctttttaactttttcgccttttttggggcaggggcaaacggggccatacctgaaactggggctgcccgaggtccccttgggccctgggccaaatttttcttccttttgggaagttttttttcacgggaaggcctggttttggc

SEQ ID NO: 151441 - DNA, 434 bp, Zea mays
  Clone ID: MRT4577_69637C.1
cccccccttttttttttttttttttttttttttttttttttttttttttttttttttttttttttttttttttaggggggcaaccccattcccattcctattaactctatatatttatcagggggagcatgaatgacagttaaacaaggacgggggggccggtgcagttacattttgggggggaaaaaaaaatcaataggggcaaaaacagacacccattatctaccttcaaggggagaggcaaactaaaaaggggaaaacagctaaacaaaagcaagtttttcggggagcaaaaattttgaaagaacagggggcacattggaaactatttgattagcgattgggcacgttggtgaccctgatcctccttaaacttctccctgggggagagcttggcgccaaacagggggaacttccagcgatctggttgaagt

SEQ ID NO: 151442 - DNA, 252 bp, Zea mays
  Clone ID: MRT4577_69638C.1
atggggttcgtgctggtggtctctctgcccttcatcttcctctccatcctccttggcttcggctgctacttcctcggcaagcacatgggccgggaggagatgcggaccgaaatcaatggaggcgaccgagtagagcaacaatgggactatggaacaaactttggcaaagaaaaagaagaggacaaccgagagcaatctaggcctgcagacggttcgacattccttacacaacagtttagacggctgttgtag

SEQ ID NO: 151443 - DNA, 519 bp, Zea mays
  Clone ID: MRT4577_69639C.1
tgtttcttattcagcgtcttttctgtgtggtctgaaattagtgttgtgcattcaccgaccgatcacttttcaaaatggtagtttactctaagatcactaaggacgctctttttgagtgtgtcaactatgttgtcgaaaaatctcaagaaaaaaaacgtaactttgtagaaaccgttgaattgcaggtcggtttgaagaattacgatccacaacgtgataagcgtttctctggtactgttaaattacgtaatattcctcgaccacgtttcacagtctgcattcttggagatcaacagcattgcgacgaagccgcagctaataaccttccattcaaatctgccgaagatttgaaaaaattaaacaaaaacaagaaattgattaagaaattagccaagaaatatgatgctttcttagcttctgaatctttgattaaacaaatcccacgtcttttgggtccaggttttgacaaagccggcaaattcccaactttgcttactcactctgaaacatgattgaaaa

SEQ ID NO: 151444 - DNA, 451 bp, Zea mays
  Clone ID: MRT4577_6963C.1
atcctatccccccacgctgggtcgcccgatctgcatgcgcacggcggcttcctcttggcgtttctagatgggctcctcctccgtcctcctcttcccctcgtcctcctccgccgcaccctccgcccccccattcctttccccactctcatgccaccgccatcgcctcctcccactccttattgccgccgctgccctgctccaaccccccgcctcctctttcctcgcaagaccacgtcctcatccactacatccaccagctagacgatttgaggttatttttgtttccccaactggtgaggaaattaaaagcaagagacagctgactcagtacctgaaagctcatcctggaggccctgcatcttcagagtttgattggggaaccagtgatactcccagacgctcagcacgcttgagcgagaaggtcaaggcaactgagagcccagagggtgag

SEQ ID NO: 151445 - DNA, 162 bp, Zea mays
  Clone ID: MRT4577_69640C.1
tttctcttttttttttttttttttttttttttttttttttttttaaatccggggattttaatagctgcaaaacaaaacgggccggtccaaacagtagtttgttccatctccctggagagccaggccgatcagggcaaagcaaagcccattgttgcggcccct

SEQ ID NO: 151446 - DNA, 594 bp, Zea mays
  Clone ID: MRT4577_69641C.1
atgcatgatccagatgcagatggcggtcaacttcttgaactcggtgatggggtttaccacaatgaccctatacaaagcgctggcacagaaggacatgccgttgcatttctggtgcctcaaggatgccaatgtgtcgcagctgaaaaacatgtgcaagctgctgggcgagaaggatgccaacagcctggcaccatctcagacctcaccaagggtgatatcccacggctgcacgtcaccaaccagagcctccagcagcagcacaccatccaccacatgcatgagcatgatggagcaggaggcctggcatccccagcactgcctgtcggcctccccgagcggatgcacgggatttgcctcgtcattgtaatctgtgcgcaagtgggcatcctcgacgtaaaattagtaattgcattgacagggcctgcaggctatggtggaggtgcatggtgggcattgaccggtcctccaggtggtgcatgcggcagtgccatggcggctgggagctggtgtctgggccagagcacggctatggcacatgtgggagatgaggttctggggccagaaaagtcgctggtgccgagattcgatgcctga

SEQ ID NO: 151447 - DNA, 756 bp, Zea mays
  unsure (1)..(756): unsure at all n locations
  Clone ID: MRT4577_69642C.1
cattgggtacctcgaggccggccgggaatagctcctctataccgtagacgtcgccagtatcatcttagtgtaccaggatgttcaacgaacctggctcatcatgatcatccgcaacaatagcctccatgaaggctagcagtttctctgtctggagaggacgctgaatgtccagaacgatgacaaccatccaaacctctcccagcatctaggtgagaagcccaacaggagacccagctatatgaagagtcttaaggcgcaggaaaatgtcaaggacaatatctcgatgaagtactacgattgagatcccaccaaagctgtcatttataacagatcgaactaccttaacctccgctctgatatcgtgtctgcaaggactctagaattctgccaagtcagctggcctaccatttgggtctggtcctcttggtgaccggctaaagggtctaggacgttttgactgcaacaggcctaagattgatgacatgaatgagtaccacggtagtcctcgggaccttcctgtcgactatggtggcgataagagtgcaactcctgctgaggtccagacatcattcatcatgactggctttaagcgtaatggtgggaggatcttcggcctgntgtcaacctcttctatcatggagagaagtagcacttggctgcgacatggtgtctcccttcgcatgcganatttagtcntgaaggacagatattatgaaccagtactcttactcggatcggacagtgctgacatatgca

SEQ ID NO: 151448 - DNA, 3403 bp, Zea mays
  Clone ID: MRT4577_69643C.1
cgagcaaagattcactggcacaatagttggaatatgtgtttctgatccatctggctggcggacgcgtgggcgacacgctgcgagagggggaaagaacttagaagggcaattcggcacgagggagcgacacaggaaactgacgtcgcttttgacggcctgctacttaataaatcccctcgcctgcctcccttcccatctccttcccgcaaaaatcgcccgggtgccaggtgcgcggcgcagggaggtcgcgacggattccgggcaagtgcatgtgagatccgatggtggcggctgcagcggcggccggcggcggcgccgacgcgggatgcggaggcggaggcggaggcggagggaaggacgcgctgttcgtggagctgtggaaggcctgcgcggggccgctgtccagcgtgccgctactcggggagaaggtctactacttcccgcagggccacatcgagcaggtggaggcatcgacgaaccatcttgccgagcatcagggcacgcccctctacaacctgccatggaagataccctgcaagctcatgaacatggagctgaaggctgagccggatactgatgaggtgtacgcccagctcaccctgctccctgataagaagcaagatgagaatacatctgcaagagtggagaatgaggaggcagaggaggaggtggtgcctcatgtgccaccagccacaagtgaggggcttcgcatccattccttctgcaagacattgactgcctcagacacaagcacacatggtggtttctcagtgttgcgccggcatgcagatgagtgcctcccaccactggatatgagtcaacatcccccaaatcaagaattggtggccaaggacctgcatggggttgagtggcggttccgtcacatctttcgaggtcagccacggagacacctccttcagagtggttggagtgtttttgttagtgccaagcgtcttgttgcgggggatgcattcatatttctcagaggtgagaatggggagttacgtgttggagttcggcgtgcactgaggcaccaaaccactatcccatcttcagtcatatcaagccacagtatgcatcttggtgttcttgcaacagcatggcatgcagtgaacactgggagtatgttcactgtctactacaaaccaaggactagtccagctgaatttgtggtctcgcgagctaggtactgtgaatcactgaaacgaaattattcaatagggatgaggtttaggatgagatttgaaggtgaagaagcggcagagcaaagattcactggcacaatagttggaatatgtgtttctgatccatctggctgggctgactcaaaatggcgttcccttaaggtgagatgggatgaagcttcttctgttcctcgtcctgaaagagtttctccttggcaaatagaacctgctgttagcccatctcctgtgaaccctcttccagtcagattcaagaggtctcgttcaagtgttaatgcttcaccatctgatgtgtctactgtaaacagagaagttgcttctaaagtcatggtagactcgcaacaaaataatctcccaagggccttgcacaatcaaggaaggacacaattgacaggtcgataccgtgatagcactgatgtgaagactgctcaggatcttaccatgtggtcttcaggaactgagcaacagagaaacaatattgctgcccagacaaaacgatgtctggagggttggacgcaatctagaactcccgaaggttacaatcaactgttctcggcatttcaaccactgaaagatgcacataatccacttcgtccttttcctaataaaatatctgggactcgctcaagtacctgggtcacagccgatgcccgttatccagctcaacaagccaatcacaacatgttacatggcacattgtcttttatgcctcatagcagtggttttaggatgattcaacagaataatctagtgatgcctgaagctgcaaattttactgggaaatcagctttcacttcacttcagggccatgtcactgatcagtgctccacaggttggtttggacctattgagtcaaattcccacacagaccatgcatcgtcaagtttgatcaggtcccagcctttggttattggaaatgatgttcagaaaaccaaaggcacttcattcaaactatttgggattcctcttggcagtccagaaaaatctgaacctctggtatccccaccaagtgtcgcatatgacgggaaacttcaaacttctccaacagacaacaatgagccttgttcagaagctacccagaatatccagaacaaagtgccaagtagttcaaccagaagctgcaagaaggtccataagcaaggcagcgcccttggcagatcgatcgatctaacaaagttcgcttgctacgatgagctgatcgctgaactggaccagatgtttgacttcgatggtgagctgaagagtccttgcaggaactggttggtcgtctacactgacaacgaaggcgacatgatgctggtcggcgacgacccctggaatgagttctgtgacatggtccacaagatcttcatctacacaagggaggaagtggagaggatgaacccaggcgccctaaactcgaggctcgaagactgcctgtctgactcgctgggaagagggctggcttccaaagagccccggagcggcccctcgacttcggctgtcgattctgagaaccgcgctaacttgtccagtcagtgagcccttttgaaagtggtgaagcagacaaaaggccacgtgtcagagtgaccggaagaacgagaaaggggtgtgtttcagtggtgtgtagtaggtaggtaattttgtgtgtatgcctccgggtaaaagccccgcggtacccagtttgtagatggtgcttctcctggtgctagtttcccgtcgtaagctggatttttttggggggtgtgtgccctgctctgtgtgctgacccgcctgggggtaagttgtagcagagcaggagaaagcaggcaagaaaccgctggtgcgcctgcttggccaatccttttccttgcggagcgctgtaaatagccttggatctgaagcgtagtaatgtattgtcatggtactcgaagtcatgctccagtttgtgttgggtatgacctgcaactgtcggttcgatgggtgcggaccatatctggcccctttttcttttctagtcatccccttgatacataaacgcatcctaggctcctaagcatgcttcaatcaagttatgtgctgttggtctcttttggcaacatgttttatgcatgtataagcgccagtccaataaaatcggcgagatctgaaatccttcgtgttgatagatggctttcagtttttaaaaaaaaaaaaaaaccaaaacaaaaaaaaaaaaagggcggcccccgaatagtaagctc

SEQ ID NO: 151449 - DNA, 603 bp, Zea mays
  Clone ID: MRT4577_69644C.1
gggctccttccccgcaaatcgcccgggtgcctgccaggtgcgcggcgcagggaggtcgcgacggattccgggcaagtgcatgtgagatccgatggtggcggctgtccagcgtgccgctactcggggagaaggtctactacttcccgcagggccacatcgagcaggtggaggcatcgacgaaccatcttgccgagcatcagggcacgcccctctacaacctgccatggaagataccctgcaagctcatgaacatggagctgaaggctgagccggatactgatgaggtgtacgcccagctcaccctgctccctgataagaagcaagatgagaatacatctgcaagagtggagaatgaggaggcagaggaggagggtggtgcctcatgtgccaccagccacaagtgaggaggggcttcgcatccattccttctgcaagacattgactgcctcagacacaagcacacattggtggtttctcagtgttgcgccggcatgcagatgagtgcctcccaccactggatatgggtcaacatcccccaaatcaagaatttggtggccaaggacctgcatgggggttgaggtggcggttccgtcacatctttcg

SEQ ID NO: 151450 - DNA, 887 bp, Zea mays
  unsure (1)..(887): unsure at all n locations
  Clone ID: MRT4577_69645C.1
gagtaccatgacaatacattactacgcttcagatccaaggctatttacagcgctccgcaaggaaaaggattggccaagcaggcgcaccagcggtttcttgcctgctttctcctgctctgctacaacttacccccaggcgggtcagcacacagagcagggcacacaccccccaaaaaaatccagcttacgacgggaaactagcaccaggagaagcaccatctacaaactgggtaccgcggggcttttacccggaggcatacacacaaaattacctacctactacacaccactgaaacacacccctttctcgttcttccggtcactctgacacgtggccttttgtcttcttcaccactttcaaaagggctcactgactggacaagttagcgcggttctcagaatcgacagccgaagtcgaggggccgctccggggctctttggaagctacccctcttcccagcgagtcagacaggcagtcttcgagcctcgagtttagggcacctgggttcatcctttcgacttcctcccttgtgtagatgaggatcttgtggaccatatggcagaattcattccaggggtcatcgccagccagcattattcgccttcatttttttgtccccnctagggggtggtgcaggggggggccgctcaccattggngtccccccccccccccngttggggaaaaatataatnttagntggtgnnnttggttncaaacatgccctaaaaagggctctacaaagcttatgacccttcttgcagcttctggtgggaatactttgccctatgttctggatattaagggtagcttttgnanaagnnnnnntancaaagctattagaaatgaggtcaatgatggggggatgcgcctagctnccaccgcag

SEQ ID NO: 151451 - DNA, 623 bp, Zea mays
  Clone ID: MRT4577_69646C.1
aaaaaaaaaaaaaaaaaaaaaaaaaaaaaaaaaaaaaaaaaaaaaaaaaaaaaaaaaaaaaaaaaaaaaaaaaaaaaaaaaaaaaaaaaccttttatttaccacaacaatggcccggatccaatacaagtggaagaagaagggcgcggaactagttttgggggggcgaaaaaacgaatgaatgtttggccattaagggcggggaagaaaaagccctttttgcaaaggaaaatggaaacccggggggggaacccgtgggcccggaccccggtttcgcggcctttttgggggggggggccccgccgtttgcggatttttttgaagtggggaaacttaaggaccgggcccttgggtaccaattacttaataagcaagggggggacctgggcaacaatcccggaaatggtttggggggggggccccaatttggaaaccttaacccgaaaaaagttggggcaaagggggggggggggggcaattaagaacttggcaacggggttggttttcttggcggtcttggttttaacaatttcggttaaaataaggccaaggccaagcccgggttccttaatgaatttggaaggttaaaggcggcccaaaagcttaagggggccaagggggggt

SEQ ID NO: 151452 - DNA, 4302 bp, Zea mays
  Clone ID: MRT4577_69647C.1
gccggccgggctgggctcttcctcccctcgctctcttgcgaacttgatcacacagcacatagcacacacacgacacgctgcgagagggggaaagaacttagaagggcaggcaggagaagcgacacaggaaactgacgtcgccttcggcggcctgctacttaaataaatcccctcgcctcgcctccggctgcctcttccctttttccttccgcgcaaatcactcaggtgccagttgcgcggcggagatcgcgacgaattccggacggcagggaggtggtcgggggaactgggaagtgcatgtgagatccgatggcggcggctgcctgcgccggtgcggaagcaggacgcggatgcggagggaaggacgcgctgttcgtcgagctgtggaaggcctgcgcggggccgctgtcctgcgtgccgccgcttggggagaaggtctactacctcccgcagggccacatcgagcaggtggaggcatcgacgaaccagcttgccgagcagcagggcacgcccctctacaacctgccatggaagattccctgcaagctcatgaacatcgaactgaaggttgagccggatactgatgaggtgtacgcccagctcaccctgctccctgataagaagcaagatgagaatacatctacaacagtggaggaagaggaggtggtggtgcctcctgcgctaccagccacaaatgagggtcctcacatccattccttctgcaagacattgactgcctcagacacaagcacacatggtggtttctcagtgttgcgccggcatgcagatgagtgcctcccaccattggatatgagtcaacatcccccaaatcaagaattggtggccaaggacctgcatggggccgagtggcggttccgtcacatctttcgaggtcagccacggagacatctcctgcaaagtggttggagtgtttttgtgagcgccaagcgtcttgtcgcgggggatgccttcatatttctcagaggtgagaatggggagctccgtgttggagttcggcgtgcactgaggcaccaaaccactatcccatcttcagtcatatcaagccacaatatgcatcttggggttcttgcaacagcatggcatgcagtgaacactgatagtatgttcactgtctactacaagccaaggactagtccagctgaatttgtggtttcgcgagataggtactatgaatcactgaaacgaaattattcaatagggatgagatttaagatgagatttgaaggtgaagaggcagcagagcaaagattcactggcacaatagttggaataggtgcttctgatccatctggttgggctgactcaaaatggcgttcccttaaggtgagatgggatgaaccttcttctatttctcgtcctgaaagagtttctccttggcaaatagaaccttctgttagcccatgtcatgtgaaccctcttccagttagattcaagaggtctcgatcaagcgttaatgctttgccatctgacgtgtctactgtaaccagagaagtcacttctaaagtcatggcagactcgcagcaaaatagtctcacaagagccttgcacaatcaaggaaggacacaattgacagttcgataccatgataacagtgatgtgaagactactcaggatcttaccgtgtggtcttcaggaactgagcaacagagaaacaatattgctgcccagacaaagctatgtctggagggttggacgccaactagaagtcctgaaggctacaatcagatattctcggcatttaaaccactgaaagatatacataacccacttggtccttttcctagtcaaatatctgggactcactcaaatagctgggacacagctgatgctcgttatccagtccaacaagctaattacagcatgttacctggcacatggtctttgaggcctcataacagtggttttaggatgaatcaacaaaattatctagtgatgcctgaaggtgcaaattttacggggaaatcagctttcacttcacttcaggaccatggcactgataaatgctccacaggctgctttggtcatattgagtcaagttcccacacagaccatgcatcctcaagtttgatcaggccccagcctttggtccttggaaatggtgttcagaaaagcaaaggcacttcatttaaattatttgggattccccttggcagcccagaaaaatctgaacctctggtatccccaccaagtgtcgcatatgacgggaaacttcaaacttctccatcagaaaaagggaatcagctagacgtagttgaagtggataattgttctcatccttctaagactgtgaagccacttgatggtcctcagtcagattctattacagagaataatcagccttctccagaagctacccttaatatccagaacaaagtgcaaagtagttccaccagaagctgcaagaaggttcatcatatgttgcacctttttccttgctagtagtcattccttgatacataaatgcttactaggcccaaaccttcaattgaatacttctcaaagtatgctccaaagaagtttatgtactcttgatcccttttggcaacttgttttatgtatctagaagcaccggtccaataaaacctgctagttgtgtaacctactaacctttcatgctaataaattacttgagtttttcttgccccttcaagtgtcgtatttggatctgtttggcatcatcaaaagagctatttatccttaagtttggctgtcaagaaagaaaaaaaaagctgtgggaatcctgtgatgagactttttaatctttaagcagtatgccttttggatatatagtctagcattatgcaaatggttattaaatacaatgtggatgacaaatgtcacgttgtcattagattggtgacatgggctttgagaaatgttagctttctaatgataacggtcaaatgttctatctaattgcatccatttttctccggttgctttttattttattttatttatttgaggggaaggataggcctgacacaatataccgagtaaaggccttgggttcgacgcagcttttctgcaaaaatgtagggatatggcgtgcctcggttattacttcatcggactccactcaagtgttcataagcaagatgtttgacttcgatggtgagctgaagagtccatgcaaaagttggttagttgtctacactgacaatgaaggcgatataatgctggttggtgatgacccctggaatgaattctgcgatatggtccacaagatcttcatctacacgagagaggaagtcgaaaggatgaacccaggtgccctgaactcaaggtctgaagatagtctatctgactcgctgggaagaggggtagcttccagagatccccgaggaggcgggtctacttcggctctcgattccgagaactgctagtttgttcagtcagtgaggcctttggaagtgaagcagacaaaaggcgtgaatcttgcggtgtagagtgtagttggtacattgtgtgtatgcctccgggtaagccctgcggtacccagtttgtgtcctggcgccagtttaccatttaagctaagtttttgggtgtgccctgtgctggggtctgggctctagttattgtagcagagcaggcaatgcatgcaagaaactgatgatgcgcctgtttggccctctttcccttcccaagccatgtaaatagccttggctctgaagcgtagtattgtattgtcgacagccgtacttgagatagtactccaagaggcgcgcttgctcctgtcagttgggtgtgcgtatgtagatgtgcgtgtgaagccatgcaagcaagggtttgtggggttgatggcttttcatggtagcggatctgctttcatggtactgacaagcaggtcccaggcggcccgttgactgcggcggtttgctttgagaaccgcgctaacttgtccagtcagtgagcccttttgaaagtggtgaagaaaacaaaaggccccgtgtcagagtgaccggaagaacgaaaaaagggtgtgtttcagtggtgtgtagtaggtaggtaattttgtgtgtatgcctccgggtaaaagccccccggtacccagtttgtaaatggtgcttctcctggtgctagtttcccgtcgtaaactggatttttttggggggggtgtgccctgctctgtgtgctgacccgcctgggggtaagttgtagcaaagcaggagaaaacaggcaaaaaaccgctggtgggcctgcttggccaatccttttccctgcggagcgccgtaaataaccttggatttgaagcggaggaatgtattgtcccgggcctcc

SEQ ID NO: 151453 - DNA, 1210 bp, Zea mays
  Clone ID: MRT4577_69648C.1
ggtcctcggcggccggaccgccctgaggcttcggcctggcggcgcgcggagggccctggacgccgtcgtcgtcgcgcgggcgtcgtctgaggcggagaccgccgaggcgggcggcggcggcggcggagcggaggaggagcggccgtacgaggagtacgaggtgacgatcgagaagccgtacgggctcaagttcaccaagggccgcgacggcggcacgtacgtggaggccatccagcccggcgccgccgccgacctgaccggccagttcgaggtgggcgacaaggtgctggccaccagctccgtcttcggggaggagatctggccggcggcggggtacggccagaccatgtactgcatccgccagaggatcggccctctctacatgaagatggagaggaggtttggtaagtgggacggcgccggcgacctcaccgagaaggagatcatcaggttcgagaggaactccggagtggtcagcggcagggtgcgggagatccagctgcaaaactaccagaggaagatggagcagaagatgcagagggaagaggacctccgcatggggctcaagctgtacaaggacgggaagtacgaggaggcgctggagaagttcgagtcggttctggggtcgaagccggagcccagcgaggccgccatcgccagctacaacgtcgcctgcagctactcgaagctgggccgggtagaggctgcgctttctgcgctggaggatgcgctcaagtcagggtatgaagacttcaaggcagttcgcaccgacccggatctcgcgaacctgaggaagtcggaggagttcgagcccttgctgaagaactacgacgagtcgttcatcaacgagaacgccatcaacgccatcaagtccttgttcggactcggaaacaagtgaggcgattgttagcttagcttgccctcgtacaacctgaccatttgccgtgcagatacattgtgtatgtctgtatgagtactgtccaaatgtaaagggaaatatgcaattgtgcttgtcagccacatgccaaatatgttaagcatcaagaaggtgaatatgttagcggacaaactcacgagacaagtattgagaactctggattggatttttttttcaggttcagacagtttaatgacttgtcaagaaaagaaaacgcatcaattcttcctggttcaaaaataaaaaaacaaaaaaaaaaccgagggcgagctt

SEQ ID NO: 151454 - DNA, 302 bp, Zea mays
  Clone ID: MRT4577_69649C.1
aaaccctatggggtttgtttaaaagggggggcccccttgtccatggaatagccttaataaaacgggcttgcccccgttggcgggggggagctaaatttggggctttttgacccccagaagttacaccattggttgccaggggtcctttacccaaggggtattcttccttagcacacccgttggcaaataatttgggaccttaactttttccagtttttatcctaattttaaccccagtattaaagcaggttaaatctagatgttcgccaacttaacagacgtttttcacaagggattttgtt

SEQ ID NO: 151455 - DNA, 403 bp, Zea mays
  unsure (1)..(403): unsure at all n locations
  Clone ID: MRT4577_6964C.1
gacgcacacgcgtgcgggccgacctgagcaggcgacggtctgacctgcttttgcgtcgccgccgccgtcaaatcgcttccgctcttccacgccatctccaccgacaaggctgtctggtgagcgcgccgccctgctcgctggagccaaccaccaccatgcatgcccattgcgtgggcagaaggcgcagcacaagggcctactgcttggtggagaggagggcaaagtcgcgaccttttcattgagtagaagcatcggcgctgtgctgttccgccgtgccctcctcctccaaagtcggcctcccctcacgcttcttcagcggcgcctaccgagaggcgagagaggaagttcgctccgatctggaaaagttcttcgcaggccataatgaacctnctcaatgtctacg

SEQ ID NO: 151456 - DNA, 738 bp, Zea mays
  Clone ID: MRT4577_69650C.1
accacccaccctagctcccctcccctctagtcctccacacagccacacatacatacagatctgcttccacgcggttgatggatcatcccccagcttgtgtccgagggagggcgagctgaacctatggggtacctgaacctgcggcaagtgattctccggctgcaacggtatgcccctctgtcacaacgctgcggtggtgtggagggagcgggggcatgcaccggaggagcattcaccctgcggtggcaagagtggctggatctcgtggacccaggagtgctagtcatctgggtgttagtcaagctgcagggcatcgtctccctggtaatcccgcgagcaatgctacgagcgcgcttgaggtgggagcgagctgcggtgagctgcggtgaggtgggagcgagctgccatcaatctatgtatgtgcatttgtctgttcagccatcgttgttcagccatctgtatgtgcatctctaattcatgttaggtgaggattagaggggggtaaaatgaagcatgcacctgatccatgaatggtctggctcatctcttaaccatcgaatgcacacaatgagagtttcccggattccatgtgcctttctttaaccgacagcaacacagttacagagatcttacctgtttctagtactgttgttgttgttgttcctttcgttgtttcagattttcttttttcaaacagctatgcattcaatcttataaattgtatccatatgttttctt

SEQ ID NO: 151457 - DNA, 464 bp, Zea mays
  Clone ID: MRT4577_69651C.1
catagattttagcaggtgtgcaatccacagggggctcgtcacagaacacagtctagaacaccaccgtgcaaacgacagcctgtaggaaaccgtcatggctgccggcggtgccgaccaaagggggaataatgctgcgacgacgacttttgtggtgccagcggtggcgctgagcttggggaagccgatgccgcgggtgggcttcggcacggcaacggcgacgctgggccaagcggagggccgcgccggcgtgacggaggcgatcctccgcgccctggacgctgggtaccgccactttgacaccgccgcagtctacaacacggaggcctcgctcggggacgcggtcgttgaggccgtgcgccgccgggactgtcgcctcccgtgacgatctctacgtcacgtccaagctctggatcaccgacgcgcaccccggacgagtcctaccggcttttcacaggacacttgaa

SEQ ID NO: 151458 - DNA, 384 bp, Zea mays
  unsure (1)..(384): unsure at all n locations
  Clone ID: MRT4577_69652C.1
ggcggagtcgtcttcctggtggcgacnacagactctggggggccgcgggccgtcttggcggagaacgcctcgtcccagatctcggtgaaggcccggaggatggcgtcgtggtggtgcggcgcgttcagcgcgaggaagtggcggagcaggtcgcggagctcgtcgcacgtcgcgatccggttctccacgatcatgttcaccatggagcgccggaagtcgctcagcgggtcgtcggactgcttcaccacggccacggccacgctcccgtcgagcctcgcggggccggggccagtgccggcgccggcgtcgcagcttcttgctttccggtggttcggggcctgcggtgtcggggaaacgttggcggcttctttcttgcagcctttg

SEQ ID NO: 151459 - DNA, 411 bp, Zea mays
  Clone ID: MRT4577_69653C.1
ggaagggaacccccaaaaaataacattttactcttaaaacatgacatacaccccattgccccaaggcaaaagggggggggtttttatcagagaccccacacaacaatgggtaaaaaatgcaaaaaaaggggggggggccacccaaaaaaacatggccattgaaaaggccggggccctaaaatggggaagggtccgaaggggaaatcccttaagggaaaaacgggtcgggggaacaactggaaacgaccaccaactttgtcctttttaaaagagccctaggctttccaaaaaacgaaggggttcatcaccaaaatgaaaaaagaccccttgcaaaatgatcctcctgtaaaataaatgaggaaaataggaacgggccattccgccctttggaggaaaagggtaatgaattgg

SEQ ID NO: 151460 - DNA, 391 bp, Zea mays
  Clone ID: MRT4577_69654C.1
ataactgctaaagaagagggtcttattcctgttgaaacctgcttttaagaatgggcagagacacgggtttgactatgttggctattcatagaaaattccttgcattgaggaagataatctttcatgtttcactgtatggaatggcttttcacgaatatagtatgtccaatatagactgccaggacaagagcccactgttgataattatatgagaaaaagtaactgatgtgttcaccttatgacataagatggctgttgagttatttggaactgtatgcattattgagaaaacttgggaagattcaagttagtaaatctattccaagctactggtttatcaaaaggctaaaatttttaggtgaaaaagaaattgaaccgagttttttcttta

SEQ ID NO: 151461 - DNA, 107 bp, Zea mays
  Clone ID: MRT4577_69655C.1
gtctctgcagcttcatcccggttggcatcatcgagggccttacgaaaggcggcacagagggagctcagctctcagtgcgtgctccaccctctattccagattggcat

SEQ ID NO: 151462 - DNA, 430 bp, Zea mays
  unsure (1)..(430): unsure at all n locations
  Clone ID: MRT4577_69656C.1
tggcttgngacctttgggctgatttatgtgcttgtttatgtgcttgtgtatacactcatcacatcacatctcaggaagtaaggatattattgttacggtagttaagacgtccgtaccgcctgtctcttcagtctcccgcgtaagtgttatcagcgtgatgtacaccttagggtatccgttattagctacgttaccgggcattacgaatttacgtacgtagcatcgtacgacgtaataggggtccgttagtccgacggtgcgcttgctttcgacgtcgtagtaatcgccggttccattgtcctagatgacgttagcgacgacgttatagacgacgatgttcaatacgacgctattaccgacgacgttgaatacgacgctattaacggctccgttgaatacgaagctgtaaaagaagacgttataacgctat

SEQ ID NO: 151463 - DNA, 323 bp, Zea mays
  unsure (1)..(323): unsure at all n locations
  Clone ID: MRT4577_69657C.1
ggattctcctctccgtctgngnntttgggggtncgcnnnnncancccngaatccccgatncgaatcgncctcctcgngagnctcgtcgatcccccactcccctcccctcgcttcnagatggaaatntttgtgaaaaacctcacggggaagagtatcatcctcnatgtgagatctactgacaacattgaccatgtcaaggatatgatccaggaaaaggagggcatccctcctgactaggaaggaccttatcttcgncggaaagtagcgtcgaggacggtcgcatacttgatgactacaacctccataaggagtccatccttcat

SEQ ID NO: 151464 - DNA, 398 bp, Zea mays
  Clone ID: MRT4577_69658C.1
ggatggggaaaagagaggggcccccccagctttttaggtgggggtgtttaaaaaacaaattacaggggctggggctggcaaccccagggaaaaaaggggaaagaaccccccaggttcccggcaacagaaacccccaaaaaaggggccggtcatttggagtagtattggagatttggggccccccccgttgacccccaggtctgactgaaggggacagggccaacattcccggttggttccttgagacagtacccgcattttttgctttgagggcgaggaaggacccctaaagccggccttaaactttgagggggacggggggcaacttgaacttgggcccgatctccttgatttgtttccggacccttatttcaaaaaaattggagccccccggaacc

SEQ ID NO: 151465 - DNA, 493 bp, Zea mays
  Clone ID: MRT4577_69659C.1
ccacgaccaatcagtacgtagtgctcgtcgagctagcccggcgggtagctagacatggcgcccagcaaggccgtggtggcacacctcgtggtgctattagtgcccttgctctccctgctgcccttctcctcccacgctctgacccaggacttatgcgtcgcgaacatgctcctcccagacacgccgtccggctacccgtgcaagcccaaaggtctcgtcagctccgacgacttctactccgacgccttggccaggcctggcccgctcatcgcccccttcaacaccagcctggcctccgccaccgttaaacagctccccggcctgaatggcctcggcatcgccgcacgcgtgtcgatgtccagccaggtggggtcgtgcccatgcacacccacccggaagcctcggagctcatctgcgtcctcgaaggaaccctttccgctggcttcatcagcgccgaaaccaataaggcctatgtcaagagcctaaagaaggg

SEQ ID NO: 151466 - DNA, 341 bp, Zea mays
  Clone ID: MRT4577_6965C.1
caaggaactcagcatataacgggggcataacagataacactgggttttatacagactttacactccaaaatcgggaatgggttctgcaatacggaccaaaacttcgaagactagttaattcccggttcctagaactatacaaccaaagttaatggaaatatggccatttggggggaacccgcaactgaatgaatgaacaacctttgacatgctacctaattttgggcttgctacagttttataatagctcggaaagtttaccagggatatagggggaaagcccaggggggagggactggaacccattgacaaggggggggtggaattccggggctttttcc

SEQ ID NO: 151467 - DNA, 146 bp, Zea mays
  Clone ID: MRT4577_69660C.1
ggggaaaaaaaaacttatcgaagatacctgttctgaagtctttttagtactggattcacatgatattcacgtcaaggagtcaatccacaatcttatctaatgtcaggacaccaaaagtcgaaaccaaccctataattattgttaga

SEQ ID NO: 151468 - DNA, 600 bp, Zea mays
  Clone ID: MRT4577_69661C.1
agagcagagcaagaaacacttctctggggaggcaaatccagtacgaagcgtggcacctccccttgaaacgacaggacccaagccctaacctaacaaaaaaagatgcgaaacggacactcccctctttgttttaaaccaaagcaggtttggggggggggaacaaatggatggccatacctaacgaatataaaaggaaagaacaaaccatttgatttaaaccaaaccccccccggatcagctgacttgagttcagtgatgtggtgctagccaagctaaccgttcagtattgtattgaccttgcacactacaccccaggcaaggaagggaacatctcttttgtacgccaccccctcaccttacctgtgcaactcaactggaagctaatcccacgccatgctttggccactgcaggaaggcaaggcttcacccgaccccccaaccaaggaaacacgctaccctacaccacaagactctagtgggtacgccacctcaacctaaccttggtcctgatctcatgcaatccaaaccaaagcatgggatgttatgccatgcattgccaccgcattgagattgcatagcacacaaaccttactgttctgc

SEQ ID NO: 151469 - DNA, 317 bp, Zea mays
  Clone ID: MRT4577_69662C.1
gagcttgcattatttgttgagcatgtggatagggacgatgatggtattattacttttgaggagtggatagatcatctctcgctctatcctgatgatgcaaccatggaaaacatatgtcatcactgggaacgagtctgcctcgtgaacatcggggtgctggctgatgcaccagatggtattatcaatcctggtggtgccatccaatgtaagcctgctggaagcatcgctagtgccacgtccactactgtatctgctcctattgaacgacataacttaaatatgctagcgctaactgactggcttgactcattctaatc

SEQ ID NO: 151470 - DNA, 1314 bp, Zea mays
  Clone ID: MRT4577_69663C.1
ccgggacaacgcgtccactcgccatccgcgtcaacaccactgcaaccaccaccgccgtgtgggaggcccaaaccacgcgcctttccccactgcaccaggcaacccaccagcaggccgcagttcacgcttggctgacgaccgacccccattcgttctagccctccctccgacactccgatccattactcgctatggacgcggcgggcggcgaccagctaagcctggccgcggtgcgcgacgcgctggtgcggctggaggactccgtggtgttcgcgctcatcgagcgcgcccggcatccgcggaacgcgccagcctacgcgcccgccgccaccgctggagaacattcgctcgtggagttcttcgtccgggaagcagaggccctcaacgcaaaggctggacattatcaaaagccagaagatgttccattcttccctcaagatctaccctcacctctctttcctacaaagccttccccaaaggtcttgcacccttttgcttcattggtcaccgtgaatgatgcaatatggaaaatgtattttgatgaattgctcccgttattcactgttgatggtgatgatggcagctatgcacaaacagttgcactggatttagcgtgtctgcaggttctatcacaaagaattcatattggtaaatatgttgctgaggtgaagttcaaagacgctcctcaagaatatagtcgactaataaaagaaaaggacagcaattctctgatggatatgctgacattcaaggctgtggaagagaaggtcaagaagagagtagagaagaaggctaggacgttcgggcagaacgtcaccttggatgacaatgccactgctggtgacagcgagtgcaaggtcgatcccaaagtgctctccaagctgtatgatcagtgggtgatgccactgaccaaggatgtcgaagtcgagtatctcctgcgccgcctcgactgatcagtgatcacccgattagctgtagctgcgaactttatgtacgcgtgggtttcagtttgctttgcacatgccctttatggctttatcgttcaaactcaactacgagagaacgttaccaggatctggccttcgtctttgtcagcctgcttgcccgtcatctgcatgagtagtccaactgtaagtgacgcttggtatggaatgtaagaaaagtaatacaactggttacatgttatctttaagctcctgttgttcgtctgtaaaagcggcccaacacagtaaggtaccaattctctggttcagaaacgtattatgtttcttgcttacgtgacaaataccaaacaaaatagttacagctttaaaa

SEQ ID NO: 151471 - DNA, 332 bp, Zea mays
  unsure (1)..(332): unsure at all n locations
  Clone ID: MRT4577_69664C.1
ccggaccgagaacaacgcccgcctccacacgctcactagtcatccgcctcccgtgtcagctatcactgatacatctgctacgccaaccgcgtcngcttctagtttttaataccaacaaaccaatccacctataccctacaacacaccatctgccatccaatgcacacacaaacaagcgtgctcagcgaacctattatcaactgcaagctgatgcaccgtcaaaaaacattgaggtgacttaaccaccatcatataacagcactgcacccaagctggctactcctgatctaccaatgacccacccaaccatgcatcgatggtctaaatagaga

SEQ ID NO: 151472 - DNA, 477 bp, Zea mays
  Clone ID: MRT4577_69665C.1
aaaaacgaaaaaatttcggaacgggaaaaaaaaaaagggaaacggggaccctgggggggggggggggcaaaaaaagaccggggggaagagcaacaggggattcttaaagccaaaagggggtttttattttggggagggccccaaaaaagggaactgggggcccgttcccaaggaagaaaagccggcacaacaacgggggggaaaaccttttttgcattgggggaaaaaaaagggccagggaaggggccgttttcgggggggtcggtccagggaaaaacccattaaccggggcacagggaacgaaaggacttgggaaacttaaaacactgaggggcatccccaccttttggagccacacacctgggaaaataaaaaaagcgggggaaaaaaagccttggtggggttggtgaggggaaacaaaaattggggggacggtgtagaactggacccaggaggtataaaccctttcccccccgg

SEQ ID NO: 151473 - DNA, 739 bp, Zea mays
  Clone ID: MRT4577_69666C.1
gggggggggggggggggggggagggaggggggggggggggagggggggggggggggggggaggggcgggggatggcgacgtgaagggcgggcggggagatcggcatcgggacgtctctccgtcgcggtggtcctccgcctgcgtcgtgagccaggcaaggcaggggatcgcgatggcgggatcggaggagcacgagttggaatccgagggggacgccggaggggccaacagcgacccgcaggagggtgggaccgtccggaagaacggcttcatcgggcatcgacaaccgcccctgcaagggtggggaggtttctacctcagagactgggagcggtgggcatgggcgatgccactttgttggcatagacatattcaagcggagaaagctcggacatattgtgccttcggcacacaactgggatattccacatggggaccggactggggaccaggtgagtggtagatcaggggatggatttgtggagcgtcttacttcagatgggaacacgaaggatgagcttgcgctcccaagtgagcgaaggcttggggggcacatcgaggaaggggttgaaagggggaaggatcgtgcggtgagtggcgaggcgtggtatggggggaggagcagatctgcgcgctgaaggatgtgggcgcccaagtaacttccctgccttggaatagtgtatcggcaaaacggtgggtgcgaaaaaagaaggggatcaaggattgctacggagacgtc

SEQ ID NO: 151474 - DNA, 290 bp, Zea mays
  unsure (1)..(290): unsure at all n locations
  Clone ID: MRT4577_69667C.1
tttttctggtcgccaacgacaacacccgcacgccgcaggcgggggcagcccggcgagcgacagcgccgccagcaggcaccaggcaggggaccgaggcagcgacgcgcgcgccgcgggcgcagcgagcgccccgccagccgacngacccttcctttctcctcagaggactagaggagaagaacgggacttttttctcgtttatganccancacnccacancgggcgcaccacgggggggggggaggccccaccgccccccacaaaaaaaaaagacccaaagagacgcggcc

SEQ ID NO: 151475 - DNA, 155 bp, Zea mays
  Clone ID: MRT4577_69668C.1
gcagtatcaacaggggtgggtgcataaaacgaatcaaataaccctatcttacaaaccacctatacagcttatcacggttttttgcgtggtgtaagaaggttaaaaaaaaaaaaataaagaaggtgttggcaacccgggcatgtatatttatattc

SEQ ID NO: 151476 - DNA, 523 bp, Zea mays
  unsure (1)..(523): unsure at all n locations
  Clone ID: MRT4577_69669C.1
attcatgagagacagagacacacacacacacacacacacatataaatatatataaacacacacatacatacatacatatgttaaatcctctgggaaacgtgctgcccgaccagcatccgtaggcccccaccccacattggaccccagctctgaggcggcagggagcatgccctcactctgctggaacctagcacagcacctacatgcaaaggcctcagtatctgtcacaggacagttcacaggagctggcgacaggcacccttgggtacagccgccagaagtaacagacacatcaggattatgtaagaacggccgaaatattcccttacaggagtgttcatcatggcattacttaaaacagtgcaaaatgagaatcctaaaagtctaacaacatggcaatggtctgttttatgaaacaatctatgacagatatttacactaaaattaatattttcaggggtaccctgngtggctcaagtggttgagcatctatctactttcagctcaggtcatgatcttgcag

SEQ ID NO: 151477 - DNA, 248 bp, Zea mays
  Clone ID: MRT4577_6966C.1
gctgttggttgttttgttttttacattgtgacatcaaagatcactgggcccaccaccggacgtccacaaatatatgtgcgcaaccattcccccctcaaaagccaaatccagctttgagttcgacaatccataaaccacgccgcacttggcacgttcagctgcttttcttggcgaagagcccgccgagggcgccgaggttgaaccccccgccgatgccgattgtgggaccgccgggagccttcttgccg

SEQ ID NO: 151478 - DNA, 210 bp, Zea mays
  Clone ID: MRT4577_69670C.1
acagtgcgcacttggattgcgcgaccaccgcagcgcggaggaggcacaggcgccgaggtagagacgatggccggcgcgggctcctgggcgtgcttctcctccttgagtaagcgactggaacggaacgtggatccttgtcactggtggcgccaacggcatcggcgaggccatcgttcggctgttcatggagcactgtgccaaggtctggat

SEQ ID NO: 151479 - DNA, 468 bp, Zea mays
  Clone ID: MRT4577_69671C.1
tgacgcatatgggagtatgtacaggagcgggcagagcgcggcgccctgattggagttgtgtgtgcccagctggcatcaccaactgcgagtctaatgaactcacttgagactgagggtatgcgtacagacaatcagggagcctgtgatctgacccgcactggacaggacaagaatgcaacaccgcaccagtccatgcgcgctcactacaccgccaacaagcttgacctgcatggacttgatgtgatcggtgtcgataaagcaaacaccaatgcctgtctccttggtgaatactttaggtcaaggaacatgactacccgtgatattgcttgcgcaaagactatcgaccgggatctgaaatgtaaggaggtgccaacaagcttgggatttgagacaccattgcaagatatactctgcaatgattggcaatgtgatgactgatgcgagatccactggaaaatactaccactt

SEQ ID NO: 151480 - DNA, 182 bp, Zea mays
  Clone ID: MRT4577_69672C.1
ctgcacagggcaggtccccatcgccgcggcgcttgccccacctctcccccgcccggtagtagcctcgccggcgttgccgagatggggttcgtgtgcttggtcgggagggtgctgttggtgtgcggtttggtgcactccgcctaccaagagtttaatgaatgttcgcgctgatggtgggacca

SEQ ID NO: 151481 - DNA, 232 bp, Zea mays
  Clone ID: MRT4577_69673C.1
acttgtcaaaaacggcataaactcatgctgtggggggccaaaaaaaaaaagtatctacattctacataaaagtggtgggaatatgttgtgtagtacctataacattagtgttaacaacgaaaagtatatttgtacattcaaattataacaccctctctttgtcttaacaaataatacaaaaatgttctcaaaattaaacctctctaggagttatgttgttgatcaccaccaa

SEQ ID NO: 151482 - DNA, 505 bp, Zea mays
  Clone ID: MRT4577_69674C.1
acccagctcaccggggagcgaagcgcaagctgctctccatcttgtaacaacaacggcacgcgcgcgcgctgcacctcctgcgccatggtctcctgcatctagcacacggaggagacgcgcggcgcggacggtgcacgccaccatcgacaggtggtaccgggcgcgcgtggaggccgagatcttcaggatctgcacggcgatcttgaccgtcgtgtactaggggttcacgacgagggggacggccggctacgcgcaccgctcgtacactcaacaggaacgggtactaccacagctacatctccgtgttcaagaccggcgacaagcgcaaggactccgaggactccaggctcaccggctatcaagtccgacaggacatggaagtcaagggagctgccacccacgcatcacatacggctgcgtcttgtgctacaagtactacgtcgtttactatcagcagctcagctagcgggcacagcgcctgctatcttgatgaacacgctcttcg

SEQ ID NO: 151483 - DNA, 229 bp, Zea mays
  Clone ID: MRT4577_69675C.1
aacttaaaatctcataaatcaaaacctaagggagggtgttttttattctacagggtacccattcacgatatacacctacccctaccctttagggatactcatctttgtttatttatataagcatataaccaatcctattcattctttatctttatactcttgttatttacaaattatactcttgcaaaacaatgtattcccccaagtacttaaccttaatatacaccat

SEQ ID NO: 151484 - DNA, 430 bp, Zea mays
  Clone ID: MRT4577_69676C.1
acgccttgctaggatagtagatgtgacatacttagtgcaggacggcactccttgattgatcactcgcttgctggaccttacactgaatactcttatccgttctgaatacaacaacggttgactattttctgactggctggagcacctacaatgcgtgacccactgttgatcctataagctctagctagatacaaggcgatactttacccgatcaagatgaagcaacataaaggatagcgacgcttacgtgtaccaccctatcatgagggtctgttagagctcactcacctgctgcaatctattacctaccgccaccacattgacaaactgcttgaagaaggtctggaacatgataacacccatgctcaccgatcttacaggcagactctcaatgtcggactcaccgagactactgaacatgtccagagta

SEQ ID NO: 151485 - DNA, 361 bp, Zea mays
  Clone ID: MRT4577_69677C.1
tctcaatctcttctacaccataaaaattcccaggtctttattcctcgtcacagattctaaggctatgggtgtactcggcaagggcttcaaggttcttaacaagggcagctctaagcaccaccggaaggtgctcctcgacaacatccaggtcatcaccaagcccgcaatccgtaagctggctatgagggatgtcgtgaaacgcatcttcgagctcatctacaaggagaccctcagctgtgctcaagatctttctcgagaacgtcatcctcgactccgtcacctacaccgatcactctctctctaagacctgtaccttcattgacttcgtctactcgctcaagccccaaggactcacccttta

SEQ ID NO: 151486 - DNA, 1315 bp, Zea mays
  unsure (1)..(1315): unsure at all n locations
  Clone ID: MRT4577_69678C.1
ccggccggggaaacggggncaccagtctccaccgaactctgcagcagatcctcgctctagccagacccacatcgccctcgtcgttatctagggcaccggtcgtgtgccgccgccgccgccgccgcccgacgctctccgtggataaggtcagtccggccacgcattttatttccgtccaagaaaggcagcgccgcaagcaaccggacaggagcagtcgaatccggcaagttaaaggaaacttaaaaagaaaagggaagtaaagaccgggcgcgtcactggcatcaatcggcatcaatcctcccctgcggaagggaaggaagccagaattgggacgcaacctgagctggaaagttgggccttttccttcgaaagggacggggccgcggcgaaccggggcggcaagatcgcccttggacagttcttggtaggcggagagagatattatatcatattctgatatcactcacctacccggtctgccgttcgcctataagaagaccggaggcgaggagggagctccctccctctgcaagtacaagttgtcctgtatttggtttagtttgcgctgctgtatttgttcagggttttggtcgcgtgttgaggaaagattcggggttcttgaaagttgagtgaaacaaatggggtcatcaaggaatgtgccgcacaaagtgatgcaagatgagatcacacctcttctcccgatcaaagctgaggaggatgcagttcatgagttcgacggagcttctttctctggcgcggtcttcaatctgtcaacaaccattgtaggagctggaatcatggctctgcctgcgagtatcaagatgctaggccttatacctggtattctaatgatcatccttgtggcactgctcaccgagacatccattgacatgctggtcaggtgcagccaccagggcaagattacatcctacggctggttgatgggtgacacatttggtcagtgggggagaattgcgctacaagcatcggtggtgataaacaatgtcggcgtgttgattgtatacatgattattattggtgatgtcctatcaggaacatcgtcaacaggtgttcatcacagtggcgtattggaggggtggtttggacctcatatgtggaattctcgtcccattgtactcctcgctacaactcttcttgtgtttgctccattggtgagctttaaacgtttggattcattgagatacacatctgcactatcagttgctcttgctgtgggtttttgttgtcatcactgccggggttgctattgtcagactcatccaaggnaactgtggagatccccanactgttcctg

SEQ ID NO: 151487 - DNA, 186 bp, Zea mays
  unsure (1)..(186): unsure at all n locations
  Clone ID: MRT4577_69679C.1
taagtgactcctttgacaaatgaaatgttcctaagtcaataccttggttaggtgggaagactctttgtaggaaaacaagnnttgtggcacaatgactgtgaattgggaccgacttgactgaataaccagtgtggcaccgtcaacccaaggcccttgccaccaaggtttcctctctaaccaacaacg

SEQ ID NO: 151488 - DNA, 306 bp, Zea mays
  Clone ID: MRT4577_6967C.1
actcctccccgcctacctcaccccggccttccgctcgcctcgcgactccccgcgcccatccctcctgccccccaccccacgctgggctgttcactctgtggtcttggtttggttcatggtgaacgttttgcttcttttttcggctacaaagaatgcagagatgtgcacccacccccaccctcgaccacccccgatgggatggcttggggggctccagggggcgccctcccagacccccttgcacacgcctccccagcacgtacgtggggcctggggcacgaggacaggcctaaaatccccacaaaa

SEQ ID NO: 151489 - DNA, 141 bp, Zea mays
  Clone ID: MRT4577_69680C.1
cctggctaggggcaagaactcatccgatacttaaaccaaggcattggctgcaagaaaaatggcccgactgacaaacgaaaggcagactctgtgaccattaacgcttttggggactgagggcacgacgtagtaaggatagtt

SEQ ID NO: 151490 - DNA, 128 bp, Zea mays
  Clone ID: MRT4577_69681C.1
tctatttagcctacctgacacccaccacctggctaccaaaatcaccaacgcaggcattgtcaccaactttgacttccctacctacttccccgagcgcaggccctttcacgaagaccctttacttcatt

SEQ ID NO: 151491 - DNA, 334 bp, Zea mays
  Clone ID: MRT4577_69682C.1
ttcattcttaagctcccgcattcattcctcagcggctgtaattgcaccatgggggctgagtgattgagcacaaggaatgcctgcccaattatgaccgcggcaacacaatcaatgaattcataacggcgcatggcatactatattcataaatgaaggctgttctgaccagacaagcaccgtctacacggagatacaagcgctttacagacggagacatcagtgattgactgatgatgacatatcggatgttaacagtcctgaaaggactgggtatgcggcccttgcacatgcacctgatttacacacctgtcgtgaacaacgattacggccctga

SEQ ID NO: 151492 - DNA, 765 bp, Zea mays
  Clone ID: MRT4577_69683C.1
ccccgggcctgcaggaaattcggcacgaggctccgctttaccaaaacagctcctcgcccaatcattctctctgcctcgtcctcgcgccgcctctcatcttccgggagtcagcggcggcggaatatggcggggaaatccaagggtgggaagaacaaagggaaggcgcaagtcgtgggtcactccgcctcagctgagccagaggtgctggcgactgatggagccgaattggttaatccagataacggggaagtaagcgaacccggggaagtaagcgacccccctgccacggaggatggcgtggcagatgtagagaaaggagacggggatgctccggaggttgtgcagtctgcaaaaaagccagctgaaggagagcttcatctgtaccctgttcctgtcaggacacaatctggtgaaaagctcgagctgcagctaagcccaggagattctgttattgatgttaaacaattcctcttggatgctcctgaaacatgcttctacacatgctatgatttgatattgcatactgaagatgggtcagctcatcagttagaagactacaatgaaatatctgaaatagcagatataacttctggtggatgttcactggagatggttgcctctttatatgatgagaacaattatttttggcatcctcctcaaacatgcttctaactatctcacaattcgctatttcataccctagatgggttagctcctcagttgcaagagtctgcccagggaaatctgcagattctggaaaaagcc

SEQ ID NO: 151493 - DNA, 418 bp, Zea mays
  unsure (1)..(418): unsure at all n locations
  Clone ID: MRT4577_69684C.1
acaacagacgtncttnctcgtactccaggtctttgacatcgtctacacgaccttcaatgaacagcggggcgagcccggaccatagccaccaccgatggctagcatcgacctgaaactgataacgctgttcaccgaggtcgacagacgcgaccagatcagccagaacagaagtgcgctctatcagcctggctttacggcgccatcgtggagaggctgcacagatggatgaagcatgaccacaaccctacgcgagacgtagtggcggcttacgatatccgtgcgttccctcgccgacatgtccatgcgacgaatgatgtgcacggtgatcatacctgtggctcaactaaacagagggctccggactaccatgcaatagactggagcgcattctctaatagtacttccgactgtgtttaca

SEQ ID NO: 151494 - DNA, 423 bp, Zea mays
  Clone ID: MRT4577_69685C.1
aagatgcagaacggcactaactccgttatactacaagcactttgtttgaggaactaatttaactgggtggatgtacaccgaaaaccgtttgtgtattgagaactactttgggtaattgtgtaatgcctgattagaacctgaaaagaaggtctttgtgcctaaggccaaattgtttttggacatacgaacagggaacttgtcaatccggctttaggccctgttccctactgggatgaaaaaatctgggcgagcaaatcaaagaggttgcggatcttttgggaacattgccctgttctttaaatagaaaccatgtgactttgatatcattgcataggaatcatggctggcagcccccaaagtcttgctttattagcgccctgaacatgtcttgctcacctcaatacaaaacttatctggtttcct

SEQ ID NO: 151495 - DNA, 637 bp, Zea mays
  Clone ID: MRT4577_69686C.1
ctcgtcttcgcgccgcctctcatcttccgtgagccgaagcttcggcggcggcggaatatggcggggaaaaccaaggtgggaagaacaaaggaaaggcgcagggcgctggtcagtccgcctctgctgagccagaggtgccggcgactgacggagccgaagtggtgaatccagagaatggggaagtaaacgaaccccccgtcacggaggatggtgtgaaaaatgttgagaaaggagacggggatgccctggaggttgtgcagcctgcaagaaagccagctgaaggagagcttcatctatacgctgttcctgtcaggacacaatcaggtgaaaagcttgagctgcagctaagcccaggagattctgttattgatgttaaacaattccttttggatgctcctgaaacatgcttctatacatgctacaatttgatattgcatactgaagatgggtcagctcatcagttggaagactacaatgaaatatctgaaatagcagatataacttctagtggatgttcactggagatggttgctgcaatatacgatgagaggtctattaggtcacatctccgacgtgtgagggagctactatctctgtctagtctttatgtttccctatcaacatccttagctctgca

SEQ ID NO: 151496 - DNA, 433 bp, Zea mays
  unsure (1)..(433): unsure at all n locations
  Clone ID: MRT4577_69687C.1
atattatnccagtcaaaacttcaagagctctttgggtgtgagagcgttcctatttcangactatcanaaatgcgggggcaccacttcatcaagaaaacatancaaatcctcattaactnatctatggggggggtgtggggnnatangcctaacattacaacatggggtgctttacagaatgggcagcgtaggttatgtgtttcttcaattttntgnattatgaatggtgtgccgggcatatcanattatttgcggggagcctgtacattnttatccgtgctnnctactgctgggtggtgctgggtaantgtntaaccttctctactnaattnctgntgctaattcctaaatntgattgctnactatgtaaaggtaagctttctattccagtgtganagtgtgtctcttaagtcttaaccccggngnnnnnnna

SEQ ID NO: 151497 - DNA, 1067 bp, Zea mays
  unsure (1)..(1067): unsure at all n locations
  Clone ID: MRT4577_69688C.1
cgtagcccacgtctccttcctctcgaagtaaacagagttggaaatcccccctctctctccctcgtcgctgctcctctccaaatcccctgaacccgcctctccccggaggaaccgcggcggaggagagatgtcgtacgcctacctcttcaagtacatcatcatcggcgacacaggtgtcggcaagtcgtgcctgctgctgcagttcaccgacaagcgcttccagcccgtccatgacctcaccatcggcgtcgagttcggcgcccggatgatcaccatcgacaacaagcccatcaagctccagatttgggacacggcaggtcaagaatcattcagatcgataactagatcgtactacaggggagctgctggcgctcttttggtttatgacatcaccaggagggaaacctttaatcatcttgcaagctggctggaagatgcaaggcaacatgcaaatgctaacatgacaataatgctagttggaaacaaatgcgacctatctcataggcgtgccgtgagcttcgaggaaggcgagcagttcgccaaggagaatggtctcatctttatggaggcgtctgcaaaaactgcacaaaatgtcgaggagggctttgtcaagactgctggagcaatatataagaaaattcaggatggtgtcttcgatgtatctaatgagtcctatggaatcaaaggcaactatgcagttcctatccaagctgtggcgttttcgatgtatctaatgagtcttatgggatcaaagttggatatgtagtccctgggcaatctggaggtgctggtagctcttctcaaggtggtggctnctgcagctaatctgctaacgcccttatgtacaaaggcatatctgcggtgtagctgcgttatctctatgttgctgagcgtaaaatagttactgctccagggtgctttgttatttgatgcaccaactggtggcagtgcctgaacgatttganncattcagttttatttatgtcaggtgttcataaacattatgtaaatcactagggtgctgtttggttcaagaaatataacgcaaagggtaatggtaatggttt

SEQ ID NO: 151498 - DNA, 504 bp, Zea mays
  Clone ID: MRT4577_69689C.1
cattggtacctcgaggcggccgggaacgaccttctccagccgggctccaagcctgcacagagtgaaccggagcttcttgcttgctggcctcgccaagtatcaagagtatgactgaaggagcaggcctctcgccaagtagcgcctctccctcctctcttcacttttctccatcacatctcgcgctccacatgctgagactgaggtcaatatccggctcctactcctcgaggggaatcgccgtcggggtcggcgcgtatgccacgctgggccagtgggtgtgacgcaagttcacctccgagggctacaccatcgccatcctctcgtgagaactcaagaagctgtggcatgtgatgataggagatcgggcagaggaccagggaccaggtgctcacactgagtgtgaactgagacgacatccggaacaagtgggaggccttcgagagcatggtctccatctgtgccgttgaggcggtcgtctacgacgactgctaatcgactggatgc

SEQ ID NO: 151499 - DNA, 358 bp, Zea mays
  Clone ID: MRT4577_6968C.1
actcttagaagtctttcgctccgaatctcgggacgagggtcttttaaggggggaggggtgtaacacccctggtgtttatattctgctcaacagcgagtacgaacttaagcacgtaatatcagtggataaaacggatgctaaattttaattatctcgcctattgcaattttaatatcgcatctgttttgtctgtcgcgagtgcgacatcgtttttatttatccgggctcttcttagattttcgtgatgttcggaacatcgtcgttccgaaaatcggtgcgtccggtgattatttaaaattcatcgctcgcgcgaatacgaattcggaagcccgtcccactttgatgattttattccgag

SEQ ID NO: 151500 - DNA, 267 bp, Zea mays
  Clone ID: MRT4577_69690C.1
agcagtggtaacaacgcagagtacgcgggaacaatgtctttttttgctacctgtttttttttctctctctctctttttttggcacaagatgcaaaggcaccctgctcctgatcaaagggccttttgcatcataagctgtttgattataattaccatggtgtgtcagtggaacaaataactgttgcaaggtgttaaaaaaaagttgtattgtaacaaaaaaaaaaaaaaaaaaaaaaaaaaaagtactctgcgttgttaccactgctt

SEQ ID NO: 151501 - DNA, 910 bp, Zea mays
  unsure (1)..(910): unsure at all n locations
  Clone ID: MRT4577_69691C.1
gccaactgcgaagtatgcaattgtcacggagagggcgagactaacggcgcgcgccatcgccgcagttcagccgctcgccgtcgccggagagggcaagggcaggaccgtccacgcgcatctccctcgacttgtttcacgcgcacacacacccacgccaccctgctgcaccgcgcgcatggtggggaccaaggggacgccgcctctgctcctccgccgcccactcctctccccctccttgcctgcggattggggcgacaggggttggcgatgccggaggccaatgccggcgcgctggcgcaggcggagcagaggaagaaggcggggaggtcggttccagagcgtggaaagcgcgatagagattaagagatacgagttgttagtcctccccagagtccgaagcaagctactaggttttcagtttcagatccccgaaaaatacggttgttgttttgacgccaaccgatatacgcggcaggagtaccacgcgacgctggtattggattcgcgtgacttggaacccaccagacatggagtccttcagcgacgccgacagatacataccccaagagatcatcggcagaggcagctacggggtcgtttgctcagctattgaccggcgcaccggcgagaaggtcgcgatcaagaaaataggaggcgtcttcgatgacctgtccgacgccgccaggaccctccgggagatcaagctgctccggctgttacgacacccttgcattgtcgagatcaagcatggcatgttgccttcggctaggagggactacaaagacatttatgtcgngtttgaattgatggagggcgaccttcaccaggttatcaaggctaacccctgacgacagagcaccaccagtactttctctatcagatgctgcgggcgttgaagtatatgcctgct

SEQ ID NO: 151502 - DNA, 855 bp, Zea mays
  Clone ID: MRT4577_69692C.1
agggcgattgggtttctcgagggcggccgggaccttcatctttcaccttttatccctaaaggcaaaaaactaatccaacaacccacttagaatacataccaacaagtcaacatggctatcaagaaggtcttcgcccgctccgtctacgactcccgtggaaaccccaccgtcgaggtcgacgtcgtcaccgagactggcctccaccgtgccatcgttccctccggcgcctctaccggccagcacgaggcttgcgagctccgagatggcgacaagtctaagtggaacggcaagggtgtcaccaaggctgtcgagaacgtcaacaccgtcattgcccccgctctgattgagaagaacctcgatgtcaaggaccagtccgctgttgatgctttcctcaagtcttgcaacgctctccttctcaaggtcaaccagattggtaccctgaccgagtccatccaggctgccaaggactcttacgccgacggctggggtgtcatggtctctcaccgatccggtgagactgaggacgtcaccatcgccgacattgctgtcggtctccgtgctggcgagatcaagaccggtgctcctgcccgatctgagcgtctcgccaagctcaaccagatcctccgcattgaggaggagctcggtgaccaggctatctaccctggtaaggacttccgcaagtctgttaacctgtaaatgatggttaccggatgggtggaacaaaaagccttgtgatgattatgatgcctttgggtcttcaccaggacgcgtgagacatataccaggatggcaaattgaaagtaatagaggcaaaaatagtaaaagccaactgatcaattaattaaactttgattg

SEQ ID NO: 151503 - DNA, 346 bp, Zea mays
  Clone ID: MRT4577_69693C.1
ggaataaccacatctgctctccctttcgtcggcaagcactgcaggcagaggagggggccctcaattcttatattcacatgctcaacgcacgaggtgaatgctcggacaaacataaaacaacgaaactgaacaatcgttgcaagacattgacacaaagaattctaggccaaagtgaccgacacacaactcgccattgctgaaaatcagaatctatagaaacaagtgaatactcacccaagaaatgtgacggatgcccatagaaaagcgaccggagatgcagactattcaagataacatagccaaccctgataagggcaaaacatgcactggagcataaacattcaca

SEQ ID NO: 151504 - DNA, 269 bp, Zea mays
  Clone ID: MRT4577_69694C.1
aaaccgaaccagaatttcagaggattcaactcgcttatcacgaagatatcgtcgaagaaaatttggttctctcgactcaatacatgaacatgcatgatacttcttgtatggacttacattgcagggtaaaatagttggtattttgtactgacttaggtggtattaaaaagcttgtatagtatggctaaggatttactaggttttaatttgagctaaatcgtttaaaagtgcagaatttcaagtgttaataatacacctcatttttaaat

SEQ ID NO: 151505 - DNA, 404 bp, Zea mays
  Clone ID: MRT4577_69695C.1
gtctgactctttatgcaagatagtgttcaagggctccggtgggaggagctccaggctaggaagatcacccacaaggctttagaccgcctcacggtggacgcccagatgcgcgacaaggactctctcagatgtcagtaggtctacatgccctgcctgtgctgctacaatgacgtcaacaagtacttgcctgggccgcaccactagtcgtcgtccaaggagaagctcaggtccatgatggaggactacaacgggaacctgaccaggctactggaccgcgaggcgttcgaacggttcatcctgaagctgaccgggaactcgctacggctaatcagagcgaagatcctgatcacgctggtagcggcgacctggctaaccattgcaagctagcggacgacgcaggccgt

SEQ ID NO: 151506 - DNA, 1818 bp, Zea mays
  unsure (1)..(1818): unsure at all n locations
  Clone ID: MRT4577_69696C.1
ttgggaccctcgaggccggccaggccggagccgcaacgcctccgctttcattcttcttctcttttctcgttccccccgttggggttttgagctccgacgaaccctaataatcgccggggaccggcgaccgatcgcccgccggcatgcaccattagcagcggatgaagcaggcagcggcggccgcggccgcggcgcagcaggcactgctcctgcagcagcagtcgcagccgcccttgttccccgtgcaccacccgcaccccggcctcctcgccgcaccacagatagagcccatagtcagtggaaacctgcctcctgggtttgattcaagtacatgccgcagcgtgtatgttggcaatatccatcttcaagtgacggacgcagtactgcaggaagtcttccaaagcattggtccagtagaagggtgcaagctcatcagaaaagaaaagtcatcctttggtttcattgactaccatgatcgcagatatgctgcactagcaattttatctctcaatggcagacaactgtatggtcagccgattaaagtcaattgggcatatacaagtactccgagggagggcacatcaggtcattttaatatttttgttggggatctttgcccggaagtcactgatgctactttgtttgcatttttctctggttactctacttgctcagatgctagtgttatgtgggaccagaaaacaggacgatccagaggatttggttttgtttctttcaggaaccagcagatacgctaattgatcacgaaatacggagggcacgagatggattaatctcaagtgaagctgatgaatgaacttgaagattggatgatctgatcaagtgccaggatgggacatgctcgacaagcgagtatcatctaacaacactaacttagtgttatcacagatacgttaattgatcacgaatacggagggcacgagatggattaatctcaagtgaagctgatgaatgaacttgaagattggatgatctgatcaagtgccaggatgggacatgctcgacaagcgagtatcatctaacaacactaacttagtgttatcacagtcatcctttggtttcattgactaccatgatcgcagatatgctgcactagcaattttatctctcaatggcagacaaactgtaagttttttattggtttgtactctcccattcgtaattgtaagtcgtttggcttttctatatttatagcttttactatgtatctagacacangtgtatatctaggtgcaaagcaaaagctatgtacctagaaaagctaaaattacttacagtttgaaagggactacatgctaattcctattaacattggccttgttttggctctaattttgtaataccactaccaccaaaattcaggtatggtcagccgattaaagtcaattgggcatatacaagtactccgagggagggcacatcaggtcattttaatatttttgttggggatctttgcccggaagtcactgatgctactttgtttgcatttttctctggttactctacttgctcagatgctagtgttatgtgggaccagaaaacaggacgatccagaggatttggttttgtttctttcaggaaccagcaggatgctcaaagtgagataaatgacttgaatggtgtgttctctagttccatgtttctaacttatgttccattttgaagtcccgagtgtttcaaaaagtgctagcagctagacgtgcctagcaacctaggtggtgctcaggcgttgcttgacatttgtactttctatggacagtatgccatgttgaataaagtattttttggcatgacaag

SEQ ID NO: 151507 - DNA, 639 bp, Zea mays
  Clone ID: MRT4577_69697C.1
aggaatgtccatcttccttactaccacccacggctgctggctgctactaggcaggccttcccacacgcccgccgtagctctctcgcttgtgtggtcatccccggcctcgccttctctcattctgtcgtctgctgcccctgcctgccagtgccaccaccccccggccgtgcggattatattcgggcccaacgacccaagcaaatggagcagaaggcgaggaggcgccgcgtgccggcgttcggagagtggaactacaactactacggcagcagcgcggagctcgccacgcccgcggcaccggcggagctggaggcccgcagcgacgtctggttcaagtactcgccgcccccgcggaagccaccgccgccgccggcggccagcaggaaagttcggaggccggcggccgacaggtccgcatgcggcggcagcggcaagcggccccgtgccgcgacgcctgcgagggcgtccgacgccgtggtcccatcgtcgtcgtccgtgccacgcacgccggcgaagagcgcggccggcgctgccagggcgcgcgtggtgcgccgcgtcgacgcggacctgtaccaggtgcccccgccggacctgctccacgacgaggatctgccaccgaggcggaagaaggcgtccaac

SEQ ID NO: 151508 - DNA, 2097 bp, Zea mays
  unsure (1)..(2097): unsure at all n locations
  Clone ID: MRT4577_69698C.1
gcacgagaacgcctccgctttcattcttctcttcccctcggcttcgagggttatttttatttctttctttccttttttcgtttttattttctttttattttcttttttcttccttttctcgttccccccgttggggttttgagctccgacgaaccctaataatcgccggggaccggcggccgatcgcccgccggcatgcaccatcagcagcggatgaagcaggcggcggcggccgcggccgcggcgcagcagcagcagctgatgcagcaggcactgctcctgcagcagcagcagcagtcgcaggcgcagccgcccttgttccccgggcaccacccgcaccccggcctcctcgccgcaccacagatagagcccatagtcagtggaaacctgcctcctgggtttgattcaagtacatgccgcagcgtgtatgttggcaatatccatcttcaagtgacggacacagtactgcaggaagtcttccaaagcattggtccagtagaagggtgcaagctcatcagaaaagaaaagtcatcctttggtttcattgactactatgaccgcagatatgctgcactagcaattttatctctcaatggcagacaactgtatggtcagccgattaaagtcaattgggcatatacaagtactccgagggaggacacatcaggtcattttaatatttttgttggggatctttgcccggaagtcactgatgctactttgtttgcatttttctctggatactctacttgctcagatgctagggttatgtgggaccagaaaacaggacgatccagagggtttggttttgtttctttcaggaaccagcaggatgctcaaagtgcgataaatgacttgaatgggaagtggcttgggaaccgtcaaattcgttgcaattgggcaacgaaaggtgctaatgctggtgaagagaaacagattctggacactaaggttgacctgtcaaatggttcatcagaatctggaaaagagaatccaaatgaagatggtcctgaaaataaccctcagtttactactgtttatgttggcaatcttcctcacgaggctaccatgaatgatgtgcacctgtttttccattcactgggggctggttcaattgaggaagtccgtgtaactcgtgataaaggctttggctttgtgaggtacagcacccatgaggaggctgcattggcaattcagatgggtaatggccaacttattggcgggaggcagataaagtgttcctggggaagcaagccgactccacaagggacagcatccttgcctctgcctcctccagcactggcaccattctccactggagtgtcggccaccgacttgctggcctaccagcgcctggctctgagcaagatggcctcgaaccacccagccctaatgggtcagcacgccttgaagcaggtcgctgcattggggattggcggcggagccagccagtccatctatgatggcggcttccagggcatcaatactgccaccggcacaacttccgtccagcagcagcagcagcagcagcagctcatgtactactagagtactactactccatgaggcacccagctacctatcccttcaagaggaaggcgaggatgaatggatgatgccccttactatacccctatacatatagtagatgatgaagtcattactaggacctttttttccctaatctttttaagacccatctaagtaacatgtcctctctatgctagctatataattgtgtatttctggatacataaagccaaggttcttagtagtataatcttctgtgtttgaccatcttttattgtgatgtatggattttcgttggcaaaaaaaaaaaaaaaaaaaaaaaaaagctacgaggtgctgttcatggtggacgccatcgacgagtacgccgtggggcagctcaaggagtacgacggcaagaagctggtgtcggcaaccaaggaaggcctaaagctggacgacgaggacgacgaggaggccaagaagcggcgggaggagcgcaagaagcggttcgaggagctgtgcaaggtgatcaaggacatcctgggcgaccgcgtcnagaaggtggtggtgtcggaccgcatcgtc

SEQ ID NO: 151509 - DNA, 849 bp, Zea mays
  Clone ID: MRT4577_69699C.1
ctccttcctcgcttcctttcttacctcttctccacgaaatctgccattgctgctcgtttctcttctgcagcctcgctacttcgctagacatcgctaacaggaggacgtgggcacgtggcagtggtgctggtgcacctctataccatcctcagcggcgtgcatatggcctgctgcgggggaacgcggcgtcgcgcggcggggatacaccgccatcaccttcgacatacgcggcgctccacggggcgtgcgtcggtcacgggctccaccgaggccggacgtcgtcgccgtctaccgatgtgtcgcagagaacatcaggccgcgtgacatcctcctcgtcggatcctcatccggggcaccaattgctggacctgcagttgatatacagtgtgtttggttagaggcatccaatggtccagagtcatccgaacctaaaacagcgtttggttaccgtcacggattcatctcatccatcatccactcattccgatctaaaactaaaatctagaagctgcccattcctcgtaaaacagacggaccaactcattcctcccatccgaacctgcaaggagtgagtccatactggatcacctggttccgaacaaggttattccactaaccaaacatactaatagtggatgacatgattggttacgtaagcgttgggtacccgtttagcctttagtcctattcggaaggcatcatgatggtatactcaagtatgaacctggacgggttgatgatacacaattcttccagacatttcaaatttcccaggcaagatgttcatcaactcatgcctgtaagcggtcactaatgtcttctcatgatttgttcatccattgtctactg

SEQ ID NO: 151510 - DNA, 373 bp, Zea mays
  Clone ID: MRT4577_6969C.1
ctgtatggtatagcccttttttttttgctcttcattattttccttacaaataaaatattagtctgaaaacaagctccaaaaccaaaatgcatcgcctatctttacagtgactaatggcaggtttagactacatctttgaaaacggaattctctgatctctaaatgttttcacaaaataaatacacactgtatttctcaactatcattatacaggtttggctcacaatgaaacaaatattcaagttaaacaggaacataatctgatatttccattgatcaaaaaactgacagtctgacaaaatctgattggaccatttttgtagggagagattgaacttgatattgcattgtgatgaattcaatactcccagat

SEQ ID NO: 151511 - DNA, 725 bp, Zea mays
  Clone ID: MRT4577_696C.1
aaaaaaaacaggccactcacccaaaaaatctccactcctcgaccgcaccgagcagaggatcacatggcatccgccgtttcgcttctcctctcgcccccgcgcctgctccaccgcgacggcacatcccgcctcctcagcatcccgcatcggcgggtcctcctcgccgcccccaacaacgcgacccctcgtcggctcctggccccccgaccgcctcgtggccgcggtcgcctacctatacccgttcctcgacggcgcgcaccacgggcgcttccttctcacgcagttccccttcttcggcgcgctgctccgcccgctggcccccgcggctcggctcttccactcatcgccgctcacgcccttcctcctcttcctcacgctctacttcgccgttgtgcggaaccagcaggcgttctcccgcttcgtccgcttcaacgcgatgcaggccgtcgtgctcgacgtgctgctcatctttcccgacctgctcgcgcagtcgttcgcgccctccggtggggttgggttcgagatcttccagagcatggagagcacggtcttcctcttcctgctcgtctccttggtgtacggcgggggcgcctgcctgctcgggaagacaccacgtctgcccattgtcgcagatgcagcggagcgccaggtgatgtgactacaattcctttcctgcggaccatgttgatggaaagggaaactgatggatatgagaaaacatccca

SEQ ID NO: 151512 - DNA, 352 bp, Zea mays
  Clone ID: MRT4577_69700C.1
ggaagaaaaagcattttatcacggaaaaccaaacacgccactaaatgcccattaccggggtactgggcgcaacggacaatgatagattgtttgcgtacattaaatcttacaggaaacgcacacgagtccaccagagtatccgctgtgcccgcggcatgagaacgagtgcccacagcacttttttttgactatggggagggccggacacggctgaatgctttaaaaaactatccgatgatcataacaacatgcgcaccaaaaaactctgggtggcagaaattcatgtaagcgaaaagtgcttgaatgcattgctttgactggcccattgctgcaggaagaaccagggaaactt

SEQ ID NO: 151513 - DNA, 373 bp, Zea mays
  Clone ID: MRT4577_69701C.1
ccggttgacccacgcgttcggttaggtgggtgtgagcgcgcgcgaggaggaagagcagcagcaggaggaggaggaggagcaggcgcacggagacatcgctgtcggcccgagcgagactagtgtggaaaggagctgcccttccttggagtggcatccgctttctggttttggagcgggcggcggcggcgacgacgacgacgacgaagggtacctcgtccgtgcgtgcatgggtggtgtaaacgcccggacgccgcggcggcgcggggacgacggctggcagttctcggcatccagtactgctcgctcctcttggctcgagacttgggtttaatttgtcagccatgcgttccaaacacgccaatctattctggtc

SEQ ID NO: 151514 - DNA, 111 bp, Zea mays
  Clone ID: MRT4577_69702C.1
cccacgcgtccgatcacgcgtgagcctactcgtccgtccacgcgttacgttcacgcgttacggtgacgcttgttcgtgcgggtgatatgaagagctgagctttgttgagct

SEQ ID NO: 151515 - DNA, 351 bp, Zea mays
  Clone ID: MRT4577_69703C.1
gtgcttggttttttttttttattgggaaaaaaaaacacacctttattaattaattccaaaccaaccaaattcaacagtagcaacaattttcctaccatcctaaatttccatataaccatatcctaccccttttatagcaaaaccctttctaaagccccctttcttttgtggcctttggggggaaaaaccaataattcattccattccacaaccccccccaggtttatcaaaaacgcccaccctttttttttccccccgccaaattttttttgaaaaacccccttaggtttaatttccaaaaacccccttcctacccgggggggcccccctttttcttttaaaaaggggcct

SEQ ID NO: 151516 - DNA, 381 bp, Zea mays
  Clone ID: MRT4577_69704C.1
gttgtgtcatatgcaggacctcctccgattcgtgaccattttgaagctccaccaggcccaatgcactatgggcgaccatcagatcctccaccagggcattgtgcaggctggtctaggccgcctaggatatctaataactattctccctcaagacattctgtggagcctccagtttcccatgcagctggagctggaggtatgtaacatgttgtgttgatatatatgctttttaatgaaagctgtttccattttctattaatatctgtttctggaaatcttgtctcgcaaggaatcactattccctcagtcccaaaaatattaaggacttgtggtcccaagtcaaactatactaagtttataaaaaagaaaagtagtagttat

SEQ ID NO: 151517 - DNA, 572 bp, Zea mays
  Clone ID: MRT4577_69705C.1
ggccggccggaaaaaaaataaaaaaaaaaaaaaaaaaataaaaaaaaaaaaaaaaaagcggccctcgagctccgtctttggatccgttgaatgttgggattctgagcgcttgacgaggtcagtgtccagatattgcttaccgtgagaaaaatagccttgcggtcaagagtcctcacaaagtttgggctgcatatataaagagaaatgcctgctcggacgtaaagaactgaatacctacggtttgttgtggaggagtaactggcggattccgttaaggatatatgctgactagctcggctgaattaacgagtctatcctggtatttatgaaaaaatcattgcacatggtttgcacttcgactagctccatctctgattcgatggactcgctggtccggaaggggggattgttctcgtaacactctgcggtggcatctatatgatagtccacaaaatgttcttattgcgacagataaagagcatgagataaatatgccagagtttgctgactctcaaaaagatggtcgggagactaatcaatttctttgggttccgtccccctgtggacaatct

SEQ ID NO: 151518 - DNA, 338 bp, Zea mays
  Clone ID: MRT4577_69706C.1
gcgccgtccgccttctcgtctcgtcggccgtgcgtcacgcagtccgatgactcgtgcgacagagacccgcatccgctgtcagatgagcctcggcatgctgtctgactcgccttctccatgaccagcttagccgaccctctgagcgtgatcctacgcgtgatcaggaccacaagtgccacgatctagcccttcaccctctacttgttcctgaccctcatggacatcgactggatgctgtacggcctcatcaccaaggacccctacatcacgctgcagaacgtgggcatcttcttgttcggttgcatgcagatggtgctctactgctgctaccgcaagct

SEQ ID NO: 151519 - DNA, 273 bp, Zea mays
  unsure (1)..(273): unsure at all n locations
  Clone ID: MRT4577_69707C.1
tctgaagttcaccggcaatacattgtctagtcctttgcgcaccactctgatttgtgggcacagttatgaagtttccccacatgtgcagcgcgaatacanaatcgcagagccaagcagacagtgggtctattcttcattagctcagtgacttgtccacactcgtcttagcacttacgtttcaaaagcttgtcacaaacccttggagtcattcccagataatagaactggaaatgatacatccgctaatgcctacggtctagtgtgttcttagtg

SEQ ID NO: 151520 - DNA, 269 bp, Zea mays
  Clone ID: MRT4577_69708C.1
cggcaacaagacgctgaccgagcactgagtctcttgctaataaggcaacatataattaaggaagttgtggtcacaactgtactcagcgacaatatattttgaagtattttgccaaaacaatccacacaaatctatgtgcagtagcattttttctagatctttgtttccttgtttgtcctgtttgcttcaataaaaaagttgttgatgcaccagatttcacctttaatcccagagcagtagctttcaagatccagaaggtattatctaaa

SEQ ID NO: 151521 - DNA, 591 bp, Zea mays
  Clone ID: MRT4577_69709C.1
tccgcattcccggctctgccggcgtctccgccccttactatcccacaccagcgccagcccgcgccccggtcagtaagatgtccttgaccgttcgcgcctctctccgtaaggccacccgcaccgtcgtcgtggcaatggctggcagcgccctgcttgccggccgtgccatggcctacgaggtgctgatgggcgcacgcgacggtgggctcgtgttcaagcccaccctgttcaccctcaagggcggcgacaccatcacattcaagaacaacgccggtttgcctcacaacctcctcttgcaccaagagatgtgtcgagcggagtcgactccaccaagatctggcaagtagagtaccttaacgcgccatgcgagacctactccctcaccctcaccgtgccttgaacctacaggttatactgcgagccgaataaaggatcccgaatggtaagaaagatcaccttcaactaattaagctatctatctaccgatatgcattcatgtattagctggtgcttactgctttgctcttcggctatctgtacatctgtacatgttatggattttacacaacaacctctgttacgactgcgttc

SEQ ID NO: 151522 - DNA, 381 bp, Zea mays
  Clone ID: MRT4577_6970C.1
tgaactcctgcttactcctgagacatgatagacttggccactgactcacacgtagcattctagtgaactaatgagggtagataacagatggctagtatcagccaagcgctagaactacggtagaatgaactctaaattcacggagtgacttaacttgcttatataactgggtttcttgggatccactatctctaaacaggttgtgaataaaggctcgctataccatcagcattacctagactcccttaagccagcttgtccttgagagactattgctttgacggggaacacttgagaaagtacactccatactaacgggatctcgaaacatcgttattgttattggggaaacagtaggcttttgcttgaaccctctctatg

SEQ ID NO: 151523 - DNA, 446 bp, Zea mays
  Clone ID: MRT4577_69710C.1
ctcgtgggtcgacgcaagcctctacacacacttctgctacgcgtccgggaaaactccaactaaacaacggactttctggtttggcagcacaaaagaccagcgggaagcctgatttgtttgcatattataaggaaaaggaattatcatttgcaggtagtgacaaagttgcaaattcagaagaaaacaaaccaaatggtgctgttaaacatatgcaaaatctggacttgccagcacaacagaaaaacgacaaaaatgattgtgatcgcaaggcagaggagttttcctctgcattagaggatgaatcatcaaaatcaccaactcatacagtgccaaaaccacctagataccctctacttcctgttacttctcatgacagaagcatgctaagaaaggtaccaactttggttcagccttcgagtaagcttgcagatgagaagaacacacta

SEQ ID NO: 151524 - DNA, 203 bp, Zea mays
  Clone ID: MRT4577_69711C.1
cagacccgccgctacatcgagatgttcttcgccctgtaggaccgcagcctggcaaggcaggtttcgctattcttagattagtactgggaaagaaggagttagaattataaatagtccaggccggtgaaccatcggctgcatttcgagttgtttcaccgctatttgctattgttggttgttaattgggatgtagtgggttcttt

SEQ ID NO: 151525 - DNA, 270 bp, Zea mays
  unsure (1)..(270): unsure at all n locations
  Clone ID: MRT4577_69712C.1
gcgggcgggtgttttcagtgtatcngtatactgtttctataagcgcagggaggcgaaagaggatggataattggatcggatagccgtcccctgggttctgtctggggagcaggagcagcagtcgccgagagcaacccaaagcaagctgcagttcgtaagaggatcaggggccggcgccggaggagatcccccgcgctatttggagctccccaagaaatgccgagtgcactacaactgactgatgtccggttaccgagcacatcacatatt

SEQ ID NO: 151526 - DNA, 307 bp, Zea mays
  Clone ID: MRT4577_69713C.1
cccacgcgtccgaaaaaaaaaaataaaaaaaaaaaaaaaaaaaaaaaaaaaaaagaaaaaagaaaaaaaaaaaaaaaaggaaaaaaaaaaaataaaaaaaaaaaaaaaaaaaaaaaaaaaaaaaaaaaaaaaaggtctcccttttcaaagattcaaactttacttcccctttcttccaacttttaaattcttttaaaggttcacctaattaaattttatggcccgttttttaaaaaccttttccctggaaaacccttagtttaaccaaattaaatcaccttccattaaatcctcttttcaacttttt

SEQ ID NO: 151527 - DNA, 640 bp, Zea mays
  unsure (1)..(640): unsure at all n locations
  Clone ID: MRT4577_69714C.1
atagactcatactcattcacctnttttttaagctagggcagcagccatgggtgtcaagtgtggtgtggtcgtgtggtgtctcctgctcgccgggctccttctcctggccgtggcctccgcggcggagcgggacacggagaaggagaaggaggaggagatccggttgtgcaagaaggtctgcgactgtaaggcgggggaggacaccgggaaggccagggagtgcaaggagcagtgcgagcgccgccgccacggccacgagctgctccaggaagacggcgacagcttcgacagctgtgtgagccagtgccggggccatgggggctggtggggaaaggagcggtgggaccggtgcaggcggatatgcaggcaaagccaagaaggggaggggggcgacgacgacttcgacgagggccacaacgccgacgacgacttcgacgagggccacaacgccgacgacaggtgtgagaggatgtgccagcgctaccacgaccggcgggagaagaagcagtgcctgaaaggctgcagatatggcgagtccggcctcctcgtcttctacgacggccatgaacacggagaccgctgcccaacacagtgcaagcgcttccggcccgtgtcctacgaccagcattattgcatctaa

SEQ ID NO: 151528 - DNA, 258 bp, Zea mays
  unsure (1)..(258): unsure at all n locations
  Clone ID: MRT4577_69715C.1
acgcttcacatgcgtatcatcagtttttcatcggctccnntactcctatcatccagaaaatctgagcnggtattggatgggcgcccaagggcggagaagatagccggcggtcgaagaaggtgtgcggaggaagaagccctcggagaaggcggctccggcggagaaggcccccgcggggaagaagcccaaggcggagaagcggctacctgcgggcaagtccgccggcaaggagggcggcgacaagaagggtaggaagaa

SEQ ID NO: 151529 - DNA, 481 bp, Zea mays
  Clone ID: MRT4577_69716C.1
ctgacaccgaggccagctccagcctcctccagctcgatcgaccgccggccatgacgaacgggtacctcttccgggagtacctcggcgcgcagtccacgggcgtccggttctccgacgtgcctgtcaaccccggcgtcagcttccactacatcctcgccttcgccatcgactacacgccggtggcgcagcagcccacgccggcgcccaccaacggcgtgttcagcgcgttctgggacacggccaacctctcccgcgccgacgtggccgccatcaaggccgcgcacccgaacgtgagcgtcatggccggcctcggcggcgacagcgtgctggacatcgtcaaggtctccttcgcgccggcctccgtcgactcgtgggtggccaacgccgtggcctcgctctcgcgcctcatcaacgagtacggcctcgacggggtggacgtcgactacgagcgcttcgccgccggcgtctccgtcgacacctt

SEQ ID NO: 151530 - DNA, 1117 bp, Zea mays
  Clone ID: MRT4577_69717C.1
gcacgagcacgagctccgccgtccgccgccgcatcgcgtgggagggggaggaggaggaggaggaggaggccatggccgctgccgtagcttgcaggcgcgcggcgctcctgcacgggcaccagcagtggccgcagcggtgggcggccgcgccctgcccccgctccatctcgcagctcgtcaagaccaacggccgccgcgccttcctcgtagacaccctcgccctggtcaggaagctggagtcgcagggcgtgcccaccaagcaggcggaggcgatcacctccgccatcacggaggtcctcaacgacagcctcgagagcatctccgagtccttcgtctccaaggccgagatgcagaagagtgagatgctgcaggagtccaatatctccaagttcaagtcccaagtgcagagctcgcaggaaaaccatttctctttactacagcgggagactgagaaacttcgcggagatattgataagatgaggagtgaactgaagtatgagatcgacaaggtcaccgcaggacagcgattggatctgaatcttgaaagagggcgcatacgtgatgagcttgccaagcagaatgaggaaaccactgagcttaccacaaagcttgacaaggaaatccactcactgaaggcccagttggaggcagcaaagtacgatgtcatcaagtactgcataggtaccattgtttcgatctcagccgtcggcctcgccgtcctccgcatcgtgatgtgaaggcagcaaagcaaatacgttctttggttttacccatattcgtcgcccgtccgtggaaacccgcaagaagagaataggttctaattctgttcctagtttttaaaggggacaaaacgtgctcaggggagggggacacttggtagtagggagatgttgctcaaacttgtaaaaatagattgcccgtggaagaaatgcatccgaaatgattctttacctgtgctgaagcgtgcctggtctccagagctgctgaagccactgttactgtgggggatcctgaactgtgttagcctcgtcctgtgttggagccagcaatttgggctctgccatctggccgttatcagttctgcccactcgtttgaaaaaaaaaaaaaaaaaaaaaa

SEQ ID NO: 151531 - DNA, 803 bp, Zea mays
  unsure (1)..(803): unsure at all n locations
  Clone ID: MRT4577_69718C.1
attgggtacctcgaggccggccaggcacgactttgttcagcaccatctgccccgcgcagatccctacatccttccccagccccgtatccatggactcgatggactcaccccgtgactcatcctgccaacccgagactcccccgtcaagcttcgaggcctcgcccgaattcgactcgacacaatactctgccgcggtattgtgcgacctgcagtgtcagtcgaattcggcagcctcgcttcggacgatctggacctacctttctctattcaaccttttgcaccagtcgatgagaagcctgtcgtcatggaaaacttcttcgacttcgaccagttcccaaagtgcagcccaaccaccagcgcaccaatggaacccgcttttagcatggtggattcttcttcagtcgatgtctttgggtcaaccctcttcgaccacagctctacctcaagctcttatggctttcttgacggctttgatgcaaagttccatgacttgcagagtgcctctggcgcaacttcggttagcgacgaggccctcgcagcgggatcactttagcatcgatgctatcatgcgacccatcaagagcgcgagcgggcaagctgggtcggcggatggttgccgtggatcacgactaatgaaatctcctacctctatacaaacgggtcggcgtaatggtgtacaaataggaagaatagaaaggtccgtattggaaaggcaaaatttggggcgtggtttcacatggcgtangacggggtccgtagcttgtggcgcgtaactgggttgtagtaacagtttcttttgaaag

SEQ ID NO: 151532 - DNA, 287 bp, Zea mays
  Clone ID: MRT4577_69719C.1
aacaaaaacaatcccatggtttttattgccgcccccccaaaaatacaacataaaatgggggcctcgggcttggcaaatgtttattttttgccaacaaaaaggggggtaccccctatttaccttcgggggcggggggtgcaaactggttggagttacatacaggggccatgtctacgggctaaaatatagcttagtcaatccaatgccagggactttgggtgccactttttacagggcttaaatgggaagcatggccgttgcctatcctaaaggggggacattttttt

SEQ ID NO: 151533 - DNA, 1346 bp, Zea mays
  Clone ID: MRT4577_6971C.1
ccggccgggccgggctcctgacatcattcacttgcttctcctgaccatcattcacttgcttcccttgacaactgatagtagctgcagcatctaataccatgaatgagagctcagcagcggccagtagttatctcctcctcacattgattattcatctgctgccgttcgtctcagcccatgatttcctgtcagccggttcgtctctctccgtagagcacagctctgatgtgctccactcgcaagatggcactttcacctgcggcttctaccgcatctcccccaacgcctccaccttctccatctggttctccggatcatcggaaagaaccgtcgtctggagcgccaaccctccccaccccgtgtacacctggggatccaaagtcgagctagacgccgacgggagcatggttctaaaggactacaatggccagatcgtgtggaccaacaacgcgagcgtttcggacgctgggcatgttcaagctcggctgctgggcaccgggaacctcgctgtggagggaagaggtggcgccatcctgtggcgaagctttgattctcctactgacaccttgttacctactcagagaatcactgcttccacaaagctggtctctactaacaggttacttgttcctggccactacagcttccgtttcgacgaccagtaccttctttctctgtttgatgacgagaaaaacatttctttcatctactggccaaatccgcgtatgactatctgggcgaagggtagagtgcagttcaacagcaccatgttctggggctcttgacaccttgggacatttccttgcaagtgacaatgcaacctttacagctgctgactggggccctggtatcatgaggcggctaacactggattacgatggcaacctcagattgtacagtcttaatgtggcagacagaacatggtcggtcacatggatggcgtttcctcagctttgcaatgtacacggtctgtgtggcgaaaacggaacttgtgtgtatacgcctgtgcctgcttgtgcgtgtgcccctggttttgaagtcatcgacccaagtgagcggagcaaaggctgcagaccaaagaccaacatcagttgtgatgtggagaaggtggattttgctaagctaccccacactgatttcttggggtatgatatgactgcccatcactccgtttctcttgacttttgcaagaaggagtgcctgcatgattgcaactgcaagggttttgcatactgggaagggattggtgattgctatccgaagtctgttcttgttggcggtgtaaccctgcagaactttgctagtactggtacgatgtacatcaagattcctaatggattacaagt

SEQ ID NO: 151534 - DNA, 827 bp, Zea mays
  unsure (1)..(827): unsure at all n locations
  Clone ID: MRT4577_69720C.1
ggtacccctcgaccggccgggtctaggcaccgcacctagctcgggcatccatccactctcgtccccgtcccgtacttacctgactgagctcacacacacacgtacgatgccgaagccgtggaggccggtgctggcgtcggccaccaagtgctgcgcggcggaggacgcggcggtggcgcccgacggcctggcgcggtgccggccgcagcagtcggagctgtcgcggcggctggcgtccttcaggcgcctctcgtcgctggccaacagcccggtgtccgccaccgccaccacggtggcggacaaggacggcggtagcgtgaagcaggccgcctgcggggagatggcgggcccgctgcagctgcactcgttcggcctgggcgagctccgcggcgtcacgcacgacttctccagcaacttcctgctcggggagggcggcttcggcgccgtgtacaagggcttcgtggacgccggcatgcgcccgggcctcgacgcccagcccgtcgccgtgaagcagctcaacgccgcggggttccagggccaccgggagtggctcgccgaggtcatcttattgggccagttccgccacccgcacctggtcaggctgctgggctactgctgcgaggacgaggagcgcctgctcgtctacgagttcatgccgcgcggcagcctcgagaaccacctcttcaggagcagtaggtgtcctagctagctcttgctcttgctcttggggagcaaggggagtacgtatgtatcacagcaggtttaccgatcgactgcttgctcctcacacctcgatggatcgntcgtgcgggcctgcagggatctcg

SEQ ID NO: 151535 - DNA, 1865 bp, Zea mays
  Clone ID: MRT4577_69721C.1
tcgcgatgccttatcgacctttgcctactcgcttcagtccccgctccccaccacggtgccaccgttcccgtgcgtcgctgcaccaccaccgtagcctcctcctcgcacccgtacgcggccgaaccagaatggctagtgttcatgaagctccgcatgcggacagtgttgctggtggcctgggaggcggcggcggcgcttcccgtcgagagcgtggtgtcatgcccctccaaagccgggggagcaattttatggcgagacgccggacgtcgcggacgtcgaagattgcgctgggatggatgatgcccatgacgactacgatgcttcgaaagaagatgaagcggaatgaagcgcaggaggaaccgagcacatcaagcagagccgttgatggaaaacgaagcgcaaggccagaattaagctcgtagagaaacccgtctcctgggccacctgctggactggtaaaacagccaagaacattcttttcgtgttgttgaagccggacgtttttaactgcacgacgacggagacgtatatgatatgcggagaggccaagatagtggaccttagctcaaagctgcagccgcaggctgggcagtagttcaggatgaaggaccgaagcaagataatcgctaagctggacgcggccgccgctgcggcggcgccgggcgacgagtaggtggatggcgacgaggccgggatagagccccgcgacatagacctcattattaaacagaacagcgtaaccagagccaaggtcgtcaaggctctcaaggcgcacgacggcgacatcgtcagcgccatcatggagctcacggcctgatcatgatataccagtgcagtggcgttgggccgtttcttcctcgttattgcagtctgcttcgctcagcgtcgctgttcatttttgggatttgcatgcaagacgagcttcacagagcttcatagccttcggcgacattcttgagttacataagaagttccttgaactttctggtggcattaaccggatctttgagcttgaggagtttacacgcttcgctcaaagaaatactgtggtgtctcccaatgccatcaatgcagcctcagaagaaacgatttcgtttcatgaagtggacattgtaacaccatcacagaagctattggctagaaaactctcgtgcgatgtggtacaagggaaaagccttcttctgaccggtcccaatggtagtggaaagagttctatttttagagtgctcagggatctctggcccaccttctctgggagagttaccaagccctcagaagggatgtttcatgttcctcagcgcccatataccagcctaggtactctgcgggatcagatcatataccctctctcaagggaggaagcgaagataaaagttctttcgctacatagatctggtaacaattctagtgcctccatgctgctggatgatcacctgaagacaattctagagaatgtccggctgatgtatcttctagaaagggaagggtgggattctacaccaaactgggaagatgttctgtcgttaggggaacaacagaggcttggaatggctcgtttgtttttccatcatcctaagtttggtatcctggacgagtgccccaatgctacgagtgttgatgccgtacggccgtttcttcctcgttattgcagtctgcttcgtccagggtcgctgttcatttttgggatttgcataaaagacgagatttgaataaaagatgtactgtttgttccccgtatgaacgtttttgcatcatgccagtttccggattattattattgccactccttaagttcttatgcttaaaaaaaaaaaaaaagggcggcgctcgcgatagaacccacgcgtccgcccacgcgtccgcga

SEQ ID NO: 151536 - DNA, 696 bp, Zea mays
  Clone ID: MRT4577_69722C.1
atggcgttgcgcccgcatcctgccccgcattccccgagcgcgaggcgcgacgtcgagctggaggagcggctggcgcgcatccgtggcgagatctctcatccggctaaacatctaaatgacactgtgattgtttcacagttcaaaattttctgcaagtctgactttgaaaggatcttcaaggaagtcttcgaggacctgtcagacaagaacacggggatcctggacatcaactcccgccacgtcgctaccctcatggtttacaatgttggatcaatgacctgtttcaatgtcgagaaagttcaatacaagaatgtgatgtttactgtttgggatgttggtggccaagaaaagttgaggcccttgtggaggcactacttcaacaatactgatggcttgatctatgtagttgattcattggatcgggagaggattggaaaagctaaagctgaatttcatgtctgtagattgtcggcaataatcaatgatcctttgatgcttaacagtgtcatattggtatttgccaataaacaagatatggtgaggcaacaatacgtggtgtgggaaacttcatgtctattatcaaacaagctggcatacatgggtcgtatactcatttctgtaatttcaaaaacatcagatgctgatgagatgctgatgagatgtgaatggctgacctctgcttcaggaggtgcataa

SEQ ID NO: 151537 - DNA, 831 bp, Zea mays
  Clone ID: MRT4577_69723C.1
aattcggagcagttgggtgtgctggtgtgtgttggaacggttgtccctccggcctggggggtcctcttgctcgctgctatatgatgggcaaacctcaggcgagacaggaaccaccgcatccactctcgtcccgtcccgtatctacctacctgctctctcgtcttctgctcacacgctgacgcgcacgctccgagtccgagctaagctagctagctagctacttccggcgcggcacagccacagctgtttaggtagtagctagacgtacgtacgtacgcacacgacgatgacgaaggcgtggaggccgatgctggcgtcggccaccaagtgctgcgcggcggaggacgcggcggtggcccccgacggcctggcgcggtgccggccgcagcagtcggagctctcgcggcggctggcgtccttcaggcgcctgtcgtcgctggccaacagcccggcgtcggcggcgggcacggacaaggacggcggcagcgtcaagcaggccggggagatggcgggcccgctgcagctgcactccttcggcctaggcgagctccgcggcgtcacgcacgacttcgccagcagcttcctgctcggggagggcggcttcggcgccgtgtacaagggcttcgtggacgccggcatgcgcccgggcctcgccgcccagcccgtcgccgtcaagcagctcaacgccgcgggcttccagggacaccgggagtggctcgccgaggtcatcttcctgggccagttccgccactcgcacctcgtccgcctgctggggtactgctgcgaagacgaggagcgcctgctcgtctacgagttcatgccgcgcgggag

SEQ ID NO: 151538 - DNA, 237 bp, Zea mays
  Clone ID: MRT4577_69724C.1
attcggctcgagtcctcctacaactttttctctagtagggttctgccggccgccacctcgtcgacgcactggagttttggggtgaagaagtgaagccaggagctactgtttgttgtaaagttggtgatcggtctgttctccacctttcacaggctgcactaatggaaccaacaaaagtccgtgatactgatattgcgtctgacaaattgatgataagaaagtactgctcggaacctt

SEQ ID NO: 151539 - DNA, 384 bp, Zea mays
  Clone ID: MRT4577_69725C.1
cggctcgagcgaactaccattgcgtgcgactgagatactctccgccttctcgctggctaggaagactacggtagctcacgatgactatcaatcccacatatctcgcgcagcggacgcgcacttctgtcaactgggcagatgctaaagccagagttcgcaagtcgtaccgagaatggctccgagcgtctcccgaaatccaaacaatgtactctcttaatgtccctgtatccgccatccgtaccaagatccgtcaacagttcgagaagcatcgttacgtcagtcagatcaatgttgtcgatgtgttgctgtacaagagccatgccgagttccaggaaacattgaactactggaaacaattatcccatgtcatgaagtatttccgcg

SEQ ID NO: 151540 - DNA, 540 bp, Zea mays
  Clone ID: MRT4577_69726C.1
agtaatggctagcacagacctgcatagtagctctatgatgatgatctgcatgcagctagcctgcttgtattggcaaacaaacaatatcttcccacgctatgaatgctgctggaaataacatgacaagctgggtctgcattccctgccacagccgaactgaagcattcagagcacttgatctacatctagacaagggatgactgacgggcttgactggctttccagcaacatcatgcaacaagacttgaagcttttgcgcaagcctactaccgagcaggatgcctgaacaacttatggctgctttattcttacatattattactaagacacaagctacagcagatatagtgcttgagaaaaaaagatcttctgaactctttggagggatcgatactaaacaggattgtgttaccgatattgggtcaatatcataggctgatctgttccacaaaattgactgtaaactatatttacctatgctgcccagattgcatgataaagtaaattgacatgctgtctttgtgcagtttcatcaataac

SEQ ID NO: 151541 - DNA, 545 bp, Zea mays
  Clone ID: MRT4577_69727C.1
attccttcaatgccagacttgcatcacgtgaccgaccgtgccgggcgacgccgactctttcgtccccgcgacatggtagcgtctccagtgagtgtgcgagtcaccggcgggagataagggcaaatgtggatgacgatgccgtccggtgactgatgcttgacgtggatcgcctcctccatcggagttatccccgacttcaccaagtcatggatcatgttccaggagatctctacaaatgctgctcgatcccaaagtattccgggacaccatcgatctctttgtctagcgacacaaggacactatgatcaccgcggtggctggcgataaacttcataaggattcatttttgagactcctatcactttagacattgtggcaaaaattgtgtctttgaggaaatcaaagaagatgccatgagaagagatctccgaaaaatatgctttgtaatatgtgactgaccaaatacagatgcatgtcggagctgtacaggtcaactaccgggctcttgtagtcgcatgagcttattgctaccggagcaacactat

SEQ ID NO: 151542 - DNA, 114 bp, Zea mays
  Clone ID: MRT4577_69728C.1
tcgggaaccacatccatccaccactcgtgagaacaaggtcgcagccaatgagaagtcgggcctcgctgcgcgttgtcgatctcccaacttaagctatgagcttagcacgggtgc

SEQ ID NO: 151543 - DNA, 277 bp, Zea mays
  Clone ID: MRT4577_69729C.1
ctttttctttctttctttcccttttttttcttcccaaacaaaatagccttttcatttcaaaacatgctaaagccaatccgggtgggttcacatccagaaattacaaaacttcctttactggtgagggcggaacaaaacctaacaccaccctatttttgactttgcaattagaccacccccccgagttgcggccagtaataccaaaatttaaaggagtgtttacttttttttgggaccaccacccttgggttttttgacaccccggattttcttggcc

SEQ ID NO: 151544 - DNA, 363 bp, Zea mays
  Clone ID: MRT4577_6972C.1
aaaagcaaaagtagcccgccacgcggagatcttgtttaaccaagggaatttttacaaggggccattgaaatagggaactttttaagcgccggggggcaaatcaccagcggccgatgtcagacccaaggggaagacaacagggttttaacataaactggttcggaaggcgatctagcaggggggcggccctgatcttaaagggtgtctagctcctcgtttcgaccggaagaaaagcctttggcgatcacagaagcgttattctaaatgaagggggacaccatttgccctagagctagggcggtcccatggaacatgcccacgacaacaacgggctttgtatggccaagttgggatctgagccag

SEQ ID NO: 151545 - DNA, 1079 bp, Zea mays
  Clone ID: MRT4577_69731C.1
cggccgctcgagacggcctggccgggacatcctaactccatcccctcgcgcgctcctccccacccccagagccccgtcgcctagctagggtttttgcctccccgccgccaccgccgcgcgcgcgcgagagagagaccacagcgaccaacccagccatgtcggtgcgtccgagcgagcgggccgacgcgcggcggaaccgctacaaggtgacggtggacgccgatgaggggcggcggcggcgcgaggacaacatggtggagatccgcaagaaccgccgcgaggagagcctcctcaagaagcgccgcgaggggctccaggcccaggctcctatccctgccgccggcgtcgagaagaagcttgaaagcttacctgctatggttggtggggtttattccgaggataacaacctgcagcttgaggcaacgacacaattccgcaagttgctttctatagaaaggagccccccaatcgaagaagttatccaatcaggcgttgttcctcgatttgtgcagtttcttactagagaggatttcccccaactccagtttgaagcagcgtgggcactcacaaacattgcgtctggcacatcagagaataccaaggttgtcattgatcatggggcagttccaatatttgtgaagcttcttgcatctggcagcgatgatgttcgtgagcaggctgtctgggcattgggcaatgttgctggtgactccccaaagtgccgcgaccttgtactcgcaaatggtgcattgatgcctctgctagcacagttgaatgagcatgctaaactctccatgttaaggaatgcgacctggactttatcaaatttctgcagaggaaagccacagccagcatttgatcagactaagcctgctctgccagcacttgcacgacttatccattccaatgatgaggaagttttaactgatgcatgctgggctctttcgtatctctctgatggcaccaatgacaagatccaatctgtgattgatgctggtgtctgtccccggcttgtggagcttctcctccatccatcaccttcagtgcttatacctgcactacgaactgttggaaatatt

SEQ ID NO: 151546 - DNA, 1013 bp, Zea mays
  Clone ID: MRT4577_69732C.1
actgctcacgtcacgtgccggtcccgttctctctccgactcccatgcctctccggtgagctagtctggtatccatcggcgagctagttttgtctccaccggcgagcacgcgtctgtaacctcctccacccccatcgaactcctcctgctctccaatccgctagatctcggctccgtgcaggttgcgtggatggctgtgtggtgttgctttgctcgctaatttggttggatcaggagtgtcctgggagctatgctatgctgattgtgaggaatttggtagcacctctatcagggtttttaaactagagtgctgccgccccagcatacataatatggacgaagaaaatgttgttgagctgctgcaacgttatcgccgtgaccgtcaagtattactcaactacattctttctggcaacttgatcaagaaagttgcaatgccacctggtgcaatctctttggatgatgtagatatagatcaagttagtgttgattatgtcctcaactgtgctaagaaaggtgaacctcttgaccttggagacgccatccgcctttttcatgatagccttgactatccatatgtgaataacactggagctgtggatgagttctatttgcttacaaaaccagaatattcaggaccagctccaacacgagaaccaccacctatcccagccactgcaccatcatcagttgtggtaccaccaccggatgtggaaccagcaccaattattgtgtcatcgccagtcacagctaccaacttgccaaaatcacaaccatttgattctccgaccgagaaggagttaactatagatgacattgaagactttgaggatgatgaagatgaatttgatgggcgaagggcttctagaagacatcaaactgacgccagtgatctatcgttgctgttaccactatttgaaacaggtatcacagataatgatcttcgtgagacagcatatgagatccttgttgctgctgctggtgcttccgggggtcttatagttcctcagaaag

SEQ ID NO: 151547 - DNA, 218 bp, Zea mays
  Clone ID: MRT4577_69733C.1
ggcccgggcccggaactgattcccgggctgacgagctttgttttcggcggccggccgaccatctccttcgtggtttgttgttgacccaggttgcggaacaaccaaaccggacccagtgcttgcaggggacatcatattcgtctaagaggcgaactgacacaaagcgtgttgcacataagacatggatgcctgggtttacggcacgatggacacaaact

SEQ ID NO: 151548 - DNA, 291 bp, Zea mays
  Clone ID: MRT4577_69734C.1
cagcagttcacacaagcacgctatcgtcgcacgggcgctgaacacagactcaccaagcggcactgccaatggcttactaccacgacgtggactactgctctgaggaggcgaagtcggaggtcacagacggttatggacctcacggaagcagtgtacagaagtacgtactcaatgagaaattcacagaggtcgacactgcctgacgcgccggggtcgaccaccaccacctctaccatggtcaacacgacagtcacgggttcatacagcgcgagaacacggtcgttgaggaca

SEQ ID NO: 151549 - DNA, 129 bp, Zea mays
  Clone ID: MRT4577_69735C.1
cttgaaaagacgaacttaaatttaccctttaatatatcacctacaaatatgacggaaatacaaatgacattgccagcggggggcctttccacgggaaggaatttactggaggaaagtctctggacccac

SEQ ID NO: 151550 - DNA, 600 bp, Zea mays
  Clone ID: MRT4577_69736C.1
cattgggtacctcgaggccggccggggacgcttttctgtctcctctctacagtggtgccgcctcagctctctcctctctgatgcacccccctatcgagcgtgattctatccaggatactagggttcgttcgcctcgtctcccaatggacaaggagagcgtcaccccgtcgccggcccctgccgccgccgccgcaaagaaggcctactgcttcaacatccacaactgcaacgccgtctctctctgcgcctggtacatcgtggccgaacaactgcgccttctcgccgcaaccacatcatggacctttgcgtcgactgccaccgcgacaccagaccaagtgccaccatcagaagagagcaccgtcgcttgggcaatttgcaaccatgcattccacttccactgaatcatgcgttggatatagaccccatcagtgtgccctcatgacaacagtgagtggtagctcccgaagtatggtcactaaagagactgtgttcaacgagcaattgcttcatgaatctcagcgtttatgcagaccgtgttctgaataaattctgctgaacatggtatggatctgaaacgtatctgacattctgccttacttg

SEQ ID NO: 151551 - DNA, 553 bp, Zea mays
  Clone ID: MRT4577_69737C.1
gcggccgggccgacgggctcgtagctcgactgctacggagagagctgcttatatatcccgtattggcattactacttgcgcattggtatacacgcatgatcaaatgcccgggcccgagatcctaatgtttgtatcttttgattaggcggaaggactcactacctgaacaagaattacattctacttatattaagagaaccgcttagactagacattctctatctcataatgactgtgaccactttttccatatacgttactaacgattagatagtgatgtcttattatcatagtgatatacagaatggatattagtcataccccttacttgattatatgagaccagaaacaagaaatgacgagaaagttctatatggggatagactgagacaaaaatttcgatgtagagaaacttgatttgaaattgactacctcgtacgatgcctctcttagggctactatcataacactgacgaacgatactattggattcaggctctaatccaagctggagcgagtcatggccatagcatgtaccagtgtgagactgtca

SEQ ID NO: 151552 - DNA, 365 bp, Zea mays
  Clone ID: MRT4577_69738C.1
ggcgcccgccgtgagcctgagagtcgctgactccgcgggacctgcggtcgctgtgcggtcgggcgggtccaagcccgtcgcaccgctacgactccgtgcgaagaaatcgtccggaggtcatgaaaactcgcacaactccgttgacgaagctctcctgttgaagagaaaatcagaagaagttctgttctacttgaacgggaggtgtatttacctagtaggtccgtcctcatcctcctatgtgacgattgctatagagaattccgacttttagatgaaactaccatatttgaatatgtgattgatgagtgagagtgagcgtgtgcaagaatgatgggttctggaaaaagtactgtggggaagattat

SEQ ID NO: 151553 - DNA, 320 bp, Zea mays
  Clone ID: MRT4577_69739C.1
ttctcatagctccgtgtatatcatgagaggatacgggggcattttagccgaaagggggggtaaaaaagtggtggcatcaccttaggacgcaagctgcggccagagctgccactatgaagtcatgggagtcgcagatgaggagcaccagtagcggcgtctaacatgataactcccacgaggtttacacaagtggacacaagaggagcgaaacaaacacggacaggatgaagtgaactgctaaaagagaaaggcacacactgaaggaaaatgggaggcaagctgtccggaatgaacagaacgttgataaatgaccgtacaca

SEQ ID NO: 151554 - DNA, 207 bp, Zea mays
  Clone ID: MRT4577_6973C.1
ccgtgatgtgccacttcagggtggctactaggggtattttaggcgttttgggaacatccccaccaaccataacgaacctctggtatactctggaggagctccaccatctcaggccctatctcccatcattaacggtaacgaacaagaacccagacatgtattatgatgcgtggccacccataactcatgctctctaccatcaatctc

SEQ ID NO: 151555 - DNA, 304 bp, Zea mays
  unsure (1)..(304): unsure at all n locations
  Clone ID: MRT4577_69740C.1
agcgctccagctcccctccatcctcggccattaattctttggcgagctccgatccggtcggagtactagcccacgccgcagaagccgcgcgacctgatcgcgcgggggtcgaggagaggggaagcgcggcgccgcggttgcctgccaccgtaccgccgcatgagaaggaagaggagcccgtatccctccgtcccgctgcccgtcggaccgatggactccgagttcccctgcccctactgctacgaggaccnnnacgtnagatccctctgcgcgcacctggatgaggagcacccgttcgaacccc

SEQ ID NO: 151556 - DNA, 216 bp, Zea mays
  Clone ID: MRT4577_69741C.1
tgtttaggcctcaaaatatattaattgatgactgccctggactgatcgaatggtgtgatgagcaagagctctactatcatgccccaaaaacggcgaatatttcagatataataagggcaaagccgtgtggtatggcttattttcaatccttcgaacagatctgtctcgacatttgcccggagcagggatcagaattggttttgtcaccagatactt

SEQ ID NO: 151557 - DNA, 322 bp, Zea mays
  unsure (1)..(322): unsure at all n locations
  Clone ID: MRT4577_69742C.1
cgcgggcgggcggtggggggggtccntgctttcgttcgcgtgcgtgcggcgtccttgctcttctttcgtgtctccttggtctcctctcctggccgtcgcttttcttcgtcgtgtctgggtgctccctggcgtgtcccttctttttcgcctcgccgcgcctgcggggggggggggctgttttttttttgtgggggcccgcgccggtcgcccttcccgcccggtgcgctggctgcgtggcgcgtggggcgcgccctgttgcggcgcgtcctgcgcggcgggggtggggggtcgcgccgtgtggccggtgctcttgccggctgcc

SEQ ID NO: 151558 - DNA, 199 bp, Zea mays
  Clone ID: MRT4577_69743C.1
ccctcgcctcgtgacgaggcgcttgggacgatgaccaacagccagtgtgggcgacacacccacaagtcgagctatagggcttggggatagcaagggaccacccggggccggaccggagcacgtacgttcgtaccggaacgatggcttggtatgaaagcgtgcaggccctttgtttgtgcttggcggctctttttttttt

SEQ ID NO: 151559 - DNA, 466 bp, Zea mays
  Clone ID: MRT4577_69744C.1
actttaaacgcctacccatttgctgcatcggtgactcacccgatcttacactgtgcggggagaccaaccgaatcggggaagatagcatagtgccaagcaaagtcgacggacgtgcatatggaggtaaagctcccaacaaggaactcgtcgaccaaggcgtgccgaaagcgtagcccccaccagaggattggcagacagaaacctgaacgcgtacgacactgctaactggtgccccttcaccagattccgaacgatcaaaagaagactgagccaataaccaggaagctgtccttccataggctcgcgagttagaatccacaggacttaaaaactggatgtgtatttgcagagccatgccagactgtgactacagtagggtcgctgagcgtactttgtgtgcctgttggaagacaccaaactgttggccatccatgctaagaggagtgaccattatgccaaaggacat

SEQ ID NO: 151560 - DNA, 401 bp, Zea mays
  unsure (1)..(401): unsure at all n locations
  Clone ID: MRT4577_69745C.1
gggntgtgtgngggtggttggttttgttgttggtgggggtttggttgttttgtttgggttggtgtggtaggngttgcttagagtggtggggntgttgtngttggtngtggggggttttctttcagagcaagtgggtnnggcgcacgcngctgcttgtggccgtnggcgacgcggttcaccactgctaggtggctcagtggtggcagaaaaagttgttgctgttgcgttgcgatggtttgtagggttagatgtgccaaggattgctgtcgcaattgggcaattggttgttggacggcgctcgccgcaagcgctagttgtcgcctataggcttgcacggttggatgctccgaaacccattgaagtaactggtgggaggaactggggaacaatggcgctaggag

SEQ ID NO: 151561 - DNA, 463 bp, Zea mays
  unsure (1)..(463): unsure at all n locations
  Clone ID: MRT4577_69746C.1
ggccgctntttnnntnnnnnntttgcggggggggggggggggtttttttttcttttctattgtgatacggtataggaattacatttttgttcttgttctatcattgcttgtggcaaatacgggcgagcaaccgcaataaccattcacccaaacctccgcaaaaaccgggcaagagattaaggacggggggggcaaactcccccctagcaacgcgagggaacagtccacagagaaggaaaccgggggcccaacccccccccttatatttcacgggggaaaaaccgccaaaaacgacccggacccccggactttgcattgccccgacgcggcccgcaacaggggccggcgcggagcacaccctgctcgaacggggaggcgatcagagccaaggcccccacggggcgaagcgaacgaccggccgaaaaaagcacccggacggggggaaaaagcccccgggcgcccg

SEQ ID NO: 151562 - DNA, 512 bp, Zea mays
  Clone ID: MRT4577_69747C.1
tggagagacaacagctcataccccagaaggaggccaggagttgtgagtttccaagccccagctcactctgaccacttctctgcctgcccagcatcatgaagggccttgcagctgccctccttgtcctcgtctgcaccatggccctctgctcctgtgcacaagttggtaccaacaaagagctctgctgcctcgtctatacctcctggcagattccacaaaagttcatagttgactattctgaaaccagcccccagtgccccaagccaggtgtcatcctcctaaccaagagaggccggcagatctgtgctgaccccaataagaagtgggtccagaaatacatcagcgacctgaagctgaatgcctgaggggcctggaagctgcgagggcccagtgaacttggtgggcccaggagggaccaggagcctgagccagggaaatggccctgccaccctggaggccacctcttctaagagtcccatctgctatgcacagccacattaactaactttaat

SEQ ID NO: 151563 - DNA, 298 bp, Zea mays
  Clone ID: MRT4577_69748C.1
cgcatgaacaactaccatagagggagttgggggttctttaacgctaatgccctattcactgccacaggccacaaacagcggatagagaatcacatcgtgagccggcgactctatttagcttatttactgcacgagcaagatagctcactactggtggggggattcctcaggtcttttaactcacagcattggacgcttcggccacaacttttgccccatgctccattgtttgggcgacgccaacaagctcagcgggcattgtctcaacgactttgaatcgagccagaggaggacaaac

SEQ ID NO: 151564 - DNA, 571 bp, Zea mays
  Clone ID: MRT4577_69749C.1
tttttttttttttttttttttttttttaaccgctaaaacgactacttttttgtaacggatagagtattttgtttttacaaccaaaagctccccctatctaccaaactctaggtttctcgatcaaaacttcaggaacggtttgaaactgttttgtgctaaacatgataaatattaaatttttttaaaaagctgtatatacgtggagctattttgctaaatagttagctaaaaactagctctttccccactggtagagctgccaatagagttgctacggaagaaaaatatatagcttgacctggccatgtatgcttgttgtgagcgggcgctatacatgaacagtaaaggccgtatgcttccagcggcagcaaccacatcggaaagaggctgatacttggaatagattcatataccatgtgattggttgtatgagcgtctagcgcctggctagctgcagcctgactggttggatacccgcttggatcgcgtctttaaacaacttcagactcgactctggttccttttcccaccaaacaaccaaggaacaccaaataaaatttgtaaacaaatt

SEQ ID NO: 151565 - DNA, 534 bp, Zea mays
  Clone ID: MRT4577_6974C.1
gccggccgggcctccgactagttgctagtgctaccaagaactggaaggaaacaccgctcgccgccgagccttccattccagtactcgcggaggaaaggaacaccaggcagcggcatggtcacgtcgacgaccgccgccgccgtgttgtccccgccgtgcgtggacgagcttcgactggtgccgtctcctcgggagcgcgtggaattccgcgcggaacggccgcaacgctctccgctacaagggctcgaacttgaacccgtcgctggcgatcagcctgagcacgggcgtgtagttcttcctgggccgcttcatcttcttcaacttccatctacgagaacgaggtcaaccacgagaacgaccagaacgagaacaccgacttcgacgtggtctacaagcgcaacaaggagttctcaagcctgctctagcacaacgacctcgggagcttcaacatcgcttacgtcctcggctggggctcgctcttccacatcgtcgtctacgacatgctcgtcacctcaagcatcgatacgagcccaa

SEQ ID NO: 151566 - DNA, 536 bp, Zea mays
  unsure (1)..(536): unsure at all n locations
  Clone ID: MRT4577_69750C.1
tttagaatctattatgggcagcgatagctgctacagtatgcagggtcttaggcaaccgcacaattgtcgcacgcatagagcgcttcgacggatgaatctctagtagagccagactatcaccccttgcatatgagattggtatgtagcgggcggcatagcngtcccctctcgcattagactgatggttcctaacggacaaacaaggattctatggatgacccaacactgagatgtacatagactatcatgatattatctcatcccctagcatggcaccggctctcacctattcagtcatatactgctaatagtatgtagcagtgttaatagcaaggatctctggtgtatcttctacctaatggctgaccgacaaccaatggctggatatgcgaacaatgtagacctggatccaatatttatgtccagggtgccaatacaggtgttagtagagccgtcatcactcatgttatctgacatgtcagcgaggaacattaccgtatatatactcattacatccatactatcatcgagattaa

SEQ ID NO: 151567 - DNA, 623 bp, Zea mays
  Clone ID: MRT4577_69751C.1
tcatgtaattaagctgatcataatcgtgctgatattgtgaatgaattccatgcatttccctgtgggacgcatccaccgccacctgaaggatagcgcacaggccggcgagcgggtgggggcgacggcggccgtgtacgcggcggccgtcctggagtacctgacggcggagatcatggagctggccgggaacgcgtgcagggacctcaaggtgaagcgcatcaccccgcggcacctccagctggcggtacgcggggacgaggagctggacaccctgatcaaggccaccatcgccggcggcggcgtcatcccccacatccacagggagctcatcgacaaggctgcctaggaatgacgaaggagcaagcagtctgagaaaaaaacctgagaaccaagtagtaccatgaacctcttgtgggtggcttcgctcttgttgcgttgtcaatctgctgatacatacacatttctcaaaaatagaggcgggcactcgccgcttcatgctcccttggatggttgttcttttcatccatcagctgaacccagctgatcatcccggtcagcattgagaattggtctgtgcatgaacttaatcgataaacagtcaaagagctcaccctttttactct

SEQ ID NO: 151568 - DNA, 266 bp, Zea mays
  unsure (1)..(266): unsure at all n locations
  Clone ID: MRT4577_69752C.1
ctgaaataagctgttttcaaaggaacagaagggaaacttgctacctgttctgaaagcagtgtaaacctcacaggactttggatataatcagatgtagaggagnatgnaggaaaggaatagttaaggatgcacaggaatttatctgtctctgatcaggaaataaagctggctatgggtctgcaggggcatgactgatggttgtctgcctcttttcaccctgtaagtgaatccctgaactggattcactgtagcaagtcttggttaac

SEQ ID NO: 151569 - DNA, 899 bp, Zea mays
  unsure (1)..(899): unsure at all n locations
  Clone ID: MRT4577_69753C.1
nnnnnnnnnnnnnnnnnnnnnnnnnnnnnnnnnnnnnnnnnnnnnnnnnnnnnnnnnnnnnnnnnnnncgcgagaccctcgtggagaaacgacgacgagtgacgactacgacgcgagatttcgaggggctgtttcgtgctaggaccgatcttcaggaggtctccatcggcaacggccccaccccgcgccatcgcccgccgcatggacttattgttattatatatctatttggttggtggtctcgaggccggcgtggcccgaagatgagcgttgtgggattcgacctcggcaattgagagctgcatcgtggcagtcgcgcggcagcgcggcatcgacgtggtcctcaacgaggagtccaagcgcgagaccccagccatcgtctgcttcggggacaagcagcggtttatcggtacggccggtgccgcgtcctcaaccatgaaccccagaaactccatctctcagatcaagcgcctgctcggccgcaagttctccgacccggaggtgcagagcgatatcgcctccttcccgttccgtgtctcggaggggcccgatggatttcccctggtccatgtacggttcctgggtgaggagcggacgttcacccccactcagctgcttgccatggtgctgtccaatctgaagagcattgccgaggggaacctgaagactgcggttgttgattgctgcattggcatccctgtgtacttcactgatttgcagcgcagggctgttcttgatgctgctactattgccggcctccggacgatgcggctattccatgagacaactgccacggcgttggcttatgccatttataacactgacctcccagagaatgaccacctaaacgcccgcatttgttgatgtaggccatgctaccatgcaggtcacctttgtcc

SEQ ID NO: 151570 - DNA, 901 bp, Zea mays
  Clone ID: MRT4577_69754C.1
ttggctccagaatcgcagacattacaaacgttcggtagacaacaaaacccaaggacattttttttctggacatcagatggaattcacaagaagcacaatcaactagtcacaagttaggaccaagaacctatcatcctcatttgagaccagcatatgtcaatgtacaacaagtctatcgaaatccacaagcccgaagagatgtagtctgaatctatacaaatcaacagccctaacaaacaactgaccaaacaaaagattaagcaaaaataaactacgatctagacaaaagagtaactcaaaaatctcaaattaacaagctctaaaaggaagtgggggtatcagggttctggagtatggccacgtaggcttgcaggtagatcccagcagtccacagcagaggttatttccattccagcaatccaaagctcaggctccactctgctactctgaatgagatcctgaagctatagctttcacctccagatgcgtagtttacactagctcagcttgaactcttttattcccagtctgagtatcaatccgttttctaatcaaagccaagcaaaggtttcctcacctaccactatattgcgagcgggtttcatagtctggtgagatgccatgctcactcatgctccctcttgacaggcttcgcaacctctgccagaacttcctgttcttgcctgtcatcagcggacctgaacttgactgcttgcgaaaagaatctgaatcggcaccgcgagtaaagagtggtgtggagccaaatatctcggatattagcactctctcagcttccatgccagtcgcgtcataaaccgctgtagtttgcatgggcaactcctggctgaatcttcctgacgcaatgccgtcgtcaccctcgctgcacacaagcttcaaggcc

SEQ ID NO: 151571 - DNA, 556 bp, Zea mays
  unsure (1)..(556): unsure at all n locations
  Clone ID: MRT4577_69755C.1
cnnttcttttttttttttttttttttttcggaaacaatggctttaaattgaagtttatccttgcatacatgtcaattatgtccgctattttttcacaaattctttcacaagctctaatcacacggcgcacgggcccggggggctagctattgatcacggagcagcggctcgagcgaggcggcgccgagcctggtggcattcacgtagtcctgcggcgagtgcggcggcaggccgggaatcaggagcccgacggccctggcggcccgcatcacccagccctccgcgtacacggcaccgcacacgtggccgatgaggaagccgcggagcagctcccaggccgcgttggcgtacttgggcgccaagaagagcggcgagaagaagttcttgttgggctcctccgccatcgccgccgccctgtagaagctgtctaagtaaaggcacaggccgaactgcttgaacaggagcgcggcgccctcgtagggcacccgcggacgacgtcgttgcagtacacgaaccggaagtagcggcgcgggcggtccaggtggtccttcatgaa

SEQ ID NO: 151572 - DNA, 1769 bp, Zea mays
  Clone ID: MRT4577_69756C.1
cctcgaggcctgtccggactgcggcggccgagatgaacgcgcggcttcctcccccaatggcgcccttcccaaaccctcgacgcgctgctctcgcccagatcccgcgtggcttccttccctcggctgccgagatgcatccctcttccccagctgctctcccccaccaaaccctcgacgcgcggcttcaacagagccccagcccgagcccatcccgccttcaatgccggatctcgccccatcgccaccaacgacgtcgtcaagtggtccaacatcgatccctctagcttttaaagcctctggatcctccgcagacgacgtcaagttgtccaacatcgatgtccaagagttcatcgccttcgatccggtctacggggcccagtgctagagaaaagatgagatggaactttgatgataaggtctttgaagcctcaaacagagtcttgaacattgtcttggatgctgtgaacaaaataaggtctctgaagtctccagtagacccacgcgtccgcccacgcgtccgtccacttttccgagccctcccagggtctcacctcgaggccggccgggactgaaaggccccacgaacttttactctagccctcccagggtctctcttcggcggcggcgatgtctctcgccccggacccggcggacggcggcgccggcaccggcaccggcgacgactggttcctcgactgcggcatcctcgacgacctcccggccgcggcctgcggggccttcccgtgggacgcgtccccgtcttcttccaaccccagtgtggaagtgggcagctatgtgaataccaatgatgttttcaaggagcccaatgatgtcttcaaggagcctggcagcaataagcgtttgaggtcaggatgcaatgatgtgcatgtgccaacatctaaagcttctagggaaaaaatgaggaggaacaagctgaatgacaggtttcttgaattggggtctacattagaaccagggaagccagtaaaagctgacaaagctgctatcctaagtgatgctactcgcatggttattcagcttcgttcagaagcacagcagctgaaggaaactaatggtagtcttgaagaaaagatcaaagaactcaaggccgagaaggatgaacttcgtgatgagaagcagaagctgaaattggagaaggagagtttagaacaccagatgaagctgatgacatcgactccaacctacatgcctcatccgaccctgatgccggcgcctttccctcaggcacccctagcgccgttccatgcccaggggcaagctgcagggcagaagctgatgatgccctttgtcagctatccggggtacccaatgtggcagttccatgccgccttcagaggtcgacacctcgaagaacagtgaagcgtgccctcctgttgcataattgcttcgactagcggctggtcctgctcacaccatgcgaattagtcgcaactgaagcccccccctagctgtcgattcattgattggctataactgctgttgttatatttgtagttcgttggtgaccaagtaagctgctgatatctgtggcggggcgccctactatagaggctactgataccccttcaatggctgtacatttttttactgttattctttttgcggagaaaagaagaatgtttgttcttgttctccacagcaacaatgtcacataccctattattctatatatatgtcgtgtattttatatttaacaaaaaaaaaaaaaaaaaaaaaaaggggcggccaaaaaaaaaaaaaaaaaaaaa

SEQ ID NO: 151573 - DNA, 1050 bp, Zea mays
  Clone ID: MRT4577_69757C.1
atggacaatgatgagaccttcagccccgtcgtcaagttcgccacctacatccgcttcgccacctacttggcctccatcggcttcgtcgaggccaagtcggacacatcattcttcatctaccagcggggcaaggacatcgtctgcctcctcctctacgtcgacgacattgtgctcacggcattcaccgtcgatctcctacagcgcacgatcaccaccctccagcggaagtttacgatgaaggacctagggcctcttcatcacttcctcggcatcactgccgagcgccagccccagggtctcttcctgcatcagcgtcagtacgccatcaaaattttgaagtgggctggcatgtctgactgtaagccatgctccacgcctgttgacactaagacgaagctctctgaggatgacgggctcccgatcaccgacacggtgtcttactggagcctaacaggcgcgctccagtatctcgccttctcccggtccgacatcgcctacgtcgttcaacagattctcctctacctccggggctccctcgactacgacctcctcctccgaccatcctcgacgtcagaacttgtggtctacactgatgttgactgggccggctgccctgacacgtgccgatccacctccggctatgtcgtgttcctgagcgccaacctcgtttcttgggccgccaagcggcagcccgtcgtctatcaccccagcgcagaggtcaagtaccgcgctggatccaatggcgtggtagaagcatcctcgatgcgccagctcctcaacgagctctacagccccctccagcgcgccaccctagtctactacgacaacgtcaatgccgtctacctctccacaaatcccgtgcagcatccgcgcatgaagcatgtggagatcaacctgcacttcgcccgagagcgtgtgcaacagatgacgttcgggtcctcagcgtccccacaacgctacagtttgccgacatttcaccaagggactgtcgtccagtgtattcctagactttcagttcagtctcaacacatgtacatgatagaattgtga

SEQ ID NO: 151574 - DNA, 421 bp, Zea mays
  Clone ID: MRT4577_69758C.1
gggaaaaaggcaaacatttattcaagaaaaaaaagcgcccccccccgctaaaccgggggaacaaaacggggcccaagacgggcaaaaagaaaaaacggggcccctggccaggaacccaaaaaatgcccccggggaaaggggaaggccccaaaaacagcactagggaaccccgccccaaaatacaacccaggacatcatggcaggacccgacattttaaaaaaccccgcaaaaacaaaaaccctttaaagtccctccttccgggacacctacaaaaaacacaagcaagcgggactcgggggcgggttaaaacttttggtgccttgggaaaggtctcgggcgttttaaaggggagttcccgggccttgcttggcttgggaaaccccccccatccttgaaatcccccctgggggccggggccct

SEQ ID NO: 151575 - DNA, 425 bp, Zea mays
  unsure (1)..(425): unsure at all n locations
  Clone ID: MRT4577_69759C.1
tttaccttcagaacagatttgctactatgggccgtgattatttccatagtggggtgggtgataaacaaactttatcaattnctatatctaacctcaaaatatttttttacagtctcaatactaagatgttttcataatttattctttttttatcatcactttgctatnaaagacattgccactatttttttttttttattttcaatgggacacccaaactttttgtcaacacttcattataacaaattgtaattggttctttcaatttattatttctgaggggtggggggtggggggagtttaatttaacttttcttaattatatgccaaaatgttatttttttttttattattttccttactttcttttaatcttttttatttttttaatctaatcttttatttttaacattctttttttattt

SEQ ID NO: 151576 - DNA, 702 bp, Zea mays
  Clone ID: MRT4577_6975C.1
agtttttaatattctttttttttttttttttttttttttttttttttttttttttttttttttttttttttttttttttttttttttgggacccaaaaaaattcccttttttttttcccttttttttttgggtttttaacccttggcccccgaaaaaacccaaaaaacgggaaaggggaacctaaggggcctcaaaattctttttttcccgggtttagccaaaagtttgggttttccccccgggccccgttgccttgtttctttcccccgggtttctaacccttttccccccttaaaaacccctggtggaaaaaaccccccattttttccccataaacccggccccaaaaaaaaaaaatggttcccccccccccttgtcccccgtttttttccccccccttttcggttaaacaaagccttcccaatttttcgggggggaaaaaattttggcgtttgggtcccaggggaacccttttggggggaaaaatttaatttggggcccccgttgcttggctttttaaaggaggctttaagggggccccccccgggtttgggagaatttaaagggggggccccccctttggagggaaaggggttaacccgtcccccccggttaaaaaaccctttaaaaatttttgggggagggcattttttcaagggggccggcccttttaacccttactgttccgggggcaaagggcc

SEQ ID NO: 151577 - DNA, 528 bp, Zea mays
  Clone ID: MRT4577_69760C.1
ctcacacaagactttactttcgctcaagaccagcgataacaaagaccttctctcttccgattaccatctatccacatcacttcctgcgacagatcaccgacatcatgcggatcttcgccaagaccctgaccgacaagaccatcaccctcgaggttgagtcttctgacactatcgacaacgtgaaatccaagattcaggacaaggagggcatcccccccccccagcatcgcttgattttcgccggcaagcagcttgaggacggccgcactctctctgattacaacattcagaaggagtccacccttcatcttgacctgcgcctgcgtggaggtatgcaaattttcgtcaagaccctcactggcaagaccatcacccttgaggtcgagtcttccgataccatagacaacctcaagtagaagattcaggacaaggaggtcattcctcctgatcagcaccgcctgatctttgctggaaagcaactcgaagacggccgaacccttgccgactacaacattcagaaagaatcta

SEQ ID NO: 151578 - DNA, 332 bp, Zea mays
  unsure (1)..(332): unsure at all n locations
  Clone ID: MRT4577_69761C.1
ggaacttaaaatataaatctctaatactttattactgaaaggtcgcacatatcagcatgaaaactttattattacagtttaaatcataaaaaatctaaaaaaaggcaccaccgatggggggcggttgcaataagggggtaggattcgtcaaaccatgttggctaaatggcagcaattgttgttgttgtaagaaggcaacaatgtttgctgcattctgtgggtaaaatggtancaattgttgctgttgcaaaaaggcattaatgtttccccgtgttgagtcaaattaannnnaannntnnangccccnnnntacctnnnccgnnaccacccta

SEQ ID NO: 151579 - DNA, 318 bp, Zea mays
  Clone ID: MRT4577_69762C.1
cgcagaagtgcgctctggaccttgaccagctgtgaccatatgaactttaatatcttgccctgtggcggcgcggtgacctgacctattgcgcaatctaaagaccctggggacgacactctcgatgatggaagtctatgaccaactctgtttctgcaactcgagcatttcaggcttgaagggatccatttcggtgcaacccaacgtctctaaaccagattcgtaagagagacttgccaaaggaatccaagcaaatgaccgccacatcatctttgtgaataacgacctgacccagtttcaaggaagaaagcccaccggttt

SEQ ID NO: 151580 - DNA, 444 bp, Zea mays
  Clone ID: MRT4577_69763C.1
aaaaacaagggaccccggccccgacccccctaagggggaaatcaaaaaaaaggggggcccttacaaaaggaacccaccccggaaccaaccttggggaaaaaaaggcaaaaactttttcctgaagaaaaagggtctcccatcaaaaatccaaaaaaaaaaaaacccggaagccaaaagggaaaaacccggggggccaaaagggggggcccacccaaattaattgggtggcccaaaccccccgctttccaattggaaaaacgggcgccccacccgcataaaaaaaacggccaacccccggggaaaggggggtttggtattgggcccttttccccttcccaagtcaataaatcggtgggcccggaaattcgggttgagcgaggggaaaaaatttacccaaaagggggaaaaagggtctccacaaaaaaaggggcaacccgggaaaaa

SEQ ID NO: 151581 - DNA, 434 bp, Zea mays
  Clone ID: MRT4577_69764C.1
ctccacccgtgccgtcgcctcgcctatgcgatgctgccacctcctcccgtctcgcacgatccttcccagctccgcagcgtagcctctccgcggcgcgatccagatccaggttattcagcatgggcctggtgaaggaaggcatccacatggaggagggaacccttgagagcggcatggagtacaggactgtatctggggatgctgggcctctggtcatataggataaagcaaagggcccaaaggtccaagagattgtaaacatcccactgggagatggcaccaatcgccgtggccaagtcctggaagctgatggcgacaaagctgatgtgcaggtcttttgaaggacctatctggaataggacggcacaaacacaagccgtggcagttctacagggctaaggctcttgagaaccccctgtcgggacttgaatatg

SEQ ID NO: 151582 - DNA, 237 bp, Zea mays
  unsure (1)..(237): unsure at all n locations
  Clone ID: MRT4577_69765C.1
attcttttattcaaaaaaatgcatggtaacaggaactccntttttggggggggccttcccgctattttactttcttaccggttccttcatgcgttccagctttcccttttgtggggggtttcatagctttgttcttttctttgtcatatctgttttctgtgttgatagtttttttccgttctcaatttcttcgtcaacttttcttttttcggtgggcctatatatgtgtttttagtt

SEQ ID NO: 151583 - DNA, 308 bp, Zea mays
  Clone ID: MRT4577_69766C.1
cccacgcgtccgcccactcattctcatacacgttgacagacacatacttacactcatcatggagcactacatgtcggaggacctaacatcattcatatcacatgatctgagataatttaatcagacaatcaagtcttctatgttcataattcgcctcataaaacatgagctactctactagtacttgatgcaaatccactcaaaatagatgcatattccatcagatcagcatggttacctgttcctgatcaactcggatgcttctattgctaacgagcattaccacaatgttcactatattattgtaa

SEQ ID NO: 151584 - DNA, 261 bp, Zea mays
  Clone ID: MRT4577_69767C.1
tctctgaattttaattttaatcttaactactaaaggtgtttcgttttgcgacatttatatttctggggagattatattattgtgacaggggcttcttttctataatactttctattccttaatacatggacatataccatctaatccatgatatttaatgcttttgacatgttttaactggattccactattagttattactaataaagattgaagttttataaggaaactttcatttttgttgctacaggatgactttgt

SEQ ID NO: 151585 - DNA, 371 bp, Zea mays
  Clone ID: MRT4577_69768C.1
cgtcggtcaccttctagattgggggggggatgccgtgtcttgtcttccacaacaagaagaaaaaacagcaaaacaagagcgcacaatacaggggcaacgacgagcccgcccacatgaggggagtggggacagctagaggggcagccccgcctgaagaccggaaagatggctcacataaccggccctagcctaagaagacgaaagactccgcttacgccaatgggtccacggaccggctgggcggcagaacaggcagctaggactaaaactcccccccccccccctacttcttctgcaaaaattacaggggcgctcccacctggggctgggcgcccccacggaagcgccaatgggcgccgcaagtgcctgcg

SEQ ID NO: 151586 - DNA, 297 bp, Zea mays
  Clone ID: MRT4577_69769C.1
gggaaggggccgttcccaaggattaggggaaaaaaaaaggttcgaaatctaagaccaaaggcggcaactactattctaagaagtcgactaacggagtatctgtaagtatagcgctaagaatccgcgccgtattccccgagatgactagaatgtacccgacggccgggagcaacgggaacctgctgatcgaggcgccttagctcactacgaagtacgagggacggatcgggccgccttgcggcaatcccgccaacgctacttgggcagtttttagtaaggtaactgagtcccccgtcc

SEQ ID NO: 151587 - DNA, 260 bp, Zea mays
  Clone ID: MRT4577_6976C.1
atttcacaacattgcagttacgattattgtgtatggtcaattggcacattgatgcttagtaagaaaagtgatcctacactccaagctaccttattgacagcttatcgcattttcagtttttcaggctgtctaaatagatgccattgaggtgttattaccattctaaaatggttgttgtagtatttggcttgacttgattgtacacttggaaaccatgttatgaccaaagcccgtctgctctgcaggaaatcccgcaaaat

SEQ ID NO: 151588 - DNA, 248 bp, Zea mays
  Clone ID: MRT4577_69770C.1
ttcttaaccaagaaagcctcatgcggtggcggttggccttggtgcggttgagcggtggagatgggctgggcacccaggtggttgcgcgggctgtttggtggcggcggtggcggttggaaggccgccgacacaaggcctgtgaaggagaagaagcgctgggggttcggcaagtccttccgggagaagccccccgcgccagtgccggcgcggcctccgactccgaacgccttccgtctgcattctccgcg

SEQ ID NO: 151589 - DNA, 204 bp, Zea mays
  unsure (1)..(204): unsure at all n locations
  Clone ID: MRT4577_69771C.1
ttaatttttttttntttacagcagcgtactggtgggatacccatatttaaccatatttaaaactctgcgaacattacaatttacagggcagaacagtgctttaagtgaccatatgagtgaagtgctcgacacggtcttccgactctagtggaagtgattttgggtctcatttaggctccccggacgcgtgggcggacgcgtggg

SEQ ID NO: 151590 - DNA, 187 bp, Zea mays
  Clone ID: MRT4577_69772C.1
gggatcataacatctatactattctatatattatgagagatcaccgttggtcccgaactgtccaatatgatgcaccaggaacctccactgaggacttcatgtgggttttgggagcgacccctaagtgaggaattacaagggtggcaggtaatcctaattctgatgtattgagagacaaagcactgtc

SEQ ID NO: 151591 - DNA, 303 bp, Zea mays
  Clone ID: MRT4577_69773C.1
gccaaacgttcggagggccttgaactcccgttcaggatccacatcttccctaccgagtggtggcgagacctcttcctcttaggaccacctccaaggctcttggtgtaagcttggggctgctcacctatcaagttctcatgtttgatctcggcattcagatcccaactgtctttgatccgttccctgaagccaatgctagggactctgttgccaaagcttggtcaaaggacaacctgcacgtgcgcatacataaacgttttggacgcaagaccctttccaccagttagggattgaagaaagagg

SEQ ID NO: 151592 - DNA, 134 bp, Zea mays
  Clone ID: MRT4577_69774C.1
gttctagatcgcgggctgcctctcgcgaactagaactagtctctagatcgcgcgcgggggctctttattatcaaatgttggctgcgctggcattccacttgttagcccgtttatagtgttacctaaattcaatt

SEQ ID NO: 151593 - DNA, 217 bp, Zea mays
  unsure (1)..(217): unsure at all n locations
  Clone ID: MRT4577_69775C.1
tcgcttagncgcgtacgctggattcggctcgcacggcacctggctgcgtctgtctcttctttgtgcggtgtgtagccattctcgtgctttcgttgtcccccctggtgtccactccagttttttgctgcgacactgccncgtgccgttcgtgtgttttgctggcggttccgtggcaccatcntcgcacactgccttgcccgctcgntatttcgggttg

SEQ ID NO: 151594 - DNA, 302 bp, Zea mays
  Clone ID: MRT4577_69776C.1
gtaccggcccggaattactgggtcgacccacgcgtgcgtggactttttgtcggacgcgtgggttaaaatgttccttctatgtatatgtaagggaccacaattaaggggacaggaggatagcaattagacaagttgttttactttgaataaaataactcatgtgctgagttctctgctaaatgaactgtaacgtgaaatcctttattgtatttctgattgaaattgctcgaacaatctaatataatatcttttttaatgaaataaataaaaactatttgtattaattaaggaaaccctaaaaa

SEQ ID NO: 151595 - DNA, 404 bp, Zea mays
  Clone ID: MRT4577_69777C.1
ccaggcaaaagggggaagcaacagccggaaaaacagggggggttttataggggggggggggggaacaaattttggggccccccagcctaacggggggggggggttcccttttaatcaaaaagatttcccaaggggcaacagcttccttaaaaggggtttttttggggggggggcaccaatcggaggggcagggggggggggccccaaggcatttagggcgactggacaatgcccccccggggggggaggggaaaaccccaaagcccgccgaccttttggtgaaaaccccaaattcccatggagttgaagccgggaaaaaccttggcggggccccccccccccataatgaaaacccccgcctcaaaattggggggttgggcggccttccccatttgggggcccca

SEQ ID NO: 151596 - DNA, 654 bp, Zea mays
  Clone ID: MRT4577_69778C.1
gaccacgatgtactttctgatgctctttggagcgacaatgttggattgaacgagaagaatggtgctggcaaagatcttcaacgtgggcttgtggcctcgaactccaaaggtgaacctggcaaggaggctgacaagttcacctccccgggcatccttatgaagcaccctgggtagattggcaacgggtatggcccagaggtggactgtcacacctcccacataggtgtcaaatctgctgtgctcattaccaagatctacacggggtctggcaaggagattgagaaggagccaaaggcccttaagaacgcggaagctggtatggggaagatgctacccaccaagcccatggtggggcggacattctcacagtatcctccccttggtaagggtgctgtcggcgacatgaggcagacggatgctgttgcaggtatcacgagagtggagaaaaaagagccacccgcgcgccaaagtgaccaaggctgctgccaaaaagaaatgatgcgagcctgtgcccgctttaggaagggctagttttcatcagtacaagtgtttgcttgggggaccgtgctggtattgtgtgaactgaacgagctctggtagcctgtgcacttttatctatttatttgggaaccttcttggtatgtcaccctctgc

SEQ ID NO: 151597 - DNA, 374 bp, Zea mays
  unsure (1)..(374): unsure at all n locations
  Clone ID: MRT4577_69779C.1
tttttttttttttttggaagaattctgggatgtgggaattatacttttgacatttatctctatacactttntcattatatntgatgttcttctttggcgcatacattagatgcacccggctttatcccttaaatccgggtgtcacacctgaatattcttctttcagactctattccttcttgtgcccacaaaactaacacaacatatgtatctctactacacttaattgaaggacattgtcttctttttggtagccaacattcaacacccaataacattcttggactaatcacttgtctacagaattcacctttaaagcttttgggttcaccctttttgtcacagagggacgtcataaagcacttattgtggtg

SEQ ID NO: 151598 - DNA, 1065 bp, Zea mays
  Clone ID: MRT4577_6977C.1
ccggagctgtgagaaagaaatcagctggggtggagctgtaacagttcgccacggctaggctcctctcccctctcagctctcagctgcccctcctgcatgccgatcgcctccaagctcgtctacttccagcgccgccccgcgccggcgccgcctgacgacccgggtcccgagcctcccgacccccgccgcccccgccgccgccgccgcagcggctccctctcctcctctcaccagaagccggagcatgatgttccagggcaccaaagggatcacgctgctgcagccaagcctccggggccagtcggaaaggcagcagggcttcttcacacggcctccagcgcagggctttttcaccaccgcagcacgtcggggtcggaccacggccggcttcccgacgccgtgcagcaggccagggaacggctccttcagaggctcggcagcgtggacctggtcctggcggcgggacgaaggtgctctgcacaagacatggccgctgcagacactctgggctggagctggaggactcgctcgccccgtcgttgatgcctcttcgggcggcggtcaaaccagctgcttccagttccagttccagcccggtgaacgtgaacccatccctgtgttccccaaaccggcggccttcgtcgcggtacaggaagtagaagacgggcgagccgcgcccgcggacgcagcttctgactgctccatatgcctggagaggtgcggcgccggcggcgggctcacgcagctgcgctgcgggcacgtcttccactccgcctgcctgcagcgctggctgcggtcccgcgccgactgcccctactgccgggccaccgtgcgagctcgctcctaacagcaggaaggaaggaaggatggatgatgaatggaaagtgtggaactggatgacgatggttttattaaccgtgtgtcgctgctcacctcttgttgtaaccactccactagtatgggttttttttcttttcttcttcctttgcccgttgaggtagactggtagtactgagctttgcggcttcagcgattcagtgtgatatatgtgtgtatgttgtgtct

SEQ ID NO: 151599 - DNA, 641 bp, Zea mays
  Clone ID: MRT4577_69780C.1
attcctagcctgcgtggggctatagacacatatatagatcctgaccgggcggcagagagccaggacgaggagggagactatggcgtgccggctgcggcatcaacgagaacaacggcgcgctgctacgacttgctgtgatggagatcgacatagagcctgcatcgctgccaccagccctccgactgcggcctcctccgcgaggactaccacgagggcctccaccactccaacgatatccatggcaggaacacgctccacaatgaggaccagcgacagatcagacctactgatcgaaatgccaaggatgaagctgaggccgacacagctgtcgcacactttgttacccacccggcccattattgggggcgacggttactgacagctcatcttcgggtcatcatattatgctacaaggaaatgcaataatctccagatgatgaactacgcggagttctttccaccatgacttaaatatcaagactcacttgtgtccagaagacccaaactatgagggcccaatgcaccgctaccgccatgtatggttccctccaaggagggctcactgtccgcgcgacggaatcaactacagagatggtacccgagtcagatgatgatgcgatcacacactgcgcccatttacg

SEQ ID NO: 151600 - DNA, 391 bp, Zea mays
  Clone ID: MRT4577_69781C.1
acgttagatttgcggactccccttgcactacaagtacaaatgggaaggcacaggcaaccgaagattacctggtagaccgtggtttaatctggggaatggaggacagctctacgaagctgaaagaagtacccacttgggagagagttctaaagagcacagatcctaacagggatcaagagagcgatagagatgagtcggacgacgaagacgacgactgtaaagtgctgattcagcagattgtagagagaactaaacaaggttcccctgtacttgttaacgctcaaaaacttctgttttctgtggatcaatagggcacttcactatacaccatttatttttgagatatagcatgtagtgtcgaattattattgagaaaggaaaattatttatc

SEQ ID NO: 151601 - DNA, 172 bp, Zea mays
  Clone ID: MRT4577_69782C.1
aactaaaagatgatacatttctggaagacaattcatctgtaacaaattaatacaacgtaagtttgcacttactaagatggtgagttctgccaaacgaaattggaggggaaccttcaggaggcttcaggatttcctcgtcatagttaaccgacatgagatacaatccatgtgg

SEQ ID NO: 151602 - DNA, 613 bp, Zea mays
  Clone ID: MRT4577_69783C.1
gtgccgttttttttttggcattcagacattttggttcgttaaggtggactcaaatctgaagtctgaacaaaagaacaggaacgcaactaagctcgatgagttcgaagcaagcaaaagctgaacaccgatcatcagaaagacgcactaccctcgatcagttccaaagaatgcagaaaaagaaatgacgaaagaatccttgaagaacctctgcgagaactgatccagttccagaccggcccacaggacgtgtcaacagcgtcctatccaagcttgatcacgcgcgtgtcgactgcgatgaaggcgcctcctctactatctcgctgtccaccggaactgaagcggcctcggcgtccgtttctcgccgtgcctcggaagcagtgggtcctccaaatcccgcgtcgacgacgacttccgcggcaactgttgttgcgctgccgccgatgctttttgtgaaggtggtggcgacggtggcgctgtccgtttccacggcagcgcgtgtcgactgcgatgaaggcgcctcctctactatctcgtcgtccaccggaagcgtcgtcgacgtccgtgtctcgccgtgccccggaagaagcgctcgtgccgaattcctgcagcccgg

SEQ ID NO: 151603 - DNA, 166 bp, Zea mays
  Clone ID: MRT4577_69784C.1
acgaagctcgaattaggctcggctagatacaacctgttgtttggactcatgggcaggagcaaggacggcctatcattcttggccagaccaggacattcacgcggggaaagacaggcagactacgacatgtcgagcgtcatatagtggggcttgattgtccgcacga

SEQ ID NO: 151604 - DNA, 485 bp, Zea mays
  Clone ID: MRT4577_69785C.1
attctaccttaggcgcctatgctgtctatcgactattcgtgagctgccacaaaccgagagagtcgccgccatgaggcctctccggcggcggatcacgcgacaaacgcctatgagtcatgtccaatcagcaggactggccacacccactagcactgctgatgcaaggagaaaacggtgatacacacgacagacaagacctcctccggctacgactcaacatgggagctgatcaataattgcgaggaattgcgtgaacaacttggtcactcgattacagacgtcaccggggtacagcttagcccgcaggactactgaagatagtgtatgtcctccgactactcatcatcaaactggtacatcttaaactgctgctgctgcatctgcttcttccacgatgagtgctgatcgttgcagcatgcattccaaggcttcacaatattgcctcaacaactatgtcaatggacacactcagtacctcgtctacc

SEQ ID NO: 151605 - DNA, 609 bp, Zea mays
  Clone ID: MRT4577_69786C.1
ctgtatagcggacagccttcgtcctttttttttttatcacatttttttttttaggagaaacaagcagccaaccgctaacgaggaaggggctcatgagggaacatcaaaagccctcaccagaccctccaaaaaactgcaagtaaaaatgctttgctactggaactaaaaaaataacaagcttaatttatatatatcaaacaagatcttatctgcttgatcgtgtaacagacggtcagaatatctaaaatcactgaaaaaaactgcatgttacacaaaaacctctgccttcccttgactgcttgtatccagatcaccacagcactacttgcagaagcgaataggacgttactctgaatcccaaaataaaaagtataacccaacaaaagatgaataagagcaaactctgagataaaacatcacttatatgatatgaaaatctaccccctcgagatgaataatattgaacctcagatcggtgaaagcccagttccagagaggtgtggaataaatctatggaccgctaaccccctaggaaaaaggctaccctgaaaactagggaataaagatacaaaggaccccctttttttaaaaaggaacacaaccccccca

SEQ ID NO: 151606 - DNA, 235 bp, Zea mays
  Clone ID: MRT4577_69787C.1
gctcgccctgtcttgccatgcgtcctgctcgccctcagctttccatggagctcgccctggcctcagctccttgctcggcatggctactatgcgctccctcgccgcgaagctctctgcgcgcgctcagccgtggtacacgcgcgcggcctcctgctcgccggaatagttctcctttgcttgaccctgcgcgagctcctctgatgaccgatgctgctcggctccctgttggaacttc

SEQ ID NO: 151607 - DNA, 347 bp, Zea mays
  Clone ID: MRT4577_69788C.1
aaacgaaaatttggcccccctcctgtaaaacaacttttaaaacaatggacccccattttttacaaccaacctttttgggggaaaaaaaaaattgtccaaaccaaccggggaattattgaaataattcgaattaccccccggtttaccgggacagattaacacccctttttttcaaataaactttggggggaacccccttgggcccgggaatataggtgggtggcaaaaaaaaacaaagccccgattggacgggcgccgggataaagatgttctggcgcaaattttttttgcccctgttaccaaaaggggccgggatggggtgcacccctttcaaattttttattggc

SEQ ID NO: 151608 - DNA, 1315 bp, Zea mays
  Clone ID: MRT4577_69789C.1
ttctttttttcttttttttttttttttttttttttttttttttttttttttttgccagggaaagagaatgccaagtaaagataatgacaacgaacagttattggatttcacttctcattttcttcagaggctgcctttactacaaccgcaccatgcatgttgtgcagcttagttactggttattccaactacacaatcttctgttcaaccacaccgccccgtcagtcagccgctaatatttctctgtacaaccccaaaaaaaaatggatacggcactggcgtcttcggggaatctacaacaaaccccagaagcagcaaggcacagtagctaattttgttttgctgtgagataggatcaccaaagttgatgatgttttcagttaacaatggactcgtcagcagcaattgcccgcttcccagactggcagcagaggcccatcagaagctaatgacatgctctcccctttctctaagcgtcacaagccctcccatggaaagaaacggtcaagcttttcctcacttgtccacctttcttcctgtgaccacacaatcaaacagctctcctgaaccatgatgttcgaacagcttgccggatgtggcgctcgttcttctgcaacagttcatcgaccttgtgcgactgggacaacaaagggcccgagtactcgaccttctcttcttgattatgaccgccctggagcttgaagccattcttcgatgagagagtacccccaaggaacatggcgttcgagaagttatgggagtggtaagtgtcgcaagaatcgaacgaatctggacgctctagctgtgaccacttcttcaggactgcacgcttcgccgcatcgtgaggcccccggtctcggactctggaaccgacgtgtgatactgatacaggtatgtctctgctatgcagctccctaaggccagcattctctttagcttgggtattacatccctgaacagcatcagcaggaaactggccccttgagctagatctggtccgtgatctagcaaaggaacggtcctcctgtggtcttctggcccatgcaaagccactagatgaagaaacactcaatggcccggagaaaggtatttgctctcgtgattcattcttaacgtggcgagcactctctttaacttgagccgctgacactggttgtatgtccacaaatagcctagcatcgccattcagtttcgcacggtcctgtgttgtaccatctttggttgcattcacattagttttggatccccctgttctacttattatctgcttagggaatgcactaggttctctctcgagccgaattccgagcttacg

SEQ ID NO: 151609 - DNA, 546 bp, Zea mays
  Clone ID: MRT4577_6978C.1
gttcccttcaattcatctacatttgcgaacaaagctcggcagtagtttagctactgaatctagctgcaggagcatgatgttccagggcaccaaagggatcacgctgctgcagccaagcctccggggccagtcggaaaggcagcagggcttcttcacacggcctccagcgcagggcttcttcaccaccgcagcacgtcggaccacggccggcttcccgacgccgtgcagcaggccagggaacggctccttcagaggctcggcagcgtggacctggtcctggcgggacgaaggtccttgtgcgttaaccaaactcttattagctgcacgtaatctggcaacacactcatcaatctacatctacgcttgctgtgtgtgctctcgtccgttgcttgcaggcacaagacatggccgccgcagacactctgggctggagctggaggactcgctcgccccgtcgttgacgcctcttcgggcggcggtcaaaccagctgcttccagttccagttccagcccggtgaacgtgaacccatccctgtgttccccaaa

SEQ ID NO: 151610 - DNA, 520 bp, Zea mays
  Clone ID: MRT4577_69790C.1
aaaaaaaaaaaaaaaaaaaaaaaaaaaaaaaaaaaaaaaaaaaaaaaaaaaaaaaaaaaaaaaaaaaaaaaaaaaaaaaaaaaaaaaaaaaaattttttttaaaaaaaaaaaaaaaaaaaaaatttttttccctccccggggggccttttaaaggggcattttttgaaattttccttccccttgggggccttttgaccttccttttaggggccccatttccccttttggggggtgtttttccatttcctggcccgggtttttccacctttgggcttggaaaacccttgggtttccccattttattccctttgaaacccttccccttttccccatttgggttttttccaaaaggcccccccccattcccctttccaaaaatttcccccccctaattggaaattggcccccccttttaccggccctttaaccccggggggtggggggtttccccccaggggaccctttccttttgccaggcccttagcccccgttcttttcgtttcttccctttcttttttc

SEQ ID NO: 151611 - DNA, 116 bp, Zea mays
  Clone ID: MRT4577_69791C.1
cacgctgatattcgactatcacacgcagcatggcattgaaatccgaattgccacgattttcaacacctatgggccaacgatgaacattgacaattgccgcgttgctagcaacttca

SEQ ID NO: 151612 - DNA, 477 bp, Zea mays
  unsure (1)..(477): unsure at all n locations
  Clone ID: MRT4577_69792C.1
tttttaatcttttttttttttttttttttttttcgtgtggttttttttttttttggttttttttttttttttgatttcaagttttcaaccggttttgaaattattatgtgggcagggcatgctatccgccccgccttttgtctgtccaaaattcttgggtccaaaaaacggggtatacacactaccgggggggctcatcctgtcctcaaccgggggggggggccccatttttttttgggtttctcaggacatgtgaaacaattaccaccgggggccgaaaaaccttccctcaaagttgggtgtaaaaaaggggcgggtttgtggaaaggggaacgatagccccatgggggacgggggttccttggcccgccaaagggttttttgcttggacctttttcaggttttttttgggaagtttnagtgctccagcgcaggcttttttaccggttaagcccccttttacgtcggggaatatcc

SEQ ID NO: 151613 - DNA, 420 bp, Zea mays
  Clone ID: MRT4577_69793C.1
ccacttttccctcctccttccaccggcaatccactcctcctcgtcctcctcctccttccgcctcccaatcactccgtgtgtgtgtatatataccacagaacccctcaattccgctcccaaagaccaaagttcctccactagccaagctagtcgctactcccaatctcagagccaagaacagtggtactagccaagaaagctggggaacaggctgcttcctgggacgaggagcaggaagacaagggatctggagccggagccccgatggcggtgacgggaacctcggtagcagcggcggcgacgatgctggcggcggcggcggcaatcttcatcaccttcgtcatctgcttctacctcttcctgtgcgcgaagcggtaccgcggggcccgcccgaccattggcggcgacagggcccggccc

SEQ ID NO: 151614 - DNA, 609 bp, Zea mays
  Clone ID: MRT4577_69794C.1
cgcccttaagcagtggtaacaacgcagagtacttttttttttttttttttttttttttttttggaactgggaaaagagctgttgtagcatctgttgcacgtgccaatcgtggagtaagtggatgttgtggtgatcagttgattataatctttgagatatttggatgtggctaataatgctcttatgaaacttattgcagaaaattgatgcagctttggaagatctttctgtcgaatcagcagtggatctgcagaaagttcttaaaacaagtacatttacttcaaggaaggatgcattcaacacccttttggctaacattcatttgtttcaaagtcgactgggagccatgctatttcttatctctgctttgctttcacgagaattagtatgtgttcgttagtactaaagttctcaacttgctttcatgaggattggtcccctcttgacccaatcttatgttctagttgaaaacatagtttttcaatcttaagttctagtggaaaacaaagttttcatttgttaaggccctgtttgtttccttccaggattatataatctagcttatggattatataagcacccccggtactctgcgttgttaccactgct

SEQ ID NO: 151615 - DNA, 1146 bp, Zea mays
  Clone ID: MRT4577_69795C.1
gagctaggctttctgtgtctttgattcggtgatctctgttagtacttcagcactggaagttccctaaggcaggcagttgaagtttactgtctttttacactcactggcttaagtctcccgcggcacatgcacgatcttatgacacaaccactgcctttttaatataaaatggtacaaaggagcccctgaagtggaaagtcaagttcaaaattgcacttggaattgctgaagggctgctttatctacatgaaggctgccatcgccgcataattcacagggacgtcaaggcatctaatatccttctaactgaagactaccaacctcagatatcagattttgggcttgcaaagtggctccctgacaaattgacccatcatgttgtgtatcccattgaaggcacattcggcgagcatctatgcgttcgggttactaggacatgggacttctatgatcctggagatgataaaaaacttctgcattctgatcttgtactgctcgatgaggaggttcataaagcatggttaccaccttggctagcggcacaatatgctcattacgtggattgacggagaggaagcaaaaatgactgtatgggagaatatgcagaaagctgaagcagaagcagccatacaaaaccttgtgataaaacttgaaaagaaaaggccatactcgctggagaggattttcaacacccttaggtctggctctcggaagacacaggtggtacgcagtacatcaaccgcaaatcagaatcagcatatttccagaactatcaaaacggcgccaaacctcagcaagaacggtcaaatgagttcattgagtggatgcttcagacaggatctatagcatggatcataatctggattgtccttaagtttttattgtgctaggggaacataagaaagtatgtagagcaaaatgagaggagctgttgttaccctcaattctttgtgattattgtgctagagtgatgtagttgttggcttttgaacaatagctagagtgatatgaaacattagtgatctagttgtgaatgatattataattgtgatgcttttgtgaatatataattatggtgcttttgtgtttatgcgatggatctatgactgtggtatactgagcaaaaaaaaaaaaaaaaaagcggcc

SEQ ID NO: 151616 - DNA, 246 bp, Zea mays
  Clone ID: MRT4577_69796C.1
catatacacaggccatacatcccaagatacggcaattaactctgtacactcaccagactatagcttagcgccgtatactcttactcactattaaaccactgcgggcacacaatgcagagctaacgaaagatacatgcatattaaagccacaccactcacgagaccaaacacacctgttacatgactgagatgaacatgagcaacagactcatgagaacccacagagacacacagctcgtgatccta

SEQ ID NO: 151617 - DNA, 423 bp, Zea mays
  unsure (1)..(423): unsure at all n locations
  Clone ID: MRT4577_69797C.1
ggcctcacgctttggtttctttcaccttgttgtcttgcctgcaaaagattttatcacttgcttaaaagtaacaagggagaattctactggtggttccctgtcctgttagtgacttcaaattcatgataggataggaaaataataggcgcgaagtggtacatcaaagggtacgaagccgagtacgggaagatgaacaccaccgacatctacgagttcatgtccgcgagagacgccgtcgggcatggcacgcacacagnctccaccgncgctggtgctctggtagccggtgcaagcttcaaggggactcgccggtggcgtcgcagggggaggggcacccagggcgaggctcgcggtctacaaagtgtgctgggccaccggagactgcacttcggagattcctcgctgcttcacgacgcgatacat

SEQ ID NO: 151618 - DNA, 316 bp, Zea mays
  Clone ID: MRT4577_69798C.1
gggggctaatactaatgggaggcgtatagacaactcgatccaaatcctaaggaagtcttcaatttaccgagtgggtacattaccagaaaatagctagctaaggctgcacttatagaaggggacacttaaaaaggtatcaagtcattcttctttggatctggcttcttcggtccttcctgggagctgcatacctgcttctttggcgaatatcatcttgtccagatcatcaaggatatgatcatccccacctgaccttgttctcgcggcacatggttttcttacaagggcgtcttcattgaccgcagctgtcagatct

SEQ ID NO: 151619 - DNA, 416 bp, Zea mays
  unsure (1)..(416): unsure at all n locations
  Clone ID: MRT4577_69799C.1
tacgtgagctcnaattcgtttcgagctaattgttcacctaaaaacaacaaaccggggggtgcttttcaaggtgtttttgtgatgataaactangcgtnnataaaaaaatccactaaattacatctgattaaattactgcagctttggcggtatccatttccattttgtctccaagtaacaaacttgatcatcaatcagatgacaccacaccactcttacttcataaaatccaacaatctcctcactctgaatttcctttcaatgtacttactaaagctcatagaatcttctattgctcatggtcaaataaatagtacatcgcacaacactaaaccacaaatcatcctttgtttgaaatatccaatgatattgaagtccaagccaatcttacagtagcaaattcaatacccatggaa

SEQ ID NO: 151620 - DNA, 609 bp, Zea mays
  Clone ID: MRT4577_6979C.1
taggggccttttttttttttttttttctttttttttttttttttttttttttttttttttttttttttttttttttttttttttttttttgcccacaaatcccatcttttttcccacaggtcttccaaaggatttacattgggagggagcaacggggggacaaccaaaaaaaacttggccattttccccccaaaattataaaaaagggggaaaaatggcctggaacccaaatggggggggaaaaaaaattcggggaaccccaaagggaaaggggaaaggagggggggaccaatatcatttcaaaaattaaccccccccaggggtggcaccaaatgggaccgggggaacaaaacaaaaaaaccccgaaattacttacgggggggggaaaaaatttggggtgggaaaattggggttaaaggttatcaaaccaaatttatttcttggatctggtcgggggggccattcaaaacggcagggaataattggacccccgggagggcggtggctttcccagggggccccggccccaacctgataaccggtttgggggaatctggtccccggccaccaacaaaaaccaagggttccccatgcctcccaacatttggg

SEQ ID NO: 151621 - DNA, 608 bp, Zea mays
  Clone ID: MRT4577_697C.1
gacgacttgtttcattgattcttgaagagatcgagcttcttttgcaccacaaggtcgaggatgtcttgcaactgcggatcaagctgcggctgcggctcaagctgcaagtgcggcaagaagtaccctgacctggaggagacgagcaccgccgcgcaggccaccgtcgtcctcggcgtggccccggagaagaaggccgcgcccgagttcgtcgaggccgcggcggagtccggcgaggccgcccacgcctgcggctgcggtagcagctgcaagtgcgacccctgcaactgctgatcacatcgatcgacgaccatggatatgattattatctatctagcttgtggtggtggttgaacaataataagcgaggccgagctggctgccatacataggtattgtgtggtgtgtgagagagagagagaaacagagttcttcagtttgctatctctctctctgcatgtttggcgtcagtctttgtgctcatgtacgtgtgtctacatgcatgttggttgatccgattgcgtctgctgtaaccatatattaattggtccacgatgatatgatttgatactatatatatatatatactctaaaaccggacttcttattat

SEQ ID NO: 151622 - DNA, 227 bp, Zea mays
  unsure (1)..(227): unsure at all n locations
  Clone ID: MRT4577_69800C.1
aggcgttgaccgcaccgttgcattcnacaaggtatcttcgaactcnggtcggcatcacagtagaccaagatnatgcgaaggttggtacagcgccganagtgtgaacngganagcttcggcgtacagcaagaagtgaaccgacttannggtgaagngctatttagacctcggcaggttactgngnggttattatccagtgtanggggcatgagtgtnttttgtntggg

SEQ ID NO: 151623 - DNA, 187 bp, Zea mays
  Clone ID: MRT4577_69801C.1
gtcagctccgcgaggtgctcaaagtctgcgcgggcacgcagagcgacaaccttcttcagggcaagggctacggtgccgtgccgagtgtgccggcccttccgcttgtgccttgtggttggggggttaaacgggattgtaaactggaaccaacctgccaaccaaccaaaggcaaaaactgcccccccgg

SEQ ID NO: 151624 - DNA, 373 bp, Zea mays
  Clone ID: MRT4577_69802C.1
agcaggccaacgagcaccaccaagagctgcgagtccaaatcgatcagcccgaccactccagctcgatggaactggaacggcgacgtcggcaggttcggcaccacggagcacgggcacagaacttccggcgggtggcttccatggactcgcggtcgccgccgccggtgtcagccgaggtcgatcctgaaggcgagccggccggcggcgaggagcaggggacatgcggtgctgtttgctgcgaggtgtcaccagagcctgctgagctgaagaggtcatggtccgccagcagccggtggacgctcctctagcggcattgccggcacgcagctcgctcctgccgctgtgatgggacggaagatctgtatctcgcttt

SEQ ID NO: 151625 - DNA, 796 bp, Zea mays
  Clone ID: MRT4577_69803C.1
gatcaaaccaatttctagtggaattgaagggatcagtatagattttagtggcattggagagattaactttaaattgaactaacgacgttagcttcgaactaatagtaatgtcattcaagggattaaaatttaaatttgatagcattgaagggaagctttaaattctgatggcattgaaaggattagtataaatttgaatggcattgaagagattttctcggctggggtggacgttcgaccgcgcggaggcgaatcggatgatcgacgcgctctcgcactgcctcaacacgttccggaactacaaggagagctggcgcggcctggaggcgcgcggcatggcgcaggacctcagctgggaccacgccgccgtgctgtatgaggacgtgctcgtcaaggccaagtaccagtggtaagtgagttacgccgacgcccttcatgtcgcgggacagtcctggacgccctgggcactgcgtgctcttctcacgcggctttgctgcgtgcggcgcatttgctcaattggcgcggggcgatggtggttggcctacgtcggcttcggctaggtgccttcggattttcagcttcttaccaccaaaacaccaaaagctgctgcggactattaaacgctcagtttttcagttagcttctataaaaatcgatcgtaaaaatcatctataatcaacataaacacataatggacggagtacttttaataatagaaatctatcgctttgtagatcttaccctatggacaccttcatcttgaaaattgtttggttgaaataacagtgagttgtat

SEQ ID NO: 151626 - DNA, 574 bp, Zea mays
  unsure (1)..(574): unsure at all n locations
  Clone ID: MRT4577_69804C.1
gagcaacgaccgagccggcgcggcggaggggnccncccccnccnnccgcgaccgcaacaaggacggcgccaccnaccccnccgagacacaccaagggncccgagcnaccgggggcggcgncgcccngncngcngcngcngccgccnncgncaacggnggaccnggacccaagaccggacgggagaacgagaagccngcgccnnncaagnncccnancnacgngaagaacanccacaggggcaagcacggcagcganncgggcgncnacgaaaccaacggaagaaaagnnccngaaaagnncgaggagaaaancaagaagnangcccaaacgaggccngangcccnnacaggcaaagagcgacaggagaagangaaagcaaacagagaacccaaggacnngaaaggacggcngggnggcnncacagagnggaaggngcngnacncccngngcaaagacaaggacgggnnncnccacaaagacaccgncagggcggncaacganggcagccngnnngaaaggggggagcaagagaggaacccaaagaaagaggcgagnaagaagaaaagacgagaa

SEQ ID NO: 151627 - DNA, 500 bp, Zea mays
  unsure (1)..(500): unsure at all n locations
  Clone ID: MRT4577_69805C.1
gggggggaaggataaccttggttggtattacccgcacatgggaaaaacaattcggcgcagaaaaagaatttaaaatccacgacatgcaaaagctcgacaagacgtaccggccaacataaatggggggcagtctaggccagccagagggcttgatttgaaaaaagaaaattaagcaaaagtccatgcctaccccagggcgaaagcagcaagggagcaccccaaccaaaaaaaaaccaccacggggacctacgatacgaggaccaaacaagcaagcttgcatgtgggaaccatgcattttattggggggacggggggagccgtattcacttgaaaaactcgatggcccaagcgttggcgtaaatgtagggggccttaaacccggaaaaaccggcccccttggggaactcggggaacttgggcttgtaccgtttcttgccccctgggtttgtgccccaacataataattttcnacgtggaacaccccctgcgccttggggggg

SEQ ID NO: 151628 - DNA, 544 bp, Zea mays
  Clone ID: MRT4577_69806C.1
acggcacactggggcgggacgcatgcgcgcgcggaacggagtcgtgttcctattcccacaccaatgtcgtcgtgtcttcagtaatcccccctagcggtaccccatggggacgctagtacaacttactaatctcacgcatcagttgacttcaacgtgctcagtcgccagaatcgccagtggtacgagacgagaagtgtaggcgcagcggacgaccctttttctcccctttctttcttacgaataggggacacagcaccacccggagtgtggtatacaagccttgcaggctaaaggttctcgcaaggacatgagctggataggggtcagatcggcaaagagggtacccctccttacccactccgtcgtaatgtgttcgagaatctggtgctccaggccttttgaaggggtcgggacgcttcgtggacgaagaagatcgtggtccccactttgtagttcccgaccactacttaaaggattgttctaccctacgtccaaaccgccagaatagctttgcgtgcttacaatggtaacctacgctgccaat

SEQ ID NO: 151629 - DNA, 558 bp, Zea mays
  Clone ID: MRT4577_69807C.1
ccggccgggctgcaaaccctttccacagcatccgcatgcaactatacctgcctttctctcgtccctggctgcgggaagatgatgacgagcttctactgcgaggacagggaccgatgtcaaccaccgaacgagagtgaacggcctactgcgccagtttaaacgctcggagaacatggagcttactcagaggcgacacagtttgctagactgcgagggtaaggaggcccctcgttatgaccgctacagctgccactacatcaatactgcatgtaggatacacaaaaagctacttgatcacaaggcgttgacagttgcctcttccagattatatatactaggcggcaaaggaatggcttacgctcacctaactgatgcacgagcacgtggcgccattaaacgcaacatgctgcagcatctccaggagatgctcatcattgatgtcgatcccaatggtggacggctgcatcacctaccacagaaggtgcgatctggaccaggacggctgacaagggttgctagctgaaacttgagcaacctgcatacaggttcctatgatgt

SEQ ID NO: 151630 - DNA, 330 bp, Zea mays
  Clone ID: MRT4577_69808C.1
ctgtgatgagttgataccagagtatctcaattttatccgtggtgtagttgactctgaggatctgcccctgaacatctcccgagacattgtctagcagagcaaaatcttgaaagtcattcgcaaaaacattgttaagaagtgccttgagctcttctctgagctctcagaagacaaggagaattacaagatattctatgaggcattctctaaaaatctcaagcttggaatccacgaagactccactaaccgccgccgcctgtctgagctgctgcgctatcatacctcccagtctggagatgagatgacatctctgtcagatatgtttctcgc

SEQ ID NO: 151631 - DNA, 289 bp, Zea mays
  Clone ID: MRT4577_69809C.1
gggggcctctctaactataggggtcccccccgctctggaagtaattcggcaagaggctcactcacacagcaaatacccacagtgcacacttgccagcaagaacctagtagatggaaaaatccgaaagatcccgatcattgccgacctgacgggcagcatcaagaatgcgcacctcaagggcaacctggcgctcatgcgcaagatcgtgctcggctttaacggcaccaggatgggcgcatccctcatggacggcctctgcgagttccttcgccgcggatgcacctgccaa

SEQ ID NO: 151632 - DNA, 405 bp, Zea mays
  Clone ID: MRT4577_6980C.1
ggtaccctcgatgttcggccgggaatcttcccccatcagtacccacctctccaagtggcaatcaccatgggagatcaatctggctctagaaatggaccacaacagaagtacgtttcaggagcccagaatgcctgggatatgttctctgatgagctgtcacagaaacacatcactactggttctggtgacctcaatgacatacttggtggcgggattcactgcaaagaagttactgagatcggattcaactagcaatcaatgtacaaatcccagtggaatgtggtggccttggtgggaaagcagtttatatagatacagagggcagtttcatggttgaacgtgtctaccagattgctgaagggtgtattagggacatactggagcactttccgcacagccatgaga

SEQ ID NO: 151633 - DNA, 1133 bp, Zea mays
  Clone ID: MRT4577_69810C.1
tcgttcacgcgttcggccactcgtccgtagacgttcaacgacggtggggacacgccggtgcacgtgtgcgcccgccatctacgactaggccatgtttcttcaatagatccgtcgtcgtgggctactacaataaccgagttaagcggaaagtcgcagtcaaagttcttggttttgcctgcattcacatctgaatcgagtacatgtgcatacacgcgtaccaaccttggattcctgtactgggtatgtatccaaagcccttaaatcttgctctgaggccaatgagaatgctacaactatgatatttatctatggtccctcgccggccgggcccccgcgcctcgcgcaatagccgtcgcacatgccagccccggcgccgtccccgccaccggcctcgcgcaacagccgccgcgccatcccgaccctgacccttgcccctgccgtccatgccaccggcctggcgtaagagccgccgcacattccgcacatgccagccccggcctcgcgcccgcggcattcgcgcccgactgttgtgggaggcaccgtcccatccgaatctcctcccctctccctcagatataagggttcgtcctccgcggccgtatgggaagattgtgcgtagacgttcaacgacggtggggacacgccgctgcaggtgtgcgcccgccatctacgacgaggccatgtttcttcaatagatccgtcgtcgtgggctactacaagaaccgcgtcaaggtagagtatcccgcttgttgctttatgctaccgctgcatgcagtctaggtgttcagtgaaatgtcaatgcaattttgctattgttttgcgattgattgctatgtgctagcgtctgttgtatggtggtgagttacgaggccattgagttccttctgtcgcggaaggttacagtcaaagttttgtgattgactgctatgtgctagcttctgttgggtctgatcaaaatgaacaataactgattttgtcagtaaaaaaaaaaaacagtttgcggccttggttttgccggcattcaaatctgaagcgagtgcaagtgcattcccgcctaccaaccgtgaattccttgactggttatgtataaaaagcccttaaatcttcctttggtataaaacgaagattaccat

SEQ ID NO: 151634 - DNA, 368 bp, Zea mays
  Clone ID: MRT4577_69811C.1
acggacgagtgggtcctgaactacactctttcctttcagtaccattctttgctgcagatactgaactgtgttgcaggattgcgtgaatatttttcccaaacagatgaaatccatataatcccaagaattcatgtaatggaaaccatgtttgatgtggattcaaagccaaaatttcataagcttcaagaagttgaaaccaaggaaaataaaaacatgggaatcattgatgaagaatcagatgatgatgatgattatcaagttcctgaagctaatatagagaccttgaccaaaaccaatatacaggaagacccaaacacatctgacaatgataacaagcacacagatgagcctccagaaaaaattgattt

SEQ ID NO: 151635 - DNA, 485 bp, Zea mays
  Clone ID: MRT4577_69812C.1
gaaaaatgaggtggtgatggattaactcactttattccacaaaccaaacaaaaaagtgaggagttagaagatgatggactacctcattccctcagaccaaacatcccatacatgtaccacgtttgcttgcagtcctagtttattaacctttattaggaagaaataaactaagtttgggtgccgaaacagaccacgaccactccattttcaagcaccaaactgtatcagcttctccaggttcatatatgacgatcctccatgctccagagcagtctttgatttggccttcagttccttagctttcgtcttccttgcctccccatccgctcctccatccatgagcatatccaaggcttgcttcacctgttccattcccacatctgcgtccgccttaccaccgccgtctttggcaccggtcagcacgctctccgtgggcttcgtcacgccgacagacactccgatgccaagcacgtggacgatcaact

SEQ ID NO: 151636 - DNA, 620 bp, Zea mays
  Clone ID: MRT4577_69813C.1
gccggccgggccgggaaccttccctcatcctgtcatccaccctcgcccaaccgacggctaccggttgtaagattggaatcgtttgatggccgccgccgccgcttcgcctccggttcctttaggacccgatgcctccgatctactggacggggatctccgtctcaagcccgctgtggcaatctcatgggattccgaaggtacatatctctatctgcttaccctcggcctttctttttacacttgcgttgcttacacatctctgtctttaccttgggcctttctacactttttgcttgctgctctctcccgcggtgacctgcatgttcatggagtggtcttgtggtgtagaaaagtagatagaatgccagggtattaatgcaaggcgccaagttattacacgaagctataccccttgctgtgcggttcgaaaaagaaccttcctcctcgaaggacaaagccacaaaggaataacattcctttcactgctctcttctttccttttgaaagtttggaagcctagacacatttctgtgtgattacctgttacctttctacactgcttactgtttcccagaatcccaatgatttgtatgtgaaaaaaaaaaaaaaaaaggccccta

SEQ ID NO: 151637 - DNA, 302 bp, Zea mays
  Clone ID: MRT4577_69814C.1
atcgccaacattactttttctattcctcgcaacttggacccatgggttgcctaatattacgtgtgagtgcgcctcctcatggcctaccctacggcaggtgatgaacccctctcgcctcactttgcatgttcggcggctgatgctacgtgcgcaatgccctgaaccccagggcactgtgccggatccagacatatattgcgggttttgcccggagctcgataaggaccaggccgtcggcacggtgggacaccaccagcgccactggcaacgtcgggacacgggtccggaagggtggccgcccc

SEQ ID NO: 151638 - DNA, 254 bp, Zea mays
  Clone ID: MRT4577_69815C.1
gcatcctcacatcaagctccattttttccttaggattaactaagatcaaatgcttgcaggtataacagcatccatatatacatagtccatgctgatggatacatcgcgttgttggagccgaggatgaacaagccacttacaactagctcctagagaacttcttatcaacatcccggaagggcctcaactaaagaatcaaactaaattgaaacatgcggactagggtaaacttcacgttagcgaacttgttaact

SEQ ID NO: 151639 - DNA, 813 bp, Zea mays
  unsure (1)..(813): unsure at all n locations
  Clone ID: MRT4577_69816C.1
actcccacccctagccgtcactttctttttctccctgtcttcttctcccacacagcagcagcccatgccgtccttcctctggttctgcacggcgaccagcagggagctcagctccttcttgccatggcgctaggcacccatgtagcagggacagcgcccttcctccctgctcctcccttgcgcaggcctgcttcagccgagtccccttcttcatggcattcggcagcagggagactttcttcccacggctgcagcaagcagctctgctcgcctcctccccatggtgcctccacctccctgcatgctctctgccccttctgtcttggcgagctgaagctctcccatggtgtggccgagcagcagctccccctcccctcgcccctgctctcctctggtcggaccgacccccagttcgagcgggtgagctgtcgtcgcccatggcgcctagcgcagggagctccctccctctccaatgtagcagcacgtgagctcgcccccttcctccttttccctagtgcggcagcagggagcccctgcttggacagcagccatggcatccaagttctctgcgcggcgatgccggtccaaaaacagcagccccggatcccctccgcatcgcgtgcttcactcgatctgcgcagtctcgacccacgccgtcgcgttggtgtttgggggacagcccatgccgcgtcgtcgatctgcgcagatcgaccgtctacgcgtctcacgtcgccggatctgcgcagccccatccgcgacgncgtcgaaacccgtgctagccgtcaattgccattcgtcgcgcacgcgtgttcg

SEQ ID NO: 151640 - DNA, 1375 bp, Zea mays
  Clone ID: MRT4577_69817C.1
cgtgcggggttcgagaacttcccattccgatcccatcagccccgtcgctgtctctccaggatctggagaccctacccgcctgagccctcagccggccgcgcggtgcggcaccgcaccaccgccaccgagccacgaacccgccggagtaccgacccgcctgcgccctccgctggccgtgcggcgtggcagcgcaccacctacggcgggctgcggcaccgccccggccctcgcaccagttccgcggcgacgtggtccagcagcaccgccaggccgcctacggccatttcactcgcggcttctgagcatctacctgcacttcttcaattacctgcagctttcatcgtatttcctttgcattgcataccgtgcagccacctctgcacatgatgtttcggatgttatcttattattaaaaaactagatttactcatgtttttcttcctctgtcattattgctgatttggtaactaatctttctgtggggtttatgcactgttaatttttccctgtcattttaggtctaatttgtattcgacactctcatcgtagtaactgcctcataggttttgtgccctctgtatacatctctatcggctccatgtccaaggcactgcaccacccttttgttatcaggttttaaaccggcttttggaattgtacacatggatcaatttgtgggagtggaaattagagcagatttctgtgcttttttttttccagcacatctgccagactagtatcatcagcaattgtccatcgcagcatagatctctttctcatcgtcaatggaggtgggtatagtaccagacaacatggcaacgacagacatgccaagctccggcatcctgctgacgcctgctggggccatcagcctgttctcgtcgggtcctccgctccagatgccgcttcacttggcctccatggacagggaggccagggtgctgaggtacagggagaagaagaagagcaggaagtttgagaagaccatacggtatgcaacgaggaagacgtacgcagaagcacggccgaggatcaagggacgcttcgcgaaaagatcgtctgatatggatgtcgaagtggatcagatgttctcagctgcggctctgtcgtctgatggtagctatggtaccgttccatggttctgaaggaactttagtgagacattatatgtatcatacagtataataattgtaacatgcgttgaccatatatagtggtaaggtcaagtacaagtagttctaggaaaccgatggtaatgagtgatattgtgtttgttttgaaagataaatgaacaaatatcttagcatttgagttttggtttgtaattgcatgcacatatcaggtctatacagaattttcagtcacttaaacaaaa

SEQ ID NO: 151641 - DNA, 856 bp, Zea mays
  Clone ID: MRT4577_69818C.1
ccacgcgtccggcaagccctcagccctccacgtcccgtcctcgcttccaccttattcgctatggccatcctccttcctccaccgccaatcccgtggcgatctctttcggccatccaccgcacccgatcctcccacctcctttcccgagaggctcttcccccgcgagatttgcactaccgcgtcggtgccaccgccgccacagcacccgtggcagcagcttgccatggcgctgccggccccctccgccccgccgcaggtcaccgcaagacggcgctgcggagtgcctggggtgcgcacgggttgttttggcgaccccgagatgaagcggcggcggcgggtggcgggctacaaggcgtacgcggtggggggcaaggtgaaggcgtccctccgccggggcctcaggtggttcaagcgcaaatgctcccgcatcttgaatatctgaccaccgtgcggcggcgcgcggcggcgttctcccactcttcttggaccgcaaggccgctcttttaccgcaacaattatggcatgcactcggcggtgcattgccaatttatgcattgatcaagaattcgcgtgattgaatgtacctctctgttcggaaagatcttgtttgtgcttccaagatttttatttccagaggctgcagatttcaacggttatcaataatccttgtttccagactacatgcttcctagtcttctagaatgcgtaccatttcggtcattgaagttcataattcaaacgcttgccctcattgaatttgtaatcacaatcaacagttgaagacaataatgttgtcttgttttcctatatatattcagattcgattgaaaaaaaaaaaaaaaaaaatttgcggccg

SEQ ID NO: 151642 - DNA, 203 bp, Zea mays
  Clone ID: MRT4577_69819C.1
gtacaaggcatgcagtatttgtacgaaccatagcgccagagcaccctcgagaatgggtgtggacctctcgtcccccgggaggtattagatgaccatgcgcgctgcgcccaaatgcgtccatgtgtaccttaggcttctcgtcacagctctacccgtttctatgtaccgacgaccaagcatcttttcaacgctgtcattctgaa

SEQ ID NO: 151643 - DNA, 491 bp, Zea mays
  Clone ID: MRT4577_6981C.1
ggaaccgggtcccccctcaattttttttttttttttttttttttttttttttttctgtttttttttgtttttgtttttatttggtggttgtttcttttttatttttccatggtttgcgggtgcttcttcttgttttatgctaaatttcttccttgccttctacttctttttattttgggaaacaccgcatgcacacccacactttcttcgaccaaaaaaagcaaaaaacaccagaaaacagggggggggggctttttttagtgccccacccccccaccaaggaggggcggggaaccccaaacaaacccctggggagacccctgccgaaggggcaaaaaaaaaacggcccacgccaaaaggggggggaaaacagcccccaacctaaaagcaggttctaccggggcgaaagggaaacaaacccccccctcccccaagcgcgccctggacggcacgggccacacggccaattgcaccccgtttatttatgagga

SEQ ID NO: 151644 - DNA, 2743 bp, Zea mays
  Clone ID: MRT4577_69820C.1
tcattatcgcgggcggccgctcgcgatctagctcaacttgatgaattgcttaaagaagctagtaagcaggtatgtcaatatgaaggaaatgtagcagaattttagagttaacaaagagaatttaacttaccatgtgaccagaaattgtacaagtggcttaattgtatggatcctgtagttatgcaaaggatacagtccaaaaattagtacaatcagaggaacgaaatcctcttttgattttgcatgtgctgttatttcaagtataaattattgactattagcagtttggtttgtgatgtatttttttttatatacaattgatgttagtatgagcatctgctgactatgactaaagtcaaatggtgacttctcttaccagtcaactattctgtctctaaacattttctgttttcgttattgttgaggaaggtccgaaatccagacaatgggacacagagtctctatgatttgtggatgtcttctaacagttctcctttgattggaagattaggaggtggaagttcggattattctgcatttgttcaacacattggtattccatcagtggacatggcgattgggtcagactatccggtctatcatagcttgtatgatgacttcatatggatggaaaagtttggagatcccttgttccagaggcatgttgcagctgcaagcatgtgggggcttgttgctcttaggctctcagatgaggagatcctacccttcaactacagcaattatgccacagagcttgagaatggagcattgggcataagtgaaagagtacagggaatgcctgtcagcttatcacccctgcacaagtcaatcaaagagttcagaaaggcagttgcaaaagtggattctgaattgaaggctctacagacatggaaaatttggtccccatggagaaacaaccccttaaaggtcagagacatcaatgatcggttgatgatgaccgaacgggcattcacagaccgggaaggactgtctggacggccatggtacaaacacctgatttacgcaccttcgctgcacaacgattacggggctgaagtgtatccaggcattggtgacgccattgagagggtgaagaaaacaaatacttctgaatccttgcaatctatacaacatgagatttacagggtctctcgagtcataaaccaggcagcgcttgttttaagtggagggctcacgtgaatgcagtagctggactgatacagtattgcatagtatggtgatattaaggggaaaaataaatttcactggcagtcattacatttgtgccgagttcttattttgattctggtacctataaattgcatattactctttccaaacttatccggttcctattttaaatcgtattctcaaaatttgtgatgggttcttaaatcaaatttcaataaacactcggctccataatctaacatgcaggtatgtaataattggaaatcaccgtgatgcatggacatttggggcagttgatccgaacagcgggacagcatccttgcttgagctagctcaacggttgtctgagctgcaaaagaagggctggagacctcgacggaccatcatcttgtgcaactgggatgccgaagatggatacaggatccactgaatgggtcgaggagaacagggcaatgctaacttcaagaactgttgcttacctaaatgttgattctgcagtggctggtcatggattttatgcgtctgcaactcctcaacttgatgaattgcttaaagaagctagtaagcaggtccgaaatccagacaatgggacacagagtctctatgatttgtggatgtcttctaacagttctcctttgattggaagattaggaggtggaagttcggattattctgcatttgttcaacacattggtattccatcagtggacatggcgattgggtcagactatccggtctatcatagcttgtatgatgacttcatatggatggaaaagtttggagatcccttgttccagaggcatgttgcagctgcaagcatgtgggggcttgttgctcttaggctctcagatgaggagatcctacccttcaactacagcaattatgccacagagcttgagaatggagcattgggcataagtgaaagagtacagggaatgcctgtcagcttatcacccctgcacaagtcaatcaaagagttcagaaaggcagttgcaaaagtggattctgaattgaaggctctacagacatggaaaatttggtccccatggagaaacaaccccttaaaggtcagagacatcaatgatcggttgatgatgaccgaacgggcattcacagaccgggaaggactgtctggacggccatggtacaaacacctgatttacgcaccttcgctgcacaacgattacggggctgaagtgtatccaggcattggtgacgccattgagagggtgaagaaaacaaatacttctgaatccttgcaatctatacaacatgagatttacagggtctctcgagtcataaaccaggcagcgcttgttttaagtggagggctcacgtgagtattatttcaccttgctatagctggagttcgtgaatgcagtagctggactgatacagtattgcataggatggtgatattaaggggaaaaaaataaatttcactggcagtcattacatttgtgccgagttcttattttgattctggtacctataaattgcatattactctttccaaaaaaatccggttcctattataaatcgtattctctaa

SEQ ID NO: 151645 - DNA, 213 bp, Zea mays
  unsure (1)..(213): unsure at all n locations
  Clone ID: MRT4577_69821C.1
ncggaaagaagcccggccgggncggaaggggagcagnncncgccnncncggggagggcgccagaggggngggcagaggcggggcagcgcnggggncagacgcagcgnncnccaaggcncacnaaanggagncncacaanggcgaggcngangacnngccnccaccacccccnnnggcngcnggcggggaaccacnnaaagccgangaaacaaa

SEQ ID NO: 151646 - DNA, 684 bp, Zea mays
  unsure (1)..(684): unsure at all n locations
  Clone ID: MRT4577_69822C.1
atcttattttggacacttgaaaagttggtaaatcttgttaggcacaacaaaacagcagattttactggcttatgacgagattaaatttacacgaagaagaaatataagtgtcatttctacctgaaaatctagtagcagcaccacacagcttgcaaggtccaaactggaagagaaaaccgcatctagttccccatctatttagatagcgtttgcttccatagtcacttgggatacaacagatccgtccccggaagcggctctgtccagaagattttgggaacgaacatattttttcatttttagaatcactccatcgtacgtggaaccaatccaaacaacaataaactgagagtgaaatggccctgtcccaccatacttcggaactaaacgttatcttaagatagtgtttggttccgaaatatggtaaaattgagcccttatgctcctaatttatttttgtttggatgatttcatataaaatcgagtggttctaaaaatagaaaattatgcttcccaaaatcctcgaacgaagctgctcctgaagagttgntccatcctaactaactccagaaccaaaccctatctaatttcccttcagggacacctcaagctgttccaatctccgggcaaggtcatgcttcccacaatgtcgaaagccatcaactacagcactaaaggtcggtg

SEQ ID NO: 151647 - DNA, 1467 bp, Zea mays
  Clone ID: MRT4577_69823C.1
ctcgtggcttggcagtgtcgatcgctgatcccaccggctgatagagttggcggccgggagagtgagtcagggatggcgtcggagccggtggcgcgggcggtggcggaggaggtgggccgctggggcagcatgaagcagacgggggtgaccctgcggtacatgatggagttcggctcccgccccacccagcgcaacctgctcctctccgcgcagttcctgcacaaggagctccccatccgcttcgcgcgccgcgcgctcgagctcgactcgctgcccttcggcctctccaacaagcccgccatcctcaaggtgcgggactggtacttggactcattccgggacatcagatacttccctgaagtgaggagccggaacgacgagctcgctttcacgcagatgatcaatatggtcaaggtgcggcataacaatgtggttccaaccatggccttgggagtgcagcagctgaagaaggagctgggccgctcaaggaaggttccattcgagttcgatgagatcgacgagttccttgaccggccctacatgtcaaggattggcatccgcatgctgatagggcagcatgtggctttgcatgaccctaaaccggagcctggtgtcataggcctcatcaatacaagattatccccaatccaggtggctcaagctgcttgtgaagatgcccgttctgtctgtttaagggaatatggatcagctcctgatattaacatttatggcgatccaaattttacatttccatacgtcacattacacctacacttgatgttatttgaattggtgaagaactctctccgcgcggtgcaagaacggtatatgaactccgataaagatgttcccccagttagaattatagttgctgatggagaagaggatgttactatcaaggttagcgatgaaggtggcgggataccaagaagcggcctcccaagaattttcacgtatctgtacagcactgcaaagaatcctcctgagctagatagacctaatactgaaggggtaactatggctgggtatggtttcgggctcccgatcagccgactctacgctcggtattttggcggcgacctgcaaatcatctcgatggaaggatacggtaccgatgcttacctccacttgtcgcggctgggagattcagaggagcccttgccttgacgacatatttttgtggacctccagtaccactcttctcctgtaactatgtggctcgatcttcttcactgctacgtcctgcttacttccgccatgtactatgatctctctgccggccttcaacaggaaaaaagaaaggacgagggaaatcatggggagcagctaggcggatgagcgcattctcggtagctgctaatctcattttcatagctgcgtctcttgtgttgtacattacatagtctggatttgagcttttgctatggcaagtatcacatgttacctgggtaattgagaaatataagt

SEQ ID NO: 151648 - DNA, 2130 bp, Zea mays
  unsure (1)..(2130): unsure at all n locations
  Clone ID: MRT4577_69824C.1
ccattgggtacctcgaggccggccggggtctccgtcccgtgtcctcgtggcttggccgtgtcgatcgctgatcccaccggctgatagagttggcggccgggggagtgagtcgtcagggatggcgtcggagccggtggcgcgggcggtggcggaggaggtgggccgctggggcagcatgaagcagacgggggtgaccctgcggtacatgatggagttcggctcccgccccacccagcgcaacctgctcctctccgcgcagttcctgcacaaggagctccccatccgcttcgcgcgccgcgcgctcgagctcgactcgctgcccttcggcctctccaacaagcccgccatcctcaaggtgcgggactggtacatggactcattccgggacatcagatacttccctgaagtgaggagcaggaacgacgagctcgctttcacgcagatgatcaacatggtcaaggtgcggcataacaatgtggttccaaccatggccttgggagtgcagcagctgaagaaggagctgggccgctcaaggaaggttccattcgagttcgatgagatcgacgagttccttgaccggttctacatgtcaaggattggcatccgcatgctgatagggcagcatgtggctttgcatgaccctaaaccggagcctggtgtcataggcctcatcaatacaagattatccccaatccaggtggctcaagctgcttgcgaagatgcccgttctgtctgtttaagggaatatggatcagctcctgatattaacatttatggcgatccaaattttacgtttccatacgtcacattacacctacacctgatgttatttgaattggtgaagaactctctccgcgcggtgcaagaacggtatatgaactctgataaagatgttcccccagttagaattatagttgctgatggagaagaggacgttactatcaaggttagcgatgaaggtggcgggataccaagaagcggcctcccgagaattttcacgtatctgtacagcactgcaaagaatcctcctgagctagatagacctaatactgaaggggtaactatggctgggtatggtttcgggctcccgatcagccgactctacgctcggtattttggcggcgacctgcaaatcatctcgatggaaggatacggtaccgatgcttacctccacttgtcgcggctgggagattcggaggagcccttgccttgacggcatatttttgtggacctccagtaccactcttctcctgtaactatgtggctcgatcttcttcttgtaatccagtgctggcctcgacctatatatatatatatatatatatatatatatatatatatatatatatatatagctatagttggcctcgaccttatttcactgcctgctctgctgcattgtgaacacagcactgctacgtcctgcttacttccgccatgtactatgtgttgagaactacgttaccacggatcaccagatccgttcccttccctcccgtcagcagtagaggcgcaagaagatgtagagaacctgtctcccttcccataagcacgacagagaaaacacacgagacactggatatagggttgggcctctggcctctttctgatctctatcatatgaaggggtgtacaggttccttatatagagatgtgagacccctcaggggcaattccaacttgaatatactaaaacacaagccaaactcactgacggctgatgatgggtatgcatagctttacacggtcacttgtgcggcctttgtattcttgagatttgcagagcaaggtttgcgccgaatcagacgtcgtcatcgtaggggaaggaggtggcgccgagccactcgtcgccgtagatgaagttctcngacggcganactgtgccgccctcgtcgtactccatctgccgcacctccagctccagncccacgcgcgccccccgtgtcggccncccggcnccgtagtataacagaaaaaacaagaagtancacggtgtnccgcgcggccgggctcggcgccagggcctactcggcccatcccctcccggtcnncacgatntggcccagagtaggagtctcatcactgacggcgcgccgcgtacgcgcccggaggtgccggtcccaggaacgt

SEQ ID NO: 151649 - DNA, 281 bp, Zea mays
  unsure (1)..(281): unsure at all n locations
  Clone ID: MRT4577_69825C.1
actgcctttagctaagattttccataacttggtctcgagcacctatgtgttgcatgtgggctacgggcaaacttatatctgatttantttagattgcgatgaaaaaaaaaaaaaaaaaaaaaaaaaaccctaaaaatacaaaaaattaaacaacttataaaacaatacaaaattcaacaagtttcaaaaataactaagaggcccccaccaatcggccttaccaacaattgcacaaccatgaattgcaaataaggacgggccctggatcaaaagattaaaca

SEQ ID NO: 151650 - DNA, 268 bp, Zea mays
  Clone ID: MRT4577_69826C.1
gggtaccggcgctcccctcgagtttttttttttttttttttttttttttttttttttttttttttttttttttttttttgtttttggaaaaaggcctggtccccctttctgatttaaaaaaagaaatggggctccctttacgggaaacaaaaaagggggggccttcctttgggaaaattctctcccttaaattaatgcccaatctattttttactaaccaaatacctttccgccggggttgtggggaccggggaccccctgcctattt

SEQ ID NO: 151651 - DNA, 411 bp, Zea mays
  Clone ID: MRT4577_69827C.1
gggtcaagcttttctcattacacattatcaatcaaacaggtgagggagaacaagaaaggggccagaatccaaaaaccagaaagtaatttctacaagtcaattacctcgcttcatcgacacacacggaaaagggtgggtccagaattaagacaacgatgaaataagttatccatatttcctaacttaaccaataccaacagttaaagtcctggcctctttacatacaaagtcccctctcacatcaaggatgagtggtacacactagataccctgatatgagacagaatggtgaaagcattggtgcaattcacaggtcttcgtcttccataggtgtgatttatgatcctttctcgcgatacaaaaaaatctcccataggtgtatctgcaagaagcttatccaggtaaggaact

SEQ ID NO: 151652 - DNA, 756 bp, Zea mays
  unsure (1)..(756): unsure at all n locations
  Clone ID: MRT4577_69828C.1
gcgatacataaagtcgtcttcctctccgccacgtgccggcagcactgaaaccctaaccccgctaaagaaaatccttctccagccatggccgccgcccttcccgactggatgatgctcgagcgattcgtgttctgcagggagtccttgctggacagcgaggccgcgcccttcatcaaggccgacggcaccagctcccacggcggcagcttctccgtggccttcctcgtcctccagcccccgggcatctcacgcctttacctgcagtggcccggcggcccaaagggcggctctcagtgcgttctcgtagcggcacaccgcaatcttgtcctgttcaggctcaccccagatcctgtaatcacccgcaaggcccccttcgtggattaccggcaagaccacttcatctgcggagcccaattctcgccgtctcagcggtcgctgctgctccgaaagatccccgagtgtgaccaacctgcgctggtggactggagggatggggagaaggtaaccatgccccgctcgtttgatcttaaccccgttagcatcttgtgccgaggagatgaagaatttgccttggcgcagttgaacctccgtagatccaacgatgagtggggcaaaattgaggctgagctgtgtgtcctccgctccaaagtaagcaatcgtcttcacgagtggaagagtgagaagtggctgccaatccagtacgagggacatgaaagatctgatttggacagntggagaacggacagagtagttcca

SEQ ID NO: 151653 - DNA, 290 bp, Zea mays
  Clone ID: MRT4577_69829C.1
gacaccccctggcgcagacataaaacgcggcaggcgtagcggtactcgcagagtgacaagtacacttggcagcgaccctagcgcaccgctacttaacatttgttcccttcttgtcttgcaaggcctggcggatgtccactgtaaggtataaatagagagctccctttatggccacgagatagagcttgtacggttaccgcgcccacacaaagcatgactagggagatggctcacgtaacaacccatttatctgaaagaccgccaattgccctatggctttggagcctact

SEQ ID NO: 151654 - DNA, 358 bp, Zea mays
  Clone ID: MRT4577_6982C.1
ctctggagagcctgcatcctgctatatcctccaagtagaaagtgatgaagggcgggacccaagcaatgagactgatggtacaccttgctgggccctggagatgcctctgcttatgagcagcagcatctgctaccagcgctagcatctggaaatgtgggtgcaggagctccgatactgagagcagagcacatgaatgagaacttgagcacacgattcggtgacccacgacaagtgcaaaagattcattgtttctgtcgcagctggtttggtgagcaaagcggagggcaacagcagagggatccgcttactgggcaaaaaagaccaccctgtggtgcaagagtccacagtaaacatcacc

SEQ ID NO: 151655 - DNA, 106 bp, Zea mays
  Clone ID: MRT4577_69831C.1
acgattgcttgcaacactgcaagtggggtcaacactttgtggcttatacactgatacacctgcggatgctattgtcacaatttatcgtcatgtattctgctatcaa

SEQ ID NO: 151656 - DNA, 350 bp, Zea mays
  Clone ID: MRT4577_69832C.1
agcccatgcagaaaagccggccaaaggtttgggcccttggaaaaggtctcatcactttaatgccaaataaaagaaaaggttagagtcctcaaacaaaagattacataagaaatcctcttgtttgtgcacgttgttgcatacaccatccacaatgacactaatggttcctcgagtttgatcttcagagtagcttgatgctgaccagaaggacgctgagcgaccagttaaacgtgtcgattgtgattccttgccttctcgtgcaaggtaccggtctcgagctgtctgtatcttactgtccacctatgatcgttttacacccacatcattctgtgacgagttcacttgcttat

SEQ ID NO: 151657 - DNA, 652 bp, Zea mays
  Clone ID: MRT4577_69833C.1
ccctgccacggcgcggacacagagagtggaaaccggaagggaggaagagagatggattcctccacctcggcggcggcggcaggggaggcggccttgccgccggaggacgacgtctgctccgtctgccacgaccgcttccggatcccgtgccaggcgaactgctcccattggttctgtgaggttgcaagacctacccttcttcatccgaagactgttcagagaactaatggacccccagcggaccctcccactcgtgttcagggcgcggatgctgatgatggcatgctgggcctctttggattcgtcgatgacctgctcatcctgctgatcgtgttcctccacctcgccgcggtgtaccggtcgttgctcctgtaccgccacgggggccagtagaagtcgctgtgcataaaccgtttgttaagctggtttccatgtggagttctctgagatcgcagcagcggatttggaagatcgccgactcgccgagtagatggcaatgtcacggacggcttagcctgtccctgctctgtaccattctactacgcctgtttttctgagactctgacacggtgaactgaactttggttggttgatgcaagtgaatttcccttcgttttactcgtcaggaaaaaaaagggaaagagtttgcgtt

SEQ ID NO: 151658 - DNA, 258 bp, Zea mays
  Clone ID: MRT4577_69834C.1
gccagaactcccgctgccgctcccctactggcgcggccctgctctccatggctgccgagcctctccacgcatctccctgatctagctccagctcgctgtcatcccacagcgctcgtctgcatggtcgctggcgctcggcttttctctctcaagctgcgggttttccgttctggggcaaccggcccgccagctcagtgctacttgtctccgtttccgcgagaggctggtcgatcagtgattttctgggcaattagttct

SEQ ID NO: 151659 - DNA, 1129 bp, Zea mays
  unsure (1)..(1129): unsure at all n locations
  Clone ID: MRT4577_69835C.1
tacctcgaggccggccggggatggcgacgggcgggcgtgtgcggctgcaagcggctcggaaggggcacggtggagacgcgggcgggggggagcggaccctcgcctcttctcctgctcctgctgctgacctgacgagctgagcccacggacgagaggggagacgaggaggggcacaccacgcaggagaccggaggagagcgcgcgcgcggatccacctcgatgttggcaagaccatcagcaccgcctttggtgactgctcaaactcctgaagtcggcatcttcattacagctcgcaacgtctcgggtgcactggtcgccaagcttcctggtaacaaaaacaagtgtggaggaagatcgaatgtccggcagcggaacatccaacctgggaaaaggggctgtcgtcgggagtggcgggcgctctcagcagctgaccaagcgcaggcttctaccttggacgtagatgaggagtgcaaacgggtgctcactccattgggtttctccagcgaagacgccgagaagatgctgaagaaagcgtttggctggacccactcgccgtactggagcgaggagagggagaaggaggttccgaccgccgaggcggtagctggagtgctggactacatcaggagcctggggctgtcggacgaagaccttggcaggctgctgaagaagttccccgaggttcttgggtgcgaccttgacggcgaggtgaggccgaatgtgggcaagctggacagtgactggggaataaacgggaagaccctgcggagccttctgctgaggaaccccaaggttctgggctacaatgttgactgcagaggggattgcatggcccagtgcacccgctgttgggttaggttctgatgatgatggttttgttcttcgtcgccacatcgttggtcagtgttggggacttgttctcaaatgctatgaattaagaacaaggcaacataaagtgttaaatgccaatgtccttcgtccatgaaacattattcaaacgggtccttcccggggggggggggggnnnnncgtggggggggtggggccccccccaattttttttttcttgtggggggggggggggagaaaaaaaaaaaaaaaaaaagaggggggggggggggggggggag

SEQ ID NO: 151660 - DNA, 689 bp, Zea mays
  unsure (1)..(689): unsure at all n locations
  Clone ID: MRT4577_69836C.1
ccgggttcgacccacgccgtccggctcacgaccgcttccggnatcccgtgccgaggcgaactgctcccattggttcntgtggagagtgcatcatnccgcgttntggaattatggnacctcctgtacaggcnttgcaagtgtcccatttgtnncgccgccttatannaatctactggtnngcctgctgcatnntatcagggcaggaagggatggtccacagagctcaacnngtattctaggagagattcagcactataanctgtatatttnggtggagcaccacgcagcctaactcagaggttgcaagacctacccttcttcatccgaagactgttcagagaactaatggacccccagcggaccctcccactcgtgttcagggcgcggatgctgatgatggctgcgctgtttctgacctcagtttcataccatcgcccagtgcaatggatgtgagagatgaaaccgtatatgaatcttctgataagacaacgacttattccaaaacctgtaggtcgcactgagtgcaatttatgtgctgagccctgtcgacattcttcccgaaagcatgctgggcctctntggattcgtcgatgacctgctcatcctgctgatcgtgttcctccacctcgccgcggtgtaccggtcgttgctcctgtaccgcacngnggccagtagaagtcgctgtgcat

SEQ ID NO: 151661 - DNA, 1104 bp, Zea mays
  Clone ID: MRT4577_69837C.1
gcaggcggctcggaccgggcacggtggagacgcagcggagccctcgcctcttctcctgctcctgctgcccggtactcgccgagggagacgctgctgacctgacgagctgagcccacggacgagaggggagacgagaaggaggggcacaccacgcaggagaccggaggagagcgcgcgcgcggatccacctcgatgttggcaagaccatcagcaccgcctttggtgactgctcaaactcctgaagtcggcatcttcattacagctcgcaacgtctcgggtgcactggtcgccaagcttcctggtaacaaaaacaagtgtggaggaagatcgaatgtccggcagcggaacatccaacctgggaaaaggggctgtcgtcgggagtggcgggcgctctcagcagctgaccaagcgcaggcttctaccttggacgtagatgaggagtgcaaacgggtgctcactccattgggtttctccagcgaagacgccgagaagatgctgaagaaagcgtttggctggacccactcgccgtactggagcgaggagagggagaaggaggttccgaccgccgaggcggtagctggagtgctggactacatcaggagcctggggctgtcggacgaagaccttggcaggctgctgaagaagttccccgaggttcttgggtgcgacctcgacggcgaggtgaggccgaatgtgggcaagctggacagtgactggggaataaacgggaagaccctgcggagccttctgctgaggaaccccaaggttctgggctacaatgttgactgcagaggggattgcatggcccagtgcacccgctgttgggttaggttctgatgatgatggttttgttcttcgtcgccacatcgttgctcaggaacttgggacttggttttgcttgctggccacttttctgtaagctagcacctgtcgaatgtagcacaatcgctagctgctggatattgggttggccactgttagttcttatgtacgtacaacagattcaagagctaaaccatgctgctgttgtctgtaaaagagttgcaataaatatggccagaattcctgaatggcctgtggtacaaaaaaaaaaaaaaattgttc

SEQ ID NO: 151662 - DNA, 635 bp, Zea mays
  unsure (1)..(635): unsure at all n locations
  Clone ID: MRT4577_69838C.1
actccttagggcgattgggttcctcgaggccggccgagactgcagcgcaaaaaaaaaaaagcgaaatcgccgaaggaaaggagaccccgagacgagcaaggcggcgagggagggcaaagaccacgtaccagcgcgcacgcacaatgtcgggagcacagggcgcgcacccggtcggccagacgacgccgacgacgtacgagtcggtgggcggcggggagaaccgcacgcgcacggacctgcggtcgcgggaggaccagggcgccatccagatcgagaaggtgcaggacaaggtcgacgatgccgcggggcgtggggtagaccacagcaccttcggcgccaacaaggagggccgcgacgacaaggccgatgccggggcaaccggcacaggcgcgtgattttgtgcccttccgcagtacctgagcgtgtgtgtaccatagctttgtgtccgctgcttggctgctctgtatgcgcgcgcgtggaatgtgtgaaacctttctgtaaaaatgcacatgttagattgaaataaaacaaggaccgactggtctgaatcccacttggtactcccccaattgggaaaaaaaaaaaaaaaaaaaaatgcggccnnnnnnnnnnnnnnnnnnnnnnnnnnnnnnnnn

SEQ ID NO: 151663 - DNA, 199 bp, Zea mays
  Clone ID: MRT4577_69839C.1
ggcagtgctgccaaggcacctgagtctgacaagagaactgctgcccccgctgaagcacccgaagccgcatgcacccccgtcggcgccgctggcccatcgacgttgtctatgaagtctggtccagataccgggccagtcaccgacttttcaccccctttttccaccgtcgaagagctgaggcctttccctccatcattca

SEQ ID NO: 151664 - DNA, 948 bp, Zea mays
  Clone ID: MRT4577_6983C.1
aggcaatcaccatgggagatcaatctggctctagaaatggaccacaacagaagtacgtttcaggagcccagaatgcctgggatatgttctctgatgagctgtcacagaaacacatcactactggttctggtgacctcaatgacatacttggtggcgggattcactgcaaagaagttactgagatcggtggcgtcccaggggttggtaaaactcaactggggattcaactagcaatcaatgtacaaatcccagtggaatgtggtggccttggtgggaaagcagtttatatagattgctgaagggtgtattagggacatactggagcactttccgcacagccatgagaagtcctcttctgtccaaaaacaattacagcctgagcgtttcctggcggatatctattacttccggatatgcagttacaccgaacaaattgcagtcataaactacatggagaagttcctcagagagcataaagatgtgcgtatagttattattgatagtgttactttccactttcgacaagattttgaagatctggcactgaggaccagagtgctaagtggattatcattgaagttaatgaagattgcaaagacatataacttggcagttgtcttgttgaaccaagtcactactaaatttacagaagggtcatttcaattgactcttgctctaggtcagttttgtgtcatacaagtataatcctccattccttcttcatcttcgaatcagtactggatgtttgtggtcattattgctcacagagcagcaggaagttagcaccaagaatttccttgcttttgttaccaaggttgcctttctgttctggttctgggcacacgtttccagtgaccaagtcaaaatggcaagcatttactaattgcagccgaaacttcggtaccgtgataatgtggggtggatgaaattatctaggcaaatcgtact

SEQ ID NO: 151665 - DNA, 253 bp, Zea mays
  Clone ID: MRT4577_69840C.1
gttgggcgaaagaccatatttttttgttccattcaaaaagaatgacgcgaggtaaaaaaatcgtaacgaatcaccttagctgggaaaaaaaaccaactttaccaccccctcgaagaggaggattacaatggaattgaaccaaagacctccccacctttggtttggctgacattccagctggactggctgaaagacgaattgaaattttggctgcccaacgccatacaatggaacattctgatctgggccccac

SEQ ID NO: 151666 - DNA, 132 bp, Zea mays
  unsure (1)..(132): unsure at all n locations
  Clone ID: MRT4577_69841C.1
ttgtatcgtcatcgccgtgacccatggcaccttttcccttcgcactccgtgcgcggccgccgtcctgcccatacgcccatacgggtaatgccataccccatcacaacggnccgggtatcctttcttttgaaa

SEQ ID NO: 151667 - DNA, 482 bp, Zea mays
  Clone ID: MRT4577_69842C.1
tttttgattattcgttgtcatagtaaacacatcaagtgtgctatttaaaagcgatacgacaacatttgagtatggaagtcaataaaatgaggataagaatgagaccatatcccaaatgtgttagtgattgggctaccacatcatttttagtcttagccattccaataacttactggtttgaactgtggattgtagtaccggcattgttttcaaaaaattcatttttctataaatttaattttgttcttgggacattcatctttatcagcatacttagtaatttgtttatacttatggtatgtaatacaagtattgttggtgaacgaattattcgaccatccaaagcaaattcatcattatggaaattttgttcagtttgtgaatcgataacgccgccgcgttcttggcactgttcaatatgtggagtatgtattctgaaacgtgatcatcattgtatgtctactggctgctgtatcggtcac

SEQ ID NO: 151668 - DNA, 264 bp, Zea mays
  Clone ID: MRT4577_69843C.1
tcggcctcgccgccgccgccgcctccgcggccgacgcgcccttcgtcgtcgcgcacaagaagatttcgctctcccgccccaagccgggcgtcgagcgcgtcgccgtctccgtcgacctctacaaccagggatccgcgtgagtaccgctgctccccccacagcacccccaccgccgatccggtttgtcgcttgtagtagtctgccgatctggcttgttgcttgtcgtagtttcgtttgctcctgggatctgatctgactcgtatg

SEQ ID NO: 151669 - DNA, 417 bp, Zea mays
  Clone ID: MRT4577_69844C.1
aaaccaagaatgggccatgggaatcaggccagagtcaggttacagggaaattaactgttaataaacgacccactaattatatataaaacaatcgttggacggggaaatacatattgaaagctatggggtttttcaaaacatattgaagcatgggtattcatctgttaggcagtcatcaggcaaaacgggtgggccctcattagccgggggaggatccacaagctgggagagaactggggacattggatggggtgccaaatagagtgggaggacccctacaaatttaaccttgggcgctaaatacaccccctgcaccctaatatgggccccgcccaccaccaacaccgggtccaccatcccactttttacgaggaccatacccttttttgtagctggcagtttggcccactgaaaaca

SEQ ID NO: 151670 - DNA, 409 bp, Zea mays
  Clone ID: MRT4577_69845C.1
ttttcattatattctattgtttttttttactatttttttttttgtttttctgtttttaacgagaaaaaatattggagtttacaaaccataagtgtaatttacctttaccaaggggtggcccaccatccatattattgcctgggaaccaatgttttttgaaaaaaaataaaccctagattcccgcgggggctactttaggtttttaatgttaaaaaagaatggcgtcggccatcttgctcgttcaagaaaagattattagggggcgctgggcttataggggctaaaactcgggccccacattttagtccacattaggtcattaattgagtaatagggaaactaacagtcagcttgagactctttatgttgtgaattcggctctaaaagggatttaacctgggggtgctaa

SEQ ID NO: 151671 - DNA, 402 bp, Zea mays
  Clone ID: MRT4577_69846C.1
ggattcccgggtcgactcacgcgtccgttgtttttttttttttttttttttttttttttttttttttttttttttttttcatgggtttgttttctcttttgtttatatttctatatttaaatatttctaaaaaaacaaccaaccctttttaagaaccaaaatttactacattaatcttaaaaaataaaatgaacctataaggttacccaaattcaattcaattagccatcatactaaaaaactattgacttacaaaaacctaaactaacccaacataatcaccttttaaaacatatcacattaaaaaactatttgaaacccaaaaagccccaaccaaaagccatttccaatcattaaacaacactaattctgaaagggaccatccctatatcccttcataaa

SEQ ID NO: 151672 - DNA, 565 bp, Zea mays
  Clone ID: MRT4577_69847C.1
attgggtacctcgaggccggccgggtttgcatacactgttcgtagagtggaatttgaatatggggatgcggatggtaaactgttggagatagcctaacaagggcatacaaggaaatccctcacgccctagccattgcccaaagctaggcctcctccttagcatagacctttggatccttgatgacgacttgtcttcacataacaccaatagtttagataattaggggcacacctcacacccttttttggggggggggggagttgacttcatatatgtagtcaaagtacaacttatagtacaagtcactaccttcataccagaaagaatgcaattctagatggattgactttcatatatatagtcaaagtacattttggaggacaagtcactacctccgtcgtttgtcccataaagaatgttatatgtgcattcttggttagtgtctaaaatttgaccaaatatatagataaaaatattaatatttatgatgtcaaataaatatattatgaaaatgtatatgatgacaaatctaatgatacttatttgatgtcacaaatatagtta

SEQ ID NO: 151673 - DNA, 825 bp, Zea mays
  Clone ID: MRT4577_69848C.1
gggcgattccgcgctacgttcccgaatccacccatcttcgtccgctccggccactcgtttcgccgccgtcggtcgccacccgcaaggtttggaggataagattcgggagggatggcttccggtgggcagccgcagttccggtacacgcagccgccgtcgaaggtgctccacctgcggaatctgccgtgggactgcactccagaggagctggtcgagctggggacccccttcggcaaggtcgtcaacaccaagtgcggcgtcggcgccaaccgcaatcaggcattcatcgaattcggcgaccaaaatcaagctattgccatgatatcatattacgcatcgtcaacagagccagcacaggtaagagggaaaaatgtgtaccttcagtactcaaatagacaggagattgtcaacaacaaggcaactggggaaggttcaggcaacgttttgcttgtgggaatggagggtgttgcaccagattctgtcagcattgatgttctacacgtgcaagccgttgtcacggagtatcatggcaggaagcatctggaacacatgtattttctgctttcggatttgttcataagatcgctacctttgagaaagcatctggttatcaggctttgattcagttttctgatgctgaaactgcaacatctgcaaaagctgcactggatggtagatgcattcctagctatttgctaccagaactggatgtggcctgcactttgagaataacctattcagcacacagtgttctcaaacgtcagtatcagagccacaggagtagggacttcactaatccttaccttccttttctggactctgcta

SEQ ID NO: 151674 - DNA, 627 bp, Zea mays
  Clone ID: MRT4577_69849C.1
gatacgttcccgaatccaacccatcttcgtccgctccggccactcgtttcgccgccgtcggtcgccacccgcaaggtttggaggataagattcgggagggatggcttccggtgggcagccgcagttccggtacacgcagccgccgtcgaaggtgctccacctgcggaatctgccgtgggactgcactccagaggagctggtcgagctggggacccccttcggcaaggtcgtcaacaccaagtgcggcgtcggcgccaaccgcaatcaggcattcatcgaattcggcgaccaaaatcaagctattgccatgatatcatattacgcatcgtcaacagagccagcacaggcaacgttttgcttgtgggaatggagggtgttgcaccagattctgtcagcattgatgttctacacgtggtattttctgctttcggatttgttcataagatcgctacctttgagaaagcatctggttatcaggctttgattcagttttctgatgctgaaactgcaacatctgcaaaagctgcactggatggtagatgcattcctagctatttgctaccagaactggatgtggcctgcactttgagaataacctattcagcacacagtgttctcaacgtcaag

SEQ ID NO: 151675 - DNA, 1492 bp, Zea mays
  Clone ID: MRT4577_6984C.1
cgagagaaggcggctctggtagggtcgctgtgcggagagattcggcacgaggcccaagccctcttctcttcccttgactccccctccccccctgtgcgcagttcgcttggtccccggagccccaaaggcggcggtgagccggagcccggagacgacggcgcggcgcgactcccccctaagcgacagcggcggcgtcgacgtaagcggctgcgtggcgccaccgacggaggctacgagcggttgtggaggcagatatgagaggtggaggtggctacaacgggtcggcggctgtgagatactgaaatccgcactgcagttctcttcttcccccaatcagtaccacctctccaagtggcaatcaccatgggagatcaatctggctctagaaatggaccacaacagaagtacgtttcaggagcccagaatgcctgggatatgttctctgatgagctgtcacagaaacacatcactactggttctggtgacctcaatgacatacttggtggcgggattcactgcaaagaagttactgagatcggtggcgtcccaggggttggtaaaactcaactggggattcaactagcaatcaatgtacaaatcccagtggaatgtggtggccttggtgggaaagcagtttatatagatacagagggcagtttcatggttgaacgtgtctaccagattgctgaagggtgtattagggacatactggagcactttccgcacagccatgagaagtcctcttctgtccaaaaacaattacagcctgagcgtttcctggcggatatctattacttccggatatgcagttacaccgaacaaattgcagtcataaactacatggagaagttcctcagagagcataaagatgtgcgtatagttattattgatagtgttactttccactttcgacaagattttgaagatctggcactgaggaccagagtgctaagtggattatcattgaagttaatgaagattgcaaagacatataacttggcagttgtcttgttgaaccaagtcactactaaatttacagaagggtcatttcaattgactcttgctctaggtgacagctggtcccactcatgcacgaaccggttgattctgcactggaatgggaacgaacgatacgcacatcttgataagtctccttcacttccagtagcctcagcaccgtatgcagtgacaggcaaagggattagagatgctgtgagctcaaaccacaagcgagcccgagtaacgtagcattcttggtgtcaagcacttgtatgtccactacgctcctgcagctttcttcgccatggatcttttggactagtgaggtgagactggagaatagtaccattttgttgattctcagttgctttgtgccgttggctaccaaccaaccttaagagagaagtaaatacaacagaacaggctaatatagtgttttgtatctgaaaaaaaaaaaaaaagtacattcagtaaagcctataatagcgggcat

SEQ ID NO: 151676 - DNA, 905 bp, Zea mays
  Clone ID: MRT4577_69850C.1
ccggccgggaggcgtctatccattagaaaattggactgattgaccgcaccgattccgcgatacgttcccgaatccaacccatcttcgtccgctccggccactcgtttcgccgccgtcggtcgccacccgcaaggtttggaggataagattcgggagggatggcttccggtgggcagccgcagttccggtacacgcagccgccgtcgaaggtgctccacctgcggaatctgccgtgggactgcactccagaggagctggtcgagctggggacccccttcggcaaggtcgtcaacaccaagtgcggcgtcggcgccaaccgcaatcaggcattcatcgaattcggcgaccaaaatcaagctattgccatgatatcatattacgcatcgtcaacagagccagcacaggtaagagggaaaaatgtgtaccttcagtactcaaatagacaggagattgtcaacaacaaggcaactggggaaggttcaggcaacgttttgcttgtgggaatggagggtgttgcaccagattctgtcagcattgatgttctacacgtggtattttctgctttcggatttgttcataagatcgctacctttgagaaagcatctggttatcaggctttgattcagttttctgatgctgaaactgcaacatctgcaaaagctgcactggatggtagatgcattcctagctatttgctaccagaactggatgtggcctgcactttgagaataacctattcagcacacagtgttctcaacgtcaagtatcagagccacaggagtagggacttcactaatccttaccttccttttctggactctgctaaagatggctctggaccggatggaaaaaaacaggaagcagagagcaatatactgcttgcttctatttgaaacatgcaatat

SEQ ID NO: 151677 - DNA, 121 bp, Zea mays
  Clone ID: MRT4577_69851C.1
accctcgaggcttgtgccgggcacgtgtctgaatggcgtatggggagaccagaacatgggccacccgactatagctgactgtgctgccgggactcgtgctgatgcctgacatgactgggtg

SEQ ID NO: 151678 - DNA, 4162 bp, Zea mays
  unsure (1)..(4162): unsure at all n locations
  Clone ID: MRT4577_69853C.1
tgcatgtggcacaggttctaagcctgtgctttatattaccctgtggtggggcggctaacggggcccttagttctctgccttgcantttgacactttggcttactggtctgaagtcacttttacggccccgtttggcattggggtatcgagcccggccggcaggcggccatccaccagaaaattggactgattgaccgcaccgattccgcgatacgttcccgaatccaacccatcttcgtccgctccggccactcgtttcgccgccgtcggtcgccacccgcaaggtttggaggataagattcgggagggatggcttccggtgggcagccgcagttccggtacacgcagccgccgtcgaaggtgctccacctgcggaatctgccgtgggactgcactccagaggagctggtcgagctggggacccccttcggcaaggtcgtcaacaccaagtgcggcgtcggcgccaaccgcaatcaggcattcatcgaattcggcgaccaaaatcaagctattgccatgatatcatattacgcatcgtcaacagagccagcacaggtaagagggaaaaatgtgtaccttcagtactcaaatagacaggagattgtcaacaacaaggcaactggggaaggttcaggcaacgttttgcttgtgggaatggagggtgttgcaccagattctgtcagcattgatgttctacacgtggtaaggatgttaacagttgcatcgagatttatgttattagacaatgattttatctgcaggaatactttgatgtgccagtactgtcttagtaacttctagcacatttttttgcaagacggcaatggattagcaagccgttgtcacggagtatcatggcaggaagcatctggaacacatgtctgtgtttgtttcctctcccttactcatcgctgccctactcctcccctaccctccctcccctgcacctcttctccctacctttcccctcccataccctttcatccaagtaccctcttagggttggtcacatctaccttcgtcgatgtccgttttagttgttattataagttgtatctagttagtgcctaaggttggtggatgcatttttctcaatggaggtcgtttctgattggttacattggtagctggcatatttgtatgattattatcaagtgctcttctctggatttagtaagggaaaagaaagagaaaaggaacataaaatgtaatgcatcaataatagtaaataaatattcttgttttcactaacgccccgtttggatcctcggaattgaattccattctaataatagtaatttaggcaaatatcaattaagctagtatagttttatgcaaaatatatttgtatactattattactttattagcaatatgtgggagatatttatgtgctgcatttttactacagaggagtgagtagaagagtgtcttataagttgcagagtagaaacatattccactgatacacaaaatcattttctatcctccacccccatgaatttgagatagtcttatatctgaactgtggaaagtggcggaatatcaaattccaagccaaatagactactctattaagtaaatttcaattccttcaaaatgaatagatccaaatggcccataaggtaaatataatgaacttgattggcacaaatttgtcatttggttgcactgatttgtgtaacggtttaataccatctttcaagcaggattttagctccttattacagatctgcaagctaccaactcgagttatttgcatctgtatgttgattaaaagaattactttacaatcttctacatgatgattagattataattcttttgcaatcttttatgtgttaattacaagaactatcttgtgtttatcctccatagtgtcatttggttgacgcacctttaatacgctgttaaggcgagcttcaaaattggaacatgtggattatcagttcataaagaaacatctgtctgaacagtttaatgagtttcactcactttccactgtgaatattgtagatttgatcactttgttactggcgcatgaatgaatgcttgttagctgtgctcgtttctgatctctttctctagacaatccttacaaagcctagaaatgcattgattgatttgattctaatactttaataacagcttgatgtcacaattttacccaggagtgatgataaattcatctgcattatctgtactagcaggttgaaaggttttgaacatgtacagttgtgtgctagtctgctagtacccttgattcattgttattgtctattcgaggcaaaaactttattgtagttgtaagcttttctgtatgtttgtataaatattaattttgtttggcgtagagatcagacaacctttggctgccactttcaatttaagatcatttcactttccagatatattggtgcatgcatttggttttactataatgtttcacatgtggtattaacagttgacgtatgtgtgcacaggtattttctgctttcggatttgttcataagatcgctacctttgagaaagcatctggttatcaggctttgattcagttttctgatgctgaaactgcaacatctgcaaaagctgcactggatggtagatgcattcctagctatttgctaccagaactggatgtggcctgcactttgagaataacctattcagcacacagtgttctcaacgtcaagtatcagagccacaggagtagggacttcactaatccttaccttccttttctggactctgctaaagatggctctggaccggatggaaaaaaacaggaagcagagagcaatatactgcttgcttctattgagaacatgcaatatgttgttacaatagatgtgcttcatgaggtcttttcagcttttggatttgtacagaagattgctatttttgagaagaatggctttcaagcattgatccagtatccagacattcaaactgcgtatgcagcaaaagaagcactagaagggcacagcatctatgaaggtggctactgcaaactgcacctcacattttcacgccatactgagcttaatgttaaggttaacaatgagcgaggtagagattataccaaggggaatgccactccaagcagtgatcaaccttccattcttggtcctcagccaataccaagcgttggtgctgctattccaccagcacagggtagtgttccttctgcagccaccaattcagtaatgccaccaggggatccatcagttgctctaccttctaatccttccagtgagccactcctgcaagcacctgttgtttcctctggagggcctccgcattaccctaatcaggccatcctacaaggcccacttggtgttgttgcacggttcccaggctatggtgccctgcagtttgctcagggctcagctcaagctcaaatggtgcagccttcaggccaaggaagtcaacatatgtcaggtcatgtaaattatcagctacctccaggttcagcccaattcatgcagtatctcagcaacggaagccatccacttccaaacgcacctgggccacagacaatgccttaccctgccctcagtgggcagcagctacctccgggtcttcagatgatgcaagctcaaggttttggaggcctgccgttttcacagggtcctggacaaccaatgccacagttcccaatgtatggcacccagcagtttcctccgggtatggagccccagatgatgcgcttctctgagcagggaggccagcagtttacatttgcgccacggggtccaaatagtcgttagcaaatttgaacttagcaacgttagatcgttgatggtgatggatggatgtcaagccttctatgttgctgttttgtaaggtgaataccgatgctgttccattactaggatctatacttggtttatctctcgtactgtggccaaaacaaatgtctaatctgaggtttcgtagccttgtatttgtatcgatttcctcacgcccgcagcttctaatgaaagaacacagtgttacattacggttatactgcagtagtggaagcaaatgtaaaagaaacctagagaccaaaaatgccaggttgaaagcccgtagctgcaacctgtaggctcacatcgcgtccagttataaatttgtttgtgctatgttaagagtctaaaccaaggtttaggagaaa

SEQ ID NO: 151679 - DNA, 497 bp, Zea mays
  Clone ID: MRT4577_69854C.1
acctcacaggctcacacccataagactcgcgtcacttcaccgcactatattacacaattacggtgagctgcacagaactgtaatcgaggtcgtctacgacgtcgtctctcgtcagacgatgaacatggacaatcaccatgagcacgagaatcacctgcagcgttgctgagcatgcatgccattccgtctcctagcgctggtcctcatcgaggacttcgaatcgctggtgtcgtacctggtgctgcggcactacaaggcgtccttctacctgcaggatctgcagctagcgaatgcccatctcgctgggggaacctgtagcttaccgcgatgacttaggtgacgcatggtcttccgcaaccactatgacagcatgagcatcttctacaatcagctgtacatgatcgtcatctaccgcgacgaggccgtgaccatgcacgtgtatctgtcgaaccactactagggccaccgagacttcaccgtctgtgaccccgtgctgt

SEQ ID NO: 151680 - DNA, 339 bp, Zea mays
  Clone ID: MRT4577_69856C.1
acactttcctgatcgagtgcaacagaggcgagcactggggcttttttgaagcagattgccgtagagtccgaggaagaaatcgaaatgttataggaaaactatcttcaacgatgtgaatcatgccatggtcaagcagcgagacttgtgaattctgcaagagagatggaagactcgatttctgtgaacttaagggctcgacgacttgaagctaagtagagtggagctgctgctacaagcgggaacatcatgcgctgcaataggagcactaaccgcaggaatattgggcatgaatcttaaatcagatcgggaaacaaatgcgagggcattgcgggtgacgac

SEQ ID NO: 151681 - DNA, 640 bp, Zea mays
  Clone ID: MRT4577_69857C.1
agtttaagacgccgcgtgcgctccttgtcgctacggctcgtttccgtggtgcgactcttacgacgagtacatggcgctacgtcggagctttgcctccctcggtcgtgcgcttctcacgccggggtcgccgtacggcgcggacgctctccgaggagggctccgatggcctcgctgagatcaagcgccgtggagagttgggatcgggctccgcgcatcccgcgaggagcacctccgccgtaaggttgtgatgtcttcgccaactaggactgcgtctcaacaaggatctttgtcagctgggaggggccaatttcctttttgtcaagcccactgtgggagaactcgttgacggcatgcacatcgattggagaacatatggtcgatgtacgcgacgcatcgacgttacgttcttgctagtagggttgacaaaagcctttgctgatgaagtggcggaaaatatgtggcacgaagatccgtgtacgcctcgatcagcagagtatgggctaccatgagaacttcaagggtcgaggacctccgaatgactggtctgcattctagctgcagctagcatgtgacgcctgacactgggatgatgttagtttcctcctgagctctagagtctagagctcttgttcgtgagcct

SEQ ID NO: 151682 - DNA, 720 bp, Zea mays
  unsure (1)..(720): unsure at all n locations
  Clone ID: MRT4577_69858C.1
aggacttctccctccctcccgcagtcggacccgctgcttcttttaccaccgcagccgtcgtcccttcccggtctcgcccccgcccgccgcctctttgtcctcctcaacgtccgccgccgcgcctgccgctcctcctcagcctcagaaatggaggccagttctagcactgctctctatcctcagcgccgctgcaaaaacatctacctggtgaggcatgctcagggtatccataacgtggaaggcgacaaggatcatagcgcctacaagtcgcctgcgctggtcgatgctcacatcacccctttgggctggagccaagttgattacctgcgagaccatgtgacaaaatgtggactggcgaaaaagatcgagttggttgttgtttcccctctaatgaggactctgcagactgcagtgggggtctttggcagtggaaactgtaccgatggagaaagtgcaccaccattaatggtgaagggtgctgaacacagtggacgtcaggcgatttcaagtttggactgcgcgccgtttctcgcggttgaggcctgcagagagcgcttgggtgttcatccctgtgacaagaggagcagcataacaagataccgtactctctttcctgccattgatttctccctgatagagaatgatgaagatgttctttgngaacccgatgtcagagaagcaattgacgttgttgctgccaggggcatgaagttccttgac

SEQ ID NO: 151683 - DNA, 201 bp, Zea mays
  Clone ID: MRT4577_69859C.1
ttatatgtctaaccaccaataaaaacacgtatcgcgctactacaaatgttattagttagcttccacacacctcgaaaagcaaacagcacaactatatgccccatcatccgcttgctaatattgtaaaaagagaactacccagaaacaaacttatacctcattcaaactaaaacaaaaacctagggcatccttctactaagc

SEQ ID NO: 151684 - DNA, 482 bp, Zea mays
  unsure (1)..(482): unsure at all n locations
  Clone ID: MRT4577_6985C.1
tcgcggtcgttcctgtcggccgccgtctacaagaagcatcagaggctgtccaactcggcgaagctgaagcactcttccggcgagatcatgaactacgtcaccgtcgacgcctaccggatcggcgagttcccgtactggttccaccagacgtggacgacgagcgtccagctctgcatcgctctagcgatcctgtacgacgcggtcggcctcgccacggtcgcggcgctggccgtcatcatcgccaccgtggtctgcaacgcgccgctggccaagctgcagcacaagttccagagcaggcttatggaggcgcaggacgtgaggttgaaggcgatgtcggagtccttggttcacatgaaggtcctgaagctttacgcgtgggagacccacttcaagaaggtcatcgaggngctgagggaggtcgagatcaaatggctgtcggcgttccagcttagggaagcgtacaacagcttcctgttctggac

SEQ ID NO: 151685 - DNA, 239 bp, Zea mays
  Clone ID: MRT4577_69860C.1
cgttgctgtcgggcatttggttttcatttcagtcattcaagggtgcagcgacacctgtccacggacaactccaccggagagagtgagtagtagacgatcacacagtttgatacatctgtctcccctgatgttcgaaacgttaggcgcgctaagcggcaatgtgatttgggatgaaaaagattaagtatttggcccacaaactgaacatacaaaaaatatatattgacccgacagcaacg

SEQ ID NO: 151686 - DNA, 711 bp, Zea mays
  unsure (1)..(711): unsure at all n locations
  Clone ID: MRT4577_69861C.1
cctcgaggccggccggacccacatcagacaaaccgcgtcacgtaaataatctgagcggccaacccaacccaacccaacccaccactgcctccccgttaggcaatacccagctggaccgggtgctcctccatcgtttcccaacgacatcctcgaagcatacggcggagacatatctaccctgacgacgaagaccgcgcccggcctcgatttgatggagaacttcaaccttacgctgcggatcctgaaggatgcggagggagtgttcatcgagtcagcgctggggatcagggtgatgcccaccgagaagaacatgggctacgtcgatgatatgattcttgccgcgtcgcaagatacctatgagaagggaatcggacacctaagattttatctcattggggatgatgtcatggatgcacttcttgtgaaggttgagaagatgaatcatcttgcttgccctgacttgcttgtcttgatatggctcaatcctgtcaagaacatanggacaactgttattgatactctgaacatgctgttaattagaaagagacgtactgagctgggattttgctgatgaccctttctgaagataatgtggatacacttgagcatcctctgagcgaggacttgtggagaaatgctaacactgttgtcgcctggatgtgatatgaggatgatagcgcagcgctagacatggtgatgtaaccctatcat

SEQ ID NO: 151687 - DNA, 390 bp, Zea mays
  Clone ID: MRT4577_69862C.1
cccccaaacaaccaaaccggagagaaggagccgggatagcagagccaccaggccctggagagaacacaacggacaagcgccgccgcgcggccagacgaaggacgacggggcccccgaccccggggagaagaggagttttttccaagggggaggcggacaacaaccgcagcaccgcccgagagaccgaccggcgagaccggcgggagcgggccaaacaggaggaccacagcgccgagggagacgcccacgaaccaccgcggcacgccaccgagaggaggacgcccgaaaaaacgccgaggccgacgcaccaaggcccagaaccgcccacgcacacgacgcaaagcccccgacccacccaaaaaagaggaacacaggaaaaggccccaaccc

SEQ ID NO: 151688 - DNA, 282 bp, Zea mays
  Clone ID: MRT4577_69863C.1
acgactcgcgagcggacgtcctttttttttttttttttttcgttttctcggagaattgttcactgaactaaaagaagacggcacgcgctgacgtctagcactattggggcgggacggtcggacgccgaacgcgcgcgcgtgccatgatcattcggggacactcgaaacatgacggctaaacatgatcgttgggcattttataccaactgacctaatagagttaaaaagaacgagggcgggtgggggggcaataacatttttagtagtaatttttactaaaaa

SEQ ID NO: 151689 - DNA, 247 bp, Zea mays
  Clone ID: MRT4577_69864C.1
aaaaccgcaaaaggggagggccctttccccccggaaagaaacccaaaaaaacaggttgggggggcccggggggccccaaaaaaattggtgtccaaaggggaaccccattttttggttaaaaaaactgggggccccccaaaaatttcaaccggaaggggtgaaacggacccccgtttaaagaacccccccccctggtccaggggaaaccaaattctcccccggtttccggggggaaaactttttttcc

SEQ ID NO: 151690 - DNA, 252 bp, Zea mays
  Clone ID: MRT4577_69865C.1
gagaaaaaaaacgcatgatccattgctggcactgaaccacaggacgaattgctccagacaacccaaacactagggattgctcgcacaggacacggataccttgaacaccagtggaatggtagacgcgtaacgaacgtaagggaaaagagagcgctatactcacaatgccgcactcggttacttctaccactcaccacttatgcatgtgcagtggcagtgccagacggataaagctcgccacaactggaagca

SEQ ID NO: 151691 - DNA, 200 bp, Zea mays
  Clone ID: MRT4577_69866C.1
cccaccaaaacagtaaatggcaatgttaatcgggccccaaacgtggggttaaacaaaaaaatgttaacagcaaattttttataaaaaaaaaagaaaacaagggggcgtttttaaatttttgacgtgagagcacccgaatattcaaaattttcaaaaaatccctccttgaagacccggaagagtatacccttttaacccgg

SEQ ID NO: 151692 - DNA, 279 bp, Zea mays
  Clone ID: MRT4577_69867C.1
gtaaaatgaagacttcaccttcaaaaaaaaaattaaaaaaaaaaaaaatacaaacaaatgggggaggacacactaaacagggtgatggttaacaggacaacagtggtcgacgcccaccgtctgtcgacgatactttaatggggatctcataatccattggggtgggcggttttataaattacaagtttatgcacgatgcttgggataacaactttttttttttgtgcgcctaaatttaatttccttggccgggttttctcaccatagggtgcgggaaaa

SEQ ID NO: 151693 - DNA, 229 bp, Zea mays
  unsure (1)..(229): unsure at all n locations
  Clone ID: MRT4577_69868C.1
ctgggtcatncttacgcatgcgcatatatcggctcgatgaagtctctgtgtgagaggcagagtgtcagagtctgtgttacttctggggactgacgaggacgaggctccgtggtcgtgcgtggtggtcttggtagacaccggtctgtgccggtcctcacccactgcccgcatttcctcagctcctggcagggcattctctaaactctgggcagctgcaaatcaggctggt

SEQ ID NO: 151694 - DNA, 331 bp, Zea mays
  Clone ID: MRT4577_69869C.1
aaaaatatatttacatcccgggggaaggggggttattttaacacattgttgacccaaccccaaaaaaaagcatggcgacccccaagggtaccaccctttcattttgggacaggccctgaaggccttaaaaattacattcaaaagaggggtctccaccatactggctttccctcaccatagcaactccagaccgaaaaggaaaccccaaaaaacaagcccgcggtgccccatgcggaaacctcaaggcactaaatggggggggcaaaaaaaacaattaaccccccaaaaaaaggggggggaggatgcccaaaatacaacctcaaaacccccc

SEQ ID NO: 151695 - DNA, 213 bp, Zea mays
  unsure (1)..(213): unsure at all n locations
  Clone ID: MRT4577_6986C.1
cggattcccggtcacactccgcggacgtggggaaagtgcactaggtaaggagtcttggaaactgtgcactgccccgttccatactttagatttatgaaatcaaatatgattcaaaatttcttaccgcttaagtaaacttggtagagttgcctttgcgttaatgcctactctggggttatcccgagaaaagggggnaaaaatataggggggggg

SEQ ID NO: 151696 - DNA, 571 bp, Zea mays
  Clone ID: MRT4577_69870C.1
gccggccggtccgggaccggatcgaaaacgaattaccctcggtgccctccctctcggcggcggcggcgcaagtccccttcatctccggcgcggcacttgacgtctgacttcaacaccaggcaaatggcaggcggcagggttgcacatgctaccctcaagggccccagcgtggtgaaggagatcttcattggactgaccctgggtctgatcgctggaggtatgtggaagatgcaccactggaacgagcagaggaaaactagatccttctacgacatgcttgacaagggccagatcgtcgtcgtcgtcgaggagtagttcccacgtgtcacctcagaagtttttttttccagttgtttttgaaaactcactctggagagcacgacaaagtgaatgctgtggagatttggcttgaaaataagcataaccatttgagaacaccagcttctgttgaattgtcttttcttgtcatgactatttgagcatgtccgtgtcgtaaccaaacatctgatctactttacaatatgttttatgtgatctttgcgattaaaaaaaaaaaaaaaaaaggccccta

SEQ ID NO: 151697 - DNA, 729 bp, Zea mays
  unsure (1)..(729): unsure at all n locations
  Clone ID: MRT4577_69871C.1
ttcttaagcagtggtaacaacgcagagtacgcggggagaccaggagcaaccaccgttagatcggaacggacgaatcgggtggtagtggtggatgaagatgaagggcccggcggcgtgtctctgccagtcggccatgtttggctggttctcttgtggttatccaaaacgcatgctccatcgtagtcgtagtacgagccctgtgtgcttcgctgtcctcttcgccgtttaataatttgtcctacttatgtttttggagtgaggagtagtgatctgtccagttgtcgggtacgtactccagtttactagccagtgagagtgaaggcagccctgcgtgtgctgtgtgtgtgtaccactaggctactagcttctctgatctctctccatcttgcaaatattttgcgagtgcgtaacggacatgcgtgttctagttaaaaattgtttttattattttgtttttttngntttgtttttgttttttttttttttggtttaggattttttgtggtttttccaatcgcttagggggtattttttgttttttgggtggtctttttatgttattcgtggcnnnnnnnnnnnnnnnnnnnnnnnnnnnnnnnnnnnnnnnnnnnnnnnnnnnnnnnnnnnnnnnnnnnnnnnnnnnnnnnnnnnnnnnnnnnnnnnnnnnnnnnnnnnnnnnnnnnnnnnnnnnnnnnnnnnnnnnnnnnnnnnnnnnnnnnnnnnnnnnnn

SEQ ID NO: 151698 - DNA, 513 bp, Zea mays
  Clone ID: MRT4577_69872C.1
gtattaccctctcggtgtcctccctctcggcggcggcgcagttccccctccatctccggcgcggcacttgacgtctgacctcaacaagcaagcaaatggcaggtggcagggttgcacatgccaccctcaagggcccgagcgtggtgaaggagatcttcattggaatgaccctgggtctgattgcgggaggtatgtggaagatgcaccactggaacgagcagaggaagactagatccttctacgacatgcttgacaagggccagatcagcgttgtcgtcgaggagtagtttcccacatgtcaattctgaagtttttttttccgccagttttcaaaactctctgaagagcatgacaaagtgaatgctgtggagatttgtcttgaaaataagcataaccatttgagaacaccagattttgttgaatttcctttccttgtcatgactatttaagcatgtctatgtcataccaaacattgatctacttttacatatgtttatgtgagcgttgcgagtt

SEQ ID NO: 151699 - DNA, 477 bp, Zea mays
  Clone ID: MRT4577_69873C.1
aaaactacttaacattatttgtttttgttatttttttttgtttttgtcaacaaggaccaacataacagaggggccaaatgtggggtaaacaaacaccaggtgggcatccgcgcatttttacagcccggccttgtccatgaaactgactaggagcagaacctcagttcttgatcttcttcttggccctcaggtggttggtgtgaccacacttcttcttagaagctggtgacagacctaaggtgcagatcctgcatagcatttgctgcacaccatcttgggctggttgtacttgggagccatcgcctgcagatagggatgaatgattccaccgcccgatcctaagcacgacgtggtgcggagaatgcttttagctgccctagcccggaggggtactgccatcctcctgctgattcccggtaaaatcacccgatggtggtgcggcgggatccctttcttgagctgtatctcggccttgac

SEQ ID NO: 151700 - DNA, 339 bp, Zea mays
  Clone ID: MRT4577_69874C.1
ggccgcttttttttttttttttttctagctgaaactgctcattcattaggtctaacaacgtcccactctccgtgtacagaactgatgtgctcgcatacaggggcgtattcgacggcatggattctcataccctgagtctcatatgatcgatgcgcaaacgaagccgcgcgcgccaattaattctatggaggcagacgaaaactggtgaccttaggaaaaatacttgctgcatggagaaagaatgctacaaacggcggagttcttgatccgaattgttggaagcattaaaagagctgctgccttgctattccactgccctcattgacaccctttaactgc

SEQ ID NO: 151701 - DNA, 642 bp, Zea mays
  unsure (1)..(642): unsure at all n locations
  Clone ID: MRT4577_69875C.1
ccgagacggatcgaaaacgaattaccctcggtgccctccctctcggcggcggcggcgcaagtccccttcatctccggcgcggcaaatggcaggcggcagggttgcacatgctaccctcaagggccccagcgtggtgaaggagatcttcattggactgaccctgggtctgatcgctggaggtatgtggaagatgcaccactggaacgagcagaggaaaactagatccttctacgacatgcttgacaagggccagatcagcgtcgtcgtcgaggagtagttcctacgtgtcaacactgaagtttttttttccagatgtttttgaaaactcactctctgaagagcatgacaaagtgaatgctgtggagatttggcttgaaaataagcataaccatttgagaacaccagcttctgttgaattgtcttttcttgtcatgactatttgagcatgtccgtgtcataccaaacatctgatctactttacaatatgttttatgtgatctttgcgattaaggagaacaccagcttntgttaaattgtcttttcttgtcatgactatttgagcatgtccgtgtcgtaaccaaacatctgatctactttacaatatgttttatgtgatctttgcgattacctgtgctcgacttt

SEQ ID NO: 151702 - DNA, 736 bp, Zea mays
  unsure (1)..(736): unsure at all n locations
  Clone ID: MRT4577_69876C.1
gctcatgcggtcatgcctcttctcttccgtggctctgtggtccgtagtcatagtcagcgccagacgcccagagcccccgaccagcaccggacactcgctcgcgaatagccttggcgggcctttaaaaggccggccccgcccgggcggggcccgacacggatcgaaaacgaattaccctcggtgccctccctctcggcggcggcggcgcaagtccccttcatctccggcgcggcaaatggcaggcggcagggttgcacatgctaccctcaagggccccagcgtggtgaaggagatcttcattggactgaccctgggtctgatcgctggaggtatgtggaagatgcaccactggaacgagcagaggaaaactagatccttctacgacatgcttgacaagggccagatcagcgtcgtcgtcgaggagtagttcccacgtgtcacctcagaagtttttttttttccagttgtttttgaaaactcactctggagagcacgacaaagtgaatgctgtggagatttggcttgaaaataagcataaccatttgagaacaccagcttctgttgaattgtcttttcttgtcatgactatttgagcatgtccgtgtcgtaaccaaacatctgatctactttacaatatgttttatgtgatctttgcgattaactgtgctcgaaaaaaaaaaaaaaagcggccanaanaanaaaaaaaggtttaaaaaaaaaaaaaaaaagcccncta

SEQ ID NO: 151703 - DNA, 458 bp, Zea mays
  unsure (1)..(458): unsure at all n locations
  Clone ID: MRT4577_69877C.1
gcgacgccaaacgcgtccgnnacgtaccnnngtagatgttnnagtgactttaataaaanntaattaaaacccaattaaacatgtgatggcgctaanannttgtagtaagaggaaagagaaanggaattgtangnnaaaagaannaaaaagaatnntatggtaaagaaaaaacgaattnngtaaaaaaaggagnnttttaaggtnntttgaaccttgaatttctgtttgacttcannatttttaaggtnntaatcattttgtattataatnntatttgcaaaaatctcacttttttattgttttatntgtgacacancgtnnttgatttaagtggaatctaattcgaaaattatgtattttatttatangaactattacttttgagatttttattaatttttagaagagtatatatatatatantgctattcgtcgcccttaagttaaaacttcaaaaa

SEQ ID NO: 151704 - DNA, 865 bp, Zea mays
  Clone ID: MRT4577_69878C.1
gaattaccctcggtgccctcccttttcgattcttgcggctcaagtccccttcatctccggcgcggcaaatggcatgcggcagggttgcacatgctaccctcaagggccccagcccacgcgtccgcccacgcgtcgtggactgaccctggggctgccacgcgtccgtgacgcgtgggaggagctcttcattggactgaccctgggtctgatcgcgggaggcatgctgaacatgcaccactggaacgagcagaggaagactaggttcgcctgcgtcgaaaccgccggccgggacacggatcgaaaacgaattaccctcggtgccctccctctcggcggcggcgcaagtccccttcatctccggcgcggcaaatggcaggtggcagggttgcacatgctaccctcaagggccccagcgtggtgaaggagatcttcattggactgaccctgggtctgatcgctggaggtatgtggaagatgcaccactggaacgagcagaggaaaactagatccttctacgacatgcttgacaagggccagatcagcgtcgtcgtcgaggagtagttcccacgtgtcacctcagaagtttttttttccagttgtttttgaaaactcactctggagggcacgacaaagtgaatgctgtggagatttggcttgaaaataagcataaccatttgagaacaccagcttctgttgaattgtcttttcttgtcatgactatttgagcatgtccgtgtcgtaaccaaacatctgatctactttacaatatgttttatgtgatctttgcgattaactgtgctcgactttatcttgcggtttatgtgattggatcacggttaccaaaaaaaaaaaaaaaaaagcggcc

SEQ ID NO: 151705 - DNA, 368 bp, Zea mays
  unsure (1)..(368): unsure at all n locations
  Clone ID: MRT4577_69879C.1
caagcctcatgtcccatggtctgcaatttctacccgggctgntgtctttgttgtatggatgcttnangggtacatcgcgggtgccgcttggagtcgttatgataatgttaaggaagattgccggaaaatggaggagctgaaaaaacaggcggaagcagctgatgttgctaaatctcagttccttgcaactgtttctcatgagatcagaacgcccatgaatggagttctaggaatgcttgatatgctgttagacactgacctaacctcaactcagagggattttgcacaaaccgctcaagtctgtggaaaggctttaattcgctaatcaatgaagtgcttgacagagcgaaaattgaaaccagaaagtt

SEQ ID NO: 151706 - DNA, 1949 bp, Zea mays
  Clone ID: MRT4577_6987C.1
ggggcatcgttagaatcagccttacacgagacagaattcagggaaaggaggagggcgcggcggcgacgagcttagcgatacagcggcaccggagagctagccgcggcctcgatgctcgcggggatctgaactagtgccgctgcccaatcgcgccgaggactgtggcgctcactcctcatatcccatttccagcactcgtttctccatttcccaccttcccaaacgccacttaaaagagaaaggagagcatcgcagtgacacacgcgcaatggaaggctcgccggtgacgcgcctcccggaggctaactccctccccgacggcttcgttcccgactccgagagccctggcacggacgcgacgtttcccttctccgcgcccatcgttgatgatgcgctcaactccgatatccccgccgcgaccaacccaggcggcgaggaaaccctaaacgatccccccctccctgcgtccagcgccgaagatgcctcctcggccgccgctgctgaagccttgggcacactttctctggacgctgccgccgagccagaacgcgctctagaggagaacggacccaccggcgctgcaagaggtgaagcatccttgaagaattgtgcatcagagctagtgggcgctccaactgctcaaaaagggagcgttgagccgaaacgtaaggttgtgaaacgtagcaagcttgagaaggacagagagttgtttgaactggcccagcaataccacaaagttgttgcagaaagggatgcagccattggagttaaagaaaaactagaatctctttgtagggagtttcagcgtcaaaacaaaatgctaaaggaagagtgccaaagggtgtcgacggagggacagaacatgcgtatggaattgtctgaaaaatttgatatcgccataaagggtgtcagtgtcaagcttgaggagcagagggttgagtgcattgctcagctagaagagaacaatatgttgagaagtaaactcaaagacattgctgatcagtataacattactcagcagaaatatgctcaccaattgaaagagaaaatgatggaacttgagcttgctgatctgagacttcaacaacatcaagagaaggctgctcacgaacatacccaaatgcaattgtatgccgagcaagtttctcagcttatgactactgagaagaacctgcggttgcaactagcttcggatggagaaagatttcagcactttcaggatgccctgtcaaaaagcaatgaagtctttgaaacttacaagcaggagatggaaaaaatgattttggtgataaaaaatcttaagaaggacaatgaatttctgaagggaaaatgtgagaactcagatattgctcttgtgaagctcattgaagagcgtgagctaacgaagaagcaaatagagaaattgaaaaaccaaaaggagacacttgagtccctgtgtcgatcactacaggcagaaaggaaacaaggccgctccgccagtattccagacgccccttctagccaagaagacatgccagcgacaagtcaagaatcttagcatatgtgcttgccaatattccgttggtgtccgttacagcttgccgggacttctgaagcctgagaaatgaatatgttactgatatcttgttttgcttgagtttgcggaagttctggtcccatttaacacatactcagctgtcaacctactcaggcctttggggattgtaactataacctagaggtgcattcctctacaagtaactcggtattgttactaaccatataagctatccgttgttccttgttttttgttcgagacaaaggctgttgctgggaaatgttaccaatcatataagctctcagtcgttccttttcttgattttgtttgagacaggctgttgcattgtgggtgtgttggttcctctgatcttttgttcccgttttgtccctaattaatggcctttttgttc

SEQ ID NO: 151707 - DNA, 418 bp, Zea mays
  unsure (1)..(418): unsure at all n locations
  Clone ID: MRT4577_69880C.1
ggtaaacagtatatatatagtagtcatgcatgacttggcatccaaatacttcacagctggacgcttggacagtctcattcgcacgcatggcgcatgtatgtagtagcactagcacatgccgtggggggggagttaatacgtagttccgcccacgcgcgcacacacacgtataaccaaccatgtagtacagttcgttctacgcgtgcagctatgcactagcggctagctgctacgtncttgaggtgtatgtgtgcatgcactacatgacctttaggcttgcgagttccttggngaacacctttctgaactttgggttgctcttcggtttctgggtctgctcgtgcgcttggggtctttttttgtgtggtgngttgtgggtgttttttttttttttgttgttttgtgttttttgtttttg

SEQ ID NO: 151708 - DNA, 1229 bp, Zea mays
  unsure (1)..(1229): unsure at all n locations
  Clone ID: MRT4577_69881C.1
ccggccgggtaccactgaagtatacggggaattttgtatttccttccgcatccttacactccggctaccaccatctctcacccccgccgccgccggctccaactcccagcgccccgccgcgccccgccgccgtctccatcggagctccccaccgactgccccgaaccatggcagccgcatcagcgacgcgccgcggcctctccgctctcctcctctccccttcctcccgcgcgctccgccgccgcctgggccccctcgccgccgcgtcctcctcaccgcacgtcgccccgtggccccttctcgcgccgcgcggggccagggccgcgtcgtccggcgggtccgggcactccccgctgaacgacccgtccccgaactggagcaaccggccgcccaaggagacgatccttctcgacggctgtgactacgagcactggctcatcgtcatggagttccccaccgaccccaagccgtcggaggaggagatggtcgcggcctacgtcaagaccctcgcggccgtcctcggaagtgaggaggaagcaaagaagaagatctactcagtgtgcacttcaacatacacaggatttggtgcattaatttcagaggagttatcatacaaagttaaaggattgccgggagttctatgggtgttacctgattcgtatctggatgttcctaacaaggactacggaggtgatctattcgtagatggtaaggtcatacacagacctcagttccgattcaatgagaggcagcaggtaaggagcaggcctcgtcctcgttacgacagacgacgcgagattgcccaagtggagccgagggagacgatgcaaagaggcccttcgacgacgcagcaacagaggccgccatgtccacaggaggccgctacacacaatcaggagcagcactgaaaccatgctggcaggagtaggaaagcggcatcagtatgggaatatttgtatggttgaagccggcagttgcttatttatatataaactaaggtcctgttagtttttttacagattggaggcccggaatggttcctagccggattgtttctccaatttaggccccgttcgtttctgctggtttggatcgttactggcctctttccgggtggaaagaaataatctggattgaaattcggcccggattaaaacagccattcgtttgaacttggataaaaaacagaaagccacccagggtttaagaaaaaaaaaaaaattntggcg

SEQ ID NO: 151709 - DNA, 392 bp, Zea mays
  Clone ID: MRT4577_69882C.1
aaaacctcatatttcgtctcgagaggctcgagataattattattgagaggtttaaaaactgtaacttcaaactttgtaaattattgtactatacttgttgttgtttgttattgttgctgttgagaagaattagttattaagaactaaagacttacttgtatatatttgtaaatagttgtatacaattgtgtatattttgtagtgttattgtaaatagttgcggtgagttgtgaatcaagatgagaagagttttgggtatcacgaagggctctgataggactctatcaacgctcttgaagaataagggcaaattgcagagtttggttgttcttccagattggcaagacaggtgtgcgtggatagacaaaacggggaaactaatcgcaaaacaa

SEQ ID NO: 151710 - DNA, 211 bp, Zea mays
  unsure (1)..(211): unsure at all n locations
  Clone ID: MRT4577_69883C.1
gcaaacnagaagaaacnnccgtcatcagcgacnncnccccaacggngccgacgatnngcgcaacagcagacgcagctaaccacnggctcgggcatccnggatgccgtcccgcncntcgtcgtcatcntcntcgcggcccacntncnggccctcgtgttcnggatgtacaagcnggcttccgagaagcaaccacnccggaggaagacacagt

SEQ ID NO: 151711 - DNA, 446 bp, Zea mays
  Clone ID: MRT4577_69884C.1
ggcaggacgcaggccctggcgtaataatgtaacggaggcgctgactagctacctatagctagttcactcgtttagcggcgatgagtaacggagtgtcacccatcaccatgggtggcagtgtgagcaatgacctgaatgaaccattgaaatggaggggggggggggtagggaaaaaggtgtttggaaaaaaaaaaaaagaaagaaagagaggaaacagtgagagggaatgtgagtaagaggaaggaatttgatagaaccgatacaatggagagaatagtgagtaatgaagtagagctacaactaccttgctggcgtgaacctgatgagtaccgctagtgtaaattaccattcaaggtgcgggtggcatagaggtcttgtgttattgactgctggtgcatgtactaccatggagccatatatgtcctgtgagcggtgatatcttattg

SEQ ID NO: 151712 - DNA, 199 bp, Zea mays
  unsure (1)..(199): unsure at all n locations
  Clone ID: MRT4577_69885C.1
catctaatctttaggggtttttttaatataatttagtgacctctgaaaaaagtatgtgaataaacaactcttacaccatcagaagagngaaagcagacaaattctttataactgacacacataacacgatagcatgagcaactctcggcagatcacgggataaggggagcacactggcctgatgctgtgtcatcaacaa

SEQ ID NO: 151713 - DNA, 381 bp, Zea mays
  Clone ID: MRT4577_69886C.1
aattccccggtttacccacccctctcttaaaccgaaaggaccgcaaaaaacacgtgctttttatagggggccgcccattaaaattgtttttaataccttctttgaaaaagattaaaattataaatttaaaggcattggaaaccaaaaactccctgattttttttgagaatattaaacaaaaaaaacacctcattcctattgtccctcttggcacccatgttttaaccttttaatattttaaagctcaacttttgactactattaatctttacctcttcatatacaccttgtttatcaatattcaatcatgtatttattttaccttccccattgttcttcttttccctatttgaaatatccacttatttatttttttacaac

SEQ ID NO: 151714 - DNA, 329 bp, Zea mays
  Clone ID: MRT4577_69887C.1
gccggatccggtcgccgacgcgtcgccacgcgtcgccacgcgtcgtgactttcactctatatacttacagctacggcgtaacaagtcgcaatccctctcagagagtcagaaatggcatacctcatagctgtttcgcggctggcagacacgagccagtcgcagtgcgctgggtccggctgatcctgagctcggcacgtcttcccggcggaggagcctgctggactgacaagccgcggcaggcgctctgcgtaccaaacggcccgtctgcaggcgatccgggtccatattggacggccgttcacccgcgcaaaggcgggtaccgacttctc

SEQ ID NO: 151715 - DNA, 497 bp, Zea mays
  Clone ID: MRT4577_69888C.1
caaccagcaagaaggggagttcttcacgcttgtcacgccgggactgtcatatgcgatgtcggacctggctggggcagcttgctgctggatatgatacgcgtacgtgcagcagtggcggatggatatctggtgtagggagtgtagagcaaaccaagaccagtgtctccagggaccgaacccctggccgacatgctccaccagcactaggtgcggccacacctctagcatacagacagcagcaaggagggagatacaaaacgatacaaccggataggtccactaggacgggccctagtagaggacacgcctaagacactgaccaaaggcctcatttcgaaggacaccttctactcatgacgagcccaattctattgaacactattttgcaaatggacataaaacattttctattctttacgtgaactccaacaggccattgatagtaaatataaggtgactaaccaatgatatctggcactacgaacactaaacactag

SEQ ID NO: 151716 - DNA, 253 bp, Zea mays
  unsure (1)..(253): unsure at all n locations
  Clone ID: MRT4577_69889C.1
cactcatccgatctcactgatccttcagcgccactttaagaggctaaccttactatgctgatctccttgattggtccaaagaggttgagtcctagacagctggaagtcagctgctggaccttatcactacccatgagggagaactagatctaacagagtttaacataacagnncacggtcgaatcgttcacatacaagtcaggcttttatccatttgatgccgccggaagcatgtgccctgcagctctctggc

SEQ ID NO: 151717 - DNA, 535 bp, Zea mays
  Clone ID: MRT4577_6988C.1
agatggaaaaaatgattttggtgataaaaaatcttaagaaggacaatgaatttctgaagggaaaatgtgagaactcagatattgctcttgtgaagctcattgaagagcgtgagctaacgaagaagcaaatagagaaattgaaaaaccaaaaggagacacttgagtccctgtgtcgatcactacaggcagaaaggaaacaaggccgctccgccagtattccagacgccccttctagccaagaagacatgccagcgacaagtcaagaatcttagcatatgtgcttgtcaatataccgttggtgtccgttacagcttgccgggatttctgaagcctgagaaatgaatatgttactgatatcttgttttgtttgagtttgcgggagttctggtcccatttaacacatactcagctgtcaacctactatccatctcaggcctttggggattgtaactataacctagaggtgcattcctctacaagtaactcggtattgttactaaccatataagctatccgttgttccttgttttttgtt

SEQ ID NO: 151718 - DNA, 395 bp, Zea mays
  Clone ID: MRT4577_69890C.1
cgaattgggtaccgggccccccctcgacgcggccgctattttttttttttgttcttgggcctcatgggttccatttattttgtctctgaaatgttaggaatctgtcttgggtaattaactcatcaacctctcatggcaagaatttgaaaaagtaaatgtttacccagattctaattttaagagggacgtcattagttacagctcatcgcacattaagctgcgaacaagatcgagacatctcagccccgcctctctggaacaagaaagatgcttggggaggaaacacagatcaccgtgacgaagaagctcatggtacacatgactgtgggttggtctcccctactacaacattatgcctaccagaacacagacacattcaggtgcctttaccgaaa

SEQ ID NO: 151719 - DNA, 502 bp, Zea mays
  Clone ID: MRT4577_69891C.1
catgctcccggccgccatgggctccggattacagtggtcgcggcttagcgtggtcgcggctattgagagacagacagattaacaaaaagcttggggaaagaaaaatggaaggaacttgtaacaaccgtagccatttccaaactatttttcttattttggttgccttcagttcttcttcattcatggagtcagcttcagcagcaaggccagcagccggagatacaaatacggagtttataagaacatcatgcaaatcaactacatatccaaacctctgtttcagctcattatccagccgttcaactgctattggggtttcccctcaacttctagcccatgaatccctcaccgtcagcctcgaaacagcgcagtctacatctgccacgatgctggagttggcacacggccaatgcatgacgccgagagagatcggtgccatgcatgactgtgtggaagaactaagtgacgcagtcgttgattggaaaaagtctttgggggaaaa

SEQ ID NO: 151720 - DNA, 865 bp, Zea mays
  Clone ID: MRT4577_69892C.1
gatatcccacgacacccgttaagggagaagagatcgtcatcatccgccaaaccagatcggctcggctgcttcctcttcttcaacttcgcagaatcgctggtcttctcgtcctctagttaagtccctcgagagcaatgggaggaggcaacgacggtcatgggtacccacccggtggccaggggggataccctccgcaagggtacccgccgcagcagggaggttaccctccacagcaaggatacccgcctgcacctggagcttacccacctgcacctggggcataccctcctgcacctggggcataccctcctgcgcccggagcgggtggcagtgacggggagaaggggctcctctccaacatcatgcacggcgttgccggtgctcatggtggtggtcatggctacccatctggtggtcatgggtacccatctggtggccatggataccctccacaacaagggtaccctcctcagcatggttaccccccgcagcagcatggctaccctccacagcagcatggttatccccctgccggctaccctggctcatctggtcacagtggtagccatggaggaggaggcatgggcatgggcggcatgctagctggaggcgcagcagctgctgccgccgcttacggagcacacaagatttctcacggcggccacggtggaggtggacacatgatgggaggcatgatgggcggccatggaggctatggcggcgggtacggccaccacggcggcaagttcaagcacgggaagcacggccacggcaagttcaagcacggcaagcatgtgaagcacggcatgtttcggcggcggcggaaagtttcagaaagtggaagtaatgcgctagctagtagctt

SEQ ID NO: 151721 - DNA, 834 bp, Zea mays
  unsure (1)..(834): unsure at all n locations
  Clone ID: MRT4577_69893C.1
aattacncggagaagaatcgtcatcatccgccaaccagatcggctcggctgcttcctcttcttcaacttcgcagaatcgctggtcttctcgtcctctagttaagtccctcgacagcaatgggaggaggcaacgacggtcatgggtacccacccggtggccaggggggataccctccgcaagggtacccgccgcagcagggaggttaccctccacagcaaggatacccgcctgcacctggagcttacccacctgcacctggggcataccctcctgcacctggggcatacccatctggtggccacgggtaccccccgcagcagcatggataccctcagcaaggctaccctcctcagcatggctacccaccgcaacagcatggctaccctccacagcagcatggctatccccctgctggctaccctggctcatctggtatataccactcccttgtttttcagtcattgatattgataaggatctgtgcaaagccatcatagcaccctctctgttaggaacatttacatttccacgatttctatgcatttatatgtgtagtatgtgctggattgatatgcatttagatgtgtagtatgcgctgcatcttcaacagcctgcaatttcagtctagtatatgagtggtggtttatcttgatgttaaagagtcccaagttctgttgtatcaaacttgtgtcattcttcagcatccgtcctcatcggctattgttttttcaggtcacagtggtagccatggagggagaggcatgggcatgggcggcatgctagctggaggcgcagcagctgctgccgccgcttacggagcacacaagatttct

SEQ ID NO: 151722 - DNA, 570 bp, Zea mays
  Clone ID: MRT4577_69894C.1
ccttcaaggctgttggacctctcaatcatgtagacaccttcgaaaccaaacatggaaacaaagtgcatcttgtaggggatgaatccaaccttctttatgtaggaacagacttccttcacaatcacctaataacgcaccttggagcacttgagagggatgccatccatcttgttacaacagtgaaacatctgcttgactcctagatgaaaagcacggagagcacgctcctggatctggacatcctttcagaatccctgccaaaaacacgcccatacgaagtcaatgattataacaagacatacagatcgccaagtgccaatattgataataaagaaccactgactttgctctctggcaagacagactgtgtatcatccttttgcatctgaaataacctatggacatccaaataatatgatgtcaacctgagacccttttaaacgtaccagataccagggtagctcgaaaattgatgtgaattcgagccataggagccggtgataatcatcgatatgctcgcattgttgatgctattattgctgaaatcaaagacgcagtgccccaaatgcc

SEQ ID NO: 151723 - DNA, 438 bp, Zea mays
  Clone ID: MRT4577_69895C.1
cgaggtcaatgtcctcgaaggtggagacgggggatgggaagaccggtccgaacagttcctggttgatgagcggcatcatcgccgccacttgcgcgcttatagatgcacctgaccggcggtgtgctagctgcgcccacgaaacagccctccctcatcacgtcctcgacgacatcgctctccatccagatgaggccgcagatgaagtacttctcccgggtaaacgctgtaaaggaactgcattctaacgagggtgggtcagttatttcgaaactgcaaaatgtggaccataaggttgcaaatcttgaccgggaaactcttggatcccaggagagaaatgtagatccctaaagctatcatgggtcacctaaaattgtgatgatggtgtagctgagacaaaggatgtagtgcttgaggaccctgtagaacacattggtgcta

SEQ ID NO: 151724 - DNA, 271 bp, Zea mays
  Clone ID: MRT4577_69896C.1
ttgttcttcagatcaagtccctcaatgaggactttcgcaacgaccattgtcaatcgcacacatccgggtgggactcagtccctccttacccatcttagtcattcctttcatgctacctgcatcaaccttcgtgagtttgttgccatcgacatctagttcattaaggcaaggaggaataccttctcggatggtacttatatttgtgtcatcatcacggatctactagaccttcttcattccctgaacagctcccatttttaatacctcacct

SEQ ID NO: 151725 - DNA, 432 bp, Zea mays
  Clone ID: MRT4577_69897C.1
tggcctggacctttgggctgatttatgtgcttgtttatgtgcttgtaagggtcggcccaacgccctagtaataagccagcgtaagacccggcaaacgttcctccgaatccagtggaaataacgttactaccgccacggacgacgcagacacttagtcagtcgcgtgactcgctccgcctgtcgtcgccggcatagtaggataatgtcgtattatacgctgcaggtcgacctcctacgagaatacacactaaattccttccgactagtccgccgaggcacataaataagcttgaaccggggacttgccggagaaaggtattccatcgggattatcgtatatcttcgtcctaaaagagaatcccccgaaaggtacctagatcactaaactctagggagggaaaacttcccccggaggactcgttaccgaactag

SEQ ID NO: 151726 - DNA, 327 bp, Zea mays
  Clone ID: MRT4577_69898C.1
gaaaaaaggagggatattttgggcttttggacatccaactggtggacaaaaatttttggccgccccccaaacaatagggagaatttgggcaaacaaaaaacccccccgggttgatttggattaaccatggggcgatcattaatttaaagggaatgaaagcctggcgggttaaccaggcttgtgggcggggcaatttacacacactttacaacctggggggtaaaatggggttcttccggggattcaccgggaacccccccacccagtttaaggaggggcttcccccttgggcaagaaccaacggggggggttgttttaaacttcccg

SEQ ID NO: 151727 - DNA, 409 bp, Zea mays
  Clone ID: MRT4577_69899C.1
cagcttgatagagcgtgcccaccaggaaaaaaaacgtgaatcagacactgagggggcaatgtcagccaagttcattgttaatgacagttatatgacatttgatacttttgacacggacagtcacaatatcctatattcagaaccgtcaggaacctcagttatgccttaaccaaaataatattggtctaatgtcattcaatactttaggcgtgaggggtcacaatgcctcaatttgtaagtgaatgacacaaccatcaggacttgtgtagtcttgagtaacaaggacagatatagtacctcagaaacatcccgccgaccttgatgcaagataagttctttgagcattcgccgtctgaaatgcttgcccgtgagaagaacaaagaccgcatgagaagttccgacagcaacg

SEQ ID NO: 151728 - DNA, 698 bp, Zea mays
  unsure (1)..(698): unsure at all n locations
  Clone ID: MRT4577_6989C.1
cactttctctggacgctgccgccgagccagaacgcgctctagaggagaacggacccaccggcgctgcaagaggtgaagcatccttgaagaactgtgcatcagagctagtgggcgctccaactgctcaaaaagtgatcaatattgtttatcacatagtatcatataaacggttgcaagaagaatttgtctgtgaaatgggattgatttacttgcttttgtaggggagcgttgagccgaaacgtaaggttgtgaagcgtagcaagcttgagaaggacagggagttgtttgaactggcccagcaataccacaaagttgttgcagaaagggatgcagccattggagttaaagaaaaactagaatctctttgtagggagtttcagcgtcaaaacaaaatgctaaaggaagagtgccaaagggtgtcgacggagggacagaacatgcgtatggaattgtctgaaaaatttgatatcgccataaagggtgtcagtgtcaagcttgaggagcagagggttgagtgcattgctcagctagaagagaacaatatgttgagaagtaaactcaaagacattgctgatcagtataacattactcagcagaaatatgctcaccaattgaaagagaanatgatggaacttgagcttgctgatctgagacttaacaacatcaagagaaggctgctcacgaacatacccaaatgc

SEQ ID NO: 151729 - DNA, 2771 bp, Zea mays
  Clone ID: MRT4577_698C.1
tagttcttccatccagatgactaatcttaggtaaaatatgacacaattagcggtgaaccaaacatgcagcagtgtccttttttatgaggacaatgtaggagcggtcgattccgcccatgtcagctctcccggagtggaaatcgttttgagagacttcactactttgctattatgaaacatgccgcatatgctataatatcatttgattgtttaaaaaaataaaaagaaaaaaaaatatatttatagggacatggagggatgattttgcctctattgttgtttgtgcatgcactttgatcgctgatgttcgtctccctataaaattgactctcaatgtccctatatatatatatatatatatatatatatttcctttttcgatttattaaacgataaaatgatatcataacgtgtatgacatgtttcagacgaatcctctcaaaacgatgacaaagcgatgaatcccaatttttaccatggcgggccacgctgcaaggcgcgagcgcatgccggccggcatggcggcccacgcgaggcccacgtgaggctcaccgcgcgtcgcccacgcgcccgtccttcctcccccgcgacgccgcagcagcacggcccgcactcgcactgcaccaggcaggcaggcagaagcaggcaccaccaaccaatctcctcgtctcccactcggctacccacatcccccggagctccacaaaaatctcccctcccaggctcccaccctcgcgcttggggctcttcaacgccaatccagggccggcacttccttgcacgtgttcctcagcctccccttcgtcgtcgcgcggtggttgggccgccccccacaaggcgactcacccaaaaaatctccactcctcgaccgcaccgagcagaggatcacatggcatccgccgtttcgcttctcctctcgcccccgcgcctgctccaccgcgacggcacatcccgcctcctcagcatcccgcaccggcgggtcctcctcgccgcccccaacaacgcgacccctcgtcggctcctggcccccgcgccgcgcgcctccaacaaaaacgacaacagcggggccgtggaggcgcccgaccgcctcgtggccgcggtcgcctacctatacccgttcctcgacggcgcgcaccacgggcgcttccttctcacgcagttccccttcttcggcgcgctgctccgcccgctggcccccgcggctcggctcttccactcatcgccgctcacgcccttcctcctcttcctcacgctctacttcgccgttgtgcggaaccagcaggcgttctcccgcttcgtccgcttcaacgcgatgcaggccgtcgtgctcgacgtgctgctcatctttcccgacctgctcgcgcagtcgttcgcgccctccggtggggttgggttcgagatcttccagagcatggagagcacggtcttcctcttcctgctcgtctccttggtgtacggcggtggcgcctgcctgctcgggaagacaccacgtctgcccattgtcgcagatgcagcggagcgccaggtgatgtgactacaattcgtttcctgcggaccatgttgatggaaagggaatctgatgatatgcagaaaacatcccaatggttcgttggcgcttgcagcaaatcacaagcttagtataatttacaattgccttgctgtttatataggtctagttgccgattgaatgcatgtactgtggaaggttgatacaaaaacgttgcaatactaccatatttgttgaattgacaaattttgagagagcagtacatgtacactgttttacaatctgaattgcatttacaaatgaggaggaatgtctgaattggggagctttatgactaccctcccctgagcagcttcctttgtacctgaatggaggcttaggtcagtaattgtgatttcaatataaataagagcattccatcaattgtcaatttcgtcgacaaagtcctggtctgttgtcggcttgtcgccacagtttgaatttcagtttgagctggagatcttgcttctctcgccccgaagcttcttggtcacatgtataatatcttcacattcatgatcctgtcaggtaaggttaaaaagaagtagtaaagaaatggctgattctgtgaataagccatgacataagtctagcaactttgcaagcattaacgtgctgatatactttaatgtgctgttattaccttcaaattgtcatgtatattattaggttctgttgctcttctgtccatactgatctctacagatatactagcttgagatgggtctactcccgacctttttagagcttgtgtcaatctatttagaagtctgatgtaaataatgttttctcttgttagttgcagatatagcaaaattaccatcataaacaacagtagtttcggaacaaacccttgagagtaagcatcagaaagactttgagtatcctcttggagagtttgtttctcgttcttgctcagtgttttgttgtctgcatcagaggttgacatgctcaaccatggtggatgtttgccagtactgcgatgaacgtgataacgtggctatgttagtacccatggcatggaggagtcctcgtgattcttttctggttgggctgactcgtacttttggaccttctcttgcaagaaccttatgtattcaataacctgcgagcaaaatgttccacatgctaaaatacttgctgtaacgtgctgatcaggattccggtctccccagttgctgagatcatgttacattgaaatattttttagtattatattttcgtc

SEQ ID NO: 151730 - DNA, 552 bp, Zea mays
  Clone ID: MRT4577_69900C.1
gagcgcaccctgatcatcgggcagatcactgtcaacggtaacggcgtggttaatgtgccggtgctcggacagggtgtgagcgatgcccaatccaaaggcggcctgggctcgatgctggcactgatgaccgcggcctataaagcctcggataactttggtgaagtttggtttttgccgctggcagacgccgagggttctgtggctgcgagcgggtctctgctgatcgctggcgcacccagtggcacaggtgtcgtctcgctctacatcgccggccaacttctcactttcgctgtggctaccgctgagcccgcgacggacattgctaccggcctcgctgccttggtcaatagcaccggaaatcttccggtgacggccgtggctaccgactcaaccgtgaagtttacggccaagaacaagggggcgaccggcaatgacattgacctgcgcctgaactatctgggagccgcaggcggcgaggtaacaccggctgggctgacgctgaccatcaccgccatggccgccggtgcaacaaaccctgtgctcgacgctgct

SEQ ID NO: 151731 - DNA, 1013 bp, Zea mays
  Clone ID: MRT4577_69901C.1
gcggatctagcaaacattgttaatgagtctgctctactagctgcacgaagaggtcggaatactgtgtctcgggaggatattatggatgcaatcgagagggagaaatatggggtcactgggaggcaagaatctgattctgaaaggcaaggcctcaccaagttatttccatggctatctaaacctggaaataaaccatcaagccctgatgatttccgaggactgatgggttatcatacattaagctaacttagtagctcttgcaacttgcaagaactgagaaagaatataaagtgcaactaaatctggggaactgttgcctgtaattttatgtacatcagcaaatatacttgtcgatattatgtacgaagtatgctgcaaattgcaaccggtggctattgggactttgagaagaaagctattacaaactacatgagggcggtttgcgaatacaaaattccaacaattttcctagcttaagagtcagtttggataccaagggctaatcagtttcgtgcttcataattttgttagaaacatgactcaagtttcgtcacataccctgtaaagctagtggcgctcctgcttctttacacatacacagaccaatcattcctctgattcttcccaactagaagtctggatgtgcaacgctgtgcaagtttacaaatgcagtgtcaagtgcggcgcatgggaactgaatctgcagcgaatgtgcaagaaatacacggcatcatatttcacagttcacaccgagcaacatttaatttctttttcctgttaacttacactaccgctgtctgtattttcattgaattactgtcaagaacaatttctttttcctgtttaacttacactaccgctgtcctgtattttcattgaattactgtcaagaacaaactgcaactctagcagtttgagatgtgaaaccacccgatctgtaaacatgttgacagaaacctagaacccaaaaccatgtttttaaaaaccaattaaatcaatatttactctgcccc

SEQ ID NO: 151732 - DNA, 380 bp, Zea mays
  Clone ID: MRT4577_69902C.1
cgtacgcgtgggtgctagttcatcactgccttctatgagagggatcctgcctaactatttcagttcacagtggtcatttgctcatgtccatttaccacaagtcactcgtcacatagtagcctttggtgcccataatactgtgatgatggctggcctgcatggcatcttattcaggttcagttttgaccattcgaatggagggcagatgttgccacatgaacatttgcggcttctcaagtgcgacagcccacctttcatgactgcagccgattgacctgctgcacgtggatcatccatccgaccatgtaaatgtcgacatgccactgtacatatacgctgtctaccggctaagttataggcagacggaataaggatagctg

SEQ ID NO: 151733 - DNA, 1647 bp, Zea mays
  unsure (1)..(1647): unsure at all n locations
  Clone ID: MRT4577_69903C.1
tgctgtgaccatattttgaggggggtttcgcccgtgttgtcagtagaaatttgcgtgtgcactcttcccgtgttggggcccatgcgatgtgtttcacccgatgtatcggtgggcttcctgtgtaaaaaaaaaaaaaaaaaaaaaaaaaaaaaaaaaaaaaaaaaaaaaaaaaggggggggggaaaaaaaaaaaaaaaaaaaaaaaaaaaaaaaaggggaaaaaaaaaaaaaaaaaaaaaaaaaaaaaaaaaaaaggggggggccgtttaaagggacccaagttaacgcccccnncattccaaanaaaaaatttttttatgggggccccaaaataaaataaaggggggggggtttaaaaagggggggaggggaaaaacccgggggtacccaaattaaagggcttggaaaaaaatccccttttggcaagggggggaaaaaaaaaaagggccccacccaatcgcctttccaaaaagtgggcaaccctaaagggaaaagggaccccccccttaacgggccaataaggggcggggatgcgggaggttcatctccaccatgccctgccccaggtgcttcgacctccttgccatgggggagcacaacggacacggtggagggcgccccagtctgcacccggcggctggaccacggaggaaggcaccaacgacacattggtgagctttgccttcgctgtgctctctgccccaaatctcgcgccgccgctcttcccggtcccagtcatcggaccacagaggaacgacgaggagctcggcaacccggtccccaaggagcccatcctgttcctaaagccgacctcgtcgttcctccatgctggcgtggccaccatcgcagtcgagatcctagagacgctcgagtctctacaccacaaggtcgagctcgctatagtcatctcccggcgtgggcatgacgttcctgaggcatccgccatggacttcgtcagagacactcgccaaggtccttggaaggaggaggcagagaagaagattcacacagccttgtgcgagcgccacttcgggtttggatgcaatgttgatgaggatacatctaataagctcaaggacccctggtgtttcctggattcgtatgttgatgcagagtgcaaggactatagagagaaggaagaaatgtaaagtctcacggttagaaaattgcattctaatatagttggcctagcagctcaggaaccagtgtcgtatttggctgaaaacctatttgaattctctcatcagggtgtgtcctcaatggctacaagatctgagctggaatggtgccaaaaatgcctgctccttttgcttccacaatttgatcttgcaattgagatgatgactgcattctggactgcaaatctggagctgacaacataccccaaggggcaacaagtgacatacctatttgattggaatgtttgcagtggcacagaccttgcactgcttcggacaaacatagtgaaggaacagtgtcatttagtgctctttgttcttatggtgtaccttttcttacaggacatccatgtttcttacctacaaaagccctctcagtttttgggttctattggttgtgaatttgaggccatggagattatacagcgaagaaggttgtgttacaagaacagaaggtgtctcgagcact

SEQ ID NO: 151734 - DNA, 585 bp, Zea mays
  Clone ID: MRT4577_69904C.1
gatgtccaagcagtgtcagctttatttaaggttctacaacattatatataaaaaaaaaaattatatagcataagcaaaacaaagctaaggaggtatctatttttagcatgtttgtgaaaccctccaaggttcccctttatcagtatgtaagacagacccactggcgccagaagaccttggttaatagataagcttgttgctccagatgtacatactttattttttttctctctcatgagttaaaacacaaaggactgctttgtgtgtaatggctgtttgcacaattaggacagcgatggtccatcagataacaccttaaaaccttcctgatgcatgctgctgagctgagcgctgcaacctgtggatctttccggtaacacggttatctgtacatactttaaaagagtattagatatggttaacagaccagcaaggacagcacaggcccttatttaaatttatgaccaggccagaataaattgtatctattgtgttatgtggggtgatcacatacaagcgagctctgagaaccattgctcaagccctttctaagcggtaaccaactattcagcctttaggctcccg

SEQ ID NO: 151735 - DNA, 490 bp, Zea mays
  Clone ID: MRT4577_69905C.1
ccaacctttaaatttttaaaaggtagcacctttgtgaaccgtgggcttgactttaaccctaaggggtggttattgggccactaatggacctaaggcaaaagggaaccttaatatttgggttggggctttttggggttttttttttaaagtttggtcgaaccaggattaacgggatatgccccgaccaagtttagggcccggaggaccttggtttcaaaaatttgtgccttaatggttaactacttgacctgtccacccaaggaaaaacccaaatcctttctattcacatggaaatgtgacgcagtaggacacaaactttgccaaagggaaactaggactggatctatataaagtattaaaccactcacttcagtcctatggaatccaattttaatgatggcttttcaatacacactgaatgctttccgaacgatgcaagtgcatgggtccctattaaacacatacactctctaatggtttttttaaatac

SEQ ID NO: 151736 - DNA, 227 bp, Zea mays
  Clone ID: MRT4577_69906C.1
ccggctgttgctgttcatttagtcgtgggggtggtggagccttgcgtaagaaaagcgcttgtattatgaggacgggaaatgaagagcctgcaatgaacagtaatattttgggaattgatagattggacaaaaaaaacgcctgatggtatgcgagtgtttaacaaaaatggaagcgaataactgatgaggcagactgagatacccggtagagacgccgtgttgggaga

SEQ ID NO: 151737 - DNA, 156 bp, Zea mays
  Clone ID: MRT4577_69907C.1
atggaaatcggtggctggcgagggaggtggcggctcacggcgatagatcctgagggcggcgcaggttcgagggagcttgttggaggtggcggctatggagaaatggaggcggccgtgatggagaaatggggaggcgggtctgaaggcctccactga

SEQ ID NO: 151738 - DNA, 1072 bp, Zea mays
  unsure (1)..(1072): unsure at all n locations
  Clone ID: MRT4577_69908C.1
gtaactgttccttcaatggcttctgtctacaatgaatatgnccttgaaaagccaatatgacactagcatttatcttcaggtaaagtattagttagtttacctttggctgagttcatttagagtagcttgtattgtccagccttagatcagaaatttcatttattgtagttctgtttttgttttccaacttcatggtttgacttgtattgctgtttgtttttttatcatattgccccttatttccttgatgtttttccatttaattctagaacttgtttctgtatggatatggagcaatattcaacttccttggcattctcgggactgccttattccaagggccagagagttttaatattcttcgaggacattcgagggccacgatgtttctcatatgtaataatgcagcacaaggcattctatcttcattcttcttcaagtatgcagacacaattttgaagaagtattcgtcaactgttgccacgatatttactggcctagcttctgctgcatttttggggcataccttgaccattaattttctcctgggcatatcagtggtgtttatttcaatgcaccagttcttctctccacttgctaaagtcaaagatgacaaaccagctgacttaatagagttggaagacacacaaaatcaccggtcatccgaatcttcttttgtaaatatgactgctggtgctgctgttgatgcgagccatcggattggaactgatgagaggcaacccctgttgcctacatgaactagtttcttgaggtttggtgtagcattgtaagttgaataaactattgtacactgtaaaggcaaaggaaagaaagaactaccaacatcttctccattttctttcatttttgggacgaggccggccggtggcctgccatctgtggccgtgggagtgacagagcagcatacattttgataggcgtataattcaatagggattttccagatacggcacttgtaacagaattttcttggaggtgtatatgaacaacggcgatgtgacaatcttttctgtacggaacatttatactattgagtgattgatttactatt

SEQ ID NO: 151739 - DNA, 1966 bp, Zea mays
  unsure (1)..(1966): unsure at all n locations
  Clone ID: MRT4577_69909C.1
cgctccggaattccccggccccttcgcaccgtttccctctgcgctcccaccccccgcccccccgaaatcaccgccgcgccccgcgtctcgcccacgctcacaaggaaaggaggggaggagaccggggcccagacgccaacgcgcggacccctcgagtagggcgaggtccgggctccgctcccggtttccggggagagtgcggaggacccccatcgtgcgcgccattgagctctgctcccggctgctcgccggggagagggcggaggacccgatcgtgccgtctcaacccgctccgcacccgcgcggccgcgggcgtggtgctcccgcgccttccgggcgcctcctgcttctccgtgcgccctcggctccatggaggccggctactgcaaccgcaagaagaccgacggcatctgcgagtcagtctgcgacagcgagtttggctcgaagtcagtcctgagcatgtcaaggctgaagtgcgcactgcggggatttgatctgagggttctcttgatcctactgattggtgtgccaattttgatctttgccatatatgtgcatggccagaaggtgacttacttcctccgaccaatctgggagaagcccccaaagcccttcacaatactccctcactattaccatgaaaatgtctcgatgggtaacctatgcaagttgcatggatggaaagtcagggagactccacgccgtgtctttgatgccgtgctcttcagcaatgagcttgacatccttgatatccgctggcacgagcttagcccgtatgtgtcagaatttgtgctgcttgagtccaattcaacttttaccggcataaagaaggaccttcacttcaaggaaaaccgccaacggtttggctttgcagagtcacggttgacctatggcatgataggtggaaggtttgtgaagggagagaacccatttgtcgaggagtcgtatcaaagggttgctctcgaccagctcattaagattgcgggcatcacggatgacgacctgctgatcatgtctgatgttgatgagatcccaagtggacacaccatcgacctcttgagatggtgcgatgacgttccggagatactccatctccagctcaggaactacctctactcgttccagttcctactcgacgacaagagctggcgggcttcagtgcacagatacagagctgggaagacgaggtatgcacatttccggcagacggacgacctcctggctgattcagggtggcactgcagcttctgcttccgctacataaacgacttcatcttcaagatgaaagcctacagccacgtcgaccggatcagattcaagtacttcctgaacccgaagaggattcagcatgtgatttgcgaaggggctgaccttttcgacatgcttcccgaagagtacacgttccaagagatcatcgccaagctggggcctatcccgagtacattctccgccgttcatctccctgcctatctgctggagcaattcgatcggtacaggtaccttctcccaggcaactgcgttagagagagtggctaggcagctggctgcccgccgtctgcatcatgaccctgaggcgcacggacgtcgctctctcgcggatgtctgtcttatggcggcgggggttgtgtccgatacgattggctgacttagttgagtgatcgcttggctgctggttgagttcatatgggatttttgtgtaccgtgtaacagaaaccatggaaggcctgacggctgcgtagcgcagcgcgtgcttgatcgctgctgcgttcttgtttggcagaggagagctgagagctttttgttcgttgcttccatgattgatatatgatgaactcagaacctgttgtagatctcataccgccgagcgacaacccacgcttcagattctttctttcnnnnnnnnnnnnnnnnnnnnnngatgtacattgccgttcacttacctagntacgttgagccatagatgttt

SEQ ID NO: 151740 - DNA, 275 bp, Zea mays
  Clone ID: MRT4577_6990C.1
gcggggtaagaaacttatatactagaagtattataataagtccggttttagtatatatatatagtatcaaatcatatcatcgtggaccaattaatatatggttacagctgtcgcaatcgtatcaaccaacatgcatgtatacacacttacatgtgcacaaagactgacgcctaacatgcatagagagatagcaaacttaagaaccctgtttctttctttcttacactcacaccattacattacctatggatgggagtcagctcgtccttcgctta

SEQ ID NO: 151741 - DNA, 1157 bp, Zea mays
  unsure (1)..(1157): unsure at all n locations
  Clone ID: MRT4577_69910C.1
gtaatctaaaggtactggnttatagctgttcttctgaaatttataatgagaaggagattctcagttattcagtgggaagctcttgcttnattgcttattggaatcagcatcaatcaacttcgaactgtacctgcgggcaatacagcatttggtcttcctgtcactgctattgcatacatatatacattgatttttgtaactgttccttcaatggcttctgtctacaatgaatatgccttgaaaagccaatatgacactagcatttatcttcagaacttgtttctgtatggatatggagcaatattcaacttccttggcattctcgggactgccttattccaagggccagagagttttaatattcttcgaggacattcgagggccacgatgtttctcatatgtaataatgcagcacaaggcattctatcttcattcttcttcaagtatgcagacacaattttgaagaagtattcgtcaactgttgccacgatatttactggcctagcttctgctgcatttttggggcataccttgaccattaattttctcctgggcatatcagtggtgtttatttcaatgcaccagttcttctctccacttgctaaagtcaaagatgacaaaccagctgacttaatagagttggaagacacacaaaatcaccggtcatccgaatcttcttttgtaaatatgactgctggtgctgctgttgatgcgagccatcggattggaactgatgagaggcaacccctgttgcctacatgaactagtttcttgaggtagggatagatgactctttttttgcggtgtgagcagcaggtttggtgtagcattgtaagttgaataaactattgtacactgtaaaggcaaaggaaagaaagaactaccaacatcttctccattttctttcatttttgggacgaggccggccggtggcctgccatctgtggccgtgggagtgacagagcagcaaacattttgataggcgtataattcaatagggattttccagatacggcacttgtaacagaattttcttggaggtgtatatgaacaacggcgatgtgacaatcttttctgtacggaacatttatactattgagtgattgatttactattactatgttgttacctaaaaaaaaaaaaaaaaaaggccccta

SEQ ID NO: 151742 - DNA, 309 bp, Zea mays
  Clone ID: MRT4577_69911C.1
gttattgacggacatcatcacatgtcaattcacttcgaacgcgcactggcaattgccaaatggagaaaaaaagggaaggaacgcacgaacagagcacagaggaggagatcgcctcccatgtgtaggaagagagagagaggaagttacatagcagcgaggcctataaagtcgacagcggacttggccatgatggcggtgaactcctagaagctgatgacgccgtctccgtcggtgtcggcctctttcatcgtgtcggtgagctcgacgtatcaaatggggtggcccatgagcgccatggagcgcgcgagc

SEQ ID NO: 151743 - DNA, 3230 bp, Zea mays
  unsure (1)..(3230): unsure at all n locations
  Clone ID: MRT4577_69912C.1
aaatttcctttcatgatttttcctttaattgtagaacttgttgctgaactgatatggagcaatattcaacttgcttgctattcttggcactgtcctattccaaagcgagcaccttcatatgaacatcaactgacattgatagatgatgccagctgcatttctagagtactacgccactgcctgtatttatgcggatacactctacatgacaatgagaaatataattttgtatgaagataccctcatgctttgcaagctgtacaaaaaaacgacagacataacttcataccttatgtaagctataaaagcgaaggctgactacctgactgattttgtgcacgagattagaatttcccacacttcctaaagattagcaaacagcggggttacacttgtcgatgactgactgaccgcttacaattcctgatgtcacacacgataagcatggtggctgtcttatgattatgataattacgttgggaccctcgaggccggccggggcgtccctccccttcctcttcccaccttccctcctcccttctccaatcatccctttctggctttctcctcccccctgaggccccgagtcctgccggaatccgagatcccggaggcaacttcccacgggctcctctcgctccggtagctggatcaaaccatcgtgctctcgtctcgacagaaaccccggccgaaaacccagccggacccagccctgttcgccgtgcgcgcggtgccccgggccagatctgcgagatccgcaccgacaccgctacgcctatcacgagcctgtaggtggatgctctcgtgatctctcggaggccgcggggactgagcggcatctcggcggaggcgtagcctgcttagctggtggcctgccgagatgcagcggaacggggtggtggaatgcagcgtgtgccgctcccgggtggtggtgccgagtccccggagcgtgtccagggcatacgacaagcaccgcagcaagatgtcgtccaagttccgcgcgctcaacgtcttcctcgttgtcggcgactgcatccttgttggtctccagcccatcctagtgttcatgtcaaaggttgatgggaagttccagttcagtcccatcagtgttaactttctgaccgaggttatgaaagtcatctttgctattgtcatgcttataattcagtctagaaagcaaaaggttggagaaaagccacttttggcacgttcaaccttcatacaggcagcccgtaataatgtacttctagctgttcctgctcttctatatgcaatcaacaattacctaaaattcatcatgcagttgtacttcaatcctgcaactgtgaaaatgctaagtaacctaaaggtactggttatagcttttcttctgaaatttataatgagaaggagattctcagttattcagtgggaagctcttgctctattgcttattggaatcagcatcaatcaactccgaactgtacctgtgggcaacacagcatttggtcttcctgtcactgctattgcgtacatatatacattgatttttgtaactgttccttcagtggcttctgtctacaatgaatatgccttgaaaagtcaatatgacactagcatctatctccagaacttgtttctgtacggatatggagcaatattcaacttgcttggcattcttgggactgtcttattccaagggccagagagttttaatattcttcgaggccattcaagggccacaatatttctcatatgtaacaatgctgcacaaggcattctatcttcattcttctttaagtatgcagacacaattttgaagaaatattcgtcaactgttgccacaatatttactggcctagcttctgctgcatttttggggcattccttgaccattaattttctcctgggcatatcagtggtgtttatttcaatgcaccagttcttctctccgcttgcaaaagtcaaagatgacaaaccagctgactcaatagagttggaagatacacaaaatgaccgcccatctgaatcttcttttgtaaatatgactgctggtgccgctgatgatgcaagccatcggattggaactgatgagaggcagccgctattgcctatatgaacttgtttgttgaggtaggacagaagagaggggatagaagaagaggctcctttttgccgtgtgagcaacagatttgatgtagcattgttaggcgaataaacagctattgtacactgtagaggcaaaagaaacaaataaacgtggtttccattttctttaaattttttggggataccttgggagcggcagaaatcatacattttgatagacataattcaatagggatttctagatacgatacttgtcaaaaaaaaaaagaattcatggagaaacaacggctgtgataatggtttttttaggaaccttttctttatacaattatactattgattaattgttatactattactacattgttacctgattcgtggccgtaaaagtgacagagcagcaaacattttgataggcgtataattcaatagggattttccagatacggcacttgtaacagaattttcttggaggtgtatatgaacaacggcgatgtgacaatcttttctgtacggaacatttatactattgacatagattcttgtaggcagatttttacggtgttgctcagttgagaatttgacatggcaacatgcacgtagtttgccaattcagtaaggtgtatgattgcagataatttaaacagtataaacccgaaaagaggatgtttgactggtttttagcggatatttgtccataacaattcattttctatagcaatttgagaaagcactgaatagattgttgcaaagtgatggtagaggcaccaaatactgatccgtaggctcatattgtcttcaagatgaaaaatgatctgcttagctgtacctattagctcggcagaggacttcagatccacatgggttctatacttttatgtgcaataatacttacgtttcctggaatatttcactcgcaagcaagcacatgaactcccagctgttttgcaggtaggacagaagagaggggatagaagaagaggctcctttntgccgtgtgagcaacagatttgatgtagcattgttaggcgaataaacagctattgtacactgtagaggcaaaagaacaataaacgtggtttcattttctttaaattttttggggataccttgggagcggcagaaatcatacattttgatag

SEQ ID NO: 151744 - DNA, 474 bp, Zea mays
  Clone ID: MRT4577_69913C.1
gaacgcagaggaagaggaggcggcgagagtaagaagcggaagtctgccaatggtggtcggtccaaggcattaaggaagcgcatgaagaggacacaccgtaccgtagcaaggcatttcgctttctgtaggtggagagcagtggcaggtacagtatggaaatcgaagacgaggcgaaggtgacgtcggttggctggcgactgaccagcaactattccacggcgcctataggtagaagaaccggcagaggcttttgtaatgcacacaagtatctgggatagagtttagggataaaatgagcaagaacagagtggaggaatggggaagtcacggttgatgtccatgggactttgggcacttttttgcatctttttgcattttagcctttttttggtttttttttcacaactataccctttgcagtttcatttcaaaaaatggacccttgatttggcgctgtatgtgaaagtagaaact

SEQ ID NO: 151745 - DNA, 395 bp, Zea mays
  Clone ID: MRT4577_69914C.1
atattctcggactccatactctgcactatcggcggctttaatagaactcgcgggatccataaaccctcatggaccatcacacggggaccgctagcacatccataatagccccccacctgctcgaccacagacacacgggcgccgcgcattgccaccaacacctcccgcatacgctccaactagtccactccccacacctgccaaccgccttccaccggcgtcggcatgctgaccatgtcaccaagcagccccattacccccttatccattggccacctagggcacttgctattgggcgcaccaatgatgggacggtcagccctcgcaaggagtacccggggatccctcctgatagtggccacatcgctgacactctggtcaccacacccactccg

SEQ ID NO: 151746 - DNA, 394 bp, Zea mays
  Clone ID: MRT4577_69915C.1
cactgagctcgacgcggtcgccggcttcagcgagatcgtgccggacaccgtcgtgttcgatgatttcgagagtgagctcgtcgctgctgcttgggatcactgggctcccagacactaagttcaagagtgcgatagatactgcactggcagatggtgagtgcaacgcactggagaaggctgaggacaggatgtcctgttacctcaccaaggctcttgcaaatgttggcgctgaactggctcatcaagtccctgggagagtttcgacggaaatagatgcccggttagcttatgacacccagggcataatccacagggtacatgaactgttgaatctatacaaccaacatgatgtctcaactgaccgcctgttattcaaaattcctgctacatggca

SEQ ID NO: 151747 - DNA, 248 bp, Zea mays
  Clone ID: MRT4577_69916C.1
tcttcctcccatgcctcctccctctcctaccttcctacttaacaatatctgtcctccctatctaaactgcgtttcctacacttgcatccgaaacaatcaactttacactcctttctacccactgattaactttaataactctcaaagtatcattattacacttactccctcactcatacaataattctacaccaataacatcatttcacaaaatcttactacatttcatctcaacaaatacttcttta

SEQ ID NO: 151748 - DNA, 1919 bp, Zea mays
  Clone ID: MRT4577_69917C.1
ttttctttaggtcactatcgtcaccactaccgggggctttcgtgctcccaagctccctctgcctgcctttataaatcaccggggcatagcgccacaatgacacacgcccttgctccaagaaacaaccgtcgagcccaaccgcacaagcgcgcgaggcaggagagcgagagaggctgggagcagaacacaggaacggaaaggcctcgagccggccggaaacgctattcttctcccctctgcagtcttccgtgcccgacctgcagtcttcacttccattccaccggctccgatcccaactgccatggcgctctccatctacacgcccacctcctcctccctcgtcccgccctccattcaggaggtcaggctgacttcgcgaccgccaaagcccgcgactttcagcctacggaggccacatctggccgcgcgggccgccgctggcaacgcacccacgtccccggtccgcgaggtcgtcactgagctcgacgcggtcgccggcttcagcgagatcgtgccggacaccgtcgtgttcgatgatttcgagaggttcgcacccacggcggccacagtgagctcgtcgctgctgcttgggatcactgggctcccagacactaagttcaagagtgcgatagatactgcactggcagatggtgagtgcaacgcactggagaaggctgaggacaggatgtcctgttacctcaccaaggctcttgcaaatgttggcgctgaactggctcatcaagtccctgggagagtttcgacggaaatagatgctcggttagcttatgacacccagggcataatccacagggtacatgaactgttgaatctatacaaccaacatgatgtctcaactgaccgcctgttattcaaaattcctgctacatggcaaggcatagaggcctcaaggttgcttgaatctgaaggaattcaaacgcatctaacatttgtttacagtttcgcacaagcggcagcggcagcacaagctggtgcatctgtagtacaaatgtttgtgggccgattgcgggactgggcaaggcatcactctggtgacccagagatagatgaagctttgaagaatggagaagatgctgggctttctttggcgaagaaagtatatgcctatattcacaggaatgggtacaaaacaaagctgatggccgctgccatacggaacaagcaggacgtatttagccttctggggatcgattacatcattgcaccactgaagatattgcagtctctggaagaatctgtcaccgatcccgatgtgaagtacggctatgtcccgaagttgactcctgctattggcaagacgtacaacttcactgaagaggagcttgtgaagtgggaccagctgagcctgtcagctgccatgggaccagctgcagaagaactgcttgcttcagggctagaggggtacgtgaaccaagcacgccgcgttgaggagctctttgggaagatctggccacctcccaatgtttaacaacggcgttgagagcaatagcaatgtgatttgcctggcaggctcacaatgctgcgcggaagacgatttgcttctttttggataatacacgaagcactcccgtgtttacgttgacttgacttgcagtgtgcatgtattctgtttttgtttgtaattcagatgatttgctggatccatgagaacctgtcgcctgatattccctgcaactgcaatcgtcctcgtacgtacggctggcaacggcttcttggaacatcaccacctgagctgcagttacatgattccatttatacacacacgtatctgcctgctatcagaagtcatttctacgctggttagccaagttcatgttttggggatacaatcgcccacctagcgtcaagatctcccttgtgaagcgtcatgctgaatgtatgaatttaccatatgcttttgt

SEQ ID NO: 151749 - DNA, 1449 bp, Zea mays
  Clone ID: MRT4577_69918C.1
cattggtacctcgaggccggccgggcagtcttcacttccattccaccggctccgatcccaactgccatggcgctctccatctacacgcccacctcctcctccctcgtcccgccctccattcaggaggtcaggttgacttcgcgaccgccaaagcccgcgactttcagcctacggaggccacatctggccgcgcgggccgccgctggcaacgcacccacgtccccggtccgcgaggtcgtcactgagctcgacgcggtcgccggcttcagcgagatcgtgccggacaccgtcgtgttcgatgatttcgagaggttcgcacccacggcggccacagtgagctcgtcgctgctgcttgggatcactgggctcccagacactaagttcaagagtgcgatagatactgcactggcagatggtgagtgcaacgcactggagaaggctgaggacaggatgtcctgttacctcaccaaggctcttgcaaatgttggcgctgaactggctcatcaagtccctgggagagtttcgacggaaatagatgcccggttagcttatgacacccagggcataatccacagggtacatgaactgttgaatctatacaaccaacatgatgtctcaactgaccgcctgttattcaaaattcctgctacatggcaaggcatagaggcctcaaggttgcttgaatctgaaggaattcaaacgcatctaacatttgtttacagtttcgcacaagcggcagcggcagcacaagctggtgcatctgtagtacaaatgtttgtgggccgattgcgggactgggcaaggcatcactctggtgacccagagatagatgaagctttgaagaatggagaagatgctgggctttctttggcgaagaaagtatatgcctatattcacaggaatgggtacaaaacaaagctgatggccgctgccatacggaacaagcaggacgtatttagccttctggggattgattacattattgcaccgatcccgatgtgaagtacggctatgtcccgaagttgactcctgctattggcaagacgtacaacttcactgaagaggagcttgtgaagtgggaccagctgagcctgtcagctgccatggggccagctgcagaagaactgcttgcttcagggctagaggggtacgtgaaccaagcacgccgcgttgaggagctctttgggaagatctggccacctcccaatgtttaacaacggcgttgagagcaatagcaatgtgatttgcctggcaggctcacaatgctgcgcggaagacgctttgcttcttctttttggataatacacgaagcactcccgtgtttacgttgacttgacttgcagtgtgcatttattctgttttttttttttgtaattcaaatgatttgctggatccataaaaaaaaaaaaacaaacaaaaaaaaaaaaaaaaaaaaaaaaaaaaaataaa

SEQ ID NO: 151750 - DNA, 431 bp, Zea mays
  Clone ID: MRT4577_69919C.1
aaatgacgcggggggacaccccccaaacccggacccgtacctccaggcctaccacctttccctatagtaacaagacttagagccaggcacaatgatgcacaaacctgcaccaagggaaaaacaggtaaccggttaaaaatccacacaacaaacaaacctaaaacataaaccctaaaacctggagggcccaaagacccaaccaacaaacattaatggcgtaacgcccactgccccctttccaaatggaaaaccgggaaacccatattcattaatgaaaaaaccaacaccccaagaaaggcggaatgggaaaaaggccccagggggaactgcccctataacattgaaacagaaaaaaagtgaatgcccaacaacccctgaccctgaaacacatgcaaaaaagggaacaccctgaatagccccaacatgccaaa

SEQ ID NO: 151751 - DNA, 596 bp, Zea mays
  Clone ID: MRT4577_69920C.1
aggggtacgtaaaccaagcacgccgcgttaggagctctttgggaagatctggccacctcccaatgtttaacaacggcgttgagagcaatagcaatgtgatttgcctggcaggctcacaatgctgcgcggaagacgctttgcttcttctttttggataatacacgaagcactcccgtgtttacgttgacttgacttgcagtgtgcatttattctgtttttttttttgtaattcaaatgatttgctggatccatgagaacctgtcgcctgatcttccctgcaactgcaatcgtcctcgtacgtacggctggcaacggcttcttggttcagggcaggtgggcaatgtgcctgccagtgttggttccataagaaaatcctctatgcaacaacatcacctgagctgcagttacatgattccatttatacacacacgtatctgcctgctatcagaagtcatttctacgctggttagccaagttcatgttttgaggatacaatcgcccacctagcgtcaagatctcccttgtgaagcgtcatgctgaatgtatgaatttaccatatgcttttgttacttggcctgattttattatttgtgtgc

SEQ ID NO: 151752 - DNA, 1141 bp, Zea mays
  Clone ID: MRT4577_69921C.1
tgggtccctcgggccggccggggccctccattaggaggtcaggctgacttcgcgaccgccaaagcccgcgactttagcctacggaggcccatctggccgcgcgggccgccgctggcaacgcacccacgtccccggtccgcgaggtcgtcactgagctcgacgcggtcgccggcttcagcgagatcgtgccggacaccgtcgtgttcgatgatttcgagaggtaaccgtcttcttgccttatactgtatttttttctgtcttgttgtcccattcgatttggtgggcgagtggcgcattgtgctatcgtgaacaatcacaggttcgcacccacggcggccacagtgagctcgtcgctgctgcttgggatcactgggctcccagacactaagttcaagagtgcgatagatactgcactggcagatggtgagtgcaacgcactggagaaggctgaggacaggatgtcctgttacctcaccaaggctcttgcaaatgttggcgctgaactggctcatcaagtccctgggagagtttcgacggaaatagatgctcggttagcttatgacacccagggcataatccacagggtacatgaactgttgaatctatacaaccaacatgatgtctcaactgaccgcctgttattcaaaattcctgctacatggcaaggcatagaggcctcaaggttgcttgaatctgaaggaattcaaacgcatctaacatttgtttacagtttcgcacaagcggcagcggcagcacaagctggtgcatctgtagtacaaatgtttgtgggccgattgcgggactgggcaaagcatcactctggtgacccagagatagatgaagctttgaagaatggagaagatgctgggctttctttggcgaagaaagtatatgcctatattcacaggaatgggtacaaaacaaagctgatggccgctgccatacggaacaagcaggacgtatttagccttctggggattgattacattattgcaccactgaagatattgcagtctctggaagaatctgtcaccgatcccgatgtgaagtacggctatgtcccgaagttgactcctgctattggcaagacgtacaacttcactgaagaggagcttgtgaagtgggaccagctgagcctgtc

SEQ ID NO: 151753 - DNA, 1107 bp, Zea mays
  Clone ID: MRT4577_69922C.1
ccccgcgtccgctggatcacaccacagtaggttcgttttgtgataatggggaaatttgttctgctctgatcatactatccataggcgatttgatctgaaaggatcatctcttggccgtataactgacaagccaccagcagaaattgatgagtatacaactctgaaagaccttgatcttaactttatctttcggttacagaaacaatggtaccaagagtttcaaaggcaagtggacaaggactgtgagttcctcgagcaggagaagattatggattacagtctattggtgggtgtacattttagaggtgccattgacattgatggtgacaaacccgcaacacctcgcgtttcaagatgggacagagatcattttcgttctgatccaaataggtggtcaaaaattaagcttggagcaaacatgctgtcaagagctgaactgacaatccgaaagaacgacagtgatgtttttggagagccaaccggggagtactgtgacgttatcttatacttcgggattatagacatacttcaagactatgatattggcaaaaggctagagcatgcctacaaatcttttcagtatgattcgacgtccatttcagcggttgatccaaaacagtattccaggcgcttcaaagatttcatatacaaagctttccaagaagataaactagacagctgagaacagtgcattgcgacattggatttggcaggaattcggcagcttctttagggaaaggagtccgggtgattggggtcgctggagcacctggtggccccacagtttccaggaaacagattggccgtcatgtacatactacaaagcaacatgcacagatacggagtccagtcagtcattcacaaagagtaggaaatgtaacttgcagaatcaaattatacatagaaacatgtaatcgaatgtcccgagccgagccttcaggggttgtaaatgctctttgtttcagaggataccattcttgtcttgtatcggtagtcgttactttcttcgatagaattgggggccagttttgcctttgcactttcttttctttgaacaaagcacgacgtactgaggtgccttatttgttgatagaggcacgtcacggc

SEQ ID NO: 151754 - DNA, 371 bp, Zea mays
  Clone ID: MRT4577_69923C.1
ctctccttccccacccgtccatcgcccctccctccggtctgcgctcccagagggggacccttgctcctcctcctattctcatcaccctttgttggaaggaacgattgatcagacctttatcatgatcaattcccgactgcttccatcggggcctgttctgagacatcatcagtcgctttgagaagaaagaggttttacctcaaggggatgtagtttatgtacttggagaggggcttttctcattatctctatacttacctttcctatttgccttttcttccctgggttggaggagtacatattttccagcccctttgttgctattgtgttgtaggtgaaggacattatgttgattagcctcttgttcattt

SEQ ID NO: 151755 - DNA, 118 bp, Zea mays
  Clone ID: MRT4577_69924C.1
ttttgcctaacatttgctcaacatacttgtaaccatcgtacgtactcatcaccctatcttgcccccactcagggaaataaacacctatctgacaaagaaacactctcggaacacgctc

SEQ ID NO: 151756 - DNA, 443 bp, Zea mays
  Clone ID: MRT4577_69925C.1
tttttctttttttttttgtttcttttttgctatgggtagagctatctccatatattttttttctgtaatgagcctaccctctatcctctcttttcggtcggtatttctatacacccaaacttagatagagactagacgtatattaacaggacccttcccactagataaatatctatcatggtccgcatagctgtttccttaactgggcacgctctgttaggtaataagtgaaatttcattaagaaaaactatccatctaaacggcaaataaaaattgagaaaataccctttattttttcctcaaagcccaaagcatttgctctttttttatacttaggtcggctattcggcattggaaaaaggcctgcgggcccttcccttcaatagtccaaaccatttcaccgctgtcgagcgacttatatcacgacccatgctacactagc

SEQ ID NO: 151757 - DNA, 130 bp, Zea mays
  Clone ID: MRT4577_69926C.1
gacttttgcggccccggcacgaagctaggacggggggaacctagtggccaagaaggggagcaccaagcgaggctagcgcggcggccatggacaacgaaccgcggggactgggaaccgacaccacggcacg

SEQ ID NO: 151758 - DNA, 455 bp, Zea mays
  unsure (1)..(455): unsure at all n locations
  Clone ID: MRT4577_69927C.1
tattttcttttttttttaaaatacgatcctggaatccaggtatgcggggtatccaccattcattcaaatatgaatcctgaaatccaggtatgcagttttcaccattcactcaaatattaaatcaaaaaatggtccacataaaaagcagggagagaggcaacaggaagccccaaagcttttcttgggcgaggatagaggacccctcgggccggtcaaacttaaagcgggacggggggcaactataactgggaccgcattttcttgattttgtttccggcccttattgtaaataaacttggacccgncggggcctaattgcacggaaaacccggaaataacctccgggccaagctgctttttgaggcggactttgtgggcgccggtctttttttgaacgtgctgcgcgatttgcgccaggtcttgcgactcgagctgtacaacggaggtgacggggg

SEQ ID NO: 151759 - DNA, 890 bp, Zea mays
  Clone ID: MRT4577_69928C.1
tcgaggccggcgggccgggataattggtgtagtagtgtattggtataggagggtatgcgcgagagagaggtcgcgagttcgaatcttaccatttacaaaacatattaaaaaaataactgcaaccccggaacagagcgaggcgacgccgaggcacctcatctccggcgaagggaaatggcgaccgttccaggggatctgatctggcagattgtgaggaagaacaactccttcctggtgaagcagtttggcaacggcaatgccaaggtgcagttcaccaaggagcccaacaacctctacaatgtacactcctacaagtactctggcttagcaaacaagaaaactgtaacgatccagccagctgctggaaaggactcggctgtggtcctctctactaccaagaccaagaagcagaacacacccgcgaagctcagccacaagtctgtaatgcgcaaggagttccgcaagatggccaaggctgtgaaaaaccaggttggcgacaactattacaggcctgatctgaccaagtcggcccttggtaggctgagctctgtgtaccgcagcctccaggttgccaagtctggtgtcaagaagaagaacaggcagcctacgcactaagcctgtgttctgtcgttggtgcccatagtctcagcttatatttatccaatgtctccaacagttttgagacttgttagaactagagcaaatcgtgttaagatgttgccgtttgtcattctatagcaagaattccatgacaaagattgcttggcacttgattgctgctttgtttgcaagctggctggccgggattacccctgatttttgttgggttctggaacatgtatgtctagcttcttattgggtgcttaaaaaaaaagaaaaaaaaaaaaaaa

SEQ ID NO: 151760 - DNA, 501 bp, Zea mays
  Clone ID: MRT4577_69929C.1
cggcccgaggtaccaagcttctctctctctctctctctctctctctttctctttaacttttttttttttttttttttttttttttttttttccctccctttttttcctttttaaaaggccattcccaccccactgccggccgtcccaaccggacccaagcccggacccaaccttggcgaaacccgggccaaaggggaccccgggggaaaatcacaatcccccaaaaattccaaacaacaaacaacccgagaaaaaaaagggaaaccccagggggccccaaaaagaaaccaaacccccataaatggcgggccccccaccccccattaaccagccgaaaacccctgcatcccaggggcaaaaaaaaaccgcccaaaccccgaaaaaaggcggttcccctatgggacgcctttccccttcccccccaaaaaacccccttccctagggcgcccgcctgcgcaaaccggtaaaaggccactaaaaggcggaacaccggttctcccc

SEQ ID NO: 151761 - DNA, 255 bp, Zea mays
  Clone ID: MRT4577_6992C.1
tcaaccgctttctcgactacaaacccgccacaccggggggggtcgtctggcaaccccgagaccgcatgggtaaattccgcaagcttggtccaattactcccaacgcctctgtatgcttaggactattggtgttccactcgttaatacactatcgcattgagacccaccgtctccaaagctaatgatgttctggcagacggcagacatcagatggtgccaactagggaaggagggtactcatacatgcatctatga

SEQ ID NO: 151762 - DNA, 971 bp, Zea mays
  Clone ID: MRT4577_69930C.1
cagctgcttagctgccttcgcccaaatgtcgagcagcctgcaccagcccgcagtccttgtccctcctccagcacgttccctagccatccgtccagccgatggccatggctgaggccacccacctcgccagcttcatcatgtgttcgttccccgtggcgtgtccttatcactggtcgttggactcggcttagaccccatgctttgcgtcctttcgacgttgacgacgcttagctccctcctatagctctccgtgcggcaagcccagctttcatctccagctccagcagctgcccctcctggctccagtcctctgttcgtccctcgtcgtcgatctgtgcagccttgacgcgccatcggctccctgtccgacttcatcctcgtcgccgatctcatcccgttcaggctgtctgctcgagctccagccctcgctatcatgacttctctatggtcgccaccttcagttcaccggcgtgctgctccctcgcctcggcgccctgcgagctccttcttactcgcccagtttgcagctcaggcctcgatggatgtcaacgccgtttctttgacctcgccttgacactcaatcgctgcagcacgctatgtcatgtgtgctacaatatcatcgttcgctatactcattctcgccaattttccttgtcgtttctcggctactacctcgtcagctcctgcgcgtcgtgcacgtcttgtgttcggatcaagcaccaggattttgaggaaaagaaagctccagtgcatcggccggtaaaataaaactggtggtagtcatcgtccttgcgaaatccaagactagcttagtcgcggtaagctcatatattactctagctatttgatttgattaacgaattaaatgagtatattggtcgcgacaattctttagttagttgcacctgtgttgtggttatattaaatgtttgctaaaatgccttaatcaaatatttgttcaatttaaaacc

SEQ ID NO: 151763 - DNA, 281 bp, Zea mays
  Clone ID: MRT4577_69931C.1
tgtgatctgccaacccctgacagcactgttaaaaaagggcgctctgtacgtttggacagctgatcatgatactgcattctgcactctcaaacaagcgatgtcatcggctccggtgttggctctaccagattttaatgtcatatttcagattgaaactgatgccagcgccaatggtgtaggggctgttctttcacagcaaggtcaccctctggcattcatgagtaaggcccttggagttaaatctcgtggtctctccgatttatgaaaaagagtatctagct

SEQ ID NO: 151764 - DNA, 260 bp, Zea mays
  Clone ID: MRT4577_69932C.1
tatttttttttttaaccacaaaagaaacaaagggggactttaagtcgatggcggagcatatccacaaatccacacagcaaggtgccgccaaaatgtggtccaattgctcttctacaccctcatataagaagcaacgaagacttcctcggctgcagggaactgaaatgcccaatctacaaactagtaaacacccggaaactgggctcttaacgccaagtacatgaggcatggggtatactacccgcccaagcatgaacatg

SEQ ID NO: 151765 - DNA, 205 bp, Zea mays
  unsure (1)..(205): unsure at all n locations
  Clone ID: MRT4577_69933C.1
gcgacgaagctgatccttaagtcaccacgcgtcgcggggttcacggccgcgctaatgcgccgcttcgatgctgggctgtatctactactttggctgcacgtattgtgttggacgcataagaagacgtgtactttagtagttggtttgtagaccaacctttgggaataaaataaaatcccccccanggaaaaaatttgttggtttt

SEQ ID NO: 151766 - DNA, 115 bp, Zea mays
  unsure (1)..(115): unsure at all n locations
  Clone ID: MRT4577_69934C.1
ggccgacgggcgcangccgtgctaatccatattgacgtagttctgacgtggactctcatcggcgagagtacaacactgatacctcacacgaggaataactagagggaacaaccgc

SEQ ID NO: 151767 - DNA, 461 bp, Zea mays
  Clone ID: MRT4577_69935C.1
aaaaaaaaatggattgagcgctaatgattttacccagacgctgacggcctgctgaccaaacacccaagacatgaggggttacgagcagacgacccctaccataccgaacgacagcgtccctactggcttaaacacaccgcgtggagggccccagagagaggcgtgcgattaggaccaaataaaaaaagacagcagccgatccggatcacagaggaggcacaacctgctactgcgtccttaggaaactgctccgggcggctactaaccctcgtagacgtgggtaccgaaggccataaggaccacggggatgagcgctaagcatacgacgaaccctgactagaaccgccagacccctggcgtgcatactgacgaaccctgggacccggccccggcccggcggaaggtcacaccagccccgcggtgaggaccacgaacaggaccaggcccacgaacacgggccc

SEQ ID NO: 151768 - DNA, 593 bp, Zea mays
  Clone ID: MRT4577_69936C.1
cgacgatttcgacctcacaaaacgttaagcctcaacagcagcacaaataggcaacacatccagaagcgtccacagcacaagccccgtttgcagcatcgtcagtcctttggctcatcttgcggcaatcagaagcattccaaggctgttgccaccacacggctatctgacagtgatgatgatgacttcaacatcacggacaatgactttgaccttccagcttcgcattcaaggatatcacgcccacgccgcactactagttgccgccggttgacgagttttgctattgacatctctgaggaagacgaagaagaccttgctgatgatgacttcgactaccaagacccaaggcctccccagcaacgctcctctggccgccgctttgtggtcggggacgatgatgacagtgatgtgcctgtagctctggaggaggaggatggggtgaattggtcggagctggagaaggaggacgtagatgaggactacaatggggtgagaagtgtacatgtggaggagcccgagggagatgtagtgggaatggcattgcacaaatgttcacgcatctcgtcagatctgcgcaaagagctttttggttc

SEQ ID NO: 151769 - DNA, 395 bp, Zea mays
  Clone ID: MRT4577_69937C.1
gaaataacaatgatagtttactcatacacttcctcattaaacatacaatgacgaacacttggcatggagagaactcttggacttgatgtatatctgacagtggagatcggaccatagccatgcattggagattggagccgggcaccattaccatatctaatttacgtggaccaatggaagaacattactttacaagtagtcttgcgcaaggacctgcgccgccttcaactgctctcctgtatggactaccactgtcactaagatgcacgccatcgaggggcacagaaagaagtgcttgcagaacttggctaacatgcttcccaggctgaaaaggtgcatgatctacgaccgcttcctaacctgtctgagccgaaactcgatatactgaaacatgg

SEQ ID NO: 151770 - DNA, 458 bp, Zea mays
  Clone ID: MRT4577_69938C.1
ggtaagaatcgagctccatctgatcttgccgctggggcctgttgcataggatagcttcccactacgcgctctctcggccaccagagggctgagaatcttttgtcgaaggatggccaaaacaagcctttccttctatctgacgttcttgcgtgcttagacaaagctgcctcacatctatcgctaggagctgatgaccctgtccttactcaatgactgggagattcgctaggctgtttctatgacactgactcactgtgttgtcattgcatgatctatacaaatatgctatgattactctaaagctctgatctctcaactttcctggggcccccactataatatattaaatgatgctaaggttcttcaggaactagtcaaggactatgaccacgctactgcagagtatgctcttgaaggtaagattgatgctattgagagctgatactaaatgatctttg

SEQ ID NO: 151771 - DNA, 489 bp, Zea mays
  Clone ID: MRT4577_69939C.1
ccggccggacaaaacatgacgggcgctgttatatcaaatgcctgtgttcagcattcacacgacgccctcaccactagagttgtcgcccgcgacgaggaaatccaaggcaatgaacaagcggatgatgcgccttaagaggaagctcctgcagatcacaggaaaccaccaacacccgacagtttttgagtacacgcgtctgcagtgtgctgtggtggggtgctgcctaatgaccaataccagtttttttttattaagacaatgcgctatttaccagagattacttgacgtggcgcgggacgtgcacaaagagtatcatgcagcgcgactgcgcggtgagctatcttgcgtcctgtcgtacgctggacttgccgactaggccctgatgtgcgcatacgtggtggatgccagagaaggcgatatcgtgacagttcatgaccacatagaagacgcaacgctaacgacggaagccacgctcccctaaggagcctg

SEQ ID NO: 151772 - DNA, 509 bp, Zea mays
  Clone ID: MRT4577_6993C.1
ccccaaacgggcccttacggaaatttttttgcaacgggaaaaaaacgctaagggttttttagttcaacacttttcgctgttgggctgcaataacaattaaggacccactcaaaataggaaacggcaaagggaaggggttgcaatatgcatagccgggttttacaatacatccaccacattattatacgtccaaatcatacaagctataccttttaataaatcggatatggcaccaaccaaattctggtatgcatactccacaacggtaaaatccaatggaaaaaaaccaaacaaatagttgcaggaacgaaaaaatagctaactgaggcctgaaatagttgctctggggcggagggtaacccccaggggcattgtccgggggctggggatatggcccaaattgctgcggctgaggggctttgtaatatggcccaccccttccaggatttgccggttgaccgtaccctggccaggaggtggttgggcccctggcgggtgggcctgcccgg

SEQ ID NO: 151773 - DNA, 410 bp, Zea mays
  Clone ID: MRT4577_69940C.1
gcgacgagtacgacatacggcttgacttagggagagatttcacctaatgtaaagcccacctcgaaacagaaatggcgaatgggatggtcaatcgggcgaaaccactcaagagatcatggaggggctaacggagtgcaacaccgactgcatcgaagacagtatctactccagtcgctacttaacacgcagctgtcgaaatgcatggggtactgcaaggcttcacgacaggttaaatgatagcctacctgatgcacttcgacatgcaccttgccgtgagcgagcacgaggatgctcagcttgctgcccatcttgctgcacaaggccttgttgctggtctcggtgctgatgccctctacgacggcttctacaatcagtacccagatcagccgcttatgcactacatcatgtac

SEQ ID NO: 151774 - DNA, 200 bp, Zea mays
  Clone ID: MRT4577_69941C.1
caaacatttttttttcttatatacttattgctttacatttaaatggtcgattcatgttattgatcacactgccaaccatggtgacgagagacactacccttacttttgggcggtcaatgaataatctaccgagctatgtttttgggcagcggccccattacaaaattaaaacagggcgcactcccctcaatggtatacac

SEQ ID NO: 151775 - DNA, 275 bp, Zea mays
  Clone ID: MRT4577_69942C.1
ttacctgtcacaaaaaatctgtttttcttatctcaacccgggttcttcttcgtctggtagtggttaacacaaaaaatacttcatatcttttctctatcatactatcccactaagaaatatcatttctaacacacagcttcgtcgatttgaatttgatgtactaatggaatctaaaggtggcaaaaattctaccaataatccttctataatgtattaaactcccctttattacaataataatagtcttttaactctcatctatacaccataaattt

SEQ ID NO: 151776 - DNA, 530 bp, Zea mays
  Clone ID: MRT4577_69943C.1
ggccgctcgaggggccggccgggcctgcgaaaaaaaaaaaaaaaaaaaaaaaaaaaataaaaaaaaaaaaaaaaaaaaaaaaaaaaaaaaaccccaaaaaaaaaaaaaaaggccctcaaggccccggaaccccccgaaaaaaaaaaaaaacccgcccccttgggcaataccgcttcaagaaaaggggggcccccccgcccccccggaattccagttaacctttttcccccccgtcaaccccgagggggttgcccacgtccggaataggcaaaacaaggggggaaaatgaaaaaagtttgcggggcaccccatttaccatttggtgggggggggaaaaagtgggggggccggcacaaatggccctgggcaaaaaccccctttccttgagggggggggtaaaacgcaaagggcaaaacgaaagtcaaaacccaaattattttttcccaaaacgctttagttttttggaacaggagccatttttttaaaaataccgggaaaaattgaaaaaacaaccccaaatttttttagaa

SEQ ID NO: 151777 - DNA, 879 bp, Zea mays
  unsure (1)..(879): unsure at all n locations
  Clone ID: MRT4577_69944C.1
ttgggtacctcgaggccggccgggaaaaaaaaaaaaaaaaaaaaaaaaaaaaaactcactgtcccctattgtgacctaaccctaactcttagaagctcctccttccagcgtcgtcaagctccttcatcggaggtcctccttccctgcaatgtcgtcgagggggaagaagaggctagtggtcgaggtggatctcgatttagatcctgcagctgaggtcaccgccgccttcgatcgactctgtgtttccgtagtgaacaagccgccaccagctgccgccgttggtaaggattcagcctcctccaccttggtcaacagtgtagcctttggtaaggattcttcctcctccgctcgatctcctccgacgatgtccaccgaacagcctcactcatggagcactccggccgtcaccactccattgtcagcagcatcaactgtgccgtatgccaggtacaaagaggtctataatggccttaatgacgccattgaagagatgcagaaagtagcgatgaatttgaaggcattgtctactgagtacattgttcctgagccttcttcgggtaaagagatcttggtgaaccaattaatgtggcgcgttcatgagcttgcgcagtcactagatgaagcattgtatcgatctctactcgctcaggccggtccttcaccacccttgtctgagtattttgacaacgacagatcagatgatgaagcccacatgatggngggggtggggattgggcttctggaagatgttaattttgaagagattcgggatcgtatgaggaactagaatttgggaggcagtgcttagcccatcaactggttgtagtaatttgtaatgtagtatttgtgatgtatacatctagtaagtcttttgtcggc

SEQ ID NO: 151778 - DNA, 335 bp, Zea mays
  Clone ID: MRT4577_69945C.1
cgaagcgcggaattcggctcgaggtccttatctgccggagcctcatgaccgggcggaagggggtcacaaacgtggggaacattagtatccgaccggtgctacccagcatgcgaatggtcaccgcggacatatccgggaagaagcgccttgccagggccgaaccacgtggcgtgacagggcatgcgtagctgccaatcaacttgaccatgctgacaccgcagttgctgctggtgggcgcaggcaaagcgtgcatacacactatgcatacaaacttgttgataacgaggtaggccaagagcatgaagaccatgatcgcagtcctctgcatcagcacg

SEQ ID NO: 151779 - DNA, 528 bp, Zea mays
  Clone ID: MRT4577_69946C.1
gtggactttttttttttttttttttttttctgcattttttcttcttctctaagatcaacaataatactatcattgttgatgcgaaatgcacccatctgctactagtagttttcttttgcgttttgcagatgcatcatactgctgctatcagtcgacgcctctagcacagtctagtgctcactcgatcacaacctggtacggaaagaacacacggggtagctgctccatgcccaatcctaaatcaggcacaggcaataccgatacgccaatactagtactgatttaagaatagcaagcatactagtatgtccgttccctctattttcttcgaaaaggcccgtatgcttcacaactcggcccacaagagcggctcgtgcatcccgacgacggcgtcgcagccgtcgtaatgctcatcggccattgccgccggccaccacagcccgtcccgcaggtcgaggaggaggtcgggcaggtcgaacagcgtgctctcctcctcccgtccctgtcctccgtcgccatacgccgccg

SEQ ID NO: 151780 - DNA, 517 bp, Zea mays
  Clone ID: MRT4577_69947C.1
gtcctgtcaggaggatctacctgccggatgggctgttggaccggtcggaggtgccggagtacctcaccggagaggtccctggagagtatgtcacatgactccaattttggctcccataagggtttccgtttgtttcagaaaatttagacttcagttggtagtttaatgaaatcaagttagtactacaagtcagtttaaacaatagtggcaatttcatagagcatgcagaacaaaagaagttttttcttgaaaaaaaaatagtttgtgccaaaatgcgatttctcaccaaaatggtgcgtcattgctgtttgtagaattcgatctgaaagtacacacgtctgccaacctctcaagctcaaccagcatatgaattttgaaataatctttgttcttgcaacttgcagctatggctacgacccttttggcctgggcaagaagccagaggacttcgccaagtgagtctcatatatcccaaacacataatttcacagcttaaccgttgtgaatatacacaaac

SEQ ID NO: 151781 - DNA, 277 bp, Zea mays
  Clone ID: MRT4577_69948C.1
aaattttaaacctccctctactaactcttattaagaacgcaacctacacgcacattatcacacaatgcttaattttatccatactcctcattattcaacaactttctatcaaccaaatactctaattgaccttcaaacacctaattttgcaaaccaacatgcaacaacaaacccttgctccgaacttcatacaacaaccaatttccaaatttcaacaacaattcatgccacatctaaaaatacaaaccatcataactcaacagcaacaacatatcct

SEQ ID NO: 151782 - DNA, 251 bp, Zea mays
  Clone ID: MRT4577_69949C.1
ttgcaatccagactgactgctgagtctacgggcgatggtactaaagccagggggaccgacgggacgacctaaggaagcgcaggacggccgtactatatccagcgagccggtacaaggttcgcttgctgatctaggactactcctgacgcctaggacggtctaaccgagcggcatcccattaagcagtggctgacggagtacctgggcatctgctatcccaaccacacgagtgctgcacagaccatatggag

SEQ ID NO: 151783 - DNA, 921 bp, Zea mays
  unsure (1)..(921): unsure at all n locations
  Clone ID: MRT4577_6994C.1
agccacttgtcagtactgctgcaggtagctagcgctnnnnnnnnnnnnnnnnnnncccttgcaatgctggacgctgctaaatattctctgcagtgaagcacgcacgttgcttttccttcactccatccatcggccaccaagttaatgcattgcatgccagctggcccatctgattctacatcatgtaatgtaggttgatgacgatgatgtgtcccctcagcaaaaaagaaaaatgacactcattgatcattgctggaccggactagactagacggtccattcaatatnnnnnnnnnnnnnnnnnnnnnnnnnnnnnnnnnnnnnnnnnacaaggttgtgcacatggacgacgatcccatgtactgctatctcttgtccgctacagcaacgaatgtgcgaaaannnnnnnnnnnngagagacacatgtactgccgcttgagagccaatggatggaatgatggatgcatctccgatccgcaccggccatcggccgaggtgaaggactcggcgaagccggcggggcgggcggggatgctgcccttgctgtcgtccaggctcatgacgctcccgccgccgtccgtcaggccgccggcctccgcgtcctgccagctcttcaccatctgcagcagcggcaggggcaggtcgatgcccaggtagtcctcggcctcgtccttcacgggcctccacttctccaccatgggcaccagcacgttcaccgcgtgccccatgtccggccgctgcgacggctcccgggccgtgcagtgccccgccagctccgcgatcacgccgatgctctccattgtctcgccgtcgcccacgtccagggccgggtcgatcgccgcgcgcagctgctccgcgtccttccgtatctggctgaaccagtacgccaggggccgggtctcctcgccctcgcccacgcgg

SEQ ID NO: 151784 - DNA, 381 bp, Zea mays
  Clone ID: MRT4577_69950C.1
tagaaacaaacaaacaaacaaacatttaacaaatgagctagcttcgatattggttcgtgtttgcaatttatttttagatagacaagataatttgtttgccgtcaatgtcaccaagtaataggtttatgaaattagttataaggagtcatatatgtcacattgaccgaccaagtcaattcttttacctccaagcacaatgatcaaacacattgttgggtccactcctcctcgtcatattcatgaatgtgattagattcaaattaaactatccatcgcgagtaaggcaagaattattgagtgtccttaacaagttcatagatgttgtatagtaagacacagacgacatcgtaagacaactagacatgctcttgcatgctgcat

SEQ ID NO: 151785 - DNA, 1167 bp, Zea mays
  Clone ID: MRT4577_69951C.1
gccggccgggccgggacaatcggagctcctgtgggcctcgacgacggcccggctcccctcccctccccatctcgctcttgcggagatcgaagagaagctgaggcctagcgccgcacccgccgccgcatcagccatcagccatgacgctggccgctcgcctcgtctcgcgctcccgtcagctacattcggttcaagcagcttttgcgaatggaggtgccactcaagttcgctcctttgccaaggatgcagctccagctgaccgtcctcctgttagtggggatgatctcctgaagggcatattctttgaggtaaagaagaagtttgagacagctcttggcgtccttaaaagggaaaagattactattgatccagatgacccagcggcagtttctcaatatgctcaagtcatgaagactgtaagggaaaaggcggatcttctttctgattctcaaaggattaaatataccattgagaccttcaccaagggcatccctgatgcacggacttacttgaatactcttcaacagctcagaataaagagtggtcttatagatcatattggaatcgaacctttgatgatggaagctcttgagaagattgagaaggatattaagaaaccacttttaaggagtgacaagaagaacatggccacccttatggcagagtttgacaagattaacgcaaagcttggctttcggaaggaggatcttcccaagatcgaggaagagcttgaattggaaattgccaaaagtgagctgactgaacttaagaaggaatgcgttgaagcaatggagactcaactcaagagggaggagtttcaagatgaggagatgcctgatgtcaggaaattggacatcagaaacttcctgtaggcctgatcgacgataatctttgaggcccaacgcacctctggttttggtttcaagttgatcggtgctccacacctatgaatgctgctccttccctttttgtaataaaagaaactgcacggttgggtatgagttggatttcctcttgcctttctgttgttctggactcttgtggctgcagcaacaatgggatgtccttgtgttatagcatatgaactcgatacgaggcattcaggaaaatggtgatacctggtatttaaccccaaaaaaaaaaaaaaaaaaaaaaaaaaaagcggcc

SEQ ID NO: 151786 - DNA, 1016 bp, Zea mays
  Clone ID: MRT4577_69952C.1
tggcatcctgaaggaggatcttcctaggttcgagctagaactcgaattgaagagtgccgagcgtgagctgactgaggtcaagagggaatgtgtagaggcaatggagactcaactcaagagggaggagttccaagatgaggagatgcctgatgtcaggaaactggacatccgaaacttcctgtaggcctgatcgacgataacctttgaggcagtcatcccgccgcgatgagggccaagtggaagaagaagcggatgaggcggcttaagaggaagcgccgaaagatgaggcagaccccgcgtccgccccgcgtccgccccgcgtccgcccacgcgtccgggcagtttctcgttatgcccggagcatgaagactgtaagggaaaagcggatcttctctctgattctcaaaggattaaatataccattgacaccttcacctaagcatccctttctcacggacttacttgaatactcttcaacagctcagaataaagagtggtcttatagatcatcttggaattgagcctttgatgatggaagctcttgagaagattgagaaggacattaagaaaccacttttgaggagcgacaagaagaacatggccaccctcttggcagagtttgacaagattaacaaaaagcttggctttcggaaggaggatcttcccaagatcgagaaagagcttgaattggagattgccaaaagtgagctgactgaacttaagaaggaatgcgttgaagcaatggagactcaactcaagagggaggagtttcaagatgaggagatgcctgatgtcaggaaactggacatccgaaacttcctgtaggcctgatcgacgataacctttgaggcattgcaaatcacccagcccacctgtgatttttttttctttggttttggtttcaagttgatcggtgctgtaagctacacctatgaatgctgctccttcccttttttgtaataaaaaaactgcaccgaggtacacaaactcaaaaaaaaaaaaaaaaaaggccccta

SEQ ID NO: 151787 - DNA, 1300 bp, Zea mays
  Clone ID: MRT4577_69953C.1
ccggccggatgcgatcataccagcactaaagcaccggatcccatcagaactccgaagttaagcgtgcttgggcgagagtagtactaggatgggtgacctcctgggaagtcctcgtgttgcattccctcccctcccctccccatctcgctcttgcggagatcgaagagaagctgaggcctagcgccgcacccgccgccgcatcagccatcagccatgacgctggccgctcgcctcgtctcgcgctcccgtcagctacattcggttcaagcagcttttgcgaatggaggtgccactcaagttcgctcctttgccaaggatgcagctccagctgaccgtcctcctgttagtggggatgatctcctgaagggcatattctttgaggtaaagaagaagtttgagacagctcttggcgtccttaaaagggaaaagattactattgatccagatgacccagcggcagtttctcaatatgctcaagtcatgaagactgtaagggaaaaggcggatcttctttctgattctcaaaggattaaatataccattgagaccttcaccaagggcatccctgatgcacggacttacttgaatactcttcaacagctcagaataaagagtggtcttatagatcatattggaatcgaacctttgatgatggaagctcttgagaagattgagaaggatattaagaaaccacttttaaggagtgacaagaagaacatgggccacccttatggcagagtttgacaagattaacgcaaagcttggcattcggaaggaggatcttcctaagatcgagaaagaacttgaattggagattgccaaaagtgagctgactgaacttaagaaggaatgtgttgaggcaatggagactcaactcaagagggaggagttccaagatgaggagatgcctgatgtcaggaaactggacatccgaaacttcctgtaggcctgatcgacgataacctttgaggcattgcaaatcacccagcccacctgtgattttttttttctttggttttggtttcaagttgatcggtgctgtaagctacacctatgaatgctgctccttcctttttttgtaataaaaaaactgcaccgaggtacacaaacacagtcaaccgttgagttgaatttctttcttcttgcctttcagaagtcaaccgttgagttgaatttctttctaaaagaaaaaaaaaaaaaaaaaagcggccaaacaaaaaaaaaaaaaaaaaaaaaaaaaaaaaaaaaaaaacacacaggccggccgtgtagaggatgccaaggctacgtacggcgtgca

SEQ ID NO: 151788 - DNA, 1444 bp, Zea mays
  Clone ID: MRT4577_69954C.1
ctccccaacccgttgtccactgccaccaggcaaaccagccgcgccgccgccggcgatgaccaccgcgcggctcgtctcaacatcccccgcccgcctatcctccacgtcggcttccccgattcacagaacctcgctgtgtgttgtcggtcgtgcccctgctttctccgccaggccgctcggattctcgcttcgtctcaagccgtcgcctgccatggccgccgccggcgtcggcggcaacggcccccctaccgcgcatggagactcaataggtggttcatgtgtttgatactggaattttttgctctctgtgcagcttcgcgtttgatttgttcctcagctgtgcccatcacttcatagttcatatttgttcttctttacggtagctatttcgactgactgtatttattccaagcacattttttttttatgatcgcgttcaaaatcttcaggatcttttaggattggagaggttaagagggtgaccaaagagacaaatgtgcacgtgaagatcaaccttgatggcactggtgtcgccgagtgtagcacagggataccgttcttggatcacatgctcgatcagttggcatcacatggactctttgatgtctacgttaaagcaacaggcgacacccatattgatgatcatcactcaaatgaggacattgctttggcaattggaacggcactacttgaagcacttggtgatcgaaagggaattaaccgatttggtcattttacagcaccgcttgatgaggcagcggttgaggttatactggatctgtctggtcgccctcatttaagctgtggcttagatattcctactcaaagagttggcacatatgatacacagctggttgagcacttcttccaatctgtggtgaacacatctgggatgactcttcacatccgtcagcttgctgggaaaaactcacaccatatcattgaggcatctttcaaagcgtttgctcgggcccttcgacaagcaacagagtatgacctgcgccgtcaaggcactgtccccagctccaaaggtgtcttgtcgagatcatagcatcgcagtttggacgaacgcatatcttccactgcagcgcacatcaatgagaggaaaacctgcagagtagacagcttggtttttgctgctcacgttgggagcctgcgttagcctctgaacattgctaatgggataatcaagaaccatctagcaactagcaagcaccacttattatctgccttgtgacagtggcatagcgcgtctgctcgctactgcaactctattatctgctcgctggagttacaggatatctgaagattgaaggtctagacatgctgtgactttgtaagctacaccggtcaggaataatgctgcgtctggatcatccgcagaaacataggggtatgtaaattgtttggacattgaagggaatgcattgatctttgcgcgttc

SEQ ID NO: 151789 - DNA, 1334 bp, Zea mays
  Clone ID: MRT4577_69955C.1
ccggccgggaacgccctcatctcctccccaacccgttgtccactgccaccaggcaaaccagccgcgccgccgccggcgatgaccaccgcgcggctcgtctcaacctcccccacccgcctaccctccacgtcggcttccccgattcccagaacctcgctgtgtgttgtcggtcgtgcccctgctttctccgctagggcgctcggcttctcgcttcgtctcaagccgtcgcctgccatggccgccgccggcgtcggcggcaacggcccccctaccgcgcatggagactcaataggatcttctaggattggagaggttaagagggtgaccaaagagacaaatgtgcacgtgaagatcaaccttgatggcactggtgtcgccgagtgtagcacagggataccgttcttggatcacatgctcgatcagttggcatcacatggactctttgatgtctacgttaaagcaataggcgacacccatattgatgatcatcactcaaatgaggacattgctttggcaattggaacggcactacttgaagcacttggtgatcgaaagggaattaaccgatttggtcattttacagcaccgcttgatgaggcagcggttgaggttatactggatctgtctggtcgccctcatttaagctgtggcttagatattcctactcaaagagttggcacatatgatacacagctggttgagcacttcttccaatctgtggtgaacacatctgggatgactcttcacatccgtcagcttgctgggaaaaactcacaccatatcatcgaggcatctttcaaagcgtttgctcgggcccttcgacaggcaacagagtatgacctgcgccgtcaaggcactgtccccagctccaaaggtgtcttgtcgagatcatagcatcgcagtttggacgaacgcatatcttccactgcagcgcacatcaatgagaggaaaacctgcagagtagacagcttggtttttgctgctcacgttgggagcctgcgttagcctctgaacattgctaatgggataatcaagaaccatctagcaactagcaagcaccacttattatctgccttgtgacagtggcatagcgcgtctgctcgctactgcaactctattatctgctcgctggagttacaggatatctgaagattgaaggtctagacatgctgtgagcctgtgactttgtaagctacaccggtcaggaataatgctgcgtctggatcatccgcagaaacataggggtatgtaaattgtttggacattgaagggaatgcattgatctttgcgcgttcaaaaaaaaaaaaaaaaaaaaaaaaaaaaaaaaaaaaaaa

SEQ ID NO: 151790 - DNA, 448 bp, Zea mays
  Clone ID: MRT4577_69956C.1
cgggggcacgcctaaccattttcaccgggggggcgccaggacaaggagcagggggactacaaactcatcgcaaaaggcggggacgaaacgtaccgggcgggggaatgcaacgggggggggtaccccttcggggcgggcgtcgtccacggggggggggacaacaagggggtcaaaaacaaccacaactcggtccggaaggacccccacccgtcggcgcacgccgaagagaccgccatcaaacaggcgtgcaaaaagctggggaaaaccaacctcgccgggtgggaaaactacacgtcctgcgagccgtgcccaatgtgcctggggctcattcgcctggccaaaataaaaaagggggggtacggagccaaatcggaggtcgccgttgccgccgggctcaacggggtcctcccaaaggtcttcaaagagtactaccaaaaatcccgcgtgg

SEQ ID NO: 151791 - DNA, 415 bp, Zea mays
  Clone ID: MRT4577_69957C.1
acatgccgagcagcccaccgcacatccccacctgtcgtcgccgtagcccccgtcgtgcacgacgggccgagaggaccaggacctggcgagaagccccactcctcggcgcgcagctacgggcaagatgcccatcgtgcgcgcccgcctacgactcgctctcggcgacccccacagtagcaccgcacgacacccgcttccgcgcctcaggaccaccatgacccagccctcgagaagggcgccaagggccgctctgcggtgtcagccgcctctgccggcaggggttacaccagcaaccagctcgagcccagctcctagctgacggggctggcccccggcgacgccatcctcgaggggagctgaatgctgcacaggctaagcctcgacaacctggcccgtgaggtgccaagggggcacc

SEQ ID NO: 151792 - DNA, 424 bp, Zea mays
  Clone ID: MRT4577_69958C.1
aaaacacaggggagcggccgtagttaaaaaactaaataaagccttattacaactttcctcacttaacgacttccttaaggggtacttgggtatttgcacaataccgcgcaagtgaaaaccacacttcacggaacggaacggggaaacccaaacaactagggggaggggggggggtcctcattttaaacaaaactcaaagggaaatcctttttaaaatgcccttgggggggaggccgggggggtcccccttcttgtcggaggggttggggtaaaacaacgtgtaggggaactccgccgggccctttatgttcttgaggggaggggccgcgttcatggggacgacccttttttctatctctgtcaaccccccccccaaccgcttaaacccctcctgccccttggggtgcgacgtccactccttggg

SEQ ID NO: 151793 - DNA, 187 bp, Zea mays
  Clone ID: MRT4577_69959C.1
cggacgcgtggggaaccagcagcctccaataagagccagccagagaaactaataaaactgtcggcgtcgtcatccgagcgaacagagccaaccgaccccgttcccaaggcaatccgtcgtcgacgtaccaccaccaccgcaagagcgagatggatatgaaaaggatcctcttcggcgtactcgtcgt

SEQ ID NO: 151794 - DNA, 592 bp, Zea mays
  Clone ID: MRT4577_6995C.1
acgacgcttctgttctttcagaacttcctcttcctgcttcttttgttgtttcttagcttcagcctcctccttttcacgtctcttctgttctttcaaagcttcatcttcctgcttcttttgttgcttcttggcttcagcctcctccttttcatgtctcttctgttctcttagggcctcttcttgctgtttcttttgaagttttctcatctgagcttcttctttctcctggcgctttatttccttctccacttgtttttgtgctttctgaatctctttctcattaccaagtgagttcccattctgcggctcaaagacactagtatcctcaagccttctaacattttggtcatttttatctgtctcttgcatcaattccttaactgctgatacagcatctttcacaccccgttctgtgttcttttgtgtcgctctttccaccattgatctgatcccttccaggttcagggatttgtttaatttcaatgatgctttttttagatcatttacttggatgtaagctcctgaattttcaagaaccgacaaagccgaatatggcagggattctctcatggattttctttctgacagatct

SEQ ID NO: 151795 - DNA, 1062 bp, Zea mays
  unsure (1)..(1062): unsure at all n locations
  Clone ID: MRT4577_69960C.1
cggacgcgtgggtgaagttgcacttcctaagctggttgctgattttggttctctggaactttcacctgttgacggtaggactttgactgatttcatgcataccagaggcttacagatgcgttctctaggacgagttgtcaagctttcagagaagctttcacatgttcagtccctatgtgtgcatgagatgatagtgcgtgctttcaagcatatcgtccgttctgtgattgctgctatttcagacattcgacaattagcactaacaatagctgcagcgttgaacttattgcttggtgtccctgaatctgatgtctctggaagttctcctaatgtgcatcccctacgatggaaggggctggtgatcttcttgaaaaagagatatgaatttgagctcacggagaaacattaccatgatgtgaggaaatatgctgtccttagaggactgtgccataaggtgggcattgattttgcaccccgagatttcattatggattgctctttcccattccataagcaggacattattagcctggtacctgtacataagcaagttgcatgctcatctgcagatggtaggcaactgctagaatcctctaaaactgcccttgacaagggtaaacttgaagatgctgtcaattatgggaccaaggctctttccaagctcataactgtatgtggtccctaccaccgaatgacagctggagcttatagtctgctagctgttgttttgtaccatactggtgattttaatcaggctactatttatcagcaaaaggccctagacatcaatgagagagaacttggacttgaccaccctgatactatgaagagttatggagaccttgctgtgttctactaccgtctgcaacatacagaattggccctaaagtatgtcaagcgtgcgctatatcttctgcatcttacgtgcgggccatctcatccaaatacagctgctacatatatcaatgtagctatgatggaagaaggattgggcaatgtgcatgtagctctaagatacttgcacaaagctttaanatgcacccagaaatactagggcctgat

SEQ ID NO: 151796 - DNA, 394 bp, Zea mays
  unsure (1)..(394): unsure at all n locations
  Clone ID: MRT4577_69961C.1
aaacaagggncccgccggaggggacccaaaggcagagggggcggaaaaagaagtccaaaaaaaaggagggcccaaaccggaaaaaaccggcggnggcccccggaggaagnnnngggncaaaccataaataagtttaagcaccacacaagttggaggccccaaattcccccaacaccccaaaaggggcggaaggcaccaaaggctaatggaaccattggaccctaaaaaagaaccaaccaagggggaaacgaaaacataacccccaaaataatggaccaatttccgattccaaaacaaaaaaagaagggggggtggcctcaaccctcaagaaccatcctttggggggggggaggggggccaagaaggaaaaggggggaattggccaggaaaaagg

SEQ ID NO: 151797 - DNA, 411 bp, Zea mays
  Clone ID: MRT4577_69962C.1
ttttttttttttttattccaactgattgaaaattaaggagctttagttgagtatcatttactacaatgtgtatattagaatttacaaaaagctacaatgaggagtctaccagtgcaagaaacaaaccctaaaaagatattttgagaaaccgggtgatgatgtctgtaacacgatgatggctgccatgaatttctatttaattgttggctaacacggcttgtagaaacgcccgatgaattcatctggacccgacaccctatcagcaggcaattcttttattgttgcccaaacctcttcttctgttactgttatgtccttgtccatctccaaaagatcaactctttgcctacaggcgcggtgctcgcccggcgccgtcggaaccgctccagcacgccgcgcagcaccacattg

SEQ ID NO: 151798 - DNA, 1162 bp, Zea mays
  Clone ID: MRT4577_69963C.1
ggcacgcgtcggggcgacatggcatacatttgggaatccttgagcagactggtggaaaatcttggcatttccacaatcagacttgcttctggtgacgccagaaattgtcaagaagacatactgtttgaagatcaggcaagagctgatgcatcgccttccagctgtgacgagtcgagtggtgtagcaagccttaaaattcagatttctctgttgaatataagactgagggcacttgaagaggatcaggagttcctcaatcaggtattgagttcgctccaatgtggtagtgatgggctgcagtgtatacaggagataagcaggcacttagcagagttgcgaagagttgtggctcactaaaatgaaaatggttttgccccgagttcacactttttggccgtcatgaggttctcctttgtaacggcaaacctatttgcagtcatctagatagcaggctgctttcagacgaagaagaacaggagctgcacatccttcctatgccttctgacatacacgtctgcatacatggatatgatcaccgtcatcttcgtagcaatgctcttctctggggacttcgtatcagtctgctgtgcagttgggttcttcaccctatggactttgtgctgcctgcaatggcacttatcaagacaaacgatgactgataacctagggttgcagtgtgctgtgaagatgctccgctctgctgtcgcaatcttcttcttggtcataggtgcccttgcatgcatcggcgtcaaaacctgcaagttcttccatgatatgtgatgtgatgaactgatgatggttttgcagcaccaagttaccttgtgcgacatagcaacaaagtgtaccgatgcaacctcttgcaactgcaggttctcatcagacaatgcgcccttaagctcatcagcgtcaagtaggacaccccccgaagctcatcaacaccaaggatgaaatcctcatgtctagtttgaaaacataagggtacgtttgtgaggaaggggattgaggaggataaaatcctcttgctattcaaatttgaataggaatgtgcccttctaatcttttctcccaaacaaccccaaactccccttgggattcccctcatttcctagagtttgtaaacccttcaagtgacatttgaataaaatatttagtaatttgtggc

SEQ ID NO: 151799 - DNA, 1274 bp, Zea mays
  Clone ID: MRT4577_69964C.1
gccggcctggccgggtcgaaaggtagctaggccagtgacgcgcacacaggagattaatatggcgagcagcggcggcgacgagaaggcggctgcggtggtgcagaacaagaaggtggtgctaaggaggtacgtcaccggcctccccaccgaagaggatatggagatcgtcgtggacactatcgttctgcgcgtgccggcggggcagaccgccgtcctagtcaagaacctctacctgtcctgcgacccctggatgcgtgaccgcatgagcaagcacgatgacggcgaccccaccgtcctcgccccggactttgtgatcggagaggccatggtcaatttcggtgtgggcaaggtgatcgattcgacgcacccagagctcaccgccggtgacctcgtgtgggggatgagtggatgggaggaatacacactcgtcacccagacggaatacctgagcaagatcaaccacaaggagctgccgctctcctactacacgggggttcttggcatgcccgggctcacagctttctcctgcttcttcgagctgggcaagccgaagaagggcgacttcgtgttcgtctccgcggcgtcaggcgccgtcgggcaagtcgtcgggcagctggccaagatcgccggctgcttcgtggtcggcagcgccggctccgacgagaaggtcagtctcctcaaggacaagttcggctacgacgacgcgttcaactacaggtccgagaccgacctcggcgccgcgctcaggaggtgccttccagacggcatcgacgtctacttcgacagcgtgggcggcgcgacgctggacgccgccctgctgcacatgcgccacggcggcagggtcgcggtctgcggcatgatctcgcagtacggtctggaggagccgtacggcgtgcgcaacctgtactgcatcatcggcaagaccgtccgtgtggaggggttcaacgttaatggctacttccatctgtacacgaggttcgaggaggagatggcgggctacatcaaggacgggaaggtaaccgtcgtggaggacgtcgtcgagggtattgagagcgcgccagcatctctgatcggattgttctctggcagaaacgtagggaagcaggtcgttgcgattgcgcattcaggaactccgtaacggtgacgagatgagaagaacaaggcttgggccacttgcctacttgttgtgtgtgatgtcatcataagaaggcttggcaccgttatatgcactacactaaaacataaaatctccgacggccaaaaccgtcgcacat

SEQ ID NO: 151800 - DNA, 665 bp, Zea mays
  Clone ID: MRT4577_69965C.1
acttttcgctcgccgaaaaccaattccatgctccagcagcaggcaacctccaattttccattatagtattgctcccgctagggttccagccgcctccatggaatccgcggccgcctgtagatccttcaccagccgcctctttggaccgcctctcctcccgcagccgggagtgcttggtctcgggcgcgtctggccgcctgcgccgagggtttgagttattgcatgtggtggcaccaagcatgaggcgacaactgcattacttgcaaggaagttacaaaatctatgggtcatcataatcgtgactttctcgcaagttgtgcagttgctgtctcaagcttgctgactccgtttgcctgaccgcaatgtgaaataggaaatttagtcaggaaatgcctaaatgatccaataaatggttgaattgggccactcatgtcttcttaaatatgttcaaggaaattgggaacgtattcttaattttgagaacttgtttccagatgtaaaactttaatcggatatctctacacttaaaagagtactagtggattaaggatacaagagtgcatcctaagttgcaatggttgtatccacggcaagaacaattatgtgtctacgagaacctccaattgatgcaccatgtgaagtcatgttgacatttttttttcttc

SEQ ID NO: 151801 - DNA, 616 bp, Zea mays
  Clone ID: MRT4577_69966C.1
ccggccgggactacctcccaaaatgggacattatctgatgtatctgcctctcctgtgacgcgctgatggagtcctatgaaactgacgcctctgaggggcacaagaagtaagagcacgaagagattctcagagcgtccacctcctatgaataatattaacgtggatgtcgcaaccactcccgtttccttgcccatctccagcaagaacagcatccggcgacaacacataacctctcggagtgaaatcaaaagctccagaggcttcacatccccactcaccggcgacacaccacggcatcatactggcacccacaaatcctcacctccgactgtaacgcgccttgcccggggaactacaccgtccagcatctggaccatggcacgggacaacttgcacatcgtgaccgtcaacatgatctaccccaaccacggagcgcatcgtccgcgatttctccgcgaccccgatcaagatcctgttcgaagatcacttcctcaatgtaccccttgacgcggtcgcaggaccagctgccgcctgacatgaggaagatgcccctgctctaagacctcccagccaccaagaacatctaccccgcggcggaccagcaccttctcacctc

SEQ ID NO: 151802 - DNA, 275 bp, Zea mays
  Clone ID: MRT4577_69967C.1
cgcatctgcgccaggcgaaccggtcctgcgcctcctgcagtcccagctctccaccgtcgcgtacacctgcaaacgctccgctcgctgccttctctcctggcaggcgctgccttttctccccgttaaagggcacttgggctgaaggatcgctttgagatctgaggaacccgcagcgctttgagcgacctgaagctgtttttcttcgttttcctttgggttcagtctgaacgggaggtttttgatccctttttttcagaatggattatttgctcatg

SEQ ID NO: 151803 - DNA, 361 bp, Zea mays
  Clone ID: MRT4577_69968C.1
gggggggaaaaaagggaaattgtatttgccaacatgtccctgcacaaaaatacaaagacagggtgggggaccaaccaaattttgaaaattatccttgggccaagggctggaaaaaaagagagacaaattttgagacccaggggctgggaaaaaaacggggggaatggcaaaaggggcccccatgcaaaggggggcggggataacccttttacccctcaaacctcctaaaggggggccccagcctcagaagaaaccccaggcggttgtttcagggaaggaaaaacctgggggaccaggacctgttccccccccctgtaaaaggatcccgaagggggctaggcccttccgggggaggacccct

SEQ ID NO: 151804 - DNA, 255 bp, Zea mays
  unsure (1)..(255): unsure at all n locations
  Clone ID: MRT4577_69969C.1
acttcctctactctgctccctcaacatcaactggcgtgtgaaaaataaaacgcgcccgtcctgacaaactacactacccaactccngcgtcctccccaccgacccatccacagctcaagccaacattcatccgtatcccgcgctctctttattcgccgcatcttaacgtcaccgccatgactgcgcgtcctgcgtctcctcccgccgccgccgcacggactcgactgatgctctgccaccgctttccctcctctc

SEQ ID NO: 151805 - DNA, 504 bp, Zea mays
  Clone ID: MRT4577_6996C.1
aaaagggaaatggatgatgctaacaaggtggttgcagttttccaggaaaaaaaggggggcaaggggggggttgttggaggaggttatttcggcctaaaacggggggcagccctgaaaaaaaaggactttgagggaactagggggtttccggaacctgggggcatgcctcgccttttaaatggcgatatgggtgttttttaggggggttactatacaaaaaaaggggaaaagattttgaagggccccctagctgggggttttgaggctgacgccaagggggatgtcactgcagttaagctaaaggggggcccagttcttgaagcctattttgttgttgtcggggttggaggaaaaccattaactacttttttaaagggtaaagttgttgaggaaaaggggggaataaaaactgacgctttttttaaaaaaagcgttccgggggtatttcccaatggggggggggctcccttccctttgaagatgaccaaggggggggggggaggg

SEQ ID NO: 151806 - DNA, 601 bp, Zea mays
  Clone ID: MRT4577_69970C.1
gggccgcactggctgtgtgaccgtgggattgtgtctgtccccttgctcagggcggcgtgcgggcgatggagcgcgcggtggagccctggggcccggatctccagggcgcagaggagagggagcagctgagaagcgcccgcacaggtatagggagtgagaatgtggagatttctcagccggatgagtttgaacataccccacaggaggatgacttggggttcaaggaagaggaagatttggccccaggtcatgaagtaggaaatgcctctctcaaacctgaaggcatccagacctgggatgacttgtgggtccagagagaggtaccaggaaaacctcaggctcgggacggaggtccccggctcttgggagagccacgttggggccaggctagtgatcgggctgccgtgtgtggtgagtgtggcaagagctttcggcagatgtcagatctggtgaaacaccagcggacccatactggggagaaaccctacaagtgtgcggtgtgtggcaagggctttggggatagctctgcccgtatcaaacaccagcgaactcatagtggtgaaaaaccctacagagcccggccaccagcccaaggcccccc

SEQ ID NO: 151807 - DNA, 228 bp, Zea mays
  Clone ID: MRT4577_69971C.1
atggacgagtctgaaaaaggagatcgggttcagacatcggaagagggagcagtagcaccctcggcgtcgtttccacccccggtggaatctggcccagcctcagacggcggcatgggcggaaggatctccacctcgaaggaggacgccagcaccacgcttgggccctcacggccaggctctccgcaagggttccggcccgagcagacaccccggctaaccgctccatag

SEQ ID NO: 151808 - DNA, 760 bp, Zea mays
  unsure (1)..(760): unsure at all n locations
  Clone ID: MRT4577_69972C.1
tccgggacgcgcgacagcaccacgcacgcacttcgactcgacttcgctcctccgttttgcccaggcaattgagcgcccagaatggctaagaacttgaagaccgcggtcttctcgaaatatactgtccagcctaccggaatctatgcagctatcaacaggctcttcgcgatcgaccccaagcgttccacgggtatcccaatgaacccgcagttccgtaacccacctcccggcgcaaacgatcccatggcctacgacgatcccgttactgttcctgctgccgatatcgccgagaacccatactggaagcgcgatgtgcgacgacgttaccctaggctctcgaccgtcacccaggccgacgcagttgcattgcttgaagttggaagcgcagcagcccccaagcaggaattgattggggaggcgggctccaagtctttgattgctgcccaagaacagggtgcgaaaggactcgctgttgcgtttgagaagaacactgggcttgcaaaggatgtactaggtcctggtggtatgcctccgcttcccagcggcctgcacagcaccggggtttcgggacacaagcgatatgatttggagcaggaccagtcatacggtgatgggtacccttgccggacatttgcttaggttggaatatagctcctggtaacgacacccaagatagatacattgtacagatgagacttctctccctccatttcatttcatatttccaccatctcttcaatttcatgtangaagtgcccgt

SEQ ID NO: 151809 - DNA, 368 bp, Zea mays
  Clone ID: MRT4577_69973C.1
cgaacttggactacatcgccacgtgcatcctcgtcaagccatgggccctcaagccaggggcgaggctcatcacgcagtgcgtgacgcccgaccgcgtctcgcgcttccacgacgccatggtggatatgaactagcgtcccgtccaccacggccttcgtctccgtcagccccccgtttgttcatcggtttcttgatttttttttctctcgtctccgttactgtggtaattagcaatcggtaattagtaatcacgttgcagccttctggcgagtggtcaacaacaacaacaaaaatgcaaacagtaaactaatacgtatagcaataacaaaaaagatactaataacaaaggtggtggcgtacatacagac

SEQ ID NO: 151810 - DNA, 282 bp, Zea mays
  Clone ID: MRT4577_69974C.1
gcgtccacgcgtacgagcgcgagcttctactagcatctatactgcactccggtgaggaggcggaaggtgcccggtggagtctaagtgcattgtaagcctgactctttgacaagtcaacggcaccggttgctcattcagtatgtgcgctctacagctgctatacacacatcacgttcctcaccgtacataccaaacttgtgccttccaacgacactgggcgccagaactgacgacctgctagagtggagttctgccactgatcgattgaagacgactgttatc

SEQ ID NO: 151811 - DNA, 485 bp, Zea mays
  Clone ID: MRT4577_69975C.1
ccagggccatgttactattatttaggctcagtttgaccaaaaccctgggaagctaaagttactaccaaaaagtttacttccccaaacccatgagggctttatttttttctcccaagggggtggggagttttttttttttctccattccagccccaagctggaaaataaacagaatgaagtttattttaatgctggggggcggtatttgttagcaccctgttttttttttttcgggggggtgatttttttgccttgacggggtatttgcccccatttttggacccatttgttaatagcaaaacctttatttttgggaggcatcaaccttggaaacgtgctccaaaaggtcgaggacccggggggagtaaccccattcgttgtcgtaccaaaaaacaatcttgacaaatttggggttaagggaaatcccacccttgatatcaaaaataaaggaggggttgttgccaaccatttctttggaaacaacc

SEQ ID NO: 151812 - DNA, 129 bp, Zea mays
  Clone ID: MRT4577_69976C.1
acctcagctgattatcctgagcagtggccaagtctccttcattgggtttcacacaatttagacttgcagaaccaaatttttggtgctttacatgtcctgagggttcttgccagaaaatatgagttcaag

SEQ ID NO: 151813 - DNA, 241 bp, Zea mays
  Clone ID: MRT4577_69977C.1
atatgaccatccaatctaatagaaattcaattaggttcatgttcagtcacatatgaccatccaatctaatagaaattcaattaggttcatgttcagtcacatactccgacgggtcaggaaagtaaagcactggtctcgcgcacttccaacagaagtgaacattgaccaatacccagctgtcaacaattgagtatcccatgcctgattttattacaacccacagggctgtttatggaacctt

SEQ ID NO: 151814 - DNA, 663 bp, Zea mays
  Clone ID: MRT4577_69978C.1
cgtcaagtaaactaaaacagaaaacgcgttattgctgtaaaatttatatatcttgaatacataccaacacgacttctcaagaccgatgtcatgtgttcttttatttacttctgaggcaaacatgagcacagcctggaagataaagtgtgctatgtgcgctaccagcatgtagcaaccacatttcgctgtcacacgacagtttccttcgtctaatggcaaccgcgtcgcggaaggaatactggccagggaagattcggtctgtcgatggacacctgagatcatatgcacagtgatttcggtccatgaattgatggaagcgtccatagctcggccgacatgctcattgctcatcccgctctcgtagtcgtcttcgtcaaatcgcgcacatgctagtctttaacaccatccatcttaccacatcaacctgtccgtgttcacctccctgccggacatgtgggccatcgggcagcagttccccatcatcccgatccagcggctgcaggagcggcccgccgtcgacggcgtgctctcggacctcacctgcgacagcgacggcaaggtgagcgagttcatcggcgggaggcacagcctgccgctgcacgagctgcccacccacgccactcgcggttactacctgggcatgttcctcgggggcgcctacca

SEQ ID NO: 151815 - DNA, 321 bp, Zea mays
  Clone ID: MRT4577_69979C.1
acaaattcagatcctaggttctctacatggcacgacgaatagtgtagagtaggtagagaggatcacaggatgttctttgagctgttacttctgacatgggcttgagctacactgacatggtccgctcttctgaatgtgaaagacatattctgggaagtgatgatggagcttgtcgctcattaaggctaaaaattaagagagaagaatattatcgcacctggataccatagctgtccatagtcatccatacataaactgcacactgttatagaaaacacacgcgaaattctctagatcatgcgcatagttggatcgtttgat

SEQ ID NO: 151816 - DNA, 173 bp, Zea mays
  Clone ID: MRT4577_6997C.1
ccagcgcaaactttaacctgatattcgtagggaatcccaaaacaacttggacgcttggaaaagggcaaacttcttcataggctaagttaagcactaaacggcaacgtgttcaggacaggacacttactctgagcatgtggcgctcggcacgttttttctcagaatggactagc

SEQ ID NO: 151817 - DNA, 210 bp, Zea mays
  Clone ID: MRT4577_69982C.1
ggacaccaactagctagttttcctgaatcccgaaaggcaaggacgaggggaccaccgaccaatccaacaggggcctgatggcatttcacggccgatggcccccatttgcgcctgcccgcacggttggagtacattaaaacaaatgcgacgggcacaacacgtactggataaactcggcgtcggggaacaacccccccatggtttccgaag

SEQ ID NO: 151818 - DNA, 576 bp, Zea mays
  Clone ID: MRT4577_69983C.1
aacaaaacgggcggcggcgccacgcgaacaaacgtccgcgacgcgcgcgccatgcggccaccccggccgacgtgaaggagctgcccggcgcgtacgcgttcgtggtggacatgccggggctgggcacgggcgacatccgggtgcaggtggaggacgagcgggtgctggtggtcagcggcgagcggcgccgggaggagcgcgaggacgacgccaagtacctgcgcatggagcggcggatgggcaagttcatgcgcaagttcgtgctgccggacaacgccgacgtcgacaaggtcgccgccgtgtgcagggacggcgtgctcacggtgaccgtcgagaagctgcccccgccggagcccaaggagcccaagaccatcgaggtcaaggtcgcctgagggagcaagcagtagcccgtgcttctgaaactgtgtgttttgtgtttgctttcctttgtgacgcaaagcagaatgccctgatgctttctccacagaataaatctctacatgtctcttgtaaccttttctggtgaagatcgtgtccaaaaaaaaaaaaaaaaaagcggcctccgacttacagttc

SEQ ID NO: 151819 - DNA, 608 bp, Zea mays
  Clone ID: MRT4577_69989C.1
cattgggtacctcgaggccggccggggaacacatttctttcgtgtctcttcttctgcgcactctgcttcctaactgcgcatagagtaccagaccgcctggacacgatgtgcgagtgcacgcacgaatgacgttgtcagtagctccagctgcaacaagcatcagtgcctgatcgatggatggctccgctctcctctccgatcgacatctgctgcgacggcccttgtagtcgaccgcctctacgtcatcggcgaggaaggagcccatcacttgcacgcccagctccaacactccatcctagcgaggtgtcgacaggcaactgtggatcacaaccaatgaatctcctctcctaccatccatggcaccctgcccaactattatgacttcgacccgctgagactcttggactcggaggacactgacgtctacatcgagaccaagcggctggacgacagggaggcgatctacgttcgctacgtcatagctggccgtgcgtgagcggcatccccacggagatctacaacgacatcttcatcattgcgtcggagaccgcgctgccttaggtccataatcacgacatcccgcccgcgctaacctacaaatagtgggc

SEQ ID NO: 151820 - DNA, 411 bp, Zea mays
  Clone ID: MRT4577_6998C.1
agtctcaacactgactggaattacacagaaaaaagaagcaaaagagatgcctaccaccaatgcaaaaaaaaaaaaaatcatgtatctacaaagcagagcagagcagagcaggagaagaagaagaagcacaaggttgtgcacatggacgacgatcccatgtactgctttcttttgtacctacagcaacgaatgtgcgaaaacaggcaagggagggaccgggagacgagagacatttgagagacacatggatgcatgcatgcatccgatccgatccgatcaccggccatcggccgaggtgaaggactcggcgaagccggcggggcgggcggggatgctgcccttgctgtcgtccaggctcatgacgctcccgccgccgtccgtcaggccgccggcctccgcgtcctgccagct

SEQ ID NO: 151821 - DNA, 609 bp, Zea mays
  Clone ID: MRT4577_69990C.1
ggccgcttttttttttttttttttggtttttttttttttttttttttttttttttttttttttttttttttttttttttttttttttttttttttttttttttttttaaaaaaaaagggccccaaacaaaccaaaaaagcaaatttttgggggcccaaaaggggccaggtaaccatgtttggaaaaaacacttggttagacaccattccagggatccccacggtcaagacccccatcccacaaatccaaaaggaacccattgggccatacggaaaaaacaaaagcttggggaaaaggaaaccatgggttgtaaaaaacccaggccccgggcttttttttaaaggttcggggggcggggggaaaacattaaggcccaacggtttcctggtttgggggacaaaaaaacccccggttttgaacatgcctggaaagcccccggggagggtcagcaagggaaagtgggccggccctttttttcttcaaaaaaaaaaaagccccaggggaaagccggggctttaaggcgacactttgttgtaggggaaaccctggggaaaaaatttaaggtttttcgcccaaaaaagggggtgcttttgggggaagaccccttgt

SEQ ID NO: 151822 - DNA, 229 bp, Zea mays
  unsure (1)..(229): unsure at all n locations
  Clone ID: MRT4577_69991C.1
caaccaacactttttgtgcccccatccttttccgcctcaagtcaagtgttcacgggccatcctctcgggagtctaggcccttcttctttagccgctttctctccaaacggctctccatatnnnantctatgtttatttgttcngggcccnccnccnncnnnnccncncctcctcctccgggttacgggttcttcagcaccgtcttctccgcgctgtctgcgggttgcgc

SEQ ID NO: 151823 - DNA, 1215 bp, Zea mays
  Clone ID: MRT4577_69992C.1
attttcatattcctcgagattatgactgtcaaaatgtattgcgaaaaaacaaatccccgtaaagcagccgaagagttgtgataaaaccaacctgtcatcacctaataagaaagcacatcgcagaaaacatgaccaggtgcaactcgagtttcggcaaaattcgttctcaggcgacagtcgacaggcgaacagaggaaggtacagcgaaaatgcaaccaagctaaccagcctcagttccaacattatgaacagttgagaagctcttctacatgaagtgacaaatatattagagtaactgcaagttctaccacatatactgatttgtcaaaggtgcccaaaggtaaagggaaccgaccacaggtgtacaaccaaacaattcagagtggtagtcatttagagacttcattccatggcaaatatctccagtctattttttatcaagcaaatggcaacggattaggactgaagtatgatggggttattacacaaagaacagcactgcgctctcatgcaccgctcgcatacaggcgagtccactccttggctgtttcaacagcttctacttcattggctttccagtgctttgcaatgttatcggagagagggtcatctggatttggtgcactcagtagagcctgtatactcaaaagaactgttcgaatctgaagtgctgggctccatttgtccttgagaatgtcgaggcatatcctaccaagcttgtcaatgttgggatgataaatcttggtcagaaacctaacctttggggcagccatgggatattcctcaggcaaaaagagttcaagcttaaaaactccaccttcatagggcgactgcgccggcccaaggatcataacgttgaagtagcgcatgttctcctccgagggcgacgcgctgatccccggcgctggctcgctgagcagtcgctgcgtctccttgatgatccgccgcgggaggttgctgttggccatcggatccgggcaggggtgcgggcttcctcctcaacgaagttgcggcgccggtgatgcctcgaggccttgagggcttgaggctggtgcgggggagggggagcagtcggtcggggtggggactggggaacggggagggaggcagtggtgggttgggttgggttgggttggccgctcgttattgaaagtggacgcggttttggctgctgtggggtgggttttatcccggccgccgcctcgagcgccgcac

SEQ ID NO: 151824 - DNA, 350 bp, Zea mays
  Clone ID: MRT4577_69993C.1
aaagtaacagcaagttctaccacagatactgattagtcaaaggtgcccaaaggtaaagggaaccgaccatagttgtacaaccaaacaattcagagtggtagtcatttagagacttccttccatggcaaatatctccagtctgtttttatcaagcaaatggcaatagattaggactgaagtatgacgggttattacatcaagaacagaaccaggttctcatgcaccgctcgcatacaggcgagtccactccttggctgtttcaacagcttctacctcattggctttccagtgctttgcaatgttatcggaaagagggtcatctggatttggcgcactcaggagagcctgta

SEQ ID NO: 151825 - DNA, 988 bp, Zea mays
  Clone ID: MRT4577_69994C.1
aaacccacctcacagcagccaaaaccgcgtccactttcaataacgagcggccaacccaacccaacccaacccaccactgcctccctccccgttccccagtccccaccccgaccggctgctcctcctcctttccccgcgccatcctcgaggcatcaccggcgccgcaacttcgttgaggaggaagcccgcacccgcccccgatccgatggccaacagcaacctcccgcggcggatcatcaaggagacgcagcgactgctcagcgagccagcgccggggatcagcgcgtcgccctcggaggagaacatgcgctacttcaacgttatgatccttgggccggcgcagtcgccctatgaaggtggagtttttaagcttgaactctttttacctgaggaatatcccatggctgccccaaaggttaggtttctgaccaagatttatcatcccaacattgacaagcttggtaggatatgcctcgacattttcaaggacaaatggagcccagcacttcagattcgaacagtttttttgagtatacaggctctactgagtgcaccaaatccagatgaccctctctccgataacattgcaaagccctggaaatccaatgaggtaaaagctgttgaaacagccaaggagtggactcgcctgtatgcgagcggtgcatgagagcgcagtgctgttcttggggttattacaccatcatacttcagtcctaatccgttgccatttgcttgataaaaataaactggagatatttgccatggaaagaagtctttaaatgactacccctctgaattgtttggttgtacacctgtggtcggttccctttacctttgggcccctttgactaatcagtatatgtggtaaaacttgcagttactctaaaaaatttgtcccttcctgtaaaaaaaaaaaaaaaaaaaaaaaaaaaaaaaaaaaaaaaaaaaaaaaaaaaaaaaaaaaaaaccgaggaaagggcccggtacc

SEQ ID NO: 151826 - DNA, 1038 bp, Zea mays
  Clone ID: MRT4577_69995C.1
ggagctgcatagtgggtgcattgtgcctgctgcttcttgtcatatacaactgctcagacaaattcctcagcatccgtgaacggaggaaagaaaggtcaagggagaatgccatccggctagctcgccagcagctaaaggcgcaggagggatggaaagcggcgaaacagtttgccaggaggcatgtgagtggcatgcagggtcatctttcacgcacgttttcacggaggaggtcgtttcgtcagcaggtagacgcagacaagtctagccatagggtgcaggaagcgccgctgatgggtcaggtccagatgcaggaaatgtcggattctgctgtgtttgcttctgagagcgcaaatgagataacagaggcgatgccatcagtcattgtagatgtcagtgatggggaagttgttgctacaaatgaaaatcctgcgacgaaaggaaggcatagatcaacccacacacaagtgttcaagtatgcgtatggcgagattgagaaggagaaattccagcagcgacaggacaacaagaatctaacttttactggggtgatcgccatggtgaaggaccagcagaaggagataactaggcctttgctcaaggttgagttcagagacctgacactgatgcttgggaagaagaagctgctgaggtctatcaatggtgaactccggccggggcgtgtaactgctgtcatgggcccatcaggggctggcaagaccacatttctcaatgccgtcactgggaaggtgaacggctacaagatgacaggttctgttcttgttaatggaaagaaccttaacatccgttcctacaaaaagatcatcggatttgtgccacaagatgacattgttcatggaaacttaacggtggaggaaaacctctggttcagtgcaaagtgcaggctatcagcaagcatgaagcatcgcgacaaggtgctcctattggagagagtgatagattctctggatcttcagggaatcagaaattcattggttggcacagcttgaaagcgtgggatttctggcgggcagaggaagc

SEQ ID NO: 151827 - DNA, 2374 bp, Zea mays
  Clone ID: MRT4577_69996C.1
atgtataactggaggttaatatttatggattctcacgttccacctgattatgactgtcaaaaatgtactgcaacaatacaaattcctgtaaagctgcttaagtattgtgataaaacgaccctgtgatcacttcgtaggaaagcacctcgcagcaaagctgaccaggtgcacattagttttggcaatttgcattctccgatgacagtcgacgggcaaagaaaaaaaggtgcaaccaagcttcagtttcaacaatatggacagttgagaagctcttctacatgaagtaacaaatatattacagtatcagcaagttctaccacagatactgatttgtcaaaggtgccccaaggtaaagggaaccgaccacaggtgtacaaccaaacaattcagagtgatagtcatgtagagacttcattccatggcaaatatctccagcctattttttatcaagcaaatggcaatagatgaggactgaagtatgatgggttattacatcaagaacatcactgcgttctcatgcaccgctcgcatacaggcgagtccactccttagctgtttcgacagcttctacttcattggctttccagtgctttgcaatgttatccgaaagagggtcgtctggatttggcgcactcagtagagcctgtatactcaaaagaactgttcgaatctgaagtgctgggctccatttgtccttgagaatgtcgaggcatatcctaccaagcttgtcgatgttgggatgataaatctttgtcagaaacctaacctttggggcagccattggatattcctcaggtaaaaagagttcaagcttaaaaactccacctgaccaatcaataagcgaaagtaacattgtcagtaactaagtatgattgcaacttacaaggaaaccaattaggtgtcacaaatatccccagtacaagcaaaagtattgtggtgattgctacaacacacataatgagctgaacataatagtccactaagccaggtaaaagtgagttccaccatggttttcaaggtatcgcctaggcaatgagacactgcgattctgaccttctgggtatcctggtctccacgacaaaaaaaggtcagcaaaagagatggatggagggagggaaaagataggaagaacgggaggtgagctggtcagcaagacggaacaaaaaggatgaggaaaggcagggagcacttgcaggcagcacatctggagagagaggtgcagagagagagggggggctgagggggggcagcgtcgctggcggttctagaagatgaatcagggaccgagtggtatataagctgtctgctgggctgggccagcccccttgttatcctatggcatagagtatcaccttgcttcaccttacaggtgcctaggcctagatgattggaaaggatggctcaccatgtatccccttgccaccttaagaaccggtttccactggtaccagtggtatgtttcattcattcactaccattttagaatcgagatcaactaacccatttcccaaggttcatactagtgtctttcttagtccttgcctccgaaaaagagattagcaagtgaatctgctatattacaacttaaacaaatcagagagtaaggagatcatcacagcatacatggataagaactaatcgatcatggaaggaacaaaatatattattaccaattcatccaaagaagctacagtctacagaaaactataatctaggaaataaaaaatgacttttgttccctacacaaatatgcagaaaaacagcaaacataaaacaaaactagtaataactatcacatactatactagtgcaaaacattactcaaattacctgcccttcaacatagctaacagaattctgcaaatagaagctaagactcatcagccacaataccgcccaaaaactaaaattgacaagccaaaagtcaccagccgaccaaactatacaagcttacctatgtgcgcataaactagagcaaacatttcagcatttctgccatttccagtggcatcttttgaaaagaatcgattcgattcgactcgactatcgatatctggaagcactccaatattaccactctagtcaccacaccacacagcacgaacagcgcataaaaaaatccgaatcagaagcttgcaccttcatagggcgactgcgccggcccaaggaccataacgttgaagtagcgcatgttctcctccgagggcgacgcgctgatccccggtgctggctcgctgagcagccgctgagtctccttgatgatccgccgcgggaggttgctgttggccatcggatccgggcaggggtgcgggcttcctcagcgatgttgcggcgccggcgatgccttgaggctggtgcgggggagggggagcag

SEQ ID NO: 151828 - DNA, 370 bp, Zea mays
  Clone ID: MRT4577_69997C.1
taccagtggaggtagctggagatcctggcataataggggccctgcagagcaatctatcgacatatggagctcaagacatgagcaggacaggaattcttgctttgagacgttccaggattggcgctacagcccggacttggcgatattctgctgctacctacccagacctgattgaggcgctgccgaagaatccacttacatctgttaataggacaggtaatgagctctttaggtcaaccatccaatgctgggggtgatgttcattgctgtggaagcttactagagcttctcagtggaccatgcactcgatgctatagatggtgttcttgatgctgatgatgcgagtggacttccatgatcatactctctc

SEQ ID NO: 151829 - DNA, 550 bp, Zea mays
  unsure (1)..(550): unsure at all n locations
  Clone ID: MRT4577_69998C.1
cggccgcccttttttttttaaaaaagaaaaaaaaaaaagaaanaaagaagaaaaaaanananaaannnannngcaccaattaatgaaggacctatcgatgattactgaattacagtgggggacgacgtcactacgacatatacaaaagacagcctatatatgcctcggggttatgtgactatatgaatcgtctatatatgagacaactcaaatatacttgcatatgtatccttgaatttctgttatttggtttacaaatggtaaaaaaatctgccacgtgatgagatttatctcgggggaatgggtggaggaggtgacggtgctgctgctgctgtgcctgccgccagtggagcagttgctgctggcgcacagaggaagtgagcagcggaaattgtagtcgccgtagcaggcggcgcagagcccgccgaaggagagctgcagatcccaaccatgtcgtcacatgcggacaccggtaccactaccacggccccaccaccacctcctcctcctgctgctgccactgccgccgccgcagcagcgtcccgaacgc

SEQ ID NO: 151830 - DNA, 476 bp, Zea mays
  Clone ID: MRT4577_69999C.1
caagcttctttctttctttctttttcaaaccattattgtatctattattttgtattttactttttgctacctgtgatcaaccaagtagctctggcaaaccttactccctactatcagcaacaacggtggcttccattcaaccaactatctacactgaaccctgctgcttatttgcagcaacaactatgggcatccacccagctagctactgcctactgggatcaacagcaacttcaaacattgaaccaaaaggggcaacattaaccccgctggtaaaagggggggggggataccccaaacctgtgggcaaaaaggggcaaactgggctgctgtcaaaaaggaaacacggactgttgctgcctttctaccaacaggttgaagataaccccgcaaccctctaacaactacaacaattgcggccctttggccaacttgctaagacaaacccagcagcctcctaccaacaacacatcatt

SEQ ID NO: 151831 - DNA, 951 bp, Zea mays
  unsure (1)..(951): unsure at all n locations
  Clone ID: MRT4577_6999C.1
cagcattcagggtgtggaacaaggggcaagggctttaggtttggggccccttaaaaaaaaaaggcagttggcccaaacgggcatttataaacaagatcttttcaaaaaaggcacccccctttttttttttttatttttttattttgtaaannttctttctatttttatttttttttttttttctttattttatttttttttttttttttttttttttttttttttttttttttttttttttttttttttttttttttttttttttttttttttttttttttttttttttaaagccagagactcgagtctcaacactgactggaattacacagaaaaaagaagcaaaagagatgcctaccaccaatgcaaaaaaaaaaaaaaataataatcatgtatctacaaagcagagcagagcagagcaggagaggaagaagcacaggcaaagcagagcaggagaagaagaagaagcacaaggttgtgcacatggacgacgatccgcgctttcttttgtacctacagcaacgaatgtgcgaaaacaggcaagggagggagggacacatgtactgcttattatcccatggatgcatgcatgcatccgatccgatccgatccgatcaccggccatcggccgaggtgaaggactcggcgaagccggcggggcgggcggggatgctgcccttgctgtcgtccaggctcatgacgctcccgccgccgtccgtcaggccgccggcctccgcgtcctgccagctcttcaccatctgcagcagcggcaggtgcaggtcgatgcccaggtagtcctcggcctcgtccttcacgggcctccacttctccaccatgggcaccagcacgttcaccgcgtgccccatgtccggccgctgcgacggctcccgggccgtgcagtgccccgcgagctccgcgatcacgccgatgctctccagcgtctcgccgtcg

SEQ ID NO: 151832 - DNA, 1376 bp, Zea mays
  unsure (1)..(1376): unsure at all n locations
  Clone ID: MRT4577_699C.1
ttgggtacctcgaggccggccgggggcctgctattgaaaatcacacgacttccaccgcaatcgcgcgcaaaaatcccgctcgagcttccaccgtctccctccgcttccccgtgcggcggtgccgggtcgcgccgtgccatggcgcccgccttctcggtctcgtgcgcgcccggatcctcgcgcccgctggccgccagccccggccccagcgtcgtcgtcgtcgcctcctcccaacttcccgcgtcgtcgcggagcagcgaacgcaggagagcaccaggcctcgcgctcgccgcggccccgggtgtcggcggtagggatggcggtggcaggtggagagcaggcatctcgtccttccccttcctgccgccgttcttcacagggaacaagggggagaaggacgctgagaaggcgatgaggctcaaggaggagctcctcgacgccattgcaccgctggaccgtggcgccgaggccacgcccgaggacaaggagcgcgtcgagcagattgttcagcaactggaggcggtgaaccaggtgaaggagccgctcaagtccgatctcctaaacggcaaatgggagcttctctataccacctccacaagtatactgcagccacagaggccaaagtatctgaggccgtttgggaagatttaccaatcaatcaacgccgacaatttgagagcccaaaacatggaaacttggccctactttaatcaggttactgccaacttggtacctctgaattctagaagagtggcagttaaatttgagccaagcaaataagacgacttgtttcattgattcttgaagagatcgagcttcttttgcaccacaaggtcgaggatgtcttgcaactgcggatcaagctgcggctgcggctcaagctgcaagtgcggcaagaagtaccctgacctggaggagacgagccaccgccgcgcaggccaccgtcgtcctcggcgtggccccggagaagaaggccgcgcccgagttcgtcgaggccgcggccggagtccggcgaggcccgcccacggctgcagctgcggtggcaactgcaagtgcgacccctgcaactgctgatcacatcgatcgacgaccatggatatgattattatctatctagcttgtggtggtggttgaacaataataagcgaggccgagctggctgccatacataggtattgtgtggtgtcactggtgtgtgtgtgagagagagacgaaaccgagtccttctgtttgctatctctctctctctctctctctgcatgcttggcgtcagtctttgtgctcatgtacgtgtgtctggttganccgattgcgtctgctgcaaccatatactaattggtccacgatgatatgagttgatactaatataatatacg

SEQ ID NO: 151833 - DNA, 336 bp, Zea mays
  Clone ID: MRT4577_69C.1
attcggctcgagtggtgggggcgcatttgtggctattcctcaccgtgtgatcacagtcctcgacggctctaggatgccttaagcgtttgtggaagtgcgatgcccatgcgtgatgtttcctaccttaggtaggaggtggaactgggcttaaccaccatgatcgagtcgctggagaatgccttcagctcctacggtgagatcctggacttcaaggtcatcaccgaccgtgagacggggaggtcccgtggttttgggtatgttaccttctgctcgagaactccatgctcgacgctatcgataacatgaaccgctaggagctcgacggtccgtacatca

SEQ ID NO: 151834 - DNA, 215 bp, Zea mays
  Clone ID: MRT4577_6C.1
tgcgcccccaccgtcgcctcgccttaatctctccccgcctccgttaccgtcttcccccttcccacactacccccacccgttgtgtatcataccatcgatcgctcgagctccacgaccttcgaatggataacgtatgatacacctaataatattgcttgcggctacttactcaccattaagctcgatacaatactgaatatactgtatgttgttgg

SEQ ID NO: 151835 - DNA, 289 bp, Zea mays
  unsure (1)..(289): unsure at all n locations
  Clone ID: MRT4577_70000C.1
aaaaaaaagtacagcggggcattccacctgattttgtgacttatagctctgtgggtcatgccctgtgtaaggcaagagcaatggacagggcagaggctttccttcgacaaatggtcaataaaggtgttctgccaaataactggacatataataacttgatatatggatactcctccacaggacagtggaaggaggcattanggtggtaaagaatgagaanaacaacatcttatanatgttgttaatttnaacacnttnatnnnttncctttnnanntatnnaaaaatta

SEQ ID NO: 151836 - DNA, 247 bp, Zea mays
  Clone ID: MRT4577_70001C.1
atgaggaaagcgggcgcgctctgcaagctccggtcctgtattaccggcgcgactcggggcgttcggactcaagcaactttggatgatgtcgaggaggggttgcatgctcgcactgaagcagctaagacatggatgactatgccgggaccgaagagaggtgagattgtgagacacattggtgaagcattgaaggactaattggatccttcggggaggctggtgtctcttgatatgggccaaagtctcc

SEQ ID NO: 151837 - DNA, 146 bp, Zea mays
  Clone ID: MRT4577_70002C.1
ctccttctgtacataaacctgaaaaaaaaagggttcagaggtttattgaacgaaagagagatttcctttgctcacatcttaaactttcacctagcttttatcaatgatcatctgttacagaaaccaacatcgctttatctggctcc

SEQ ID NO: 151838 - DNA, 321 bp, Zea mays
  Clone ID: MRT4577_70003C.1
cggtggtcttaatgcttcatttatatcggcgaagaacatgcctgtatcagcaattctgtttcaggaaccaaacggatagcttaacactgtgttattgcaattgccaggccttgacggctaaaaaagcaaagtctgcgggcgccgggctaacgaaaacaagaccagcattgatccatgcggccccatttacttgtcagttgcgcatagtgcatacacgttatgcctacaccttaagcttgttccagaccaagtttctaaacgcctgagccctgcacaagctgtcacacatgagcgacatgatcgatgacctcgagccacacc

SEQ ID NO: 151839 - DNA, 307 bp, Zea mays
  Clone ID: MRT4577_70004C.1
agcaccgcagctagtccattgcattgacgcctcgatcagggctagcgacggacgaaagaaagctctgcatgcagcgcctcgccgccgccgtcgtccccagcctggtgccgccgctcgacctgtccatggccgcctccgccgctgccggctgttttccagcagaagcagccggcagtagtagccggacgacgacgtcgacgccgacgccgacgcggcggccattattagcgcaccgccgtggcgggtggtgctactgacgctcctgctgctggcgccgagctgctgccaggcgacgcgaggcatgcag

SEQ ID NO: 151840 - DNA, 551 bp, Zea mays
  Clone ID: MRT4577_70005C.1
gaccattgtttctatcatatcgaacccaaatacacataccctgcactgctacttggacctaaaatcgatatcgcatcttggggtatgtaaagcgtctgctacatgtggtgcaaccggttgtgcttggcttggacaaactgcgattacagggtaactactcgcaggatctataatcgggtctggacgatttaactatactaacagaaaggggcaagtagacacgatagcctatacatggtgtctatttaggttctgcacgcattgccacacgctgtacctactgcagaacttcaagcacaacctgcttcagctgctctaggagaagtacttcaaatcatgctacattatgcagctttgtgtctttgctgctacactatgaagaaagcaaaacaatataatgtgccagccagtgatgggttgacttgcatgatgacaaacaaccattgatttaaaccatgtgatgcctagaaacaaatgaactctccaaagattcaagtgacagtggagacacttataaagcatgatatggcgcttgggaatccatgtacaac

SEQ ID NO: 151841 - DNA, 264 bp, Zea mays
  Clone ID: MRT4577_70006C.1
acgcgtacgcaagcatgcattatagagagtccacgcgctcgttcgagaaacaagtggttttcctaactggggaacgatatgtttaagcatgccatgtcccgtgaaaaccagcttcataacgaggtggcgctagcttttgcagttctccagacctgctgttaatgctatagagaaagctgtggtaaactacaccgaggtggacctattaggcctgaaccccgtcctccctgatcgcttaagactcttctacaagttcgagattca

SEQ ID NO: 151842 - DNA, 666 bp, Zea mays
  Clone ID: MRT4577_70007C.1
gccggccgggccggggcccatccgcccatctcccgaccactcacgcgcctattccttcccgccccgccgcgcgccgccacctctacggctccccggcggccatgctgaccgggcgggagagcctggtccgcctcatcggccggcgccgccgctcccctctccccgcttcgctcgccgccgccctatccttaccctccccttccccctccacctccctcgcccaggcagacgatgggggtggctcgggagaagcggccgggggtgaggctggttcgacgtccggaggaagccgcgtcgtcggcatgggcgcggagtgggtggtctgccccgtctgcggcgattcgatccgagggtcggactactgcgtcaacactcacctcggtccgtccacgagcgcctcgcttgtcctgaataacctgcgatgctgaatgctccaatgcatttactgtatggaggctgtagagtgcgtactacttgtgccggccgtgtttgtcccgaaatgcttgtagcacccggtccgctctgactgaaaactgtgctatgcctcaaataaccgggggcagatccaggacaaaatatgactacatattttatatttttaagaacgagcagcaaaatatcatacaagggcatctaaaaagaagtaacacagaaaaaaggccccta

SEQ ID NO: 151843 - DNA, 485 bp, Zea mays
  Clone ID: MRT4577_70008C.1
cccacgcgtccgcccacgcgtccgcccacgcgtgcggtccagtctccttgcgccgcgccatcccccgccccgtcggctggaggcccagacggccccgccgcctccagtcccggagccggtgcaggtgggcgagataacggaggaggaactacggcagtacgacgggtccgaccccgagaaaccgctgctgatggccatcaaggggcagatctatgacgtctcagagagcaggttgcttcctttgaatccttgattgcttcagtcctaacctttaattattcatccatttcgtcccaatcgcaactcgcagagctgctgtgctctgttgtactagtcactagtcaatcgtggtgaaccagtagctttttcttcttctcttcacttgtacaaccgatgctctccaaaacaaggcggagttctgttgtgcttaaaaaaaaaaaaaaaaaaaaaaatataaatatatggtgggccattataaaggatac

SEQ ID NO: 151844 - DNA, 3222 bp, Zea mays
  Clone ID: MRT4577_70009C.1
aattcggcacgaggccgcaacctcctcccatcccttgcgccagcggattccttggctgcgcggaattctcctagcctcccgagcctccccagctcgagaagggagctcacggtgacgcggcgcgaagggccgggtcagatcttggccgttggccccgaggcggcggtttcgcgtggggtccagcagagcccggcccgcgcgggagccgctctgattcgccgggggacgccgcggggaatgctctacctcaagctgccggcgggggatctagggttccgtccgggggcgccgaggcggggatccggcggcggcggggcctgagggtggcgcgggcgtcggaggcggccgccatggagcaggacccggagcgcgcctgccttcggagcttcgagctccacgagagcgagtcgagcctttacgttctaggaactaattctgacagaacactttggagactactcaagatcgatagatcagagccgtcagagcttgtgatagacgagtgttctactgtatatactgaaagtgaacatcctgacttgttgaagggtcttgatgacgagcacaggtcaactggcggagtaaaatttgttacaaagttttatggcataattggttttatcaaattccttgggccatattacatgttgattattactgagcagaaaaaaatcggggaaatctttggtcatccagtgtatcaggtgaccaggacttcaatggttgaattagcaaattctaagacaagatctacttttcaaaacttcaaggacgagaacagatacaggaagatcttgaatgcacttgatcttaggaaggatttctttttcagttactcataccacattatgagaagtcttcagaagaacttggctgatccacaggatggatggaccttatacgagactatctttgtgtggaatgagtatctgacacggcggatccgtaattgtctcagaaatactttgtggactgttgcattggtccatggtttctttaagcaggataaattctcaatatctggcaaggatattatgttcacactcatcgctagacggtcgaggcattatgctggaaccagatatttaaagaggggggtgaatgagaagggaagagtagcaaatgatgttgagactgagcaaattgtctatgaagctgtgcctggacctactgaagtaagttctgttgtgcagaataggggctcaattccactattctggtcacaggagacatcaaaattgaatcttaaacctgatataatattgcatgagatgcagaataattatgaagctacagagcttcattttgaaaatcttagagcaagatatggaaaccctatcattatcttaaacttgattaagacacgtgagaggcgagagtctatactccgccgagaatttgataaggcgatcaagataataaacaagagcctgtcagaagagaatcatctgaggttcttacattgggatcttcatcaaaactctcaaggaaaacctacaaatgtactcgacgtccttctaaaagtggcatttcgggctctgaatttaactgagttcttctattgtcaagtcgcaccaaattctgagacttctgcacaatgccccaccctattgaatggtcttgatcaatatttatgtgatgacaacaatagtgacgacacggaatgcactgagattgttggtgatgtatcccaagaggatatctcaggcagctctgattcctctggtaatgcaaccacagaagataaatttgagaatagtggactgccaccaccaaaaccaccaaaattccaaaaaggtgttttgaggacaaactgtatagattgcttggatcgtacaaatgttgctcagtatgcacatggtttagctgctcttggacatcaattgcatgcgcttggttttatagaatctccagaactaggtttagaagctcccttggcccatcatttgatgcacttttatgagatgatgggtgacacacttgctgtacagtatagcggttctgctgctcataacaaggtattctctgcaaagagaggtcacttgaagctttttattcagtcacaagagttctttaggacacttcagcggcactacagcaacacctgtatagatgctaacaaacaggctgctataaacttgtttttgggatacttccagccacagcaggaaaaacctgcactgtgggagttagaatcatctgctgggaagcataacaataatctttttgatggccacccaagtacattgaaaagagtaaaatcagatggcaccattcttcatgaaagtaatgcttctatatctggctctggtcgttgccataatgaacagttaagtgcatcgcagcctgatgtccagaatgggtttcaattcccaacttcagaatccgattcacttcatgaaaatgaaatttcatcagcttgtggaagtggagtagcacacctaaggtatactcccacagcctctgacgtgcttcatgtcccaagagctaaagttgaatattgccatgattctggtgattcaaactttttggatcttgaatggctttccacttcaggcaactcaagtgatgaaaggtctattgcaactagcacgccagatgcaaacctatcaaatgagaatgtcattagtggcataactcctgatatcatggaaaaccatcttgctgaaatgcagtatcagaagttacctcggaattttgtgcagtgggttaatcacggtgataccttttggtactaagatcgcaattactggaattcaatatgtcgccagcttcccagggtgggcattaacacggatctgagtagtagattatagagtgatatggatgctgcgggcaaggcatttctcccgtgatatactccgcaccatccccaaagtcctttattggtccacgtgtttttacaatgggtgagtagatagatatctttctgttgaaagaaaatagagatgataattaggcttattattgttgacctgaaattgtcattattcatgggaacatgtcatattttcttgtgtaaaaaaaaatgcttgaggtgccattaaaaaaaaaaaaaaaataaaaaagcagctagcgccccgacggaagacggtcgcagggcgaccacgtgcagctcccgcgcccgcgtcccatcctggctgagcgcacccgccgcgccccttcgccccgctccgcccattgcgtcatttcaaaatccaaaaaaaaaaaaaaaaaaaaaaa

SEQ ID NO: 151845 - DNA, 379 bp, Zea mays
  Clone ID: MRT4577_7000C.1
tttctttgttatgcggcactgcatctactacgcgggcgagctgttctaggaggcttgctctgactgctgccaggactacaggagactcaacaacgacgcccgaagcacctacgaccgtcttgctggctgtaactgcctgaagaacagctacaccggcgacagggggcgcaacagcggaagcgtcaacagggtgccgttcaagagcggggtgagcatcctctacactgtgaggcattacaccgactgatccagtgggagctgaacctgaaacgacgactacaggcgacaggggacgcgtgaagacgatccatatcgattccgacctacagaggtacacgcaggacgagcagatatgaccatatctagcgacctacccatg

SEQ ID NO: 151846 - DNA, 571 bp, Zea mays
  Clone ID: MRT4577_70010C.1
aggccaaaggttgggaccaaaaccctttcttcctttttggaaccccgcatttgtaaagggacaaaagggttttcaaaacccacaaccccaaaggggggtgttttgaatttttaaaaaaaaacggcccgagaaaacaacggccttttttttagatgggggaaaaaaaaaccccgggctaaaaaaaaaaaaacccaaaaaatctcaaataaacacgctttaaaggggggggggggtataagggtttgggagttgggccccttaggtttgggggaaaaccccaccagcccaaaggaggggttttttcctttccaaaaatcaaaaggtaaggctcccctttgttacttggaggaaacccggaagttttagtttttacccccaaaggggaaattaacactacctaatttggaactttttttttcccagggggaaactttgagaataaacccgtttttaaaagaaacccaagaaagggttccccccccaaccaatatatggggggggggtttaaaaggggggggaaaggccaggccaactaaggccccctttggaaggggttggaaaccttggccaa

SEQ ID NO: 151847 - DNA, 356 bp, Zea mays
  Clone ID: MRT4577_70011C.1
aggaaaagccagccgcccccaagagggtgcattggattccaggggggggagaacaacgggggggggggtcaactcaacacacccaagggggggcccaaagaaaataaaaaaaaagaacccgcggaaccctgccttattagttgaccacgggggggggcaggccgttgaaagatgaccgagaccccgggggaatgatataccatcttggggggggggtcatcatcacattaaaccacccgggggaaaaaggggaccccccccgggaagggaaactggcaaaccccgacgcggggatcccgaaaaagcccgaccttgagttccctgatgggggcccggacccctgggtccacccggga

SEQ ID NO: 151848 - DNA, 429 bp, Zea mays
  unsure (1)..(429): unsure at all n locations
  Clone ID: MRT4577_70012C.1
ctcntttgctgtaccaataatatcgagatgaggggtaattaataaattgaggatgtctcgggaacacatgcccgaatgagggcaccactatcgagatcatgtcatatgtaagctaaaagaggggccctccaacgatgggttgctgcctcgtcacgacagggttcatcaaagagaactggctgtttggcaacaactgacgctgctgtaggaaggcagcaaccaatgggctagccactgctagtggattaagaaactgatgacgcggctgtagggacccaacagattacgacatacacagccggttgaatggaaccaactgttcgcaagtaggcagcacggtttgccacaactagctgagtcagaggtggtacaatctgctgcaacaattgttgtcgcaggctgtaggtgcattggccaccgggagcgggc

SEQ ID NO: 151849 - DNA, 309 bp, Zea mays
  Clone ID: MRT4577_70013C.1
catattgcacgcctgccgcagaagtgagcgggtcgggcgaaaaataccgggcgcctcatcgtccggaggtgcggtgacgagacgaaggcagagcgccccaaacccaaaccccagatgcgcgacataggactacgccatcatcatgggacctgctacctccgaagcagggccaccttcttctcactcaacgctacacgaggagggcgcgccgccctatgggccctgactcgcctgcatcctcccgcacacctcagtgggagaggagaaccatgacgagaaaggcaactacctcaacctcaatgtagcagc

SEQ ID NO: 151850 - DNA, 433 bp, Zea mays
  Clone ID: MRT4577_70014C.1
aaaaccgggtggggtttttttttttttttgttggtaaccaacccaacaatgaaaatatttttccctgggattcacggggggaacacccaaatcatccacaggggttgaattggttttaatgcaaaggggactaaaccttttagggcaggagacgaagggctttcttgggaataaggaaataaccggccattggccacataagttttacgcgggacatttgcaggcaaagggactcccaaaaaacttacaaccatttgggcaacataaaggagactttgtttttgacaccccgaaacttaggcatcaatagaaccaggcccttcttactggaaggcccactggttttccctggggaacttccttttccttctaggggggaaaacatttttgatgttgaagggtttgggaaatttttttgggggcttgcccttga

SEQ ID NO: 151851 - DNA, 939 bp, Zea mays
  unsure (1)..(939): unsure at all n locations
  Clone ID: MRT4577_70015C.1
aattcggcacgaggtaaaaagggcaccacatccagccccagactaaaaaaacatccttcctttatgaagctaacaactgaactctcaactagatcactaaaggacacctggaatgggagctgtaataagggcaaggtgtttggcccccgcaaacttccatataataatttcttcttcagctcttctaatagcaccctccagactgggttttactttgtcaaaaacgcacccatttctatggttctagagagtccaaagcccaagggtaatcaaagaattgagccctttttagcaatcccctgcagctgctcactgattctgctccaccattccatcgttttagcttctcccacgttaggagcaaaggcagacaggttgacctgtctcagcagctgaaaccaaaaactcctagcgaaaacacaacccaccaaaatgtgatctatggtttcttgatcttggtcacacacaacacatttgtcaggatgacttaagcctctcttctgcagacggtctgctgtccagcatcttccaagatcagcaagccataaaaagaatttacatttgggaggggaccaagttttccaaattaattcccaatactgagccatggtcgacccgatgaagaggccatcataagctgctttagctgaataaattccatcagtagcgaacctgaaaatatgcttgtcctcccagctggatattttgaagttcgtcccaaagatcaaggaggtcggaaaagacacctactgtcaaggcccctttaatatcaattaaccattttctgtctgcccaccctcgcggtattatctcaatagaaggccgtggcaatggtcctagccgaggaacccctaaaccgcttcgccgcactgcaaaccgtccacacgggtggtgccccaagtcagcnagctggttgagctcggcatgattttgagggcc

SEQ ID NO: 151852 - DNA, 330 bp, Zea mays
  Clone ID: MRT4577_70016C.1
atccttcaccattcctagcatttctcagtcccaacaatatagcaacaatggcgggcattatattttccattcctatcctcctttctctttctgcatttttttcaactctaccatttttccttaatacttacaattcttctattgcatcttcttctactctattcctatcatttttgactttttcttttttttataaccctttcttattacctatcttcttttatctatcttttcttatcaatctacttatcttttattactcctgtttttttaacattctatatttttatttttttttccactttatttttttttcttatttttttttta

SEQ ID NO: 151853 - DNA, 310 bp, Zea mays
  Clone ID: MRT4577_70017C.1
cccacgcgtccggaacacttgagctggaacaggctgcccgatcctgctacccaaactacggagctgtccttacctgagagaagagaactcgaagtgacatacactgaccatgtcatgatccccactctacgatctcggaaaggctacctcctgccaatacacaggccacacacactgacgcacgaaactacttggctctcgcaatctcgatcactactgccgacaccatctggatcacgtcctcggcaccaatgtcgtcccaccttatacgtatcgctgctgctcacatgagccggctattctgaccgat

SEQ ID NO: 151854 - DNA, 347 bp, Zea mays
  Clone ID: MRT4577_70018C.1
gtatggttctgaaactcggcctggctttagatataaacctagactttgagtgactataaccgggggttgttatcatgcagacccaactttgaaaaagaggggggggaacgccaccagagggaaacgaggttgatggctgagtggaaggcaaagtgctgggcagatcattagaggttgggggaaatgttccagtacatgcaaagccttggcgccgaacaggggatagttccaccacctccatggttccctccagatgaccctgctttattgaacactcctgtaaccagacattggggagggatccccgctgaggaccatcgcctcatattgacaaacaggggtggatt

SEQ ID NO: 151855 - DNA, 229 bp, Zea mays
  Clone ID: MRT4577_70019C.1
ggacggtgggttcaggtgtgtgtagacaacctattttttagttgatatagatggtgctgatttgttaagtaaagctattgtctttgatggtcacacttttattggaaatctgcaattccttttatgttgtaacaaaatttaatatctaaaaatgttgttggtgtcttggtggtaccgtgtcagttgtcaacagtccaattccattctcatggctttgattctgacgtat

SEQ ID NO: 151856 - DNA, 1863 bp, Zea mays
  Clone ID: MRT4577_7001C.1
ggggggggggggggtttttttttttttttttttttttttttttttttttttgaagcaaaagagatgcctaccaccaatgcaaaaaaaaaatcatgtatctacaaagcagagcagagcagagcaggagaggaagaagcacaggcaaagcagagcaggagaagaagaagaagcacaaggttgtgcacatggacgacgatcccatgtactgctttcttttgtacctacagcaacgaatgtgcgaaaacaggcaagggagggaccgggagacgagagacatttgagagacacatggatgcatgcattgcatgcatccgatcaccggccatcggccgaggtgaaggactcggcgaagccggcggggcgggcggggatgctgcccttgctgtcgtccaggctcatgacgctcccgccgccgtccgtcaggccgccggcctccgcgtcctgccagctcttcaccatctgcagcagcggcaggtgcaggtcgatgcccaggtagtcctcggcctcgtccttcacgggcctccacttctccaccatgggcaccagcacgttcaccgcgtgccccatgtccggccgctgcgacggctcccgggccgtgcagtgccccgccagctccgcgatcacgccgatgctctccatcgtctcgccgtcgcccacgtccagggccgggtcgatcgccgcgcgcagctgctccgcgtccttccgtatctggctgaaccagtacgccaggtgccgggtctcctcgccctcgcccacgcggctgtcgtcgatggccgtcgtccctgttatcagctccagcagcactacaccgaagctgaacacgtctgctttcgtcgagatcttcccggtaactgcatactcaggagccaagtacccgaacgtcccggcaagtctggtcgccacagagtagttcccatccggcgcatctttcatgagcccgaagtccgccaccttggcccggaagtcgtcgccgaggagaatgttcgctgacttgagatccctatgtatgaagcggtggtgccccaggttgtgcaggtactccatcccacgggcaacatccagggcgatgttgagacgcttcttccacgagagaggctccagctgcaactgtttccagtggaacaggtgcttgctcagagccccgttgggcatgtactcgtacaccagcagcctctcgttcccttcgatcgcgtatcccagtatcgacaccaggttgcggtgccggaccttggtcaggacggcgatctcggcctggaactcgtccaaggccttgttgctcaccgccacggcctccatcctcttcaccgcgatcatggtgccgtcgtgcagctcccctctgtagaccaccccaaatcccccacggccaagcacattgtcctgggcgaagttcctggtggcgccacggaggacctgcaccgcgatcacgaaacttcccgcctcgaccacgtgcacgtcgccagcctggccgctgctgctcccgctatgggacgtgccgctgctgctgccgccgtcgttggtggccaccacgatcttggccaggttgtccggatcagagctattacggggatgcaccaccacggaggctgcctgcggcggcaccgacgctcttctcttgcacaagaacacggcgcccacggagaccagggcgaccacgctcaccgcgactggaatggttgtgcccagcaacacagctgatgaggccttcttcccactcccagggatcccccctgcactatttttacccccagcaccagcaggtgcgccaggcgtaggacgaggccgcggggactcgccgtttggctgcgcatccgttggcggcgccgtggtgttgaagctgagattgccggtgaccggacgcgtggg

SEQ ID NO: 151857 - DNA, 651 bp, Zea mays
  Clone ID: MRT4577_70020C.1
gcgcgcgcgttctctccctcacctccgcccctttctctctctctctctctctctctctctctctctctctctctctctctctctctctcgctccgggagacgggtgggcgaccgccgctttatccgtgcggcccttccttttgttctcccgtcaccacaacccctctttccccggagagatctctctctctcttcctatcaaggagacgcctgggataccgcgccacaactgcggactcacagagacaggggaaaagtctccatcaggtgccatgtcttctacagactcttcaccggagacaagcactgccagatatgcatgtatacacccgagtcctttacagggaccaccgccaaaaaaatgaagataaagagaataaagatactgagaagagaggaaatcaacgataagaaagaaaagacagagcaagagaaaggaaaaaaggattagaaatgccccgaaaatccaaaaaaaagcgggatgcgagaaagcaaaaggaacccaccggaaaaaaagaaaaaaaagaaaacgggtaaaaagacaaacgtaaaaagcggagtgacaagggggaccaccggagggtaagaaaaaaaaacgaaagaaaaaacacaaaaaagaaagaatgaaaaaaaaaagcgggcccagaaaag

SEQ ID NO: 151858 - DNA, 872 bp, Zea mays
  Clone ID: MRT4577_70021C.1
gggattcagtgaatcttgtttttttctccgatccagcctgcaaccgggaaactgatacacactcgagactgttcatttcacgagctggcacacttacttcaccacgacacgacggatcccaacagaaatgatctactgcgtatgatcctggtttcgtaccaatcctgactactgattcatatcatacaagtcaacctgtgccactagattcacctcacttcgcatcccatctgcgagttcttcttcttcggctatttcctccactgcagagaattcgataccgatacgaccaatagcagtagcagcattccgtttgtgtagcttgactcgaacgaatacgcctttcctcgaactcggcaatccagagacagagaagagaatgagatcgatcaagagcaggcagcttttccctcaacttatagctagaaagaaagccaacctggaaacggaagaagtccaaatccggattcccatttcactaagaaaatctgcttgaggacaaaaaacacggtaaaatggaaatgcagaagtcgctccaacccaggcccgtagcttaagatcggcttcaagtccattggatgccggtggatggatagatagttggaggtgagcgagtagcggcagtaaagaaagtatcggtcagtgagtaactagactagagcatgtgctcagcgcctaacgcgcttatcctttgttggaatcgatggtcctaatggcaacgggacatcatgaggcgtctgtctaaattgactaggactgtgagagagtggagtggtaatagcggatcctgtgcaacaagatcaccacaatcgacctcttcgtctacatgatcaccttcctagggggtggattactacaaccacgtaaagctg

SEQ ID NO: 151859 - DNA, 635 bp, Zea mays
  Clone ID: MRT4577_70022C.1
tttcgcaggctaccttcggtacgctagccaaccctgttcgttagtcgttactgatccctactcccttatgtcgcatattcgctttggcgaagatgtataggaggaattgggttttggatcttgacatgtcaactgacaatctagtggattttagtttaagtcaacacgatttttcagttctttctcccagtcccagctattgattttagattccagacgagtctagacgaacaacagatggttctcgaatgttttcatgtcaggatgaaaagtgcttacgtacttgatgaatcgatcatgaccctgctccggcaactttaccgtgctgaacggcgacaagatacctactaactgttatcggtgagttgaagaggatccttgttcagactactggcttggagcctgagaggcagaggctcttcttccgtgggaaggagaagagtgacagagagttcctgcacacggcaggtgttaaggatggagcaaagctgcttctgctcgagaagcctgcccctgccaacatagagcagaaggttgagcctgtgattatggatgaaagcatgatgaaggcatgtgcggctgttgctcgtgttagagttgaagttgataagctgtctgctaaggtgtgtgacttg

SEQ ID NO: 151860 - DNA, 1282 bp, Zea mays
  Clone ID: MRT4577_70023C.1
cattgggtacctcgaggccggccgggacacacacataaaatcccactgtcagcaagccactcacgcagtcgcagcacactcggagtgactcccgagacccgcacccggccggctcagctagtcagcatggcgggggagacggtgctggtcaccggcgccagcggcttcatcggctcgaccctcgtccgcctcctcatcggccgcggctacaacgtccacgccggcgtcctcaaccccgatgacggggcggagacggagcacctgctcgccatggccgctggcgctggcgctggcgagggccgcctccgcatcttccgtggcgacctccttgacggcgccgcgctgaccgacgccgcgcggggctgctcgggcgtcttccacctcgcgtcgccctgcaccgtcgaccccgtcagcgacccccagaagcaactgatagtgccggcagtggaagggacgctgaacgtgctgcgcgccgccaaggaggccggtagcgtgcggcgggtggtggtcacctcgtccagctcggccatcatgcccagccccgggtggcccgccggcgagctccgcgacgagcgctgctggactgacatcgactactgcaagaagaaacagggtttggtaccctgtttccaagacgctggcagagaaggcagcgtggaggtttgcagaggagaacgggcggacacgtggttgtggttaatccaatgtctgtcctgggccagataatcccaccgaccatcaattctagcatgtccgtccttctacgcctccttcaaggctgcacagaggagtacaaggatatctggatgggggcagtccacgtggaagacgtcgccttggcccatctcctggtgttcgagaacccatcagcttccgggaggcacatctgcgccgagtccatcagtcacctgagtgacttcgcggccaaactcgccgagctctaccccagctacaaagtgcccaaattccccaaggacacccagcctgggctggtaagagcggaggcgggagtggcgtcgaagaagctcgtcgagctagggctgcagttcagccctctggagaagatcatcagggatgccgtggagagcctcaagagcaaagggtacatttcgtagctagccgtgagggtgctgtaatgcctttcatgaaccttgattatatgatttgtagttgtaactaagtagcaaagatgtctttaatttcgtgaaccttaataattgacaatttgtaattctggaaagtgaggtcgaaacttagatatctcctataaggggttgcacct

SEQ ID NO: 151861 - DNA, 182 bp, Zea mays
  Clone ID: MRT4577_70024C.1
aacatcagagagcacaatagtgcaccaacaatggcagccaaaatattttgcctccttatgctccttggtatttctcgaagtgctgttacggcgaccatgtttttgtaatgctgacaggcccccatagatttcctttttcagctgcacctctcaccatccgggggggcgggcgatattaaaac

SEQ ID NO: 151862 - DNA, 546 bp, Zea mays
  Clone ID: MRT4577_70025C.1
tcagtcactgtttttatatacttaactatttaaaaaatagtagtaattaatatgtatttatatgtttgtacaaaccttagagccccttgtctacgccactgccaggaatccacacgttattgattaatgcgtcttttttcctacgtcgccaattgtcgtctctcttggcttgttgaggtttgttgttaggaagaagccagtctgcattggcatctgttgtctttgcaaacatccattgacacgcaagagcattggcagattgaaataaagatcatactcgactaatcttcttttttctatcacactgaatattttacattgaatatcagttcatggttcgatcgcccaatctaacggtgacaggacatatgttccactgacctacttattgtagatgttgagcaagtaccaaagaccgaagatagtttcatttaatccaccattaaatgaagaaaattgttaccattggttcgttcctgagttagctatcagagtcgagagcatgaaaaccctaaaccttcagacttagagtttaccggccgccta

SEQ ID NO: 151863 - DNA, 534 bp, Zea mays
  Clone ID: MRT4577_70026C.1
ggggcgggccaacacattcagttacttttttaaaatgaagaagggtcccgggttacaaaagctccggaaatacaggattggttcctatttttcaccacccacatttgaggaatttcacacatgcccaaaaaacaatggatggcttttggtctgcctccccaagatttttatataaaacatggacccgaacccatgaacttttaagttttttcacaaaaatagtactatggcggaaaaatactatggaatccccacactccaaagggggccggggggattctacaggcggggggggacacagtacattgtactggagggctccaggcctccagttggggaaaagctcctgactggagttgcagcatcgttcaaaatcaaaccgggcaccagtatcatacgatggctttgattacaaacacgggcatgggacattgggggaaaaaagaattggtttgattactcatccgaaatcctttgacggaaatcttgaaccattagcggaaggccttttttgaaagagacctttggctccca

SEQ ID NO: 151864 - DNA, 1601 bp, Zea mays
  Clone ID: MRT4577_70027C.1
aattcggcacgaggtaaaattgcagctagatatgattgtagtgagtgctttgaggaaatcagggagggctaattacagttacttacaggtacatcctacctggagctttaaaaattgtgtttcatcgcccattgatcaatattatccatcgggttatcaacgtcatccgagcctgtccagtcaggttaacagtgtggctaagtcatatgaaaaaatatagctcaaaagataaccccagtttcttgcaatattaccttcttgtgtatgttccaagtataatacctgactttggtaatacatagttattctgttttaactgaaatagtttgtcgatttttgcgtgggaacaacaaatacatgatggtaccccttccatccaaaaaatgcaaggcctctatttgacaaacagtcgaactcttagtagaggcagtccagaggtcgttagtggatagtcaagaagagattcacagttgatgtcgaacaaataaaggaatccaatgaacttactgcaacattgagaagggaaaatcctacatcagctacatgtataatcgaattatttgtataaacaagataggtacaggcagagcaattcggtagagagaagggagggtgcatgcttgcagcctcattagattactcagttactattttaggctgtcttattgcgccttcatagttggaagtagtatatattttaatcttctctgtatgagcttaatatacttttatttagcttcttgcaagcttgaatttcctggtgctcaaatgccaccttctacttttgtagtctctgctcggaactgtgttttcttactctaattatacatatacgttcatatagagatggaatcaccacccctcacggttgaagcgaccgcttttaccgagaaaatgatggacatgactttggaggatataatcaagatgtgaaagaaaaagaatcctggaggcaagaaaccccctaggcggccggtaaactctaagtctgaaggtttagggttttcatgctctcgactctgatagctaactcaggaacgaaccaatggtaacaattttcttcatttaatggtggattaaatgaaactatcttcggtctttggtacttgctcaacatctacaataagtaggtcagtggaacatatgtcctgtcaccgttagattgggcgatcgaaccatggtacatcagtcaccttctttaatgatttttttgttctacttactaatctgctgctttactcttccctggtgtttgtactgacctttttaggaaatcttgcagaactgatattcaatgtaaaatattcagtgtgatagaaaaaagaagattagtcgagtatgatctttatttcaatctgccaatgctcttgcgtgtcaatggatgtttgcaaagacaacagatgccaatgcagactggcttcttcctaacaacaaacctcaacaagccaagagagacgacaattggcgacgtaggaaaaaagacgcattaatcaataacgtgtggattcctggcagtggcgtagacaaggggctctaaggtttgtacaaacatataaatacatattaattactactattttttaaatagttaagtatataaa

SEQ ID NO: 151865 - DNA, 2759 bp, Zea mays
  Clone ID: MRT4577_70028C.1
ctggccgggacccggcgatatcttcttccccacgcattcttccttcctcacgtcgttcgcagtgtgcggcggccacggggtcacgacagttggtatcagagaccttcgttcctcggcttggcacgcccggtgctccgctactccgtcgatcggcaccgacacaggccctggtttgtgagatctcaccgtttgccgcgctgaaccggcgacggtgatcgatttcctgtaaatcctccgccattttggtccgatttgcgggtgagcactacggcgccacccaagccatccgttcagacgcgattcgtcctcgacgaaatggcggctgtcgagcagaaggatgaaaagcgttgggcgcacatttcagagagcatcgatctcctcttcactcggctcggtgacgtgacgagggtacaagagcagatccaggtgaaccaggagctgggagccaaagccatggatcaagttctgaaggaccagtccctcctcgcgcagcagatcgcggctacaggaaaagccgtcgcacacctctcaatggagcgcgaggtggaggcggatctggagacctactcgcgcgattcccgcgacgctcgtcctccgtttcaccggcggcaacctcgtccgtttccccaacctcaggggatggcaaccgatagtgaagcctcgaaggcagctgaggttgtggttgactggcataaacaggacaaaaagaggatgctccatgcagtttaccgtgttggggatctggaccgcacaatcaagtactacacagaatgctttgggatgaaactgctgaggaaaagggatgttcctgatgagaagtacaccaacgccttccttggctttgggccagagaacaccaactttgcagttgaattgaccaactttgcggaggtctcgcgtcctacgtgcgtcgcgccgttgcctggctccgtcctcgccgttcctctgtagaagctggccgctgaccctcgccgtcgcgccgtttttttattagatgaagaatgaatcaacccttgtagaagctaaagatagaagataacactactctgtttttgaatgtctgaagtgtaattttgcagccttgcaactataaaacaaacaatgtatggcttaattattgcagttgcacagtgtgaagatttaaaattgaagtgctatgaagagatggataagaggaagaaactttataatattgttcaagagacaaaaggaaattatcagggtttttttgtcgatgccgacccttaagcaaaaatgaggtgtcatcaagcctgaatgcaaatggtggaacaactaaaaagacatttaagtttgatagagtattcacgccgaaggatgatcaaggtgtgggcgtctccggcggcccgactatacgaagcgagggcgtatcggggctaaggacacgaaaggccaagcgcacagggcgtacggcagtaagcccgcctgcaccgcaccagaccgtcacccgcgacgtgcccatgtcatgacgccacggtggcggcacgctgacccatcgacgtcaccctcttcctcgcttccgctcgacagcctccagtttcctggtcagtcttcgtgccgcctctctgccacacaccgtctctcagagatggaatcaccacccctcacagttgaagcgaccgcttttaccgagaaaaatgatggacatgactttggaggatataatcaagatgtgaaagaaaaagaatcctggaggcaagaaaccccctaggcggccggtaaactctaagtctgaaggtttagggttttcatgctctcgactctgatagctaactcaggtatgtacaacattatcttattttcctattattaaattatctataaagctgctaggaaattacgcaacatttatatttctatatagagtagcttcttatgtccttaattgtaattagttatttaatttgatgattaccatcttgtaatatttgtataagaacgaaccaatggtaacaattttcttcatttaatggtggattaaatgaaactatcttcggtctttggtacttgctcaacatatacaataagtaggtcagtggaacatatgtcctgtcaccgttagattgggcgatcgaaccatggtacatcagtcaccttctttaatgatttttttgttctacttactaatctgctgctttactcttccctggtttttgtactgacctttttaggaaatcttgcagaactgatattcaatgtaaaatattcagtgtgatagaaaaagaaggttagtcgagtatgatctttatttcaatctgccaatgctcttggtaattccagtttgcctaatagtcaacttgttttttttgtaatgttcgagcattcgctgaaattgctgatcgtattcaaaattgttgctaaattgacgattaacccttgtttccatggatagcgagaggtgtgacgtggtatgtttatagctattgtgcagtatacaccttgcttacaggttgccacaactccgctggttggatccactaaacttccaatgtgtcctgtttgcattagtgtgcttacagttttgtatttttgtttcttagggcccacgccaccatgatgtcacatttcaattcattttgtgacctctgatgaagagatttaaacacatctgttctatcctatccatagttttaacttcaaatattgttctgtttaatgccacaacaacatatatttttacaatgtcatattatatatgattttgttggctaaaaaaaaaagtcgacgcggccgcgaattcg

SEQ ID NO: 151866 - DNA, 366 bp, Zea mays
  Clone ID: MRT4577_70029C.1
caggagttcctcgtgtagcatcattcgggctggccaaatgtttgcatgtacggcgacacccgacgccattcgtaagccaggcccatcttcaccacccctcccagtacccgacgtagcatgcactgcaacagagcggagaggcggtcaagccaactactcaccggtagctcctcctcgctcccgggctccgtctcgtcgcactcggatgccccctgcgctggcgcctatagcggcagcggtctagcaggctccgggagcggtgaaatccacaccatgggcgacgctctcatgcttccgtgccgattactcgcgccgttgtcagccacattcggggcctttttatcagcctcttaatacccgccgagt

SEQ ID NO: 151867 - DNA, 586 bp, Zea mays
  Clone ID: MRT4577_7002C.1
accgcctgcgcttttccttcgccttctcccctctctccgctggcttgtcgcagggagatatttttcttcccttccgatgagagatacatctgggcctcctcctcatccctatccctccatctccacgaggaggacgacggactaccaaatcccgcggatctttccccctcttctccatcgaccggcgattttcgctgacaaaatccacggaaaatatcctcgctttctctctgatttgacctccggcgccgtccggcgagacttcttgggcggaggagggcccagccgcccggatccatgggggacgtgtccacgattcaacgcccgtccggcactgccgctaagggtgatcaggctggggagctggtgtcggccggatggacgaacgacacccacaacatgtacatcagctccatggaggcgtccttcatgcagcagctccgtggccagcagcagcagcaccaccacgccgctcccgacaggaacatcgcccatgtgggtcttcttggccatgggctcaagtcccaccaagagggagcttcccgataacgccagggccgagaggaacgtctcttgcccgcgtgat

SEQ ID NO: 151868 - DNA, 876 bp, Zea mays
  Clone ID: MRT4577_70030C.1
ctgtgcggcgctcgcggcggccggttttcctaccacccaccggaccgggcattcccgcttttcccagccccgcgctcccgctcccgctcccgcgcccgcgcccgcgcccgcgctgctcctcctccctcgtcttgtgaggccgacagccggagaggcacagcgcaccaaatgattctggtggccatcgtggcggagctgctggaggagtacacggcgctggtggcgcgcgtgctggagcagctgctccacggcgcgcccttcccgcgccgcatgcgattcctcatgctccggagcctccccttcgccacgccgccgctcccgccgccgccgccagcgcacgcgctccacgtcggcgcgccctccccgcccctctgagtcagagtactgttcctcgacgtgtttcagcgtttggtacgtaagttctcatctcggtcatgaaagaaaagggtagcgaatgtgaatctgcgctgcctccgatcctctcctcgttgtctcgttgagaagcctcagcaagagcagtttcagtgtccacggatctgctgtgtaaattctttgcttagtttgtccgagtaatataatagcagtgattaatgagcaggtgattcggagttgttcttcttcaaaaaaaaaaaaaaaaagggcatagcttcagcgcagctgcctacctgagttctggatgtgactagagtttactcttctccagtggcgtcacggtcaggagtagctagcagcctagcaggcgtctggaaatttcggacagacacgtggcagcccatgctagcttccaggcgttggaccatgatctaacgctggccgcagaatcgctgtcgctggcgagaagggactgcgggtgggactgccgtctcattcttttgg

SEQ ID NO: 151869 - DNA, 588 bp, Zea mays
  Clone ID: MRT4577_70031C.1
ttgggaccctcgagccggccgggaaaattcccgcttttcccagccccgcgctcccgctcccgctcccgcgcccgcgcccgcactgctcctcctccctcgtcttgtgaggccgacagccggagaggcacagcgcaccaaatgattctggtggccatcgtggcggagctgctggaggagtacacggcgctggtggcgcgcgtgctggagcagctgctccacggcgcgcccttcccgcgccgcatgcgcttcctcatgctccggagcctccccttcgccacgccgccgctcccgccgccgccgccagcgcacgcgctccacgtcggcgcgccctccccgcccctctgagtcagagtactgttcctcgccgtgtttcagcgtttggtacgtaagttctcatctcggtcatgaaagaaaagggtagcgaatgtgaatctgcgctgcctcctcctcgttgtctcgttgagaagctgagcagttccagtgtccacggatctgctgtgtaaattctttgcttagtttgtccgagtaatataatagcagtgattaatgagcaaaaaaaaaaaaaaaaaaaggggctacccccaaaac

SEQ ID NO: 151870 - DNA, 592 bp, Zea mays
  Clone ID: MRT4577_70032C.1
accgccgtccaccggaccgttcattcccgcttttccagccccgcgctcccgcgcccgcactgctcctcctccctcgtcttgttgtgaggccgacagccggagaggcacagcgcaccaaataaccatcagccgggcagcgagatgattctggtggccatcgtggcggagctgctggaggagtacacggcgctggtggcgcgcgtgctggagcagctgctccacggcgcgcccttcccgcgccgcatgcgcttcctcatgctccggagcctccccttcgccacgccgccgctcccgccgccgccgccagcgcacgcgctccacgtcggctcgcgctccccgcgcctctgagtcagagtactgatcctcgccgtgtttcagcgtttggtacgtaagttctcatctcggtcatgaaagaaaagggtagcgaatgtgaatctgcgctgcctccgatcctctcctcgttgtctcgttgagaagcctcagcaagagcagttccagtgtccacggatctgctgtgtaaattctttgcttagtttgtccgagtaatagcagtgattaatgagcagtaacgttgggagttgttcttctttcg

SEQ ID NO: 151871 - DNA, 294 bp, Zea mays
  Clone ID: MRT4577_70033C.1
aaagattttgacttctgcgcgcgccttcaacttctatcctccttaatagacccacgcgtcctcggacgcgtggggtcagactacaaatttggggagcaaacatcagtggccagactccccatattatactatcgagagactcttttgaccaggattatcagggtatactatgctaagatgactgtaaaaataggatagcaagtgctgatcgttggggatgaccttctttgcaccaaccccactagggcagctaaggctataaaggtgaaaacatgcagtgcccttatattcaaa

SEQ ID NO: 151872 - DNA, 584 bp, Zea mays
  Clone ID: MRT4577_70034C.1
gggtacctcgaggccggccgggaagccccgcgctcccgctcccgctcccgcgcccgcgcccgcgcccgcgctgctcctcctccctcgtcttgtgaggccgacagccggagaggcacagcgcaccaaatgattctggtggccatcgtggcggagctgctggaggagtacacggcgctggtggcgcgcgtgctggagcagctgctccacggcgcgcccttcccgcgccgcatgcgcttcctcatgctccggagcctccccttcgccacgccgccgctcccgccgccgccgccagctcacgcgctccacgtcagctcgccctccccgcgcctctgagtcagagtactgttcctcgccgtgtttcagcgtttggtacgtaagttctcatctcagtcatgaaagaaaagggtagcgaatgtgaatctgcgctccctcctccttgttgtctcgttgagaagcctcagcaagagcagttccagtgtccacggatctgctgtgtaaattctttgcttagtttgtccgagtaatagcagtgattaatgagcagtagattgggagttgttaaaaaaaaaaaaaaaaaagcggcc

SEQ ID NO: 151873 - DNA, 160 bp, Zea mays
  Clone ID: MRT4577_70035C.1
gcaaaggtgggcgaggagtttattaaacctttttccatgaagaccggcatctgggccaggccaggatgaccgatctgctgatgctgcccaagacgtagcaccatgcagtcccttggctgatgcatcttcgagtaacaaccacggagcaccatgattagcc

SEQ ID NO: 151874 - DNA, 1480 bp, Zea mays
  Clone ID: MRT4577_70036C.1
ccccgcgtccgcccacgcgtccgcggcactagctggccgcgtgcaccccgcgacgaagccggcgttggccacccaccaccacagcgcacgcgtcgctgtcgcgcgcctggggttttcctagggttttgtttttaccaaccccagccgggggagcgcggaggtggcggcggcggcggagatggacggggaggagattggcctggtcctcgcccgcgcctcggacctccgcaccaggatatcggcctgcgccgctgccgcggcgggggcgccgggtccgcggcgggacgatgaggaggcagcgaagcggttggacgcggcggagggcgatgaggagggagccgaggaagaggaggatgaggaggaggaggtggagagccttgtcggcatcagcgacgcgctcgagtcgctcgagcggcagctcgccgcccttcaggatctccagcaccaacaaagatacgaacgggaaaccatcttgagccagatcgaccgaagccggaggtccctgcttgccaagctcagagagtacaaagggcaggactgcgaggtgatccacgaggctgccgccttcgctggcgagagaatagagcgcgacgacagcctcgtcctgcctccttactcggaccatgtcaccaactcgttcgcgctcgacgacctgtaccctctgagctacatgtccaagcccaagcgcctgcacactcaaccagactccgaggacgacgggactgcgcaggacgacgcgagaaggaacgggcgtgagagcagagataccagggcctcgaaacgcggctcgggaggcggagggggaggaggaggaggaggaggcatcggagccttcatgggatgggtggctaaaacggcggtcatggtggtgggcgccgtctgtgtcatgaaggccgctggatacgagtccgtgacgtggaggaacggcggcgccaggctggacattgcgggtctgttcggtggcggtggtggtaagcaggcggtggcggcgggcggcggagatgagcggcgcgctcctctgcggtgccctcccggcaaagcgatggtggtcgagaacggcagggcgcgttgtgtcgtgaaggaaagggtggaggtgccgttcgacgccgtcctggcaccgccgagttcgaggtacggtttaggctgaagcccactctcccccgctgcgcccgcgcctgtgtgtgtgaatagtagtagtagggtgtagctctatctatgtggtgcgggagttgcttagtagctgctggggaacggttctttgtagaacgtgttgctgggagctttgtttgttaattctgcgtttggtgctgagcattgggcagcctggagatgttgaggctatgtatcatggagaagaataaacccttgtgctctcacactggcgttgtggtgagcagtgagctcttctattatccggcatgtctggcactatatgagccaatcactgtaccttgccaaaaaaaaaaaaaaaaaaccgatt

SEQ ID NO: 151875 - DNA, 318 bp, Zea mays
  Clone ID: MRT4577_70037C.1
cccacgcctacccaggcatcctgtatcgcctcacgcctattactgcactctcattgcacaatggcgggacaagggcaactctactacacggacatgcacggcaccctcatcacaagagcttcttcggcgatggcccacatcaccattcgcatgaccgtcggcaaaccacaagtagccccatgcggcaatccctgatacgacctccaccgtgtcaagtaccatcgccacttatccagccagccccccaactaccttaccgaacagtttcccgacgactacggctgcgacacccacgggctgcacgactacccccatacc

SEQ ID NO: 151876 - DNA, 175 bp, Zea mays
  Clone ID: MRT4577_70038C.1
gtttatctctctatatggcacttttagtgaagggcggatctgttgaatatagatctaccaatcgaacgacccggatccttacgtcgcgatggacgaagttgtggcagatcttatgtaaaaacctactgtacaacaggtgctagctcgggacggcaaccggggttttattgaaatg

SEQ ID NO: 151877 - DNA, 339 bp, Zea mays
  unsure (1)..(339): unsure at all n locations
  Clone ID: MRT4577_70039C.1
ctgttggcctgttgcctgcctcgcctccgtcccctcgtggcctccacctccacctcctcggtcacanagagagagagagagagagagagagagagagagagggggagggagagagggaacccggagaccgccaccaagtgtgaggcagaggaggccgcgaagtagtaggttgcgcaggcgcatacgcatacacatacacacagggtgctgccgtgaacatacacatgtaacgctgtaaagttcatctgctgtgaacatacacatgtaacacagatacttcagtttcagcagttaaaaacctaccgtcgnttnaaaaaaaaaaaatataataatatttat

SEQ ID NO: 151878 - DNA, 434 bp, Zea mays
  Clone ID: MRT4577_7003C.1
ttttttttttttttttttttttttttttttttttttttttttttttttttttttttttttttttttttttttttttttttttttttaacaaaaacatgtaaaaactgggggccccttttcagggggcgggcctgatacataggtccaggacatttttggggcatgtgtgagttgcctttacaagggcaacaagcccatgaaccaaaaaaatccgcattgttttcattgaacgggacattggaacttttgctcattgcccttgatgaaggcgattggactaaaaaatattgatcccaccattcactgaatggctcaatattgggacttgctgcaggataacaagcggaagggggaaaaagggactccaagctgtctgcactagtcccctccgtaagggggaagttttatcctgggcatccaaaacgcttaagggc

SEQ ID NO: 151879 - DNA, 302 bp, Zea mays
  Clone ID: MRT4577_70040C.1
tcctgcaccgtactaacttggatccttaacggcgcctttttttttttttttttttattttgttttttttttttaaatgaacatgttattacgatatttattgtcagttccacggggtgcattcaaaaacactaggggacatctttggtccaccacagtccttaagaaaggtgggcaacctgcatcgtagaatcggcgtctacgtcagctgcaactatgccctcgtcattgccggggacaattgggggcgtaagcccaacttttgtgacgggtctggattggtcggagtttctgggggccctt

SEQ ID NO: 151880 - DNA, 631 bp, Zea mays
  unsure (1)..(631): unsure at all n locations
  Clone ID: MRT4577_70041C.1
ggtgctcaaggacggccagtggatcgacgtgcagccgctcgcgggcgccatcgtcatcaacaccggncatcagatcgaggtgctcagcaacgggcggtaccgcagcgcctggcaccgcgtgctgcccatgcgcgacggcaaccgcccgctccatcgcctccttctacaacccggccaacgaggccaccatctcgccggcggcggtgcagggcagcggcggtggtgagacgtaccccaagtacgtgttcggtgattacatggacgtgtatgtcaagcagaagttccaagccaaggagcccagattcgaagccgtcaaggccgcggcgcccaagtcatctccggcggcctaaaacttgcactagacaacttccttatctagtgctaaaacgtttgcggagagttaaatgtcgggcactctaataaagacaaaatttaccgagtattcgacaaagaactcttctccaatagtgttgccgcttaaggacacaaactcaatacaggatggtaaaattatttgggttgctattttgtttcatcgtgttgagcctgaaaatgtaatcctaatattcttgttcctcgtgttcaatgacatatattggattattttaaaaaaaaaaaaaaaaaagcggcc

SEQ ID NO: 151881 - DNA, 429 bp, Zea mays
  Clone ID: MRT4577_70042C.1
aaaaaaaacaaaaaggactgtttttttggcctcgggttggaaaaacgtacgggggggacaaaaaaggggacatacggggggcccctttcgggaaaacgggcatttttttagtttttactagggtgacacccacgttttaaggctcaccacttttttccgtacaaaaaaaaaaaaactacgggcaaacgggggccggagaaaaagaatttacttgcaaacgtaccccttctggcgggttggacttttttatgtaacactaggattcgggggggggggcccctttgcaaaacaaaaatgaggggggtgttttaaattctttggggcgctttacttccacttgttaaacttgccccccccttttttgggggtggccccaccaaaacccccgttttttccgcccccgaaaatacccggggggccccccccccc

SEQ ID NO: 151882 - DNA, 524 bp, Zea mays
  Clone ID: MRT4577_70043C.1
cccggggcagcacacgccgcaattttacttaacaaacctaatgcacggattctacggtactacagaagagctcacccttgaggggattaagcatgcctatgtcaacatcgacaaggaaaaggcacatcatggacactatgagtgacctgcatgcaaccctcgcgcttcagcgctagaagtgatctttaccaaaaacacgccggaaggagggactggatgcacggtcaaaattaagcacaagaaccacaccacgtaagctatcacacgtatattaggtccaaaacaccaccgacatgatatgacacagtgagtgcgcgcctgtccatattgctgatcaccaccaagctgtttccctcggtatcgtacatgcagacacagtgtcacttgttataactacgaactgacacccagtacagaactacctctcccatcagccgtatcaggagaattgcaaagaatgtttttggaatcaactatggtaaaacctacgaaaagtgtaatgtgcttgacatacataaggtcta

SEQ ID NO: 151883 - DNA, 350 bp, Zea mays
  Clone ID: MRT4577_70044C.1
gtccaaactgtattattgcatccgtttgtgaatgcacgaattcatttgcaaggaggaacaaaactgtgatcaaagaacaaagaatcaaagagaacgaccgacatatgtacagttgtacacacacacacacacaaatggcgcgcgatccccgcaactggtggatcgagcaggcggcggattcgttcagccgccggccggtcagccctcgaagctggacgagcggctccatctccccctgaggtactcctccaacgacacggcgctgccgacggacgaggcgtcgttgtcgtcgtcgtccacgatgtcgcgcagggcgaggttgatgtaggactggatgtcgccgcccttct

SEQ ID NO: 151884 - DNA, 449 bp, Zea mays
  unsure (1)..(449): unsure at all n locations
  Clone ID: MRT4577_70045C.1
tttatataggnagtgtgccgcaacaaanatcacaccacagccgcggatagagaaggaaaaatttccccaaaccctagcttcggatctcgatggcgaacccccgcgtcttcttcgacatgaccgtcggcggtgccccagccggccggatcgcgatggagcctggctccaccgagggccccacagaccggggaggtccccaggccctctgcggcggcggggggggggactgcttcagcgcgccgggcaggcccattcaccacctgctcctctcgatctcgtgctccgcctgcgcgacccccagcnccggtgttagtgggtgcggggccgccgcggagttcgagttcggcgggcctggcgggcccatgatctccgccgacgagctgttccacaagggncagagccggcctgtcaccctgcgcccagtgccggatctcgtacccggaagcggc

SEQ ID NO: 151885 - DNA, 346 bp, Zea mays
  Clone ID: MRT4577_70046C.1
gaacactaacgccctttagagccttcgcaaaattgaacatttgtttcgcctaatccatcattataattgtatttaataataagtataactgttaaagtgtgattgagcacaaaattgccaatttaatatatatagcttatatattaagagccctgggcatccaataatagaggaagcccacgctagccaatatgggcatttaggttgaaccacaccgagttaacaggtaccaatcacggggccgttacaaccgtaacttcgtcagtcaggcaacctttccacgtttcctgtttctaaaacccgaatcacgcaattaacagagacagaccagcgccgacaggaagaa

SEQ ID NO: 151886 - DNA, 484 bp, Zea mays
  Clone ID: MRT4577_70047C.1
cagtgggcgaccttttatacatatttgaaaatgtaatgttaaataattgaattataatacaccgttaactaattcaaaattactgaaaaataagactttcctaggaattatatattatagaaatcaatcgataattaactatgtgatgattgattattagattatagtatacagaatttttacgtttgacaatcacattggtagagccgaaatcttatcgcgcgtaactcatacttcattttatatgcatgttcaaattttaaatactctattctaacatgccttgatggcatatgcagactgatatataatcattatccacattgtagtgatttagtttaactatagggatatcaaaatcagaaaacctctaaacacaaacaaaacacaatttattttctcttctcaaacataaacaacgcactacacgctattactctcttgtttgaatctgacaattcctttttgatagatctggacgccc

SEQ ID NO: 151887 - DNA, 176 bp, Zea mays
  Clone ID: MRT4577_70048C.1
tttattcggcacaaggttgaccttggcggggattttggggatgctggaagcagagaggcactgcacaaagctggagctgaaagagcttgtgctgatgcaattacctatcgatacccctggtgcaaactatagagctgtctgcgcattgaacacatatttcccaaatgtcaacacat

SEQ ID NO: 151888 - DNA, 339 bp, Zea mays
  Clone ID: MRT4577_70049C.1
aaacgggcatacatgaggaaacatggcataccccaaatttttttaaatggctataaatgggagttacaaacaggtggtttaaagctggcgcgaacaagttatgttaaaaaaaaacaagggggggggtataaaaaacaatcaggagggcctaattttttttgcccattggggcccaaaaaaaagtttttgggtgttcaccaagttacgggagaaacaaaatttttccccccgagcaaattgcttttgggttattcaacggccaaagggaaaatgactttttttttaactcggggttaaattattaacaacccagggtgggaaaaagcaccttttgggaaa

SEQ ID NO: 151889 - DNA, 408 bp, Zea mays
  Clone ID: MRT4577_7004C.1
caagctcgtccaccaacgcaactcgctcgtcccagctgatcaggtcgagcacctagtagcgacctgctcgatcatcagtgtagagtgacggtaggtgactgactctcttggaggctggatgcaacggtcatggcgacgtcgaatagacagatgcccttgctgctgctgagcctggacgtgctggagaactgatacttaccggcggacagcttggaccaggagctggacatcacgtgaggcgacggacggagcaaggaacttgacaacagacggatgatgacaccgaaactggaccgaacatacgactccgtaaaacattaccgtaacgagtacctgttcgttaagatcgacatgccattgtggctggagccaaacaactaacacgataccattaccgactactacctg

SEQ ID NO: 151890 - DNA, 406 bp, Zea mays
  Clone ID: MRT4577_70050C.1
ccggccgatgacgccttttccaggcgctgtggctccggtacaccgcgtgggtgtccgactaccacctctactgctgcgacatcctcttcctcttcgtcgtcttcacgggggtcccgcttccgatcgcgctcatcgagctccgggccccggacgcgtgtctcgccgtacaaactgcagccccgggtgcggatctccagggccgagttcacccggtgctactaggacgtcctccgcatcttcttcctcgtcatgggaccgctgcagctcgtctgctacccggtggccaaactggcgggaatacacccgaatgtgcactttgccgtccctagcagagatggcagcacacctactggtgcacttccctgttgaggactacctcaatgactggacccacagggttctccac

SEQ ID NO: 151891 - DNA, 504 bp, Zea mays
  Clone ID: MRT4577_70051C.1
ggcttggaacctttgggctgatttatgtgcttgactaatcctcggatggtgggtactgagggtgggcggggtcggtgtactgggtcggggtctgttgcttagaagccgactaggcctgttgttaggacgttgacggcggctactagtcggaatttgacgccgattagcgtgcgcgtctacttgcgtatgttggtaacggcgcttcttgtttgcgtgtctactggttcttctgctgttgtggttctttctgttgctgtgtctctggacggtggtgggacggtggtgttcgcgcatgggcatgtggtggggagttttaatgggttggagaatcgggggaagtcgagttttgtgcataagtcgcgtggcgaggggaagtagtagcttttgactgatactgctattaagtaggttgcttttgttgctagttctgatatttctaactgtattcatggtgttattaatgttatgtctactaatgacggttatgatactatgtcggtgtcg

SEQ ID NO: 151892 - DNA, 290 bp, Zea mays
  Clone ID: MRT4577_70052C.1
ggaaattttggttttttttcttgctggaagtaaaaccctgtaaaataaacaaacagtaatgacgggttggccgccctaaattcaagcccaattgacaattctcagttttttaaacaagcccaattgaagatgagagggccaccatccttagttagtcaggtttttataccaggaccatggacaatttttgttaacagacaagaacaaccatctgcgccccctaaaatggtttttcaaagcgggttacaagattttaactggtggcgggtgctttttaaaacctaaacttt

SEQ ID NO: 151893 - DNA, 315 bp, Zea mays
  Clone ID: MRT4577_70053C.1
atggctttggtgccgcctccggcgctgcctcctgctactttggtcggggcgtggctgcctgtccaccgcacgggcgatggtcgcgccgtgcgcaggaggacgggagcgaggacctcttcgcacgtgctgaggcggccatcatcgctggaagatgggggcaaggacctcttcgcaatggcgcacatgctgaggtggtcgccactgctggcgagtcgcgcggagttagctaccacgcggccctactggtgtggagggtctagtctgggaggccaagttgtgcgtccagaccccctggatggtggttctaggtactag

SEQ ID NO: 151894 - DNA, 1697 bp, Zea mays
  Clone ID: MRT4577_70054C.1
cttcttacaaacagaggtggcttacgaattttaatggaatgaaataaatatgaacgctttctgacatagaatcccctagaagggttaggtacatagaataagtatggatagtcttttccaatgcgataaaatcaaccgacatggcggcgatgctagactggaggcggaaccgcgcacgacaccaagctgccgcgccggactgctgcacgcaagcgcagcgcaggaccgaccgacctccgtaggcacgcacggcgccggcggcatggcggagcacctcctgtcgacggccgtgcacgacacgctgccggggagctacgtgcggccggagccggagcgcccgcgcctcgcggaggtcgtgaccggcgcgcgcatccccgtggtggacctgggcagccccgaccgcggcgcggtcgtggccgccgtcggcgacgcctgccgctcgcacggcttcttccaggtcgtcaaccacgggatacacgccgccctggtcgcggcggtgatggccgcggggcgcgtcttcttccggctgccccccgaggagaaggccaagctctactccgacgaccccgccaggaagatccggctgtccaccagcttcaacgtgcgcaaggagacggtgcacaactggcgcgactacctccgcctgcactgccatcccctcgacgagttcctgcccgattggccgtccaacccgcccgatttcaaggagaccatgggcacctactgcaaggaggtccgggagctcgggttcaggctgtacgccgcgatctcggagagcctgggcctagaggcgagctacatgaaggaggcgctgggcgagcaggagcagcacatggcggtcaacttctacccgccgtgcccggagccggagctcacctacggactcccggcgcacaccgaccccaacgcgctcaccatcctgctcatggacccggacgtcgccggcctgcaggtgctccacgccggccagtgggtcgccgtcaacccgcagcccggcgcgctcatcatcaacatcggcgaccagctgcaggcgctgagcaacgggcagtaccggagcgtgtggcaccgcgcggtggtgaactcggaccgggagcgcatgtccgtggcgtcgttcctgtgcccgtgcaaccacgtcgtgctcggccccgcgcggaagctcgtcaccgaggacaccccggccgtgtacaggaactacacgtacgacgagtactacgccaagttctggagcaggaacctggaccaggagcactgcctcgagctcttcagaacctagcgaaccggatacggatggatggatacattacatacgcgccctctgtttttctccatgacgttagaagaacacgttctgcaatgtttgtccattcaaggtggtatcaatcaaggctgtggtcgttgcaattcttccgctccatatacatgattaaatgctttgaaagaaaaagaaaaaaagaaacacaagtattatggcactactagtgtttttaggaacaaggaaagaggggttgccccctgctggctatatatattaaatataaataaaggtaaggctgtagacattggtgaataagagaaagtatttgagtttatctactgccaaaaaaaaaaaaaaaaaagcggccctttttttttatttccatgattatattttatataatgttttttaatattttttattagaataccctttttaatgt

SEQ ID NO: 151895 - DNA, 169 bp, Zea mays
  Clone ID: MRT4577_70055C.1
tctgggatctctttaaaagggcggcctctttttttttttttttttttttaacacaaagattctttcaaaactgataagttacctgcactaatgtataataaaaatttgcagatttttatcacaatcaaattcacaagacaagagagagatatgatacttttaaataata

SEQ ID NO: 151896 - DNA, 321 bp, Zea mays
  Clone ID: MRT4577_70056C.1
acgcctcatcctctcagtcgccggcattgcggtagccgcgctcgtcgggcgccaccgccatgtggcgtccgggcacggtgccacgctcacagtgttcccgctcatgccataattcgtgctcgtcggtgcgggcgaggcattcatgtatatgggccaactcgccgtcttcctgcgcgagtgcgccaaggggatgaataccatgagcacgggccggttcctcaacaactgcacgctcaggttcttcttcagcaccctgctcgtcacaatcttgcacaacgtctcggcccacaccggacgtgactgttagctcgcctacaagct

SEQ ID NO: 151897 - DNA, 350 bp, Zea mays
  Clone ID: MRT4577_70057C.1
gcgggtcgacacaagcctctagagtgagtcgcactaagcaaccagcttgctcgaccgcgcccgtcattctgcgacaccgccgttccattccgtcgcgccctccaacggcactcgggcagtcagggatggagatgaagaagatcaccggccccgtcctcgtgcccaccgcggaggtcaccggtacccacgccgccagaagcgccaatccgagcctcatgacctggaccgccatcgtcacgatcgtcgtctgcgcctccctctcgaccgacgtctgctacatctgcttctagtacatgcagtcaacggcatgctgcgacgcgtggcccaagctcaaagcagcgtgacagata

SEQ ID NO: 151898 - DNA, 294 bp, Zea mays
  Clone ID: MRT4577_70058C.1
tttgtttttttatttttataggactgggctatgtgttttttttggcacgggcagaacgagagggctgatcacgctgtgtctgtttgttttaggacgacctcaacttcgacttaaaccactcgaggtccatggaagagctggccaatggcgacaagatgttcgtcgcgatgccggactgtaagtggaagctttacacggtgtcgggggtgtcgaacaagcgcgaccagatagagctgatggggatgaagacgttcctcgacatgacctaatacgaagctttaaaaaacttatcca

SEQ ID NO: 151899 - DNA, 268 bp, Zea mays
  Clone ID: MRT4577_70059C.1
cgtttataattccatatttatgatgttggcgacaacattcgtgactattcctgtgtcagtactttagtatattcaccatgtctgaagatacattaagacaagatacaatagtagtgagccgagtctcatcatcgacgagtataggttctccgatatccctaagatccgggagatcgtggacgggttataactggaaccccatgggaagatggtcagtaggatagagggtaacattgatgactcgctcattaatcgaaatgcctccgct

SEQ ID NO: 151900 - DNA, 234 bp, Zea mays
  Clone ID: MRT4577_7005C.1
tccgactgccgtccccaaggccaatagttgtcaagtggcaatggtacggcaggctatccaacccactgcagttcataaggtccgtggccgccggcgttagcgtcttgcattatgtttggcagcctttgaggagtcaactaaaggtaaagaagccggtgtagatgggatcattgttcaaggacgtgaggcaagcgggcatgttattggacaagaaggacttgctccactggtggc

SEQ ID NO: 151901 - DNA, 186 bp, Zea mays
  Clone ID: MRT4577_70060C.1
gagcggaattggatgggtttgaatcccaaacaagtcaaacttcttctcaatttttttcaatcccactcaatccatgtgttttgggaataaccgaccaagcccttagtgtgtttgttacttcattccgcatggtttgggcctttgaagttaaaagaatcataagaccttgttcggttaaccaaaaag

SEQ ID NO: 151902 - DNA, 561 bp, Zea mays
  unsure (1)..(561): unsure at all n locations
  Clone ID: MRT4577_70061C.1
ctttatagctaccaccatcttatcaatggctttgcagttcacatgtcgtcgctgcaggctgagttcttgaggaaagcgccaggagttaagcatgttgagagagacatgaaggtacagaaattgactacacacacccctcagtttctcggattgccaactggggtatggccaacaggaggtggacttgatagagctggtgaagatgttgtgatcggttttgtggattctggaatttannnnnaacatccgagcttcgctgcgcacaagactgatcgatatggtcctgtccctcgttataaaggaaaatgcgagaaggatctagtaacacaaagaagcttttgtaatgggaagatagttggggctcagcattttgcaaaagctgcaatggctgctgccacacagctgcaattgctgctggaaacaatgggattccggtgcgaatgcatggccacgaatttggcaaagcaagtggcatggccccacgtgctagctgtctacaaggttctttacaggcttttcggtggctatgtggctgaagatgtggcagctattgatcaggct

SEQ ID NO: 151903 - DNA, 533 bp, Zea mays
  Clone ID: MRT4577_70062C.1
tgcatgcgggactggtagctttaactttatactgatgatggaatgagagaactcggacaacttgattctactcggacatggttcgacatccacaaggatgggtcgctgccaacacgcagctgatctagcgtgcgtctcatgacataacacatgtgtatgaggtatcttgtagtattcatagcgagagggacggcttcatgtgcacgctcgcgtgagccaatatcttagagagcttagacgcagctttggccatcctctataagggaggctggcggaatcggaagggattatgccaaaaaccaaatacacactcacctgacccgacccaggcacaaaatccccacctacaagacgaagcagatcaagagctatctctggagatcaaacgttgacttcatcggtctacactgaattggagcactacgctatcatacaggactcttgcaggtgaaagatgccgcgagctgtgcactgtaccggctgacaggtgacggaggagagatcactgtctctaggggggctcaagatgcaca

SEQ ID NO: 151904 - DNA, 410 bp, Zea mays
  Clone ID: MRT4577_70063C.1
ttggttgcgggccatgctattcaccctggggggctattagcgtgcgctgaggcttttaacacgccgcttaacggggctagaccgaggcatctgcttactgcaccgcatgggcgtcggctcctgcatcagcgtggtaggcaccctggtcgatggattctgggagcggcaccaaaaggacgcggcggcggagggctgcgccacggacgccggcacgtaacccttgtcgggctactggctggtgccgcaacacgcactggacggggaggccgacgagttcacctccttggggcacctcgagttcatgtacgaccaggggccccagagcactcgcaacacggggacggggcttccctggctggccatctcgctgggaagctactccagcacgcatggtgggggaccctgggcac

SEQ ID NO: 151905 - DNA, 3110 bp, Zea mays
  Clone ID: MRT4577_70064C.1
cgcgctcgcgcctccgccaccttgccgacctcggcgcgggtcgggactcactgcccacggccactcccctccccgctccccaaaccctaccccaacggcccaaccccccggagcggagcggagcgattcgctggtcccgccagcgccgcgcccgggcatgccgccgccattgggtggcgcgaccgacgacgcccactgagccgtgcgccggggagccgccgctgttccttcctcggtgtccagtggattggagtggagatcccgccggaagcggtggcaggaaccgcccctgctgttgcgagttctgcggtgctgacatcgttgaaagatgaggaggatcaggcttgcctgtttgcttgttatctttgtgcaagtgaaatgggcagctgttggaacgcaggatgcgtccatagccacgtacaaaggagtacatggcgtgagctctgaactattgaataagagaaaagtacaggggactgttcatttggatgggtatatggacctttccagtgatgcggtaacatcgtatgccctccacctccggaggcaccatgacaagctgctagactcgcttttagtagaaggaacttacgagaagctttatagctaccatcatctcatcactgggcttcgcagttcacatgtcttcacggcaggctgagttcttgaagaaagccccaggagttaagcatgttgagagagacatgaaggtacagaaattgactacacacacacctcaatttcttggattgccaactggggtatggtcaacaggaggtggacttgatagagctggtgaagatgttgtgatcggtatcgtggattctggaatttaccctgaacatccgagcttcgctgcgcacaatactgatccatatggacctgtccctcgttataaaggaaaatgtgagatggatccattaacacaaagaagtttgtgtaatgggaagatagttggggctcagcattttgcaaaagctgcaatggctgctggtgcgtttaaccccgatgttgaatttgcatctccattagacggtgatggtcatggaagccacacagctgcaattgctgctggaaacaatgggattccggtgcgaatgcatggtcacgagtttggcaaagcaagtggcatggccccacgtgctagggtagctgtctacaaggttctttacaggcttttcggtggttatgtggctgatgttgtggcagctattgatcaggctgttcaggatggtgttgacattctcaacctttctgttggacccaatagcccaccaacagctacaaggactacttttttgaatccttttgacgctgcacttctttctgctgtgaaagctggggtatttgttgcccaagctgcaggaaatggcggaccatttccaaaaacactggtgtctttcagcccatggataaccactgttgctgctggagttgatgaccgcagatacaagaatcatttaacactaggaaatggaaaacttatttctggacttggagtatctcctgcaacacatgggaatatgtcgtttagcctgatttctgcagctgatgctcttctgggctcatctgcaagcaagtacagtgcattagactgtcagaggccagaactattgaataagaggaaagttcagggaaaaattcttttgtgtggctattcattcaattacatttctgggacagcctcaataaagaaagtgtctcagacggccaggagtctcggcgcagctggctttgttgttgctgtggagaatagttacccaggaacaaaatttgaccctgtaccagtcagcatccctggaattctcatcacagatgtcagcaaaaccgaggatcttatagactactacaattcttccaccgtaagagattgggctggaagggctacagcctttaaagcaacagccggtattgcagatggtttggcaccaacactatacaattcagctccccaggttgcgctgttctcttctcgaggacctgatgtgaaagattttagctttcaagatgctgatgtccttaaaccagacatacttgctcctggcaatctcatatgggctgcatgggcgcctaatggaacagatgaatcaaattatgctggtgaaggatttgcaatggtttctggaactagcatggctgcgccgcatattgctggcattgcagcactgataaagcagaagaacccaaagtggagcccctcagcaataaaatctgccctgatgacaacggccaatacactggacaaagggagccatcctcttagagcgcagcagtacaccgcatcagaaatgatgacactttcacgggccacaccgttcgattgtggcagtggcgctgttaacccaaaaggcgccctcgatcctggccttgttctagacgcaagccatgaagactacatcacgtttctgtgctcgatccccgacgtcaaccagagcgaagtatcaaacatagccggctcggcttgcaactccaactccaagggacaacgccccttcgacctcaacatcccctcgatcgccgtctctcagcttcgaggcacggtggtagtgaagcggaccgtcacgagcgtgtccgacgaaaccgagacctacaccatcatgacaaggatgccgccagaggtcgccctggaggtgacgcctccggcggtgaccgtggtccccggagcatcacgagagataactgtgaccctgacggcgaggtccgtgaccggcacctacagtttcggtgagattgccatgaaaggtgaccgcggtcacctcgtcagaatcccagtcgtagctatgggattcaagtaggtagaagacgactgtgacatctcctagggagtagaggataggaagagcgagttgtgcctctgtaatctgaggtcttgagctgcagaggaacgttgtataattttttcataggttgtagagaataagagttggcacaatgctgtaagtgttatgcatgccccctccaggttgtaaaatatatttgggtgccctaaatcctctgacatggtgactagaggacctcttgtattgtagtccagccttgttctgattctctaatgcatgaaggtttgaatctcaaaaaaaaaaaaaaaaaaaaaaaaaaaaaaatcaggc

SEQ ID NO: 151906 - DNA, 508 bp, Zea mays
  Clone ID: MRT4577_70065C.1
aaaaaaaccaaatccccaaagggggtttatgtttatacatccacccagtatacaagggaggggtgggcccaaagctaaggactccccaagcccaaaaccaatttttccagcacactaacaacattaagcatacaaaaactaaaaacccggcggggggacccgggtttttgggggggctggccaaaactaaacataacacccgcaaccccggacgggatttttattttttaatggcatgggaacagaaaaagggggcaaccaaacccccaaagctcttttttttttttctgaagctgaaccctgaagctcatcgagtgggggaaaaaaaacctcccgagcccaaaaggggattattcggcggcggcgaaagtattttttttttcaaagtttaactatggggcaggggcactgcaaaattttgggggggcagccaccggcctttagggagttcctgaaacccgtaggggggtttaacactggttcaagaagttaaaatcgcaaacttggg

SEQ ID NO: 151907 - DNA, 268 bp, Zea mays
  Clone ID: MRT4577_70066C.1
cgtttattttttcctttgttggacagacaagggagagttaagttgttgtgctgatcatctcattcttcctacatattgaccaccatttcaatcatatatatatgataattactcacacatccactgtcacacagcttcatcttctcctttgagactaaatacataatagtgcacgattcactgtcttacagttcacgcatcactagtaagaccactaccacctgcatccctgtctaggatcataacattttactttctttctattcca

SEQ ID NO: 151908 - DNA, 3219 bp, Zea mays
  Clone ID: MRT4577_70067C.1
aagggacgtttacctcctcaacagttgcggggcctctgagtgctgatcctgccagaaccggtggctgctcggccttccacgcctatcaaactcctcctcgctctgccctccgctcgggccgaactcctcctcgctccgtgcctctggggccgccggactgagattgctggtatgtctcggggcaacccgggaggacaaggccttggatacccctaccttggacgatatagatgagctgaggtgcgttggtgaaggaagggaggaggaggccattaggctcgatcacgtggcggacgtcggcaacaccggcgcactggaactcatcctcgttatggtcccacacatcgatagtcccggcctcgcacttgattctgttgctaggctcgagggagttgatgcggtcgagttggcactggcttctttttttttttttgacaggtgaacgagcaggcatttttattcgaagcaaaaggtgcagccaattctcaccatactaggaaccaggccagcgctgcccaaaaacgctcaaacaagaaagaaaaaaaaacaaggaaccaaagttcttggaaaccaagtacacataactccaatacacgactaacaatgcgaattgcggtgaaacagatcgaaatgcaggcgatggttctccggcctgggcttcttcttcttcttctttccccgtactaatcgaaggacagcggaacctggcttgccaggctacggtacttcagggcgtagaacatctcgatgtagcggcgggtctcgcgcctctccaggttgctcacgtacttccagaacccgtacacgccggtcagggtcatcagcctctcggagtagagcttccaggtgtacttctcataaattctctgcaggccgccctgtgagatcttgtcccagtagctcggatctgccttgcatttgtcaaagaagttgaccaggatatccgcggccttgtcgctgtggtaagggtcaatgtgcaggccagataccccgtccacgatgatctcagcagggccaccactggcaggtcgcgatcgttggcagaccgcacgtcatggactcgatcacagtcaggccgaacgcttcgtagaacgcaggctgcacgaatgcgcccttggtatcgcaaatgtagcggtacagctccccgttgcggacgcggttcatctgcgccgagatccaccggatatggcccttcaacttgtactcgtcgatgaggctgtacatcttcttgaactccgcctgctcctccctgtccttggactccttgccgtggtcaccggcgacgatcacgaggttcgccagctccctcaggcgcgcgttcttgccgtacatctccaccaggcctgtcatgttcttcacgcggtcgagacgcgccatcgagaagatgatcggcttcttcttgtccttcagcacgaacctggaagcaagtaaacaccaggtgttcagttcaggtgccagatagaaagatggatagatcatgcgatgggtgttggagtatttacaagctgattggctgcagtaagacatgcaaccagttttccgtatactcacttgtgctcggagttctcgacgtcgctgtagatgagctcctcgatttcaggatggaaggcagtgagtctacaagacggtccccgtatacgggtagtaaacactcatgtctgctccaggggagacaatgttgaacttgggatcgaaaaccgacaagagactcactgccttccatcctgaaatcgaggagctcatctacagcgacgtcgagaactccgagcacaagttcgtgctgaaggacaagaagaagccgatcatcttctcgatggcgcgtctcgaccgcgtgaagaacatgacaggcctggtcgagatgtacggcaagaacgcgcgcctgagggagctggcgaacctcgtgatcgttgccggtgaccacggcaaggagtccaaggacagggaggagcaggcggagttcaagaagatgtacagcctcatcgacgagtacaagttgaagggccatatccggtggatctcggcgcagatgaaccgcgtccgcaacggggagctgtaccgctacatttgcgatacgaagggcgcattcgtgcagcctgcgttctacgaagcgttcggcctgactgtgatcgagtccatgacgtgcggtctgccaacgatcgcgacctgccatggtggccctgctgagatcatcgtggacggggtatctggcctgcacattgacccttaccacagcgacaaggccgcggatatcctggtcaacttctttgacaaatgcaaggcagatccgagctactgggacaagatctcacagggcggcctgcagagaatctatgagaagtacacctggaagctctactccgagaggctgatgaccctgaccggcgtgtacgggttctggaagtacgtgagcaacctggagaggcgcgagacccgccgctacatcgagatgttctacgccctgaagtaccgtagcctggcaagccaggttccgctgtccttcgattagtacggggaaagaagaagaagaagaagcccaggccggagaaccatcgcctgcatttcgatctgtttcaccgcaattcgcattgttagtcgtgtattggagttatgtgtacttggtttccaagaactttggttccttctcgttttttttccttgtttgagcgtttttgggcagcgctggcctggttcctagtatggtgggaattggctgcaccttttgcttcgaataaaaatgcctgctcgttcacctgtcaaaaaaaaaaaaaaaaaaaaaaaaaaaaaaaaaaaaaaaaaaaaaaaaaaaaaaaaaaaaaaaaaaaaaaaaaaaaaaaaaaaaaaaaaaaaaaaaaaaaaaaaaattaaattaaaaaaaaaaaaaaaaaaaaaaaaaaaaaaaattcccttggcccgaaccccccttaggggaaattttggaaaattcccaaaaactggggggccccttaaaccttcctttaaagggccccattccccccttaaggggggggaaaaaaaaaaaaaggggcgggggttttaaaacggggggaaggggaaaacccggggggtacccaaattaaaggcctttggaaaaaaacccccttttcccaaggggggaaaaaaaaaaaaagcccccccccgattcccctttccaaaaattggcccaccctaaagggaaaaggacccccccttttaccggccctttaaacccggggggggggg

SEQ ID NO: 151909 - DNA, 812 bp, Zea mays
  unsure (1)..(812): unsure at all n locations
  Clone ID: MRT4577_70068C.1
ccggccgggcagtcttaataagggcatggccttctgtaatggctgtgcttctgaaaataataaactagctgtccagtgtgttctgtgcaaatgttgccgagatgaaggatcagtatccatgtagacattcatgtattgctcatatcgtgacacggcgcatgaaagacatggtttcggcccctaccacgctcactcgtttttttggctactcgtcactgctgacgctccaactgaattgattttttcttcggcttccctttcagctgactgacctgccatcttgcatgttctggtttaatagcaccagagttttcacttgcaaaaaaaagacatatctaccattttccatgttcgtatcatggttgggggcaattgcagcatcaccggctaacaggttcttgaaagttttttttttactttttacggtgatcgtcacatgacatgttttcttttcgaaagggaggcaatttttgtattgaagccaaaaacaatacatcaaagcaattggtctgaatcaccattgagagtgtcaggaaggacatttcctgcagcacgcggaaggtggccaatgcatgaagcatgatgaccagctgacaacagtggcaccgagcgcagcaagcgaggcgagcccgagaatagggtagaaggatgaacactgccatgcctagcggtaccagccaaaggtcgtgcatgtaccatgcgctaaagaagccgacgtcagtgaccagggatccatcggtggcgcttgcttctgttttacactctntttaacatgtcagtgactagggtagcagtagcagattcgaacccct

SEQ ID NO: 151910 - DNA, 423 bp, Zea mays
  Clone ID: MRT4577_70069C.1
gcgaaaccaagactattcagctacaattactattgacgcaacctttcagctgtgctgttacagcctttttgaagccatctaatgtggtaaccttgacatgcacagactctgacagtatgcaccaaaataaacagaaactgatgggctcagatgctaggcagatacagggcaccttctaaacaagtcattgtgtgcaagcacgctatgtgtgaaatcgctggagtaagttttctttagtttctactaaacgctcggatcactttcagtttctgggaacagagtacaaacctgccatatatgtattgggcccagaaatcccacccactctctttcagcctgattgaacagagacttgatgagctcaaaaaatcccccagcctctttcttctgcatttggatgtcagataagctgaaaccccagtc

SEQ ID NO: 151911 - DNA, 420 bp, Zea mays
  Clone ID: MRT4577_7006C.1
gtacgtaagcaagaatatgataattcctgaaatgagtagagaacttctcccatgtaatggtgttagcagtggcatgggcagcgcaatatgagtcccaccagtcagcagtagggctagtgaggcgacccaaagtgtagaggaccttctcccgatcggtgcactaagcgatgttgagcatttgctccactgcctttagccaatcatctgcctgaagtggttctggtgagctggagaaggtaggtggcttgtgactcatgaactcccggtgcttatccctaggtggagctgtttgtggtggaggtggtgcctgctgtcgatcctgacaatcttgatagatctgcgcttgcatctctgccttggtgttagccatctgctacagcagctgaattctgtacatgaaccacaacatttattcccagt

SEQ ID NO: 151912 - DNA, 268 bp, Zea mays
  Clone ID: MRT4577_70070C.1
tcggaattcggctcgagcccgagcccgactcgagccgacgattatagtattcaggaggcggcggagagaagggggaaagtccccgttagggaggggggaaggaagccaaaggcccaaaggtctcggcgctgccgtagtaccggctgaggcaagatggtgaaggcacgaatgacgacgacggacgtggcggcggaggtgaattgcctctcatctcctaatatgcgtgcgctctttctacttatacgacttcacccccaagacatacctt

SEQ ID NO: 151913 - DNA, 709 bp, Zea mays
  Clone ID: MRT4577_70071C.1
gcggtgctgctcctcaccctgctcgccgctctacatgtggccggccacaacaacaacaacgagaaccgcaacccgggcggcggcggcggcgacccgggcgccttcttcgccgggatgccgcggttcagcggcggcggggtgccaggcggcggcgggttcttcggcggctggggcgagggcggtctcgggtaccggcgcggcgctgtggtgccgccctccacggtgtgcccgcaggacgggccctgccgcgggaagcgcctcacctgcccgccgcgctgcttccggaccttcagctacggcggcaagaacgggggcggcggcggaggcggcggaggctgcagcttcgactgcaccgagcgctgcgccgccacctgctgagtgaatctgggatgtattagaggagggcgtggccgtagctatagctaaagctcgtgtactccttcctctactggcatgcggtgcactgcttcttcctgctcgtccactgatacgaattatcgctactactaatagtatcgaggtggtttggtttggtttagctgttggtttgttgcgagctgtgatcggtcgtgatcacgtacgtgatgactgatgagatcatttatgcatgtgtgtctgtaaatttggtgtctgccagtgccagtgccagactgatcaataatagcagaggagaggagatgaataaagagaaaaataataataataacag

SEQ ID NO: 151914 - DNA, 334 bp, Zea mays
  Clone ID: MRT4577_70072C.1
cccacgcgtccgaggaggttcctcgctcagtacctggattaactgtggaggttcacaaattggatccgctagttcagcgtgctttagctgctgctttacgatccaaagatcttcgaggtttgtatgacaggattccccctcatctcgagtcaaagcttatgccatttcagcgtgaaggcatcaggtttgttttacagcatggtggcagagccctgattgcagatgaaatgggtcttggaaagacactacaggcaattgctgttgcttcgtgccttcgtgatgcctggccagtcccttgaatctctccatcttctttgcgattacattgggcatc

SEQ ID NO: 151915 - DNA, 528 bp, Zea mays
  Clone ID: MRT4577_70073C.1
ggacgcctgcggtaccggtccggacctcccgggtcgacccacgcgtccgggcacctgggcggcagcggcggcggcggctgcgggaagcgccgcgcggggggcgggcgtcccctcccccaccccccggttgcgcggggcggctctttactgtcgcggttttacaggcacctttgctgttttttttttttttttctctctctctccctcaaagtgccattaaggggaaattacaagaattaggagcttacgtaaatgaagaacttcctgattacattatggtgatggtggccaacaagaaaagtcaggaccaaatgacagaggacctgtccctgtttctagggaacaacacaattcgattcaccgtatggctccatggtgtattagataaactgcgctctgtcacgactgacccctctagtttaaagtctcctgacgccaacatcttatatagtaacgtgccttcaaacaagaaaagtttcagtcattcatatcagagaaagcaccaagctgacgaccctcaccttgctg

SEQ ID NO: 151916 - DNA, 191 bp, Zea mays
  Clone ID: MRT4577_70074C.1
ccttcccccccctttgtgttttgggtaaataaaattaataatttcaaaccccaagcataaaaagtttgattccgacagggaccactggatatgcttcatcatttatcctaagggtggaaaggttcttgtaaaagggataggggcggtctgtaacccctaaaatggctaccggtccccttggtaaacccaaa

SEQ ID NO: 151917 - DNA, 651 bp, Zea mays
  Clone ID: MRT4577_70075C.1
gcgggccgggccctcttctctgccgaccaaaccctaaaccctagcccgactaaccccctccccctcctcctccggcggcggcgccagccaccggcagcacacaaaccgggcgaagatgccgctggggcagcgcgccggggacaagagcgactcccgctactgcggggtcgaggtgctcgacttccccgccggcgacggcctccccgccgtcctcacccactccctctcctccgccttcgacttcctcctcgccccgctcgtcgatcccgactaccggcccacgcccggcgccgtcctgccggtggcggcctcggacctcgtcctcagcccgtcccagtggagcagccacatcgtcgggaagatcagcgagtggattgatttggattccgaggacgagcagctcctgctcgactcggagctcacgcttaagcaggagatcgcctgggcgactcatctctccttgcaggcgtgcgttattcctcctcccaagagatcaacctgtgccaattatgctagagttgtaaataatattttgcaaggcctgaccaatatgcagttgtggcttaggatacctctggagaagtctgaatctatggaagaagaccgtgacaaagtaaataataataaccccacgagtgaaacggtagactc

SEQ ID NO: 151918 - DNA, 176 bp, Zea mays
  Clone ID: MRT4577_70076C.1
cacactcacacccgcagcgaaggagggagctagcacggaccaacgcacacacaacacaagctcgtcgccgatggcgcgaagggatgtaatgctggcgctgaacgaggacacagacattgacgagcagagagtagcgaaccaagacaaagaacacagaaaaaacgggagatgccaac

SEQ ID NO: 151919 - DNA, 437 bp, Zea mays
  unsure (1)..(437): unsure at all n locations
  Clone ID: MRT4577_70078C.1
aaaaaaaactttggggatttttttcctcgggctcaggcacaaaaacactagccttgggggggggggggtttgttaaaatcccaaaacccctaaggaggggaaacaaaagggggggagggctcactggtgagcaatcacaactaggtaggactacttaaatacaacccccactaaagctaaagcaaaactggggagagctaaatttaaacaaaaacccaaaatcacggggggggcaacaacaaagaaggggaggaaanttttcccaccaaacaggaggcactaaaacgggtgagctgcaaaaaaaaaacccctttgtccccccacccatcctaggatccaccagccaccacagtcaaccctcccgtttgtacaggcacacacaggcaaacgtcccacgcggggggggtaattccactaaaaaaacaaggggggcttgg

SEQ ID NO: 151920 - DNA, 770 bp, Zea mays
  Clone ID: MRT4577_70079C.1
aggccggccgggccgggtttcccgcccggcgatgttcacctgccgctgtgccgtcgtcgttgtcgtcgccctcgccgtgcttctactgccggccgcggcgacccagttggtttactgcgacgattccacctatgccgacaacagcacgttccaggcgaacctgaatctccttagcgcggcgctccccgccaacgcctccgcctcgccggcagggttcgccactggcgcagtcggtacggcgccggaacaggtcaatgggatggcgctctgccgcggcgatacgaacgcttcctcctgttcctcctgggtcgcggccgcgttccggtacgcgcaggcgcagcagggctgtctctctcacgaagggcgccaccgtctacctggacgattgtacccttcgcttcgccggcatccgattcctcgacttccttagagaggaccagtggctcgtcccagaattggtgtaaatatggctatgaactcaagattccaatttttgtacatcaataacccaacaagatttctttccagctaagaggcgcgcgtgccttacaaatttgtgaacttgttacaagtcccgcgattgaacctgcctctgtgagcgtcaacgccacagatgcctggttcggcgccgccgtcgcggcgatcttcacggccctggtcgaccgcgcagcggcggcgagcaacgcgacgagggagtacctcgccacggggggagatggatttccgactctaagatctacggcctcgcgcaatgcgcgccggatctgacg

SEQ ID NO: 151921 - DNA, 841 bp, Zea mays
  unsure (1)..(841): unsure at all n locations
  Clone ID: MRT4577_7007C.1
gngtcancccacgctcccgggcctcttctctatttatatttattgttactattgtaattattgtttattactatgttgcgaggccgcccttcctgccctcccatctccggccgccactgcccgcctatctccggccgccaccgccctccctgctccgaccaccgccggatctctcagccaggattcgatacggtgcaagtcgacatgtcaaagcgcaagatctcgctccacagctgcagcaccgccgccgcggcggtcgaaatgtcaaagcgcaaaatctctctccacaactgcagcaccgcagccgcccccaagccgcagcaacacttgttcctagtgttggacgactgggataagggctacagcgttcgcaaggtggatttagacgctttggactacgccaacgataactgcgagcctgacgacttcagcgagccgccgctcgcccgctttgacgtggtgcacggccactcgtacgccttcgtcgcccacggcaccaagatcgttgccatgaagccccatgaggttagccccgctatccccgccttcgacacggccacctccgcagttggtatcctcccgtggcccgagtttcgcatgtcctttggaaggcccatccttgtctccatcgacggaaggctcttcctcttcatcaaccgcatccactaccttggcgacccgccagtttgcgaagctgtatatgcacctgcagtgcagaaaccgtggngtctggtcgtcactcgactcgccacgttcgctgctgccgttcacagctcctgtatgctatgcgntacacccggatggcggcaccctcgtggtgtcatcccgttaaatggaggac

SEQ ID NO: 151922 - DNA, 258 bp, Zea mays
  Clone ID: MRT4577_70080C.1
ccctcgcgtccggctgccaactccgcaagggacgggagcacagctactgaccgaggtgtcccaactacattcggcgaacggcgatacacccacactacgacaccatgagggagcgcataacgatccacataggacaggccaggatccaggccggaaacgcgtgctgggagctgcactggcttgagcatgagattcaggctgaacagcagatacccggtgacacgagaattgggtgaggaatcttgaccagctcccaag

SEQ ID NO: 151923 - DNA, 169 bp, Zea mays
  Clone ID: MRT4577_70081C.1
tcgttggtgagtttaacagataggaggcggtatggcgatcgtctctcaaaggacatctttaattacttgtttgatgtgctgaattcttctaacacttttgcatacggaggaacatctatcatggatacctggtatgactcaaacaggctggtggcacgagcaccctcat

SEQ ID NO: 151924 - DNA, 1461 bp, Zea mays
  unsure (1)..(1461): unsure at all n locations
  Clone ID: MRT4577_70082C.1
tctcggacgcgtgggcggacgcgtggggagccgtgctcgcatgtgtgttaagcccagccaacacaagtcaagtcggagcccgcaggtgtcgacaccgcgcgccgggagccggaagaagggtggggggtgagctgtggaccatgagcgcgaccgggcgagccccgtgcggcctgccgcgcatcggcctgggcacggcggtgcagggcccgcggccggaccccgtccgcgccgcggtgctgcgcgccatccagctcggctaccgccacttcgacacggccgcgcactacgccaccgaggcgcccatcggggaggccgccgccgaggccgtgcgcacggggctcgtcgcctcccgcgaggacctcttcgtcacgtccaaggtctggtgcgccgacgcgcaccgggacagggtgctcccggccctccgccggacgctcagcaatctccagatggaatacgtggacctgtacatggtgcactggcccgtgaccatgaaggccgggaggttcacggcccccttcacgcccgaggacttcgagccgttcgacatgcgggccgtgtgggaggccatggaggagtgccaccgcctgggcctggccaaggccatcggcgtgtgcaacttctcctgcaagaagctcgagaccctgctctccttcgccaccatccctcccgtggtcaatcaggttgagatcaacccggtgtggcagcagcggaagctgagggagttctgcagggcgaagggcatccagctatgcgcctactcgcccctgggcgccaagggcacgcactggggcagcgactcggtgatggactccggcgtcctgcacgagatcgccaagtccaagggcaagaccgtggcacaggtgtgcctgaggtgggtgtacgagcagggcgactgcctgatcgtgaagagcttcgacgaggggcggatgaaggagaacctggacatcgtggactgggagctgagcgaggaggagaggcagcgcatcagcaagatcccccagcggaagatcaaccagggccgtcgctacgtctccgagcacgggccctacaagtccttcgaggagctatgggacggcgagatatgatatgagtaaacgttacgtcggcgccccgctaggcggctgccttgcgtgacggagcaacgagctccccgtcgtgacagtgagcggctgctttgtgtggttttatgtcgtgccatctgtgcaacaaaaagtgatgctttagtgtcacagtatgtgtgaaataaattaaaaaggattttctggttaagggggggaaaaaaaaaaaaaaaaaaaaaaaaaaaaagttctttgtggttttaccacngcnaaagggcgaaggcgggagaaangcagcacacaggcggccgcgcgggcangcagacagagggcccaaaccccccgaaaccgagggggagaacaagncaccggccggggggaacaacgaaacgaccgggaaaac

SEQ ID NO: 151925 - DNA, 381 bp, Zea mays
  Clone ID: MRT4577_70083C.1
aaacaaaaactgctctccttctagaccttatacaaaaaattaaaacgagccaaacatggagaaatttaaaaactcctgactttctaaagcatccaaatttccctccccataccttccaatttataactcttttatagtgcaacctaaactaaattcacttgcccacattttacaactttctgaccggtaaaacccttacattacccaactcaatggccttgcctgacaatccccattttctaacttgcgcaaatgccaacacgccctaactcatcatattttccaacaattccccttccttaatgcccaatgatacacctccttttaccggtcattaaacaccttatgatcttggtgatacatctcaaaatttacctttac

SEQ ID NO: 151926 - DNA, 477 bp, Zea mays
  Clone ID: MRT4577_70084C.1
ccacgcgtccgttttttttttttttttcctaaaactgtgttgatgggatatatcatcagtagccatataaatgaagttccgaacaaatgatacaaatttcagtggctcatcctttagtttcatcatccaaggctccaacacaacatctagctaattaatacaagcaacagtacatattgtatatagtaggagtaatgcttagcaaactcgatctagtgggatactgtaattaattaattgcttcagctagaggatccctcccttctctttaattatttggctttgtcatacgcatgcctatatatgatgctacttaccatcatatatatttaagttcttgtactgtgtgagtccttggagcaacaacaacagcaaccatcagcccgtctctgtgtttgagaaaccattatttttgcttatggtggttttggttggcccagccatgagcactgctagtgttcaagtcatggccggttt

SEQ ID NO: 151927 - DNA, 278 bp, Zea mays
  Clone ID: MRT4577_70085C.1
gggtctcctcccggccatccgcggcgagaacgggcgacgacgacggggcgggatgtgctacttcccaagcaaggcgtgctgcatctgcacgctcatcgtgctggtgctggtgggcgtcggcctcatcttcggcttcggcgtctacacccgcggcttccacaagctcaccagcaacatgcacctgcaggactatgcatacggccgcggtggggcctgcggcttctttcgcgcctaccggcactttggcccggcggcggactagaaggacccccccccct

SEQ ID NO: 151928 - DNA, 507 bp, Zea mays
  Clone ID: MRT4577_70086C.1
cggcccgcccttttttttttttttttttttttttttttttttttttaatccattctttttttttggttttttactaaagctaattagggttaatggcaagaaaaaagaaaacaaagaaacaacaaccggagcaaaaacggggggggagcaaagaggaaacaacgcgcgcaaaaaagattccacgcccaacgacaaaggggaaggggaccaaaaaaggaaaaccacaatcccccccccccgggaacaaaagggggaaaaaaaaaagaaaaaatccgcccaagaaaaccaaagcgagttgaaaaaaacggcattttccccacacccgggggggaaaaccatccccccggacagagaccccgggggacaaaagaaacgccacccccccaggaaaagggccccaccccccgaacacaaaaaggggggggcggcccccccaggggggggaggaaaaaacataaagaaaaaccgggggggcaccaggggcaaccaccactaaggggggagggg

SEQ ID NO: 151929 - DNA, 264 bp, Zea mays
  Clone ID: MRT4577_70087C.1
cggccgacctttaatttttttttttttgaaaattagttttatgggtttcatattttggggatcttttttccgccaagaaaaaattcaacttaacggttcactgtcttttttcacctccatccaatttttttattataaaaaaagcagggagccgcttccaaagggcaaagttacagcaccggtcaattcttaaccaaaaccaaagaataaaaaaaatcactggggggctgggagattttgaaacccttaaatggtaatgactat

SEQ ID NO: 151930 - DNA, 379 bp, Zea mays
  Clone ID: MRT4577_70088C.1
gaacattgaacaaagggcgtggaatatgaattgctggcagcatgaacatagcgttcaaagtggcaacagagtagaaaagagcacgcaacctcatcttcaagattcgtaggaattaggatgtttgaacaagtgcaaatgtgcaatatccatggctggaattatttcttcaataatgatacagtacaggtgggtgggcaatgttattaatgtacaaataaataggtgggtggaattatttcttcaataatcgcacttgccgcgtgttccacgagaaacgtcgtcgagcgctcaaatcaactggaggccgcgccgacgagctccctgagctgccggacgaactcgtcggcgaacctcccttgcacgccgtcgtccgtcaaaa

SEQ ID NO: 151931 - DNA, 284 bp, Zea mays
  Clone ID: MRT4577_70089C.1
aaaaaaaaaaaaaaaaaaaaaaaaaaaaaaaaaaaaaaaaaaaaaaaaaaaaaaaaaaaaaaaaaaaaaaaaaaaatttttacttaaaactgtttcccccttgggggcaaattctccaggtttcattctccctgttggccccctcattcttgcttttttggggcctattttgcccgggcccgagtccccttacaatgggctggccgccttttttcaaccttgtgtttgaaaaacccctggggggacaaaccttattgtccttgggttaaatcccctttttccca

SEQ ID NO: 151932 - DNA, 327 bp, Zea mays
  Clone ID: MRT4577_7008C.1
cattcaagaaggagatgatgaagagttttagtatgagtgacctggggctgctgacttactatctaggcatccaagtaacacaaaacgagggggtgatctcactgtgtcagagttcttatacactaaaaatcctagagcagacaggtatgaaagggtgtaatccctgtcatgtgcccatggaaaatcggttgaagctgagcaaaaatgacaagacaccttcagtcgacaagacaaagtatagaagtgtaattggaagtctgagatatctggtcaacactagaccagatattgcctactcggttgggatagttagcaggtacatggagg

SEQ ID NO: 151933 - DNA, 996 bp, Zea mays
  unsure (1)..(996): unsure at all n locations
  Clone ID: MRT4577_70090C.1
gttacttgtttttctantccggggttccacacggagcacgttctttattctcttaccttcaccccgtccggcagcatctcaacccttcataggcgctgtcgtaggctgtccttcgcatcgttttcatagtagctgtatctttgtgatgactctgacggtgtatgaccattactttgtatgtggagttcttttacaccatttataatgtgaatgtcaatatccattataatgatggtattctttcggaccatcattgttttattctttttctttaagcattttgatgattgttttacttttgtttattacaatattcattattgattttattttttatttgtttgctttttttttcttttttttttaatatatctttttattaatatttattatatttttattaatattaatcatatttactatattntttaatttttttttttttcatttttattatgttgtttgattttattatttttgttatttttttttttttatgttttttttaatttatattgtttctttgtttttttttttatttctattttttttatctgttttattttttttattttttttttatttttttttttcttaagtttttttttttttccttttttttttttttttttctttttttctttttttttattttctcattttttttttttttttttttgttttttttttttttttatttttattttttttttttttttttttttataatttttttttttattctttttttttttttgtttttttttttgttttcttttttttttttttatttttttttttttttttttatttttttttttttttttttttttttttttttttttttttatttttttttttttttttctccttttttacttttttttttttttttttttttttttttttttttttttttttttttttatttttttttttttttttttttttttttattttttttttttattttttttttttttttatttttttttt

SEQ ID NO: 151934 - DNA, 117 bp, Zea mays
  Clone ID: MRT4577_70091C.1
gcaagcgaactaaaccaggggatttacaagcgcactattcatgcatcgatgtttttcctggtgagaaaaatgctaaagctattttttgactcaacagttgctataccattgcataaa

SEQ ID NO: 151935 - DNA, 307 bp, Zea mays
  Clone ID: MRT4577_70093C.1
gtgctgcaggtgcacgagcactcggactatgagtatcacaagatgaagcagtggatgcagaccgtgatccagggcttgattgagcgcatgcgcatcacgaccgtcatctgggaataggctccggttaagaagtgcatgatgaggctgcctaaatggttcggcgatagactccagctagcagctgtctgctgctagagtcgccgccgctgaatagctgagacttggtattgtacattacgataggttgcccattggtatgtcactaccacttgtgttacaactagctgctattgtaacttgtaagtcg

SEQ ID NO: 151936 - DNA, 1404 bp, Zea mays
  unsure (1)..(1404): unsure at all n locations
  Clone ID: MRT4577_70094C.1
aggccggccgggccgggaccctcgctgctgaggagctagtcttccttcccgttcttttataaggccccggccccgggctgcggcgccgctcgcctctcctcccttcccgtaccgtgtcactctcctcccaggttcgtcgtgcggagggccaaagcttcgaggaagcaaaaccctagcgctgttggagtagtagagcctacgccctacggccgatggctgcggcggcgatcctgccggagctggggacgcaggtgctcatcccggtcgcggcggccgtgggcatcgccttctcggtgctgcagtgggtgctggtgtccaaggtgcggctcgcccccgagcgacgcgcggacggcggcggagccgtcaagagcggccccagcgactacctcatcgaggaggaggaagggctcaacgaccacaacgtcgtcgtcaagtgcgccgagatccagaacgccatctccgaaggagctacatctttccttttcactgagtacaagtatgttggattattcatgggcatctttgcaatccttatattcctcttccttgggtccgtcgagggattcagcacaaagagtcaaccttgccactatagcaaggacaagacttgcaagcctgcccttgctaatgccatcttcagtactatagcttttgtgcttggtgcggtcacctcactggtttctggttttcttggaatgaagatagcaacttatgctaatgcccggacaactttagaggctagaaagggcgtcgggaaggcatttattactgccttccgatctggtgcagttatgggcttcctgcttgctgccagcggtcttttggttctttatattgctattaatttgtttggaatttattacggtgatgactgggaaggtctttttgaagctattactggttatggccttggtggttcttctatggctcttttcggccgcgttggtggtggtatttataccaaggctgctgatgttggtgctgaccttgtggggaaggtagaaagaaacattcctgaggacgatccaagaaacccagctggttttgccattggctctgcagccttggtttcccttgcactatttggtgcgtttgtaagccgggctgctatctccactgttgatgttctgactcctaaagtattcatcgggcttattgtcggtgctatgctcccgtactggttctcggcaatgaccatgaagagtgtgggcagtgctgcgctcaagatggtggaggaagttcgtcggcagttcaacaacatccctgggctcatggaaggcaccacanagcctgactacgcaccttgtgtcangatcttcacgtgtgcttccctcngggggatgatccccccaggtgctctttggtttgctcccccccctggtcggtggggattctattttgggg

SEQ ID NO: 151937 - DNA, 1906 bp, Zea mays
  Clone ID: MRT4577_70095C.1
ggcgcttggttgacccggaacggacggcaagacaccgccgggggttcgctgcaaccgcacgcgtggtggccggtgtgggaaggagcccactgctcaagcagcgacgacttccgcaacttctcaggccaagttgtagggagggagggcagcaaagaaagcaagcaagaaagaagcgcagcaagttcaacaccaatggcagccatatgaaatataaggcaaagcagataaaaagcttaatttttttcaagaaggtaaaggcaatgacagaaaagtgaggagggtcagaggtgtacagataaggatgagggctgaaaagaggagtaggaagttgaagatacattcctgaggacgatctggtgcagttatgggcttcctgcttgctgccagcggtcttttggtgcttttatattgctattaatttgtttgaaatttattatggtgatgactgggaaggtctttttgaggctattactggttatcgccttggtggctctttttggccgtgttggtggtggtatttataccaaggctgctgatgttggtgccgaccttgtggggaaggtagaaagaaacattcctgaggacgatccaagaaacccagctgtcattgctgacaatgttggtgataatgttggagatattgttggaatgggatcatatctctttggctcatatgctgaatcgtcatgtgctgctcttgttgtggcctcgatctcgtcttttggaatcaaccatcaatttactccaatggtgtatccccttcttgtcagctctgttggtattatagcatgtctcataacaacgctgtttgcaactgatttcttcgagataaaggctgtgagtgaaatagagcctgctctcaagaaacaacttataatatccactgttgtgatgaccattggcattgcgctcatgttggcttggtcttccatacaccttcaccatttataactttggagcccagaagacagtgcaaagctggcaattgttcttatgtgtggcggttggtctctgggctggcttagtcattggttttattactgagtactacacaagcaatgcctacagccctgtataagatgttgctgattcctgcagaactggagctgccactaatgtcatttttgggcttgctctgggttacaaatcagtcattatcccaatttttgctattgcgtttagtatcttccttagcttcagccttgctgccatgtatggtgttgttgtggctgctcttggaatgctgagtaccattgccacagaccttgctattgatgcctatggccctatcagtgataatgctggaagcttaagtctgtatgggtgcatcttatcatatatatgtatatctgaaagcttaagtattttttaaatagaagatgtctggaaactttagtaacgacatgagtttcaggctttcagctatagcagtcttattcgcttttaagacagagaagatttttatttagagtttagaaagagtaggtgctatgggtgcatgttatcatttatgtggggaacatctctggtggaaattaatcagtaacgacatgagttaagacagagaagcttaagtattttttcagctatagcagtcttattcgcttttaagacagagaagcttaagtattttttgaatagaagatgtctggaaactttagtaacgacatgagttaatcagaagagacggaagcgtagtttatcaacatgtatttggcacttcgccgaaaatgtcacttggactatcttgcaaactgaattttcagattggcttcttctgtctgaacattcagttcagtcttgcaggatttatttggtgtgcacactccagaggtcagcattgattcgatccaaatcaacttacaacttgttctacattggttttcatcaacaactgtgttcagca

SEQ ID NO: 151938 - DNA, 414 bp, Zea mays
  unsure (1)..(414): unsure at all n locations
  Clone ID: MRT4577_70097C.1
cagcgcnncaacgacggcgngcttaggttttcggcgacgcggncgcggncccgggcgcggggggcgcggggccccngcacggccaccaaccccaacgaccagngcnggcggngcccgcgagacggggcccgcgaccgcaagcgccnggccaggngcgccangggccncggccacaggaccaccggcgggcnggccggcaagnncaacgnggngacagaccccagcgacgacgccgccgaccccgncacccccaggaagggcacgccccggcacgccgngacccgggcccgggcgccgnggancaccnncccgcgcgacagggngancgagcncngccaggagccncacgngagcagcgacaagaccancgacgggcgcggagcgcacgngcacaacgngggcgcgcagaacacg

SEQ ID NO: 151939 - DNA, 357 bp, Zea mays
  unsure (1)..(357): unsure at all n locations
  Clone ID: MRT4577_70098C.1
gcggggggccggtcgttatccgctactcgcctgtagtcagccttgaaccgagtacaccgcccaacgtgcgatgcgttctcaaacaaccaacctccctaacggcgcccggcgccgcgacaggcgacaggccgcacggcgcactgacccttcaacctgggggttgccggagaacttatttttttttcctcgctcaggactcctgtccccactacaaactacacggcggggggggaggactcccaagtttcactgttgcctgttcgctcgccgttcgtaggtgataactgntttgtttgtagtaggggtnccggggtgggggggggggtttcggtgtttagggttttttttttggtttgg

SEQ ID NO: 151940 - DNA, 488 bp, Zea mays
  unsure (1)..(488): unsure at all n locations
  Clone ID: MRT4577_7009C.1
acgcgtacgtatatttggnacctctaaaagaacgccctgggtgttttttttttttaacatttggcaaaggaaggactattagaatggtgagggagttcacaccattttatggtgtagtttatatggttttaggcaagagcgcaacattgaaaggtttttatttggtaaaagaaattggaaattagggggggggggggaggagagtgccgagaataaaaaactatgacttgggtagagggagagatgtgtgaggatgtaaaagtnttctgaagataagattttgaagggcacggaatcttatgatgtttgtttagttgaggtgatcctgtgcacgttgcgtataaaggggtctaatgtgtaaagaagtggtcttgcaacatttatattcacgtttgagtgaatgcggacatgaggtttttggtaagtttgatgctgggtcacgtggaagggatggatgtttgttgtacgagtaaacttgtagcccattt

SEQ ID NO: 151941 - DNA, 1377 bp, Zea mays
  Clone ID: MRT4577_700C.1
gacaaaacgacgaatcccatttttacctggcgggccacgctgcaaggcgcgagcgcatgccggccggcatggcggcccacgtgaggctcaccgcgcgtcgcccacgcgcccgtccgtcctcccccgcgacgccgcagcagcacggcccgcagtcgcactgcaccaggcaggtaggcagaagcaggcatccgcacctcggcgcggccgggaaccaatctcctcgtctcccactcggctacccacatcccccggagctccacaaaaatctccgctcccaggctcccacccgcgcggagggggcaagcagccagcagccgcgcggcgccactgccttgccctcaacccctcacccaaacgcctcgctttggccgccccccacaaggccactcacccaaaaaatctccactcctcgaccgcaccgagcagaggatcacatggcatccgccgtttcgcttctcctctcgcccccgcgcctgctccaccgcgacggcacatcccgcctcctcagcatcccgcaccggcgggtcctcctcgccgcccccaacaacgcgacccctcgtcggctcctggcccccgcgccgcgcgcctccaacaaaaacgacaacagcggggccgtggaggcgcccgaccgcctcgtggccgcggtcgcctacctatacccgttcctcgacggcgcgcaccacgggcgcttccttctcacgcagttccccttcttcggcgcgctgctccgcccgctggcccccgcggctcggctcttccactcatcgccgctcacgcccttcctcctcttcctcacgctctacttcgccgttgtgcggaaccagcaggcgttctcccgcttcgtccgcttcaacgcgatgcaggccgtcgtgctcgacgtgctgctcatctttcccgacctgctcgcgcagtcgttcgcgccctccggtggggttgggttcgagatcttccagagcatggagagcacggtcttcctcttcctgctcgtctccttggtgtacggcggtggcgcctgcctgctcgggaagacaccacgtctgcccattgtcgcagatgcagcggagcgccaggtgatgtgactacaattcgtttcctgcggaccatgttgatggaaagggaatctgatgatatgcagaaaacatcccaatggttcgttggcgcttgcagcaaatcacaagcttagtataatttacaattgccttgctgtttatataggtctagttgccgattgaatgcatgtactgtggaaggttgatacaaaaacgttgcaatactaccatatttgttgaattgacaaattttgagagagcagtacatgtacactgttttacaatctgaattgcatttacgaaaaaaaaaaaaaaaaaatttgcggcc

SEQ ID NO: 151942 - DNA, 465 bp, Zea mays
  Clone ID: MRT4577_70101C.1
aggaacgagtacaagctttttttttttttttttttttttttgataaaaaactttattattgaactatacctcataattaaacctaaaagagggccccaccaatgatgggttgttggtagaacactgttgggtttgtcaaagcaagttggttgaatggcatcaattgttgcacttgtaagagggtgccagcgttaggcgcaacgtgctggtaaaacggcaacaactgtggttgtgtcaagaaggtagcaaggctcacaccagctagctggctgaatggtagtagttgttgctgctgtaaataagcaggagagttcaatgctgctagttggttgaatggaagaaatttctgggggtacgcacaaggtagctggcttaatggcaattgatgttgttgcaacatatcaagcttatttacatgagcctaaattgctaacatggaagaaacttatgtggtttaaaccctgc

SEQ ID NO: 151943 - DNA, 2545 bp, Zea mays
  Clone ID: MRT4577_70104C.1
aggccggccgggccggttaagctaccgccgcagtgccgcacggcgactccgactctgtctcctgcgcggctccagctcaccctctcctcacatcgaggcggaccggcccacgtcgccggcaaccgaaacgtcggccgtagcctcgcacctccggcatcggcgagcgcgcgcgcccgtccggcggcggagatggcgctgcggcacctggtcacgggccagaacaactgcgcgccggacggcgcctcgtcgtccaaccccctcaacgccctcgccaacgccttccttggccagtcctccaaggcgcagtcaataaaggaacttcctggttctgttagtgttccatctacatctggcttcagcgcgcctgctcccttgtcaaacatccctggttcagaaaatgagttcaaacaagaccagcgaccttttgtgcagggctctgactttattcatggtggtcctgctaatgattggattaagtcttttcggcctccgggggttcctgaacttggtggaatagaagcacactttccagattttgagcaaatttataacaatgcaggaacaacctttcagccgccattggatggtccaccacaaagagtgttgtctggtgtcttgcattcctttctcacaagtggcccagctggtgtgccatttcaacctcttccagtaccagctgctcttggtttatctgaaagtgacaaacagtgcatacgtgatcgtagctgcataatggcacggcatattttttctgaccaaccggaagaatatatacaggctcaggtcaatactttgctgcattcgcttgatatagacaaccgtatgagaggacctatgcatggacaatacccagaactacaggagtactggaaccagtcccaaagttctatgggtcctgccctgatgcataataccgctgataaatggattactgagtttggcaaacaaaataataatccggaaaattgggcaaagtctttcgaacaacaatatggccccaatgggtgggcctctgagtttgaacagcatcagtctcagatggccatgggccagatgggaggagtgaacatggccaacctggctgctatggagcaatcccgaatgcttgcacaaactttagcaagtaataatgatcccaagtttcagctttcacaaggggcggataagtgggttagtgagttctctagtcaacataatcaaggtgcgctaaatgagagctgggttgatgagttctcgaaattaaatgtcactgatgaatgggcagaggaattcagtggaggtggttttggcgaaagctctgctgatccgtgggtagatgagttccaagaacacttgtcatctttcaaacaaagttcaggcgcctctcgaggggtttatgtttattctgagaacaacccgtatgttggtcaccctaatccaatgcaagaaggacaggagctcttccgcaagggcctcttaagtgaagctgttcttgctttagaggctgaagttttgaagaatcctgataatgctgaaggttggaggttgttaggcataacacatgcagaaaatgatgatgaccaacaggccattgcagcaatgatgcgtgcgttggaagctaatccgacaaaccttgaagttcttcttgctcttggtgttagtcacacaaatgaattggagcagggagaagcattaaggtatctttataggtggcttcagaatcatccaaaatatggtggccttgtccctccgcagtcaactgattcaccttatggtcctgatgttgttagattgtttaatgacgctgctcagatgtcacctgaagatgcagatgttcatgtagttctgggagtcttatacaacctatcaagagagtatgataaagctataacttcatttaagacagcagtacagctcaaaccacaggactactcactctggaacaagcttggtgcaacccaagcaaacagcatccagagtgctgatgcaatattggcgtatcagcaggcactagacttgaaacccaactacgtgcgtgcatgggcgaacatgggaatcagctatgccaaccagggtctgtatgaggattccattcgatactatgtaagggcagttacaatgaacccaaaagctgacaacgcttggcagtacttgaggatttctcttggcaacgcttcaagagctgacatgattgccgcatgcgacgcccgcaacctcgacgctcttcagaaagagtttcctctctgagtcctccctagctttctccagcagcgatctccatggaaatggaattggaggccagtaacatttttgtatttgcctgttgattcttctgtttttattttgcttaagtgttgttgggtaaatgtataggaactaggaagtgagggggaacaacatcccgtcgatgtgtgaagtatcattgcaagaaggcaatagtggcaaagggggaattatacatctgtaagtacacaggaataaaggaatggttgagtaataaattgtttttagggcgaaaccactgcttgttttataaagttaatataaaaaatgcaatgcgggtgct

SEQ ID NO: 151944 - DNA, 447 bp, Zea mays
  Clone ID: MRT4577_70105C.1
ttgcgagccggacccacgcgtacgagcaactagcaacatagaaagcacaattttgtaccaacaatggcagccaaaagattgggcctccttatgctccttggtctttctgcaagtgctgctaccgcgaccatcataccgcaatgctcacaagctactatagcttcccttcttcccccgtacctcttaccagtgatggcttcagtatgcgaaaacccaattcttcaaccctacaagatccaacatgcaattgcatcatgcatcttacctttatcacccttgatcctgcaacaatcatcacccctattacaacagttacctttggtgcatttattggcacacaacatcatggcacaacaactcgagctagcacaccttgctgcctactcttagcaacaacagttacctttggtgcatttgatcgcacaaaacattaaggcacaacaacta

SEQ ID NO: 151945 - DNA, 689 bp, Zea mays
  Clone ID: MRT4577_70106C.1
actactcactctggaacaagcttggtgcaacccaagcaaacagcatccagagtgctgatgcaatattggcgtatcagcaggcactagacttgaaacccaactacgtgcgtgcatgggcgaacatgggaatcagctatgccaaccagggtctgtatgaggattccattcgatactatgtaagggcagttacaatgaacccaaaagctgacaacgcttggcagtacttgaggatttctcttggcaacgcttcaagagctgacatgattgccgcatgcgacgcccgcaacctcgacgctcttcagaaagagtttcctctctgagtcctccctagctttctccagcagcgatctccatggaaatggaattggaggaactaggaagtgagggggaacaacatcccgtcgatgtgtgaagtatcattgcaagaaggcaatagtggcaaagggggaattatacatctgtaagtacacaggaataaaggaatggttgagtaataaattgtttttagggcgaaccactgcttgttttataaagttaatataaaaaatgcaatgcgggtgcttcttggtggtggtgccagatcgagtttaactgagacgatccaaattaaattccatggtccacgccacgggtcctgctgggccgttaatataaaaaaaaaaaaaaaaaggactagttctagatcgcga

SEQ ID NO: 151946 - DNA, 2946 bp, Zea mays
  Clone ID: MRT4577_70108C.1
tttgtgttggggtggcagccccacaactttttgctctgttcacacaaattagccgtgctctgatgatatttccccattattatctattctgccggccggactctgaacgtcgggtcacacccgcaaagccaacgcctccacgctccacggcgactccggctcctccacggctccagctccaggccccagctcaccctccccctcccctcgaggcggaccgcccccacgtcgccggcgatcgaatcggcggccgtagcctcgcgcttccggcgtcggagagtgcgcccgtccggcggaggagatggcgctgcggcacctcgtcacgggccagaacaactgcgtgccggacggcgcctcgtcgtccaaccccctcaacgccctcgccaacgccttcctcggccagtcctccaaggcgcagtcaataaaggaacttcctggttctgttaatgtcccatctacatctgactttagcgtgtctgctcctttgtcaaacatccctggttcagaaaatgagttcaaacaagaccagcgacctcttgcacggggtgctgactttattcgaggtggtcctgctaatgattggattgagtcttttcggcctccgagggttcctcaacttggtgtagaagcacaatttccagattttgagcaaatttataacaatgcaggaacaacctttcagccgccattggatggtccaccacaaagagtgttgtctggtgtcttgcattcctttctcacaagtggcccagctggtgtgccatttcaaccacttccggtaccagctgctcttggtttatctgaaagcgacaaacaatgcattcgtgatcgtagctgcataatggcacggcatattttttctgaccaaccagaagaatatatacagagtcaggtcaatactttgctgcattcgcttgatattgacaaccgtatgagaggacctatgcatgggcaatacccagaactacaggagtactggaagcagtcccaaagttctacgcgtcctgccccaatgcataatgctgctgataaatggattactgagtttggcaagcaaaataataatccagaaaattgggcgaactctttcgaacaacaatatggccccaatgggtgggcctctgagtttgaacagcatcagtctcagatggccatgcgccagatgggaggagcgaacatggccaacctggctgctatggagcaatcccgagtgcttgcacaaactttagcaagtaataatgatcccaagtttcagaattctaagttcttccagtttgtttcaaagatgagccgaggtgaacttattatagaagataatcaagtaaaagaaggttcagcatcccaatccagtggctgggctgatgaatttcaaacaccgtacattgctaatgcaaactcatgggcagatcagtttgcacatgaagagctttcacaaggggcggataagtgggttagcgagttctctagtcaacctaatcatggtgcactaaatgagaactgggttgatgagttctcgaaattaaatgttactgacgaatgggcagaggaattcagtggaggtggttttggcgaaagctctgctgatccatgggtagatgagttccaagaacacttgtcatctttcaaacaaagttcaggcgcctctcgaggggtttatgtttattctgagaacaacccgtatgttggtcaccctaatccaatgcaggaaggacaggagctcttccgcaagggcctcttaagtgaagctgttcttgctttagaggctgaagttttgaagaatcctgataatgctgaaggttggaggttgttaggcataacacatgcagaaaatgatgatgaccaacaggccattgcagcaatgatgcgtgcgttggaagctaatccgacaaaccttgaagttcttcttgctcttggtgttagtcacacaaatgaattggagcagggagaagcattaaggtatctttataggtggcttcagaatcatccaaaatatggtggccttgtccctccgcagtcaactgattcaccttatggtcctgatgttgttagattgtttaatgaagctgctcagatgtcacctgaagatgcagatgttcatatagttctgggagtcttatacaacctatcaagagagtatgataaagctatagcttcatttaagacagcactacagctcaaaccacaggactattcactctggaacaagcttggtgcaacccaagcaaacagcatccagagtgctgatgcaatattggcgtatcagcaggctctggacttgaaacccaactacgtgcgtgcatgggcgaatatgggaatcagctatgccaaccagggtttgtatgaggattccattcgatactatgtaagggcagttgcaatgaacccaaaagctgacaatgcctggcagtacctgaggatctctcttagcaatgcttcgcgagcggacatgattgctgcatgcgacgcccgcaaccttgacgctcttcagaaagagtttcctctgtgagccctccggtccaaggcattagagcttccatggaaggaagcagcacactagcaagccgagtgactgcacctgtggtcatggaaatggaattggaaaccagtagcgttttgtatttgcctgttgattcttatatttatttttaggaagtgggggaatgtgtagcaactaggaagcgagggaacaacatccagttgatgtgaagcattcatggcacagtaggcaatagtggcaaaggggtactatacatacacacttacgggacgcacaacataaataaagaatggttgattaataaactatttattttggggacacacccctaggatcaacccctacttgtttcgagtttgaatactgatttgtatcaacaggcaataaataatgcgctttgtaaccttttatatcataatgtaatgcgcacgcccaaatcagttgtgtct

SEQ ID NO: 151947 - DNA, 437 bp, Zea mays
  Clone ID: MRT4577_7010C.1
ggcccccaaaacgttccgggtaaaacttaaaggggggcccaaaggggaaagaaaaaaaatttaaacccaccgttaaaagggtcgaaggaccctcaggagcccggggcggggggggccaagcttaactcggggggggggccaaaaaccacggggcacttgggcagtttgccgagccccgaaaacagggggtcctccccctggaggtcccggttccacttcttcgggggaagcaaaggggggtacaaggcccaccggggccccgtggggtactgggcgaaccacccaaaggggaagtttttgtcctctctcgggcgccggggccaccgttaagggtggtggcgttttcggaccggccaaacatgggaccccctttttcgccggctggggctccttttttgggtccgactcctggtcctggtccgggacctttgttttta

SEQ ID NO: 151948 - DNA, 455 bp, Zea mays
  Clone ID: MRT4577_70110C.1
gttggaactttgggctgatttatgtgcttgtggatgtgcgggtggatgtgcgggtgtctgatattaaggttttgtctaagcatttttccggtagttgtcccgtcgctaagcttggcggtcattgtactgtcgatgatgctacttttgtcgaccctaaggttggtattattcacaagattatatctagtactcaactagttctcgacgacgaaccacaccctaaaagagtctattcggcgtctacgccagtaagataacacccccctcacggtcaccccgcggtattaaattatttaagaaacacgcgacgtcatacgctttcctcgacgttccgccgcgccgggccgacaccaccatacaaatcaaacaaaccacccacccaagaccccaaaaaaaaaaaaaaaagggtggttgtctcagaggacttaagtccatgcatgtgcgtacgtgatgct

SEQ ID NO: 151949 - DNA, 252 bp, Zea mays
  unsure (1)..(252): unsure at all n locations
  Clone ID: MRT4577_70111C.1
tttttcttttttttttttttttttacaaacccccnaaagcgcaggctctggattcaacttactataattcaaagcctccattcatggaaaatcatgtttcatttttacacatcacacttgggagtattaaataaaatccacagcttcctcggatgggattaggttataacaaaacttaaatccctcaaccacaaccatgtgaaaaaatccaaacaagcgaacaggcgttctgtttttttcaatgagataaaa

SEQ ID NO: 151950 - DNA, 397 bp, Zea mays
  unsure (1)..(397): unsure at all n locations
  Clone ID: MRT4577_70112C.1
naaaaaaaaaaaaaaaaaaaaaaaaaaaaaaaaaaaaaaaaaaaaaaaaaaaaaaaaaaaaaaaaaaaaaaaaaaaaaaaaaaaaaaaaaaaggggcgggccggttctaaaggaatccatactttacgtacgccgggctatgcgaacagtgttaagcttcttttttataagggtcccctcacaattcaatatccacggggccggtcgcttgttacaaaccgccgggtactggggaacaaacccctgtgcgcttacaccaaccttaactcgctctgtgcaacaacactcccctttttccgccagtctgtgcgaaatagcaaaaaaggtccccgaaccgtatcgcgccttccccaacagtctgccctagcctgaaatgggagaatgggcacccgtccct

SEQ ID NO: 151951 - DNA, 548 bp, Zea mays
  Clone ID: MRT4577_70113C.1
cacactaaacaagcaacgcatttaaaatggtaaaaaaagctatacatacaaaaaggggggaaaacggaaaaatagttttgtccagaattaagctcaggaccagaactgctagcctatcacatatattattgttccggactcgatctcttgtatggtcacaaatccaacgcaacatatacattttcgcaacacttatatgttgaacatgttgtctttttgtagaccaacattttacaccatacaacatagtttatctaaccaccgttgtataaaacttttctttagcttctatggtaccctcttgtcgtactagatgtttgacgtcactttatctgctctgctttgcttctatagctaacatatccattggtatctcagtctttctgtagcattgatcctaaataccgaaatgtatcctctctggacactacttgaccatccaaaataacatatctttcctcgtgtagtagtgctaaagtcacaactcatatatttggttttagatttattgagtctagaacctttggactctaaagtctcctaccaca

SEQ ID NO: 151952 - DNA, 263 bp, Zea mays
  Clone ID: MRT4577_70115C.1
aacgcataaagagaagagatgctggagccagttcagatacctcactctcgacagtagagaaattggttgatgcgccgaagtctctggcatcaagggtatttcgacttccagttcggtcggcgactttgccagttcgcaagacaattgtcgttgtcacgtacacggcgttcgtggcgggtcttgtaacatacaagtccatacaccacgatgccaatttccacgagcgcattgcgtttcgcgcagcttggatagcagcgacacag

SEQ ID NO: 151953 - DNA, 640 bp, Zea mays
  unsure (1)..(640): unsure at all n locations
  Clone ID: MRT4577_70116C.1
gaccctgttaacatcagaggcttaatgagttagaaaacgaacgacctatggcctcagaaatccatacatttgataacatatgccattttacttcaatcattcttgtgcctgacactatcatgacacctattacatcacacaccttatgtatgcatttattggcgcaaaacatcagggcacaacaactacaacaacttgtgctagcaaaccttgctgcctactctcagcaacagcagtttcttccattcaaccaactagctgcattgaactctgcttcttatttgcaacaacaacaactaccattcagccagctacctgctgcctacccccagcaatttcttccattcaaccaactggcagcattgaactctcctgcttatttacagcagcaacaactactaccattcagccagctagctggtgtgagccctgctaccttcttgatacaaccacagttgtcgccgttctaccagcacgctgcgcctaacgctggcaccctcttacaactgcaacaattgctgccattcaaccaacttgctttgacaaacccagcagcgttctaccaacaacccatcatttggtggtgccctctttttagatttcttatgaggtatagntcaataataaaggttttttggtg

SEQ ID NO: 151954 - DNA, 454 bp, Zea mays
  unsure (1)..(454): unsure at all n locations
  Clone ID: MRT4577_70117C.1
tgcccgcctctgccgccgtcgcaggcgccttctccctccgctgccatctgtgctccgaatgcaggcctttggcgctcctccctccccgaaaacctcgccctcctcacgcttctctcttccccatccgacgctctcgccaccacccccggcaccgtaccgcctcgccgtccccgccagctcccgctccacgtcatccgatccacttatgcttcctttctcgcttccagtcttccaccatgtcatcctcactgagtccgcctncccgctccactccgagccaggcccaagccccgtccacctcgcgttcggatccctcgattccgacctcggcgcgccacagttgtacgtgtgggggccgtctcgtgagccgtgagcccttcttacgatccgaggccaaccccatcccactgcgaagcataaagctgagttctaccggcccaccacgcggcatggt

SEQ ID NO: 151955 - DNA, 465 bp, Zea mays
  Clone ID: MRT4577_70118C.1
gccgcatctggggacggggtcgcgcgcgacgtggccgccgccgccgaagctgatgctcgtcgctgcacgccgcttcgcgccgccgccgccgccgggcagcgggaacggcgccggcgccggtggcggtgctgcggatgtcgttgtcgttgtcgctgggtactcatcggtcaccttccttttggcgtggtgcgccgcctgctgggcctgggagttggacgacgcgtggtgggtaaacgtcaacggtggcggcggcggcgcctagggcggtgacaccacctcggcgtcgtggccgccggcaccgtcgctgtatttgttggactcccctgaagatatggttccgccgggggtgccgatgccctagctggatagcaaggcgccactcgagacggccccgacgtgggcgttgtcgacgcggacgccgagctcactagggaacgcgagcgccgcgtcgagatgggccacggc

SEQ ID NO: 151956 - DNA, 577 bp, Zea mays
  unsure (1)..(577): unsure at all n locations
  Clone ID: MRT4577_70119C.1
agcgtccggttgcaaaccaacatcaacaacaactggggggggggctgccacagcttatgccactagtccatgtgagaaaccccttgcggctaccttcaacactaactacagctttaatatcatgctcttatctagggccatagctgctgcctacgtgcctaaagaactgtaacaacaaattgtaccaggggtggggggggttgttactgaaaaccctgtggcctaccctgaacacttgtttccatacaagctactatctatgcaaaactctgtggcgaaccttcaacagcgactacaacaactaaaaccattacttaaggctaacccattggttaatgcattgctacatgacttactacagctgccatacaagctgctctatatgatgaattctgtcttgaatacgcagtaacccatggatgaacgcaccatcttttatgaccacatattagatgacctataaaatggagtccttataccggcctgtgtaccctagagataatcactataatgattaagatatatcttgagatttatctcgataaaaaaaaaaaaaanaaaaaaannaaaaanaaaa

SEQ ID NO: 151957 - DNA, 341 bp, Zea mays
  Clone ID: MRT4577_7011C.1
aataaaactaatcattcacttcctccaatcacatacttgccatgggctcccgcgtatgggagggtagcggcgcaaatggaagcgatgcggcactaaggtacagacggagcttaatcggcgcaaaccaaatgaatgcaaggtggcctatcaacttcctgaggaaatcgccgtcgccgtgggggccgatgtgtgctgcgactgcggcggcacggtcgggtacaactacgcccggtgcgagggggagggcaaccgaaaactactagaggcgcactcccgcggaacgccaacgcttgtccagagcgcggcacttgaagcgcccgacttgggcggcgcgcatgcac

SEQ ID NO: 151958 - DNA, 233 bp, Zea mays
  Clone ID: MRT4577_70120C.1
gggggggacttttttcatattgtgcactgtaattgtaacacaaatcactatgaattatgaaactttctagacacaaacacaacatgtttttgtgggtgtcaaacgacaacaacagtcaacaaacctgattggtgcttggtgcttgctgcgctgctctgcttgcctgcttgctgctcctgcttgcctgcttcctgcgctgtgtcgctgcccggtgcccgctgcttgccttgccc

SEQ ID NO: 151959 - DNA, 452 bp, Zea mays
  Clone ID: MRT4577_70121C.1
aattcggcacgagggcggaactgaacatgcatagccttcctgagcatggttcctgggcacgtgttgccaatatttggacatctggagataaaactctgattgcatgaggtcgtgaatcaggagcgccgatcgccaacgcctttctctggtcccaagattatgaaacttgcatgctctccagagaatagtgatgacacaacagggctgcatcagactgtgtgcacatatagacttgttgcatctgtgcttgaaaaattgaacagtagcctagctagcttgtatatattttggtagcaggttgttagttatccattcggcgaaatctgtagttgccccttgaattggttaatcttatgtgggaggggtgtttgagctgtgtgtgggggggtggggcgaaggtgggggggtttagggggtgtgggggggcgtggggagggtgggttgggggaggg

SEQ ID NO: 151960 - DNA, 244 bp, Zea mays
  Clone ID: MRT4577_70122C.1
ctcgaggtcccttgcggagttttgttattgcaaccatccattaacaacaagtcaagggactaaaaggctaaagctagtttaatcccctgctggaaatgaatgcactgatcattgagcatgcaggcctgcaacgggagagggggggacgaccaacgatgaccttagcttattcgcggccggcgtttctgtttcctttcatgggtttagcgctggcgaagcttgtccaaatctccttgaacacctc

SEQ ID NO: 151961 - DNA, 311 bp, Zea mays
  Clone ID: MRT4577_70123C.1
ggccgccctattttttttatttgcaagaacgagtctgttaaaaacaccaacggcacctaagttgctgttgacccacatccgagaactcatctagatacatttacatggtcattctacgccatatttcggtacaatcttacatgttccaagagcgctgggaaaaaagtgcttggactctgtcggtgaaagtgactattcttgattggcccaagagctttctcaactgatgcgtactagtgatatataaaccaacaaaatctccaagcccgagaatgatagcgctactggatgaacaactagctcctaaaaca

SEQ ID NO: 151962 - DNA, 392 bp, Zea mays
  Clone ID: MRT4577_70124C.1
attcggctcgagcgcatttgaaccgatagtttttatgggttcggcactaagatttgtttgctaatggtgacacagggatgcatgaacaaggttatcactatatactacggaggtgcggacatactgcatcaagtcgagctttgctgaaacagaatgactgatgtgatgaaacttgttcgaccatggcttagcaatgacatatagcacttggtttgatggaaatacaattttagcacatacagtgatttcagaaacaatcttggcccacatgatgattgtttctagctatgccaaataaccatacctttgttatatagcttacacatattgtacattgctcgctagctgaacgaattccattgaaagccacttaggggagtaaaactttatag

SEQ ID NO: 151963 - DNA, 223 bp, Zea mays
  Clone ID: MRT4577_70125C.1
gccgggccgggataccaccactgggtctgtagacattagctttatctactccagagcgcagaagaacccgatcgacaccatgagggtgttgctcgttgacctcgctctcctgggtctcgctgggagcgccacctgcacgcatacaagcgggagctgcggatgacagccaccgacgacggagaatgtacgcgacgacggtgcatgtagacacctacgggtcacc

SEQ ID NO: 151964 - DNA, 759 bp, Zea mays
  unsure (1)..(759): unsure at all n locations
  Clone ID: MRT4577_70126C.1
ttggggtaccctcgggttcggccggggccccagctcccactatggcgtctggccgagagagcttctctcatctcctccctgctcaatctctagccacgcgccctccagttctgagctcctctgcgcgcgcgaagtcctctgcgccgcaccctgaagccccctgctcggcgcccgagatccctcccatggccggtgttcggtccctgcgctcgtccgaccgaactccctggccatcgcgcttgccgtttccccacgcgcaggaattcaccagtgttcggtccgcgcgcaacctccctcccagctcagccgcccatctccatggccagagctccttcatctccctcctctcagcgtcttctccgtgctcccgctcggctccacccatggccggaatccccttcctgccgagctcccatggcggcgcccatcccctgctccctccagttctccctaccacgcccaccgccggtctatgcgcgcgcgctctgctcccatgccgcgcgcccctgtcctgtttctctgcgcgctcaggtgcctgctcacacccctgaccatggcgcttggcttctccagccgcgcgtggtgcgcgctccctgccatcgtcgttctctgccccgccgtgggcagcaacttcgtcgatctgcacaaatccggttcgacaatcgggtccgtctccgtcgaactcctattcgccatcacgccgagcttctcacactgccccaacccgntgtcggtatttcatcgtctcgtcttggctgc

SEQ ID NO: 151965 - DNA, 704 bp, Zea mays
  Clone ID: MRT4577_70127C.1
gacgcccgcggttctggtccggaattcccgggtcgacccacgcgtccgggctgaaccaggccagaggccatagtctttaaccagacagcccagacctgtccagtgccctgccagttccagactgggcttgtgtcgggaaaggagccagaccatgttggggaaggcaggatctgtggtgtggatgttctgtgcaatctgggtcgctgctgatgctcttaccgtggaaactacacaggacattcttcgggctgctcgaggaaggagtgtcaccctcccgtgcacctacaacacctatgtttcagaccgagaggggttcattcagtgggataagcttctccgaagtcagacggaaagagtggtcacctggaattttgtgacaaagaaatacatctatgggaaccgttatgagaatcgagtgagagtatctaacgatgctgagttgtcaaatgcctctatcaccatcgaccagctgaccatggacgacaatggcacctacgagtgctccgtgtcactgatgtcggaccaggatgtcaacgccaagtctcgagtccgcctcttggtccttgttccaccctccaagccagactgcagcatccaaggggagatgggtgatcggggaacaacatccagctgacatgccactctggcagaggggctctccgagccccacatacagcgtggaagagttacaacggccagaacca

SEQ ID NO: 151966 - DNA, 3370 bp, Zea mays
  Clone ID: MRT4577_70128C.1
tagcaaaggtgaaactgtgatattagtacctggttatcacttatttctttatgaacataatgatggaaaccaggggggcaaaagtggtaagttgagcagcggtaatctaactcagactgattttataatggaacatgagaagtttgatcatgctctcaagggatgtagggatcctttaattgcagatgacatttattctacaggtgaaaatgtagctattgaaggaaagactacaaaaggaagttgtgcccctttaaatggaggggacaggcatgaagaaataaaacacctcaatgagggatgtcataatgcaggtgtacctgaaacaagcaacatggagaaagatggcaaaagtacagatgtctctgacaagaggcaaacaagtcaaaatacctcgcaagtgaagaagcgcaagaaatcaaaggttggttctgttgacatgccttccgtggatgcttctggtgaaaaagatcatcggtatagtgaaaatgcgaccaaacaagatacagcttctactaaaagggagattgtccacgaaccttctatgcaacagatgtcaaacattgtgcatcagggggattcaaatgtaatagaaaatccaagtggtgatggaaagaaaaagaaaaaaagaagacaccattcagaatccttaaagggtatgaatcctagtcaagatctgaccaaatcttctggatttgtaacaaacgaaagctcgatacaatgtacagatgctgctccaatagatgcaaagcaaacaacccaaggcattatagaaggagaaacagttaatgagcacatgaagcttagtagaagtctagatgtagcagcaacaaatattgttgatggggtattggcagatctacgacctaaagacagcttaagtaaggatctggatgaagatcttttaccaggacaaactcacctaggcagcaatcagaatggactagaagttcctgaatccattgctgttaaagttggtagtgctactgcagcattacctccgaaatatcctgcaacagttcactctgcttctcctgttaactcacctagacaaaggaagtctaaggggaaaaaattgaaagtgctatccaccatggctgactcttctcatcaatcaagtggtgtacccgaagaagatgctaatagaaaattaaaagagtctgattctttgaggtttgctgataaaacaagtgatcatgaggatatagtaactgcaaatgtggttgctcaagctgatgaaaaacgcaaagccactaagcgtcaaagaaagaaaggttctgtaaagcaggtacttgatacattggacttgaaggaagtgaatgacacagaagaaaatttggttcagggaggttctgtagttgacactcccttgagcactgctgggaacgtagagcagaaagactggtcttctgagactttgagtcctaaagaacaagaaactaattgttctactcatgggctggatagtcacacagctaaggacagccaggatgagtatgtaactgacaccattgggacccatgataatgaaaatgctgcaggaaccccagccttgcatgtagttcagaaagatgccatggccctcaaatccgccagccctaattctcaaaaggagcaggaaacatctttgaactctgaactacaaagtcaggattgtcctctggaacatggttttagtgcagatttggtgaactccaggactgaaaagggagtcaggactacaagttctgctagtgctgttaaatctgattacaacaccatgtttcatcctgctaatggtagaatcaatgtccttgatcattttagccgcagcaatttgaatgatggttcatcaattgtcgcagaaagtaagcaaaacaatgaagatggaagtttaagggaagtgaagaataaaaagaagaaacgaaagcaaggtactggtagcgttgaaccaaatgatgttatagaatctcttccctcagagatagctagcttaactggtcattttggtaccagcaaagctgttgtgtcatctgttgcaacagaaaacatgaatggaggaaatgagaatgtgaataaaggcaaggagaagaagagaaagggcaaatctaatatggaagtacctactgctggaaaggaccatcctaattgtgatactcaattcattgatattggtacccaagaatcacttatttctattgtacaaaaagaaaggacaggtcaagacaatggaaaagagagcaacagtaaagctactcagaatgccagtataatgcaacatgaaccagaagatgccacttggaatcgtagccctgagaagaatcaccaccagagtgttgatgatgatcagaacaagttgctcactgaaaaggatcatgcacatataaataaagaagtgagaaaattcactcctcaaacaaaggcccatgctaagattagaaagcctgatgggtctactatcaaggaaaaggtggctccaaatcctaaacctgtaaccaaccttgtgaaggatttttccatgagcccacgagcatcaagtgacagcacagagggcatgccacaaagtgctaaccgatatagagttgcagtccggaaagtaccaagtaaaaggtatgaagagaccagtggaaactccaataaggcgagtaggaaagtaggctctggtgcaatattcaatgactctatcagcgaaggttctggtgatgaattggacaccaagactgtcatggaaagatcacctaataagtcatctacatctgctgattcaggtatttcatctgcagcctctggtgaaagcgaggttcctgatgatgatggcaccgtatcactatctcagaagagtttcaaaggtctgcacattagctccatcctccgtggctcccgtagctacaagaaggcactaaagaggcaaatggagctgctagacgacgacaccattgtgcctgatagccagcccgcggatggcctttggggctgaacatggttatcgtcaagagaagcgccgaccctgcttcatcccttttttgccattgtccacctgatacgctggtgggctttataagttgtctaaaacacatgcccgaatgcgtgatgtcgctgatggcattgccatacgccacacgcagttcccttattttgtcgggcttaagctgtgatctgcctgaggatgaatcgatgatgttcatgatacagcttaccagctatatatatgtgttaatgtatgtaagaatgatacgcacgcttagtctctcacccatgagccatgggtccgttgagtcctgactgaccatcgccagaagttgtggtttgtgacaggaaattccatccttctggcttatctgttgtgtattttgcgtagctgcagttttattttttttcaaaaaaaaaaaaa

SEQ ID NO: 151967 - DNA, 690 bp, Zea mays
  Clone ID: MRT4577_70129C.1
cggacgcgtgggcggacgcgtgggcaggcctcatgtcactatttcttaggttgataaatccagttgttgtctcgccaacagtggcagctgttgggctttcatttttcagttatggtttcacgaaaattgggacatgtatagagatgggaattctgcagttattgatggtggttatttttgcacttttacctccggaaaataaagctatttgggtacagagtgtttcttatttatgcggttcctcttggattaggaatcacatgggctgttgctttcgttctcacagcaactggagtttatagctacaaaggttgtgatgcaaatattcctgcctcaaataatgtatcagccttttgtcggaagcatgtattgaggatgagatcttgccgtgtagacacttcgcatgccttaagatcttcaccctggttcagatttccctatccattgcagtggggaactccagttttttcctggaaaatgggccttgtgatgtgtgttgtatcagttattgcttctgttgattctgtcggttcctaccatgcatcgtctttgtttgtggctacccggccaccaacctctggagttgttagcagaggcattggtgttgagggtgtatctacagtcttggctggcctttgggggacaggagttggttctgcaacaataacagagaatgtacacacaattgct

SEQ ID NO: 151968 - DNA, 272 bp, Zea mays
  unsure (1)..(272): unsure at all n locations
  Clone ID: MRT4577_7012C.1
accacgacggtgtcgaataacaacggtacggggacgcttaccgtgaacgtacgtgtcactgtgcgtggtactgtgaagcatccagggaccgatccagcaaatgctactggtgatttgggaggagacaggggaataaagaggggtagnctgcnttgcataaaaaaaaaaaaaaaaaaaaaaaaggggagggggggaaaaaaaaaaaaaaaaaaaaaaaaaaaaaaaaaaaaaaaaaaaaaaaaaagaaaaaaaaaagggggggggcccttttt

SEQ ID NO: 151969 - DNA, 745 bp, Zea mays
  Clone ID: MRT4577_70130C.1
ggagaaattgcacacttgatagattgagtgatattgtggagtgcactgtttctttagagaagcagattgctgaagaggaagaggaagaaattgaaatgttattggaaaattatcttcaacgatgtgaatcatgccatggtcaagcagagagacttctgaattctgcaagagagatggaagactcgatttctgtgaacttaagttctcgacgacttgaagtaagtagagtggagctgctgcttcaagtgggaacattttgcgttgcaataggagcattaattgcaggaatatttggcatgaatcttaaatcatatctggaaacaaatgcgtgggcattttgggtgacgactggtggaatagtagttggagcagtagctggatttttcgtcgtatactcgtatctaagggctaggaagatattgtgaaccctgtaacatctgtatgttaggatattttttggagctgtaaataatgtcattagcacatccagtgagggatatgcgtgttccaaactattgcatggtttgtgtactctgtactcttgcgagaatgttgccaccctatgtatttgtagttgcccgttgagacggaaataggttagaactcagaaacaaatatttggtttccaccctagacgatttctcgtagctgcattttactatcctgtattgaaaattcgtgtcaacatctgacttagtcttctaaattttggtaatgcactaaaaaaaaaaaaaaaaaagcggcc

SEQ ID NO: 151970 - DNA, 400 bp, Zea mays
  Clone ID: MRT4577_70131C.1
gccacgcgtccgctttggtccaactggcctgactaccgaggtgaagtctggtgagatgcactcacgaggcgcttcaggaggctcttccgggtgacaatgttggcttcaacgtgaagaacgttgctgtcaaggatctcaagcgtgggtttgtggccttcaactccaaggatgaccctgccaaggaggctgccagcttcacctcccaggtcatcatcatgaaccactctgggcagattggcaacggctattctccagtgctggactgtcacacctttcacattgttgtcgagggggctgatcttatttttaatttttacattttttttattttgttttttgtgtttgtttttttattttttttttttattttttttttttattttttattttttttcttttt

SEQ ID NO: 151971 - DNA, 500 bp, Zea mays
  Clone ID: MRT4577_70132C.1
agcatgctaaaaagcacaatagagtccaacaggggctgccgacatatctagcctgaatatgcgacttgatctttgtgcaagtgctgctacctccaaccataatcccgaagtgctcacaagctcctatagctacccttattgacgcgtacctctcagcagaggtgtcttcgatatgtgaaaacgcgattgttcaaccctacaggatccaacaggcaatcacagctggcatcttacgttgatcacccttgttcctccaacgatcatcagtcctattacatcagttacctttgatgcatttattgtcacaaaacatcagggcacaccatctacaacaacttgtgctagctaaccttgctgactactctcagcatcagccgtttgttccattcaaccaactagctggattgaactctgcttcttatttgcaacatctacaactaccattcagccagctacctcgtgcctacccccagcaatttgttccattcaaccaactggca

SEQ ID NO: 151972 - DNA, 485 bp, Zea mays
  unsure (1)..(485): unsure at all n locations
  Clone ID: MRT4577_70134C.1
tttggggttttttttttttaattttttttttttttttttttttttttttttaaaaaaggactttcttatttctgggaagccacaaacatcagataaaaaactttattattgaactataactcataaaaaatctaaaaaagggccccaccgtgttgtcgggggtnntaaaacactgctgggtttgtcaaaacaaggtggttgaatggccgccattgttgccgttgtaaaagggggccagcgttaggcgcaacctgctggtaaaaccgcaacaactgtggttgtgtcaaaaaggtaacagggctcacaccaactagctggctgaatggtagtagttgttgctgctttaaataagcaggagagttcaatgcttctagttggttgaatggaaaaaattgctgggggtaggcagcaagtagctggctgaatggtaattgttgttgtttcaaataaaaagcagagtttaatgaacctaattggtttaatgg

SEQ ID NO: 151973 - DNA, 307 bp, Zea mays
  Clone ID: MRT4577_70135C.1
aagcctctagcataacatggctttgccgacctctgatgaatctgcctatcaggaggacggagagcaagatgacaaggagagcgagtatcatatatacattatgcatgcgtgtgccatggctaccttaagaagcgtatcgaggaggattactgatacctggttgacttactccagggaaaaaggggaagagaactagagaagaggcgggctcttaaaactggacaaaaatgactatttcaccttgattacataccatatctgttatggcctgtaaagtaaaaaaatcataaaacataaatagaggggc

SEQ ID NO: 151974 - DNA, 594 bp, Zea mays
  Clone ID: MRT4577_70136C.1
cacctactggcggccgggacctaggggcctctaactcgcgacgaatcttggaggagaaatgcccatagttgaaccctagagggaaacatgaagtacgctcacaatggcacactacctatcatcacgcttgcatctacagcaaagatagggcctactacaagagtgacctaacggagcataaatgggcacagctcatctgggcgcatcaactacaacaaccctgggctagccaaccttgctgtctactctcaccagcagcagtgagatgtccattcagccaactgggcgcattgaactttgcttcttatctgcatcaacgacctctaccattcagccagctacctgctgactacccccatcaattgcttccattcaaccaactagcagcattgaactctcctgcttatttacagcagcaacaactactaccattcagccagctagctggtgtgagccctgctaccttcttgacacaaccacagctgttgccgttctaccagcacgttgcgcctaacgctggcaccctcttacaactgcaacaattgctgtcattcaaccaacttgctttgacaaacccagcagtggtctaccaac

SEQ ID NO: 151975 - DNA, 1681 bp, Zea mays
  Clone ID: MRT4577_70139C.1
tgaaattacaacagcaagaatcagcagtggaacaacagcaagggggagaggaaaagccccccgaaaatctctccttctcttttgagcaaatcctccccgatgaccaattcttctttcagttgtgtatgatacctctgggctagagacctcaagcgtgccatctcggcttggttcctcccttatctaaacaacgctggtccatatggcaccttagacgaaagggattgcccactattgcggaataatctcatgaaacacaacaccagattgctatgtttgtcatccaggagatacacctgctgtcagagtgcctgcatgatcctgtggatgagtttgaggagtcgcgtgtccaagcagagctttcagcgctctacattaagtggttcacaaagtacgtagaaggagtgaacgtgaagctggaggagatggttgatttagcctctaggtgaacactgaaagaagtgctggcaggagccagcgaatcaatcaataggggtcagataaatatcagcgacatcgaagatgaaccctctggcatacaataatagatgacgtttcttgtcgagtttgagccgtaaacatacgttacatggactccaagctcttacatcaggtcgtgactcacggatttctgccaagttcttgcttcagcccaagagcaggaaaccagataatgtagatgctaaaaaaaagctctttgggtattggcccagtgagtgtattgcgtgaaaggttcaagttttgaagagggccagttgcttagactccaaggtattatctccactgagggagagaggtttgaaaattagcctgttgttgttcttccacttgtagttcttgttggcgggtgtgtgttttgtttatactagctgtggtgatgtattgctgcagtcgttatggaaccaccgtcggttcctttcacacttgtggatacaacacttgctcactgttgaaggaaactggcccgcaacgacatcccagatggatatgtttgtcatccaggagatacaactgctgtcagagtgcctgcatgatcctgtggatgagtttgaggagtcgcgtgtccaagcagagctttcagcgctctacattatgtggataacaaagcaagtcccggatgtgaaggggaagctggaagagaggttgcattttgcctccatggggaggctgaaggacgtgctggcaggagcctgcaggccagagaagaagaggttttggatgaatttgctcaacctggctgatcaatccagtgacgtacaataatacatgacctttcttgttgagtttgagccgtcaacatacatgacatggacgccaagctcttgcttcaggtcctgtctcccggatttctgccaagttgttgcttcagcccaagagcaggaaaccagataatgtagatgctaaaaaaaagctctttgggtattggaccagtgagtctattgcgtgaaaggttcaagttttgaagaggcacagttgcttagactccaaggtattatctcccctgaggccattggcatccagaacaaatctagaaagccctgttaaatttctaagagtttctgggattaaattgctgagagtttctggtatattcgggcttcttgagattgccaactgatgatgggatactagagattgctccccgtgctttctgatatatttctagctatattgttcatcc

SEQ ID NO: 151976 - DNA, 240 bp, Zea mays
  Clone ID: MRT4577_7013C.1
ttcgttcgtcgcattatttagcataccctggggagggttcacctgcttaccgatgccaaccccaatcaggtcgttgtttattcgatcattaacagtggaccccttgaggatgccacccgtattggtttctcttgttttgtgaggaggcaagccgtggatttcttacccctgaggagggtgaaccatgccatttaccttcttaccacttgtgccatggatagtgctttccggaacattaaa

SEQ ID NO: 151977 - DNA, 365 bp, Zea mays
  Clone ID: MRT4577_70143C.1
ctcacaaaaaaagcccagttttaacattaaaccaaaaatcatgccttggcaatacccatttccccaaatcactttctttccataaaaatggaatttttccccccaaaaaaactaaagaaaaataaaaaaaataaattttatgggggggggaatagtaatagtagtaattaaggattcggttttgcacagctaaatctttaaatttgccttaattggggcccaagcgggggttcccccaaccccccaaacttaaaataaaaaagaaaaactggcttaaaaattcacccccacaatgaaaaaactaacttgggatttcttccctctaatcccccttggctggttcggggtttaactactggaggaca

SEQ ID NO: 151978 - DNA, 513 bp, Zea mays
  Clone ID: MRT4577_70144C.1
cgttgctgtcgcccgttacttgcctgagtgggagcagttcctttgtttatatatatgtacagtatggggcttgcacagtcggatctcttgaacctttttgtggatacttggccgagatttcctttggtaccaatccgaagggtactaatgcaagttatgcagatatcatacaagtggtaaagaagggattttctgttggattcccaaaggacgaatatgattatagctaccataatacttcttggatattcaagacatgcctaaataattttaccaggtacttccacgagcaattgtctagcggaggcatcgttggtataactcgtgctttcttttggagtgatgtatttcttctcaagtgcgcagagagttacaatgccacaactgttattttagatttcgatgtgatatccgtagtgactggtgttaaaatcacaacgttacttgtactgttcaggtttgtgttcacagcactagcagtacagatgttcctgccccagtactggaaaacac

SEQ ID NO: 151979 - DNA, 620 bp, Zea mays
  Clone ID: MRT4577_70146C.1
agtcgccagtcattctacttaactctcgcttctgtggtgctactacgacctccacttacactatttcccggaactcgaacggtgaatggtaccatggctaactacaataccacgtccgtagctgccctccgcatccgaaagttcgtgacctacctcgctgcctgaagccgccagcatttagtgcttgcagatgctccaccgcgcgtcgcgccaacgtactcccagaagagagtagatagagaggatagccagggcggatgatgtcgaacgtgcccaatgccatcttctgtcttcgagtcttggtacccatttccgacgaggaaatgccaatgcattatcacagctcatctacgacaacctcgactctgcctctagtgaacagcccgaaacaccgcctcatccagaatgaacttgcatactaccggtgacaacgtcccaccacgtgaatgaaaggagatcacaatatcccccaaaacattcatggtgacaagacgacccaagctggagagcgccagaaaaagtaaaccgtcgttaacataagcattactggtctcgggctctgggacgacctagcctggatgtcttaattatgataaccgcctaggatatgctccaccttt

SEQ ID NO: 151980 - DNA, 327 bp, Zea mays
  Clone ID: MRT4577_70147C.1
gccacgcgagcgagcagaaacacaccaagcgaagcacatgagcaacaaccgaacaacaaaggctaccaagagaggaacccaccgagcgcaactggcgcaaagtgcgagcgcaacaaaggcggtcaagaggccacaatgcacacacgctacaagctccaggatcacacagcacctcccaccagggacttcaaggggctgcgaacacccaggagggcaagcctataggcgacaacaggcaagggcggcgagagagggacaacaaccaaaggcccagtagcaacaacaatccggggcacatctaacgaaacaaaccaggggagcgcaaca

SEQ ID NO: 151981 - DNA, 351 bp, Zea mays
  Clone ID: MRT4577_70148C.1
tcctctcggccgggaggccctaaaagctaaccggggtcttgttcaagaagatcaggggcggtgtcacatactgccatggtgactaggaggcacaacactacggaagcaagcgaatattaggtatcgaccggactgggatgccatagggaggccttgatgggttaactcagcagggctaaccttcacataagaactaacacctcgggcctgcacgatcataacgacaggatgcttgggttgggcactccaaagaagcatatgatgatagagcctatattggactaagggacacaatctgctcatgggtagacgacatacgggtgcgggatacacttatcatcaacgacaggg

SEQ ID NO: 151982 - DNA, 172 bp, Zea mays
  Clone ID: MRT4577_70149C.1
tcttccacgcgttcgacagggaccaccggcctggagcttgttaccttgtgggggggcccaacttttggtccaacgcgttgccttcggttgttgtgggcccgaaccccaaattcccttcccagggcccaagcaagtaacatttttgcctaccttccccccgtgacaaacaccc

SEQ ID NO: 151983 - DNA, 431 bp, Zea mays
  Clone ID: MRT4577_7014C.1
tcggacgcgggcgagcacacggaccggggggaaggacaggaggaaacccaccggccccacaagacccacggaggaacagggaagacaggcccagcggccaaacaagaaaccgtgcaacaagacgaggagaaagcgcgaacacggaaaccagaccgcgaagagggcagagacccagaccaaggagaggaaggaaaacaaaacgaacccaaggagcgaaaagaacggcaacaacagaaggaggggccaggcgcagcaaggcggacaccgaaccaagaggaagacgaacaacaaaccggagagaggaccacccccgaagaagacggcgagacagcccgcaacacccagcacagagccagaccacagaaggaggaaagaaccagggccaacacggaaggaaagccgcaccagagcggcagtcacaaaaaaacaga

SEQ ID NO: 151984 - DNA, 4437 bp, Zea mays
  Clone ID: MRT4577_70150C.1
aattcgggtgctgtgttgtgctgtgctgcgtgctgtggagggggaggaggagatggggaagggggcaggagcagcggagccgtcgacggtggtgctggccgtcaacggcaagcgctacgaggcggccggcgtggctccgtccacgtcgctgctggagttcctccgcacccagacgcccgtcagaggccccaagctcggctgcggcgaaggtggctgcggtgcatgcgtggtcctcgtctccaagtacgacccggccacggacgaggtgaccgagttctctgccagctcctgcctgacgctgctccacagcgtggaccgctgctcagtgaccaccagcgagggaatcggcaacaccagggatggctaccaccccgtgcagcagcgcctctccggcttccacgcctcgcagtgcggcttctgcacacccggcatgtgcatgtccatcttctccgcccttgtcaaggccgacaacaagtccgatcgcccggaccctcctgctggcttctccaagatcactacctcggaggcagagaaggctgtctcgggcaacctttgtcgttgcaccggatacagacccattgttgacacctgcaaaagctttgcctctgatgttgacctcgaggacctaggcctcaactgtttctggaagaagggcgaagaacctgcagaagtcagcaggctgccggggtacaacagcggtgccgtctgcacctttccagagtttctcaaatccgaaatcaagtctactatgaagcaggtgaacgatgtccccattgcagcctcaggtgatggctggtaccatcctaagagcattgaagagcttcacaggttgtttgattccagctggtttgatgacagttctgtgaagattgttgcttcaaacactgggtctggagtgtacaaggatcaggacctctacgacaagtacattgacatcaaaggaatcccagagctttcagtcatcaataaaaacgacaaagcaattgagcttggatcagttgtgtccatctctaaagctattgaagtgctgtcagatggaaatttggtcttcagaaagattgctgatcacctcaacaaagtggcttcaccgtttgttcggaacactgcaaccataggaggaaacataatgatggcacaaaggttgccatttgaatcggatgttgcaaccgtgctcctagctgcgggttcgacagtcacagtccaggtggcttccaaaaggctgtgcttcactctggaggaattcttggaacaacctccatgtgattctaggaccctgctgctgagcatatttatcccagaatggggttcagactatgtcacctttgagactttccgagccgccccacgaccatttggaaatgctgtctcttatgtaaactctgctttcttggcaaggacatcaggcagccttctaattgaggatatatgcttggcatttggtgcctacggagtcgatcatgccatcagagctaagaaggttgaagatttcttgaagggaaaatcgctgagctcatttgtgatacttgaagcaattaaactactcaaagataccgtttcaccatcagaaggcactacacatcatgaatacagggtcagcttggctgtcagtttcttgttcagtttcttatcttcccttgccaacagttcgagtgcaccatcaaatattgatactcccaatgggtcatatactcatgaaactggtagcaatgtggactcacctgagaggcatattaaggttgacagcaatgatttgccaattcgttcaagacaagaaatggttttcagcgatgagtacaagcctgttggcaagccgatcaagaaagtcggggcagagatccaagcatcaggggaggctgtgtacgttgatgatatccctgctcccaaggattgcctctatggagcatttatctacagcacacatcctcatgctcatgtgagaagtatcaacttcaaatcatccttggcttcacagaaggtcatcacagttataaccgcaaaggatattccaagcggtggagaaaatattggaagcagcttcctgatgcaaggagaagcactatttgcagatccaatcgctgaatttgctggtcaaaatattggtgtcgtgattgctgaaacacaaagatatgctaatatggctgcaaagcaagctgttgttgagtatagcacagaaaatctgcagccaccaattctgacaatagaagatgccatccaaagaaacagctacatccaaattcccccatttttagctccaaagccagttggtgactacaacaaagggatggctgaagcagaccacaagattctatcagcagaggtaaaacttgaatcccagtactacttctacatggaaactcaagcagcactagcgattcctgatgaagataactgcataacaatctattcctcgacacaaatgcctgagctcacacaaaatttgatagcaaggtgtcttggcattccatttcacaatgtccgtgtcatcagcagaagagtaggaggaggctttggtggaaaggcaatgaaagcaacgcatactgcatgtgcatgtgcccttgctgccttcaagctgcggcgtccagttaggatgtacctcgatcgcaagacggacatgataatggctggagggagacatccaatgaaggcgaagtactctgttgggttcaagtcagatggcaagatcacagccttgcacctagatcttggaatcaatgctggaatatcaccagatgtgagtccattgatgccacgtgctatcataggagctctcaaaaagtacaactggggcactcttgaatttgacaccaaggtctgcaagacaaatgtctcatcaaagtcagcaatgcgagctcctggagatgtgcagggctctttcatcgctgaagccatcatcgagcatgttgcctcagcactcgcactagacactaacaccgtcaggaggaagaaccttcatgattttgaaagccttgaagttttctatggagaaagtgcaggtgaagcttctacatacagcctggtttccatgtttgacaagctggccttgtctccagaataccagcacagggctgcaatgattgagcagttcaatagcagcaacaaatggaagaaacgcggcatttcttgtgtgccagccacttatgaggttaatcttcgaccaactccaggcaaggtgtcaatcatgaatgatggttccatcgctgtcgaggttggaggaattgagataggtcaaggattgtggactaaagtgaagcagatgacggcctttggactgggacagctgtgtcctgatggtggcgaatgccttctggacaaggttcgggttatccaggcagacacattaagcctgatccaaggaggtatgactgctgggagcaccacttctgaaactagctgtgaaacagttcggcaatcttgtgttgcactggttgagaagctgaaccctatcaaggagagtctcgaagctaagtccaacacagtggaatggagtgccttgattgctcaggcaagcatggcgagtgtgaacctatcagcacagccgtactggactcctgatccatctttcaagagctacttgaactacggagctggcaccagtgaggtggaagttgatatcctaacaggagcaaccacaattctgcgaagcgacctggtgtatgactgcgggcagagcctaaaccctgctgtagacttgggccagatcgagggctgctttgtccaaggaatagggttcttcacgaacgaggactacaagacgaattccgacgggttggtcatccacgacggcacatggacgtacaagatccccacggtggataatatcccgaaggagttcaatgttgagatgtttaacagcgcccctgacaagaagcgtgtcctatcttccaaagcgtcgggcgagccgccgctggttctcgcaacctcggtgcactgcgcgatgagggaggccatcagggcggcgaggaaggagttctcggtcagcaccagccccgcgaaatccgccgtcacattccagatggacgtgccggcgacgatgcccgtcgtcaaggagctctgcggcctcgacgtcgtggagaggtacctcgagaacgtgtctgccgccagtgccggcccaaacacagcgaaagcatagatccagcaggcctcagggtgcagtcggcgcactgccagagatgatgtgtgctgccctgatgtacagacagtacagtacagaggagagagaattgggggaactcaggaactgcgaggagcgatgaacagtatatagagtgaaaaataaaagtgcttcgtactaataatcactagaaaaaattatgcacatctcccacgcactaccggcacgactgttgaatattttgtaaaataagatgtcataagctatttattttctgtatgattagatcagcaaataatttaattcaagtataaatcgcagaatat

SEQ ID NO: 151985 - DNA, 714 bp, Zea mays
  unsure (1)..(714): unsure at all n locations
  Clone ID: MRT4577_70151C.1
aattcggcacgaggctgtctgtacatcagggcagcacacatcatctctggcagtgcgccgactgcaccctgaggcctgctggatctatgctttcgctgtgtttgggccggcactggcggcagacacgttctcgaggtacctctccacgacgtcgaggccgcagagctccttgacgacgggcatcgtcgccggcacgtccatctggaatgtgacggcggatttcgcggggctggtgctgaccgagaactccttcctcgccgccctgatggcctccctcatcgcgcagtgcaccgaggctgcgagaaccagcggcggctcgcccgacgctgcaaacaagtccccggtatgtcaggattttggtttttttttcatatgcagttaccagaatttgatgatgtccgcatgagtgttgagaatgtggagaggggatgaaacattgtgaggagatacttgcctttggaagataggacacgcttcttgtcaggggcgctgttaaacatctcaacattgaactccttcgggatattatccaccgtggggatcttgtacgtccatgtgccgtcgtggatgaccaagccgtcggaattcgtcttgtagtcctcgttcgtgaagaaccctattccttggacaagcagccctcgatctggataaatgatgaacagtgttnttagaggangagcacattttttgttgatacaatggtctgcgtgaact

SEQ ID NO: 151986 - DNA, 264 bp, Zea mays
  Clone ID: MRT4577_70152C.1
ctcactcaacgaggcgctcatcattcgttacgacaagaccattgacggccgcggggtgcatgtgcatattaccaatggaaaccatattaaggtgcattttgtgaacaactatatacatccacagcattcacatcatcaacagtgggctcctccaacaaggatgtcgactacctccgcaacatagagtatcattatatgctggcagcaccgtctccgactagcacggcatccacctcttccgctctaccaacgtatggatggacc

SEQ ID NO: 151987 - DNA, 125 bp, Zea mays
  unsure (1)..(125): unsure at all n locations
  Clone ID: MRT4577_70153C.1
cgggtccgaccccacgccgnntccggtcagtccctagcatattagctcaatcgtactccatgattggggagaancctcgacaccatgagagggtgcttgnnatcgttgcnnccttgctttctcct

SEQ ID NO: 151988 - DNA, 314 bp, Zea mays
  unsure (1)..(314): unsure at all n locations
  Clone ID: MRT4577_70154C.1
nacntgatccancanaagtcgcangcacgcgtacgtaaagctcggaattcggctcgagggatttggctgacattgttgccaacaagtggaagtgagagccatcanattctgaattggtaattcaattattatatgtatgtaccatgccattgtagttttgtatgcttactactagctactactaccactatcaacacttgttgcttcatttttcattctaaaacttgtactgagaaacagaaccatcaattttctctgccttctcattgtgcaataaaattcttaccttgaaatctgactataaaaaaaaaagg

SEQ ID NO: 151989 - DNA, 399 bp, Zea mays
  Clone ID: MRT4577_70155C.1
acctgtggtttgtcttgggcgaaaaaaaatcacaccgtacgccggaatatgaatccacaggaacgctacgaggaaggaggcatatcttggggggcggcgattaaagccgaacaaaagcctctggtatatacatacaaggccaaggtaggtggacactactctgatggacagaaccatctgaagcacccaactaagtgatgcgtgaaagattgactgcctccaaccttgccggtagtgcacacttgcctactcaatgtgtcttgcccacataccaggcatatccacatgctgactgactttcgtgatgctgggaactcatatcgcgacacgcatgaacacgatacaggttccaagaagcgacacgtacaccacaaagaggaggcggaaacccatcagact

SEQ ID NO: 151990 - DNA, 1038 bp, Zea mays
  Clone ID: MRT4577_70156C.1
atggactttaaaggcaaggacattgtggtcgacgagaagaagactgtcaacaacaatgagccaaagggagaaaaggccatcgactcaggctcaaacaacgagaagaaggatgagaagaagaagaggtgcatcaagaagatagtctactacgacaacgacgcctcttcatcttcaccaaaggaagacggcgacgactcttcttccaataaaaaagggatgaatataacaaggttagtggattggacaatgctaaggagatatgtggacaccctcaaaatcgctcatgagagaaacgatgacacaataatcaccaagatggagttggtggaaggcgagttggggaggttcgtcatgaagaggagtgaggagccaactgacatgtacaacatgctcaagaccctagtgaacaagatccgaagctacgagagtacaagatggacggatcatgatgtcatccctttcatgctaaggtcatttactgttattgatcctcgtcttgtaaatcttattcgtgagaaccccaagtataccaaaatgtcgttcaaagaaattctttcaatgaccaacaaggaggtgctccctgacaaggtgtcgcaagttgaggcggccgaccttaatgaggatgagacgacgcttgtactcaagcgctttaagaccgctttgaaggaacacaaggactacctagcaagaacaaatcaaggggaaagtgttcatgctttaagtgtggtgattccggaccaagaaaataaagggaagaagttctatagaaaaagaagggtgaggtgcacatcgataaggaatgggactcaaactgctcttcatctgactcgaacgatgaaggacttaccgcctctgtcttcaacaagtcttctctcttccccaacgagtgacacacatgcctcatggctaaggaaaagaagatttgtcagtgcgacagatagagccttccactatgttgatatgagttacaacgatgtcgtgactgcttacaatcttcttgacagcactccggcaaagcgcctaaggtcccttctataa

SEQ ID NO: 151991 - DNA, 744 bp, Zea mays
  unsure (1)..(744): unsure at all n locations
  Clone ID: MRT4577_70157C.1
ggggaccttcgaaagagaaagacccccaacaatgatcttttcaagtggtcttattaaggaagccacatgcaaatgatgatctttgcaaacagttcttagctctctgcttgcaaagattgttattttcacaagcacccagatagtagcagactcttcctcgcttgggtagatccctttaaagttgtttgtaaaaactttttcgtttgtaaaaaaactgttttctatagtagtgtaaggaatgactacatcaactaacaattattgctttagcacaatatgttaagataattagatttcaagtattattgccatacatgggttaagtactgacaagtgagcatagcatgtttgccgcatctaagtattgttaccatacgtagatgttattacatgttttgtgaggagttttagtattatgtgataatttttattttccatgattctaagaaatagcaccttagggcctgttggcaccaatgttcctcaaaaccctggttttaaaatactatactttgtaattgtaataacaattcatagttttggccaactcccattaattaaggagtacatgtgtttagaaaaaacaactaatatttagcttgttatatatagtgcatgcatactatatanttttgattcatacacaaagtactttaagatgatggtattttttgtatttattgatgatatattttcaaaatatgagtgcccaaaagttttcttttaagatcatacccaaaattt

SEQ ID NO: 151992 - DNA, 1199 bp, Zea mays
  Clone ID: MRT4577_70158C.1
tcgaggccggccgggccgggaccgacaccaggaggcggaaggaaagaggaacccgcacagtgcacggacctgtaggctcccgaaaatctccccgagtccgacgcgtctccggcggccgcccccctctccctctcggatctctccctctccgctcgccgcgcctccatcggtccactcagccatgtatagtaattacgggaatccttcggggatgcagatgcccccgcagaactctcaacctgtccagtttgataatccattatacggtgcaagctcgggtctaatcagatctgggataggagtatatggggagaagtttttgggttctagttcagaattcatgcaaagcaacatcaatagatacttctccaacccgcagtattacttccatgtgaatgatcaatatgtccgtaacaagttgaaagttatactgttcccgttctttcacagggggcactggactcgaataagtgagccggtcggtggccgcttgtcctacaaacctccaatctatgacataaacgcaccagatctgtacatccctttcatggcatttggaagcttcatcatcctttcagggtttacattgggtttcatgggaaagtttactccagcagctataaatctgcagtttacaagggcgctcatcggctggggcttccagctcatggtcctgaaaggtctgctctactcgatgggtggtggcgaggtgccactgctcgacttggtagcgtacggtggttatttattcgccgggctatcgctcgccgtcgtcgcgaggctcatgtgggcgtactcgtactatgtgatgatgccgtggatgagcctgtgcatgggggtgttcctggtgaggacgatgaagagggtgctcttcacggagatgagaagcagcgagaggcactcgtcgcggcagcactacttccttctcttcatggcaatcgcacagttccccctgttcttctggctcggcagcataggtgcatgatgcagttttgtgtacttttcgcagcattaacgttgcaaaaatgatattgaagtgtttagatgtgttgtaaagaaaaaaacaattggacaatggtctcaacagcttagaggttggcagctctgcttgtgaagttgtatgtgatccacaatcatgttatgctattgactttttttggttggtaaaaaaaaaaaaaaaaaaggcccctagggccctc

SEQ ID NO: 151993 - DNA, 1739 bp, Zea mays
  Clone ID: MRT4577_70159C.1
tcgattcggacgacggaagaggaacccgcacagggacggacctgtaggctcccgaaaatctccccgagccccaccagcctccggcggccgcccccccgggcctctcgccgcgctcccccccgccccgcgcccccccgcaggcagggcagcagatcgcgagttccgacttccgacgcgtctccgaccaggccgccgccatttctctgtctccacacagcgggatctctccgccgcttgccgctcctccctcgggcgtctctctctattcggctcgggttcctcgcgttcccacttcccttcccttcccttccttcctcgccagtcaccacttcttccgacccaagcaagagaaaactaaaaacaacccgacccaccaatcacgtgggcccacccaccgcctcaccaccagcgtccagggaggaggaaagggaaggaggaaccgaggaacccgccgcaccgcaggcacaggcaggcagggcagcagatcgcgagttccgacttccgacgcgtctccgaccaggccgccgccatttctctgtctccacacagcgggatccctccgccgctcgccgcttctcccttggtccaccgtccacccaaccatgtataacaattaccggaatcctccggggacgcatatgcccccgcagaattctcaacctgtccagtttgacaatccattgtacggtgcaagctcgggtctaatccgatctgggataggagtgtacggggagaagttcttgggctctagttcagagttcatgcaaagcaacatcaatagatacttctccaacccacagtattacttccacgtgaatgatcaatatgtccggaacaagttgaaagtcatactgttcccgttctttcacagggggcactggactcgaataagcgagccggtcggtggacggttgtcctacaagcctccaatatatgacataaatgcgccggatctgtacatccctttcatggcatttggaagcttcatcattctttcagggtttacattgggtttcatgggaaagtttactccagaagctataaacctgcagtttacaagggcgctcatcggatggggcttccagctcacggtcctgaaaggcctgctctactcaatgggtggcggcgaggtgccactgctcgacctggtagcgtacggtggctatttattcgccgggctctcgctcgccgtcgtcgcgaggctcgtgtgggcgtactcgtattacgtgatgatgccgtggatgagcctgtgcatgggggtgttcctggtgaggacgatgaagagggtgctcttcacggagatgaggagcagcgagaggcactcgtcgcggcagcattacttcctcctcttcatggcgatagtgcagttccccctgttcttctggctcggcagcataggcgtgtgatacacagttttgtgcgtgttatgatatttagatgtgttgtagaaaaaaaacagtcggaggatggtctcaccagcttgtgctcatccatagtatgtgttcttgaggaaccttggatgtggtgctgtatagcttgggagctgttgttgtgaagttctacatgtgatccgtaatcatgttaacttagtccatgatgctattgttatcatttatttacagggagatgggtgctagttagtattgtggacatgttttctattcatcagtaatgaatagttgaggtacccaattttcccatattttatgttgcagagatcatcgatttctcgagcccgg

SEQ ID NO: 151994 - DNA, 738 bp, Zea mays
  Clone ID: MRT4577_7015C.1
ttttttttttttttttaagggaatatagattaattgtttaataagttgtgcttgtttgtttttaattgcattgttcgactacttaaaaaacagaaatatttatccaataaggacatgatgaattaatacagacaagaaaaaaaaagtaaccaaatcagaatttgatgacaaactaaaggaccgatacccgggcaatattcagccagggaatctatacacaaacaacaataaaggacaccgacgggccattttactagcagtgaacaacaatctactttttggcaaactgcgccttgatcctctgcacggtggcggcgtcgatcctgaacgccttggcgaggacctcgtcggtgaccgcgggggcggcgccgaagagcgagtcggcgacgcggacgaggccggggttctggctgctgaggccggcgaggccgacggcggggccggcgccgcagttgaactcgaagtggacgaggcccctggggaagacgaaggcgtcgccccggttgagcaccctggcgaagagcttgccgtcggtggcgaggaagccggcgtacatctggccctccacgacggtgagcacctcggtggcgcgcgggtgcgtgtgcggcgggttgacgccgcccggcgcgatgtcgaggcgcgccatggcgacgcccagcgagttgagcccaggcagcgcccgcgcgtccaccagcgtcaccttggagccgaacgcgttcccggtgtcgcccgcgtcct

SEQ ID NO: 151995 - DNA, 715 bp, Zea mays
  unsure (1)..(715): unsure at all n locations
  Clone ID: MRT4577_70160C.1
gcaacatagaaagcacaanagggagcgagacaagggcagaccaaaaatagngcctccttaggctcctaggncannctgcaagngctgctacggcgaccattttcccacaatgctcacaagctcctatagcttcccttcttcccccgtacctctcaccagcggtgtcttcggtatgtgaaaacgggggggggcaaccctataggatccagcaggcaatcgcagntggcatcttacctttatcacccttgttcctccaacaatcatgagccctattacagcagttacctttggtgcattgattggcacaaaacatcagggcacaacaactacaacaacttgagctagcaaaccttgctgcctactctcagcaacagcagcttcttccattaaaccaactagctgcattgaactctgcttgttatttgcaacaacaacaactaccattcaggcagctacctgctggctaccaccagcaatgtgttccattgaaccaactggcagcattgaactgtgctgcttatttacaggaggaacaactactaccattcaagcaggtagctggtgtggagccctgctacctgtttgatacaaccacagtaggtgccgttctaccaatacgcttggcctaactgttggatcccttttacaactgcaacaattgctgacattccaaccaacttggtttgacaaaaccagcagcggactaccaacaacc

SEQ ID NO: 151996 - DNA, 672 bp, Zea mays
  Clone ID: MRT4577_70161C.1
ggacctcagcggcgggatccgttccagagaatcgcgtgtcattcccaatcggctacgagtttcctcccaccgccgaccttcctctccttcacatcaaccgaacgattcatcccctccgccttcccccacaacagctccacctccaccaggaggtcgccgccgtcgcctcaccagatctgggacatgaaaaggggagcacgctgtgccaatcaatatacagatccacttcttgggaagcactcttagacagtgccgccctgcgactactggacaacaagattgtgcttcctggagatgcacgggtcgctgcagacccgtccaaggtcagccccctaagaccctctatcagctccaccgatgccatgagagcgctagaagccggaccccctatggctgcgaacagggccatggtagctgtcgagactcgagcatacaggcgccgactatgagcatgtacccatgagtcaacaaagctgggactacgccgctggtagcacctcaccaggaagatgcatacctcccttccgtggctacttgaaccagccatggatttgttgccttcgctccgtgcgtcgatgactacctcatgatccaatcgcggtagggcagtaaagttcacgctccgagcctctcgcatgcttgcgtgtaggtgaacactctatatctccgata

SEQ ID NO: 151997 - DNA, 176 bp, Zea mays
  Clone ID: MRT4577_70163C.1
ctattccaatctcgctttttattagtgtttttttgccattttggatgttgtcacgaggaacccccaaggtgaacccatagggggcatataaaggggcgaaaaatccggcgcaaatgatataaagggtctggggaaagaagacctttaccaaactgataggggaaggggcccccccc

SEQ ID NO: 151998 - DNA, 819 bp, Zea mays
  Clone ID: MRT4577_70164C.1
ttgcgggaaaatggtcacaagctcctatagcttctcttcttcccccatacctctcaccagcgttgtcttcagtatgtgaaaacccaattcttcaaccctacaggatccaacaggcaatcacagcaggcatcttacctttatcacccttgttcctccaacaatcatcagccctattacatcaattacctttggtgcatttattggcacaaaacatcagggcacaacaactacaacaactcgtgctagcaaaccttgctgcctacgctcagcaacagcagttacctttggtgcaattgttggcacaaaacatcagggcacaacaactacaacaactcgtgctagcaaaccttgctgcctactctcagcaacagcagtttctgccattcaaccaactagctgcattgaactctgctgcttatttgcaacaacaacaactactaccattcagccagctagctgctgcctaccaccagcaatttcttccattcaaccaactggcagcattgaactctcctgcttatgtacaacaacaactactaccattcagccagctagctgctgtgagccctgctgccttcttgacacagcaacagttgttgccgttctacctgcacgctgcgcctaacgttggcaccctcttacaactgcaacaattgctgccattcaaccaacatgctttgacaaacccaacagcgttctaccaacaacccatcattggtggtgccctcttttagattgcttatgagttatagttcaataataaagtttttttgctgatgtttgtggcttcccaaaaataagaaagtgcatttctagttt

SEQ ID NO: 151999 - DNA, 208 bp, Zea mays
  Clone ID: MRT4577_70165C.1
ctctgctgcgctgcctctggtgaccgtcgcatcctgaataggaggaggagggaagatctccctcatctccaaggaggatacatcatgatgccgcagctgctcagccgccggaggtcagcgtgtgctctatctccaactcaccatcggtaccaagacccccatgatggagacggagtcctccgctgctgaccgtctgccccgtatgaag

SEQ ID NO: 152000 - DNA, 174 bp, Zea mays
  unsure (1)..(174): unsure at all n locations
  Clone ID: MRT4577_70167C.1
aggacgtagtcggactcgctcagcccanntgccgcgacggcgccccgcagcagagtagcagatcagcggtggatgtgatggacgtcagcggtatggaggatgagacagtgagtggagacgtcagggagcaggacgacgacgacgacaaacgtgctcaactcagcgctgctgcga

SEQ ID NO: 152001 - DNA, 611 bp, Zea mays
  Clone ID: MRT4577_70168C.1
atgagctagcaaccttgctgcctactctcacaacagcagctccttccattaaccaactaggttcattgaactcgtgcttattatttgcaacaacatcactaccattcagcagctacctgctgcctacccccagcaatatctttcattcaaccaactagcagcattgaactctcctgcttatttacagaagcaacagctactaccattcagacagctagctggcgagagccctgctaccttcttgacacaacgcacagttgttgccgctctaccagcacgtcgcgcctaacgctggcaccctcttacaactgcaacaattgctgccattcaaccaacttgcttggacaaacccagcagggtgctaccatacaacccatcattggcggcgccctcttttagataacctatgagctatagctcactaatatagttacctatctcaacaacagttgcaacagtttccaccagcgctcagtcaacgggccctggggccccctagctccaacctacgacagcttcagcgagggtcatctagccgcttggctatgggctgtgcatagacgtacccggagcaacagtggttgccgcatccaatgccgcaccacatacga

SEQ ID NO: 152002 - DNA, 351 bp, Zea mays
  Clone ID: MRT4577_70169C.1
cccggggccggaattaaattccaaaggtggttcatatttactattaccggtggcaatctaaattaatcattacatgaatttcctcaaacaagcaggcccatgtgtttacatacaatggggggaacaggcccagtacaaccaaaccaatttttaagggatgtctggccccatttgttttcaacgaacaaaacacggatgcggggtagcaaattcttccccctccaaggggggaaaattttggggcaggcatccagccccttaaataaaaatggcatcgggatggccaaacccttgggtttatttgcatggggcgtgtttgttcaggtcctccatggccccgggggggtgcaa

SEQ ID NO: 152003 - DNA, 330 bp, Zea mays
  Clone ID: MRT4577_7016C.1
ttcgggaccacacctccagtcctccactgacaagccgccgccgctcttccacctacctctccccggcctcgcacccatggccacggctttgatggttgcagccaagctggacgagggacgcagccgtgtggaggccgagctcgtagaggcgctcgccaacctcgaggcgcagaaggaggaggctgtcaaggcgctcgacgcccagatcgcctcgctcagtgatgagatcgtcaagaaggtgctcccatccgcgtgatgaaaccaaaccggccctgccttatcctatgactatagttacatgaacatcataaattaatgataattttgaag

SEQ ID NO: 152004 - DNA, 613 bp, Zea mays
  Clone ID: MRT4577_70170C.1
cggagctcgagatccctagtaacggccggcagcgaggcggggaatacggccttagatatgtgcagaacgcggccttcttgttatcagacggttgacgtagttttttgttttcttctctttttcctaccttacgtgaattcaacagttcattttggaactgtcatccctccttaatcacgccttgtccctccaacaatgatcagccctattacagaatataccttaggtgctatgatcggcacaaaacatcacggcacaacaactactacaactagtgctcgcaaaccttgctgcctactctcagcaacagcagatccttccattcaaccaactatctgcattgaactctgcttcttatttgcagcaacagcaactaccatgcacccatctatctgctgcctacccccagcaatttcttccattcaaccaactgacaacattgaactctcctgcttatttacaggagcaacaactactaccattcagccagctagctggcgcgagccctgctaccttcttgacacaaccacagtagttgccgttctaccagcacgctgcgcctacagctggcacccttttacaactgcaacaattgctgccattcaaccaactt

SEQ ID NO: 152005 - DNA, 411 bp, Zea mays
  Clone ID: MRT4577_70171C.1
gttatagataaagagcaatcgttctccaacaatgcaagttacaatcttgtgcctgcttatgcttattgtgttttattagaggagctgaactcaagaccatgttcgcacaatgataacaagctgctatggcttacctttttccccacgcacctctaaccaactgggtcttcagcatgctataacccaatggctgtaaccctacagaagccaacagggaacggcatttggaatgttaccttatatcagcctggttcctgcaacaagcattagacctattacagaagttaccttggagggatttattggcacaaaacatcagggcacaacaactacaacatcttgtgctagcaaaccttgctgccttactctcagcaacagcagtttcttccattctaccaactagctgcattg

SEQ ID NO: 152006 - DNA, 490 bp, Zea mays
  Clone ID: MRT4577_70172C.1
accggttcggaattcccggctggacccacgcgtccggattgaggatcgggttgaggaggaatgttacagtgaggcttcagaaggagatgatgaggcagatgatgcttataggcagtaggaggccatgggaatgcagtgttgttagtggctcttctgcttgtagttccatttgtccctggtcaagtgttgcctggagaactggcagagaaatttggttgacatcgaacaatctgacttcgtgcggctcctgaccctggttggaagtgttcgcttcagctaaaacagctccagctgcggcctctctctgcagatcattgtagcatcagcagcgctgccaagggattagttgttgcatcctatgatgcaaccataatatgttcatgcagcaactcagttcagttgtactgtttgactcgagaaatgtaacacgctgtactgttaaaccaggtgatcctattggtgtctcggcgtcccaagttctgtgacactg

SEQ ID NO: 152007 - DNA, 202 bp, Zea mays
  Clone ID: MRT4577_70173C.1
cagatagccgccgagatgagaacttgagaagtcaggtgactacggtctcgtgagggatagtgagggaggacgcagtttgtactctgctgcgtgctttccgtatatcatgggattggaagacaccggatttctatcttggatctacgacaccaggagaaatggctgaccatcctaatccggagtcctgttttaggaggtcatt

SEQ ID NO: 152008 - DNA, 403 bp, Zea mays
  Clone ID: MRT4577_70174C.1
tagacccacgcgtccgcaactagcaacatagaaagcacaatagtgtaccaacaatggcagccaaaatattttgcctccttatgctccttggtctttctgcaagtgctgctacggcgaccattttcccacaatgctcacaagctcctatagcttcccttcttcccccgtacctctcaccagcggtgtcttcggtatgtgaaaacccaattcttcaaccctataggatccaacaagcaatcccaacttgcattctaactttattaaccttggttcctccaccattcataagccttataccagcagtacccttgggtgcattaatggccccaaacattaagggcccaccacctccaccacctgggctaaccaaccttggttgcttattttaagaaccagaagttct

SEQ ID NO: 152009 - DNA, 636 bp, Zea mays
  Clone ID: MRT4577_70176C.1
ggccgacggacccacaaaggcgagcatgaacagatgtgctcgcttatgctactggctctcttagcatgtgctagttaccgacaccatgttacccgtgaagctcacaagctactatgacttcccttcttcccccatacctgtcaccagaactgccttcagcgtggggcaacacagtactttaacacctacaggaaccaacggtgcacttcgcaagacgaatattacctttatcacccttgatcctgcaacaacacgacactcctattacaacagttacctttggagcattcggtggcacaaaaaattatggcacaacaactacaacaacttgcgctaggaaaccttgctgcatactctcagcaacatcagttacttccattcaaccaactggctgcattgaactctgctgcttatttgcaacaacaactaccattcatccagctagctgctgcctacccccagcaatttcttgcattcaatcaactggcagcattgaactctgctgcttatttacaacagcaacagctaccaccattcagccagctagctgatgtgagccctgctgccttcttgacacagcaacagttgttgccattctacctgcacgctgtgcctaacgctggtacctgcccgggc

SEQ ID NO: 152010 - DNA, 340 bp, Zea mays
  Clone ID: MRT4577_70177C.1
gggcgtggctggggaggaggccgagttaggccgacgagacgccggaggcaggcggagagccaagagaggcggcagcagtgccgcccgcagctcaggcaggcggagacgaagcaccgctaccaggcaaactacggcacgggcctccagcccataccgcagcagcagccgcaaagcggcgcaggtcgcgcggcagtcggcggcgcggagggcgcaacaatggatgcgtatgaggggcctgcagcagccgactccatgcccctacgctgctgacggcgccgccccccactgaagaaactatgagccgaaatacagcacctggctagctagctcggcgagaaaa

SEQ ID NO: 152011 - DNA, 228 bp, Zea mays
  Clone ID: MRT4577_70178C.1
caattcaccccacttccaactggctaaatttaaaacccgataaagaacattggcccaacaatttaaacccttacattttggttaaattctttttccccttttcctctttaaacaaaagggggtccaggttaaaaataaccccttttaaaggataccaataaaactagatcccccttgtgtttgggggccccagttacccccagaaaattagggatttttgacaaaaac

SEQ ID NO: 152012 - DNA, 197 bp, Zea mays
  Clone ID: MRT4577_70179C.1
accgtgaaaactcaattttatttgttattattcaaagggatacatgaataatacccggaaaattgtacatacgaaaccaaacaaacatgaagtacattatatatcctaaaaaacacaggaaacatctcacaacacagcgacagccacggaccattcagcatcagttaacctttcttccacgtccaaattggattggg

SEQ ID NO: 152013 - DNA, 157 bp, Zea mays
  Clone ID: MRT4577_7017C.1
tagagcatatcaccttcggcatcatgggcgatctgttcacccttcacgtccgggagaagatggtctcggcgatactgcggtacgagatcggctgattcggtgatgccagcgacactagcgccatgctgtactcgcggctcgagtctgacgcgacgct

SEQ ID NO: 152014 - DNA, 307 bp, Zea mays
  Clone ID: MRT4577_70180C.1
acggggaaatgggtaattaatactgtgagaaatcagttggtgaaccaagaaagctaggaccgatgaagacgatgcaacgaacaattgcatcattgcaagtgcagttcttggcctgtgggtgatagactgacagtctctcatgcatggcgttgtccattgcaatgcaacaagcgaagtctgcgaccggtttgccacggccggcttcggcgccaacctgatcacgtacctgacgcagcaactgcacctcccgctggtggaggcctcgaacacgctaaccaacttcagcggcacgtcctccttgacgccc

SEQ ID NO: 152015 - DNA, 366 bp, Zea mays
  Clone ID: MRT4577_70181C.1
acaacactcttggtttgggccccccaagggagcccagtttttcgttaggaataacacataacaaaatgggaaaggggctgcaccatactgggttccacaaaacctggttgacgcgacacgggtgttgttggccacaggctaaacccaagagttataacttgagcagaggggccttgacatcaaaagcacgccggggcatctacagacgagcccaaccatgctaaaccctttggagggggggtaactctgctgccaaactcagtgttacttggactccaagggccccacccattaagatcatcatttgcgcatgatgaggccgcgtccctccacccaggtgcaacactgaaagacccctcaagcccc

SEQ ID NO: 152016 - DNA, 349 bp, Zea mays
  unsure (1)..(349): unsure at all n locations
  Clone ID: MRT4577_70182C.1
gtcaaaaagaggggcaacccccnacccttttcaccagtagcgacaatggggcacacccacatagaggggagaagcatccattcaatgtgcggagcaagcacctcatgttctcatggtcagctcggtctgcgacaggcatggagcactgcggcacctcgaaaggatccgctcctacttccacgtcatcacgtaccaagaagatacagaacgatgactcgtcgtactcngactgaagaggatctcgaccatcatctacaacgacacccgcatagaggtcaagatctacctcgagaacgagatcctcgacaagtacacctagaccgagcacggataccgcaagatctacacc

SEQ ID NO: 152017 - DNA, 107 bp, Zea mays
  Clone ID: MRT4577_70183C.1
caatactctatactgacgtcgtattaacgcgtccgctagaggtacagcaccaaaaagatatgcaagagagataggggaccggagggcggctggccggtgctcaatac

SEQ ID NO: 152018 - DNA, 178 bp, Zea mays
  Clone ID: MRT4577_70184C.1
gatgagtttccctactgtgtgcaacttgtctctagggagaaagagaatgcctccagagaagctcttagaactgcccgttttagctgcaacaagagcattgaccaaatctgcaaagaaaagatagacttccaccttcggtttctcgttgcacccgttccatgtccttagcttcaacaac

SEQ ID NO: 152019 - DNA, 269 bp, Zea mays
  Clone ID: MRT4577_70185C.1
ttcggtcacccgtcccgaaactgttcgttcctgcgatatgatggacacccaaggcgcactacttgcccctgggtcaagacatctggaagcccggcaaggaacttcatcatggccgcaacctgacgcctttcagcactcaacgtgcacgctatgtcaggtatacacaggtgtacaacaaaaacgcaatccggtcagatatttcggccaggtgaaagaaatccagaacgcttccaacctttcaggttatcacatctgaggcagcgcaaggg

SEQ ID NO: 152020 - DNA, 362 bp, Zea mays
  Clone ID: MRT4577_70186C.1
atgttgcctcatctttaatgtaccgcaaggcgtcagcaatattaggagaaaacccctaaaaatacagccaattctatgtttccaaatctcagcagtcagggttttggagctgagctttatgttggcagatgtttctgctgacattaatttaagacacaaatgtgagattacaggcaataaggccagttgaagctattgatggaatgtacataaatgtgtctattgtgcaaataaatagtactaatattcagttgcgatgaatgttttctctatctgcttgtttacaatggttaacataggcttcacagttagtgatgcggtaagtaaaatagttgataataatttatgaacacagaagtatg

SEQ ID NO: 152021 - DNA, 752 bp, Zea mays
  Clone ID: MRT4577_70187C.1
tttccgctcggttggtcgtcgtgtcgactgtttcgtctccatccgcctctcgtccccttttgctccatcgaaggtccctcgcgatctcgcctcgagtagctagtgcctcgcgcgccgggggcgactgcacgcgcggtcagtcagtcttcggcgtgcggggcgcgcgcgagatctcctcagaggtaggggagaaaatcggtgagggtcggcgggcctgatgggcggggcggtctccggtggcgcggcggttggggatgcggcgggggcggcaacatacccggtggttctcaacgtgtacgacctgacgccggtcaacaactacctccactggggcgggcttggcatctcccactctgccgtcgaaggcgccttttgcaactgccttctaccagaaggcttgcggcttgagtcaactgaaacaaagcatcttggagactgtcgtttctcagatggttccaataccaccagcaacgataactctgacgaagatgaattggaagataaacacctgcttccgactacttctgttggtgaagacacaattgtaaaagaaattcacagatgaatttctggtgaagccttgcagtgatttctctatgtattctaaaatctaatgggtttcaatactcattgtgcagcttgtcgttcattatgtatattgtcattgtattttaaaatgtcatgtgctctttctgttgtgctctgaaatttgtgtacatttggtgggaagtctgtatttatgggtgagttca

SEQ ID NO: 152022 - DNA, 1342 bp, Zea mays
  Clone ID: MRT4577_70188C.1
acaatatacataagaacgacaagctgcacaatgagtattgaaacccattacatttagaatacatagagaaatcactgcaaggcttcaccagaaattgatttgaccccttttagagcttttgatgtctttgggttaaaatttggaaatcaagtcaagagtgcttctacataagaatttttattgtctctcattcatccacctattcaatcattcaacaagtgaaatgaactcaaccataaatacagactacccaccaaatgtacacaaaatttcagagcacaacagaaagagcacatgacattttaaaatacaatgacaatatacataatgaacgacaagctgcacaatgagtattgaaacccattacattttagaatacatagagaaatcactgcaaggcttcaccagaaattcatctgtgaatttcttttacaattgtgtcttcaccaacagaagtagtcggaagcaggtgtttatcttccaattcatcttcgtcagagttatcgttgctggtggtattggaaccatctgagaaacgacagtctccaagatgctttgtttcagttgactcaagccgcaagccttctggtagaaggcaattgcaaaaggcgcctagccttgcaagtcgattgacccaaccaggaattgattttcctgttaatctggtgctaagatcatctgtaaagtggttacagttcttggaaatgaggtggtaggtatctccatggtattctgaggccatcctctgaatgaattctcgaaattccaagggattcagagttgtgtggcctatgaaaaccgtacatctgtatatgaaccctgggcagctctttggttccacctcaaaaactccactcgatgggtgatcatgtgctccaaaactgtactccgatccatgaacttcgacggcagagtggaagatgccaagcccgccccagtggaggtagttgttgaccggcgtcaggtcgtacacgttgagaaccaccgggtaagttgccgcccccgccgcatccccaaccgccgcgccaccggagaccgccccgcccatcagggcccgccgaccctcaccgattttctcccctacctctgaggagatctcgcgcgcgccccgcacgccgaagactgactgaccgcgcgcgcagtcgcccccggcgcgcgaggcactagctactcgaggcgagatcgcgagggaccttcgatggagcagaaggggacgagaggcggatggagacgaaccagtcgacacgacgaccaaccgagcggatcgagagcgtggccgggagaggttcacggtacattgactgaacggtgggatcaggagcccggccggcctcgagggtcc

SEQ ID NO: 152023 - DNA, 1401 bp, Zea mays
  Clone ID: MRT4577_70189C.1
tggttccacctcaagaactccactcgatgggtgatcatgtgctccaaaactgtactccgatccatgatcttcgacggcagagtggaagatgccaagcgcccgccagtataggtagttttttttttttttttcgtcgacacaaaacaaagatgcattcataataataactgaaaactccatgttgcatcttacttctgaatgcaaaaactcaactctattcacaggctcttatccatgaaacaccagatctccagctaaatttactagacacatacatcataaggtaaatatgcggggacctcacttatatacatctcactactcactgcaattgtgcagtttcgattgccagtcagaagggcaaaaggcaactctaatcaggctagcttaaatgcactacttaatatcctgcacaccaccacggtgattcacaaggagcgagcggtcggtcggtccaagggcaaaatcaggaacataccaacaaaatgctcagacaaaggtaactgcatagtgggtctcggagttgccacaggcgaaaccttcaatccttacttttgggctgctgctaacgccgcaagatggcgagcctacttcaactcgtactgctggcattttgccataggagctccctcctagaggagaaaaggatggcagtcttttaccaaactgtggatcatggataacagggttgtcagcgcgtatcggaggtgagccgcataagaagcccacctggctgctcgaatctccatccgagtcattcttactgaggataagatcaagtatatcgcaagtggagtccgatctgtacggcggaaatgcaccgttcatcttggggctggctttgttcagggtttccacagcggtgaggggaatccgggtggcgcggcgaggctgggggcagatgacctccgcccgggggcggaggaggcgcatccatctgccagaacctggacctcctctcgggcattgcctcggccctcgagatcggctgtcccacatagcagtgctccatgccttggacgggtgggaggagagacgagaggagcagcagccacgcggacggaaagggccctcgatccctaaggctgaggcgagcgtggcgtccacgcgccacctctctgcgccgctcgctcaggtgtggctggcgccgttggttcgccggaagaatcgccgacgcgaggcgaggcgacgcagcgcagccacacgccccggcccggcccggtccgagccgatccgctgccttccgattcggattaggggccggccgcactagctactcgaggcgagatcgcgagggaccttcgatggagcagaagggcacgagaggcggatggagacgaaccagtcgacacgacgaccaaccgagcggatcgagagcgtgttatgcgtggtcgaaagtgt

SEQ ID NO: 152024 - DNA, 254 bp, Zea mays
  Clone ID: MRT4577_7018C.1
gtcttcgccgcagagtccgtgactccgatctcgcgttcacagcagcgcacatcttctttccgacacccggctcgatcctcgctctcctctccgtcgcttcagtcatggcaggaatggcacctgagggttctcagttcgatgctaagcactatggttctaagatgcaggagctgctgatcatcggtgagactgatgaattcttcacttcatgtggtgaagttttggagagcttgactgatatgggcctccaagag

SEQ ID NO: 152025 - DNA, 480 bp, Zea mays
  Clone ID: MRT4577_70191C.1
cgagtgcacaagcttttttttttttttttttttattttttaaagaattttttttttgattttaactcatatgcaatcaaaaaaaggcaccaacagagacgggttgttgggagaacgccgttgggttcgccaaaacaagttggttgggggggggaaattgtaacagatgaaagagggtgccagcgttaggcgcagcgtgctggaagaacggcaacaactgcggctgtgtcaagaaggtagcagggctcacaccagctagctggctgaatggtggtagctgatgctgctgcaaataagcaggagagttcaatgctgccagtcggttgaatggaagaaattgctgggggtaggcaacaggtagctggctgaatggtagttgttgttgctgcaaataacaagcacagttcaaggcagctagtcggttgaatggaagaaactgctgttgctgacactaggcaacaaggattgctagcacaagttg

SEQ ID NO: 152026 - DNA, 3947 bp, Zea mays
  Clone ID: MRT4577_70192C.1
aaccaaccatcgtctactcggcggctgggctagcaccctccctaccaccatggcggccgtcgtgcctccgcccgacaacctggacccgcagccggctactcccccagccgccgctccttccgccacgctcaccccgcctcccgccgccacctccaccccaccaacccccttgacgccgggccccgcggcgcctagcccaaaccctaacctaccccctgcccctgcccctgcccctgccccccgcccccgcttccacgcctccggcggcagtcgcgccaccgatgcccccagctccgatctccttcgcttctaccttccgtccactcggtgccccagcgccaccgccgccgtaccaggtcccgcagtacgtcgcggtgccggcgaacccgggctacccgatgcagccgccgggcgtccccgtcgttatgcctccgggcgccgtgcggctgccggccatgtacgggccgccccagccgggagtatacatgccgcagcagggcgctgcgatcccccatcccgcggtggtcgtgccagccattactccccacaacaagaggtgccggctcatgtttgattctgcagctctagatcgtttgctccctcactgagtgtgatgcttcagctctgggttgttccaaaaacttgaagaggtagaatgattccgtagagtttagatttcgaatgccgaatatatctgtgttttttttgttgttacatatagaatgctttgttgatgagaagcgtatagtaatgacatatttgcctgagctcttgtaaccggagaagattatgcagatagaataagggaggaagaggaactcacataaccaaggcaagtgggttatcctgtccaagaggaagaaaggtaaggccagctttgcttagctcccttttatttgagcaagatattgcttctgtcaatgttcactctggtatttgtttatggctatgggtatcttctgcttacacatggccacattctctgattctatatctgttatgaggtttcatttgttcactatatgatttacttgtaggtatacttactgatgtggttgcataggtgtcatttgtctctctctgcaggaatgtctcgttatcctgcaccgtatcctatgattcgtcctggttttgttccacgtccaatgccgccgcctggtgttgtgccaattcaacgaccaacaataatttctgggatccgggctattcctcctttggtagccccaactgcccggccacctgctccagctgttaagctggcagataaaccgccaaccgcagtttatgttgggaagatcgccccaacagtggacagtgatttccttctttcacttcttcggctttgtggatctgtcaagagttggaagcgtgcccaagatcctagtaatggaaaacctaaaggttttgggttttgtgaatttgaatctgctgaaggcatccttcgtgcgacacggcttctcaacaaattgagcattgatggtcaggaactggtgattaatataaatgatgccaccaaggaatacctgaagaaacatgttgagggaaagaagagagcacaagagaaggaaaaagaaacagaagatgcaagcggggatggaactacagctgttgctgaaaatgaatcatcaaaacctgtccctgatgaattggatgagacaggagatgctggagataagtacagggaagacaacactgataaatttgggattgttactgacgaagactctcaaactgacaaagatgtcgcagaaaaaataagcaatatgattgaggagtggttaaagactagaccgccacccccaccttcaccagttcaaccatctgctgatagctctggcgtagataaggcaaaaaatgattctgatgataagaatgctgctgatgctgataaaagggcagctaatgaaactgagagatctgaaactgcctctcctgataagaggaaggatagagagcatgataaggacaaacgggacaaagatcttgaaaggcatgaccgtgaacgtgaaagagtacggagggatagagagaaggatcataagcatagagaagctgataggctctacagggatcgccttaaggagtgggaatctagggaaagagagagagaatatcagaggtatagtgaaaaggagaaagaaagagatagagatcataaccgcagaagggagatcctgaagcaggaagatgagagcgatgacgaggataataggaaaaggaaacgaaggagtattagctcacttgaagataggaagaggaggaggcaacgtgaaaaggaggaagatttggcagataaaataagggaggaggaggaaattgcagaagcaaggaggctggctgtagagttgcaacggcaagcagatgaagcagctgcggcggcggctgcagccgccgaagagtctgcatcacttatggagattgatggtgatgacgaaaaggaaacagatgcacaaaacaagtcggctgttgtggaagctgataacatctcgagctttgctaatggtgttggtgctggtcgacttagtaagggaaataatggtgaggaaacatgtatgacacctggtcaaaccgcagatactaagcaaaacaacaatgttccagcaaagaaactgggttttggtttgattggcttgggcaaaaggacatctgttccatcagtttttgctgtagaggatgacgaaaataatgttgataaaagcataagacctctagtacctatcgattactccactgaagaattacaagctgtacatgctaattcttctactggggcaaatgtcacagcagctgccgagtttgccaagcgcatctcagtttctaattcaaaggaagagaaggctgaagctgagaaggataggaataggagatccagtgaagctcgtcctaatgatgagcgaagagagaagctacatgatcgcgagaaggataagcccaagtcagagaacaagaagattctggatgcaaagcaactaattgatatgatcccaaggacaaaggaagagctttttgcctatgatataaactgggcgatatatgacaagcatgagttgcaagagagaatgaggccttggatttcaaaaaagataattgaatttcttggcgaggaggaatcaactttggtggactatattgtttcctgcaccaaagaccatgttcaggctgaaaagatgctagatcttctacagtcgattttcgatgttgaggccgagatgtttgtcctcaagatgtggaggatgcttatatttgagatcaagaaagtcgaatctggactatcaggaagagcaaagtcatgaagcgaagcctgttaccctgtatgacctctgatctgcattactcatcaactgtgaccacacttgtaaggtcatactgcactacaagtatcaaaaaccatttttagtgacagagttgatggatctttttacttgtttcttgtacaaatgcatacgagagttaatgagatactgtgcgtaatatttttattttgatagattgcataactgtgtttggcacagttcacacgagtcaactgcctacttttgcttaacttgttctctggtgaacgaagaatgtcaatgctggcagtagccacaagtgatccctaatcatacatggtgtgtgtgcaaaaaaaaaaaaaaaaaaggcccctaatggtgaagtcaaattcagtaaatcgtattattaacatggaagctgaatagtggttttttctttcatatgttctcaagctttttttcactacttagggggtgttttaatgcactaaagctaatagtcagttcgttaaaaaattgatagcgaaatcacctagctaactattagctaattggctaaaaatagctatagtttaatcattaagctaggtagtagcctaaaaaattgacaccgagaatagctagctaactattacctaatctgctaaaaatagctatagtttaattattacgggg

SEQ ID NO: 152027 - DNA, 573 bp, Zea mays
  unsure (1)..(573): unsure at all n locations
  Clone ID: MRT4577_70193C.1
aacaacgttcatagcattcaaatagcgcatcctgggtaaaaggcgagcgagcagaaggaaagaactctgatgacacgagggaggcagctacctccatgatgacaaccatcaagaccatgacaagcgcgattacgagggactactacaaaggggatgacgatgacgacgtggacgcgcaagaagacatgacgacgaccaggatgacgaggaagatcatgatcaagactcggtgcagcccccaaacaacaggtagatataagatcttgcgctggtctacttaccgaccgctgagctctgccagattctgcgccttatgctcccatttgaactctcccattcaaagttaagaatgatccacacgttgagcactacgcttggactcggacgatctttatgatttgatgcaattagggacaactctcatgtaactgttgcttgcttctgaggagtccaacagatgcttccctaacataattccacttgagtgataaaagccttcgccgcaactctcgttcaaacagatttacggnctgggcgcgctgtttacaggatctatcatacgtactcgtgcat

SEQ ID NO: 152028 - DNA, 292 bp, Zea mays
  Clone ID: MRT4577_70194C.1
taaaccctagcacacgcaccatggcggcgcagcagaagatccggtggggggagctggaggaggacgatggcggggacctcgatttcctcctcccgccccgcgtcgtggtcggacccgactagaacggctctacgaaggtcatcgagtaccgtttctacgacgacggccacacggtttgggttactaccactacctgcgttcgtatactagctcgggcgctcctttaccgtattgccatcttgcgccttctgtggtctaagtttgttgtcgcccttaaggaggtcgtgttctt

SEQ ID NO: 152029 - DNA, 488 bp, Zea mays
  Clone ID: MRT4577_70197C.1
gttagattctgctacaggtattctagtataacacgatggcactccgctaccgcgcccaaaatggggacggtgatttccggggtgggacgcaagtccactgttagtgttctctgcttttccatttggtttttgggcaacctattacttttaacctttccatttgttgttagtgtacctttgaactaccagggcatagggtacctgagggcttgttccgataaggctagtttggaaactaaaattcccttcgggattggagaaaaaattagttcatttacaccttaatcccctccaatcctagttcatttacacctttgggatttgaggttcccaaaatagcccttaaggtggattgaaggtttagaggctgggttctagttaaaattgaatagaaagatatataatcccactcaactccctctgatcctcaattcctcatgcaactgaacaaggccagacaatgtcttttaccacccacataccacaga

SEQ ID NO: 152030 - DNA, 114 bp, Zea mays
  Clone ID: MRT4577_70198C.1
taccctcgggccgtccggtgaagacgagctgccttgggcaaagtacagaagcttatgaactttatcacagagagagtatggaattgtaaatggagaagtggaggtggatggtgt

SEQ ID NO: 152031 - DNA, 616 bp, Zea mays
  Clone ID: MRT4577_70199C.1
tgaatggtagtagttgttgttgttgtacataagcatgagagttcaatgctgccagttggttgaatggaagaaattgccgggggtaggcagcagctagctgttggttgaatggcagaaactgttgttgctgagagtaggcagcaaggtttgctagcacgagttgttgtagttgttgtgctctgatgttttgtgccaacaaatgcaccaaaggtaactgttgttgctgagagtaggcagcaaggtttgctagcacgagttgttgtagttgttgtgccctgatgttttgtgccaacaaatgcaccaaaggtaactgttgtaatagggctgatgattgttggaggaacaagggtgataaaggtaagatgcctgctgcgattgcctgttggatcctgtagggtagaagaattggattttcacatactgaagacatcgctggtgagaggtatgggggaagaagggaagctataggagcttgtgagcattgcgggaaaatgctcgccgtagcagcacttgcagaaagaccaaggagcataatgaggcaaaatattttggctgccattattggtacaatattgtgctttctatattgctagttggtctcaataatatgtgcgat

SEQ ID NO: 152032 - DNA, 593 bp, Zea mays
  Clone ID: MRT4577_7019C.1
ggcggcccttggcgcagcagctcccgcggctgctggcaacggcggcggcggcggcggcggtggcagctgcgccgctcccggcgctggcggagcagatggagaaggccgcactgtttgacttcaacctgacgctcccggcgatcgcgaccgagttcctgctgctcatggtggcgctggacaagctctacttcacgccgctaggcaagttcatggatgagcgggacgccaagatccgcggtgagctcggcgatgtcagccgtgtggaggccgagctcgtagaggcgctcgccaacctcgaggcgcagaaggaggaggctgttaaggcgctcgacgcccagatcgcctcgctcagtgatgagatcgtcaagaaggtgctcccatccgcgtgatgaaaccaaaccggccctgccttatcctacgactatagttacatgaacatcataaattaatgataattttgaagaaattggccgatgactccgacactgtactcatgaaagattattggatgggttgtgtccaccgcctgtgttgggtgtggattgttgtagactcgcagtgatctttctcgataagcttgtacagttcagtac

SEQ ID NO: 152033 - DNA, 1215 bp, Zea mays
  unsure (1)..(1215): unsure at all n locations
  Clone ID: MRT4577_701C.1
cccgggagccaagcaaataagacgacttgtttcattgattcttcaagagatcgagcttcttttgcaccacaaggtcgaggatgtcttgcagctgcggatcaagctgcggctgcggctcaagctgcaagtgcggcaagaagtaccctgacctggaggagacgagcaccgccgcgcagcccaccgtcgtcctcggggtggccccggagaagaaggccgcgcccgagttcgtcgaggccgcggcggagtccggcgaggccgcccacggctgcagctgcggtagcggctgcaagtgcgacccctgcaactgctgatcacatcgatcgacgaccatggatatgattattatctatctagcttgtggtggtggttgaacaataataagcgaggccgagctggctgccatacataggtattgtgtggtgtgtgtgtgagagagagagaaacagagttcttcagtttgctatctctctctgcatgtttggcgtcagtctttgtgctcatgtacgtgtgtctacatgcatgttggttgatccgattgcgtctgctgtaaccatatattaattggtccacgatgatatgatttgatactatatatataaaaaaacggagaagcatactattagacataccggtatatattattgttcttagtcatcgcacaagactcttgtcaacaagaccaacaacaggatgaggactaccgtgcatgctgcgctttgcattgtgcttgtgataatgtcttcaacactgtcatcttgcgaggacgatgagaaggtatctatcgcatgtgacacaggatgcaatgccgcgatctcccgcctcaaatgcttcctgatggcctattctgaagggaaagtgttggtcagcagcaactgcgaaacgccgaccaggtgcggctgcgtgtttcgtcacaaacaagatgcagcccttatcgccggcgacgttggcaacaaaaagggatactgatggcagacgtgtacttcttggttgaataatatatactgctagaattaatatgggcaccaacaacgaaatatctataatgttattcttcagtgtaatgcttccagcatgttctgttttagtataactaaatatctatctttcccccccaaaaaaaaaaaaaaaaaaaaaaaaaaaaaaaaaaaaaaaaaaaaaaaaaaaggaaaggcngnnactatagtatacaatcttaccttaccctacccttccatg

SEQ ID NO: 152034 - DNA, 940 bp, Zea mays
  Clone ID: MRT4577_70200C.1
aattttttttttgcacataagaatctagaaatgtactttcttatttctgggaagccacaaacatcatcaaaaaaactttattattgaactataactcataagcaatctaaaagagggcaccaccaatgatgggttgttggtagaacgctgctgggtttgtcaaagcaagttggttgaatggcagcaattgttgcagttgtaagagggtgccaacgttaggcgcagcgtgcaggtagaacgacaacaattgttgctgtgtcaagaaggcagcagggctcacagcagctagctggctgaatggtagtagttgttgctgctgtacataggcaggagagttcaatgctgctagttggttgaatggaagaaattgctgggggtaggcagcagctggctggctgaatggtagtactagttgttgttgcaaataagcagcagagttcaatgcagctagttggttgaatggcagaaactgttgttgctgagagtaggcagcaaggtttgctagcacgagttgttgtagttgttgtgccctgatgttttgtgccaacaaatgcaccaaaggtaactgttgttgctgagagtaggcagcaaggtttgctagcacgagttgttgtgccctgatgttttgtgccaataaatgcaccaaaggtaactgctgtaatagggctgatgattgttggaggaacaagggtgataaaggtaagatgcctgatgcaattgcatgttggatcctgtagggttgaagaattgggttttcacatactgaagacaacactggtgagaggtacgggggaagaagggaagctataggagcttgtgagcattgcgggaaaatggtcgccgtagcagcacttgcagaaagaccaaggagcataaggaggcaaaatattttggctgccattgttggtacactattgtgctttctatgttgctagttggt

SEQ ID NO: 152035 - DNA, 342 bp, Zea mays
  Clone ID: MRT4577_70201C.1
atggcccagacttcgccgccgacggatgcgtgtggatggaagggcggcgcggttttgcggccgttgcagctgtgctcggctgcgtcctcgcggcggagactgcgggcgttgctggcgcggcggtgcagctttgcggacgttgcagctttgggcactgggggcgcggctgatttgcgcgcggccgcagccgatttggggaccgggggtgctgcggctgcgaggacggcggcggggaatgcgggcgcgtggaggggaatgctggcgcgtggaggggactgcgggcgcggaacgcgcgatggcagaacatttgctactgtgcacgcctacaatgcaaacatatag

SEQ ID NO: 152036 - DNA, 215 bp, Zea mays
  Clone ID: MRT4577_70205C.1
acaaaacggcttggaaaggggaattctaccattcgtagcttgtaaacgccatatcatttcatgataattttggttagtgctttctttctgtatcttcaccgtgtctttgactctttgctttcttggttctacctagtataaattgctcatctttacggttcgcagtgcccgcgatttactctttttcgtatttatcaagcatgggaaaaagtagt

SEQ ID NO: 152037 - DNA, 492 bp, Zea mays
  Clone ID: MRT4577_70206C.1
cccggcgtacccacacgcgtccgccatcataaaacgcacattactccaccatctttgccacccaacatattctgcctccttattgtccatgttcaatctgcaagaggctctctgctaaccatttacccacaatgctcacaagctcctatagctttcctacccaccccgcacctgtcaccaacggcgtctacggtcatgtgaaaacccaattcttcaaccctacaggatccaacaggcaatcgcagctggcatcttacctttatcaccattgatcctccaacaatcatcagccctatcacagctgttacactttgtgcatttattggcacaaaacatcacggcacaacaactacaacaacttgtgctagcacaccttggtgactactctcagcaacaacagctacttccatttaaccaactaactgcattgaacttctgcatattatttgcaacaacaacaactaccattcagccaactatctgctgcctacc

SEQ ID NO: 152038 - DNA, 570 bp, Zea mays
  unsure (1)..(570): unsure at all n locations
  Clone ID: MRT4577_70207C.1
ggttacatccgtatggagaggaacgtcaatgcccccactggnaagtgcgggattgctatgatggcatcctaccctaccaagaagggcgcaaaccctcccaagccgtctccaacccctccaacgccgccgcctcccccggttgccccggacaatgtctgcgatgagaacttctcctgcgcagcgggcagcacctgttgctgtgcgtttggtttcaggaacgtctgcttggtctggggttgctgtccgatcgaaggtgccacctgctgcaaggaccacgccagctgctgcccgccgggttaccctgtgtgcaacgtcagagccggaacttgctcagtgagcaagaacagcccgctgagcgtgaaggccttgaagcgcaccctcgccaagctgaacagcgcatgagctcgtccagacatcagggatcatcgatctggagaggaatgggaccgcccggagcttttcatagataacattatattgtatctaagtattacttggcgtcccatgaatctgttgtaaatatcaagctataatttctactatcttcgttctcgaatttttattgcccgc

SEQ ID NO: 152039 - DNA, 576 bp, Zea mays
  Clone ID: MRT4577_70208C.1
aaaaaaaaaaaaaaaaaaaaaaaaaaaaaaaaaaaaaaaaaaaaaaaaaaaaaaaaaaaaaaaaaaaaaaaaaaaaaaaaaaaaaaaaaaaaagaaaaaaaaaaaaaaaaaaaaaaaaaaaaaggttcccttgccgggggggcccgtttaaaaggggcaattttccacccccttgcggggccgtttttaggggtcccggcctgggccccaagttgggggtattaagggccaaagttgttccctggggaaaattgttttccgttcaaatttccccccaaattccaaccgggaagcttaaagggaaaacccggggggccctaagggggggcctacctcaaattaattgggtgggcccaactgccctttttcaagggggaaaacctgtgggcccacttgttttaataaatggcccaacccccggggggggggggttgggttttggggcctttttccctttcctggttaattgactcgttgccctggggggttcggttggggggaggggtttaatttccttaaaggggggaaatccggttttccacaaaatcgggggataccccaggaaaaaacttgtga

SEQ ID NO: 152040 - DNA, 392 bp, Zea mays
  Clone ID: MRT4577_70209C.1
aacccaaacttaaaagggttttgttaaccaaaaaaaagcgggcggggggtaaacctgcccccccctattgaaggggggggcctgaaaagaaacgggaaaaaaaaagggctgggggcagggggtccaattccacccaaaaacaactagggtttacgggaaaaaaggaccccgggaaactgggtttattgggattaacggggtttaacaagggacaaacagccccaaaatggggcccccggggccccgttccctaagaaatcccaaacctttgggggggaagcccaacccctgggccaaccttcagtttttaaagtttatcaggggcaaaaaaaaaccccccccatttttttaccccccaaaaaaagttttttacattttaacaaagggcccgg

SEQ ID NO: 152041 - DNA, 776 bp, Zea mays
  Clone ID: MRT4577_7020C.1
tcctccactgactaacaaacaacgctcttccacctacctctccccggcctcgcacccatggccacggctttgatgcttgcagccaccacctcctgctccccgggccgcgccgcgccgcgcctgaagccggtggcctcctcctcctccagcagatggagaaggccgcactgtttgacttcaacctgacgctcccggcgatcgcgaccgagttcctgctgctcatggtggcgctggacaagctctacttcacgccgctaggcaagttcatggatgagcgggacgccaagatccgcggtgagctcggcgatgtcaagggcgcctccgaggaggtgaagcagctggaggaccaggcggcggccatcatgaaggcggcgcgcgccgagatcgcggcggcgcttaacaagatgaagaaggagaccaccgcggagctggaggccaagctggacgagggacgcagccgtgtggaggccgagctcgtagaggcgctcgccaacctcgaggcgcagaaggaggaggctgtcaaggcgctcgacgcccagatcgcctcgctcagtgatgagatcgtcaagaaggtgctcccatccgcgtgatgaaaccaaaccggccctgccttatcctacgactatagttacatgaacatcataaattaatgataattttgaagaaattggccgatgactccgacactttactcatgaaagattattggatgggttgtgtccaccgcctgtgttgggcgtggattgttgtagacttgcaaaaaaaaaaaaaaaaaa

SEQ ID NO: 152042 - DNA, 1759 bp, Zea mays
  Clone ID: MRT4577_70210C.1
ttgggtacctcgaggccggccgggggacacaccgaccgaaccgaaaaaaacagagaatccaaaagaaaggaacagggaggtggggaaaagcgcagggacaaggaaaaggaaagggacgcccgtctcgtcacgtcctccacccccccccgccgccatggctgccctgggcctcctgctcctcctcctcgccgtcgtcggtgccgccaacgccgcggcgcccggcggcagaatgtccatcatctcctacaacgaggagcacgccgcgcgcgggctggagcggacggagccggaggcccggacgctgtacgagctctggctcgccgagcacggccgcgcctacaacgcgctcggcgagcgcgaccgccgcttccgcgtgttctgggacaacctccgcttcgtcgacgcgcacaacgagcgcgccgcggagcacggcttccgcctcggcatgaaccagttcgccgacctcaccaacgacgagttccgcgccgcgtacctcggcgccaggatccccgccgcccggagaaggggaaccgccgtgggggagaggtaccgccacggcggtggcgccgaggagctgccggagagcgtcgactggaagggagaaaggcgccgttgcgcccgtcaagaaccaggggcagtgcggaagttgctgggctttctctgcagtaagctcagtagaaagcgttaaccaaattgttactgggtgagatggtgaccttgtccgagcaggagcttgtagagtgctcgactgatggagggaacagcggctgcaatggtgggcttatggatgccgcatttgattttatcataaagaacgggggcattgatactgaaagagactacccttacaaagctgtggatgggaagtgtgacatcaacagggaaaatgccaaggttgtgagcatcgatggctttgaagatgtgcctgaaaacgacgagaaatcattgcagaaggcagttgctcaccagcccgtcagcgttgccattgaggctggtggccgggagttccagctgtacaaagcgggtgtctttagtggaacttgcaccacaaatcttgaccacggtgtcgtcgctgtcggctacggcaccgaaaatgggaaggactactggattgtccgcaactcttggggtgcaaagtggggcgaggatggttacatccgtatggagagcggcgtcaatgccaccactgggaagtgcgggattgctatgatggcatcctaccctaccaagaagggcgcaaaccctcccaagccgtctccaacccctccaacgccgccgcctcccccggttgcccctgacaatgtctgcgatgagaacttctcctgcgcagcgggcagcacctgctgctgtgcgtttggtttcaggaacgtctgcttggtctggggttgctgtccgatggaaggtgccacctgctgcaaggaccacgccagctgctgcccgccgggttaccctgtgtgcaacgtcagagccggaacttgctcagtgagcaagaacagcccgctgagcgtgaaggccttgaagcgcaccctcgccaagctgaacagcgcatgagctcgtccagacatcagggatcatcgatctggagaggaatgggaccaccgcccggagcttttcagactctgcgtcctgatacaagctttcatagataacattatattgtatctaagtattacttggcgtcccatgaatccgttgtaaatatcaagctataatttctactatcttcgttctcgaaaaaaaaaaaaaaaaaggggcggcc

SEQ ID NO: 152043 - DNA, 336 bp, Zea mays
  Clone ID: MRT4577_70211C.1
tcgttcactgcatcttagcgtctactggtgtggagtgacaagtggagggggtagctgcagctgtatgcaaatgcaaaaatattacttccatcgttctacaaatccacccttccaagcttaagttatttctagagaatgtgactaaatagcctcttgttcttgcattacatacattaaactgtcttctcctttttaaaaaaatcaatataatataaaaaaaatttaattattataaaaaataaaaaaaaaaaaaaaatcttttaaataaattaaaaaggccgccccttttaaaaatacccaattttacttccccttccttccaactttaaaactttt

SEQ ID NO: 152044 - DNA, 446 bp, Zea mays
  unsure (1)..(446): unsure at all n locations
  Clone ID: MRT4577_70212C.1
ttcttttcccnannnnnnnnnntttttgtgttggtttttttttttttttttttaaagggaggggggccccggccccatggaaccccacattattaatatgcttccacagttcacaggtcaccaaaaaaattaaaaaccgggcccctttttaaaaccctttcctgatcttaaagggaaaactattccccgatccagggtttttatgcagcacaaaaaaccatagctgggcccgcaaagaccaaggccgtccctaattttggccgggaaaggacccccctaatttaaggggggaacccccctcgaacaataagcctaattctttgggggcccccccacagaagggccccattatccctggcaaaaccacagcatggttaaaaccattcctggctaggaaaattttcgtccaaaggcgagggaatcatctaacccctgtggggggcagt

SEQ ID NO: 152045 - DNA, 301 bp, Zea mays
  Clone ID: MRT4577_70213C.1
gtattgttggtgctgaaaatttaccttaggatcaaaagcatcagactctgatgaagactatctcagctgttgcgaagtatgaccatgtctatacctgttacacaaatagttgcgactcagatacaatagtaatctcatgagagctataatgttatctgaattgcagtgtgaaatctatacgtacctgttatccacaagatatttctccaacagcagccaacagaacatcaaggattgagatgatttttgctaataagcttcattctattgtggagtattcagctgttgaagatgctgaaaa

SEQ ID NO: 152046 - DNA, 648 bp, Zea mays
  Clone ID: MRT4577_70214C.1
ccggccggggacctgcagctcaccatctaccagcgactcagcgagcgagagcagcacacacgcagctagctaggagcagcagcagcagcggcgatggcggcctccatgatctcctcgtcagctctggcggtggcgcctcagggcctgtcgcccctcggtcgtcgagcctcctgcttggtcgtcgagtgctccaagaagaagatcaagaccgacaagccctacgggattgggggtggtctgaccgccgacgtcgacgccaacggcagaaaggtcatgggcaagggcgtgtaccagttcgacgacaagcacggggcgaacgtcgacggatacagcccaatctacaacgaggatgactggtctcccaccggcgacgtctacgtcggtggaaccactgggcgtttgatctgggccgtcaccctcgctgagatcctcggcggaggcgccctcctcgtctacaacaccagcgccctgtgcggctaaggatatccaatgcatgcgcttcttgcgattcgacatgtaaaatcacggtgtgtgtctataatctagccaccatgggtgatgctcaaccttcgtcatgtaacaataatcagagctactcttcattacataactttgatgccaagaaaacaaaaaaaaagcggtccttga

SEQ ID NO: 152047 - DNA, 344 bp, Zea mays
  Clone ID: MRT4577_70215C.1
cagttcgtcgacacgtacggcgcgaacgtcgacggatacagcccaatctacaacgaggatgactggactctcaccggagacgtctacgtcggaggaaccactgggcttatcatctgggccgtcaccctcgatgggatcctcagcggcggcgccctgctcgtgtacaacaccagcgccctgtccgggtaaggatatccaatgcatgcgcttcttgcgattcgtcatgtcaaatcagggtgtctgtctataatctagcctgcatggatgctcaaccttcggcatgtaacaatcatcagtgctactcttcattacataattatgatgctatatatatataccccatc

SEQ ID NO: 152048 - DNA, 682 bp, Zea mays
  Clone ID: MRT4577_70216C.1
ctgtgcggcgctcgaggcggccgggttccaaacctgcagtcaaccatctaccatttactcagcgagcgagagcagaccacgcaggtagctaggagcagcagcagcggtggcggcgatggcggactccatgatctcctcgtcagctctggcggtggcgcctcagggcctgccgcccctcggacgccgcgcctcctccttcgccgtcgtctgctccaagaagaagatcaagaccgacaagccctacgggattgggggtggcctgaccgtctacgtcgacgccaacgcgagaaagggcaagggcaaggccgtgtgccaggtcgtcaacgagtacggcgcgatcggccatggatacagcccaatctacaacgaggatgactgggctcccaccggtgacgtctacctcggtgaaaccactgtgcttctgatctgggccggcagcctcgatgagatcctcttcggcggcgccatcctcacgtaactgacctgacttgctctccagatacagatataaaatgagagcgaccacgtgatgatcgatgagcatccaccggctggatgcttataatccagcattcgccgttggagctttgttgagatcgcaaaactgtacaaagtcggacgtcctcacgtgagactgagatttctcttgttgacaccgactgtcattagatgttttctgtga

SEQ ID NO: 152049 - DNA, 696 bp, Zea mays
  Clone ID: MRT4577_70217C.1
ccgcgcgtctgggcagcaaagcacccacaccagcgaaaaagcagcagcgatggcggcctccatgatctcgccgtcagctctggtggcgccgccgtccagggcgcagggcctgccgtccctcggccgccgcgcctcctccttcgccgtcgtctgcggcaccggcaagaagatcaagaccgacaagcccttcgggattggaggtggcctgaccgtcgataaggatgcctccgggaggaaggtcaagggcaagggcgtgtaccagttcgtcgacaagtacggcgctaacgtcgacggatacagcccaatctacaacgagaatgagtggtctcccagcggcaacgtctacgtcggtggaacgactgggcttctgatctgggccatcaccctcgctgggctcctcggcggcggcgccctcctcgtctacaacaccagcgccctctccggctaaggatactcatttccaatcgtgatccatgcgcttcttcttgatgcggttcatcatgtaaaatcatgccagcagggtgtctgtctgtaatctagcctccttcgatgcccactgtaatgcaagcttcatcatgtaacaatgctactctctactactacgacgtactcttcatacttaattttgggacaacgactatcattatattattaattgatgctatatatttagaatattattaatatataactggt

SEQ ID NO: 152050 - DNA, 296 bp, Zea mays
  Clone ID: MRT4577_70218C.1
acgacgcgtgggcggacacttgggaataaagcgcgcgcgcgcacgccgagaggctctgagggctgtgtgagatggcacaagccattgcttccatgaccgggctctagaagggcgttctgcccaggaggcgcgccagcaacagggccaggactggcgacgtcatcagggcgtgcgccgaggcgcaagcgcatgcagtccggcgggccgcgctatggctgtgggacactgtcatcgtcggtggcgccttgtaacaagcagtgcacgctctgaccgtcaagaccatcaagatcggagcc

SEQ ID NO: 152051 - DNA, 320 bp, Zea mays
  unsure (1)..(320): unsure at all n locations
  Clone ID: MRT4577_70219C.1
gacccgggcgtcccgtccaatcgggcatacggttaaaaggcactttaaattcacaaatggacctgatcgcaangtatgggcgcctcgacggtatgacatatttgcatctccggatgtattacataccttgtactcacatcatactcaaactcacgcacattgcgcatatattatataacaagttaccgctggttatggacaccgatccacagacacatggtgtcatggcggaacccacggtgttcctgccgaaaacgcacatatgcatgccaaccgctatgaaaccccatgtgatccataagaaaccaacatatctgcta

SEQ ID NO: 152052 - DNA, 449 bp, Zea mays
  Clone ID: MRT4577_7021C.1
ccggcccggactgacaagccgccgccgctcttccacctacctctccccggcctcgcacccatggccacggctttgatggttgcagccaccacctcctgctcccccggccgcgccgcgccgcgcctgaagccggtggcctcctcctcctcctccagcagcagcagctcggcgcggagctggaggccaagctggacgagggacgcagccgtgtggaggccgagctcgtagaggcgctcgccaacctcgaggcgcagaaggaggaggctgtcaaggcactcgacgcccagatcgcctcgcccagtgatgagatcgtcaagaaggtgctcccatccgcgtgatgaaaccaaaccggccctgccttatcctatgactatagttgcatgaacatcataaattaatgataattttgaagaaattggccgacgaaaaaaaaaaaaaaaaaagcggcc

SEQ ID NO: 152053 - DNA, 603 bp, Zea mays
  unsure (1)..(603): unsure at all n locations
  Clone ID: MRT4577_70220C.1
cccggtcgacccttcgtccgcccagcgtccgacccgcgtgggggcgagcgtggcgcccacacataacgcccaggggggcgcccacgcgtccgtttggctcggcagctaacgacctgcagccaaccatctaccagcgactcagcgagcgagagcagcacacactgcacgcagctagctaggaccancaggggcgttttgattgggggctccatgatctcctcntcagctctggcggtggcgcctcagggcctgccgcccctcggccgccgcgcctcctccttcgccgtcgtctgctccaagaagaagatcaagaccgacaagccctacgggattgggggtggcctgaccgtcgacgtcgacgccaacgggagaaagggcaagggcaagggcgtgtaccagttcgttgacaagtacggtgcgaacgtcgacggatacagtccaatctacaacgaggatgactggtctnctaccggcgacgtctacgttggtggaaccactgggcttctgatctgggccgacaccctcgctgggatcctcggtggtggggcccttcttgtctacaacacctatgccctgtttcgctaaggatatccaatgcatgcg

SEQ ID NO: 152054 - DNA, 657 bp, Zea mays
  unsure (1)..(657): unsure at all n locations
  Clone ID: MRT4577_70221C.1
aattcggcacgaggcgccaacagcccgcacgccacagccgcgaccgctccacgaatctcgccgcgaatcccgccgcacgacgccgctacagcactctgcacacccgccagccatgccgcaccgtacgcccgcaacagcctcctccctacgcgcgcgggaaccgcccgcacagcccgccgcgacccccacgcccgtggccgtccctacgcccgccgtgaaacccccaccgcaaccgctccacgaatcccgcgcgcgaatcccgccgcgcgatgccgctacagcacacccaccagccatgccggaccgcgtgacgccgctacagcacacccgccagccatgccggaccgtcaatggaaggtccgcgtccgccgattttttggaaggttcgccgctatctacgcggatctgccacttcctcatcagccgccgtcaatggaggtccgcgtccaccgattttatggaaggttcgccactctctccgcggatccgccacctcctcctccgccgaatagcaggtacgtgagtgctgtccgctgcgaggtgctggggacccaatcggagcccggcaccgacgcccaccacgtcgtggtcgggttgcgcacgaggtagcacgccggcgggtggaggtcanngagctcgtgcccccgggcgcgggct

SEQ ID NO: 152055 - DNA, 666 bp, Zea mays
  Clone ID: MRT4577_70222C.1
attgggtacctcgaggccggccgggaacgatctgcagccaaccatctaccattgactcttcgagtgacagcagcacacacgcagctggttctgatcatgagctccaccgtcgatgtgcgggctccatgatctcctcgccagctctggcgatggcgcctcacgggctgtcgcccctcaggcgccgagcctcctccttcgccgtcggctgcatccacagaagaagatcaagaccgacgagccctacgtgattgggcggggtctgaccgtcgacgtcaacgtcgacggcagaaagggaaagggcaagggcgtgtaccaccctcgtcgacaagtacggcgcgaacgtcgacggatactgcccaatctacaacgaggatgactggtctcccaccggcgacgtctacgtcggtggaaccactgggcttctgatctgggccgtcaccctcgctgggatcctcggaggaggcgccctcctcgtctacaacaccagcgccctctccggctaaggatatccaatgcatgcgcttcttgcgattcgtcatgtaaaatcagggtgtctgtctataatctagccaccatggatgatgctcaaccttcgtcatgtaacaataatcagtgctactcttcattacataattttgatgcaaaaaaaaaaaaaaaaaagcggcc

SEQ ID NO: 152056 - DNA, 636 bp, Zea mays
  unsure (1)..(636): unsure at all n locations
  Clone ID: MRT4577_70223C.1
gggtacctcgaggccggccggngactgcagtcaaccatctaccagcggctcaccgagcgagagcagcacacacgcagctagctaggagcagcagcagcgtaggtggcgatggcggcctccatgatctcctcgtcgctctggagatggccctcagggtctgccgcccctcggccgacgcgcctcctccttcgccgtcgtctgctccaagaataagatcaagaccgacaagccctacgagattgagggtggactgaacgtcgacgtcgacggcaacgacagaaagggcaagggcaagggcgagaaccagttcgtcgacaagtacggagcgaacgtcgacggatacagcccaatctacaacgaggatgactggtctcccaccggagacgtctacgtcggcggaaccactgggcttctgatctggaacgacagcctcgctgagatgctcggtgacggcgccctcctcgtctacaacaccagcgccctctccggataaggatatccaatgcatgcgcttcttgcgattcgtgatggaaaatcatgctgtctgtctataatctagactccatgtatgctcaaccttcgccatgtaacaataatcactgctactcgtcattacataattttgatgctatatac

SEQ ID NO: 152057 - DNA, 660 bp, Zea mays
  Clone ID: MRT4577_70224C.1
gccggccggtccggggacctgcagccaagcatctaccctcgactcagcgagcgagagaggacacacgcagctagctaggagcagcatcagcggcgggggggatggcggcctccatgatctcctcgtcagctctggcggtggcgcctcatggcctgccgcccctcgggcgccgcgcctcctccttcgccgtcgtctgctccaagaagaagatcaagaccgacaagccctacgggattgggggtggcctgaccgtcgacgtcaacgccaacggaagaaagggcaagggcaagggcgtgtaccaattcgtcgacaagtacggtgcggacgtcgacggatacagcccaatctacaacgaggatgactggtctcccaccggtgacgtctacgtcggtggaaccactgggcttctgatctgggccggcaccctcgctgtgatcctcggaggaggcgccctcctcgtctacaacaccagcgccctctccggctaaggatatccaatgtatgcgcttcttgcgattcatcatgtaaaatcagggggtctgactataatcgatgctccatgtatgctcaaccttcgtcatgtaagagtaatcagagctactcttcattacataattttgatgctatatatacaaaaaaaaaaaaaaaaaaggcccctag

SEQ ID NO: 152058 - DNA, 615 bp, Zea mays
  Clone ID: MRT4577_70225C.1
ctgcgggacctgaagtcaagcatctaccagcgactcagcgagtcgagagcagcacacacgcagcctagctacggagcagcagcagcggcggcggcgatggcggcctccatgatctcctcgacagctctggcggtggcgcctcaggtgctgtcgcccctcggccgccgcgcctcctccttcgccgtcgtctgctccaagaaaaagatcaagaccgacaagccctacgggattgggggtggtctgaccgtcgacgcctacgccaacgagagaaagggcaagggcaaggatcgtgtaccagatcgtcaacaagtacggcgcgaacgtcgacggatacagaccaatctacaacgaggatgactggtctcccaccggccgacgtctacgtgaagaggaagcactgacggttctgatctgggacgtgcaccatccatgaaagcttctccttcggtgtcgtcatctttaacagcagcatatatatatcggtttgatagtagctcttgcattctaccccatgagaagagattagggatttaaggtagacacaaagttacctagttatattggtagactggccgataggaagttggaaaaacatcggcagcttgtgttgatctt

SEQ ID NO: 152059 - DNA, 173 bp, Zea mays
  Clone ID: MRT4577_70226C.1
ggtacgcgggcgaccgcgacaccaagcaggggggccgctttgaaaagcccggcgagacacaagcatgacccaccaaaacacagcccacggcccaaccagcacaaacggacgaacccgaaagaaagcagcccccacaacccctcccacgctataaaaggggagcgaactaaaca

SEQ ID NO: 152060 - DNA, 529 bp, Zea mays
  Clone ID: MRT4577_70227C.1
ggccgcttttttttttttttttttctttgggtttttttttttttttttttttttttttttttttttttttttttttttttttatctttattttatataattatttttttacaaactgtttgcttctttcttgccaaagagggagaaacaaaaaaaccaaacgaaacacaaaccacgaaacaaggggggggggggcaaaacagggcgggctaccaaacacactagcaaaccaaaaaaaaaaaccccctgcacacaaaaaccctaaaggcgggggccacaaacaagacataagacccccgaatcctcaaaaccccaaacaccaagctgctgcgggcccgccaaaacctttgacaggggcggacctcacattcattgcaacccccctcgtacccggcaaacgggtttcccgaatgagcggccgcccggaacttgatcctcagcgtgggcaaaaccacttcccagcgcggcaccctaaacacaagacacaccgggtgctgaaacaccgggacgcacaacaacctgctgcgggg

SEQ ID NO: 152061 - DNA, 282 bp, Zea mays
  Clone ID: MRT4577_70228C.1
ggggggaaaagaaacaggtccaaaaaacctccaacagttttgggggggtataagggttgaacgggaacctccgtccccctaaaacaaaaaactttttttgggccgggggaagacatttaacagggtgcaactgggattttgtcctggggttccatgaaacccccggggctcctagtcagttcgcaggtgatttttaaggggggccttaagccttgctctcaatgttggtggacagccataccaggcccttatacaaacccttcccagttggggcccaagggc

SEQ ID NO: 152062 - DNA, 224 bp, Zea mays
  unsure (1)..(224): unsure at all n locations
  Clone ID: MRT4577_7022C.1
aaaagaggaaagggggatagcttaanctttccatccaccgnctctcagttgagactctagcgctttttcattccacagttatatctgtaggacggatgttcaaactctgctagattcagtctttctagctgagaactgagctgtagctgaaggttcagtcattcttcacgctcgagctactacatcttcttgctgctgagtgccgggagctgagatcgatcgag

SEQ ID NO: 152063 - DNA, 675 bp, Zea mays
  Clone ID: MRT4577_70231C.1
gccggccaggtcgggagctaatccttcttccttcttcctccttcctcctctctctgtctctgtctctcccttgcagagctggctgagaagagctagcacaaacgtcgatgcaagcgacgaataagagaccgcagacaagataccctgtggcacccatcgtcatgtgcctggtcctggcgtgggcatcatgcctccacggcgacgacactaaattattagcggccgcggttccattgccgcggcgtccagcagcaacaagcagcgtggccgccgcaggggggatgcccgtcgtcgtgggctaccgcccgagacctcaagcaggcgccgccgccggacgctcagcaccgcgttccaccgcctggatcggagacgacaagcgccagattccaagctgccccgacgctctccacaacaggtagggtcgaaaaccaagcaccctggcctggcctaccccgtccccgtggtaaccactgcttaattgaagagtgtgtgtgtgtgtgcgcgcgcgtcgctatgtgttttggttgaattagttcaaaagtatcgtcatcttacaaagctgctgcaacagtatgcaacgctgaaagatcggtgagcagaaccacggtggctagctcgatctcttgtgcatctcgcattatgaaaaaaagtgtgtctttctgcgttgtttgattc

SEQ ID NO: 152064 - DNA, 738 bp, Zea mays
  unsure (1)..(738): unsure at all n locations
  Clone ID: MRT4577_70232C.1
cacgcgagaagcacgcagaagtaacgtcgctctctctatatgccgcctgtgctgtttcctgctactggctgcctactgctgacgcatcccacctcaatgctaggatgctgctatagcttcacttcttcccactggacttatgaccgcgatactgtaggatgcgaaactccttgtgctccctacaggatccaacaggcagtcttacttgtcaatgtacctttatcacccttgtacctccaacaatcatcagccctatcacaacagatacctttggtgcattgattggcacaaaacatcagggcacaacaactactacaactagcgctaacaaaccttgctgcctactctcagcaacagcagtttcttccattcaaccaactagggacatcgaactctgcttcttatttgcaacacaacaactaccattcagccagctacctgctgcctacccccagcaatttcttccattcaaccaactagcagcattgaactctcctgcttatttacagcagcaacaactactaccattcagccagctagctggtgtgagccctgctaccttcttgacacaaccacagttgttgacgttctaccagcacgttgcgcctaacgctggcaccctcttacaactgcaacaattgccgncattcaaccaacttgctttgacaaacccagcagtgttctaccaacaacccatcattgggtggtgccctcttttagatttcttatgagttatag

SEQ ID NO: 152065 - DNA, 263 bp, Zea mays
  Clone ID: MRT4577_70233C.1
gccgccgccgccgtcccgcccccacccgacttcttctgaccgccggcgtggggtgcccgggctccacctccggcgacgacacccttcccgtcgggcgcgcccacaccgtctgcttcgtttgcgggggtagccggggctcccggctcggtggctttcaaagcccccttccttacaacaggatccaaaatcccggcctagacttcttataacttgccttgcagaaattccttttttggcattccggacgggcgatcttgaacccc

SEQ ID NO: 152066 - DNA, 484 bp, Zea mays
  unsure (1)..(484): unsure at all n locations
  Clone ID: MRT4577_70235C.1
tggcttggaacctttgggctgatttatgtgcttgtgtatgtgcttgtggattagtagcgggtgcttacttgagtcaagcaaccaggctgaaaacgatttgcgttagtagtagcagtagtagttggtgcgcgatgtcggcatcgtctggctcttgttcgtcgtcctcggccggcgccgtgtaggtggcagcggagccggcgttcgtcgacgacaacactgttgttgttgtcgtcggtatggtggcggatgacggtgagttgttctagtagcgtgtgattttggcgagtgcggaggaggtgcgttgtggtgtgcttgagatgtatgttggtgcggttcatgattatcgtacggtgctgtcgggtgttgatttgtgtagtaaggaggttggtaataagaatacgtatgggtcggtggcgtcggttattaggacggttactgattatgttgntagtattgagcttaagactgatgattctgtggagtc

SEQ ID NO: 152067 - DNA, 507 bp, Zea mays
  unsure (1)..(507): unsure at all n locations
  Clone ID: MRT4577_70236C.1
gcacaacaacgacaacaaccgggaccagcaaacccagccagacaacccgcagcaacagcaggncaccccaagcaaccaanaaccgaanggaacccngccagcgatagattaacaacaacaactaccatttcagacagttaactgactgcctacccacagcaatttcttccattcaaaccaactggcagcattgaactcttcctgcttatttacagcagcaacaactactaccattcatccagctagctggngtgagccctgctaccttcttgatacaaccacagttgttgncgttctaccagcacgctgcgcctaacgctggcaccctcttacaactgcaacaattgctgccattcaaccaacttgcttgacaaacccagcagagttctaccaacaacccatcattggtggtgcccttttaagatttctaatgagttatagatcaataataaaggtnntngaccgatatttgtggcttccagaaataagaaagtacattttagattc

SEQ ID NO: 152068 - DNA, 675 bp, Zea mays
  Clone ID: MRT4577_70237C.1
gcccgacgggctctgttattaactgccctacacgttgcagctacccttttctatgatccttggactataactcacctgcttcgaatagactgtaccagcaatgctatatatgacgaaataacatcacgcggggttcgacaaaacaagttggatagaatggcagcaattgttgcaagttgtaaagaaggtgccagcgttaggcatagcgtgcaggtagaacggcaacaactgttgttgtgtcaagaaggcagcagggctcacatcagttagctggctgaatggtagtagttgttgctgctgtaaataaacagcagatttcaaagctgctagctggttgaatggaagaaattgctgggggtaggcatcagctagctggctgaatggtagctgctgttgcaaataagcagcagagttcaatgcagccagttggttgaatgggagaaactgatgttgctgaaagtatgcagcaaggtttgctagcacaagttgctgtagttgctgtgccctgatgttttgtgccaccaaatgcaccaaaggtaactgctgtaatatggctgacggttgttggaggaacaagggtgataatggtaagatgcctgttgcgattgcctgttggatcctgtagggttgaacaattgggttttcatatactgaagacaccgctggtgataggta

SEQ ID NO: 152069 - DNA, 596 bp, Zea mays
  Clone ID: MRT4577_70238C.1
cgtgcctatgaccagcggtgtcttcggtatgtgaaaacccaattcttcaaccctactaggatccaacaggcaatcgcagctggcatcttacctttatcacccttgttccctccaacaatcatcaaccctgattacagcagttacctttggtgcatttattggcacaaaacatcacggcacagcaactacaacaacttgtgctagcaaaccttgctgcctactctcactatcagctgttactttcgttcaacaaactatgtgcactgtagctctgttgattatggacaggcagcaactgccccattgcacctcgaggagatgcctgttctaccagccagcgaaaaattctcatcatcacagagggcctgtttgcactctactgcttatttacagcagcgccaactactaccattcaggccgctagctagggtgagccctgctcccttcttgacacaaccacagttgttgccgttctaccagcactctgcgcctaacgctggcaccctgttaccactgcaacattggctgcccttcacccctcttgctttgtcaaacctggcagtgttctaccaacaacccgtggttgctggcgccct

SEQ ID NO: 152070 - DNA, 570 bp, Zea mays
  Clone ID: MRT4577_7023C.1
gccggccgggggccgacccacctccagtcctccactgacaagccgccgccgctcttccacctacctctccccggcctcgcacccatggccacggctttgatggttgcagccaccacctcctgctccccgggccgcgccgagatcgcggcggcgcttaacaagatgaagaaggagaccaccgcggagctggaggccaagctggacgagggacgcagccgtgtggaggccgagctcgtagaggcgctcgccaacctcgaggcgcagaaggaggaggctgtcaaggcgctcgacgcccagatcgcctcgctcagtgatgagatcgtcaagaaggtgctcccatccgcgtgatgaaaccaaaccggccctgccttatcctatgactatagttacatgaacatcataaattaatgataattttgaagaaattggccgatgactaagacactggactcatgaaagattattggatgggctggggccaccgcctggggtgggcgtggattggtggaaacttgcagtgatcttgctcgataagcttggacaggtcagtaccagacacaccttggaacc

SEQ ID NO: 152071 - DNA, 263 bp, Zea mays
  Clone ID: MRT4577_70240C.1
tctctcgagagagaagctcagtcaacaccagaagctcttgatcccaccgaggacgaagaagagagaggaatggcgcccgaggagggagtggcgatcgcctgccacaccaaggacgacttcgacgcccacatggccaaggccaaggaggccggctagctggtgatcattgacttgacggcctcctggtgcggtccctgccgctacatcgtgccactgatctgtgggcactccaagaagttcacccatgctgtgttcctgaaggt

SEQ ID NO: 152072 - DNA, 428 bp, Zea mays
  Clone ID: MRT4577_70241C.1
ggcatattaactttaataaccttggtccttcaacaaccggcaagcctaataccagagtggccgtttggggcattggtgggccaaaaacatcaagggccaacactacaacacttgtgctaagaaaccttgctgcctactctcagcaacagcagtttcttccattcaaccaactggctgcattgaactctgctgcttatttgcaacaacaactaccattcagtcagctagctgctgcctacccccagcaatttcttccattcaaccaactggcagcattgaactctgctgcttatttacaacagcaacagctaccaccattcagccagctagctgatgtgagccctgttgccttcttgacacaacaacagttgttgccgttctacctgcacgctgcgcctaacgctggcaccctcttacaactgcaacaa

SEQ ID NO: 152073 - DNA, 346 bp, Zea mays
  unsure (1)..(346): unsure at all n locations
  Clone ID: MRT4577_70243C.1
caacacaanccacccgcgncggcacgagcacccacagcagnnnggcgcgcggcaaagcggggcccncccncagcncncagccggcagcgccangggcaccaccgccgcngccnccgngcccccggngnccgccggcnccggcgagaaccncgnccncaaccncgacnacggcncgcagnacacgcaccncancacccgncgcgggggggagggggggcgnnacncnnccccngcgagaccggcacggagccgcacgacaaccaggagggccaccgcccacgcgccgccaaacacaccgacggcccccacccaggncacgccancggggcgcccgccacccccgagg

SEQ ID NO: 152074 - DNA, 193 bp, Zea mays
  Clone ID: MRT4577_70244C.1
gcgcccacgcgtccggtgattgtaaggaataagtaaactccctggtaaaatatatgattaaggggtggaggttaagacactagagagaatataggggggctctaactaccatggcttaatcatatattttaccagggagtttagtgattgtaaggaataagtattatacatgtctttatcaagtttttttttc

SEQ ID NO: 152075 - DNA, 300 bp, Zea mays
  Clone ID: MRT4577_70246C.1
tcggttctatttgatagggagacaaaacatgagaaaataattgaagagggttgtgccaattatttggaactgtaactgaataaataatggccaaaaatgtaccattcttgggttttaaaaaaaaaaaaaaaaaaaaaaaaaaaaaaaaaaaaaaaaaaaaaaaaaaatttaaatttctaagggattgtaagataaccgaaaaaaaattgccaaaatgtgaacttacagaaaatggaatggtaggttcttaataacaatttttcaatgcgcaagggtatagaaaatcaaaatcggggtaac

SEQ ID NO: 152076 - DNA, 497 bp, Zea mays
  Clone ID: MRT4577_70247C.1
attcggctcgagccaaagcaaaccaaactccatctccatctgctcgctcgctcacgcagcagccatgaccatgacgacaccaccgccaaggcagcagcatggcctggccgctgttgcgtccgaggtgcgcgcgcagcgcggcatcgcgctccctctcatcggcatgaacctcacctggttcgccaagcaggccgtgaccacggccttcctcggccgcctcggcgacctggagctggccgccggcacgctcggctacagcttcgccaacgtcaccggcttcgccgtcctcagcggcctctgcggcgccatggagcccatctgcggccaggcgcacggcgccggaaacgtcgccctcctgcgcgggacgctgctcagggccaccctcatgctcctggctcgctacgtccccatcgcgctactctggacgcgcgtcgacgccgtgctgctgcgcttcggccagcagcccgacatcgcggccacggccaggacctacgtgc

SEQ ID NO: 152077 - DNA, 690 bp, Zea mays
  Clone ID: MRT4577_70248C.1
ctcagcgtgtccccattccgatccccctcccggcgccgcctccagcctagggtttcctcccgccgcccgtccgccccacccgccgccatggcccgccgcagcggaggaggaaggtcttcccgccctgctccacgtgctgctccagtgagaaacccaccagcgccagcccgtccagctcctccacctgctaccacccagagcagcggtggtggtatcatgagcgggattgggtccaccattgctcagggcatggctttcggtactggaagtgccatggcgcacagggctgttgatgctgtgatgggtccccgtaccattcagcatgagactgttgtcggtgaggctgctgcatctatgactccaatggacaatgctgctgatgacaagtgtggcaacccttccaaggccttccaagattgcatcaaccactacggaagcgatatcagcaagtgccagttctaccttgacatgctgaacgagtgccgccgtggaggagcaactctttaagctactatctttgcttgattggggcttaattgggcagaacctgttttcagtcatgatgatgatgatatatatctcctaaataattcattggcaatattatgaacctatgccacagcttgtgtctattacctaccctagttcgtggtctctgttgtcccgggagtatttccttgtattgatgtt

SEQ ID NO: 152078 - DNA, 280 bp, Zea mays
  Clone ID: MRT4577_70249C.1
atgcaagtgttgatggatatcatagctgaactgaaactcaggagcgcaactaggaacacagaaggcactctaatgctgcgccatactgtgtcatccaaattacaaaattctcaaagaaaaaaactcatgaatatctgaacagggtgtagaacatcctgaaaccacacactgtagtaatgaagtccagtcgggttggtaagtatgaggagagctagaggtagaaattagaccctagatgtaccgagcttacgctcgaaaaagcgtcgcaacaagtagacct

SEQ ID NO: 152079 - DNA, 1086 bp, Zea mays
  Clone ID: MRT4577_7024C.1
ttgggcccatccgtccccccacgcttccgccccagcgtccgcactgacaagccgccgccgctcttccacctacctctccccggcctcgcacccatggccacggctttgatggttgcagccaccacctcctgctccccgggccgcgccgcgccgcgcctgaagccggtggcctcctcctcctccagcagcagcagcagctcggcgcggccgcggcggcccttggcgcagcagctcccgcggctgctggcgacggcggcggcggcggcggcggtggcagccgcgccgctcccggcgctggcggagcagatggagaaggccgcactgtttgacttcaacctgacgctcccggcgatcgcgaccgagttcctgctgctcatggtggcgctggacaagctctacttcacgccgctaggcaagttcatggatgagcgggacgccaagatccgcggtgagctcggcgatgtcaagggcgcctccgaggaggtgaagcagctggaggaccaggcggcggccatcatgaaggcggcgcgcgccgagatcgcggcggcgcttaacaagatgaagaaggagaccaccgcggagctggaggccaagctggacgaggggcgcagccgtgtggaggccgagctcgtagaggcgctcgccaacctcgaggcgcagaaggaggaggctgttaaggcgctcgacgcccagatcgcctcgctcagtgatgagatcgtcaagaaggtgctcccatccgcgtgatgaaaccaaaccggccctgccttatcctacgactatagttacatgaacatcataaattaatgataattttgaagaaattggccgatgactccgacactgtactcatgaaagattattggatgggttgtgtccaccgcctgtgttgggtgtggattgttgtagactcgcagtgatctttctcgataagcttgtacagttcagtacatacagacacacattgaaaccatatagatacaggatacattttgccctaaaaaaaaaaaaaaaaaaaaaaaaaaaaaaaaaaaaaaggaaaaaaaaaaaaaaaaagggcccctcgcgatctagaaccggacgcgtggg

SEQ ID NO: 152080 - DNA, 451 bp, Zea mays
  Clone ID: MRT4577_70250C.1
aaaaccaaaaaaaccccaaaggggccttcaaaccttacgagggggggccccggcctaaggaaaccaacccccggaccccaggcaaaacgacggggaaaacagggcctatactagggggattcccgaaaacaagaacaaccgggaaaacagagccccattaagctcccgaaaactttttgccgggccgggaggaaaaccgttaacggggggaaaaccccaaacgggggccaaaatttaccttatcatagggaattggggaaaaacgacggggacccgaagcttaacccccccccccctttttgttttcgccgggggcttcccccaggggggggatttaagtttgggccccaaaaaactgggcctcttgggggcccaaaccgggctttaaaatgggaaggacccgggggccaaagggggggggggccccccggctgaacccgggggtcaaaaa

SEQ ID NO: 152081 - DNA, 1659 bp, Zea mays
  Clone ID: MRT4577_70251C.1
ttgggtacctcgaggccggccgggagccgttccccgacacatcagcaccaccggtgtcctcgctgccaaggcgcccgcccgctcgtgtgacgagtggcgttcgtccaccgcccattccgcgctcagctctgagggcctcccgcccgccgcggcatcatctccggctcctctcgtcgccacgcgatccatctgtttccagttgtacacagaaaattagtgcctggaaaaataagaatggtaaggggggcgataggtgtcctaagatgaaactgcggttgcatctgttcgtcctgtgcgtgatcattatattcctggtgtacaacatggctaactttcaacataagcagacaacgttggaagcaaaatctcatccatttgatacagtgacggtgtctgacagagatgctgttaaggtgcctcaaaaggctgaggctaggattggttatttaccccatggtatagtggagtctaactctgacatggacttgaagccattgtggctgactacaagtgcacggtcaaagaagcctaaacaaaatgataattttttgattgctattgctgccggtataaatcagaaaaaaactgtggatgctattatgaagaagtttcttccgaaaattttacagctatattgttccattatgatgggaatgtcaatgggtggaatgatctaccatggagcaaaagtgtgatacatatagctgcctctaatcagactaaatggtggtttgcaaagaggttcctccatcctgctgttgtgtccatataccagtacatctttctttgggatgaagatctggaagtagataactttagcccgagaagatacttaaatatagttagatcagaagggttggagatatcacaaccaggtcttgactctaagctttctgaaattcatcaccggataactgttcgtaaaaaagcagggacctttcatagagttagccgggctaacaaaaagtgttcaagagaaggaccaccttgttctggatgggtcgagggcatggcaccagttttctcaaagtccgcttggcaatgtgtgtggcaccttatccagaatgatcttatccatggatggggcatcgattacaagtttgggtattgtgctcagggtgacaggacaaagaacatcggcgtagttgatagtgaatttatagttcaccgaggagtgcagacattaggaggttctacaataacaaaggatggtattcgtggcaaaaatgccaagccactcggccagaaagcagctcaaatccaaagatcgagagggagggctccaggccttgatatgcgaacaaagatccggagaaaatcgcgatccgagctccgtgattttcagaagcgctgggaccgggctgcaagggaagacagaacatgggttgatccgtttgcccgctcccgaagaaagcggaagaatagaaacccacagtagatcagcataatcttcactgttacacttgcacataattccgcttgcaccttggatttagagtgtataataattgcataatcaacattgtataaattctcacagacgaaacgagaaccacacacgtgaaattttcccatgggagttgtgggttcttgtatcgaggggcaggtccaggatttaaaggatgggcattcggaaaaaatattttatatatttttttt

SEQ ID NO: 152082 - DNA, 822 bp, Zea mays
  unsure (1)..(822): unsure at all n locations
  Clone ID: MRT4577_70252C.1
acctcgagccggccaaacagcaccaccggtgtcctcgctgccaaggcgcccgcccgctcgtgtgacgagtggcgttcgtccaccgcccattccgcgctcagctctgagggcctcccgcccgccgcggcatcatctccggctcctctcgtcgccacgggtgtcacgaaatgatcctgacttgcttgagttgcttcttgacaccataagaagcgatccatctgtttccagttgtacacagaaaattagtgcctggaaaaataagaatggtaaggggggcgataggtgtcctaagatgaaactgcggttgcatctgttcgtcctgtgcgtgatcattatattcctggtgtacaacatggctaactttcaacataagcagacaacgttggaagcaaaatctcatccatttgatacagtgacggtgtctgacagagatgctgttaagttgccccaaaaggctgaggctaggattggttatttaccccatggtatagtggagtctaactctgacatgaacttgaaaccattgtggctgactacaagtgcacggtcaaagaagcctaaacacaatgataattttttgattgctattgctgccggtataaaaaaaaaaaaaacgccctgtggatgctattatgaagaagtttcttccagaaaattttacagctatattgttccattatgatgggaatgtcaatgggtggaatgatctaccatggagcaaaagtgtgatacatatagctgcctctaatcagactanatggtggtttgcaaagaagttcctccatcctgctgttgtgtccatataccagtacatctttcttt

SEQ ID NO: 152083 - DNA, 519 bp, Zea mays
  Clone ID: MRT4577_70253C.1
cgtcatagcgcggcggcggcgatggtgggcggcttctccatcaggggatacgcggcgagcatgcggggcacggccgagctcggcccgtttagtttggcggcccgggaactgcagcccatggaggtgcgcaccttccggtggtgggaggacgagctcgcgtccatcaaggcggcggaggcggaggcggaggcggaggcggagaaggagaaggaagcggtggcgggggcgggggcggagggggaggaggaagaagaggaagaggaggcgtcggggaacggccgggcgccgaagaaacgctccatcaccgacctgttcgctgaggcgcctgccgtgggcgccggcagcggacccgacgctgtcgtggacgacgaggaggaggttcttcgctccatcgtccgccggagcaaggagctgcgaaggaagaggcgtctggagcaagctgcgttggcgtcggtggcggaggagccggagacgtcggcggcaggcgaacggcgtgcggcccgaggggaatttccccag

SEQ ID NO: 152084 - DNA, 1338 bp, Zea mays
  Clone ID: MRT4577_70254C.1
cgtcaacatggtataggagccaactatcgatcccagatgtccacagactcctctcttttttccgcctcctccccttccaccatgactaccaacgctccagcattccaatctgcctgcattccaattcctctgcaccatgtggtaaccatccgtcttaccaagagcaactatcttctatggcacgcccaacttgttccgttcctcaggagcgcgaaactcatgggttatcttgatggcacattgccggcgcctgcccaactgatcgcctcttcaacggcgactggtgctgcgcaagtggcaaatccagcatatatacgctggtatgatcaagatcagcagcttctcagcggacttctctcatcgatgactgaagatgttctttgggacgtggttgcagccacctcatccaaggaggtgtgggactctctgtagaagaagttctcctccactcgagctcgcacggttcagatctgtgttgaactcgctacgacaaagaagcgtgactcaacagctgctgactactatcgcaagattacagggctggcaaatgagctggctgctgctggcgctccactccaagatgatgaggttctctcttatctacttgctggcctttctgctgaatatgatctgtttgttacttccattaccaccaagacagatcctctctcacttgacgatgtgttcgcccatctgatggtgttcgaagcacgacaacttcagcatcaggctgagattcaactaaacaccggcatgtccgcgaactatgttgggcgtggtggtcgtggtcatcgcggtcgtggccgcaacacttgtggctgcgggcattttgcacctagggggggtgcgcctcctcgcgcttccggtggtcatggctcatcttctcgtcccacttgtcaaatttgtgaaaaggaaggacatacagcaatcaagtgctggatcgcatggatgaatcctacactgagacaccttcatcctcagctctggtggccactacttcgtacaagatcgatccaaactggtatcttgatacgggcgctaccgatcacataaccagcgatctcgatcgtctggccatacgagaacgctacaacgatgatgagcaagtccacgtcggtaatggagcaggactggcacaccaagaaaagcctgctggacgggaagtgtgaggccggcctatatcccatcaagccttgtgatgtcatcgcccttcatcaagctttgattagtaggactccaagtcgcgcccaatggcatgctcgccttgggcatccctcatctcaagtggtccagtcaattttgcatcttaataaatttttatgtcctagtgagtcttcc

SEQ ID NO: 152085 - DNA, 642 bp, Zea mays
  Clone ID: MRT4577_70255C.1
cccggtctgcattgatattttatttttgtgcaaataaagccacagcttacagcaattctgctactcattgcacaagctttcacgggagtgttttttccttcataatttcttgattgaatgcagtccctgcgctatagtggtgtgtcaacttctggtacaggtttttcagcattagtatgcacaggagtatatttccattatttaaaccctgaaagcataactctgctgaacaaaaactctagctcgcaaacaaagatgatttaaatttcctgtaaaacattggtatattgcttagatgttcagtgttctttcttgttggtctgtttattttcctgtttgggattcttgggttcattttgtgcaaatggttcttgatctaccttgtaagttaacggctccctagacccaccaaatacaccttgcatacacatgcctgcagaaactacctgaaaatagtttgtgttccattttggcacatatgcttccacttttggcatgttgtgcactgttggatatttccataaactttctacctctgtgacctgtttagtcgacttgtactttaattttcttaatgttcactttattttgtgcaacgtaatcttttaggtaatatgttgcattgttgatgttatgttttgc

SEQ ID NO: 152086 - DNA, 1232 bp, Zea mays
  unsure (1)..(1232): unsure at all n locations
  Clone ID: MRT4577_70256C.1
ccaggaccggtcaacgctacgatacctgtgcactgcgcagcccccgccgctgcactagccgttgcttctcccttccgttcgcgttcccattcccaaggagttgtcctcgccggcggatccggggcgccgtcgcaagacgaggaaggcggaggagaggataccagaatggcgtcgcgaacggcgtccaaggatatcatcgctctgcgaggctccgccgccatcgtcagcgagttcttcggctacgcggcgaacagcatcctctacaaccgcgccgtgtacccgggggagagcttcgccaaggtgaagaagtacgggctcaccatgccgctcacgcaggacgagtgggttaacttcatcactagcgccacctccaagaactcaggaaagctgcaggggatcgtgatggtcataatgagcaaggccaccagcgaggtgatcgagcgctggaacttcaacatcgacacctaccccgaggtcgtcgagaaggggtctatcaaggagaagagcgacaaaaagatcatgagggagattcgggccatcaagcgccagatcgactcttgcatcaccgacctcccctgcctcgacgagccatgcgtgtttgatatgctggcctacacggacacggacgttgacgctccggacacctggatcgaaagcgacaccaagctcatccacaacacgcagatggttaagctgcactcgttcgacacgaaggtccacaaggtcgacacggtggtgtcgtacaagaagaatgaggacgacacctcttcgtcgtcaagctcagtaataagagaagcaagaatagtgcttcttcggcgctgaacttggaagatttgtgatgcttgctaatgagtcagctgaagagatgtatacaagattgaaaaaaatcatcaagaaaattagaagctatggaagtaagaaatggacagatcatgaagtggtgaaaataatgctaagggcttattttctaagaaactcggtattatgttttatgataagagatagtcctaattatgagaagatgacgccagaagtagtacttggtagatttatccgtcatgaaatgatggaaaatgaagggcttcttgaagctgaacttggaagatttgtgatgcttgctgatgagtcagctgaagagatgtacacaagattgaaaaaaatcatcaacaaacttagaagctatggaagtnngaaaaaaaaaaaaaaaaaaaaaaaaaaataaaaattttggg

SEQ ID NO: 152087 - DNA, 205 bp, Zea mays
  Clone ID: MRT4577_70257C.1
attgtctgcatgctttttagggccttgagaacaaaaccattatattatactgttcacaaacagaacagagtcgctctatttttattttgacgaacagcacagtagaacaaactcccttattccttttgttggatggacttcggtctttgttggattggaaagctttatcgatgtacattggaagagaacgctctcattcattcgt

SEQ ID NO: 152088 - DNA, 1853 bp, Zea mays
  Clone ID: MRT4577_70258C.1
tccagacatccacccgccagcacccctcagacctccaccgtggcggctgccgcaacaggctcaacgctcacgcgcacacacaatccatagccgcctcccacatctcactctcgttccgagcttccggccatggcggtgacctccggcgcccccaacgacaacggccggtgatgcttctcctcctcctcctcctcctttgtccataactgtttttttgcagttgcgcatcagtgcacttagatctaactcccttcccgttcccaaggagttgtcctcgccggcggatccggggcgccgctgcaagaggaggaaggaggaggagaggataccagaatggcgtcgcgctcggcgtccaaggatatcatcacgctgcgaggctctgccgccatcgtcagcgagttcttcgggtacgcggcgaatagcatcctctacaaccgcgctgtgtacccggaggagagcttcagcaaggtgaagaagtacgggcttaccatgctgctcacgcaggacgagggcgtgaagaacttcatcgccagcctcacctcccagctctcagaatggctggaggccgggaagctgcagcgtatcgtgctggtcataatgagcaaagccaccagcgaggtgctcgagcgctggaacttcaacatcgtcaccgacgccgaggtcgtcgagaagggggccatcaaggagaagagcgacaaggagatcatgagggagatccaggccatcatgcgccagatcgcgtcttgcatcacctacctcccctgcctcgacgagccatgcgtgttcgacgtgctggcctacacggacacggacgtcgacgctccgggcacctgggtcgagagtgacgccaagctcatcgacaacccgcagatggttaagctgcactccttcgacaccaagattcataaggtggacacgctggtgtcgtacaagaaggacgagtgggacgaggaggagtagagtttgcaccaaaagttaccctgctgctgctagagcttggcgtgaaggctgtgtgaatcgttcattcacgtctatcgtgtactgcactaatagtatactgctactttggggggaagaaaagtgtgagacgctcctaccatttagaatttcgagattgaaatgccggttttaatataacatgagtcagcgcctttaagatctggctgcgaatgcaaaaaatcatcaagaaaattagaagctatggaagtaagaaatggacagatcatgaagtggtgaaaataatgctaagggcttattttctaagaaactcggtattatgttttatgataagagatagtcctaattatgagaagatgacgccagaagtagtacttggtagatttatccgtcatgaaatgatggaaaatgaagggcttcttgaagctgaacttggaagatttgtgatgcttgctgatgagtcagctgaagagatgtacacaagattgaaaaaaatcatcaacaaacttagaagctatggaagtaagagatggacagatcatgaagtggtgaaaataatgctaagggcttattttctaagaaactcggtattatgttttttgataagacaaagtcctaactatgagaagatgacgccggaagtagtacttagcaaatttatcgatcatgaaacgttgttagaagaagccaaatatgttgatatcatgtccaaaagtgtcactgcatcaaagaatcaagacattgcactcaaggcaaacaagaagcaaaaggggaaatgtgtttttgaagaatcaacaagtgaagataatgaagatagttcaagtcttgatgaagaaaaaatagcactcatcaaaagcttcaaaaagataatgaagagccgcaactacaagagcaac

SEQ ID NO: 152089 - DNA, 308 bp, Zea mays
  Clone ID: MRT4577_70259C.1
ctctgtcgatattctgaccaatgacttaggagctgctgttgcttcaaatgatgcaggagaacctattggctctaacatctatgttgctggtggaatgattaaggacacaccgagtggaaactacattctatcagctgcctgatccattgagttatgtcccataagacgatatagtatatgctataaaagccatcgccgtcacacatagggaaaatggaccaactgattaccgcatgtatagcatgattaagtatacagattgaccgtcgtggaatagataggtatcggactgaagttgaaaaatatta

SEQ ID NO: 152090 - DNA, 432 bp, Zea mays
  Clone ID: MRT4577_7025C.1
gggggggggtttctagggaaatagatccaaaaaaacattgggatcaccattttgggattacatgaccccaggggcggggatatatagtttggtttgaacattgggactactcagggccccctttttttttaacgggatattcctttcctttccatccttccttgggccttactaccccgggagggcacaatccaactcaaaagggacgggggggactttattacatccttgggcctagggctgggggcaattttttgaaaacccggatcaaaagaaggaaaaaaaaccggttggcttttttgttaattcaccccataaatccccttttccccattggtggggaaaaaaaccaactccttgggttcaaaccataaagggaactcatccttcggtggctttgggccatcacttccatgaaggaggttttttcca

SEQ ID NO: 152091 - DNA, 486 bp, Zea mays
  Clone ID: MRT4577_70260C.1
atgggccccacctccgcctgcctcctgcggtcctgcctggtgtccgcccccgcgatcgccgatcggcgatcgctcctgcctcatgaagatatccatctggaagcgaaaaaagaaaaaagaaaacgtgtggatgatctcatagactcacgtagaggagctattgacaagtttttcaagagcaatactagtgcttcgacgaatccaaatgatgtgtatgcgttggcaatagttcccgtgggggcagaggaatcaaccaatggcaattctataaacgaagaagaacgagttgatatcaacatcgatgataacaatgtaagtgaccatgagaatatatctaattcatcagatgcacatgcacaatttggtagtgttgatgaacaacctgacatttatgatctaagaaattgggataatcttaataataaagcaagagacatattaattgagaaaggacctataagagaggaaggtctggagttcccttaa

SEQ ID NO: 152092 - DNA, 814 bp, Zea mays
  unsure (1)..(814): unsure at all n locations
  Clone ID: MRT4577_70262C.1
ntcaatatcattgggnaccaacataccatcatagaaagcatcacatcgaggagaccaaacaagtagacccgataagacaactatgggaggcttgttngtgtctgcctgtggctctgttctgcctggtgtcttgcttcgggagaccatacctcccacaatgcaagcaggctcctgtagctgcccttcttcgccccgcgcctcataccaacgcggcgttgcatatgccaaaacccaattctttgaccctacaggatccaacagcacatccgagctggcatcttacctttgtcacccttgcacctccaacaataatgacccctattacagaagttacctttggtgcattcattgacacaaaacaacagggcacaacaactacaacaacttgagctaaccaaccttgctgcctactctcagcaacaacagcttgttccattcaaccaactagctgcattgaactctgcttcttatttgcaacaacaacaactaccattcaggcagctatctgctgcctacccccagcaatttcttccattcaaccaactgacagcattgaactctcctgcttatttacagcagcaacaactactaccattcagccagctagctggtgtgagccctgctaccttcttgacacaaccacagttgttgccgttctaccagcacgctgcgcctaacgctggcaccctcttacaactgcaacaattgctgccattcaaccaacttgctntgacaaacccagcagcattctaccaacaacccatcattggtggtgccctcttttagatttcctatgagttatagggcaataata

SEQ ID NO: 152093 - DNA, 422 bp, Zea mays
  unsure (1)..(422): unsure at all n locations
  Clone ID: MRT4577_70263C.1
ttcaccgtactgctgccgttctcttgacaagttttacaagatgacggcctcgtcaaattgctcatttattatataaggggtggccggtggggggagaaaaattcaaagtcacagttggtctatgtctctctgactacggcgcancaacagatttaatttctggcaaattgattgatcagcgagtgactttggatgctagctcgacggcggatctacatggcgctaaactgaatggtcttgcggtacttcaacttctaccagtgaattccctatcttggaagcaaattgagaggcgatcatgcatttctttggaggcatttatacgtgattactttttatgggagtcccctggtatactcagtggatgcattgatcattggcctgcaaggaaaaagtggaaggacataaagtacctaaagagt

SEQ ID NO: 152094 - DNA, 438 bp, Zea mays
  Clone ID: MRT4577_70264C.1
cccacgcgtccgcgcggtaaatttttcttttaatctctcatgtgttgtctgatagggtcacgaatctttccaaagtcccacataatatcttactctaggctgcctttaacaatgtcactaacatgtaccttcaggatccacatgtcaatgtcatctacttgctagaaatcatgattctgatcatgaagctcatcttgtaatacaactgaaagtgaagctcgacttataagacaactatacaaagtaagacactccataattcacaacagatcaaacgatgtctgttgctttgattgatgacccttgctgtgctcattgatactcactcgcatacttaatcctcttccccatttgtggtgatagccacaacccaagatacattctaaactgcagttagaactcatttgacatataacgcttacttcaacggttaatcac

SEQ ID NO: 152095 - DNA, 1587 bp, Zea mays
  Clone ID: MRT4577_70265C.1
gtcggcatctcaagcgcagcagcgatggtggacatcgaccaccggatggccgggctggccccgtcggtggcgcacaccgcggcgctgcgccgcctctcgacgcgcgccgccgcggggccgtcatcggcgtccgcgtcgccgcgccacggcctccactccttccacgccgtggctgcaggcgtgctctcccacctccgcgagtccggggtggccgtcctcccgggcctctcggacgcggagctggtccgcgcggaggccgagttcgggttcacgttcccgcccgacctccgcgcggtgctcgccctgggcgtgccgtcggggcccgggttcccggactggcgcggccgggccggcctccgcgccgcgttcgacctccccgcggcggcggcgtcgctccaggtcgcgaggggcgcgctgtggccgcggtgctggggccggcggccggccgacccgggccgcgcgctgcggctcgcgcgctccgccgtacgccgcgcgccgccgctcgtgccgctcttcgaccgctgctacctgccctgccgcccctgcctcgcggggaacccggtgttcttcgtcgccgacgaccgcgtcctctgctgcggcctcgacctgctctacttcttcacgcgcgactcctccttccagccggcggaccgcgccgtcgtctcctcctcgtccccgctctccgccggcgcgagcaggccgtcgtgcacgcgccggagcctcgacgccgtccaggccccgcgctggatcgagttctggagcgacgccgcgtcggaccgccgccgccgcgactcctcgtcctccgaagcatccaccgcctcctcgtcctcctcctcgtcgtcgtcctcaggatgcccatcgccaccccggcggccaaccccgcggtgggtcgacagctacctcgacgagctggggtcaatgctgaagaaagggggctggagggaccgagaagtggacgagatggtcgaggtcaccgcctccgggttcttggacgacggcgaggaggccccaacacccgactccgaggctatcctcgacgcgctggtcctcaagaccgaccggtgctcggactcgctccggcgcgccgggtggaccgccgaggacgtgtcggacgcgctggggctcgacttccggcgcggcgaggagcgctcccggtcggccgtgcggatcccgccggagatcgccgccaaggtccaacgcctcgcgcaagcgctggcgcgcccgtgacgtgacgtcgatcgatctcccccgttcccgccgccggaggcttcccattctttgtttatctccagtccgaatcgaactgcactagtataaaagtgagaaagtaaactaggccatgttcgcgcgagtgaattatgccgtgctcatgtgcgcgaagcaccgtgcgttgtaaggatacaggatcccagaagagaaatgagagctaaattagccgagaagacacatttgcagttaaaaacgctccatactctgcaacggactggtgaatcttttaaatgtttattttgagtgtgtaccgttattggataccccccgttcgttagtacgtccaagcttgaacaaccacggtgggtcggtgttcct

SEQ ID NO: 152096 - DNA, 478 bp, Zea mays
  Clone ID: MRT4577_70266C.1
tttgcgataccccgtcgcgaacacattttcataagaaccccctagagattgaataattaacccgcagtccacttgatggttggctgagtctgggcgagttttatagagttgcccctgtgcttttctgtaatagtgcgcatgatccagaggatagagaaagaggataaatgattatggaaatagatttctagtataaaatttattgcagaaattgtttaattcttagaaaattcatatgaagttcaaattaatctattccagttgcaataattttgttttaatattgttcatcatctagtacctttgtttagccataaaaattgaattaatgttattcacttgatttagtctatactaagcacttaataacttcgaaaattcataactcctccgttttaactccgatttaatccgttcaagttccgttagtctcgtagcaacgcgtagattattattacacagtttattcttatgttgg

SEQ ID NO: 152097 - DNA, 210 bp, Zea mays
  Clone ID: MRT4577_70269C.1
ttttatttttaaaagctgggcttttttacaggttttgtgtgcacattaggggggttacttctgagcagcaaaaaagcgattctattgcgtctaatctaaacctcaagaagctcaaggccctcacaataaaaccttataccttttgtatccctgtctctaataacacatacattgtatacctgtaggctatgaatatgccgccattatata

SEQ ID NO: 152098 - DNA, 831 bp, Zea mays
  Clone ID: MRT4577_7026C.1
tgggtacctcgaggccggcctcgcacccatgtccacggctttgatggttgcagccaccacctcctgctccccgggccgcgccgcgccgcgcctgaagccggtggcctcctcctccgcgtccagcagccgcgccgctcccggcgctggcggagcagatggagaaggccgcactgtttgacttcaacctgacgctcccggcgatcgcgaccgagttcctgctgctcatggtggcgctggacaagctctacttcacgccgctaggcaagttcatggatgagcgggacgccaagatccgcggtgagctcggcgatgtcaagggcgcctccgaggaggtgaagcagctggaggaccaggcggcggccatcatgaaggcggcgcgcgccgagatcgcggcggcgcttaacaagatgaagaaggagaccaccgcggagctggaggccaagctggacgagggacgcagccgtgtggaggccgagctcgtagaggcgctcgccaacctcgaggcgcagaaggaggaggctgtcaaggcgctcgacgcccagatcgcctcgctcagtgatgagatcgtcaagaaggtgctcccatccgcgtgatgaaaccaaaccggccctgccttatcctatgactatagttacatgaacatcataaattaatgataattttgaagaaattggccgatgactccgacactgtactcatgaaagattattggatgggctgtgtccaccgcctgtgttgggcgtggattgttgtagacttgcagtgatcttgctcgataagcttgtacggttcagtacagacacccattgaaaccatatagatacagggatg

SEQ ID NO: 152099 - DNA, 191 bp, Zea mays
  Clone ID: MRT4577_70271C.1
caggccgactctagatgcacataagtcaagcaatgatcctatcattgatctatatattgttagagctacatgtttaccttcctcatttagggcgggatgtacatttgatgacattggagtcttggcgagctttgcttttttcatgccaaacttcttgagcatattttgaggatattacgtttggataaaaa

SEQ ID NO: 152100 - DNA, 541 bp, Zea mays
  Clone ID: MRT4577_70272C.1
gtaccggcccctcttcgagtttttttttttttttttttttttattatgttttctttttttttttttttgacacacttgatacaggatttacctcaacacactaaacttggaaactaaattacagacaggactgactgagggccataccgcgggcttattatttgcaatcattaatatattagaccaaagcccatgagaggacaaatctgaaacggacccagttagctagagcctgaagagggcgagcgcgcggccatttaggcctatggtgtagaactttgttatgaagtgtcggtccctgacgctcctgaacaaaagcttcttgctggggtctggagtggggccggacatgctctcggacctcctcacgtccgtggtgaagcaaggacagccagggagaccctatccgcggcagctgatattgttgggtggcaccccgggctacacgctcctgaaccggtcattgaaggggagcctgaaaagatcaccgatgctgaccatgagcgccccaccccgagaagcgatgtccaaccagctgccg

SEQ ID NO: 152101 - DNA, 465 bp, Zea mays
  Clone ID: MRT4577_70273C.1
ccggatttgaattctcgactcaagccacccgttcgtgacaaggcctagcatacactgttgtctactcttaacaccaacatcaatttgcgttgaatcaactactctggacttgaacgtctgctaactatatttaacataacaccgactaccatacaaccagaaacctgctgcctacccccagcaattacttccattcaaccaactggcaacattgaactctactgcttatttacagcagcagcaactactaccattcagccagctagctgaagtaagccctgctaccttgttgatacaaccacagttgatgccgttctaccaacacgctgcgcctaacgctgtcaccatcttacaactgcaacaattgctgccattcaaccaactagctttgacaaacacagcagcgatctaccaacaacccatcattggtggtgccctctttgagatgtctcacgagttatagtt

SEQ ID NO: 152102 - DNA, 101 bp, Zea mays
  Clone ID: MRT4577_70274C.1
cgaaagaagcgcctaattctttcgatcgaattaggcgccttcttcgtcccatgctcggtcgtgcactggtctgcgtgatgctgccaagaccacactgctac

SEQ ID NO: 152103 - DNA, 545 bp, Zea mays
  unsure (1)..(545): unsure at all n locations
  Clone ID: MRT4577_70276C.1
cggggacacaaaaaatattatgtgagaaccaactangcattttagtaaaacacaatattgggggggggggggggaggcaaaaattttgccttattatgctgcttggtctttctgcaagtgctggtacggngagcattttaccgaaatgctcacaagctgctatagcttccattcttcccccatacctctaaccagcgatgtctttattatgtgaaagggggggggggctaccctacaggatccaacaggcaatcgcagcaggcatgttacctttatcacccttgttcctgcaacaatcatcagccctattacagtagttacctttggtgcatttattggcacaaaacatgagggcacaacaactacaacaactggtgctagcaaaccttgctgactactctgagcaacagaagttacctttggcgccatttgccggcacaaaacatcagggcacaacaactacaacaatctcgtgctagcaaaccttgtttgctactctcagcaacaacagtttttgccatttaaccaacctaccttattgaact

SEQ ID NO: 152104 - DNA, 491 bp, Zea mays
  Clone ID: MRT4577_70278C.1
gattgagaccaactagcaacatagaaagcacattattgtttcaataatggcagccaaaatatggtgcctggttatgctccttggtctttctgcaagtgctcctacggcgagcattttccctcaatgctcacaagctcctatagcttcccttcttcccccatacctctcaccagcgatgtcttcagtatgtgaaaatccaattcttctaccctacaggatccaacaggcaatcgcagcacgcatcttacctttatcacccttgttcctccaacaatcatcagccctattacagcacgcacctttggtacatttattgtcacaaaacattagggcgcaacaactacaacaactcttgctaacaaaccttgctgcctactcttagcaacagccgttacctttggtgcaatttgtggcacagaacatcatggcacaacaactacaacaacttttgctaacaaaccttgctgcctacttctaacaacaaacaattt

SEQ ID NO: 152105 - DNA, 231 bp, Zea mays
  Clone ID: MRT4577_70279C.1
tgtaatgtcagtactgctaaaaacatgcatatggagaaaagactagccagtactacatgatacgaactagtgagtcactactatatactatgagggaccgaacgcatttcactgactccataacataggtgagatgaaacggcggaagctccagcggaacatgaccaacagtccacaaacactagtatatatctcgggatgactagctataatagagcatgcccgcgctct

SEQ ID NO: 152106 - DNA, 515 bp, Zea mays
  Clone ID: MRT4577_70280C.1
accacacgtcctgaaggattgactaaggaattaacagtgcatgaggagatacgtgagaggagaattgctggggacatggatggggtgcatgtgacgtgaagggatacattgtatcacatgctgatgcactgccttgcatcatgagaggatcgatcaggtgaacggaaaggggagccaagtgctctgtcatcccgagtattaccatggcatgctgaggtgcatgctgcactatttgtacatcttgattcagggcttcatagggggatgtattatctggagagaaatgatgagcactttgatgctatgcagcgtgctatgaggcaggactatgcgtggggacaccctgaaggatgccctgtttgcctgccactctacaggctgatgaaaggagattgtcagaagatatctatgcatatatcatgcttttaggaaataggctctaatggatgtattagccttggaatgattgctagattccatcctgagatgcatgagaaaggtgaatggatgtatcc

SEQ ID NO: 152107 - DNA, 301 bp, Zea mays
  unsure (1)..(301): unsure at all n locations
  Clone ID: MRT4577_70281C.1
nnnnnnnggagttatgttcntcngttttttttgagaccaccaacccacccctngaaagaattgcaagaggcagaccacctacctaacagctaccactaacaacaggtcctgtttcaagcctcttgtacaaaaaacgccgaactgaaaagatagaaaaaaaaccgaccccccaaaaaaaaggggggcaaaggagcccaaaaaaaggagccctcttcccccacccctaaacccactaaaaaaaagcccctttcacacacacataaacaatcctaaaaacaacccccgccctaattcaaccgac

SEQ ID NO: 152108 - DNA, 162 bp, Zea mays
  Clone ID: MRT4577_70282C.1
gggggtgtgttgtttttgtgtaccaaagtagggtttagttaaacaggttcggataaagaagcaagccatcgatgttcgatggagcctcctatacacatataggcccctccgtgcgggtatgtgtaataggaggaacgcgcagggggggtactaggcctgctt

SEQ ID NO: 152109 - DNA, 199 bp, Zea mays
  Clone ID: MRT4577_70283C.1
gacaataatgtgacagattggtgatacgtgtgcactggagccctacacaacacgatactgatagctgggggaattatttatcagtggtgccatcatatgctggggatggcaggagttgtatttatcctcctgctgttggtaattcatttgtatttaagcttcaggacatatagggacggggggggggggtacttgtggc

SEQ ID NO: 152110 - DNA, 292 bp, Zea mays
  unsure (1)..(292): unsure at all n locations
  Clone ID: MRT4577_70284C.1
ggacgacgcgacgagccgggccgcccccccagacgggccaccagaagccccgcaaggcgacgagcgcccgcccacgcagcaggaacacagacgggcacgggggcagcacccagcggaccaaggcgccgcgaaagacgcccacgacgacggcgacgccggcggagacgaccaacccagacggaggcggcggcccgcgacggagcgccacgcaccagccgagcaaacagcgcacgaaggccaagcgcccgcaacacacgaggaccggncgagaccccaacagcgcccaccgacg

SEQ ID NO: 152111 - DNA, 338 bp, Zea mays
  Clone ID: MRT4577_70285C.1
cttcgggggatcgagggaacggggtatgactcgctttctattgcataacaaggggtttacacaaagggaatactcctgcgtgtgatacagttaaaacaacccaataggtttttcattggctgggctgttttacttctactgcaagtgtgaaaaacgtgccgcgcacattatttattctggagtagctttaccgcaagcggaagcgttatgactcatgccctgtctttggagtaaacccggtagaatgatgtccttaaactggtcaatggcttgaggaggaagtccctggccatccccttatcgactaatctaatcgggggatactgccctaatgggtc

SEQ ID NO: 152112 - DNA, 422 bp, Zea mays
  Clone ID: MRT4577_70286C.1
aaccgcccctcactgcacattgcacaccattgtcgctgacacagctttttttataaacctcatgaccaagaacctagatcaatatattattatcaaggagggcagagaggggtattaattattaagcttgtaaagaaacaggaaaaaaatgttcttggtaataaaaacggattaggattacctatgagataatgaccaagatcattaagaaaaatagaaaataaataactgaaataaaaaaaagctgctcctgttctaaaattatgaaaagaaaggaaccaaaaaccaaaattattgaatggttccacccatgaatggagcttgaaaaaacaatttgaataaagaaagaggcaataaaaccggatttcagggctctattaaaaacataataccagtttaaacccaatcaaaaaccctgttat

SEQ ID NO: 152113 - DNA, 431 bp, Zea mays
  Clone ID: MRT4577_70287C.1
ggggggggctatagtattttatttatattatagtaattgttcaataaaggagagaaggggaaaaaaaaacaggggaaaaaacagttatactttggggggggggccaccggcgctctcattttcgcccacacccaaacggggcttcgaggccggctccggctgctactggtagttttttttttactaccgctactacccaaccaaaaataaaatctaaggccccagccaaaaaccaatgaaaaacggccttgccgtccccggcgacaaaagaaaacccctggccgccgggacagatcgtccaaacaaaacattacattacattgcacgggtgccaatcaaaaaagcccctgcgcgtgtggtttggtttggtttggcctgcgtcgtcaaccggcggtttcttcaggcaaaaaggttgagcaacacgggctccc

SEQ ID NO: 152114 - DNA, 339 bp, Zea mays
  Clone ID: MRT4577_70288C.1
aacgccagcgccgcctcttgcttgctgagctccagccgaggagaagggggtaagtaaggaggtgctcataccatggctcgtacaaagcagactgcccgcaaatccaccggtggtaaagcacccaggaagcaactggctacaaaagccgctcgcaagagtgcgccctctactggaggggtgaagaaacctcatcgttacaggcctggtactgtggcgctccgtgaaatcagacgctatcagaagtccactgtgcttctgattcgcaagctccccttccagcgtctggtgcgagaaattgctcaggactttaaaacagatctgcgcttccagagcgcagta

SEQ ID NO: 152115 - DNA, 846 bp, Zea mays
  unsure (1)..(846): unsure at all n locations
  Clone ID: MRT4577_70289C.1
cccgggnaaccaanaccccggcacctctctctctctccatccagctgcttctccaatctccaccgtccctctctctcgtttgcttgctagctcttgttgcacaccacagccagctctagcttgcattggggttcttgcccttggcaaagccctcatttttcttggtgtgcatatagcttgcatgcatttgattgggtttaggtttgccagcagcagcaatttaaacgaataaacaggatccctttctttctccaattttcgtgtgcgtattaattagcttgcatgcttgggccggcgatgtctgagctcgtgtgtggcggctgcttcaccatgctggtgcactcccgcagcgcaactaacgtacggtgccctcactgcggcaggctcggctcgacaagatcaggaaaccagatggggcacctgtcgtgcgggcaatgccggacaaccctggcatacccgccgggagcgacgacagtcgggtgcccgacatgccgcaacgtcaatccagttccaaccagggtacgtatggatgctcggccgcagcagacgatggttctggtggagaatcctaagacgctggatgaaaagggcaaactggtgagcagtgttgccgttggtgtcccctcgtggaaaagatgaccaacaactcacttcattccggctaatctcgtcatcatcgacaacgacgacagctaatgtaaaatcaagtgtgttttgaagcgcttgatgtttttcatataaggaaaaaaagaaaagaggcagagtagcagtagctgttgagcagcaaaagatctgaaaattgtaaatacattacatgctatagccacccgtgtgcgcctttgtgcc

SEQ ID NO: 152116 - DNA, 385 bp, Zea mays
  Clone ID: MRT4577_70290C.1
ccggccggcattcttcagtgcattgctaagcttcttcggtggattcgcctttgcgccgacgacgtattttcttccatgcatcatgtggctgacaatatgcaaacccaagactttcagcatctcatggtttaccaactggatctgcatcgtcctaggtgttctgctgatggtactgtcaccgatcggtgggcttcggcagatcatcttgagagccaagacataccacttctaccaataaagtcgattcatttaacacaaaaaaaacaaggtttgcgtcagatttattttgcagatgctcagcgtgtgtgtctcgagttttgaatcggacttcgttcctcacctttatctccatcatgacaaaaaaaaaaaaaaaaaaggggcggcc

SEQ ID NO: 152117 - DNA, 2369 bp, Zea mays
  Clone ID: MRT4577_70291C.1
gtgctttgcctttgttcgctttgttggtcgcgggtttgatataatttgggtgtgcggatgagcgcggacgcgagcgccgcgatggagaagatccgcgccgcgggtctgctcaagacgcaggggctcatcgccggacagtgggtcgacgcatacgatggcaagaccatcgaggtgcaaaatccagcaactggtgaggtccttgcaaacgtgtcctttatgggcagcagagaaacatctgatgctattgcttctgctcacagtacattctattcttggagtaaactcactgcaagtgagagaggcaaggcactaagaaaatggtacgatctaattatttcacacaaggaagagcttgcacttctcatgacactggagcaggggaaacctatgaaagaagcccttggtgaggtcaattatggtgcaagtttcatagaatattttgcagaggaagcaaagcgcatatatggtgatataattcctccaactttatctgatcgcagattgttggttctgaagcagcctgttggggtagttggagctattacaccatggaattttccattagcaatgataacccgaaaggttggaccagctttggcctgtggctgcactgttgttgtcaagccatcagagttaacacctctgacatcattagctgcagcagatcttgctcttcaagctggaataccagcaggtgcactaaatgttgtgatgggcaatgctcctgagataggtgatgcattactgcagagtacacaggtcagaaagattacgttcactggatcaacagctgttggcaaaaaactgatggctgaatctgcaaatactgtgaaaaaggtctctttggaacttggtgggaatgcaccttgcattgtttttgatgatgcagacattgatgttgctgttaaaggcagtcttgctgccaagttccgtaacagtggacagacatgtgtttgtgcaaacaggatattggtgcaagaaggtatctacgaaaagtttgcatctgcattcatcaaggctgttcagagtttgaaggttgggaatgggctagaagagagtacatctcagggtcctctgattaacgaagctgctgttcaaaaggtgcatattttggccactaatatgttccaactacttagtctcccgccctccctcctccatccctaaagtgagcaattactcatgctttatttcattatttgttggcctatttccaccccctctaggtggagaagttcataaatgacgcgacttcaaaggtaatctcaaatcatctaagaatgtgcattttcccttccacaatgggagggttcacaaaaggaaaaaaggaactggactgatttcctgcttctaggacgtgttggtctgtctgcagttcactcaggacagaccagtttcttgaatttcttttggctgagatcagatcaacctgaattggttaatatgtgggtttaagttggaatatctggttctcgcttacttcattgagaccttaaacatggtttttggtgttttgttgcctctctttgtaatgcatgtgaagtaccctctaatctatttgtagggagcaaatgtcatgctaggtggtaaaagacacagcctggggatgtcattttatgagccaactgtagtagggaatgtcagcaatgatatgcttcttttcagagaagaagtttttggtccagttgcaccccttataccattcaaaactgaggaagaagctgtccatatggccaacgatacaaacgcaggcttagctgcatacatatttaccaagagcatacctcgttcatggcgtgtatccgaatctcttgaatacggcttagttggggtaaacgaggggattatttcaacagaggtggcaccatttggcggagtaaagcagtctggtcttgggagagaaggatcgaagtacggcgtcgacgaatacttggagctcaagtacatctgcatgggcaacttgggttgagtcatgaaatcggcctcaggctagaaacgcatggaagagatgatgaaccgagagaccaagatggcaggcgtctagctacaagaccggaggaacatggctgaaaggggccggccactggttgtgggggagcagttttcgaataaagcgaataagccgcggaacatgaacaaaagaagccgaaatgagttgtaaatgacgtgaactataaagtatggcttcgcctccggacttttgtatacgtaatcatggcactacttgtctatagtgtctccaaagacgtccatgttacagaataaaagcgtatagggtggatgctacattacaggctgtcggtggtatgtacacctcgcctgattcctgacgaaataaagctggatactgcattcttgcctgcaggggt

SEQ ID NO: 152118 - DNA, 2218 bp, Zea mays
  Clone ID: MRT4577_70293C.1
ccggccgggaaaaagattaaaagtggggtatccagtcggaagcggggggcccttccctccggcgtccgccgccgtcaccactcgtcgttttcctagttcgcacacccatccggcctcccccccgtctcgatagtcgataccaggttctaaatggcgatggcgatgatggctatgcgacgcgcggtggcgctcggcgctcgccacatccccgccgccgcagcctcttcgttccgagtcgtctccctccgccacatgagcgcggacgcgggcgccgcgatggagaagatccgcgccgccgggctgctcaggacgcaggggcttatcgctgggcagtgggtggacgcctacgacggaaagaccattgaggtgcaaaatccagcaactggtgaggtcctggcaaacgtgtcctgtatgggcagcagagaaacatctgatgctattgcttctgctcacagtacattctattcttggagtaaattcactgcaagtgagaggagcaaggcactaagaaaatggtacgatctaattatttcacacaaggaagagcttgcacttctcatgacactggagcaggggaaacctatgaaagaagcccttggtgaggtcaattatggtgcaagtttcatagaatattttgcagaggaagcaaagcgtatatatggtgacatcattcccccaactttatctgatcgcagattgttggttttgaagcagcctgttggggtagttggagctattacaccatggaattttccattagcaatgataacccggaaggttggaccagctttggcctgtggctgtactgttgttgtcaagccatcggagttcacacctctgacagcattagctgcagcagatcttgctcttcaagcgggaataccagcgggtgcattgaatgttgtgatgggtaatgctgctgagataggtgatgcgttgctgcagagtacacaggtcagaaagattacattcactggatcaacagctgttggcaaaaaactgatggctggatctgcaaatactgtgaaaaaggtctccttggaacttggtgggaatgcaccttgcattgttttcgatgatgcggacattgatgttgctgttaaaggcagtcttgctgccaagttccgtaacagtggacagacatgtgtttgtgcaaacaggatattggtgcaagaaggtatctacgaaaagtttgcaaaagcattcatccaggctgttcagagtttgaaggtcggtaacggtctagaagagagtacatctcagggtcctctgattaacgaagctgctgttcaaaaggtggagaagttcataaatgacgcaacttcaaagggagcaaatgtcatgctaggtggtaaaagacacagcctgggaatgtcattttatgagccaactgtagtagggaatgtcagcaatgatatgcttcttttcagagaagaagtttttggtccagttgcaccccttataccgttcaaaactgaggaagaagcagtccatatggccaacgatacaaacgcaggcttagctgcatacatttttaccaagagcatacctcgttcatggcgtgtatctgaatctcttgagtacggcttagttggggtaaacgaggggattatttcaacggaggtggcgccatttggcggagtaaagcagtctggtctagggagagaaggatcgaagtacggcattgacgagtacttggagctcaagtacatctgcatgggcaacttgggttgagtcctgaagtcggcctctagctcgaaacactcggcagatgatgaacggagaaaccaggcgtgcttagaagggcgtgagttgcgtttagctgcaagatcggtcatgatggctgtgggagagcagttttagaataaatcgaataagccgcggagcattaaataaaagaagtggaaatgagatgtaaatggcgtggaactataaagtatggcttcaccttcgaacctgtatacgtcatgatggcattcttgtctatagtgtctccaaagacgtccatgttacagaataaaagcgtatagggtggatgctacgttacaggctgtcggtggtatgtacacctcgcctgattcctgacgaaataaagctggatactgcattcttgcggctcttgcctgcaggggtaacatggtggttctagtaggttagccgatctttcaatcagtggtgctggtgtattcaatgaaaccatggatagtcccccccttct

SEQ ID NO: 152119 - DNA, 418 bp, Zea mays
  Clone ID: MRT4577_70295C.1
cctcgaggccggccgggattttttacgtatcgagctccttccagatcctccatgacggtaatccctctccgccatccattaccttcactcctgcgatcacgcaaccccagatcgagcctctggtccatactctaacccgactccgtgatatatgctcgacgctggccactactccttccctggcgaggcggagtccgccctctccctctgctagtacatggatgacatcgaggatatgcagctgcatgcgtgatttgatgctgctggaatgctacggcatggagtgtgcctacgacgatggatacctcaagcggctggccggcttctcctgcctcacctgggagccggatggagtggccggaatgtgtaccgactgcagcctcgtctgtgacgacggtcatgagattgttgaactttg

SEQ ID NO: 152120 - DNA, 1079 bp, Zea mays
  unsure (1)..(1079): unsure at all n locations
  Clone ID: MRT4577_70297C.1
catggccatatggattcaccatcccaatttctttttcacaaaaatttcccatatcccgtgtaacacatcatcttttttaaaaagaaacaagttttaaatatctaagcagggctaagcatctttagttctcttttataaacagtaatcaaggaatagtaatcaaattccaaggaatggtaatgcatcaactgtttattcacacaactcctatcacctaatgcaacatataagtgataaaagttttataacaacaagggggtggcaaatgcaccggggcttgcctggaataacactaagttagtgttgttagatgacgaccacttggggagcatctcccattctggcacttgatcagatcatctagccttcaggttcattcaccagcatcattttggatcaactcggctcttgttcttcacatcacgtgattacttaacgtaccaattcacaaaccgacccgaagatnccgcgagaaaggcgaggttcccggttcggaccttccatcgaacacttggcaaacgtcgcacggaccttgcttctttaccggttaactccctcatcaacacacacaatagtaatcgacgtcgagcgctaaaacgacagggcgagaacaaaacctcaccgggggtcgaaggtgtcgtaggtggggcgtgtgccataggagaggctgagtgcttgcagcagcagggccgaaagggaagctgtggctggggcaggggcgaggtcggccaccaaggagatggctgggggcagcgacggccatggaacctagcaggggcatcgagtaaaggggctggcatccagggcaccatggaaaaactcggctagggcttgagggaggagggcagagagctgctggcgagctggactgagggcaggcgccataggatggagcagggatggcggccatcagtagagagggctgggcgtggggtggaagcctccatgggctgctcggctgggcaccatgggatatggatgagcaggaggcggtgcagagcaaggagccgaagatagaagatgcggtggggagagaggcttccaggagccgtgcgtcacagcaagggaggaggcaacat

SEQ ID NO: 152121 - DNA, 670 bp, Zea mays
  Clone ID: MRT4577_70298C.1
ccacgcgtccgggccgcttttttttttttttttttctttttttttttttttttttttttttttttttttttttttttttttttttttttttttttttttttttacccgccaagggcagaaagaaaaaaatttccgccaaacccttgggggcccctggaaaaaaaaaaaaaaaccctaggcgcagggttggcccccttgcaaaacccagaaaaagagaaagaaaaacgacgggaaccctcgggggaacccaggaaaacgtttttattttaaattacccccggaaagagcctttcggcattttgggggcatttccaagggagcttggtgatgggacggacctgaccagtcaccaccttctttgaaaaaaccccagcctggggttttaactggctggaacctccaaggggggggccatggggccaaagacgggcgtcctgaaactgaaggcctcctgcgcccgggggccccacccgcgctgaatgcccaagacggggctaagggtggggggggacgactccaaaaaaactactttgttgaggggccccgtttcccggggtcccccgccgaaaaagggaaacttggggcgctgtttgggcgccctttgagaccgcaccttggccttggacgcctgggtgctcaacatgtatttcgggcaggcgttgagcgacgg

SEQ ID NO: 152122 - DNA, 783 bp, Zea mays
  Clone ID: MRT4577_7029C.1
cccacgcgtccgcccacgcgtccggctagctagcacctagcagtcgtacacacgggctagcagtcgatcacaaaccaatcgcggagaggcaatcacgtacgtatacacacgggcacgtaactagctatctagctagcagtcgtagagtgacgatgaggggtctctctgttgcggtcgctctggtcgtggtggtggccgcggcctgcctcgccgcgccgcggggcgcggacggggcggtcgagtgcggggcgacgccgagggacacggtggcgctgaggctggcgccccgcgtcggcggcggaggaccgtcgtccccttccgccgcctcctgagccactcccacttcgtccaggacgtcgtccttagttccgacggccaattcgcatgctcgttttcctgcgaccgcgagctccgcctctgggacctctccaccggcctcaccacccgacgattcgtcggacacgagaaggacgtcatctccgtcgccttctccgtcgacaaccgccagatcgtctccgcgtcccgcgacaagaccatcaagctctggaacactctcggcgagtgcaagtacaccatcggcggcgacctcggcggcggcgagggccacaacgggtgggtctcctgcgttaggttctccccacacaccttccagcccaccatcgtctccggatcctgggaccgcaccgtcaaggtctggaaccttaccaactgcaagctgccctgcactctggatgtgaacggtggctatgctaaaggcgtcactgggagcccccaaggaaatct

SEQ ID NO: 152123 - DNA, 385 bp, Zea mays
  Clone ID: MRT4577_702C.1
cacgtagcggcgcgctctagcacgactctaacacaacggctccagcagataccggtcttgcgcatctagcgttctagcgagctcaacagatgcctccatatgcacagtgctcactagctgctagtgccgttactccacagttcctataaccagtatctacaacgggctcagaacatgcaaccgtgcaagcctacacgctacagctagcgcttgcggccagcgccttacaacaacctattgcacaattgcaacatcaatacttggcacatctaaccctgcaaaccattgtaacgcaacagctacagcaacaacagctgctgccattactgatccacctagccgaggcgaaccctgtgacctacttgcaacagcagctgtttgcata

SEQ ID NO: 152124 - DNA, 1150 bp, Zea mays
  Clone ID: MRT4577_70300C.1
gatgttaatccatcatggcatatgattcaccatctcaattcttttcacaaaaattcccattcccgtgtacacatcatcttataaaaagaacaaccttttaatatctaagcaggactaagcatctttagtctcttttataacaggaatcaaggaatagtaatcaaattccaaggaaatggtaatgcatcaattgtttattcacacaactcctatcacctaatgcaacatataagtgataaaagttttataacaacaaggggtggcaaatgcaccggggcttgcctgggataacactaggttagtgtggttagatgatgaccacttggtgagcatctctcatcctggtgcttgtttgattcatccactttagcttcgtccatcagcatcaccttgagatcattccagttgttgtcctccacattacgagatcaatgaacgtaccatactaaaccaaataacggaaaacggcgacgattcaaactcaatcattccgtcgagcgctaggtgtgtgatgcgcgagagctttctttattcttctccacccaactgcctcaggtgtttctccacaaaaatcacaaacataagcacacatatacacacgattagcatttaattaatcagcgtcgaatacatgtaccggagaggaataaacacaaggagaacaatgggtcctcactgggattcgacgacatcgtgaccggagtgcacagatcaagtgtaacctgctgcgacattacgtcgagcacgtcgagggcgcgacacgaagaggctctatggctgttgctgttccatagccaagggcgagagcaagcaccagggagccgcacgacgtgtaggaagcagcatcccggcgccctgaggagatccagcgaggcgaggttgcaggggcgaggtcggccaccaaggagatggctgggacagcgacggccatggaacctagcaggggcatcgagtaaaggggctggcattcagggcaccatggaaaaactcggctagggcttgagggaggagggcagagagctgctggcgagctggactgagggcaggcgctaaaacttgtgctcgcagaggtgatgagggatggagataaggccgacaggcaacatggagacgtgcgtccatgaaaacccggccggcctcgagggtccca

SEQ ID NO: 152125 - DNA, 458 bp, Zea mays
  Clone ID: MRT4577_70301C.1
agaatctagaaatgtactttcttatttctgggaagccacaaacatcatccaaaaaacttcattattgaactataactcataagcaatctaaaagagggcaccaccaatgatgggttgttggtagaacgctgatgggtttgccacagcaagttggttgaatggcatcatttgttgcaaatgtaagatgccgccagcgttagacacaaagtgcacgtggaacgggaacaactgtagctgtgttaagagggcattagggctcacataagctagctgtttttaagccggttgttttccctgcagcaaaaaagcagcacagttcaatgctgacagttggttgaatggaagaaattgctggcggttggcagcagctagctgactgaaaggtagttgttgctgcaaaatagcagcaaagctcaatgcagccagttggttgaatggaagaaactgctgttgctgag

SEQ ID NO: 152126 - DNA, 2008 bp, Zea mays
  Clone ID: MRT4577_70302C.1
ataataacttaatttacattaactggtacaatatagaaagagtgattattacaatataagggtacgagtgcttctacttattacgtcacaggaaggtagacaccttccataagttttacttagttttcatcctcttgcttcggtatgatcttggaacagaagcagcaaaactgtacagtctcttcacctacaacaacatgggttcgaaaaccctgagtacggagtgtactttcgcaagtcttacccaactaaagaaaagactctcaaggatatgttggcctttaggagtcaaggtaaggtttatcaagaaccaatgactcaatttgcccaaagcttactaaagtcggtccttatgaattctttttacttgtcaagttaagtaatttcctaaatcttgattcctttcctaatctagatcaaacacttggcctgcactagccatcttttatcaaactttgaatttacttgtcactacgatgtaggtcagtgaccaagtcttcatatccgagaagtacggcgatccgaatcgattaatactcagttgaggatctccaaccacacgacatatgtagcacttaacccttgcatatgttaactcgcccacgggtttctcaagaccagaacgggtccccgccaaccgagagctcagtaccccaccatccagcctcttgccaggtggatacacgatactctcgccatctctccactcccattgcgggccggcctttctggtatctggtccagccgaggctaagcttacccatgacgaggcatgtggtcagttaaagggtcctagatcagcaggccaacaatcggaacggtccttaatcgacacagacgggcgacctttcctgctcaacgtctggtctcattttagttcaaccatttcccaatccttggtacctgacagaggtactttttctagatgttgaatccatcatggccatatggattcaccatccccatttctttttcacaacaatttcccatatcccgtgtaacacagcatctttttaaaaagaacaacttttaattatctaagcagggctaagcatctttagttctcttttataaacaggaatcaaggaatagtaatcaaattccaaggaatggtaatgcatcaactgtttattcacacaactcctatcacctaatgcaacatataagtgataaaagctttataacaacaagggggtggcaaatgccccggggcttgcctgggataaaacactaagttagtgttgttagacgacgtccacttggagagcatctcacatcctggcgcttgatccgatcatgaaatcttcaagttcattcatcagtatcactttgcgaagaaacccacgattaacagcatcttgtggtcgactcagctcgacttccgcatcacgtgatcaactagcgtaccaattcacaaaccgacccgaagatccgcgagaaaggcgaggttcccggttcggaccttccatcgaacacttggcaaacgtcgcacggacctcgcttctttaccggttaactccctcatcaacacacacaattcacacacagtaatcgacgtcgagcgctaaaacgacagggcgagaacagaacctcaccgggggtcgacggtgtcgcaggtggggctgcacacaacacaaaactcctcatggtcatttcatcgagcaccagggagatggcgcaaacaccaatagaaaggggctggacgagcaccgtgtgccataggagaggctgagtgcttgcagcagcagggccgaaggggaagctgtggctggggcaggggcgaggtcggccaccagggagatggccgacgagcacaggcaagcacagtagggcgagctcgacctgggtagaggaaaaacgtgatggggaggaagtgacgtgaaggagatacacactacagaagaagccaacggcggctggattttctttgtagagattttgagatacgcctggtcggatgaggctaaagcctgaaacaacgatgagataaggctaaaggaaaagcggt

SEQ ID NO: 152127 - DNA, 444 bp, Zea mays
  Clone ID: MRT4577_70304C.1
acacccaagaaatgaaaaaccctatcaacaaaacaaaaccaaagcgagggacaaaaccaaagagtgggaaaaagacaccaacaaaaagaggacctagggtgtaaaaaaaacaaaatgaaggaacaaggagcgaacaaaaagggggacactccagaaaaatgacagcaatgcaggaaaagaatgaggactctcccggggaagatgctacgtttttccaatggtgaaaaaaaaaaaacccgaaggctatggtgactgcgcaaggacggacccatgggaaaaaaccaaacggacgcagggtaaaaccacgggaaatggggaccgcacctgaaggaaaaccaaccgaccctagagtgagccccagaataccttaccggaaccaggaacaaaaccaattcctgcgaaaaagaggtatccgaacacagggccacacaaaagacaaaccgg

SEQ ID NO: 152128 - DNA, 257 bp, Zea mays
  Clone ID: MRT4577_70305C.1
agttcaagcacctcctcttcccccgccgggcaacaactcagccgccgcaaccgccacatcagccatgggcgcctgcgcaaccaagcccaagacgcttgaggggcaggccccagctgacgccgccgtctccaaacccagggtggcgcccgacgccactctaatctacgttaaggttgctgccgtccataatttgcctagactgtcagcgtaccgcaattcatgtcaagcgatatgcacttgatacaccccccatttct

SEQ ID NO: 152129 - DNA, 400 bp, Zea mays
  Clone ID: MRT4577_70309C.1
atcttatagaggctgggaccttatttctggtccattttctaaaaaaaaagtcaagaatttctaaggttcattaacaactccaactcttcacaagttattctttccttgcggttacaagtacacgcaagatttgttgatcctctgcagcaatttcttaaacgcaacatccacggggtttagataccgagaaagaaaattggtgcctggtataccatctgaacccttaagctgacatctagatgaatgttcggtcattatcttgattggctgcagcctgcagctatgggagcaaccctcatgcactttgctggcccgtgctgctacattctgaactttttccggtgccttgtgccacatggactaagctggaggctccaacaaacagcatagctgatggaac

SEQ ID NO: 152130 - DNA, 1811 bp, Zea mays
  Clone ID: MRT4577_70310C.1
ctcgaggcccggccgggactgtaggctgccggtagccaatgcaagaaacttggaagcaccggtagccactgagcgcagcatacaaagttgagagatggatgtggtctcgtggtttagccaggtctcggtggtggtaagcgttctggccgtgtgctggaccgtgttatggcagaacctgcagcacatccacctgcatcagttcttcgcgcgcagcttcaaccgccgcccagtgacaccgtgccgtggagccgtgcctcacgcgccgagcgccggttcttccggctcgagttccacgagggccaccgcgacctggtgctcaacgagtacctcccgtacgtgcgcaggcagggccgcgccgtcatggccaagaaccgccagcgaagactctacacgaacatcctcagggaaggctttgacgacggtttctaccgagacgtttggacgcatgtcccgttcgagcaccccaagacgttcgacaagctggccatggacccggcgaagaagaaggacgtcatcgacgacctcgacatgttcaagcagagcaaggactactacaaccgcgtggggaagccgtggaagcgggggtatctcctgtacgggccgccgggcaccggcaagtccaccatggtcgccgcgatggccaaccacctcgggtacgacgtctacgacttcgagctcacgtcggtgaagaccaacaccgacctccggaagctgctcatagagaccaagagcaagtccatcatggtgttcgaggacatcgactgctcgctccaagtgaccggcaagcgcaaaagcaaggaggaggaggagggttcgaaagacgggaacggggacgacccttctgcggcgaaacagaaggaggaggaggaggacgccaagagcagcagcaaggtcactctgtccggcctgctcaacttcatcgacggcatctggtcggcgtgcggcgaggagcggctcgtcgtgttcaccaccaaccacgtcgacaagctggacccggcgctgatccggacggggcggatggacaagaagatcgagatgtcctactgcgacttcgagtccttcaagttcctggcccggatgcacctccgcgacgacgtcgtcgaggcacacggggagcaatgcgaccgtgttagggctttgctccaggaagtgaacatggtgcccgtcgacgtcggcgagcacctcacgcccaggagccccgacgaattcgaagacgctggaccatgcctcgcgaggctggtcaccgcgttggagaaggccaagaaggaggctgatatactaccgaggccacaggcccaaccggatgtcagcggcatcgttgtggacgctggtagtaaatagtaataactacggtccgctagggctactccgatgaccccaccaggccaccatgttggttccagcggtttacctttctacagtgcatatacacttgtaatctactactactttataagactgtaaagaaggcgtccaccaccacatatgtggtgtagcatggctccgctcccgcgattctcgccaccgccccgctctatctacccctgacggacgccattccagggatgacagccttatacgcatctgtgacctgccatccccatccacgcgccgtgcccccatccgcactcagcatcccccattttttttgaaggatcaggagggggaaacccctactgcgcattttattagaaagcgaaaattaaaggtaaggccctggtccttttacaatcaataaaaagaagagaaaaagaaagaaaaaaggaagagctatttctatatttgccaaaaaaaaaaaaaaaaaagcggcc

SEQ ID NO: 152131 - DNA, 547 bp, Zea mays
  Clone ID: MRT4577_70312C.1
cgagcggccgcccgggcaggtacaagctttttttttttttttttttttttttttttgttttttttttttttttttttttttaaaatccttttttcccaatattattaccccccatcaaaaaagtggatcaaggagattgttgacaccaccgccgccaccaccccgcgggggacaaacaacaaaccgggggcggccacaagtgggggggccatgcgagccaaccaggggggagtaataggggaaacagcttcctgcgggaaaaaggtgttagctgacaaaaacccacaacaaaataccaaccagaataaaagggaaaaaaggcgggggcgaaaaaggggggaaacaaaaaacaatagcgggggggccaaagcgggccgctcaccaagaaaaaaagcggtgccaccagcggcaataaaaaagccaaaaaaccgggagaggaggcgggcggaaagaggggccctactcctcctccaagactaattacttatggggggcggttcggctgcggcgggcagggggatgttacccataggaggtggttctgcgg

SEQ ID NO: 152132 - DNA, 813 bp, Zea mays
  Clone ID: MRT4577_70313C.1
ggtaccctcgcggccggccgggactgtaggctgccggtagccaatgcaagaaacttggaagcaccggtagccactgagcgcagcatacaaagttgagagatggatgtggtctcgtggtttagccaggtctcggtggtggtaagcgttctggccgtgtgctggaccgtgttatggcagaacctgcagcacatccacctgcagcagttcttcgcgcgcagcttcaaccgtcgcgcgcggcggctcgccgcggtggtcgacccttacctgtcggtgaccttcgaggagtacgagggcgggcgcatcaagagcagcgacgccttcgacgagatcaagtcctacctcaccacggcgagcacgcgcgacgtgcgccacctcagggccgccaccgacagggacaagttcgtgttcagcatggccaagggcgaggaggtcaccgacacattccggggcgccatggtctggtggtcggccgccggcgtgccgccgcccagtgacaccgtgccgtggagccgtgcctcacgcgccgagcgccggttcttccggctcgagttccacgagggccaccgcgacctggtgctcaacgagtacctcccgtacgtgcgcaggcagggccgcgccgtcatggccaagaaccgccagcgaagactctacacgaacatcctcagggaaggctttgacgacggtttctaccgagacgtttggacgcatgtcccgttcgagcaccccaagacgttcgacaagctggccatggacccggcgaagaagaaagacgtcatcgacgacctcgacatgttcaagcagagcaaggactac

SEQ ID NO: 152133 - DNA, 1403 bp, Zea mays
  Clone ID: MRT4577_70314C.1
attcaatctttcatagacagggtggccgaccgtcttccgagttggaaagctgatcttatgactagagccggtaggaagattatggttcagcatgtgctctccagtatgatcatatatttggctatggccattgattttcctcaatgggctttggaggcaattgataaaattagaaagggttttctttggaaaggccgcaaggaagtcaggggaggacattgtctggttgcttggggaagggtgtgcagacccctccatttgggagggctgggtatttctagtttaaaggaactttgctgggcccttcgtatgagatggttatggcttcataaaactgatcctgaaaaaccttgggctaatctccctatccaagttccaaaaaaggcagaagctttcttctccactgttttggtctctaaggttggaaatggagcacacactctgttttggacaaataaatggatcttggggcagaatgtgtgtagtctggcgcctaggttattcgccatcattcctaaaaggattgcaaatagaagaactgtgcttgaagctcttgccaacagaaaatggatatctgatataaagggtgctctgtctgtgggagttctagtggattatctgaatctttgggagcttctttcagaaatagtgttgcagcctgaagtggaggataagcacatttttagtattgcagcagatggtaaatactcggctaagtcggcttatgagggcctctttgctgggtcaacgtcctttggtctctatcacctgatttggaaaacctgggcacctctaaagtgtcggttctttctttggctggttgctaacaaaagatgctggaccgctgacaggcttgcgaagagaggcttagatcatccagctaggtgcctcttttgtgaccaggaagctgaaactattgatcacatcctcgtctcctgtgtgttcacaagagtattctggtttactcttcttaaaccgtttgggtttcagagactggctccccagcctggacattcttcatttatggcttggtgggagcagatttctgggttggcttctggtatccgtggtaaaggtcttaattctcttgtggccttaggagcttggataacctggaagcatcgtaatagttgtgtttttgatggttgtactcctagtttagatctgtccattaatttagccagggaggagaggcagtcttgggagatggctggggctaagggtctttcataccttgctgccctaattcctggagactagggagttgtttagtttgatggattttttcagtttgctgtgtttctggcccccatgaggaggccttgtaatttgtccagatctctttgatctggatatatctcttcttcttaatatattgaggcgcagttctcctgcgttttccc

SEQ ID NO: 152134 - DNA, 385 bp, Zea mays
  unsure (1)..(385): unsure at all n locations
  Clone ID: MRT4577_70315C.1
ccccttacattttggctttaaatttttcattttttgtcccacaaaacttttttccgtgggggccggggttaaattttggttggtggcaatacctttcgctttttccctccaaaaattttttgaaaaacaacattcttttttttctttcacaaggggcgggttttgggcttaatttttgggggcccgtggcccccntttttacattattttccgatttttcccccctccttattgcgaccgggtgggtttttccccgttttttttaacacccaggctttttttaccaccggggtttgatttttcccctttaaatattgtcccttgcttttttagtccttttttttgcaacttgggtacctcttttggaattttattttttttttaa

SEQ ID NO: 152135 - DNA, 425 bp, Zea mays
  Clone ID: MRT4577_70316C.1
ccctcccgcacatttttttttttttttctttttttgttctcaagaacaaaaaaatcccctgaggggggcgccgccttttttaaaagggacccagggcccctccggggccttatccacttttttgtcccccccctgtgcccttagacccccttgccccttatgcccccgaaaatttttatgttgaccgcatttttgacgcgaaagtggcccccctcgaaaaaataattggttttaaccccaagggttttttccctcttaatccccaagaagggcccaccctccggattgtttcttcagagcccccaatttcttaggggggggccttctgtaaagctcttccaatggggcctttttttgggggggagactgcccaccccggggggaacaaaaccgggggtcccccaaataaaccagatattggggcc

SEQ ID NO: 152136 - DNA, 469 bp, Zea mays
  Clone ID: MRT4577_70317C.1
accaaaaaaaaccttttcccaggttattccctaaaaaacacagggaatttttttttggaagagagaggggaacatacttgacacccttacatggggggggccccaacgggaggcggagcaaataattttttttggttccctttcaccccccaaaaggccaccaaacccaattattaattggcttattaacttattggacccgcgggggggggcaaccaacctttataactcccatcccacaaaactttaatgccccggtggaacaaaaacaacaatcgtcggcgtcgtcgtttttaatttttgggccttcctgggccaacaatgcaagacccttcccacgaccttgaaaaacccgaggggggccctcgtcctggttaagggccttgacatgaacccctggcccgcgtaaaagaacccccccctggccagggggggcttgaacttgccaacccatgccttggaccccccc

SEQ ID NO: 152137 - DNA, 1508 bp, Zea mays
  unsure (1)..(1508): unsure at all n locations
  Clone ID: MRT4577_70318C.1
ccggccgggagcctagccctttcgttcgcactcgatacatttcgcgtcagccctcgggtggtcagtccatatagctaagccgcctacctcccgcaagctctgcgatatatatgcaaacccagcttgccgatacagcgcacgcagccgccgggggtcgtctcagccagccccggctagctccaacaccgtgcagctcggccggcaaaaactagctaagctagccagtagccaccgtttcgttccaggctccagcctaggggcgcgcgacgacgacatggggttgggagctgtggctgcgacccgggaggatgaggaggcgaagatggaggccggcggcgacaccgctggccagaagctcgacgccggcgcgctcttcgtgctccagtccaaaggttcgtggctgcactgcgggtaccacttgacgacgtcgatcgtggctccggcgctgctgagcctgccgttcgcgttcgcgtcgctggggtgggcggcggggacgatctgcctcgtcatcgccgcggccgtcaccttctactcctacaacctcatctcgctcgtcctggagcaccacgcgcggcagggccgccggcagctccgcttcagggacatgatcacggacatactaggtcctggatggggcaaatactatattgggccgatccagttcctggtgtgtttcggagcagtcgtcgggtgcactctcctggccggacagagcatgaaggcaatctacctgctagccaaccccggcggcacgatcaagctgtacgtgttcgtggccatcttcggcgtcttcatgatgatcctggcgcagctgccgtccttccactcgctccgccacgtcaacctcgtctccctgctgctctgcctcgcctacagcttctgcgccgtcgccggctccatatacctaggaaactccgataaggcgcccccgaaggactactccatctcaggtgacgcccagaaccgtgtgttcggcgtcttcaacgccatcgccatcatcgccaccacgtatggcaacggcatcatccctgagatacaggcaacggtggcggcgccggtgacggggaagatgttccgggggctgtgcctgtgctacgcggtggtggtcacgaccttcttcagcgtggccatctcggggtactgggcggtcggcaaccaggcgcagggcatcctgctgagcaacttcatggtggacggcgcggccgtgatccccaagggcctccttctcgtcacccagctcttcacgctgctgcagctctcggcggtgggcgtggtgtacctgcagcccaccaacgaggtcctggagggcctcttctcggacgccaagcagggtcagtacgcggcgcggaacgtggtgccgcgcctcgtgtcgcgcacggtggccgtcgcgctggccaccaccgtcgcggccatgctgcccttcttcggggacatgaactcgctcatcggcgccttcggnttcctgccgctcgacttcgccgtgccagctctcttctacacgtcacctt

SEQ ID NO: 152138 - DNA, 359 bp, Zea mays
  unsure (1)..(359): unsure at all n locations
  Clone ID: MRT4577_70319C.1
agatctgccgatcaggtttctccctaggccatcnataccttgtcatacctcgtctactaggtttgccggttttccttgccctggttcctcattctgatgtcctccccnccaccctgcaccaccttcctgagtcgccttccccattcgcaccttggcagggatcaggttgtccacttcccatcctccctccccagtctacatcttcccctgcacacccattacaaacgagggatacaagtaccatggctttttctctcagggatcgattactggaaacgattatcccactgattctgtcaacgacagactacccatctttcgatcttcctttgcttgcacatgaactgcaaccggaaacc

SEQ ID NO: 152139 - DNA, 154 bp, Zea mays
  Clone ID: MRT4577_70320C.1
caatatgctgactttccttcatccgcacattcacgagctcctgtgcaaccgaaccactaacacggagcacaagttcgttcttaactacacgaacaagccaatcatcttctccatttctcgcctcgaccatttcaacaacttgacttttcttttt

SEQ ID NO: 152140 - DNA, 606 bp, Zea mays
  Clone ID: MRT4577_70321C.1
ggccgcgggttttttttttttttttttgtccatgaacacacgacatcggctaggaaatagttgaattacattatgtaatgaaacatgcataacaacgacattacatacgacaataaacttattgaattgaagatccacctacgtagttataaaacatatggattcacatgcttccacgtcgagcccacaaattctctacaagatcattttgtagtgtcgacgacctttcttggcgacgaagatcgaagtgattgatcacccattcagaccgtccttcttgaatgagttgcgatggttcaatacctgaagtgccgtctccgaaatactggaccacgcagcaccgcccaccgtgcttgaagaacaccaaatgcgcgctcaatatcctttctgcaacttttctccagcttgaccttcatgttggaggtgtcaggaggatcagaagatggctgggtgtgcattatggcagggcgctagacggaagggacggcgcagagggccatttgaagccctcgcagcgcagacggcccacgcgacgcggtggaggggagacgcagggaagcgaagcggccagcccaggccaggcgtgcgggggagtgtcccggccgg

SEQ ID NO: 152141 - DNA, 352 bp, Zea mays
  Clone ID: MRT4577_70322C.1
ggttttgtgttttttttttatttttttttttttttttttttttttttttttttttttttttttttttttttttttttttttttttttttggggggggggttgctcttttccgatttttttgggaaaaaaccccgggttccccaactcaaattgggggggggggaggaagtaattttttttcattagtcaaaaatttccaggggtttttttccagataagcccaattgcccaaaaaaatccggcggggcaacgcaacgctggggcctgaatttatttggaaagcaaaaacctcctgggggcctcgacaacattctttatgccccccaggaaaaaaaaagcttttttgccattg

SEQ ID NO: 152142 - DNA, 422 bp, Zea mays
  Clone ID: MRT4577_70323C.1
gagagaggcttgtgaatgctgtggccggggcagggagcttcaacagtggctgcagctggcggtcaagctcaagataatcaagattgacaactttgaccccgacccctacgtgctatccaagtgccgctccatggacgagaaggatctccatgctatagttaaagaactagagtaggacattggacaactgataagacttacttctgactattctgtcaaggaggcccaattacttaatgagaaacatgtgctggaaaatgcattgcatatatttacatgcaacataattcggttgatgatgcatcaaaagctttgaattacagataggaaattattgaaaaaatcatccatcttacatatgcattgatattatcaatttgggtgtgatgatatctaacctgaagatgatgtgagctccgact

SEQ ID NO: 152143 - DNA, 276 bp, Zea mays
  Clone ID: MRT4577_70324C.1
caatgtctacatttcatacctttttttttgtttcctccaccccgaggcaaaagcgaaatggaaccctttatttaacccaatttttccaaggctccgtgccatggtcctaatagggaacgcgtcaaacccccacccccacccaaactgtgaaaaggacccctagggatcctccccgttgcctcaaatccatcgaacaagttgaaagtccccatttttctataagggcttaccaccagcaaagctcactttaacaacagggtcattaaagaaacctgc

SEQ ID NO: 152144 - DNA, 360 bp, Zea mays
  Clone ID: MRT4577_70325C.1
attgtaaacaactagcagcatatatagcacattcaagctctcaacactggcacacacaatattatgcctccttatactcgttggcctatatgcatgtactggtacggcgaccacatcgccgcaacgctcgaaagctcctatagctctccatctttaccccgtagcctctcaccaccggtgtcttcaggtgtgtgaaatacccaattattcaaccctacatcatccatcacacaatcgcagcatgcatattacctttatgaaccctcgctgtacaacaataataagccctattacaacagttacctctggcgcatttattggcacaaaacataatggcacaacaactactacaacttgtgc

SEQ ID NO: 152145 - DNA, 315 bp, Zea mays
  Clone ID: MRT4577_70326C.1
cggaattgcaattctcggcccacgcttccgctctcttattatttcttgtgagcgactgggcaataataaagcctttcatctcatggttgccactccctagaaataagcatgtacatttctaagcacttaaaagggagaaatgaatttagttcggagggggggtggtatcaaggatgcaaattgaggaacacttatatgcgacgtcctaactgttgtatagtgttgcctacaccagatttcatccccactacttcacaaagtcaggcctggtaaatgggcttcttgctcgttagcttaggacagacctgacatctt

SEQ ID NO: 152146 - DNA, 517 bp, Zea mays
  Clone ID: MRT4577_70327C.1
tcgggtcgataccgaataatcatcgggcagcgagatgatgcggagcatcggcatagtcgagagagagcatgttccttcagccgtgtgcggtgagaatgccagccaattagcagccaggcagaagattatttcagcatagaggatttctatccatgatccaatgatacgtctgagcatcaatgggccatggtaggatttaggtgacgagagacgagacaatgagcctgcgatggatcctcattcttcaatccatcctccaggaaagcatcttcccaggatccacataagttcatcagggagaggagagatgtccgcgagcgcttcgggagccatccgcttgatcctcatccgacgatccccatcctggatcagtcgattcccctcgacgaggaaccactattatttcgtccatagagtttcccatttagtatgtagtctccagttgagcctcaccatttgggaaatattcccactagtcggagtcgtcttcaaccccatcatgaacgagcttttcacg

SEQ ID NO: 152147 - DNA, 358 bp, Zea mays
  unsure (1)..(358): unsure at all n locations
  Clone ID: MRT4577_70328C.1
acgtactcgatgcaaagggcggactcgatgccaacgtgttcaaactagaaaccaccgatgagcttttccaaggacgataccaaattgttgaaggcactgccatggactaacgaatgcctacgctatgaatgaacatgcttctcgaggtagacaacttgccatgattagaaacaacatattcctagcagcctganagatacatggtggtgaaatgaaactgaaaggcatatgatgtacagtgcatgcctcccagtttggtatgttgatggtgtaggggtgaaacttttaacggccattctatttcaaaaattttgcattttggtctgaacgtcttgcccagcttgtgagttgtttggtg

SEQ ID NO: 152148 - DNA, 267 bp, Zea mays
  Clone ID: MRT4577_70329C.1
ctgcttttaagcttagtaaccagggaccgaacgcctcggcgacctgctcgaccaggactaggtgcggcacgacctccagttcatagtccccgaacggagggagacgacaagcccatgggaccggcgagggcgaggaggacggggcctagaggaggacaggccagatcgtcggacccaaggccgccttccccggcgcacctcctactcccccgagcccgcttctcttaaaaattattttcccaatcagagaagacatctgctatgttt

SEQ ID NO: 152149 - DNA, 330 bp, Zea mays
  Clone ID: MRT4577_7032C.1
agcagtggtaacaacgcagagtactttttttttttttttttttttttttgggtctggttttgtaattctaataattgatttctagttggaataatgctaaataaaacattttactttaaaactgatctggactaaaggtccctttatttttcctaggttttctgttacttaagcaaactaggaaaaaaaatttcactcactgttcattaatttctaacgcatttctgaattttcctaagttttgggcaaaatagctttaaatggatatctacccgcgtactgtgcgttgttaccactgcctcccgcgtactctgcgttgttaccactgct

SEQ ID NO: 152150 - DNA, 254 bp, Zea mays
  unsure (1)..(254): unsure at all n locations
  Clone ID: MRT4577_70331C.1
ccgagctcacgncccttccctattctacccctctatcttcagaccttccccatctaccgtgcgctgccacaaaaccggcacacagcaccacgcactgctacatcgatgaacccaaggtggntggcgctacaaaccacggcggccggtgctaagagatgccgccaccatggcgtgcggagctggaaccggcgcggcgaggcgctataaccaaacacgtccgtgctgcaaccagcacatagcagcgctgggattga

SEQ ID NO: 152151 - DNA, 429 bp, Zea mays
  Clone ID: MRT4577_70332C.1
accactgacacatcatacataaaagtttacttatgcaccatgacttatatgcaagcgaaaatacggcaccaacaatgatacattgctcacaagatcactatatcagtccggggggcgcgtaccttgaacgacaggagtcgtcaatgtgggaaaacgcagccagccaaccgtacaggatgcaacaggaactggcaccacggatgttaccataataacgcttgatgcttcaacaaccgtaagtcctataacagcagttacctttggtccatttgagtggcacaaaacatcagggcacaacaactacaacaacttgtgctagcaaaccttgctgcatactctcagcaacatcagtttcttccattcaaccaactggctgcattgaactctgctgcttattggcaacaacaattaccattcagccagctagat

SEQ ID NO: 152152 - DNA, 501 bp, Zea mays
  Clone ID: MRT4577_70333C.1
gcctcattatgctccttggtctttctgcaagtgctgctacggcgagcattttgccgcaatgctcacaagctgctatggctgaccttcttcccccataccgtctcaccagcgatgacttgagtatgggaaaatccaattcttctaccctacaggatccaacaggcaatcgcagcaggcatctgacctttatcacccttgttcctccaacaatcattagccctattacagcagatacctttggtgcattcattgggccaaaacatcagggcccaacaactacaacaactcgtgctagcaaacctggctggctactctaaccaacagcagttacctttggtgcatttgttggcacaaaacatcagggcacaacaactacaacaactagcgctagcaaaccttgctgcatactctcagcaacatcagattggtcccatccaagcaactggatgaaatgaactctgctgcccaggggcagaaccaacggccaaaccttcagttagc

SEQ ID NO: 152153 - DNA, 433 bp, Zea mays
  Clone ID: MRT4577_70335C.1
agtaaatctcataagagggcaccaccaatgatgggttggtggtagaacgctgatgggtttggcaaagcaagttggttgaagggcagcaatagttgcagctgtaagagggtgccagggttaggcgcagcgtgctggtagaacggcaacaactgtggttgtatcaagaaggtagcagggctcacaccagctagctggctgaatggtagtagatgttgctgctgtaaataagcaggagagttcaatgctgccagttggttgaatggaagaaattgctgggggttagcagcaggtagctggctgaatggaacatgtggttgttgcgaactataaggataatttactgcagctagatggactaatggaaaaaactgttgctgctgagagtcgtcatacggtttggtagcacacacagttgtagccgttgtaccatgat

SEQ ID NO: 152154 - DNA, 840 bp, Zea mays
  Clone ID: MRT4577_70336C.1
cattgggtacctcgaggccggccggccgggatcgttactatgtctcctaatactgatacttacacccgcaccttgattgtggcgttaaagtcaccttctgttggcaagtcaacatcgcagatctctgagcttactggtgttcatcctcgtacgattaatcgtatctatagtagagctattgaggctggttttgagccaaacgttcttcctcttaagatcctcccagagcacgtacacgacgcccctcgctctggtcgaccttcaaagcagacagacgaggcgaaggagcagataatccaacaagtacgatgtgatagatatggacgagagaagagctgcgctgacgttgctggtgcactcagtcttcaaggagtcaatatatcacgcactacagtctggagggtattaagagcagcaggatacagaaagaccaagccaacgaggaagcctgggttgacacaggagatgaggagtgctcgtcttaagtgggcgatggatcacaaggattggacgttagaggactggaagaatgttatctggacagatgagacgtctgtggtgatcaaccaccgacgtgggggctataggatctggagaaaggcagacgagagagtagtcaagagctgtatccgtgagaggtggaagggatactctgagttcatgttctggggctgcttctcgtacgacaagaaaggtccatgccatatctatcagccagagacgaaggcagagaaagaggacgctgctcgtcggattgaacagctaaacgctgagcttgagccattaaagcgagaggagtgggagctatcttcagctatggcgagaacagggctgcgtaat

SEQ ID NO: 152155 - DNA, 365 bp, Zea mays
  Clone ID: MRT4577_70338C.1
tttttaaaaatctagaaatgtactttcttatttctgggacgccacaaacattatccaaaaaacttcattattgaactataactcataagcaatctaaaagagggcaccaccaatgatgggttgtttgtagaacactgttgagtttgccaaagcaagttgggtgaatggcaacaattgttgcagttgtaaaaaggtgccagcgttaggcatagagggcaggtaaaaccggcaccactgtttgttgttttaaaaaggcaacctggctcacattaactagctgggtgaatggtaaaaatttgttgctgctgtaaataaaccccaaagctcaatgcctctactcggctaaatagaaaaaaattctgggg

SEQ ID NO: 152156 - DNA, 297 bp, Zea mays
  Clone ID: MRT4577_70339C.1
aatgactgatatttttgtgttaaagaacttaacaaaagaaacgagccaaaggtaccaagagggaataaaagctacaagaaaacatcaatgaggcaatcagaacaaaggccaaaacaccgggaaggtcgtaatatattaacaaaagagccagcggaaacaatttgtggcagcaatgtgcaggctctcacccagcggtctgtgaaaaaaggcaaacaaacaggggctatagacaaaaggcatgtatggatggccgggatgggtaaccaaaacctaaatagatggggtagagcccccttg

SEQ ID NO: 152157 - DNA, 1453 bp, Zea mays
  Clone ID: MRT4577_70340C.1
agcacccgcggcccaccccggccccctaggctcccttcccgcaaaaccctagcgctctctctatctctctgtctgtcggcggcgatggaggatgctgccgagagccgcaagctcttcgtcggcgggatcccggccggggcgcaggaggcagacctgcgggcccacttcgcgcgcttcggcgaggtgcgctccgtcgtcgtcatgcgcgacagggagacgggccacggccggggcttcggcttcgtcgagtttgaggacaaggcagccgccgccgccgccgccgcgctgggcgacgcggacaggcccaggcacttcctctgcgggcgcgcggtggacgttaagagggccagggcaagagctccacgaaaccagcgcgagcagcactcccagcctcatcaggtcgaacaaggcttagaccaggggaaccaggacaatcagtaccccatggggaacggcaccgcggacagtggtgacaacgtgaactacggttcaaaaaaggtcttcgttggcggactgcaggatgacaccactgaggaggagttccgggcctactttgagacgtttggcactgtaacggatgtcgcggtgatatatgacagcgcaacgaaccggtcgagggggttcggcttcgtcacctttgattcggaggaagcagtagggaaggtgatgcggcagagctttcacgacttgaacgggaccaaggtagaagccaagattgctatccccaaggacgagcagtattaccgcaacagagggcgtggcgcacgctcctctggtgggagggtccctgctggctatgaaggctccatgtaccaaccgccatacaatgctggatatggctcctacaatggctacatgccacaacctgttcacgtgcagccctactttcctgccccctattttcctgtggcgggttatccctatgggagtggatacccaagccaagtcgtcatggcaaacgctcctgatatgatgtcaagatgggttcctccagcttatggaaattatcctcaaatgtatccatggtacattctatacagagctggttatggtggtccagccacctcttttcagcatggaattaatggtggaggagctgataacaaaaaggatcaaactaatgtagatatgcagcaagctgacaacacttctagcgttacaacgatgttggaacatatgaagctaggttcacaatgactttcaggactaatacttctacaatggtgacactggagtacaacaattgtttgggaactcgcaactgtgaagacgacttggacttagattctttggttgacaagtatatcattagaattcttccagcttacctacgattcctattcctcccgcctgtaaactagtaaaagcatgctgcaagttgttactggctcccctcccctcttgtaccaatgttaaattcttacgtcgtttaatgcatcagaatcatactgtt

SEQ ID NO: 152158 - DNA, 429 bp, Zea mays
  Clone ID: MRT4577_70341C.1
attgtcactgcccctcttgggctgcatgagcttatggtggtatgtgcttgtgagttccctctgttatttctatcattttcagcagctgttagtagagaagccaagtagatatgacgtggatatggtttgcagttattaaaacttagcagttattttggaattttgttaacaaatagatctctagaattgctgtcctcttctggaaaaagaatgttgaaattttctacaaaacaaaattataagtaatatctatgtagatagtggccttgtcaaccttcatgtatgtgtaccttgatgttatgtcgtatttgcatagtgattatttttaaggtctaagggcatttaagtactgtatactgtaagggcttatgtagcaactagtgtcagaaatgaactataagtgtataaaagtgtttaaaaagcaatttt

SEQ ID NO: 152159 - DNA, 489 bp, Zea mays
  Clone ID: MRT4577_70344C.1
ggccgccatgtgctggcaattccccttacgagtcgggacgggcattacttattttggaacccaaactcacaaaaaacttattatgactatactcatagaaactaaaagaggcaccaccaatgatgggttgttggtagaatgctgtagggtttgtcaaagcaagttggttgaatggcagcaattgttgcagttgtaagagggtgccagcgttaggcgcaacgtgctcggtagaacggcaacaactgtggttgtgtcaagaaggtagcagggctcacaccagctagctggctgaatggtagtagttgttactgctgtaaataagcaggagagttcaatgctgctagttggttgaatggaagaaattgctgggggtaggcagcaggtagctggctgaatggtagttgttgttgttgaaaattagaagcaaagtacagtgaacctaactggtagaatggaagaaactggttgtggtgagagttgctacctggt

SEQ ID NO: 152160 - DNA, 300 bp, Zea mays
  Clone ID: MRT4577_70346C.1
aaaggacaaacctcaaacttcataaggattccaccccttctggtgcaaaaaagttttgggtcccacccccagaggacccaacgggtcctttaacccaacgaagcccccaccccttttcttgacccccaacccacagtttttttttaaaccaccacctccattttgaggtcccccagagggccccaaactacccaaatccccaggtacagcagcctttttaatgacccatggtttactgaccccccgggggggggagccccaggtggagagtggtccccaagcgtccgcccaccctttcgg

SEQ ID NO: 152161 - DNA, 153 bp, Zea mays
  Clone ID: MRT4577_70347C.1
gcaacaggaagaaaagctagtttgtatttattggacagcacccacctgaaactcccagatgttcacaggtgacacctggtggctacgctaggcttggacactgcgcatgccccacacagatgcgttcatgaggcgtgatagaatgagcacatc

SEQ ID NO: 152162 - DNA, 200 bp, Zea mays
  Clone ID: MRT4577_70348C.1
catgatttttaacaatgcctcacaggtcacataaagggggatgttaatgaacgggagaaccttaataaaaactgcatacattcagcagcaggaagcaaaaaccaccaatgaaccagaacagatccaggtagctgataaacttattatagagtagcataacaaaacattcagagcttaagcgtgcttacagaaaaaaacat

SEQ ID NO: 152163 - DNA, 554 bp, Zea mays
  Clone ID: MRT4577_70349C.1
aaacacagaaaaccaacacatgatctaaaatgtgaatgtggttcagggtttcctctgccgtaaactcttctcatggagtttagagagacaatacaaacacacaacttattatagctaaacaagtttttattttaacatagaagagaaaacgttttttttttttggtggttgagtttcactcaaatcttagctgcgaaggaaattccttgtttcacgagctcgtcgagactctctgcagaaggtcgagctttggcgactttagccaaggctttgttctcatcaccactacctccctccatgaatgctccaaccactttaccaccttgaacccaatatgctccaaatcttggttttgggtttgatggattgctgtctccaaataacacagagtctcctacgttgtctccgtagaactgccatgagagatcaaaggagcgagagtagaagaatggaagatagtcgtattcctccaccgctgtgcctccctcagccgctttgatcgccttaacagcttgctctgctgatttgcgggaatggtcaacatgctcgaccct

SEQ ID NO: 152164 - DNA, 378 bp, Zea mays
  Clone ID: MRT4577_7034C.1
aattcccgggctgacccaaacgtcagaaaaaaaaaaaaaaaaaaaaaaaaaaaaaaaaaaaaaagaaagacgaacaaataagataaaaacttaagtaaacataaaaagtaaaaaaataaatcttcaaaaaaaaaacaaaaaattcaattcggggggcgtcccataaagattctacattaatgtgaccgtcatggagttatcaaacttattcaacttgcacaccaaattccatttcactaggtggtctttttaaacattctgaacggaaaaatcctggttctaaccaattttaacccctttgtagcaaatcccactttcccaatatcggtttatatgacaaaggcgttgtcgtttgtcctttcaaaatatttgctaaac

SEQ ID NO: 152165 - DNA, 117 bp, Zea mays
  Clone ID: MRT4577_70350C.1
cccaaaaccgtgaagctgccaggaaaagccgattacgcggagccgcttccctccaaaacctcaaaaaggccagatctgattcaaacagagtttgtcaccgcgctcccatccatggcg

SEQ ID NO: 152166 - DNA, 1785 bp, Zea mays
  Clone ID: MRT4577_70351C.1
ctggccggagtccactccacgcgtgtcgcgaaacagaaaacaggcaaaccacacacccaggacggtggacggacacccgcgccgccgccgcgccatgaccgacgccgccgcagcagcagcacggcgcctccgcgccttcaagcggtggatgcgcgcgcacggcgtcgtctgcagcgacgcgctcagcctcgacgtctccgatcccctcggcgtccacgtgcgcgcggccacgccgctacgcgacggagaccttgtcgccaccatcccgcgcggagcgtgcctcaccccgcgcaccaccggtgccgcggcagccatcgaggcagccgagctcggcggatgcctcgcgctcacggtcgccgtcatgtacgagcgcgcacaaggcgccgactcgccgtgggacgcctacctccaactgcttcccgactgcgagtccgtgccgctcgtgtggcccgctggcgaggcagagtgcctactcgccggcactgagctagacaagattgtgaagcaagacaaggaattcctttgtgaggattggaaagaatgcatcgagcccctcatgttatctggagagctggatgttgacccagatgattttagcttggagaaatatttatctgcaaaaactcttgtttcttcaaggtccttccagatagatagctatcatggatctggaatggttccattggctgacctatacctcagactcagatgatgaagaagaagaagatgaccgaagtgatgcttctgctgatgacaaaccggctacaaaaaatcccacaagtagtcctccaggttcgagagctaacgacgaagatttggaaataatcattgttagagatgtcaatgaaggggaggaggtgtataatacatatggaacgatggggaatgctgctttgcttcacagatatggtttcacagaacttgacaatcaatacgacattgtcaacattgatttagcattggttactaagtggtgcacatccatattctctggtcgacacacaagagcaagggtatcactatggcgtaatctgggttattctgggtgcactagccaagataccgagtactttgagattgcatatgatggagagccccagcttgaactctcaatcctcctttacatcatcaacatgaaacctgatgtttatggcaagctgatctgcgtggcccatggtttcgttagcgacgaagagcatgagactatctgtaacgtgttcaagtttgtcaaagcaacaagctccaaccaaaattctgaagtcaatggcctcgagaaactgcctgatgtgaagaagttattgcatagtgagagcgtttgttcggcgcttctatcactcgctgacatgagggaaagcctctatggttcgaacactttggaagatgacgaggaagagcttcacgcatgctgcgttgtcaacgaaaggaagctctaccattctctggttttgcgggtgagtgagagaaggatacttcgtagattgagggagtttgcctctagtgggtcaaagggccggaagaggaagcacccctagtgtttaagcaatattctgcgggtcaggcttggtattcctgaacaccatgctcaataaaggtatggtgacgttctgcaattctgctgctcttgtaatggaatactaacatttttaggaacaataactacatacaggcatgctttgttttctttaagtagattagatacttgagatttacgacgtgggggacattatgtgttggtttgcgtggtaacaaacatttggacaagaaaaatccacaagaggttctccc

SEQ ID NO: 152167 - DNA, 308 bp, Zea mays
  Clone ID: MRT4577_70352C.1
ccgcgtactaagctgatccttaatcacccacctccacacctcctcaactggcgactattcttactgagggcggtataactgctcatccccgctaaaggaggacggaacgacataggtcgtgctcctgctttctgtcgggtcgggctgctggactggcgcaccggcagcgcactttaccagacacaagatacctggcgatgcggcaaggtatggacggggcgcgctggacctgacgctggaccgactcggctcggttccatccaagacgagacctgtcgcaagatcgacatgcagataagctgggccag

SEQ ID NO: 152168 - DNA, 295 bp, Zea mays
  Clone ID: MRT4577_70353C.1
atattatattttttccatgaagtaccattcgggggggtttattaaaaaagagtggcgtctaacaatgcaaacagaagaaattcaggctaaaaaaatgccgggggacgcagggacctgcttaaaccaaggaagaacacagcagtaacaactgacacagacagaccatgcaataaacaacacataagggcaacaccaaacacgaaccgaacgaagataaacccttgggacctagggcaaacaaaaaagccaggaacaggataacttggccagccgggacccaccgcggacaacctgc

SEQ ID NO: 152169 - DNA, 148 bp, Zea mays
  Clone ID: MRT4577_70354C.1
tgctgttgattcccgtcgtatatgccacgtcgtagctcgtatgcggctcgaggctaatttcgcgcgccaggactggctagcttcgcctggttatctgacaacaaaagctaatatgaatatgaaagggccttccttaatgcttgtttcc

SEQ ID NO: 152170 - DNA, 746 bp, Zea mays
  unsure (1)..(746): unsure at all n locations
  Clone ID: MRT4577_70355C.1
ctcgaggccggccgggccggggcacatttctcttctggaacataagtagcgtgcaaacttcgaccgggaccggcgatatccgccatggccaccaccactgccgccgctcgctggagcttccccgcccgtctccagctcctcaccagccgccgcttttgcttccccgcctcctctgccgcgccgcccagttctgtagcggggttcagttgggccgacgccctccgcgtcgctggggacggcgggcgcggcgacgagtccgacctctccgggtacttccggaaggtcaagagctgcaaccgcggaatggataaaaaagggcagttcgtgaagttctctgtggaggatcaggtcgtggggtacatccacaagggatttatcgaacacatcagagactttcatgatgtttttaccattgtcatggatgacaatggcagcaacactgtggagcatgtgtctctccagtcatcactaaggactccagaagaccgaacacatgctattggaagtgtcattaaaagccttggagaattgattccaggtattcgaaatgagctctacccagtaacgtcatcttatggcatgcctgtgtacttctctctggaacgtgctgctgctccttactttggtataaaagcttatggagttcatatgaatgggtatngttgagaaggatggtcagaaatttctttggattggaaaccggagtgatgtgaagcaaacatatccaggaatgcttgatcatcttg

SEQ ID NO: 152171 - DNA, 951 bp, Zea mays
  Clone ID: MRT4577_70356C.1
gctggattcgtctcgagggtaattcggcgttcggtctcagagaagacttgggcgccatcatcgcgtggttcctctgcgtgttccggccggaccgggtgccggcgcttgtcaacaccagcgtcgccttcatgcgccacatcttcgtccgcgccgccgccgccgccgtcacgcccatcgactacttccaccgcacctacgggcccacctactacatctgccgcttccaggagcctggtgtcgcagagaaggagttctcgccggccaacgccgggtacctgatgaagcggatcctgtgcaaccgcttcacctcctcggcggccggcgacgacaagcgaccgccggcggacgccgccgaggaggagccgctgccgccgtggctgacggaggaggacgtgggccacttcgcgtcggagttcgagcggacgggcttcacggggcccatcaactactaccgcaacatggaccgcaactgggagctggcggcgccgtgggcggacgccaaggtgcgggtgcccaccaggttcatcgtcggcgacggcgacctcacctaccactacccgggcatccaggactacatccacaagggcgggttcgaggccgacgtcccggggctcgagagcgtcgtcgtcatccccggcgccggccacttcgtccagcaggagaaggccgacgaggtcagccagcacatctacgacttcatctccaagttctgatacatgtgcatggatcgaccatcagcttgcttgcttacctgctaaagcctgtaatctcaacctcgatatccgtgctgccaacttgttttgtttttcgaactaagagtaataagtgttcgcatatatgtctggtttaatttgtgacttggacatggtatgttcgatgtgaaatggataaaccatgcgtttcgtaatttaaatgtacaatgcttgccggtaaaaaaaaaaaaaaaaaaaa

SEQ ID NO: 152172 - DNA, 967 bp, Zea mays
  Clone ID: MRT4577_70357C.1
ctcgaggccggccgggaagtggtcctggcaaatcttctagcgctcgcaattcttctcctctccaccacgccggcgccgacggccggtgaacagaccatctgcagcgatgccacgtacgagcgaaacagcacatacaagtccagtctgaggtcggtagccggcgcactgaccggggacgccgcgaggctgcactcgtccaccggcgctgcaggggagggccccgacaaggtctacggcgccgtgctctgccgggcggacaccgcgggtgctgactgcgccaggcgcctccgggacgcccttgccgccatcaccgacggggacggccgctcgcgttgcgcgctccacagggacgtggccgtctactccgagctgtaccagctccgtttctccgacagggacttcctcgccgacttcagcaacgcgccggaatgggtcgacgtcacgaacccaggccccgtgccgctcgccatggccgcgcggttcgaccagcgggtcacggagctgctgagcgcgctcgctgacgcggcggcggggcgaccgggcaggtgggccgtcggcgaagcgccgtggtcgtcgtcggggggcagggaccgggcggtgtacgcgctggcgcagtgcacgctggacatgccgccggaccactgccgggcctgcctcgatggcgccatggcagagcggcgacggaaggtcggcggcggcaagatgggcgcggcagtcttcggggcgcggtgcaccctgcggtatgagatggatctgcagttcttcaacgtcactggcaacagcaagatgctgtccctgcctgggaagaagaaagaccgtgcgttcgtcatcgttgcaacagcttacgcttcggcaatcctctgtacacgcttgcttttctggctgctaagcgtctggaggaaacaaaaaaggaaaatggacttgacggaggagccccagatgtggatgaaaactcaggtcatggaga

SEQ ID NO: 152173 - DNA, 221 bp, Zea mays
  Clone ID: MRT4577_70358C.1
ataacatgaacatcacagttcattagagcgcggcgtgcgctagctgcggtttatttgcatggcgtccagtgcataggccagccggagccggcgctgtacaacggaggcattctcaagttcggcagcatcggcagcgacccggactggtaccgtacgacggaaaccggcttcttcttcccggcgttcgtggtgtacaacctcaacaagaccaccatgtacac

SEQ ID NO: 152174 - DNA, 116 bp, Zea mays
  Clone ID: MRT4577_70359C.1
aacctacagtaattttgcttaggtaattgtgcttatctatggagcacaggaaggctcttaggctttgttcctacaagtttctttgaattttagagtaaatggatgtgcctgactgt

SEQ ID NO: 152175 - DNA, 545 bp, Zea mays
  Clone ID: MRT4577_70360C.1
gacgcctgcgggtccggtccggaattcccgggtcgacccacgcgtccggagctgctgccgttggggtccgggctggtttgctgtggagctatcggcgaggcggcacagacatggcttacaacaagatcccgccgcggtggctgaactgtccgcggcgcggtcagccggtggcaggaagattcttacctctgaagacgatgctggggccaagatatgatagtcaagttgctgaagaaaaccggttccatcccagtatgctctcaaattatctaaagagcctgaaggttaaaatgagcttgttggtggatctgacaaatacttcaaggttctatgacagaaatgacatagaaaaagaaggaatcaagtatatcaaacttcagtgtaaaggacatggcgaatgccccaccactgagaatactgagacattcattcgcctgtgtgagaggtttaatgaaagaagcccacctgaacttataggtgttcactgcacccatggcttgaaccgtactggtttgcttatatgtgcctttttggtgcgaaaaatg

SEQ ID NO: 152176 - DNA, 293 bp, Zea mays
  Clone ID: MRT4577_70361C.1
aaatccttaaaaaattcttcatatttgttctttatttcaaaggagtctatagggcaaaacaactttttacactgtgatgtatatgcgccatgcatgcataagctgaaaaaggcaatgacaaatgacatggtaacaatcagcttgtgtatatcaacaaaagttggcacaactcacaatgcactctatacaacacacttacaattgactaggcaccaccacatgtttctcccaccctcactggtcaaaactgcatctataggcaacaaatacaaaagaattcggctggctcagac

SEQ ID NO: 152177 - DNA, 274 bp, Zea mays
  Clone ID: MRT4577_70362C.1
cacatgcgtcagctgacggatccggggtcgcataggcggaagttggacacagagaagggaggtgatatgaccggactgtcgaagcaggaaaggcgtagcaccaccactgcaatgaagctcatgccatgtttcgtggatgcttcatcagggtcacattttaactcatgggctgttgacataaccacgggtgctaaacatgcaattgcaatgtcaattttagttcacgatcgttgttgcatcgatcaacgcatatgttgtctgcgatgctagtgtg

SEQ ID NO: 152178 - DNA, 427 bp, Zea mays
  Clone ID: MRT4577_70363C.1
actagatcccgagcgcaccaccttttttttttttttgtaccaacacttgcaggcaaaatgggtagtttccttaatctactagggctcacaccaaacatgctaccgcaaccattttcccaccatgctcacaaactcctatagcttcccttcttcccccatacctctcaccatcggtgacttcaatgtgtgaaaacccaattgatcaaccctacagcatccaacaggcaatcacaacaagcatcttaccattatgacccttgctgctccaacaaccgtcagccctattacatgccgtacctttgcgccatttggtggcacaaaacatcagggcacaacaactacaacaactagtgctatcaaaccttgctgcatactctcaaaaacatcagtttctgccattcaaccaactggctgcattgaactctgc

SEQ ID NO: 152179 - DNA, 379 bp, Zea mays
  Clone ID: MRT4577_70365C.1
cctataggggaatgggttcctccagggcggccgggaaaatctctcctggtacgagatcacgcttctcgttgctatcaaacagataaggtttccgagatgctcttgcgcgcgccgaaaaagagcgacaacacatggtactactggatcctcggggtctccccggacgcgtcccaggatgacctcgagaaagcctaccggattgtagtaatgaagaaccaccctgacaagggcggtgattccaacaaggacaaggagctagattaggattatgaggccctcaatgatcctgacaagaaccacattcatgactcatatgatgaccacgtcttcaaggatggaatgcttacacgccgaagggaatgaccacccctatgacata

SEQ ID NO: 152180 - DNA, 266 bp, Zea mays
  Clone ID: MRT4577_70366C.1
cacatacagatccaaatggccgtcggcctgcagctatgatatgcacagaggctgcactaaggaaactagataggcgagattagatgtgagattgggctggcttctcgcagtcttgctttggcgttctttcctgttcatcggtggcgctcttttggcttatattcggtgcacccgtgactatcaaggcgtctgctattagcgcatgacgcctatactggcatccgatgatacttgcgatcggaggtgctagttccccttatgcctac

SEQ ID NO: 152181 - DNA, 928 bp, Zea mays
  unsure (1)..(928): unsure at all n locations
  Clone ID: MRT4577_70367C.1
ccggcccgggcttttaactatttcctcctggcctcccgatgagctagcctggcctcccacctcccctcccctctcttgaactgaatcccccactccgtcctccagttcgatcgcgttcgcggccccccactccgtgttccggaataagtagccggcggtttcctcaccccaggttttgcagttgctgggagtgggaaattcgtccggctccggtttggccaatgctcctgcggtttcttggagaggccgctgaagcagcagcccttgcctgagggattctccgtttctcgggcggagagttcggttgcggcgggggaaaaaagaattctttcgtcggattggcccaagttcttggttgatccgttacaaaggcccccccactgtacgctgtgttagcctttttccacgcgtttctttccttactctagatccgtgtccccgcccgattatttgggggaataggcggccgatcgaccgggggcagagggatttggaggcctgacctccgatggaggtgcacgccgacgtcgatgggtccggtgtgcccctggccgtgctcctcaagcgggagctgtgcaaccagaaggtggagaggccggacatcctgttcggggaggccaacaagagcaagaaaggggaggacttcacgctcctcttgcccaggtgccaccgcaccacaggcgaaggtggcggcagtggcggcggcgagaatgcaggcgacgacgacgacgacaccatttccgtgtttgcgatttttgatggacacaatggctctttagctgccatatacacacgggagaatctaataaacatgtgttggctgctattcctcaaatctcacnagtgaggagtggacagctgcgttgccagggcactnagttgctggttttgtaaaacgggataagacttcaaacaaagctgcacgtca

SEQ ID NO: 152182 - DNA, 679 bp, Zea mays
  Clone ID: MRT4577_70369C.1
gaggccggccgggccgggatcgcacatattattgagaccaactagcaacatagaaagcacaatattgtaccaataatggcagccaaaatattttgcctcattatgctccttggtctttctgcaagtgctgctacggcgagcattttcccgcaatgctcacaagctcctatagcttcccttcttcccccatacctctcaccagcgatgtcttcagtatgtgaaaatccaattcttctaccctacaggatccaacaggcaatcgcagcaggcatcttacctttatcacccttgttcctccaacaatcatcagccctattacagcagttacctttggtgcatttattggcacaaaacatcagggcacaacaactacaacaactcgtgctagcaaaccttgctgcctactctcagcaacagcagttacctttggtgcatttgttggcacaaaacatcagggcacaacaacaacaacaactactaccattcagccaacatttgttgccgttctacctgcacactgcgcctaacgttggcaccctcttacaactgcaacaattgctgccattcgaccaacttgctttgacaaacccagcagtgttctaccaacaacccatcattggtggtgccctcttttagattgcttatgagttatagttcaataataaagttttttttgctg

SEQ ID NO: 152183 - DNA, 455 bp, Zea mays
  Clone ID: MRT4577_7036C.1
cccgggccagcctcatccacacgcagaatttacctagacctactggacctgccaggggggagctcataggcaaccgacaagggctaccggatcaacggctgaccactcaaagaggtagcaatacccatctctatcccggccacagcattgacccgctctgtctcgacgacaacccaaaagccttcactgatctaaacgtgaaggaggggaagaacaaacgcctctccatgttctccatgtacggatacttcgggcacaccatccatacctaaaaggaccatctcaaaaacctagctgaccacatctgctaccaagataaacacaacgctcagggcctacgccaccaactcacttccccggcataggcatggaggctcactcccaaaacctataaatatacttatgcttgtgagctcacacatgatgccaaaagaacccataaactaaacaatagg

SEQ ID NO: 152184 - DNA, 198 bp, Zea mays
  Clone ID: MRT4577_70370C.1
ggtaagacggagaacggcttgcctggctctaaggcagaggagaaagcaccttcaacagtgtgagccctgcggccggctgagcagctgtcgggagccccctttctgatgatgaaactgatgcttgagccccgatcgtagaacccacgtgcctgagacatctgctgcctggcctacatgttccattttctatgaacaaag

SEQ ID NO: 152185 - DNA, 844 bp, Zea mays
  Clone ID: MRT4577_70371C.1
ctccaccgcggtggcggccgcccttttttttttttttttttttagggccgcttttttttttttttttttcgaaacagggctttaggagttaagaccacatgcgcaactgatacaagatagatccaaagaggtatcgagataagtgatgataacttcaccccatcatcaaacacatacgtgcagatcctaagcaagccctgcatgctcgccgcgcacatagttgcattgcggacatacacacggcgactgccgcctagctagttctgcctgatgacgtgcccctcatttgctttcttgaacagacgcgcctgtgccgcggcggcgccgtcgtcaccagagttgagcgcagcaccgaatgcgtccttcacctcctgcgtcgtgaaggggaacctgttgttcaccatggagttgagcaacgacgccgtgccctcgcggtagagcgcgcccatgccgtcctcgcgcgtgttcgccagcgcctccggtacggtgaggtcgtgcccgaacggcaccgccgcgctcgggccgaacagccgcaccagcgggcaccagaaaccgaataggccccagatcacgcccgggtgcatcatccagtaggtgcatgggcccgtgaagggcggcgtgttggggtcgtacggcgttggggtagtcggtgttggcgtcagtggagagaacggcggtgatgtgctgataggcggtaacggcacgtctggagttgtcggggaggtgtcagaggacggcgaaggggggccgtagtagccgccgccgccaggcgtcgtgggggaagtatcactggatggcgagggcggtccgtagtagcccccaccgctgcctggagtggtcggcg

SEQ ID NO: 152186 - DNA, 2465 bp, Zea mays
  Clone ID: MRT4577_70373C.1
caaaagattaagaagaagaacacggtcgtatgagcatttcgggggcgtttggttgccttctccggtggtgcagctgcatctacacatgcaaaaagtagtgtttgcttgcttcgttgtatcgcacgagatgggctaaaacatagcagaccagtccaaaaaagacaaatgctaaaataaaaaaaataagtggtttgtttaaggaaccccctttggctaaaacccttacaaaaatttaaagggaaacccctaaaaaggggaacgccctaacgagagattgccctatgcgcagaggggagaagagagctatagcaccattgggacctcgaggccggccgggatatagcagaccagttgctagtaaggctagctggaaagctcactgccctgtaaacctccagcaagcttcagctagctcattgcctccttgcaaggagtgtggagatggctactaggccggctctcgtgttcgtttgctgctgcctcttgctggcgtacgccgcggcagcgcgtgtgctcgacgaggccgagccttttggccgcctgaagaatgcagcgcgccgtctccgcgacggcgagcctttcggcggccggaaggaccccgccgacccggaccactctcccggctcacacgggactccgccctgcccgccgtccatcggcacctcgccgaccacgccaaccacacccggcggcggcagctactacccgccttcgccagacatcggcacttccccgaccacaccgacagctccaggcggtagcggcgggtacgatgctcccccgtcaccgtccagcgacacctccccgacgacgcctggtggtggctactacggtcccccctcgccatcatctgacacctccccggtgacgcctcctggcggtggcggcggcggatacagtgctcctccttcgccgtccagtgatacctccccatcgacgcccggaggtggtggtggctgtagtgtccccccttcgccgtccagtgatacttctccaccgacacctggaggtggtggtgggtactatgggcctccctcgccgtcctctgacacctccccgaccacgcccggcggtggtggtactggagggtgtagtgctcccccttcgccgtctagtggcagctctccatcaacgcctgggaggtggtggtgggtactacggaccctccctcgccgtcctctgacacctccccgacgtcgccgcctggcggtgatggtggagggtatagtgctcccccttcgccgtccagtgacacctctccatcgacacctggaggtagtgatggagggtgtagcgcaacccctccgccgtccagtggcacctctccgtcgacgcctggaggtggtggtggagggtgtagtgctcccccttcgccatccagtgacacctctccatcgacgcctggtggtggtggtgggtactatggccctccttcgccgtcttctgacacctctccgaccacaccgtctgcgcctagtggtggctactacggacctccgtcgccgtccagtgacacttcgccgaccactcctggcggcggctactacggccctccatcgccgtccagtgatacttcccccacaacccctggcggcagtggcggcggcggctactatggccccccttcaccgtcctctgaaacctccccgaccacgcctggcggcggtggtgggtacacgccgactccacaagtgccgttaccgcctatcagcacatcaccaccgttctctccactgacgccaacaccgactaccccaacgccgtacgaccccaacacgccgcccttcacgggcccatgcacctactggatgatgcacccgggcgtgatctggggcctattcggattctggtgcccgctggtgcggctgttcggcccaagcgcggcggtgccgttcgggcacgacctcaccgtgccagaggcgctggcgaacacgcgcgaggacggtatgggcgctctcttccgcgagggcacggcgtcgctgctcaactccatggtgaacaacaggttccccttcacgacacaggaggtgaaggacgcattcggtgctgcgctcaactctggcgacgacggcgccgccgcggcacaggcacatctgttcaagaaagcaaacgaggggcacgtcatcaggcagaactagctaggcggcgatcgccgtctgtatgtccgtaggcatgcaacaaactgcagtgcaactatgtgcccggcgagcatgcaggacttgcttaggatctgcacgtacgtgtttgatgatatgggggtgaagttattatcacttatctcgaaaaaaaaaaaaaaaaaaaagcggccccttgcgcatgtggtcttaactcctaaaaaaaaaaaaaaaaaagcggccatggttaataattagtcagcaaataattagctagcaaaaatttgttagtgtaaaaaaaaaaaaaaaaaaaaaaaaaaaaaaaaagtactctgcgttgttaccactgct

SEQ ID NO: 152187 - DNA, 448 bp, Zea mays
  Clone ID: MRT4577_70377C.1
gcgcccacgcgtccgagaccaactagcatcatataatgcacaatattgtaccaataatggcagccaaaatattttgcctcattatgctccttggtctttctgcaagtgctgctacggcgagcattttcccgcaatgctcacaagctcctatatcttcccttcttcccccatacctctcaccaacgatgtcttcagcatgtgaaaatccaattcttctaccctacacgatccaacaggcaatcgcagcgaggcatcttacctttatcacccttgttcctccaacaatcatcaggcctattacagcagttaccttttgtgcatttattagcacaaaacaatcaggcacaacaacttccaaaacctgtgccaacaaaactttattgctaatattaacaacaaccgttaccttaagtgcatttgatggcacaaaacattaaggcgcaacaac

SEQ ID NO: 152188 - DNA, 416 bp, Zea mays
  Clone ID: MRT4577_70379C.1
cctcgaggccggccgggtagataccatgccaacttcggtgtccgcttaggatgcatatctgttcctagtgagtacttggttgacctcttcctcgtcgcaccaccttaaagggtcttgtagttctttgcctgtctcacatatcacaggttcatgtgtgcatctccacatatcgacccaaaatgacttcgatccctacaactgaggccaatgctgacgagtctggcgcgccagtgtgctgaaaggactacgtagacgcgtacatgcagaactacactgggcacaacaggctgaacatgcaacatgatacagtacaaggagttctactacagaaagattcttctagagctccagaaggagctacggtgcaatggtacaacgccccagtatccatgaattgcaaaaagcattactattac

SEQ ID NO: 152189 - DNA, 127 bp, Zea mays
  Clone ID: MRT4577_7037C.1
atctggatcagcgccgcgcgctaccatgcggcgcgcggtaagcaccgcatggtcgaccgcggcattgactgcgaccagctcaaccgggagcacatgggggacaagcagatcatccttaagggggtga

SEQ ID NO: 152190 - DNA, 821 bp, Zea mays
  unsure (1)..(821): unsure at all n locations
  Clone ID: MRT4577_70380C.1
gtttacgtatagccagtcctcgaaaaagttgccgttgcagtgttttccactcgaggtctccgttgcatacagcccacagctacagctccctgcacgcgtggacgcgtagaaggcagccatgtatactctgatcccgcgctgccacctccagccagtccaccggtcgccgccgccctgccaggcagcaacgacgacgtcatcggcgccgccgtcgccgtcgccatcactgtccatccggttccgccccgaccaggacgagctgcggtcgacgtggccgcagcgcgcgtggacgctggcgggcacggcggccatcctctcctccctgtccacgtccgcctccctcgcggcctcgggctccggctcgcccgcggagccaatcgccgcggcgctggcggcctactccctcgcagacctcgccacgggagtctgccactggttcgtcgacaactacggcgacgccgccacgcccgtgttcggctcccagatcgccgcgttccagggccaccaccgctacccgtccaccatcacgctgcgggagacatgcaacaacctgcacgcgctcgcgcgcggcgccgcgctcgcgctcgcccccgtcgacgccgcgctctccgccacgggcgcgccagccgccgcgcacgcgttcgtcggcgccttcacggcgtgcgtcgtgctgagccagcagttccacgcgtgggcgcacagnaagcgccgcaggctgccgcccggcgtcgaggcgctgcangnacgccggcgtgctcgtgtcgcgcgcgcagnacgccgcgcaccaccgccagncgtacacaccaactactgcatcgtca

SEQ ID NO: 152191 - DNA, 341 bp, Zea mays
  Clone ID: MRT4577_70381C.1
cgggcgggggagctataacgagaaccaccgcaccctttcatcagcctgcctgtccctgtgtggcttggtgacttcctccgatccgctccgctcccctccgctcccgaagcgtcgagctgtgcatggcagcagcagctggctccaaggggggggggatcgctggaagctgcgtcagccgcgtcctcgccggcaaggccgcctcggcgaggagggccgtgcacgcctcggggtacaacaagaactctggaggaccagagccacccgacgctcgcgcgcggaccactgtgtccggcagcgcccgaagccccgcaaagtaactgaagcccccacccctataccgg

SEQ ID NO: 152192 - DNA, 129 bp, Zea mays
  Clone ID: MRT4577_70382C.1
gaggaacggttattcccaaggagtgaaactttaggaggacccaaatctctatcactgggcacttttatctgtagattgccatgcagcctatgttgttgtcaactcaaccataatgaatgcttatgaacc

SEQ ID NO: 152193 - DNA, 325 bp, Zea mays
  Clone ID: MRT4577_70383C.1
accattgaacagaagctattggacacgcaccatggactgtgtatttgtaacgggcctatgggagtgttagactttgacaagtttgcagctgtaactgatgcgactgccactaagctagctgtagcttacaaccatcgacggcgtcactatgatcatctacggggagtactttaggcatgctgatcgcaaggctgtgctggcggacaagttgtaccacatttgtgaccggacgagcgcgatgctcggaactgtacgaaggcatgactgtacatgaggtgataggactatatgacgcctagatccgctgctagctgctgctgatgat

SEQ ID NO: 152194 - DNA, 292 bp, Zea mays
  unsure (1)..(292): unsure at all n locations
  Clone ID: MRT4577_70384C.1
cctttatttttgnnnnngnaannnnnnnncccgtgnnatcttaaaagagnaccccctcgtaacacaaggtaaccctttcggaagacaaaaatgcaccttatgacggaacactaataaacatgagccacaaagaacaccacagatcggatacaaaaaacaaaacaccaaatagatgtacaaaagaaaccaaaaccactggaaaggctcccatagcattgtgacgaaaaacaaccacaccaatgagaaaccgagaaacaaacagacaaccggaaaagcaaattgcaaaggacca

SEQ ID NO: 152195 - DNA, 792 bp, Zea mays
  unsure (1)..(792): unsure at all n locations
  Clone ID: MRT4577_70385C.1
ccggccggggaccagacgggcgacaacagcaccgcagcagactagggtttggagccgcaccggtgcaccgcagtccgcagctgctggaggcccgccgtgccgcacagtcgtcactcccgtcttgcggccagtcgccctcgcccctcaagcctcggccgttggcccctcacccgctcaccgagtcaccgtctgtcgtagccgagtgcctgagtcgctgtcgtcgccgaggtccagcgcccagcggcctagctccagccatcggcgcccgccctcctccgccgagacgtcgactccgagtgccgagcaccctagcgcccagcagccagcacgctagcagggagatgcaggcacaagggattaaaccaaactcggtcacgatctgttattcactttcttggtattgtttgcaaattgctaagcgatggaatccttaacagcccattcaactgcgcaagggaaagggaggagtgaaagagatgagactgattcagagagtaactcctttgacaagaatgatgaaatgtctgaggatgagatgacggtgctaggtgggaaagatgtcgatgttgttagagttgatgaatctgatggtggtggagatgtgaatagagtcaagaaaaggtgtaaaggggttatttgaatttatttatgttctatttctggtggatagcatggatgaactgttctgtaatctactttttagtttttggatgaagaaaacaactatgcaaatgcaactnattgcagtatatgttctggttagacatatatgctatcatgctgctatgaacc

SEQ ID NO: 152196 - DNA, 302 bp, Zea mays
  Clone ID: MRT4577_70386C.1
gggaaaaaaacaggaaaatccttcccatcgccaacgggaatggccttttaaacccacccgtttaagccctaagctccatttcccccggaatttttccccccctttgggggggcataaacccccctccggggttttttaaaccttttgtttcccccccccgaactttttcgtaaaacggggcccctccccaaagcccacgaaccacattaaaccattgtttaaaaacttttgggcccaaccaaaaaaaagggggtttgaattccccccggttttattttggttttttattttgggggggggct

SEQ ID NO: 152197 - DNA, 230 bp, Zea mays
  Clone ID: MRT4577_70387C.1
cactttgaagaagccatgcgctttgcgcagcgttctgtcagtgacaatgacattccggaagtatgagatgtttgcccagacccttcagcagagtcggggctttggcagcttcagattcccttcagggaaccagggtggagctggccccagtcagggcagtggaggcggcacaggtggccgtgtatacacagaagacactgatgatgacctgtataagtaagtggtggtgg

SEQ ID NO: 152198 - DNA, 190 bp, Zea mays
  Clone ID: MRT4577_70388C.1
gtgcttattacgactggaatgatattggcactacctcctgcgcccctgcggaaaaatcggcgagatctacaaggcgttccgacttatggccaaagaagacggcatccgctggctgattcggatggacaactacatttcgctgtctacattgtgatctggcctgagcttgggaggaataaaagaagcaaag

SEQ ID NO: 152199 - DNA, 785 bp, Zea mays
  unsure (1)..(785): unsure at all n locations
  Clone ID: MRT4577_70389C.1
atattgttattttattctacatatatatcaaactcygtccacacacatrtgcmttccccttyttcttcawtcawcaawgaagagcgacaggcatcatgcttctctgtatccgagacctttcgctattactaatgtacaaatwatayawcawttaaacwcattttcwccaayttcaggacaaaawtamaaawgcgtcaatggcaacaaaaaaaaaaaaaaaaaacaccaacaaacaaaacacaaaaatacatccccamccacamacaatgramrsacaaaagatacrtktctattgtacacatctcacacaaatattatcccytataaccctacaaccccaacccacgctgatcmcacmgcgagytccgcgycgctycgsccgcatcgacccatgycggcgacgaactccacgtacccacacmggycacacatcccatmtggtgcgccctactgtccccttcagcctmgcaacctccttgcaamgcantggggctcgttcactgcttggntgnyacctcctacntgatcgntgctgccgcatccttctgccangcatcntcggcctgctcgcgcccctcccttgcagccactgcagctgctccgttgctgccccccatcstcttaacatcacctagcctgggatcggtcgactcactagctcactccggctnstacctcatctgactangattgcanaggctcygcttgncgtctgtgcgacgtcctgcaccccgcgctgcgctctcgtccngatcctctctgtccaagcacgcgtgcygtcgctg

SEQ ID NO: 152200 - DNA, 485 bp, Zea mays
  Clone ID: MRT4577_7038C.1
atacgaggaagcacaaaacaccaccatcgccatgagatgagagccaagcagagtagtagagggagagaagttgtggccgccgcgttgaaactgagcgaggaggagaggacggctcctgcagccggggtgcccgtggtgcggacttcgctgggtgaccggggttcaccggtggagctcgtgggatttgtcatcagggcttgaagcacgctgcgtttccgccctacgccgcgctggttgaggacgacaccaatcaccgcgaggttacgagtcacctgaagagcaagttggtacctagaatctcaagtcccaggtcaagaacaggtacccaggatgaggcgcatggaggatgctgcgatgtgttcgtgagaggtctaggtcgtcgtctcccagtcaactttggtttgctggaccgttatctccttataatgtaattatttatttttatagaactcctgtatgtagtaaagatgtgacattcgatctcc

SEQ ID NO: 152201 - DNA, 294 bp, Zea mays
  Clone ID: MRT4577_70390C.1
tttgatctcagagactgcactgacacaactgcaggtcaccgtgtacccactgagaccgactgcagtctggtacttacactgatcgacggcaaactgctggtatatgacaagcttatgatgctcatgacatccctagggtacttctctcgcgagctagccaaagagtactaggcggacacataggctggggatctatactggccaccttcaaactacgaccgcctgcatgtttgcactcgctggatcctcttgaacggagatacaacacactgggcttggacatgctacgaacta

SEQ ID NO: 152202 - DNA, 297 bp, Zea mays
  Clone ID: MRT4577_70391C.1
cccacgcgtccgcccacgcgtacgaggtacgattgtacgtacgactattgggcagcaggagatgatagttataagatctagaggcataagcaatatgaattgctgatggatcaagatgctaatacatatgcctgtacctagctagaataaaaggattcatcagcagataaacattcagatgtaaacgagaagactagagtgtgaaattaaccaggagcaatatatagtgattaaaccgatgcactcgagcataatacacatgagaagaccagatctatgttaacctataataagaaa

SEQ ID NO: 152203 - DNA, 322 bp, Zea mays
  Clone ID: MRT4577_70392C.1
gacacataaaagccattcttataaggtatggtaatttatccagggggccacttacaaagacatgtgaccaagttcagtcaggaatggcacgatggatgttcttgtcaaaccacataacaacttggtgttcttgaccattatgcgcactgattaacggagggaagactccattgacaacttcaaggccgctactaaactaagttctaaaggggaagacacttgcaacggggactactgacacatatggaccccacatttagactgatcctttacgactacgctctactcttttaaccttcattactgttctacaactcactga

SEQ ID NO: 152204 - DNA, 281 bp, Zea mays
  Clone ID: MRT4577_70393C.1
tccaagtgttgtttttactttggtgggatgattatacttaattttcttacttttaatatgggaaaaaaacaaacattacagaaagtgtatcctcagtattcaatgatcaaacctatgcacgagaatttcttaagaatccttccaaaaaacctatagatagacagatagatagagaagcatattttaaaattatgttttatatgcacaaacctaaatatgtatttattgtagtagctctacaactcgaatcatatgtactcttttgcactttattttttaaa

SEQ ID NO: 152205 - DNA, 347 bp, Zea mays
  Clone ID: MRT4577_70394C.1
gggtttggtttttttttttttttttttttttttttttttttttgagccatcaacatacacattggggggctcatgaaactggccagttcatacaggggaaacagaagggggtggacaacaattcagcaaggatacaacacataacgtctattgggggggcacagggtcactaccttggtgtcacaaaacatgggatattacaacaacaaaatgggggctcggggctcggtgaaacaaacaacatgggataacagcaagacacaaagaccaggagagggggggagaggccaccggagcaacggggccggacaggctgaaccgggcggacccctgggcggacccttggg

SEQ ID NO: 152206 - DNA, 793 bp, Zea mays
  Clone ID: MRT4577_70395C.1
gtagtctcctccctcaataacgcgtcctcgccttaccatgccaacctagccccggctctccatggaaggtgcgacctctgcacccaactctccagggaaggcatggtctactctccatggcctcccgcaatcaacggtctctcaccccaccacgacgaccctgccctggctccccatggaaggccatggaaggtgcgatcgagccccagctcaacatggaaggcgcgatccactctcctcgccccatcatcggcgtccactatccatcaaagagtcccgccttcccagtcccccttccccacagatggtcggtgaacccatcgccaccgtgccaacggggcccgaatccgtggccgaggccgaccgcctcctggcgctggctgagtcggagctctccgcgggcaggctccgagccacgcgcaggcacgccctccacgccgcccgcctgtacccgacctccccgcgcgccccggtagtggccaccaccgccaacgtgctcctcgccgacgcctcctcccaccacgccgcgctgctgctgcccgagcccgacgaccccgacgcctcaccgctcttcgcctccgagctccggcgccacttcaaatcgctcgtcaagtccctccgcgtcggcctcaacgccgccaccgcagccgcctacccctccgtcgccgccgccgccgaggaggcactcggccacgccaccgaggcctacgaggcgctcaccacccctacccctgggaccttctggaccgcctgcgccgggtgccgcctcctccacgagttcgagcgcaagtat

SEQ ID NO: 152207 - DNA, 641 bp, Zea mays
  Clone ID: MRT4577_70396C.1
acctcgaggccggccgggccgggatcttatcccaaacacaacccacactactaccctacccgtccgcctctctcgaaagcgcagcaccagcgagcatgtcgcctgtcaccgcactcctggcgggcacggtggtgccgccggcctcggccccgtcgccagcgaggcacgcccgccattactccgtcggcttctccccgctccacggcggcgggcgcgcggcgctggcggtggagtgctcgtcgcggccgcagaagaaggggaccaagcaccacatgaagacgcggcccaagaagacgcagccgtgggacatcaagcgccgccccacgcagtacccgccgctgccgccgctcccgccggactggacgctcgtcgcctccggcgccacggtggacgtggaggaggcggaggccccggcacccgccgcgactctcgtcctcgacgtggccgcggccaccgactgaggccgccgcggcgtgtcgccaaagttgttcccttgaacctccgcataagctgtttttctttgagatttattatataataacaatggctgcccagattttgtgattataaattaagaatctttcattgctgtccaaaaaaaaaaaaaaaaaaggcccctaaaaaaaaaaaaaaggccccta

SEQ ID NO: 152208 - DNA, 445 bp, Zea mays
  Clone ID: MRT4577_70397C.1
gctggtacgcgtgcaggtactgggcgggcgtcccacgggcgacccatcgcaattcgttctgtgttacgcggtcgacgtgatccgaccgggaggcagggatgcattcaagctcaccctgagtggtgggtgtcaacctgcaccttctggtccacgagcttcggtgctccgggtgggagcgatcgacacatgccctgaccgaaggacactgagggccaatgattcgtgaggatcatcatctaatggaaaagttggctcagttcgacagataacgtatccttgaacgggatgcgcatgaacgaggaggcagagtcaagggtttctgtgaagacactcatgatgtctgtcaccttacatgtgctgattttatccgcgctcctggggtccagacacctggtattgttcgtttttgtacagaggtgcatgagcgttgaagacctgagacctt

SEQ ID NO: 152209 - DNA, 621 bp, Zea mays
  Clone ID: MRT4577_70398C.1
gaatatgactatcacaataataattagcagaaaatgtgagttccctgccaatcagactcaaacctatatgagcgatgtttgtcaagctgctccagtaattctatctctctctgtttattattatcatctacttacaagcaattaggataattatcccaatcaaaaacacgtgacactcgtgacttctctatagccctatacagctgcttccacctccagcagttctgacttcagaacaagcccaaccaccctagaacttccgccaaagctggacgatggcgtgccaaccaatagttagcccatgatgtcaattgtcagctacacatttctgatcagtgagaattcgtcatcgtgtaccttgctatgtgtttcttaatttctgtctatgtacactggaatcacacccagggatctgttaggatgatgattagtgtgactttgatgctgacaagggggctggaggccctggttgacacaggcagtcaggaaaagggttctcataaaatgcctcttctgaccggaacctgtctttgccctttgttcctgagaccggaccttttcgtttccgtggagagccttgtcttttctggtggatatctattatcttttgtgatagcctct

SEQ ID NO: 152210 - DNA, 336 bp, Zea mays
  Clone ID: MRT4577_70399C.1
aatcatcaaacaaaaatgacagggtcaggtgagctataaaaacactacacaagcattaattcttgccacatcttaaccctaactagagggcgctgactttttttatctaataaaatggtaactcccgcctgcctagagtctattggccgatattatcgcgcgcagggcaaaccaattttagcacaacataacacacggtgcgagttgtaggcagcaagcctggacaaggaggtacaccaatcaaaacacataaccaatgcccgctacgcatattcaaggtagccatcccttccttttttcctgcagaacttggaccgagagatgacatccccgaac

SEQ ID NO: 152211 - DNA, 565 bp, Zea mays
  unsure (1)..(565): unsure at all n locations
  Clone ID: MRT4577_7039C.1
cccacgcgtccgggaaaaaatctcgcaggctgcaggtgcaacacgcaacttgaccgatccatcgccgcatcgcggaccttgaccccgcgctcactgagctaggagcagacgaggcttgagaacgagcgacggagacctagccgaagcaggagctccccatggcgaccggcaacctggcgagcgtggtggtggctgtggacggcagcgaggagagcatgaacgcgctgcagtgggcgctcgacaacctccgcctgcgccccgacggcgagctcgtcgtgctgcacgtccagccgctgcccaacatcgccgcgggactcaacccggcgcccatccccttcggtggccccagtggaggtgaagacggaggtggtggtcggggaccccaaggataaaatctgcgagattgcggccaaccgtaaggccgatctgctcgtcatgggctgccgtgccattgggccgctcaagagggtattcttgggcagtgtgagcaactactgtatcaaccatgtgggctgccctgttgttgtgatcaggtgacatgagaatccatcagnccagcattctt

SEQ ID NO: 152212 - DNA, 624 bp, Zea mays
  unsure (1)..(624): unsure at all n locations
  Clone ID: MRT4577_703C.1
ccnngccggnagcaaaacagcgccccaccgactccccgttccccaccccgaccgactgctccccctcccccgcgccagcctcaaggcatcgccggcgccgcaacatcgctgaggaagcccgcacccctgtccggatccgatggtcaacagcaacctcccgcggcggatcatcaaggagactcatcggctgctcagctgagccagcaccggggatcagctgcgtcgccctcgtgaggagaacatgcgctacttcaacgttatgatccttgggccggagcagtcgccctatgaaggcggagtttttaagcttgaactctttttacctgaggaatatccaatggctgccccaaaggataagattctgacaaagatttatcatcccaacatcgacaagcttgtcatgatatgactcgacattctcttggacaaatggagcccagcacttcagattctagcagatcttgtgagtatacaggctctactgagtgtggcatatccatacgaccctctatcggttaacattgcaaagcattggagggccaacgtcgaacaacctgttgaaacagctatagagtggactcacctgtatgttagcggagcatgagaacaaagtgatgcccgtga

SEQ ID NO: 152213 - DNA, 253 bp, Zea mays
  Clone ID: MRT4577_70400C.1
gtccgaccgccggcgtctggaacgatgaggatactccacgccgtcgttttattcttattggcaaccagtggacactgagggcaacgaggccctggaaatcgcggcgcaccgacagctgaccaacgatctgtacgaccacaggggagatgtctacgaatgcagagcgacactaagcaaggatgggcatctcgccaggactcgacagtggcagcgctccgctgccaccaacgcacaacactgatctcatctctac

SEQ ID NO: 152214 - DNA, 1480 bp, Zea mays
  Clone ID: MRT4577_70401C.1
gccggccgggtcgggacatgccctgccatgcatggtcagtgatctcctcctcctccttttcctctctctctctctctctttctctcactcccgcgcgtacctgttgggaaaaaaaagtacctactacagcttggctacagttttgataaactacacacacatggacagcagtcagcagcagcagaaacaagacgacgtcgacgtcgacgtaatggaggtcccggaggtccacggcgacctcctcatggagctcctggacgcgtccctcgccgccgagaacgctgcccaccaccaccaccaccaccaccaacagcttggtctagcgcccgacggcgacggcgacggcgactgttggatcgacgacaaccaagagaactacgacaatatgcacgcgcaccagggctgcgaggactgccgcggcctcctcgacggcatactgtccgacttcgacgactacgacgggggcccatcacggccgaggtccccgccggcgccgtaccgcgtcgtcttcggccacgacgacgacaccctgctggagctggagtgggcggaggaggccgccatggacccgttcgccaccagcgagtccgcggggggctggtacatggacggcctggtcatggccatggcgtgggacgagcagcaggacggcggcggcttcccgttcgagccctgctacggatacgaaggggaggcgggcgccgccgggcagctctatgatgccagcccgctgtgggagtgagagtgaagtagtgtacccggttacgtcgtcgatcacacgtgtccgcgtcgtctgggccgtgccgcgctgccgcgccggcctaactactcctccgtactttacttttgcgccgcttttgcaaatttttttgaggatatgaatttgctgaagagaactggacttgtgtgcctcttgtgctcattagtgttgtgtggctcagattatcagaagcattctagtttttgttctttgttttattttttttgtttgaaagctttgtgctaaatgaagtgcattgtctacattcaggtttgctttactgcctgcaggatgcgttcggatggtttatgctctcgaatcaaaaacagaggtcgtggagaatgtactgcatatacgagcactgttgttccgtgtttcaggcggagaacagctaaaaaccgggcatacagagagcctgcaagaataacagtgaccctcttggccttggagcatgcggagaatagcttgaccccggtcactggaaactgcgccgtctgcccccaccgcgcgaatcattgtacgtcgtcgtcctgattccgtcgacaggaacaggcgggtgatcgcgggtgaatgttgtttctgctcttgatgacatgggtgccgctcgctctctgccgtgcgtgaggggaagctgcgacataagcctagttattacattgtacatgttctgaataaacatcttaaaagattggagtcctaatataatatcccccccaaaaa

SEQ ID NO: 152215 - DNA, 849 bp, Zea mays
  Clone ID: MRT4577_70402C.1
cattgggtacctcgaggccggccgggaaaatgccctgccatgcatggtcagtgatctcctctctctctctctcactcactcactcactcccgcgcgtacctgttggaaaaaaaaacaccaactacagcttggctacagttttgataaactacacacacatacacatggacagcagtcagcagcagcagaaacaagacgacgttgacgtcggcgtaatggaggtcccggaggtccacggcgacctcctcatggagctcctggacgcgtccctcgccgccgagaacgctgcccaccaccaccaacagcttggtctagcgcctgacggcgacggcgactgttggatcgacgacaaccaagacaactacgacaatatgcacgcgcaccagggctgcgaggactgccgcggcctcctcgacggcatactgtccgacttcgacgactacgacgggagcccagcacggccgaggtccccgccggcgccgtaccgcgtcgtcttcggccacgacgacgacactctgctggagctggagtgggcggaggaggccgccatggacccgttcgccaccaccgagtccgcggggggctggtacatggacggcctggtcatggccatggcgtgggacgagcagcaggacggcggcggcggcttcccgttcgagccctgcaacggatacgaaggggaggcgggcgccaccgggcagctctatgatgctgatgccagcccgctgtgggagtgagagtgaagtagtggacccggttacgtcgatcacacgtgtccgcgtcgtctgggccgtgccgcgctgccgcgccggcctaactactcctccgtagtccgtactttactttgcg

SEQ ID NO: 152216 - DNA, 736 bp, Zea mays
  Clone ID: MRT4577_70403C.1
cattgggaccctcgaggcctcccggggaccaacctacaattgtcacttcattttctcaataccttaagcaaggaccaatgtctcaagcccagccccctcgttcccaagcccagtggaaacacgttaaatttcaggataaccaagctaatgccatgaaggaaccaggaaccggtgggtatggctatgggacgaaaaatgacaagaataaggatgtggatacaatagctacggacttcatcaagctgaagcacaaggcttgggcactccagaagagcacaaccatgtaccaaccttctacctaaaggtgtcaatagttcaagaagttgatactatatacttatgcttgtctctgtatagtctataagtcctaattcaaataacaggtgctgcttgcagccttggatatttgcggagtgaagttaccatggcatcattgctaagaataagaaagtaatgtggttatgaggagatgtgtaattttgtggcgatattatttgcaacaatgatgtatatagggcatgtttggttcacggctaactgtgtcacactttgcctaaggttagtcgttcgaattgaagaactaaccttaggcagaaaaagttaagcaaaatgtggcaagttatgcagcaaaccaaacaggcatatagttttactgctagttaatttgcttctatttggaaatcggaatagtaaagcatcgagcaaggtttacaaaaaaaaaaaaaaaaaagcggcc

SEQ ID NO: 152217 - DNA, 688 bp, Zea mays
  unsure (1)..(688): unsure at all n locations
  Clone ID: MRT4577_70404C.1
ggccgggccgcctctaagaactaagtggaatccccccgggcctgcaggaccttcggcaccgatgaccggaaaggaaataggaatgatgcaaggaatccccgaacgccgacggaggccccaccttcccaaaccgtgctaggaagacctcgccacccattaaagacgcctaccgggccccttgggccttccccgccgttcctggcccgaggttcctgccgccgacaccccctcaaccggtcctggctccagggaaaagtaccgaggccttcactgttgcctgcaagggcaagttggcctttccccgcaagccaaaccgccccaaaggaccactttgggttttcactcatagttaacccgttagaaagaaggccccacttgtgccttgcttggtggagaaaccttccctacactcaaaaagaaaatggggtccctttcacattaagaaaggccctaaatttactgccgctttaacttttttgttcaaaacttgaactcatgtgttaaactcgacttgtttaaagtttgatggctactttgtgcttgttggaccagctataatcagaaaatgaaattttctcactcaaannnananannnnnaaaaaaaaaaaaaaaaaaaaaaaaaaaaaaaaaaaaaaaaaaaaaaaaaaaaaaaaantcctcggggggggcgcccggaccccaattccc

SEQ ID NO: 152218 - DNA, 352 bp, Zea mays
  Clone ID: MRT4577_70405C.1
gggaccaccaagatgtacctagacctcaaaaccagatactggtggagaggaatgatgaatgagattgcacaatatgtggcccggtgcgacacttgccaatgaactaaggccgagcattaaaatcctgcatgtttactgcaactccttttagtgcccaaatggtagtgtgaagaaatagtcatggattttgttactggactttcttcgatcccaaaaagggaactactctatttaggtgataattgatcgttttaccaaggaagcctatttcatctcagtaaaaattactttctgaggagctctcccttgctcggttatatcataaatagatagtttgtcttcatgttatttc

SEQ ID NO: 152219 - DNA, 670 bp, Zea mays
  Clone ID: MRT4577_70406C.1
ccggccgggataccgaccttccttgcattttctcaataccttgaacaactaagcaagtccaatgtctcatgcccagccccttcgtttacaggcccagtggaaacacgtcgatattcaggataaccaagccaatgctatgaaggaaccaggaaccagtggtgggtatggctccccaatgaaagatgacaagaacaaggatgtggatacaatagcttcgaacttcatcaagcttaagcacagggcttgggcactccagaagagcacaaccatgtaccaaccttctacctaaaggtgtcaatagttcaagaagttgatactatatacttatgcttgtctctgtatagtctataagtcctaattcaaataacaggtgctgcttgcagccttggatatttgcggagtgaagttaccatggcatcgttgctaagaataagaaagtaatttggttatgaggagatgtgtaattttgtggcgatattatttgcaacaatgatgtatatagggcatgtttggttcacgactaactgtggcaaatactttgcctaaggttagtcgttcgaattgaagaactaaccttagacagaaaaagttaggcaaagtgtggcaagttatgcagcaaaccaaacaggcctatagttttactgttaaaaaaaaaaaaaaaaaagcggcc

SEQ ID NO: 152220 - DNA, 712 bp, Zea mays
  Clone ID: MRT4577_70407C.1
tgggccgcccggccggggccgggaccaacctacattgtcacttccattttctcaataccttaagcaaggaccaatgtctcaagcccagccccctcgttcccaagcccagtggaaacacgttaaatttcaggataaccaagctaatgccatgaaggaaccaggaaccggtgggtatggctatgggacgaaaaatgacaagaataaggatgtggatacaatagcttcggacttcatcaagctgaagcacaaggcttgggcactccagaagagcacaaccatgtaccaaccttctacctaaaggtgctgcttgcagccttggatatttgcggatgcggagtgaagttaccatggcatcgttgctaagaataagaaagtaatgtggttatgaggagatgtgtaattttgtggcgatattatttgcaacaatgatgtatatatgggcatgtttggttcacggctaactgtgacacactttgcctaaggttagtcgttcgaattgaagaactaaccttaggcagaaaaagttaggcaaagtgtggaaatttatgcagcaaaccaaataggcctatagttttactgctagttaatttgcttctatttggaaatcggaatagtaaagcatcgagcaaggttttcaaaaaaaaaaaaaaaaaaggcgcctaactttttcttttttacgcgtaaaaaagcgtgcatgctctgtcatagcgct

SEQ ID NO: 152221 - DNA, 754 bp, Zea mays
  Clone ID: MRT4577_70408C.1
ctgtgcggcgccccggccgggcggcgggaccaacctacaattgtcacttccattttctcaataccttaagcaaggaccaatgtctcaagcccagccccctcgttcccaagcccagtggaaacacgttaaatttcaggataaccaagctaatgccatgaaggaaccaggaaccggtgggtatggctatgggacgaaaaatgacaagaataaggatgtggatacaatagcttcggacttcatcaagctgaagcacaaggcttgggcactccagaagagcacaaccatgtaccaaccttctacctaaaggtgtcaatagttcaagaagttgatactatatacttatgcttgtctctgtatagtctataagtcctaattcaaataacaggtgctgcttgcagccttggatatttgcggatgcggagtgaagttaccatggcatcgttgctaagaataagaaagtaatgtggttatgaggagatgtgtaattttgtggcgatattatttgcaacaatgatgtatatatgggcatgtttggttcacggctaactgtgacacactttgcctaaggttagtcgttcgaattgaagaactaaccttaggcagaaaaagttaggcaaagtgtggaaatttatgcagcaaaccaaataggcctatagttttactgctagttaatttgcttctatttggaaatcggaatagtaaagcatcgagcaaggttttcaaaaaaaaaaaaaaaaaagcggcccctacccta

SEQ ID NO: 152222 - DNA, 646 bp, Zea mays
  Clone ID: MRT4577_70409C.1
tgggtacctcgaggccggccgggataccaacctacaattgtcacttccattttctcaataccttaagcaaggaccaatgtctcaagcccagccccctcgttcccaagcccagtggaaacacgttaaatttcaggataaccaagctaatgccatgaaggaaccaggaaccggtgggtatggctatgggacgaaaaatgacaagaataaggatgtggatacaatagcttcggacttcatcaagctgaagcacaaggcttgggcactccagaagagcacaaccatgtaccaaccttctacctaaagccttggatatttgcggatgcggagtgaagttaccatggcatcgttgctaagaataagaaagtaatgtggttatgaggagatgtgtaattttgtggcgatattatttgcaacaatgatgtatatatgggcatgtttggttcacggctaactgtgacacactttgcctaaggttagtcgttcgaattgaagaactaaccttaggcagaaaaagttaggcaaagtgtggcaatttatgcagcaaaccaaataggcctatagttttactgctagttaatttgcttctatttggaaatcggaatagtaaagcatcgagcaaggttttcaaaaaaaaaaaaaagcggcc

SEQ ID NO: 152223 - DNA, 522 bp, Zea mays
  Clone ID: MRT4577_7040C.1
atggagatggcttcgcctacccccgtcgatggtggagacacccgcttcagcttcgactacctttcccgagagggctttctctctatcttgtgtgagatactctacgcagcgagataccccacacctcctctatacacggtgcagcaatacgaggagcaccgggtgccacgctgtagggtttggctaaccctggagcctcaccctctgcagcctaggtggcattcgcttgattctgaaactgttggattcagggcagatgacaccattgaggtcgcggcactgaaggccttgacgaccttctatggataccacccactggagatgatgatgcacccacttggactcttccctaccgagaacagggatgatccgatgtggtgcgaccgagtgcgtcatgccaaggatgtgcgggctatgcatctcgaccatgttgggaggatcaccgtccagtgcatgagtgcactgtaccgcctgcaggccctgcaaaacgatgttatgacgcacctaactgggctcgcttag

SEQ ID NO: 152224 - DNA, 673 bp, Zea mays
  Clone ID: MRT4577_70410C.1
gtgtcttccttctcttcgcttcttcgctcgcgacctgttcccgacctccgatctcgctccccgtcctccacttcgcctgtcgatgcgatccgccctggatgcaatatcacgacgtgagcgatgaaccccacccaggccgccgagggcaagccacgagtgctggctgccgcttacggaactcaccagattagagattgtcgccttagctgccaagtcactcaccgatcacgcaagcaacctaggaggatgagagcgcccataaccgaatacctcgccctcatgaaggattgagttcatagtaagggtgctgatagcagtgacgactcccacgcaaacggccagcgactctaggctgacacggcggctaagatctatctactaccctctcaggacgcaaacatctccgcggatgtcgattcagatgtgttctgcgatatgctcacctccgtcaagaactgaggagagctggtcccgaactatgctcgcagacttgaaccggctaccgatctattcttgcctatagtgacactgccgtggcatattatgcccgtctggatccataattcctggtcagagctacagaataatgcgtctcagatctaaagcaaaacgtgtctaagactgtcatataccaccattgatatttgtaacactaggtaagtaatgattgttt

SEQ ID NO: 152225 - DNA, 414 bp, Zea mays
  unsure (1)..(414): unsure at all n locations
  Clone ID: MRT4577_70411C.1
aagtcgtcgtaggcagcgagcgtctctcctctcccaggcatggcgccgaggaagagagagagatcgtcggtccccttctcggcgtcggtggtgcgggtgccctccctcctcgagcgagatctgtctggtcacagatctatctgacaaaatggtgaagatntgttgcatcggtgctggctatgtaggtgggggggggggggcgttattgccctnaagtgcccagacattgaggtcgtcgtcgttgacatctccaagcctcgtattgaggcctgtaacagtgacaccctgttaatctacgagcccggtctttacgctgttgttacccaccgcattgggctccaattttttttttattactgatgtcgagaagcacgtggtttaggctgacattatcttcgcctccgcgaacacccc

SEQ ID NO: 152226 - DNA, 521 bp, Zea mays
  Clone ID: MRT4577_70412C.1
gataaaataatttctatgcaactttattgatcacgtaaactgcttgctcacgtatcaaattccgcgatttctctctgtctttctctctaataaaaagaggaccttgagcatgctcaggtcttacattgtggggtaatagttccttctttgctgatatatgatatggatatcatggtccatagattattacttattctgatacatacggcccttcatcacaagcggcccgccggcagggccaaaccctgcagtggcggtgtttacaggaccctactgatcgctgtaaatatggaaacggttgagcaagaggactcatgaggctggtccactcggttaaaggtcccttcccggcggctgggggctccactgggaacccgaagaaggcaaccatggccagccgtgcgtgctagatctccgacagctgcagacactccttcttctgagggtcggccgccagtccgagcggatcgaagtaagaaacctcggcgtacagcctcttctcacggtcgagctcggcgttg

SEQ ID NO: 152227 - DNA, 374 bp, Zea mays
  Clone ID: MRT4577_70413C.1
cgcaaaatttttcccaaatcttctcctctttaggaaggcagcccgagcgggggctctggagtgggggactcgtcgtctccaacgagagtgattatggcggctaacgattcgtctctcaaggtgtacccgcacccctgcatcagatgtcgcaccgcctttgactggacgatatccaagatcgactggtccaacttctaggggctttcactttctcttcgtccacgttcagagtcgcgacgaggacggattttatgacatggataggatctattcttcgccggaagtactttaacaaataaagcaaagagacaaaataagaaggcttcatttgtgtaagtactttgttaaccaatgccatcaattagggataaaat

SEQ ID NO: 152228 - DNA, 960 bp, Zea mays
  Clone ID: MRT4577_70414C.1
gcacgagctctctctctctctctctctctctctctctctctctctctctctctctctctctctctctctctcctcgtgccgctcgtgccggccgggaggtcccatccggccggccggccgggggtagcgcaccaatcccatcctccacccaatcgaaggacctagcgagcggcagcggcggcggcgatcggagaagatggtgcgcaaggcgaaggttgagttcgacgagcagccgccggataacttcgacccgaagaacccgtatgccgacccggtggcgatgctcgagtaccgggaacacctggtgcgagagaagtggatccagatcgagaccgccaagatcatccgggagcgcctccgctggtgctaccgcatcgagggcatcaaccaccaccagaagtgccgccacctcgtcgaccaatacctagaggctacccgcggcgtgggttggggcaaggatgcccgcccgcctgaactccacgagcccaagaagaccgtcaaggcggagtagcggcgctgctgccttgcttctcgtgctgctgttcctggattggagaggtgatctgacccttccattgagttgaatgaagtagcctggaactgtggtagttcgtcttttacatcttaagctgctgatagacttcaaataaaatcttgtccaagaaaacattctgtgagcgtacatgttgtcgtcgagctgtgtaattgagcaaatcgtcagattgaaactcggtgtctgccttgttcttcaaataccgcttatccagacggtgcttttgttttcacttttccactgcatctttgctctgcaaggatacgaaaggcatcattggttgctgttgactgttaaaaaaaaaaaaaaaaaagggattaactagtacattgtaacccagatacgacgtccttcccggctagtacaaaaataccgaattttttttaattcgaaaaaattttttaaaa

SEQ ID NO: 152229 - DNA, 264 bp, Zea mays
  Clone ID: MRT4577_70415C.1
agcatacacagagaaccaaccatgcattatttatggagctgatatgtaccagattgagggcattgctacattcatggactatgggctgccagagatattaagcacaaaactttgggacccacacaccacagttaactatggcttggaggcaaagttggcagggaaccacatatgacattgtccgactatgggctcaggtcaattgggccctgagttccacaggatgcattggctgtggaggtcttgtggcttagtggcaccttg

SEQ ID NO: 152230 - DNA, 524 bp, Zea mays
  Clone ID: MRT4577_70416C.1
gctaagggatattttattcttcttatgattcatttaaaatggtctgaaaatttttaggccccacaactaaataaaggaggggggaaactttagtcccctaactaaattttagtccccaaactaaactaatcaaacatggccttgatactatagggagaatacaacagccctaaattacatggtctccgatcggtaaaagggtaacgctaaaggaaagttccgaacagacccaacacaaggaaacccgacacgtcccctgaaaaaacacagggcctggggggctggaaaaccctttacatttacatcagggacatgggaggactcatcggcctcggcggcgaacagcttcccatctgggtggggtggggaacggacacaaaaacaggggacaccctgacggggccatgggatttttttccagaacacctaccatgggttcagggcgccgcgggggccctcgggccagttgagcaccttctggccgggcttgaggaacacgtcctcaccgggggggagtttccgcg

SEQ ID NO: 152231 - DNA, 498 bp, Zea mays
  Clone ID: MRT4577_70417C.1
gatctataaccggtctctttttttcccaaagctcatccgccgtctgacgaatttttcgtctagcccggtccgccccatatacctaagtggccgcctccggcaccccggcgaccgacaatgatctcccccgacgcatgccaaaacgtcttcggcattgggggtattgtgatctccttctgactatccctgtcacgagggcttaccatttcgcttgactacatggccatagacttggaagcagtcaagcctgcacccttacctgtctaccctagtgaaatgcgtgctcttggcgctttatggctttcccggcggccacccctacaagcttggtcctaagaccatcaacgggatctttgctgtttgtcaacagccttgctacctcactatccccttcctatattccaacaggccccagctctgaaccttttcgagatcctgggcttttagattctgttcatggccaaacgtggtgctgagtgtgattctctgcgcgcgcac

SEQ ID NO: 152232 - DNA, 352 bp, Zea mays
  unsure (1)..(352): unsure at all n locations
  Clone ID: MRT4577_70418C.1
acaggagncanaaggcaaacggccnccaaaanggaacgaaacaaaanaaaagggggggggggggggacnnnggancngcagnaacgcagggacaggacgaacaacaaacncnnnnncncnnnggcacccaacnncagcncacggcggagnangacgcnnnacaccgggcacgcnggnaccccaagngngnaccngccnggancnggccccanccgaggaggcgccaangcnncncaacgcgacggcgcagagcaaccccccncnccncggcncgggcagacaggcgcggngagcngnagcnnggcaagaacgnncnnaacagcgaccacacgggcgccnggggacacggacc

SEQ ID NO: 152233 - DNA, 490 bp, Zea mays
  unsure (1)..(490): unsure at all n locations
  Clone ID: MRT4577_70419C.1
ctcgaggccggccggaacactnatcccccaatgggcacctctctccatctcttcgctcctccgccttcttcttgctccagtcgaggcacaccatatccatgccccacttggacgatcaccaattggaatcgaaggtggacacccaagcgtctaagacctactcgcagaacgctggcagcgcccggatgaacagcttgatcgtcatcaagaaccgcccctgcaaggttgaggaggtttctacctcaattactgggaatcatggccatgccaaatgccactttgctgtcatacatatattcaacgctaaaaagatcgaatatattgttccttcgtcacacaactgagatattacacatgtgaaacgtactcagtatcggctgattgatatatcagaagatggatttgcgagccttcttacttcagatggcaacactaaggatgatcttagactcccaactgatgagactcttgtggcccaaatcaaggaagg

SEQ ID NO: 152234 - DNA, 330 bp, Zea mays
  Clone ID: MRT4577_7041C.1
aaaaaaaataaataaaaaaaaaaaaaaaatattaaaaaaaaaacaaaataaacatacgggaatgggcttgtactgtataacagctgtacatactcaatcataccactgtcaaaaatggtccctagtttaacccaatctgaattgactttccaaaattgtccaacgatttggctgctaaaaccatggcatcaccaaacttattccccttgcagtacatacagctttctcaataaatcatcatatcgaccagtcttaacccgatcgccatatctaccagttacacacttctgtatggttattgttacttccccatcctactgctctttaaaa

SEQ ID NO: 152235 - DNA, 2742 bp, Zea mays
  unsure (1)..(2742): unsure at all n locations
  Clone ID: MRT4577_70420C.1
cgggaaaaaaaaaaaaactgaattgaaggaggcggtgataaaacctccccctcggcacgccgcgcgggcggcgcgcggcacctcaagctcctgcttttgtcttgctctgcgtctgcgtctgcactgcttcgcgtctccctccccccgcctccgcccccgccccggcaaaaaagcaaaacacggccatggaaggctacgaccgcgagttctaccagttcagcgaccagctgcgcctgcagacggccgccttctcgggcctctccctcggcgactccatctggtcccccgccgacaacaccgccccccgcgcccgcaacgccgacctcttctccccctccccggcgcccgacaacaacagcgccgggttcgccgccgccaagatgaacggcaacggcctcaacgggcccggcctcatcggctccggcaagctcgccttcggcgccaccaccaccagcaaggccgaccgctacaacaacgtcagcctccccgacgccaagccctacgccaacgccaacgccaacggcatgtacggtgccaagcccaacaacaccaacatgaacaacggcttcgggctcaacaagatggctgccggcggcgggggctacggcaacttcaacggcggcaacgagggggtgaagagctacttcaacaagtccatcggcaggccggccagcaacaacagcagcagcaacaacttcaacggctacggcggcaagaagggcgccgcggacggcgaacaacaacaacaacaagaacgagcgaggggacaacaaccacggcgccgcgtcgggagaagcggttcaagacgctgccgccaagagcgagggtcctgccccgggcgcgagcccatcggcggccaacatcttcgtctggttcacgacgctgccggcgtcggaggcgctgccgcggggccaggccatcggcgggtacatcttcgtctgcaacaacgacaccatggacgagaacctcaaggagggagctgtccgggctcccgtccaggtacagggactctgtgcgtgctatccgcccgggactgcccctcttcctctacaactactccacgcaccagctccacggcatcttcgaggccgcgagcttcggcgggaccaacatcgacccgacggcgtgggaggacaagaagtgccccggcgagtctcgcttccctgcgcaggtgcgggtggcaacgaggaagatctacgacccgctggaggaggacgccttccgccccatcctgcaccactacgacgggcccaagttccggctcgagctctccgtcaccgaggccctcgcgctcctcgacatcttcgccgacaaggacgacgcctgatcgatcccccatcggatctgtcgtcgggccactcgaagctcggatgcacgaatgaatgaatgaatgaatgaacaaacaataataacggatggatggggcatgtatatcgtcatgcgcatgtcaatcccacgacgagacgagaagagacgggagtatccgcatcaccacggtggtcggtggagtagtattatattaatacgtaattaatatagtatgtccacctttgtttgatactactaagggagatgtattagggaacgcgtcagaatatatggggtcggaactatcgcaacgggcaattgccacagatgcagaggatggcagaggtgctcgagagtctggaaaggatgttgtgaccgagatggccaagatgacagtaccaactggagcaacaacaacaacaacagcagccacgccggcggcggcaacaagaagggcggcgccggggagtacggcaggaagaagcacgccaagagcgagggcgcggcggcggcggcggccacggacaagcagcggttcaagacgctgccggcgtcggaggcgctgccgcggggccaggccatcggcgggtacatcttcgtctgcaacaacgacaccatggacgagaacctcaggagggagctgttcgggctgccgtccaggtacagggactctgtgcgtgcaggccggccgggactggttctctaatggagaattcctcgagtggaacgggtcccgttgccatctttagacgagatggtgcaactgcaagaggcgtgaggatgcaacctgtagctgtagcatgtgcgagtggcaacgcggaagatctacgatccactggaggaggacgccttccgccccatccttcaccactacgacgggcccaagtttcggctcgagctctccgtcgccgagaccctcgccctcctcgacatcttcgctgacaaggatgacgcctgagccttccttgccgccccctcgccgccagtgccaatccattaatgcacagacaataaaatggctggagggacagaccaaactatccacctttgtttgatatgataaagggctatgtatgaggcacgcgtcccattatttttgtttttattataagactagacctcgttccgtaagatacatgtatcaatattatataaaaacaaaccatcagttcttgtgctgcactacaaaaaaaaaaaaaacacagcacaaatcatatctgctagtatagcaggtgatatggttcttgcttctgcttactcgcatgagttgccacgatatggtgctcgaagtntggtctgaccaactatgcagctgcctactgcactggccttctgttagctcgccgtgtgctcaagaccccgtgtttagataaggaatatgagggcantgttgaggccactggtgaggacttctctgttgagccagctgatgag

SEQ ID NO: 152236 - DNA, 677 bp, Zea mays
  Clone ID: MRT4577_70421C.1
agatatcccgcgttcccaaacccgccatcattagcagcgtacagttgcgcaaagttgacatgggcactctaccgcctttcatcacaaatccaaagctcaaggagctgactgttgatggcgatcttgttgtcgaagctgatgttagttacaagggcaacttttccattgaggtatccgcgaccgtacgcatagatttgggcacacgcttcaaggcccgcgaggtgacactcatcttggctacggtattgaagaggctcgacggtcacattctcatcaggatcaagccaccgccaagcaaccggctttggatgaccttcgagactccacccaagatggaattctctcttgagccaatcgtcagttcacggcagattacctatggtgttgtcttgagggcaattgaaagtcgaatacgggaagtcgtcaatgaaactttggtgcttcccaactgggacgatatgcccttcacagacacgatagcgcaagtcatcagaggaggcatctgggaagacacttgtaaaaccaagggtgaagatgcggacaaggccagccagaaagacgccacgcttgacgctgccatttctgatatgcaaaaacttgacgagaagggcgactctgccagtgcacacttctccatttcttccagtgctgaatcagaagaagtcgcgactggtatt

SEQ ID NO: 152237 - DNA, 247 bp, Zea mays
  Clone ID: MRT4577_70422C.1
cttcaaaggtgttagcagaagccaatgtgctccttaagttgcaggatagtcccattggtaaactttctcgtacaaggattcctccactgcctttcctcctctcttcccttcttcagtctcgtgccccactgaagttaccagaggagcaatttggtggtgatgatgatgatcttgaagatgatttggcagatgattctgattcagatgatgggtcagattatgatgatttacctccatttaagcgtct

SEQ ID NO: 152238 - DNA, 498 bp, Zea mays
  Clone ID: MRT4577_70423C.1
ggcagaggyatagaatggcaggtcgcaaattcaaaaatttccctcgccatccatgcgtacaggcatttcacatctcattgacbttacttagtatgtgttcgagatattcgtagattcagcctcctcgtccattcbttgcttatctcaaaacatgcygcaattggatgaacagaaaaaaaccgaacgcttaaaatcagggtcctgcagctatagtggacctcaaacacggcagkcttgttgctcaccgaagagcctccggtcgccatgtgggctcaacggagacatttggttgataggaccgacttggtctttgagctgggtgcccaaaaacggattcccgagacctatatkactcttcgactatyccagccgcgcctgagcaaatttgttagctgccttggagacacactttgtcgacgaccagggccgaaaacttgtcaaataaaccaagactcgaagtgggtttcctgtttctattcctaatacaatttcaacgtc

SEQ ID NO: 152239 - DNA, 505 bp, Zea mays
  Clone ID: MRT4577_70424C.1
aacaaaacaaaaaaaaaaaaaaaaaaaaaaaaaaaaaaaaaaaaaaaaaaaaaaaaaaaaaaaaaaaaaaaaaaaaaaaaaacccaaaaaaaaaaaaagggggggcccttttaaaagaaccaaatttaactaccccttctttcaaagggaaggtttttttaatagggaccctaaattaaataaaatggcccggcttttaaaacgtcgggaacggaaaaaccctgggtttacccaatttaattcccttggaaaaaattccccttttgccaagtggggtaaaaacaaaaaagccccccccgaacgccctttccaaaaattgcccaacctaaaagggaaatggaacccccccttgaacggcccattaaaccccgggggggggggggttccccccaaggggaccctttaatttgccaagcccctaaccccccgtcctttgggttttttcccttctcttttttgccaatttagccggttttcccccgaaaactttaaattgggggctccc

SEQ ID NO: 152240 - DNA, 173 bp, Zea mays
  Clone ID: MRT4577_70425C.1
tcgttaggcccagtaaattttttgatgcacgattggtagtattgccggtgccgctggtgctgggagctcatcatcattcgtcggtagcaggaaggaggcggcgtgtaaggggaggcaaatgctggaggcctcacctcagggtcttttcaccagatggacacgccggataggcc

SEQ ID NO: 152241 - DNA, 371 bp, Zea mays
  Clone ID: MRT4577_70426C.1
gccacgcgtccggacatgcgttcgagcatgtgctcgtgcaatgcttgcgtacttgaggtccgcttctgtggcgaggggtacgatagcgagggcccagagctgaccaccatgtttacgttggcgatctcggctacgccatcgtggacccatacgtcttaacttcttgtatacatacggtccggtgctagtgtctgaaatgatactaggtccacatatacgatactcccgaggcttgagcttcgtcaccttccacacggctgtaccgcgatacgtcatagcacgtaatacggcatgaacatcaaggacctctactgtctgatcatagacctttaactaggtaccacctctgcttctgatgtggaggccatggt

SEQ ID NO: 152242 - DNA, 291 bp, Zea mays
  Clone ID: MRT4577_70427C.1
ctaatgggaacccactgcaacgtcttcactgatcggcccagcctaaagtactaatgggaacccactgcaacgtcttcactgatcggcccagcctaaagtatgatcaaggattatgacctggaggtacattatcacccaagaaaagctaatgtggtagcagatgccttgagtcggaagttgcaatgcaattgtattctgatggattctcgcattaacaccttgtgtgatgagttgagcaagatgcaaattgaactgattccttctggttctttgtctcacgtttctgttgag

SEQ ID NO: 152243 - DNA, 553 bp, Zea mays
  Clone ID: MRT4577_70428C.1
tattcagccgccttcgccccctcgccgacctcgggagccatcatccacggacccgccgccgccgtcgagcactcgagcgcagcggagcggaccacagccggtgctagggcttcggttcgagggaggatggggaagtcgaagagcaagggcgccaagttcgccgccgtgaagaagatcatcagcaagaagaccatcaagaagtacaaggacgaggtgctggacccgcggaagaagcacaccgagaaggagaagctcggccggaatgtgccgcaggtgtcgtcggcgctcttcttcagctacaacatggcgctcgggccgccctaccgggtcatcgtcgacaccaacttcatcaattcctccatccagaacaagttggatttggagaaaggaatgatggactgcctttatgcaaaatgtaccccctgcatcactgattgtgttatggctgagcttgaaaagctaggacaaaaataccgtgtcgcgttgagaattgctaaggaccctaggttccagagattagcgtgcacacacaagggaacttatgctgatgact

SEQ ID NO: 152244 - DNA, 299 bp, Zea mays
  Clone ID: MRT4577_70429C.1
gagacccaagcagctggaggctctgtgtgtgggtcgctgatttcttggagcctgaaaagaaggagcagcgactggacccagagccatgtggctgtgccctctggccctcaccctcatcttgatggcagcctctggtgctgcgtgcgaagtgaaggacgtctgtgttggaagccctggtatccccggcactcctggatcccacggcctgccaggcagggacgggagagatggtgtcacaggagaccctggccctccaggccccatgggtccgcctggagaaacaccatgtcctcctggga

SEQ ID NO: 152245 - DNA, 781 bp, Zea mays
  Clone ID: MRT4577_7042C.1
cgggaaattatctaaaaaatgaaaaaaaaaaaaaaaaaaatttacaaaaaaaaaaaaacttggccgatccatcgccgcatcggggacctcgaccccgccctcactgagctaggagcagacgaggcttgagaacgagcgacggagacctagccgaagcaggagctccccatggcgaccggcaacctggcgagcgtggtggtggctgtggacggcagcgaggagagcatgaacgcgctgcagtgggcgctcgacaacctccgcctgcgccccgacggcgagctcgtcgtgctgcacgtccagccgctgcccaacatcgccgcgggactcaacccggcgcccatccccttcggcggccccagcgggttggaggtgccggcgttcacgcaggccatcgaggcgcaccagcggcgcataacgcaggcgatcctggagcacgccctgaagatttgttccgataagaatgtggaggtgaagacggaggtggtggtcggggaccccaaggataaaatctgcgagattgcggccaaccgtaaggccgatctgctcgtcatgggctgccgtgccattgggccgctcaagagggtgttcttgggcagtgtgagcaactactgtatcaaccatgtgggttgccctgttgttgtgatcaaggggacttgagattccatcagcccagcattctttggtgtacttccattcaaggtttttgaggcttctgctgtgacatgtgtaatcctgtacgatatattactgcacattactattcttttggtggtactgctga

SEQ ID NO: 152246 - DNA, 532 bp, Zea mays
  Clone ID: MRT4577_70430C.1
ctcgaggccggccgggacaacattttgacaaacacccactacgatagggaaatcacagtactacggggtctgaagctatgacagcggggggccacgcaaatcgggtgctagtgcgcgacgatttcacatctgcgtcgccactcatcgctcttgacatcctacctgatggctcgacgcggccggctccactcctatttcgactcacagtgagcaacacatctatggagagggaccacctgtccggctgtttccctgtggtaacaagaaacactacgaccacctatatctgttcaaagaacacataaaatgaatggcgacataaaattgtacaatcgaacgatgtatacaatttgaatataacaacaccaacaagaacattgaactacaacaagaattcactgtttatatcatagacaactcatggctgcatacaccaataaactcgtcaaaaggtatattgccaagaagacaaataaagatggtatatacaccatacttttatacatatgaacatttggatgatgatgatgac

SEQ ID NO: 152247 - DNA, 289 bp, Zea mays
  unsure (1)..(289): unsure at all n locations
  Clone ID: MRT4577_70431C.1
cacacaatccgcctccgcctcggcctccctgaggatttgctctcggctcgtcggatcgagttcgggggatcctccatggcctggngtacgtcgctgaagtcgaagcccaagggcacaggcgggaagaaggccaacgctgacgacgaggacgccaccgcggcggcgaccacggtgaggctcatgaaggagtggaccacgtggacgatgaagaaggcgaaggtggtggcgcactaggcttcatccccctcgtcatcgtcatcggcatgaatccgagccaagccctcgtctc

SEQ ID NO: 152248 - DNA, 191 bp, Zea mays
  Clone ID: MRT4577_70432C.1
attatatactaatatttatttttaacgcaaacattggcaagataaaaattaacaatcaccacacgaaaatacaaaacaatagaaccgcaaggatcactagaacatcaagtagaccagaaaactgcacaattctcaaccgataaacaatcttaaccattgactatccaaatataaaggactttattaaactt

SEQ ID NO: 152249 - DNA, 236 bp, Zea mays
  Clone ID: MRT4577_70433C.1
aggcgtccgcaatcttgcgcaacactagtttaaacaacactcacaaattgccactagcaccagccacgtgacctgaggggagcattcaaaatagacaggcgcgcacctggacgacatatccttgtcaggctactatatcgaaccaggtgaagaaagcaggaaggctctaggccgaagggcccccgagggccataccgtagacccctactgtacccaagaaaaaatcgttgaagccc

SEQ ID NO: 152250 - DNA, 204 bp, Zea mays
  unsure (1)..(204): unsure at all n locations
  Clone ID: MRT4577_70434C.1
aaactatcacgtcccatgcactcctacctaagctttgatcctctanaccggccgcccgttttttgtgtttaaaacctccaccaactgctanctactattctttaatgacttgaaaattttccttcttgaactccatcggagagttatttctcttttcttttttttccatgtacaatccactcttcttatgcttctacanctaca

SEQ ID NO: 152251 - DNA, 353 bp, Zea mays
  unsure (1)..(353): unsure at all n locations
  Clone ID: MRT4577_70435C.1
tttatagcgaggacaagccgaaccatagcggaatttcatagcancaaattcaattctgttgggaatcttggagaaagtcctccgatagttccttcagctgacgatttgtcctaaataaactacagcaatggatattggtgtttctagtctagaaatcaaatccaaacgtggccaatgaatcgattctacgacgacaccctggtgcagactctggcgtccttgtacaccttgccggcgcggcagacgtagccctgctccggcgcgcagtgctcgtcccgcgagcacacgcacattccctcgagcgcgcacccgggcgcgttcgtcgtcggcgccctcccgccgatgccgagcat

SEQ ID NO: 152252 - DNA, 761 bp, Zea mays
  unsure (1)..(761): unsure at all n locations
  Clone ID: MRT4577_70436C.1
cggggcggggacttcccggaggcagcggcacgaccccccccagcgcgcccccccgcgctgcccctacagccccctcctcgaatgggtacctcgnaggccggccgggccgggtcgttccaaaaagactccttccacgcccagccatctctaaaccctacccacangccacccgncccgccgnnccgccgnctccctggacccctagtggtccggatttaaccttcaaacatgggcggacgtcggatggtcggaagcccggaagggtcgccgccccggtggctcccccagaaagaagggaccgtttccccggcaaaggtaaccgggcttaccccgggggggggggcccgaaccctcccaaatggcgcccgggcttttggaccatgggcccccccccgaaccgaacccccccggtttcaaggctcctttcccccaagggggggggggcccccaggggaaaaaaaaggggttcccccaaaaagggggggtttttttgaaaaaaaaggggaaaaaccccccctgggggggggccctcccctccccaaaagaaaaacccttgtggcgccccaaaggggggggggcaaaaaaaagagggggggggggggccccccccccggggttttcgggggggaaaaaaaaaaaaacccccccccaaaaaccacccccccgcggggggggaaaaaaaaaaccccccttttttttttcccgcggggaaaaaaaagggggggggggccccccctttttggggtgcccccccccccccc

SEQ ID NO: 152253 - DNA, 402 bp, Zea mays
  Clone ID: MRT4577_70437C.1
cccaagggcccaactacccccagtctcggaagagaactatccacaatcgcaagactccaagggcggggcctttctatccatcccttactaaccgcggtggtcgcctgacatcacataaaccatggtgaatgcttgcactgtgcttggtagctacgatctggtcaatgtcaccatcttcttcacacaagagggagatggccctaccactgtcaccgtaagtgtttatggcctcaagcctggccttcatgggttccatgtgcatgcacttggtgacaccaccaatggctgcatgtcaactggaccacactacaatcctgcgagcaaggaacatcgagcaccagaagatgaaaaccgccatgcccgtgatcctggaaatgttacatctgcagcttatggtgtttc

SEQ ID NO: 152254 - DNA, 591 bp, Zea mays
  unsure (1)..(591): unsure at all n locations
  Clone ID: MRT4577_70438C.1
cacacaccagnagtctgttggcgcggggggagaggcacagctcgcagtgcagagcagccacttccttcgtctacaactaagtaaccagcagaggtcatcgatcgcgatcgaccatggcgttggtgagggagcacggtgggtactacggaggcttcgacagcgtcgaggcggcggccttggacacgctcggctacggccacggcgcgtcgctgggctttgacgcgtcgtcggcgctgttcggggaaggcggttatgcggcgggcggcggggacgcctgggcgggcgcgggggcgtcgaccgtcctggcgttcaaccgcacaacggcagcggcggccgtgggtgtggaagaggaggaggaggagtgcgacgcgtggatcgacgctatggacgaggacgaccagagctccggccccgccgcggcggcgccagaggcgcgccacgcgctgacggcctccgtgggtttcgacgcctccacggggtgcttcaccctgacggagagggcgtcgtcgtcgtcaggcggagcggggcgcccgttcggcctgctgttcccgagcacgtcgtcgtcgggcggcacgcccgagcgcacggcgc

SEQ ID NO: 152255 - DNA, 574 bp, Zea mays
  Clone ID: MRT4577_70439C.1
aaggccggaagggtccctttggggggttggggacgggcccaattattacaaacctgggcggggtaggcccaaactttttcacctttttttaaaaaaaaaaagggggggaccccctttttttaccctccggggaaaaacacttttccttttttttttgggtttaacaaaacacccttggaacaaacttaaggctctgaaaacatgttccccccctgggaggcccccaaaaaaccctttgttttccaaaaaccctttatgggcatgaaacaaaaggggccccccggccatcggaaaaaacccggggggggggatgcccccctgccccccaaagggggagcccgggggcaaaaacaggatctcaggtttaaacagccccccccccgggggggggagggcccttttaaacggaaaccaccacgggttcaacccgttcgtcgttggggaaacgggacctccggccaaattcggaaccggacctttttggaccaatttgaaaggcaggtttttgggaaagggggcccattcctttttaaccctccgtttgaactgcccagagtcttcgggggggggaagg

SEQ ID NO: 152256 - DNA, 355 bp, Zea mays
  Clone ID: MRT4577_7043C.1
atattttttttttttttttttttttttttttggtttttttttttttttttcattgtttttcttttttttgttggccttttatatagtttacttgggggggggtcaaaaaaacccgggcttaaattttttttacaaaatacagggattatggggccgtgaatttattattacaagggcaaattatataaaaggttaatttaatggtcaaaggggaccctcttttataggaccctcattaaccattgggccagggggggttttccacccattttgggaaactaggcccccttttgagggcaaaaagggggtcccaattaacccccgggaagttcaaaaaccctttttcccggggggg

SEQ ID NO: 152257 - DNA, 1660 bp, Zea mays
  Clone ID: MRT4577_70440C.1
ggccggggtaatcttcagatgaaagacagatcgctaccaatgcacacatagctcaggctcatgtgtgtgttgcatcccacagtctcatgcgcatgtttacttacagaagttcatgaaaagacacgtgcacttgaggcttctggatacttcttctgcctagaggaccgtgcactactttgtagagactgtgatgttgctatacacacagtgaattcctttgtttcagtacatcagagattcctgctaactggagttcaggtgggtcttgatcctgctgatccagttccacctattgctgaaaagcacgttaatgctgctggtggatcagtaaatcaaccagtgagacatcagccaaagagaagcccgacagttcaattttcagttgaagggagtgcttctgttcctactaaaaatgtaacaaatggagattgttcaaggcagaattttgtcccaacagccaggggagaagtggttgattggactatgaataatagtacaattcggtcagtagaatctccgcctaagtacatgtcagaggagagtccaacacttctgcaatctagccagaccacaacagtcttctctaaccaaattaacggcaatagtgatgggacctaccacttgtcattctcaagtggtaatgtgacagacagtctaccagattggcctgtggatgagttcttcagtaactcagaatatgttccaaacttaggcttctccgagcatggttcttctaagggtgataacgctaagctggagagtgctggtggatctctacaatgccgtttagctgaaggctccattgctgaggaactattaggacaggtgcctgggttgatcactgatgattatatgagccgggtacctgagaattcatggacagtacctgaggttccctcgccaccaactgcctcggggctcaattggcatgggaatttgtgtttccctgcatatgacagcacaatgtttgttcctgaaattacatccctccagaactcccaaaatcagttcaccgtaccttcgagtttcaagcgccggagaagagagtattgaggtgacgacaagatcactagacgtccactgtccagtttaggccatcttgagaaaggtttcttgctgtaccaaatgacggagaaaggatatccaggactgggttatcattcaaacttcaactgaactatccaagtagctaggtttgaagtgtgctgcaatgcttcaatgatgttcattttccaaagatctgagcttcgctagtgttggggtctttttctccgccgaaggtcctctaggcaaaaacaccttcggcaagacagtacaaaggcaggtgcaacatgaagatataagtcgaagctacgatcgaaagagcttcggcttggtgtcatgctaaagacgaaggacgataccgacttaaagaggaaaatactgtatagcccttggtagtctgtattatgatcataattagttattaatgacatggatataatttcgtctgggttacgttctgcgcctataaatagatgaacagtaccccgtactattcatgctgcatggtaatcgttcctgcgtctctcacattttcatcatttgtcgaactgaatgtatcaatgaagcataaatattatgagcatttatttatgtttataagaggaaatgggaatat

SEQ ID NO: 152258 - DNA, 562 bp, Zea mays
  unsure (1)..(562): unsure at all n locations
  Clone ID: MRT4577_70441C.1
caaacggngcttaaacaattcataaccatatcttcagaatatacatggtgtcgcttttacgagcatgtcctgtgcggcaagtttgtcaaagctctctaagacgagatagacatggaagatgcaattgacctggacctcaggctcgagatccagcgacttgcgaggtggttcttctacagccacttgcggattctcctgttcattaacccggcttcctccgcaaacctctcgtgctcgatcgcttgctgttgcctgttgcctgtcgctgtagctaggcgccgagacaagtcggtagctcgaagcgttggttgcatatacttgcaacaatggtggaactgacggtgtccgtgctcctcctggtcgccggcgtcgtggcgatgctggtgctccacatcctcatcgtcgtctgggcgctccggcggggcgtcgtcctccgcgcagcggcgtcgcggcaggacgaggagcgcgcggaggggctgtttgtcgaggaccttaaccagctgccgtgccatgcccactagtgcaaggtcgatgcgggcacccagtgcaccgcgtgcctgga

SEQ ID NO: 152259 - DNA, 245 bp, Zea mays
  Clone ID: MRT4577_70442C.1
aaaaaggggtaataaaactcttacaggagcacacgcacactttgcaaataaaaaaagggggacaataccagtgaagatggtctaacgggaacacaaaacaaatgagctgaaccacttcctgcctcctaaccggaaaaaaaacgtcactgggcaactaaattaatttccctaatgtcacaaggaaccttacacagaactagaacatataaaacattggggctcggacaacttatcaccccttggga

SEQ ID NO: 152260 - DNA, 883 bp, Zea mays
  unsure (1)..(883): unsure at all n locations
  Clone ID: MRT4577_70443C.1
gcacgcctgcgctttgaccaccgcttcgtctgtcgtctcattcttctcccccgatccctaccggaagcccggaagcaaccgccaaccgtaccgcacccccaccaagcgcgcacctactcaaaacgcaacagcgctcgcttcctcgcagccaggtatctcacccctcgccaagtgcgcacgtactcaaaaagctctagctcacagacacgagccgtgcgggagagggagggagagagagagaaaggggaccccgatccaatcccagtcctctaaaaccctagcggggagccggggatgaggatccagtgcaacgcgtgcggggccgcggaggcgcgggtgctgtgctgcgcggacgaggccgcgctatgcgtcgcctgcgacgaggaggtgcacgccgccaacaagctcgccgggaagcaccagcgggtgcatctcctgacggactccgccaccgccgccgcctcccccgcgccggccgtgcccaagtgcgacatctgtcaggaggcttctggatacttcttctgcctagaggaccgtgcactactttgtagagactgtgatgttgctatacacacagtgaattcctttgtttcagtacatcagagattcctgctaactggagttcaggtgggtcttgatcctgctgatccagttccacccattgctgaaaagcatgttaatgcttctggtggatcagtaaagcaatcagtgagacattctgcctaggagaagcctgggagttcaattntcagttgaaggcagtgcttcttgttccgagccaaaatgtatcaaatgggagattattcaaggcagaaattctgttccaacagccanggcagaaatgngttgattgggacttagaacaatactcaattcagtcagt

SEQ ID NO: 152261 - DNA, 2253 bp, Zea mays
  Clone ID: MRT4577_70444C.1
gttgcatcccacagtctcatgcgcatgtttacttacagaagttcatgaaaagacacgtgcacttgtaagttgtaaccaccttgaagaagctaaagtaaaacaacatgtgttttctctaattacaacacattatgttctatcattttattgtaaccttcacattttctgattttgaaaacctggtaaatgcgtcaaccatcaaactgtaaatttactaatcccagtccatgtatagtgatgccattattttgtgtcaacctaagttatgagtactgtgaacagataaatttatttgcctggtgtgtttctgcaagttgcatttgttttacttctggttgctagatgaaaacccttgtttctgcactaagggctgctgtagtgctgttgggtaggtgtaccttctgttactctacattgttgtacttatgaaggtcgaatcactgtctggatgatgagtgaactacattttacattttttagtttgttgagttatattgtccgtggacaagctgtatctggatgtggccaaccggcttcaggggctcatgcggctggcacaaggagcaaacaagcaacaaccttatcctgagttgctatcattatttgttagttagctactagatccatttggtagtattttatcatcttgctgctagtatgtggttagagagggcatgtgatcattagttggaacttggcagactagaagaatatcaatcaatattgtcctagtcccattctcctacccttacccttgtggtgtggttgccggctatcagcgatgtcatgctgctgaggttcagggccatctagaccagagtttatcacaacgatatagttcgctactgtgacacagtttgttttgtagtgtatcgaatcctcctgcaagacccttctcatgtttatccttactgcaggaggcttctggatacttcttctgcctagaggaccgtgcactactttgtagagactgtgatgttgctatacacacagtgaattcctttgtttcagtacatcagagattcctgctaactggagttcaggtgggtcttgatcctgctgatccagttccacctattgctgaaaagcacgttaatgctgctggtggatcagtaaatcaaccagtgagacatcagccaaagagaagcccgacagttcaattttcagttgaagggagtgcctctgttcctactaaaaatgtaccaaatggagattgttcaaggcagaattttgtcccaacagccagggcagaagtggttgattggactatgaataatagtacaattcggtcagtagaatctccgcctaagtacatttcagaggaaagcccgacacttctgcaatctagccagaccacaacagtcttctccaaccaaattaatggcaatagtgatggggcctaccacttgtcattctcaggtggtaatgtgacagacagcctaccagattggcccgtggatgagttcttcagtaactcagaatatggtccaaactttggcttctccgagaatggttcttctaagggtgataacgctaagctggggggcgctggtggatctccacagtgccgtttggctgaaggctcagttgctgaggaactattagggcaggtgcctggattgatcaccgatgaatatatgagccgagtacctgagaattcatggacagtgcctgaggttccctctccaccaacagcctcggggctcaactggcacgggaatttgtgtttccctgcgtatgacagcaccatgttgttcctgaaattacctcccttcagaactccgaaagtcacttcaccgtaccttccagtttcaagcgccggagaagagagtactgagaggcgacaagaagatcactagacaccactgtccggtctaggctatcttgagaaaggcttcttggtgggctaaatgacgaaagaaaatatccaggactgggtggtcattcaaacatcaactgagctatccagtagccaggttttaagtgtgttgtaatgcttcaatgtgtttcattttccaaagacctgagcttcgcttgtgatttgttccgagctgtacggtgtcgattttgtgtatataatataatataacgaaataaagggtacccagtatgagtatgatcattccgaaataaaaaaatattaatgatataataaaaaaaaaaaaaaaaaaaaaaaaaaaaaaaaaaaaaagaagaaaagaaaaaagggggggaggggaaaagggagaaaaaaaggggggggggggggaagag

SEQ ID NO: 152262 - DNA, 235 bp, Zea mays
  Clone ID: MRT4577_70445C.1
ggtgcttgcgatgtgatagcttttgtttggggtcccctaatttcatttccctggctggggggggggggcgtcttccctgggaaacccctggcctttcccaccttagtgggcttggggcacttccccctttcgccggttggggtttttgcgtgtgggccctctttggtcgccctccccttctgtttgtcggcctggtcgggtcttgggccgcgccttgtggcgggcctttattccc

SEQ ID NO: 152263 - DNA, 148 bp, Zea mays
  Clone ID: MRT4577_70446C.1
caataaatggggttagaaaaccaacagaaaattttgggaaacagacttatccaaaatgaggtttcttatctttgaccgattatattccatcactgtaaatctagacgaagtacccctttatataacctttgcacctctccttgacaac

SEQ ID NO: 152264 - DNA, 506 bp, Zea mays
  Clone ID: MRT4577_70447C.1
gatctctatcacttatcctccgcctccgcgcctctcttcgtctccctgctcccccgacttcttcttgatgcagacaagccagggatctatctgcccgactccttcgagaaccactgccaatcctatgtcgagacctgagtgtcccagacctacccgcagcagagtggccccgtccgtcgtaacgagttcgtcgtgatcatatatcccaccctgcactgctgtgcctcttcctaccttcgagactggtcagactgtccatgacaaattggcactttggtgctgtaaatatattcacccttgaggagctcgaaagatagtcgttccttcatcacaagattgtgatattccttgtgtgactcggatgagcatcagctgatcgatttttccgaggatagtgtttgtgagtgttcttacttttaatgcgtacactgacgatgtgcttatactcccaactgatgatcctcttgtggacgccatcgactctactcctgaggatgttgacgatc

SEQ ID NO: 152265 - DNA, 411 bp, Zea mays
  Clone ID: MRT4577_70448C.1
gtaaaaaaagccttaagaagggaaatttatatgacttggaaacaacagatctaccctgccctggagcagggcgaccagaggccaggggcgtttgaccggcccttattaacacggtggtacaaacatgaagagccccatgagccaccacagagcgggcgccggtttgtcggtgtgggcggaccatcaaaggagctgggtttgaaccatgccgcccctactttgcccagtgcgggtcatgctccttgggaagacagaaggtatcccgatccaaaatccataaactcctcatcagagatttcaggggttcacatttgactttcatagtgcaccagggactgcagtttccattgggaaaagcgtcccgggtactttattttaataacaaccccattactggcagaacctgtccca

SEQ ID NO: 152266 - DNA, 978 bp, Zea mays
  Clone ID: MRT4577_70449C.1
ccggccgggaaaggattcgttcgttcataaacatcgcctgaacactaaagtcaccctccagcagtttcgctttcttgcttcaccctgcggtcgagatcgagctcaacaaccatggaggatttagtcagtagcccatctttcaggagcgtcctcagcagcagtagcgaagggcaggctcagtcaggagagagttcttggacggattacttcgtggatttcatgttatccgaggaggagaggaagagacaggaagatgctagctcatactcatactgcgctaccgaagacgaaggcagcaaatacggcggcgatggaagcaaccgcgatgaggaggaggaggaagaggaagaggaagaggaagaggaggactccatggtctccgatgccgcctctcatgcccctacgactgcagccaccgcactgataccagctggcaggtacaaggagctgaagaagctcaagaaaaagcctttcggcaaagccctggaccatgacggttccctggaggatactgcgagctctccggtgaatagcccaaaggtcagtgttgtgtcacagctggaattgagtcctaaaaggaggtgcaacatcagggacctcaccaagggagtcgttggaattggcgatgatcacggcggggaggggatggacgtctgtacagatgcaacgcccacggaaggagcgaggcttggtgatcagtaccacacgagcatagctccatgtgcggagctgaaggacaaggggatttgtttgttccccttttccgtgctgctgccctaccatgggccaaactgaggaaaaaagcaatatgcgaatgaaccccatatgtagtgtttggcaacttacactctatgggggcatgcatgtgtggtatgaacgaatcccagaagaatgtgatactgtggatatatatatggttttccttaaaaaaaaaaaaaaaaaaaaaaaaaaaaaaaaaaaaaaaaaaaacccccccag

SEQ ID NO: 152267 - DNA, 332 bp, Zea mays
  Clone ID: MRT4577_7044C.1
aaaaggtcccaaaaaagaggatttttatgggtggacgggccttgtacaagtataaaccagtttccaagttccagcccccttggagctcctggaaaaacccataccaccaaaaccctataaacccgacaacttaggaaaaccctggggccggggccccctggggagacccaaagcttataacgaccccttttccccctctttctcttttccaaaccccacagggttatttattcttcaaaaaaaccaaatgggcccggtgttcctttttgccccccctgggtagtccccccccctagacatgttgaaaccaggaccgaacctgaaccccgggg

SEQ ID NO: 152268 - DNA, 1074 bp, Zea mays
  Clone ID: MRT4577_70450C.1
gctctctctcttctctctctctctcgttcgttcataaacatcgcctgaacactaaagtcaccctccagcagtttcgctttcttgcttcaccctgcgtgtgtaccccggcgcaaaaggcattcgttcgttcataaacatcgcctgaacaccaaagtcaccctccagcagtttcgctttcttgcttcaccctgcgatcgagatcgagctcaacaaccatggaggatttagtgagtagcccatctttcaggagcgtcctcagcagcagtagcgaagggcaggctcagtcaggagagagttcttggacggaatacttcgtggatttcatgttatccgaggaggagaggaagagacaggcagatgctagctcatactcatactgcgctaccgaagacgaaggcggcagcaaatacggtggcgatggaagcaaccgcgatgaggaggaggaggaagaggaggagtccatggtctccgatgccgcctctcatgcccctacgactgcaggcgccaccgcactgataccagctggcaggtacaaggagctgaagaagctcaagaaaaagcctttcggcaaagccctggaccatgacggttccctggaggatactgcgagctctccggtgaatagcccaaaggtcagtgttgtgtcacagctggaattgagtcctaaaaggaggtgcaacatcagggacctcaccaagggagtcgttggaattggcgatgatcacggcggggaggggatggacgtctgtacagatgcaacgaccacggaaggagcgaggcttggtgatcagtaccacacgagcatagctccatgtgcggagctgaaggacaaggggatttgtttgttccccttttccgtgctgctgcactaccatgggccaaactgaggaaaaaaacaatatgcgaatgaacagcatatgtagtgtttcgcaacttacactctatgcgcgcatgcatgtgtggtatgaacgaatgcaagaagaatgtgatactgtggatatatatatgtttttccttaatgaatatatgtgaatattactatgaaattactcaaaaaaaaaaaaaaaagcggcc

SEQ ID NO: 152269 - DNA, 627 bp, Zea mays
  unsure (1)..(627): unsure at all n locations
  Clone ID: MRT4577_70451C.1
ggtcggtggccgcgccgcaccgtggacctctgccgggcgcggtcccgtccacccgacggtagttcgtctcccgcggcggcgtcggctcgtctgtcgcctctgcacggcttctgcaccgtcggcgccgggacctcgttttttttttttttttagcagacagtcagttttgttggggggcgcgtggctctctaagctgttctgtgtttgaaacgtggggggggggggattcctggcttcccattatccatataagccggaacctccttttttntctctttgtttctttctttccgttggggtggtttttgttgcttntctgccttggttgttttttgttgcttttgtggtttttttttttttnttngctcttttttttttttttttttccttttgtttgtttttcttttttgtttttttcttgttttggtcgtcccctctcccgccctcctttttttttttttttgcgggttctcccctcttctttttttttggtttttttttggtcgttgttgtgttttgggtgtgtttntttttttcctgtttttgttttttttttgtctgtgtttttttttttgtgtttttttgttttttcttttttgttgttttcttttttttttttggtgtttt

SEQ ID NO: 152270 - DNA, 623 bp, Zea mays
  Clone ID: MRT4577_70452C.1
ggccgcttttttttttttttttttgatagtgcgcaccctgacgctgaaacatgcatgtctgtctcacatgagagatgaccacactacagatatccaaaaaccataaccaacagttgatgcatagcagaaacgttgaaacgtatcatcctgacaagaactgaaccaacactgatcagtactaaagataaccctctcgaatgacacggggccttacatgatacattagagcatgacatcttggtgataaactgggggccgtgcatcgtgagctgctagctgatattgatcctggtgtggcatgtccatatcaatgtgaagttccggtggttttacagcgacccgtcctacaaaaagaaggctatgatcccgtggcagcttgacttactaggaaaaggaatggctcttgaaaggagtaattgctcttggcagaaaactcataggactgcaagacgttgttgctgtggaatggaacttgcttggctttgacctgcctgtagctttacatgaaccttgttatactagagaacggtgggcaatgttctctcagaccttgcacaggtccatgtgccgtgttggaaaatttttggatggcacactatgaagcgactccaaacataacgatg

SEQ ID NO: 152271 - DNA, 671 bp, Zea mays
  Clone ID: MRT4577_70453C.1
aaagactgtgacaacgaaaaggttagcaaaaaattggagtgtatattataagaccataaaactttgttgttccatattatagatcgggccacaaaaagttgtgtagctcattgaaattgttacagtggaaggcaacaaatggtatcactgacaaaagttttaatgagatcttaaaactcataaagaagttcttttcagaggagaacaaattgtcagcatcaacatatgaagccaaagagattgtttgccctgttggttggaagcacgtaagatacatgcatgtccaaatgactgtaacatgtatcatggtgagaagaacaagaaattaaaagtttgtttggtgggcgaacccccagaaaaaagaatagttgctaaggtcatgtgtcacttctctatgatatcatgtttgaagcgttcgttttgtaacaaagagcacgacaaaatgatgtggtgacatagatagtgatggaaagaagaactcataataaggttatatggaggagatttaggaacttgagtatgggccatatttgaagataccctatttcattgtcaatggataaagttaaatggaggagtcataatagttgacccccagtatggaatgacccctattgacctccatatgatttgatatagagatggaaaaaaaaaaaaaaaaaaaaaaaaaa

SEQ ID NO: 152272 - DNA, 286 bp, Zea mays
  Clone ID: MRT4577_70454C.1
aaaaagaaggccgggttccaaaaaaacaaaaaattagcgcccacaacggcagaaaaaagatcttcactggcagaaccaccgggtcatgctacacacaaaacagaattttgttttaaaagaattctggggtgaaacactaggggtaaaatgggaaaccccattcttttgaacgccccaaaaagagaaccccttttcagccgggtggaaagtttaggggaggggaagggcggaacctcattttttcttaaatgcccatttatggaacttggcgagtttcggcttaaga

SEQ ID NO: 152273 - DNA, 374 bp, Zea mays
  Clone ID: MRT4577_70455C.1
gtaagctactagagatagcctaagacagaatggcatatcatagttgtggcaatgaaccaaagcactacagaaaaactatgacatgactaatacttcattcgtcccaaatgaaaatttgttttatgtaattaatggattcatacaatacttgtgcatgtgttttatatatgtgtttatattcatcatcatccatttcatatagacataaaaactaagagcgaaaacgaatactactttgggatagagagagcgagagagagtatgtgatatggtatgatatgacacttgtttttctgtacggacagatcttgatcatacaacaaaagatataatcagacatatgattcaaaccttaaagcttgttaactaatgct

SEQ ID NO: 152274 - DNA, 295 bp, Zea mays
  Clone ID: MRT4577_70456C.1
tggccgccctgttctccagcctcttagccctcgtcatgggcacggtgagtgccgcgaaggccgttgtcacggagataatcccaccggccgcggcattggtggccaacataatggcaatcgcaaccacaaccgcgtcggcgtcggtggcgtggttcatctattacgtctgtgcagtagccgctgccgcggtcgacgtggccaccgacaccctgccgtacgccgtggcggtggccaggacggcggcgtgttccgcggttcaatcctcgcggctggcgctgcaggtcctgctgagtta

SEQ ID NO: 152275 - DNA, 2099 bp, Zea mays
  Clone ID: MRT4577_70457C.1
ggtacctcgaggccggccggctccaggcggccgggccgggatcccaagaagagccgccctacctattccttctccccgccgtcgagctgcccaacccagagcaccagcagccctcacctccttcctctcggccggtccttccaacgagcccgctggtcttggagccgccgccggtctcgttctggacgaacgagaacttactctctttcgatcgacaggttcaaggagattgcatttgtggatgctctaatggagtcgaaaggtggcaagaagtctagtagtagtagtagtaatttcatgtacgaagctccccttggctacaagatcgaggacgttcgcccagccggaggaatcaagaagttccagactgctgcttattccaactgcgtccgccagccatcctgatatcgcctcacatgcaattcgcggtagagtaggattttaattcagttttcctcttgtgtcggtagttttccgttggctctggctgccttcctctgcttctgagattccaacttgtcttgcccatctctccttttcctctctcatcctctctttcttgcaacacgtcatccagtggcgatgtcttcagcagattcttgtgtctcttctcctgcctcccctattggctttgagggctatgagaagcgcctcgagatcacgttctctgacgcgcctgtctttgaggacccttgtggtcgtggcctgcgcgccctctcccgtgagcagatcgactcgtttctggatctcgcacggtgcaccatagtgtcacagctctccaacgagagcttcgactcatatgttctgtccgagtccagcctctttgtgtatcccacaaggttgttctgaagacctgtgggacgacgaagctgctgctcgccattcctcgcatccttgagcttgctgcagggctgtcactgcctcttctttcagcgaagtactctcgtgggaccttcatcttccccggcgcgcagcccgcgccacaccgcagcttctcggaggaggtatctgtgctgaacgctttctttggtaacctcaagtccggtggcaatgcctacctgatcggtgaaccgttcaagcccaacaagaagtggcatgtctactacgccacagaggagcctgagcgtcctatggtgacgcttgagatgtgcatgacagagcttgacgttaagaaagctgctgtgttcttcaagaactccactggtggcagctgcacttcagctaaagagatgacgaagctctcggggattcatgagatcattcccgagatggagatctgtgacttcgagtttgacccctgtgggtactcgatgaatggcgtcttcgggcctgcagcctccaccatccacgtgacacccgaggaaggtttcagctacgcaagctacgaagctatgaacttcgaccccagctcactggtctacagcgatgtgatcaggagggtcctggcaggcttctctccttcggacttctcggtcgcagttaccatctttggtggccgtgggttcgccaaatcatgggcgacgggtgcagacatcgattcctacatgtgcggtgatcctgtagagcaagagcttcctggtggcggtctgctgatgtaccagagctttactgctgttccctctggctctgtatcgccgaggtcgaccttgcagacggatggctggagcagcgatggaatggagatggcctcaaatgacgagatgtgtattggctgctggaatgcggtgaagaaggtggtgaagaaagatttggatgcttaaagatttggataacttaggtggttcttcacctaagttatgaagaagtctgagacctctgtctctctgttcttttggtttcagttaagcagttagctgggctaccggcaatttgtttgcttaatatttttcctgttcaataagtactctggatggcttgctgcgtctgccatagtgagctgcatattgttgtttagtcatattgtttctgctgccgatgcccttgtggggagaatgatcttgtaacagacttgcctattcccgcaatatattggaaattttggttaataaaaaaaaaaaaaaaaaaaaaaaagggcgtccggtcccgctcgctcgcgcggg

SEQ ID NO: 152276 - DNA, 933 bp, Zea mays
  Clone ID: MRT4577_70458C.1
gtctgctttgcttaatcaaatgttaggctacggatctgtttctctttctcatagagtcatgtagtcttctcttgttgttgcgtgacgcttgcttgcagaggcgactcccaagggcattctgaagctgatgaacactgatggcctcacaatctaccacatcaagagccaccttcagaaataccgcatagccaagtacatgcccgtgtcatcgacgtccgaagggaaagaggagaaacgagctgctgccgccaatgacgtgcagaatctcgacctcggcaccgggatgaagatcacggaagcgctacgcgtccagctcgacgtgcagaggcgcctccacgagcagctcgagatccagaggaatctgcagctgaggatcgaggcgcaaggcaagaagctgcagaagatgttcgaggagcagatgaagacgagcaggaccgtgatggggccgccgcagggcgccgacgtcgccttcatcggcgccggcgagcaggaggaggaggtggaggtggaggacgcgttcgacgacgtgcagctactggcggccgtgtccagcgccagcgtcggctaccgcgacggcggattccagtcgaagataagctagcctgtcgcctccagcctccaggcttcagctggcttgtcggcattgtaattgtagggtttgactacaaatgccatcgtagctatccatggaagatgatgcctacaatgtttgggacgacgacgacgagtgttttggagggaaaaaaaggaaactaaattgttggggatgtaggcaagggacgatcctcgtcgtccacttatgtcgttgattggaaggtgtgatcgtgcacctagcctaaccacttagttttaaaagttctctctgaactttagaatgtgagtgtctatttttgcttatttatttttaataaaaaaccatcaggtctcttatag

SEQ ID NO: 152277 - DNA, 222 bp, Zea mays
  Clone ID: MRT4577_70459C.1
ttttaagacacagtggaggggaggcaggggagcccccgcggcgccgctgccctcgaaatccccaaaaagggagcgatcaaatcaaatcagatctctccacccccagcccatccatggagatcgtgtacgccctggccgcgcgcagcaccgccgggcgctaccttggattctgcgtctcgggcaacgacggataagtgggcccacggaagcttcacgccactg

SEQ ID NO: 152278 - DNA, 348 bp, Zea mays
  Clone ID: MRT4577_7045C.1
gggggggaaaagggggggtccgggtacaggacaaagttttacactcggggggggaaaactttccttatgaaaaggacagagttaaccgaagagggaaggaccccttttactaaaaaaaaaatgacttccttaaaaacgggggggactaaacacaaacccccgggggggggcccccattaccaaaaattgatcgatcgatcgccaccaacttttttttaaaaacacgggagaagttggtgaacaaaggggggtttgccttaaaaggtccaaataatggggaaaaccaggggagccacaaaacaggacatttaccaggggaggatttttcaggggtgggtggcgcccttg

SEQ ID NO: 152279 - DNA, 259 bp, Zea mays
  Clone ID: MRT4577_70460C.1
cttattgaaacaatggtcctttatggtcttgattaggcccggggggcggacccgaacttaccagggggagccagggcaggagccaagcttgccgaaaaagggggaacacacgcgccggagcgacggagggcacacagttattcgggtaaaagacagaggcgcaaatgccttcgcgcagagcgaacgcatccctgcaaggctcaggccaggcgggaatgcccaaagaggggcatagctgaaaccagtgggaaagcgccaa

SEQ ID NO: 152280 - DNA, 268 bp, Zea mays
  Clone ID: MRT4577_70461C.1
cttttctcgcctgcatcgcaggatgctacctatatcgctgtgctctgcttcgattaggatcagtcaccatgtatcttcaggcttacatagacgatgacggtgacaaagtttacaccactaagatagattcgccgctagcgctacctacacaatctgctcatccagcccgggtttcacctgatgataaatattcaaggcagagagttcttctgaagaagcgttttggattgttaccgacccagcagccacctccaaagtattgagtgat

SEQ ID NO: 152281 - DNA, 267 bp, Zea mays
  Clone ID: MRT4577_70462C.1
accggatgcccgaccctagccttacttacctactgtggaagcgacatctcagaggggggttcgtgcaagcggtatcatgaaccacccaagtacaagcacaaatgagtccaagactattcagaccattttgccggagaagcaagtagtgctctagtcagacatgtttgtcgtgctgagcgctcatatactcatagagttgcgccaaaagggaattagatcgtattcgagcgtgcggtagctgagaccatatacccacattacgaacta

SEQ ID NO: 152282 - DNA, 451 bp, Zea mays
  Clone ID: MRT4577_70463C.1
ttcgtgcctaccgattaccacctgcatactagctacacgtcagggcggtagaggctgaggttcaggaagagcacaggcatccattccacgagtgcttaatggctgcagtcaaggtggcccacggatcgtcagtcacttatctctctgccacctttccctttaccacttttgacggagggctcagagtgacttcgacgtctccatcacggcgctgttctacgggcttcgccacactgacctgcatgtcatcatgaacgagtttggtaacgccaaatacctagtcgttcccggtctccacatccttggcgtcgtaaccgacatcggcttctgaattacacgctttaactctatcgacacggtgttcctggactacttcaccgtctcctgcctcagctttctcagctcgagcacggtatacgagagctactgtccgcacctcgtggagacatcc

SEQ ID NO: 152283 - DNA, 385 bp, Zea mays
  Clone ID: MRT4577_70464C.1
ggcgcgactggtggcatcttcctgatctcggagcacgtctaatcctcgctccaaatgctgctccgcccccaatccgtgcggcatcttcagatggaagccgggacaatgccccatccccctctcccgagccccgacgactgacattccagggatgtcgctctgcgatcctcacctcctcgtcgttggcggtcgcgcgacctcctgaccgtcgtctccgcccgcgagatccccccgactcgcccacctctccgtccacagccgcctccatcacgcacctccacgccgacgagaaggctcgcccacctctcagtccacgactgcctacgacgcgtcttctgaataaagatctctcgaagcacccggtggatgggttctctgctgggct

SEQ ID NO: 152284 - DNA, 329 bp, Zea mays
  unsure (1)..(329): unsure at all n locations
  Clone ID: MRT4577_70466C.1
ggcggccgccctttttttttttttttttttttttttttttttnnnnnttttttttttttttttttttttttttttttttttttttttttttttaaaaaccaaacaggccctttatgcttattatttttggacggttgttggaaatgataacccagggggtcccactcgaattgaaaatcccaaatttaaaacaagccgcaacagcagcggggggggggggggtccaattaatcgttcggggggctgattaatttggaaaagtaagggttttttttaacacaatccaagttagtcccgacctttacgcggagcaattttgatttcttccg

SEQ ID NO: 152285 - DNA, 302 bp, Zea mays
  Clone ID: MRT4577_70467C.1
taacccttttttttttttttttttgataaagaaccaggtcgaaaaccaaaattcccatttaattttgtaattagtgtgagtagttcactgacgtcgatcaaccaagtaacaagtttccctatcctttcaaactatttttgtgtcattaagtctttaattatacccaataaaaaactaaacctaatcatcaatcaatcgaacacgcgcgccttgtagccattttatcgatcactcggtaccctcttcgatggtgcttagcgcccttctttcagtcacagtcacaattacaggctggggccggt

SEQ ID NO: 152286 - DNA, 369 bp, Zea mays
  unsure (1)..(369): unsure at all n locations
  Clone ID: MRT4577_70468C.1
tgtctagcggacattgttttttgacaccataaanctagagctgatgtgaccgaacagatggtccatacaataatcgcagagaggcctgttcccaataatggactctgatcatgacacctacaccttgaacatacatttttgctattacggaatattgaaagagtctttataactgtcgtgcaaacataactatccgctgggttctacttctaatcgatttatgcaaaccatgccaatcatgccatgtggtgactgtgatcgattttttaacgaatacttgattgggctcaatgattcaattgcgaccctttctttcaatcatatgcatgccactataataaagagcaactcttttttatttataaaccg

SEQ ID NO: 152287 - DNA, 286 bp, Zea mays
  unsure (1)..(286): unsure at all n locations
  Clone ID: MRT4577_70469C.1
cgccccccgctcccgcgaattggaataacggaaagggaaagaagatggatctcgccgacccccagcagcagcaagngctcatcgccggcgcggcgctgctgctgggcaacgcggccttcctcaagctcatcctgggctcccgctccggggcggggaagcgcctgccgcccaccatcccgggggcgccgntggtcggnggnctcgtcaagttcatgcgcgggcccatccccatgatnccgggagcagtacgcccgcctcggcagcgtcttcaccgtccccatcatca

SEQ ID NO: 152288 - DNA, 511 bp, Zea mays
  Clone ID: MRT4577_7046C.1
accgacgccctatttttttttttttttatttttggattacccccccacaaatagtgccacagtattaggcgctctgccaggaaaaatctgtgggagggtcttttgattcaacagcacggacagttacatcacagagcttaatggaaaggaggggaaaaggaccatcctgtgacacacaccacccctattcctcattccgcggcagccattcccgtttaggagcatgaccgggcaccattacaacaaccgtcgggggagtcagttttcttggggaccagcagcgaaagacacacggagcatttactttgaccatgcgatccaccgtcctcaagaaaacccacgcctgagggatccctacaggagggaattaggaattttgggaatttggcgggtctttttggctgcgcctgacttcatcccccgggggctttcccttattggaagcgggactcattcacctcgcgttcatgttttttcaagagaattcccccctttcgggaacccctttttt

SEQ ID NO: 152289 - DNA, 554 bp, Zea mays
  Clone ID: MRT4577_70470C.1
aagaagcaaatcaattttatttctttatcgtcttcataaggctatatttacataaacaagagtacataaaaagaaaacgcaacaaagaagcaagagttaacgaaactagaagcaaaatcaacgagaattagccagcgcccagttagcttcacttcctcttctagggatactattgatcttagaacaagcatcaactttgaaactagctccacaaagaacaccttcactatcaatcctcggcattgccttcatcatattagtcggatggtcaaagctcttaagccctgtctcactatgaaacatacatccattagggaaaggagcaaacgatttagcacagccttgctttatgatctgaatatcatcagacattacaacagatccgtctccagaaattccccagtaaagactctctcctccatcagaactcagagctgagaaaacagaggaagtttgagtatcgtaaacaacgaaagcgaagcttccctcaagacctctaagaacttgatctgctgggtaaggaccccgatcacgaagtggtcgataagctttcg

SEQ ID NO: 152290 - DNA, 329 bp, Zea mays
  unsure (1)..(329): unsure at all n locations
  Clone ID: MRT4577_70471C.1
gagcgccagaaagaagcgcagccagcaagacaccacaacagacaccaacccaggccgccaagcgccacgccaagaaccggccaagacacgcaagcgacgaggcaaacgaccaagaacaccaaggaggaggaagcnaccacccacgtgcagcnggcacaccacgaacgagaaccacaggcngaacaaccngangagacacgccgccggcacgccgacccccgacaggaacaggcgcaggncaaccgacaccagcgcaaccccaaggaacgcccagcgcaggcagcgcacggcgacaagcaacaacaacggcacacccaccgcgacccgaa

SEQ ID NO: 152291 - DNA, 1124 bp, Zea mays
  Clone ID: MRT4577_70472C.1
cattgggtacctcgaggccggccgggctggcccccggccctgttgtcatcctcctgcggctcccgcatctctagctctcacgtgcgcaccgcctgctcgacgcaattccccactcgcccaccaaccttcccgtccccgatggcgatcatggcggccaccgccactgccgtggcttccccctccagctccacctcgccaggtcccctccaacccagcccccgcttcctccctcccgtctccacgcccgctcgctgccatctcctccccaagccgcggcggtggtgcgcgcgcctccacatcgagcgtcgggtggccgtcggcagcgacgtgtcttcgtcccatgacgtggctgccgaggaggccgctgctgcgcccaaggtcgggaagcgcgtgcgcgtcacggtgcccgtccgcgtccaccacgttgccaaggcgcccggcctggacctgcgcggcatggagggcgtcgtcaagcagtacatcggcgtttggaaggggaagcgcatcacggccaatctcccattcaaggtagagttcgagctcaagctggacggccaggacaagccggtccggttcatcacccacctccgcgagcaagagttcgagatcctcggggaggaatagagctctggactagagaataacgcgctctcatcggcggctgtggcatctgtatactattgtgtctgcgctaaagaagaacgtggtcgagggtgcggggagaataggagattgcaactttgctagtaagttcctgtttgtttgcttatttgcggtgcgcttctcccctctccaccctttaacattgaaattttcatatgtgaggattgaggaattgttcgattgttgatacttatgatccaaagtaattaaactgaggaatctgttcagcatcacgttctgttgatgttcaagacaaaatgttacctctaggagtgagcgatgccgtgacatatgatggaatgtattgtagttaagtttgtttgccacttggatgataagaactagtttgatcctggctcaaacaggaggcatgttggctgatttttccaattaaaataagaagccaatatatcttcatgaaaaaaaaaaaaaaaaggaaaaaaaaaaaaaaaaaagcggcc

SEQ ID NO: 152292 - DNA, 257 bp, Zea mays
  Clone ID: MRT4577_70473C.1
gggacaaaaccctgcgacgcggggctggatctcaaaggatcgggggaaaaagggcactttggcacttacaaaggccccggggggtttaaagcccctgcaaaaggattaaaaccccccccccttggaaagggggttttaagggggcccccccggggcccttggcccggggggttaaaccaagggccgggccccttggggggaaaaccccctaacgggggttgggggggggggaaaaaaaaagcccccggtgctaacct

SEQ ID NO: 152293 - DNA, 101 bp, Zea mays
  Clone ID: MRT4577_70474C.1
tgagtgatagaaggtcctcgaccgtcgtcttgctgcttgccggtcgcggtctcattcatcgagcatttgcagcttatggcggcaggtcctccgatgaggca

SEQ ID NO: 152294 - DNA, 751 bp, Zea mays
  Clone ID: MRT4577_70475C.1
acttataatatgatcataattaacaaccaaacacaaccttaaaaaaatgtacagtcatttatcaaactaaatgtcccatgtggaaaacctaaattttatacatacgagcacaacacactcaccttagtagaacttagccaagtgcaaaggaaaccaagaatctattgctctatctaagaataaacactttttaactgacatgaaattccccacttgcctgtgcttccttgactctcttttcgtactcatcttcttcagcctcggtcactgcttcttcttttgtttcatcctcctcttcttttgtttcatcctcttcttcttcccctccccagccaaatcctccaattgacctggatgctggaggtggagtcttggcctcctcaacaatattcatgatgccctctatactctgaagagaaaaggttgggttttcttttctgtagtaggcagcttgagctacttctgttaattccctgggcaagttctttaaaaaccatggatgggacttgatttccttaatggtgattctcctagctggatttgccacaaaaatgcgagatagaagatgtctacagtcttgagatatgtgaacatagtctgggatcttgtattgaacagccataattcgattgatggttttcctgaaatttttgggatcgtcttggtcttcaaatgggtatgctcccaccagcattacataaagagtcactccacaggaccatacatctgctaactttccatcatattctct

SEQ ID NO: 152295 - DNA, 400 bp, Zea mays
  unsure (1)..(400): unsure at all n locations
  Clone ID: MRT4577_70476C.1
gtctcatgcacgcttacgtaagccttaatcttctatacttttcagcctccggtcttttttattttttatttatttattttttgttatttgtattttttttacgtggtgagtctttattttatttttgannnttacttttaccaggtccaggttacagagcaagggaaaacagagggggacagggacaaacagacaacagagtgagtgatttagtgagtggcaaaaaccaccatgcacctactaggcacgacatccaccttactttatttaatggttagccttcggcctttatccaaaaaaaataaggggggagaacatatccatgaggtgagagattattgcaatcctgtcccccccctaggatgatggggtattcctttgggggtccgggtggtgggga

SEQ ID NO: 152296 - DNA, 243 bp, Zea mays
  Clone ID: MRT4577_70477C.1
cggggttccgtgagaataggtatcctaaatcactcccaaaaacccggaccggcccccggaggatccccaccctgcccccaagggagcgagctcagaacggggaagaaccaagcctaaagcaaatgcgtgaatgaaatcaaaacccatttccaaaaccccactgcatacgaaccaaaaactcaaaaagcaaagcccggggagcctaaaggaagagccaactaacttcaatcgggtggcccccac

SEQ ID NO: 152297 - DNA, 798 bp, Zea mays
  unsure (1)..(798): unsure at all n locations
  Clone ID: MRT4577_70478C.1
cctgcaatctactaaccaacagtcaagatgggtgccctcaagtatgtcgaagaacttcagaagaagaagcagtcggatatgatgcgcttcttgatgcgtgtccgctgctgggagcttcgccaacttaaggtcatccaccgcgccagccgcccctcgcgccccgacaaggcccgccgcctcggatacaaggccaagcagggctacgttatctaccgcatccgcgtccgccgtggaggtcgcaagaggcccgctcccaagggtgccacctacggcaagcccaccaaccagggtatcaaccagctcaagtaccagcgctctctcaagtcgactgctgaggagcgtgtcggccgccgctgcgctaacctccgcgtcctcaactcctactggatcaaccaggactcgacctacaagtactacgaggtcatctgcgtcgacccccagcacaaggccatccgccgcgaccctcgcatcaactggatcgtcaagcccgtccacaagcaccgcgagagccgtggactcactgccactggcaagaagagccgtggtcttggccgtggacacaagttcaaccacaccactgccggcaggaggaagacctggaagaggaacaacaccctctctctctggcgctaccgctaaatgcgctgagcgagtggtgtgcttggtgngacgtctggtcgattgtttcaagcgtatgggctggcgtggattggaatagggtgtcctgggctatgtagctttcgcacagcatcaaaggctggcaggactttncaaaattaaataccatgggattcatgc

SEQ ID NO: 152298 - DNA, 425 bp, Zea mays
  unsure (1)..(425): unsure at all n locations
  Clone ID: MRT4577_70479C.1
tccacgcgtccgcttgaagcagatgcatcaaatgcttcacttgatcagccttctcactctagcgttttcacttcatcttctaatgataatcaaggaaatgcgtgtgaacatcctagtccaaatacaagacctgagggtgagcagcctctcatggataactcagggttaacatcactagtgcctcaaaatctaacttctgcttccgacatatgcaagatgggggagatcttgaatgagaacaggacacttgaagcaaacccatcaaatgggtcaattactgaatctcctcaatccaaggttttacttgtaccatctcttgatatcctacagcgtgngatgttccagtgaaacgcctaggtctcagtttaaggaacctgatgtggacagctattggttaacatcagcagcactgaaagtttaacatc

SEQ ID NO: 152299 - DNA, 570 bp, Zea mays
  Clone ID: MRT4577_7047C.1
ccgactgtctccgaggcggccacgaaccgcctacgtagccaaaacaacacgacgagggagacgccatctattcccgacgctgctgcacctgcacctccgggccaccgccgagatgggcgcggatgccgagctgaaccgggcagaggagaagcccaggagacggacagggcggccaggcagagggtggaccggcgcacagactactcgctgccgcgcgacgcacgctggcgatggcgctctggatgaccggcatccacttcaactgccttctcgtccctgcgtagcatcttcctcctctccggccgcggcgctggcatactcgcgtgggtccacatcatgtgcatgtgcgcgcccgccgaccacagatacaaatgccgactgagcggcaccaggtgtcatatgcagacacggaacgagatacttccctatcactctgcatgtgaaggactagaagacctcgcagcccaggacgtctcacgtgatccagtatgagacacactcactgctggcgatctctcggacggcgctcgcatcacgagtacaactggcagcctctcactatgatgcccg

SEQ ID NO: 152300 - DNA, 683 bp, Zea mays
  unsure (1)..(683): unsure at all n locations
  Clone ID: MRT4577_70480C.1
gggtacctcgnagccggccgggccgggatcaaataggttaccctccccacgcctcccacacacacactcccattcgctcccatccgccaggacactcttctccccggcgcagtcaggacactcttctccccggcgcagtcaggacactcttcttctcaccgccgccagcactgctctgggcgcgcgccgcctaccctcccctcttccctccctcacctctcgtcctcgaagcaagggtttccctgccccaggctgcctctcctatactccgatggccctcgtgaagtccgacgctgaggaggagtggtccgactctgacttcgatgatgcctccgactccgaggtcgccgaagctctggattggctcgacgccgtggagggccctgacggctcagctcgcccccacgtcgccttctcggcctccggaggcggggctgcggcgcggaggcctaacgcacacggcggcgtgctgtctcgcccgctccagccgctgtctaaccggacccagaagctggcctcgcacattagtgctactcccttggaggagtgggaaggtaggatgaacgttgcgatgtcaaattccgtcacaactgcaatcagggatagcataagggacacagctattgggaaaataaacgaacactgagaaggctgaccgtgctacagtggaacaggctattgac

SEQ ID NO: 152301 - DNA, 622 bp, Zea mays
  Clone ID: MRT4577_70481C.1
ccggccgggagcgactctacctcgtccttgcatccctggatgtaggcgacgcggctctggaggccttgcgactgactattgacctccgaccggcatggtcccagcgaggctgaatgactgatgacgcgcacgtgcagattatttgctctgcaagaccatccgcaagtgcctcgctgctgactgccgggcgatgacctccacggctgctcatggcccggacctttggagacttctgcctgcagagattatggagccatttcggctccagactacttgcactggtcgctcacagacaacgatcacgcctgtcatccttgcatcaaatgcctggtgtcatgtcctcagctaccaagagggcgctgacatatcgtctgcgctcccgaggcgagtctgaatccgcaagatccctgctctaaggctctgccacccgggaatgctaaaccagagtaccccacatcgatatgatccactgactgcgcagtgatcggcctatatctgtacggtacaagtacctcctacgagactcgacgagctccatgcacgacatgagcctcgacgatggatcgcctaagcacccacacgaagctcacttatagagagccagcgctgacccgcaacttca

SEQ ID NO: 152302 - DNA, 2299 bp, Zea mays
  Clone ID: MRT4577_70482C.1
ccggacctcacacacacgggccggaaaggtgctaggacactctccccacgcctcactggacgcactcccattcgctcccatccgccaggacactcttctccccggcgcagtcaggacactcttctccccggcgcagtcaggacactcttcttctcaccgccgccagcactgctctgggcgcgcgccgcctaccctcccctcttccctccctcacctctcgtcctcgaagcaagggtttccctgccccaggctgcctctcgtccgttctccttctctaccgccgccacaactcgcccgccgccccgccctcaccgccggcaacgtgacacgacaagcccacccctttattcctgcagctatactccgatggccctcgtgaagtccgacgctgaggaggagtggtccgactctgacttcgatgatgcctccgactccgaggtcgccgaagctctggactggctcgacgccgtggagggccctgacggctcagctcgcccccacgtcgccttctcggcctccggaggcggggctgcggcgcggaggcctaacgcacacggcggcgtgctgtctcgcccgctccagccgctgtctaaccggacccagaagctggcctcgcacattagtgctactcccttggaggagtgggaaggtaggatgaacgttgcgatgtcaaattccgtcacaactgcaatcagggatagcataagggacacagctattgggaaaataaggaacactgagaaggctgatcgtgctacagtggaacaggctattgacccaagaacacgcatggttttattcaagatgttaaaccgtggtgtctttaataacataaatggctgcatttctacagggaaagaggcaaatgtctatcatgcaacaaagacggatggccaggagcttgcaattaaagtctacaaaacctctgtccttgtttttaaggatagagaccgatatgtccaaggagattatcgttttagacatggttactgcaagcataatcctcggaaaatggttaagacctgggctgaaaaggaaatgagaaatcttctacgagtgagggcagctggaatccgatgccctgcaccattactcctaaggcttcatgtactggtgatggaattcatagggaaaggaggctgggctgctcctcgtctcaaggacgctgctttgtcagatgacaagttgcatgaaagttactttgagataattacaacaatgcggactctttaccaaacgtgcaaactggtccatggtgatttgagtgaatacaatattctatattttgagggtcacttgtatattattgatgtttcacaatccgtcgatcttgatcacccttcagctttggattttctgaaggaagattgcttgcatgtttctgagttctttaaaaaacgtggtgttcctgtcatgacagtaacggatttgtttaattttgttattgatcaaagcatttctgatgaagatgttgatgattacctggaaaaggctcagcaaaagattttggaaaatggtggtgcggttccaaatgatgatgaaattactcctacagtcatggtgcagacgttggactacgtgaagcaatgtgaggcagatattgtcaacatgtcaataatgcaacgttcatcctctggctatgagccaaccgcagataagctttatgaccaaccattgttagggtttgtgcggactaaaaacacaaacactgaaaaggagcaaggacaaccggcacgaaacttagttgaggttgaagaagacgagagcgaatcttgcttgagttctgatgaagatgattcgtggcacgaggatgatcctaaggtgggacccgaggaaaggaaggctgctcggaaggaaaacaagaagaaagtgaaggaagagaagagggaggcccgcaagaccaagatcccaaaagctgagaagaagaagaggaagaaaatggcgaaggcaaaatgcaagcggtagcgaatatctatgaacaatccagtagttaactccgtcagtagagatggataacttcgtcgtgaatcaaacaagatgatggataacttcattgtgaatcaaacaagatagcctttatgagggagtgcaggttggaagtttggttcacagcgctactttacacatcacaagattattcacgatgttttcaacctttttgttcgtttcaattttgtagagaactactgtacgtaatgtgaccacatatatgtttatcttgagtggaaccgtatagtatttttttagagaagagtacaaatggtactttgtgccgcaaaaaaaaaaaaaaaaagcggcc

SEQ ID NO: 152303 - DNA, 762 bp, Zea mays
  unsure (1)..(762): unsure at all n locations
  Clone ID: MRT4577_70483C.1
cggccgggccggggaaccattgcagggtgaagaccatcgagagacaggaggcgcggtactctcctacataatcctcgacgctaaccacgctttcccttcccctctccgagcccaaaaccgagcaaaatcgatttcaagcggaccaaaatccggcaccgcatgggtttccccaggcactgatccggcgggtggacgctaatgcggcgccgctgaagggatctgctgcgcccgcggggttcacatggcggcacagaacggcagcggcggcgcggcggtggtcctcaacgtgtacgacctgacgcccataaacgactacctctactggttcggcctcggcatcttccactccgggatcgaagttcatgggctggaatatgcttttggagcccatgatctctcaaccagtggggtttttgaggttgaaccaaaacgttgccctggctatgtctatagaaggcctgtatggatgggcacaactgagatgtctagggcagagttccgctcgttcgttcaaacctcttgcaggaaagtaccatgggaatacatatcatttgatttcaaagaactgcaaccattttacagatgatgtttgtaagagcttcaccanaaaaccagccccctggatgggtaaatcggctagaaagagtgggttactttttcaatcgccccctacaaaaaagcattcaagtctctactgttactcacgcagaaacccatcctgcattctctgatgaatgacgtggaattcaccaagttcttccc

SEQ ID NO: 152304 - DNA, 389 bp, Zea mays
  unsure (1)..(389): unsure at all n locations
  Clone ID: MRT4577_70484C.1
atngccccacgggacntacnatcctcattactatnctgactaggcaaaactncaaactnacgaacggcactncanagtcgcattcataatnncctctcaaggacttcaaactcttacttcccactaatagctttttgnatgacttctaggcaagcctcgctaacctcgccttaccccccactattaacctactgggagaactctnctgtgctagtaaccacgttctcctgatcaaatatcactctcctactttacaggactccaacatactagtcacagccctatactccctctacatatttaccacaacacaatggggctcactcacccaccacattaacaacataaaaccctcattcacacgagaaaacaccctcatgttcatacac

SEQ ID NO: 152305 - DNA, 578 bp, Zea mays
  Clone ID: MRT4577_70485C.1
tggcgcggactcatggggaacggtgacgcgcctcctgtcttgttttcctttcatggcgccgaccctcgccgacgggtgatcgacgtcgcccctattcatctgcttgatggtcccgccccatacgccgatgctcacgcacctcctccttctatctccttacagacgcggggacgctcgcccacggcggcggcgggagctgagtcttctgtcagcacgctcctcgaggtgcgcggactcaccgaatacgtgaaggagactgggcagctgaatcctagccggcgatcaccttaccatccgcgagggcgagattcatgctattatggggaagaacggctgcggcaagagcaaccctcacaaaaggtctcactgggcagtctcattatgaggtgacgggtggcaccattctcgtggaggggggggacctggttgacatggagccatatgacagacctctagcaggccttttcatgaactcccaagcacctatgtgagattcctgaatcaacaatttcgattttgtgctatggctgcgaatgctcgctaagaaaggaatggtctaccagcattgggggcccttg

SEQ ID NO: 152306 - DNA, 204 bp, Zea mays
  Clone ID: MRT4577_70486C.1
ggagaaagcggctggggacgggggcgtggagcggccagcgcgggcatctccgtcgaggcggcgcggcgttggctgcgctggtgcgccctatacgcgtcggaggacgtgcctctcccactcgctgtcatctgtcaagctttactgtcatctccctcccctgattctccttctggctttgcctcccactcatcccgcttctccctc

SEQ ID NO: 152307 - DNA, 902 bp, Zea mays
  Clone ID: MRT4577_70487C.1
cacgagaccacgcatttcgaagcgctaagccctttttttttttttttatcaataattcaatccggacggacgatcgactgttccgattcacctcattttaccagtccatgaatcaaaacaacagaatcatcaacctacaccgaaatacttatgcccgatccaaatcgcagcacgaatgaatgcgtcgacaatttctcatgcgaccacgaaggcacgaactacacacttttttttgttgccggtctcacagcaatcgtctcctactcccggcattgctgtaggggagctcaaagatcccgagcttgctgtgagcgcgacgacggccgtggccgcttcactcacttggcgccgacgccgagcgtgagctcgagctcctcggcggcgacctcgtggatgcgctcacctcatcacgccagtacgtgaatcaaaacaaccgaatcatcacctacacctacaccgaattacttatgcccgatcgaatcgcagcacgaatgaatgcgtcgacaatttctcatgcgaccacgaaggcacgaactacacactttttttgttgccggtctcacagcaattttctactactcccggcattgctgtaggcgagctcaaagatccgagcttgctgtctgagccgcttcactcacttggcgccgacgccgagcgtgagctcgagctcctcggcggcgacctcgtggatgcgctcgccttcccacggcgtgacgcggcccttgtcgaactcgaactccgcctcgtgccgtccagctccatggagacgacggcagggtggacgaggttgtacatggagtccgcgggagggttggtggcttggaagctgctccaccgggcggagtcggccgcggagcagacgtcggactcgtcgcacccacgcgtccgcggacgcgtgc

SEQ ID NO: 152308 - DNA, 344 bp, Zea mays
  Clone ID: MRT4577_70488C.1
ctcacgcgtacggccaggcgatcttcctcacagacggacatgggagaggtctgagcacagactgaccttgcacgtgaggggatctgtggtgaaagacccacggctatgctgttccggaggcttacctgacatgcgcaaagacgctcttattttcggcattgcactggagcattattgtacgcaaggggctggcaaaaggatgctacgtggaggcacactgaacacacgtgcatgcaatgcggaaacatgtatcctgtcggctacactacgccgtcctgcattgggtgctgctgatggcgtgcctggcgcctgggaaccgggcctccgtgagtctttctcatggc

SEQ ID NO: 152309 - DNA, 779 bp, Zea mays
  Clone ID: MRT4577_70489C.1
ccggccgggagcttaccaacctggcatcggcactgcaggtattgcaacacctgcccaacctgacaagcttggtgctgaccaggaatttccggggtggcgagacgataccagtggacggcatcagcgggttcaagagcatgcaggtgctcgtcctggcgaactgtttactcaccggcgtcatcccgccgtggctgcagagcttgggaagcctcaatgtgctggacatttcatggaacaagttgaatgggaatatcccgccatggctggggaagctggacaacctcttctacattgacctgtcaaacaactctttcagtggtgagctccctatcagcttcacacagatgaggagcttgacttcaactaatggctcgagcgagcggtcgccgacagaggacctcccattgttcatcaagaggaactcaactggcaaaggtctgcagtacaaccaagtcagcagcttcccaccgtcgctcatactctcgaacaatctgctcgtggggccggtcttgtcgagctttggttaccttgcgaagctccatgtcctggatctgagctggaacaacttctcagggccgatccctgacgaactgtcaaacatgtcgagcttggaagtgctgaatttagcccacaacgatctcgacgggacgataccttcgtctctacgaggctgaattttctctccatgttcgacgtgtcgtacaacaatctgaccggagatatacctaccggcggggcagttctccacgtttgcacctgaggaatttgacggcaaccct

SEQ ID NO: 152310 - DNA, 259 bp, Zea mays
  Clone ID: MRT4577_7048C.1
gttttggatcgcgggcggccgttttggaggttcttggcttacgtccgcttgcttgcaacgtattagtttttttttggggcaacctaattcaaattaactggccgcggttttccaccgtctggcctgggaaacccctggcgttcccaaacttattggcttggcagaacatccccttttggccggttggcgtattaccaaaagggcccgaaccgttcgcccttccaaccagtggcccagcctgattggcaatggggccccc

SEQ ID NO: 152311 - DNA, 352 bp, Zea mays
  Clone ID: MRT4577_70490C.1
cttgcggtgcgtatgcttttcggtgttttgtgtcagagcgagcaatcacaaagcaatggagagcccagcttgtaggaaccacatcgatgtatagtagttgatacgcatgtactgactaatttgagcaagtaaaatgttactgctcacaattatagcacacggttcatctgtgaaaacaaatatgctcatctaaaaaaaaaaaaaaaaaaaaaaaaaaaaaaaaaaaaaaaaaaaaaaaaaaaaaaaaaaaaaaaaaaaaaaaaaaaaaaaaataaaaaaaaaaaaaaaatcaaaaaaaagaaatacagaaaaaaaaaaagggggggcctcttttgatttaaaacctatatga

SEQ ID NO: 152312 - DNA, 556 bp, Zea mays
  Clone ID: MRT4577_70491C.1
gtctacctctctctctctctgctcatcacagcacagctccagctctaggctgtagagggtggaagaagcgaggtcgagtcacagaggcctgcagcaaccgtctgcgctgagcatcgaggccgcgctctgcagtctgctgtctgctctccctcgataagccgggttccaagctagctctgcagagtgtgagctctgactgaacacgaagtgattggcggcttctcatcgatcgatggttgtgttgtgctggccatctgagcgatgaaccagttcgtccctgattggagcaacatgggagacacctccaggccgctcggcgaagaagacgacctcatcgagctgctctggtgcaacggccatgtcgtcatgcagagccagagccaccggaaggtgccgccgaggccggagaaggcggcggcagtggcggctccaccagcccccgcgtccgtgccgcatgaagacgagggcggcctgtggttgcccttcgcgctggccgactcgctggacaaggacatcttctgggagttcttctgcgaggcaccgacgccggcaccgg

SEQ ID NO: 152313 - DNA, 754 bp, Zea mays
  unsure (1)..(754): unsure at all n locations
  Clone ID: MRT4577_70492C.1
ctcgaggccggccgggactcgcagtccggcgtattcctgttcccaatcgcagccgcgcgcggggtgggagcaggcggggcgagctgccgtcgcggcaccgctcttcctctctgtaaggcaggccgaagggccacaccagctccgtcgactgacgtcgtcgtgcgccatcatcgtcgcatcgagtgctacacaaaggacttttctaggttagatgtttggtcttatgtcagcaatcgcgtatggtctatttactgaggaaggtgaattggttgatttccaaaagaactgtttggttatcttggatatttttgccaaatggcatggtcatacctgctggacccaattattggaggaagtttattgttgacatacacaacgggcaatgttgcacgtcttcctactatagcttcctttgctagagcactgcaggtcaccgttggatcatggtgctccaattctatgaggtggtagcgagcacctggtcctccgtttctaaccatgactgtggaccttcctcccttcttgtgctagccaacacaggttgatctctgcttgtaaatatatgactgcagttcccacgtgcggtggttgcctagcccactggtaggatcatctgcttgttagactttcaagccgcaaaatgtgttgtttagttacttgggtagccgacgtcctttgatcaccaaaacatgtaatagattttgtactgtctaggtcctctccatcaggcaatcaacataccattgtctgaana

SEQ ID NO: 152314 - DNA, 621 bp, Zea mays
  Clone ID: MRT4577_70493C.1
ctctcttgcatgagaatgacgccggactggagtatagggtactagatgaccttagctacctatccaaaacattgctcttattctgggagccgcaagagtacgtggtgctcaaaccaactgtatgttgggctaaggatcacctgaatttatcgagtgatgtgtcgttcttgatgtaccaaacaacgcgcacatcaattccctactcttagaccatccttgtgtttaaaggtgatgaaaacccaattcatatcacacaaggaacacattgtatgctgcactttgccatactctctctagactgtgtatattgaagatcgccataccctgctattcagagactgtcttagactcttaacttcgaatgacttaacatactcctatgaggcatagaaccgctattggataagaggattggtatattgtagaagctgatgatatttttgtccgtgcaaacgaagaatcgcactccgaccgagaactctattgcagaattagaaagcatgagaatcctgtcttagcagagacaccgtcccaataaaaaaaaattcgagtgatacgccctgttcacggtgagacgatatagataatgtctttaccattctatactccgatcccgctacg

SEQ ID NO: 152315 - DNA, 1005 bp, Zea mays
  Clone ID: MRT4577_70494C.1
atggatgtggtgatgatcaccggtctagatatcgagtctgccagcccttctgcttttagtatgtctaaggtccccttcaaactttcatccaaaatagacagtactagctggggagcttacatgtctcagcatgccaaaacaaaaggtcctatgactgagaaggagcatacaactttcttgaatctctgtcttgagcatttcatgttttgtggcccttctcttgctccaaccaagaattatatctctttggctcatcgcttagccggaggcaatcctatcggccctagaaagctcttcctgggagaagtttatcgattcctccatctgttaacttccaacttgcttagtgagtttgagagttcaacttccctcagcctagacaactttgctgatgacagtgatactggacacttgtattctctcatgatccgccctggcttcctctcggaaggagaagagcctctaaactataatggatttccctctcaactctctgagaccactcccatggtattttcccgtaagaatgtgccacccatgaagaagctcataatacaacaccaacctgattctccaaaaccggctcctaagagaggacgaactttagaaactattgcccctcgggtccaaaccaaggtgaggaaagtggttgccaagaaggttctcaaagaggcacgatcatcgtcccctaaccaagaagccctgaatgcacatcaagtatgcaccctttctgtatcccatattcgatgctcgcacattcctggtaactgcagttcacatgcttcccagaccatcatccttgaagcatccagtggggaggaacatgcattccaatggcactctcccctagaagctattgatatcttagctgagatcatcgacaccctaatcgtccttcaggacttgcatgaatcggttgtccccgagccgaccgttaatccaatcccaaaaaagctccagtgcatcatggacttgctctcagcccccattggcacattagtttag

SEQ ID NO: 152316 - DNA, 365 bp, Zea mays
  Clone ID: MRT4577_70495C.1
accaccactactatgccgaaaggcaagaaaatgggggttctgacccaccggccacgatatattgagacggccgtagtgcctgaacttggtgaagggacttccttcgttgccgaagggaatcaagctgctctcactaaggctgaagccgaacgatcgactgcagcgccgaaggtgcctatagtcgaccgaagccaaagatgacgtggccaaagagccagagttggaaaaaaccatggtgatgccaaaaattctgagcccaccggcagaggcagaattaccgaaggtgataaaggctcctgccacaactcccaagagaaggaggatggccagcgtgtgctagacgttgcaatggagaccacaaaagc

SEQ ID NO: 152317 - DNA, 1929 bp, Zea mays
  Clone ID: MRT4577_70496C.1
cattgggtacctcgaggccggccgggagaaaaggaaggaagaagggcctcctgtatcctctcacttccctcagtcctcgtccgtctgctccctcctctctctacctagctctagctagccttcctgtagcgcggcagagatggctgcccctgcctccaccacggcggcggcggcggcagcgctgctgctgctgctcctcctgtcgctcgccgcggcggcggacatgtcgatcgtgtcctacggggagcgcagcgacgaggaggcgcggcggatgtacgcggagtggatggcggcgcacggccggacctacaacgccgtcggcgaggaggagcggcggtaccaggtgttccgggacaacctccgctacatcgacgcgcacaacgccgccgccgacgcgggcgtccactccttccgcctcggcctcaaccgcttcgccgacctcaccaacgacgagtaccgcgccacctacctcggcgccaggaccaggccgcagagggagaggaagctcggcgccaggtaccacgccgccgacaacgaggacctgccggagtccgtcgactggagggccaagggcgccgtcgccgaggtcaaggaccagggcagctgcgggagctgttgggctttctcaacaatagcagctgtggaaggcatcaaccagattgttacaggcgacttgatctccttgtctgaacaagagcttgtcgactgtgacacttcgtacaatcaggggtgcaatggaggtctgatggactatgcatttgagttcatcatcaacaatggcggaatcgacaccgagaaggattacccttacaagggcacggacggacggtgtgatgtcaacaggaaaaacgcgaaggttgtcactattgacagctacgaagatgtaccagcgaacgatgagaagagtctgcagaaggcagttgcaaaccagcctgtcagtgtcgcaattgaggctgctggcacagcatttcagctctacagctcgggtatcttcactggaagctgtggaacagcgctggaccatggtgtcacggccgtcggctacgggacagagaacggcaaggactactggatcgtgaagaactcatggggcagcagctggggcgagtccgggtacgtgaggatggagcgcaacatcaaggcgtccagcggcaagtgcggtatcgcggttgagccgtcatacccgttgaaggagggcgccaacccgccgaaccctggccccagcccgccgtccccgaccccggcgcccgccgtgtgcgacaactactactcgtgccctgacagcaccacctgctgctgcatctacgagtacggcaagtactgcttcgcctggggctgctgcccgctcgagggcgccacctgctgcgacgatcactacagctgctgcccccatgactaccccatctgcaacgtcaggcagggaacctgcctcatgggcaaggacagcccactgtcactgtcagtgaaggctacgaagcgaaccctggccaagccgcactgggctttctccggcaacacagctgacggaatgaagagcagcgcatgagaaaacgcagcgtggcattaggtcgtcagcaacctgggtggtcgattagagcccctgcgtgggaaatggtcacctggccccctgattgacgacggaagcatggctcggcggccgctatctacctatatcgattttagtaggtactcactcctgtacataaaccctgcagaaaaaaagagggttcagttgtttatggaaccctggcaaatttgctatcgcgcacaatgtaaaactcagctaagctccccggcgtagctcgacacagctgcgatctattattatttgatgtaatggggactgatattgcaacgaccagcaatgttatactacattcattttctaaaaaaaaaaaaaaagggcggccctcgcgatctagaactatc

SEQ ID NO: 152318 - DNA, 2564 bp, Zea mays
  Clone ID: MRT4577_70497C.1
agccggccacaaggggagggggttgccaagggtgcaacgttgcagttagcctaagaggaagaaaaggaaggaagaagggcctcctgtctcacttccctcagtcctcgtccgtctctgctctccctcctctctctctctctacctagctagctagctagccttcctgtagcgcggcagatatggctgcctccaccacggcggcggcggcgctgctgctgctcctcctgtcgctcgccgcggcggcggacatgtcgatcgtgtcctacggggagcgcagcgacgaggaggcgcggcggatgtacgcggagtggatggcggcgcacggccggacctacaacgccgtcggcgaggaggagcggcggtaccaggtgttccgggacaacctccgctacatcgacgcgcacaacgccgccgccgacgcgggcgtccactccttccgcctcggcctcaaccgcttcgccgacctcaccaacgacgagtaccgcgccacctacctcggcgccaggaccaggccgcagagggagaggaagcctcggcgccaggtaccacgccgccgacaacgaggacctgccggagtccgtcgactggagggccaagggcgcccgtcgccgaggtcaaggaccagggcagctgcgggagctgttgggctttctcaacaatagcagctgtggaaggcatcaaccagattgttacaggcgacttgatctccttgtctgagcaagagcttgtcgactgtgacacttcgtacaatcaggggtgcaatggaggtctgatggactatgcgtttgagttcatcatcaacaatggcggaatcgacaccgagaaggattacccttacaaaggcacggacggacgatgtgatgtcaacaggaaaaacgcgaaggttgtcactattgacagctacgaagatgtaccagtgaacgatgagaagagtctgcagaaggcagttgcaaaccagcctgtcagtgtcgcaattgaggctgctggcacagcatttcagctctacagctcggtaattggcgctcaccttgctgctgggttcatctgtggaccatttggttaaattccgagatgaatgattcaatcatctagtattctagtgtttgattattagttggtggccatgaaagaaataaaatccatctgccttgaacaagacatgcccatgttaggtcgaggtcacctaattgctttaaaattgtctctttcatatcgctttactcaagattattttctctggaaagaatgattctgttgtcaccctgcaagctgcaactgttacacaccatacccctgacctagtttacttcgatccagactatatatttagcaacttttacagtacgatagtccttcagtgccccaccactgaatcatgctcccttgtttttctcaaagactatcctgccacttcctgtgaagcacttttaatggtatacaactttgatgtgtttctgtgaggccttttggaaagacgtgctttggtaatatagcggcgtgagctatcctccactaattaataattatcatttcaactccatgaatcatctgcctttgtactggtgactaattatcgtttcctggcctcagggtatcttcactggaagctgtggaacagcgctggaccatggtgtcacggccgtcggctacgggacagagaacggcaaggactactggatcgtgaagaactcatggggcagcagctggggcgagtccgggtacgtgaggatggagcgcaacatcaaggcgtccagcggcaagtgcggtatcgcggttgagccgtcatacccgttgaaggagggcgccaacccgccgaaccctggccccagcccgccgtccccgaccccggcgcccgccgtgtgcgacaactactactcgtgccctgacagcaccacctgctgctgcatctacgagtacggcaagtactgcttcgcctggggctgctgcccgctcgagggcgccacctgctgcgacgatcactacagctgctgcccccatgactaccccatctgcaacgtcaggcagggaacctgcctcatggtaaatgctcggcccatctcgtgatcttcttcagttagctacggagataactgccagtttctttcgtctgatctctaaccggcaaattcgctgcttgacgaacagggcaaggacagcccactgtcactgtcagtgaaggctacgaagcgaaccctggccaagccgcactgggctttctccggcaacacagctgacggaatgaagagcagcgcatgagaaaacgcagcgtggcattaggtcgtcagcaacctgggtggtcgattagagcccctgcgtgggaaatggtcacctggccccctgattgacgacggaagcatggctcggcggccgctatctacataaatcgattttagtaggtactcactcctgtacataaaccctgcagaaaaaaagagggttcagttgtttatggaaccctggcaaatttgctttcgcgcacaatgtaaaactcagctaagctccccggcgtagctcgacacagctgcgatctattattatttgatgtaatggggactgatattgca

SEQ ID NO: 152319 - DNA, 389 bp, Zea mays
  unsure (1)..(389): unsure at all n locations
  Clone ID: MRT4577_70498C.1
tacaagcactggtacgagcagtgctcctaccggagcaaggacgacccgaacggcaacaggatgtgcaaccagacgtgcggccagacctacaagggcgccgacgacggcgcgcccgcttgatcgacccgttgttcatcggcgcgcggattcaggtgcatattaagatcattttcaatatcttatacaatggttacgtcagcccatacatgagctcatgaatgagctcattgaatgttctacttatactatagcatatactagatgctagccttggtgctcatacatggattcactcatctatccactaattcctaccataaagtgagatgacctatgtgtagacatatatatgcatgaatatatgcattaaacagnattttaaaagggcg

SEQ ID NO: 152320 - DNA, 318 bp, Zea mays
  Clone ID: MRT4577_70499C.1
ttcatttgtgcggtcacaacgggccctacagggtctactttaagcggtcgggcttcatcttcaacgtggcacacggaggtgaactggatcctgttcggtaggcccatcagcaaggacttttcgctcgcgatctactaggaggacagggtgccactgccctacgagctgataggtaccaagccgtccaccctggcatgcctgacgagcttggtaccacgtggaatgcaggaccaagaagaagatgagggccctacggatcgacgtgacgcctacgggctacgacgagacctgagccttctgcgaccagatggcaggcgg

SEQ ID NO: 152321 - DNA, 181 bp, Zea mays
  unsure (1)..(181): unsure at all n locations
  Clone ID: MRT4577_7049C.1
gccgggtcgggctcattattttattantatggctgattctgcacggccggtgcttctcgtggacgtggtggttttggacgtggacgtggacgtggtggtcgtgctggccgcggacgtcgtggtgaacaacacaacgaatgggttcctgtcaccaaactcggtcgtctcgtcaaggctacca

SEQ ID NO: 152322 - DNA, 1620 bp, Zea mays
  unsure (1)..(1620): unsure at all n locations
  Clone ID: MRT4577_704C.1
ctcagcgagctctccaccagtttacagccaagaaagaaccaaccgatgagcagcaccaagaggatcgctcagctggccaagaagtggcagaggatggaagcgctcgggaggaagcgccgcctcgcctgggggacggcggcggcggcggcggcggcggcaaagaaaaccgacaggtgctgcgcctccgtggcggcaagggccactgcgcggtgtacacgactgacggggcacggttcgaggtgccattggcgtgcctcgggacggcagtcttcgccgagctcctgcacatgtccagggaggagttcggcttcgcgggcggccacggcaggatcttgctgccctgcgatgccatggtcatggagtacgccctgtgcttgctgcggaggggcgcctctgcggacctggagaaggcgttcctcagcaccatggcgatgtcgtgccactctgcagaccacgcggcggcgccatatgtggcggcttgctgttagtttgcagctgtataagtagtggcagagagttcatcactgtatatagtaggacaaagagaggtgttgttcagatcctgcgacccattaaggtagcgaattagcaagttagcgccagtgctcttgtttgagcagtgagcatattccagctttnnnnnnnnnnnnnnnnnnnnnntgttttattttgtttcattgattcttgaagagatcgagcttcttttgcaccacaaggtcgaggatgacttgcagctgcggctcaagctgcggctgcggctcaagctgcaagtgcgggtaatatatatgataatatataagtgcaccgtgcatgattaatttctccagccttcttcttgtagacgacttgtttcattgattcttgaagagatcgagcttcttttgcaccacaaggtcgaggatgtcttgcaactgcggatcaagctgcggctgcggctcaagctgcaagtgcggcaagaagtaccctgacctggaggagacgagcaccgccgcgcaggccaccgtcgtcctcggcgtggccccggagaagaaggccgcgcccgagttcgtcgaggccgcggcggagtccggcgaggccgcccacggctgcagctgcggtggcaactgcaagtgcgacccctgcaactgctgatcacatcgatcgacgaccatggatatgattattatctatctagcttgtggtggtggttgaacaataataagcgaggccgagctggctgccatacataggtattgtgtggtgtgtgtgagagagagagaaacagagttcttcagtttgctatctctctctgcatgtttggcgtcagtctttgtgctcatgtacgtacgtgtgtctacctgcatgttggttgatccgattgcatctgctgtaaccatatattaattggtccacgatgatatgatttgatactatatatatactaaaaccggacttcttattataatacttgtagtatataagtttcttacgccgcaattgatcgattcagaaggagttctagctagctaaaacatgcagattcagaatatcagatttttaggactactggagatccagaaccttcgtgtccttgtacccgtgattttggatcccctttctccccactacaatcgttggcgc

SEQ ID NO: 152323 - DNA, 300 bp, Zea mays
  Clone ID: MRT4577_70500C.1
gggagcacgcatgcaagctgtttttttttattcaaaaaattccgaggagcggggacgacaacaacgtcctgctggtcctgcatgcatgtagtcctttacccacgacgggggtcgccgaaacttggggcgggcttcttcttcttcttgggggccgtgccggcaacaaggtgcttgtaaaccaccccggaaaggccggggccgaccatgggccccacccaatacacccattggtgttttcagggacgggagcccacaaaggggggcccgaacgcgcgcgccggatttattaaggggcccttc

SEQ ID NO: 152324 - DNA, 685 bp, Zea mays
  Clone ID: MRT4577_70501C.1
cccctcggatttttttttttttttttttttttttttttttttttttttttttttttttttttttttttttttttttttttttttttttttttttttttttttttttttttttttgggaaaaagggcagccgcccaaaaattttaaacaccccggaaacccccccaaaaggggaaattttaccaaaaggggggcaaaaaaaaaaaaaccccaaaaaatttcgttcccccaagggggccaccccaaaagttaacgggccccatttaattaaaagggccaaacccccggggaaaaattaaaaaaaaaaaaaccccccccctaaaaaacctttttctcggggggcaaaagtttaaaggggccccataaaccaaagcgcccttttgggggggggggcccccttaaaactgcccccttttggcccaaacaaattcccaaaggcaaaatccccccaaacttgggtttttgggggggggggccccccttaaaaggggggccccccgggccacccaatttgcaaaaggttttttctttgggggcccccctttcccccctggggcccaacccccccccgggccaaggggccggggtgttggcccaacccccaaatccccccaagggttggccctttccccccctggggcccccggggaacccccaaagggaaaaaaaaaatccccccagggcccc

SEQ ID NO: 152325 - DNA, 389 bp, Zea mays
  unsure (1)..(389): unsure at all n locations
  Clone ID: MRT4577_70502C.1
ctgactcttggtcaaactcttagactgactcatgtacgcacacgtgggcggactttcgggtggattantcaagaacaaaataactcacaaaattaacattaacactagatgcaataacaccctaaaatatgactgaatcgattcctgataagaaattcatccttaatatctcgaatcatgacttataagcatactgaaattatccattatacttatgattctctccaatgactttgcaacgtagatcaatgaacttgtccctgaataaatattatatctacaactatgttcatttactatcacctaaaattcatcatcgctcataatctaacctgtctcataaaattttgacctaacttacattccatattactagtttaactgtctat

SEQ ID NO: 152326 - DNA, 580 bp, Zea mays
  Clone ID: MRT4577_70503C.1
ggccggccggggcagatctcccgacatgtgcgccaagaccgagcgtgagccggtcttcaccatagatggaccaggtgcacccccagatgcacggtcacactcttatgtctgcgtccgctctggctgcaccatccatcgacagaatcctccatcgcacatttggtcatcactcgcgcactacccccagtgacctcatcaaatacaacatccacgccgacccttgacacgcccgcaataatacatgatgactctcacgaggagatgtggggtgacagaatcgaacagcgttgacagcaggctgcacggatgagaaatcagtatgaaaaatgagcaatatcacacagacgagtagctgaaggtgatgcaccacaatcgcgacctcactgcgcaagcatgccctatatacagtcgacgagaacaccatgtaatgcagatgacgtcgtagcggcgacaacgaagaccgaccaagcgaggataaaattacaggagatttctctcattagtaggctgggggcggttatgactatacgtgcaaaccatccgctggatctcattagtgcacgattacctcactttttct

SEQ ID NO: 152327 - DNA, 332 bp, Zea mays
  Clone ID: MRT4577_70504C.1
cacactgatgttgatgctcctgcgccgcacatcgacgaatctaacgagactactcctcagtatcgtgcaggacagggatctgcacaacaacattgatgtgctcaacggctcggactactactgtactccggcacaacataaagagactcgtccagtccaacgactcctgcttcatgtatgtggactgccactggcgctgcttcatatccactgtcttcagcactagcacactggggacatgtgcgctggctgccactctgttctctgccagaccgaatgcggagggtattgttactgaggacttctttctcttcttgaagagagactacatc

SEQ ID NO: 152328 - DNA, 213 bp, Zea mays
  Clone ID: MRT4577_70505C.1
attcggctcgaggggagcttgcttgctagcggttttgaacaggtggggcagcaagatggacccgggaacggtttggaattgcttgcggacaagggtaggtgcaagaaaaatcaacgcatggtcccctgcggggatccactggtacgagccttacgtcctcatcgggggcagtatcgaaacctacgaacatagtcgacttctgtgattctttga

SEQ ID NO: 152329 - DNA, 516 bp, Zea mays
  Clone ID: MRT4577_70506C.1
atcattctgggctgccgataccgcctccttttcttatcctccatttctgctcccggattctcagctggacgaggcggatacgaccgacatggagatgatgttgatgggctcgctgcgatgggcaagtgcctgccgcgccggcttgcgcgcttatctctcattcgcttaacaaagtcgtgcacacgatcgtcccaccggagcacaaaggctgcatcgtcactctcgacatagctgagcgcatcgccctctgtgcaggccattgccagagactactcaaggtctgtcccgctgtccggttcctgaacgccgcattgcaaggtcgcctaccatgacacgcgtgggcgtccactggagcttcacgtgctcgagagctaacttcatgatctctgctggatcctctggctgattcgctgctgcaaacttgtccgatccgatcaggatagacgaggctactctcatgtcatgagcctcattgacatcgttcgagaacaagttgcttccaactgctgcgactct

SEQ ID NO: 152330 - DNA, 1286 bp, Zea mays
  Clone ID: MRT4577_70507C.1
atggcaaccagatcttgaataaaacatcagcacgttaacatttgtcttaatcttaacagaggggaaaaaagctctatttgatgcctcacccgtttcccagctcaacatcaatgcaaaagacaaagctttaaacaaaagaagtatatatgttttccaccatctctttgagattaccttgggtaatctataattctatggtgtctaaatcctaaatcctacaacgaatcggtcaactaattaaacccgtttcctatgtacaaggaaaacaaagctgggtgagtgactggacaaaaggttgaccatgcactgtaagtcattaagtctatataggcaggcaattaccagcatctactttgtacatgcttcccctgactgggcggacaaagaacagactaactccatagccttccttttatcaactcccacaaaaacttgagttgcattaagctctcctcatgagaactcctgtaaatcgaaatgctttcactgccaaaatattgttgggtcattgctataaactgcacgatcctggatctccaagatagatacatgccaatcaacaagccttgcttgaatgcacttgcatagaacaagtcctatagggaatagcgaccagctggtttcctccccaccaaaactccacggctgcatgcttggatgttttttgcttgatgacttgtaatgcagaaatccacatacaaaagccacaacaacattaaccagtgatgtaatattccacaaggcatagacacgagcaagaccagctgaccgccgctgttcatgactaaaaagagcatttatcccagctggaaatggtgctagtatcccaagaggaagaatgaacaagactaacagaacatcgaccatagaatatgaatatagttggaggaaagtaagcaagactaagctgaaatctgcaagaagcagtattgagatgtctaagccgacaaggtcgtgatgtccaactggttttgtattgtgcaagataacacacagaaggtaaaagaatcctctcctgccaccaagcatccttaagttgtcaacattgagaatggtgccagttatccttttacgcagaacatcattggtccttgagtggcccatttgagagtcagtgcatgtattctggtttactgaatgctgatcggttttacttgtacagccatcctggagttcagcagccaccactcccccgacagcatgaaggtcaagtccaagctcaaggtaacctaatgctgtagtttgaacccatgcaaggtcaacacgcacacaaaaagtgttctcgc

SEQ ID NO: 152331 - DNA, 331 bp, Zea mays
  Clone ID: MRT4577_70508C.1
gaccgcccttccttttttccctttttttagaaaagcaccttattattaggaggaagcctcaatcatcaaacaaacaactttatctataggactataactcatcagaaatctaagagagggccccaccaatgatgggttggtgataaagtgctcgaggattttgaaaaacaagggggcatgaggggcagacattggtgcaggtaaaagagggtgccaccattagcgcacatcgtgctgaaagaacggaaacaattgtgagttgtgtcaaaaagaaacgagggctgacaccacctaggtggctaaatggtagaaggttgttagctgctggaaa

SEQ ID NO: 152332 - DNA, 593 bp, Zea mays
  unsure (1)..(593): unsure at all n locations
  Clone ID: MRT4577_70509C.1
agctggcgcgcgtgaccgccgagggtgtcgcggatatggtggacgagtcggggccacggcgttcgggaacgcgtgcggacgcagctacgtacgcgtccnnnnnnnnnnnnnnnnnnnnnnnnnccacgcggccaccgcgtccgcggcagcggcggcgatgctcgcgcagcggaacgtggagtcggtgctgttccnnnnncgaaggctgtcggagcggactaacgccgagaaggtggacgcgctggccgtggagcttgttnnnnnnnnnnnnnnnnnnnnnnnnnnnnnnnnnccgaacgtggccatcaagcaggtggccacgccgaggctgtcgtcggcgaccgcgacgtcaggcaccgcgacggcaaggaccgcgtcggccatgccgtcgccggcgtcgtgggattctcgccgatagttgtgttaattaggccgtggcgcgatgacgagnnnnngttttcaaatgcatgtcactaacaagggtagagcagtgacgtgtgttcttttgcataatgggtcaccgacaagtttgaaaatgaattcattttcatatacacgaacgtgtactgctctaaagttattcacaaatggag

SEQ ID NO: 152333 - DNA, 1077 bp, Zea mays
  unsure (1)..(1077): unsure at all n locations
  Clone ID: MRT4577_7050C.1
ttcttttactaatacatgtccttaatgcattttgatagttctcgattgaatgatccatggagtagctcaatgagattgggtccatctactattttttcaataaaataagctcaatgactggtcactgtagatttaattttgttccatcctcttatggaatactaatccatacccaaagtttagatttggtaaagtgttttctagtaattaaactttggtattcgcttcttatgtgtgtgcaatagttagtgtgtccttccccatctactattcttcaatagatcgagctcaatgactggtcacagtaggtttatctatgcctaatcctcttttggaatactaatccatacccaaaaaaaatattttggtatctgcttctcatgtgtgcaacagttaatgtgctcttccccatttactattcttcaatagaatgacctcgatgactggtcacagtaggtttaacaatgatggattatcttctggaatactaatccatacccaaagattagattttggcgccacacatacactaagaaaagttcatcctgctaatttgcttactattcactggtctatcaattgaaaatacttaatgttttaatctggttatgtggtttgccttttctttttgctgataggtcatgctgcctgaagcaattgcaatagttatggcacctactgacacaacaagaaaacatggtatatttcatctcacggatccaggtggtatgggcgtgatccatgattgtcaagagagaggtttccatcctcataaggcacctcttgatggttcgccaatctacaagcaatgctcccatgtgtacatggacaccgacataaagtttgatatgattgatctccgagaacgatgagagcctaacttttttgggtttattttggagcccatactgtagttaaatcaagttgctgcctttttcttagtcgtgctgaagatttgtggattcttatgtatgctgttgtacatagctattgtattgtatagagaaaacaattgagtgaatgatatcagtcattgctgctttgntgcgatttaaaaaaaaaaaaaaagcggccctc

SEQ ID NO: 152334 - DNA, 723 bp, Zea mays
  unsure (1)..(723): unsure at all n locations
  Clone ID: MRT4577_70510C.1
ttgtcacttgaggatattatctaaaggttctgttccctcgacaatctggaatggcatcgagcttactggaaatagaagccttattctagacttccaaaacaattctctcaagacaattccggacacatttgatcctcccccaaataccactgtaatgctatatggaaaccctgtgtgtgggggtacgaatggatctctgataaccaacctgtgccaacccatgtcagtaaacatgcaaacatcgcaaaatgaacatggctctagttgtcaaccttgtcctgcggataaaaattatgagtacaatccatcatcaccactaacttgcttttgtgcggtgccacttggagtcggacttcgtctgaagagtccaggaatcacagattttcgtccctatgaagatgactttgagatcaacttaacctctttattgcaactgtttcggtatcagttaagtattgaacgctacatatgggaggttggtccaaggctaaatatgcacatgaagttatttccaagtaattcaagtctattcagtatatctgagattgtgcaactcagacatgtacttgctgcctgngaaaataccctntcagatgtatttggtccatatgagcttctcaacttcacactaggttcttatgcagatgaatttccaaatgcagtgtcaacaggtttaagtaaggctgcactgggcagtatctttgctagcacaattgctggcgc

SEQ ID NO: 152335 - DNA, 553 bp, Zea mays
  Clone ID: MRT4577_70511C.1
ggcacgacaaaaaacatggggcggtttttcatttcaaggggtcaacttttaatttttgtgggaaacccaaaaaaacaggggggggggtttcctgtcaggggggaaccccttaaaaattcaacccaaccccccgcgcccaagcaaccggggtgaaatttaggggattacgcccccaataaaaaagcgggccccccctgctaataccccatatttaaaaacaggggtaccaggcccataaaaaaaacggggcgcccccggcccttcccccccaaatggtaagccaaacccccaccgtttaaacccaaaacttgggggctgcccaacctttcaaaatactgggccttgcccccagcttgaaaaccgaaaacatttgcattccccatgacttcaagacattgaaccacttgccccgggttgtacggagcttttattaccaccccggcacgacctttttaaaagaaacactggggagagtgccccctggcaatggggagaacaccctgaaacattttttaaagcaagggtcgaaaaaagaattcccgaccagtgccgg

SEQ ID NO: 152336 - DNA, 1210 bp, Zea mays
  Clone ID: MRT4577_70512C.1
ttttcgattgggtaccgggcccccctcgggtcgaccccgcgtccgaccgccgtacgccccactggtctcccactcatcccgtctcgtttcgtctcggtctcgcacctctcacgacggcaccaccccagcgcggcgcgagtggagacgccgctgctccgtgcttcgccgcgcctacctaacccaagacctgctagacctgagtggctgagtgttcgtgttcggtcaaaacccaccgcgcgagcgcctccagagtccaaacccgctacaaatctcgcgctgcgcattctccccgtacgatacggcggcacggcccacgagccaggcggtggcggcagctagctagctgcggagtagcaccagccaccggagggaagtgggcggcgcgatgggggacgagccggacggggaggcggaggagtacctcttcaaggtggtgatcatcggcgacagcgcggtggggaagagcaacctgctgtcccgctacgcgcgcaacgagttcaacccccactccaaggccaccatcggggtggagttccagacgcagagcatggccatcgaaggcaaggaggtcaaggcccagatctgggacaccgccggccaggagcgcttccgcgccgtcacctccgcctactaccgcggcgccttcggcgcgctcctcgtctatgacattacccgccgctccaccttcgacaacgtcggccgctggctccaggagctcaacacacattcggacacgacggtggccaagatgctggtgggcaacaagtgcgacctgggcgacatccgccaggtgcccgtggaggaaggcaaggcgctggccgaggccgagggcctcttcttcatggagacgtcggccctggacgccaccaacgtgaggacggccttcgagatcgtgatcagggagatctacagcaacgtgagccgcaaggtcctgaactcggactcgtacaaggccgagctgtccctcaacagggtgagcatcgacggcgactcaaaagacgagcagaagcaggggagccggttcgggtgctgctagaagtggttcggggggtagcggtacattattggatcgggttggatttgaaccggagatgatgctttttcatttttttttgggtggcgggtgggggcttgcttgtaaactgtaatacaaggtttgactctttgtttgctgttacgttacacttaaaaaaaaaaaaaaaaagcggcc

SEQ ID NO: 152337 - DNA, 152 bp, Zea mays
  unsure (1)..(152): unsure at all n locations
  Clone ID: MRT4577_70513C.1
atctaaaaaaaagaggtcctccacacattcagattttatcttcagctgtccttggaggggaacatgaacatttttacctaacggaccaagnataccgacacccaattggtaagcaacaacacaagagccggaaatcagatcttttttaaaga

SEQ ID NO: 152338 - DNA, 821 bp, Zea mays
  Clone ID: MRT4577_70514C.1
ggccgggatcttatcttctatccggctgcataggcatagactatagagagagtgcaatggccgtttctttggcagtgaaccgtcctctgcttggtcttcacgagaatgtaccattagctgttgctcatccccaattcctcccgttcaaatggccacccaagtccaaactcccctccgtcgtcggaattcgatgctcctcctcccctttcaacgacaaaaccctcatttccatcacacctaacacttcccacctcaatcccaaccctctcgcttgtcgctttcacgcttcccagtttggagaacaggagagcaacaaatacgtggaagcctatgctgtaggacgaaatattcgtatgtctgctaataaagctcggagagtgatcgatcagattcgtggacgtaaatatgacgaaacacttatggtattagaactcatgccttatcgagcctgtgaagccattctcaaaatagtgttttcggctggagctaatgctagcaataatctgggtttaagcaaaggaagtttagttatcagtaaagcagaggttaatgaagggaaaacaatgaaaagggtaaaacctgtagctcgagggcgtgcccatccaattaaaaagcgcacttgtcatataaccatcacggtaaaaggcttacctagtgagtccgtcgtggaagcaaagcctgcttaatcctatttgagacaaaatgtatgccttattatgagttcccttcccccatttcatttcatgaaaatttctgcatttcgacattatgtagttcattttctacattgtgacttgtagaggagtaatgaacatgctatt

SEQ ID NO: 152339 - DNA, 238 bp, Zea mays
  Clone ID: MRT4577_70515C.1
aaatgtacgccgacttcttagcacgtgtctatacgctagactgtgaatccatgtataccatcaggtgacttagatgagcgagagcgatcagcgtctcatgacgttcatactgtcggccattgtgataaccgaccagaggtcattgtaccatcgattgcgatcttccagtcacctgtgctctcctatcaacgctcacggtactgcgactgcacttgctcggaattttccagcagtcaca

SEQ ID NO: 152340 - DNA, 416 bp, Zea mays
  Clone ID: MRT4577_70516C.1
accgaataatgagttgacatgccatcgcgtgtgactcattattaacaataaaacaagtttcctcttattatcttttaaaaaaaaaaaaaaaaaaaaaaaaaaaaaaaaaaaaaaaaaaaaaaaaaaaaaaaaaaaaaaaaaaaaagaaaaagaaaaaaaaaaaaaaaaaaggaaaaaaaaaaaaaaaaaagaaaagaaaaaaaaaaaaaaaaccgccccttggccccaacccccgcgagggggcaatgttcaaacccagttgcgctgggggataattgggatcccggtcccagtcccccacatgggacaaaccggaagcaaaaggggtaccgcggggggtgcttaatgggtgaaataaccccacataaattgggttgggataattgacggttaacccggggggacccctggggggc

SEQ ID NO: 152341 - DNA, 610 bp, Zea mays
  unsure (1)..(610): unsure at all n locations
  Clone ID: MRT4577_70517C.1
gggtccacgcataattttttatatatatacatggtaacaaacatgtggtacgatagccaatccacttgagttggcctggttatctgtgagactcacacccttcacatactagttgattcatcgacaccgcttacacagcagattttatggtaataaatccttacacagtaaaatgttcatcttatatgcaagcttttggaaacgacaccgatggctattacatctgactggaacatangctgcattcatatatgtctcgcatatatgattcgttaatatgagcatcacctagactgatatcttcgtcgcttgattattccactctgcaatagaactcaattacagcaggtttgttacttacttcattttattgaaaacattcattgttgatatctgaggtaccaaatcacttacatttcaagtctcacaagcaaggattcctttaatttaagccacatttgtcatgacaagtactgtccataaaaaattgtactggcagacgatacacttgttataatcgaccgggcttaaaccaatttgatctaattccttgacacatttatacttattgaaaacatacaattctgacaactgaagatccacacatcta

SEQ ID NO: 152342 - DNA, 454 bp, Zea mays
  Clone ID: MRT4577_70518C.1
agcagcgccagcggcggtcagcgtcagcgtcagcgcccgaccaaatttcccccctcacctccccctctcccgtcgtcggcatggccaccgacgtgctgcgcgcgcgcaacgtcctcttgccggcgccgccgcagaggatccgggcggcggcgccggcgcgccgtaggggagctcgcaccgacagtcgccatccaggcgccaccggcatcaggaggaggtcgcgccgggcgagacatcgtcccccgcggcggggctaagacaccacgacacaatgaggctcgaggcctgaggctggaggtgtacgccgggccatccataccagagatagcacgaccaaagcttgctgacgttaccggaggatgctgccacgaaggctatgaccgtgaccaagacgacagggaagaattacgaagacaaatcgacgcccgagctagagctaatacagcagctgtgg

SEQ ID NO: 152343 - DNA, 494 bp, Zea mays
  unsure (1)..(494): unsure at all n locations
  Clone ID: MRT4577_70519C.1
ctgtgcggcgctcaggcggcggcttcacaaatgtgtgcaatggcacttgtacatcatagattcaagcgcgtgttctatgctttccccaatcctgtcaccggagcgctcggtggagtctacatgttgcatggggagagaagtctaaatcatcactacaatgtatttagggtttcagtacctgaggcatactcgaatggtttgaattagttgttcgaaggaatgctgacccaacatcctgttccattttgtttagaaaaaaaggatccatgagctcttgattttcactatgggtgccattttgttgcacaagagcttcagattaggcttaaacttgtccttttgtattattaaaattttacctatgttgtatcactaaaatagtctcttcattctctttaatatagggcccttttggtagggcttatttttcaaaaaannaaaaaaaaaaaaaaaaaaaaaaaaaagaaaaaaaaagaaaaaaaaggcccctaggg

SEQ ID NO: 152344 - DNA, 708 bp, Zea mays
  Clone ID: MRT4577_7051C.1
aattcggcacgaggcgcgcatggaaggaggcaggcacccttccccgccgccccggatctcgcgccagccccagccctaccccgcctgcccttccattcttccccagccgccccccggtcaacgtcacgaacccgggcctcgtgccgttcgccgtggccacgcggttcgacgagcgggtcacggagctgctgagcgcgctcgctgacgcggcggcggggcgaccaggcaggtgggccatcggcgaagcgccatggtcgtcgtcggggggcaggaaccaggcggtgtacgcgcgccgcgcgcccggctcttcatcgcctccacccgctccagcgtctccaccacctccttcatcgagggccgactgcgaggctcgccggccaggcagccgagcgtcagttgcgccgcttggaacgcctgcttttgttgatcgtttgttttggtctgatttcggtgggtctatccgcagagaggaagaagcagaagctctccgagatccaatccggcgttgaggaagctgaatcgctgattcagaaaatggacctggaggcaaggagcctacagcctagcattaaggctagtttgcttgcaaagctgagggagtataaatctgacctcaacaacgtcaagagtgagctcaagaggatatctgcgcccaatgccaggcaggctacccggggaggagctcctggagtctggaatggctgatac

SEQ ID NO: 152345 - DNA, 139 bp, Zea mays
  Clone ID: MRT4577_70520C.1
gcatgaaggtcaggcgacagaagctcagccaaagacagtgctacacaaaacgcgagccacaagcaactggggacccaacgggaggtcaaaaggagaggccaccgagtcggcctcgatcaagtcagcagccaggggggcg

SEQ ID NO: 152346 - DNA, 306 bp, Zea mays
  Clone ID: MRT4577_70521C.1
agcgtgatacatactcacaatacattgtacgtatcgcgttcggcatgcatgtttacgggctatcgagaagacgttggcacaatcagatgattgctcgatgcacacttgtcgctcactgagcagccttccaagttggatacttatgatccaagatcacctttcttcactgataccactatgctaggctacgacgcaattgtaaaagagcaagatgaaagacgcatagatctcaaatggcagcttactgagagaatgcaacatctatcattctgtgatagcagtctgctcacgtgtcatctctgcatg

SEQ ID NO: 152347 - DNA, 383 bp, Zea mays
  Clone ID: MRT4577_70522C.1
ggccgggccttgttcgctgcgccgccgcctccgacatcgtcccttcgtcccaggaccaacccgacaatcgccggcggttagatgttgctttataggtagctccaaccggcgacgagctcccctcgcgactcattcacttacaaggggctccaacacggcggcccttcgggtaggccgtaggtacaagtgcgaacacccctactggtccctcagctgaatgtgggaacattacggtgcccaaattccttcccgcccgaagggtccgtgaagggacgaaaagcggttgatggacacagcctgtgaacggtgggttgcttatccgttggaccaatttccggtctacagggagcctcctccctttttgacaagaaaatcatttgtgg

SEQ ID NO: 152348 - DNA, 679 bp, Zea mays
  Clone ID: MRT4577_70523C.1
cggggcgcacgtccacctcaacagtccaagccaagcccaccttcggctcccccaccgctgcccttctccgccaccacctccccctcccacggcttctcatccccctctcccttcggcggccacctgcgcccgctctccatgtcccgcacccccgtcggccgcgtcggcagcgacctcagccacgccagagcgaaccatcatcacgccactacgagcgacggcaccagcagcaaggacagggacagtagggccaagagcaaggcctcgcctttcttctctggcctcggcggcgcgtggaggaagcaggccgaggagaagaggaagggaaggcccaagcccaggagagcggcgctggacgtgggccagtgggtgaagcgacacatggcatccatggtggagcagctgcgtgcctccttctcccggcactcggagcgggagcagcggcgccgtccgcactcgttctcgggccacggcccgggcgccgccagggagatgagggagcgggagcactggaggcggcggcgcgggcagctgtcgtccgcgccggcgtcgctgcgcgtgtcggctgcgaacagcggccgcctctccgttggcggctcggtccaggtgtccccgcccgccgtcggagagcaccatggtaggagcctctgctgcgccctcggggcccggcgtgggggcg

SEQ ID NO: 152349 - DNA, 990 bp, Zea mays
  Clone ID: MRT4577_70524C.1
gaaaaaaaaatgtatatatatcgctcttatatatctcttcttacatgcatcttaatttacatgcgcctgtgtgagatcgaaccaaacgactgggcttctgaaatttcgatcaaattaagaatccataagtgcagccagcacccctaccaactactctggtttactgaagcttggtgccgtcgtccccggtcggcgccgtctgcttggccacggagatggaattcttgcagtgcgcgatggcggcctcgatggcgctctgcagctcctccatggtgctctcctccgacgacgtggacaccttgaccgagccgccaacggagaggtgcccgctgttcgcaggcgacacgcgcagcgacgccggcgcggacgacagctggccgcgccgccgcctccagtgctcccgctccctcatctccctggcggcgcccgggccgtggcccgagaacgagtgcggacggcgccgctgctcccgctccgagtgccgggagaaggaggcacgcagctgctccaccatggatgccatgtgtcgcttcacccactggcccacgtccagcgccgctctcctgggcttgggccttcccttcctcttctcctcggcctgcttcccgggcacgtcgctgctgctgctgctctccttcctccacgcgccgccgaggccagagaagaaaggcgaggccttgctcttggccctactgtccctgtccttgctgctggtgccgtcgctcgtggtggcgtgatgatggttcgctctggcgtggctgaggtcgctgccgacgcggccgacgggggtgcgggacatggagagcgggcgcaggtggccgccgaagggagagggggatgagaagccgtgggagggggaggtggtggcggagaagggcagcggtgggggagccgaaggtgggcttggcttggactgttgaggtggacgtgcgcgtgactgcggtggtgtgtccatggcggccgcttgagcggcgcgggggtgttagcttc

SEQ ID NO: 152350 - DNA, 3613 bp, Zea mays
  Clone ID: MRT4577_70525C.1
gcggcgaaccggggggcccggacaggcggcggagagctcgaggcgtcaagcgtcatggcgaagtcgagcgcggacgacgccgagctgcggcgcgcgtgcgccgcggccgtggcggcgtcaggcgcgcgcggggaggaggtggacttctccatcctcctgggcaagggccgcggcatcttcgagaagcccggcaggctcgccgagccccatgtcctcgcgctccgcgtcgaaaagggccgaggaatcttggagaagctcggcttgctcgccatgctccgtttcctagctgtcaccgtgaaacagccatcaagaggcgaggcgatgaaagcttttaccagagtattagtaaattcaactgaggcagttgccgagccagtcaaactttactagcttaaccatataacaaagggtgatgtcatttcaaatggtacgatgggtaatacacttgttatgagttttgataaccttaggagtctgaatgtggccccgccaaaatggacaatgcgtaacattgatgacagaaatcgtctacttgattgaattctgaatatgtgcaaggagatactgatttaacatcacaaagttgttggcgatgattttttggagtcaccgcttggtacgtagaaaaagacgtttttgatagaaaatgaagtaagtatgttcgattgccaagaaggataagtggcaattcaaagcgagtgtcaattaacaaaatctattacgtccgtgctgggtttctatatacaaatacacagaaccatgcatgagttcatggaattagacgtgtgttatgttcatacgttaataagatgcaatcccttgcgaaatgatgtgaggcatggtctggttggttaggttccagatggcgacgatgtggatgcccgccgtataaatagcgaacgctgggtgcgtcccatgaggctcttcatgaattgcacggagtcatcaaggaagatttcaacgatgcagtcggtagatcagaaagaacatattcatgattttgaatctctaatgcaggggattacagagcgataggtttttggagcgacatcaactggaggctcatttgaagagtcacggatgctgaaaaatgttgaggcatgtgaatggttgacaggggccattcgcagtcttgaagttcctaatttggacccatgctatgtgaacatgcgcgctgttaggtagttgaaggcagagctggagaagttaggtacatctttttcttgaggaacattatatgttatgccagactacttatctagtttggtagccttcatgatcagtgacaaacgcaacttttcacactttggagaaattaacagaccgtgttcttcagacttcaggtattaatgtaagggatatgccggatttcttcagcaacaatattttcgagataagagctgctgaggtcacttatggaaggcattctgatatacccataatataatactaactagcttgcactcgccatatcagctcactcatttatctgcaatttgagaggttatttcaattcaaccggaaagttgacgaattgacttacactattgctgctgaggagataccgtttcagctgggattatcaaaaactgacctaaggagggtactgaaatccagcttatctgggattgataagtcgattagcgccatgtacaggaggttgcagaagacacttacctccgatgagttgtttccttcgctgtgggacaagtgcaagaaggagtttttggacaaatgatgatctgggtcttatggatccagatggcaacgatctgaaacctgacagtacctctgctgaactgggtacattgaatgaagctctttaagaattactcgatggaatccaagaagacttctatgcggtcgtagattgggcttataaaattgaccccttgcgttgcatctcaatgcatgggattacagagcgttacctttctggacagaaagctgatgctgcaggatttgttcgcaaactacttgatgacttggaatcaagaatatcagtacagttcagccggtttattgatgaagcatgccatcaaattgagcgtaacgaaagaaatgtgcggcaaactggaattctagcctacattccaagctcttacccaaaaatgtaaaaactggcaataagcagcaagactccggtgctcttatccttggcactggtgattatatgatttaagttctgcttcaagataaaaagagcactatggagaaattgtgcttattgcagggtgtactgtgacaagtttttttgttgtcttagagattcttttctgaagtggcaaacatagaccaagatctgactttgtttcatatagatttgctgtccttgcatcacgtatggaacaatatatccaaggacaatccagggatttaattgataaagcatacacaaagctagttagcacaatgttcgcaactttggagaaaattgcacagagtgatcctaaaactgctgatattgtgttgattgagaattatgctgctttccagaacagtctttatgacttggctaatgttgtgccaacgcttgcaaagttctaccatcaagccagtgaatcatatgaactagcttgcactcgccatatcagctcactcatttatctgcaatttgagaggttatttcaattcaaccggaaagttgacgaattgacttacactattgctgctgaggagataccgtttcagctgggattatcaaaaactgacctaaggagggtactgaaatccagcttatctgggattgataagtcaattagcgccatgtacaggaggttgcaaaagacactgacctccgacgagttgtttccttcgctgtgggacaagtgcaagaaggagtttttggacaaatacgagagctttgttcagatggtgacacggatatatgggaatgagccgatcatgtcagtcaacgaaatgaaagacgtccttgctggtttttagatacaagtacacagcaccatgtatgatttcagagaaatagctatgtattccattcattccattgaattctgcacccacttgcgttactgtgttaggcgccctttttgggttatgtgtgtgtatgtggatgtcctctgtatagaagtgaacgcggcatgcttcccctaatgatgttcctgtgtcgcatcgagccgtcagtgacaatgcaaactgcaaacccggagtaccggaaggaacatgttcatgtttatgacgtcatttgtccaattggcgttccattcacggtctttaggtcgatctcactcttcttcgagtttatgcgcgctgcccaggacaacatcacagcgctgatggagttggacgatgtcatcgggctcgactggatctagatgggatggaccctacttgcgctgaaggagagagagagggcgtacttggcttgcaggggatcgtagtaaggttctctttttcatgggtcatgttatctgtcatgtcagattacacaacttcagctaccccagtctttgcgagagaagtaccaaaataattttacttcatggctatctcagagtgtgttcatgtcgctaccactaatcatataagggtaacaatgtatttgttagcaaacaattttgagaattaaagcggtgataaataaaaaacccac

SEQ ID NO: 152351 - DNA, 133 bp, Zea mays
  Clone ID: MRT4577_70526C.1
cagacgctggcgtgacgcgttggccgtcgccaagtccaatccgttgggtccggcagctcctgtgacggtgccgagcacgtgctggacctgggcccgctgtccggctctcccccgagctacctgaccggctagt

SEQ ID NO: 152352 - DNA, 3147 bp, Zea mays
  Clone ID: MRT4577_70527C.1
atggcgtcaccatccaatcctcctctttccctcccttcctccctgaatatcaccatcaccgagaagctctccaggacaaatcacgtcctctggcaagcccaagtgctgccggcgatccgtgctgcccaatttgagggttatcttgatggatccattgctgcgcctcctccggccatcaatgaaaaagacggcgataaggtcatctccaagcccaacccggagtatgctcgctgggttgcgcaggaccaagccgttctcagctatctgttctcatcgctcacaagggagatccttacaactgttgcttcgctccgcacctcggcgcaagtttggtctaccttggagcagatgttcacgtgccaaactcgggcgcgttccgttagcacgcgcattgcgctgcatactctgaagaaagggaattcttcagttgctgactattactccaaagtccgtagcctcgccgatgagcttggtgcctcgggcgtggttatctctgatgatgaactggtgtcctacatcttgtcgggccttgaagaaaattacaatccggtggtctcggcggttctagcccgtgaagaaccagtaacgcctggggccctgtatgctcagcttttgagccatgaatctcggctagagctgcaatctggtgcaagcaacatccagttctcagccaatatggcgtcctatggaggtcgcaataggggccgatctggctcctctcgtggcggtgggcagtcccgtggtcgtggccgattccagggtgcctactctagcaacagcaccggccgccacaataggcaagacactggcaatcgctccaagaaacccacgtgccaactatgcttcaaagttggacacgttgttaccaattgttggtacagatttgacgaaaatttcgtccctgatcaacgcctcgccgcagcagccgctccatccactactgatccatcctggtacacagacacgggcgcaactgatcacatcacaggcgaattggacaaacttgctgtttatgatcgctataatggcactgatcagatacacactgcaagcggcgcagagtttcaagctcttgttgaacgccttcttggacgaaaaatcattgctatacaaacggactggggaggcgagtatgctcgcctcaacacctttcttcgacaggacacatcaggctccctgatcgggaatcgtctagatcaaacccctggtgaaaataataggagggatgcttccccgggtccagctggagctgctctggattccacgacagacgactacccatcatcagttgttccatcgctcactccggtctcgatcgagggggacagtccggacctcatctcgccagatgcacttgacaccgcgagtgttcgggtcagctccgcctcgcatgaagcgccatcaactgcgacagacaacaacgatgagtctagtttgggatcggtgcccatatcatcctctactgcaccggatcctgaatcagcagctgaagaacttgttcctgccttatctcctgcgtctcctgttcaccgtaccaggcttcagcaaggtattcgtaaaaccaagcagtatactgatggcaccatacggtatggatttcttattactacaagtgagccatcaaatttaactgatgctcttattgatgcgaactggaagctagcaatggatgttgaatatgcagctctcgttcgaaacaagacctggcatcttgtgcccccaaaacaaggcaggaatataattgattgtaaatggatatacaaaattaaacagaaggcagatggatcagtggatagatacaaagcacggttagtggcaaaagggttcaagcaacgttatgggatcgattatgaagacaccttcagcccggtggtcaaacctactacaattagacttgttctctcaattgctatgactaaaggatggtgcctgcgacagctggatgtgcagaacgcgtttcttcatggtgttcttgaggaagaagtgtatatgagacaacctcctgggtatgaagatatcactaagccacatcatatatgcaaacttaataaggccctttatggtctaaagcaagcgccacgtgcttggtatgctagacttagtgataaactcaagatacttggttttcgatcatcaagagctgatacctctttatttttctataagaaaggcatgatcaccatttttcttcttgtatatgtggatgatatagtggttgtaagctcctcgtcaaaggcagtccaagcgttacttgaggatctcaaaactgattttgctctaaaggacttaggggaattacattattttttgggaattgaggtcaaaagaatcagagatggaattttgttatctcaagagaaatatgccactgatcttctaaagaaagctggtatggccacctgtaaacctacggttactcccttgtcaacaagtgaaaaactgtcagctcatgtcggggatgctttaggctcagaagatgctacaaaatataggagtattgttggaggcttacaatatttaacacttacaagaccggatatttcattcgccatcaataaggtgtgccaatatttacatgccccaactactcaacattggactgcagttaagaggatattacgttatgtgaagggaactgccgacataggattaaaaattaagcaatcatcgtcctggttaatcagtgccttctctgatgcagattgggcaggctgtttagatgatcgaaaatccactgggggttttgctgtattcttgggatccaatcttatatcctggagtgcaagaaaacaagctaccgtgtcaagatccagtactgaagcagaatataaggcaatggggaatgctactgcagaagtaatgtggatccaaactttgctcgatgaattgaacatagcatgtcctcgtactgctcgattatggtgtgacaatatgggtgctaaatatctatcatcaaatcctgtatttcacgctagaacaaaacacatcgaagtagattatcattttatccgtgatagagttctacagaaaagattagacgtgcaatttatatccaccaatgatcaagttgcagatgggtttacaaaaccattgactcaacagaagcttgaagaatttaagtgcaatctcaaccttgggcggttatga

SEQ ID NO: 152353 - DNA, 170 bp, Zea mays
  Clone ID: MRT4577_70529C.1
cctgcaggaccggcccggaacaattctcgggccgacgatgttacatacccggcggccgccctcaattcggtgggttgtttgacaacgagaccggtaaacacccaagcgacaaaaacacacgggagaacaaaacgcgcacaaacacaagaagccgaggcccaaacgacaaa

SEQ ID NO: 152354 - DNA, 132 bp, Zea mays
  Clone ID: MRT4577_7052C.1
ctatggtcatggcggaggggacggcagtgctgaggcagaaccagccgggcaccaaagcgcaaggatctctaacaattggcctgatgaatcctttgatgaactggacagtaccctagatgttcaacagtatat

SEQ ID NO: 152355 - DNA, 540 bp, Zea mays
  Clone ID: MRT4577_70530C.1
cgtgtatgttctgtgccgacccttccggtccaccccataatacaatcttggtgacgctagatccctgccccatgctcctagcatataatgttgcaggtctgactgggagcctaacggccgacacaagacatacatgtcgagctcattattggccccggcggccctgccagctagataagaacatcttataaagcctcttgggatggtaaacacccttgttccgcctttgatgggccactcgatattacccggccgttatcacaccattgatggagcatcaagaatcccttgagacttgcattagacagacgcatatgcaggttggagatcgaaagctatgaaaagcaattaggtagaacgcgcgcgtggacacaaacacatgcaagcaagcaatgcaggtccagcacaatacctgtcggtgtcaaaaacaacgacgaacagtatggtgcgcgttcccgatttcactggtgatcccctgcacgcgggccacaaggctggcgtctgagacccggccgtcaaagacagggaagacactcacgt

SEQ ID NO: 152356 - DNA, 176 bp, Zea mays
  unsure (1)..(176): unsure at all n locations
  Clone ID: MRT4577_70531C.1
atcatcttcatgcagagctaattgtgcatagctttcatatttgttcgtcttgactggggataggtttggggtttagttaaatgacccaatgggttgggggtttgtgttaagcttggtgttgtcttcactgtataattgatattctgctcccatccatgtncttcgttaataaatgc

SEQ ID NO: 152357 - DNA, 255 bp, Zea mays
  Clone ID: MRT4577_70532C.1
tctcatcttgctaaagcctataatgaagaaaaagatttagaaacttagagttgtggggcgggctctaattccaaccatcacgtttgattatagttagttccacaactctaatcaaacgtgatggttggaataagaacatttgtgttatgaactcttttaggaaaaaatgatccaacatttttattagcatgagctacctcatttatagaagctggtatggacctactatacttgtacatattttaggtactaaaa

SEQ ID NO: 152358 - DNA, 103 bp, Zea mays
  Clone ID: MRT4577_70533C.1
gcgggaccggaaaacaatccactggccgaccttaaacaacttggaggccatgcaactttcggcaggtcgcagaataaccaacagggccggaccgatcggcctt

SEQ ID NO: 152359 - DNA, 403 bp, Zea mays
  Clone ID: MRT4577_70534C.1
tcatcgacggctcgagcggctcgagaatttggaacttgagagttacttgtatgatgacttgcctgatagagatgagtctaatgaattggataaatatatggctgagccacttatcaaacaagatccgtttgacattttagcatattggaagaaccaaacagataagtatccaattctttcccaaatagctcgtgacttaatgtctgttcaagtgtcaacagtagcatctgagtcagcatttagtgctggtggccgagtcattgatccatatcgtaatagacttgaccctgaggtggtggaagctctaatatgcaccaaggattggataaatgcagtaagaaaagattctaaaagcgttctttcaattgtggctgaactaaaacccctagagacagatccttta

SEQ ID NO: 152360 - DNA, 419 bp, Zea mays
  Clone ID: MRT4577_70535C.1
ggggaagccctgtttttgcatatagctgggggggggaacaaacaagggaaaacaaacagtagcccgggggggggggggggggtttacaattcaaaaaccccgggtaaacccccaacatatcaaaggggtttggtgggcccctgataattcgacttttgcttgcaaaacattttttagcaaagggaaactttgacccacatttggtggccccccagttacccgtaactggtttttaaagacttccttatgtcccccacaatcgcaggggggtgccctttttttagcttgaaaaccctttccatgactgaaagctcgggggctgtcgtgtcccccccaaaaaagggagtccagtcgttcactgtcatgcctgcagaaaagacctcgttttcttttttcacagttcctgcgacaaggggaac

SEQ ID NO: 152361 - DNA, 654 bp, Zea mays
  unsure (1)..(654): unsure at all n locations
  Clone ID: MRT4577_70536C.1
gnaaatgcggcgcaggcagaagaagagaacccaagcgcggctccgtctccggcagtccggctccgctctgcatctcccgccgccttgtgcaatgcggtgccctcctccacctctttcgcatttgatttgattcgtccagaggacaatctctgcgccgcgcataaacaacgccagaagagtcgtcgcccctgaccgtcccgtctccttcctcccctcatccccaccctcccacccacccaccgcgccaccataaaccccgaggggatagagagaaaaaccccggccccccacacgcgcactccatggcggagccggccggcaaggcccgggagcggcgggtgtcgatcgaggaggtggcgaagaagctgtccctgtggcacacggccacgttccggcccatcctgacccacgccgagctggagcccatcctgtgtgcggcgggcttcgtggcgctgccgtcggcaccagcgacgcatcagaagcaggacgagcggcccggcgtggcgtggcgcgagtacgccttcctcggcggcggcaatgcgagccctgcggcggcggccccgcggcgctggctgggcccgcgcccccgcctcccgtacccgcgcgtcgacggcctccacctcaagacgtaccaggccttcctcggcgccgtcg

SEQ ID NO: 152362 - DNA, 435 bp, Zea mays
  Clone ID: MRT4577_70537C.1
cggatttcccttgtcgttccacgcgtcagcataagcctgtgtggatgggagcctaggtggcttccaaatgttcaagactgtgaagaaaattcaacgcattcagctaaaaatttaccctcagctggacctgacgaacggttatatccccattttgttgaacataacaaaaattcattttctgcatcagccaagaaagataaggggaaaggcaaattgcccgttggagattctggatgcagcatgaggtcaccgttgttagattgtaacctgtgtggagctacagtcaggatgcgggactttagacctgtattatgtccttctcgtttcagtccaaataacattgttgtgcctggaacaggcagaaagctaacactgacacatggagttagtgctgccagtggtatcaatgagtgggttactgatggggtggaaaga

SEQ ID NO: 152363 - DNA, 548 bp, Zea mays
  Clone ID: MRT4577_70538C.1
cccggggcttagagcatactgatctgctgcctagcaaagcatgactctcgggaaacagactagacaaacgatgcacgacgaatgtagactaggcatagagctagagcccacgaatgtttatttgagaggggcatgaacgggaaccacccatcttcgtatggatgtacgacacccctttataacaataatacgatccatgttgcggactgctatctgaaccaactcagagactggcggcttggtctgacacgatccaagactacaaagacacgcctgaggcgcactagttcaaggtataacctcaccgaaatccagaaggaagaccgcaaggttacagtggaggaactgaacaatactgtgatgagcggacattacagcaggtagaaggaagacaaggtctacaaacgtgaccgaatagagagcaggaccggacagatcgccatgcgctaccgtctgacagacaacacgaaggaggatcacgtcaagggtggcctcgataacagcgcgctcactgtgcaccgttcccaacgcggaggacaataaacttg

SEQ ID NO: 152364 - DNA, 653 bp, Zea mays
  Clone ID: MRT4577_70539C.1
cggacgcgtgggtttcaggtggtcatgtcagaagaaggcaaagtagtgggatttcagccaactaacctcccagctgtgaaccattgggcaacaaacccactagcaacacttctgtatcagggacggtcactttctccaggcattatagaacccaggctcaaaatttcccgtccagctaaggctgccccgatcgaattattgatgtcagtaaatcaagattccttttttgctttggcaaggcctgttgaagacccatggtagcagagcgagcttcagattgattctactgcaagattgtgaacagttccaaagatgtgaagcaacaaatagtggcggctgagcctgaacaggatttaacaaggtgcctgagttatgagaaagaaatcgactaatgggccccatcatttttagtaagatgccggaggagtggtggtggcagacgtgaagaagaaattccactagtatctcgtcggagtgcaggaagagcgatcggaggggcacaacaaacgtgggaaattggtgggctttggcataggccaaactctgaatgaaaagataatgatatatatatatattaggtcctgtttggaagcatctaattttttaaaactgatttatagaaattaaggtggttccaaacataccagtttatt

SEQ ID NO: 152365 - DNA, 269 bp, Zea mays
  Clone ID: MRT4577_7053C.1
gagtttactagtcggcggccgcccgcttttttgcgattggtatgtttctcatcgtgtcctcttggcccgaaaaccacatagatccatgtgccagcactgaccttatggcccaggataaggatgttgctcacgcaattgagtatgatgcaacgattgttacactgggaacaatacctgcattggttggcggctccaccaactcaatgatctttctatggactacccacccgattacagaacaagaagacagatctcactggcttattcac

SEQ ID NO: 152366 - DNA, 775 bp, Zea mays
  Clone ID: MRT4577_70540C.1
gatgcacacaaagaaagaaagaattgaaggtggaagaagagaacgagacctcgctcgaggacaggggcatcatcaatgtcgacgtacctcaagaagccgcccccctgcagcgtctccctcatcgtcctcctccctctcaccctgatcttattatgcttcacctttctccttccgctgtccgcctacatcagcaacccgcttgcctccacggcagtggccacgagagcctgcgtcggcgccaccgctggtgtcgtccgcgctgcgccagcaacgacgaccgtgggcgacgtcgacggtgtcgtcggtagccagcgcccggcggagcttatgagcgtcctcgtcggcgtgcacaccatgcccggcaagcactcccggcgccacctcatccgcatggcgtacgcgctgcagcagcagacgcccgcgctccgcgccgccgcgcgcgtcgacgtccgcttcgtgctctgcgcgcgcccgatgccgcccgagcaccgcgcgttcgtcgcgctcgaggcgcgcgcctacggcgacgtgctggtcctcgactgcgccgagaacgcggaggaggggaagacgtacacgtacttcgccagcctgcccaccatgctcggctccggctccggcggccggccgtacgactacgtgatgaaggtggacgacgacacgttcctccagctggacgcgctggtggacaccctgcgctctgcgccgagggatggacatgtactgcggcgtggggctcccgttccacgaccggcagttcccgccgttcatgctc

SEQ ID NO: 152367 - DNA, 537 bp, Zea mays
  Clone ID: MRT4577_70541C.1
gggggattaaaaccaccaaaataaaacaaaacatagtcgggggggttctgaaggggaaaaaaatccataaaaaaccaaaaaagggccccaaaacatcctggtaaaaaacttgggacaggaagggaacaaaaaaaagtttcccagtttggtgattttgacaaaggggaattggcgctgccccgcaaaaccttaccccttgggtttaccaaaaaacccctggttttcatcgggaggcgggaaacgaccatgcccaaatttggacgagggggccaagaacttgagcttgatcccccccagcgcccaccgggaaatttggttcaggagggactggggggggggccccccccccttttttggacccacaaagaatcccttggtcatcagggagccccccttcacgaaaccaaagggggggaaaccccccctgggagggggggccttttcgggcctggaaaaatctggggagggatcgggggtctcttggccaaccttggccaatttggaaaccttcttggtcatctcgggggggggggggga

SEQ ID NO: 152368 - DNA, 601 bp, Zea mays
  Clone ID: MRT4577_70542C.1
tacctcgaggccggccggggagcgatgctccagaagcagaagccaccgatcggtgtgccgcgtgcgtgaggcgatcggagcatcccgtcccgaggaggaagacaaccggcgacgcggggggaacatggggaagacgccggtgcggatgaaggcggtcgtgtacgcgctgtcgcccttccagcagaaggtaatgccggggctgtggaaggacatcaccaccaagatccaccacaaggtcaccgagaactggatctccgccacgctcctcctcacccccgtcgtcggcacctaccaatacgccatgtggtacaaggagcaggagaagctttcccacagatattaaatgcgctgcccttcacagacagcacttggatttaacatttgtttgatcaatttcagttcaacgccttttcatcgttccatatgcatgtatggtatccgtgtctggcaaacttattttgaggcttgttaaatatgtaccttttgtctctcaagatgttaaataaagcaaattaacttccagtttctcgtgtttgtgtttaagaattggtaactgggtttatttgttagttgtcccaaaaaaaaaaaaaaaaaagcggcc

SEQ ID NO: 152369 - DNA, 418 bp, Zea mays
  Clone ID: MRT4577_70543C.1
tctattatgcgtgcgagcgtgcacattaggaactatgggcacgacagccgctagtccggtacgaaggtattaagatccaatacaaaaatagtaagctgaaccattacttgcggacgatggcataacagtagcgatacttgatgagagagaagtaaacgataatacacctgtaacttacggtgatgacatctgagaagctaagaatgtaaatgtgacaatagttacaatgcttgggatttatacagaaaacaatatgatcgcaaagagaatgcgcaacaccatgctacagaatggtcactttgatcaggaaaatttcactgatagttacactataccttgttatagatgacagaaactctgtgcagatgtctcaggatcaactagagttgagccacatggtagatgaactaatgagttt

SEQ ID NO: 152370 - DNA, 662 bp, Zea mays
  Clone ID: MRT4577_70544C.1
aggccggccggggaccgatataccgaaccctagcccagttgttccgccgagcgaacgatccagaagcagaagccaccgatcggcgtgccgcgtgcgtgaggcgatcggagcatcccgtcccgaggaggaagacaaccggcgacgcggggggaacatggggaagacgccggtgcggatgaaggcggtcgtgtacgcgctgtcgcccttccagcagaaggtaatgccggggctgtggaaggacatcaccaccaagatccaccacaaggtcaccgagaactggatctccgccacgctcctcctcacccccgtcgtcggcacctaccaatacgccatgtggtacaaggagcaggagaagctttcccacagatattaaatgcgctgcccttcacagacagcacttggagttttcatgatgggtttcataatcctcccatgatgatttaacatttgtttgatcaatttcagttcaacgccttttcatcgttccatatgcatgtatggtatccgtgtctggcaaacttattttgtggcttgttaaatatgtaccttttgtctctcaagttgttaaataaagcaaattaacttccagtttctcgtgtttgtgtttaagaattggtaactgggtttatttgttacaaaaaaaaaaaaaaaaaggggcggcc

SEQ ID NO: 152371 - DNA, 649 bp, Zea mays
  Clone ID: MRT4577_70545C.1
agagtactttggcaggattgggtaaccattcgttgcagttggcccaaaaatacttgcccggcccaatcgaatctctgaccgatataccgaaccctagcccagttgttccgccgagcgaacgatccagaagcagaagccaccgatcggcgtgccgcgtgcgtgaggcgatcggagcatcccgtcccgaggaggaagacaaccggcgacgcggggggaacatggggaagacgccggtgcggatgaaggcggtcgtgtacgcgctgtcgcccttccagcagaaggtaatgccggggctgtggaaggacatcaccaccaagatccaccacaaggtcaccgagaactggatctccgccacgctcctcctcacccccgtcgtcggcacctaccaatacgccatgtggtacaaggagcaggagaagctttcccacagatattaaatgcgctgcccttcacagacagcacttggatttaacatttgtttgatcaatttcagttcaacgccttttcatcgttccatatgcatgtatggtatccgtgtctggcaaacttattttgaggcttgttaaatatgtaccttttgtctctcaagatgttaaataaagcaaattaacttccaaaaaaaaaaaaaaaaaaaaaaaaaaggccccta

SEQ ID NO: 152372 - DNA, 1520 bp, Zea mays
  Clone ID: MRT4577_70546C.1
gagtgtccccgcaggcacgccagcactgcagcagcgagaagcagcgcatggagcgtcgtcggccagcgagaggtgggggaggctggatcgtggaggaggactggaggtggaggagacggagtgtccccgcaggcacgccacactacagcagcgagaagcaatggttttgaagtgtactgtatgtgtctactatactgattgttacatgttcttccatgtacctgaagacttcgttcttctttcctgcctcgtaaatattgcactggagtagtggttgtggtgccctgtggcaaagagccacagttctttgtacctaggttaataatgaaatttcattgtgatatagtaaatggcagtaaagttcagtttcagtctccagtggaaaaaaaaaaaaaaaaaaaaaaaaaaaaaaaaaaaaaaaaaaaaaaaaaaaaaaaaaaaaaaaaaaaaaaaaaaaaggggcgaacgatccagaagcagaagccaccgatcggcgtgccgcgtgcgtgaggcgatcggagcatcccgtcccgaggaggaagacaaccggcgacgcggggggaacatggggaagacgccggtgcggatgaaggcggtcgtgtacgcgctgtcgcccttccagcagaaggtaatgccggggctgtggaaggacatcaccaccaagatccaccacaaggtcaccgagaactggatctccgccacgctcctcctcacccccgtcgtcggcacctaccaatacgccatgtggtacaaggagcaggagaagctttcccacagatattaaatgcgctgcccttgacagacagcactcggagttttcatgatgggtttcataatcctcccatgatgatttaacatttgtttgatcaatttcagttcaacgccttttcatcgttccatatgcatatatggtatccgtgtctggcaaacttattttgaggcttgctaaatatgtaccttttgtctctgaagttgttaaataaagcaaattaacttccaaaaaaaaaaaaaaaaaaaaaaaaaaaaaaaaaaaaaaaaaaaaaaaaaacccgcggccgcagcacaatcgcctcgccttcccttccccaccagcccgtctctctcttctctctgactctctctctcgaagccgcgtccacctcgcagcagcaagcaagcgcgaccaaagggcgcctctaggagacggcggagctgctgccgcggcggcgtccaacaacctgggggggtcgttcggcgagatgctgatcgacttcgtccccgacggggccgggctgtcgctggccgagtcgggcggtttcgtcaaggcacccgggggggcgcccgccaacgtcgcctgcgccatcgccaagctcgggggatcctccgccttcgtaggcaagttcggcgacgacgagttcgggcacatgctggggaacatcctgaagcagaacaacgggaacgcggaggggggcctgttcgacaagcacgcgcggacggcgctggccttcgggacgctcaagcacgacggggagggcgagttc

SEQ ID NO: 152373 - DNA, 867 bp, Zea mays
  Clone ID: MRT4577_70547C.1
aggccggccgggccggtttcatcttatgccatgtaatcgtttcatatagatgccattagggaatgtcgtcgttactttcatctgatgtaactcagatcatggtgtgccactagcacccattgtaatctattcattctctttgcacaaaacttttgatcaaactacgcttttcatctttacatattccctttagagccacatttcatcttgtagaccctttacagcctaatattttggctccattagaaattatttctgagccacaaacgtcgttggtaattagtggttcttttgccgtttaagcgagcgagtgcttccatggcttcttcaaatgaggtgggattgccctcaaattgaatttcacaaatatagactttgtagtcataaaaatatctgatttattattctttaagaccatttatgcctcagctattagcacttctttcatatggggtggttgttgctctttattgccaagatgcaattcattatacaatctccttataccattgatggaacttttgggtctgcccaataaccctaaccactagatcaataccaaaacagatcgtacctttgatccaatcgctatcatgttcgtcggtgaaaatctgcgctagggcaatgacggtcggggaagtgatcttgccggcggtgggcttctcgttgctgatagcctcccctcgggatcggtctagggttgaagtggggaatttagagtgtgtttggttggacgtataaggagagatgaaaggggcgaccatagtttttatagtgtttagatgagagtcacgtaggggcgaggtaacaccggagtaatttttggtggtggggtgatcccgaaaaaaaaaaaaaaaaagcccctag

SEQ ID NO: 152374 - DNA, 614 bp, Zea mays
  Clone ID: MRT4577_70548C.1
cgccacgtgtccacagccgtggcctcgcctcactcgcactactcgccctgctcgtcgtctcccccaccgttgccttcgcatcgccggacgccgctcgccctccgcttctgtgactacgtccgagatggccgcctcggcattggcctcccgcgcgctgcggcctccgcacggccgccaccctcccgccccttcgccgcgtccgcgtccgcgctcggcaaccgccgccgctccaaggacgcgctgccgcgcggtggctgcggacgagcgccccgccgaccccgcgttcccggagcgccagaaccgcgggatttccggggcggtggagaggccggaggcggatgtggttgtgataggcagcgggctcggcgggctgtgctgcgccggcctcctggcgaggtacggccaggacgtgctggtgctcgagagccatgaccgcccgggaggcgccgcgcactcgttcgatatcaagggattcaacttcgattcagggccatccttgttctccggattccagtccagaggcccccaggcaaatccacttgctcaggtccttgatgcattaggcgaatcagtcccttgtgcgtcttatgactcttggatggtttatgtacctg

SEQ ID NO: 152375 - DNA, 390 bp, Zea mays
  Clone ID: MRT4577_70549C.1
accacgcatccgctcctacgcgcgcacggctcccacggcgcgtcggttccctgctccgtggtgcttgccgagctcaatcccaagctaccgcggcgtccctgctcggatctcctccctgcagcgcccaaccgaagcttctatcgtggaacgcgcgcctcctctgcttctcctcaagtggagtcttccctgcgcgcgcctacgtcctgcgtcgcgaactcccctgttgttagcaacctccaatcacatgaacacaatagccaccaccaaagcaagggtataaatctgatacatgcatacactagtacagagatggagtttgggaagtagcaagcagggaagggaagaagattaaccgcatcgaaaggttagaagcatcacaagcacatctca

SEQ ID NO: 152376 - DNA, 1985 bp, Zea mays
  unsure (1)..(1985): unsure at all n locations
  Clone ID: MRT4577_7054C.1
attgggtacctcgaggccggccgggacgaacgacacgacggagggcagcgatctcnggtttttacccaaagacgaagccgacgataaggagaacagagactccggcgagccccagccacggtgaagccgcgcgaattgcaggagcgaagcaaaggagatgcttctcgaggagctgctccggtgccaaatccacgagtggtacccggccttccgtcgccactccatccccaccgtcatcatcccgctccccgccgccttcctccgctacctcgccggccagcgggcctaccccaacgccgacgccgacgctgaagatggcgctgatgaggagccactaccgttcctccttccggcgataacttccggccgccagcccttcgcgcccatccacgcgcaccaccccgaccccgactctctcctcaactccgacttgttcttcggctccagcagcgaagacgtcttcgaccccgacgccgaccacccgctccggccggaattcccggagctggaggtggccatcgacgccgccatcgccgagctaggcggcgccgcgctccccaagctcaactggagcgcgcccaaggatgccaccttcatgtctgccgatggcacgagtcggtgcacgtgcttcgccgaggttgccatgctgctccgctcctccgactgtgtagcccacgaccttgcctccgcgcgacaatcatgcaaggatttcgtgcgcccggagggtgctcgacggaatgcccaaaaagttagtgccggttctgaggaaggtgctcgaccaaatgccgatgggattcgtggctgcgaaggcaccaatggagcaccaagtaattcaagcaagacaggtgaggagggaggcaagacaaatgatggggactgtgatgttgaagatgcaaccgaagaagaacataacgagaatacttgggtggacgatgggttccaatactaccttgccctccgcaagtggtacccaggcctacgccctgagtcagagttccgatgcttcgttcgggagcagaagctggttgctgtgtcccagagagacccatcagcttactacccatcactgcctggatggagttccgaggtgcaaccgaaaattgaggctttattcggcgcaaggattgagccacagtttgcttcaaacaattatacgtttgatgtgtatgtgaggacagatgggcgagtcaagctcatagatttcaatccatggggtggttataccttgccgctgctgtttacttgggaggagcttgaggagaaggggagagggtctgagctggagtttcgggtggtcatgcagcagggtgcagtgaggccaggattgatgacagctgtgccatatgatatgctggattggggtgaggggagtggctgggatgtttttctgaagaaggctgacgaggagcttgacagacagatatgaactccctggatggtgattcatgattgtggttcgaaaaaaaagtcttaattatgctgtaggcacacaatttaaagtgatgactgctgttttttttacctgctactgtgctacatactagcagtcacctcctttcttaaaattgctatgcagtctcttgccatttatacttttctctttttttttgttactattatggtgctacttagctgtcaatgcagatcacctcttaaggcctcgtttggaacctctaaaactaataattaactactaaaaattagttgttgggtttcaaacaccatcaactaatactacagctaattgttagctacctcacagctaacaattagttcattagcgggctcaatccagctaataatttattagctagctaactattagctctagagttccaaacaggaccttagtctgattgcgtcatgtgttagttggaacctcccagataattcgtatgtggtttttagtggagctgatgttaagtaaaaatctgcagaaatgcatttgcagtgaaacttgtagcccttttgcccagggctgtaat

SEQ ID NO: 152377 - DNA, 202 bp, Zea mays
  Clone ID: MRT4577_70550C.1
cggccgggggggaatttctctctggctcctttttgcagttgctcgggttccgtcctctacccgttccgttcagtgcttagcactttctctccattctattgatcttttgctctcctggtcggggggtacatgttaatcctcataagctccgaatggtcaggtgttctacgccgaaccggcggcgtctttgtcgtcccttcct

SEQ ID NO: 152378 - DNA, 235 bp, Zea mays
  Clone ID: MRT4577_70551C.1
gagctcactatacggtgtcgcgccctcttttttttttttcaggcgggggatgattacagccccagggcgggcctagataatatagtgcatggcaaactgaaggaccaaatgatcagaaccatcatgaggatcactcaatggcacggccagtccgaatagctagcaccacagatatctacaccagcacccacactgggcactaggccacggaaagagctgaaacggctagcggaat

SEQ ID NO: 152379 - DNA, 466 bp, Zea mays
  Clone ID: MRT4577_70552C.1
cgctcccgatgggatatacaatattataggtgcgcagcgtgtcataagtatgcgaccgagccacctgtgacgaagaagtcacgggatgtggccggtctagaaggggattaggttggagctcatccatctatacatacactgagctgtgcgacatcattcaatggatcactaatccctcgatccggagggtggctatgattagacatttgaaactcatttccgcactgatctacgatgagaccttcatattgcttaagatctttatcaagaatgttatccttgacgcttggacctacacaagagcactcccggctctaaaccgtcaccgctatggactttttgttcgtcctctgacgcctgggccgcactctatatggattttgcggcgtcgttatgtgtgggtaattgcctgtccaggtgtctcggatcttgtgggctgggtcgtttgcctttctgtgttcgtatt

SEQ ID NO: 152380 - DNA, 512 bp, Zea mays
  unsure (1)..(512): unsure at all n locations
  Clone ID: MRT4577_70553C.1
gccgttcagtcgaagaaaagcctatctgctattacctacccagaggccgtctccgctatccacctaataattaaccagtcaaattaattgcgacgatggtgtcgtccatcaccacaatcgcatgtctcctcgtgctcacactgtttgttctttctgcggcgtctgtcttggccacctccttgtggcatggaatccgcatggtcacgttaggtatcgggggcgccgctttgcagcctgaccgcgcagcgtgcgtctgggtcgcggcatgcccagctcgtgagctcccctatcttctcaggctctatcacggctgcctnccctgcgagtaactcctatcctgtcaccagaccgttccccccatccaacggaggggacccacatgactgatgcctgccctctggtcccccgccctccgtcgcatctgtcggtctacaatggaaccatgcacggtgcacaagcacgactgcatgatactacctactatctatgtcgggtacctgtgcattcggcgt

SEQ ID NO: 152381 - DNA, 512 bp, Zea mays
  unsure (1)..(512): unsure at all n locations
  Clone ID: MRT4577_70554C.1
tcctgcacgctactaagcttgatccctanacggccgggggggggggggggtttttttttttttttttttttttttttttttttttttttttttttttttttttttttttggggaagggaacttcttatttttggggggccccatacattatccaaaaaatttttttttggattaccactaataatgggggggggggggggggcccccaataatgtgtttttggtaggagggtgttgggtttttcaaaacaagttggacaaagggcaacaattgttgtatttttaaaaggggtggggggttagccccaaactggttgtaaaaagggagcaactgtggttttgttaaaaaggaaacacgaatttgtggaactagcttgttaaatgggaggagtatttggtggtgcaaaaaagcagggggggtgattgcgggccaattggttaaatggaaaaaattttttttgttaaaagtgggcgataactagttgggtaaatgggaaaaatttttggttgaaa

SEQ ID NO: 152382 - DNA, 310 bp, Zea mays
  unsure (1)..(310): unsure at all n locations
  Clone ID: MRT4577_70555C.1
accttgggcggccgccgctattcttgtttatttaattcaagccgggcaagccaattttgattcttaaaggcgaactgagaacgggaaccggaacttatacatctgagatcccgaggacggacctaagaccagagcaggggaaactaaagcagcgcccagttgctctggggaccgggggacccagccgacaccactgaattgcactggcagggtcacaagggaaagtacaatcaccgcccagaggttccccagcttactccnacacaactggacggacggagggggagtcatccatgacagggggacggcg

SEQ ID NO: 152383 - DNA, 433 bp, Zea mays
  Clone ID: MRT4577_70556C.1
gcagccctgcgctgtcgccgcctgttgagcccgagctgggaaaaggccaaggatcgtgtgccccactacttccgtcgccctcgcccgctccgccgcgtcccggacagcggcgactggccgagtaccgcctcgggcttcagctgcacggacacaccggcgacatgcgtggcatctggggatgctgggatgctgctatcgtgacatcatcgagggaccgaactgtgaaattctggacgcggaacccagaaaaggacagcgaatatggtctctccaagacactcggaggacattcgagttctgtcggcccattgggttggatacctttttcataccgttttcctgaaggcggaatcagctctggtgcaatggacacatttgctttcctctgggatctgcaaaagcgagaagttgcccagagcgatgaacgcccaca

SEQ ID NO: 152384 - DNA, 109 bp, Zea mays
  Clone ID: MRT4577_70557C.1
gttgggacacgagagcaaacgcacaggccgagggaaatcccaggctagagtggcgcgccggcccaacgaagcacgaaccggaccgaagcaccacaagctcagcggcaca

SEQ ID NO: 152385 - DNA, 1043 bp, Zea mays
  Clone ID: MRT4577_70558C.1
cattgggtacctcgaggccggccgggaacttactccatcctcagaccgagaagaaagaaataacggcacaccgtaccatggcatctatttctaagtttctacttgcactgttgttcagctatcacaccctcattgctcacgcagcagacgatcgccgccacaaggttctgtccgttggctctctgatgaagtcttccacagcatgctccgagcccaaagtgactccaccatccaccggcgtcacggtgccgttgcaccaccggtacgacccatgctcgcctgtaccctccaagaaggtgcccaccttggaggagcggctccggcgcgaccagcttcgagccgcctacatcaaacggaagttctctggcgccggcgacatcgagcaatcggacgccgctaccgtgccgaccacgctgggcacctccctgagcacgttggagtacgtgatcaccgtcggcatcggctcgccggccgtgacccagaccatgtccatggacaccggcagcgacgtgtcgtgggtgcagtgcaagccgtgttcgcagtgccactccgaggtggactcgctcttcgaccccagctcgtcgagcacctactcgcccttctcctgcagctccgccccctgcgcgcagctcagccagagccaggaggggaacgggtgcatgagctcccagtgccagtacatcgtcaactacggcgatagctcgagcacgaccgggacctacagctccgacacgctcacgcttggctccagcgccatgacggacttccagttcgggtgcagccagtcggagtccggcggcttcaacgaccaaaccgacgggctcatggggctcggcggcggcgcgcagtctctcgcgtcccagacggcggggacctttggcacggccttctcttactgcctcccgccaacttcgggttcgtccggattcctcactcttggaacgggaagttcgggtttcgtgaagacgccgatgctcaggagcacccagatcccgacctactacgtcgtgctcccttgagtcatcaaggtgggaagtcagcag

SEQ ID NO: 152386 - DNA, 463 bp, Zea mays
  Clone ID: MRT4577_70559C.1
ggaaaaaaacaaaagggtatttatttcccacaaataaacttttgatcatgcttaagtatatgctaatacataggggggggggcccactaactagaagaaccccggttcctagggcgtgttgggataaccaaaggtttaagggcctctgcattagctgaaaaccggtgcaatttaaaaaataaaaatcagctgttttttttttgcttgccccaaaaaggttagtttttggaaaaacactaagcataaggtttcaaaccggggcacgggagcagcagggccataagccccaccccataagaaggggggggactgaatccacaatttttttccgaagaaaaaaaaaaagctcgggctcctcaccgaagggcaatttgtaaacctcccactccttgccttccaaaaggggcctcccaatttaagccaaaaaaattcgcctttaaaaattcttgaaagcaagggggat

SEQ ID NO: 152387 - DNA, 371 bp, Zea mays
  Clone ID: MRT4577_7055C.1
ttttttttttttttttttttttttttttttttttttttttttttttttttttttttttttttttttttttttttttttttttttttttttttttttgggggcaaccaaaaaccatgctagcattacgggtccagagttaaaggggaccccggacgttaagttaaaaaagcaacatttcggcgggggtaattcgctaaaaaatccactcaaagggggaacaaaaaattggaactacacggaaaaacccactggaccaaaaaccctttccatgccaagaaaatccggggtttaagtctccaacaacccgacctttgcgggaggcccccacaaagggctgggctaccccccagacttaaaagcttccatcaggg

SEQ ID NO: 152388 - DNA, 269 bp, Zea mays
  Clone ID: MRT4577_70560C.1
gtgagtgctaggcgatatatctgctatagggccacctagatgcagtacaatggacgtggctctacaccgtcctagctggcaaacagcgtgtcgcacccaactgaatcgcgcggcagaatatccctctttggccagctggcgcaattgcgaagacgcccggactgatcgcccttccaaacagttgtccatgctgaatggctgaatgggacgcaccctgctgcggctcattcatgctcggtctgtgtggcggatacgcacagcgtgaccgc

SEQ ID NO: 152389 - DNA, 283 bp, Zea mays
  Clone ID: MRT4577_70561C.1
gatcatgggccagtgcgatgcaccctggttaagaacacctgacaaacacaccatccgggtatttttttgcgaaaacagatagtccattcctgctctatccaaccacagctaaaactaaacggatcagcacacagtgccagccttgttgagaggcgtgagtataacttggactgaccctaggcaacagagctacaaaaccagctcagtacataatctggtcatgagagaagcagcaacatactcaataaacggatcactcacattgaaccaaacaagggccaca

SEQ ID NO: 152390 - DNA, 291 bp, Zea mays
  Clone ID: MRT4577_70562C.1
ggccgggaaggcctacgagctcgatactccatctcgaccgtcattcaccgggaagctacgctacgacgaatcatggcgtccgtcaccgcccgaggcccggtcgcagtactgcgaccgacgacgacgttggtattccttggccactctagacgactcggcctgactggtaccgcgacgacgacgaggagcagtctcaaggacctacgccaaaggcgagtggttccctccccttgcctcgcccgcctacctcgacggtagcctgtcgggtgacaatggcttcaacccgtgggc

SEQ ID NO: 152391 - DNA, 1336 bp, Zea mays
  Clone ID: MRT4577_70563C.1
gctgtgcgtacctcgaggccggccggggttcccgcaaacagttctcctctagggacggatcccctttcccccaactcccccgcaagcagccgcgaagagagatcccgcgctcaaccaccgcttctcggccgcggcccccttcggccctccttccctcctttcctccggtggccgccggggacggggagcgaagaagcctccatcactcctttcctccgttggtcgccggggacggggagagaataagcctccctccctccttccctccggtggttgccggggacggggagcgaatcctccattcctccttcctctccggtggtcgccagggacgacgggatcgaagatgttctatggggccatggtttgggatccgtggctgatcgtgtcgcagatcgtgtgcctgcagtgcctctactacctgtcgctgggcgtcgccatggcgctcctcgtcggcacccgcgtcccgcgactcacccttctctacttcttcgacttcgccacgctcaccccgcgcacccccacgggttggtgcgccatcgcatcattcattcttgccgctgtcgcaggtgctgggttcatgctttatgtgattgagagagccaagaagtgcctggactttgcagcaacactctacataatccatctcttcatttgcattgtttatggtggatggccagcttccattacatggtgggttcttaatatcactggtttggcaatcatggctctcctaggtgaatacctatgcatccggcgggagttgaaagaaattccaatatcacggcttcgtgcaagtgtttaatctcacatgctaaaagattataggtgtttcaaatggtgttgccccaggaggtgtttgttaatatgttccttaaggaatacaatgaatgctttattccgtggtttgcaatgtgatacttctcaaacttcgcatagagcgttcatctgatacccaatctcccagtaggccatgataaactgattggtctcagagttcccaccaacggaaatggcacctcagtttctaaatcatacattcaagtcctctttatgaaaaaaagcctgccctgcctcttatgaaaagaagtgttcctcccttgcctatgttctagtgacagctcgctgcttgacaacgtatgactagatatcaacatgtgcattctttagtgatatattgttcttacttcttaatgcactcatggactcttgtctagaatgtattttgcaaaaatatatctagtgttatatgccaaaaaaaaaaaaaaagcggcctcttgtctgtatcttgcaaatgctaggggcagtgttatatgctaattctgtaattcatgct

SEQ ID NO: 152392 - DNA, 199 bp, Zea mays
  Clone ID: MRT4577_70564C.1
tggggcggcccccctttttttttttttgtgttaaactggagatcttgagtgatgctggacttaatcgaagatacataggacagaatacatgctcgggacggcgactggatggactagaccatatgtggggcactacgcactccatgtagggaggacagctgcaggctggctgcaccagcaccggatgatgaggcgagat

SEQ ID NO: 152393 - DNA, 277 bp, Zea mays
  unsure (1)..(277): unsure at all n locations
  Clone ID: MRT4577_70565C.1
gggtgttcttcacgctcttgccaatcgatgttaggcgatcactgctgggtcaagctgagtgcgcaagataccctcctaggagacgagcaccgcgcgcagccaccgtcgttcggtggccgagaagaagccccgagttcgtcgaggccgcggagtcggagcgcccacggtgcagctgcggtacgggntggcgacccctgcaactgctgatcacatcgatcgacgaccatggatatgattattatctatctagcttgtggtggtggttgaacaataataa

SEQ ID NO: 152394 - DNA, 287 bp, Zea mays
  unsure (1)..(287): unsure at all n locations
  Clone ID: MRT4577_70566C.1
ggggggggagccaaaaaaacaagcgggcccccccgcacaagagaccgccctgcacatcgtgtgccttnaccccccccagggcccccaccctgggggaggccacatccgcaccctcacccccttcctcnncancgaacagagggggggggggggggggctctaccactacaanaactccnccagcngcttctccacgaagctcaccccccagcgagggaaggatctcaaggagcaaccangtgttctccaagttgtgcccagccanacttaccaggtacatgggcctg

SEQ ID NO: 152395 - DNA, 786 bp, Zea mays
  unsure (1)..(786): unsure at all n locations
  Clone ID: MRT4577_70567C.1
cgcgccttcggaaaatgtgaatgagcatttcgaggcactggcaaatggaggggagtttataacacactggtgggcattgctcacccacgctggcgcactagagagggctccaaggaatgtcancaaaatgacatagaaaatcaatgggaaggatcatcatcatatggttgcccatctacaactcaggctgcagctgcagcctgtgccacaaatcaacagccaatggctggggaccgtactgtgcaactgattgaaatgaatgtcggagacatagaagatgctaagactgacaggcattatcctggagagatttcatatggtgctgctttaaggcttcgtcgtgcgaactcctacattagcaagtgtagagaagctgctaccttagccaccagcgccacgattaaaccagcaatacgtggaaactgtgagcaagtgaggatgatgattcggcaacaagcatatctaggtcaaaatgtggaactcgcaagtcccagcgcaagcactgctccaagtgagaacaaagagattgaaattgtaatagcatgtgagtaatgttgctatatatgtgtcaatgaatgaaatttgtacatatgcatggggcaacattcacaggttcagctggtcatttgtttgtggagccatgaactattatgaagttgtcctgttattctgaaagtaaaagagtgcagagatcatatgtaatgtgacagatatttagtatcaaaatagtgtacaattgtcttaagatgaaattcgtatatatggggcatcttcattcacaggtcc

SEQ ID NO: 152396 - DNA, 794 bp, Zea mays
  unsure (1)..(794): unsure at all n locations
  Clone ID: MRT4577_70568C.1
cgatctccgtatcgccggccgcttcctctccccctcttgcggccgtcgactcagccgctttcttctttctccgatccattgctcacgactgccggacgactgccagtgccatggcgactcaagcacgcgagaaccaccgccattcttttacgactaaggacgagaggagtggtgaaggtgcggaggatcaggcgatcgacgactggctcccaatcacctcatccaggaatgccaagtggtggtactccgcgttccacaacgtcaccgccatggtcggcgccggcgtgctcagccttccttacgccatgtccaagctcggctggggacctggcatcgcggtgctgatgctgtcgtgggtcgtcaccctgtacaccatgtggcagatggtggagatgcacgagatggtcccggggaagcggttcgaccggtaccacgagctcgggcagcacgcgttcggcgagcgcctgggcctgtggatcgtcgtgccgcagcagctcatcgtcgaggtgggcggggacatcgtgttcatggtcaccggtggcaggtcgctgaagaagctccacgacgtactggtctgcgacgctgccggccgcagntgcagtgagggcggcggcgacatcaggctcacctacttcatcatgatcttcgcgtcctgccacctgctgctctcccagctccccaacttcaactcccatctccggcgtctccatcgccgccgctgtcatgtcactcagttactcgaccatagcttgggggagcgtcggtgcacaagggcaagctgcccgacgtggact

SEQ ID NO: 152397 - DNA, 857 bp, Zea mays
  Clone ID: MRT4577_70569C.1
cctcgaggcggcgggactcttctgacacttccctttgcacgcattttttggggtttttcatgatggtcggccgtttctccttcttcgtgcgcgtcttgcttgcattttacacctcgctcgccgccgcaaaggctgcccaggagcctctcgttcagcaggggtatcgcgttggagagaagatccccgtgagctgcttgaatcggacaattgacactggcgaacacatcaccgacgctgcaggccagctatcatacatcccattcccgacttgcaatgaaaccggccgccctctggagctcctcttcggcatagagaaggagatcaactgcacgatcgacttcatcgacgaccctttcttccacctgctggaattctacgtccacaacgacgcgcccttgacctgccgcataccgaccaagcctctcccgcccagcgctttgaaagatgagttcgagaagggcaccacggaagaaacagacggacaaggcagtttgagcgatatctacacgcctatggtcgtcgcgctggcgggcaccctccagctcagccacttgcacgttgctacgagcatgaacgtgctggttcacgcggcgcctaaatcggtttcgccggggacgattgcggctgcgactgcgtacagtatttctcgcgagccgcctaccaggattgtcattggcgatcctttgccgttgaagttcagtgtgaggtggtatcctactactcagctgccgagtggatggactggtgttggaggacatttgacttttagcacgttggtttactgcatgctcagcgcgttggcgagtgctgctatttgcgtgacttacttcagaggtgtggaattaccgcgcaggctg

SEQ ID NO: 152398 - DNA, 595 bp, Zea mays
  unsure (1)..(595): unsure at all n locations
  Clone ID: MRT4577_7056C.1
gggcccattttttccccgctttttttttttagtacatatgatagtcgcaagattttgtttgtgatcataataacaagattaaaatggttccagcgtcggcctacacttatagaccatgcaaaagaacacagaagtcatgatgaatctcacacgaaatgagatgaatctactactactagagctagatataagccatcctagagagcattttgttcttcggcaagagagcaatttgacctccggcgagcccgattcaggttggattcgcctgtgcaccaccgaaaagtcgccgcctaccctgcatcctgcgccgcgctcgccgcgccatcgtcgagcacctggacgcgatcagctccgcggcggccggtagcagccgtgtgccctcgaaaagcgcgctcctctggtactcgagtacccacgtctccggttccagccgcaccgccgccgcgctctgcctccggtgggcccaggagctcccgttgctcgcccgcaccgtcggtcacacctttccgtcggaccactcggtgatctcgccgganaggagggtgaggtgccgcgccgagagtgctcttgggaggagaccggaggtgcggaa

SEQ ID NO: 152399 - DNA, 277 bp, Zea mays
  Clone ID: MRT4577_70570C.1
caaatacttctacctttaccattttccaacaattcttacaagctcctataacttcccttcttccccacaacctctcaccatcttaatcttcactatatcaaaacccaattcttcaaccctaaaccatccaacattcaatcccatatttcatcttacctttatcacccttgttcctccaacaatcatcatccctaatacatctcttacctctcgttcatttattttcacaaaacattaatgtacaacaactacaccaactatttgctaacaaaccctt

SEQ ID NO: 152400 - DNA, 367 bp, Zea mays
  Clone ID: MRT4577_70571C.1
aaggaaaaggcggaacttttatttccatgaaaaaaaagggacaggggcaggggccctcgaccagggaacattggctccacaaagccaaagggatgctactttgattaagcagaagcattccttattggtccataacaagaaacaactggcggtatgcaaccgactacaagggtccagcccagcactttactgaaataaagtttgaaaatatactggtggcataaccatcctcaccggggttacaaccagcagcatggggtaattttttccggggttcaagtttccaaaccggtccttcgggggcttcaaagcattgcccaaattggttatgaattcttcgacttcattgggaggcatgaacgggggg

SEQ ID NO: 152401 - DNA, 2154 bp, Zea mays
  Clone ID: MRT4577_70572C.1
atggaaatggacttggatccggccgctgaggccgcggagataaggctgcaggaccacaacgacgccgaggatgctcgtcgtttcatccttggcagcagcgcagatgctgctgtcaatttggacgccgagatagatcctgttgctggtggtactgggacgggatccacgagcccgaccaatgagagcacagttgaaggtgatagagcagggaagaagaggtctaaagcttggaatgatttcacagaggtcaaagatttggtgaatggtaagagggtaagggtctctgccatatgcatccactgtaaggctacattttctgctaaatcctctggtggcattggacatttgctacgccatgttgatacttgtgctgctaagaaagaaaaggaacgatctggtagaattcaatctgttcttaaatataatcctgatggttcactaatgcgttgggagtactctgatgctagggcacaatatattgtgaattctcataatcctagatttgttaaaacatctagacaaactattgctagagatctaatcaagctttataatgaacgcatggacaaattaattgaaactttgaaaaagtctgtgtcatctattgctattacatctgatatctggtcaggaaaggctaaagaagattacataagtgtagttgctcattatgtaaattcagattgggagttagaaaagagattgctaggtttaagaccaattgaagtggctcatactggaagaaacattgctgatagagttcatatggttgttgatgattttggcatttctgataagattttctctattgtgctagacaatgcttcagcaaataaaactgcagtatctgttcttaaacctgttttttctgcttatattggtcatttgttgcctgtagaagttagagaagaggatgaattagcatctatttttttgcataaacgctgtaattgccacattgttaatctgattgtcaagtctggtttgaaacgactgaagaattatttagatgattttaggactgcaattacatttctgaatgcatctaaccaacgtattgctgcatttaaaagcttttgcttgagtcttggagtgcctcctcgcaagtttggtgttgatatggatgttagatggaactctacttacttaatgtttaagcatcttgttccttatcgaagcactttctccgtttttatccaaactaaccacccagttcaaagagatggttcttttttgttgacagatgatcactgggatgttgctgagaaaattctatcttttcttgagttgttttatgatacaactgttgctttgtctggaacttattatcctacttcagcattaatgcttcatcatatacttaaaattgctagacatctaaatgcttttgaaaatgatgctttgcttagagatgctattgttcctatgaaaacaaaatatttgaaatattggaggaagatacatgttctatattgctttgcttttgtattggatcctagagcaaaaatgagggggtttaataagcttcttatgaggttgtctgggcttaatagaactgattattcaaggtatcctacatccattcgatctaaactaactaagatttttcagatatatgaattgaaatttggtgaagtacgcttgagtgcacaacaacataagagtgctggtacggcaggtaaggctacagaggcatgggatgacatatatggggatgatatcctcatgccatcccaatctactatacctactccttctgtatcatctactgctgctgctatatctgagttatcatcatatcttgatagtgatactgtgacccaatttgactctgatttcaatcttctaaactggtggcaacggcacaagttgacatatcatgtgctttctatacttgctaaagatgttctaactgtgcctgcttccactgtatcatcagagtccactttcagtttagctggcagggtgcttgaagaccggcggcggcgcctaactcctgatatggttgaagttttgtcctgcataaaggactgggagctcgctgacttgtgtagtcagcacacggtggaaaaagacaccaaagaacttgaagttgtttttgaagcaatgtacctagaagaaactggtggaggcaaagaaagaagaggtggttga

SEQ ID NO: 152402 - DNA, 304 bp, Zea mays
  Clone ID: MRT4577_70573C.1
gttttgttttttcttttttttggggggtaaccagacatacttgacgatggattccgtgctctggcgcaaatgagaaagcatacttaagctgtctagatgaattataaactcctgggctaccaacgaggcaccacatgctactgtcagtaaccatgaaggagaatgatgcaccagagcagtctctgataacatgatcaaccataatattacggttctcagaagatgcgatacgatgcattccagctcgccaggtggccagccgaagcatttacatgttctgcatggaaacagactttgcatgccc

SEQ ID NO: 152403 - DNA, 513 bp, Zea mays
  Clone ID: MRT4577_70574C.1
tatgacgtaaagtgcacgcgtccgtaagctcggatcctgtatagcgggcgccatctactcgttcgttctgcacactgacaatgcccacagggacgaaagcatgcaagcaaatccgtgctctaatggacctggccgtgagcacatgctctcttatctacaaatcctcgtggcatgctactcggaggacactataccaatacactgtgttctacggaagaccgcatacaacatgtgcatatagtgctggctaactcaacgcagacgaatccggcagcctatgccaaggcgccgaccgtgacatgtacatggacgcggtgtgcgaggatcccacaagcaccctgaccggtgactatggccgtgactacggatgcgacactggagaactgggcgaggacgccgatactgatctcattaaccttgagctgcaggaaatcctctggctctggggcaagctcgacccgctcgaatgtgtcttccgggaactgctggtccacaacctcctcaagcgggcca

SEQ ID NO: 152404 - DNA, 257 bp, Zea mays
  unsure (1)..(257): unsure at all n locations
  Clone ID: MRT4577_70575C.1
taannncacatncaccnnacatttaatactttataataancacaanccattaaagcgtatttattataaaaaactatcccaccccccaanaacannatcttccattttaatttgttctactattcaccttcgaatacatttctattatattattccccttacatattttttttcattcctacacatactaccatttttcctcactcctacatttacttaaactataattactattctctttttcccaatttatacct

SEQ ID NO: 152405 - DNA, 248 bp, Zea mays
  Clone ID: MRT4577_70576C.1
catttgaatcatacttttgattacttgttgttcagcgggaaatgcgctggtaattggtgtcatgagcataggatgctcaaagtggatccgccatgttctcttacaaccaaaaaatcacttccaactattttggtctgatctgaaaaaaaactgccccctcctagtaaataagggcacctttgggggacctgaataaaaacccatctcgacacaactttttttttgaaaaccttcaaaaccaattatgt

SEQ ID NO: 152406 - DNA, 1878 bp, Zea mays
  Clone ID: MRT4577_70577C.1
ttgatcgaaatgtagtgccagcctgaatatacgatcgatttttatactgccaaacaaatgtgacacattttaagcacatgaatagaactacaggtatcagttccataagcaatagctgacacagacacagctgacagtttcattactaccaagtgaataaccaagccatccaaaagccacagtgcatggatacaaaactacaagaccagaacataagcagtaatgtgtacgctgttcatgagactgacatctaagtttcgaatagcaattgcggccaaaacaatctgtttgaagtttcctttgatcaacagaaagggaaaggaaactcaaggcaagggcattcacaaaatccatgcaaaggcagcaccggaaaagtggagctgcttgatcccaaaactggatgcacatcgcagagcacatcatgcaggcatcagcacaagccaaacagagacctcatctccatccaatcttatatcctcggttgctgtctcaacaatgggacaaaaaaaaggaagaatctgacggacctccgaccactagagcagcaacataccatggtgtgttattttgcgtcccctgcacatggatagcatgaaaaagcaccccgcctctaaaaatgatttcatctctcagctgcctcgcgtaggtggtggtggcgccgtgaagtcctgcctgtagcccgaacagcacgctgtcccctttgagtgctagctgactcatgctgaatgtcagaagcatcagcagaattcgttgaacgtctaggcctgtccctgtgtcttctataagccctgctcaatgagcctccagtagagattctcctgccatgggtaaacagggatgccaagaagtcaaacccctcatccaaaccatctgacgagtcgtacaggtcaattctctcattcaaagtacgatctaaggatgtgaagaagttgagcctttcccctaagtcaaagttatctccatctgagagcaaatggttgttgccaccaccattcaactcaaggacataatcccccatgatcacagatcctgggttcatggacctgatagtgctgatggcatcctgccgctctctctcacattcaaaccttttccactcatctgcagtagcaggatcaacttcacgaggttttgctgtagggtgcttcgatttcacatgcttgcaaagctccttatacgagccatggaatgagcacccatcatgcatgcaatttctccttttccggttcagatactgacgagcaggctcaaccacagtccatcctttaacctctccacggcacagagggcaggcaagttccattacacatggctggttgcttgatggcagtgtgtttgaggataatggaaggccagatgcagactcagctgaaacaccaagagccattttttcctttgcataagctcctttaaagtgttcaaggcagttggaatgacggtagttggtaccacacatatatggccggcagcccttgtggtgagaggtacacaggaggagaacagcatcatgtggatgctccaagcaaactgggcaagttgctcctttccattcattcttctcagatgtcactgacacatcatttcctttgcttgttcctttcgtctcacaggagctcaagggcacatctgaagaagctgacctacgttgacgagcttggaggttcctaccttttggtgatcttgccatttccaaagttctggctgtccaagtcaactggtgggtgttcgtcgccggtgaaggtccaaaggtggagactcgggcacctggcgtaggtcggcggcggcggccgcccaatcgtcagctcgtcgccaccagagacaagaagagagtcgcagagcgcaagggaggtaggagaacgagagcccaacccggccggc

SEQ ID NO: 152407 - DNA, 662 bp, Zea mays
  Clone ID: MRT4577_70578C.1
cccaacttcttatcagaaacagcagccccaaatagttgcatggaaaagaagccggagtgcactgcaaaatgttagagctgtcctgaacagtctgagcatcacaactgatagggatagtgtagcttttgtgcaaattcacaactaaacctgaggcctctccaaagcaatccaggatcatcttgacacaaactagatcttctgtaggcttgacaaaaagaaccacatcatctgcataaatggagagcctagatttcacgttcctgatggccaaatcatgcagcaatcctctcctcatacagaccatttctaaatgaatgcatgtgcaagaaaggatgcatatgaagtgtacttaaccatgtctgaaaaattatattgatattgcaaaagcctattctatgtatgatcatttatacttgtgtgcctagtgttgaatgtatcatattgttaggcgtcgtttttgtatcgaaaataaatcgtgacttgagtgtgcactagattttgatctgtaatggcaagttagaaatgcatggtaaattggtttgctagtaatattctcaaaccttttctggaacttttatgcaaatttgcatggtgtttacatttgggtgcatggtgtttacctttgtgtgcacttgtgcctatgtaattgtagttagcgtggc

SEQ ID NO: 152408 - DNA, 301 bp, Zea mays
  Clone ID: MRT4577_70579C.1
cggttccgcattcccgggggggtgttggtggtcagggcagctacagccttgtgggggcggtatttccataacacccaagccttatctttgctgttgatagctatgacatagatcgtgttgttgaagcaaggttgagctccacaggatgctgaataggatgaattgagggatgctgtcttgctcgttttttcaaacaagcaagactaccaaatgcaagaacgctgtttgagatcacctttaagcttggtcttcatttctctgctccaatgccactggtatattcatagcactcgtgctacca

SEQ ID NO: 152409 - DNA, 515 bp, Zea mays
  Clone ID: MRT4577_7057C.1
aggaacaaactgtacataaatcctatcatgaccctttcccaaagtaagcacacattctatacagtggatctgggcaatggggagcttgcaaaatagatattagaagcatgagggttacaggtcacacggccactaacagggtcccaggacatctccgaactcaaatgcacttttgaacagagagcattccgatgtacctctatggactcagcctggagggtgactacccaccccaattgtctggtttaaaagcaagccttcttcagctggggcggacgtggcctgagcccctgctgcccaattgcataagaacacatcaaagtctgcacagtcggggcccaaatccatctctcgatcagaccacccttgctagaccaatgcctaactggcacgtcaatccttcactatttcacatttaagatgcactatcaagaggtggatctaaaaaacactggccaggcgagtcatagtgcacactagttactcacgcctatgaagtgaactaggacatgcct

SEQ ID NO: 152410 - DNA, 288 bp, Zea mays
  Clone ID: MRT4577_70580C.1
ccaatgcagaatgtttaatggagcagttgagtcacagctcataagtcacaaaaccatattataactcaaagtcaaatatgtattcgtttgccagatatatgcgtcggaatataagagctcccaatgccaaagtcacgatgacaatcagtacagctgacccaccatgatcagtgtggttgtctcttggctggtggccctggattacatctggtgaagtagacaaccttctcttgactctgctgctgggcccggacgctgtcgagggctcatggaggtattcgtagctac

SEQ ID NO: 152411 - DNA, 372 bp, Zea mays
  Clone ID: MRT4577_70581C.1
ctcatggcaaccgcatgcagtggtatccttgtaggccgtgcgagaccgagccagggagcaggtatgtgcagtggagcggcacctgacatccctactgcaagtacgtacgggcgcacatagcatgctgcaaatccgcgggcggatctcacggttcgaggggctcttcatctcacgccgccatacccaccgggaaggagaccaaagacccaaaggctctgctgggcagcacagacaactatgccagtgcactgctcctcacaaatgctaaatctaatgcattggacaaagtctaatctaagattaaagcgatcgtaaatgcctccaagacgagcccgttattctctcagttcataaaatactcgccagttgcaa

SEQ ID NO: 152412 - DNA, 378 bp, Zea mays
  Clone ID: MRT4577_70582C.1
acaggcgtattcggactgctctatcttcgctgactcaaagtttcttctcattggctatcgtcgcacgactgcaggtacatcctattccgttgacaccatgagggagtgcatgtggatacacatctgccatactgggatctaggttgtgaacgcatgatgggagctcatactgcactgagcatggcattcagggtgacgggcagatgcccggtgacaagaccattggggggggggatgacgttctgaatagcgcccagacggacatggtcgctgagatgcttgtctgtcgcgctggagctgcctacatggagccagatggcactgacgtggggtggactggttgcatagcgcgcgctcttccacagtgaggagcttatc

SEQ ID NO: 152413 - DNA, 589 bp, Zea mays
  unsure (1)..(589): unsure at all n locations
  Clone ID: MRT4577_70583C.1
ttcagttgttattgaggaaatggcagaggatgatgacaaggctggctgtgtgctcgaagtgctgcaagggattagacgaagcaaatccgagaaaatggcgatgagtatcaactccagcttgttgcaagaaatgcacctactgaattctcagaaagggaaaatgaacatggattgactgtatcattggatgaatcaaacaacagtcctagaaattgttccaaacagagaatcgggggaaaagacatgtgagcactatgcnacataagacctgaagagaaaaagtggagccattagcaaccgtggagatgcttcaagggggacagctgagattgatggagcgtaaaagaaaaagaaaaagaggcaaggacaatgcactgttatggacacaggataagtaaacaacgaagaaaaggacgtttagctacacgatactacagctgatcctgttcggtataaaacagaactataaagaataacatgaccaaaagtgctgttagatggtgataccactgagcaatctgctcagaacaacattgtcaataaagacactgacgaggcaagtgcgcacgacgcctattataagaacaag

SEQ ID NO: 152414 - DNA, 384 bp, Zea mays
  Clone ID: MRT4577_70584C.1
gggcaaagtttggcacacccctaacagtatagaaggttttggttgaaattcaacatatttcacacttactttttgagggtgtcctgatcaatgataacacccttcaagtaatcactgataccaaactagggtacatgttcctatgactctgccttgggctgcaaatttaatatggaatcctggagataccagctttaagctccttattcccttctgccccctttattggttattttatccaccctttttcgtccaatccaaattcttccacccctgaaattatccgatccagtccttccagaagaaccaaaggatcaagaacattcccaccacttcctatcttgtaactaaggggtacaaatccaggcatgttaactctttaaa

SEQ ID NO: 152415 - DNA, 980 bp, Zea mays
  unsure (1)..(980): unsure at all n locations
  Clone ID: MRT4577_70585C.1
cccacgcgtccgcccacgcgtccgcccacgcgtccgtgctatctgaacatattgctgactgggtcagggaggagagtgggaagaagattattttccacaccttcagtaatactggttggctttgttatggcgtaattctagagaacttgcaacagcatgatccttcagcagtggactaaattaaagcttgtgtagtagactcagcacctgttgctgcacctgatcctcaggtttgggctttgggcttctcggctgccctcatgaaaaaacgcagtgtcaccacgaagggactaggttcagatgattcaaggtctgatgtcctagttgtggagtccaacaaggagctcaagctgggggcaacagaggcggttatactgtcagcgttagagagtttctttgacgttgttttgaactatccaaagatcaataggaggttgtgtgacgtgatggagctcttgtcctggaagcaacccaagtgcccccaattgtacatatacagctccgccgacagggtgatcccagcgaaatcagtggaggcattcatcgacggccagcggaaagccgggcatgaggtgagggcctgcgacttcgtgtcatcgccccatgtggaccattaccggagcaatcctgggctgtatagctctcagctggccaacttcttggaggattgtgtgcttgccaagcgctgtgagggtgcttgcacatcatgattgtctcttttatttgttcctggtcttgaattggaatgcaccagggacactgacatacgtgggttatacatgattttgttctctccttgttttaacggtctttgtgggtgacctttttttccccctcttgtaactcttgtctttgtggttggagtctgggcgcacaattgtaaaaacgtgtgaggagaaataaccaaatgaaaggagaggaaattcttttttttttatccaaaaaaaaacacctgatagcctgaattaaaaaaaannaaa

SEQ ID NO: 152416 - DNA, 425 bp, Zea mays
  Clone ID: MRT4577_70586C.1
gccgccgccgccccctcaatcccccggccccgccccccaactccctccgcctctcacgcgcgtcgccggccaccgcgcccctgctgtctccaccccgtgcgcaatctctctccactgggttttgaggggaacatggcgaggctggtgtcgtcttccctcgtcagggggctcgtgcggtcgtgccgcgcgcccagcacggcgactgtgtcacgaccaactttccaacaggtcatgacctactcatcaggaatcagtggtgattctaacgcgaatgggggcacaagagcaacacgagtaactgctgatactgatacacatcaagatttccagcctacaagcaaaggttctgatatgtctttgcaagacattgttgctcaggatatcaaagagaatccagccattatcttcatgaagggttatcctga

SEQ ID NO: 152417 - DNA, 388 bp, Zea mays
  Clone ID: MRT4577_70587C.1
gctgtgagagccccggcgcgctgggggggctccaacgccctacgactcgcgcgagagccgttgcgggtcccctcgtcggcgggctgctgccaagatagagtgtagaaatggctgatatgagaggacctccaggatcttgtgagcgacgatcctcatgcaatggtcagagggtgtgagtggtggcgatcatgcacacaaggggcggcccatccctagtgttgtgggccgatcacagacactgctggcaacataggggagggacagatggacgcatatgtagtctatgaggaacagcccaagagagggatcattacgcgtgacaaaccccagagcgcacgggggtgtgagaaactgggaaaggatggagaaaagctggcatcagactttg

SEQ ID NO: 152418 - DNA, 228 bp, Zea mays
  Clone ID: MRT4577_70588C.1
gggggagtacaagggaataggggcagttggacatgcgcggaaacgaggataaggactggccccacttcgttgaggcgttggagccatactccgtcaccgccttcttcaccggtagctgtaactccatcgccatagtgaactacggcgcgttgtctacatggggatggacccaacgctggaggctcgggcacccgccggataccaagacggagagctccccgggccccg

SEQ ID NO: 152419 - DNA, 552 bp, Zea mays
  Clone ID: MRT4577_70589C.1
atgatctaaattgaaactcatatataacaataaaggattgtaattgttacattattttagtttacaacaataataatatatggtatatcctagctcacagttgaatctctcaaaaccccactgtctcactcacactagataaaaaaaaatagataaaataatagtagcatatatttaaaatatatatatatatatatatatatatataaaaaataaatcttgactctttaaaacaagaaaagtagtatccctaataagacaatgtgaagttgtgcatgcattaaaattgaaacagaactactagatttctggtcgtcactagctttgtcatcatcattttcttctttggggtgactgaaattggaaggaacaatagtgtctggtgctgaatcatcatctccagcaacaggactagcaggagatggagcatcttctggggatttaagactctttggcaacccttgtccataggtcacatttattttgaagtgttgtccactcttgcattggtcaccatcataatcacctgagaagaagtatgtcatgcctttc

SEQ ID NO: 152420 - DNA, 375 bp, Zea mays
  Clone ID: MRT4577_7058C.1
cccacgctttttagcgaaccattggtccgatgtagcttgtggcgagggaaactttggaacctagggcgtgtggcttgtgtttaaccaacatagctggggctacattcatttgaagagagctggcgattgtacgtgattaacaacatcatgacgtatttggcaggcgcaactttattaggctgacagtaaagaggactattagaatgctgaatgtctctccactatatttgcgagttcttataacctaaatgataggggcgccctgtatatatgtattatgcaccactacaggttctttctacgagagagctatgctatggtggatcatagactcaattcagtgcacgacatagtacagcccaaagattgaacaag

SEQ ID NO: 152421 - DNA, 264 bp, Zea mays
  Clone ID: MRT4577_70590C.1
ttacttcagccgataccccatcagctagcaggtgcgttgcatttacctggtcgcccgctacgcaggcggagacaacgtggcgatcacagaggacgccgtggctatacgcgtacggcaacgcggtgttcatcgtctgccgctttcaaggtggttggcaactacaacagtgactccgtctggctggaccccgacaaacatcgcgagctacttcaaccgcttggctgagtacgctgctgattggtgctacttcgaggctctagatga

SEQ ID NO: 152422 - DNA, 859 bp, Zea mays
  unsure (1)..(859): unsure at all n locations
  Clone ID: MRT4577_70591C.1
acccacgcgtccgcccacgcgtccggcacaaaacacatcaccgcatctttttccttccgagctgtacgtatctgcagagagagagagagagagagagagagagagaaagattaggtcagagaccatgaagcacccgaggccgacggagcaggatgtgtcgctggcgctgtcgctgagcacggactcgtccacgacgacgtccgactcggcggggacgccaccggcgaagcgggcgcgggcgcgggcgcggcggcggggcgccgtggtggccacgtcgggggagggcgagttcgtctgcaggacctgcagccgcgccttcccctcgttccaggcgctgggcggccaccgcaccagccacctgcgcgcgggccgccacggcctcgacctcggcgtcgtcggcgcccgggcgctcaagcagcacaagcagcaggccgccaacgccaacgccaacggctgcgaaggaggcaagcagcggcacgagtgcaacgtctgcgggctcggcttcgagatgggccaggcgctgggcggccacatgcggaggcaccgcgaggaggagatgggcgccgccgacgcctgggtcaccctctggcgcaccgaggcgtcgcgcgccgccgacccgcccgtcttgctcgagctcttcgcttagctgattagatgatccgtagcgccagccggcattgattagtataatccacccagctggacatgtaaatcttcttagtggctgcatgcagctggttgcttgcttgctttgcttctgtaattataattacgatggtacgcacgtagttggattncnnnccctngatgattcatttggttcatcccacaatctacatgcatccgtcaaatatcatct

SEQ ID NO: 152423 - DNA, 521 bp, Zea mays
  Clone ID: MRT4577_70592C.1
ccggccggagcccatctgttaatacaggacggtatgctactcagtaggtatcctgggcagcagcgccgtgtacgagcaaagcagcactagcaggcaggacagaaatgccaagggtgacaggctgtgggcggggctgcaggactcgtgggacttgttgcgcaagattttccccgagctgtacaagagtatcgagaccgtggagggcgatagcaagtcggccgacaccgtgcgcctcctgaagtacaccgaggaggtgacgatgctgacgctcgtcaaggagaagattgagacggacaaccacgagaacaaggaggtgtacaacagcgacgcgagacggcgagctggcgtacttctacaagaacttcaagatcacgctgtaggagactctgaacaacgcgacaggtcaagtggctgaccatcatcagctggtccatgctgttcgacaaggacaacgagcaggagcctgacccgtacgtcatcatggagaccgccagcaagacgttccacgacctggactacta

SEQ ID NO: 152424 - DNA, 272 bp, Zea mays
  Clone ID: MRT4577_70593C.1
gggaccaaaatgcccgaggtttcgtttctttttaaagcaactttagagcatgtagctttctttattgtttcaaaagcttttctttagcggcaaaaccagaaataattcttttggggaataagcagacacaattcgaccccgcacacgttccatttttttggacagtggccgtcccgttcaaatgataagcagggggcagatcaagaattacaacacgttggagccttaaaaaagcttgatagagcgcaggcagaccaaaccaaaagcttttt

SEQ ID NO: 152425 - DNA, 524 bp, Zea mays
  Clone ID: MRT4577_70594C.1
gatccttaatcataatgggagctagctagcgcacgtatcaaaatctcttcttcacctcactagctaacacccgctatgagctcgatcgatctgtcctgcaatgaatggccgctcgctcctcctcccagcagctggacgcggtggcggaacctggcagcggctgctgctgctgctggaggcggggggcgtgaccgagtcggtggcggtgagctgcggcgaggagacgtccaccgaggcgacgtgcctcaacaacgcgatgggcagggcggagtcgccctccgagtagcgctgcaacgtggagcgctcgctcaacagccgcgcggcgaccgaggacgaccgggaggtcacctgcaactggctcaagactatgacgcgccggctcgctcgcggactacagcatggtcaacgacgacaacatcccccgacaagagcggagatctcccgtcggcgtggccatcaaccccaccggtcgagtgcaccgagatcgactgatcgctggaaccatatgcggagaatactcgctc

SEQ ID NO: 152426 - DNA, 313 bp, Zea mays
  Clone ID: MRT4577_70595C.1
tttttatttcacttcattccttttagggccgatgaacaattggttgcatttataaagaaaatcactcaaactgccatatatgacagtcgatagacagataacatgaatcaaaacagagatacaagctgtaattgcacacatggggcaccgcgccctactactcactaccagaccagactactcacactttatttagcccatgtcactcgcatcttgcactgggcagttcactcaacaaccactgctatagctacgacacattgttacacacacagagatggagagaaaccgttacgttcgcgtcatactgaac

SEQ ID NO: 152427 - DNA, 305 bp, Zea mays
  Clone ID: MRT4577_70596C.1
aaaccccaaaaaaaaaccggtcccaaattgggcaccaacccaaggggaaaaaaaatttttcaggggggggaaaaccccaaggacatgcccaggccccttttttaaaaaaccaaagggggggcaaacttaggggcccaagggccaaaattggtttttgacaaacttaaaacccctggttgatcagggaaatgccgggccttttcaccacaatattgattggcccgggggttattgggtcaaaaaaaaccccggtaataaagggcacgccggtttttttgaaaaaaaggcctccagggccctttttt

SEQ ID NO: 152428 - DNA, 1077 bp, Zea mays
  Clone ID: MRT4577_70597C.1
ggtatgtaaaccatcctgtccgctagatttagtagacgaggagcttgttttcacctccagcaaggcgctccaaaccgtccgctaaattttacgggcgtcgccagagctgctaattgtggcagatcttcggacgtccgctacacgccgatacactccctctcccgcgctggggcggaaacttctagcttgcgtcttcccatagcgaacggcttgcgaccctacccaccgcacctaccattctggagaggagaggaacagagccaagaaacaagcccggaagatggcaggcggcggggtggtgaagcacatcctgctggcaagcttcaaggaggaggtgacgcaggagcgcctggacgagctcatccgcagcgcacctaccattctggagaggagaggaacagagccaagaaacaagcccggaagatggcaggcggcggagtggtgaagcacatcctgctggcaagcttcaaggaggaggtgacgcaggagcgcctggacgagctcatccgaggatacgccgcgctcgtcggcgtggtcccctccatgaaggcgttccactggggaactgatgtgagcatagaaaacatgcatcaagggttcacgcacgtcttcgagtccacgtttgaaagcacggaaggaatcaaggagtacattgagcaccctgcacacgtcgaattcgcaagtgtgttcttgcctgtgctggagaaggtcctcataatcgactacaaaccgacgtcggccaattagcggtagaacatgctctgtactggttcctcggaggatccagtttgattctactctttattttgctaaataaactcggtctgctttgtcccttgttaagaatgagctttgagttttctgtagtgcaattgttgtagcttcgcatgttttcatatgggaattacgttcctaaagaccgtatttgccacttggaagcagcaaactgcttgaacttcttggagattggacgctggtttgtttcttggttcggaaagaggaagtaggtggatggcgtgagactgctctagtaaattttttgtcggattatttactcgttaatatagctcccatcct

SEQ ID NO: 152429 - DNA, 838 bp, Zea mays
  Clone ID: MRT4577_70598C.1
cattgggtacctcgaggccggccgggtcccttggcgcggctcttgtatttctcgcccgttgctcctcgtcccagccggcagccatatgcatgccatactacctatactactcggctcctcgtaatctctgtccagagctgaagatcgaagcccgaggaccgaggtggatccggccaggaccttgaccaggctgctgagtttccatccaagatcaggacattgcgatcaaaacatgtgggcgacaaagaagctcgccacgactgccctgctcatgctcacctctctgctggctgcacggtatctgatagagcacaccgcgagctcagggatgtcgtctcggtaccagatcctgcatctggttcaccacctcgagtggctcaagagcccagcggacgcgaaagaaaccagtccgggagtcgtcatcacaacggcagctgcttcttcaaacacctctgctagtaaaaactcctccgccgccgctcaagtgtttccgtggctagccacgtggagccagatgacgcggctagccgacatcgccagcggccttccgcacgcgaccgaggcggtggacgacgggaggactgcgtgggaaaacctgacagcatccgtccacgttcaccagaggcagaaagcagagcagcagcggcgactctgcccgtactcggtccgcgggatggacgacactccgtccaacaaacccgagagcggcggcggcggcggcgccttcaccgtcggcgtaccctgtgggctgaccgtaggctcctcggcgacccttataggcacccctggactcctctcccggaacttctggatcgaactcgtcgggacgacgacagcg

SEQ ID NO: 152430 - DNA, 410 bp, Zea mays
  Clone ID: MRT4577_70599C.1
tacgtaagctcggaattcggctcgagcgattttggccggccgagatagttcgcgatctgacccataggcgtgggggaccagtgtgggctaatgggactctacaaaagctggcgggaggcattatgaccttatactagatcatactacttactgcatgccgatggatttaccattatatacgctgacagggccagcactgaagacatgctctttgagagggcacgtactcttgcatgacagggaacctggatgctagaccacaacgtagcggttctgctcagggagcagagagactgtgaaggagctgcactgcaagacgctggtgataaaacatgaggacagtgacaaggtgcctgagaaggtgctcttctgtgttaagtggtactgaacagacgtccgcaaaaggacag

SEQ ID NO: 152431 - DNA, 578 bp, Zea mays
  Clone ID: MRT4577_7059C.1
gtctggtttgccacatgtcgtcaccgatacacacgatcgaccttcacatcaagcggtacacacgacgagtccccgatccagccacactggtggacactcgacacaggcccgagatacgctcgacctcttccttctccggattcgcgttgatctacgcgagggagggcggcgcagcgatggccgtgcaaaaccatgcggatcaacgacgagtcgaccgggaccatgctcggcttcatgaaggggcggatcgtctgaggcaccctcgggcactgtatattgaagaagaatgctcacgcactcacggcgcagatacgcgccgtcctactgaagatcgttgccgccaaggaacccatgattgagactatgctagcctcctccttctccctcgcgaggtcaatgaagtggacggggaaggcatacgccaaggcgtcctacagtccgagcgcaacggcatcactgaacgcgtgacgatcccaccaagataatgtagccgatgcacaagcgccccaaggtcactcacttcagtcgatgccgacgtggcatctgggggcccctccaacgagtccccgactcttact

SEQ ID NO: 152432 - DNA, 521 bp, Zea mays
  Clone ID: MRT4577_705C.1
ggggggggggggttttttttttttttttttttgggtgttttttttttttttttttttttgtttttttttttttttttttttttttttttttttttccctttcaaaccacccatctttttggtttcaaccctccaaccaaagggcgggggggggggggggggccaaaaccggggcccccggggcgcgccccctttttccccttttcgcgggggcggcaggggcccccccgggggggaaatttatcaccatcccccgggtccccccggagaattggggggggggcccccccctcgcaaggggggccccccccgggggccggaacctttaggcggggttctccctaacccagcgggtccggggaatccaaccgggcccccccctattaaaacccgtctaaggaaacccttaaacccagggctgcaagggccgttgcaaaagggccggggcaggccggccccccctccagggggaggccccgaaaggggggggggggtcccccaaggggtggaccctacttccaa

SEQ ID NO: 152433 - DNA, 116 bp, Zea mays
  Clone ID: MRT4577_70600C.1
cttgaggattggttttgagctttgacattggagagcggccgcaagaggagggagagccgcgagacccacgacaccctaagataaacgctttgtgtcgcagagaaagcccagcccta

SEQ ID NO: 152434 - DNA, 871 bp, Zea mays
  unsure (1)..(871): unsure at all n locations
  Clone ID: MRT4577_70601C.1
ggtggcgcacggcgcctataaatccttggcctcgccggccgggctgggaacacatccatcctcgctagctcgctctctcttgcaactccagtgcttctcactgccactgccagcaggtcgagctgctccgcaagtctgctttgctgctgcacctgcaagtctgcaaccgcgcacagagaatgtcgacgactgtgagccgtgcgtccctcgaccagaaactcgccctcgccaagcgctgctcccgagaggcgaccctcgccggagccaaggcggcagccgtggcgactatcgcctccgcgatccccaccctggccagcgtgcggatgctgccatgggccaaggccaacatcaaccccaccggccaggcgctcatcgtctccacggtggctgggatggcctacttcatcgccgccgacaagaagatcctgtcgctggcgaggcgccactcgttcgagcaagcccctgaccacctcaagaacacctccttccagggcaccggccgtccccacccggccttcttcaggccgtgagacgagacctccgtcgagctagctagctacctgcctctttcagttcgtcagtgcaaattaagcaccaaatgtcgaccgatgcctctgaataaatttaactgcgaggctagctgctgaacatcgatctgctagtattactacggcgaggctgctgaacagcgctcagttcggaatgtatgtataatctgaacgccaagtttaattttatgttacttctaccgattaaactgttaaaaaccgtcgcgcgcgcgtgctaatcgtcctcgatgtactagtgattgtgctattttaatatatcgtttcacgnaaaaaaaaaaaaaaaaaaaggncgacggtcgacc

SEQ ID NO: 152435 - DNA, 377 bp, Zea mays
  Clone ID: MRT4577_70602C.1
gcgcatcctcacgtcgctcggcgggatcggctcgaccctcaacctgtacatcttccggtgctttgttaagagtacgttcaccgtcactggccagaagcacgacgtggctttcaaggcatccttcttcaacctgatcccgtttgcatacacgctggcgaaagcacagaagctggcgacgttcaagaactttagttgacgtgcgggccacagaggacatggaggcgaacgtattagagaagcactcagatgtgatgcgctatcttgatgccatcgagcacatcggcgagaacctacgaaacactgacaaaattcatacgaccaatcactgcatctgcacaaaagctgacggggatcacattctggccaagtgcacatgg

SEQ ID NO: 152436 - DNA, 1528 bp, Zea mays
  Clone ID: MRT4577_70603C.1
atcctatatacattcaagagggacgccttactccaagaagtgatgtttatagctttggattagttctatgtgaactaatggctggaaaaggggtaagaaaaggtgcaatcaacctcattctatacgccaacaaaggctgtgcaagtggtaaagggttcagagagatttgtgatgctgcaatcgcaaacgagaacaacatgaagatccttaaagagatgcagaaactggcagccgaatgcctatcgctgaccatttctaggcgtcctcagatgactgacgtggtcaaacgcctccggacgctgagaaaggaactaaagaacaggcatgagaactattcggaaccaatcttggcatcgcaccattcgtggcgcaagaacaagaagcaagagatgatcgcgcccacctataactctaagctgcagatcaagaagagcctgagcttcttcaagaggagcatcagcagttccaaggtccaatcggagcccagcaacgtgaggattttcgcgcaggaggagctgaaagaagtcacgcacaattactcttgtctactcggtggaggtctttcaggcaaagtctacagagggacactcgaggacaacgcagtggtcgcggtgagagtgttctctgaagtgctcgagggcttcgaggaagcgtttgtcaatggcgggatgatcctgtctcagatatcccacaggaacgtcgtcaaactcttgggatactgcttggacgccgattgcccggcgttcgtgtacgagtacgcagctagaggcagcctatccgatgttctggacaggcacgaggacttcccgctcgatctacgcgcgaagatcgcggtgaagatcgcagaggcattggagtatctccattcaccagcgaccggtatcatcaggcacggctacgtggtaccgtccaagatacttctggatggcaatttcatgccgaagctcactggcttctcatgggcgaggaagcttatcaaggacccgattcacgatcgctgtgtgtcactgagagtgaaagccgatgtgtaccagttcggcgtccttctcctgatgcttatcagcaggaagaactttgtgttctacgccgaccacgacgacatcgttgcgcagttccgcgcggctcggcaggcagatggcagcgggagggcgttcttcgacgatgatgttgcaggtcatggcggagacgttggtctgcttgaggagatggggaggctgtcgctcaagtgtgtttgcgaggaaatagaccagagaccgacgatgagtgaagtggcagagcaccttcggatcattacgaggtcctggaagaagtgttcttcgtcagagggagctacggcgctggtatctaaagccatggctaaaaagtcccatgtcgccgccgaggctgaagccactaaacttgattggccacctggttcggacattagagactgaccaccgtaaggaatcgtgtacatactgtgaatgatgtattgtattgtataatcatcatcagcaatctttcatgcgctgcaatttggtttgcaatt

SEQ ID NO: 152437 - DNA, 636 bp, Zea mays
  Clone ID: MRT4577_70604C.1
cccctcttccccagttccccttgtcctttgcgcaggggaaaaggagcgccgcagaccgagggacggcgacgaggtatccaatggccgaccctgacgtgatcgaagtgaccttcggcaacgacgtgattaacaccaccgtcacatcctccggccaggctgtggagcgctggatcgcggagatcctcgcgttgcaccgccccggcagcaacggctacagcatcatcgtcgggcttgacgttgagtggcgcccaagcttcggcccgcaccatgagccgctgggacgcgtcctgcctcagctacgagcagatcaagtacgcctgcatcgacgccttcgtctctttcgaggtcgcccgcaggctgcttggcggcgcgtactgatcgacgcggtgaggtgctgtgttgtttaatccttactctatcctgtcttagtttgttgtactttgccgtggactcccgttgcttaatccttagcctatcctatcttagttcgttgcgctttgcttccagacaatttgtgctagtgtgctcagacttcagatttggttgttgctgcatttcgggctacaaggttgtaggggtttctgtgatcgaggagaattattcagacagtcatgtactgcgttcctggtttgtcgc

SEQ ID NO: 152438 - DNA, 326 bp, Zea mays
  Clone ID: MRT4577_70605C.1
tgataacacgcaagcacacaacacgagcgggggggacaaggacgagccgacggcgaacagagacccacccgacacacagacgcacgcgcacgagcccaaagcacagccagagcacaagaacgaccaaaaacgagacgcgataggaccaggccaacaaccgaccgcaaggcacgaaaacggggcggaaccaaaccacaaacgaccgggaccggcaagacaaaactgcaacagctaaacgaagggcaaccaacactgcgaccgcgcggcgccccccagaagcaacggatgaaagccgggaggagcacggaccgcgaaggccgaagggg

SEQ ID NO: 152439 - DNA, 901 bp, Zea mays
  unsure (1)..(901): unsure at all n locations
  Clone ID: MRT4577_70606C.1
ggcccgggaaaaacggccaaaccactcccctcttccccagttccccttgtcctttgcgcaggggaaaaggagcgccgcagaccgagggacggcgacgaggctgtggagcgctggatcgcggagatcctcgcgttgcaccgccccggcagcaacggctacagcatcatcgtcgggcttgacgttgagtggcgcccaagcttcggcccgcaccagaacccggtggccacactgcagctctgcgtcggacacagctgcctcatcttccagctcctctacgccgactacgtccccggcgcgctggcggagttcctcggcgaccgcgggatccgcttcgtcggcgtcggcgtggaggcggacgcggagcggctcagcgacgaccacggtctggtggtggccaacgcggaggacctgcggggccgcgccgcggagcggatgaaccgcccggacctccgccaggcggggctgcgtgcgctcgtgcaagtcgtcatgggcgtcaacctcgtgaagccgcagagggtcaccatgagccgctgggacgcgtcctgcctcagctacgagcagatcaagtacgcctgcatcgacgccttcgtctctttcgaggtcgcccgcaggctgcttggcggcgcgtactgatcgacgcggtgaggtgctgtgttgtttaatccttactctatcctgtcttagtttgttgtactttgccgtggactcccgttgcttaatccttagcctatcctatcttagttcgttgcgctttgcttccagacaatttgtgctagtgtgctcagacttcagatttggttgttgctgcattcngggctacaaggttgtaggggtttctgtgatcgaggagaattattcaaaaaaaaaaaaaaaaaaaaagggcggccgccaccgcggtgga

SEQ ID NO: 152440 - DNA, 730 bp, Zea mays
  Clone ID: MRT4577_70607C.1
gccgcagaccgagggacggcgacgaggtatccaatggccgaccctgacgtgatcgaagtgaccttcggcaacgacgtgattaacaccaccgtcacatcctccggccaggctgtggagcgctggatcgcggagatcctcgcgttgcaccgccccggcagcaacggctacagcatcatcgtcgggcttgacgttgagtggcgcccaagcttcggcccgcaccagaacccggtggccacactgcagctctgcgtcggacacagctgcctcatcttccagctcctctacgccgactacgtccccggcgcgctggcggagttcctcggcgaccgcgggatccgcttcgtcggcgtcggcgtggaggcggacgcggagcggctcagcgacgaccatgagccgctgggacgcgtcctgcctcagctacgagcagatcaagtacgcctgcatcgacgccttcgtctctttcgaggtcgcccgcaggctgcttggcggcgcgtactgatcgacgcggtgaggtgctgtgttgtttaatccttactctatcctgtcttagtttgttgtactttgccgtggactcccgttgcttaatccttagcctatcctatcttagttcgttgcgctttgcttccagacaatttgtgctagtgtgctcagacttcagatttggttgttgctgcatttcgggctacaaggttgtaggggtttctgtgatcgaggagaattattcagacag

SEQ ID NO: 152441 - DNA, 254 bp, Zea mays
  Clone ID: MRT4577_70608C.1
ggcattcttccttccctttttcgccggcaggaggtttcatcaacagccgtcactcggtctcagcctctcagggatgggaggtgggatcggatcgcaggccgggggagcggcaccggcgccaccgacggccctcggatcggcatcggacggacacaaacgtgtccccgtcggctttcgcgtgtccccactatttagccattgatacgccggatccaaggacgtcatcttcatctccacgctacgctgtggctggc

SEQ ID NO: 152442 - DNA, 1038 bp, Zea mays
  Clone ID: MRT4577_70609C.1
gagagaaacctcgaggccggccgggaaacggccaaccactcccctcttccccagttccccttgtcctttgcgcaggggaaaaggagcgccgcagaccgagggacggcgacgaggtatccaatggccgaccctgacgtgatcgaagtgaccttcggcaacgacgtgattaacaccaccgtcacatcctccggccaggctgtggagcgctggatcgcggagatcctcgcgttgcaccgccccggcagcaacggctacagcatcatcgtcgggcttgacgttgagtggcgcccaagcttcggcccgcaccagaacccggtggccacactgcagctctgcgtcggacacagctgcctcatcttccagctcctctacgccgactacgtccccggcgcgctggcggagttcctcggcgaccgcgggatccgcttcgtcggcgtcggcgtggaggcggacgcggagcggctcagcgacgaccacggtctggtggtggccaacgcggaggacctgcggggccgcgccgcggagcggatgaaccgcccggacctccgccaggcggggctgcgtgcgctcgtgcaagtcgtcatgggcgtcaacctcgtgaagccgcagagggtcaccatgagccgctgggacgcgtcctgcctcagctacgagcagatcaagtacgcctgcatcgacgccttcgtctctttcgaggtcgcccgcaggctgcttggcggcgcgtactgatcgacgcggtgaggtgctgtgttgtttaatccttactctatcctgtcttagtttgttgtactttgccgtggactcccgttgcttaatccttagcctatcctatcttagttcgttgcgctttgcttccagacaatttgtgctagtgtgctcagacttcagatttggttgttgctgcatttcgggctacaaggttgtaggggtttctgtgatcgaggagaattattcagacagtcatgtactgcgttcctggtttgtcgctgcttttggcgtacagagtcgcattgagcatttgagatcatgcttgtgatt

SEQ ID NO: 152443 - DNA, 309 bp, Zea mays
  Clone ID: MRT4577_7060C.1
ttttaactacccacaccacagatctatcaatttgtgatagggccaacagggattgacgcataacaaaacgcgacctggggcagatactagcgcacgtgtagaccggcccatgcatgggcagagactgttctcttaagcggagggcaccgaagttggcttacaacctaaccacaaacaatggtccttatgcgtccaacgggttgttaaaagcatgccgcaagcgagtaacgatgaaaccggaggatctgccaggaaccttgcagatgatacaaacacctactagttgcagactgggcatgcgttgttgat

SEQ ID NO: 152444 - DNA, 292 bp, Zea mays
  unsure (1)..(292): unsure at all n locations
  Clone ID: MRT4577_70610C.1
cccaacccgaaccccaacaagggttctcggcgacgcgtcggccgcgggagatggccaccgcggcggagctgccgtccctctacgccgagctcgcggccaagtcctctcgcgtcgcggagctggaggccagggtctcggccctcgaaaccgagaacgcgggcttgagggagngccctggcggttgcgagacgagaatcaacgggcagtacaggaaaggaggaggacccaatctctcgccaattggcggcacgcctacgcggaatcgagcacggggcggtcgagaagccgggct

SEQ ID NO: 152445 - DNA, 526 bp, Zea mays
  unsure (1)..(526): unsure at all n locations
  Clone ID: MRT4577_70611C.1
tcgaggccttccgggtttgaagcctttcctttggagttagggacggctaattagaactactcccttaaaagtagttgctatttcacttaagaatcagtatatttactcacttgatgcttgtcctgaattttggccataataatctcacaaggaatcattgtggatatcaattttggccaactttgtgatcctgaaactaggaataaaactttaaattaggtactttcttggttccaaatcttaagatattttggctttttttaaatacattgattttactatgtacctagacatagtatatatatttaagtgcatagcaaaaactatgtcagagggcagtggtggtggccttctcatgttcgagaaggatggctgcctggacgcgagcgtgtgcattggcatccttcttgttcgcatcctgagccgcggcaagcatgttgtcgatctttttgtggaaggccgtgacctcctccttagcatgggcacactccttggcagncgatgaggtccctaccaagggtgtagg

SEQ ID NO: 152446 - DNA, 356 bp, Zea mays
  Clone ID: MRT4577_70612C.1
gaaccgaacgccgcaaccgaacgaccgagcgcaccgagccagcgaagcgaggaaccgaaagagcgcccaacacgcaaacagacacaccccgagacggggacgcaacaccaacgcagccggcacgacagagcacccgacaggaaagagggcagagagcgcaacgcaaccagcgcgagaaagcccacacacacaagcaccccaggcccaacacccaaagcccccgccacgcaggcagcgcgcacacgagagcggaaaacaacaacacacaggaaacagccaagaccacgacaacgccaagcgcgcaaccaaccctcaccaaagggaacaaaagccggaccacgagggccccaccggac

SEQ ID NO: 152447 - DNA, 557 bp, Zea mays
  Clone ID: MRT4577_70613C.1
tttggggtttttttttttttttttttttttttttagcgttataattacaattagggttcttattcaaatatcatagtacaaacatcatgagggggggggctttattgggtaacaccgggataggggtataacgggtagggagacacgggggggaattgcaaacaccactaatgggattgggggggcgtgggttattttggggggatgaggggggcaagcgcggcattgaggggggggattgggctgcggtcaaaattgccaccgcactttgagtgggttggggagagccacataactcacatgggggtgtgggtggcgcctcctgggttatggggtgaaccatggggtaaattgcgtggggaatgggttggggctcaatctgcctaagaaatgacaacatgggggcgtggatacctggggggtacttgggggggtcaaacgggagggggagaaaggggttaccaaaggggggggctgctggcttaggaattcatgacaattttttagatttgagctacggcgataggaggtatagccgggcgcggggggcgacccgg

SEQ ID NO: 152448 - DNA, 252 bp, Zea mays
  Clone ID: MRT4577_70614C.1
aacacgtaaacccccatttttttattacttttaaatactgggaatttacaaacaaagggcggggtgatacataactacatatacaaggggggaccaacccaaacaaacatgatcttatttgttccccctttaaatggtggaccctttttggtgggggaaaatgatccttgggcccggcatttgtggggggtttaagttccgggggggaacattaaccggccttggttgggggggggaggaaattttaatctt

SEQ ID NO: 152449 - DNA, 354 bp, Zea mays
  Clone ID: MRT4577_70615C.1
acgcgtccaccacacctccggctgggcaagggaaatatcaaacatgccaaaaataccgtacgggctgggaagcctaatttcaacctttccagtggctcaaatcctggtgttaatccgaccattgaacacaatggcctaaaactggttaaaaaaagggaaaattctggtaggaaatggtcaacaaggggcaagaatccttgggtccaaaaattggatggaccaacaatggtaaaaaaaccccagtttaaccaggaccatataaccattggatttaattggaaccaaaaccggcaaaatttgggccccaaatccaaaaaatgaaccattcaaccctaaaggttaatgggagcaaat

SEQ ID NO: 152450 - DNA, 240 bp, Zea mays
  Clone ID: MRT4577_70617C.1
gggggacaaggctgatccatacattttattcatgggggggatgtaacatgcaagaaaaactttggaacaaggggccggaatgaaagtttgggtaagggcctaaactaattttaaaacgtttttcaaaatttatgggatgacggggggggcaaagcgtccaggggactcttgcatcttggaaagcttgggcgcaacattaaccaggggggcaaggggccccctgggaatccctgccggttt

SEQ ID NO: 152451 - DNA, 253 bp, Zea mays
  Clone ID: MRT4577_70618C.1
ccggacgtctcacagcggagctacctttttcgtgcacaagatgaccaacggggaaggggtgctgggacgaggaacgctcctcacccatgccatcccagaccagaagcacgccatcgaggaggagaacctccccgagtgcacgctctacatgcacatccatcgacccaatatcaatcagcaggctctatgacctggacctcgctcgacggaacacaagatgctgcgcaaccacgccttcagttatccatgtcgt

SEQ ID NO: 152452 - DNA, 946 bp, Zea mays
  Clone ID: MRT4577_70619C.1
cctctctctctctctctctctctctctctctctctctctctctctctctctctctctctctctctctctctctctctctctctctctctctctcatgatatctccaaactctcagacgaaaagacatcatgtgacactgagttgcttatcttgaaagagaagctggagatggctcaggcacttgcagaagaaagtgaagcaattgctacagaatctcggcagatagctgaggagcataaggcatatgccgaagggaaggatgaagaagtaaaggtattggagaggtcaattgaagaacttgagaatactgtatgcgttttagaaagcaaagtggaaattgtcaaggaagaagcagagcggcaaagaatgcagcgagaagaactagaagtggagctgcagaaagttaggcaacaaatgctagctggaccaccctctgggaaagcaaggagatatatggaagatggaatgattgatttagctgactcatacaggcacccagtagatatgcacaatgagctcctcagtgctcaagagactattagaatacttagaaaggaggtttctgagaaggaatcagagattgctcagtgcaatgcacatatctcagaactaaacattcatgctgaggcagcagcacaagaatacaagcacaagttgatggagctggagactatggcacaacaggttaagacagacaattccacagcacatgcttgctctgggagacaagagaagattaactcaaaacctcggggctcaggttctccatttaaatgtatcggcatcggctttgtgcaacagatgaattctgagaaagatgaagagcttagtgctgcaaaacaacgtattgtggaactagagggcatagcagctagtagacaaagggagatattcatgtttgaatgcgaaactagcaacaacagagagcatgacccacgatgtgatt

SEQ ID NO: 152453 - DNA, 191 bp, Zea mays
  unsure (1)..(191): unsure at all n locations
  Clone ID: MRT4577_7061C.1
ggaccccggcgaacactcctgacagattcgtccgtccgccgctccctgtagtcggggctggcggtcagaaatgtttatgacctctgcagcatatcatctggtccgtccctggagatgtccggcgtacaggagcaggccgggatcaaggggcggctgccgcncggcccccacagcggacccatttggtttcc

SEQ ID NO: 152454 - DNA, 375 bp, Zea mays
  Clone ID: MRT4577_70620C.1
tgactctcttcaacaatggaatgattctcttaggatctctaatgacaatgctgctgacggtggcatcatgggaagaggagcggtgaatagctccaaggacaatgtctgcgaaaccgccggcaaagcgaatgatagggcgtcaggcatccagcacggatcatccgaaacctcgaaggctgcaaaggagatggtgtctgcggcggccaatagcgccaaggacaccgttcagagcgccagggacagcttttcctacatcgcccatagagcctatgagtgtgctgaggacacctctgatcgcgcggctgacagggccgctgatgcctaggaggaagctaatgctatagcggcctaggtgggcaagaacctgaccgacat

SEQ ID NO: 152455 - DNA, 366 bp, Zea mays
  Clone ID: MRT4577_70621C.1
gggacacaagggttgcctcacgtttaatatggatcgacatatacatagacaacccgtttgtacaacgaacgtcgaccctttttttttatggactcaggtactcacttatccacgcgcgctatgaggaattatggcgggtaattgacgcaacggacgcggccaaaaaaactcgatacgcttggacttggaccgaccgaccgatcagcaggacccactggggatctcggggagggcggcccgctgtttttcggaaagcttcgtggggaacacgaccttgagcttaaccctgggggtgccgcgcgcgcctttctttcgcccggggaccggaatgccctccccgcggaaaacctttttggggccgggggg

SEQ ID NO: 152456 - DNA, 374 bp, Zea mays
  Clone ID: MRT4577_70622C.1
actcataacccctccatctcttcacctgtacatatccgacgagtcctttgcgtgagtgaccgaccgatggggggagatatctcgtctctgcagagtgcatggccctgctgtttataatatgcttctgacaagcaactctccacgctcgcgtgcagtacaccagtcgcgaccagaggattgagagcgacgcctgatcgcgctccacactcgtaagtgggcgcattcgccagattctatctgcctatagagaggtggctggacactcagcagctgctctcccatcgctcggggttgatccaccgactataaattgacgtgtactcacgggcttgctgggttgactcgagagccctgaggtatttgggcctgctgga

SEQ ID NO: 152457 - DNA, 361 bp, Zea mays
  Clone ID: MRT4577_70623C.1
cggctcgagtttagtttcagatcgtatctagctctgggattggcccaagaaactgaaaaccgagattcgcagctcaaaaccatgcatcgcaacaccatcgccgtgcttgctggcgcccagcttgctgctgctggcctctaccccggcatcacagctgacaatcacacgtgtctattggacgagcctgcattgtcttgctccaaaggcgctgtccccggaaaggtggacacttgctgctcggagacatttggaggattagttctccaaacccagttctgggacactcgatctggcttcgaaagccaaggacaagtctatcccgagaagacatggaccatccatgggctgtggcccgactttt

SEQ ID NO: 152458 - DNA, 144 bp, Zea mays
  unsure (1)..(144): unsure at all n locations
  Clone ID: MRT4577_70624C.1
ggggccaatttaacagggcttaggatacatatagatgggcatttatctgcccagaccatgacggtccaacaaggtgnaccacacaaacacatatttcactaggtcaaacatatattgggaaggaccttgcaggtattttattgc

SEQ ID NO: 152459 - DNA, 292 bp, Zea mays
  Clone ID: MRT4577_70625C.1
gggggccaaaatggcacacacaagggaccagcatttagcaaaattttactcagggcattaaaaggggggacaatttttttactaatccaaaatgacatgatacatgtaagtctgaagggggggggaacaacgggccaaaaatacttaacgggggccccaaaaattgttcctgccataaaaactttaacttgccacggtgaaaaaaaaaagttattttgtcccctttggggggtatccggcccaagggcttcctaggggttttttgggcggtgatttcctcaacatttttggg

SEQ ID NO: 152460 - DNA, 642 bp, Zea mays
  unsure (1)..(642): unsure at all n locations
  Clone ID: MRT4577_70626C.1
ggccggccggggagccgctaaggagaaaatagctgggctattcggagcctgcacgacgacagccgagcaactcaacctagtggacacgctccagcatctaagcatagaccaccatttcagcacccagatcctctccgtcctcactagcgcccacgccgcggaagaactcaacagcggcggcgcctgtctccacgacgtcgcccttcggttccgcctgctgcggcagcacgggttctgggtgtctccagaggtattcgaccggttcagagacgaaaacgggagctttgacgtcggcggcgtggcagacgacgacgcgagggggctgctgagcctatacaacgcggcttaccttctcacccatggagaggcagagctcgaggaggctgcattgttcgccaggcagcgtcttgagtccatgtccatgagaggtagcnttgagtacccgctggcccagcaggtgagccgagcggctcacctgccactgccgcggacggtcagaagggtggagactctgcattatgtctcggagtacgggggagatccgacgcgtgagcatgagcatgaacatgacccctccgttttggagttcgcccggctggatttcgaagtcttgcaaacgtttccagtgaagggagctcaagg

SEQ ID NO: 152461 - DNA, 270 bp, Zea mays
  Clone ID: MRT4577_70627C.1
ctctacatggcttcatttttactgtgtaggatacttaacaggaaaaaaacgcgacccaaagggcaggttttttctaggaaacccatccggcatgggggggcccaaaccgggggccctccattgggaaaacaaaaaggggggccccccaacaagggggggggtcaccaacagggggggggcaatctaaaaaaacgggttggagggggcaaattgctccctttgggggaggggaacccccaaggggtttccccccgatgggggacaaaacaa

SEQ ID NO: 152462 - DNA, 262 bp, Zea mays
  Clone ID: MRT4577_70628C.1
ctacggagcaatgcaacaagcaagacatacgtactcatcgatcatatcgtgaactgctcctacagttcgcgacaccatacgctccacatagtgcagcggctgccggaacaggcgctaagacgatatatactgatgatgtacgtctaatccttcacgcagccaatgacagtgatcctcaaggacaagccggacttcgacatcatggtgctgcccgtcggctccagtggtgaccgaggattatcggcctaaccgtgtccgcatc

SEQ ID NO: 152463 - DNA, 195 bp, Zea mays
  unsure (1)..(195): unsure at all n locations
  Clone ID: MRT4577_70629C.1
gtggaatttnagtgctcatagcattatcatgaatctcagaacataacaggtgaaacacgaatcaagcataggcgccatggggttcacagatccacacctaaaccgctaaagaaaactgcgatttttttatgagaaactaagaccaccactcagagcaccaccagctttttcttacccaagggaccggccccgggg

SEQ ID NO: 152464 - DNA, 791 bp, Zea mays
  Clone ID: MRT4577_7062C.1
gccgggttccgaaacaccctcgccggcaggggccggggtttccgaaaagaaaggcgtggagtggggctgtgggggagagggccgagccaagccacctccaccgcagcaggcggcggagccgtacgcgaagcgaaagcgaggaaagacttctgaatcaggcgtcctcgcgccgccgccgcttcctgctctcagcggcgtggagaggtttcccgcccgctcgggcctggttgctcgtcttccttccttggtacaattctattgattacctcaccagggaggggggggggggtgctgcatccacggcttcacatcacatgagtgaaagggatagaaagtgcagcgaccgtgaacgaaaggactcgtgcttttgagcaattcaggaggagtacaagcatcacgaagccttgattctggaatgctgtccagtcgaaggaacagcgggattatcctacgggaagggtcggttagggactggtccgagttcaacgatccctctccgtccccaaaaccgttgtactcgcagtcctatgtcgcagtgagaggattgctgtcctctgtggtctccttggactttttcctgctgtcgagcaagctaaagtcagtgtatgcggctatgacttcacagaggcatagccgatcgcaggagagatcaaaatcgaaggggttgagctgcaggagagttgcagtccgtctgctgttctttttcatgttaggcattttcattggggtcatgcctttattctctgtcgacgtctacaagaaaatagtatctgaagacaagatgcttccgt

SEQ ID NO: 152465 - DNA, 289 bp, Zea mays
  unsure (1)..(289): unsure at all n locations
  Clone ID: MRT4577_70630C.1
gcgggggttaagtcaatatgtacatatccacaaatagtttaacagtaggttcatttttttagggaagttttagtgggcaaattcctccgtgngtgggtggaggggcccaaaaagaaagcatttgttctaatgtcatgacactttaggagcttctttttttggggtttgtaagatctggtttgccggtgatagtgaggttattttttatccattttgggggtgaagattttttttgtttggtgagttcattatgcggtttataatccctgttttttttttgttaaggtta

SEQ ID NO: 152466 - DNA, 749 bp, Zea mays
  Clone ID: MRT4577_70631C.1
atttcttacgagcgcacaccttgattcctcgaagaccaacgtcatcgccgatagacagatcgaatccttggagagcatgagcccgaacacagaagcacgaggttgagtgcgggcagcagcagctgatgaggagacctcaccctatctggaggaaggatcatgtgagcgagagacctgccttctccgtgttcaaggtcggaacccgtacaaccgacgaccggggcgcgcacaccccgcgtgagtattcccgcgctcgctctcgcccagcctcaaatgcaaaaacaatatgttttacgtccctttgagattgaaggatcgccacaggatcgactgcgtaggcgctgctcaaacgagaactactacgggccgaggaccatcatttatggacaccagagagagaagttggtcgattgcggctgaccggcaacctaattcatatccagagactaccctatcctgctacccatcgaccataatcatctacgcatctttcccgaagcccctcagtgaatggacctgctcaatgacttgccctggttcgaggtcctggatctctcccatgcacaggaagatgacggttgtctaaccaagtgcaagtggagctccctgcagcggacgaccttctttctctgggagctcatcccactgcagaacttatgaccaccgagtgttggacgactatcatacgtacgcgtgggctaccacatactggatgctgtgaccggacgcgtgggcacgtacgcttttga

SEQ ID NO: 152467 - DNA, 673 bp, Zea mays
  unsure (1)..(673): unsure at all n locations
  Clone ID: MRT4577_70632C.1
cggattcccgggtcgacccacgcgtccgaaaccctaactattaaaaagaatcgaaaaaatcaaagttctgaacttctgatcaatttcgatatgttatcgttaatcatcagaaggtctcgaagcagattcatcatccatggaatcaaaatttcttgtaactctctgtcggctgtagattcaagttcttcagttttggtttctagaagaaccttcaggtgaacacctgcgttaagctattttggattcaattatggaaaaatctctaatttgaatcagagatttggtaattacgcttattctgggagtagtttcgcttccagtactcgatcattgagctcagaagctgnagctgtggcagcgacttgtgatggacttactggggaacgaattatagctaatcagtggccgattntagatgagaatgaaggtgattggaagagtcacgctgcagcaattgcacagtctattcaagtcatcaagaagacgattacaggtgggaagaaactcttggtgaggctggaaaggtttatctggaagagttgaacaagttctggtctttggggatgatccaactcatgctaggcagaaaaggccgggagcacgggctcgctttacggggaaaaatgaaaagggagttattgacattttgagaagagagcttttttggaacaca

SEQ ID NO: 152468 - DNA, 716 bp, Zea mays
  Clone ID: MRT4577_70633C.1
agagatcgtcgtccgcgctccgccgccgtcggagtcgcaggacacggcggggttcggtggcggcgcgccgtcgccgtcgaggtggcccaaggcggaggtgcacgcgctgatccagctgcgcacggagctggagacgcggtaccaggactccgggcccaagtgcccgctgtgggaggacatctcgtcggggatgcggcggctcgggtacaaccggagcgccaagcgctgcaaggagaagtgggagaacatcaacaagtacttcaagaaggtgaaggagagcaacaagaagcgccccgaggactccaaaacctgcccctactaccaccagctcgacgcgctctaccgcagcaaggcgctcgcgtcgtcgtcgtccgggcccggtgcagctccggcgctgccgccgccgccgccgccgccgcagcgcccagatcagcaggctgctgctgcggcgccgcccgtcaccgtcgtgctagccccggtgccactgtcccagacggggcctcacggcaacggaaacggcaacggcaatgggtgcgcgggcaggggcagctcggacaatggcggcggcggctccgggggcatgcagaagcagcaggcgagcaacggcggggttgctgccgccaggttctccgccgtggatggcgccggtggcaatggcgttgcgacgaacaagcgagaagaaggcatcgtcaggaaggaggaagcggtggcggcgg

SEQ ID NO: 152469 - DNA, 387 bp, Zea mays
  Clone ID: MRT4577_70634C.1
gactgcgtgcgtggatcagaaaatggggatccaaacgaaaagcgtgtagtacatggtgctgctcctgtcactgactgtatctgcggaacggaatatgatggaccgactacgcgctcatgcgcttccacctatacatcaccataacaaacgggctgcacgtgctgatcgagctgcctcaactggtactgtacgccatctactacaagaacacccataagatagtgcacgcacgcatgctcaaggcaggccaggtcgtcaagactcaagcggatgcccacggtagcagggactccaacaaccaccgctgtggcagaagcacatactgaggatcataactactacgacgtaatctggatgtgagcacactacacacaacaccaagcaaca

SEQ ID NO: 152470 - DNA, 483 bp, Zea mays
  Clone ID: MRT4577_70635C.1
cacttttatttcattgggagcttgaagcgtgcatctatccttgttgtatttcccatcctaaaatcctcctgttccacacagatcctggaagcaagagaaggacgtcaagcatccaaaacaagcacggagtatctgaagcgccgtcattccaagaactaacttctgaccctgtgccgaatgttgaggctgacaagcatcctatctcaagtaccattgaggaatctaacccggaccctgcggatgatgatgatgaaaaagaagtagatgattggctacaggatgtcgactctgtgcccagcaaaactggcaacaatactgcagttggggaggaggaagatgtatccttcagtgatctagaggatgactgaggggctgttattgagccaaccagctatcagtttactgttagacggtagcttcatgaagtgaagaacacttgctctgtggctttaccacttcactgcctggttcttccgattgcag

SEQ ID NO: 152471 - DNA, 803 bp, Zea mays
  unsure (1)..(803): unsure at all n locations
  Clone ID: MRT4577_70636C.1
cggccgggccgggatatcttctctctccctctcaccaattcgtcccgaggcagcagaagcagctgatcgatttactcaccaatatgttctctctccctctcaccctagggtatgccctgtctgccctgctgtatcctcatctgcgctgcgggagccagtaaagggcacaggaggagttcttgtggcgtactgcagcttctcctcctcctccctaactcttgtttgttagcggctaatttcagagcttttgttggcaactgggggaaccatagtgcgggggttcctcgcccccctctttccatgggagcttagaagctgttggatctctgcaagtgaccatgagccagagttttgacatcaacgtacttcgtgaagaagcaaggagtaggtggttaaagccttctgaagtgtactatatcttgcagaatcacgagaggttccctatcacccatgaggcaccaaagaagccacccagtggttccctattcctttacaatcgtcgtgtcaatcggtatttccggagagatggtcacacatggcggaggaagaaggatggaagaacagttggggaggctcatgaacgactgaaggttggaaatgttgattctttgagctgctattacgctcatggggagcaaaatccatgtttccagagacggtgtttctgggatgttggaacctgcatatgaaccacattgtgctggtacatacagnagagggtgctgagggcagatattattcatcacacctatcaaatggccccccagaacctctttcatccttgggatatccaaatgccatct

SEQ ID NO: 152472 - DNA, 1074 bp, Zea mays
  unsure (1)..(1074): unsure at all n locations
  Clone ID: MRT4577_70637C.1
gagaacaaagcgttccattatataatataactactgcacatgccaagtctatgaatcatattttcacatcacactgctcttagtgccattacaataaatatatagaagtcgagaatcatacctttattttttgttattagtaactgtggatgggaagtttgctggcgcacttttatttcattgggagcttgaagcgtgcatctatccttggtgtatttcccatcctaaaatcctcctgttccacacagatcctggaagcaagagaaggacgtcaagcatccaaaacaagcacggagtatctgaagcgccgtcattccaagaactaacttctgaccctgtgcctaatgttgaggctgacaagcatcctatctcaagtactgaggcagaaatagttgacaagtctgtaattcaagaagagttggtgatgaaaactgaggccaagagtttacccactgaggaatctaaccctgaccctgcggatgatgatgatgaaaaagaagtagatgattggctacaggatgtcgactctgtgcccagcaaaactggcaacaatactgcagttggggaggaggaagatgtatccttcagtgatctagaggatgactgaggggctgttattgagccaaccagctatcagtttactgttagacggtagcttcatgaagtgaagaacacttgctctgtggctttaccacttcactgcctggttcttccgattgcagtagcagaatcacgtaacaatgtccctcggtgtgtcccaattccatgttgtatctaagcagtcaccgttttctctgtacataaagttccagatgcggctgtgcattcatgctatatcgttgtccttacgagctgctttttgaaacacgagattctgaatgtaatatattagaatcatctataagctgtcggatatcatgtatctcttacatgttgatatcttcagagttccattttttttcagggaacatgatacatcatcatacatgtaatctcaaggatgaactctgcatgctnaagcttatgaggcgttgagcaggatctggtgcactcacgctccacagtaattacagt

SEQ ID NO: 152473 - DNA, 1823 bp, Zea mays
  Clone ID: MRT4577_70638C.1
cgggaaaaaaaaaaaaaaaaaaaaaaaaaaaaaaaaaaaaaaataaaccctcgagggccggggactcgcgcgttcgccgctactattctactccactctacctaccgccccacgctccagtgctcgcccgccctccagaccgcacgcacgcacggcacgagctcgccgcgatgtcatggttcgctcgctccatcgctgccacactttcatctgcccactctgacgacgatgaatccgagcccgcctccggcgacaacagcccgccgcgcgcctccgaccccaccagcgccgagaccggtgagtccgatgagcagccggacaccccgagccgcggcgttaagggcgacatctcggagctgaccgagtccctcacccgccggttctggggcgttgcctccttcctcgcgccaccgccaactgaaggagagactcaagaggaggaggaggaggaggaggaggaggaggaggaggagacagccgccgccgcggaggtgcctcagtccccacggatcgacgggatccggagtgacctggcggagatcgggggcagggtgaagaccggcatctcgatgctgtcgaacgccggcgcggtggcggagatctccaggttcgcgtcatcgttcctgccattcggtcccggggatcagggggaggaggaagagggcgaggcggtcggtgtgaccgaggaggtagtggtgttcgtcggtaacatctcaaagcatccgaagacatggctcgatttccctttgtttgttgatgaccgacacgcagatgattttgaactatcagatgaacagtatggacatgcagttgctatagagcggcttgtgccaagcctatcatacctcaggactgagctttgctctaccaatatgagtgaagcgtgcttctgggagatatattttgtgcttctccattcgaaactcagcaagcaagatgctgaaattctttcaacaccacaaatcctggaagcaagagaaggactactgcaaagttcaccgacaaagcacaagctgttatcagaaagcaggaatactacagaacctgaagagagtgagttgtcaccggcaagcatccaaaacaagcacggagtatctgaagcgccgtcattccaagaactaacttctgaccctgtgccgaatgttgaggctgacaagcatcctatctcaagtactgaggcagaaatagttgacaagtctgtaattcaagaagagttggtgatgaaaactgaggccaagagtttacccactgaggaatctaaccctgaccctgcggatgatgatgatgaaaaagaagtagatgattggctacaggatgtcgactctgtgcccagcaaaactggcaacaatactgcagttggggaggaggaagatgtatccttcagtgatctagaggatgactgaggggctgttattgagccaaccagctatcagtttactgttagacggtagcttcatgaagtgaagaacacttgctctgtggctttaccacttcactgcctggttcttccgattgcagtagcagaatcacgtaacaatgtccctcggtgtgtcccaattccatgttgtatctaagcagtcaccgttttctctgtacataaagttccagatgcggctgtgcattcatgctatatcgttgtccttacgagctgctttttgaaacacgagattctgaatgtaatatattagaatcatctataagctgtcggatatcatgtatctcttacatgttgataccttcagagttccttttttttccagtgaacatgatacatcataaaaaaaaaaaaaaaaaaactcgagactagttctctctcctcgtgc

SEQ ID NO: 152474 - DNA, 240 bp, Zea mays
  unsure (1)..(240): unsure at all n locations
  Clone ID: MRT4577_70639C.1
cagagctcgatcgtcagacaacgcatctcgaatctcagattctgcgcgaccctcgtgagtgaccatggactgctcgcgtcgatcgcangacgtcacggtgatcggaacgcgctgtgtactcacagtacgatggctcgcgtcgcgcactcgatcatgagctgtcacgtagtagatgctacagtgatcacgcgaagaaaggtatatcagctatgtctatgacatacgaccagatgctgctat

SEQ ID NO: 152475 - DNA, 708 bp, Zea mays
  Clone ID: MRT4577_7063C.1
ggagttgaaacggcggccaccaaatccggccagcttcgggctagtcggacggcgagagtttcatttgcagcgaaggaatgccggtgttgagctgagactacgtacctgcgcagcgcaggtgcgtcgagcggcatcgggctggagacggcgcgtgtcctggcgttgcgcggcgtgcacgtcgtcatggccgtccgcaacgtctccgccgggctcaaggccagggaggccatcgtggctaagatccccgtcgcacggattgacgttctggagctggacctcagctccatagcttccgtaaggagattcgcctccaattttgactctctaaacttgcctctcagcattctcatcaacaatgctggagtgatgacaaggagctgcacacgttcctgcgacggcctggaactgcatttcgcgacaaatcacattggtgtgtcctcttataccagtacacactacagctagcctttgctaagcgtattgttcgaattctaactactttctttgtgcgacatctcttgtttacattattctgtagaagagtatcccttgctcgtcttatgacctatgagaatgattcctgataatgcactagcgattaaccgggatatatatatggcaggccattttcttctaacgaacctcttgctagaaaacatgaagaagacatgtagggacagcggtatcgagggacggattgtcaatttg

SEQ ID NO: 152476 - DNA, 391 bp, Zea mays
  Clone ID: MRT4577_70640C.1
aacaccgtttaccttacccagagcttagcgaggggtctccatccagctgccagcaatccttcaagtccttcagcggaagcaatctcactcggaaataccttctgagggaactgcccaaggccctgctcgaacaatcgtgccctgactgatacagatgcggagggtaagctggcatgccaactcaggccctatgactcgttttgtctggaagaactgacgtcaggagagcctaagtgtcttggaagggacaaatggctatgactgcgcaatagctctgaaagttgggcttgtatcatacaggaagcagctataccttgagacattgggatggactgataagaaaggacacatagggactgctcgaaccactgcagcaccacagtgaggttaa

SEQ ID NO: 152477 - DNA, 2806 bp, Zea mays
  Clone ID: MRT4577_70641C.1
gttcaatcttctaacccacgcgtccgcccacgcgtccgctcttccttcgtcgtctcgtcgtcggcttctcgcatccgcctccgcctccgcctccgcctccgctccccgctgcgcgtcaccggaggagaggagagaaagtgagagaggggatccctccgacccgatccaccgacataacctccgccccctggatctcctccgtccccgcgcgacgccaggacagggttggcgaattgaatcagtaatatcagatattcagggatgttcccttcagttgtgccagctggttaattcgctattaccttctctgactgctcgtgcctgcatgtgtattgagaaactccaggacataaatcatgagcacgtgtttgatctggttaaggaggttgccatggagcttgcagcgacaagcgcagtgagttctgtgaatctgctgaaactatcaagtttgttgagtctgtcaacgaacatggaattgtacacggaagctgtttcccttgagaatctcaaaacaagggcactacgatgcgagagtcgtgaagaactggatctagctgagcagatgattccactggtcaactatatgcatgaccatcttctcaaggaaaaacaacaacttagcatcaacggggtgcctattcctgctgatttttgctgtcccctttccttggagctgatgtccgatcctgttattgtagcgtctggacagacctatgagcgggtttatatcaagttgtggcttgatgagggttttactatctgcccgaaaacactccaaagacttggacactccaatttaatacctaattatactgtgaaggctctgatagctaactggtgtgaatcacatgacattaggcttcctgatcctatgaaatcattgaagttgaactttccttctgctgcctccttccttgaggatttgagtgctgcagatggcagccctctacatcctattgtcgtgtcaagggctaatattcctgggtccccagaagttgatgtgtatttgagaaacttgaatggagcatctcctccccatagtttggtcaatcagaattctcatgcgcatgcaaaccgtcatggtcatgaggtctcgacgagtcaaacttcagaaaaaacaaatggttctgtaccagatgtttcaagattatctcttgcaagttctgaagcaagagagtctagtttggaaggaaggcgtggtggttcgattgggcaaatatcagaacattctacggaggaagcattccaatcttctaatttggatagggatctgcaggacaacttagctaattcttctttgaatggtagccttccaaatagtggtcaacttgatggggaatgtgacaatggggtgacaagggttccaagcgataggacaaattacagtagcgatgcatctggcgaagttacaaatggtggtggtgcgcctgtagcctcctctgttcctcaaagggagcatttgatccctccaagactgggtatgggtactaaacaatttataaggcggcaaccatcagacaggggtttccccagaattatatcttcatcaacgatggatacacggagtgatctctctgccattgagaatcaggttcggaagctgattgatgatttgaaaagtgattccatagatgttcagagatcagcagcatcagatcttcgttctctagctaagcacaacatggagaataggattgtcattgcaaactgtggggctgtaaacgtgctggttggtcttcttcattcaccagatgccaaaacccaagaacatgctgtgacagctcttttgaatttgtcgatcaatgacaacaataaaattgctattgcaaatgctgatgctgtcgaccctctcattcatgtccttgagactgggaaccctgaagctaaagagaattcagcagctactctattcagtctctcggttgttgaagaaaataaagtgaggattggacgatctggtgccatcaagcctctagtagacttgctaggaaatggcacccctcgaggaaagaaagatgcagctactgcattgtttaacctgtcgatccttcatgagaataaagctcgtatcgtgcaagctgatgctgtacagcacctggttgagcttatggatcctgctgctggaatggtcgacaaagctgtggctgtgttggcaaaccttgctacgataccagaaggaaggaatgcgattgggcaggcacgtggcattccagcccttgttgaagtcgttgagttgggttctgcaagagggaaggagaatgctgcggctgcgttgcttcagctctgtacaaacagcaacaggttttgcagtatagttcttcaagagggtgcagtgccccctctagtcgccctttcacagtcaggaacaccgcgggcaagagagaaggcacaagcgcttctgagctacttccgcagccaaagacatgggaattcagcaaggagatagccttctgttttttcccgttttttgttgtagtgtacattaagcgttgcattttatgcccatcatcgcgactgggctcctgtttactgttgttgattggcactggcagatgcgttggctggaattatgcagtgccctgtgctctgtttatagatggagattgttatgctcatctcatgtaagttttgtctgttgagatggtatctttccttttctcgtttttgaggtttttttttgtatagcttaaccattgataggaacttcgaacttacataatcaccgattttgccctgtatataagtatatttgattgtcttggaattattatggttcgatggttgtccaaattatttgatctcccgt

SEQ ID NO: 152478 - DNA, 461 bp, Zea mays
  Clone ID: MRT4577_70642C.1
gccttggtttttttttttatgatcttttataacagtttattttttttgggaccacataccaacagggttattacagactagggaccaaatttggctgaccagatggtaaaaaagcaataagttcttgcttaatgtaacaaaaataacggttgtaaaacgaccatgcatacgtgggaagcatagttcatgacttggggagcagaaggactaaatttattactgttccgactaaaggggggaaacgaaacacacaaccagactgacatatgatttattgttcaaagaaggcttggtcatcttgactccgggtggatcctttttttaaatgctcttgctgagtcacaaagattccgttggggtaatgccgccagtgagtatactgaccttgaggaggatattaataggagtttcctcttccatgggctaagttggaaccatcttcacccatccgggctgaacat

SEQ ID NO: 152479 - DNA, 693 bp, Zea mays
  Clone ID: MRT4577_70643C.1
aaaaaagagacgagtcctcctctggccttctctcttgtctcttccttcgtcgtctgaggggggggttctcgcatccgcctccgcctccggctccgcctccgctccccgctgcgcgtcaccggaggagaggagagaaagtgagagaggggatccctccgacccgatccaccgacataacctccgccccctggatctcctccgtccccgcgcgacggcgaagagggttgatggctacctctctcagccactctgctcaacagtatctcctgtcttggcgccctaacatctgatgtctctactgcgagacccaagcctattcacaagtattgcaaaaatgtatatgatatctcaagcatcgtgaccccccttcttgaagatctttgcaagtctcccgaagagcaactcgatgaggtcttaagagaccttgacaccgctgtcaatgaagcttcaggccttattggaaactggcaccagacaaccagcaaaatgtatttcggttggcgaattgaatcagtaatatcagatattcagggatgttcccttcagttgtgccagctggttaattcgctattaccttctctgactgctcgtgcctgcatgtgtattgagaaactccaggacataaatcttcacgaaaacagagcaaatccggcgagcccgtgcggcgggggagggagacccctgctcgagaag

SEQ ID NO: 152480 - DNA, 432 bp, Zea mays
  Clone ID: MRT4577_70644C.1
gcacaagatggacgtcgccgatctcagcgaagggggctgcacggttgacaagaccggcaactgcgtccggctgactgagcctgaggaccccgccttcgtgctgacgagcgtcctagatccactatgagactatcagcaagcagaacctccgctagctaactaggattcacactaagaagtgtccactcatgatatgcaccaccgatgctgcctgccactggatcgtcaacgacgcgcgatgaccaaacatgtgcatcaactgctccactcctgctgccgtgaacctgtattgctgtgccaacatcccatgcaccagagtaaccatggacgacgaccgcatcatgtacagtgacgccaactacaggaccatgaacagttgcacaatcgctgaaggctgctccacagtgatcctaagagacctcgtatgctgat

SEQ ID NO: 152481 - DNA, 363 bp, Zea mays
  Clone ID: MRT4577_70645C.1
ggggctataaaaaaaaggggaccatttgttcacttttaaactcatacgttccttgtgttatagataaaatttaatatttggtcttatgggttaaaaatcttatatggggatcatatgttcattttaatattaaatttatttttatatataaatatcaaatttgggctacgtcggggggcacggatttgcactagttctttgttaatttcgggatcctcaaattcatgagagctggccagttgctgacgatgtccattgatccaacatggccaggcactttttcggcctgtactccggagctgggggccctccttccttaactggggcaaatgtgaggttgcgggcctttgtccttgtgaaccc

SEQ ID NO: 152482 - DNA, 396 bp, Zea mays
  Clone ID: MRT4577_70646C.1
gtcagagaatgaacttaactccatggtagctttaatagattcaattcgatcaactgaaaaagctcaaaagacttcaagaagtgacgtttccaaactttccaaagatcttgaggaggcaaatgaattgaatgaagacctgatatcacaaatttctaaactccgacaggaatccaatgaaatgcacgtacatatcactaataaactaggacaggcacaatcactagctaaagctctgtcagaagaattggcttcactacatgaaatagctcagaacggacaacaataactcgaagccacctcgattgagctggcatctattgcagaagctcgtaataacttgaagaaagaactgctggctgcgtagaacaatttgcagtcaaccacacatgagcttgt

SEQ ID NO: 152483 - DNA, 470 bp, Zea mays
  Clone ID: MRT4577_70647C.1
attcggctcgaggtgcatgtgtggatccctgttttgtcggcgtcggcctcgttgaccggacatgggcggccagctcgacggccgcatcagggaaggcgtcctcgagcccctggaggagcgcttgaccgaggctgtgatatggtctgctgcagtgctactacacgcaggatcggaggcgcctagtaccgctcctactccgccacaggatggcgctgttcacggcgccggctgtggacgtgctggtgctgctattatggacctcggcgtacggaggtgactcccagggcgagggcgtgccggctccgtaccaggacgccagcacggactaggaggtacgcgttagggacctgatagcacggatgacgctggccgagaaggtccgacagatgacccagatggagcggatcgctaagtcgtcggacgcgctcagggactactacatcagcagcctgctcagaggttgttaaagc

SEQ ID NO: 152484 - DNA, 201 bp, Zea mays
  Clone ID: MRT4577_70648C.1
ccggccggtgcaagtaaggatcgatcgagctggagtggaggagcactgcgctgcgctgcaccaacaagtcttcactcgtaacccgtatatagctcatctctcccaatttctttttagcaattccggtgtgaagggggaaacaaggaaattaagaacaaagcagcagcaacaagttataaaaaaaaaaaaaaaaaagcggcc

SEQ ID NO: 152485 - DNA, 291 bp, Zea mays
  Clone ID: MRT4577_70649C.1
gctgtattacggcacggcgccatcgacggacgactagcaccacctctccaccgtcgcggaagtaggctctccgccgttgcggagagggtgctcggtgctcttcgtctacgacgcgctcattcccgcgcggttcctcctgtccgcctagagggaggttaatgaatactctgctgatgagggaacacgaggtaaggaccttcggtccaaaatcaacgtgattgtgaagaatgcaactgctcagatgatactagctgtgacacacattgagttgaagcatgtgattgctgctac

SEQ ID NO: 152486 - DNA, 825 bp, Zea mays
  Clone ID: MRT4577_7064C.1
gggtcccctgaggccggccgggaacccaagcccagagccgtccgaatctgctgccagaatgcggtggttctaccacaaaggctcatcgggcttctccagcgcctccacggctgaggatgtcaccgccggcgtcgacggccaaggtctggtcgccgtcatcacagcgcaggtgcgtcgagcggcatcgggctggagacggcgcgtgtcctggcgttgcgcggcgtgcacgtcgtcatggccgtccgcaacgtctccgccgggctcaaggccagggaggccatcgtggctaagatccccgtcgcacggattgacgttctggagctggacctcagctccatagcttccgtaaggagattcgcctccaattttgactctctaaacttgcctctcagcattctcatgtaagtaccaatcctactacttcgtcgtgccactgctatcacgagctgtcaaaagccagcctaaaatcatagtagtatgtgtttggctggttgacttggtgttcttttcgacagcaacaatgctggagtgatgacaaggagctgcacacgttcctgcgacggcctggaactgcatttcgcgacaaatcacattggtgtgtcctcttatactagtacacactacagctagcctttgctaagcgtattgttcgaattctaactactttctttgtgcgacatctcttgtttacattattctgtagaagagtatcccttgctcgtcttatgacctatgagaatgattcctgataatgcactagcgattaaccgggatatatatatggcaggccattttcttctaacgaacctcttgctagaaaacatg

SEQ ID NO: 152487 - DNA, 376 bp, Zea mays
  unsure (1)..(376): unsure at all n locations
  Clone ID: MRT4577_70650C.1
gaagcggggatcctctaaagactactttcgcgtctttttttaatacggcaaaggaaantgtggaggactgttttaaaggttgaggtgaaatcctaacattccacccaaggatgatggttcaatagctttttaaaatgactttttcaaacgtcaagcttttttgacactttctttaccacttttatgtttaatacatatctaaatgcctttaaaatacgtttatacctttttaccaacattcctttcatataacttacatacttcacgacattttttatattttttgatggttgaacccaaaatcacattttcaatctttcatgataacattaactttttcttaaaaaaatttacattatctttttttatttttttt

SEQ ID NO: 152488 - DNA, 293 bp, Zea mays
  Clone ID: MRT4577_70651C.1
cacaaagaggggggccccagtgtaacagttgcatacgaatcccatacaacaatactgggaatctttcaacagtttcagtacaaagtcaaaaaaggggggaaaaagaaagaaagaaagatttcggaccaccaaacttgtaaagataaaaaatcagcccataacaatgctggctggtgccaagccaaattttacccaatcactaaaccggcatgggatgggttgcaattgcagcggcaattgccaaaaccctttttaataaaccttttttccgttaattttttatggagcagcac

SEQ ID NO: 152489 - DNA, 275 bp, Zea mays
  Clone ID: MRT4577_70652C.1
aacgggggattttttattttttttaggataaatcaattacctttttttttccaacgaaaaagcccaaaagctggccaacgggaactattaaagattaaaacagtccacccccacggctaggacatttattttattcactacccgaaggccatcttaaggaccaaaaaaagaagcgcaaccaacatatatatctaatgtgcatatataatacaaaaacaaacagcaaaccaaaccccaagaacaaaaggttcaaaaccgcctagatcttcatcaaa

SEQ ID NO: 152490 - DNA, 288 bp, Zea mays
  Clone ID: MRT4577_70653C.1
catgggggaacaaagatgcctttgaagctcagaagtgtaaaaaaatttcctcacctgttttaggtgccttcctatcagacctcttaaacatttggtggtggggggctgtcttccaggcccaaactatggccaaaagaggggaacaaacggactctaaaaaaaatcccgggacggacagaaactttataaaaaatcacaaggttcctttgagttccgttgtaaaaaaaactttggggacctcggtttgtttgcaaaacagcctggatatttttgggggtctttttgggt

SEQ ID NO: 152491 - DNA, 751 bp, Zea mays
  unsure (1)..(751): unsure at all n locations
  Clone ID: MRT4577_70654C.1
agtccctcccatctcccttgcctggtcgcgccccccagctcgtctccctcaagcacgccgcgctcctccctgcccggccatgggtcctcagccgaccaccaccgactagcactcgcgtcggttatccacgtcctcgccgagaggctcagccgtcgcgccctcaagctcgtcctggccaacgtccttcctatggccagcggtcgccccaacgccggctcggcctgcgcgcccagcgccgcgcgctctccttgtatccattgcggctattccgtgctcgccctccagctttgttgccgtgcagctcaccggcgttcgcctggccgctacgcagcccctcggcttcatcttcccccttctgctctcagcaagttccttctctgttcctcaatccatggcgcccggctgtccatctccttggccgtggtgagcccccttccgccccaagctccatggctgctgcgcctccccagtcaagctcctcagtgcccatgttcccctctgtttctcgtgctcggtctccatctccctggctatgcgcgcgtgcttcattgtttggttgttgtcgcgccgagcccggattccagcgccccttcatgctctggttttctctctttgcgtcgatgtgcaagcgccttcgtgctcgcatcccttgggcccgnttcgccttcgctcgacaccggctgcaagttgaatttagtttcgccgagttactcggaataagtccgatcggtgttgagagttcctcatgtgg

SEQ ID NO: 152492 - DNA, 192 bp, Zea mays
  Clone ID: MRT4577_70655C.1
cccggttgctttttatactagtcaaaccccaccggaggggggtaccaaaccgttcgatgtcaaaaccgccacccgagttctccccccttcggagcggctccataccttcccgttgccccaccaaactgaaaacccggcaacagggatagccgtggtttattttttttatcttctgtttcttgagctcaaagg

SEQ ID NO: 152493 - DNA, 227 bp, Zea mays
  Clone ID: MRT4577_70656C.1
cggaaccatcccactctcgatcgaagaaatcgcaacgttccatgaatgctaaagccttgtctctgtttatgcctgagacagagcaagagattggctccgatcaagctccgatctcgtgcaaccgcgtctaactccgaccaatccgtaataatcaacgtttccgatttctccattcgccatttttgctttcagtttcttcgatttcgtcgtcaggcacaataattttt

SEQ ID NO: 152494 - DNA, 539 bp, Zea mays
  Clone ID: MRT4577_70657C.1
gccggccgggtcgggatgatcctttaggaagataaaggaacatgatgagcggtataatctaacaattgctatgcgagaggctcgtctgccccaactaagtctgttacgtacaacagggcagcccgatgacttaccggctggtcaaaaggagtttgtcaatgaagtctaaacgcaatccgtcgatgcagctgaaggacctgcaagaaggacccccccacatcttgctctgaaaaaaacataatgaagaggccctgtgtccttggccagtaaagaatatagggaacaccccgacagtgcctaagattggagatgaagtttaacggaaccgtcatactcccgaggggagtacccgttacccaattcgcccgatactgagaagaattacgcctgccttctgaacatcgatttacaaggaagtagatgggaaaaccctgtcgaataccaacttaatcctgttgtgacaaattcccatgttctgatctggatctataaccaaaaggcccaccccgatccgccttaccctcatgtgccggaccttg

SEQ ID NO: 152495 - DNA, 224 bp, Zea mays
  Clone ID: MRT4577_70658C.1
ccactcgtccgattgaaacgccatttttaaaaacaaaaataataaaaaaaaaaaaaagaaaaaataaaacgggccatatctaaataccatcctgacatactcctttcatgccatatcatatactcttctatcatgtctcctacatctaattgactgccccccgttctaccacttctttcctgcggcacccctgccttttcccaattcaatctcctttcctacca

SEQ ID NO: 152496 - DNA, 343 bp, Zea mays
  Clone ID: MRT4577_70659C.1
gcaaacgcgaaaccctagcctcgagctctatctccggccacaggtggtcagatgtggatgcggacgccgacgcggcgagggctgctttgctgattgattattgctttgggggtaggttagcgacgaaggatgagcaggcgctggagccgcacgatctacgttgggaacctccccggggacatccgggaaagggaggcggaggatctgttctacaagtatggtaaaactgttgacattgacctgaagggccccccaaaaccacctggttatgcttttgttgagtttgaacacactcgttacgctaacgagggcactgctggacgggatggatacaacttttatg

SEQ ID NO: 152497 - DNA, 396 bp, Zea mays
  Clone ID: MRT4577_7065C.1
atggactcagacttaaactctgctccgctctggtcacctcttcttcgtctgagcagacacgaccatccaagcaaacaaccagacaaggatcccgcggaggccgaaatgcccgctgctgctcctcttcccaggacctagcagcggaacatcgtcgcgaggaatgcgccgttgccatcgtcctgacaacgtggaaggtcatcggtatcccaagcgagcgcgcgctacagccagagtacattgataacaagagaactcggctgatcgcgcaggcgcagcctgctgcctactaccgcctgctcagctgtctggcgcgtggcctccaataccaccgccgtgaggcgctggacatcacctagcaatgctagcgcggagaaaggaaacagaagccgtattgcg

SEQ ID NO: 152498 - DNA, 1317 bp, Zea mays
  Clone ID: MRT4577_70660C.1
gggtacctcgaggccggccgggtcgggtctgcgtcgtccaggtcctcctcagatccgccaaacccgccgagacagagagatcgccatggccgcggcatcgcctccgctcctccccaccacggtcgtcccggcggccgcagcacccccgacacccgcgcccacggccatatcctccgcggacgccaccgacaccaacccagcggcgatccgggccttcctctcccgcctcctcgacaccacccggcgcgcgctgtcgggcgcccgcccctggtccgagctcgcggaccgctcggctctctcccgcccggagtccctcgccgaggccacgtcccgcttgcgcaagaacctggcctacttccgcgtcaactacgccgccgtggccgcgctgtgcctcgccgcggcgctcctggcgcaccccttctccctggccgcgctgctggcgctgctcgccgcctggtgcctcctctacgtgctccgccccgccgacgcgccccccgtctccgcgttcggccgcaccttctccgaccgcgaggtgctcggaggcctcgccgccgcctccgcgttcgtcgtcttcctcacgtcggttggctcgctcatcttctccgcgctcgcgctggggaccgccatcgtctgcgcgcacggcgcgtgccgcgtgcccgaggacctcttcctcgacgatgttgaccaggctgccggcggcaccggcaacccgctgctgtcgctcatcgcctccgccaccggaggccgcgtctgatcatgagtctgtaatagatgctatgcttgaggtcactgccattttcttgatcgattattttcgcggaactatttatgcagctcaaaaattatactactatatatagctacggaaagcaacaaatcaaaccatatactggagtttgtttatgtatcatcgagcagaaatatattcttgttattcgtagcattatatttgtattttattacacgttttgataataatcagtaaacatcccggaattcggcttcagctcacacatgtaaaacatagaaaacgtttgtgtgcatttggtctttggctttgttgccaaaagataatagtatgccaccttatatgtgcaaaaaaaggaggtttctggaagcaaattattgcaacgggagaaaagggagtacgttaagctagagcatgtcttgtgcatggagaaaggtagagcatgtcttgcatatgcaaaaaggtcaaaaaacaaaaacaaaaaaaatattgtcttgtatatgcaaaaagctagagcgtgtcttgtaaatggaacaaggtgagtatgtcttgtatatgcaaaaaggttt

SEQ ID NO: 152499 - DNA, 472 bp, Zea mays
  Clone ID: MRT4577_70661C.1
tcctcctcagcatgatcactcggtccgggatacgaaggatgctgaggcactactcgtaccgcgccgcgaaggcagccgtctacacctgactacgagttcatcgaccttcgcaatcaagtccgccggactctggaatcaccggacaacgagcacgacacctaagagagtacctcgccggacctcgttcggactgacgtcccacggtacctccagagcatgtcagaatgctcctggaggaccatccgcctgtcgatattcgccgcaagaagaaacagaaccatacggacccactgtactatgaacgtcgacccctacaactacctcgtgagtatcactacaagctcggcggtctccccctgaaccagaatctcatgtataacccacgatctggttgaacaaagacctcgtggtaaacttcaccacgttcatctgcctgtggatgacgccccaggcgcccaacacgtgggagcca

SEQ ID NO: 152500 - DNA, 425 bp, Zea mays
  Clone ID: MRT4577_70662C.1
tctccagatcaaccatggttacataacattattaaggctccacatgtcaattagctgtagaactgtggacgccagacttcaacaattctctctgatgaacaagtccaataagcatgcacttagggtcatagctgagcatctttcactagaatacgctgctgacatataggatatatttgccaagatggatcttaacaaggatcaaatgctcaatttctatgagctgaaccttggtctgcataaatctggtcaccaaatacctcatgcacatgttcaaatactaatggaagctgctgatgctgatggaaaccggtccttggattatggagaatttggtacactatctgtgcatctaacaaagattgtaaatgatcagcatcttcataaagcatatgcatactttgaccggaaccagagtgtgtata

SEQ ID NO: 152501 - DNA, 696 bp, Zea mays
  unsure (1)..(696): unsure at all n locations
  Clone ID: MRT4577_70663C.1
gccggccgggccgggaaagacggaaagttacagaagatcgacgagggtatgttgaagagcccagaaggaaaagagtcatgggcgaaagtacatcaagctgtttgagaacaccgttgcggactacaacttcggcacgttaatacgcacgaattcgcgggaagattacacggagaagaacaccatgttcatcacacggatccagttctatgccatcgagatctgcaggaaccgactgggcttgaacgaccgtgcccatgaacttgccaagaaggaatggaacgagaaacaggccaagaaatagatctcatcctgctccccccttcctttgcgaggagggggagatataattatgttttttttttctgctgtttctgctttgctcttttgtttcatttgttgttgtcgttagtggtggtgcggtccctcggtccctcggcctctccctccctcttcctccctctcttcgacagaacaataacgaccatactgacgtttccgcattgcaccaaaaagtcgtggatttccaagtagagaaactctcaggcagaatcgtattttcttgttttcatcagagaattatattttccaaaaaaaaactcgttatttgaacaatccgtggacgtcatgacttgaagaagtgatatatttacgtaattgaatatacnaaaaaagaaaaaaaaaaaaaaaaggccccta

SEQ ID NO: 152502 - DNA, 364 bp, Zea mays
  unsure (1)..(364): unsure at all n locations
  Clone ID: MRT4577_70664C.1
aacacccccacctgccgccgcgcgtccaagaatgtgtctccggatcaactcctgcttcggcgcgccccccgccgacgaggcccactttcatgccccgccgaacaagcacggcgcgagcaggacgacgcagcgcaacggtgcccactacaacagcaacggccacggccacggcgacggctaccccgcgcgcacggcggcttcccgcgccgaggcgggccgcaaggcgaccaacgacgtgaggagcggccccgtgcacgccggcgcgcaggagaaggcggnagnggnggngtacccgtacgccggagccgacgggacgctcaagcagcagcagcagcagcccgcggcgncnaacggcaggcccgcc

SEQ ID NO: 152503 - DNA, 292 bp, Zea mays
  Clone ID: MRT4577_70665C.1
tcgggagaccttcgactgcctccacaggggggatgtttcaaagcgcaaggttgagcatgccctgaagaagatgtgcagggagggctcatattgggggactgttgctggcgtctacgtgggcgtggtgtatggcgtggagagggtccgtgggcgcagtgactgggtaagaagatgttttgaacttgattcattcgactgccagaagaacttcttcttcttctgctgctgcactcgtgacccccctgcagaagaacgcgatggtcggaggctccttgtccggcgcgctggtctt

SEQ ID NO: 152504 - DNA, 777 bp, Zea mays
  unsure (1)..(777): unsure at all n locations
  Clone ID: MRT4577_70666C.1
cggccgctcgaggcggncggggctggatnctctgtncccgccgccgtgtccccatcccctccccaccccacccaccccaaaccccgcccaaaaccctagccgccgccgccgccatggacgccgccgcgctggaggccctcatcctcgacctgcacgccatcgaggcggtcaagctcggctccttcgtgctgaaatccggcatcacctccccgatctacctcgacctgcgcgcgctcgtctcgcacccgcgcctgctcgccgccatcgccgccctcctctcctccctcccggacacccgcccctacgccatcctctgcggggtgccctacacggcgctccccatcgcctccgtgctctccgtcgaccgcggcctccccatgctcatgcgccgcaaggaggtcaagacccacggcaccgccaaggccatcgagggcgccttccgcgcgggggacacggtcctcatcatcgaggacctcgtcaccagcggcgcctccgtgctcgagaccgccgcgccgctccgcgccgaggggctcgtcgccgccgacgcgttcgtcgtcgttgaccgcgagcagggcggcagggagaacctcgcggcgaacgggatcacgctgcactcgctcatgaccctcaccgaggtgctcgccgtgctgctgaagcacgggaaggtcaccgaggagaaggccgccgaggtgaagcagtttttagatgccaacaggaaggtcaccgtgccaggcgccgcaaagcccaggtggtcaggaaggggttccctgagagggc

SEQ ID NO: 152505 - DNA, 3820 bp, Zea mays
  Clone ID: MRT4577_70667C.1
aattcgctcggcgtcggtggagaagagagcgcgcgcgatggcaccgggtagatctcttcgccctgcggggacggcggcggttctgtgggcgacgtcgctgctgctgctgatgacgtcgtgtgtgcgcgcaggtggcgcgtacgcggagccgggctgccggaagcacgtgacagaggttctcgttagtacggtctgctgcctgctctagtggtgccggacctggggtggagcggagatccacaagggcttggattgctttcgttgtcttgctggctttgaggtggagatgacactaagttgaaatttttatcacacgaggaagcaagaacaggaaaaaaaatcacatttcagtgttgcactctgtggagggttcattgttggtccaccaaactactgcagtgctggagggtttttgttgaagtgctcttcatgttcaccatttctaaattgtcataggctcatagcattgtagctgatcagtcttcaagatcttcctatgagtacatagaaaaatcatcatcgtatctgtgttaagtatgccaccatggtggggaaaatcttcatccaaagaagtgaaaaagtctgccaaagaaaacctcatcgacacatttcagcgtctcataagttcaaatgagcaaaagggaagcagaaaatcacgaagtagtcgtagacatggtaaagacacagctggtgacaaaggttgctggtccactgctcaatcccgctcaacatccccttcaaaagaggtctctcgatgtcagagctttgcagcagatagaccacatgcacagccacttcctcttcccaaatcacgtgctaaggtgacacgtacttcttctgatattaccaactcaaagtccactttggaaaagcatggcaaaggacaactgcttccactccctccaattcagcctaaaaaaagacctgaagctactgaacctgttactgaagtagctactgcttcggtctccagcaactgttctattgacagtgatgatcctggtgattctcagcttcagagtcctgtgggaaatgaggctgaaaatgcgactagaattactgcaacaagtagttcaagtgttgtgcgcaaagaatgttctagtgctattaccagaaagaacacaaaggaagttgcaaagccaaacagtgctattctcagtaaccaaattctgtcaacatctccagaggaccgttgctgatggttatcaatccaatttacaaagcccccgacagattgccctggagagtgctccgaatagtttgatgtcaagcccttctcgaagcccaagaaatatatgtcctgttcagattccaacttcagctttttgggcagtaaagcctcatactgacgtaactttccttgggtctggtcaatgctccagtccaggttctggtcagacatctgggcataattcagtgggaggagatatgttaggcccgatcttttggcagcctagccgaggtagcccagagtgttcaccaattccaagcccaagaatgacaagtcctggtccaagttctagggtgcatagtggaagtgtctctcctttgcatccaagagctggaggggtcactcctgagtctccaacaaatcgacatgctgaagggaacaagaagcaaacccacagattgccacttccgccattaagcattgctaatagttctacctttttgccaaacagctctaacccaactagtcctatatctcgtagtcctggtagaacagagaatccaccgagtcctggttcacggtggaagaagggaaaattgattggccgtgggacatttggccatgtatatgttggttttaacagtgacagaggtgaaatgtgtgcgatgaaggaggttactcttttctcagatgatcctaaatcaaaagaaagtgcaaaacagctctgccaggaaatatcacttctgagccgactgcagcacccaaacattgtgcgatactatggatctgaaactgttgatgataagctttacatattcctggagtatgtttctggtggatctatacataagcttctccaagagtatggacagtttggtgaacaggccatttgcagttatactaagcaaatacttttgggcctagcttatttgcacgcaaagaatacagtacacagagacatcaaaggcgcaaacatattggtagaccctaatggccgcgtgaagctcgctgactttgggatggcaaaacatatcaatgggcagcagtgccctttctcatttaagggtagcccgtactggatggctcctgaggttataaaaaatgctagcggatgtaaccttgcagttgatatatggagtttaggatgcacagtcctagagatggctacttcaaaaccaccatggagccaatatgaagggattgccgcaatgtttaagataggaaacagtaaggagcttccaccaataccggatcacctctcagaagaagggaaagacttcataaggcagtgcttgcaacgtgatccatccagccgtccaacagcagtggatcttctgcagcatccattcgtacaaaatgcaccgccacttgaaaaatcatctgcctctcatccactggaacagttgacggctatatcatgcagaacaaattcgaaggtggttgagcatgccagaaatatgtcctcgcttggtttggaaggccaatcaattttgcagagaagagctgccaaattttctttgccaaatagtgatatccatatacggagtaatatatcttgtcctgtatctccatgtggaagtcctcttctaagatcaagatctccacagcatcaaaatggtagaatgtcaccttctccaatttgcagccccaggactacttcgggtgcttcaactcctctgactggtggtagtggagctgttcctttaaaccatgtgaggcaaccagcttacagaaatgagggcttcacggtcacatcaagaggttttgatgaccacatgcctagccggcctgttgatccagtacatggacgttttattcgagtgcagcaatttcccgtgggtcggcaggagagggtagtctctgaagttgacattctgagctctcaatatggaaagatgagacatgcaaatgtgtgggatccgcatgataggccattaccttctgagcgttcctctcaacagtgctttgggaatcatgcgaagctaaaaccttcactggacttgagatctggtcctcggcaccctgggcgcaatcatggccattgattctgtagcaaaagttaatggataagctttcagtcgtgtctatgtgatagctagtggtcctaagctggttcactgaaacctttaattgtatcatagtagaagagatgttcattaattatttcagatgctgacagttggcagtggataaagattctcaaatgtcaatctcatattcccattactctaaagaagatgagacatgccctatcaggaaggggatgttgtatactcaaggacccaaaacagtgactctgaacctgtatactcttactctcgtatctacaacaatttagttttcgttttcttctatgggtttggaggccattgtacagaagggaactctcaacaagaaatccagattacatggcacaggcgaaagcaagtgagccgttcaccaatctttccctttttttttctttttaatcctatataacagatacacatatgccgactgctcactgtaaagtgttgatcgaactgtggttgtaataccggttcgatccattaaacgtatctgttactctgaatatcatgtgaagagtctaatcgttaatcaaaactggtccagttctaaaacaaaaaaaaaaaaaaaaaaaaaaaaaaa

SEQ ID NO: 152506 - DNA, 690 bp, Zea mays
  Clone ID: MRT4577_70668C.1
aattttaaacagaacgcattttcttgggtgttcttcctgttccttgtgacgatgttcgagtgcattaccgtttacgacgactgagtaattgaggaagatgctagcagatgatgaatatcttcgtgaagaccctgacgaggaagatcatcaccctcaatgtggagagcagctgcaccgtccacaacgacaaggacatgcttctcgacaacgaagggattctcccctatgcagtgcgacttatcttcgatggaatcgaccttgagaatggacgcactgtggctgactaccctatctctgcggacccaactcttcatttggtcctcatgattaagctgggaaccatgatcgatgtctttttcccactgtcaaagacatcgagcatcaacattgaacccactgagtcgattgacggtgtcaccgagcgtgctgaacatagagaatgtattcctcccgtgcagcaaaggctcatctatgcagtcatagagcttgctgatcgacacaccgtgcaggactacaacatcgaggtcggatctgactcatccatcttggccttgctcagatgagtgcttactagtgtagacctgatgaactacgattcctataaactggtgtgatcgctgcgagatgtgcacgcctgatgtataacttgctaggagagtttaaccaactatcagcttatttcctgtgccc

SEQ ID NO: 152507 - DNA, 2258 bp, Zea mays
  unsure (1)..(2258): unsure at all n locations
  Clone ID: MRT4577_70669C.1
ccgtgggacatttggccatgtatatgctggttttaacagtgacaaaggtgaaatgtgtgcgatgaaggaggttactcttttctcagatgatcctaaatcaaaagaaagtgcaaaacagctgtgccaggaaatatcacttctgagccgactgcagcacccaaacattgtgcgatactatggatctgaaactgttgatgataagctttacatatacctggagtatgtttctggtggatctatacataagcttctccaagagtatggtcagtttggtgaacaggccattcgcagttatactaaacaaatacttttgggcctagcttttttgcatgcaaagaatacagtacacagagacatcaaaggtgcaaacatattggtagaccctaatggccgtgtaaaacttgcggactttgggatggcaaaacatatcaatgggcagcagtgccctttctcatttaagggtagcccatactggatggctcctgaggttataaaaaatgctagtggatgtaaccttgcagttgatatatggagtttaggatgcacagtcctagagatggctacttcaaaaccaccatggagccaatatgaagggattgccgcaatgtttaagataggaaacagtaaggagcttccgccaataccggatcacctctcagaagagggtaaagacttcataagacagtgcttacaacgtgatccatccagccgtccaacagcagtggatcttttgcagcatccatttgtaggaaatgcaccaccacttgaaaaatcatctgcctctcatccactggaacagttgacgactatatcatgcagaacaaattggaaggtggttgagcatgccagaaatatgtcctcgcttggtttggaaggccgataccaatcaattttgcagagaagagctgccaaattttctttgccaaatagtgatatccgtatacagagtaatatatcttgtcccgtatctccatgtggaagtcctcttctaagatcaaggtctccacaacatcaaaatggtagaatgtcaccttctccaatttctagccccagaactacttcgggtgcttcaactcctctgacaggtggtagtggagctgttcctttaaaccacctgaggcaaccagcttacagaaacgagggcttcacagtcacatcaagaggttttgatgaccacatacctagcaggcttgtcgatccagtacatggacgttttattcgggtgcagcaactttctgcgggtcgtcaggagagggtggtctctgaagctgacattctgagctctcaatttggaaagatgagacatgcaaacgtgtgggatccgcatgatagaccgttgccttctgagagatcctctcagcagtgttttggggatcatgcgaagctaaaaccttcgctggacttgaggtctggccctctgcaccctgggcgcaaccatggccattgattctctaagcaaaagttaatggagtcgtgtctatgtgatagctagtggtcctaagctggttcactgaaacctttaattgtatcatagaagaagacatgttcgttaattatttcagttgctgacagttggcagtggataaagattctccaatgtcaatcccatattcccattactctaaaaaagatgagacatgccctaccaggaagaggggatgttgtatactagactgtccagataccgaagggaccccaaagcagtgactcttgaacctgtatactcttttactctcgtcgtgccgacaacaatttagttctcgttttcttatgggtttggaaggccattgtacagagggggggaactctcaacaagaaaaatccagattagaaggcacaggagaaagcaagtgagccattcaccaaccttttttcccttttttttttcttttcaagtcttagcagatacatatatgccggctgctcgctgtaaagtgctgattcagctgtggctgtgataccggttcaatccgttgaacgtgtccgttactctctgggaaaaatcatgtgaagagtctaatcgttaatcgaaaaaaaaaaaaaaaaaaaaaaaaaaaaaaaaaaaaaaaaaaaaaaaaaaaaaaaaaaaaaccaaaaaaaaaaaaaaaaaaaaaaaaaaaaagncctttggggttgttccccctggtttaggggcgatttttgcagttttccttcacattggcggccgttcgggcttgctttttggggccccatttcccccttttgggggtcggtttccatttcccgggccgcggttt

SEQ ID NO: 152508 - DNA, 468 bp, Zea mays
  Clone ID: MRT4577_7066C.1
ccggcctacggcaacctgtccttcgagacgatgtcgtacctgccgccgctggagaagtcacgacctgactgaagtaggtggtactatctgacagcgatacgcatgcataccctgtctcgagatctgcaaggtcgcgcttcgatgcacctctgagaactccacctcgccgtgttacgatgacgaacggtactgtaccatgagggaagctgcccattgatctgctgcaacgacgatcacccataaagaacaaggtagcctgcacgatatcatcagatcctacccggacggctatccaccgccgtatcaagcttcaaccacatcatagaatattccgagcgtttgcttcttcgtctactataccccgaactgagactagaccgcgtgcggcggtcgtcccccgactcactacgtagctagatagctcctgcgtgagctatcagctaacggcatgagtctattctgtcctta

SEQ ID NO: 152509 - DNA, 212 bp, Zea mays
  Clone ID: MRT4577_70670C.1
tccgggattctggttgcctgtggccgttgtgttgtcttgcagaactggagtggacagaggctgccaaacgcgccgcgacatcggacttggactgagctgaaaagatgtctggatttctagaaggctccaggtgctccgagtgcatggactggggggagaagcggaacacagttgcctccatcgccgctggcgttctctttttcacaggatgg

SEQ ID NO: 152510 - DNA, 663 bp, Zea mays
  Clone ID: MRT4577_70671C.1
aaaaaaaccaaaaacaaaaaaactgggggaggcgttccaattcccagaaaaacttttttttagccccacaggggaatgttttctaccactggggcgaagaaaaactgaccccccaaaacaacaacaaatttaactagaagacagcagagacaatagtagccctagcataccaacaacagatggcataatagcataggggggaagacccacaaaacaaacccgaggttttttttttttcctccataaaaaaaaacccagtttaggggacctcctccattttgttttcgccagggtaatcctccagagggggcatgtgggggtaagcctccggagcctcctcgtcctggtggatgctcaggcccagtttgagcatgcgggggatgcggttgccaaaggggttgggatcgtcgaggctaaagccaaaagggagcagggccgtttcaaacagaagaatgacagggtccttaacggacttgtcgtttttgtcagcctcggcacgcttggggagctcctccatgagggggttctcggggttgatctccatcgtctttttggaggacatgtacccaaacatgctggagtccctcagggcctgggctttaatgatccgctccatggggggggtccaaccgtactcgcgggtcaccaggcaggagggggggt

SEQ ID NO: 152511 - DNA, 174 bp, Zea mays
  Clone ID: MRT4577_70672C.1
tccatctcaccgacaccgaggcataacagattatcgctgtctgactatgtagtgcgtgatcccgcgtgacagacacatgatgactatgaccctgcttgaccccggcccaataaggcggcgagctggtggtcattgacttcactgccgcctggtgcggtccatgccgcgccatcg

SEQ ID NO: 152512 - DNA, 1959 bp, Zea mays
  Clone ID: MRT4577_70673C.1
cattgggtacctcgaggccggctgggatcgagtccaggccagcgaccgcgtttccgccttctcctccccttccacctccgatggccacaacggcgacaacgatggcgccggtgacggcgccggtggccacagccaacctcgaacctacaccaacacctctgcatccacgtcctgccgcgccacctcatctccgggcgctttccaccttggcccccgtcaagtcagaggctcctcccaccccctcgtcttctaccgccatcaccgccgcagccggagcggaggatccatcctacatcatcaccgtccctagttattcagcgtggttctcgttcgactccatccacgacacggagcgccgcctcctgccggagttcttcgtgggggaggccgccgcggcgtcagggtgccggggcccgcacgcgtacaagtactaccgcgactccttgatacggaggttccgggcgcggccgggtcgacggctcacgctcacggaggctcggaggggccttgttggcgacgtcggctcagtccgccgcgtcttcgatttccttgaggaatgggggcttatcaactacggtgctttgccatcggggtcaaagcaagctaaagagaagagggaagaggctgcacaacagtcctcgttgccttctggggcaattgcacccaggaagctctgtaccggttgccgcaccgtgtgtgggcttgcttactacgcctgcgacaaggcagatataagtctttgtgctagatgctatgtaaataataactaccggccgggcctgtctcctgctaacttcaagagagttgaaattactgaagatgcaaaaccagattggacagacaaagaaactcttcacttgcttgaggctgtcttgcattatggggaagactggaaaaaggtgtctgaacatgttagtagtcggtcagaaaaagattgtattgcaagatttataaggctaccttttggagaacagttcatgggacacaaggaggatagaatgaggtttgagaatactgatgacaatactgatgagcctggagcaaatgtctcaaaacgactacgtctcactccactagcagatgcaagcaatccgattatggctcaggttgcatttttatcagccattgtgggttccgatgttgcctcagctgcagcgcaagcagctatttctgcccaatcccgtgttgaccttaatgacggcgagattgaaacttcaataaatagcatcaagcaagaagaatcatctcacacaaatgggctctcagccaacgtgttactgaaagaggcagctgctaatgcacgggcacaactcgagaaggaaaggaacagcatagagcaatctttatcaaacatagtagacgtccagatgaaggaaatccaagataaaatatgccggtttgagcagaaggagatgctgatggagaaagagcggcagcagctccattttctaagggatctacttttcacagaccaattggcagtcatgcagcatcaacaaaggagtccagctgtagccacagagtgcaagggtgatgagaagccaaagcccgtggctagcatgagttgatacgagtagatcctcagcgtagcatggtttcacttcagatgtagcattggagctgcgttcatccgcatctgccgttggtaggattggaactaatttaatatactacatataggccctggttctctattggatggtgtttctgttaaatttggcgtcccctttcccttcttgcaccacagatgcctggagtgcaagggaagttatgatgacgactaccgattaccacatgcttcactgcttgtgcgctaacacgttgatatctttgccagtggcgcaacaatcgtgtatttcttgaccaaaacatccacgcaaagctccggtagattcgatggtgactagcaaggaaatacatactctctgttaatttatattttatttgattttttgccct

SEQ ID NO: 152513 - DNA, 423 bp, Zea mays
  unsure (1)..(423): unsure at all n locations
  Clone ID: MRT4577_70674C.1
gccggccgggttctactcaacgcagcganangagcccaggcgataaaaaagaaaatgagcgaggccgtcgaaaagggaagcgcagccgcagagtgggtgaaaggtggggggacgattcggagagatcgagattgaggttagagatagtgacgtctttctcttcctctttccttcctttcttcttccttcgttcctctctttttcctccctctgttctttttttcctctctccttctttctcttttctctcttctctctctctctttctccttcttttcccctttctttttttctgctttttcttctttccttcttcttctccttctctctctttctcctcttccttttctccttttcttttcttctcttctttttctttcttttttctttttttttttccctcttttctatctctttcttttt

SEQ ID NO: 152514 - DNA, 376 bp, Zea mays
  Clone ID: MRT4577_70675C.1
ttgcggttgccctgtcgagttgattttgacaaggaacactttccattccatggccgagcagacatacctgcaacagtataaatcacacgaatgcggccatacgcatccattctgttcgtcttaaaggagtcagcttgacaggtgtgaggcgccacctattgtacctcacttgggccggcgaggacgagtattataagatcctattccacgcgggcacgaataggggcatgggagggctggccttgacccgacgaaacatgctacggttccctcgtggaagcgcaaacggcacattgatcagtgatttgttttccacggtgcctatcgtatctgtgcccaagaagggtttccaggtgatggttcaaagggcccccgc

SEQ ID NO: 152515 - DNA, 543 bp, Zea mays
  unsure (1)..(543): unsure at all n locations
  Clone ID: MRT4577_70676C.1
tcgtctcgtcccacgtcgtctcgcaccaaattacccaagtatttgtgtggcccgtaataaagaagccctggtcaatcttattagaggttgcaatacaattaggcaaagggtgggtgntatcacgtcgacaacggccttctcgttaccaatatgatgggagagaatcgggtatggcgtgccttcgggtgattnggtatcaattaccaanannggcaggacccctggtatcattattgcatgatggcatattgatcccccgtggcttacccacattatntnnctaaatgattantcattgctggaccaaggaagctggccaatgtccccctacccgttgttcgaaaatggggatgtgggaaatnnttctcgaaatctcccaaaacaagattggcgatagattagtttgccgacctggtttgtgcccaaaggtcaagaccgaattcaggggtaatggtcccaagaatgcccctcatagctagcaacgaccctgatgcttgtgttcaataatcgtccaacgatctgcacgaagctcgtcagggaaaa

SEQ ID NO: 152516 - DNA, 267 bp, Zea mays
  Clone ID: MRT4577_70677C.1
cccacacatcctaccactcctacgtagatgttcaccagcatacctcaatacattccatctgatcgcacttaaaatggtgagacctcattctatatacattctcatactcatcttctactcgttcatcaacattatcattctcatttcatacattatattgaccatatataccttctactatcttcacatctctcatttttacaagcgcacgattatccatactctgaataatatctcctatcatctcacttattatcagactatctc

SEQ ID NO: 152517 - DNA, 858 bp, Zea mays
  Clone ID: MRT4577_70678C.1
cagtaaacttgaacattcgatgtatgctatacataatactaagtgcgcaatgtgcctctgcgcactctatagaagataaatttcagtacatgcatcatttacaacaacggagctagaattgctttccttccttttccttggtagcagcaattaagtacgttgcgtacatatatgcgtcgcgtcgtatagtggggcctacttgatgtgccgacgtacccacacacgtacacttgcgaagtcaagtggtatagtatatggagttattctgagacgacgacgactggccgatccatcgtacgtatcagttgttttcgctggcctcgacctcgtcgctgccgggggggcagggacacggcttttgagtagtgagctttggcgctggcggcacggcagtcagtatagcggtggcttgggattgtgtagggcaatatggtgtaggaatgtaggcaatggcgcccaacattaacatcaagaattaatctgttcgaactcgtggaaggctgctaatttttggcatcatcatcaacagtgttattaaaactacgtttaaacgtcaaaactctaattagaggttgaaatcacgttttagcgttttggcgttctaaactgtaaaacgcagtgttttatgcattttagaccattagctatttttgggcccggtctattagttacttttggggttcaatccagctcatgggtgaatttttggtaagccactaacctctttgttttggtatttaacttcatattattgtctgaaattatgatatattggtatttttcctatgttgtttaaaactacgtttaaacaaagtttaaacgtttaaaagtcaaaatttcacccatgagcgttccaac

SEQ ID NO: 152518 - DNA, 603 bp, Zea mays
  Clone ID: MRT4577_70679C.1
aaaaaaaattgaaaacgcttttaaagataaaaattttttttttaaataaagctgcaaatttccattgacacaagattttggttctttgtatgcataaatggaaaccccaggattaacatgtcccaactggtattctaaccagttggtccaatatttcaagaacgtcattgaaataaaccctacctattgctgtagtgctgttgttgattacagaattatttactccgttctgaagttgaaagaatttctggacaacaagatatgcgacacaaatatttgacggtctcaaaccgtgctaaccacccaaagaagttcgaggtgctgccagtttatcagagttcttttgctgcaggggatgatttttcatcccttactgatgatagaaagacaagagcattggttcatgctatggtggagattctttttttatgtggaactgggaaaagagctgttgtagcatctgttgcacgtgccaatcgtgggaaaattgatgcagctttggaagatctttctgtcgaatcagcagtggatctgcagaaagttcttaaaacaagtacatttacttcaaggaaagatgcattcaacacccttttggctaacatt

SEQ ID NO: 152519 - DNA, 627 bp, Zea mays
  unsure (1)..(627): unsure at all n locations
  Clone ID: MRT4577_7067C.1
cccggggctctctagacctcattgtcgcacgcgtgcagctatactgtgccagttgggtagcagatggcctaccgagtcccgcgccggcaggcggggcaataagtaggcgccgttcccctaaggtggttacgcttaatnaagccctgagctgggccagacgtgtgtggacaaagatgagtgcgtcttagcgcggcagacacccaagatatgaagattgagtgggccggacaccatgctgggtattggcgctaacgcggacacctgatgcgaaggctgtgttttccactgacctattgacaagagttgctcggtatggtgaatgcgccaaaacaggatgcctggttagatgatgatatgaatatactgtaggtacgaggaatcgaggactatgcggacacactattgagcgctgaacagcaggaaccatgagacctttaacaacgaagaggcccaggccctaagtgccttttacaccttttgacatgaaagctaactgactagatatgtgcatagactactctgactgatctgctagtggataacacatatgggactatctaaccaactgaagttctaatcctaatgtgtattctacgtatttatacttcacctacagatgcctgaata

SEQ ID NO: 152520 - DNA, 249 bp, Zea mays
  Clone ID: MRT4577_70680C.1
gaccagcttttatagtgccagcctatgagctgacaaaggattacaggattttgcttcctctcatgtgaacaagggagaatattatgaactgaaggtcatgtatcagcgaaaagcaggctttcctcttgtagcaattgtgcactgaaaaactacagtgcccttatgacaccacaacagttctaagcatgagcaagctgggttatgatggtgttgtggcactgctggttgctgatatatcactttcaatcg

SEQ ID NO: 152521 - DNA, 1476 bp, Zea mays
  Clone ID: MRT4577_70681C.1
gtcctggcaatcactttgggaaggtggtcagtggaataactttgcttaaaaagcttgaagcagttggtagtgaaactggaaatccttcttatcaagtgaaaattgtagactgtggtgaagtttccaacacaaattctcaggatccgctaaagggagataaagtaagctcaaagacagataacagcagttcagacagtgaaaagggtggccatcgtaccaagcgttccttgacgaaaggcttcaatgcagcagttgctgggtgcttctttgccattgaaactgtattaagacctcttaaagcagaaaattcacctccatttacgactgcaatgataatattggcatctgttatatcatctactgtttcaaatgttttacttggagccagaccagcttttatagtgccagcctatgagctaaaatctgctgccgctctgactttctataggttggaatggctgctacactagcttcagtctgttcagtcccattgacttcagtactgcttctctttgagctgacaaaggattacaggattttgcttcctctcatgtgaacaagggagaatattgtgaactgaaggtcatgtatcagcgaaaagcaggctttcctcttgtagcaattgtgcactgaaaaactacagtgcccttatgacaccacaatagtaagcaagactacaggacatctatgcgaaatgcagctagccagctacactgatgtagagatcattcaggttctaagcatgagcaagctgggttatgatggtgttgtggcactgctggttgctgatatatcactttcagatcggtcttgaccagattgaagctctgtatcagtatgcccaatttcagtttgagtgtggtaactactcaggggctgctgattacctttaccagtatggtgctttgtgcacaaacagtgagcgaaatgtgagtgccctctggggaaagctagcagcagaaatcctaatgcagaactgggacctagctttggaggaactcaaccgcttgaaggaaataattgattcaaagaacttctcatcacctctgaatcagctccagaataggatatggctgatgcattgggctctgttcatcttctttaaccatatcaggtacttgaatgctatacagacaaatgcacaccatcttattaggtatctagctactgcagttgttgtcaacaaaaggagaaggaatatgcttaaagagttgattaaggtcattcaacaggagcaccatagctacaaggatcccgtaactgaatttttggaatgcttatatgttaactatgtagttgtgggcttttgaacaatagctggagtgatatgaaacattagtgatgtagttgtgggcttttgaactgcttcaagcaggagtgatgccgttgtggtgcttttgtgactgatcatctctggagcttttgtgaatgatctagctagctatctataaatgatctagttgtgaatgatattat

SEQ ID NO: 152522 - DNA, 665 bp, Zea mays
  Clone ID: MRT4577_70682C.1
tggccgcagctgcagatgtgctccagtggagcttaccgctaccactttgtgttggacacttgaactgcaatgcacagtcacgggcacagatagtctcatctcatagtcagatccagcctctccgaatctggccagcacagggaacaacacgccgtgcacgcacgccccgcatgaggggaaagaaccgattcaggttctaagcatgagcaagctgggttatgatggtgttgtggcactgctggttgccgatatatcactttcaatcggtcctgaccagattgaagctttgtatcagtatgccaaatttcagtttgagtgtggtaactacttaggggctgctgattacctttaccagtatggtgctttgtgcacaaacagtgagcgaaatgtgagtgccctctggggaaagctggcagcagaaatcctaatgcaaaactgggacctagctttggaggaactcaaccgcttgaaggaaataattgattcaaagaacttctcatcacctctgaatcagctccagaacaggatatggctgatgcattgggctctgttcatcttctttaaccatatcaggtacttgaatgctataccgacaaatgcacaccatcttattaggtatctagctaactgcagttgttgtcaacaaaaggagaaggaatatgctt

SEQ ID NO: 152523 - DNA, 657 bp, Zea mays
  Clone ID: MRT4577_70683C.1
atggcgggtgccgccgccactgcccactgcacactcagccgtccgcccagccctatctcttgcacgcaccgcatcttcttcataccctccccatcttcctctagcgccagccaccagggagctgcagatgtgctccagtggagcttaccgctaccactttgtgttggacacttgaactgcaatgcacagtcacgggcacagatagtctcatctcatagtcagatccagcctctccgaatctggccagccttgaccagcctgaacgactggcacacagcacagggaacaacacgccgtgcacgcacgccccgcatgaggggaaagaaccgattcagatcggtcctgaccagattgaagctctgtatcagtatgccaaatttcagtttgagtgtggtaactactcaggggctgctgattacctttaccagtatggtgctttgtgcacaaacagtgagcgaaatgtacttgaatgctatacagacaaatgcacaccatcttattaggtatctagctactgcagttgttgtcaacaaaaggagaaggaatatgcttaaagagttgattaaggtcattcaacaggagcaccatacctacaaggatcccataactgaatttctggaatgcttatatgttaactatgtagttgtgggcttttga

SEQ ID NO: 152524 - DNA, 2147 bp, Zea mays
  Clone ID: MRT4577_70684C.1
ctcctctctctcccaagcggctctccctctatctcctcgtttctctcccctcctcttctacagccgctgccaggcaaccgaccgccgagcagcgcagccacccgagccccacgcccgccgcgccaggaaccagcgcccctgctctcgccaggacgccaggaattgctctttctatagcaagtttatgagttcagtttatattccattgaatatttgttgcagtgaagagaaatgagagaaagccttcggttgtagccttcagtttatattccattgaatatttgttgcatccgactcatctctgtttcgattccatccggtttggctcattttttaatcgagtgtgttgtagttttgtaccctaatgtcgtgggagtgctaccgaagtactgatagcatcactttaatttcattagctccgtcctggcaatcactttgggaaggtggtcagtggaataactttgcttaaaaagcttgaagcagttggtagtgaaactggaaatccttcttatcaagtgaaaattgtagactgtggtgaagtttccaacacaaattctcaggatccgctaaagggagataaagtaagctcaaagacagataacagcagttcagacagtgaaaagggtggccatcgtaccaagcgttccttgacgaaaggtgagctctagaatgttgagccttggcgctctcaccacatttgattacttggggattgagtaaccgggaaaggcgtattgcacttgttgctgctggcgctgctgctggcattgcttcaggcttcaatgcagcagttgctgggtgcttctttgccattgaaactgtattaagacctcttaaagcagaaaattcacctccatttacgactgcaatgataatattggcatctgttatatcatctactgtttcaaatgttttacttggagccagaccagcttttatagtgccagcctatgagctaaaatctgctgccggttggaatggctgctacactagcttcagtctgttcagtcccattgacttcagtactgcttctctttgagctgacaaaggattacaggattttgcttcctctcatgtgaacaagggagaatattgtgaactgaaggtcatgtatcagcgaaaagcaggctttcctcttgtagcaattgtgcactgaaaaactacagtgcccttatgacaccacaatagtcgctcgaatgcaactgtccggcctagcatccaatcgacctcaaccactctgcatcccacgtgtgtgtggagctgatgaacatgtcgatgtgcaaattcctccagctcgagtacttggagattacatagtcttctccattgtttttctagactttgaggttctaagcatgagcaagctgggttatgatggtgttgtggcactgctggttgctgatatatcactttcaatcggtcttgaccagattgaagctctgtatcagtatgcccaatttcagtttgagtgtggtaactactcaggggctgctgattacctttaccagtatggtgctttgtgcacaaacagtgagcgaaatgtgagtgccctctggggaaagctagcagcagaaatcctaatgcagaactgggacctagctttggaggaactcaaccgcttgaaggaaataattgattcaaagaacttctcatcacctctgaatcagctccagaataggatatggctgatgcattgggctctgttcatcttctttaaccatatcaggtacttgaatgctatacagacaaatgcacaccatcttattaggtatctagctactgcagttgttgtcaacaaaaggagaaggaatatgcttaaagagttgattaaggtcattcaacaggagcaccatagctacaaggatcccgtaactgaatttttggaatgcttatatgttaactatgtagttgtgggcttttgaacaatagctggagtgatatgaaacattagtgatgtagttgtgggcttttgaactgcttcaagcaggagtgatgccgttgtggtgcttttgtgcactgatcatctctggagcttttgtgaatgatctagctagctatctataaatgatctagttgtgaatgatattataattgtgatgcttttgtgaatatataattgtggtgcttttgtgttaaaaaaaaaaaaa

SEQ ID NO: 152525 - DNA, 568 bp, Zea mays
  Clone ID: MRT4577_70685C.1
ggccgggctacatcgccgtcgcagcgcaaggcgagctatggactgctagacctagggggctaaaacgtggtccctcttctcgcagttgccttggaccgcgctcggtccattcctggccacgacagcatgagggagtgctctaacgatgcacagatgctcagcggcggcatccaggcgggaaacgcgtgcagggcgctgtgctgacttgagcatggcactgaaggtgacggtcagatggacggggacaagaccatggggggaggtgatgatgcttttagcaccttcttcagggggactggtgctgggaagaatgtaccccgtgctgctgctgttgaccttgaacccacgtgggtggatgaggtgaggactggcagctaccgagcagctgtgcaccctgcgcggctcatcagtgggaaggaggctgcggccggcacctttgcccgtggccactaaaccattgccatggagaccaggtggcctatgccattgtcgcatgaagagagcttggcggcaactgcactggctcaccagggcgtccctcgcctttaacgctgggggtgcgaggaac

SEQ ID NO: 152526 - DNA, 319 bp, Zea mays
  Clone ID: MRT4577_70686C.1
agtagatcgccgtcgtccccttccgaaatcttctttcgtgtattcctccccaccgcaagaggttgcttttccttccatctacggaggcattccttcccttcggctttcaaccacaagaacttcaacttcaacccggcttggccgccgccgaagaccccattttggaaaatccaaatggaacacccctggcccattaacaatcagaatccgtttctggggctaacctcttaacagggcccccttggcaaacccgggcaacaacattgcgcttcggggcgctccattggccgttggaaaccctgtaacggggagcccccca

SEQ ID NO: 152527 - DNA, 679 bp, Zea mays
  Clone ID: MRT4577_70687C.1
atcgtcgcctcgcttcttctctttcccggcgtcctctgctcgctgctgtcgtcccctccatctccgggtgtgacacctgctatccccacaccgcgaatcggatatcgcccacaaccagagactgacgagtggtccttcgcgctcaccatcgctgttctaccatgctgttctccaagaaagagatgggtgatcctgatcgcctactcgtcgagcaccgtcggctctgagcaccatcctctacgacttgaaggtcggtcatatcgttgcccccatcccctgcatcgaattcatggccgaaactgcggagaacgataacttccacttccctgtctgggatgaccccttccatgtactatatcatgccactgtgcttgcattgcttcgcagaatgcccaggtcctcatctttgtggtggacggctttgataaggctcgtgttgctgaagctagggatgaccttgcaccgagtgctccttgctgatcaatgtgcgtgatgctgtgctgcttgtgtttgctaacctctgcgatcttccaaagtgctatgaatcgctcgctcgacatcactgatattgcttgcactgcattcacttctcccgcgttcttgcgacattactagctcttgtgctacagcgagtgaagaattgtatgagaggctgtactcgctgagctgctccattgcc

SEQ ID NO: 152528 - DNA, 356 bp, Zea mays
  Clone ID: MRT4577_70688C.1
cggacgcgtgggttctggacagaggtagtacatactagttatatttatcctccatacgttcattgtcatttaattgacttgctgtgcactgatatgcatgaaacaaataaatggtttgccagacactgcagttggtttgcatgcttgaatcagaaaattgttcacacttcgcattagtgtagaaatgcaggactgggctcgctgtgtcccagccctggttctgggcacaaaagtgcaaggaagcatacttaaaaaagtgtagaaattttagtcaaaaaatctttagcatgcaacttgctagcccaggtggcagtcaaatcctggatccgcccctggttctcaatatcaatgtcact

SEQ ID NO: 152529 - DNA, 236 bp, Zea mays
  Clone ID: MRT4577_70689C.1
ctatgacaatgactcaccgggatttcgcatctagtcaggaagcaaagccattagaacactgcttcaaactcatgctcctgcacttgccaataatgattcagcctatcattgtgataagagcctgttcacacttgtagcacttcctcacgttaaaaaccagtttactatcgtggtacacaaattttcacctgaaacaactcctgaaaacggctcatcacgaaatgacagccctcccg

SEQ ID NO: 152530 - DNA, 280 bp, Zea mays
  Clone ID: MRT4577_7068C.1
gaaagctcttctcctctcttgatcccatctctatcccaatcccttggcccccaggctcactgcggcttatacagtatcctaacctgctactaatcacagagaaaaatgtgaagaacgaggagcagaggaaggctagaagcctgagcaagtgagggtagaaccttttgggactggcctttgaagcgctggccagggatggcgggggggccataaggacagagcctggtatgtcttcatagtcattgagaatgtggagataccagttttggtggggggtgat

SEQ ID NO: 152531 - DNA, 281 bp, Zea mays
  Clone ID: MRT4577_70690C.1
tggcgacgaagacgaagacgaaggctccgcccccgccgctgatgacgacctttccgagatcgtcgagttctactcgcaggacgacgaggacgaggacgagggccgcgaccacgggttaagcaccttaagcttctagtaaattcccggtggctaagttaaataatctaagtatattcttaatccgcgtcatttagctctcgtcagtcgtcattgatgtgtataatgctatatatacatgtaaaatgtataatcaagattactactaattgttgttttaaata

SEQ ID NO: 152532 - DNA, 223 bp, Zea mays
  Clone ID: MRT4577_70691C.1
tttttgggggtttttttttttttttttgccctttttttcccacgaactttttgatttttctcttttttctctcctattgaccatagtcggaaatgcaagcgcgggcaaaacaaagggggaaccttcccgctagccactctaggtaaaaaaacttttcagccccccaaattcgggagggcagggtttaccagtttggccttactcccatttaacagcccagggt

SEQ ID NO: 152533 - DNA, 1103 bp, Zea mays
  unsure (1)..(1103): unsure at all n locations
  Clone ID: MRT4577_70692C.1
ngacgcattacgcatgtatgtaaaaaccattttttttaccttttgacggttccattccaccgtcgccttgcgtaagcagcaaggtataatgatgctgctggataaaacttatctgccagaggcaaataacacgctataaacctccgacgcggagccagccagtagccagtcacctccttcaccgcgctcgcccttctttataacacacaaggtgtgtatacgtggccgtggggtggtgcagatgggattagccatttcgaagataatccaatgaagagcattctaaggggaagggatgcatgggatatttgtaacgcaccttgtacgtttatgtttttctgtatttctgtaggatgttggagaagctatttggtagctaactcgatctatttatttatgctgaaagttctaccagcatccaatccgtggctctgtgtgttggtacaaaacttggataaagagagtgaaatttaagaataactgttgcagatagtcttagcgggtcactacgggcagcactaacatgcagtgtatcacgcacccacaagaataggtacggctggctgctgcctcctcggcccataatggccgtgtcccttctcgacagacattaaggctatttttagcagatctcctatcacatttcctattttatctttacactataaacaatgttaaacagtggttaaacagtgttatctatagttttatgttctctgttttacactacccatctggaggcagtctaatagcgccatcatcctccacaggaatcagacaatcacggtggctaaccacgccacatgtggatcgctctctagaggattgctgacctcagtcgggtggagggccggtgtgtgtggcgatgagatcctcacttccagggtggatgagttggggtcgtctgtggggtggtgtggtgtggtacggtgagacgccatgaatataaaggagaccggacacgagcaagcggcacctcactccctctccctctctcctcagccaaagttgacagcagcctacaagcaccagcagagctcttcccggtggccatggccaagcccccgcttcagacggccacgatcatcctgctcgcgctcctc

SEQ ID NO: 152534 - DNA, 265 bp, Zea mays
  Clone ID: MRT4577_70693C.1
acctggggtgttcgtttgtttttttttatggaggctcgaagactgcctacttatatatatattgtgtactcaacagcgccatgcttcaagtaaacaaggtctaagacactggctctgccaggcttaaacaccctggtgataatgactgcgaatatccggtgacaggggcgggctggagctcatgggatatctgtagaatttaaagatcctatctctgactcgctgaaaggcctgagctgtagacgaaaaccaatctatttattct

SEQ ID NO: 152535 - DNA, 262 bp, Zea mays
  Clone ID: MRT4577_70694C.1
cggctcgtggtggagcaagaaaccacagcagatcagcctgcctttcatcatatggtgcagcaggagtgcaggagtgccccatcggccaacagattcgctggaagaaagtcaaccttgagccattttcttattgcaatccaccgggcaaaagaacccaagcagcagaaagcctggttgcagaggtgatggcaggcactaaggaagagtgcaaatgggcaagctgatcctactctccagtatcagggaattgttccctggagaa

SEQ ID NO: 152536 - DNA, 398 bp, Zea mays
  Clone ID: MRT4577_70695C.1
agacggaatcgtaggagagcacaatcatcgagccggagccgccggtgtcatgcgccacgctgtcatggctctaacaggacgagctcaactacccgtccatcagggtcatcctcagataaccgcccttcaccgcgacggcgaagcgcgccgtcacaatcgtcggcacggccagctcgacgtacaccgtcgccgtgaacgtgccggcgtcagtcacagtggaggtgatcccgccgaaactgactttcaaggcgctggaagaagtcctgaaatactcagtcacaagcaagtcggccaatggccagacgcttatcggccctgtcgagggggagctcaaatggttgtccggcaagtaattcctgcggaacacgatcctcgtcagtaacgaatccaggacctcg

SEQ ID NO: 152537 - DNA, 341 bp, Zea mays
  Clone ID: MRT4577_70696C.1
ataaaatagagacttatggagaggggtatttatgagggggagggcagggaccacatgtcccggtgtgtaaatcctcctttgttcccattgatcgatgcgtacacatagataagtgctgttgtaatattgtcttaacacacgtaccaaaacaaaggcggcgttggttctacatttaaaagaagcacactaatggctagctaggttattaaacactagctatacgttcctacccaaacccgaaattttggaaaaagaaaaatttctcaaaaacatgactttactggagacaagcccgcgtttgtaaacactattattctaagccaatacttgtcgctaggttt

SEQ ID NO: 152538 - DNA, 4755 bp, Zea mays
  Clone ID: MRT4577_70697C.1
atggtccgtatcgccgagcatagtggcgaaacctgtgaaagtttctccatggtggaggaagctgcatcttctaggccgcagagctctagccatccgacgcttggtgttgcagccatgcgccctgcacggcggcgcacgccaggagtgggttgtgctggcctagcagaccacctccgtgcggcgacgtggccgcccaagtttcgaccacatctgccggaaaagtacgatggtgcgacgaacccatcagaattcctccaggtttatgtcaccgccattacggcagcgggtggagacaccaccgtattggcaacctacttccatgtggccctgtctggaccagcccggacttggctcatgaatcaagccccaggatccatctgctcctgggaagagctctgtgtgtggttcgtggtgaacttcgccagcgcttaccagcggcacggagtggaggcacacctccatgcagtgaggcaggagcccggggagaccctccaagcgttcatttcccgcttcaccaaggtacgagggacaatcccccgtatctcggatgcttccatcatcactgctttccgccagggggtatgtgatgagaagatgctggaaaagttggccactcacgatgtggacgacgtcaccacactccttgctctgtctgacaagtgcgccagagccaccgagggacgtgcttggcactcggtaccacaggtaaaggttaccaagatgggcgactcagatgtcatcacccagggcggaggtaggaagaaaaagagaaacaagaaccacgatcacgaaaagccacgattcgctatttcagttgctgccgccgctgctgggggccaaggcgagtgcggcaagccccacggccccagggatacagcggtgacacgtgcccagtgcaccccaagagccgccactgagccgccgactgccgtgagattatcaaactcgcacggcgcgtcaaagggagctgacggaaaagccatggctacggaaggacaagacctcggctaccagtcgcccgaggggtgcctaaaggacgttttcaccagagattctgactccagcgacggtggcgaccgtcgcaagaagatgtatgtaatgtacggcggaagctgggagctcacctcccgcaggagtgtcaagtccctacactgggaggtactttcggcagtcccaggggtccccaaaaccactccgcaccaaggctggaggggcactaccatctccttcggggcatccgactgccccgacaacatggagggagccggcgtgctgccgctcgtcactgcccctgttgtcgccaacatgcggctacatcacgtgttgatcgacggaggggccagcctcaatgttatcagccacgcagcattcagacatctgcaggttccggggtcgcggctggggccttctcgcccattttccggggtgggcccgcagcccgtataccccctcgggagcataacgctcccggttacatttgggacgaaagagaacttccgtacagaaaacgtccagttcgacgtcgcggagggcgaccgcaccgccgctctagcagccgtcgagaagctacacaccctggcggccgagatcgctcggcccgacgacgagggaagaggccccagtatcaaggcgccctccaaggcaccgaaagtgcagccgaccgaggcagacggcgggcccgcgaagaccatccaggaactcgtgctcgtcaccttcctccaagcaaatgccgacgtctgtgcttgggagccatcgcagatgcctgggatccctagggaggtgatcgagcaccagctaaaggtttacccggacgccaggccggtaagccagaagccacgaagacagtccgtggaacggcaggacttcatccgagaagaggtccggaagctgttacacgctggctttattgaagaggttcatcaccccgtgtggctagccaacccagtcgtcgtgccgaaggccaactggaagcttcgaatgtgcatcgactacactagcttgaataaggcatgccccaaggacccatatctactgccgcgtatagatcagattgtggactctacttcagggtgcgacctcttatccttcttggacgcttactctggtttccaccaaatccggatggctaaggaggataggaagcataccgcttttgtgatagtagatggactatactgttatgttgtaatgtcctacggtctgaggaatgccttgccaacctttgtacgggcaatgagcaagaccttcggggacctgatctggaataaggtggaaatttatgtcgatgacatcgtggtcaagactagggaagggtcggctatagtggaagacctggccctggtttttggcaagctgcgtgcaacctgcagcaagctgaacccggagaaatgcatcttcggtgtctccgcagggaagttgctggggttcctagtttcataccggggcattgaagctaacccagagaaaatcaaggctattgaggtaatgaggcctcccgcccatgttaaggacatccagaagcttaccgggtcgttagcagcccttagccgcttcatttcgaagttggctgagagggcgctacctttcttcaagctcctatggaaatcaggcccatttgcctggtccgaagaggcggaacaagccttcaaagaattgaagcagcacttagcttccctgccaatcctggttgctccagagccaggggagccgctatacctgtacattgcggcagctgcggaagcaaagccggtctactacgtcagcgaggtcctccacgaggcaaaagccaggtacctcgagacgcacaaactcctctatgccgtgttggtcgcgtccaggaagctgcgtcattatttccaagcgcacaaggttgtggtggtgacctcctttccgttaagggccatcctctacaacccaagcgccactggcaacatcgccaagtgggcagcagaactcgctgagttccaactggacttccaaccccgccacgctatcaaaagtaaggtcctggccgacttcatcatggaatggactccacccctgtgtacccccgagggccggaccccgctccgggtcccataccggcacaggggcgcgatcttcatcgagccccactggacgcttttcttcgacgggtccgcccgccaacagagtgctggcgcgggagtggtccttgccgacccaggcgaaaaccagttgcagtatgtggtgcgacttgaattcaaggccaccaacaacatggcggagtatgaggcgctgatctttggcctatccgcggccctatccctaggggtccgtcaactcctcgtaaagggggactctcagctcatcatcaagcaggtccgcgaaaaatgtagctacaacgagcctacactcgcagcttacctcctccatgtgaggaagctggagaaggatttcacgaccctagaacttcaacatgttccccggtccgacaacttagcagtagatgacctctcccagagggcatcaactcaggcacccattcccgagggcaccttcgaaagacggctgctgagacccatcgcccagctggccagactggacgaagggggtgagatcggcaccttgaagccggcgatcccggtggcatctcaagacccaccaaagacttcggcaactcagagcggtcccaatgcatggatctccgagatccgggactacctgaaggaaaatatccttcctgaagaccatgtctccgccgagcgcatagtgtggttggctaagcgatacacgatggtagaagggggtctctaccgccgtggctgcaacgacattctcatgcggtgcattacccaggaagagggccgtgagttactcatggagatccatggaggggagtgtggaagtcattcttcatcccgcacgctggtcgtaccacgtgaagcagatacacacaccagctcaggctctgcaaatgatcccgccctcctggccgtttgccgtatgggggtggatatcctgggaccattccctagggctgtcggcgggtaccggtacctatttgtcgccattgacaagttcaccaagtggccggaagccacccctgtggtcagcatcacccagggcgctgttgttgctttcctcaagtcgatcgtctgcaggttcggggtcccaagtcgtatcattacagacaatgggacccaatttacaagccgagtcttccaggagtactgtgaaggcatcggcatccggctctgcttcacgtccgtggcccacctcaggagcaatggacaagtggagagagcaaatgtagagatccttaggggactcaagacacgtacctatgactgcttaaaaaagcatggcacaaattgggtcagcgagctgccctccgtgctatgggggaaccaaaccacacctagccgagccactggggagaccccattcttcctggtctacggggccgaagcctgcctccccccggaaatcattatgggctctccatgggcccagtcattcgatgagtctgcgcaggaacagctactgtgcgaagacgtggacttcatcgacgagcacaggtggcgagcagcagtccgaaacgcacggtacaaccaggcgctcaggcgctaccaccagaggttcgtgcatagtaggaagtttgaagtcggggacctggttctaaggcgaattctgaaccgagaagggctccacaagctctcccccagctgggaaggacccttcaaggtgacagaaatatgtcgccccgggtgcgtccgcctcgccatagataactga

SEQ ID NO: 152539 - DNA, 400 bp, Zea mays
  Clone ID: MRT4577_70698C.1
acacaagcacataataattttaatgaagacagcaggaagagggaaaacacaaatcctgatacttcctatacaaagctataatgtacaaaaaaaataccacaaaacatttgcttcggccactcctgcaaatgtggagtgagggggtgtacaagaaacgtgtacctctatttacactatccactcttgttgattccactcgaactgctccaagatactatgcacagcaccagatatattgacatcaacttcacaaacaaaaaaaaactagccttttgcacggatgctcagactcatgtaatttgcatatccaaatggaacatcatgaacacaaagatccactgcttcccggagtaacgggattagcactcaagtcagaaaagtgggacatgttccgactgac

SEQ ID NO: 152540 - DNA, 323 bp, Zea mays
  Clone ID: MRT4577_70699C.1
ggggcttgggcaacccaaaaaaggggggaattggttgggcatgtaaaaagccttgaaacagcaaaggcaacctaaaatggggcaaggggggaaccatgaccaaaaccggggcttttttattattcttccaaggggcccaaaacgggggggttttttttccaatccccatagcaaccctaaaagatttacgggggtttaaagcattgggggtaacccctaaatcccccgccaaggaaccccccaaaacctttttaacttatggacaactaccaaactgggccggttttaaaagtttttggcccccggggcaaaagggtttataa

SEQ ID NO: 152541 - DNA, 1279 bp, Zea mays
  Clone ID: MRT4577_7069C.1
cactccttagggcgcggccgggccgggactattgctgggccccaaatgcccaaatccgcctcccgctcccgttccccaaccccagcaccgatccccgcccctccgacgcgccggcggccatggacatgtcgtcgatcgccgcgaacctcggtctctcggggtcccgccccgtcatccgcaaggccggcgagctccgccgcctctgcgacgtcaacttcgattcttctgtcctcggcatcggcgaggtctgcaaggccatcatctgcctggagatcgccgcgtccaagttacaggtgatatttgaccgggcggaggctgtgcgtatgagcgggatgtctgagaaggcgtacatcagatcattcaattcgctccaaaatggtcttggtgtcaagacgactttggatgtgcgtgaattgggcatccagtttggctgtgtcaggctgatacctttcgttcagaagggattgtcactctataaggagcgcttccttgctgcattgccaccttcacgccgggcaagcactgactttggtcggccagtgtttactgcagcagcattctacttatgtgcgaggaggcacaagctcaaagttgacaaactaaagctgatcgatctatgtggcacatcgagcgccgagtttacaacggtttcaacatcaatgacagacctctgctttgatgtttttgggatagccaaggagaagaaggatccaaagtccatcaaagggaacagagaactgctggatgttttgccaagcaaaaggaaacatgaagatgacagtgattcatctgcatccgatgaatcctcagacaacgatcaagacgagctagatttaccaactcacaagagacgcaagaagatggagagagaagcatacaacgactggaagtcgtccgttctctcctcgaacaagaaaaccaaaccagaccctgccaagcctaggaggcaagctcaactcaacttcaagaagccgtcagaagtaactcctgcagccaactagatgagtacgaaccctcttcgcaacaaatgcagtttgctgagactgaaagtggtgtatttgctccatcatcatctatgttccttctgaacgcataggggaaaaaaaagcccggacgcctttttgctccttgtttttgtttatctttgtgacgtaacgtaagttattcatgaaagtgctgttgtgcggcatattagtgtaaatgacatgtttatattctagtgttaaatagagagagagagaggtgttggaggatggatgactagctggtctgttttctc

SEQ ID NO: 152542 - DNA, 284 bp, Zea mays
  Clone ID: MRT4577_706C.1
cagaaaaaatagctacatgatgagttcctctgaccatcactttagccaggcagttggatctgcctcccctagcatggctcgaagtcgaatcacaaagtacagtacagtgacttataccaagtagtcatgatcccagaatacagttcaccactgtctctgtgatttacatccaactcctgccctccaaatctaagattcccatttacgatgcagagcaggctataggagactgtggagtaaggaagaaccacagtgacagtaacacacggtaacatcaccgtgga

SEQ ID NO: 152543 - DNA, 941 bp, Zea mays
  unsure (1)..(941): unsure at all n locations
  Clone ID: MRT4577_70700C.1
ccttgccttctttctcagctcacctctctctttacgcacgcgtctgctgctctctctctctctctgtctctatctctctctctctctgtacgtatctgtcctgaggcatccatttcactgttgcagatcgtagagaggcttggagtggaaggaggctgctggttttgccagtccaagcccccttgccttctttctcagcccacctctctctttcacgcacgcctctctctctctctctctccctctccctatctgtcttcctgcctgaggcagccatttcctcttccgatcgtggagaggcttggagtggaaggaggctgctggttttcggcacggcggagatgtctgaggtgtcggtgataaaccaggcggaggtggaggacgcgggcgccgggcagctgatggacctgccgccgggcttccgcttccaccccaccgacgaggagatcatctcgcactacctcacccacaaggccctcgaccaccgcttcgtctccggcgtcatcggcgaggtcgacctcaacaggatcgagccatgggacctgccaggcagggccaagatgggggagaaggagtggtacttcttctgccacaaggatcgcaagtacccgacgggcacgcggaccaaccgcgccacggagaccggctactggaaggccaccggcaaggacaaggagatcttcaggggccgcggcgtcctcgtgggcatgaagaagacgctcgtcttctaccgaggccgcgcgccgcgcggggagaagaccggatgggtcatgcacgagttccgcctcgagggcaggcttccccagccgctcccgcgctccgccaaggacgagtgggccgtggtgcaggtgttcaacaaggagctgcangcggcgaggagcgagccactattnnggcgcggccggcngcgcggaactcgagcgcgtgggctcgctgggctt

SEQ ID NO: 152544 - DNA, 665 bp, Zea mays
  unsure (1)..(665): unsure at all n locations
  Clone ID: MRT4577_70701C.1
ttgggtacctcgaggccggccccttgccttctatccctttcttctatcccctccttccccccctctccctctctctctctatcttcctgcctgaggcagcgccatttccgcttccgatcgtggaggcttggtgtggaaggaggaaaggaggccagctgctggttttcggtgcggcggagatgtctgaggtgtcggtgataaaccaggcggaggtggaggatgcgggtgccgggcagctggacctgccgccggggttccgcttccaccccaccgacgaggagatcatctcgcactacctcgcccataaggccctcaaccaccgcttcgtctccggtgtcatcggcgaggtcgacctcaacaagtgcgagccatgggacctgccaggcagggccaagatgggggagaaggagtggtacttcttctgccacaaggatcgcaagtacccgacgggcacgcggaccaaccgcgccacggagaccggctactggaaggccaccggcaaggacaaggagatcttcaggggccgcggcgtcctcgtgggcatgaagaagacgctcgtcttctaccgcggncgcgcgccgcgcggggagaagaccggctgggtcatgcacgagttccgcctcgagggcaagcttcccgagcgggtcccgcgctccgccaggacg

SEQ ID NO: 152545 - DNA, 253 bp, Zea mays
  Clone ID: MRT4577_70702C.1
gttgggggaacaggttaagcacgttcacggggtaaagcgaccttgcccaaggtcgaaggcaggcacagtacgtttttcattcacacacaaaccataccttttttttaatatggtttccatacacacacaaacgcacacgcacgcaggaattatatatttattttctttacattcctgcacgacaacacgggggaaaatatagttttggaggctaaaataccggccatggaaaaccattaggcgggggcggggg

SEQ ID NO: 152546 - DNA, 109 bp, Zea mays
  Clone ID: MRT4577_70703C.1
gctgggactacatcttcaactacgtcaagacgttccgcgcgcacccggaacgcctcctccccgaacgcaccctcgtcggcatggagaagcacttcatgcgctcctaatc

SEQ ID NO: 152547 - DNA, 433 bp, Zea mays
  Clone ID: MRT4577_70704C.1
cttcttaggtccctttttttttctcgatctggacgcgccgcactagcagccatggtcgtaagcgaagctggcggaaaggcgaacaactgcgccgatgagcgcacgttcggcgcgccgactaagatttttgtgtcgcgaccctacatggatcgtctgcagttccctatcagacgtgttgggcgcctcttataaaagggccgatgccctcccatgctaatcacttctgcccccttctacatctccgacagtctggattacttactgaacgtggtgcttgcgctcaccggaaacccggaaagggacaacaagaagacgcgcatcatcccgcgccacagtgctcttctgcatcaccaacgacacgtagctctgcaagctgatatccgcagtctccatctcacacagcggatttctccccaacatacacactgtgctc

SEQ ID NO: 152548 - DNA, 198 bp, Zea mays
  Clone ID: MRT4577_70705C.1
gtaccggacctgcatggccggcccaagccacccgttcatttctgcgcctggtcagctgccgcaagggcggggggaactttatattaaggaggatcttgaacaccaacacgggggccgagctcatcttagggtgctgagagacggtgacaaacacaagtgtgagcggcaatacatgggtgatgactaggaccatttgaa

SEQ ID NO: 152549 - DNA, 212 bp, Zea mays
  Clone ID: MRT4577_70706C.1
ggcgcgtcgagcccacagtgcatgctagctgtgaccggatatcatctcaataccacaagtcatgcgcaaggagtagcagagttctataagagcgctcttcggtatctggcctacacaaccggggaggcgcgaacggagtcattcaagcgagactcggccgtttgatcctcacgagcagcactggagggtgatagcacttataaggttggaga

SEQ ID NO: 152550 - DNA, 807 bp, Zea mays
  unsure (1)..(807): unsure at all n locations
  Clone ID: MRT4577_70707C.1
gccgggtcggaactgccagtgccatcccattcccatccgaggtaaacgcgtcaacgcgaccagctcacctcgtcatctcccattctctttcatatttgcatgcatctcggttctcggatctgcagcgctcgacgacggggagaatagcgtggcgtgggcggcgccatgaagtacagcaaggaagataagcccgagagggcgggcggcgccggcgcagagtccagggcggtgccggtggcgctcgtcgtcgtcgtgctctgcgccttctccttctacctgggcggcatctacagcacgggacggagcctgctggactccatccagccggcgccgacggctctcctcgccctcggcgccgccacgacgacccgccgtccctccgacgacggccaggctcggccggcactggcgtccacggccgccgtggcgttccccgagtgccccgccgactaccaggactacaccccctgcaccgaccccaagcgctggcggaggtacggcaccatgttcccgaacggcatggagcgcttacgtgcgccctgatgcagggcctggtcccgggcatgcgcgacggcaccgtccgcaccgcgctcgacaccgggctgcggcgtcgccagnctggggcggcgacctgctgnggcggggcatcctcaccgtgtcgctggcgcccagggacaaccacgaggcccaaggtgcagttcgcgctggagcgcggcatcccggccatcctcggcatcatctccacgcagcgcctgccgttcccgtccgccgccttcgacatggngcactgctcgcgctgcctcatcc

SEQ ID NO: 152551 - DNA, 145 bp, Zea mays
  Clone ID: MRT4577_70708C.1
gtctcgatgccacgcgcccggggccgacgccggggacgcaaggccggcaggggacgggctggcgtgggaagcaccttacatactttaaaagattataaacgccagcgtctgacgcgaaagctattgtcacaagggacagaaatga

SEQ ID NO: 152552 - DNA, 359 bp, Zea mays
  Clone ID: MRT4577_70709C.1
attttcatcattcacaaacacacctagtttagcgcactagcaacaacctaacaggcagtggctaccaagatattagccctccttgcgcttcttgcccttttagtgagcgcaacaaatgcgttcattattccacagtgctcactagctcctagtgccattatttcacagaatcctcccaccagttaccttacatgggctttgaacattcagccgtgcaagcctacaggctacaactagtgcttgctgcgagcgttttacaacaaccaattgcccaattgtaacaacattccttggcacatctaaacctacaaaccaatgctattgcaacatggacatcagtttctgtcatcactgatcca

SEQ ID NO: 152553 - DNA, 430 bp, Zea mays
  unsure (1)..(430): unsure at all n locations
  Clone ID: MRT4577_7070C.1
gagcattcanaaacacaccaagcgaagcgcactatcaccgacctagcaacactggctaccgagggattagccctccttgcgcttgttgccctttttgcgagcgcaacatatgcgttcattattccacactgctgacttgctcctagtgccattattacacagttcctacgaccagatacttcaatgggcttcgaacacctagctgtgcaggccaacatgcaacaacaagcgctcgcagagagcgtattacaacatccaattgagcaattgccacaacaatccttgccacatataacaatacaagccatcacatcgcaccatccacaacagttcctaccagcactgagccacctaggcatggtgaaccctgccgcctacttgcaagagcagctgcttgcattcaacccacttgctgtggcgaacgtagctg

SEQ ID NO: 152554 - DNA, 785 bp, Zea mays
  Clone ID: MRT4577_70710C.1
tattcggcacgaggctacttccttcggttttactatcccttcgtttccgctagccttctccttccagggcaaccgcgccattcctctcctcctccgtctcgttcgtagtgcaacacatacagcctcgtcctcctcgtctggtgaagtgaaagaacgacaagatctgtggtacggcggtgccggccgacatccacccactgtgctaccccttgcggttccagccagcgcagcgatcgattcccgctggccgctgccgtcggtgcctgcccggtcctccactcctcctcccgctactagtactagtaccagctcactccactgtccactccactgccagtgccatcccattcccatccgagctgcagcgctcgacgacggggagaatagcgtggcgtgggcggcgccatgaagtacagcaaggaagataagcccgagagggcgggcggcgccggcgcagggtccagggcggtgccggtggcgctcgtcgtcgtcgtgctctgcgccttctccttctacctgggcggcatctacagcacggaacggagcctgctggactccatccagccggcgccgacggctctcctcgccctcggcgccgccacgacgacccgccgtccctccgacgacggccaggctcggccggcactggcgtccacggccgccgtggcgttccccgagtagcccgccgactaccaggactacaccccctgcaccgaccccaagcgctggcggaggtacggcaccatgttcccccaacggcgtcggcgcgtacgtggacctgatgc

SEQ ID NO: 152555 - DNA, 603 bp, Zea mays
  Clone ID: MRT4577_70711C.1
atctccatcatacatgctggcgtcgagaatgcccatgtatacaacactgctcgatggagatgacaggagaggaaaggacaggctgggtgtgggacacatggctccgatgacgctctacggggcggtggtgccgtggaacgtgaccaggtacgcatgctccttgtaggaggatggctccgagtacaagattacgcccatcatcttctcccccgccgagcacaagagccgcgagctcttcgagcgcatctcgtacgtgcaggtcgcaagtctacaagatggtgacttgtacctcttcaaagcgctagtgtgctgcaagcacgctggtcacaaaaacaaggccgacctgctcaaggaaggagacctcgtggagggatccgtggaggatgtctggatctgggtggaggctaaccagatcgccgctgcagtgaacaccattaccgtccaggacgtcatgagactcatgcttgggcaatccaccttccataaaggtgacgctgaccacctgcgtgaagctgaagaagacgatagacgcgtactaggcactcctgtaccgagtgttagtaccatgctggagactgcctaaggctcgccgatctgaaccat

SEQ ID NO: 152556 - DNA, 954 bp, Zea mays
  unsure (1)..(954): unsure at all n locations
  Clone ID: MRT4577_70712C.1
cggggtcccctgcgcctttttttcttcttctctgccaccccgcaccccgcaccccggtaataaaagtttaatttctcctcgcgttacagctgcagcgctcgacgacggggagaatagcgtggcgtgggcggcgccatgaagtacagcaaggaagataagcccgagagggcgggcggcgccggcgcagggtccagggcggtgccggtggcgctcgtcgtcgtcgtgctctgcgccttctccttctacctgggcggcatctacagcacgggacggagcctgctggactccatccagccggcgccgacggctctcctcgccctcggcgccgccacgacgacccgccgtccctccgacgacggccaggctcggccggcactggcgtccacggccgccgtggcgtgtcccgagtgccccgccgacaatctaatttctcctcgcgttacagctgcagcgctcgacgacggggagaatagcgtggcgtgggcggcgccatgaagtacagcaaggaagataagcccgagagggcggggcatcctcaccgtgtcgctggcgcccagggacaaccacgaggcccaggtgcagttcgcgctggagcgcggcatcccggccatcctcggcatcatntccacgcagcgcctgccgttcccgtccgccgccttcgacatggcgcactgctcgcgctgcctcatcccctggaccgagttcggnggnctttaccttctggagatccaccgcgtcctncgcccgggcggcttctgggtgctctccggcccgcccgtcaactacgagaaccgctggcacggctggaacaccacctgacaggcgcagaaggccgacctggacaggctcaaaaagaagctggccaaaatgtgcttaaagctctacagtatgaaaggggacatcgtcgtgtggaaaaagttcttcaaagcctgcttcaacaagctaaccccgggt

SEQ ID NO: 152557 - DNA, 2650 bp, Zea mays
  unsure (1)..(2650): unsure at all n locations
  Clone ID: MRT4577_70713C.1
tcgagccgccggactgcgtgcatcccattccatccgaggtaancgcgtcaacgcgaccagctcacctcgtcatctcccattctctttcatatttgcatgcatctcggttctcggatgttcgtcccctgcgcctttttttcttcttctctgccaccccgcaccccggaccccgggaataaaaggttaatttctcctcgcgctaccattggagacctcgagccggccgggaggctggcggcgcgggcggggactccactgccagtgccatcccattcccatccgagctgcagcgctcgacgacggggagaatagcgtggcgtgggcggcgccatgaagtacagcaaggaagataagcccgagagggcgggcggcgccggcgcagggtccagggcggtgccggtggcgctcgtcgtcgtcgtgctctgcgccttctccttctacctgggcggcatctacagcacgggacggagcctgctggactccatccagccggcgccgacggctctcctcgccctcggcgccgccacgacgacccgccgtccctccgacgacggccaggctcggccggcactggcgtccacggccgccgtggcgttccccgagtgccccgccgactaccaggactacaccccctgcaccgaccccaagcgctggcggaggtacggcaactaccgcctcagcttcatggagcggcactgcccgccgccgcccgaccggcagcagtgccctggtgccgccgcccaaggggtacaagccgcccatccggtggcccaagagcaaggaccagtgctggtaccggaacgtcccctacgactggatcaacagccagaagtccaaccagcactggctcgtcaaggagggcgaccgcttccggttccccggcggcggcaccatgttccccaacggcgtcggcgcgtacgtggacctgatgcagggcctggtcccgggcatgcgcgacggcaccgtccgcaccgcgctcgacaccggctgcggcgtcgccagctggggcggcgacctgctggggcggggcatcctcaccgtgtcgctggcgcccagggacaaccacgaggcccaggtgcagttcgcgctggagcgcggcatcccggccatcctcggcatcatctccacgcagcgcctgccgttcccgtccgccgccttcgacatggcgcactgctcgcgctgcctcatcccctggaccgagttcggcggcctctacctcctggagatccaccgcgtcctccgcccgggcggcttctgggtgctctccggcccgcccgtcaactacgagaaccgctggcacggctggaacaccaccgcgcaggcgcagaaggccgacctggacaggctcaagaagatgctggccagcatgtgcttcaagctctacagcatgaagggggacatcgccgtgtggcagaagtccgccgacgcctgctacgacaagctcaccccggtcaccacgcccgccaagtgcgacgacagcgtcgaccccgacgccgcctggtacgtgcccatgcgctcctgcgtcacggctcccagccccaagtacaggaagctggggctcaacgccacgcccaagtggccccagaggctcagcgtcgccccggagcgcatcagcgtcgtcccgggcagcagcgccgccgccttcaagcaggacgacgcccggtggaagctcagggtcaagcactacaagacgctgctgccggcgctggggagcgacaagatcaggaacgtcatggacatgaacaccgtgtacggaggattcgcaggcagcctcatcaaggaccccgtctgggtcatgaacgtcgtctcctcctacggcccaaactccctcggcgtcgtctacgacagagggctcatcggcgtcaaccacgactggtgtgaggcgttctcgacatatccacgcacctatgacctgttgcatcttgatggcctgttcacagcagagtctcacaggtgcgagatgaagtacgtgctccttgagatggaccgtatccttcgtcccacgggctacgccataatccgggagagcacctacttcctcgattctgtggcacccattgccaaagggatgcgatggagctgcgagaagcacagcagcgagaacaaggccgacaaggacaagatcctcgtctgccagaaaaagctttgggcaggaaagcagtgacgagagaggatcatccttcttccttccgagtataaaaaagtaggcatccagatcagttgctgctgtgggtctcgatcggccaacaaggcaagaggcgcttcaatacacatggaagatgagcgagtacttctgatacaaagagtgttcggcagttattatcaaaataaataagccgagtaaaactccatataggatccaacagttaccatttttcattaatcacagtttaattctttttctgtaccgacagtttgtaggcaaggagtgggtcaattcatataccatatggtgagcaaatgtaagtttactccacactagatgtgtatagcttggttggtgctactgctatcgatgtaatagcgggccacgtatttacttcacatgttttgtggatcaatatactatgactgtgatgtcctaaagcgacggattttgttgaaaaaaaaaaaaaaaaaaactgtcgccccgggaattattccggaccgg

SEQ ID NO: 152558 - DNA, 509 bp, Zea mays
  unsure (1)..(509): unsure at all n locations
  Clone ID: MRT4577_70714C.1
ggacctcagcggcggacctgcttccggagggacgatggccgctgcgagaatggctcgtctcttgcgcccgccgcctcccgtccttaccctctccgctcaccctctcgagcccgcgcggccgctcatttctgtgcccaccgtcgccggggaaggccaaccggaaaaatcccgggcaagggaaaaaaccctttgggggctttccccccccctttttccccggggggggggggnttccccccccctttttttttaaaaaaaannnaaaaaaccccccccgggggaaaaaaaacccggggcggttttccccccgcgcgcccccccccccccccccccaaaaaaaatttttttccccccgccgccccccccttttttttttaaataaaaaaaaaaaaaaaaaccccttttttgtttttggggggggggaaaaaaaaggggggggggggggccccccccccccgggccggccccccgcggccggcgcccccgcccccccccgggcgggggggggg

SEQ ID NO: 152559 - DNA, 358 bp, Zea mays
  unsure (1)..(358): unsure at all n locations
  Clone ID: MRT4577_70715C.1
agaaagagcccannggannnggaaagggaggcaangaagtctactncagggananacggccgggggggggaagaaatttttttttttgnccaanccagngngcngccngacaggggcaggggcaccnangaggcccccacaaaaggcaacccaagggggaaccagcnaacngncccagaagcgncacncnacncangggannccaaanccacnnacanncangagcccccnnacnnnaaggacangaccangnccccaccnggccccncnacagngaaagacgccnacngcnngcngaacnncggggacagcancacnacagancacannncaccngcaggaagcanacacaaagaca

SEQ ID NO: 152560 - DNA, 787 bp, Zea mays
  unsure (1)..(787): unsure at all n locations
  Clone ID: MRT4577_70716C.1
gcccacatggaccatttactgatacccaaactgcagctgtctcccctggttgaatacttattggaggactgagtggatcaataggaacagagcatctggtacacctaagataggcaccacacgtcgcaaagttatggactgaccaacgactaacctgtctcctgaggaggagcagagatcggtgcattgtatctgcacagaccctgcaatacctgaagttgcccatgaaacctttgggcgtaaagcaatttgaaaactttccctttcatttcttgctgccaaaaggttgactttctctagaggccgaggcgcttcttgctggctaacatttgctgtgctgggcatagaccagacgtgcaaaagatcatctgagtgtacttttgtaggatcaatcacaccagcaccaatatttgtaccccgcaaacctccatccacccatccatagctagttcctcctccagctacaccttcaacaggcggtactgtaacattttgtgtctttcctcctgcggcggagttggaatcgcttgggtccatcgcggcgccggcggaaggacgacggatccggaagggcgacggcgttggcgcacagcgtttacgagttgggagtggtgcgggaagggcgacagtagcgtggcggcctggcggggatcaaagatcactcctggtgactggctgccgtgctgcggtgagccggtgatggtgtggtgcggcgtggaggtgggctgctgcctggtgtcaccctgcgtctgcttgacagggccagaggggttgcggagcnnccggc

SEQ ID NO: 152561 - DNA, 720 bp, Zea mays
  unsure (1)..(720): unsure at all n locations
  Clone ID: MRT4577_70717C.1
taactgcagtaatgaatatttcaccctcatataaccagccggttgcccacatggaccatttactgatacccaaactgcagctgtctcccctggttgaatacttatntgaggactgagtggatcaataggaacaagtgcatctggtacacctaagataggcaccacacgtcgcaaagttatggactgaccaacgactaacctgtctcctgaggaggagcagagatcggtgcattgtatctgcacagaccctgcaatacctgaagttgcccatgaaacctttgggcgtaaagcaatttgaaaactttccctttcatttcttgctgccaaaaggttgactttctctagaggccgaggcgcttcttgctggctaacatttgctgtgctgggcatagaccagacgtgcaaaagatcatctgagtgtacttttgtaggatcaatcacaccagcaccaatatttgtaccccgcaaacctccatccacccatccatagctagttcctcctccagctacaccttcaacaggcggtactgaaacattttgtgtctttcctccgacagtagcgtggcggcctggtggggatcaaagatcactcctggagtcctggtgactggctgccgtgctgcggtgccggtgatggtgtggtacggcactgcggcgtgttcgcgtggaggtgggctgctgcctggtgtcaccctgcgtctgcttgcctcgtgccgaatt

SEQ ID NO: 152562 - DNA, 1476 bp, Zea mays
  unsure (1)..(1476): unsure at all n locations
  Clone ID: MRT4577_70718C.1
ggtgcatagggtacagcatatgctgctaatcttgggtcagagtaatattcattagctttcggatgatcggcagccaaaagggcatgtgtatgctagaatgcgcatgctatcaccccatctgcagaaaaatggactaatcctatatggaggagccacctaaagtgatgatccagtgcactataccatccttcagtgccatctccaaacagaatcgatcttcaatgacagtttcagatataccaaaaacagcaggtaaagaaggtgtcactgggagagtgaagtcccaaacagtaaggcttaacttcaagcgaactgaaatattgtttataacatcttcatccatcatgtctccaaatccattattctcttgacagtcctggagtgctggattatccaacaccctcncttagtacagtagaagctgatgttagtctttgtaccatttcctctggtgacgagtagtctctgggtccagtgaggtcaagacaacttcttaattctctgtatagcctacacttttcagattttggtagagattctgttctggaatctaattctgtcttaactgcagtaatgaatatttcaccctcatataaaccaggcggttgcccacatgaaacatttactgatacccaaactgcagctgtctcccctggttgaatacttatttgaggactgagtggatcaataggaacaagtgcatctggtacacctgtctcctgaggaggagcagagatcggtgcattgtatctgcacagaccctgcaatacctgaagttgcccatgaaacctttgggcgtaaagcaatttgaaaactttctttcccggcttgctgccaaaaggttgactttctctagaggccgaggcgcttcttgctggctaacatttgctgtgctgggcatagaccagacgtgcaaaagatcatctgagtgtacttttgtaggatcaatcacaccagcaccaagatttgtaccccgcaaacctccatccacccatccatagctagttcctcctccagctacaccttcaacaggcggtactgaaacattttgtgtctttcctcctgcggcggagttggaatcgcttgggtccatcgcggcgccggcggaaggacgacggatccggaagggcgacggcgttggcgcacagcgtttacgagttgggagtggtgcgggaagggctgaaggcaggggggaggagtggagggagcagttggtgtgtgttatcgaaaccgccgacctctcatggaaccgggggcggggagaggagcaaccggcagagtccctagccttaccgacagtagcgtggcggcctggcggggatcaaagatcactcctggtgactggctgccgtgctgcggtgagccggtgatggtgtggtgcggcgtggaggtgggctgctgcctggtgtcaccctgcgtctgcttgacagggccaggggttgcggggaaggaccggagaagagcaatcccggccgg

SEQ ID NO: 152563 - DNA, 755 bp, Zea mays
  Clone ID: MRT4577_70719C.1
ccggccaaatgcagggcccgtgccagaggccaaggcgcggcgaccgctggtgtcgctcatcaggagcagcacgttccctcggcatgctgcttgctgccagcggatacacgggcgacgacgtcgaagggatcctcggatagcgcggcggcctggccatcttatggtgatagcgctaccacgggtgcgggcgcttccgacatggacgcaacaccacgacggagacaacaagttggtagcgcacaaatcacaccagcggatcaggaaaacataccgctcgattgcgcagaggcggaatcgaagtctgtcgcgtaggacagttcggctaggccggggacctgccgacttgacggagagttgatgcagatctggtctcgccgcagcaacatcgaggtagagcgtgctgataacgtgttgagaactacgttaccacggatcaccagatccgctcccttccctcccgtcagcagtagaggcacaagaagatgtagagtacccgtctcccttcccataagcacgacagaagaaacacacgagacactggatatagggttggacctctggcctctttctgatctctgtattatgagggggtgtacaggttccttatatagagatatgagacccctcatgggcaaagcaggtatttgcccacataaccctaattagggttacttaacaaatataacaaacaaatatcacgagaaagagggcatcactagtagaaaaaggctcaacacctgcgggacgatatattt

SEQ ID NO: 152564 - DNA, 217 bp, Zea mays
  Clone ID: MRT4577_7071C.1
agccgacggccattggagggtggtgccgttgcctaccggtgctggcaacggggaggtggtgcaggagcaagacgacgtggacaagtacttcagcctcacgttcgctggcttcgtcatcgacggcgacgtgacggctgtcgactggcatccggacgtttttcacgtctcgactggcgttccggccgcgcacggtgaaggcatcagaagggtgtttgtt

SEQ ID NO: 152565 - DNA, 1313 bp, Zea mays
  Clone ID: MRT4577_70720C.1
cacctaaaacaagaactcgatcaataaacgtagagtatcctaactactaaaatagagcaccgacttcactatacaaactaatctcaccataacaacactgacaacacacacatatcagctaaatgttagagacactaaatctatccttctcgcattaataattcaatcagctcaaccaataaaccaataagaagggacaacaggtcagctcaccataaccaaatcgactcggagtatgcggaaacgacgataatcccatgttctgatattttatcgagcacctagcggatgtcgtatgggactacgcttctccacacattctggtgatttctctcctccgtcgatgaaatacaactactggactcagcataggtagcgcgcagcagggaaacgagtcgctaggatggcgagcacgtcatggacgcggctgcaggagccaaggcgactgctgaggatttagggtaccggggtcggacgcgacgcctaggtgctgagcacgaagaggaacatggccgagatgagcaacacggtggccagcaacgccgctgtcaagggaaggcgaccactgtgtatcaggcgaggccacggagtggcaggcaagggcgttgacggaggggcttagcttctccactgtagacaatggcgtacagcagggtagtggcgagcagggagcacgcggctgcgcgcagagggacgggcaccgcggcgagtcatggcgacaagcgaacagaggggagggcgcgtagggactccatggctggagcgtccagcgagcactggaaattgagcgcgcctgcagggagagaagcaggggatccgggcgccgagcaggaacgcggcagggagcatgcgcgcgccaacaggctgggcgacggcgcgagcagtgaagtcggcgcgcagggaagctgaagcttgcagggaatccggcgctgggagcttcgagcagaggatccacatccgaccaggcgccggggagaagaggagcagaggctctcggctaagagcagaagatggacaccgcgatggaatttttattcagggtggccgagcggatgggaacgaggcaacggcggtgagaaaaatcttgagcagagcggcggcggggataagggaagaagacggctggaaggatagagccgcgagatttttcttcctgggcacatgagaatagcagagggaggagctccggcgaggttggctggaacgacgacttggagcggcggtcgggcgtctgcaagctctgagcgcagaactgtaggggatagaaaatatgtgcgatcggagaggggccggaggccggcccgagggtccca

SEQ ID NO: 152566 - DNA, 362 bp, Zea mays
  Clone ID: MRT4577_70721C.1
acaagccaacgggagacactagagggggatatattattttacagcttcttccaaatatagaagatccacgagagccttaaaaaagcatccaacggcttgggctcagatccatggccatccatgaataccggaagcacacccaccctttttatttatgacatcttcacgcgcggccacgcaggggacccccccccatacctatttgtgtggaactttttgtgggtaggccaggggcgttctcccgggtgggcttcgcgggcggcccgagctccaaattccttcggggtcttgggttgggtgaaccctgctttgggggggggctgggtgcgtagtttttggtggggtgtggcgcgctttggggg

SEQ ID NO: 152567 - DNA, 810 bp, Zea mays
  unsure (1)..(810): unsure at all n locations
  Clone ID: MRT4577_70722C.1
atgctcgcacctccacctgagctggactccctgttatagcgagcgcgccgaccaactccatagctggggcttctccaatcaatccagccggccagagcgcagctcccgcccacccttccccggtccccgtctcttccgcaaaggagcagccgcgccattgccgtgggaggaagcaatgggggcgacacgcgcggacgccgacgagaaggaggaaggcgtgatggcgacggacttcttttggtcgtacacggacgaaccgcacgcgtcccgccgccgggagatcctggccaagtacccgcagatcaaggagctcttcggctcggatcctctcgccttcatcaagatagccgcagttgtttcgcttcagctatggaccgccacgctcctgcgagatgcaggctggtcgaagatactgccggtcgcttacttcttcggttcctttctgaatcacaatctcttccttgcgatccacgagctcagccacaacctcgccttcgccaccccatccctgaaccgctggctaggcatcttcgcaaacctgcccatcggcgtcccaatgtcggtgacattccagaaataccacctggagcaccaccggttccaaggcgtggacgggatcgacatggacatccccagccagacagaggcgcacgtcgtaaagaacaccgtcagcaaatccatctgggtcgtgctccagctcttcttctacgcgctcaggccgctcttcctgaagccgaagcccccgggcctgtgngagttcaccaacctgacgatccaggtcgcgctcgacgcggcaatggtgtacctcta

SEQ ID NO: 152568 - DNA, 3691 bp, Zea mays
  Clone ID: MRT4577_70723C.1
ccggccgggactggctgtgcgggtgcggctcccagcgcagcctggctctgacgcgactgcaggcgcaggtgctgctcctggcgtgacggccagcacgacacgactgtcggcacggcctgactgtcggcatggcctgcaccggcacggctgccagggccgcgtgactgctggcgtgggtgcggctcctggcgcggtctcaggcctcaactcaggcgcagtgcaccacgacagcgatggcaagttcgtcgcacacaaatcgtagcccgtgcacagcaacagatcaagaacagtaaacataccgttcgattgcgtagaggaagaatcgaagcctgtcgcgtaggacagttcggctaggccgaagacctgccggattgacggagagttgatgcagatctgatccagcagcaacgtcgaggtagagcgtgctgataacgtattgagaactacgttaccacggaccaccagatccgctcccttccctcccgtcagcagtagaggcgtaagaagatgtagagaacccgtctcccttcccataagcacgacagaggaaacacacgagacactggatatagagttgggcctctggcctctttctcttctctgtaatatgaaggggtgtacaggttccttatatagagatgtgagacccctcagggacaaagcaggtatttgcccacataaccctaactagggttacttaacagtctggacctaattttcatgtctctggaccaaacagagctcgggatagactcatccttcctcaccatgcatcgcatgcattattcccttccaaccaaacacagctccgcgttaggccatggcgctaccgacctcgaaagagacagggcatcccggcggcagcgtccgcggctgagatgggaatcctgctctcggcccacggtagaaacgaatgcgcctttggagggggtaacctgtacttgaaatcgaagaaaggaaaaggaaagtcatccctaataggagaaaatttcagcttcaactgtgtgcgggcgcagctgaataaaatggagagggcaatgcataacacggttctatccacttgggcctgaggggggcaactgctgaaggaaaacgggggctgccgctaaaggcaaacctgggtcgctccatcttttgtccagatcgactgggtttttttgctcccgacttgatgcaactctcgagccagattcaaaagatgcaccaggactagtttagtccaggtttgatgatctgatcgatcaccaagggtagattaattcgctacatagatcacataccaccatatataatacaacagacgccctagactggaaggacagcatctggcaggcattgctacactaagacctgcaggtgcggtacacctcacccctcatcacatctaccggtccatgatccagcgtatatcgatccggtccaaggtacatgccagtcttctctataagggccaggccttcctccctcccataccgtgaagaataaagcttcaggtattcgatgtcctgcatgccactgagaatgcgctctagccgggtggaagcaactggttcatgtgacgaagaaaacacttcaccagggtaaaacaggacaccgtcgccaggaggaaggccgcgtcggaaacagatctcagcacttgggatcatagccttctcatagcagttggaaccccaataaagaaatcctgtcccaccttccttccacactcgccacatcactgcccggtgctgggttccacgcatcccaaggtgccagtttggttgaggatcagaaggacccatacaaacatatgtccaccactcctcaccaagatcaggccgtaattcagcaacaatatccttcactaggtcttctcttgtgccaagaacccattcacttgtgcaaaagatttgcgtgtgcggacgcagaacatttggaacttttgcaaaagcttcaaatgtagagggagccagttcagagccacttggaccacaatagtaagttgtcaaaattcgcacatcaggtgcatatgaccgtagctcattagagatgttgcatatcatgtcatactgttccacatttaatggctcatcccacaaatagaagtaagctttggaccaatgaggcttcgattttaagatttcaacctctctcctcagggaattttttgcagcatccgtacacgataggataggtgcatagggtacagcatatgctgctaatcttgggtcagagtaatattcattagccttcggatgatcggcaggccaagggcatgtgtatgctagaatgcgcatgctatcaccccatctgcagaaaaatggactaatcctatattggaggagccacctaaagtgatgatccagtgcactataccatccttcagtgccatgctccaaacagaatcgatcttcaatgacagtttcagatataccaaaaacagcaggtaaagaaggtgtcactgggagagtgaagtcccaaacagtaaggcttaacttcaagcgaactgaaatattgtttataacatcttcatccatcatgtctccaaatccattattctcttgacagtcctggagtgctggattatccaacaccctccttagtacagtagaagctgatgttagtctttgtaccatttcttctggtgacgagtagtctctgggtccagtgaggtcaagacaactttttaattctctgtatagcctacacttttcagattttggtagagattctgttctggaatctaattctgtcttaactgcagtaatgaatatttcaccctcatataaaccaggcggttgcccacatggaacatttactgatacccaaactgcagctgtctcccctggttgaatacttatttgaggactgagtggatcaataggaacaagagcatctggtacacctaagataggcaccacacgtcgcaaagttatggactgaccaacgactaacctgtctcctgaggaggagcagagatcggtgcattgtatctgcacagaccctgcaatacctgaagttgcccatgaaacctttgggcgtaaagcaatttgaaaactttccctttcatttcttgctgccaaaaggttgactttctctagaggccgaggcgcttcttgctggctaacatttgctgtgctgggcatagaccagacgtgcaaaagatcatctgagtgtacttttgtaggatcaatcacaccagcaccaagatttgtaccccgcaaacctccatccacccatccatagctagttcctcctccagctacaccttcaacaggcggtactgaaacattttgtgtctttcctcctgcggcggagttggaatcgcttgggtccatcacggcgccggcggaaggacgacggatccggaagggcgacggcgttggcgcacagcgtttacgagttgggagtggtgcggcccgtgcgggaaggactgaaggcagggggaaggagtggagggagcagttggtgtgtgttatcgaaaccgccgacctctcatggaaccgggggcggggagaggagcagccggcagatgcagcagggtccctggccttaccgacagtagcgtggcggcctggtggggatcaaagatcactcctggtgactggctgccgtgctgcggtgccggtgatggtatggtacggcactgcggcgtgttcgcgtggaggtgggctgctgcctgtgccgtgtcaccctgcgtctgcttgacagg

SEQ ID NO: 152569 - DNA, 407 bp, Zea mays
  Clone ID: MRT4577_70724C.1
attcggctcgagccggttcttcaagaccattttttttgcccaggacatacctttaggaaccggggcattttaaaactactggtgggccagcagaccacgactggtctcctcaccggaagcaaatgttgtttgacaaccattcaacgaatgcacacaactcacgattttataccgagctcagcgcccatgcctttaacaaggctacaacgacttcgatgacactcatactcagcccatatacatccgggaaacaagctatacaacaggcctaagctggggctcattcctatctacagactcccccaaagaaccttacctgagccggactgatatgcgcgctaccaagtcgcttggcatacaatgaggtctgactctctacttgaggtacacgcacactagggctgctc

SEQ ID NO: 152570 - DNA, 188 bp, Zea mays
  Clone ID: MRT4577_70725C.1
caacaggcggcgcacagcatcgccaccaccgtccaaagatggtgaagttcctcaagcctcggcaaggccgttatcctcctccagggccggttcgccggcggaagcgtgatcgtgccgtttcgagaggaccgtgatcgtcctagggcactgctcgtcgcgggctctcagacccaaaggtcgaagatcgc

SEQ ID NO: 152571 - DNA, 450 bp, Zea mays
  Clone ID: MRT4577_70726C.1
atgtcgagagaggtctccaacaaaaacgagaagattccttgggagagaagcacgaagaaaagcgctgaatcgacgtcctccaagcgcaatgagtgcaagatggttaaatctaaccacattcctttccaatgccctcgcattccaaaacacacccctttactttcgataccattaggaaaaccaccccaatttgatggaatgaacttaccaggaaaggatgatgaggactatgactccgatgaggtagcccaaaccatccaccgcaacacgcaagccaccacggtactactcgcctctttgtgtagggatgagttcaacaaggtaaatgggttacaaatggccaaggagatttggggcgcactcaagacgacgcacgaaggtggcaagatcacaaaaatggagctcatcgaaggagagctcggaaggttcaccattaacaaaggggaatga

SEQ ID NO: 152572 - DNA, 2137 bp, Zea mays
  Clone ID: MRT4577_70727C.1
gccggccggatccagaaattcgattcctttggctctctctgtcgttggtcgtcctcgcccaccccaaccaaaaccccacggacggaacccaagaaagaagagaggggcacgagtccccatgaacgacgccggcgaggccgaggcgcaagaactcgccccacccggcgcctccgccgccgccggcctgcaaggcagggcggaggtcgacacctcgacgcccttcaagtcggtgcgcgaggccgtcgaccgcttcggcggcagcgccgcctggagctccgacctcatcaagcgtatgttcgcgctgcccccgagcccaaagaagcaggaggggggcgacgaactggccgatctggaggagcagaccgcgcagctagagaaggagctcggcgtcaaggaaagggagacgcttgatgtgctcaaagagttggagtccaccaagaaggtggtcgcagatttgaagctaaagatacagaacgaaggtgccggtgcattttgcatccctgaagagagtgttcggggtcaagccgagctgcccactgccgctgaagaggttgcagaagtgcagcctgagaatgctgaaactgatgtggttatgggcgcgcttcatgtgcagctgcaccagtctcctggtacttcagtgctgaagggccttgagcaggcaaaagccaatctaaacaggaccacgagtgatcttgcagctataagggcctccgtcgagtcgctgcggaacgacattgcgaaagagagaatcttggtggagagaagccgagagaaggtatgtgccaacacgacactgattgcttctctggaggatgagctgaaccggactgcacagaagctgcagacgctgcgggatctgcagaggaggcgtgacgatcaatcggacatcttcatagagatcaagaagatgacatctgagctagagcagctcaggaatgcagcgagtgctgccaaatcggaagctgctatgctgtctgccgaaattgagcagatgagagctagcatcggcactgctgaggtgaggtgccgtgcagccaggaagatagaagaggcggcaagggcagcagaagctcttgcccttgctgaaatcaagatcctactacgcaatgaagcttcagttgaggatcttcagggcatggaagatgtgagcctttcattggaagagtactctgagcttgctgccaaagctcaggaggctgatgaacgctcaagaaagaaaatcgatgctgcaatggtgcaggtagatgaagctaacaggacagaatctgactccctcagaaagctggaggaagctcgattacaggttgaggaatgtaagaaggcgctacaggatgcccagaagagggtggatgctgctaaccgagggaagagcgcagtagaagaggctcttcgcagatgtcgatccacgactggacacaggaggaggtcggtccatgaccctcccaggttcaaacatccagctccccgttccagagattctcagaatatggatatcgtcggtgtttcaaagggtcccttgaaaccaacgttgtcaatagggcagatactgagtatgaagctaatgggaccagatgggtatgacaaaagcgtctgggacgacgcaagcgaagcttctactatgtcgctcggacatatcctgaaccgcaggcatgcagtcgtgtatagcagcgatgcaactgctcagaagaaattcccagggaagaggaagaagtttgcctttacaggactctctattttcttggcgagacaggccaagaggaagaaggaaaagggatcgcattagaaactgctgaagccaacttgggctgggaaaagagaagcattgtagtctaccttgctagctgttaactcagaccctagtgttactgttcttgtaatttactagtatgtgtcgttgataggtgcctagatcattggtttttccatagcaggctagtaagttgtagctgatatttctgtctagtggttatttcaggtgctgtgtgaacttgcaatgtagcagtatgactagtagctgatatcaagtatatgaggcatatgtggttcactgagattggaatcttcttctctgctacatgatttcacaactgatacctctctgttttgtgaacttggtcttttcaaccatggttctaac

SEQ ID NO: 152573 - DNA, 585 bp, Zea mays
  Clone ID: MRT4577_70728C.1
gggcgattgggtttctcgagggcggccgggatcttctctccttctcgcctttcggttccgcgtgcctttccccacctactctcgctgttctcgctggtgttgctagtcattcgggacaggcatgcttatccgcccccgacgtccatgtcgaagcgaagttctaaggccggccgctgaaggtgtccaaggccgacaagaaggagcatgacaagaccgatcattggtatctagctcaacaagaaagacaagtactgacaaatgaaggagctcaaggccaatctactgaaaggagagattgtacgatcgatcctgatgaacagagtaaagaatgagactggtcactacgtctccgttacctaaaggatgataaagcaagtgcctatctgaggtgcgcttcactacaggtgattgaaacagtgctacctcttgtgatctgagctccgcgatgatgtctacgaatgcttgaaccagagatggctcagctcccttctgctagctatgatacaaatgagtactgacaataatgatgagatattctgcgagagcacgtatgttgtgaaccacgcggcctgcctcgagatccat

SEQ ID NO: 152574 - DNA, 430 bp, Zea mays
  Clone ID: MRT4577_70729C.1
aaacccagcctatcctcgtcaaatcttcctcacctcgtcgcaatccaatccaccacccggcgaagaaggcgacgagatggcggcgagcaacttcatggggtcgtcgtcgcggctccgcgtcgggctcctcccgtccgtgaccccgcacctcggccgccgcgcgctcgccgcccgcgcctctgcggacagcggcggcggcggcccggtccgcgtccgcttcgcgccgtcgccgaccggcaacctccacgtcgggggcgcccgcaccgcgctcttcaactacctcttcgcgcgctccaggggcggcaagttcgtcctccgcgtcgaggacaccgacctcgagcgctccaccaagaagtccgaggaggccgtcctcagcgacctgtcctggctcggcctcgactgggacgaaggaccggacttcggtgcagat

SEQ ID NO: 152575 - DNA, 431 bp, Zea mays
  Clone ID: MRT4577_7072C.1
ggccctcaccaaggaggcccgccgcccccatgggaaaaccccccccagggcccgcccgcccttgggtcgacccttggacacccctccccaaaaaacactggggccaaccctgtgtcccggaaactgggtcacccttgaaggacctaccccgaaatagtaaataccagggttaaccccacattttttccagggaagggcccataagcctaccttttagtaatataccttagggaccgcaaacaggggttccaggaaactaggggggctgctgccctccccacaaagagggccttttgggactaacatcaccagctggggggctctttgtattctcctggggttcgcccacattttcctccaaacccaacaaacctgtgtttgaaccaccaactggtgggggtttcatttgcatgggggcttccttagctctg

SEQ ID NO: 152576 - DNA, 686 bp, Zea mays
  unsure (1)..(686): unsure at all n locations
  Clone ID: MRT4577_70730C.1
nggggcacgagtccccatgaacgacgccggcgaggccgaggcgcaagatctcgccccactccggcgcctccgccgccgccggcctgcaaggcatgggcggaggtcgacacctcgacgcccttcaagtcggtgcgcgaggccgtcgaccgcttcggcggcagcgccgcctggagctccgacctcatcaagcgtatgttcgcgctgcccccgagcccaaaggtagccaatctgtgccctcgcccggcgccgccgccccaaatgttgtgtcttggatacctacctctggtagaatcttgcgtgtggtgtgttgtgtcgtgcttttggttggttcgccgctcgattgtgtcgtctgtggttcctagatttgtggggaacacggcggatagttaaatttcgcgttgatatgtgctttctcctactaccttctgctgcagaagcaggaggggggcgacgaactggccgatctggaggagcagaccgcgcagctagagaaggagctcggcgtcaaggaaggggagacgcttgatgtgctcaaagagttggagtccaccaagaaggtgctcgcagatttgaagctaaagatacagaacgaaggtgccggtgcattttgcatccctgaagagagtgttcggggtcaagccgagctgcccactgccgctgaagaggttgcagaagtgcagcctgag

SEQ ID NO: 152577 - DNA, 263 bp, Zea mays
  Clone ID: MRT4577_70731C.1
acgactaactatgaggaaagctgcgcgcgctctgtagagttccgatcctgtatagcgggcgcgactcgacgcgttcggtgccagcgtgggcagtgcctcgtacactgcgccacgcttcgggagcgcaacctactagtagccatgagctcgcacctggagcgatatctcgaggcggagtcacggcagcgctaactgctgcatctgttagtctctcagtgcacggcgcggtgcacaacgcctctgtgtgcatctcccgatcggac

SEQ ID NO: 152578 - DNA, 642 bp, Zea mays
  Clone ID: MRT4577_70732C.1
ggcctgccggggcatctccatcataaccgcttcgattaaccttttcccgcgaagcacacattcaaagctagctccaaccttggaagtaaggtggatcgacatatcgatcggcagactaatggacgtctccgaccagtcagtgcggctgaccatcgaggcgcagccgagcgacccggcggttacccccgggttcatggcggcgacgccgttcgagccgcagctctcggactcgccaccgcgaccgagcgtggcggccgacgacggcaaagacgacgacaacaacgaggcgtcctgcagcgcgcgggggcgactggacgacggcgcagccgggcccgagcgccggctcacgctgccggcgctgcggctcgccgtgctggagaaggcggccagcggactgggcgcgctgggcttcatctgggccaccgtcgtgctcctcggcggcttcgccatcacgctggagcgggtcgacttctggtccgtcaccgccatcctcctcgtcgagggcgcgcgcatcttcagccgcagccacgagctggagtggcagcaccaggccacgtggtcgctctcgctcgtcgacgctggacggtccagcgtccgcctcgtcgcgcgctccttccgcttcgtctcccgcgcgggcggctg

SEQ ID NO: 152579 - DNA, 126 bp, Zea mays
  Clone ID: MRT4577_70733C.1
gcggccacgcgtccgcatacatgcgtgcataaaacatgaaatacgacgtgatggacaacatccggggtggtgaggtattgacggagcatgcctatgtaagatgaaggtggaccccaatagaaggtt

SEQ ID NO: 152580 - DNA, 694 bp, Zea mays
  Clone ID: MRT4577_70734C.1
ggacataagagcttgagcgttctgagcactagacactagaagagttagcctctaccgcggcagaggttaaacacggatacggatactatgaacgtgtcacgcatcatgctgttccatctccaatctacatctgacacgcggagcgagaacagaaagcatgaagagggacgaggcatactacatactagggcacagtgcacactgcagccacaagggacaacgagagccatgagacaggataggcatgatgaggggtggggaggtgcgtaggcactatgaagatattgccgtatgacaggatatgaagtaatgaacacagtgccagcgacgccgtagcccaaagacacaatgacacactgggatcctgagagcctgaagtgtgagaatggcgtcagggcatgcaggaaggcaagagctcatatgcatttatagagatgtgaccataggactctaggaatgtaagaaggagagcatacaaaacttcgggtcggtggaataggaaatgaatgaatgcaggagagcagtagggcattgtgtatagttatagagctatgtagcatggttactgtgtgacctgtaggatgtagggtacattgacactctgcatgatgtaagtattcattataactaagaactaggaggatgtaggactgatgctcaagtataatgaaaacaattaccttgtccttgtagt

SEQ ID NO: 152581 - DNA, 314 bp, Zea mays
  Clone ID: MRT4577_70735C.1
gtttgggcctttgtggacctgtagcaagcaaatttattaggaggctggcaagggattcattctagtagttgcagggactcgcctcaagctaccatatgcatcacagaacacatgaaatacatcacgctttaacaagttgggagcgaaaagaaggaactaactaaccttctcttaacttcgcttgctagatgcatgtatcgcaaacatttaacggtgcgctggagaaatatacctttccagcagctgtcggctgcaaagtggattgtgctcaataaacacgtcattgcctgctgtagtgctgatttggttttttt

SEQ ID NO: 152582 - DNA, 518 bp, Zea mays
  unsure (1)..(518): unsure at all n locations
  Clone ID: MRT4577_70736C.1
agtcatgacccaccgcactccggcgccgctacagcgtagcggtgtgtatctccttacatggttgcagagagtactatatactccgcaatgcgcgacggcacgacgcttgntgttggctgatgtcgcctggtgatccgagggtgccagcgatatgtctcaggcgtcgccacgtggcgcgaggcgacccaacgtcgatagcaacgccgcctcaagacgaataaggcgcctaaggagaagaagccgtccgcggctgaagaagccggcggcgcaccctccctacgctgtgatgattggagaggcgatcgctgccctcaaggagaggaaggggtcgagctcggaggccatcaacaagtacgtctgagcggaatcactgcggcaagctccccaccaacttccgcaagcagctcaacgtgcaagtgaagaaggttgcttacgtcagcaagctaacgagggtgaagaactgcttgaagctgccgtgcaccgacgccaagcccaaggccggcaagcccaaggcaccc

SEQ ID NO: 152583 - DNA, 278 bp, Zea mays
  Clone ID: MRT4577_70737C.1
atgttctcatttagtgattagacacattgaattgtgttatgttgtgaggacctaggacatggatgggccgcaggaacccaaattatggggctggcataataaaaggatatgtaaagggcacatccttaagacacaagaggcgagcggggtttttaagctaaattctcataactaaagaggttccggcatagaacttaatttaaaaccctcgaacccggggaccctattgtagaaatcttttaccccgttccctaggacaaattttctggaaaacaaaa

SEQ ID NO: 152584 - DNA, 1176 bp, Zea mays
  unsure (1)..(1176): unsure at all n locations
  Clone ID: MRT4577_70738C.1
cgatgaagctgacattgatccactggtttatacaaatataacgaaatagaccaaaacacctacaaccccagtgggtaaacatggtgacgttggcaagaacatgccgaccaacacaaacgtcactcctcaagcaacaccacatacggaatcttgctcgccgatatttgatgcgacgccgcaaataaagtctcccggcggcgtccaacaggcggcagaaacagatctccctgacaatggtccatgctttgatcagactccatctgaacatgttgaccagatttcacttgatccggagatgcaaactgtgttagctctacgcgaatatttgtgtgatacgcaatctgacactagcagtcactactcaactttgaggaacagaaacgacatagtcggaaccctcaaccttttgatgaatctgtactgtacacttctagacaatgcattgcccgagacagatgaaatggataaatgcaaagcaatcatggttcccatggtaagcagggggcactggacattgtatgttgtcaatacagtcaagaagtgcattcatattttagattccaatccatatggggcaacacttggtggtactacatggaaggaatatcattttgcccaattggatttaggtggcagaaagttaccatgagttaaggttattatgagtagattaaataaagccatacaacatgtacgatcncatgacatactttcccaaatttggcaacttcgcaattgacttgtgcccaaattgtcctaacatgacagcaggatccaatgattgtgggttttatgttatgggatacattctcttttatgactgtgttgaaggatctctgcggtcagacatagaagcaggcaacactagtgagatacggtctcttgcgttgcattatatcacattccatccgaagaacaaagcattattgctgcttgaagacatccaaagattcaaggtcaaatggatgcagtttagtttagatatgtaatatattgtgtatacaatggttccataaacttcagatgagtcatgtgtgtatgggcaaagacaggcagatgtttcttatgttatgtcaatgacaacttggggatcaacgatgtctaaactagaatattgtaccccatgtgtttgatcttcatgtgtgtttcatgcatttaattctgccaatttcctgt

SEQ ID NO: 152585 - DNA, 427 bp, Zea mays
  Clone ID: MRT4577_70739C.1
acctatgcgttcggtatggagtgttttgtcggtcgcaccatattaacaattaccccagcgttggcgaggccaaacgctcgttatctgggttgtttttttaacgaaaatcttggtattacagaaaaaatttgacccccaattggtcggaagggtcaattacgcaaataaaagtcgttatgtcccaacttggctgcggcaggatgggcacattaatatttatcccgccctggacgaatataccaccccgcaaaggggtgccagcaccagtgaagagaaaaaaaaatttgtgatccataaaaaaaaccctacttatttggccttaccagggcgccagattaaaaataacccccggtgcgggcttggtgttcggtccattctgaaaccaaattaaccagggcttgggatttggatgcggggccaaggctga

SEQ ID NO: 152586 - DNA, 586 bp, Zea mays
  Clone ID: MRT4577_7073C.1
cgcgcccgtcattgtgcactgctgcaccgcagcctacgcgagcctccgtccgcaagtccaaatcttcagctctctccttgacgcatgcccggatcgatcggtccagctctacccaccggaggaggaggcagatcaacgggcagctgactaaggtggatccacggaggaggcatggcaagaggcccctacccgccgacgaggaggaggaagaggaggaggaggagctgcccccgccgccggcaaagtacgagcagctggatcaggaggagaagcatcacgttgtcgtctcgcagctgcaagcaggagctacctttagcggtggccgagggtcttcgtcgtcttccgtggccggcccttcgccggaggcgtacgcgcagtactactactcggcgcgcgccgaccacgacgcctccgccgtggcctccgcgctagcccacgtcatccgcgcctcgcccgaccagctcccgccgcagcaggccgcctgcttgtacggcgccgccggcgcgccggtcctgcggcagggagagggagaccatccgcaaccgcaagcggctgcgcaccaccatcccggtggccacgtcgccgc

SEQ ID NO: 152587 - DNA, 879 bp, Zea mays
  unsure (1)..(879): unsure at all n locations
  Clone ID: MRT4577_70740C.1
aattcggcacgagggttgcagcagctgttgtaattacgtggtacaggacagtgcccatttgccgttgccgcgtccagcattcattcattcattgccctggccttcttccttcgggccttcccgtgccgtcgcccaacgcctcacctaccaccaccgcccgccaccaaaccaaaccaacccctcggtcgccgacgccgagtgacgtaaacgatggactcggcgacgtcgggggcgatggagctggtggccgcgctgctgcgcggccgggtgccgcccgagctgggcggggacggcgccgagggccgggcgctcgtcgccacgctcgccgccgcggtgctcggcgccgcgctcttcgtgctctggaggcgcgccgccgccgggaagaagcggaagcgggaggccgccgtcgcggccgcggaggccacgcaggccaaggcgagaggcgggaaggccgccgaggaggagaagccggccgacgacggcaggaaaaatgtcaccgtcttcttcggcacgcagaccggcacctccnaggggtttgccaaggccctnnctgangaggcgaagtccagatattacaaggcaagcntcaaagtcgtngacttggatnattatncagcagangacgaggaatattanaanttgaagaaggagaagctagcnttgttcttcgtngcaacgtatggaganggtganccgacttacaatnctgctaggttctacaaatggttcactnatggaaatnagangngtgtcttgctaaatnactttnagtataccgtntttngtctgggcaaccgacagtattagcatttcaacaaggttnccaaggtagtngatganatcctgacagaacaagggtggaaagcgccttgttccagt

SEQ ID NO: 152588 - DNA, 270 bp, Zea mays
  Clone ID: MRT4577_70741C.1
gcgggggctggggtgtagatctattcgacgcgctgctggaggacaaccggaactcctgacgcctacactcaaagctgacatgtgatgacggccctagactacggactacatgatgaggagggtcatgaggtggataaaccggcttaaaaggcgggggggaggagatgtaccggtgacgatgctcatacccaaagactgaactctgtagatctttcaaaggcacagacaggtattacggcacgtactcattgatgggctgaggcgcaaggg

SEQ ID NO: 152589 - DNA, 351 bp, Zea mays
  Clone ID: MRT4577_70742C.1
ttttttttttttttttttttttttttttttttgttttttttttttttttttgggttttttttttttttttttaaagcctctcaaacaaaaaacttcgaagggaaagcccacttggttttttccctttaggaagaaaaaatggggaatcttgcctgggtaatggaaaacccacccttggcccttggtttgggtatgaccttttgccctaaatttaccggcccgaagccttggggtcccaaaaccgggttttttagggtctaaacatggcccaatttacccatgcctttcaaggattgccctaaaaaaatggagggtttttgaactatgggctttggagaagggaaccgcccc

SEQ ID NO: 152590 - DNA, 584 bp, Zea mays
  unsure (1)..(584): unsure at all n locations
  Clone ID: MRT4577_70743C.1
attgggtacctcgaggccggccgggactatttcatctcccaccgaattcgctgcgacgcctctcccctcgcctcctcgactacgcctaggggatagacctacaggaatcacaaaaaggggcggatcatcangagtaagaaacgcccgatacccctactgggttcggatgcacactcgcacgaaccatccatccatcctgcatcaataactgtgactgcttccgcaccaagctcaccttgagcatgtgctcctagtgccacataggtagcatgataacgaataaggatcaagacatagtctgtcctgtctgctctatcgagagcatcgtgaactgcaacgtcgccagcgtggatacgactgttgcagtaagaaacaggggagcagctgtggcccaagaagagtggcactactggaacgtgcaccaagacgctgaggatgactgatacactaaggaaagagaccctttatctcaaaagaaaaaaaggtagagccgaaccggagcaccgcctgcaggaacatgtatggacttacaagagtccactggcggtgatgaaacttgtactgggcactccagcgatactgcg

SEQ ID NO: 152591 - DNA, 433 bp, Zea mays
  Clone ID: MRT4577_70744C.1
attcccggcggctgtcattctaatggtggatggccaagttcacagccactggtgtcctcatactgttcgaataaacagcgggtgacataacttacagcggggaagcaacagctagctgcttccctttttgtttctccaccaactaaagctgaccagaaaccacaagcttctccaaagacagctaaggacataccctcaactcataaagtaactaccactaatgtagctgcacactctgataaccagcaagtaatccctgctgatgcaccaccgcctgatctgcttgatctacgtcaccagacagatccatcgaaccgaccatcacctgaccctttttcacagctacaaggtctacttggaccaacatctgctgctcctgcgctttctaggactccgtctaccactaccaatacttccaaaccaccatatctta

SEQ ID NO: 152592 - DNA, 434 bp, Zea mays
  Clone ID: MRT4577_70745C.1
attcggctcgaggctcgttcctgatctttgtaccaggacgcagctgtgcagccaagggcggggcgacaccagcgcgttcctcggtcggactggattgatgccatccacatggcgggccagggctgtcatgcgctgatggaccaccttgcagccaaggacctccagcgccaccagctgcgccgtggcgcgcctcagttccaccacggccaccatggacacggccaaccaagccagcacttcttggtcgcggaggaccggtaggggccgtcgtactcgcgccacaactccaccaacgacgagaactacgtctggctgagcgcgtccgcccgcgcgagctacgtggacacccacgccgacgccgacggggagaccgtgagccaacactgcacgaagccgtcctgcgcgtacgagggctccctggaccacaccgacct

SEQ ID NO: 152593 - DNA, 300 bp, Zea mays
  Clone ID: MRT4577_70746C.1
atcattccagcaacgatcgtataatttataaactttcctataaggattcgaagcgtaccaaagaggcgagtgatacttaagatttaaagcataccacaaactcacaggattatgtttttctggggtaataacttacaaatttcaaaattttagtgaagaaacttatttttttcacaagaatacatatattcaatcataaaggaatacccatatctgaaaataagagctttcgttcgtaacatttgaccaaaaagaacactgattcacaggcgtgcgcgacatatagtcatcttgtccaat

SEQ ID NO: 152594 - DNA, 268 bp, Zea mays
  Clone ID: MRT4577_70747C.1
ggcctgtcgcgatctataactataaagggagggtaccacccatgttgttggtataacatatgaactttttgtacattgcgtcgttcctgtattgttagctggattcgaagcggactacatgcaggtttgttcaatttatagtatctattagctgtacgagcatacctgcatgacctaactctcatagaacccattatgcaagtaactcataaatatagggaggttcttttttgctgggttcacaccttcttagcatgaactgatgcaa

SEQ ID NO: 152595 - DNA, 269 bp, Zea mays
  Clone ID: MRT4577_70748C.1
gcacgagcggcggggtaaaaaaagaaaaaagaaaaaggaacgaacaatctcaaatccctggctttgttcatgattcgatcccctctttttaaccaaccgatggtgcacctcggctttttcgataaagaggaggttatttcatccgatctattagagcatatctaagggattctttatttttgtccttctatttaactttctatttatcttcctataaagattacactctctatatatagcaaaaaaaaaaaaaaaaaaactgggggggg

SEQ ID NO: 152596 - DNA, 950 bp, Zea mays
  unsure (1)..(950): unsure at all n locations
  Clone ID: MRT4577_70749C.1
ttttccccaaccctttcatttcccgctagcttctcctatataaaaactgcacggcacgagggcccaatgcaagcgcgatcaagcttcttttgcagctcttgttattgccaactctttgctaccttttacttgctgcagaaagcttgatcgatcgatcgatccccgaaacaaacaatggaggttaaggtgctgagctccaggctcgtcaagcccgcttacaatgctggcggcgcagccccgccggcgagtctggacgactacatccccctgtccatcttcgacagggtcacctacaatatgcagatggccatcatctacgccttcgcgccgccggccccgcccacggccgccatcgtcaagggcctggccacggtgctggcccagtaccgcgcattcgcggggcagatcggcgaggcccccgacggcacgcccgcgctgctgctcaacgaccacggcgcgcgcgtcgtggaggctaccgtggacgacgccaacctcgtcgacctggcgcccgccaagcccaccccggagctgctgctgctgcacccggacatgacgcatgggctccaagaggtggtgctcttgcagctcacccggttccggtgtggctccctcgccatcgggttcacgtccaaccacgtcgcggccgacggccacgccaccagcaacttcctcgtggcctggggacgcgccaccaggggcctccccacgggcctgccgccctccgtgtactaccagccggggcagttcaagccgcgcccctcacccggacccggccgcgtcgtcgacgacgactttgaccaccgcagcagggagtactaccacctgccgtcgcctgctgctgacaacaaccacggctacggctacggcgacgaggacgtgatcgacagcatcgtcatccacaaggcgcacttcaccaaggaattcatcgcggngctccgctccagggcgtc

SEQ ID NO: 152597 - DNA, 354 bp, Zea mays
  Clone ID: MRT4577_7074C.1
aaaaaacgggcattcaccctttaattggatttatcccattttctccacctaaaacgggcatacacccccacggttaaaaaaaaagaagtggaaactacatatacgggtcccaacacattaatccaaatcctttgttttcgggttcagagggcaaccaatttttggaaaaccccaatccactcgtaaaagggtgggatcggttccttggagaaccaacccaaaatgtgagggttgatgccccaatttttaacaaacgggcggacgcacacataatttggcggtagaacaaattatttgcagtccacgtagggatcaggcggaatggaacagggcttgggctgctggggttttttt

SEQ ID NO: 152598 - DNA, 355 bp, Zea mays
  Clone ID: MRT4577_70750C.1
ctgagcgtgcaatagcggccttgagatatgtgcagacatgcggccttaacttttctgcggactgagaccaacatcaactactaccattcatcctggtactatgtcgtcgagccctgcttccttcttgacacaaccacagatggcggcgtgctaccagaccgttgggcctagcgctggaaccctgttacaagtgaaacatttgctgggattgaaacagcttgcatggacaaagcctgcggggttcttacaacagcccatctgtggtggtgccatctaatgagatggcttcacaccatataccagtataaatggtgtttgtctgggctgtgggaaatcccagaaatagttaatgtgg

SEQ ID NO: 152599 - DNA, 618 bp, Zea mays
  Clone ID: MRT4577_70751C.1
gggccacaaaaaaaaccaaaaaggctttggggggaatttttttttcccccggggaaacccccggtttgttgggggggaaaaacctttacaacccgcccccccctttggcaataacaggggggaaaaaaaagaaaaaaaacccccctttctaacctaaaaagaggggttttttttggggggaaagggccccccccccaagggctgttttgaatgccgggggtaaggataacccccccgtccggccggccccccttttttgggccccaaacacaaccccggaaaattttttttttttttttggaaaaaaaaaaaggaccccgggggggaaaaaacaaaaggggggggagggaaaaggggtttttgtgaacataaaagaaaaaatttaacccggggaatttttgcgggggggggccaatgcccagccccttgggtttgccccccgactccacggggcccttggggggggggggcccccgaaactttggaatctgggcgcgccttttggcctgctcccgaatttcggacagttggggggacttttttttgtgggggaaaaggggcgcggtggggggccccccgggggggggggcccggggcagggtccctttgggggggggg

SEQ ID NO: 152600 - DNA, 227 bp, Zea mays
  Clone ID: MRT4577_70752C.1
aggccacccacaaacgggatccaatacgagtttgggttttgggttgcaaaatacaaaaacatgttttgtttaagggacggggacagttgcgatgcgacaaaaaaacaaaaccacgggaatctgactccacagaacagggtctcaacaaagccctgatatcactgttcattggcagatttgtttgacggggggcaaaaactgggcgggctggaccacgggggggttct

SEQ ID NO: 152601 - DNA, 796 bp, Zea mays
  unsure (1)..(796): unsure at all n locations
  Clone ID: MRT4577_70753C.1
ccacgcgtccggaaatcagttgtggcaagctaagcaattactttcctgtgttatatcgataatggtccgtacctaagttgttgaagttcctcttacataacgctctttacattatcatagtaaccagtgcagaacattacgantaccgaaaacaaacacatcgcatcacctgcttgtatcctactgttgtttctttgtggtgatgtggtctcaaccaggagcactttgtttagctgcaaatgtgattcctgagtcagttttgagatctttactacctggccataatttttgttcttttggactaggtttatgcaccagcatgccaccggagaggatgctaccttttgctgcacgagtggtaaggcacctttcatagatgtactctgttgcaacttgcaaaatacttagaggaagatgccacgtgtaattgcacatcagaatgcatggttgctcgccttgttctcttatagatggaagtgtttgtgtgcaatacgcaggctggttgtggttgcagaggtctgggggctcgaaccagccttccccatcgcgcagacccacgcctggctggctattgacccgaattcagaagggctgcatcctccatgaccacctgcctgcaccccgtccaatggttgtgaatattccagtcccgatcagatcaaataagtcatcaactattagcagcacatcattactatcattgtgatagctattattttgcgatgattatgcaactatatggttccaacttgctagctccaggcataccaggcctgtgcaccttttacgggtgtag

SEQ ID NO: 152602 - DNA, 429 bp, Zea mays
  Clone ID: MRT4577_70754C.1
aagaattaccgtatcacttatgggcggccaattggcgaaaaaccctctaatactgaccgtctataaagaggttacaaaatattctttatgatgagcgccctaacccagaacgcataaggttcatgccaaaatgaatggccgaccgaccaccatgacttgcctttttgactgtgccttccaggaactgtggcacgcttaatacttacaataaatcgctaaggccaacaacttgaacttggtgccagtgtcactgttgacacaagcggcgtactaattgatgtcgctagttccgtcaatgtatatatttgcgcactgtcacaaggagcagacgatgtgaattcaaaagctctgcatatattgcatctgggcataaaactcttccgcctacgagagctgtcagccttccaagcgaacttaaggacgcctgaa

SEQ ID NO: 152603 - DNA, 1464 bp, Zea mays
  Clone ID: MRT4577_70755C.1
atgaattcgggacaaggaaaaacaaagagatatggggtgaaggatcgtctcaaggatctgaaaagtggtcaagacttctgggaacgtgactcaaggaaagggaaatgtggtcaaccctctagtgggcaaaaatacaaagaaaactgggcgagtttactacacctaagtggcgaccaccccggaaggagaaccggtgatgatgtaagatcgtaccgcatgccacccaatgagctggcggaactcaagatgcaattgcaagacttattggagaaaggatttattagaccgagttcatcgtcatggggatgtctagcaatctttgtcaagaagaaggatcaaactcttcgaatatgtgtggactacagaccccttaatgaagtgactattaagaataagtatcctcttccccggatcgatattttattcgatcaactcactagatcccgggtattttctaaaattgatctcagatcgggctatcatcatatcagaattcgacccgaggatatacccaagaccgcatttgccactcggtatgggttatttgaatatttagttatgtcttttgaattgacaaatgctccagcccacttcacatacttgatgaattcggtattcatacccgaattagacaagtttgtggtggtcttcattgatgacattttgatctattccaagaatgaggaggagcatgcaaagcatttgtggattatattaatgcgcttgagagaacatcagctttatgccaaattcagcaagtgcgcattttggttggaagaaatccaagttctaggacatgttttatctgtcaaagggattgcggttgatcctagcaagttcaaggatattctagaatggaaatcacccacttcagtgcatcaagttagaagtttccttggattggctagttattgccgcagatttatctcagatttctccaagattgttaaacccattactgggttattgaaaaatgatgttaagtttgactggtcctctaagtgcaacgaggcctttgaacgattgaaagtattgttgaccactgcactagttttggcccaaccggatattgagaagccattcgatgtttattgtgacgcattaggcagtgggcttggatgtgtcctgatgcaagaaggacgagtaatagcttatgcttcaaggcagctgtgccggcatgaggaacattacccaacacatgatttggaactggccacagtagttcatgcccttaagatttggcgtcattatctactggggaatatatgtcacttatatacggatcacaagagtttaaaatatatcttcacccagtcagagctaaacatgagacaaagaaggtcgctcgagctaatcaaggattatgacttggagattcattatcacccaggaaaggctaatgtgttggcagatgctttaagtcgtaaaagcctcttgtcattgtctcaccgtaagatcacctga

SEQ ID NO: 152604 - DNA, 290 bp, Zea mays
  Clone ID: MRT4577_70756C.1
tctatcacaactcactattatcacaacttctctctttctacacaaagaagcttcttatcaaaattagcacctcctaacacatatcatcatcaaccttaagtaatctaccattcttcctccttcctatcacatttctcttctctttttttttaactccaacttcaaccatttataccccaatttccacactcccatctactatttctatacatacaatttctcccacaactcatactacaacaacttaattattaatgactttaccaatgttcttctacccttctacccaa

SEQ ID NO: 152605 - DNA, 361 bp, Zea mays
  unsure (1)..(361): unsure at all n locations
  Clone ID: MRT4577_70757C.1
tcccgcccacntncgtccgcccacgccgtccgggcttttctcctccccctcttttaccaagtcctnncctcgggttagnnggttccttaggtgttttgtcggaggggnncgatggcgtgcggctgatgtgngagtacccgttnngcttcgtcggcgggcctttgctctgggccacnncagcaacgagtcgctttggagaatgggccttcgccttgcctacggcgagnnatcctcgactttccaaggtcanntcaccgacccgggnagaacnnggggaaggtcnntcgcggcnttttcggcttttcgttaccctttcnntcctccgnagaaaccctccatttgctcnngacgcttttatcga

SEQ ID NO: 152606 - DNA, 803 bp, Zea mays
  Clone ID: MRT4577_70758C.1
cattgggtacctcgaggccggccgggagcgccgtacgcacagcacagtcacggtactccaccgctaaaaccttcggaaagaatccccaaatctcgcacacctcgaagccttcgaggcccgaaaccctagctcctcggcctccccgccgcttccacccatggctccaggactgcagcgcttcattgacattgccgacgacggcacgccccagctcgacgccgcgtccggcgaggagctggtccgtgtggaccgcaccgtggctgtcgcccttggcccccgctcgccggagtccccggggactctgttcgtcaccaccaggagggtgatttggctcagcgaagcggagaagggcaagggctacgcggtggacttcctcgccatctcgcttcacgctgtgtcgcgcgacctcgaggcgtacccctcgccctgtatctacactcagattgaggcagcagttggtacagaagaggaggctggggaatcaaatcctgaagcaaatgaactagagctatctagagtatctgaaatgaggctcatactagcggaccccggtcaactggatgcactttttgatgtcttctgtcattgtgctgaactgaatcctgaccctaatgctgagtgcaatggggagaatggctggatccatggtgaagatatgtctaatggtgactggattcatgatgatgtggacatggttgatgcttcaaatcaacgaccaacgttttgaggatgcagaggaggaacaggagagccatgaaaataatggacattagaaacagagacatgttcctcgagagcatcat

SEQ ID NO: 152607 - DNA, 254 bp, Zea mays
  Clone ID: MRT4577_70759C.1
cgccggatctcctctgcgcgcccagccgtttctccctgcaagttccagcctcctgcgtgctcctgctgctctgctctcattgccgagctccctttcgcgctgagctctctgcccacgctaagctcgctctttccttgttttccacgcgcacgactccgccgtccacgtcagcttgccagacctgctactttatatatatatatgttaccttcccgtattatcatcaagcccgtcgaacctcgttcttctctgct

SEQ ID NO: 152608 - DNA, 217 bp, Zea mays
  Clone ID: MRT4577_7075C.1
ctgacgcttctcgaattgatataagtatccatctcttaccaaacaaaataaaaagtggcatggtctacaagtggccatcgcttttcaccctgctgaacacgccgagtacctactaatccgctatgttcttcatatggagagtgcccacgatctgaagctgacaactgatcctagagatatgaacattctcctggacgactaccaagtcctacatcgt

SEQ ID NO: 152609 - DNA, 907 bp, Zea mays
  Clone ID: MRT4577_70760C.1
ccaattgcttctgatcctgtccactccattaccaagaatagcactccatgtatcttggagtagagggaggaggagggagcgcagccagtcatctatggatcggcgcgccaaacaacaagaccggccgagagggaagagcggaggccggaggggtcagctcttgcacttgtcaggggaggctagtctaggctaggggatctctgattgcctcctatcctctcctagccctgccctgccgcagcgcaacgactccgaaatctgaatcgccgcctccctccgccattcgcgtcagtgacatctattccttcaattcattcagtcaggcgacagcccatgcccttcacacaatcaaaatcgaatgttggttacacaactggaaaaataacgcacaccccgcaacatactaggcacgtctttatctcggatcagtattcgggagtaagaacgacagcgcattgccaggatagaaatcgtcctgatgttcttcgtaagtctggcatttagaccaggctgacaatgtcagcttccgagttcaggattccataccagcaagtttcaccttcgcagcctgctgagaatgtaaatcagtttaagacctgtcgatgtggggagggagacccgaactccacttctgaaactggtgacagtccaccggcctcttgtcctaattgccaggtccttaagagtggacatttactactttcatctaaaggaattggatggacatcatggaaaaagcgctggtttgttcttacgagggcatccctagtgttcttcagaagcgaccctaatgtgccgccacccagaggagctgaaccaattgttacacttggtggaattgacttgaataattctggaagtgtcgtcatcaaagaagaaaggaaacttttgacagtgttctttcctg

SEQ ID NO: 152610 - DNA, 1294 bp, Zea mays
  Clone ID: MRT4577_70761C.1
tcggccgggacttcgtctatttgcggttctcggcgcaatacatttccggacacagcgccgtacgcacagcacagtcacggtactccaccgctaaaaccttcggaaagaatccccaaatctcgcacacctcgaagccttcgaggcccgaaaccctagctcctcggcctccccgccgcttccacccatggctccaggactgcagcgcttcactgacattgccgacgacggcacgccccagctcgacgccgcgtccggcgaggagctggtccgtgtggaccgcaccgtggctgtcgcccttggcccccgctcgccggagtccccggggactctgttcgtcaccaccaggagggtgatttggctcagcgaagcggagaagggcaagggctacgcggtggacttcctcgccatctcgcttcacgctgtgtcgcgcgacctcgaggcgtacccctcgccctgtatctacactcagattgaggcagccgttggtacagaagaggaggctggggaatcaaatcctgaagcaaatgaactagagctatctagagtatctgaaatgaggctcatactagcggaccccggtcaactggatgcactttttgatgtcctctgtcattgtgctgaactgaatcctgaccctaatgctgagtgcaatggggagaatggctggatccgtggtgaaaatatgtctaatggtgactggattcatgatgatgtggacatggttgatgaaaatgtcccgcagtttttcaatgccaatccgataggtcaaaatggtggatatgaccttagtcgttcagtatttgagcttcaaatcaacgaccaacgttttgaggatgcagaggaggaacaggagagccatgaaaataatggacattagaaacagagacatgttcctcgagagcatcatgtgatttattttgttgtaaatcactaccgatgcagctcggtttgcctactgtttcatctacactttctcttcctttttccttgatgttataggattaacatcactgggtgactttctggaattgcatcgatggttccttttggtgagaaaaggtcttgctgctggtcaagaatgtaacttgtagagcatgatgttgaatcgtgtgaaattagttcagtacttttgatctaacaaatagaaggtcgaattgggaaaggagatatattatcttttcccttgtatatcatggcaccgttatgttacgtctgcttagaattaaattcagtttgggtgttgcagggaccaaaaaaaaaaaaaaaaaaaaaaaaaaaaaaactcgactcgtgc

SEQ ID NO: 152611 - DNA, 300 bp, Zea mays
  Clone ID: MRT4577_70762C.1
ctcgtagatcattgtacacatatcgagacagctatctagctagcgcgctcataatctaacccgtattacggcatggcttacaagcatatccgagtcttgtcctgcttcattgcgatcagcgctcttgcatgcgctcgctgcgcatccgacgtacccatggacggtggcaggtgcaacggcggcgccacctggtacaggcccggcaatggcgctggatgcgacggtaacgcgtgtgggtaccactgtgccgtcgaccaaactgagatctagggaatgatcaccgacatgggggaatccatc

SEQ ID NO: 152612 - DNA, 285 bp, Zea mays
  Clone ID: MRT4577_70763C.1
acgagcttatatttgacagttgtcgtttttagaccattgagcaagctttgtttgattattacagtctacgagttctatattaaggcaaataactctgaggttagtgcactactgtagggcgctgccagcttgaccttgtaggtagctgccactgccaacaggatgtaaacacagacagctaatgcttactaccggtcttgagctctgaaggttcctacatggatatggcatactagctggagatgacggtggccagcaagtaaatcaggacggagttcttcctga

SEQ ID NO: 152613 - DNA, 402 bp, Zea mays
  Clone ID: MRT4577_70764C.1
cactcaagagcttactaattgtcaactgcccggagttgcgatcactagaaacatgcatcgtagatctcccatcactggaaagcctctttctgtatgattgtgaaagcttggtatccttgcccagggcgcgggcaggaggaccacaagaatactcatctcttcatgagcttacaattaggaggtgcccaggtgtaaaatcgctgccttcagctctgcagcagcgactggacaacggcctcatggataaaacgaatctagatttccgtctttgtcaaggagaaggtgtccagctctctcctggaccagtagtaggagaagcaccacgagaccctcatgcgttggctgcctgccatcctcaacgtcatcgctgacgccgagaagcaagtgcctcgcctcgccgcg

SEQ ID NO: 152614 - DNA, 611 bp, Zea mays
  unsure (1)..(611): unsure at all n locations
  Clone ID: MRT4577_70765C.1
gccgtgggttttttttttttttttttttttttttggggggtttttttttttttggacaaaaactcaaaatggcataaacatttctataatcgactcagggggtacatataggctacaaacacaagaaccacaacatctgcctccctaggcggggtcttgaaaaggggcccttttttaaaattctaattatacaatccttcaggggatcaaaaaaagtttattccttttattggaactcaaattccgtaatgaaatgtggcccccaataatgacaagccaactttgagtatgctcccccgtggtttttcttccccccccccggggcagtttgggccttggttttcttgggcccttttctttctctcccggaattcnttctttttgtgccccaatcctttctttttggcgttttggggccccccccccccctcttttttttgcttgcgggtctgctccttttttttttctcnttttttttcccttgttttccctttcnctcctctctttttttttgtccctttcctctccctttctttttttttcttctcttttcttttttttttcttttttccgttcctcgttccctctttttttttttttgttttattatc

SEQ ID NO: 152615 - DNA, 1268 bp, Zea mays
  unsure (1)..(1268): unsure at all n locations
  Clone ID: MRT4577_70766C.1
ctcgaggccggccgggccgggattcccgacgccatttcttcattctcccatctccatctccatctccatctccatcttcctcgcagcgccggcgatccatcttccgctgcctcccttcctcgcgctcgggctctcagtgacggcatcagcggtttcccctcccgcctctcgccagtcgcatcacgccctcgcctccggtccaccgcacaccggccggtgaccctgcgtgcgtaccccctctctctgtctcctcccgcctccggtggatcgtcaacggcgcccggctccggcggctgcgccgtgcgcggcctgagggcaggagccagcagccgttactcgaccaaggcgatcgcgccgctttattacttgctaatctttcttgagggcagatggccgtttcttttgcaaatgtcaacgccgaggcagggctgaaaaagcttgatgagtaccttctcactcgcagctacatcactggctaccaagcttccaaggatgacctggctgtctactcttcatttttggctgctccctcatccaagtatatcaatggtagcaaggtggtttaatcacattgatgcactcctgaggctgagtggagttaccgcaganggcctagngtgttaaggttgagccatcagcagttccttcagcttcaattcttgatgttgctgatggacaggccccagctgctgacgaggatgacgatgatgatgttgacctttttggcgaggagactgaagaggagaagaagctgctgaagacgtgctgcggctgccaaggcttctggcaagaagaaagaatctggggaagtcatcagttttacttgatgtgaagccatgggacgatgagactgacatggccaagctcgaggaagctgttaggagtgtccagatggaagggctgctctggggcgcatccaagcttgtcccagttggatatggtatcaagaagctgcaaatcatgatgaccatcgtcgacgaccttgtctctgtcgacactctcattgaggactatctgtgcgctgagccagtgaacgagtacgtgcagagctgcgacatagttgccttcaacaagatctaggcgtgacttccgatcagtccttctcctggggtgctggcgatggtggtggctgggcaatgcaccagcctaatttatccatagctatatgtctgctttgtgtggccagtgatattgccgtgggagcatagtatttgcatgttcgaaccaattatctggattatggtatggatttgtgcaaaaaaaaaaaa

SEQ ID NO: 152616 - DNA, 501 bp, Zea mays
  unsure (1)..(501): unsure at all n locations
  Clone ID: MRT4577_70767C.1
gggtcgcatgggggcagcgcgctaacccgtctacatcactgatggagagagcaccctacgatgcgtgctagggtcaacagcagagctgcctatcttcccgaacactgaagccgacaagactattaatctggacgcgcaggctatggggtccgggggcaccgagaaagtccacatccatgacaggggaggcctccgtccgaacaagctatggatcattatggccagggtgctggtctaggacgaaacgcacgctctgcgccttcgacatacataatgagatcacgcctccaattggccatggctgtaagagagtgggatgctaatctcggctaacacacttactgaccatacgagcaccgtagaggaggaaaacgaacacaccatggtcatcagctaggctatccatccacngacatggtatggcattccaccgtaccaacaatgaatgatctggtacactttactaatgtaggatggcctaacctagcgtgcctacaacat

SEQ ID NO: 152617 - DNA, 697 bp, Zea mays
  Clone ID: MRT4577_70768C.1
ttttttttttttttttccattcaactggaacggtgtttcgaattaaagcaaattaactctggtactggtacattcgactcgaataggatccaaaaatactcacggcaatatcactggccacacaaagcagacatatagctatggataaattaggctggtgcattgcccagccaccaccatatccaactgttacaagcttggatgcgccccagagcagcccttccatctggacactcctaacagcttcctcgagcttggccatgtcagtctcatcgtcccatggcttcacatcaagtaaaactgatgacttcccagattctttcttcttgccagaagccttggcagctgcagcacgctcttcagcagccttcttctcatcttcggtctcctcaccaaaaaggtcaacatcatcgtcgtcgtcctcctcagcaactggggcctgtgcttcagcaacatctggagttggggctgaaggaactgctgaggattcaaccttcacaccttggccctctgcagtaattccgctcagcctcacgagcgcatcaatgtggttaaaccaccttgctacgttgatatacttggacgagggagcagccgaaaacgaagtgtagacagccaagtcatccttggaagcttggtagccagtgatgtagctgcgagtgagaaggtactcatcaagctttttaagccctgcctc

SEQ ID NO: 152618 - DNA, 1225 bp, Zea mays
  Clone ID: MRT4577_70769C.1
ttgggaccctcgaggccggccgggccctgttttctaatgatataaatccatatttgtcccagcgaaggcacacagccgccgccatttcttcatcctcccatctcctgatctccatctccatcttcttcgcagcgccggcgatccatcttccgctgcctcccttcctcgcgctcgggctctcagtgacggcatcagcggtttcccctcccgcctctcgccagtcgcatcacgcccccgcctccggtccaccgcacaccggccggtgaccctacatggccgtttcttttgcaaatgtcaacgccgaggcagggctgaaaaagcttgatgagtaccttctcactcgcagctacatcactggctaccaagcttccaaggatgacctggctgtctactcttcatttttggctgatccctcatccaagtatatcaatgtagcaaggtggtttaatcacattgatgcactcctgaggctgagtggagttaccgcagagggcctaggtgttaaggttgagccatcagcggttccttcagcttcaattcttgatgttgctgatggacaggccccagctgctgacgaggatgacgatgatgatgttgacctttttggcgaggagactgaagaggagaagaaggctgctgaagaacgtgctgcggctgccaaggcttctggcaagaagaaagaatctgggaaatcgtcagttttacttgatgtgaagccatgggacgatgagactgacatggccaagctcgaggaagctgttaggagtgtccagatggaaggactgctttggggcgcatccaagcttgtcccagttggatatggcatcaagaagctgcaaatcatgatgaccattgtcgatgaccttgtctctgttgacactctcatcgaggaccatctctgcgctgagccagtgagcgaatacgtccagagctgcgacattgtcgccttcaacaagatctaaatttccttgtgatggtggcaatggtggttggtgggcactgtaccagcctaatttataattttccatgagcatcttcaagagtttttctaaattatcatttggagtcatttacataaaaagcactttctatatctttttaatctcaacaacttttctatatcttgttggcaccatctttagctagcgagaaacctggatggctggaatagaagataactatatttagacaatacttttagtaattcttgtgtgatcggatgcat

SEQ ID NO: 152619 - DNA, 769 bp, Zea mays
  Clone ID: MRT4577_7076C.1
cccacgcgttcggtcgctgctcacggacgccgaccgcctcatggaggcgcggcgcacggtctcccacgaggtgcacggcggcggcgggggcttcggcagcccgacgtcgtcgtcctccccgtcctcggcgtcgtcctccgcctcctccaggacctcgcgcacctggtccttcggcggcggctcccactactccgacagccctaccatgtgcctcacctgcgcccccgacgccgactaccgccacgacaaaaaatgcgacgcctacacggccgacgacgactgttgggccgcctcgtcgaattacaagagcggcagcaggtgggcagccacagtggacgaaggcgacggcgaggaccagcagcagcaccaggggctcatggacgacgcctgggacgcccactcggtgaaggacagcaccagcggcacatggtccgccaggttgctcggttccttgtccttgagcaccagcagggcctcaggcttccagagtctgtcgcaaccggagcagcgaaggacaaccaagaagctgcaggggcagctacagtgccaggtttccgccgattattcacggccttgatcgctcggtcgatgaatactgcaattctctttttctctagattaaccattgatttgaccggcctattactgtaatttctatcttttttcccctcctagcacaattaagtttcatctcatcttctatttttatactttatgataagcatggatacaaaaaagggacaagacttgctcgcaaatgtccataaat

SEQ ID NO: 152620 - DNA, 335 bp, Zea mays
  Clone ID: MRT4577_70770C.1
aacgcccaagcgtccgcccacgcgtccgggggcgacgacttcagagcgctggtgttcgagttcatgcccaactacagcctggacaggtggctgggcgtcaaccccaggtctgaagagccgaggatcgtgaagagcctgagcgtgatccagaggctcaacatcgccgtcgacatcgccgacgcgctctgcgatctctacacacaatctcgttagcgcatatcgtcaagtgagatgtcaagcccagcaacgttctcctcggcgaggacatgagggcggtggtgggcgacttgggccttgcgaagctgctacatgagtccgggagccatgacacttgc

SEQ ID NO: 152621 - DNA, 760 bp, Zea mays
  Clone ID: MRT4577_70771C.1
gggaccctcgaggccggccggactaacactcccatccggccgccaccaggagcagagtctttcgtcatctcttctccggcgaagaacccccatgtcgcccaccagatcacttgttaaactttgttgaggggtgatggaggtttctttcgcaaacctcagctccgaggtagggcttaacaagcttgatgagtaccttctcactcacagctacatcactggctaccaagcttccaaggatgacttggttgtctacacttcgctttcgtctgctccctcgtccaagtatatcaacgtagcaaggtgtcttaatcacattgatgcgctcgtgaggctgaacgtaatgactgcacaggtccaaggcgagaaggttgaatcgtcagtaggtccttcagtcccaactccagatgatgctgaagcacaggacccagttgctgaggaggacgacgacgatgatgttgacctttttggtgaggagaccgaacatgagaataaggctgctgaagagcgagctgcagctgccaaggcttctggcaagaagaaagaatctgggaagtcatcagatttacttgatgtgaagccatgggacgatgagactgacatggacaagctcgaggaagctgctaggagtgtctcagatggaagggatgctctgtggcgcatccaagcttgtcacagttggatatggcatcaagaagctgcaaatcatgatgcccatcgtcgacgaccttgtctctgtcgacactctcattgaagactatct

SEQ ID NO: 152622 - DNA, 388 bp, Zea mays
  Clone ID: MRT4577_70772C.1
cccacgcgtccgcaagcttccaggatgacttggtagccagcacttcgtcttcgactggtaccgggtccaagtatatcaacgtaacaaggtggtttaatcacattgatgcgctcgtgaggctgaacggaattactgcagagggccaaggtgttaatgttgaatcgtcagcagttgcttcagccccaactccagatgagactgaagcacaggccccagttgctgaggaggacgacgacgatgatgttgacctttttggtgaggagaccgaatatgagaagaacgctgctgaagagcgtgctgcaactgccaaagcttttggcatgaagatagaatcttggaagtcatcagttttacttgatgtgaagccatgggacgatgagactgacat

SEQ ID NO: 152623 - DNA, 947 bp, Zea mays
  Clone ID: MRT4577_70773C.1
gcttgatgagtaccttctcactcgcagctacatcactggctaccaagcttccaaggatgacttggctgtctacacttcgttttcgtctgctccctcgtccaagtatatcaacgtagcaaggtggtttaatcacattgatgcgctcgtgaggctgagcggaattactgcagagggccaaggtgtgaaggttgaatcctcagcagttccttcagccccaactccagatgttgctgaagcacaggccccagctgctgaggaggaggacggagatgatgttggcccttttggtgaggagaccgaagatgagaagaaggctgctgaagagcgtgctgcagctgccaaggcttctggcaagaagaaagaatctgggaagtcatcagttttacttgatgtgaagccatgggacgatgagactgacatggccaagctcgaggaagctgttaggagtgtccagatggaagggctgctttggggcgcatccaagcttgtcccagttggatatggcatcaagaagctgcaaatcatgatgaccattgtcgatgaccttgtctctgttgacactctcatcgaggaccatctctgcgctgagccagtgagcgaatacgtccagagctgcgacattgtcgccttcaacaagatctaaatttccttgtgatggtggcaatggtggttggtgggcactgtaccagcctaatttataattttccatgagcatcttcaagagtttttctaaattatcatttggagtcatttacataaaaagcactttctatatctttttaatctcaacaacttttctatatcttgtttgcaccctggagagctatttacgttttctatctttagctagcgagaaacctggatggctggaatagaagataactatatttagacaaaaaaaaaaaaaaaaaaaaaaaaaaaaagtactctgcgttgttaccactgct

SEQ ID NO: 152624 - DNA, 207 bp, Zea mays
  unsure (1)..(207): unsure at all n locations
  Clone ID: MRT4577_70774C.1
ccgggacgacccacgcgaccgctccggaggctccaccactagcaacccgngcagcgagcccgccccgaccacngccaagacgaggggcggcgacngggncgacgagaacaacggcgggaccggcggggccatcgccggagccganaaccgnaacgacgcggcggacacccgccccacaggcggaaacagcaaccccacgcgcgacca

SEQ ID NO: 152625 - DNA, 320 bp, Zea mays
  Clone ID: MRT4577_70775C.1
tgcgtccaaattctacgaggggtttgctttgtcatcaccggcaagagaaaccttggcgggcaggcaccactcgtgtggagcaagaactactgcaccaagaaatacgactgctagcaccttcccaactcgctggggatggacttcgtgaacaacgatgatgcttccgttgtcacgctgctcaactacaatttcttgcacatgaacatgtaccgctacaaggacatactgatcaatgacgtgaccttaacacgaccgcaagacagcccgaacacagataacatccacatagccgactcatgacggatcacgatcactaacac

SEQ ID NO: 152626 - DNA, 666 bp, Zea mays
  Clone ID: MRT4577_70776C.1
ccgggctcacactctcatccgacgccgcaggggcagtgcctctcgtcttacattctccggtgaagaacccgcataccgcccaccatatcacttggtcaactttggtgaggggtgagggcggcctctttcgcaaacctcaacattgctgcaccacttaaaacgcttgacgagtaccttcctactcgtagttccatgagtggctaccatgcttccaaggatgacttcgttgtctacacttcgctctcgtctgctgcctcgttcaattatattaacataacaaggtgctttaatcacattgatgcactcgcgaggctgagcggaattactgcaacagggccaaggagtgaaggctgaatcctcagcagttgcttcagccccaactccatatgttgctgaagcacacgccccagctgctgaggacgaggaccatgatgatgttgacctttttggtgaggagaccgaagatcagaagaaggctgctgaagagcgtgctgcagctgccaaggcttctggcaagaagaaagaatctgggaagtcatcactattacttgatgggaagccatgggacgatgagactgacatggccaaccttgaggaagctgataggagtgttcagatggaagggctgctctggggcgcattcaagcttgtcccagtcggatatgg

SEQ ID NO: 152627 - DNA, 457 bp, Zea mays
  Clone ID: MRT4577_70777C.1
ggcttaaaaagctgatgagtaccttctcactcgcagctacatcactggctaccaaactttcaagggatgacttggctgtctacacttcgttttcgggtggtccctcgtccaagtatattaacgtagcaaggggggttaaccacattgatgcgctcgtgaggctgagcggaattactgcagagggccaaggtgtgaagggtgaatcctcaacagttccttcagccccaacttcagatgttgctgaagcacacgccccacttgctgaggaggacgaccacgacgatgttgacctctttggtgaggagaccccccatgagaagaaggctgctgaagagcatgctgcatctgccaaggcttctggccagaagaaagaatctcggaaggcatcacctctactttatgtgaagccatgcgcacgatgagactgacatggccaacctcgacgaagctgctagga

SEQ ID NO: 152628 - DNA, 239 bp, Zea mays
  Clone ID: MRT4577_70778C.1
tcgaggaagtcggagcgcactgatgttgctatatgtagaggtgagcagctctggccgttcccctatgaccttattcaacgcgaggtggaaagatattcaaatgcccagaaccggtggtggccaaagggggccgttaacatgggagcattcaggttcattaacccgcggttggttaccgcgattaaaggtcttggcccgggtggcattgaagacattaagagccttgggagggccccgtt

SEQ ID NO: 152629 - DNA, 1878 bp, Zea mays
  Clone ID: MRT4577_70779C.1
aatgaaccagagctactacccaaaagcccagttttcattatggtatataaatccaaatttctcccagcgaaggcacacagccgccgccatttcttcatcctcccatctccatctccatcttcctcgcagcgccggcgatccatcttccgctgcctcccttcctcgcgctcgggctctcagtgacggcatcagcggtttcccctcccgcctctcgccagtcgcatcacgccctcgcctccggtccaccgcacaccggccggtgaccctgcgtgcgtaccccctctctctgtctcctcccgcctccggtggatcgtcaacggcgcccggctccggcggctgcgccgtgcgcggcctgagggcaggagccagcagccgttactcgaccaaggcgatcgcgccgctttgtgagcgcttatgccccacagcgacgcgttacccgtcttcttagcgcttcagcgcgctgaaacgtgcgcttagtgccgcttggtttaaaccgtgtgtagaggggctaaatggccgttttggtgaacagtgactgtctcatgattttaagaatcttgttgctgtgatatgttgtcggggtgcccataaagtttacttaaggtctgagtctgagttaagctatgacatttcagaaacatagctttggtttagattttggttcagggtgcttgttaatctaatatctttgtagttgttaatgattctgttttacagtactagcggcagtattgttctctctctctctctttatttaactattgtcatgatttgacatttcaagtcctaacaatactcatatgtgccgtcagattacttgctaatctttcttgagggcagatggccgtttcttttgcaaatgtcaacgccgaggcagggctgaaaaagcttgatgagtaccttctcactcgcagctacatcactggctaccaagcttccaaggatgacctggctgtctactcttcatttttggctgatccctcatccaagtatatcaatgtagcaaggtggtttaatcacattgatgcactcctgaggctgagtggagttaccgcagagggcctaggtgttaaggttgagccatcagcggttccttcagcttcaattcttgatgttgctgatggacaggccccagctgctgacgaggatgacgatgatgatgttgacctttttggcgaggagactgaagaggagaagaaggctgctgaagaacgtgctgcggctgccaaggcttctggcaagaagaaagaatctgggaaatcgtcagttttacttgatgtgaagccatgggacgatgagactgacatggccaagctcgaggaagctgttagggagtgtccagatggaaggactgctttggggcgcatccaagcttgtcccagttggatatggcatcaagaagctgcaaatcatgatgaccattgtcgatgaccttgtctctgttgacactctcatcgaggaccatctctgcgctgagccagtgagcgaatacgtccagagctgcgacattgtcgccttcaacaagatctaaatttccttgtgatggtggcaatggtggttggtgggcactgtaccagcctaatttataattttccatgagcatcttcaagagtttttctaaattatcatttggagtcatttacataaaaagcactttctatatctttttaatctcaacaacttttctatatcttgtttgcaccctggagagctatttacgttttctatctttagctagcgagaaacctggatggctggaatagaagataactatatttagacaatactttaaataagctgttggaagatagtaattcttgtgtgatcggatgcataatgccttggtcaaaaaaaaaaaaaaaaaaaactcgagcccgg

SEQ ID NO: 152630 - DNA, 938 bp, Zea mays
  Clone ID: MRT4577_7077C.1
gggcgtgtccgcgggggccgcctttgtgctctcctccgagcgggcccacgccgacgggggcggctccaccttccgcttccccggcttctactcctccgccccctccccggccccggccccggcccctgcccccgccgcgccgccgcctcaggagggcgggggcgcggaggaggcgccgaaggtttcgactcagcaccctcgcactagtgcggcgggcttcgatcccgcgccgctggagcgtggggtggaggcgattaacaagctcaagcaggcgtcggaccccaaaaagctgttcgagtttatgaagaagcaggaggagactcaccagcaggaaatagctgcgaagaaactcgagttgcagaaggcactggccgagatcgagcttgagcaaaaacgggtggattttgaagaaaggaaaaaacttgatcaacaacgagctaaaattaagtcgcagatggctcaatacgaggatgagctaaaaaggaagcgactgcaggctgaacatgaggcgcagaggttaaggaaccaggagcttgtgaagatgcaagaggaatctgggattaggctagagcagatcaggcgggcgactgaggagcaaatccaggaacaacggagacagacagagagacatagggctgatctagagcaggcgaccatttcaaagaaagccatggcagaggcggaggggagaatactagtaacaaggcaaactgaagatgtgaagagacgattgattttggaggagataaatgctgacagagagaagtggatccaagtgataaatacaacatttgagcatataggaggtggtttgcgaacgatattaaccgaccaaaataagctagtggtagcagttggaggggtaacagcacttgctgcagggatatacacaacaagggagggtgcaagagtagtctggggctatgttgatcgtatct

SEQ ID NO: 152631 - DNA, 196 bp, Zea mays
  Clone ID: MRT4577_70780C.1
aggcaaacgtcaacgtacgcatagatgtatgcatccgcggattcaatctgcgagatcactttgggcccaacaggaaggagtttagagtcactcctccgtccggtgggagaatgggagtcctcaggtacgatatgatatccatttcgaaggtatacattgatcaagaaggcctcatccattgctgggtttcgtttgt

SEQ ID NO: 152632 - DNA, 255 bp, Zea mays
  Clone ID: MRT4577_70781C.1
tttaggccgaaactcactttggcataagcttacactagaggtatggatcgtaacaaattggtgggctctgaccaaaacaagtagcgctacgttcctcgtaaacgaaaccttagggggtactttaaacctgacttgaggacaagccggggctataacagggatttactctagggagctaattttcgccaaaaacactcctatgcgcaaattcgggtttgctcccaaaatttcttgactggccaggggcccaggaag

SEQ ID NO: 152633 - DNA, 361 bp, Zea mays
  Clone ID: MRT4577_70782C.1
gtgtttaaatcgatgacggtgagacagacagtcaccctgtaccaagaggacatgaaggttcgaatgcggttgcgcgccatcaaagaccacatcagtcaggaccggtacgagcgaccacaagagcgcgaccttatgatactgaccttcaatcctgaatagacgtacagacactcacacgacgcccacatattggacaacatgatcgagggctggtgactacaccgcgaaaacaccggcagtgtgctgacctggatgttcatggtcctcgacgaccacaccgagtttctaaaggaccgaaccgagggcgtcaaggcatgctaacccgacttgatcaccaaggccaacagttatgttcatggcg

SEQ ID NO: 152634 - DNA, 369 bp, Zea mays
  Clone ID: MRT4577_70783C.1
atggcgtacgacggttctagcccaaccaaagtgctccggcgagcaattgccggtagacacgcgatgcacacaccctaccgcatggtcctatcgattccaggggtaaaggggagtcaaccagaggattacttacccaaggttgggaagttggtggagctgcccgcgtcacgcagcgaccgcacggtggagagacaaccccagcaagaaattcgtcctcccaggtcgctcagccgcccggggatgtcttctgcaatgcgccccgagtgccgcgcgaaatgcccgacggcggcacccgactatctactggaggatttgggcgacgtggagggtatgggtcatatacccggagaagtaggcgatggtggttga

SEQ ID NO: 152635 - DNA, 365 bp, Zea mays
  Clone ID: MRT4577_70784C.1
aaacactgtaaactcttgcttgcaaagcttataaacatggttcttttcacataaacatattaaactagattcttaaaaccacaatactactccagttcttccccgtcaaacttcaaggcacacacatcattatacaatctatgtcattctctgcgcaatcttcttggccaacaactttttccaggcctttgtcttatccttctacttttatcccatgattccaccttcccactttttcctaaccttatttaaacttttctttaaatttgccttaatatcctttaaaaactttcttaactcaaactttaatcttctttctttacaatttttaagacaaaaaaaccttttccttcttctttttaaca

SEQ ID NO: 152636 - DNA, 1274 bp, Zea mays
  Clone ID: MRT4577_70785C.1
cgaacccgcttccttcctgtcccgactcggggcgggaaggcccacataagcggacgcgcgatcaggcacctgggctgcgatcatagcgacaaaatatctcgccgttcccatggacatcgacctcttccccgacatcgaccttgacgccctcctcgcctccttctccggcgaccccgccgccgtctccggcctcatcatcccgtccccgcctccgccggcgccggcgacggcgcacgatgcggaggcggggtcgccggagtcggtgacctcccggacgaacccgctcggggaggtggcgctctcggagatcgagaggctcctgatgcaggagggggaggcggaactgggcggggaggtcgatgggatcagcgtggaccagttcttcgacgcgctgtacgacggcgaggaggcgaaaggtgagcgggaggcgggggcaagcgcggatgtggactccggcagggacgatgtgctggaagtcgtgacgccagaggcggggacggtggaggtggatggcgatgatcccatcagcaagaagaagatgaggcaaatgaggaacagagattccgccatgaaatccagggagaggaagaagtcgtacataaaggacttggagacaaagagcaagcacttggaggcagagtgccgtcgcctcagctacgcacttcagtgctacgcagctgaaaacatggcactgcgccagagcttgctgaaggataggcctcttggtgctcccacagccacgcaggagtctgccgtactcacggaaaccctgccgctggtttccctgctttggctggtgagcatcgtctgcctgttcctgatgcccgttctgcccaaccgaagcccagctgctccaagcagcggcggaagagacctcgtgatggcagccggaaagacaagcagtgagaccccagagatactggaactcatcctccatggaaggcgttgcaagagcacgagggcgaagattaagctatgtattttaccatttcatgcaggagctgcttgctagtagttgctaggctttgagcctcttgcaagcttacctctatatgtagtgtacccgcaaatcttaccgtgctcgctatgcgcctgtcttgcagagaagcctgtcgatatccatggagtagtaccttttttttgtttaatagctcctgtgctacccagaatatgtttaaaatctggattttgtgttattttctatttcttcaccttatctgtagttgctcctgatataaagttccttcgctcgaaaaaaaaaaaaaaggccccta

SEQ ID NO: 152637 - DNA, 518 bp, Zea mays
  unsure (1)..(518): unsure at all n locations
  Clone ID: MRT4577_70786C.1
cccacgcgtccgcggacgcgtgggcggacgcgtgggcggacgcgtgggcgacaaaatatctcgccgttcccatggacatcgacctcttccccgacatcgaccttgacgccctcctcgcctccttctccggcgaccccgccgccgtccccctccncatcatcccgtccccgcctccgccggcgccggcgacggcgcacgatgcggaggcggggtcgccggagtcggtgacctcccggacgaacccgctcggggaggtggcgctctcggagatcgagaggctcctgatgcaggagggggaggcggaactgggcggggaggtcgatgggatcagcgtggaccagttcttcgacgcgctgtacgacggcgaggaggcgaaaggtgagcgggaggcgggggcaagcgcggatgtggactccggcagggacgatgtgctggaagtcgtgacgccagaggcggngacggtggaggtggatggcgatgatcccatcagcaagaagaagatgaggcaaatgaggaac

SEQ ID NO: 152638 - DNA, 367 bp, Zea mays
  Clone ID: MRT4577_70787C.1
cttgttgttaaaacgaaacggcacaaccgcagacggaggaagtgctgtgcctgatactagggagccaccgccccatagatgaatggtaaccgaactaacacgccagaccactctataatgttccagccatagagcttgattcacacaagagacacctcaggtgatgaacaaggctaaggaaccaaccctgcgactccaaattaaggagttaggagcttggacagtgccacaaaaaaccgaagaaccccagactgaaaaagaaaagccatcaatggacgcagctgtcattccaaaaaaagtaagttcttcaggtgaaattgaaggcccccaaaccattaaggggccaacagggaccccacaaagaaaa

SEQ ID NO: 152639 - DNA, 882 bp, Zea mays
  Clone ID: MRT4577_70788C.1
gaggaacagagattccgccatgaaatccagggagaggaagaagtcgtacataaaggacttggagacaaagagcaagcacttggaggcagagtgccgtcgcctcagctacgcacttcagtgctacgcagctgaaaacatggcactgcgccagagcttgctgaaggataggcctcttggtgctcccacagccacgcaggagtctgccgtactcacgggtaagacatgttatccgtcctctaatctttattcattccctaaattagatgaatcgatttgtctaccatcagtgagtcctctctggcttgaaccgtggatatgataggtcagtcataaattaccaagcaagtaaccaatcaaaagcacaagtgcaaccaattttttgaaaggctggtgaagtaattcgtgatgctaagatgaattttctttttatgtgcagaaaccctgccgctggtttccctgctttggctggtgagcatcgtctgcctgttcctgatgcccgttctgcccaaccgaagcccagctgctccaagcagcggcggaagagacctcgtgatggcagccggaaagacaagcagtgagaccccagagatactggaactcatcctccatggaaggcgttgcaagagcacgagggcgaagattaagctatgtattttaccatttcatgcaggagctgcttgctagtagttgctaggctttgagcctcttgcaagcttacctctatatgtagtgtacccgcaaatcttaccgtgctcgctatgcgcctgtcttgcagagaagcctgtcgatatccatggagtagtaccttttttttgtttaatagctcctgtgctacccagaatatgtttaaaatctggattttgtgttattttctatttcttc

SEQ ID NO: 152640 - DNA, 336 bp, Zea mays
  Clone ID: MRT4577_70789C.1
ctccggggggccagggagaaaatatgggtgaacgcaatacatgtatctaacgaacactaaaactttcctttgaccactggcacgatgaggacgaaagaacaccccatctcattacaaagagggtcatactcacgggagaagataacggtcaacacccaagcctggatgtcaaaagcgccaaacgagaataaaggaccccgaaggtgccgaaggggcttgacgaaacaggcaggatggttctggctacaagacacctgtacgccgatctgaacattcgcgttatcagatctcacggctccttaaatacccactagaatgtggcaaggactgaggcct

SEQ ID NO: 152641 - DNA, 851 bp, Zea mays
  Clone ID: MRT4577_7078C.1
cgaggccgtccgggacgtccagccaactttaaaccctacccgcccaaacccacacgactcacaagtcacagccatggccgccgccgctaaggcagcggccgtagccgtctccgcgggggcagccttcgtgctctcctccgagcgggcccacgctgacggaggcagctccaccttccgcttccccggattctactcctccgccccggcccccgccgcgccgccgcatcagcagcccccaccgccgtcaggcggccagcgcgaggaagccccggaggaggctccgaaggtttctactcagcaccctcgcacgagtgccgcgggcttcgaccccgcgccgctggagcgtggggtggaggcgattgacaagctcaaacagtcgtccgaccccaaaaagctgttcgagtttatgaagaggcaggaggagacgcaccagcaggaaatagctgcgaagaaactcgagttgcagaaggcagtggccgagatcgagcttgagcaaaaacgagtggattttgaagagaggaaaaaactagatcaacaacgagcgaaatttaagtcgcagacagctcagtatgaggatgagctaaagaggaagcgactgcaggctgaacatgaggcgcaaaggttaagaaaccaagagctcgtgaagatgcaagatgaatctgggattaggctagagcagatcaggcgggcgactgacgagcaaatccaggaacaacggaggcagacagagaggcaaagggctgatctagagcaggcgaccctttcaaagaaagccatggcagccgctgcagtgagaatactagtaacaaagcatactgaagatgtgaagaggcgattgcttttggaggaca

SEQ ID NO: 152642 - DNA, 354 bp, Zea mays
  Clone ID: MRT4577_70790C.1
tttcatcgcccctatcaatttctcgtgtgcggactctttttaccaccaccagactcttgataacctgaatctattcatcaaggaacaccaagaacctcttcgctactatgctcgacacacatattccatatctcctggttgcgaacaatactcagaccccaatcttcctccaggagaatggtacggtcattctcacccctcacctgtgccaagacacctacttcagattgcttgccatcaacttctttggactcgccaaggctgctacaccaatggcaacaatatttagaggacaatacttgttcactggcagtgagaccacctcagtctggttggaggtttcttaaatgaaaa

SEQ ID NO: 152643 - DNA, 366 bp, Zea mays
  Clone ID: MRT4577_70791C.1
ccacgcgtccgcccacgcgtccggcggcggcggcgcatgcggaggagaaatgcgacatgtctgtggggaaatgggtgagggagccgcggggccctgtgtacacgaacctgacgtgcccgacgctgccggacttcaagaactgccacaagtacggcaaggaccccgggcacctcttctggcggtggcagcccgacggctgcgacctgccgcggttcgagccggagcgcttcctgaacgttcccccgggggaagaggatgggcgtttattgggagactcgctcgcgcgcaaccagatggactccctgctgtgcctcctctcagaggttccggtcctccggaacggtttggtgcctttgcccataaccc

SEQ ID NO: 152644 - DNA, 423 bp, Zea mays
  Clone ID: MRT4577_70792C.1
tccgccgcggcgaggaggagctcggcctcggcgcgccagctcggcgccagtctctgggagatccacgacgtggcgcgggaggtacgccggagcaggcgacggggtgggagggccatcgccgccggtcgggagcacggcggcggcggagaactggaccagccacagagttcaggtggcattcgtaggcatgttgcagactcgtcgatgaaacatcataagttcgatcaagaaagaagccatagaatacaacctttttctcctgcaagttatacaagctcagttggggattccaatgtgaatctaactagaagtccgactcgttctttgggcatcatgggtagatctatgggggaaggctatagccttaaaacatcaacagaactattgaaggttctaaatcgaatttggagtcttgaagaacag

SEQ ID NO: 152645 - DNA, 345 bp, Zea mays
  unsure (1)..(345): unsure at all n locations
  Clone ID: MRT4577_70793C.1
tgggaccctcgaggccggcccgtctactgctgggaccgctactaccgggccctcgccggcgggcagtactgcaagtgggacgacctgctcaactgataaatacctagtgcagtattgttgtggtacgagtacgacgcggcaggacaggacgtatttttttgtccgatggaaaatttcggactgaactgctagaaattgagttcttaatggcacacaagcataaggaacagcaagaacaaaggaacacagaatcagagaaaaaacaaaagtttatatattcacttttctctcanaaaaaaaaaaaaaaaaaaaaaaaaaaagaaaaaaaaaaaaaaaaaagcggcc

SEQ ID NO: 152646 - DNA, 413 bp, Zea mays
  Clone ID: MRT4577_70794C.1
atggcatcagacactgcaacattgaccaacgtcgtacgaactatgtgacttcttacaacaacaacatcatctacaaatgcctttatatgtctcaagcactttggggtacgctatcgatgaaaccccgtatgataccctcaaagctcaacccccacttgaacatataagggatacataggcattcgagaaccgattccaactaaacggggaaacacataaaagatatacaacccacattgaccatcaagatgcatcatgatcacagaacgacacggtctaacaactgtgcatgatatacatgactagatacgtattctgaagtaataacttgcatatattattggtaataccgttaccgttcaatcacatgttgtgcacgtgcattttgtgtgaggatccaaacccccgacgat

SEQ ID NO: 152647 - DNA, 348 bp, Zea mays
  Clone ID: MRT4577_70795C.1
cgacacgctgcatcagaagaggccatcaagcagatcactgtccttctgccatggccctgtggatgcgcctcctgcccctgctggcgctgctggccctctggggacctgacccagccgcagcctttgtgaaccaacacctgtgcggctcacacctggtggaagctctctacctagtgtgcggggaacgaggcttcttctacacacccaagacccgccgggaggcagaggacctgcaggtggggcaggtggagctgggcgggggccctggtgcaggcagcctgcagcccttggccctggaggggtccctgcagaagcgtggcattgtgcaacagatgctgtaccagcatc

SEQ ID NO: 152648 - DNA, 805 bp, Zea mays
  Clone ID: MRT4577_70796C.1
acctccgtagagtactactactcaactactccgtcactattagcctcgatcgatctccttcctctcttgctcagttaccttcttgtggtcgtcggtctgccgatatcgatccatccgcccgttgtgctgatgcgtatgtgtgtgcatgtgcaggtgagatggaggaggaggagcggggagcggccgccgagctggccgccatcgccggggccgggccgccgcccaagctcgaggacttcctcgggggcggcgccaacggcaaccacaacgggaggaataatagtgacgccggtagcggcgaccaggttgtgtctgcagcgaccgccgagatgtacgactcggagctcaagttcttggccgccggattcctgagcggcgctactggaaccacggcacccactatctccccggcggccgctcctcaggagcaggccgacccgaagatgccggtcccggcgccggagcagaagaaggccgtcgactccttcggccagaggacctccatctaccgtggcgtcacgcggtaccgttggacgggtagatacgaggcgcatctgtgggacaacagctgccggcgtgaaggccagagccgcaagggccgccaagtctacctcggtggctatgataaggaggagaaggcggcaagggcgtacgatctcgccgcgctgaagtactgggggtctagcaccaccaccaacttcccggttgccgactatgaaaaggaggtggaggagatgaagcacatgacacgccaggaggttgtagcttcactttagaggaagagcagtggattctctcgtggcgc

SEQ ID NO: 152649 - DNA, 529 bp, Zea mays
  Clone ID: MRT4577_70797C.1
gtaagcaataactttattaaggtcaaatagatatcacaatacagatttatccaacaggatccagaaactggttacagatatcatctaagaacacggctgttttgtgttaaaatgcttccaacatcacatcacacagagtttatacatcgataacaacttttatctggaaatacagatgcacggtttgccctcactgctgggccttgatgtttcaatcaagttaaaacaaagaagcgaagattggcattttcttgataatgaatacattctgaggaatatttcatgagaaccctctttgggatcagagtcgctcacggaagtcatttctaatttatggataacactcaaatcagaatcagtaattagtaagttaagccgtgacttgagaatttttaagaattggatcaaggaacatattaactttacaaataaataggatttaaaatttttagctggtagtgtagtttctacagaacatcttttataaattaatatgttggcacaatagcttctcggctgtggtgtctga

SEQ ID NO: 152650 - DNA, 462 bp, Zea mays
  unsure (1)..(462): unsure at all n locations
  Clone ID: MRT4577_70798C.1
ggagcaggctttcttattttttcggagaacaaaatacttacctgaggattaggtttgcctcactatgaaaattgttgcggcacaacggaacgagttttttcatanttttttgaaaaaaggtggtgggggggggaggctatattttttaagtgtctcctgacgtattgggggggggggtcccagcccgcgnggggggggagactaaacacactgcggctggcaccgtggcctgttccggatgatttcaccatgcattccgtttttttgtatgatgggcggcgcatttcttttgtgcgagcctttcactttggctgtttttaatcgcctccctgggaaactcgaccattgcctcatcactacctgggccgaaggcaccttctccctttatgtcccttggcatgctgtgcacgatctcctctggtatgccataaggatttcctggcgaataaacccctgttgaaa

SEQ ID NO: 152651 - DNA, 519 bp, Zea mays
  Clone ID: MRT4577_70799C.1
aaacactaccgcgcgtaaacattccatgctcgagtactaccgataggacactcactgacctccctgcgtaccaccgaggcagataactacgtaaatggtcggaactatatacggccctcggagctgccggctggcagacgaaaacagtctgcagatatgcccgaacctcttgtactatatgtctgggatgtgtgactctgctaactatactgcatggccaacagaggactcgcaggaaaacatccagtactggcctgaaaaacgacctttgcctatgtctcagaggatgcccagttacctagctgatgaatcaggtgtaatctaagactgatgtaagtgctgtaccatgtatccctagcaaaggatcaagctcaacttgcctatctgcatcatcaaatgctgtccaatcagctaccggtgctgctagtggaagtgccaacctccaacctgaataggatgatgccgtcagtatatataaacatacacaagcctatgtatcttaatcgcaatgaacaggac

SEQ ID NO: 152652 - DNA, 334 bp, Zea mays
  Clone ID: MRT4577_7079C.1
agcctgctcgcctccgtgtgggcgtcgcggctcgtggtcctcgccctccgcggccttggcgctgtccaccgacgacgacgccggcggcgacggggaggccgcggccgtggcactggtggcagacagcgggggcgggggcggcggaggcggaggcggaggcgttgtcttgatgggcggcagccccggggagaccgtcgtcgtcgcctagcgacgccattgccgctccccgctcgagtcaccgacggacctgcgcaacgtacgggcgctgtaaatcgggatcgaattctcctcctcgttgttggtggaggagagggagggggtgcaattgcacgaa

SEQ ID NO: 152653 - DNA, 161 bp, Zea mays
  Clone ID: MRT4577_707C.1
cgtggctatctgcgattcctggacgatgcacttgaatacaggattcatgtcagcgggccaaaccactcacgaaccgagagaacgcgtgcggggacaaccaaaaccccaaggtgcggcacggcggatcgcggtcctgctgtagcagctcacggagacgagca

SEQ ID NO: 152654 - DNA, 259 bp, Zea mays
  Clone ID: MRT4577_70800C.1
attgaccgtggaaacacgcacatttaaagtcttagacaatcagttgaaaggtgcattacaggtggaatccgaacagcgtcggggctgtattgcagatagattgatttgttgactgtcatcaatcaactatttaaccgttaaaggtgaactagaaacaaaattaacaggatattggttgttaataaactaattggttttagtttattttagcgggcgcgaacagcaaatactgcaacacgcacattattataatctgctc

SEQ ID NO: 152655 - DNA, 1023 bp, Zea mays
  Clone ID: MRT4577_70801C.1
tcccccttcgcgtccctcgcagacgccctcctcgccgctcggcgcatctggctcgacgaggtggatgtcaacggatggctcgaggccttcgcggcgcacccggcaatcggaaccacctccccatctgtctccaagtggagcaaggaggagcaatcagcagcgctctccacagccacggactcgacggcccaggagctagcagagtggaatgccagatacagggagaagtttggcttcgtcttcatgatttgcgcttctgggaggactgcagctgaggtcttggctgagcttaagaggcgttacacgaacaggccaattgtcgaacttgaggctgcggcacaggaagaactcaagataactgaactacgtctcacgaagcttttctcattggagcctactgttccctccactacaattgaaggccccactgtccaatcagataaagcagcaggtagctcgaaccgaagtcgtccgcctattacaacgcatgtgctggacattgcccgtggatcgcctgcatctggaatcgaagttcacctggagatgtggaaggattgttcagctcctccatcattcaacaacaaagatttcagcggatgggaaactctaggctattccgttacaaacaatgatggacgcagtggccagctgatggacattgtcgataatattgctcctggtttctaccgcataagcttcaacactggcaagtatacccctgcagggttcttcccttatgtcagcatcatattcgagatcaaggagaaccaggcggcagagcattttcatgttcctctcttgcattcccctttctcgttcaccacttaccgtggaagctaagttttcaacttacgtgccattacctctgttgggatgttcgaagcaacttgtaaacttgacacttccgttgtgataataatctggttccatgtaaaaaggctttatactttaataaaaagtagtaaaaacccaaaaaaaaaaaaaaaaaaaaaaaaaaaagtactctgcgttgttaccactgct

SEQ ID NO: 152656 - DNA, 1597 bp, Zea mays
  Clone ID: MRT4577_70802C.1
gcacacacgtagactttgcttccacgcctagcagtagtcgcctacagctacagcttgaggcagctgcccatcggccgcgcagaagggatggctggacgagagatgcggctattggagcggcgacgtgcgggcgatgatggaggagaaatgccgagctgttcgagcactgacggaaacaccagcagcgctaatgcgagcacgagctcgagcaccactgctagcagcggcgtgcggcggagcggtggcgcagcggaggggcgggagaccagctccaggtcggcgggcaccatcaatctaagtcaggagtacaggctcgcgatccacaccccgtcctaccaagagatctgggataagatccacatagacggggacggggacgaacaacgggaagggggcttcggcggcaacggtgaagatgaggaaggagaagagggggaggacagggtcaccctggccggcgtgctccgcccggaggacgaggtggtggaccgcgctcttgcagatgcgcccgacacggagctcacccgcctcgccaagaactacttcagcagcacgaaccaagcgtcgctgctctgcctctcactccgtcgggcgctccgccgggcgcggtcgctgtacgggcccatcacggacctcctcgcgctcatcccgcagtcgccgcagctcgccacgccacactgcgactgtgcgttcgacgccttcctcctgttcgaccaaatgcccaatccgttcccggcgcccgcggccgggttccagtgcatgcaacgaagtttctctgggctcaaaaaccacctcgatcttcgtctcctcagtgtccgacgcaggcgccgttggctccgctgtgccaagcgcggatcaggtatctgccttattgcctgcgccaccggcgctgccgtcgcaggcctcgtgcttgcgacacacgccattaccgcgctgctggcgatggcccctgcttgtgctgcatccaattcttgctgctgtccactggctgcttcgatgaaacgcctgcagaggcacatggaccggctcgacgcgactgctaggggcacctacgtcttgaataatgatgtcgctacaattgaacggctggtgggtaggctccatgccactgtggagagcgacaagatgcttgtccgccttgggctggagcgcgggagggggcaacaccacaccatagaagaggtggtaaggcagctcaggaagaaccaccccagcctgcaacggcagcttgctgaccttgccgagcacatctgcctctactttgctgctgtcaaccgtgccaggttactccttgtgcaccacctgaatgcgcaatctgatgctgaaagtgagtctccattgtcatgacctcattagccccaagcaatctgacactgggtgccatgatcatgagtttcagttaaaacaattagctgtatcttgaaattcttgtctcgagacctcatctatcgtgccaagtgatgcacaaatttcttgctttaatagtttagacctttttatgttcaatatatttgatcttctgtactttcagaattattactgtagcgatgtaacaatgctatgtttctgaataaacacgaagtcttaacattttaag

SEQ ID NO: 152657 - DNA, 676 bp, Zea mays
  Clone ID: MRT4577_70803C.1
gccggccggtcatccaaataagacatcgccaccacctccctctacgcctcccccttccgccacgaacacgccgatgtctcgaccccttctcctcctccttcactaagatgcagcagattgatatataaacagcacctgctgacttccgcttccctacaacaaaccaaacaaggcattggtttactcgactatgtcccagtaccacaggccggttgaatgccaaaggcgatgatgatgccgtgtgcgaaaaattctgccagagtactacaggtccctttgccctgtagaatggcttgagaaatgtaacgagcagacgggagaacgcggacgtcgtccaatgacctcctctgaatgtaccgcccgacacctccagttggaccactcaacaagttggccacatagccctactgttacattctgcattcctacttcccgaatctgaaatgcctttttgtcccttgctcttcaaccaatcaccacaaaactgttagagatgcctctcgtacacagctctaataattgtgtgtacagatgccccacatgcagccttgtctttgagcgaggactgtgcacctcattttgctcactttttgaaaacgtctgaatggactttgcattttctttcgtgcctgctaccgcgtcttcctgtaactgcgcctattgtgtcgtcagtaag

SEQ ID NO: 152658 - DNA, 1325 bp, Zea mays
  Clone ID: MRT4577_70804C.1
gatttctcatttgccactgagtatacttcaacacatcagactcagagcctgcgctgtcggattcgccgccagctaggcgagatggctgcgccgttgcctctttccgcggaggacatgctgcgcgtcaacggcagccgccgcttcgccgccgcgatggcggccgcctcccccttcgcgtccctcgcagacgccctcctcgccgctcggcgcatctggctcgacgaggtggatgtcaacggatggctcgaggccttcgcggcgcacccggcaatcggaaccacctccccatctgtctccaagtggagcaaggaggagcaatcagcagcgctctccacagccacggactcgacggcccaggagctagcagagtggaatgccagatacagggagaagtttggcttcgtcttcatgatttgcgcttctgggaggactgcagctgaggtcttggctgagcttaagaggcgttacacgaacaggccaattgtcgaacttgaggctgcggcacaggaagaactcaagataactgaactacgtctcacgaagcttttctcattggagcctactgttccctccactacaattgaaggccccaccgtccaatcagataaagcagcagatcgcatacggattattggagcacatcttggagctcaacctcagccttgtgccaataaagctcctgaaattacaggtagctcgaaccgaagtcgtccgcctattacaacgcatgtgctggacattgcccgtggatcgcctgcatctggaatcgaagttcacctggagatgtggaaggattgttcagctcctccatcattcaacaacaaagatttcagcggatgggaaactctaggctattccgttacaaacaatgatggacgcagtggccagctgatggacattgtcgataatattgctcctggtttctaccgcataagcttcaacactggcaagtatgcccctgcagggttcttcccttatgtcagcatcatattcgagatcaaggagaaccaggcggcagagcattttcatgttcctctcttgcattcccctttctcgttcaccacttaccgtggaagctaagttttcaacttacgtgccattacctctgttgggatgttcgaagcaacttgtaaacttgacacttccgttgtgataataatctggttccatgtaagcaggctttatactttaataacaagtagtattatggaagtcaaatcttgtgatagtcttgctgatttgttcactaaattcttagcagcaaccatattcagaaaaaaaaaaaaaaaaaaaccccgaataaggaccctggccacccgggaatt

SEQ ID NO: 152659 - DNA, 423 bp, Zea mays
  Clone ID: MRT4577_70805C.1
ttggcggcagcggcggcggggtagcatttgtgtctactagggcttttgcaatggcggcttcggggttcgtcgtcttcaatgcgttccggctctctcccataccagtatccttttaacttaagctgtacaagggctacatttaccttttgttctgtctacttctctattatactcctctattaatgttttttatttactaatttcagataattgttatttttattatatattttttcattatttttttttatttataatatttcattctatttattaatatatcttatattaatataaattttctaattttattattttatatttttaatttatctttcataatatttatttatttattattttttatattttatattattatataatttttctattataatcttattttttaattctatttta

SEQ ID NO: 152660 - DNA, 771 bp, Zea mays
  unsure (1)..(771): unsure at all n locations
  Clone ID: MRT4577_70806C.1
gacgcctgcaggttccggtccggaattcccgggtcgacccacgcgtccgggacgacgttcgtcatttggtgcgggagggagcgcgagagcggcggtcgagcctccggtgtcccaagctagaggtaagcatggcagaacaggaacccactgctgagcagcttgcgcagatagctgcagagaatgaggaagatgagcactctgtgaactacaagcctccagcccagaagagcatccaggagatccaggaactggacaaggacgatgaaagcctccgaaagtacaaggaggccctgctgggccgagtagctgtctctgcagaccccaacgtccccaatgtcattgtgactcgactgaccttggtatgcagcactgccccaggccctctggaactggacctgacaggtgatctggagagcttcaagaaacagtcgtttgtcttgaaggaaggtgtggagtaccggataaaaatctctttccgggtgaacagagagatcgtgtccggcatgaagtacatccaacacacatacaggaaaggggtcaaaattgacaagactgactacatggtcgggagctatgggccgagggccgaggagtatgagttcctgacacccatggaggaggctcccaaaggcatgcttgctcggngcagttacaacatcaagtcgcgcttcacagatgancgacagactgaccacctgtcctgggagtggaatctaccatcaaaagggagtggaggactgagctcagctgggagacggcagggcgacggac

SEQ ID NO: 152661 - DNA, 397 bp, Zea mays
  Clone ID: MRT4577_70807C.1
acaagctgtcagatggggttaatttcagcgggcccggagccagggaacaattcctgggtggggggggggggcctcccggtcatgggaagccaagtgcggggcggggcggttgccaacattattcgatagttcacacagggtttgcagagcttggcttgacccaacaaaaaccgagaattttcgcattaagttgccatttcagcacttcattggaggctgggagcagcgccccttcggttgttggcagcgttttgtcagttgcgacctcccaccccaggttttttttttttgggccgctcaccacatttgttggcttgtgggatgaccatttcaaaagttgccgtaacaatgtcttttggctggcttcacgaaaaatctcactttccactgggatgct

SEQ ID NO: 152662 - DNA, 434 bp, Zea mays
  Clone ID: MRT4577_70808C.1
gccggccgggcctggcaactctcaagcgtctctactcctcttcctcctctctctactctccaagttctcttctccgtcgaccgctctacacgtctcttgtcgacctggacaccgaggtggaagaaggaagcagtcagcagatggatccatggatcagcagccagccttctctgagccttgacctgcgcgtcggcctgccgccgctcagcctccaccaccaggcgccggtggccgtcgccttgcccaggcccaagctgctcgtcgaggaggaacagacacagggagaggagggcgcgcggccggacatggcgtggaacagagatcgtcgtcaccgccggcgggggtgtggtcgacgacgcgacatgcgaaactgttcatccaattgatcaaatgaaaattatttttctcaaaaaaaaaaaaaaaaaaggccccta

SEQ ID NO: 152663 - DNA, 154 bp, Zea mays
  Clone ID: MRT4577_70809C.1
atagattgcgcacgcgggattcatcattaatgatactgctggagccagattaccgaagcgaggaatcttttgaatccgcccaagggcaactgataggcaactgtcggtaatgtgcacaagtggatagtccaacttgccgccaatggcacctatg

SEQ ID NO: 152664 - DNA, 196 bp, Zea mays
  Clone ID: MRT4577_7080C.1
tttcgttcacttttaaccttacccatttgttgtttacttactaaagaatgcgtctatcatacttggaataatcattatttgtaatcaaacacaaaaaccttatacttaatccaaaacgttaattcctcccacacaaccaacactgccactcctccaccaccatcccaaacccccttccaagcaccatcgacttcat

SEQ ID NO: 152665 - DNA, 426 bp, Zea mays
  Clone ID: MRT4577_70812C.1
atgaccgtggggtggacgtggagcctggatgaggtcagctctgtaggctcactcactatggtagatctaggcaatggaggagccctagacatcgatgtggaggtggaggccaacgcgaatatggttccagaggctgaagacaggcgcagacgcggggaggtagggcgacgggacgacagatggagtgaggaggaagcacgggcggcgaatcgagggggggtgaagagccgaagaggaagcgaggggaaacatgcagagcggggatgggatggcagatggatcgagacggaagaacgagcggttgatcgatggggaggaagaggtgaagaggaagcagagcggcagatcaagaggggcgctgcgcggcatgggaggagcgagaggccgggaggggagaccgggagaggagcatggcagccggtctaa

SEQ ID NO: 152666 - DNA, 587 bp, Zea mays
  Clone ID: MRT4577_70813C.1
gatattgcttgagcacatgcgctttacatctcactagagtcgtttcgctgcatcaacacctgcctactgttgcactgaaggataggtactcctctcctcccctctgctgtagtcctctgcccgctgcatatcatgtgatgatgaatcatggcatgagtgactgtatgtgtcctgagagtcgcgagagcagcgaagcacttcacggatggctgcatgtactgcaatcgaccagctggtgatctgatgctgctcctcctgctcaaccatcagtttgtatttgtccatgcctcacgtagcctcccgtcttcttgccctggcttgttcatgttccgcaagggggccaagcccgcctgagtgtgtgctacataagaccgagaagtcagagatcgactacatagtgagctccagcaggagcctactgtgtactccttatctacccgctctactgatcactatcgttcatgctgttcctcgtctgtaccttcatgtcttcgtgactgatccctcctgccccagagatgtaccgcggtacaacacagatgatttcattatacagtcctgctttctgcagacaaaaaactgacatg

SEQ ID NO: 152667 - DNA, 182 bp, Zea mays
  Clone ID: MRT4577_70814C.1
tccgcagtgcattcgctttgcatcggtctgagctcgattgtagctaatccacccttgctcctctgcacacactcaccatgggtggctttatgaatcgcaagaagctgtttcagtatgcaaagggcttccgtggcaggtccaatcgatgctaccgcctcgccttccgtcgcgcggagaacgca

SEQ ID NO: 152668 - DNA, 335 bp, Zea mays
  Clone ID: MRT4577_70815C.1
cgagcggccagactttatgagaggttgagggggggacaccatggctgcgatgaatctgtacggttcagtgatgtcttggaacgtgactaggtgctcaacagcgctggacgaggctgaattcgactacaatatcgtgcacataacttcgcaccatcacacaagaccacgacacatcgatggaacttgtttagtcaggttccagctgtacaggatattgaattgtacctgttccaatcaatagcaatctgcaagtacgctggttgcacaaacaagccagagctgattagggaaggaaatctcgaagaggcattaatggttgatgtttggatcgatgt

SEQ ID NO: 152669 - DNA, 225 bp, Zea mays
  Clone ID: MRT4577_70816C.1
atggtattctttccaaatttctgtttttaccacaataataaatctaagggctcctctgaactttttgattcagggagagtacagcaaaaaaaaaaaaaactttttgaatgaaaatgggagaaaaaaaacccaattaggcacccctgtgaaattccttgtgcgaccagtccatctttcgaagggagtactagtactagttgacaactgcacaaaactagtgattcc

SEQ ID NO: 152670 - DNA, 432 bp, Zea mays
  unsure (1)..(432): unsure at all n locations
  Clone ID: MRT4577_70817C.1
tttcccttccacacaacacacaggtactcattttccctcccgcttcgtcagctcatcatcataaaccaaacagagagctctctctctctcggtcgttcaattccaggatgctgctcaacccggcgtccgtgctggacaccatccggcagcacctcctggaggagccaccggcggcggccgacgagagcttcgggatcctggtggcggaccagtggagcggctcgctcccgttccgcaccgacgacgccgatgacgatgacgaccccaccgatgaggctggccaggcggcgggtgacaggactttgctaggacgggaggaggagngacgtatcgttcagtgatctggaggacgacgaggacgatgataggagggagaagggattgaatgggcaagagccaaggtgggttggggaagcttgtacttttgttccg

SEQ ID NO: 152671 - DNA, 745 bp, Zea mays
  Clone ID: MRT4577_70818C.1
ccggccgggccgggactgtgtctctcctcttctccacctcgcgcggagttccgcagcggcgcagctcaaaattcctgccctctcgccatcaaatcatgcgaaggatttgctaaacaggccatccatgttttcgtcatctgtctggtacttgcaaattttctagaaaccttctttagagatccgactaatccattccgtcgatcgagtcccgtccgctccatatggaagaaggcggccgccatgaccatgacgcgggcgaccgcatcagcagcctacccgacgacctcctcttctcaatcctcctccgcatcggatccattcgcgccgccgcgcgcaccagcgtgctctcccgccgctggcgccacgtctgggcccgcctgcccgagctccgcttcggcacatgggacgagcagccggggggcgacgttcctggacttcgtcgacgccgtcctcgacgcctgctccgccccggccgtccaccgccttgaggtggccatgtactgccatggccttcgagtccatgcgtgccgcctcgtcccgtggctacgcttcgcctcgcagcgccgggttgggggatgtccatatcgaagtgccatccccagaagaaattcttcttgtctaagcccatcaaagaggagctcgagcttcccgtgtgcgatggagcgacgaggatcaccctctcgctcgagcgacgatggagcctccgcctctgtcccgcgggctcgttcatgtcgctgaccgacct

SEQ ID NO: 152672 - DNA, 410 bp, Zea mays
  Clone ID: MRT4577_70819C.1
cccacgcgtccgcccacgcgtccgatttaatatgattattcatattctttatgtgtaacacatgttcatgttttctattacatattgagatgatgaaggcatgtccttcataaccttcgtctgaaaatcattatatccaaagggagataatgctttgaaggacgaaggtctttaaccattaacatttgtgttgtcttgttcttaactcgtagcatttgagaacaagtgatcaacaagtacccacctctgttaagagacacacatgctagtattttatgcacaaccaaggattgaccatgaccgtagagatgtgaacatttaccatattctctatctgtcactacatatgttttttgccgtgcttcaattaatactttgttatttcactcacggtatgcacatttttgttt

SEQ ID NO: 152673 - DNA, 728 bp, Zea mays
  unsure (1)..(728): unsure at all n locations
  Clone ID: MRT4577_7081C.1
ataagttaggcagcaaaccaaacagcccctaaagccaattgttcggactgttacnaactataatccgtagaaacaancactgtaaaagtagtaaaagccggtatggattaaagccaaacaaataggcctgtgattacaatgatgcaatgcacaccacacgaatgatccatctcggaacctaaggaaaataaaaaggcaattcgagatttctttttccccaatctcgaattatctctcgatcaggagccagtacagcttcagcagcagcaccacccaccactccgagttcagtgtagacacaatcatccagtgtagtatatggcatgaaagatgaaatggttgtttcctctaatgccgtcccatctgttgcagtacggccccgacgagatgcagggagcccgtcacgcagatgaggcctggagccgtgcctctgctctccaggagctgggaggcagcaacgatcaggttcgaggagaacggcgcaacgtcttggcacccgatcaccatgggctttcttctggaattcgacgatggactgcagtccaagagatcaccaatgtgctctggggtttcagcaccactgacgccaccgatgtccacgtactcgatgccacgatcgcgtgccgcggctatccatacttctttcagggacgaggctggcattgcgcgggaggttcctccggcgacgctcgcctccgtcagcagcacaacgtcaggcgtttgacctg

SEQ ID NO: 152674 - DNA, 474 bp, Zea mays
  Clone ID: MRT4577_70820C.1
atggggacggttgatatgtgtggggacggagtgcccctacatgtcatgtgtttaggtttaccttgcaaggtacgcttcaggatatggttgatgcctgggtggcgttcacttgattccaaaactgtcagatttagggcagacgacaccactgaggtcgcgacactgaaggctttgacgaccttctacggataccacccactagagatgatgatgcacccacttggactcttccccgctgagaagagggatgatccgatgtggtgcaacaaagctctaaaaagcgatgccatgatgcacctcattgggctcgctcaaactgcaaagatcaccctcgacgatagggaggactttgtggtcgacctgtcttcagaattggtggagaaggatctacaagttgaacagacgagcaaccgcatccaagtgttggagcaggtggaaatctgggataacaccattgaggtcctggaaaattag

SEQ ID NO: 152675 - DNA, 159 bp, Zea mays
  unsure (1)..(159): unsure at all n locations
  Clone ID: MRT4577_70821C.1
ganggggggcggagatctattaccaaacataatgtctgtgaggatgtggagtccaccaaaatttacttatggccctacatcactcactccagcaatctttactgtacctcactcgaacgagagacaagcattcttgctccatgcttcacagaaaaactg

SEQ ID NO: 152676 - DNA, 725 bp, Zea mays
  unsure (1)..(725): unsure at all n locations
  Clone ID: MRT4577_70822C.1
gccggccgngnngccgggaataaaaaaaaaaaaaaaaaaaaaaaaaaaaaaaaaaaaaaaaaaaaaaaaaaaaaaaaaaaaaaaaaaaaaaaaaaaaaaaaaaaaaaaaaaaaaaaaaaaaaaaaaaaaaggcaaaaaagccgcctggtttcttggattcttcaaaaaaccaagttttttttgcccccaaaggccaaggaggttttgcagttgggaataaagttggggtgggggttaaagttgaaagggggggaaaaataaaaaaaaataaaagggccccgggcaggataaatttccccacccttcttctgggctggccaagaaaattcccctccttaattaatttttcccttggcaaaacaaacaaacaaaaaacaaggttattcgggaccgagaagtccaaccctttgggggggggcccttttcaaaaaaaaaacccctgcccgggaggaaaaaaaacccgccgggaaccccaccgtcttcctcgggggggccccgaaaaaaaaaggccccccccaatttctccaaggccgcggggaatcccgggaaggccccccccggttgaatttgggaaaggggttgaaagggcaacccctgaaacgggggatcccatcgatcgacgcccggggaaatgattattatctatctacctgggggggggggtggaaaaaaaaaaagggaggccgagtgggtggccaaacaaaggaattggggggggggggtgg

SEQ ID NO: 152677 - DNA, 262 bp, Zea mays
  Clone ID: MRT4577_70823C.1
ttctcagtgctgtcgcgacatttccatgtaagttttattcttttcccgtcttacaggggttgttgtgaaaccaatttaactcggaccacacgctgactgatttccttatacctgtctcacatatatctttcagcattcctgggcattttgccaaaaataggccacactcaaactgtgctacaaactgtgctattagacaaagtcttcttcaccaatactaatgactctgttttttgcacaacacactaccattaccgctcct

SEQ ID NO: 152678 - DNA, 278 bp, Zea mays
  Clone ID: MRT4577_70824C.1
gagctcactagttgttggccgcccttttttgtttgtttttttgttgggcttgtatttggttgtgcaagaaccatttcttttcttaaaaaaaatggtcgtcccacactctaaagaaaaaaaggaaaaacggaaggagcttgatcattaaggggtcgtgtggcccttttggatatgggggtcttcttggtggagtctttgcaataaagagagattgatcggttcaactctgctaaaggcgcgctgttgtggtatgcctccactcttgctggttgtttggg

SEQ ID NO: 152679 - DNA, 277 bp, Zea mays
  Clone ID: MRT4577_70825C.1
tgtattctgacacgcaccccgccggacgggaagcggtgggagaaagcggaccgaagccaccacccaagcaggacaacaacgccaacggcacgagaaagcagaaagaagggaaggccgcacacggcggcaagaagagggcggactcatcaccagcggcagggcagggaacacgcaaaaacgcaccccgcacagaaaaaatgcccccaacgccaaacaaggcataaggcaaaacaaagcccggagcagaagacaccggccgggacagcgaccgagcaga

SEQ ID NO: 152680 - DNA, 378 bp, Zea mays
  Clone ID: MRT4577_70826C.1
ccgactcctagccgaatatacattttttttacaactacgaacgacacatttactggtgtggaataatactgtcgtgcccatactatacattacacacagacgaaatcgccaaaaaaaccaatatgaagacgatgctcaccataaaagcagttgcctattgatcgacgaagctttagatactcaaaacaaacaaaccaccacctgggcatgctttttcaccacttgtaacaatccaaagcactatggatcaaatatccaccttctgcaagccgatcaattatacatacacaacaaacagctacttgtacctgatcaacgaaaaactcgattttttttacttccacataacacttatcgttgctcaaaagaaatttattc

SEQ ID NO: 152681 - DNA, 319 bp, Zea mays
  Clone ID: MRT4577_70827C.1
gtcctgctagggagacctggactggaggaggaggacctacctacccgggctccagctacagatttctaactgctaaattgtgcttggcctagaacctccgatccagtccgccagagggtgccagctactccgataacggcgcctactactgaggtcataccggcgcgacaccgcccgtgtctaaggccgctgacggatgacagaacaacgccgctggtcctggttactactgatccgaccctgcatgaaaacttgacgcaccgcaccagcatggcacctgcgctgctccaaaggaatcggtctcctatcaacagctgat

SEQ ID NO: 152682 - DNA, 391 bp, Zea mays
  Clone ID: MRT4577_70828C.1
cataatggccaggagagacagctatagagcgagagaggggcaccgccacacaggcagcaatgaaggctccttgatggccgccgccgctcgcagggtagcgggcgctcgcgcctactgttgcgcagagccgcgcccacgcggcggtcgcgaaaggaaggccagtccaagaacgcaccgcactaaatggtggcggcggaaacaacaaactgtaacacctgagtgacggcacgcgacacgccaagagctcttaggattttgaccgccgagatgcggtcggacccgacatgataactccagtgataagtaagctcggcaaacactagccctgtaatatgacctgcagacggcgaacacggacaacagacccaacgtgacgcatacctactgaatc

SEQ ID NO: 152683 - DNA, 141 bp, Zea mays
  unsure (1)..(141): unsure at all n locations
  Clone ID: MRT4577_70829C.1
ggttgttggggtnttttgtactaaattattcggggggcccctacttacaagatttcntgggaaacaagttgcgtagtgggctacaccaagttgtcagaatgcctcccttcttgaggcccgcaccaccacccatgacgtcat

SEQ ID NO: 152684 - DNA, 313 bp, Zea mays
  Clone ID: MRT4577_7082C.1
cacacgcgttcgaggacgcgttggttatttttttgagattttcattactgggttaactgagagatcaaagatgtggctaaccacataaggtgtacaaaatgatgctttgaatttagctacataccacaaagataaacctacatgcctgtacaaacattaaatgcccttgcggacagctccggcagcatggagcccaagtgccccaagaagggccccaagttccccaagaaggcttacaaagtggggacttcatttgcactgagtgctgtcacatgctcgtgtctagatatgtggatcatatgtgttctgatct

SEQ ID NO: 152685 - DNA, 1093 bp, Zea mays
  Clone ID: MRT4577_70830C.1
ccggccggatcgccaaccagatcagggagaacgtcacgagggacatgcacccggcgctgctgcggtcggagtccacgcgctcgtaccgcagcgacgtgccgttcgacgggcagggacagatggattacatcggccgagacgcgaggaggcagctctccgacaggctgaagaatgtgctgaggagggacccgccggacgccgagacgcccttctcgttctcccaccggagaagggccacctcgacgtcgttcgacgaggagccaacgaggcccaagccgacgaggcacgaggtgccgccgccgtcgtcgagaaaggggaaggtcaggagcaaggaggaggagaggaagtgcgcggtggagtctgacgtccggtcattcagatacggaccgagcaacaccccgacgacgacccagctggagtccgagcccgtgtcgccgcgaaacctcatgaggtcgttctcggcgccggtgtccgggacgaccttcgtgaagctcctctcggaggagccgcgggtgctgaccggagcgaggctgcagcgcaagcaggaaggcaacgggagcagcaggccagcgtcgtcggatgagaggaaagggaggaaggacgcgttcagcatcagaggcaaggtgtccaacctgaggcagaactttgggctcagagccaagctgttcggcaagaagttccacgcctccgacgagccgttccccgacgacctcccgcccatcggcaccctcgtcaccgcaccatcggtcctcatacaccccggcgtcctgcaggagaactccaccgaggtaccaccgagcccggcgtcatggtgcagcagcccgcctgacgagatgagcaggggaggctacccaagccctgtctcgccattggaggcatcctttagcgggcaccggtctcccctgaggacggaagccaaagacatggcttcagctgcttctgaatcaggaatcctgtcagaacaagcccatgctgaagaggggcgcgccgagacaagtcctgtccaggacgagcaggacgacggcgacatggacgatacagatcaccccatgaagtccttcgtcagagctgttctcgtcgtcgccggcatgta

SEQ ID NO: 152686 - DNA, 249 bp, Zea mays
  Clone ID: MRT4577_70831C.1
agacatcagattgccgcctcctgctcgatctgcagcctcatctgcctgttgaaccgcgcgatggggggtccaccctcctgttcagctcctcgtcgctcagttgccagtagtagtcgctctccctctcctctgccgccgacttgctcgcatccgtcgctgaccgccggagtctcccgccgccgctcttgccgtgtcgtggcagctcgtccggtgcacgcggccactcctgattggctgcttcctcctggt

SEQ ID NO: 152687 - DNA, 262 bp, Zea mays
  Clone ID: MRT4577_70832C.1
ctgctctcctgagacttcccagcacaatatagaactccttgctcccgctgttaatgaatcaccgctagtcgatgcgccttacctacctgatttccagtgtccaaagtagagtccaatgcggcatgctcgcaacagcttaccaaagaaggtgtaggagagttccggaatgctgagcgaagaactactacttccagatgaactatgatgatctcccacggagggccttcatgggcaagactacagagagaacgcaagcccgatc

SEQ ID NO: 152688 - DNA, 376 bp, Zea mays
  Clone ID: MRT4577_70833C.1
cttttgtatcatgtagttttgctgagtacttgattggtttaggtcaagaactaaggatataatgctagctgcatttaaattatataattctagtactgtacttctcgaccggtggggaaagaccgctcccatggtattgtattaagaagaagcttaaattgagcccaaccgagaaaggtcacgaaacctggccccccttgcatcacgactcacgacggtccgccatatataggtcagatctttatccgtgctttgagccccttagcccctacacgagtatccaccccctataggtcagtccgtctcgagtgcacacaaccagcgagtgacctttttttaatcccagtctaaaactcgctcccactgggagtcgaat

SEQ ID NO: 152689 - DNA, 253 bp, Zea mays
  Clone ID: MRT4577_70835C.1
tcccgaatcgacccatgcacccacgcactcgaacactactagttagaccttaatctactaatattcacctctgtgtatctaatcgatgtcggtggctgctattgagaactccctcaattattactaccctatcatttcaaatacatatgaacttattcggcctgaaattcacactaaacatgacctttctgaactgatgtactaaacaatccacgagtggccaatatatttcaatgtccctctaccttttcca

SEQ ID NO: 152690 - DNA, 717 bp, Zea mays
  Clone ID: MRT4577_70836C.1
ccggccggggcgactccgcgtctggcgatctagcggacagcggcgagccggcgataggaacacgccaggcgctgtccgctactccgctgacgctcccagcctcccacgccggaccagcctgcgacgtcccgcaaggcaaggctgcaagcaaatcaaggttgcaccgctgctgctggctggcatctttgcgacttggtaattagcatcttgctctgctcggtctacaatgtccaagggccaacgacatctatctggcaagttgcaagttgcaacgacatcctgcaggctgcaacgcccacggcctaccgcgtacagtgactaaaatatgaagaagcagggagatattgcctctctttttcgcaatcatgctgcaaagaaacataagtttattgcgtcgacaccgcaagaacaagaggaagataggataaatgaagaaattgtgaatccaatgtcatctgcactgcctccgccaacactttatgatgtcagccgtcttccacatgatccaggtgaaagacaacctattgcaagttaccatgctaatgatcacgatgcaattcgaagagcatatattcttagaggtccatttcaaccatatgcacatgaattcccaaataggaaaaattggagatagagatcgccagtttaaattttgggtggtttcaaaattttcctgggattgaatataggggtcaagaaagatgctgcattttgcgc

SEQ ID NO: 152691 - DNA, 1840 bp, Zea mays
  Clone ID: MRT4577_70837C.1
aattcggcacgaggcgtccctctccgctctacatatatatatagggtcggcgcggacatccctcccccaagcccacagcaaaacaacaacagggaggcagaggcgccatcatctcccttcttcttcacccacaagcctctaggtgcctcacaagtcctcctctgctgtcatctcccctctcctctcctacctggtttgttcaagaaactttctttggacaaagatgggagtgcagaggtacaggttcttctgctgcgggtgtggcgccaatgcggcggccggcggccgggaacgcgacgaggacgggggcttcggggtgtccgacggcaaggccgagaagggggtcgaggccgggcccgggcgggggctgtcgtgggcgcaggtggaggcgatgacgggcgggttcacctcggccgtggtcggcgagggcgggttcagcaccgtgtacctggcgcgcctctccggcgcgctcgccgccgtcaaggtccaccgcagcagcgagcgcctccaccgcgtgttccgccaggagctcgacgcgctccagcgcgtccggcacccgcacatcgtccgcctcctagccttctgcgaccagcaagaggaaggcgtgctggtgctcgagttcgcggcgaacgggaacctgcacgagcggctccacggcgggggcaaggccgcggggacgatgccgtgggcgcggcgggtgtcggtggcgctgcaggtggcgcgcgcgctcgagcacctgcacgaccgctgcgagccgcaggtggtgcacggcgacgtgaaggcgtccaacgtgctcctggacgcgtccatgtccgccaagctgtgcgacttcgggtcggcgcggatggggttctcggccgccgtccgcccgcgctcgtccgcgcgcaccatgctgggctcgccaggctacgtcgacccgcactacatccgctccggcgtggtcaccaagaagagcgacgtgtacagcttcggcgtcctgctcctggagctgctcacggggatggaggccttctgcgcggaggaaggccggctcctcactgccgtcgtcgcgccgcggctcagggcaggcgacccgccctgcgacgcgcgcgggttggtcgacgagaggctcggcaccgcctacgacgccgccgaggccgccgcggtggcggcgctggccgcggcctgtgtcggcgacaaccccagcctccggccgtccatggccgacgtggtgcgcaccctggagcagcgggcgcagggatccatctccgccgtggagaggagatcggacggccagaggaaggtgtgagccacgagggcggggtcgtcgcgtcctccgaggcgcccagatctggcttgccgacttgttaacttgcggtgctgacgtgcgtgcgtcgcacacgtggcgcgcgaacattggttgctaggagaacaaagcgttgctggtgtgcgagcacatcaaaaggacgaatcaaaaaagaagtggagaaaagcgtggtgaaaattgaagagagagagagagagagagttgattaggggaaaggtttggaggaggtaaaaaggcagggctaatctgtgtgctgatggggggtttgcatcatatgttatgtgccaaagcagcatctacttgggagagcccaaaaaatatggatcgtgcagcacacgattctaagattttgttgattcttattggtagtttcttttgttattttggcaaagtacatggagtgtttcttctttgtacctataatttagctagatttcaatttgtattggatttgttgagagcttggtttgttaaacctgtgtgaatggggaaaaaatcgcttcttagaaaaaaaaaaaaaaaaaaaaagctgtg

SEQ ID NO: 152692 - DNA, 2267 bp, Zea mays
  Clone ID: MRT4577_70838C.1
tagacggggtagcaaaggggccaagaagatggcaatggaggctgatctaaaatgcaagctagtggactttggggcgccgcgcgagacccagacggaaaaaaaaaaaaaaagaaaaaccggcaccaccgccactagaaaaagccagcccaaaaccctagctccggcgcgccaccgcgcagatccggtgctcccgcgcgatgtcggaggcggaagcggcggggtcgttgtcgaggcggcgaatggaggacgaggagggggcggcggcgatggaggcggatgcggcgcacagcgggaggggcgaggcggaggatgaggaggtcgagagcagcgactacacgtcggaggacgagggcaccgaggactaccgtcgtggtggataccatgccgtccgcgtgggagactccttcaagcagggcgcctacgttgtgcagtacaagctcggatggggccacttctccaccgtatggcttgcctgggacacagtccactccagatatgtggcgctgaaggtgcagaagagcgctcaacactacacagaagcagccatggatgaggtcaagatcttgaagcagattgctgatggtgatcctgacgactcaaaatgtgttgttaagcttcttgatcacttcaagcactcggggcctaatggtaaccatgtgtgcatggtttttgagtttctcggtgataacctgttgaccctgataaagtacacggactatcgtggaattccccttccgatggttaaggagatatgccgccatgtgctcattggccttgattacctccaccgtacactttctattattcacactgaccttaaaccagagaacatattgcttgtgtctaccattgatcccacaaaggaccctcggaaatcaggcgtacccctagttccgccttcaatgaggacagacgagccacctcctaaggtgcctgcacaatcaggaaatggtggcctcaccaagaaccagaagaagaagatccggaagaaagctaaacgtgcagttgctgcaacttcagaaggaagtagtgctgtggcatctgcggacacagatgggtcagatgaccgaggagatctgggtacaacaaatgagggtagtcctagacaggatggagctaagaagcgggtgacacgagataggcgcggtagcaaaggggccaagaagatgatggcaatgaaggctgatctaaaatgcaagctggttgactttggaaacgcatgttggacatacaagcagttcacaaacgacattcaaacaaggcagtacagatgtcctgaggttatacttggttccaagtattctacatctgctgacatgtggtcctttgcatgcatttgctttgagcttgccactggggatgtgctattcgatccacatagtggcgataattttgacagagatgaggatcacctcgcactgatgatggagctgctaggaatgatgcctcgaaagattgcgttgggtggtcggtattcacgtgatttcttcaatcggtatggggatttgcggcacatccgacgcttgcggttctggcctctcaacaaggtgctgatggagaagtacgagttcactgaaataaatgctaatgggatggcagattttcttgtcccaatacttgattttgttcctgagaagcgccctacagctgctcaattgcttcagcatccatggcttgatgttggtcccctccgacagcaacctaaaacacggccagagtcagcacggagtccaggtgatggtgtttcagagaagcaaaagaaagagaaagaagaaagagaggcaatggccgtagagttagggaacattgccatagatggtgcttcttcttccaggatggcaaatgacccccaatcaagcacaaataaaacaaccgctacctcttctaagaagtgagctgcatttgatttcatgagttaagctgtaaaacttgttttcattcgagaattgctccatgagtgggaaacatatgtttttttttaggtttgagatatgttaggatagctaccgagggaaaagaacagtaggctaaatatttgttgtatggggttgggtggacaaggttagatttgtcggggttgcagtaaccctagcccttttctttgagaacatattcttttgtacaattagaatccgcgatttgtttaatggtagcattgagcaactggaaacccgagacgagtttcgttaaggcctgcctaaaattttctgctggaatcatctggaaacatgatgtgccaccttttatcactgtaaagtttttactgt

SEQ ID NO: 152693 - DNA, 790 bp, Zea mays
  Clone ID: MRT4577_70839C.1
ccggccgggaattttcgtcggcctgttcggaggggaggcaagaggaaggaagcgccgcgggagcgccagacagacagacgaaccgagcaccaccgccactagaaaaagccagcccaaaaccctagctccggcgcgccaccgcgcagatccggtgctcccgcgcgatgtcggaggcggaagcggcggggtcgttgtcgaggcggcgaatggaggacgaggagggggcggcggcgatggaggcggatgcggcgcacagcgggaggggcgaggcggaggatgaggaggtcgagagcagcgactacacgtcggaggacgagggcaccgaggactaccgtcgtggtggataccatgccgtccgcgtgggagactccttcaagcagggcgcctacgttgtgcagtacaagctcggatggggccacttctccaccgtatggcttgcctgggacacagcccactccagatatgtggcgctgaaggtgcagaagagcgctcaacactacacagaagcagccatggatgaggtcaagatcttgaagcagattgctgatggtgatcctgatgactcaaaatgtgttgttaagcttcttgatcacttcaagcactcggggcctaatggtaaccatgtgtgcatggtttttgagtttctcggtgataacctgttgaccctgataaagtacacggactatcgtggaattccccttccgatggttaaggagatatgccgccatgtgctcattggccttgattacctccaccgtacactttctattattcacactgaccttaaacc

SEQ ID NO: 152694 - DNA, 108 bp, Zea mays
  Clone ID: MRT4577_7083C.1
ctgcccgggaaccttgctgatgctcatccgggtctgcgtcggacgtaggtctctggggacgctccagaggtggaggtaggctgatatactggctgactagtggttaat

SEQ ID NO: 152695 - DNA, 2448 bp, Zea mays
  Clone ID: MRT4577_70840C.1
cccacgcgtccggactcctgctcttattatccgcgtcgctcctcaaggcggagaggaggcaagaggaaggaagcgccgcgggagcgccagacagacagacgaaccgagcaccaccgccactagaaaaagccagcccaaaaccctagctccggcgcgccaccgcgcagatccggtgctcccgcgcgatggcggaggcggcagcggcgggatcgttgtcgaggcggcggatgcaggacgaggagggggcagcggcgggatcgttgtcgaggcggcggatgcaggacgaggagggggcagcggcgattgaggctgatgcggggcacaggaggaggagcgaagcggaggaggcggaggatgatgtcgagagctccgactacatgtcggaggacgagggcaccgaggactaccgccgtggcggataccacgccgtccgcgtcggagactccttcaagcagggcacctacgtcgtgcagtctaagctcggatggggccacttctccaccgtctggcttgcctgggacgaagcccattccagatatgtggcgctgaaggtgcagaagagcgcccaacactacacagaagcagccatggatgagatcaagatcttgaaggaaattgctgatggtgatcctgacgactcaaaatgtgttgttaagcttcttgaccacttcaagcactcgggtcctaatggtaaccatgtgtgcatggtttttgaatttctcggcgataacctgttgaccctgataaagtacacagactaccgtggaattcccctttcaatggttaaggagatatgtcgccatgtgctcattggccttgactacctccaccgcacactttctattattcacactgacctcaagccagagaatatattgcttgtgtctaccattgaccccttgaaggaccctcggagatcaggagtacccctgcttctgccttcagagagcacagacgagccacctccaaaggtgcctgcacaatcaggaaatggtggcctcaccaagaatcagaagaagaagatccggaggaaagccaaacgtgcagctgctgcaacttcagatggaactagtgctgtggcatctgctgacacagatgggtcagatgaccaaggagatatgggtacaacaaatgagggtagttctggaactatgaagcgggcaacacgagatagacggggtagcaaaggggccaagaagatggcaatggaggctgatctaaaatgcaagctggtggactttgggaatgcatgttggacatacaagcagttcacaaatgacattcaaacaaggcagtacagatgtcctgaggttatacttggttccaagtattctacatctgctgacatgtggtcctttgcatgcatttgctttgagcttaccactggggatgtgctatttgatccacacagtggcgataattttgacagagatgagccaagcagcctctccacatttgtctgtgtgggtggggggcacatgtgggagcctccagcactgggtctgcattgcccactttacagttatggtttatccaattatgatgctaggatcttaatcaaagactactttgacctacttattactgatcactttgaaggatgcatttatgttgatagtttcaagaaagtgccatttccatatctaaattgcttttgtgatcaccttgcgctgatgatggaactgctaggaatgatgcctcgaaagatcgcgttgggtggtcggtactcacgtgatttcttcaatcggtacggggatttgaggcacatccgacggttgcggttctggcctctcaacaaggtgctgatggagaagtatgagttcactgaaataaatgctcatgggatggcggattttcttgttccaatacttgattttgttcctgagaagcgccctacagctgctcagttgcttcagcatccatggcttgatgttggtcccctccgacagcaacctaaaacactgcctgactcagcacagaattcagatgacggtgtttcagagaagcagaagaaagagcgtgaagaaagagaggcaatggctctagagttggggaacattgccatagatggtgctggtggcaaatgaccctcaagcaaaaaagcgcaactaaaacaactgctgcctcttttaagaagtgaggtgcatttggtttcacgagttaagctgtaaaagttgttttcagtcgagaattgttgcacgagtgggaaacagatgtttttttaggtttaaaatatgttaggatagctgccgagggaaaagtagagtaggccaattatttgctctatggggttgaatggacaagactagattcgtttgggttgcagtaaccctagtttttttttggtcctttgagaacatattcttttgtacaattagaatctgaaaaaaaattaaggttagcagtgaacaactgggaacccgaaatgtgttgcgttaaggcctgcct

SEQ ID NO: 152696 - DNA, 1105 bp, Zea mays
  Clone ID: MRT4577_70841C.1
ctctgccctcagaaccctcgccgccgcccgtcggagctccggtgtgtcagttcgccgtcgaaggatatggactatgacaggttgaattcgccgaacacgtcggctatttcgctggaggtgatgggccaccggctacatatttcacaggatccaaactccaagcaccttgggaccacggtctgggatgcatcaatggtgtttgtcaagttcttggaaaagaatagcagaaaaggtcggttttgtccatccaagctaaaaggaaagagagtgattgaattaggagctggctgtggcctggctgggttcggaatgaccttgttgggttgtgatgttacaacaactgaccaagtcgaggtgcttccgctgcttatgagaaatgttgaacgcaacagatcttggatttcgcaatcgaattccgacacagataccatcggctcaattacagttgcagaattggactgggggaacaaagaacatatcaaggccgttgaacctccatttgattacattattggaactgacgttatttactcagagcatctgttgcaacctctaatggagacaattactgcattatctggtcccaaaacaaaaatattgctaggatacgagatccgttcggccaccgtccatgagaagatgatggaaatgtggaaaagcaatttcattgtgaaaaccgtctctaaatcgaagatggatgtgaaatatcaacatccaaacatacatctctacatgatggacctgaaggcaccattgatccctgaggttgaggctaccgacgataatgggaacgacgacgaagaggttgtttcaaatctgggggaagacgaagacaatggactgaagagcgaatcttgttccggctcgtcaccagaagctaagagcggcagcctggatgattgggaaatcagaagatgtggggctatggctgcaaggcttctaaaggatgtgaaactgtaaggccttgttcggttatttctatcctatattcctatttggattggaaatgttttaacttgtttgggattgtaactcatccaatccaaatggattgagaacaaaacgaacaagcactgacatgaaattgaaccacgtttttgtagtc

SEQ ID NO: 152697 - DNA, 1230 bp, Zea mays
  Clone ID: MRT4577_70842C.1
gttgctctcctccgagaaccctcgccgccgccacccaccggagctccggtttgcagttcttcgctgaaggccatggatcacgacaggcccttacatggtgattggtgatggtggtgattgaaccttgttacttgttagcaactggcaagagtgattgcgattgaatttgccgagcacgtcggctatttcgctggaggtgatgggccaccagctacatatttcacaggatccaaactccaagcaccatgggaccacggtctgggatgcatcaatggtgtttgtcaagtttttggaaaagaatagcagaaaaggtcgcttttgtccgtccaaactaaaaggaaagagagtgattgaattgggagctggctgcggtctagctgggttcggaatggccttgttgggtggtgatgttacaacaactgaccaagccgaggtgctcccactgcttatgagaaatgttgaacggaacagatcttggatctcacaatcgaaccccgactcagatatattggcaaacacaaaaacagattccgttggctcaattacagttgcagaattggactgggggaacaaagaacatatcaaggccgttgaacctccatttgattacattgtaggaactgacgttgtttattcggagcatctgttgcaacctctaatggagacgattactgcattatctggtcctaaaacaaaaatattgctagggtacgagatccgttcgacaactgtccatgagaagatgatggaaatgtggaaaagcaatttcattgtgaaaacggtctctagatcgaagatggatgtgaaatatcagcatcctagcatacatctctacatgatggacctgaaggcaccattgatccctgaggttgaggctgccgacaatgggaactacgaggaagaggttgaggttgctgtgaatcaagaggaagacgaagatcctggagtgaagagcgaatcttgttccggctcgtcaccagaggctaagagcggcagtctggatgattgggaaatcagaaggtgtggggctatggctgcaaggcttctgaaggatgtgaaactgtaaacatgaatcctagagatcgttttccccccttgtcagagaactctagagctcctttatgttgttgtccttgatagttgttgtactgcccatggcagtctatgttattgtatcttattgcatcagtggatattgataccattccaaaagaaaaaggaagtttctct

SEQ ID NO: 152698 - DNA, 542 bp, Zea mays
  Clone ID: MRT4577_70843C.1
gaccagaaagtaagtagggtttgttatttgagaggcagagttcagaagattcaagacactgcataaccaaacttacaacgtcagttccaataatgtaatcaaatggaggttcaacggccttgatatgttctttgttcccccagtccaattctgcaactgtaattgagccgatggtatctgtgtcggaattcgattgcgaaatccaagatctgttgcgttcaacatttctcataagcagcggaagcacctcgacttggtcagttgttgtaacatcacaacccaacaaggtcattccgaacccagccaggccacagccagctcctaattcaatcactctctttccttttagcttggatggacaaaaccgaccttttctgctattcttttccaagaacttgacaaacaccattgatgcatcccagaccgtggtcccaaggtgcttggagtttggatcctgtgaaatatgtagccggtggcccatcacctccagcgaaatagccgacgtgttcggcgaattcaacctgtcatagtccatatccttc

SEQ ID NO: 152699 - DNA, 1436 bp, Zea mays
  Clone ID: MRT4577_70844C.1
gccggccggttccgaagcagtcgatggcccatcgagtatagcagacgaagttgtagttgctctcctccgagaaccctcgccgccgccacccaccggagctccggtttgcagttcttcgctgaaggccatggatcacgacagattgaatttgccgagcacgtcggctatttcgctggaggtgatgggccaccagctacatatttcacaggatccaaactccaagcaccatgggaccacggtctgggatgcatcaatggtgtttgtcaagtttttggaaaagaatagcagaaaaggtcgcttttgtccgtccaaactaaaaggaaagagagtgattgaattgggagctggctgcggtctagctgggttcggaatggccttgttgggtggtgatgttacaacaactgaccaagccgaggtgctcccactgcttatgagaaatgttgaacggaacagatcttggatctcacaatcgaactccgactcagattccgttggctcaattacagttgcagaattggactgggggaacaaagaacatatcaaggccgttgaacctccatttgattacattgtaggaactgacgttgtttattcggagcatctgttgcaacctctaatggagacgattactgcattatctggtcctaaaacaaaaatattgctagggtacgagatccgttcgacaactgtccatgagaagatgatggaaatgtggaaaagcaatttcattgtgaaaacggtctctagatcgaagatggatgtgaaatatcagcatcctagcatacatctctacatgatggacctgaaggcaccattgatccctgagattgaggctgccgacaatgggaactacgaggaagaggttgaggttgctgcgaatcaagaggaagacgaagatcctggagtgaagagcgaatcttgttccggctcgtcaccagaggctaagagcggcagtctggatgattgggaaatcagaaggtgtggggctatggctgcaaggcttctgaaggatgtgaaactgtaaacatgaatcctagagatcgttttccccccttggcagagaactctagagctcctttatgttgttgtccttgatagttgttgtactgcccatggcagtctatgttattgtatcttattgcatcagtggatattgataccattccaaaagaaaaaggaagtttctctatctctctctctgatagatgtcaggacaacacggctaatgagtcagataagaggggctcttgcttgcaccggcgcctggcggtagaaacaaggtaaatgatggggtgaaaaacaagggcagctgtggttggtttgtgtttatgacaggttgttcgttttgtattaaagccaattatttagactgctgcagctacaatttatatggacaaaatactgtaaaagaattatagccaaacgaacagttaagg

SEQ ID NO: 152700 - DNA, 1365 bp, Zea mays
  Clone ID: MRT4577_70845C.1
cctcgaggccggccgggatagcagtcgatgggctccggggccaacaggcccgacaccaacgccattacaccaagttgtagttgctctcctccgagaaccctcgccgccgccgcccaccggagctccggtttgcagttcttcgctgaaggccatggaccacgacagattgaattcgccgagcacgtcggctatttcgctggaggtgatgggccaccggctacatatttcacaggatccaaactccaagcaccatgggaccacggtctgggatgcatcaatggtgtttgtcaagtttttggaaaagaatagcagaaaaggtcgcttttgtccgtccaaactaaaaggaaagagagtgattgaattgggagctggctgcggtctagctgggttcggaatggccttgttgggtggtgatgttacaacaactgaccaagccgaggtgctcccactgcttatgagaaatgttgaacgcaacagatcttggatctcacaatcaaactctgactcagatatattggcaaacacaaaaacagattccgttggctcaattacagttgcagaattggactgggggaacaaagaacatatcaaggccgttgaacctccatttgattacattgtaggaactgacattgtttattcggagcatctgttgcaacctctaatggagacaattactgcattatctggtcctaaaacaaaaatattgctagggtacgagatccgttcgacaactgtccatgagaagatgatggaaatgtggaaaagcaatttcattgtgaaaacgatctctagatcgaagatggatgtgaaatatcaacatcctagcatacatctctacatgatggacctgaaggcaccattgatccctgaggttgaggctgccgacaatgggaactacgaggaagaggttgaggttgctgcgaatcaagaggaagacgaagatcctggagtgaagagcgaatcttgttccggctcgtcaccagaggctaagagcggcagtctggatgattgggaaatcagaaggtgtggggctatggctgcaaggcttctgaaggatgtgaaactgtaaacatgaatcctagagatcgttttccccccttggcagagaactctagagctcctttatgttgttgtccttgatagttgttgtactgcccatggcagtctatgttattgtatcttgttgcatcagtggatattgataccattccaaaggggccttgttcggttatttcccccccacattcctatttggattggaaatgttttaacttgtttgggattgtaactcatccaatccaaatggattgagaacaaaacgaacaagcactgacatgaaattgaaccacgtttttgtagtcc

SEQ ID NO: 152701 - DNA, 285 bp, Zea mays
  Clone ID: MRT4577_70846C.1
accacgcgtgcgtgcataagatacccaaaggttctatacttgtaggccctcactgggacagggaagactttgctcgccaaagctacaacaggagagtctggtgttccattgtggtctatgactgggtcagatctcatggaaatgtttgctggtgttgcacctttcacggttctgcacttgttacaagaagcatggcagggggcttctagtatggtgttcaattaccaaatcgaagctattggtcgatgcaagatgacttcatgagatctcacggtcaaatgatca

SEQ ID NO: 152702 - DNA, 299 bp, Zea mays
  Clone ID: MRT4577_70847C.1
tttcaaaaaaaacgctgaaatgaaaggcttttccccacgacaacaccagctggtcaccgcaggctacgagaataacatctccatgattccccataatggaaagcaaggcggagacgccgagtcagccgatagcaggagggcagccaaaggctttgaaccttgaacttgaacaacctgaatccggactgctcactactgatccagcgattgtattgctgcacaactcaaaagacatctcgaccaccaaagccaacgataccaccactgcatctacggggacacctgatgtgaccgaagct

SEQ ID NO: 152703 - DNA, 646 bp, Zea mays
  Clone ID: MRT4577_70848C.1
gtagcaaccctttccgttgagttccagtgcgtggtgtcaactacggtcacgactttccgcgcgatcgccgtcgggtcgtgtcagtcccggcgtcggcaccggcacacgagaactcaccagaaccatggcactatggcaggcttggaccactcatcaatcactcaactccatcacgcacgggcccattttattgtggacccacacggcagtcaggcattttgggcccatgtccctagaaagccccctcctttctcgaagcccaacgcgcggaaagccagccatcgagcccgtgaggccgtgagtcgccaaggtcgccgactcgccgttctcctcgcccacaagggccaagccgccaaggccacgactctccgttctccaaccgttgctgtagaaaaaaacccctctcgtaccgttcatctggtcgaatgacatatgggcccagagctcctcgaaccacacgtccgttcgagcgccgcggatcccgcggtccggccgccaccttttgccggttgctgctcgccgccgttcgaaatttgaatccccgctacacgaacgacgaacggttcgtttgctcctccccaccgtcgtggccgaaaaggacaacggctacctcctcgaccacccccactactccacttgttgcgtc

SEQ ID NO: 152704 - DNA, 268 bp, Zea mays
  Clone ID: MRT4577_70849C.1
tcgcaaacactgaactacatatagctcagtgtttcgcttatgtacgttcatgtggttgttaatattttaccaacatactcgcatacaaaagcgaaacactgagctatatggaaaaaattataaaaaggctggtaaagcaaggcatacataccctgtgaatgtggatgctgactggtgcactgaaggtgttctaaatgactaggaagccctttgcctagatggtaccttttatgggaacgtggctaggtttatgaaccataagtgcatt

SEQ ID NO: 152705 - DNA, 258 bp, Zea mays
  Clone ID: MRT4577_7084C.1
gccttcctttttttttttttttttttttttcagctcataggtgaccaaacgtgagtgcatttcaaatggaacttctattctcaggcccattatcaaaaaacatctcaacacataacccacaattttgtccggcctcccctcaatttatcttcccctgcccctaacttcattaacaaccacaatttccaactttttttacaaccgacctttttataaacggaacaaacagttgataaccctaaaaaacaataatacttt

SEQ ID NO: 152706 - DNA, 302 bp, Zea mays
  Clone ID: MRT4577_70850C.1
ccgcccaacatgcaccaacaaaaccatcgagaggccttcgcaggggaaaaatggcacaacgggggctcaaccacgggcgcgggggctctcaacctccgaccagccctccgagctcgcggctgccaacgccagcgccgggaccacctgcgggccggggtgggccaacccgcacaacccgctcccgagcagccactggtacgtgaccagccggaccagcggcatcgggccgcgccccccgcggccggagctgaaaaagagaagctgccgggagcaggcggacatcccggcggacagcccgagca

SEQ ID NO: 152707 - DNA, 1159 bp, Zea mays
  Clone ID: MRT4577_70851C.1
aattcggcacgaggccgccaccacctcctgctcccactgccacctccttctcgcagctcccgcctctgccccagtcctcgtcatcgtactcctctccggcgtcgtcgtcgtggccgacgtcgtcggtggatgccgcgtcaaggctggcgctaaaccacctgggcccggcgcaaatccaccagatccattcgcagctcttgtaagttaacagatccattcgcagtcggcgggccttcgttcttgggttgtccggggggcaagccgcgcagcgctgcgacccagcggcgcgaccgaccgacgcggacgggcgtgcggccggctctgcccgccctgcagctccacccaccggaaccgaattaagcaccgccgtcgccgcggccggggcacagataggccatgcacgccacaaagttgaccctattgcccacacccgcacttcccaactgcttttatgacctcccaaatttttacttgctagtttgacgaaatttttacttgctagtttgaccctaagaaacagtccatgagccccctagcgttttgcagtcctgtcctcctctacgcaccatgcctagtatcgctgctgcgattcagctttggtgagacgcctatataatgcgcctgatatgatgaattacctagcagttgctattaatctatccagaagacttggactgagtttgattgctatgtaaccacgcggttggttctgtacttctacgcaactgtgcgacattggccaatgtggtgccgttgaaccttatgtattatcgtggcccccattaccatgttatcactagcccccttcggcatttcaactcagcattcagcagttttgcatgttcaactgaggtcagcggccagccggtggtagctgctactgatagataagctaaaacccaaagctggggccaccgaccggcgcgcgtgcagttgttcgatcagttgtaattgtccctactcttgtgagagtcgcgaggacgagctttccccctcttgagatccggtgtctaatccatttttcaagttttacaatggatatgactactagagatcgcattacaaaaaggagggatgatgatgatgacgacctcatgcttttaattctccctactctacatctcttgcactatattggacatagtgaaaaaaagcatgc

SEQ ID NO: 152708 - DNA, 514 bp, Zea mays
  unsure (1)..(514): unsure at all n locations
  Clone ID: MRT4577_70852C.1
atcgtgaacgtggttgtccctcgaggcagccaatgaaggaaggttctcgccttcgtccccgctcgtcgccggcttccccgcaccgtccgatggacctgccggactgccaagctcctcgccactgcatccgctcgacttctagatctccgcatcgacacacctgggcctccattgttacccctcaggctgcagcagatccaaacaagtttgttgctgctgattggggattgcttgagcctctctttactaagatggaaatgttgcactttgagatgcagaccttgaccgtctctcgcttggaggtggtccagccccttcacgacatgatgactgctttacaggggtggatgacccggcttggtggattcatggagcagatggaggttgttgttggccaactgggctgcttgccagcctcgctccagtcgcttgagatgccagctacaggttctgttgngaatgttgctggtgctgtggatgtcgacagcgaagtggctagttgctcgtctgagct

SEQ ID NO: 152709 - DNA, 322 bp, Zea mays
  unsure (1)..(322): unsure at all n locations
  Clone ID: MRT4577_70853C.1
atatataatgttagattgtttgttccatacccctgtgagttttcagaaaacattaaaccaatatttgcttgttgaagttctgttcatgcttatttaattaaactgcatttcagtatgtgtgtttgtgctccagagaattcagcaaaatggcaattttacaagatgccatgtgatagaaattctatgcaaataattacctagcatgactgtatgcagtagcagtttgtggaactcagctatgctcctataattggtaactaactagtgttacctgntagcaataagaaccctttttggtcttcatgacagagagtctctcacg

SEQ ID NO: 152710 - DNA, 924 bp, Zea mays
  Clone ID: MRT4577_70854C.1
atgggtggccccctcaccgccgccggaggtcgaggagatgggggcgccaaggcggtggaaccgctccggcctccgccgccgcccgacccgaagacaatggccagatggtaccagctggaggcgctggagcgggcggtgcgggggaacaccctggcgttcctggagaccgggagcgggaagacgctcatcgcggtgatgctgctccgggcgtacgcgcaccgcgtgcggaggccggactcgcgccgcttcgccgtcttcctcgtccccaccgtcgtcctcgtgggccagcaggcgcgcgtcgtcgagcagcacaccgacctcgtcgtcaagcagttctgcggcgagatgggggtcgacttctgggacgccgccacctggcgatcccaactggaggacggcgaggtgctcgtcatgacgccgcagatcctgctcgacaacctccgccacagcttcttccgcctccaggacatcgcgctgctcatcttcgacgagtgtcaccacgccaggggcaatacgccgtacgcctgcattttcaaggaattttatcacccccagttgaattctagtgcgtcagaccctctgccaaggatatttgggatgtctgcttcgctcatttattcaaaagatttgaatccgcacaattattcaaagcaaatttctgagattgagaatctcatgaattccaaggtgtacactgttgatagtgaatcagctttgtcggagtacataccatttgcttctacaaaaatagtggactttgacgattccaacatttcatctgagctgcatgccaatattctcagttgtttgaatagattgaataaaaagttgagtggtaagactaggcatggcggccaatttggggtaagatacaagggagaggttggcactttcggcatgcctacagaagggaacagagattga

SEQ ID NO: 152711 - DNA, 1239 bp, Zea mays
  Clone ID: MRT4577_70855C.1
agtacgcgcagggagcaagacgagaatatgtcgacgaccagcagcgacgaaaaggcggtggtgcagaacaagaaggtggttctgaggaggtacgtcaccggccggttccccaccgaaaatgatatggagatcattgtcgacactatcagcctgcgtgtgccgtcggggcagacagccgtgctggtcaagaacctgtacctgtcctgcgacccctggatgcgtggccgcatgaacaagcaagacgacggccccaccgtgccgccccacggagaggccatggtcaatttctctgtgggcaaagtgatggactcgacgcacccagacttcaccgccggcgacctcgtatggggtatgactgggtgggaggagtacaccctcgtcatccagcccgaatccctgagaaagatcaaccacaccgagctgccgctctcctactacacgggcgttcttggcatgccagggctcactgcgtacgcctgcttcttcgaggtcgggaagccgaggaagggcgacttcgtgttcgtctcggcggcgtcaggcgccgtcgggcaactcgtcgggcagctcgccaagatcgccggttgctacgtggtcggcagcgcgggctccgacgacaaggtcggtctcctcaagaccaagttcggcttcgacgacgcgttcaactacaagtccgaggccgacctcggcgccgcgctcaagcggtgccttcccgacggcgtcgacgtctacttcgacagcgtgggcggcgcgacgctcgacgccgtgctgctccagatgcgccgcggcggcagggtcgcggcctgcggcatgatctcgcagtacaatctggaggagccgtacggcctgcgcaacctttactgcatcgtcgccaagtccatccggctggaggggttctactttacttcctacatgcatgtgtacgcgaggttcgaggaaaaaatggctggctacatcaaggacgggaaggtccccgtcgtcgaggacgtcgtcgagggcattgacagcgcaccggctgctttgatagggttgttctctggcaaaaacgtagggaagcagttggttgccattgcaagggcatgagttgaagcaggaactgatccgttttggtgaacaaatgacccccccccagtattgtgtgctactacttgagtgaagcctcttctaccgatcctagcttgtttaaatatataagagggcactgttattgtatattgcaataaaaaacatattatagtttgc

SEQ ID NO: 152712 - DNA, 272 bp, Zea mays
  Clone ID: MRT4577_70856C.1
ccggaccgcctccgcgaagtccgagcctcacgccccgtccgaactccgaaccccagagcagagcagagcctcctcgacctccctgtccccagccttccgcgatggcccgcacgaagcagacggcgcgcaagtcgacgggcggcaaggcgccgcggaagcagctggcgacgaaggcggcgcgcaagtcggcgccggcgacgggcggcgtgatgaggccgggcggcttccgcccgtgcaccgtcgcgctgcgccagatccgcaagggccatacg

SEQ ID NO: 152713 - DNA, 445 bp, Zea mays
  Clone ID: MRT4577_70857C.1
aaaaacccaaggtttggatttaaaggaaaccccgggtcaacaaaacattaccgggggggaatttcaaaggggggggggtttgcctgacccggggagctaggggggggggttaaccagggggtcgaacaaggccacaattggaggggggggctcaaaagggggctaatttaaaagggggcatcccccccctcagccatgggcttagcccggtcttccccctggggaagcctttttgggggcttttaagcgctctccttttccttttgagaattagggggggatttcatcgccttggccgccttattgggcctgttgggggaaaacccaaccccgggggtgaaggccatttggggctcatttgggggggacacataaccagtttcctttgataccctccacccctttgcatggatctatgggggggggcaattgggccctcttttat

SEQ ID NO: 152714 - DNA, 419 bp, Zea mays
  Clone ID: MRT4577_70858C.1
acaaaccgactccaacactaaaacggccattgttaaaaaacagcttcaatacaaatctcaataaacccacgagagccttaaaaaagcatccaacgtaatgggctcagatccatggccatagcatgaaataccgcaggcacacccgccgtatctattacatcacataatcaccccagcccacgcaaggcacgacggggacatgcatatactgcgatctaaacatatgtagatcagccatgtagcaatctaacggctctactgatataacaacagaagctcacaaattccttcagaccatattatcgatctaccctggatcggggaggatctcactccatacatttctcaaggtctcaaccggaccgttgataagtaccacattcactatctcctagtattgcatgcatagtaggaatgga

SEQ ID NO: 152715 - DNA, 224 bp, Zea mays
  Clone ID: MRT4577_70859C.1
ataattgacaaattatatactgcttttgtggtacatttgtttgaatcttttgttgtctacaaataaggattctataacattctgacaaaaaaaaactgttctccaagaatagaaaacaatgatctaggagctggctgtaagactattgatactacattgaacactacaaattacactcatggcagtgcccttcaataaacattgttgcggccatttacccaaga

SEQ ID NO: 152716 - DNA, 334 bp, Zea mays
  Clone ID: MRT4577_7085C.1
tttttaaaaaaaaacacaagccaagcggaattgtaaattaaggacacaacatccccagtacccccaattataacattgtttttttataataaataacttcgaggaggaaaataatggtagacattgaaaaaggttattttgttatatggtgtgaccaatcaaaagtgtttttcccaacctatgcctctatgccaactgtaaaaaatttaagtgttgtattcttgtttgatcacacactgatcattaggtatcattagccaattattatattatttggcacacgcatgtacggaacagttattcaattttgattaatcttctttttatttctagg

SEQ ID NO: 152717 - DNA, 1324 bp, Zea mays
  Clone ID: MRT4577_70860C.1
tgacacctcgccagcgcgataacttaactgcggcggcagccgccggcccgccgcccagctgcgcaggtcttcgtcgcgccggccactagaacgcagcacataaggttcttcgttacggagcaagatcaattttagccatggtgctggcgcagctcgtttttcagaagttccgggacttcaattgaacccttgagtggacagccacaaaaccatggctgcggttgccggcgtgtcggaaccgccaatggtggagcaagtgatcactgaattcttcgccaagagcctccacgtcatcctggagtcgcgctcaccctatgattcgtcgcggaacttcacacggccctccccaccgtcgtcgccactggctggcagccagccacgtgaccggtggttcaaccttgctctccgggactgccctgccgcgcttgagaattttgacctgtggaggcagagcaacctcgagcctctggtcattgacattgtcctcctgcaacgtgacaacaccagaatcgccagtgtcgaggccagcaggatcatcgagaggtgggtaattaagtacgaaactagcagatctggcaatgttatcaagaacactgacaagaacgctagaagcagctgttctcaggatcatagcttgtacaggagggcgtacattggctcgacagtgttgttccggtcattgtatctggttgtcaggctcttgccagcataccatcttttcgaggagctcaattcatctggaaggatctgtccgttaagcctctcgcacaggatttcatcatttgttgagccattcacccgcgcagaggatgcagagatgaaacactttgcatttgctccgattgaaactctgcttggttccttaagcttgtcagtttcgtatgtacctgtgttggagttggctgcagtcccagagcagtccacaccaatgccacctgaacttataaaggattatgtcggaagccccacaacagattttcttaggaagcttgattccctaccttcagatggcattgcacctgcatgttttccagtgaccaggcggcacagttggagcactgggcatggagttagaccaccggcatcaccatttcttatgagttcagaaccccatggacgcctacagccatgtatgcctaccgataattctccgacagcatacatacatccacatattacatcatcatctgagaaaaagagaaatacagtaaatgaagagtgttattcatcgccacctctgtctccatcaccatctcatccgccttctagctacccaaagaatcctttcttcagatatgggagtgctccattaagtattcccaca

SEQ ID NO: 152718 - DNA, 362 bp, Zea mays
  unsure (1)..(362): unsure at all n locations
  Clone ID: MRT4577_70861C.1
gctggtcccgcctggcgagtacccggtccggtnatnntcccgggtcgnacccacgtcgtccgnaaaaaaaaaaaaaaaaaaaaaaaaaaaaaaaaaagaaaaaaaaaaaaaaaaagaaaaaaaaaaaaaaaaaaacaaaaaatgaaaaaaaaaaaaaaaaaaatatagggggcacctaaaataaagtacccatggctctggggacccacagacgtgcgagactggggacccccctgtggtggaccccaactttttgggtcttggggcggcatgccctttacgccagcgtggtggggaaaacccaagaggtccgcccaccttcgtcctttccaacagttgcccccttttgaacggcgggtgga

SEQ ID NO: 152719 - DNA, 745 bp, Zea mays
  Clone ID: MRT4577_70862C.1
cgcggccgcgtcgacctttattttaataatagtataaatgtttaattttactgggacgacatggtctaaatatatatatatatataaatatatattaactaaaaaaaaaaaaaaaaatatatgttggcctaaaattttaatcattgaccacaagaaaattgatggactttaataggaaaacaaacaaggggtttattccttcttctttgtctctggattcttttttccgattggaatagctgctcgaactttgttagtcaattcagcaatcttgcttctaactacttcaatattttgatcaatttgagtcttattgttctcataaactttgggtagtgtgaacagagcaataaatccaataattatgagtgtaaggccgttgaacaaagcgccaacatatgtcaacacccagagaataccaaagaatttggcagagtcaaccaagtcttcagcaagtaacaagcgacgaagttcaaccaatacggcattgatgtgcacaacagctaatttgctcagttcttcagctttttcctgtggtagcctgatgtccaagtcaagatattcttggaatgggtgactttcattagttttatttactgtctgtagagcagttttatacagacgtaaaagaatgcatccagattgtatgaacatagccagataagcaactacgctaatcagtgacatatatgcgaacgacaacaatcgactaacgtagcacgtcgacgcggccgcgaattcggat

SEQ ID NO: 152720 - DNA, 313 bp, Zea mays
  Clone ID: MRT4577_70863C.1
gttcctacttcgtgtcacgcacatgttccatgctgctgccccacactctctgagggggcctattatggacggaggaggaggacaaccccctcatcaacctcccactgatcaataagaccaactcaaacgcatatgactacactgccgacgtcatccacactatcatacccgacctattcatgcatactcataacacgccattcactcctctgaaaaataatactgccatactcaacctcactccagaccataacagcaacttccacggctgcttagactaaatcctcaataccgactacacgaccattgatat

SEQ ID NO: 152721 - DNA, 252 bp, Zea mays
  unsure (1)..(252): unsure at all n locations
  Clone ID: MRT4577_70864C.1
agtcgccgcccccnagacaccaagcccaagaagacggtcaataagccggagggccagaaaacgccaacaagagcgagagagcgccgagaacggaagcacacccacaagcaaaggaggaaccgccagggagcccaccaggggaggaagcgcgaaactgagcccgaaggcaaaaaagaggaccacagaacgcataaacacaagacgactccggaaaaagcaaacgccaaacaggacaaggacggagggggggcc

SEQ ID NO: 152722 - DNA, 388 bp, Zea mays
  Clone ID: MRT4577_70865C.1
aaaaaaaaaaaaaaaaaaaaaaaaaaaaaaaaaaaaaaaaaaaaaaaaaaaaaggaaaaaaaacaaaaagaataaaaacttacatacacctacaagctaaaatccttcctcttccaaaatggggcggccgctcaaatggttgcaccctcatttacccttgtttcgaaggtgaaaccccttcaagtttgccacctaaatccatttccagggcactcccttttacaccatctggcctgggaaccccttggctttcaccaatttaacccccttgcagtaaacccccctttccccagatggggaaacaccaaataggcccgcactattcccccttccaatcattgtcacacccaaaatggcaactggaactccccctgtactagcgcattaa

SEQ ID NO: 152723 - DNA, 592 bp, Zea mays
  unsure (1)..(592): unsure at all n locations
  Clone ID: MRT4577_70866C.1
aattcggcacgaggctgaccccagccgcgccggccgcgccctgacagcccccatccgatgcgccttccccgcctctgccacgccgctgccggatccgctcccactcggccgccgtccgctctcggcggcgacgggtcccgctgacctcatcgtgcttgccccgcccccatctcgcgccggcgtgggttgcggcgacggccagtagggttccggggcttccgcctcgcggtcccctcccccgaggatccgcgccttcccctacggggcgcgcgttgcgcttagggtgtgggttgccttggtcttctcagcttggtcgcggtcgcgcggttccgaggagctccacggaagcttgatttgtcaggggggcttttcgaggcagaggcaccgatctgcggctgccggcgccgcggcattgggccacttcctaagcccccgagcacccggagcttcgttcggatcggctggtctgggagctgggctgcaacaaatcagctcttcttcggcctcactgtaagcatttcttcgcagaggttctcgctcgcttctgggctagttgatattggagggaaacatgcncgagaacattgatctg

SEQ ID NO: 152724 - DNA, 360 bp, Zea mays
  Clone ID: MRT4577_70867C.1
gagccacgcgtccacccaaacgtccgctgattagcctgagcaatggcgaactctccgtcattgggtttcacacaatttagacttgcagaaccaaatttttggggctttacacgtcatgagggttcttgccaaaaaatatgatttcaagtctgaggatgagaggataccattatttcacatcgtataggacacatttcctcgtcaactaaacatttttatcaaactggttcaaattgtcaatccacgaagtgaagttgctgacttaatcaagttgatatgtaaaatattttggtcttctatatatttggagattcggaagcagctatttgatacaaatgtcgtcaatgcatggatggttct

SEQ ID NO: 152725 - DNA, 338 bp, Zea mays
  Clone ID: MRT4577_70868C.1
ggggggggaacatgtggaaacacttaaaacaccatttctggggggtatgttcagaacttttggccaggtaaaggaaatccttacattacataaacaaggcaaaacggcctcagaactactggtggaaccaaatgggtgggctgggttccttgaaatgtgttattggaaaacattgcctcacttgggggcttgggacttcttttacaaatgtgggggggttaaatcgagggggtccataaaatggaggggctacaccaaagtcctatgagggccaaattttagaatatgaactgggacccgtccctgtataggagcccccattggtggggcccaaattg

SEQ ID NO: 152726 - DNA, 222 bp, Zea mays
  Clone ID: MRT4577_70869C.1
ggcataaaagtttcaaacccccctttgggtccggaaaatccttgcaaaaccaaattttttcttgccccacgttaaaacaaaggggcgtggcctcaggtttgggaaagcttaattaaacttgtagtagcttttttccccccttcgccggccgattaaacccccaatttacccgttggcctttgaacgggttgctgccaaaccatttccttaggccgactttgc

SEQ ID NO: 152727 - DNA, 297 bp, Zea mays
  Clone ID: MRT4577_7086C.1
atgaccgcgtcaaaaaagggaccgggaaagggggataccccgaaagggatccttctccgcgaaggaaatgggccccgagcccccctactgatcagaggttcgaaggctggcccctcggagaggttcaacagccgcctcagagcgctcgggctccacgcccactactggtcagaggttcaaaggccagcccctcggaagggttcaacgaccgcctcaggccactcgggctccgtgcccactactgatcaagggttcgtaggctggccctcgaagggttcacatccgcctcagacgtag

SEQ ID NO: 152728 - DNA, 444 bp, Zea mays
  Clone ID: MRT4577_70870C.1
cccccctcgagtttttttttttttttttttttttttttttttttttttttttttttttttttttttttttttttttttttttaaaaaaaaatttgggatggcccctggcttgacccgaaaccaaggaaggttgtaatacccaaccctttgttaattttgaaaaaaaatgggggaagagggccattgtccacacacaatactttgggtgggtaacccgggagggttttggcagggggaaattatttcccagcacccttggggaagttgccgaaggggctcaacgggggcaccctaagaaacggttgttggacgtccccaaaaacttgtgccttgcgggaattgatgctttgaaggagaaacggttttgggttttgtttgtaaggcacaacaaccatggccgtttgttttttttgtttgaacttaatgagcgggacccttttgggg

SEQ ID NO: 152729 - DNA, 313 bp, Zea mays
  Clone ID: MRT4577_70871C.1
aaatccaaagattggggccttaaacaaccaaaatagcccaaaacataaaccgggcaatttttaaacatggaacaatccataaaccactggaccatggctacaaaacttggtacaacaaggttacaaacaaaaatttcacaatttgatgattttgaaaaatgggacttcccttcacccaaacaccttaccccttgagcttgccaaaaaaccttttttttttattggtagtctggaaaccaccccccccaaaattggaccaagtgtcgaaaactttagctttatcttctccaaccccaccccggaaatctttttt

SEQ ID NO: 152730 - DNA, 185 bp, Zea mays
  Clone ID: MRT4577_70872C.1
actccacgcatgcgtctcgacataaccggactcactcatctggtttctctagcatgatgtggagcttctaggtagaaaaaatcgatgtattattaagcacctaactgatcttaatattaacaagcatttaaggctaggtgctgctttggctggctataccgcatgtgtcacttcattaatcagtc

SEQ ID NO: 152731 - DNA, 476 bp, Zea mays
  Clone ID: MRT4577_70873C.1
gcagcccatgcagctggtctggcgtgcgatgctttgacgataaagtagagattctgaacttaacaggccggcaattggctggaactctcgcacccgagatcgggagcctccgaggtctaaaatcccttttacttccaaagaacaacttccgcgggcaaatccccagagaatttggagggctgtctgctctagaagtgctagatctgagcagcaacaacctggatggaacagttccagaagaactatgggctatgccactgctcaaacaactatcccttcatgataatcagctccaagaaggcgtccaagcaatagctgatgatcaggcaggatgcttgagcagaaaactagggtgctggtctttgctgtacaagtgggactttaaggattggatctctctcggtggtctccgagagaaagataacaccaatgtaccaaatttcagtgaggcagacgtaatgcataatttgcagtca

SEQ ID NO: 152732 - DNA, 617 bp, Zea mays
  Clone ID: MRT4577_70874C.1
tggcgatgaggaaagaaatccgtgtgccggaggcatccctcggacgccggtgttggttgcacaaaccctctaagaagttctgagccggacaccaagaaagaatcacacaacagcagctcaaaaacctaacacacctcaacaagcagagcaaagacccgggattcgccggcgcggtagcgagagcgagagatggacgggaggatgttcggtctcgagacccccctgatggtggcgctgcagcaccttctggacgtgcccgacggcgacgccggcgcgggcggcgacaaggcgagtggtgccgcggcgggcggcgggcccacgcgcacctacgtccgcgacgcgcgcgccatggcggccaccccggccgacgtcaaggagctcccgggcgcgtacgcgttcgtggtggacatgccggggctgggcacgggcgacatcaaggtgcaggtggaggacctctacctgtgtggaatgtggcgaggaataatcgtagtctgtagtgggggtgcttctggtgtgcgtgtttgcgttccttcggtctcggtgtctgtctaccaattcctatctgatgtatcggcttcggtttcgtatgaaccatgccggatgctttcagtatgttc

SEQ ID NO: 152733 - DNA, 282 bp, Zea mays
  Clone ID: MRT4577_70876C.1
tgtcaagacctcgccctgctaacaggacgatgagcccgacgctcacgcattgcgccaagagccgttcagtttgtcctagaccaacctagtgaagaccaacaccattaagctacatagcaacgaaacaagagacgctccaatttggaggcctatgccaggtagactaccctgcattgacaacgtaagggactgggactgagctgactatcaaaagatcctcgagagaaaccagtgaacaacccgtcacatggaactctgagactggttggaagctccagacga

SEQ ID NO: 152734 - DNA, 401 bp, Zea mays
  unsure (1)..(401): unsure at all n locations
  Clone ID: MRT4577_70878C.1
cgcttcnnnnncctcgccacaacgatctcctgctccctcgtctcacgtctcaactccaggatcaactcaaaggaagaccagacgatctatcttggctgctggtnnnnnnaactacttcagcacactggactcaaagaggcatgcagccgacaacgcacaggtcagggagctgcagaggaaagtgagcacgttggagtccgagatcgagaagatgnnnnnggagcacctattgcagctgaagcggaaggacgagttcatccgtgacttgatcaacaggaaggatcctaataacaacagtgtccgtggtgaaagtacgagctagaatatgcatctatcaaacttgtaataagcatggtctgcaatcaaacaaaataagtgtccttcgaaaacgtttgttcctt

SEQ ID NO: 152735 - DNA, 618 bp, Zea mays
  Clone ID: MRT4577_70879C.1
ggccgcttttttttttttttttttgtttttttttttttttttttttttttttttttttttttttttttttttttttttttttttttaaaaccattatagcaaaaaccccaaaattggacaaatagcgttgcaaaccaaaaaaggaagaaaaaaacaacaagggccaaaagggggcaaaaaccaattaaccacaaaaaaaaaaagggaaacacacacagcaaaagaacccaagggaggggaaccaaaaaaaataaaccaaaaaaaacccaaccattaacccccaaagaccttcttattggccagtttctaaatagtgctccccctcggacccctcaacaaaggcccccatggccccgacttcctcataggcctttaaaagaacgaccaagtcctcacgggcttgtgaaaacacacccttttccatccccccaccgaaaaaccaaggaacgaaggcccgctgggccaacaaaaaggcaaacttggggccaatgcgggaaaacaccccccccagcggggctgtttcggtaaccaaccacaccgccccctggacccttcccaggccccccccagggacaacaggggggggctgaaaagtcagcccccccctgaactccgggg

SEQ ID NO: 152736 - DNA, 390 bp, Zea mays
  Clone ID: MRT4577_7087C.1
aaaaaaaaaataaaaaaaaaaaaaaaaaaaaaaaaaaaaaaaaaaaaaaaaaaaaagaagaaggaaaaaataatatgaaagggaaataaaaatacataaaatataaatttattatagtaaaatttaaataaaattacttgaaaaacattttaaaataggggggtttgtttttaatgtttcaaattttcattttccgttgctttggatttaatttttttttttttgggcccccaaaattaattaagtggcccgtttttttcaaccttggtaactggaaaacccttgggtttcccaattttattcgctttgaaacatttccttttttgccacttttgtgttttttaaaaaggacccgaccctttcttttttccaaaattttgccacctcttt

SEQ ID NO: 152737 - DNA, 500 bp, Zea mays
  unsure (1)..(500): unsure at all n locations
  Clone ID: MRT4577_70880C.1
atgtcngcacgagggtgaacactagggggcgattgctgactatcgatatgggaaacccataaaggggtacgatctcagcgaagaaggtgtangggatggaggaggctgtgtangggtgggcgagtacgatgaagtgagcatacttggagaagcgatcaaccactgccatgataacggagttgccatgcgccggggggtgtgcctcgacaaaggcgagcgcgatgccggcccatacctaggggggacgtgcaatgggtagaggagaccgaccatgtggagggactcagtcttgtgccaggaacatgtgtatttgctaatatgagtgggcggtcataggtcaataaagattttaagtgggggttcgtggactttctgaataatttttctatttcttattagatcttgagcccttatttataggtctagcattaactagtctgggattangtgtgtctatatcacaaggtcatgctanaactaattccaacttgtgatatagc

SEQ ID NO: 152738 - DNA, 698 bp, Zea mays
  Clone ID: MRT4577_70881C.1
agacgatcgaggccgttcgttcttctctccgcctgcggccgtctcgttgtcttcccccaatgtgcacgagctctctctctctccgtatccggcggcggaagcggaagcggaagcggaaggaagtaggcggccaccatggtgaagggacgcacggggcagcgcgtcaggctctacgtccggggcaccatcctcggatacaagaggtccaagtcgaaccagtacgagaccacgtcgcttgtgcagatcgagggggtgaacaccaaggaggacgtcgcgtggtacgctggcaagcgcatggcgtacatctacaaggccaagaccaagagcagtgagacccgctacaggtgcatctggggtaaggtcacccgcccgcacggcaactccggcgttgtccgcgccaagttcaagtcgaacctcccgcctgagtctatggggcgcaaggtcagagtgttcatgtaccctagcagcatttaaggttttgttggagtaaagatggactaaaaatgtcatgcgtatttcttacttttttctgagcttaaaatgctatttgttggcaacttagattgttcatgcagtcatgcacttgaccggtggaagttctgtctaaatttgttgtcgaacggatgaactatatattgtcggtgttatgcgagcagcagagcttattttgtccgaaaaaaaaaaaaaaaaaagcggcc

SEQ ID NO: 152739 - DNA, 854 bp, Zea mays
  Clone ID: MRT4577_70882C.1
cccacgcgtccgcggacgcgtgggcgaggccgttcttctctccgcctgcggccgtctcgttgtcttccccaatctgcacgagctctctctctccgtatccggcggcggaagcggaagcggaaggaagtagtcggccaccatggtgaagggacgcacggggcagcgcgtcaggctctacgtccggggcaccatcctcggatacaagaggtccaagtcgaaccagtacgagaccacgtcgcttgtgcagatcgagggggtgaacaccaaggaggacgtcgcgtggtacgctggcaagcgcatggcgtacatctacaaggccaagaccaagagcagtgagacccgctacaggtgcatctggggtaagatcacccgtccgcacggcaactccggcgttgtccgcgccaagttcaagtcgaacctgccgcctgagtctatggggcgcaaggtcagagtgttcatgtaccctagcagcatttaaggtcagggtcatcaaacgatggcatgctttatttgtttggcggctggttgatgttgaatctgttgcttgtgattgaatgacacgacaaggaattctgattagactgcactcgtcattgctgtaggccatgggctaggagttttaggtggttaaacgcatcatagtttgtgtgtaacatcccgtggccaccggcgttggtggccgggacgtgagattgccagacactctcgcggtgacaaatttgcacaccgtgagtggttgaaagtttattcaggattctgttacttgatactattgccaactagccattacagtacttatagtacgccacttgggctagcccatttacctcaccacgattacagacgcttatctg

SEQ ID NO: 152740 - DNA, 772 bp, Zea mays
  Clone ID: MRT4577_70883C.1
aaaaatacaaaaaagagaaaaaaaaaaaaaaaaaatttaaaaaaaaaaaaaaaaaaaaaaaaaaaaaaaaaaaaaaaaaaaaaaatggggcacgagctctctctctctccgtatccggcggcggaagcggaagcggaagcggaagcggaagcggaaggaagtaggcggccaccatggtgaagggacgcacggggcagcgcgtcaggctctacgtccggggcaccatcctcggatacaagaggtccaagtcgaaccagtacgagaccacgtcgcttgtgcagatcgagggggtgaacaccaaggaggacgtcgcgtggtacgctggcaagcgcatggcgtacatctacaaggccaagaccaagagcagtgagacccgctacaggtgcatctggggtaaggtcacccgcccgcacggcaactccggcgttgtccgcgccaagttcaagtcgaacctcccgcctgagtccatggggcgcaaggtcagagtgttcatgtaccctagcagcatttaaggttttgttggagtaaagatggactagaaatgccatgcgtatttcttactttttttctgagcttaaaatgccatttgttggcaacttagattgctcattcagtcatgcacttgaccggtggaagttctgtcaaaatttgctgtcgaacggatgaactatatattgtcagtgttatgccagcagcagagcttattttgtcctgtgccaaaaaaaaaaaaaaaaaaaaaaaaaaaaaaaaaaaaaaaaaaaaagggcggccg

SEQ ID NO: 152741 - DNA, 525 bp, Zea mays
  Clone ID: MRT4577_70884C.1
ttttttttttttttttttttttttttttttttttttttttttttttttttttttttttttttaccttttttgagaagaccttggatcctagcctaatgggcaataacaccattaaacaaaaaaaggggcaaaaaaacgaaaaacaaaaaaaagggggacaaaaccgcaaacatggggccaggggggggtcaagggggacaggaaaggcatggaacacaaacatggaacaaaaaaaaaggaaagcaaacgcaaaccccgaaaggaagggaaaaacagggccaaccccaaggagaacccttgcaccgtcgggaaagggagaaaagccaaaccctaaaggaaaaaaaaaactggaaaaaacccagggggaagaaaccaagggaccaaaccctgacagagggcacccagaaaacaaatacggctacgaaaagcaaaccaaatccaaacgggaacacaaatgaaaaaaagcctcccggggaaacccacactctggggccacaaaaacgaacaccagccttgggccccacg

SEQ ID NO: 152742 - DNA, 899 bp, Zea mays
  Clone ID: MRT4577_70885C.1
ccggccggtccgcctgcggccgtctcgttgtcttcccccaatgtgcacgagctctctctctctccgtatccggcggcggaagcggaagcggaagcggaagcggaaggaagtaggcggccaccatggtgaagggacgcacggggcagcgcgtcaggctctacgtccggggcaccatcctcggatacaagaggtccaagtcgaaccagtacgagaccacgtcgcttgtgcagatcgagggggtgaacaccaaggaggacgtcgcgtggtacgctggcaagcgcatggcgtacatctacaaggccaagaccaagagcagtgagacccgctacaggtgcatctggggtaaggtcacccgtccgcacggcaactccggcgttgtccgcgccaagttcaagtcgaacctcccgcctgagtctatggggcgcaaggtcagagtgttcatgtaccctagcagcatttaaggttttgttggagtaaagatggactagaaatgccatgcgtatttcttacttttttctgagcttaaaatgccatttgttggcaacttagattgttcatgcagtcatgcacttgaccggtggaagttctgtctaaatttgttgtcgaacggatgaactatatattgtcggtgttatgccagcagcagagcttattttgtcccgtgccaaaaaaaaaaaaaaaaaaaaaaaaaaaaaaaaaaaaaaaaaaaaaaaaaaaaaaaaaaaaaaaaaaaaaaaaaaaaaaaaaaaaaaaaaaaaaaaaaaaaaaaaaaaaaaaaaaaaaaggggggggcccctttaaaaggaccaaattttactaccgggggctgggaaggtaaaattttttttttggggcccccaaaattaattcccggggccgggttttaaaaacgggggaag

SEQ ID NO: 152743 - DNA, 410 bp, Zea mays
  Clone ID: MRT4577_70886C.1
gcttgtagactgctcactcgtctccggtccgggacgaacgtaccgcacgaagcatacagggcgctagtctgtccggcgggcaagcgcgccgaggaagcaggctggccatccaaggcggcacgctggctggccccgcagacgctgggcgagaagaagccgcaccatgttgctgccggagtgaccgatcacgcttcacctagatgcgagagtacacactgagaacaccaagcatggtaattcacaagctccccttccagtgccaggatctcgagaacgcgcaggactgcaagacgagcacctgcggctcaaggcgcgggcaagcaggggacctgcagaaggccatgaagacagcatctggaggcgctctgcaaggacacacatcctgtgcgccatccacgccagcaggaaaa

SEQ ID NO: 152744 - DNA, 642 bp, Zea mays
  Clone ID: MRT4577_70887C.1
cctgccgggacaccaacctgagcacaccataggagagaacgagggggagcaggcttggcttcatcggtggccgccgcggacgagcacattcctgggcacccacctggaggacccggcaccacagaacgggcgcattgtggcccgggtcgcttgttggcttgggcggcataggcgaagcctgatccgaagaaggtgggaagacatcgtcctgctctgactcgccgctgtgaggtccccggcgccgtggctcccgactacctgcacggctcgctggacgagcactaccggttcgacccgttccgtctcggaacgcccgtggagtacctgctgtctgagtagcactcgctggaccagaacctggccaagaatgacgccggcggcatcatcggcacccggttcgagtcctccgaagtcaagtccaccccgatgcagacctacagcgaggtgatcggcctccagcggatacgcgagtgcgagctcatccacggccgctgggccatgctcgccaccctcggggccctgtacgtcgagtggctcaccggcgtcacctgtcaagacgccggcacggtgtagctggtggacggatccttctacctgggccagccgctgtcgatctccatctcgacgctcatctggatcgag

SEQ ID NO: 152745 - DNA, 471 bp, Zea mays
  Clone ID: MRT4577_70888C.1
tttttgatctctgaacaaatgtccacgttcattcatatagtcgttacggcttgctatcctgattctctacaagcccacgaaccacaaaagtaatcatgtactcaagcattcactcaacttttgagatgttgaagctttacttcatgaacttgctggccatgttgagaagaccaccaacgccaccggaagagccaccagaggcaccaccaccgctgccacccttcatgtacatctggagtgccatctttgctgcagaggcgacaacgtcctgcttgttagagccgctgggagcattgccgttggcgttctgctggtcaaacagcttagcagcctcacccatggcaatgccaatgagctggttctggccagactttccactgccagagttgccctggttgaacatcttcatggcctgcatcgcggcagctgcacccatgttgccgctgccaccggactggttcgagttgttgc

SEQ ID NO: 152746 - DNA, 162 bp, Zea mays
  Clone ID: MRT4577_70889C.1
ggcggggagaaaaaagcttttcttttggttaaagtttaaaaactgctaattttttggtttatctgttccaatttttgttaccggtggcagcaaaagggaaattttaaataacaggatctacagttccccttcatttttttgagacccgagccttttaagttc

SEQ ID NO: 152747 - DNA, 226 bp, Zea mays
  unsure (1)..(226): unsure at all n locations
  Clone ID: MRT4577_7088C.1
cagaggggggcgtgctccatttactgantattatttgacgggcgcgtcggaacaaccaggggactaacgggccgtggcttgatggcggacccgttttgcttatagggagcagcattggatgatgccaccctcttggccatagatgttactgtgtgggagaagggagtccgggcataatagcacacaactagacgggtccattagcttacttgcaaattgtgatgat

SEQ ID NO: 152748 - DNA, 518 bp, Zea mays
  unsure (1)..(518): unsure at all n locations
  Clone ID: MRT4577_70890C.1
aanncggcacgaggccaagggggcgggcggaggcaaggccnngngaccngccggcggngcggcaagcagcggcnncnncnccgggcaggcgcgcnngcncngcncgcggggcagcngcggccgngcagagcccagcagcagcagcagcccccggcgccgggaaacaaccccaggggcggggggaggccgnngggcnnnnccgaggccaaccgcacccnggggggcgcgcagnaccagacgcnggcgccggacggcaagncccggacgcccgggagggacagcagcncgggcagcgggnncaagggggcgcgggcggaccggaacggcnacnnngccgggggcgnnagggngcagncgggggacaccgccgggggnaacaccggcggggacccggggaacagggaggaagacccggggcaccgggacgagagcgacagggagcggnnggggacggggccgggggagccggacacggnggagaccaacggggacgggcgcgggagcggggaagggaccaa

SEQ ID NO: 152749 - DNA, 222 bp, Zea mays
  unsure (1)..(222): unsure at all n locations
  Clone ID: MRT4577_70891C.1
gcgcggccctagcngcancaagcgcaggcccgccgccggcancgcccccatgggccacgaggcgngcaagaagaaccccgncgacaaggaggaggacgaggaggaggaggacggagccggcggcggagaggacgacaagaaaaggggggagggagcaaagnncnnggccaagaagggggcaacgccgggaagcgnaccngcccgggcggccgcccgaaaggg

SEQ ID NO: 152750 - DNA, 787 bp, Zea mays
  unsure (1)..(787): unsure at all n locations
  Clone ID: MRT4577_70892C.1
gaagccccaaacagccatgaactatctatgaactcataacagacagataacataccccaaatatattggatccaacggttctccagtagaggttacatggtgctcattatgtgtttggttcggtgtcaacgagggatgggacgggatcaatcctgggttgacctcgtcccttattttttgagggatggccccatccactatttttgaagaatattctttgaccctgactctggacctccaaaccaaacatgggtcaagttagaatgatcccaccttatctctcttcatccttcctcatccatccatccaaacactaccttaatggcatcatcacacatgatcttatgatatgcttctttgtttcttgacatttgctcagtaatgctatgtacctttgacaatccttcagccagacactatctataaaccttttccagccatttgacaacaaacattgtcgaagattgaactgcctcttccaattatagcaattagtacttcattttggagcatgaattcctctaaataacaaatgtgaactcctgggatgctcgcattgcatctgtcagctagaagtttttaaattctcctgttgttcatatctaaatgtcattaatgcaacataatagaaaactatgctaggcttgcacaattatgctgcttcttagctcanaagatcgttggcctctgccacaaaaagccatcaatgaagacagcatacatttcagaacgtagccatccaaactttggcattagctggcagaatttantgatcattcaactactc

SEQ ID NO: 152751 - DNA, 239 bp, Zea mays
  unsure (1)..(239): unsure at all n locations
  Clone ID: MRT4577_70893C.1
cggacgntggacgagaacgcgtgggctgccgacgactgcactctgaccgaccgaccgataggngccctctcaanttccgtgcctcgtcgttattaanaaacacaccggangngcgaccgcctcgtccgcgtctgcttctgcatctgcttctgcttgtgatgctgctgacatcgaatcaaagctgctaaacctcggtccatccatcacccgcngcgcgacacacccaaaggcctctccct

SEQ ID NO: 152752 - DNA, 488 bp, Zea mays
  unsure (1)..(488): unsure at all n locations
  Clone ID: MRT4577_70894C.1
cataaaaaaatttcagctttcagctttcagtttcagtttcagccacaacacttgctttgcagttgtaacttaaacggacccatgcatttccatggcatcgacgccaactaagcctatctggcagccctgacaggcttcgcgagccccgccgaggctgtcccgtacgccgcggccgccgccccggcgtctctgaacccgcagaagaactgccntgtgggcgggcaacgtcgccgccgccgccggagaggccatgctcccgccactggcagctgcggcgccggggatgctaggcctgggcgacgacgacgacgacggggacgaggaggcgacgcgccggcaggagaggcacatcgtgagggtggtgagcggggccgccggcgcggcgctgagcgccctgagctcggcgacctccttgcccaggcggcggttctcctcggcgagctgctcgcaccagcgcttgaggtactcgcagtccacctccgtctgct

SEQ ID NO: 152753 - DNA, 453 bp, Zea mays
  Clone ID: MRT4577_70895C.1
ccggtcgaccacgcgtccggaccagttcatggagtgaccactccgggataacattgcagccatgagggtggaatgggacgcgcttagctaattaattagaagaacctgggggtgtagttggctttgccggaagggccatcaatgagggccgggcgcgtagtgctcgctctactaaggtggggtgcagaggttcaattgatttggttttgttagtcacctaccttggggaggtgtactgcgtttgtacgactggcgaaacctaacgagcagctatgcaccaggggagtctttgtaaaggctatgtagttgttgggggctttcgtcttctgaaggtcctcaaaaacatgattaacaatgttttcccaagtgtaatatatatatacaggagccttcggaatcggaatgaagttgtccacaatacgaaaagcatggttggtacgaaggtcataacca

SEQ ID NO: 152754 - DNA, 395 bp, Zea mays
  Clone ID: MRT4577_70896C.1
tttatagaacaaagaaataatttactacgggataatgagactggagcaacagaaactcacacagcaaagacaagacaaaaggctgacaaaccaaacaggggcggaaaagaaacgccaaaaagaaatacgaaccacgaacttgaatatttggcgcccgaaagagtaacatttgaaatacaccgcgaccaagaaaaaagaaagaacacagagagtataatataaattggacacgggaagaggaacaagggcatgcagcggggacaagcagccaacaaaagatagagctcaagtggaaaagcgtcgtaaatactaaaccgatgcacacgtaaagaaggggaagagcttctaacataaagaccctggaagacgccaatttgataaccaccggagaaaag

SEQ ID NO: 152755 - DNA, 162 bp, Zea mays
  Clone ID: MRT4577_70897C.1
cccgttcggtcataccaaggagatcttgctttgccttggcccaaaggttcaaaatatgtcactcgggcctcttttcggggaatggatccaatggcacccggctcttgggaaacttaccatcttctttacacgggttgcccgcctggcccaccccccggaatg

SEQ ID NO: 152756 - DNA, 390 bp, Zea mays
  Clone ID: MRT4577_70898C.1
atttctaaaaaaaaaaaaaaaaaaaaaaaaaaaaaaaaaaaaaaaaaaaaaaaaaaaaaaaaaaaaaaaaaaaaaaaaaaaaaaaaaaaaaaaaaaaagtttttacactttcccggggggccttttaaaaggggaaatttttaaaatttgggtgggattgggggccttttaagcttttttttaaagggccaatttggccttatagtgagtctttttaaaattaattggccgtctttttaaaactttttgattggaaaaaccttgggtttcccaaatttaatcgctttggagaaaatcccctttttgccagttggggtattttcaaaaaggcccccactttttgtcttttcaaaaatttgcccatcttaatttgtaaatggaccccccttt

SEQ ID NO: 152757 - DNA, 277 bp, Zea mays
  Clone ID: MRT4577_70899C.1
atgttcatgcgtcctgtgcgcgcccatcttcttcagaggctcagtgcttccggggagatcatccacgatcacgcttagctcgcacgccatgtgctcgtaggtgacgataccgcggatcactctgtgtcaggtcatcacacaggcatctgacccatccagattattcttgcgctcatcatcatgcttcgcgacggccttcatcgcaagatggggaaggcggacagacatcgcctccgtgttggctccgacggtgcaattgggtccacacacgcgggtg

SEQ ID NO: 152758 - DNA, 321 bp, Zea mays
  Clone ID: MRT4577_7089C.1
gccggccgggtcagagagagatgccaccacgctgacgtcttcgttcctgcggctctcggactcattagtgctgctcgaagcgtacggtggcgcaatggacgtcgtgcacggagtcatcgacactgaaggggaccccaatgactgatcgtgcttcccagcgtatacagtgttggcttcggcgtcgaatgcattgcgcgattgttgcggctcaacgacgtcgttcaagacatcggtgtgctgctgaaaccagctcgtcggcgactagtcctctgtactgggaaacgaggctgcacatggggccctagggtcgcacaagatcta

SEQ ID NO: 152759 - DNA, 557 bp, Zea mays
  Clone ID: MRT4577_708C.1
ggaaaaaattccgaaaaaaattttaaaatatagggggttttacatacggaaacaaacccccggcctagggaattgcacccagggtttgggcctaaaaaaaaagcccccccccccttgttttaaaaatccataccccgtcctttgggggtggcctgacaaacccccccaaataaatttaaaatttccccgcaaaaaacttttaaaaaaaattgtttgtttattcccccaatttttttgaaggaccccccccaaaagttagccagttccaagggccggccttttcgtttccaaaaacaaattacaattttttaccaatgggggggggcttggcaaaaaggggatcatcaacaaccctttttttacttggccaaaaaactgtttcttttggggcaacccaccggggggaatgatgtcaaaaggcgctttataacaaaccctggggttttaggaaagaaaaacttttaaaagtccctggaaatccccacccgggtttttgaagaacctcccctttccaaggggggcaccccccaaagctgaaaaaccaccctttggggctg

SEQ ID NO: 152760 - DNA, 285 bp, Zea mays
  Clone ID: MRT4577_70900C.1
cgtccacccacgcgtccgacaaacaaaaaaaaacaaaaaaaaaaaaaaataaaaagaaagttctcagttcattacatagaatgcaaaaagttagtttctgataagggggatccgttcgtgcgggttctaagtattaggtcggtgtgtacgcgtcttcctcgtgctcctacacgtcaccatgtctcaattccagtggcggccgtttattagggtggcccctggaacacccctgggcgctgccaatttactgccctagcagcacagcacccttgctccagttgcggt

SEQ ID NO: 152761 - DNA, 868 bp, Zea mays
  Clone ID: MRT4577_70901C.1
gcctatgccctaccacacaccgcgtccatgtgacgcgacgtgggggaggtgcgaggaagacgcggccgagccttccatttttcaactcctagtcctatacatacagcggcgccccggggctcggatcggatctacagcaatcagtctcgaccttcagtcgtgctgcctacccatcagcatataattcctgatcgagcgagcgggagaggaaggcgagatcagtcagatcaggcccggagagaagatggcgcaggggacgctggaggtgctgctcgtcggagccaagggactcgagaacaccgactacctctgcaacatggacccgtacgcggttctaaaatgcacatcgcaggagcagaagagcaccgtcgcctcaggaaagggaagtgatcctgaatggaacgaaacctttgtgttcaccgtctctgagaatgcaaccgagctcgtcatcaagctcctcgacagtgatggtggcacggacgacgacagcgttggtgaagcaacgatcccattggatggagtgtacactgaaggaagcatcccaccaactgtttacaatgttgtcaaagacgaagagtaccgtggagaaatcaaaatcggtctgacgttcactccggaggaggctcgtgatgaggatcaacccgaggaaaactacggtgggtggaaccaatcatcttgagaagaagtaggtgctttgctgaactgtggtgcgtgacaagtcgtgtgctagaactaaagcctattttaattgttaaagactgtatttatcattgattccatcaattatggataagctacaaatctccttattgattggtatcgttttctagtattcaaatttgtaataacagtgttccccacttgtatg

SEQ ID NO: 152762 - DNA, 627 bp, Zea mays
  Clone ID: MRT4577_70902C.1
aattcggcacgcctttcgtcttccccttcgcccctttctctctctctctctctctctctcgcgtgttctcgcgtcgccgtcgccgctggtgcgagatggtcgagacgaggcggagcgccgccgcgaagcgcccggcggcgggggaagaggataagggggcgccggcatcgcctgcatcggctcccgcggagaacgcgggggcgggtccgagggcgggtgacgatgtcgcgtcgtcgcagcccccgaagcgagccaaggttgggtgcacggaggcggacaccgagaagccgttggtggcgccggcagaagtcggcaccgttgcgggcccactgcccaacacggctggtctgcaggcgctgaccggcgccatggacaagctggaggccctcttgaggcccaaggagggtcagtccaatccggccgggcataagcggggcactaacgataaagatataacggcgaagataaagagagccatggatttatcggaggatttatcagcaaagataaagaaaaccaaggataatgtggctgggatattgaataagccacaggcggcagccaccagcaggcgtcaggagccctggtgcagactaatttcacaatataccatgcaccctacccttt

SEQ ID NO: 152763 - DNA, 299 bp, Zea mays
  Clone ID: MRT4577_70903C.1
acccacgcgtccacagacgcgtccgtattaaacttcataaattttatattatattatatcttaactaaaagacgtaaaattatactagtacgaagagaaactcaacaaaaaaaaaaaactaaaaaaaaaaaaaaaatggacgcacaatctaaagaatccaaacttaccaacacatacatgatacaacatatctcttctataaaatcacctaaattcaatacactatccatcacaagacaacaacttgactagtaaaaccctagcattaccaaacttaatcaacttacaaaacatccccc

SEQ ID NO: 152764 - DNA, 543 bp, Zea mays
  Clone ID: MRT4577_70904C.1
ccccttttcgagttttttttttttttttttttttttttttaagggaacaaatggcagtgtagctttatttgatacaacactacacatgaccgcctacaccgatggacgatggaccctctatcacatcggattacatgatgagtacactacgcatgcatgactagctagggttcatcgaccacacgctctgtcattcattcggcaagattgaagaccgttatcaccaacaacatctaccccggccgctggacgacagaacagatacggttcatcaaaaggagctgaagcaatcggtgtggtcgccggaggaagcgtcgtcgctgcagggagagtgcgtgtggcggccctcgtacgtggtcatcaccatgcggcagtccgtcgacagccgctccacccgtttcttcacgcggcagttgctgtgggtgcaccggaaatagctccttggatggaggctgttcttgacaaccttctggccgtacttcctccacttgtagccatcatccagtacatccacgtcgcttctggtctggaagcaaaacctcg

SEQ ID NO: 152765 - DNA, 370 bp, Zea mays
  Clone ID: MRT4577_70905C.1
ggaggatcggaagtcactatctactggtgggaggccgtccgctttttctactggcccttgcctgccccgctgttccactgtctcctcactccattgtaacggactgatggcatgctgcacaacaccaccacacttgactcgacttcacagtctccagtttatccgtttgatctacaccatcggtattatgtcctcgctcgcttaatccattgctttacctacagatacaccgttcctaataaatcctgtccaactactacgtggatgcttgctgatcattcgctttgactccttctcctactgctcctacgttgtgtcctcgactgtcatccatgaccaggtgagctgaccggtctactcgacacatctt

SEQ ID NO: 152766 - DNA, 269 bp, Zea mays
  Clone ID: MRT4577_70906C.1
ctgtgcggcgctcaggcggcggtttcatacccgttggatatacgggtacggtttgcaattaccatactcgtctacccatgggtaaaatataaccgcatcaataccactatagccatttaatagagcccattctagctaaaataaaacccttctctaactatcatttgtctagataccaagttatgtaatcatatgatttgttatatgtgaagttaaagttgtttttgtatatttatttaatattttgagtgattgatatattagaattt

SEQ ID NO: 152767 - DNA, 247 bp, Zea mays
  unsure (1)..(247): unsure at all n locations
  Clone ID: MRT4577_70907C.1
gtgggggggcgcgttttgcgagcgctacaaatgcgcgcacaatatacaaaacttatttgctcctaggtccattatttcnaatatttacaaacaattacttgaaggggcttataacacccctcttggctagcctataagctacaacaaccgattgcggcgagggggttacaacaactaattgtccaattgtaacaacaattcttggcacatcttacaatacaaaccatcgtaacaaaacaggaacaac

SEQ ID NO: 152768 - DNA, 289 bp, Zea mays
  unsure (1)..(289): unsure at all n locations
  Clone ID: MRT4577_70908C.1
ggggcttnggaacttggggttgggaaacagaagagagagggggagactggaagttcattagcattagggtttcaggaacgggtttggtgggaatgttggttaactttncaacccatacacttgtgattacaaaacaaaccaaattaaccctggcaggtccttaacatttaactggcagcaacgggtttggtgggggggtgcctttaactttggaggtaggacaaaaaatttttccgaggttaaggcccgggggggggggggaaaaaaggggaaaaaaaaacattggccc

SEQ ID NO: 152769 - DNA, 362 bp, Zea mays
  Clone ID: MRT4577_70909C.1
cattcatgtagagaactaaaacagggcaacacaattaaagtaataaggccttcctttagtcaaccctcttatggagagatagattaaaggaagaaggacatttgtgaatgcttgatgacttaacacatctgagacaattaattataaacgtgaccttttatttatttttctataattgcaaatggttacagagataccttttgaaactcagtcgacaattcgaatgtacaaacattatttatcttcagaggctgagtgatcctgcaaagaatgctctctcatccaatgcataacactgtacctctatttatagtggcaacctgacacatagcttcgtttaaaactacaatgatgaccttaaa

SEQ ID NO: 152770 - DNA, 622 bp, Zea mays
  unsure (1)..(622): unsure at all n locations
  Clone ID: MRT4577_7090C.1
gggtacctcgaggccggccgggactagattacactcanagatactctcatgctccctatacctctcgtctcgagctatagagctacactgctactagcttataacaggaatgctcttacagatgaatctgactgaatggcctaaatcttacaccttactgctgctgcccactagtcgatatgggccttctagagagacgcattgcttgctgccgccagttcgccaagccgaaccaccccaagccgacccattagtcgatgatcactaacacgaccgattatctcctcaccagaatcccctaacagaccatcgtctactgctccggagggtggttgtcctgacggtatcaggtactagagagtctctgatccttactttcgtcgactgggtggacttgaggtgatgatatcgtatttcgcactcgtgccccgttactcgccgtatgatggaacatcaggcagctccgccatctgtgaaaggtattgaagggctgtgattactgatatgacgtttgcagctagatgaaaccgttgtgatccaatcgaacgagcgacgtgactagcacctacaagtgacccgaaagaaagcgtgcctcgcagatccagcttctgttcccttgagc

SEQ ID NO: 152771 - DNA, 2814 bp, Zea mays
  unsure (1)..(2814): unsure at all n locations
  Clone ID: MRT4577_70910C.1
accggtccaagaactcccggggcatttgctcncgatcgaccttgcccctgcgggnaagnagatcatcgggcggcggtgtgcggaccggagcacgcctgttacctgtggccgcccttgtgaacagctgctgccttgcaaaaggcatcgctgcgagaaggtttcccacgcgtccgctggttcttgcggggattgcgctgttctcatctctgtgtgttgcttctgccggaataagaatgagacattgctatgtggagacttgatggtaaagggggagctgtctgaggaggacggggtgttttcttgcaatgaggtatgtggccgcacgctcgcctgtggcaaccatgcttgcaaggatatgtgccacccagggccttgtggggagtgtgagctcatgccgaggaaggtcagtacatgtcattgcggcaagaccaggctgcaggagaggagggcgagctgcttggacgcaatccccacctgcgataagatatgcgataagaaactgccatgtggggtgcacaagtgcaaggtcaattgccatgagggagaatgcccaccttgtttggtgctcgttgagcagaagtgccgttgtggctcatcaggtcagatggtggagtgtcacaagttctcaatggaagagtttcgctgcaagaagccttgtggtctcaagaagaactgtgggagacatcggtgcagtgagatctgttgtccactgtctaggaaagttgcacaccttgaaggtggcaactgggatcctcatctctgccagatatcatgtggcaagaagctccgatgtgggcagcatgcatgccagctactctgccacagtggtcattgcccaccctgcttggagactatattcactgatctcacgtgtgcctgtggcagaacttctctcctgccacctctgccttgtggaacaccaacaccatcttgtccacatcagtgctcagttccccagccttgtggacatcttgcctcacattcatgccattttggggactgttcgccttgtatcgtgccagtaatgagagaatgcattgggggacatgtgatgctgaggaatatcccttgcggatcgaaggatatcaggtgcacccaaccatgtgggaagaatcgccaatgtggaatccatgcttgcaacaggccttgccatcctcccccttgtgatcagacacctgcaaatggcgatgctagctcaagctctggtggcaaggcttcttgtggacaggtatgtggcgccgtgaggagagaatgcaagcatacatgcactgcctcatgccacccatcgtccccatgcccagatttgagatgtgaattttctgtgcctattacctgttcttgtggccgaatcactgcaactgttccctgtggtgctggtggatcctccatgggtgataatatgtttgaagtctccatcatacagaagctgccaatgcctcttcagtcagtggaatcaaatgggagggtacctcttgggcagaggaagctttcttgtgatgaggagtgtgcaaagatggagaaaaagagggttcttgctgaagcatttgacatcactccacccaatttggatgcattgcattttggtgagaattcaagttcatcggatttggtttctgacttgttccggcgtgaaccaaagtgggtgctggccatagaagagaggtgtaagttccttgtacttggcaaggtgagaggcagttcttcaagcaatctgaaactgcatgtcttttgccccatgatgaaggacaagagagatgctatcagtctaattgcaggccggtggaagctttctgttcagtcggcttgtcgggagcctaggtgctttgttaccatccatgtcacatccaaatcaaaaccgcctgctcgcatcctgggatccaaggctggtgtacctgttacagctgcccatccttactttgatccacttgttgacatggatccgaggctggtcgtcgccatgcttgacctgccacgggatgctgatgtcaatgctctagtcctaaggtttggtggtgaatgtgagttggtctggctgaatgacaagaatgccatagctgtattcaatgatccagctagagcagcaacagcactgaggcggctggattatgggtctgcttaccagggcgctgcgatgtttatgccaagcagcgctcaggcatcttcttcaggcaatgtttggattggagagcagaaggatggggggttcgccgctaggaacaatccgtggaagaagcctgcttctgctgctgagcctgatccgccctctggagactggactggtgttgctggccatgctccagcaccaggacggagaggcgtcaacaccgcctctcaagtcatggggactacaaaccgatggaatgttctggaatcagacgctgctgcaagctctggtccaggcgacgagcggaagcctgctcagcgcatggatactgcatacagcgcaataccaaatgttgggaatgctgggccatcgatgaccaagctgcagcctgacgcagaggtggaccactgggaagaagcttgtgaatgaggtagcaagtagcatcgggaagttgggtccagattttttttttgggttcttaaatctggttataggtcgctctgcttagctggtataccgagcctctatgttctagcacattttaaattagtttggtgatttcctggtggactgttgggtcagtgtcagaagtgtttgattttgttacgcaggccaatgagccggcaaatgaatatctgtaaggctgctgattattttagcaggtcttcttttgagttcagaaggtattaccatatgtttttaggtttttc

SEQ ID NO: 152772 - DNA, 1047 bp, Zea mays
  Clone ID: MRT4577_70911C.1
ccgggctgcaggaattcggcacgaggttcagtcggcttgtcgggagcctaggtgctttgttaccatccatgtcacatccaaatcaaaaccgcctgctcgcatcctgggatccaaggctggtgtacctgctacagctgcccatccttactttgatccacttgttgacatggatccgaggctggtcgtcgccatgcttgacctgccacgggatgctgatgtcaatgctctagtcctaaggtttggtggtgaatgtgagttggtctggctgaatgacaagaatgccatagctgtattcaatgatccagctagagcagcaacagcactgaggcggctggattatgggtctgcttaccagggcgctgcgatgtttatgccgagccagcgctcaggcatcttcaggcaatgtttggattggagagcagaaggatggggggttcgccgctaggaacaatccgatggaagaagcctgcttctgctgagcctgatctgccctccggagactggtctggtgttgctggtcatgctccagcaccaggatggagaggcgtcaacactgcctctcaagtcatggggactacaaaccgatggaatgttctggaatcagacgctgctgcaagctctggttcaggcaacgagcggaagcctgctccgggcacagatgtgcacagcacagtatcaaacactgggaatgctgggccatcggtgaccaagctgcagccggatgtagaggtcgacgactgggaagaagcttgtgaatgaggtggcatcgggtagttgggtccagatgtttttcattgttctggaatctggttatagtttgctctgcttcgtaggtactgatgccatgttggtatcgagcctttatgttcttgcacattttaaagtagtttggtgatttaccggtagactgttgagtcataagtgctgattttgttacagaggcgaatgtgccggcaaatgaatctctgcaagaccgctgcttattttggcaggccttctgtggaattctgaagaaattatagtattaccataaaaaaaaaatctttt

SEQ ID NO: 152773 - DNA, 293 bp, Zea mays
  Clone ID: MRT4577_70912C.1
gagctcctagtcggcggccgcccttctttttttggggttttttttactgattttgggggtttacacattcagcgaccacaacagacaccggccaaaaaggtaaatggcagtgactcgagccccagacataggcacaaaccgagcggtcccatcttccaaaacttcaaacgcatagcgccacatgtgacccaagaacccccctgatctgtgggacccgggatcgttccatcactctggctaacaagaagcttgggaccatcccccaaaaacaccagacatcagattgcccacaa

SEQ ID NO: 152774 - DNA, 1015 bp, Zea mays
  Clone ID: MRT4577_70913C.1
ggacaaagttggctcgtcctcaggtataggttttgtatttttcgggcgacaccatgcctccggatccacttctgcccatacttcctccatttatatccatcgaagtgcggtgcttgtgtcacaattgaacctgtgtgttgtgcattcttcctaagagaagggggtaactattttaagcccaagtaaatgacacacaagtaaacatatatatataaacttcttttgctacacaccttctcttatttccaatttctttagcttcctcccccagcatgtggctctccacgccgctattcttaccacgttttcttctatatttgataagattggcctgcttcttactgttatcaccaggttcgagaaaggagaggaccttacctgaggaactggatatatcttgaaagatttgctgaacaagcttctcctgcctactacagggatcaagtgttggtacgataaggtcatataggcccttcatgagagccctttggtgttcaatctcgttgagcaccacttggcagccactacgagtggaagattcaaggatgttcatttgatgttctctaaaatgtatctcgctataaactatatataatagctggactttggagctggaggtgctaggtttatgcagctttaggcatctatttatacaagcaagctagtagcagcagcacacacagtatgatatgagcatggtggagggaatggatcgtttttcaaattttctcactggagaagactagggaggagcaatgtccctgtccaacggtggtatgtggtacaactaaaggatgggtggcagtgtctacatcactcgcatgacgttcatggaaggaaacatgcatatagctaggggcaataattcttgaggctgttatagggaggagcaggcaacgttgctgtacatacacaggccctaggacagggacatgcttcattgacctctaatggtaaatgataccgagtcgtttcgaaattcctgcaaaataaactagtcaatctcatcttacac

SEQ ID NO: 152775 - DNA, 577 bp, Zea mays
  Clone ID: MRT4577_70914C.1
gacagaagatcagatcccagcaggttcgattcaccaatttggaggcaatggcaatctgtagtcatcaaatagtacgatggttctatcttcagaacgtggtaattgaaaaaaaaaacttctcagtaccggtcgaaaagtttggaaattctgcaacatcgagcttcgagcaggtctgaagaagcgagaacactccaatgtcggtgggtgcagaaggccagaagatgtctagcgactgcactactctactctgaatccgacactagcattcgtcagccccgccgacgcagagtacagaggaacatacggagtaggaagctcgtcgccgacatcgcctccgggaccgagatcggcgacaacacgcacctccctgcgatccatgtcgtaggccaccagcttccggtcccagtgccggacaaagaaaacccagttgccgtccgggtggacggcgaccacgctgtactcgacgcggaactggcaggcgatcctcccgaacagctccgggaagccgacggtgtgcttgagcacccactccccggcgtcgtagtcctggagcacccagaccaggagcctcagcggc

SEQ ID NO: 152776 - DNA, 247 bp, Zea mays
  Clone ID: MRT4577_70915C.1
agtctatgaggtggtaggctcggagtcggctcgaactggagccgtcaccagtggacgttggtgccgcgtgccgcgaagtgcgttggttctgcgggtacacacaagatagtgcgagtctcgcagacacagagtgcgtagtgatgccaggatcgccaggtgtgttgcgtgtcgaggagggagtgggcgcccgtgcctcgacgtgggcgccgacagcaatatcggcgcccgccggctacccgcaggtcgt

SEQ ID NO: 152777 - DNA, 306 bp, Zea mays
  Clone ID: MRT4577_70916C.1
ttttgggtttttttttatgtcttgtcggttttttaatttcaaacatcaaacttattcatgatttgtcataagtctgggaagtactcacacacaacacaaccgggccattttttaatctacactgtctccacttatgacacgaacaggagattctttgacaaccctcatattgagagagggcaccagacgacccaagctcatttgctgcttaaacgacccatgagtttctgaccaccacggagatgggcacaagggggagggggctctcctcttggaagttgtagcctgctagggggggggcattct

SEQ ID NO: 152778 - DNA, 148 bp, Zea mays
  Clone ID: MRT4577_70917C.1
gtaggagctatgggggctaacgcgctccttcagtaaccaaaagctaaacaagcacgcactgtctgtagtgagatgttgaacgcccgcctgcatctgatggtgatggtgttgccatccccggccctaccccgagaaacatcccataatg

SEQ ID NO: 152779 - DNA, 1632 bp, Zea mays
  Clone ID: MRT4577_70918C.1
cattgggtacctcgaggccggccgggtaactttgcctcgctcgaaacccaagtcggaagccctcaggcgtagcgcgtccatggcgtccaccgcgctggtggcagtggcagtggggggcgccatttctctcggtctcgtcgcctcctctggcgtcgcgtcctgctccctgcgcgccggcggcgactcccggcggtttggcccccgactcgtcctcctgcggagaggaggcgccgagggggaggggacgaggacacggaattgcccaatatttcgttgtgccaataaggtggacgttgtgaccgaggatgacagcgtcgatggtgacgttaccgacgatggagaagaccttgaggctgcagctgatgacgccattgatgctgatgttggtaccgaagatgaactggagtcttcgctgcctgaggatgttgagtggataaagcagcagccacttccttatcctttggatgctctggagccatacataagcaaggagacggtggagcagcactggggagttcaccagcagattcacgtggaccggctcaatggcatgatcggtggcagcgagtgggaaggcatgtcgctggggcagatgatgctcgcctccttcaatgagggcagggagcagccccatcctcccttcttccatgccgcacaggtatggaaccatgatttctattggcgatccatgaaacctggtggcgggggcaagccaccggaacggctcctgaagtttatcaatagagactttggctcccacgagggtatgatccggcaattcatggatgctgcactaactcagttcggttctggatgggtttggctttcctacaaaggaagcgggttgccttatgtgaaatcgagaagccccatcccatcggacaaccatggtaggctggtgatctcaaagactccaaatgccatcaaccctcttgtctggggccactctccactcctcgcgattgatgtttgggagcatgcatactatctggattacgaggatcgaagggctgactatgtttctgcgattctggagaagcttgtgtcgtgggaaacagtcgagtccaggctcgcgaaagccgttgcacgggcggtagaaagagatgagcatctccgcagaaggattctaaggaaacagcgtttagctcaggcaaacggacagagcagagctaggtctcgcgctcggcaagggaggcaaggagaccaggaagtcgccaggagccgtcccgtggaggcatgacaacgcagctggtaaatggggtgcatcaggacaccgttatgtagctgaatggcgatcaaccttttccctggtgacagtcttgagagcttgcatggtcatattggtctgttttaggccgcatccaccctcagcactgcgaggagggtgggataagttttgctaagtaggattaggggtagaggtagagatgtaaaatagacagaatttcgtcagacttggactcttggagaattcgttttgctcgttattctttgtgggatgtgagtgacaatgtaagaggacatgattgtgtgttctgatttctacaatccagtgctcggttttggtgaaatatatggatttaagttctcaaaaaaaaaaaaaaaaaaaaaaaaaaaaaaaaaaaatggacg

SEQ ID NO: 152780 - DNA, 1628 bp, Zea mays
  Clone ID: MRT4577_70919C.1
atcttaactttgcctcgctcgaaacccaagtcggaagccctcaggcgtagcgcgtccatggcgtccaccgcgctggtggcagtggggggcgccatttctctcggtctcgtcgcctcctctggcgtcgcgtcctgctccctgcgcgccggcggcgactcccggcggtttggcccccgactcgtcctcctgcggagaggaggcgccgagggggaggggacgaggacacggaattgcccaatatttcgttgtgccaataaggtggacgttgtgaccgaggatgacagcgtcgatggtgacgttaccgacgatggagaagaccttgaggctgcagctgatgacgccattgatgctgatgttggtaccgaagatgaactggagtcttcgctgcctgaggacgttgagtggataaagcagcagccacttccttatcctttggatgctctggagccatacataagcaaggagacggtggagcagcactggggagttcaccagcagattcacgtggaccggctcaatggcatgatcggtggcagcgagtgggaaggcatgtcgctggggcagatgatgctcgcctccttcaatgagggcagggagcagccccatcctcccttcttccatgccgcacaggtatggaaccatgatttctattggcgatccatgaaacctggtggcgggggcaagccaccggaacggctcctgaagtttatcaatagagactttggctcctacgagggtatgatccggcaattcatggatgctgcactaactcagttcggttctggatgggtttggctttcctacaaaggaagcggtttgccttatgtgaaatcgagaagccccatcccgtcggacaaccatggtaggctggtgatctcaaagactccaaatgccatcaaccctcttgtctggggccactctccactcctcgcgattgatgtttgggaggtatattttttacattgtacttttcctttcctttgcttttcataaagtttacatctttactaacatttatcttcacttccggggacagcatgcatactatctggattacgaggatcgaagggctgactatgtttctgcgattctggagaagcttgtgtcgtgggaaacagtcgagtccaggctcgcgaaagccgttgcacgggcggtagaaagagatgagcatctccgcagaaggattctaaggaaacagcgtttagctcaggcaaacggacagagcagagctaggtctcgcgctcggcaagggaggcaaggagaccaggaagtcgccaggagccgtcccgtggaggcatgacaacgcagctggtaaatggggtgcatcaggacaccgttatgtagctgaatggcgatcaaccttttccctggtgacagtcttgagagcttgcatggtcatattggtctgttttaggccgcatccaccctcagcactgcgaggagggtgggataagttttgctaagtaggattaggggtagaggtagagatgtaaaatagacagaatttcgtcagacttggactcttggagaattcgttttgctcgttattctttgtgggatgtgagtgacaatgtaagaggacatgattgtgtgttctgatttctacaatccagtgctcggttttggtg

SEQ ID NO: 152781 - DNA, 315 bp, Zea mays
  Clone ID: MRT4577_7091C.1
tttgttttttttggttttataatggggacggcacccgcgcacaaacctatgaatgaggatgcccaacggaaacattataatagcctccaataggatttttcaattgttaaccaccggcgaccccctacagccagaacccaatagaccatacatgggataggatgcaacaaacgctccttacctaaggaatacacactctttaccaagggaaactaccacgccaaagtaaaatcaaaactccctgcaaccgaacttgtgtgaacacagccattgtgcgagatgcctctatgccaagggctgaacaggcaacaggct

SEQ ID NO: 152782 - DNA, 577 bp, Zea mays
  Clone ID: MRT4577_70920C.1
gtgcttcctataggaagccaaagttactaacacgatcgcatatgtggctttgctgcatagatcgccagacgaaaacgacctaaagatgacaccaacgaaacaatctaagacaacggaggaacaatgaagaacagaagaccgaaaaaccaacacttaaaaggactaaaagaaagaagagagagaacagatatgggcgcccggtctatggacctgaggtttgctgctgctggaatgggaggtgctgccatgtatgaactggcccgaaaatgacatgatagccccatcggtgaaaaaatccgtcttggggaaaacccgggtgcaacccaagtttatgaggaaacagctggactgattgttaatgaccgtgttatgagaacaaggaaaccctctatcagcggcattgcaaacctggaattcttggaaatggtaaagggagcctccccggcctggaaaaacattgccagggagtgaggagatgcccctattgctcgcggtgttttaggtcctgcccttgacacagatgcattatgggaatttcagtcaattaaacgacgtgttggagatgttaccacaggag

SEQ ID NO: 152783 - DNA, 482 bp, Zea mays
  Clone ID: MRT4577_70921C.1
cattgggtacctcgaggccggccgggaatatctttgtcctccagtgcagtgtagagacgcagcgatgagggaaactgctagggcgaatcgtgcccgtccgcgctcgagtgtgctgcgaacgtcgactcacgctccggcgtcgcagcctagtagctccgccacgcgaggaccgcgcctgcgccatgccgccgaggactccattgtcgccgtaggcttgtataaaggtcgcgccgaaccccgagccccatggatgccccctcatctgtcatgcacctgcgaccgcccacgtgagctaccgtccctaccacgatcaccgtcctcttcttcctcccctacatctgccatatcgccaactgggacgtcgacttgggcatggtaccacttacaactgcccagacgggatgtgctgccagatcatgctgctacaagtgtgcgacgatgcacgaccgctgatctctctttacgtgcaacgacactcatgt

SEQ ID NO: 152784 - DNA, 279 bp, Zea mays
  Clone ID: MRT4577_70922C.1
tttattttttatatatttctggttttttggttttttttttttttaataaatgatacactttgagcaactttattattatatgtattattacaaggcacaatggcacatacattcagtgatacaactgcaatatacatgaacaccctttggataacttctggtttatctatgcaactgctggaattcattccaaaaacgccttcggagataaaaaccctgtattttggtagtacatatgcatgcattgtcacgaatgatgggcgccaaggtcatattatc

SEQ ID NO: 152785 - DNA, 524 bp, Zea mays
  Clone ID: MRT4577_70923C.1
ggggggggggggggggtttttttttttttttttgtttttttttttttttttttttttttttttttttttggaaggaacatttcaagaggcattcataaaaaagcgaccgaagcagatgataataaacccaacctacaaaaaaatccctaggggggaagaggggggggagcgaaaacagcctacaactttttttataacattaccgcacggggtaaacactgggaccccataaaaattttttttttaataatcacactaaccactcaccgaactgggaaaaacaagaccccaaggaaaactaaaggggggggggggagaaaaaaagctaaaggttaactaaacccgaggaaaaattcggggggggggaaaagagggggaaaaatttacaacgaatgcccaaagggggggggtttgggttcgaacacgggggggagggggagcccgccccggaggagggggggggggaaaccggggacaagccctttgggagggccctaatgggggggacctgcatctggggcccc

SEQ ID NO: 152786 - DNA, 198 bp, Zea mays
  Clone ID: MRT4577_70924C.1
acgcgtacggatgttttttttgtattattattagtaaattttagtttctccactattatcacgacgatgaggggcgggatgagatgttctgtagcagcaggccaggcggaggggggatgatgtgacactgttttccaaggtattgttggcttccctttttgctttgtcctctagtgtctcttgctctgcgccaaggga

SEQ ID NO: 152787 - DNA, 717 bp, Zea mays
  unsure (1)..(717): unsure at all n locations
  Clone ID: MRT4577_70925C.1
gccggccgttccgggatccaccgacgttctctttcttgacagggcagcagcaccagccgcgccctcttcctcctgcggcaggtggccgacccaggcccctgctcttctcatggccgcctctcctccatcccctatccatcttctcccatgcaagaagccatggcaccccttctccccttgttttccatggaaaacccaagaacctactcctccccatggctgtgtctcctgtaggttttcgtacaatcgcagcagcagcagatatggaatcacctctatgtcgtgcccacggcatgctcgatgaaatgtcgcagccagttacacctagatctatgcagccccatcccacgatgtcgtcgacccttggtgagatcccacaatgtttctcaacttgtttcctcacccgacggcgttccttgctaataatcagtgtatatgtgtggatattgtgaggagagatctgaggtcaattagtgaagaagcgaggcctgtgtgcattgctcgtcaagtgttcggtcgaagacttcaatcaaaggtcgtcgtggttcgtataatgatagagtcaaattgcaatatggtgagttgattcgctatttttgttcttagttcgatgatgagattagcagctatattgttgatgaacaagtcatgtttgaattgcagatttatngtgannatagtgtattggtttaaaaaaaaaaaaaaaaaaggccccta

SEQ ID NO: 152788 - DNA, 128 bp, Zea mays
  Clone ID: MRT4577_70926C.1
cggaatcgtacgacgatgcatcttgtgaacatgcggcacacattattcttcgtctcgatgtatcagtgccgcatgttcacaagatgcatcactaataaatcgagacgaagaataatgtgttttcaaaa

SEQ ID NO: 152789 - DNA, 284 bp, Zea mays
  Clone ID: MRT4577_70927C.1
aaaaagacaagacaatctgagaatctactgaaccataaggaactcaaaccggtacctcttggctgcatgacacattggagcatatgttccactcttgatgcaccacgattcaaccaggattaacagacgggcccgctttgccgttcacccctggcgaaataacactaccgttcatttcacccacgccacacttgtccatctgcagttgttgtctcatgctaagccagttggaatattgaacctaccccatgctccctatgaggttttggagcctttattaagat

SEQ ID NO: 152790 - DNA, 676 bp, Zea mays
  Clone ID: MRT4577_70928C.1
gcgaatgggacgaaaggaacacaccaaggaaccacttagttctccaaaagcactggtgaagagacgacccgtttcttctcggcatctttcttctcctccaaagttgatggagaatttacacctacatctgtcttaagctcggaattcggctcgatgcaaaaacaagctccgaagcttgttgttgggatattgcttctcggtgcaggggcattcttcttaaatagggctgagaagagtcaactatttcagcagcaaggcattgccacaagtattggaaaggtaacctccacaacaaagcccatagttcttgagatacggcaaattccacagagagtaaagaagctaatagagctcttacctcatcaagaggtaaatgaggaagaagcttcacttttcgacatactatacttgcttctggccagtgttatttttgtaccattatttcagaaaatccctggaggcagtcctgttcttggatatcttgctgctggtgtcctcattggtccatatgggctgtccatcatccgtaatgtgcatgagacaaaagcaattgcggactttggagttgtcgtcttactatttaacattggacttgagctttctgtggaaagactaagctcgatgaagaagtatgtctttggcttgggatctgctcaggtgctggctactactgctg

SEQ ID NO: 152791 - DNA, 181 bp, Zea mays
  Clone ID: MRT4577_70929C.1
agacggttcaggttatccaaggcaagctatcaattatggcactcaatttagggataacacataaaacaacatgggacctaaacgccaaaaaatggcttaaaccgataaaaggacgtattggtgcattttcctcatagactgcgttcccctctctagacattagaaaaaacgatctttaata

SEQ ID NO: 152792 - DNA, 260 bp, Zea mays
  Clone ID: MRT4577_7092C.1
tctaaagcaagccatgtggaggagggctttagcgatggtcctgttcatggctggcgccgcgcttctcgccggggcttgccgcgcccgcgcgcaacaaggcgtgtggagcattattaccccgcccatgttccaaagcatgcttagccaccgcggcgaccgcgggtgccaaggcgccttctacacctaccacccctttattgagggccgcaccaaggttcccggctttgggaccacccgcgaccagcaaacccccaagccgg

SEQ ID NO: 152793 - DNA, 444 bp, Zea mays
  Clone ID: MRT4577_70930C.1
gtcacgtatatcattattactctgggtacgccacactaccacacatcagctaagctaacaggactggcccgagagtagaacagcactgttacaaacgaatgccggtatggtgatccgagtggattagcacctgttgtttaacgcggcgactctgggagagcgttgggccaacccgatcgccgcacatatcctgctgcaaatcctcgtaacgctgggagagttcctctcctacatccggagcaacctagatacgggggcggacgactgattgaagatgcattagaccaaagcaccactgtgcgcgatgggatttcaacaatatagtagcgtgggaaagtgcgcgacccataaagaagcatgcacctttggaaaatggagggcaagacttgtaatggctggttttaagtctcccactttcttggcggggtccaagcttacccctat

SEQ ID NO: 152794 - DNA, 455 bp, Zea mays
  unsure (1)..(455): unsure at all n locations
  Clone ID: MRT4577_70931C.1
cacgcccgtccnnggggcgaagnngtgccatgngnnttctannttattgtccgttcgtcttgggcttcaaagcgaaaccagcagggtggaggtgatcccagccccgctcgcgccccgtagaatttatacctggcgnnngctgcagcgcagggtcgaggcatttttcgagagcccgatatgtnnttgtttcatttttacccgtccttcccgcccttggtgattattcnnnggtgtgtgtgacatgacgagtgtctgtgtgcatattctagcgtaactcgcttttagaaggtattttccccgcgcgnnnngagccccccccacnnccaaaaaaagaagtgtattcatcgctatctctgttccatanagtagacattgatgtaactcgtacttaagtgtttattattacttttttttaccttatttcacttcaatcaaatggaaaattatgccttccc

SEQ ID NO: 152795 - DNA, 174 bp, Zea mays
  unsure (1)..(174): unsure at all n locations
  Clone ID: MRT4577_70932C.1
ggggtggagtatcaacttccaaacctcatcgtaggagctgttacaaaagaaagttctatggtgcttttgaaaatggaatatctgctcagcagttattccattttcaaaagcaccatagatacttttgtttgtgncagcaccgacgatgaggtttggaagttgctactccaccct

SEQ ID NO: 152796 - DNA, 198 bp, Zea mays
  Clone ID: MRT4577_70933C.1
ctttacacctggtgccagggaggccttttaaattttgcagccgggagacactgccctccagacaacggcaccagaatatgctgaatcggacgacatgaaggccgtatcccttgcaacagagtccaacgtagccagtgcttctatacccggggcgcctcaaactacacgtggccggatctaggacgacaatacattttc

SEQ ID NO: 152797 - DNA, 171 bp, Zea mays
  Clone ID: MRT4577_70934C.1
tcgggatgtgcaaacactagcttagatgctgctctttctagcatgagaacctgagctgtgaggtgtgtggtacaggattttcctccgtcgcttcttctatctccattcttacttggcttgctgagttgcccggcgagcctgacgaatcgatctgagcagcaccttgctgtt

SEQ ID NO: 152798 - DNA, 351 bp, Zea mays
  unsure (1)..(351): unsure at all n locations
  Clone ID: MRT4577_70935C.1
cggcgagaacggtgagtttatctacaagtttgattctatttagaaagtcttcacggcgaccgacctgccggggcgtggggtccggttcagcaacanaaagggccaagcccccgaacccggacagaacataacgctcgtgagctttcagagggagggggacgctgtggcacgagcgcgggagctacaaagggctagcctggctggggcgcctgttaggatcgagatttccaagggggtcagtgtaaaacatcctccgataataaaatgaatattaaaacggactccaagcaataaacggagcggtgtgcttctcttgaaaaaaatactcaagttaatgagaggggggggggg

SEQ ID NO: 152799 - DNA, 395 bp, Zea mays
  Clone ID: MRT4577_70936C.1
aagctactgacccagcgcgacgacgctcagttgcggtgcaccatgcatgttgtgtggtgcatcccgctaccgcgctcgaccgcaccgtgattaaacttgactactttcgtgaggaccggatcaacatgcgcacgaacgtacccaagccctaggcagctcaagacgggtgtccgtgtaccgtcccgatacatgtataagtacactacccctttatcgcgcgagccgtcgagctaatccacataggaattttccggatactactgttgtgacactactgcgctgtccagcgcacgcaaaacatccaggacgctccgtgagttgcaggtgatgcactcatgatcgggcatgattggggccctctgctgcgtgttcacagatctgctctgacagaaaac

SEQ ID NO: 152800 - DNA, 298 bp, Zea mays
  Clone ID: MRT4577_70937C.1
aaaaggactgacctcggccctctcctcttgttcttctgcttccccaccgagtctcctcaggcccgtctctctctctctgtcccctcccttcctcgcctccgatgccgccgactcctccgctcctcgagccgcgcgactacctcggcgccggcgccacctagtcgtgctgctcgtcgtgctgctcctactgccgctagggcacattgccccacctcgcgctgcggatcgtgcttccggtgtccgacgactcccccggtcgcggcgcggacactgaacacgcccgcgcccacgtctactc

SEQ ID NO: 152801 - DNA, 311 bp, Zea mays
  Clone ID: MRT4577_70938C.1
ccatactctagaaatgatatcaagggcaggaagaagttggacacgtcacaacgggtataaagaggtgcgacaatattacaaaagtttagggatgaacgcacgcgggtgattttgtgaccaaagtagcctatgtaccacaacctagctaaggagatccattgattacgtcctccagcgggaggatgtcaaccatggcctcagtggccatgccgaagtcatcctcaaagtcctccagggcgccagcggtcacgtcctccgacaggtatccagtaccgagcttgaagctcaaccagaatcgtgtgaaggccaga

SEQ ID NO: 152802 - DNA, 357 bp, Zea mays
  unsure (1)..(357): unsure at all n locations
  Clone ID: MRT4577_70939C.1
attcttttactggcgtgcagtgttataanttagaaaaaacgcttcatatttgattgcaacacataaaaaaaaaaaaaaaaaaaaaaaaaaaaaaaaaaaaggaaaaaaaaaaaaaaaaaaaaaaaaaaaaaaaaaaaaaaaaaattaaaccaggcccgaaaggacaataaaaaggggatatttctccggctggccgtgccaaagggggacttttgaagatccccataaaacgggggggccttcctatttgggtttcgggggccctttttggcctggggggggccgtttacagcccggggtgtcccctttttttaccgtggtgaatggtaaaccctcgggtttcctcttttttaagcg

SEQ ID NO: 152803 - DNA, 277 bp, Zea mays
  Clone ID: MRT4577_7093C.1
tagacataggggtggaaagcccccagcccattccaggacaacatcttctactctctgcggtagaggaaaaaattcctcctggcatcaatgcttcactgtcaccactaacgaatgatccaaatgatgtgaacatatgggccagctgccttgactaatgaagggatctgaagatgacagacaagaagcctgaggctatggaagctgagctaaacacaatagaacgggaaattgaaatgggatgaacaggcagcatcccgagctgtcagtgagatataag

SEQ ID NO: 152804 - DNA, 319 bp, Zea mays
  Clone ID: MRT4577_70940C.1
gccccgaaaaaaacaaagggccggggattgtcaaaagacaagtttctcttcaaaaatgttatggggcccacaaaagctatgataagccggtcaaaagagccccaacaagtaaaaagtgctggctgtggccaaaacgggtccctccgaaggacaccgagggcaccaaaaccgagggcggggaaagaagctgttgctttggaggggaacagaagctatggccgaaaaaaggcagtctaccaaaaaccggggcctataataaggacccccccctttagtgaggccaccaaaatgaacctttgtggagaaaaggtaccggggg

SEQ ID NO: 152805 - DNA, 173 bp, Zea mays
  Clone ID: MRT4577_70941C.1
ggttggtatttattattctcattggaactcaaaagaaaaaaaacagaaaactctccgatacacactgcaccaacaacgttccttacacaataacgcctatacgccggctcaccaaattcaaccgaaatacccctacttttaaccatggaaccggactatgacaatatcaggca

SEQ ID NO: 152806 - DNA, 261 bp, Zea mays
  unsure (1)..(261): unsure at all n locations
  Clone ID: MRT4577_70942C.1
tcccggggttggttgccaccgttgctgcctgcctttctctccacctccttttcctttgatattgaggaanattgagagaaggagtatcaaaagatggtggtccaaggaaacaagcnnnncgaaagaagcaagtgaagcgtttggccgggcgtttgggtggagcgattttctgggtgatcaaaactggaatgtggattctgcagttggagatagcctttttttttagtttatgacttgtttctgtgccttttgttttcgcct

SEQ ID NO: 152807 - DNA, 484 bp, Zea mays
  Clone ID: MRT4577_70943C.1
ggggcaacacaaccggggttattttccttaaaatccgccccaaataacaggaaaaaagccccccccaattccaaacaggggcaaaaaaaaggggggggggggcccaaaaaaaaaaacttcctatcggcccccgggggcggggggggggggggaacaggaaaaaacagccatcacggcaaacccccggggcacaaaggacccaccggccccgccctggaacccaccccccggaaactgggaaaacaaaacggggcttccaggagggaacgacgggggattcctggggccgcccccccccaaggggccgggggcaaggggtaccaaggaaccaaaaaaagggttccccttaggggccgggggaaaaagaaaaccaccaagaggtggtttttaagcttcagcaaccttaaacaaaaggggaccattcggggggttaaaaaccctcacatcaacacgggaaaaaaaccaattagggcattttctttaa

SEQ ID NO: 152808 - DNA, 376 bp, Zea mays
  Clone ID: MRT4577_70944C.1
gggaggaccgccgccggcacgaccgggccggaattaattccttggccgagcgttcgtactagccggcggccgccctttgttgggggggggtatttagcgttttttgggggtccaacaaacgctgggaccattcgcttgtcgctaagcacccatggcgaggaaacagccctcttcgacgaacgaccctcacagcccccatgaacaggcggtcacgcaaaccaacttatgtcgccgcatgcggggatgatgccacagaggaatccaaccccccccctgaacccaatcaccacaagctgccaagcaacggaataaacaccaacctgaacagcccctcccctgctggacaactttccccccaccccggaaggctgcagga

SEQ ID NO: 152809 - DNA, 468 bp, Zea mays
  Clone ID: MRT4577_70945C.1
gggggggaacaacctctttgggggggagataccgcccaatttggaaacttgcagcgaactggaacttgtgaggggtccccccccatatattttttatttggggccacacctcccccttttcagagacccttgtttttggggggttttatcgaaagctcgggttttagatgcggcctcccctccccaaaaaaaagggtgtgttctgccaaaaacttttgccatgggattgcaaaaagatttctgtgccccacccccttttcaccggggaaagggtagatacccttgtgcttgctcacaaaatcgccggatggggtcttccttgtaacgaactcgtagaccactgtcacactctgggagcccttttcttgtatccccaggaaaagccccaagcactaaaacgcgctttgttgttccatgttacagggagctgaaaggaaaaaaccctcccctctaagggggaaggcttgc

SEQ ID NO: 152810 - DNA, 1471 bp, Zea mays
  Clone ID: MRT4577_70946C.1
gggaaaacatggaccggattcctttccaaaaaaaaaaaaagaaagacagggggtggaactgtgaaacctactcaagaggtgatctgtaatgttgctacaatttgataaagataaacagcttcacccatcgcagcatcttacatacagattattgagtctacatattttacaaatacagattactacaactttaaaaagcctaacttactacagtctacagtacctcgagccttgccgtaggatacgaggcacacgtgttcggactacaagtcgtactccggtcccatggccaccaacttcacagctttaagatggtcctaaagtgagaggtgacgcgcagaatgcgctatcagtgctgttcattgcagagccgctgtttgtgtctcccgtgagtgacgggaacaagggaattgacttgagtatcaacttcctgccaccttttcggttcggggagctgccgagcgcgttatgtggcggcgagacccgttttccgttcggtgaagtagtagtcttgacacagttactgagagagtcaggttcgtgcaggatatctggcgtctcctcatcgataccactagcactagcactagcagcaagcttggatgatctacaaggctgtactgctgcagtggctttcgaagcagacgagcgggaggtcacgctgcgagccttggtcggtctcggcggttttgcgcttgagaaatttggcagtttgagcagagaactgcaaaaatcaaaaggcggtgttattgggacaaggtccaggagcgggtgatcctcgccctgtacatttgctttttgttgatcgttctccttttcttgttgaggattttctgtctggtcactttcttcttgtttcatttcttcagggagttcagtctcggcatctcttctgccaaaagcatttttgcaactctcacatctgcagttgctcgagcatccaacacctccctggtagcattcacagtatttcttgagacagcttgacttcttacaattgcatcctctcttgtgacgagccgaagccggagtgttgttaggatcttcccctgtttccagaccggcatcagacatgcggatcactttcggagcaaacgctagcgggttacgaaactctatctgcttccgagtggagaggacggtttcctcgtgtatgggcttgttcatacatccttggcacgaacaaggttctgagcagtacacaccagcagcgaaacactcgcagtaaagtttcaggcacttcgacttcttacagctgcatcgcttgcatgcctcaccatcatcgccattatccgttttccgtctcttcttttgagggctgacgctctgacctgagacatgatggtcatttacaggaaaccctcctccagccgaacaaccatccaagggaaactccaacagctcaccgcccgagtgtgcgaaattctctcctgcacaaagcagctcgccacgcgcatccttttcagacgct

SEQ ID NO: 152811 - DNA, 701 bp, Zea mays
  Clone ID: MRT4577_70947C.1
ttccgagaactcggcttcgcagaaacaccaccagctccggtagaccagccattgcatcttccccacaactccgtccatcatgagcgccctccgtatcgccagagccgccctccgcgcaaggcccgctgccatcgcccgccccatccagcgaagaggctacgccgaggtcgccaacgacaagatcaagctctctctagctctcccgcatcagtccatctacaagtcccaggatgttgtccaggtcaacctccccgcagagactggtgagatgggtgttttggccaaccacgttgcctctatcgagcagctgaagcctggtctggttgagattattgaggagcagggtggcaacaagcagttcttcctctctggcggtttcgccgttgtccagcccaactctgttctcagcatcaacgccgtcgagggctacgctctcgaggacttcagcgccgaggccgtcaggaaccagatcgcagaggcacagaagattgctagcggaaacggcagcgaggctgacattgccgaggccaagattgagctcgaggttctcgagagcctgcaggctgcgctcaagtaaatgtgtaaacagcggccctagagcacggcatgggtggtatgtatagtaactggcgctgcgtgcttttcacgcgcaaaggatagaaggagcttcaacgaaacaaccacaacattccaatgttttg

SEQ ID NO: 152812 - DNA, 642 bp, Zea mays
  unsure (1)..(642): unsure at all n locations
  Clone ID: MRT4577_70948C.1
ttttttttttttgagaattttaatctataaaccttatcacctgtatgttaatattcctgcagtacttggaaacatgttgagcatttcacgcattcatgctttatttcgtttctgttcatgtttcacattatatattacataagtgactgtaaaattatccaatttctgttcgattattgcagacatgtaaaatatcaggcacactgttatacctagcactacctagctttacatgttcatgaagttgaagcatcttttcctagttttgttagttttttttttctgtcaccttgatcagtaccaatttgagcctgcctgcctgaaacatatgtgaaattgcgaactccaagtaatttctatcactttttacatggattttttttgaatggtaccatcaaataaataatcatattggcattgttttatggagcacattacatctctgatattgcaacgaccagtaatattatgctacattcatttttgactgcactatatacgatgcaggtgacagcaattctttcgtttgctgctgcatgctcagctgcangcgtagttgtgcttttcgaaagggatgcgtacttgtgcagaatggatccctaactcccttgtggaagattcgaggttgctgctgcatttgca

SEQ ID NO: 152813 - DNA, 618 bp, Zea mays
  Clone ID: MRT4577_70949C.1
aacccagaatcgcgagcgaaccaagcacaccccaccacaaaaaccaaagacatccccgcagcaggaggaagagcgagcattaagatgtctggccaggcatacgactatgaccacctgctgtgcgacatcgaaggccaacacctctgagccgacgccatcgtctatcacgacggcagcgactgctgacaatccgagaacttcccctagttaaaacctgaggaggctgctgggatgataaaggactttgatgaacctgcgaactcttgcaccgactggtctttttgttgtaggacgaaggacatggtgatccaagagcgaacctgaagttgtccttatatgaaagaatcgcgctgaaagcattactatcatgaaaactgtcatggccgtgattatcgaagatcgtattgatgtacccaactgactgccattcttcatagctgctatgttgatcggagaggctctaccactacatgatcgaagagtatttctaagatcgtgataatgctattattggcgttgagcacttaaaatcggacctcatttgaatgtggaatatatagggcttgtgcatgagcttgtctgattgcatgtggagcataacttatcatcacgctggga

SEQ ID NO: 152814 - DNA, 795 bp, Zea mays
  unsure (1)..(795): unsure at all n locations
  Clone ID: MRT4577_7094C.1
atatttgtccgtcgccagtagccacattatccatcgccagagcccagcgagagacacagagtactacactccacacgccggcctttccatttcgctctgctctcccgcctcgtcccgtcgctgagttcccgtcggctcgtccgggaagagcagttcgccgccgttgaagcgccctccccggtcgctcgccgccatgaagaaggttgtgctcaagctggatgtgcacgacgacaggcacaaggccaaggcgctaaaggccgtctccggcctccacggcatcgaccagctgggcgtggacatcaaggaccagaagatgaccatcgtgggcaccgtcgaccccgtcgccgtcgtcggcaagctgcgcaagctcttccccgccgtgcagatcctctccgtcggcccgggcaaggaggagaagaaggacgacaagaaggacggcggcggggacaagaaggagggcgacaagaaagacggggacaagaaggacggcggcgacaagaagcagcaggaggcgaagccggccatgtccgtgtacccgccctacggctacgcgcactacggctacccgccgccgccgcccccgcgctacgtcgtccacagcgccgaggaggaccccaactcgtgcgtcatctgctgatcatcggcgccgacgcccaccccccttgtatatttcgtcgccgtcctgcctgtcttcctctgctgccgggtggttggtgggcgctgcagggatcgacggcgtcgtttatcacttagatatacagtacgtatgaccgtntaattaccggttgcatcgca

SEQ ID NO: 152815 - DNA, 701 bp, Zea mays
  unsure (1)..(701): unsure at all n locations
  Clone ID: MRT4577_70950C.1
gactccatagggcgattgggactctcgaggccggccgggacacgacctctcctccgacaacagacaatcaccactctttgtatacctcctccgcaaaatgtccgccttcatccgtgtcgctcgcggcgtccgcgctgctcccatccgacctgccatgcagcctcttgtggcccgctcggccgttgcccacttcaccacttcgatgccccgacgaagcgagcatgctgaagagaccttcgaggagttctccgctaggttcgagaaggaattcgacggtgtccaggatgttttcgagcttcagcgcaacctcaacaacgccttcgcttacgatcttgtccctgctccctcggtaattgctgccgcccttaaggccgcccgtcgggttaacgacttcggtactgccgtccgcatcttcgaaggtatcaagaccaaggtcgagaacaagggccagtacgagcagtacctcgaggagcttaagcccctccgagaaggagctcggtgtgcctctngaaggaggagctttaccnncgaggagaagtaaatggtaccatagtctcaatatttcgagccttggnaaatcctggatgttggccggagacggaagggaatcagaccaagaggtnnngatgcgggagtttgattgcggcagccccaaatcgattgtgtttagtcgcgaaaaaaaaaaaaaaaaacccgcggcc

SEQ ID NO: 152816 - DNA, 319 bp, Zea mays
  Clone ID: MRT4577_70951C.1
aatacctgtcgctcttgagtgtgtgttcgaactaagagctcaagcaatgaccattgagtcacgagggcctgccagtgtgcgcgcgtgaacaagccatgtttactatgaagcacgggaactgcattcatcatccaaagctgtttctgaaaaaccttgtcaagattgcatgattaacaaacttagagagctgatattactacacaatgagcgttgagaggtaatgttgctatacaggagctctgaacgctcaaaacgtctgaccgtgtgacttgtccatggcacgctgtcaacacttaactcgagaaacaagttgaggagc

SEQ ID NO: 152817 - DNA, 1601 bp, Zea mays
  Clone ID: MRT4577_70952C.1
ccggccgggagaccggccaaagacgaaaatggcggcggcggttcctctcccctgaccagagccagggcgtgccactgccatgtcgccactgacaaaggcggcgtcggcggcggcggcggcggagtttctcatctcttccggattggatacagggcgtgccatgcctgcgtctcagatctcacgattggcatgcgccctgacttctcgctcttcgtatctccccctccctctcccggcccgtgctagcgtcggaggaattgtattgtcgtagatctgttgctccataaatgccttccctatctgtggccgagcgcaaccaagaaacgaggtatggccggagggagaggtagggctggtcggctggacctggtcggctggacgttgccggactggacttttccctgttggagagggggtagcgaggagggctgccgcaccgacgcgagcacgaggacgccgcggagggccgcgacccgaggccactggcgaggacggactgcagagcgctcgcagcggacgacccacgagcagagaagcgagctgcttacgaagctagatagaggatttggaacggcggcggccggcgaacaagcgggctgaaggagtgcggcttgtgggtgactcggcaaggctacgagcttcatcgaacaagaagacacgcgggtcaaggcaatcggcaggattgagaagacgtgtactgatcggccggagtggaagaacaactcacatttgtgcagcttacccaagggatcttcagtgccgtcatattttgggaatccaagcttctgcgctcctggagggggtgggccgtgtattcacggtgtcgttgagagcgcaattgtactgtccaaggggctctgggtgatgacgggatcctctcctggcgctgagtcgttcaccgtgagaacaggccgaccggcggcagcagaagagaagatcaggcggaaggattgtctagtccaataccaaatgataggcacagggttaacgagcagatttggtttggtaggtttcgagatgaagacgagggcaaggtctagcagtgccaactctaggtgtgctgctgcttacactgcgcggtggtggagctggtcatgccggcggccgtgcaagtgcccgccacgcccgtgtccaggaaggagacagggttttgacaggaaaggaagatgttcgtgcaataacaaaggaagctcgatctgtggtagaaccacacactaacaaaataaaaagggtaaagatccttggagtatgcgacgggtgggtggatataacttttacctgatgcgaggcaacaggtaaatgcttccgaggcaacaggcggatgctgaagcgtctttttttttcaatgatgcactttcacccgatcagaagcgtgtcatttctatgtgcttgtatcgtcttgatgagaaccattgggtttaataaagtctctttgtcgaaaaagaagcgtgccatttcacgttcggcctccactctcgtgtagggatgaatttgggtgtccggaaatttaaattattcgtattcatattcattaaaaatgcaaatatagatatctgtatgggtatttgattttaatattaaagttttcagatttgattctt

SEQ ID NO: 152818 - DNA, 901 bp, Zea mays
  unsure (1)..(901): unsure at all n locations
  Clone ID: MRT4577_70953C.1
cggnacgccgtgnnggcgaaaaaacttcgcatgcatctgtttcctgtgccatcccttatgataaccttcgcatctccttcgtgtggcatataggcaatcgacaggattgagaagacgtgtactgatcggccggagtggaagaacaactcacatttgtgcagccagcccaagggatcttcagtgccgtcatattttgggaatccaagcttctgcgctcctggagggggtgggccgtgcctgaagtcagcgccattggaggttttggaggaatcgctgaaggtctgtttcttgtctgctaacacctgggattgtagacggttcacagtgacagagatgcggccttgttctgcttgtggtgtattcacggtgtcgttgagagcgcaattgtactgtccaaggggctctgggtgatgacgggatcctctcctggcgctgagtcgttcatcgtgagaacaggccgaccggcggcagcagaagagaagatcaggcggaaggattgtctagtccaataccaaatgataggcacagggttatccgcggatttggtcgtgtaggtttcgagatgaaggaccgggcaaggtcgagcagtagatcaggcggaaggattgtctagtccaataccaaatgataggcacagggttacgagcagatttggtttggtaggtttcgagatgaagacgagggcaaggtctagcagtgccaactctaggtgtgctgctgcttacactgcgcggtggtggagctggtcatgccggcggccgtgcaagtgcccgccacgcccgtgtccaggaaggagacagggttttgacaggaaaggaagatgttcgtgcaataacaaaggaagctcgatctgtggtagaaccacacactaacaaaataacaagggtaactatgtatcatt

SEQ ID NO: 152819 - DNA, 459 bp, Zea mays
  Clone ID: MRT4577_70954C.1
gctgacaggcatcacatacatactctttatttgacttaacatgacacggaagattaaaactactgataactctatgaatgataggggcagcaggatggccaaggcgcctgtgccacctatcaaaggatggtttgctaacaacgaaggcttgttttattggtgctgatggtatgggatatagccctttgtgacatcgtcctttaagaagtgtgttcctcgtgtcttgatcctgctccattagctgtgtggatttgctcgccgccattatacttctctcggaaggacaatttatctaactctcctgtaatgtggtcggtggcgcctgtatccgtataccagtttgtgtccacggtataggagtttgtagcagctgcaacaacatgtctctggtcagcaacaaaattctcatcatacctgtgccaacatctgtctgcagtgtggccaagtttgaaacaaact

SEQ ID NO: 152820 - DNA, 391 bp, Zea mays
  Clone ID: MRT4577_70955C.1
gaacgtcttccgcttctctccatgcaccaacttttttaaccaaataaaattatacattcggcacacactggtaattgtttgggccttctctcactcatacccttcactcaaatacatcactcacgcactaaactgtttctttaaaccaatccacaatttcatcccctaaaacattttttccttatcattcagtaccatatttacactcttcacataaataatccatctattataatgaatttaaattttactcaatacaccactactttcctttaaccctactcaactctcatcttctaatatcttacatgtatcaccatcttaattataaatacaccttcattcatatttcatactcaacacctggattttgaactaaactattatcaat

SEQ ID NO: 152821 - DNA, 479 bp, Zea mays
  Clone ID: MRT4577_70956C.1
gccctgggtttttttttttttttttttttttttttttttttttttttttttttttttttttttttttttgggggaaaaaacttattttttttttccccccaccctttagcggggtttaaaaggggtatggggggggcccttgttttttttttcccccaaaaaagcctttttgcatggcccaaattttggggggaaggactaaccgcccccttttttagtggttctcccaaacccatggtcctaaaatcccggggaattttccggcccaaccttgtttttaatgtttccctttgaaagcccgtccccatgcataaaatctaaatccttgtttaaaacctgcttttaaaaaatgggaactgggcccaggccctgccctttttgggccagggaccccagggggggaagcagaaaacccaggagcccccccattttgagcgcttggagcgcccccatttggggttgcggggcccccctttggc

SEQ ID NO: 152822 - DNA, 347 bp, Zea mays
  Clone ID: MRT4577_70957C.1
tgagggcgcgcaaaaagaaccacagatgtcgatcccctccggattcgacagagggactggttcccctctgacttcaccttccttgccaccactcaagaggaccatatagaaggtactcggaatgacaagggcaagggggaaagcacaggcgatcacttctgccataagctgacgaaaaagatactggacggcagcatgtaagacgtcgtagcgagacggaccatatgttcaaacccgacggcagatggctcaaggaaatgaacatgaacgcatatagtttttttatctcttggcccacaagcttccctaacggaaccacggaaggaggatttaacccgaatggtatc

SEQ ID NO: 152823 - DNA, 618 bp, Zea mays
  Clone ID: MRT4577_70958C.1
gtcagcagtctcggacgctcagctcccgctcccactcccggacgacgacgatggccttggcgctgcaatggcccctccaactcccactccagctccaggcgcggcctcccgccgttaccgcgggtcatcaccggcgccgccaccgagtcctcgccgtctggcgctccccgccgctccgagctcgctgttgtgccagcgccgccgctgcggccgacacggggaaggcgcagacagcggcgaggagggcttacccattcgatgagatcgagccgaggtggcagcagcactgggaggagcaccgcacgttccgcaccctggacatcggcgaggttttcgacacctccaagcccaagtgctacatcctcgacatgttcccctaccccagtggggctgggttgcatgttgggcacccccttggatacacggcaactgacattctgtcaagattcaagcgcatgaaaggcttcaacgttttgcatccaatgggatgggatgcatttggtcttcctgctgagcagtatgctattcagacgggaacccaccctaagaataccactgaaagaaacattgagcgctttcgcacacagcttaaatcgctggggttttcatatgattggg

SEQ ID NO: 152824 - DNA, 755 bp, Zea mays
  unsure (1)..(755): unsure at all n locations
  Clone ID: MRT4577_70959C.1
tcgaggcnncggccgggattggccaaattattgcatggctgttgactacacaaccttcaccctttggagcttgatcctccctcgatatacaatcggagaccaaaatggtcacaattctgggggttcccgtggccgccatgccgcccgaattactgcgcctctcggagatgatcctgcgccctcaaaagcactggagatctgctaatctggatgaactcttagtcttgtccagctcttgatcacatgcactatcgtgctttgctgctcctgatgcgaatattttgctggacaatcacacctgcagacgcgcttatgagcgaggagtcctaatgcatgatgccctaaaagacgaaaatgatgctgagaccaagttacttgcccgtgacatcaacggtgttctaaatgacgcactcaaagtccaaaatctctgaccgacacttgaaggtatatgtgcaaatggactcaacgcttgtacatcatcgttgcaccatgaggcccacattgatggagagagagactgatatcggatattgcctctagactcctttgcacatgaagaagaagtgactaatccaatactctgaaactagctactggtgctgcaccctgacaagaacacatcactaggcgctgatgaggccttcaaactgatctcttaggcgtgcagtgcgctgtcagatactacgatgaaggtgtactcatgactagaagacaacagatcattgtgctgtccatgtaaccaatggtatctatac

SEQ ID NO: 152825 - DNA, 353 bp, Zea mays
  Clone ID: MRT4577_7095C.1
agccacgccccaggcatacagaaagggaggtaccttttatacaaacccgaacccagaacaagacaaggccaatgcgtcagagcttggaaactgtgcagagtatagtggtgctcctaatgaggaggaggtgctgaagtaaaccagagagcctctcgcaagcgaagctgctgactcttatagacgaaagagagcccttctcaatggaggcggcataactaacttcactgatgttgcgaccacatccaatggcatcatacgagccttggcggataaggaatccaagttgaaggctttaagaaggcacatttatgtccgccgaggtggtccaaagtaccaaacgggactggggaaaa

SEQ ID NO: 152826 - DNA, 252 bp, Zea mays
  Clone ID: MRT4577_70960C.1
cgggccgacccacaagtccgacgggagtgtacgtgccaccatcagcggtatcattagtggccgccgctgcgaccatctcatcatcctcgcacttgctcctcctctcccgccatcaggcggcctccctacaatgcggcctctcctgcctcggccatcccaaagggcccggtacggttacggctcatgctcctgccgctaaggacgtgccgttcatggcggtcgtggacactactgcagcgtccactgcggctg

SEQ ID NO: 152827 - DNA, 240 bp, Zea mays
  unsure (1)..(240): unsure at all n locations
  Clone ID: MRT4577_70961C.1
ccggaannncgggcgacccacgcgngcgcaacaaagaaagcacaacaggcaccaacaatggcagccaaaanacancgccgacaaaagcacggagggcggaccgcaagagcggcgacggcgaccaaaaacccgcaacgcgcgcaagccccaagagcgacccgacaacccccggaccgcgcaccagcggagggcacggcaagagaaaacccaacacaacaacccgacaggaaccaacaggca

SEQ ID NO: 152828 - DNA, 257 bp, Zea mays
  Clone ID: MRT4577_70962C.1
cggacgcgtgggcggacgcgtgggcggacgcgtgggcggacgcgtgggcggacgcgtgggcggactcgtgggcggacgcatgggcggacgcgtgggttttgaatcaaagttagatggtccacatgcccggataagaacgggggagccagtgcgactggaggatgtcaaggattggcctactgatgtaatggcagattcttttaccatagcagacgaagttaccaagaaaaatttgtttaaaagaatttaaaacaccc

SEQ ID NO: 152829 - DNA, 459 bp, Zea mays
  Clone ID: MRT4577_70963C.1
gctctagaacgagtggatccctcgggctgcacgaattcggcacgagtttatattatctagctcgttgtctattccttctgctagggttatatccacataccgtgcgccaattccatataggccctgtatttacagattatcagggattatgtcatctgctatcatcctatgataccttaaaggagtgctttctaactatatccatctagagctgcgtcaaatgctcttcaaacacattcccataagcctcctacctcttcatctgcttctattttcagattataaccatcacagcctttttcatgaaattcaattcaagggatgtcaagagattttcaataaattagctttcttactgtctctgcacgcctaaagacagttcctgcttatattaatactctgatccgttcagatagaatatgcatttttagtgccatagtaaactaatctctatcaata

SEQ ID NO: 152830 - DNA, 315 bp, Zea mays
  Clone ID: MRT4577_70964C.1
ttgaccttaccagcatcttcagttccatccgcacgctgccgtccaccaagcgacgcatggcggagatgaacgcctcgcagttcctggactagcataacctatgagctgactgcctccgattccccctccggcgggggcgcggggggcggcgggggcgatggatctcaacgatatgatgataccgatccctctggacgaccgcgagaaccggctgggtcgccggcgtagcagtcgcagcgttaagggaaccgcagacgacatgctacccagttagtgagtgccaggccatgtcgcactattggaggcgcggagggc

SEQ ID NO: 152831 - DNA, 334 bp, Zea mays
  Clone ID: MRT4577_70965C.1
ctagtcggcggccgcgtggagttcacgtgcacccggtgcagcgcgctcttgtaccgcccgttgctgtagatctctaggtggtcgccgacgttgacgacgaacgatcccgggatggggtcgatggtgagccagcggccgtcgtgcatgacctggaggccctcgacgtggtcctgcaggacgaacgtgaagaggccgtagtccgagtgcgagggcatccccagcgtgagctcaggctgcgggcacgccgggtagcagttcaccgtcattatgtgcgacgacgacgctgtcagctgcccgagcacgccagcggccgtggggatgcccagggccttca

SEQ ID NO: 152832 - DNA, 183 bp, Zea mays
  Clone ID: MRT4577_70966C.1
accctcgggccggtcatcccccgtcgtctctcctctccttcccactctccacccgtcctcattgctcccttcctctctcttgcggagtcgctgcgatctaagccaccgagcacgagcgtcctactcgccgggggacctttgctcaatggcccgcgggggtcgaatcccgggtcaaccaagggg

SEQ ID NO: 152833 - DNA, 269 bp, Zea mays
  Clone ID: MRT4577_70967C.1
taacatcctccttttaaaaactccagcacatcatctaatactataccatcataacacaaaattactctcatatctccaactgtaacccatgctaccttatcataagattatttcatttatactataacttcacacaatttacctcaattgattgattaaactcacactatacacatgcatataacatatcctaaactcttacatcctatacatcatcattttatacactcaactaaatcaaatacattaaattctatttatcacaacta

SEQ ID NO: 152834 - DNA, 203 bp, Zea mays
  Clone ID: MRT4577_70968C.1
cgcttggacagtacttactgttgcaaaggagaggctatgtaaccgttcatcactgcctgcaggaccatctccaagaaagactcctgtaatgctaatgactcatgatgagacgcttccggatgagaaacagatgccccgcccagcggacgattgcacatgcctaggtagctggcaacagtcgctggcacatgtcgacaaattac

SEQ ID NO: 152835 - DNA, 382 bp, Zea mays
  Clone ID: MRT4577_70969C.1
gcgatccttcttatatggagccccggtgcctacctgtcacgaaattatgaagagcctggacgttgtggcggcacttgtgcccggaagttgaaggagaatgaacccttgttggacaagattgatgatcaagagctgagacgatggcaccactgaccttgtgatggcgcgtgctgcacaggctggaggcggtgtgtcagggatacttgctaccaggggagcaacgtaaacataggaagacctgttcctcaagcttggaagttgctaacatatatcatccagattatgggccaatgctagccacgcctgaactgttgtaagcgataccggctgaagcaatgagcttgttttaatattgacagagtatagtagctagcttcatatg

SEQ ID NO: 152836 - DNA, 476 bp, Zea mays
  unsure (1)..(476): unsure at all n locations
  Clone ID: MRT4577_7096C.1
agccaggncnncaccaacagcnggacgggggagaacgccncgccgggcgccgcgccgcgccncanccgcgccgccgngacggacaggcacaccgngagcccccaagggcgccacccagggcgagggcagcgcccaccccgaggagggcgagggcggcgncggcagcgncaggcagnncaacnncaccncagccangccgnncggcnncgngaaggagaggcncgagnnccnggacgnggacaagngcgagngcaagnccacgcncgncgagggcggcggcancggcggggccaacgagaccgcggcgncgcacgncaaggcggagnccgcggcgggcggcggcagcgnggngaaggnggacccgacgnacaagcngnngcccggcgaggaggggcaggacgagaacacnaaagccaaggagncggncaccaacaacnncaaggccgcngaggcccaccncgncgccaacccggaag

SEQ ID NO: 152837 - DNA, 186 bp, Zea mays
  Clone ID: MRT4577_70970C.1
tgaatttcacaaataagtatgctctgttccaaagtaaagttcaataaatgcaccatcaaggcatatttcatgagaatttaatgaagactgattttatgttgtagatgttggtgcattttttttctagaaaacttggtcaaagttaaagaagcctgatttagaacaaataaagtgagatgtatttgg

SEQ ID NO: 152838 - DNA, 555 bp, Zea mays
  Clone ID: MRT4577_70971C.1
caaagcctgtctccgagtagcaacgacaacgaagcaggtgttcgccgactataagctagcagtgtgcaggcgaagaagccactcgctggtcctggtaacctctggttccaatccaacaaccagacgagctagcaagcagcgccgcgcaccacctcgatcgaggtccaatccaatgggctgacgcagcggcgacagggcgccaacgtcgtcgtcgtcgtcgtcgctggcgctgcgggccgcgtgggcgtgccttgccctgtgcctgctcctgctgctgtctcgctgcccgccatgccagggccgcgagctgctgcaggcggaggccgaaggggaaggcggcaaggtgatgctgatgcacttcgagggcggcctagtgttcagagtgccaccggcgccagcaagcgtcgacgtcggcgaggaggaggagccggcgccggcggcggcagtgccggtcccggtgcccagcagcaggagggggttcgcgcccgtcgccgccggcagggccgcgcggtcgatgcggtcggtgcccagtcctgggcgtcgccactagctagc

SEQ ID NO: 152839 - DNA, 737 bp, Zea mays
  Clone ID: MRT4577_70972C.1
tgggtaccggcgctcttcctcgagttttttttttttttttttttttttttttttttttttttttttttttttttttttttttttttttttttttggaggaaaaaaagtaacaacagtcccaaaccgagaagatgtccaagggccccaatgccctcctttgatagccgtctaaggtttgaatcaatacgattcaagttagtatgctcataagataaattatccactcacatttgcattatgttttaacgggcaccaacccaacgcccaaccatgctccgggcaccctggacccatccactccatgcatgccgggcccgcccaccagtcgcagtagccgtcgaacatgctgggcacgtgcccgccagccgcactccaaatcccaccaacacattatttccaggggcaaactcaaggggtagctatcaaacatgaaatcatccctaactggcgtcacatgaagatagtaatcagtatccagctcccaagatgggatgacagaacaaaagggattggtgtctgggtctagttggctagccagggcccaggggcgagcgcttttgatgcacaacaccgcccaacactttgcctgggggggtttagtttgtgtacagtgtacttaacaccaagcatactccaccttaattctgagaaggcacgctaaggaacagacaatctaatacaagagcaatggggacaaaacagagtcgagcgagtgagcaccgaaggggagcggggac

SEQ ID NO: 152840 - DNA, 435 bp, Zea mays
  unsure (1)..(435): unsure at all n locations
  Clone ID: MRT4577_70973C.1
tcggaantcggctcgagcgcagaagaacgcaccgacgaacattttcttttcctcccgcagcgacccgaccaacgcggcgtttcttggccagggtcgcgccaccgccaatgccagccccgtccgcgacgtctccgccgtcgttgatggcaggcgcatcaccatgcgcaactacctgcggaacggcccggaccgcgtcaaggacctgggccccttctgcgtccagacgccctcgtacctgaccggcgaccaccccgggcactacggctgagacaccggcgggctgtccgcggaccccgaggcgttcacccggaacagggcgctggacgtcaaccacagacacagggcgacgctgcctacaccgtgctgcatcacccagaaggtgctggaaaagaggtcgccccctgacataaatgagcccgtgaggtccaaagcccg

SEQ ID NO: 152841 - DNA, 157 bp, Zea mays
  Clone ID: MRT4577_70974C.1
ctccagtccacccattccattccactacccacgcgcataattcacgcgaacgcacacgcacggggacgacacattcagatgatgcttatggtttccccgtccccggccgtcgcggtgccaaccctgctcttcggtgcgcccgtgacccctgcttccg

SEQ ID NO: 152842 - DNA, 640 bp, Zea mays
  Clone ID: MRT4577_70975C.1
gccggccggttctgtggagaaaaaaaaaaaaaaaaaaaaaaaataaaaaaaaaaaaaaaaaaaaaaaaaaaaaaaaaaaaaaaaaaaaaaaaaaaaaaaaaaaaaaaaacaaaaaaaaaaaaaaaaacccgcccgacaccccttaggaaactgcaaggggaccccaaaaccgtccccctccttggggaggaaaagggaaaaacgtggatcggagcacccaagaaaccccgaggcttggcctacggcaacgccaagggggtttcccccccacgccgggtttttccgggggggggggtccgacctcaaccccactttccccccccccgccccggggagggcccccgggaaccccaagttccctgccccaaagcggccccggttcccaaaaaaccccagggggaacccgcccgcccccgggccccgaagcccgactttccgggttttcggattcccggaaagggggggtttcgcatcccccgaaatggcccccggggtgtgggccgccgttatagggggcccccccgggggttacccccggggggaggggggggccccccccgggcagtcctccaaaaaaggggccctcttaaaaaaaaaaggtcccttgcccaaaaaaaggtttctcctcaaataaggggcc

SEQ ID NO: 152843 - DNA, 351 bp, Zea mays
  Clone ID: MRT4577_70976C.1
aacgacaacgtgagatgctcctccacccgcactgccgagcggctgcaggggctgctacatgcatgacctctacagccagtaccgcttccacaaacaggacctagggcgcctatttatcgcacgactacctccctcgatggaactgccgaccatcgccggatcccacgcggataatcaagcgcgaaacagggcgtgtgcataccactgcgtgagctacatattaagctgtataaccaaacactctccccagaacaaacaacttatgattgggcgcgttcccggtgggattgacaattcgctgctctacacacaggtggatccatggaacgtgcccgagccccaccgggaagg

SEQ ID NO: 152844 - DNA, 204 bp, Zea mays
  unsure (1)..(204): unsure at all n locations
  Clone ID: MRT4577_70977C.1
gaaccaacaaaaggccccttcttccgtttttcaagctagcttttcgtgacaagctgtagcttacacagatttgtttatttattggaaatttgacaacaaaaaaaaagattagtaactgaagggggggggggggggggggtnanaanctaaccanntanccacngaaagcggcctggatccgaacggccgcccactgttcccgtt

SEQ ID NO: 152845 - DNA, 161 bp, Zea mays
  unsure (1)..(161): unsure at all n locations
  Clone ID: MRT4577_70978C.1
ctcatatgacgccccgctnctccccccccacagaatcttcaaagcggtcaggattccnccgcncnactaccaccgcacggactcgcgcttcaacctcgtgttcaacgaggacaagaagaaccactcgacgatcatcaccaagaaacatctaaactactaca

SEQ ID NO: 152846 - DNA, 464 bp, Zea mays
  unsure (1)..(464): unsure at all n locations
  Clone ID: MRT4577_7097C.1
ggcgcgccgtctgcnctcccgggacggccgtcgtcctcgtccgggcgtccgcggggggcgccgccgttgcgcatgcgggccgcctcgccgtgttcgggctggtggtttttgtttttctcggcggcgccttgtcccggggggggggggccgcgaccgtcaagaccntcaagattggagccccgccgccgccctccggcggactccccgggactctcatctctgaccaggcnagggacttcgacctccccttgcaggagcggttctacctgtctccgctgccgccggcnnnngcccncgcnagggtgaagacctcggcgcnggacatcntcaacctcaagccgctcctcgncctttaatgcttggccgtccctcccgcccgccctccgcctccgggcctcctncctgcgcctccccctcnngaccgtnttcgcttccnagcccccggggggggncgaacagcctct

SEQ ID NO: 152847 - DNA, 378 bp, Zea mays
  Clone ID: MRT4577_70980C.1
gaacggtactaccggttgttttctaaatcatgaaccagggctttcggccaacacaaaggccggcccggaccgcccgggcggaagggggagggccagcacacaggggggccccaaccaagggagccgagcggggaacgaggctcggcgaaggaaagggcaaagcggggaccggggcgaacaagggatccgcgcacaacaccacacaacagaccagaccggaaccaaaaagggaaaagcctgggaagacgagggagggaccaaacgcacaataaatgggcggcacacacggcccgcctcccacccgaaaaacccgaccagccagcggaaaaaaggaatcggccaacccgccgggagaggcgttacgcgcagagagagccg

SEQ ID NO: 152848 - DNA, 531 bp, Zea mays
  unsure (1)..(531): unsure at all n locations
  Clone ID: MRT4577_70981C.1
tttttnttttttttttttttttcgaacatcattgcatatatgctcgagtaataacatagagaggtattaacttattacatcatgatgtcgaagacatccacatagtcatcaatttaacaggtaagtcaaagtgctaaggcgaaacgtagtaagataaggccttcacaagcagctgactgggggtttgccatgaactcggatctaaaactcatcatagtcctaaaactcctagaaatcctccgatgtgccttcgtattctcctgagaagtggttgcaatgaggacaaccttctccaaacagctgctgctcaaggtcttctcccgcaacttccccggattccgcgaacgaacagttattaccgcgcagggatgcgggccgcgccagggctgctgcacagggcgctgccacgactatggccgcacacggtcgagcatcggctggggagcagaggggaaggggagagctcaattcaacaaacatgggagcagatgggcgctctaggtgggcgtgaggtgcggcggttcttgcgtg

SEQ ID NO: 152849 - DNA, 330 bp, Zea mays
  Clone ID: MRT4577_70982C.1
ctctgaattacgggtgcccagccctcatcgccgcgccgacgccagccgcctcgacctcgcgtcctcggccgccaggggccgcgtcgccgccggcgtgagccagcagcctgctgtagtcgccgggcaggggctcggccactacgtttgggctcggcgctcggccgcaggtcgtaccgtagtagcagccatcttggggctcggcgctggcctgccggggcgcgggacacggtgagccagggagcatgggttgtgagggacggctcggtgaaccaaaggagctcaagtacactccgtctaccctggctcgactgtgcctcgacgggggccata

SEQ ID NO: 152850 - DNA, 377 bp, Zea mays
  Clone ID: MRT4577_70983C.1
atcgccgcccgccaggccaggcgatagctagggcgcggcggccatcgccaacgcccggcccggccccgggcagctcggctcctcacgcgcgcgtttgcagcgtgatcgtcgagcgccgccacgtacatacacgcgcctcctcctccccgcctccaggctggttggctagctgcaaccactcgcgagctagagctagctaactggccagcagctccaggtcgaacgaagcttagctagctagctcaccggcaggagcggagctacccctcgagtactcgcgcgcgcatgggaaacgccctcgggtgcgcggggctcggcgagcggctggcggccggcgccagggacggcgacgcggcggaggtgcggcggctgctgga

SEQ ID NO: 152851 - DNA, 1770 bp, Zea mays
  unsure (1)..(1770): unsure at all n locations
  Clone ID: MRT4577_70984C.1
ccgggatttacccaacaatcagtggcaagaaataatgttccaaacatgggacagtggcaaaatactcggttcgcagctgagaaggacttcaaaaaagaagacataattcagagaagaaagttagcacctagctctcgtgcccctactgggcctgtgattcagtctccagtgtcctcgaaatctggagagttatcaggcagttcaatgggtggccagtttggttctgctgtgacatcagctgtaacaggggtacagaaagataaatttgctgcaaattccggtactgcagttggatttccttctgtagcttccagtcctagtgattccatgcaccgaatacaacagcctgctgttgcttcctcaaagaggaaaacaaattctgtccccaaaactcaaccgcctgtgagtgctgttgggtctccagccagtgtttcaaacatgcatgcgctgctgaatgcaagcagtccatcgattgggaccacacctatgggagaccaagcaatccttgataaatttgtgaaaattgataacatttcccatcggtaccagcttttcaataagaagaagtttgataaaatatctcaaaagaaacccattatcaatcgaaaccaaaatgtagctggttgtctcaacagttgtttccattctgaggattatatagataccacaagacctctttgtaattctatgattagtggaactataaacacatgcaagggtagggtaataaactttgtgagcacaaaagacatgtaccaaagtcattcaaggccattcccggttgattttaacgaactgtctgatgaaactgtaagaatgcaatatggagatataaaagattttgatgatccaaattcatatggttgtgtattcatattaccgacaaagcactatgctgacttgtttgcggggcagcttattttttttatgttgcaagatggacattctaaagctgacgatgaagttgtgcgtagcaccccttttgctaacatcagtacaccctttggacctttaccaaacaacgtagtgagtgatgtaaagcaagagggaggtgtaagccaacaacttaatgccgcagcccatgcaaatgtggcacctggaacacaaatgcaacagcttcctgtcaataggatgcttccatctgcaaatggcaaccagattctagcaatgcagcaaggttatatgcaaggggcagccatgcctccaaggagccagcatcttgaccaaaatttggttcagcagccgcagcaccaacagccacaacagcaaccactgcagcaaaatgctcaagcccaggtgcagcaaccatcatctcttccactgaaccagatgcaaagacctcaggttctgcctacgagcccattatctcagatgttggggcctggctcaaatctcccaatgggctcaagtcagataggtaagaataaggctcctcccacatctttgcagcttcaaatgctacaggcacaaccccaacaacctatgtctaggaaagtgatgatggggcttggctcagccatgaacatgggcaatatggttaacaatgttgttggtcttggtggcctcggaaatgttatgggaatgggcaacgtgcggccaatatcttcccccatggcatcgatgtcaggcttaggtaacaattccaatccaatgaacatgngaatggcatccaatcttgctgcagctggacttcggccaggcatgaaccctgctgctattgccaangtgcgtatggngttggcacagcaaagggcagcaggcatgtaccct

SEQ ID NO: 152852 - DNA, 930 bp, Zea mays
  unsure (1)..(930): unsure at all n locations
  Clone ID: MRT4577_70985C.1
cggtgccgccgcacagggcgggtggtgcactggtgcttgcatcgaactgtgctcgtttgattaatttgccctccgatcctcttccttccctccagctaacccatcagccattggtaggtagcccgtgaactaaggttgcaaccataactcttctcttcctacgagagtatagctggtggtagcagtgcagccggccggggtctaaagagggggggggggggaccgtacgttctgcatggccgcgttgacatctgcgaagggcgctctccttccgtcgtgggctcgcagcagcagcggcggccatggcggcgacttgtggagggtcctggggaaggcgttggccacggccggaggaggaggcggcggatgctcccttctgctcccgcgccggtggcagtcgtcgctgccgcagctggaccacgtcgccgacaggtccaacgaggagagcggcggcggcggcggcgagatcgactgggacaacctcggcttcggcctcaccccgaccgactacatgtacgtcacgcggtgctcgccggaggaccgcggcgacttcccccgcggcgagctctgccgctacggcaacatcgagctcagcccctcctccggcgttctaaactacgcccagggcctgttcgagggaatgaaggcgtaccggcggccggaccgggccgggtacacgctgttccggccggaggagaacgcgcggcggatgcagcgcggcgccgagcgcatgtgcatgccggcgccgtcggtggagcagttcgtccacgccgtcaggcagactgtcctcgccaacaggcgctgggtgccgccgcaggggaagggagccctgtacctccggcctctgctcatagggagcgggccgatccttgggctggctccggnccccgagtacaccttcctcatctacgccgcacccgttgggaacta

SEQ ID NO: 152853 - DNA, 1484 bp, Zea mays
  Clone ID: MRT4577_70986C.1
atgtgacggtgcggcccgcttttactcgtttccgtaaccgatcgtttcttcttaattcggcggatgctcccttctgctcccgcgccggtggcagtcgtcgctgccgcagctggaccacgtcgccgacaggtgagcctcagtgacagacagtacgcccggccgcagatcccgatcgggcattctccgaccgactcccccattgtttcgccatcttttaagtctgccggccgcaacgtgcatcatgcagcatgcgtgtgaacgtactacgcaggtccaacgaggagagcggcggcgagatcgactgggacaacctcggcttcggcctcaccccgaccgactacatgtacgtcacgcggtgctcgccggaggaccgcggcgacttcccccgcggcgagctctgccgctacggcaacatcgagctcagcccctcctccggcgttctaaactacgcccagggcctgttcgagggaatgaaggcgtaccggcggccggaccgggccgggtacacgctgttccggccggaggagaacgcgcggcggatgcagcgcggcgccgagcgcatgtgcatgccggcgccgtcggtggagcagttcgtccacgccgtcaggcagacagtcctcgccaacaggcgctgggtgccgccgcaggggaagggagccctgtacctccggcctctgctcgtggggagcggcccgatccttgggctggctccggcccccgagtacaccttcctcatctacgccgcacccgttgggaactacttcaaggagggcctggcgcccatcaacctggtggtgcatgacgagttccaccgcgcgatgcccggcggcaccggcggggtcaagaccatcgccaactacgcgccggtgctgagggcgcagatggacgccaagagcaaggggttcacggacgtgctgtacctggactcggtccacaagcggtacctggaggaggtgtcgtcgtgcaacgtgttcgtcgtcaagggcggcgtggtcgccacgccggacacccggggcaccatcctgccgggcatcacgcgcaagagcgtcatcgagctcgccagggaccgcgggtacaaggttgaggaacgcctggtttccatcgacgatctgatgggcgcagacgaggtgttctgcaccgggaccgcggtggtggttgctcccgtgtcgacagtcacgtaccagggcgagaggtatgagttcagaacggggccggacacggtgtcgcaggagctgtacacgacgctgacatccattcagatgggcatggccgccgaggacagcaagggatggacagtagcagtagagtagattaataaggttggggaatgccatcgccacgacattcgatcctacatcagtattgtcatccggtagaatgcatactcggttgatcagcatatgtagtgttgcagcaaattgaagaataaaccgtgtgtgttcgatggcgatcagtgacgaggccattgagcagccattgatttg

SEQ ID NO: 152854 - DNA, 1912 bp, Zea mays
  Clone ID: MRT4577_70987C.1
gtacgtactgcatggccgcgttgacatctgcgaagggcgctctccttccgtcgtgggctcgcagcagcagcagcggccatggcggcgacttgtggagggtcctggggaaggcgttggctacggtgcgtgcgcgattctcgccgtgtgtgtgtgtgtgtgcctgtgcgcaccgttcacatcacatcccaatcccatgcgttaacctctcgccgtgtggaagctggactgtgcggcccgcttttactcgtttccgtaaccgatcgtttcttcttaattcggccgtggccgccgccgcgtccaggacgatcgatgcctctccccgccgcgatgagatcatccatgctcagaggtcggtgtaacctcttcctccctttcgctgctcgctgttcgcaggccggaggaggaggcggcggcggatgctcccttctgctcccgcgccggtggcagtcgtcgctgccgcagctggaccacgtcgccgacaggtccaacgaggagagcggcggcggcggcgagatcgactgggacaacctcggcttcggcctcaccccgaccgactacatgtacgtcacgcggtgctcgccggaggaccgcagcgacttcccccgcggcgagctctgccgctacggcaacatcgagctcagcccctcctccggcgttctaaactacgcccagggcctgttcgagggaatgaaggcgtaccggcggccggaccgggccgggtacacgctgttccggccggaggagaacgcgcggcggatgcagcgcggcgccgagcgcatttgcatgccggcgccgtcggtggagcagttcgtccacgccgtcaggcagacagtcctcgccaacaggcgctgggtgccgccgcaggggaagggagccctgtacctccggcctctgctcgtggggagcggcccgatccttgggctggctccggcccccgagtacaccttcctcatctacgccgcacccgttgggaactacttcaaggagggcctggcgcccatcaacctggtggtgcatgacgagttccaccgcgcgatgcccggcggcaccggcggggtcaagaccatcgccaactacgcgccggtgctgagggcgcagatggacgccaagagcaaggggttcacggacgtgctgtacctggactcggtccacaagcggtacctggaggaggtgtcgtcgtgcaacgtgttcgtcgtcaagggcggcgtggtcgccacgccggacacccggggcaccatcctgccgggcatcacgcgcaagagcgtcatcgagctcgccagggaccgcgggtacaaggttgaggaacgcctggtttccatcgacgatctgatgggcgcagacgaggtgttctgcaccgggaccgcggtggtggttgctcccgtgtcgacagtcatgtaccagggcgagaggtatgagttcagaacggggccggacacggtgtcgcaggagctgtacacgacgctgacatccattcagatgggcatggccgccgaggacagcaagggatggacagtagcagtagagtagattaataaggttggggaatgccatcgccacgacattggatcctacatcagtattgtcatccggtagaatgcatactcggttgatcagcatatgtaggtcctgtttgtttcggcttctggcagcttctggccaccaaaagctgctgcggactgccaaacactcagcttttcagtcagcttctataaaattcgttggaacaaaaatcatccaaaatcaacataaacacataatcggttgagtcgttgtaatagtagtaatccgtcactttctagatcctgagtcctgtgaacaactttatcttccttcacacgtaattgtaatgatactcagattttcctcacagccagattctccccacagctagatttttagaaaagctggtcag

SEQ ID NO: 152855 - DNA, 377 bp, Zea mays
  Clone ID: MRT4577_70988C.1
gttggaactttgggctgatttatgtgcttgcaaaaactagaaccgaaaatggcccgaccaccgcccccgcccgaaaacatacgacacttggccccaccgatatctgctagatcgtctcctaccttttgccgtcgtaccagggtacgtttttgctacgcagtagcacccgactcgtcctcgtcctacgggcttatacttcggcactcccaccttacaacgacacacacaccaaccaataaatcaaaatacgcacccaccccaggggcccgctgattggacgagtccgtctcggtcggcgtacggacggaagaagtgggactagtcgatgttgctgaatccgtcgtctactagagataaggctgtgtctggtagtattt

SEQ ID NO: 152856 - DNA, 443 bp, Zea mays
  Clone ID: MRT4577_70989C.1
gctacaaaaccagacagaagcaatattgctgaaacgtacaaaaaacatgattcatatagtacttctttcaaacgtaggagagcacgagggaaacattgaaaccccatggtgggaaaatggacaacaatggcttaaccaatggcggtggggttaaaaagaaactggccggaaaagaggattttccatggccaacccaaaagaaaaaaaaaaaacccctacttggttggataaaaaaggccaaattgcttaacccggggcttgaaagggaaatacccccttttatggtcgtccaagggaccggggtaccagggggccttcattaccgcccattttaaggagggaaggggggcttgctcactatgcccttgctaaaaaaaactgcaaggacaaagaaaccgtccttggaacccctcaattgcctgaaaaaaaaaaaatgggccctg

SEQ ID NO: 152857 - DNA, 506 bp, Zea mays
  Clone ID: MRT4577_7098C.1
gtacactcaccgcatcctttgatcccgctgcctgcgcactgctggcttgatcgacttcctccgctccgctgcgatgcccctccgctcccgaatggtcgatctttgcatggcaagcaccacgtggatacccgcgaggtgcgatagctggaagacttcaacagaccgccgcctccgcgggaacgacaccacgccgaagaggcgcgtgtacgcctccgccgacgacaagaacctggagaaacacgtgcgcccgtcgtccgcgacgtaacgatgcgatcggctccgacgggagccccgtaccatcactgtagccccaagcccaagatcgtgatggtacgaccgtcggtggtcgaccccaaagtgaaacctgtcggtagatcggacgccggtgcgcaatgcggcaggatgcacactgctgaaccatagagtgtgagatacgccgatatgagacgacgagaagtacgacgccgacgggtgatgctctcagctgtgttattccggccctctct

SEQ ID NO: 152858 - DNA, 210 bp, Zea mays
  Clone ID: MRT4577_70990C.1
ttttgtgcaaactttctaattacactgacttatttgtatgtggatgcccttaggatattatcgtcatttgttgtaaaaaggacagaataggttttatgttcaggtgtggttaactttcaggtaaaaaaaaataaaaaaaaaaaaaaaaaaaaaaaaaggacagaagatataaaacttataaaatatactaaaaaatgcaatactgataat

SEQ ID NO: 152859 - DNA, 395 bp, Zea mays
  Clone ID: MRT4577_70991C.1
ctcttccgcttacacttcagcatcagggagctcgccgtggcctgttcttttggcggcgcaccaggatacgcggccccgggatagttcgacaggcggggcggaggatccggcatgtacgggcaagcgatgaagggaacttcgaccagaaccagtacaactggtcctcgttctttttctacgacagctccttggtcaacctgaggtacgagctggggcgacggcaggatgactggaacgaggacatgctcgccttcacgctgtgcatgcggcctggctcgcatggccggttaatgccaatggtcaccgacctgcctggcagcttagaccccatgagcatcgtcgtcttgaggaccggatcaccagctgctgcggcattagtgtatccggaccaacac

SEQ ID NO: 152860 - DNA, 552 bp, Zea mays
  Clone ID: MRT4577_70992C.1
ggggggtgggttttttttttttttttttttttttttttttttttttttttttttttttttttttttttttttttttttttttttttttaaaaaaatttggccccccccaacccaaaaaaaaaaattgtttttgccgaaccaaaccccgggtgggggggggggggaaaaaaaaaaaaaaggggtgttcaattttccatgggggggaccaacttacccaaaatttaaccgcaaaaagactaattaacatccaaatttaaagatacccctccccccccaaagaaagcatgttttttggatgtccaaaaaaaaactttaaaaaaaaaaccacactccgaaacctaatttgggggggggagttccaaaacgggcccccaaaaaaaaacaacccaaaacttggagcccttaacggggaggctttcggggtggggggaaaaaacaccctttgaggggcccaggggaccccaaaaattggccctccccccggcgaagaaggaaattttaaccttttcaaaattttccaccttgccaacccaagccttgagggggcccccc

SEQ ID NO: 152861 - DNA, 307 bp, Zea mays
  Clone ID: MRT4577_70993C.1
accgcgggtccgcctctgtttccacggatccgccacgcactgaccctaaagctctcgtgcgttgacagctacgagcagccgatgagccatctcctgcctcctacatatctactccacgtacgacagcgtctgacgaggagccggacggttggggttcgggccgatcacctgcggatgattccagggtaccgtgcaattgacagtccgacctgcggcgcgttgtacgagtgcaggagggcagacggcgagtgtcggaggacgtcgtccacacgcgcggacagaggggactcagagaaatctccatacg

SEQ ID NO: 152862 - DNA, 278 bp, Zea mays
  Clone ID: MRT4577_70994C.1
ccctcatcagagcgacacatccaccggggatggcttcgcttaaggggtgagtgactggccatcccgttgtccatgactgccaccagctgctcgaaccattccaagactctcgcactgatgaggctcacagcatctacattcttcgccaccgtgacgtccaggagctgcatgctacccaccgtgcttacccagagatctatcgcgaggatctgctccactagatcactgacgaggtcctcgctgtccacgctagggccgcgatcctgcacacgctggac

SEQ ID NO: 152863 - DNA, 763 bp, Zea mays
  Clone ID: MRT4577_70995C.1
cggggaatggcagcaggtctaattattcgtactttcggtgcatacgcctggtgaaggaaccttccttgggtagaaaagttactaatagctctgcctcgaacaaacccaattgtagtgatcgcccatattggatctttcgtatcgaaaagtgataggaggtgagacttgcctatttcctttggatgcctattcatatgttttgtgaacaagtgagcagctggtgctctagtatactgtagtgagcctgaatggtctttatgaattgtgcacttgctatattatttgttcttgcactttggccttgaatccttattgtgcaccgtggtctcttggctttgatgacagggatatccctttcccttctactgcttgatccatccctgcggcttgctctcttgagaaaaagaacctaagcgaattcccttatcttatttggaggattagccatggccttcctcagattatggggctcctagtttgctgatcttgtaaatctcttccccgctcaagttaaggttcccacggcaatgagtgctttgcttctctacatctcgtctgctatcttgattgagatgcttgttttcctagtaagagttgtacagcccatctcttcccttctattcactaccattccgcgtcttcgacttctattagtttctttctttctcactttctttggctacaatggttactgccagcaatatcagatcagaaatgttataagaaatagctatatctattttatttttctacttccgctaca

SEQ ID NO: 152864 - DNA, 768 bp, Zea mays
  Clone ID: MRT4577_70996C.1
aattcggcacgagggccatatagaactttgaaaactgcaagtgcagggttcacggatcaaggtttgtaaacatttatcaacaactggaatgggtccatcagaccatcagtatgtaagttttgtcatgtatgattttactttcttcaagcataccaggctaatcttaccaagcgaatagaattttgggtactttgcattatgtaggcacagcttggctctggttacagtaaattaacaccatatggttgtgcctaatcagataatattatcttcaggcagaatacatctttatgttgaatcaaagtgtgaatctgaattttgataaccataggtcgctataataagatttaaaatattagcgagcaatgagggcacttcatatccattctttccataaccccgagggaaaaagccaactctagtacttaaccatcaactatacaagagagaatcaatggtacaactggatatgtattaagctgggcgatcatcattcagttgaagtaattattggtgctgtaactggtgataacacggagtgtcttccatagaaaaggttcctttttgttacaaatatatagttcaacatatttcacgtagtgcattcatatgatcactatatcacttacatgttattggttgaaaaccaattgtagttgtagaatggattgtggataaactggtagctttcatttatcagagtgataagtttgcttcattatatgtttggtttttcctcaagatgattatatatgatattacatggag

SEQ ID NO: 152865 - DNA, 188 bp, Zea mays
  Clone ID: MRT4577_70997C.1
gcgactgcacgagcaccaccctgaccagctaagaggggcaaatgtttggacaggatgaggctctttaccaacctgagaatagtggaggagatgacagctattccctgaacaacgctccaatcattgatgaagaccggacaccaaaagtattcgattaaacaatgaaagccacaaccgaaaaaggacaa

SEQ ID NO: 152866 - DNA, 242 bp, Zea mays
  Clone ID: MRT4577_70998C.1
aaaaaacaaaccaatttgggataagattaggaaatcacccctaaaaaaaacaataattttatttgttccactacaagcttggaaacattcccaggatcaggggctgacattaggatttattcttagtcgggaaacaaatttgttgatgtaaaaaaaaagcctcacaaaagtcccaaaaaaacattaatttttttttaaaactgaaagtcgtttggggcatttttagatgtccatagtccctt

SEQ ID NO: 152867 - DNA, 245 bp, Zea mays
  Clone ID: MRT4577_70999C.1
tctgtcgccaactctcgaccatactaccctcaactcaccccttgtatgctgtggcattaaccactccccggcaccaccggcaggcatggatattgagagatgaggtatagtagtctgtagcctctagcagatgatgatgaattgaaaaaaaaaaaaaaaaaaaaaaaaaaaaaaaaaaaaaaaaaaaaaaaaaaaaaaaaaaaaaaaaaaaaaaaaaaaaaaaaaaaaaaaaaaaaaagtttgtc

SEQ ID NO: 152868 - DNA, 600 bp, Zea mays
  unsure (1)..(600): unsure at all n locations
  Clone ID: MRT4577_7099C.1
ctatgatcaaancatgttgttggctgatgatgcgccactgtaggttaaaaagctgcattggaccccccaatcacccanccattgccaaaaaagatgctagaggatcaccgaaccgtacaaaggatgacacctcaagtgacgagtttgacaaagattctattgagcgtgatgatagatggcttgaagagctaggctgcaagacactggaactttttgccgtaactcatatattcagccgagcagaagcggcgtaccaagaagcgatggctttgcagctccaagaggaactcattcgtgaagaagcatccgagcgagctggaactgaacttaagccaaagcgtcgtgctgctgataagaaaaggcgtggcaagaacatgtgaagtgttatattttctttttaaaaaactagcaataattcatcggatgctaggctatttcccctcattttttgtgaacagacatatatatgccgccgttcgtagattctagtctcgtgcattccctttgagaatgtaagattgaagtgtgtttttccattggttgatctcaggtttatatacatgttattaggctgggttcaaaaaaaaaaaaaaaaaaaaa

SEQ ID NO: 152869 - DNA, 367 bp, Zea mays
  unsure (1)..(367): unsure at all n locations
  Clone ID: MRT4577_709C.1
gcggaagccaaccccaccggcaggggaagcggaagggaagcaccncggccccggcaagaaggngcccgcacagcngggcgggagcancncccgcgcgggggggcagangagcaacgccacggngancgangagaaggngcncaacgagggccgcaacgagaacncgcgngcgcaccaacaggccgaagaccaagacaagaaggnccgngacaagcaggccaacancaagcgcaacgnnaaccccgaggcgccggccgcaggcaccaacaagcgccgcaacaagcaacaggcagncaacaccgaaccccgcaccagggaagaacccgggaagccaaccgcccacccccaaaaagggcaagccaagcgc

SEQ ID NO: 152870 - DNA, 433 bp, Zea mays
  Clone ID: MRT4577_70C.1
ggaaatgaaaatgttctccattaaaaagagaagaagcagaataaaaaatttatatataactttttcagaaagcaaaaaaaaaacaaagaaaggaaaaactcgaaaacaatggttgatggtacaatacaacatactattgcatttggttatttattatatagatatatatatatccatcggagaacttgtttatgcaactgtcgaccgccggcttcagctgctttctatgctttctttccttgccggttctcttctttgatcttggccttaatgatagagaacattgcaactccagcaatggctattcctggtcctatacctggctggggcgatatcttgtttccgaagataacgatgggaaaaccgatcacgaacacacgtttcagaacgtttccaaccgcgtgagtcagcggggcaaccctctccaggtatt

SEQ ID NO: 152871 - DNA, 263 bp, Zea mays
  Clone ID: MRT4577_71000C.1
ctcgagcgtttgactctgccttttttcagcgacattccactgttgttggcgtccacgcgttcggtggcccgtcgtcccgatgcgccgtcaacgatgtcacccataggtgcagaccatcgacgatgtcacccataggtgctgacgagccatctcctattctcctacacatgctgcccctcccctccatcctttgatccaacttctcggtcgtcgacgacctgccagcttcgccggagatgagatcccaagctcttcccaacatg

SEQ ID NO: 152872 - DNA, 518 bp, Zea mays
  Clone ID: MRT4577_71001C.1
ctagcctctaaaaagcgaggcgagcccgagtcttccaatacactatgtgctgggcgaccctcctcccaagtacggcatggaagaaggtaaccggcatgagcagtttcgggccgctcatggtacacaagggcagcgagccagagatgcatgttattgttcatgtggactatgaggagcatacacttacagaatcattgggggcagctgctgggatgatagtacaagaagtgactggcgatgtttgaatgattgatactcctgcatatgaagcctagcgcggactcacattcaaacacattgggatgtgtttttattatctagatgactgaagagtcacttacaaactactacggtgagatgtaaggaaaccaatagttgatcaaccttattgactcacacggtgcactgggctacttcttcagaagcaacatctgctattctcatgaccgatagggactcttttgcggctgattgcacagaacgtgccagggtgcaaactgaacctgtgcttctcctag

SEQ ID NO: 152873 - DNA, 390 bp, Zea mays
  Clone ID: MRT4577_71002C.1
aaaaggaacggggggattcaaaaaaaaatttaaatttgcccgggattcatcagggccccccattgtttttttgaaaaggggttttttttattacccttctacaccagcttaattaatccggctcccagctgacacttttgatacaaggatgccgttcattccttggcagaccactcaacttgggggcccgcccactgctttttgaaaaaaccattttcaaacctttacagtccacaggcattattttgtttaaaaaaaaccaaaagatcccttcaatggcagatttccgttgtttaacccgaccgggctgcacctaaagggtgccatgaaccattgttgggcacacttgggagaccaaacattctattttttcaggggggggaaatgaaa

SEQ ID NO: 152874 - DNA, 273 bp, Zea mays
  Clone ID: MRT4577_71003C.1
cgttccggatttcccgggtggcccaaaacgtttttcctcctccggtgtttctccccgttccagctagactgtcctgccaccctcgctgttgaatccggttaagcttccgaagttccacctcgtactacaggtcgatcgcgttcgctgtaccccactccgtgctccagaaatgagtcgccggcggattgctaaccccatggtccgccgtcgctggggaggtggacaactgtacggtgctgtctggccaacggctacgcaggatgtaggggaggc

SEQ ID NO: 152875 - DNA, 545 bp, Zea mays
  unsure (1)..(545): unsure at all n locations
  Clone ID: MRT4577_71004C.1
gcctagcccgccgtcgctactggtggtggtttattctgcaccagctcggcatctgcaagccgctgcaccactcgctggcggcgctggccatcgcgcgcggcaccgggggcgccccggcgccgctcctgtcgctgcgcctgggcgcgcggcgcgcgctgctggtgtcggagcacgccgcggccgaggagtgcttcacggcgcacgacgccgcgctgggcggccggccgcggctgctggtcggggacaggctcaactacgggtacaccacggtgggctggtcctcgcacggcgaccactggcgcgccctccgccggttcatggccgtcgagctgttcgccgcgtcccgcctcgccgcgcgcgccgccgaccggcgcgccgaggtcgccgcgctcgtcggcgccctggtccgcgacgccccccgcgccggcgccgaggtggcgctccggcccaggctcttcgagctggtgctgaacgtgatgctgcgcgcgctcaccggcgcgcccggncacggcggcggcgacgtgcgcggcctcaggagatcatcg

SEQ ID NO: 152876 - DNA, 265 bp, Zea mays
  Clone ID: MRT4577_71005C.1
caaggacactaggtattaataatagtaccaaaaaatagaatgtttcaccatctaccgtaaagcccaaggaagtgcttatcctgaaagcaatggatgaagagccaaagaagcagaatcgggtcacatggaccattgagctccatgaaaaagtttttggaggctatcgaatctcttgggggaaacaagtcctcgtgaaacctggagtttgaacacatggctgttcccatggcttttgtagatgaagtggagcagcgcttgttgtttt

SEQ ID NO: 152877 - DNA, 310 bp, Zea mays
  Clone ID: MRT4577_71006C.1
ggggaaatggaactttttatttctgggtggccacatacctcatccaaaaaactttatttttgaattaccactaataagccatctaaaagagggcccccccttttatgtgttgttggtaagaagccccttggtctgtcaaaacaagttggacaaagggcaacaattgttgtatttttaaaaaggttgcggggttaaccccaaactgctggtaaaaaggcaacaactgttgctttgtcaaaaaagaaacacgggttgctgcaactaactggctaaaagggagaaaaatttgctgctgcaaaaaaacaacggg

SEQ ID NO: 152878 - DNA, 1893 bp, Zea mays
  Clone ID: MRT4577_71007C.1
cctcgaggccggccgggaccgacatcgcctcgtgacccgacgcactgcgccaaggacccagccagctagctacatccactgatccacgcgcattccccgtaccaccgccaccgcgccgcgtcacggaaggaggaggatgtcgtcgtctccctcgccggcggccacccgcctggatctggatggcaaccccatcgctcccctcaccatctgcatgatcggcgccggcggcttcatcggctcccacctctgcgagaagctaatggccgagacgcaccacaccgtcctcgctgttgacgtctactgcgacaagatccgccaccttgtcgaccccgcgccgccgcacctcgccgggcgcatctcattccaccgccttaacataaaaacgactccaggctagaggggctcatcaagatggccgatctggtcagttagtgcctattcttccacctatcttccttttttctttctcgattgcttactactacttggaatgcatttcgaattgactcacggatttcctcatcctctcctgccatgctgctgctgcttggatctgatctgcgcgccaagaccataaacctggccgcgatctgcacgccggccgactacaacactcgcccactcgacaccatctacagcaacttcatcgacgcactcccagtggtcaagtactgctccgagaacagcaagcgtctcatccacttctccacctgcgaggtctacggcaagaccatcggcagcttcctccccaaagaccacccgctccgcaaggagcctgaattttatgttcttaaagaagatgagtcgccctgtatttttggtccaatcgtgaaacaaagatggtcctatgcatgcgcaaaacaacttattgagaggcttgtatttgctgaaggtgcagaaaatggccttgatttcacaatcgtgagacctttcaattggattggaccaaggatggacttcattcctggtgttgatggtcctagtgaaggtgtgcctcgggttttggcttgcttcagtaacaatctgctccggagagagcccttgaagcttgttgatgggggtcagtctcagagaacctttgtctacatcaaggatgccatcgaagctgtagtgctgatgattgaaaatcctgctcgagccaatggccacatcttcaatgttgggaatccgaacaatgaagttaccgttagggagttggcccaaatgatgacagaggtctacgcaaatgtctcaggagaggcaccgctggatgagcccatgattgacgtgagctcgagtcagttctacggcgaaggatacgatgatagcgacaagaggatccccgacatgactataatcaacaagcagctaggttggaacccaaagacgcctctcaaggatctgctggagacaacgctgacgtatcagcacaagacatacaaagaagctgtgaaaaggcaaatgtcgcaggcttcagcgtcgacttagatagcgtgcccctggctctcgtctagagcctagttgcagctgttaagatgtttcggaagcgcaggtcacacatacgctagtgatctttttttttgaggccctagatgtccgtgttgttagataatcaagggatgctgtatcagtatgatatatttgtggcagagttgatgtattccatcgttcgtcgtactagttgggttggttgccgagagctgttatatattgctgtttgagtgtagaactagttgctcagttatatgttattggttcatgagattagcgcccacatcaatctgttgatagcacatacatacatactatagcagggcaatgctctgctctgttggtttggctcctatgatgaatctcattcgtcagccatcaagtttctgaaaaaaaaaaaaaaaaaaaaaaaaaaaaaaaaaa

SEQ ID NO: 152879 - DNA, 1706 bp, Zea mays
  Clone ID: MRT4577_71008C.1
gagagagggagcacccttccgaagccacgccaccgacatcgcctcgtgacccgacgcacgggatagaatcccattccccccgaaccctgcgccggggacccagccagctagctacatccactgatccacgcgcattccccgtaccaccgccaccgcgccgcgtcacggaaggaggaggatgtcgtcgtctccctcgccggcggccacccgcctggatctggatggcaaccccatcgcgcccctcaccatctgcatgatcggcgccggcggcttcatcggctcccacctctgcgagaagctaatggccgagacgcaccacaccgtcctcgctgttgacgtctactgcgacaagatccgccacctcgtcgaccccgcgccgccgcacctcgccgggcgcatctcattccaccgccttaacatcaaaaacgactccaggctagaggggctcatcaagatggccgatctgaccataaacctggccgcgatctgcacgccggccgactacaacactcgcccactcgacaccatctacagcaacttcatcgacgcactcccagtggtcaagtactgctccgagaacagcaagcgtctcatccacttctccacctgcgaggtctacggcaagaccatcggcagcttcctccccaaagaccacccgctccgcaaggagcctgaattttatgttcttaaagaagatgagtcgccctgtatttttggtccaatcgtgaaacaaagatggtcctatgcatgcgcaaaacaacttattgagaggcttgtatttgctgaaggtgcagaaaatggccttgatttcacaatcgtgagacctttcaattggattggaccaaggatggacttcattcctggtgttgatggtcctagtgaaggtgtgcctcgggttttggcttgcttcagtaacaatctgctccggagagagcccttgaagcttgttgatgggggtcagtctcagagaacctttgtctacatcaaggatgctatcgaagctgtagtgctgatgattgaaaatcctgctcgagccaatggccacatcttcaatgttgggaatccgaacaatgaagttaccgttagggagttggcccaaatgatgacagaggtctacgcaaatgtctcaggagaggcaccgctggatgagcccatgattgacgtgagctcgagtcagttctacggtgaaggatacgatgatagcgacaagaggatccccgacatgactataatcaacaagcagctaggttggaacccaaagacgcctctcaaggatctgctggagacaacactgacatatcagcacaagacatacaaagaagctgtgaaaaggcaaatgtcgcaggcttcagcgtcgacttagatagcgtgcccctggctctcgtctagagcctagtcgcagctgttaagatgtttcggaagcgcaggtcacacatacgctagtgatctttttttttgaggccctagatgtccgtgttgttagataaccaagggatgctgtatcagtatgatatatttgtggcagagttgatgtattccatcgttgagctgttatatattgctgtttgagtgtagaactagttgctcagttatatgttattggttcatgagattagcgcccacatcaatctgttgatagcacatacatactatagcagggcaatgatgaatctcattcgtctaaaaaaaaaaaaaaaaaagcggcc

SEQ ID NO: 152880 - DNA, 284 bp, Zea mays
  Clone ID: MRT4577_71009C.1
cggacgcgtgggcggacgcgtgggaggaaaggagcattagtggtagttacgctgaggaaaagaaagaagtagtcgtctcctgcattgccgcatgcatgatgcgtgcatgcaaaaggaaaagatgtatggctacttggctagattcactctttaaaatctgcatgcgatttttatctttttcgtttttaattcatttattgaaaatcgcgtagaaagcaatattttcctcataagtttctaattaagaaactttggtactattttaattgtacacatgctccatg

SEQ ID NO: 152881 - DNA, 273 bp, Zea mays
  Clone ID: MRT4577_7100C.1
cccccccccgaatgtttttttcttttccaatttattttattcacactaatcatatctggtttgccgaacaaataatgtttaggtggaaaaacacattcatggagttcatccacacagcaagggacatctggtcccatcgttgcagctcccagggatcccttgtccgcctccatttttgtgcggtcgattcgaattaaaggggcatcttctgaagagaacttcatgactccggaaataggttcgattcatggaggtattgtcttcagaagaggc

SEQ ID NO: 152882 - DNA, 1780 bp, Zea mays
  Clone ID: MRT4577_71010C.1
gtgacgatcattatcttaattatttatgttccatgttcaaaatgctcttgcgggggggaggcctttctccgggcacaccatactgttcttgctacttctagacagaggaacaagagagagaaggccaccgacatcgcctcttaacccgacaagccggggagcgagccgcgcgcattccccgtcccgtgccaccggaccaggggaaggaggacacacatgtcgtcgtctctctctccagcggcggcagccgcgcccctggatctggacggcaactccgtcgcgcccctcaccatctgcatgattggcgccggcggcttcatcggctcccacctctgcgagaagctcatggccgagacgcgccatgtcgtcctcgccgtcgacgtatactgcgataagatccgccacctcgtcgaccccgcgccgccgcacctcgcggggcgcatctccttccaccgcctcaacatcaagaatgactccaggctcgagggcctcatcaagatggccgatctgaccatcaacctggcggctatctgcacgccggcggactacaacacacgccccctcgacaccatctacagcaacttcatcgatgcactcccagtggtcaagtactgctccgagaacagcaagcgtctcatccacttctccacgtgcgaggtctatggcaagaccatcggcagcttcctccccaaagaccacccgctccgcaaggaacctgaattttatgttctgaaagaagatgagtcaccctgtatttttggtccaatcgtgaaacaacgatggtcctatgcttgcgcgaagcaacttattgagaggcttatatttgctgagggtgcagaaaatggccttgaattcacaatcgtgagaccttttaattggattgggccaaggatggatttcattcctggtgtcgatggtcctagcgagggtgtaccccgggtgctggcttgcttcagtaacgtatgtgcacttgtttttatttttattttctgaggatggttggcttaattttgcaccatagcattcttctgagaagatgcatggttttgcagaatctgctccgccgagagcctttgaagcttgtcgatgggggccagtctcagagaacctttgtatacatcaaggatgccatcgaagctgttgtgttgatgattgaaaatcctgctcgagccaatggtcacatcttcaatgttgggaatcctgacaatgaagttacggttagggagttggcccaaatgatgacagaggtctatgcaaacgtctcaggagaggcgccgctggatgagcctatgatcgacgtgagttcgagtcagttctacggtgaaggatacgatgacagtgataagagaattcctgacatgactataatcaacaagcagctaggttggaacccaaagacgcctctcaaggatctgctggagacaacattgacgtaccagcacaagacatacaaagaagctgtgaagaggcaaatgtcgcaggcttcagcaacaagttaagttggcgctggctggggacggctcctcgtttagagccctagtcgcagcagctgtttcgcaagtcagaatacatatacgccggtaatcgttctgtttgaggccctagacgcgcccatgttttgtctgctaccaagggatgttatcctattgtgatataactactacctgtgtttggttgctcctagttttttttcttgcaattatatgtatttatattgaaaaactatatattatttaaaatacaattaaaaacaaacaagcaatatatattgtgcacaaaa

SEQ ID NO: 152883 - DNA, 466 bp, Zea mays
  Clone ID: MRT4577_71011C.1
caaccaaaggcgttggtaattcaaacggccttgctacagggatttatatattgggcataaagtccagccccctgccaaaagaagaggctcctaaaacaagttctcaggctgaatttcaaagcttttggagggcttcctttatcgcaggggcagcattgaaaaaggctacccactgctccattggcatacaaataccttggggggaggggatttctttgccgtccttaaggaaaaactttgggatgaacaccaacagacctgcccttgaactcggacagaatcaccctccttttgcttgaaaggcgcaacaaaataaggtccccttggtagccgaactttttttacccgccaccctcacgcagatcctccttcctatgtaaagtaacctgcctggcctttgctcttcctgccaggacatccaccttattaccgcttaggacaatggtgatgttttcacagaccctgc

SEQ ID NO: 152884 - DNA, 255 bp, Zea mays
  Clone ID: MRT4577_71012C.1
cgaccggttaaacccttaaggtttggttaccaatggcattcattccgggaagggtttttaagaaaatacccaattgaagcttaggcgaaccacaattgcagttaaaaggacaaaaaccccgtgtttttagagtgggtaaaggttttaacacagccctgttcatttatttcccctatactgggccccccctgtgagaatatagtgacgaaactctcccactgggtccattgacccttgcagagacaggcctaatgc

SEQ ID NO: 152885 - DNA, 549 bp, Zea mays
  Clone ID: MRT4577_71013C.1
tttttttttttgtttgaacagttctattcattattatgaacaacatacccttgtcaatgattacatttaattaaaacaaaataataatgtaccactggaggagcatctatggatgcaacaacctttggtactaataacaaaagtatacctgatagtcacctttctcgtctttcatgatccttcaactctaatcatcaccgcctgtaatatatactagatctatttaatcttctaaaatattaactatttttgaataaacactacatctacatgtaaattactagcttacttaagcaagcccatagatctatatatagattagccacctttgacatttttttaaaataaactaatactcaaagttgcatctaacaacccacctatatcgttataaaagattataaatactatttcctacatttttattttaaattcacatctaagggtcacatatgtatagtataaaaggatgaaaatacatatcttaatattattgatttaaggatctttgataagcctccacattaatatatactcatatgacgctac

SEQ ID NO: 152886 - DNA, 215 bp, Zea mays
  Clone ID: MRT4577_71014C.1
gaggggggattttaaaaacttttaaaagatacataagcctcccattaagcacaaaagggtcttgcactttcgggaaaataatttccatccggaggggtgatctaaaattttatttacaaaaaggtgcaactgaacaaaacagccaaaaagggagctaaggcaaccccatttttctgcaaacaagggttgttggaaaagtttaacaaactcttttt

SEQ ID NO: 152887 - DNA, 1096 bp, Zea mays
  Clone ID: MRT4577_71015C.1
tattggcacctcgagccggagcactaaaaaggcaaatatcttcgcagtggtgacacccccatcccggggcacgaaaccctaactgaacccatggcgctctccgccgctcgccggctctccaccaccgcgtcctcctcctccgtcgccgacgcgccgccaaagctctcttcgctgttccagaacccgaagcctcgaccgctgcctgtccgcggcgtcgaggagccgcggcggggggccaggcccaggccgaggcagccctgggaggaggaggcgggggcgctgctgctgcggctccacaaggggaggtacctcccgggccccgacctctcgtcggcgccgcacgctgtctcacccgacgccgtcaagaccgccgccgagtggttcgggcatgaccaccagcccgtcgccaaatggctgtcagggagtgatttgaagaagcttgccttgtttgggtgtcccactgttgagcgaagaacggtttttgcatcaaaaagattaagagccttcttcaacatccaggaagacaaaatatgcggttcctgtaaactgagaagttcgtgcaagtttgtgaaccaggaagtggccaggcataatagagtgattctatcagatacgatgagaattatctccttgtttgtactggacgcttgcccacaagagctcgagattaccgctgagttaaaagccagtgtctgcaagctgctaaaggacgccataaatctcagcagttaactgctgagcattacggagcagaagtttgctagttttcttgtccttgtagttctaatagcgtgctgtcagcatttatctggacttatggaggaaattgccgaggcccatgtttgacgttgcgctcgcaatcgctccctgtgaaggttggagtggtgaaccccagcgacttccttctgatccgtgttttcttttgtgcaactaatatgaagatgaagtacagagtatgtaaaaacttaagatgcatatcgctctgtagctccttttcaactaatatgaagatgaagtacagagtatgtaaaaacttaagatgcatatcgctctgtagatccttttcattttgatgtaaaaaaaaaaaaaaaaaaaa

SEQ ID NO: 152888 - DNA, 494 bp, Zea mays
  Clone ID: MRT4577_71016C.1
aagcagcagtggtaacaacgcagagtacgcgggcatgagaaaaactgagatattttttttctcaaacgcgcaggagaataactgagatatgagtcagttattttacaaatacagacgttacgagatagaaagtgaataaactaagtcactctatgaatacccagtaatttcatccttttagcctcagacatccatgaaaaatactgagataggaggcatttaatcagtcaatcattctaaaaaactggtattgcagaaaaggaagtgaacaaactcagtcattcactcattctataaatactcagtcattccatcttttattctcagttattcctaaaaattactgagatataaatcattttagtgggccagtcattctaaaaaacagacattatttttagtgggccaattagcctacttacctttgctacagttttttcaaaaaaaaaaaaaaaaaaaaaaaaaaaaaagtactctgcgttgttaccactgct

SEQ ID NO: 152889 - DNA, 508 bp, Zea mays
  unsure (1)..(508): unsure at all n locations
  Clone ID: MRT4577_71017C.1
ttaacttgttttcacatcaatgtttagagagattgctcaataattatcttaatgtgtgtcttgatattattgttacttttatcgaattttgaattcaacgtattcaaatgcatgagaattatatggttagcatgtaggatcaacaaaaatatgccttctatgttggtggacataactattctatcaaagagagagctaatgcaaatgctttcatttgactctgattggtcaaagttggttaggatgactttggaagttaaccatgctaactttcctctctttcatgtaggtgtgcccaacttagctaggctagcccctaacggctattaggctagctttcctaacctggctgggtcagctctagaagttggctaggatgactctcttgatgaaggtccaaatcaacctattttggattctaatgatgccgaaattgatttggatgactggagagnctccatagctaaacatttatgtgatccaactcgtacagttaaaaagattcttt

SEQ ID NO: 152890 - DNA, 205 bp, Zea mays
  Clone ID: MRT4577_71018C.1
aggagggcgcgccgcgcagtcattgttaagaaccggcacaagatgatcatggccaagagcggtggtctcgcctacatggacaccactgatggcggtcccttcacatccactgtcgctgactgtccacatccaatggacacgttcgagggaaagccagtctcattggccacagtggcgcttcggatcgattcaacaagtaaataaa

SEQ ID NO: 152891 - DNA, 362 bp, Zea mays
  Clone ID: MRT4577_71019C.1
ctccacctcgacccaacggtcgacacagcacccctccagacacttgcaaaaagcgggtcgggacaggatggcccctggaggaacgtgccgtcagcaacagtgcagctcgccgacgaccagagacacagtcaccccccagtgggtctcagcacacttatgtgcaacatcatgcgcctatgaccctcaagggtaaccggaacaaccaccacttaacaaaggtaagcagcaacatgccgccgcgatccctcctgcggccccggacgagctgcatattatcggacaactggatgtcatcacgtccgagaccaacatatcgatccagttcctgaaggccgagtacgagcgcaagagcatgctgatcc

SEQ ID NO: 152892 - DNA, 127 bp, Zea mays
  Clone ID: MRT4577_7101C.1
ggagattttacctatcggccgcccagtgaaatcagggcgggtgaccctgaataggccgcgccaactgcaggatggagccatcgagaccaacaagaggacgccagctacaaaacgacacaggaacagg

SEQ ID NO: 152893 - DNA, 801 bp, Zea mays
  unsure (1)..(801): unsure at all n locations
  Clone ID: MRT4577_71020C.1
gtcctactcagaggtgctgatagagcgtatacaaacaagttctagcctggataccatgaatcagcaatatgttatctgatcgattgaaatgaaaggtcatttatgcttaaaacaaacggtcgattctccgctccaaatccccgatcgatttctatcggagaagattactggaagttcagactgacacaagaatgtacaattgtgagcaatgggttacagtataacatgacctatggtaagaaaaaagaaaagaactttctgtttgggcgcctctggtacctcttctgttcttcagtcttactactactagtttttttttaacctttcatgatctggtacttatcacagaacaaatcaataaatggtattcggatggttcaaaggcagggcaggtatacttggtgattatgggccggaaaaaggtggtgctgaactgctgatcagctggcaccggtcctgcagcgttgccctctactgaacggcaaggaaggtgttgctcgttggggcagctgaagtcgtcggtgccgcagccgtcgctgctactgctagtagtagtaaggttgaagaacagaagaggtccggagggcgcccaaacaaaaagttattttcttttttcttaccataggtcatgttatactgtagcccattgttaacaattgtacattcttgtgtcagtctgaacttccagtaattttatccnataggggtgggtggtgggttttggatgaatgctttcgccgttcgttcggggttngggggggaaaaaaaaaaaaatgggggagggcggccgcttaaggatca

SEQ ID NO: 152894 - DNA, 373 bp, Zea mays
  Clone ID: MRT4577_71021C.1
cgttccgcatctagcaacatataatgcacatttttttttccaacaatggcagccaaaatatggtaggctcttatgcttccttgtatatcctacaagtctgctacggcatccatttttccgcattgctcacaagctcctatagcttcccttcttcctccgtacctctcaccagcgttgtctttctgttgtgaaatcccaattcttcaaccctactggatccaacatgcaatcgcatctggctatctacctttataaccctttgtcctccaacaaatattttccctatatcagctattgttcctttggtgcatttatttgcactaatacattttgtctctacaactatcacaacttgtgctatctaaccttttct

SEQ ID NO: 152895 - DNA, 191 bp, Zea mays
  Clone ID: MRT4577_71022C.1
acgagccgggtttctttctaattctttcgagaaaaggtggttttttttctctttttttaacagggaagcctgtaccttatcctatattgcccccgataacgtttgcaaacgtgacaagttgctggccattgtacctaacccggtttgccgagtaaccaggaggaatcccccttatcccgggggacttttac

SEQ ID NO: 152896 - DNA, 231 bp, Zea mays
  Clone ID: MRT4577_71023C.1
cgtctctaccagccggacagccccatatcatggaggacgctccatcgccatactccatccgagcaaccttcaaagatctagtaatacccatagcaacatctatcgcagcgctctccttgtacctatcctgagactacttatcagcgctctcgtaggctcgcatcatctgatgccattagtctgaattcgccacaccttcattaatgggataaaagcctcgcgttggaaaaa

SEQ ID NO: 152897 - DNA, 149 bp, Zea mays
  Clone ID: MRT4577_71024C.1
acgggtcgcgtctgtgatgcgatgcaacgggcaagctttactaccactatagaggccacatcgtgcttgagctggtacagacgctgcgttgtgtgcctagccatcacgccgagcttgagcttcacactcacgctctgctgcagccagca

SEQ ID NO: 152898 - DNA, 2070 bp, Zea mays
  unsure (1)..(2070): unsure at all n locations
  Clone ID: MRT4577_71025C.1
gccaagttcattcccctcccttgcttgctcagggggttgtcttgtggtctgctatttgtctcagagaaggtggtgccatcatcatcagttgtgattatgaattatattctaccgataggtattcaatctctctattcggcaacaccttaaaaatatgtacttcaaaatattgacaagtggattgcaggcttagataatttttggaacacaacattgctccaaaaagtttttctaaagaaaaggtatcaatctgcagtttggtaagtgagtctgaatctgcagcaccaaggacttcaagaattagtctgaacctgcacttacagttccatgggtcttctcaattattaataatattattttttaatgaataattgaatatatattgagtctgtgtcatagattcagtcaccttaacaccctttgttgttttcccacttaagttagttaatgagatgaatggatggaaattacgtagtgaatgtatgataagtccaggctacatgttaaaagacacacttggctacttgagctctgtattgccatgaagaaatcttactgacgggtgctttcatctgctatttggatccgttgctgatggatcttacaaagaagttgagctttaagaggaacgtggtgtcattgtcatctgagctcaagggtgtgaggagcaagcttgcttcctaggagcagctgtttgtaagggaatctcaaactagaaagcttgcggagacaaaaacaaggagcatggaagaggaagtaatcaagctgcataaatgcttacaggacaaggatgaacaactgcattcattcacaagtagcacggaacaggaacccaactgaaccttcaacttgcttgttctgggagatctgtgagcaagcgagtgctcctcataatgggtattcgacatgagccccatccctgccacagacttgggaaaggcacaatgatttttatggtgacatgaatacattcctcttcaaattatatctttaagcatccatttttcgccctactggtgcaaacaagaatttgcaatgggtaggttactggctgcacttgtttttgaatacttggagtgaccacaactaagtcacacaatgaaactttactttccagagtgtaacctgccggacttctgatagaatgaactgaaagacttctctaacaaaagtggagctgaggggagcaagagtgctgaaagtggtccaatgtttttagatgttctcgaatgttatctgaaatatgaggtttatctcttgcttgatcaacaatagaagcaaaaaatcatccttttgtttatttatgtttcccaatataaaggaaaaggggaaatattttggtgcagtgtgcccaattcttttgtctctagaaaactatgtagtcacctatagcaggcgctatagtcagttttagctattttagacaccactactatttgtacacacatttctattatcctattttagcctgctatattcatgtatgagccttatgggaactctgcaactactatggatcctcttatacattgtgttcgacatgcagacaaggtagtatattgagttggaccaataatccttcatatttatttatgtgaattanaaaaaaaaaaaaaaaaaaaaaaaaggaccctaggagccacgagctccagcccctctcctctccagtgacgtccaccagtgccgcagtccaagacaaagccgcgacatgagtcaacccaagtccggtcgcacctacaccgatgaccgtacccaacgtgagtcaagccaagtccattcccctcccttgcttcctcaacttgttgtcttgtggtctgaagtttgtctcggagaaggtgatgccatcatcatcagttgtgattatgaattatattctaccgataggtattcaatctctctattcggcaacaccttaaaaagatttacttcaaaatattgacaagtggattgcaggcttagataatttttggaacacaacattgctccaaaaaagtttttctgaagaaaaggtatcaatctgcagtttggtaagtgagtctgaatctgcagcaccaaggacttcaagaatta

SEQ ID NO: 152899 - DNA, 197 bp, Zea mays
  Clone ID: MRT4577_71026C.1
aaaccaaatgataagatcatattcaacactttggtgacattctagggggggcatttacatcacaaacgggggaatagaaactagcagcatgagaaggggacaacattagcctggacgacatcccacaccacatgggatattttgtttaatcctctctgatacaattcataacggaactatgtatgaggttgtaacac

SEQ ID NO: 152900 - DNA, 295 bp, Zea mays
  Clone ID: MRT4577_71027C.1
aaaagaggaacagcttttcgttgaatgtgtaactgcaaagcgtgtacaggttataagacatacggtctctagatcgtgagttagatcacccatgcgagaggaaccatattgtttttagggggatggacggaccatatgctgcgtgattacagctccataaaacaccatcattgatatagagaaaaacagtgtttagccaactaatctaataccaaactgtctgagggcaccgttagccatacagctggaatcagggtgcctgatcaattagcgaacatccaatgcttctattgag

SEQ ID NO: 152901 - DNA, 383 bp, Zea mays
  Clone ID: MRT4577_71028C.1
aaacaaaatcccaacgggaacggggtttcaaataaaaccaaataaacccggggccgggccccttccccccgaatggggcccaaaaacccccccgggaaaatcccgggccccccaaagcaaccatatagcttggggaaaaaaaggggggggccttgcccccccccccccatccccagccccccaggaaaaggaccggccggaagccccccccaaatcttgtggaaggcaactatgtcccagctttgcccctcccctttcactggctcagcccacaaattgtccccaatgaaagggtccacaaaaacaagggccccccccatggccataaaaatttgcggttttttgttcccctatccaacggggacaagcttggatccccccca

SEQ ID NO: 152902 - DNA, 630 bp, Zea mays
  Clone ID: MRT4577_71029C.1
gagttccaccgctagcatccgcagtacccccgagccccagacgcaaccccgcgccaggagtaagtttgctcttttatcgatatggcgagggaggagaatgtctacatggccaagctggctgactaccgtcgaaaggtatcgaagagatggttgatcatatgcataatgtgcctaatactgtagatgtggaacagctcactgttgaggagcgtgacctctggtcgggcgcatacaaccaatgtgatcgggggtcgacgtgcttcatggacgcattgtgctccttctatctgagacagaactgacggagtccgcgtaacgaaccacagagcatcgacgaacctctatcaacggaataccgtgcgcagatcgaggctgaactgatcaatatccgcgatggcctcctgtaatgtgcttgactccctgctagtggcttcctctactggtgctgtccccaaggtcttctacctcaagatgaacgtcgactatcacagggatctcgcggaatccaccactgtgcctgacaggaaggaatctgctgacatcaccatgatggtctactacgctgctcacgacattgcgtcgactgagatgagacctacccatccgatatcgcttgcgattgctcctaac

SEQ ID NO: 152903 - DNA, 484 bp, Zea mays
  Clone ID: MRT4577_7102C.1
cacgtgcgccaagcgtcctcacacctgacataggagacagacacggtctcgaccctacccaccattcgcgggataggctaccgcttgaagaaggctgacaacgatcaagaaatggcaggtcgcgctctctggctctgcgacataaaggccaagcgactcgagaccaacctgctgacggcacaggtctcgcaacatgcatggtgggacgaaactctgctgaacttgcacctgctcgtctcgctcggcgccgccaggaacatcacgaccaccaccacggacaacaaggacgacatccgcggtgcacccgctgaccttcccgcccttcgaccgactaggcggctgcgcgtcccctgcgttccgcggcctccccggcggcagcattgcttgtatcagacattcccactgtcagacattcccggctgcgaccaaaatctacccgcgttcaactcgaccggcagagctatccttccccttttaggtggag

SEQ ID NO: 152904 - DNA, 184 bp, Zea mays
  Clone ID: MRT4577_71030C.1
aaagatgggatcaatttgattgatacagttgattgccactaagtactaattgagggggggctgcggcctgcagattttgctggttcgccagcacggtgtctactcttgaaacgtatataaagcatctcgtcccaatacagattttagggcgaaatgatcttgtcgtcgttgttcgtgaaggttg

SEQ ID NO: 152905 - DNA, 850 bp, Zea mays
  Clone ID: MRT4577_71031C.1
cctcgaggccggccggggccccggcgcccccagtctctcccgaccgtcgtccccgccctgcgagaccctcgcccttgcctccccacaccactaaaactgccccgcctctgcccctcggcaccatcgtcatcatcttcgatggccccgacggccccgacgcccccaccctgacaaattgagccctcttccgctcacgtgaccggcaccccctcaacccttgactctcctccccaccgtgacccccttccccagccccagtgaccagcgccgcccttcctaggcacgaccatggcgaccatcgcaccctagcccacccctgcgcatggcaagcatgccccttctactcctctcgccccaacccttgtgcagcccaacgcgttggcctataacccgcaacatggcatggctagccggctggtggccctgccccgcgagcccctgctaggcacaaccagcagcccccgtggtctggcccctgcctaggcgcacgtgaaacccctgtccttgcaacctgtcctcggcgccgccccactcgcccgagatctgtcgcgacaatcggagttggacgtacactaggactttgaagtgcggctagggtttgtatgtcctcacattcatgtgttcctatgtcaaattcatattttattattataatcgctctcgagaaggctacctggcgattggtggaaagagatgtgatgacggcggtcatggtcgaagagcaggagaggccctagaagaaaggcgacatcttctcgttcttcggtactgttgctgatatggcaagtatgagtaatgatgaattggtggccattgatgcagctaatttcatgcaataaatgaagttgat

SEQ ID NO: 152906 - DNA, 370 bp, Zea mays
  Clone ID: MRT4577_71032C.1
cctattttcttttttcacaatgagctaaaccaactatagctgctattttcatgtacatgggactacccaaatccatgcctttgattccatacaaaccaccccttcctatttattccaccggaaggagcactcctcgttcttaataatgatccccatatttataccccctatttttgtatatgggaagtgaaacctatacacgtacgtaggatcgatcggagcctttcaactttcatatatgaaaactctccgttcgtttttcctccatttcctaaatatgtatcacctcttcaattaaccaagtatttcacaacctgcccttttttgttactggacgataagacgaaaatgagcttattttatcatcaat

SEQ ID NO: 152907 - DNA, 313 bp, Zea mays
  unsure (1)..(313): unsure at all n locations
  Clone ID: MRT4577_71033C.1
nnatnnaaataatnnannnnaaaaancnaaccaaataaagggtatttttttttttttttctttaggaaaagcaagggatttcctctcctatccccttggcaaaaaaccaggggtgataggagataaacaggcatatttatgtcatttcctagcggggccattaaaccatgaaaacatccggaaggatgcatacataaccttgcaactataacaatgcgagggcatgggcataaaaccttgcaactataacaatgcaagggcatggacataaaacctactgagggcattaggaaggtacatgcaagcatttttt

SEQ ID NO: 152908 - DNA, 634 bp, Zea mays
  Clone ID: MRT4577_71034C.1
acttcactcccatcgcgagacgcataccaagcgcgacagcaataaccgcagagttacaccaaaagaaagagtacgctcaaacaagaagaggtgaatatgagttcacgagcacctgaggtgaaacacaaagggaccaaagctgagtcccgcccccataaggctgcactacagctccccgtgggccgaatcccacactatctccaagtcaaaaactaaggcagagcgctgctatcataaagcactctgataaatctgcgactctcgcaacaattgcgcgttacaggggatggaactggcacatgacgatccaagcgacaactggaataaccgtatcatgacaagaaacatccggctcgccgagtataaagaaaagcaactcgtccatgtagcactgaggtgtacccatagccaacgaatgcggggtgacgaaaattgatgatacacagctgcccaagaatacctgatgcgagaaggcaatgcccaacagtccgttccgcatctcgcattagttcataagcggcacctacaagctgcagccttcatgttccctcttgaaagaccgtgagactcgtgcgatgtgacttgaatcaatgtgtcatgacactgaatacatgtatgcaaaggtgttagtcct

SEQ ID NO: 152909 - DNA, 288 bp, Zea mays
  Clone ID: MRT4577_71036C.1
cagcacagaggggacgcaaccctccaaggtcaccagggacacccttctaagaccctccaggaatctgcaatcccattctctacctctggagatcagcatggcggacgagagcagcgattcggctggggaaccccagccggcgcctgctccgtccgacgtcgctcctcggccaactaccgagcctatgccaccgagccacatgccaagaaaaagtctaagatttccgcctccagaaaacttcagttgaagactctgatgctgcagattgcgaacagggagatggagcgt

SEQ ID NO: 152910 - DNA, 407 bp, Zea mays
  unsure (1)..(407): unsure at all n locations
  Clone ID: MRT4577_71037C.1
agctcccatcccagccatggcgtctcggggtgggtgggctcccatccccgacgaccccaccaccattcccctgggacggcggtggccatgccgctgggggatcctgtgtaggggaggactgtctcgtgtggccatcctaccattgccgcccaccctactcccacgatcccggtggtgggccttatatttcaacaagcgcgtgccgccgctcgtcgccccctacttcgatgtcctggccttttccgttgggattgtgcggcctataggcacctggaaaactggcctcgtcctacctttgtgcctacttctactctacaaggatattcttgcagcctgtcatatatgatttattcacaaaanaagatggcgaattcttaattaaacatggaacgctcactgatgaaccc

SEQ ID NO: 152911 - DNA, 215 bp, Zea mays
  Clone ID: MRT4577_71038C.1
actaccaaattttacaggttacaaaattttttttttatttattcggggggattacaaacgtttaggtttgaaatttttgctacctaaattgaccgtcctaattaagaattatagggaggttacttaaactgataaaaaggccgagcccaccggcacttagcaccatcccggcagccaagggttaaaacctgataaccactaggttagggtggtac

SEQ ID NO: 152912 - DNA, 441 bp, Zea mays
  Clone ID: MRT4577_71039C.1
ccgttcgcctcttctccttttcctgccgggtccttaataaagagtagcagcgcaagaggttggtagagcgagttataagaaggtaatggtggcggagagcttcctgttcacctcggagtccgcgaacgaggggcacccagacaagctgtgcgaccaggtgtcgcacgcggtgctggacgcctgcctggcgcaggaccccgacagcaaggtggcctgcgagacctgcaccaagacgaacatggtgatggtgttcgtcgagatcaccaccaaggtgagcgtggactacgagaagatcgcgcgcgacacctgccgcgtgatttttttcacctccgcccccgtgggcctctttgccgaccgctgtaaggtgctgctgaacatccagccacagtcccccgacactcgcgcagggtgtgcatgggcactctccccaacgcccccagg

SEQ ID NO: 152913 - DNA, 197 bp, Zea mays
  unsure (1)..(197): unsure at all n locations
  Clone ID: MRT4577_7103C.1
tttccgcccccccattcccctaccctcttgggcgccgtcccccctgccatcggctcctttctcaagcacttgcaaccacacatcaaaccctagccgnccccccccccatctccacctcccatggtgccattcgttgccgctcggatctccgtcgcgtggtgcaaatcttcaacggttttcggtggagggaggtaggg

SEQ ID NO: 152914 - DNA, 244 bp, Zea mays
  Clone ID: MRT4577_71040C.1
acaacctgctcgttctatctatccagcacacttgaggttccgagcagccggaaaccaggggcaatcgtcagcatggcgctcgtattgcattctggagctggaagcgaaaatgccttcaaggcacttattgctgcagaatactatgggatcgaagttgagttgaccaagggattgtgatatgggtgtatcacacaaggagcctgagtttctagaagtgaacccccttgggaaaggtcctgttctg

SEQ ID NO: 152915 - DNA, 269 bp, Zea mays
  Clone ID: MRT4577_71041C.1
tttggggttttttaaacacttttttgggttttttcccttggtcctatatttctacttgccgctatcaacgggcccaacaaaaatttcacgggaatgggggggcacaatacggcccggaaaaaatggcacggcttcctggcaacaaaaaaaggggggggcttttttgccgcacaaccaactcgagggggggggggggccccgggggggcatcctctggttaccccagaggccggggggggccccccgggactgccccctccaaccaaaaa

SEQ ID NO: 152916 - DNA, 204 bp, Zea mays
  Clone ID: MRT4577_71042C.1
gcgcaagagatcacgctactactcatgactcgccaacatgcatatatcatggaacgcggcgctacggccactcactgaccggtcctggctgagctcctgctcttcctctacccgacctcgcccatcgacactgtgctctggaccctggacctagaccttttccaccacgtcccgcaagacctccgcgacaagttctacgcctac

SEQ ID NO: 152917 - DNA, 473 bp, Zea mays
  unsure (1)..(473): unsure at all n locations
  Clone ID: MRT4577_71043C.1
cgccccttgcgtggattcagacgaggtacaagactttttatatactcttttgttaacccccataaatccgactcgcctttacatttctttcttgtcttcctcctgttccttatatcctattaggtccgtctttttcgcgcttcccccctgccgggcgggcggggggggggtttttctctctgtggcgcccccctgtccgtcctgggggctctcttccttgcggcccgcttgtctccttctctggcctgctcgcctgcccccgctcctgcctttccgttcgcttgctttgctcttcccgtgcgtctnctctccctgtggctctctgcttggtggcctctgtttctgggtgggctttggggctgtgcgcttccttctcgcttgctttctctttttggtcgccgcttgccgtagtgtggcctcccctcttgcgccctggtttgctcctgcgtcccttgggtccgtgcgcgccgcgt

SEQ ID NO: 152918 - DNA, 826 bp, Zea mays
  unsure (1)..(826): unsure at all n locations
  Clone ID: MRT4577_71044C.1
cattgggtacctcgaggccggccgggctcctcatttggtgttcacgtataaaccaatcagctcccgtccccgtcccacaccacacacagagaaagagaaagagccacgcattgcacttggcttgcacaagcccggaggagccccaaacgcggcggcggacggaatgcggctgcgcctgcctcagtcagtgaacattctgctgtgatggcgaaggagtactacactacgagcagccttgtggttgggtacgcgctgtgctcgagcctgctctcgatcatcaacaagtacgccgtgacaaagttcggtttcccaggcctcctgaccgctctacagtactcgacatccgctgctggtgtctggatcctcggaaagctaggcttcctcacacatgaccccttcaacctggagaccgcaaagaagttcgcgccggcggctctcgtcttctacctagccatattcaccaacacgaacctcctctgccacgccaacgtcgacaccttcatagtcttcagatccctgaccccgctcctggtcgccatcgccgacacgacgttccggaagcagccatgcccttccaagttcacgttcctgtccctcgtggtcatcctgtgcggagcggtcggctacgtgacgacggattcggcgttcagcctcacggcgtactcgtgggcgctcgcgtacctggtgaccataacgactgagatggcgagcacaggtcggtcttcgcagcgatggagtccaggggcgaaggctggtttcaactggacgccgtcgtgtcagtggcgctgtcgtgcgtcttcgagctgctcatcagnttctttggctt

SEQ ID NO: 152919 - DNA, 1672 bp, Zea mays
  Clone ID: MRT4577_71045C.1
ggatggaggttcctctgacgtgttgtagtcttacggacacctcgcgttcaactattttaattggatttgaagtttcttccttctcctcaagtggtgttcacgtataaaccaatcagctcccgtccccgtccgggtccacaccacacacagagaaagagaaagagccacgcattgcacttggcttgcacaagcccggaggagccccaaacgcggcggcggacggaatgcggctgcgcctgcctcagtcagtgaacattctgctgtgatggcgaaggagtactacactacgagcagccttgtggttgggtacgcgctgtgctcgagcctgctctcgatcatcaacaagtacgccgtgacaaagttcggtttcccaggcctcctgaccgctctacagtactcgacatccgctgctggtgtctggatcctcggaaagctaggcttcctcacccatgaccccttcaacctggagaccgcaaagaagttcgcgccggcggctctcgtcttctacctagccatattcaccaacacgaacctcctctgccacgccaacgtcgacaccttcatagtcttcagatccctgaccccgctcctggtcgccatcgccgacacgacgttccggaagcagccatgcccttccaagttcacgttcctgtccctcgtggtcatcctgggcggagcggtcggctacgtgacgacggattcggcgttcagcctcacggcgtactcgtgggcgctcgcgtacctggtgaccataacgactgagatggtgtacatcaagcacatcgtcaccagcctggggctcaacacctggggcttcgtgctctacaacaacttcctctccttgatgctggcccccgtgttctggttccttacaggcgagcacaggtcggtcttcgcagcgatggagtccaggggcgaaggctggtttcaactggacgccgtcgtggcggtggcgctgtcgtgcgtcttcgggctgctcatcagtttctttggcttcgcagccaggagagctgtatcggcgaccgcgttcaccgtgaccggggtcgtgaacaagttcctcaccgtggccatcaatgtcatgatctgggacaagcatgccagtgcgtatggttcggtctgcttgctgttcaccatcctcggtggggtgctctaccagcaatcggttacggtgaaaggaaacggtgcagttgtggcacagcgtgagctggtgcccgagcaacctgaggaggttgacgaggagaaacaaagcttagtttcttcagctaaataatacggtgcaacggatcacttgcaatgataggatccgtttgcaggtttattctttggcctttgaatgggctcgtttatgtgtctgcgaaacaaacatgagggaatactatactagtggaagtagcacttccgtcaatggaagccctgctattgtttgaatttgcatcaagattgcaacgttttgttcactgcgaatgtgtactttagctgataaaggtggttcttgatattgcatatttttttcctttacaaaaaaatatttttatgtgtctaatgcctcagtttatctagcgcaaatgtccgcctttcaaatttactttgtaaaattacttaagctacctccagcaacttatttatcctcgtaccaatattcaaactcaaaaaaaaaaaaaaaaaagcggcc

SEQ ID NO: 152920 - DNA, 891 bp, Zea mays
  Clone ID: MRT4577_71046C.1
cattgggtacctcgaggccggcctaagggttctaccacaagccgcgcatggatgctgctggatcgtcaggagctggatttacacctcatgttatcacagttcaagctggggaggacgtgtcatcaaagatcatgtcgttttctcagcacggaccgcgtgcagtctgtgttctctcagcaaacggtgccatatcaaatgtgacgcttcgtcagactgctacatcaggcggaactgtaacatatgagggtcggttcgagatactgtcactgtcggggtcattcctcttggtggaggatggtggtcaacgcagtcgaactggagggctcagtgtgtcgttggctggtcccgacggtcgtgtgctgggcggtggagttgcagggctcctcgtagcagcttcgccagttcagatagtactgggaagtttcaattctggaggcaaaaaagaggcaaaaaagcatgctccttcagcacccacaccagcgccactgaaggtcgctcctccgacaacaaccaggatgggacccaacagcagcagccctccttcaagaggaggtacattgagcgagtcatccggtggcgccggaagcccaccaccgccgctgcatcaaggcatggctgctagcagtagcaacgaccagccgccgttcctgtccagcatcatgccatggaaatgatcctcttatgtagtagtataagtcagaagctttgagtagggaggtaaatttgtagctctactgtaggtttaaacctgaattcctgtgctacgtaggtgtattgagctgtaacggatgtgatcatttgagagctaccaagtgttgtttagttaaatgttttaccaaggcatgtcgatctgagccagaagattcttgctatgaatttgttgtttgcgcg

SEQ ID NO: 152921 - DNA, 302 bp, Zea mays
  Clone ID: MRT4577_71047C.1
ctcagacctccatccctcaagaaacgagaccttacatatgataccactccttaacataaaacaaacgcttaatcaacaaaaacaacactaatcacaacaccctgatcatcccctaaattacacatctacatcaaaaaaatgcaccttaattacgacaatataacaactgtaacttgatcccgttccatataacattacacctcaaccattaatgcataaccataacattcattataacaaagatcatcaacctatttcctttacaaatcctacagtacatcacctcataagaccaatcccta

SEQ ID NO: 152922 - DNA, 140 bp, Zea mays
  Clone ID: MRT4577_71048C.1
cgtcttctatcaaggaaaaggaatattatcttcttcgagaaaaaatacactagtccgagggccgaccttgcatgcctaccaaaagaaggaccgttcccagaataaagactacccctagtatagttacattcagatcggct

SEQ ID NO: 152923 - DNA, 297 bp, Zea mays
  Clone ID: MRT4577_71049C.1
tctggtttttcgaggccttttttttttgtttttttttggattcagatgagatagggctacaacgtttgcagattcacggtgcaactgggcagggatacaggatttgcgaacttgtttggaataacaattgtggagctttcgctgaccccaaattttttagcccagtctggccacacattgaggtacagagcaccctggatgctgttctggaaacaagcagcaaaatcccacattccaacagttgaaattacatacggctaggacattgatcggtggatggggcttcatgttgaaaaa

SEQ ID NO: 152924 - DNA, 320 bp, Zea mays
  Clone ID: MRT4577_7104C.1
tgttgggtttcaaggcaggtcaggccaatctgatcttgtatgacgtccaccctcccttggctcccggcgggtgctgattccacaatagtacatgcaccatagccgctctgtaccagctgagccagctcaaccttcttgggcagcgagagaccgggggctgatgtgaacaaactgccagtggtcaagctagtcgcaccagataccacaaagcatgaccagttgattgttctttcaatcctcatccatgtccatgacagagttgaacaccaacattaggaactgacttcgcgataacttgagcttgtgcgcagatctgccga

SEQ ID NO: 152925 - DNA, 304 bp, Zea mays
  unsure (1)..(304): unsure at all n locations
  Clone ID: MRT4577_71050C.1
aagcatacataaacacaccaaacaaagcttcttatcaactactcaacaacaatctctaccagtatatttgccatacttgaacttcttncccttccttttaactcaacaaattctttcattattccacaattctcacttactcctaattccattataccacatttccttcaaccacttactttaattttctttttacacctatctgttcaagcctacattctacatcaatctctttcaattaacttttacaacaaccaattaaccatattcaacaacaatttcttttctcatttaaccatacaaa

SEQ ID NO: 152926 - DNA, 603 bp, Zea mays
  unsure (1)..(603): unsure at all n locations
  Clone ID: MRT4577_71051C.1
tggncgcgtgggnaaaaaaaaaaaaaaaaaaaaaaaaaaaaaaaaaaaaaaaaaaaaaaaaaaaaaaaaaaaaaaaaaaaaaaaaaaaaaaaaaaaaaaaaaaaaaaaaaaaaaaaaaaaaaaaaaaaaaaaaaaaaaaaaaaagggggggcctttttttttttttcaagtttacttccccgtgcttgcaaggttttattttttttttggggccccctaatttaatttaattggccggggttttaaaacttcgggattggaaaaaccttgggtttcccaaatttaatggctttgaaaaaattccctttttccccagttgggtttttagcaaaggggccccccccgttggcctttccaaaaatttgcccacctttattggtttttgggcccccccttttaccggccttttaagcggggggggtttggtgtttccccccagggtgcccttttcttttgccagggccttagcccccgtttttttggtttttttcccttccttttttgccactttcgcgggttttcccctgaaagtttttaattggggggttccttttggggttccgttttagtgttttagggccctttcccctaaaaaattttttt

SEQ ID NO: 152927 - DNA, 428 bp, Zea mays
  Clone ID: MRT4577_71052C.1
ggatcctccggacgccggtcgtcctttttttttggcgaaagggtgtgctaaaaaaattgaacaaaagagagctacgtcacatgaccatgtacaaaatatcttacatgtgcgaacaggcaaagtgtcttttcgcaaaaaacaaagcaaaaaagaaaaaaaaaagaaggaacagagtgtcttttcgcgggaagaaaaagggacagggaaattgtcaaacaaaatgtcaaaattttattaagttctttctatatctcacatgtatacccgttgatccatcataatgcatgatctggacatgctgtatatatggtctctatataaattactcctgaacacgatcacaaccaggaaaaagaaaagagcgcataaaacaatcacaagcacggtgaaaatcaagaggcgagttaaaaaaaattacggcctgcaga

SEQ ID NO: 152928 - DNA, 769 bp, Zea mays
  Clone ID: MRT4577_71054C.1
gtctgttcctgctgcgagctttccagtggcgagcctgggtcaccggcgtaccagctccagccaccgctcaaatcgagaataagatcaaggacgcgcgtcctgaattcacttgacgcatcccggccaggaccttgctcgactgctcggtcgcccatctctctcctgcatcggtcgcgcactggtaccttgctccagctcgccgaccggagcttcactcgtccccatggagactgctcggactgcgcgctcggcgacaatctccagccagcgctctctccaaccaagggcttcgtcctgtgcgcgctatcctgcgcacgcaccgtgagctgctcggcctaatcgccccctttaccgctccctcagctcgcccgagctcctcccctgatcgccgtgctaaccgtctagtgtcgtcgcacggacttgtctcctcaaccatcttggagtagccatttcctgatgctccatgacctcgtcaagccattctcaggttgctcccaatgctccagaccggatgtcgctttgtcacccaggtcggttctacatctcccatgactgcctgctctagctcgctgtactccctgcgcgcatcgagatttcgagcggagctcactgctcacgagaagctcgatctttcattgttgacgcgagcacgaattttatctgctcgacacagcgtgacgaggtcccacaccatcatctcctctgtcgcaagctcgttagccacgatgattttgaccacgacagcacacgactgatgacgcgtttatcg

SEQ ID NO: 152929 - DNA, 615 bp, Zea mays
  unsure (1)..(615): unsure at all n locations
  Clone ID: MRT4577_71055C.1
aaccatccggtaggtaatcaggccgctttgtttttttttttcttatcagcacagataacatgtttgaatcttactcgccaatcgcaacaaccttaagtcagtgacttttgttattttatctgaaacattgtcgcccattcgccgaataagttactggaacatggagccttttatctgagtttctggacatcgaattcgttggagcttcttatctggcttataatctgggatgccttatcaaacttgtacgctctctcataaacgcctgcagccacaagataaagctccctcttgtcgatgcttgggtcatggcttagctcgccaaccagcacttcgagcgccttgaagtccttctgagcgccaaggaggctaatcatctgaaagtgcacccggtctgagaacacacaacctgcctccctcattgcctggtacagcgccgcggccttgtcgaactccttcagcttgccataagcattcatcgcggtggcaatgatctctgagtctggcaactggcccaacttcctcatttcatcgaacacctcgatcacattacggtgcctncggttcttcgcgtacaagtccatcattgctctgcgcaccgatgagtccttgatc

SEQ ID NO: 152930 - DNA, 1035 bp, Zea mays
  Clone ID: MRT4577_71056C.1
atgtctggatatcacgccaagagggagatcgtgaccagcgacaagcccacgggctcgaggaagactccatcaagggagtccggtaacaagtacaaggaggaatcctcttcctccatcaagtcacataggaggggtgacaaaaagaagaagaagatgaagaagctcttacgatcttgcgaaaatagtaaagaattttatatcccaacgacctgggatggtccagacagagcatatttcgcttcattcaagattttcttttctttggctgttgtgcacgaggagcagacgatagggcacaacatcaagtcatcgttgaaattccaagctttcggttttgtatggtaccagtgtgatatcatgatgttctatcaagagttcggtagatcaaaggaaaacagcgccgcctgccccgctccgactgctgtgccacccgccagggtgaggctgacaacagctaagtcccgcctcaggcgccacaggaagctccgcagcacccgaccccaggggctcggcccccgcctaggcctcggaaggtggactctgcctcgcccgaccccagggctgcctcgacctcaacctcaaaaggtggactccgcctcgcccgaccgcagggctcggcctcgacctcagaaggaatcgcgtcctcatccgaccccagcctcggcttcaggaggagtctccgcctcgcccgaccttgggctcggaccgaccgcgccacagggggtcatcattaccctacccctagctagctcaggctacggggaacaagaccggcgtcccatctggctcgccccggcattgttctcattggtgaaattacagcatgtttgcaacacccatcccctcatggttcagcgaagttccatgtccttctcgttttggaaggccgacatggacaacacattgaaaacaacagagaagaaagggtctagcaacaactttggtcctaatggaaaggccatctccgagagggatccaatgccggtagggaaacaatctctgaacgcgcgagaagccgaaaggaatgatcggtag

SEQ ID NO: 152931 - DNA, 224 bp, Zea mays
  Clone ID: MRT4577_71057C.1
tgttcagctccaagccgttcgacgagagatacgaccgaacccggccggaaggggaggagcgggaggaccgcctgcgccgtcggtgagctacattgctcaagtcagcaaactgaacccgtccggattcgtgcgccgccgagcacccctcgacgccagcggcgatggcagcagacgacgtgcggagctcctcctctccaccacaaaaaaaaattaaaaattaaaaa

SEQ ID NO: 152932 - DNA, 267 bp, Zea mays
  unsure (1)..(267): unsure at all n locations
  Clone ID: MRT4577_71058C.1
aaaaaaaggggccatgccggtgcatttgggggttttaaaaaggggaaaaaaacttttgggtttcggtgggatggttaaaaaaaaggcccggttaaaataaaaaggtttggggttaaacttcaaaaccttgaacctccttttggaagggggtttaaaacctgggggggtttctctttaggagggcctgtggggtttcccccttttagacttttggcagggattaaaaaccnggggttttttttttttcccttggaagggggggggggg

SEQ ID NO: 152933 - DNA, 238 bp, Zea mays
  Clone ID: MRT4577_71059C.1
gcaacatagaaagtagaatccattagcaacaatagagcaacaatggcgaccaagatattttccctccttatgctccttgctctttctacatgtgttgctaacgcgataatttgccctcaagtggtcagaagctcttatagttgcccttcgggccccataccttggatcaattataggttcagtatgtgagaacccagttcttcaaccatataggctgcaacaagcagtcgcagcaagc

SEQ ID NO: 152934 - DNA, 1062 bp, Zea mays
  Clone ID: MRT4577_7105C.1
cggacgcgtgggcggacgcgtgggtctagatcgctagcggccgccgcgatctagaaccgcgtttccgtcttctcctccgacgagttgccccaatccgcccagacctccaacatcgcaacggagcccaccctgcctgcctcgccgcgatccctccgcgctgctcgaggctcctgtcctgaaccaatcgagaacgccgacttccggggacgggatcatctaaagccgcctccttcccgttgaatccgccgagattcggcgtgaggcgaggttaccgacttcccttgcgcgtagggccggcaggagcgcccgctggccatggcgtgccggggcttctttgagtgcgtcctcaagctcctcaacctcgtcgtcatggcggttgggctggccatggtgggctacggcgccttcctgctcgtgacctggcttcaggtcgcgccgctcccgccgccttcgtcgtcgccggacgccgtgccacccagcggggagctcgtgcggctcgggaggccgctgctgctttttgttgatgcatccctgtcggatgggaccgcggagaggctctccagtgcctggtttatttttgcgtttattggtgtcggtgctatactctttgtcacatcgatctttggttgtgctggagctagaaatggatgctgcttatctattgttattccagttgacaaaactggaaactttgacatgatgtacagttttttgaaagagaattggagaattgcaaagtgggttgcacttggagctgttgtatttgaggcattgttgttcactgtagctatcatagtacagtcaggcaaccaaaccgactatgacagcgacgatgagtacatcggcgcaaggtccggaatacggcagccattggtgaaccagcaagctgctgctgctgctgctgatcctagggtgcccaatctcgactaccgcccaatccggaacgacgcatggagccaacggatgagagagaagtacggggtggatagcttcgatccgaacaggtttcagccggccaccatatctcctggagaacaaagaaaccgatgcacgattctctga

SEQ ID NO: 152935 - DNA, 654 bp, Zea mays
  unsure (1)..(654): unsure at all n locations
  Clone ID: MRT4577_71060C.1
gagggctacagttctttccatttctggaatgttcacatttctggttcactttgccatcccccttcaattcccaaagcaacaacctgtcgtcacactgcagagttctcagcactgtaatgccgatgggatgcctatcacgtcgcctccgataaatgactatccctggagtcctagatgggaccaggcagagatggttgaacggatctagtaagtacatggtctatctatcccttttccaatctatgctgcctgtcaatggtacagctttgagatcctgctgacattttcctgcagcaaaaaacagtggtgcgccttaatttcaagaagggcttttttgttcccatcactcggcacaagtggctaattgtgggcccgccccaagcctgcaaccgttgatgctgttctctttcttgtcatgtgagaggacgcaacctcaggcgttggttaggatcggcataaaccaagcaggacaacacaagacntgttggttgtttangatgtccccaacacccacaaaatgnngacatggtgactgtttggaatatggtatagatggatacaatccagttcttttgtaaatctatactacctattaaggctgcaaggggtaggctgcctccctggttctgcttcggtgaaaaaaaaacccccccc

SEQ ID NO: 152936 - DNA, 1736 bp, Zea mays
  Clone ID: MRT4577_71061C.1
cattgggtacctcgaggccggccggcattaataaaaagtttgctagtgagtcgagaagagagagagaggcgtccggaattcatcgccagcgatgtctccgtccgccgacgcccccggcccggcctcctccgcctcggcgcccccgctcgcgcccctcatcgccgcgcagctcaactacctcctctcgcactccaagctgcccattagggtggtacagatctggtccggctgccgcaacggtcgccctgccgatcggttcaggctcgccatccccttctgcctcgactacgtccactgggatttcgtgtacaatgcgctgtctcccaaggtggcaccagacgtggtgttcggtccggaggatgagaggttccagccgctggtcgattacgctgctgctggaaatggcgataagagctgcttggcgcgttgggattgccgcgcccccgagggactccatgcgctcgtacaggagcttcgagaattgtacattgaataccaaaaggagcgggttcacatggtggatgacgcgagactagcgtttgaactaagcacagttctctctaaggaggggattgaagtctgcatggtaccttctgctgataggccagatgaggccaaatttgctgtaccacttctggagtctgactttgactttgccaaactggtgccaggatgtccttggagattacctcaaaagatccatctccaggtcatttttcctatcagcaggagttcaagctactcttctatgccttctgctccacgactcaaactaatctcaacaccagatttgaggtcacttctctcagttgaggatgtgaaactccctccatggtcaaatgggatgtgtttggcggagtatcttcctgctttagaagacagtcttaacggtctgcttgtagatgcgtcggcttcaattggttccagaagacgctttattgaggcactagctcccatctttgggagaccattagaggctgatccgattttttgcaggagggctacagttctttccatttctggaatgttcacatttctggttcactttgccatcccccttcaattcccaaagcaacaacctgtcgtcacactgcagagttctcagcactgtaatgccgatgggatgcctatcacgtcgcctccgataaatgactatccctggagtcctagatgggaccaggcagagatggttgaacggatctacgacttcctgaccgacgagtgccaaaatttcaagaagttctgcagcgatgctatcactcagcagaagtagctgacatcgttctgcagcagaaagccgtggtgctgattttctcagcaacaggctttcttattcccagcaagcggcacacgtgtctacttgtgcgcccgccccaagcctgcaaccgttgatgctgttctctttcttgtcatgtgagaggacgcaacctcaggcgttggttaggatcggcataaaccaagcaggacaacacaagacctgttggttgtttacgatgtcgtacccctgtataagctgccgacatggtgactgtttgggatatggtatagatggatacaatccagttcttttgtaaatatgatatgaaggatggtggcactcctacccccgttgcattctcctctccaaagcaccacatgctgtcgatgccgttgggaagtttgcaaaaatcttactcttattgttatgcaatcaaattgtgtgtttccacgcgaaaaaaaaaaaaaaaaaagcggcc

SEQ ID NO: 152937 - DNA, 588 bp, Zea mays
  Clone ID: MRT4577_71062C.1
ggtcccatcaaaattaagcctatgcatgataaaagattatagagaacattattgggtaaataaaagtgatcaagggcacaacttgtcctgggacttgagattccagctaccaacttgctcttcagatgactcgtgacctcactactaaacgtagcaatacaaacaaacatggtataggtataaattaacatcacaccaaacataagaacaaactgcgtaataacattctatgcgatgctatgagatcgtgggatcgagaacaactaaattcgaagctacggtttaaaagatatgattttccaaaggttttggagtcgggtacaaaagaaatcatgtgcataattttaatttatgtttcatagcaaaaaaagttaccaggggataaacaatattaatatgaatttaatgcaactagaatggattaaaaagaagttaaaataaatttaatatgaattaatcaagtttctagatttatttttatactaaaaacctattttcttatttaattcagagtatttctaatatttatggactgggtacataattttctaagagatcaggggcccgactgctaaaaacaggactcaa

SEQ ID NO: 152938 - DNA, 540 bp, Zea mays
  Clone ID: MRT4577_71063C.1
cgagtacaagctttttttttttttttttttttttttttggttttttttttttttttttttttttttttttttttttttttttttttttttttttttttaaaaccaaaattttttttagatccaaatattatggggcatcccacacaggaaaagggggggttttttacgggattataacatatataaaaaaaaagggagggatgggggaaattccccaaatttaaaaaaaaaaaaaaaggggggaaggggaggggaaaccccccacgggttggggcggaacctgggaagggggaacctgcccgggcgccccccaagaagggggaattccaaaaaactgggggccccccctaggggggcccagctaaaaaccaaatttggaaaaaacaggggcaaagttttttcctggggaaaattgttaccccctcacaattccacaaaaaaaaaaacccggaagcaaaaaaaaaaaaacccgggggccctaaagaggaaactaacccacattaattgggtggggcaaacgggccgttttcaaagggggaa

SEQ ID NO: 152939 - DNA, 726 bp, Zea mays
  Clone ID: MRT4577_71064C.1
aattcggcacgaggaatgcatgggcattgtacgatgctatactttttatttgaacaaatatgtgtgattctattaaacaaaagaatgctaataaagtttaacaaagtctttttttgtttgaactgattctgtgtagcatcagtatgtcaccatgtatatataattatcctttaatgatatgtttattaatcgatctattgtcaccatgtttattcttccaattcatgggctatagatttatgtgttccaaacaatcctctgtttttggcattctattcctttcctgttttaattttttaagctttcatatgtttcataatccttggatccaaacatgtttgatatgggaaggtattatgttgcttatgacttacttttttaaataagaattggagtttgagaatctcaacattatttgttttattattttcatcagatgcaacttccttctaatcttcatctgatgtgaagttgaatctagcagctaagagagggaagcagcattagcctgtgcaaagaaaaatattatgctccactcgaagctatattctctattatgattcacaatattcattccttcatgaagaatacacaaacagttatgacacaaaaatatctatgtaacagaagcaataaataagttgctaatgttctttatggcagcacactcggtgtgataatgggacaattctagattttaataatgcgacaattgatcatgaatcg

SEQ ID NO: 152940 - DNA, 397 bp, Zea mays
  Clone ID: MRT4577_71065C.1
gcgctcggcaaaaattcaggagattcgagaccgagagctttaccctcaactggttgatctcatacacagggtcaggagtttgtggaaagagatcatgggatgccatgagaagcacctatttgccatacacgacacaaggatacacaggatgaaggcgacgactgctagcgaatactgcgttgtttcataagcctcactacatttggaacggcagctgaccaaatggtaccgctgcttcaacaagaggatgatctcgcaaaggtcctgtgccgaggcgcctaacgaatggctgaagaaatggctccctgagtcgcaagaggaagttacagcagacggagctccttctttctccccgtgcaggcttggcgcgccacccgtattcgtcggtttaaacgac

SEQ ID NO: 152941 - DNA, 213 bp, Zea mays
  Clone ID: MRT4577_71066C.1
cgaggttgaacaacttcagagtggcaggtttgcagatgtacgaagaattggtcatatactgaacataggagtaaatgacctgacctaacgagtcatgaagctgaagaacacaaggaatgaccccatacagggcaagaactagttgacacgaagatacttagacaagaaccctgagaccccaagtactaaattgtaaggaccaaaacagctgat

SEQ ID NO: 152942 - DNA, 310 bp, Zea mays
  Clone ID: MRT4577_71067C.1
cggagataatctgtttccctggtggccgagagctggactggtgcagaaactacttgtctcccttctcacagcactcctcaccccggagcagagacaccaggagctggaagtcacagtactcccggctgtgcctctgcgacaccaaaggggaagctcttgtgggaggagcaaaggggctgcaccccctttggactcccccatgcacgttgccttatctctcccctctagccaggaatctgttgtttctcttctgccaatctactacgattgtatatgtgccgataccgccaacccgccatggggggagggg

SEQ ID NO: 152943 - DNA, 765 bp, Zea mays
  unsure (1)..(765): unsure at all n locations
  Clone ID: MRT4577_71068C.1
acactttccaccactgctactccatggagacagcaggtcagacgacactccaggaaagcgctgtgcacgcccggaggcaggcggcgtgttggtggcctttggacaccacggtatgcagctgggacttggacgacgcgagcaccttgagcaggagcctgctccttggatgggatccacagctctgctgctttggtagtctaggaggagcgatggtagctggtgccgccgccgatttctgtacccttcggcccacatgcatggagtctccggtgtccgaggcgtcagcagcggcggccaccggggagctggacgatgaactactactcatgagcctgtggggcgagtgccacctcttcagttcctgcagcgctctcaaggaggagacggccacctcttcccaacgtactcctaagagtttacaatctggtttaatttgctctcaacttctcaagtgctttctttggcctacctactccagtttaattagtagtttgcactgccgtttctttcttcttgttgtttttttttactgactccaaggactttggtactataaataaattgccattgatttcatgattgttgcacggttcctaacaaccaggacaagctttgatgattactactccattaaataatactccgaccacggcgcttgtgaaatttatgcgcgggcccactcgagattagcagcgcatgtatacgtatcatcatgcgcctggccggcttagcttggcacttggcaggcatagntcatatatttaa

SEQ ID NO: 152944 - DNA, 898 bp, Zea mays
  Clone ID: MRT4577_71069C.1
tgggaccctctcgagcggccgggggggagggacaccgctattcacccgaaatcaaaattccccatctcgcctcggctaggcgaatccgcaaacacagctccgtctatggcgtcctccgttcccgtggtcgacatcctcgacgacgacgacgacgacaacacctgcctcggcattgcctcccctgcctcgtgcaagcggtccctcggatcctccggaacctcttcccgcgacttcctcgacgcgttctcgccgtccccgcccctgcgaaagcggcctcccctcgcggcggtggcccccatcaacctcgacgacaccccgtctccgcccaagcggcggcgctcctcggtatccatcaacctcgacgacaccccgtcaccgccaaagccgcggctctcctcggtgcccaagcagccggtcggggtggacgacgacgtggcgctctcaccccctggtgatgttgttgccgacaggcccgattctatctttgactgggccgctttctccgagtcaccagagacggttgtgcccacttctgacggcctcggcagtcttgctgctgagactccgggcttcgcctccccggactcgattaggccacctgctgcccctgacatgtcaatgtcatctgctccgccggcacaaaaaggatctggagttacctctctgatatcacttgatagtgacaatgagtcagatgatgacatcatgaacatggagcctttgaccaatttgccaagcaataaggaagcgatgatgtgccaaaaggacggtaccgaacaggttcatgagaagcagaaaagacaaccggcagggaagaaactgacgaaggaggagaaagacaagctgatgcaagaaagaaaacaaaacgacaggaagaaaactactgaaagcagctttg

SEQ ID NO: 152945 - DNA, 1410 bp, Zea mays
  Clone ID: MRT4577_7106C.1
ctcgaggccggccgggaaccgaacgacatcttaatcgtcccaacgcatttccgtcttctcctccgacgagttcccccaatccgcgctgcctgagcccaccctgcctgcctcgccgcgatccctccgcgctgctcgaggctcctgtcctgaaccaatcgagaacgccgacttccggggacgggatcatctaaagccgcctccttcccgttgaatccgccgagattcggcgtgaggcgaggttaccgacttcccttgcgcgtagggccggcaggagcgcccgctggccatggcgtgccggggcttctttgagtgcgtcctcaagctcctcaacctcgtcgtcatggcggttgggctggccatggtgggctacggcgccttcctgctcgtgacctggcttcaggtcgcgccactcccgccgccttcgtcgtcgccggacgccgtgccacccagcggggagctcgtgcagctcgggaggccgctgctgctttttgttgatgcatccctgtcggatgggaccgcggagaggctctccagtgcctggtttatttttgcgtttattggtgtcggtgctatactctttgtcacatcgatctttggttgtgctggagctagaaatggatgctgcttgtctatttactcattcctcattattttgttcatactggtcgagcttgctgcaggaggcttcattttcttcaaccatagctggaaagaggttattccagttgacaaaactggaaactttgacatgatgtacagctttttgaaagagaattggagaattgcaaagtgggttgcacttggagctgttgtatttgaggcattgttgttcactgtagctatcatagtacagtcaggcaaccaaaccgactatgacagcgacgatgagtacatcggcgcaaggtccggaatacagcagccattggtgaaccagcaagctgctgctgctgctgctgatcctagggtgcccaatctcgactaccgcccaatccggaacgacgcatggagccaacggatgagagagaagtacggggtggatagcttcgatccgaacaggtttcagccggccaccatatctcctggagaacaaagaaaccgatgcacgattctctgaggcaagttctacatatatccaaccgcgcaattaacaccgagttgcagagagtatgcgcctggattattcggtgttgcctggctgtgtggcatccggagggcttcacattctcgtctgtattttttttttttttggtttacatagtccaaactcagcacaccagtgctgtttttgtaataagtattgaaccaagttcgtgttctagataacgttccaatgtgcataaaaactttcccctgttaccagacatgtctgttacggaaagcttttacatcgtcagagatgtccatgcgggc

SEQ ID NO: 152946 - DNA, 358 bp, Zea mays
  unsure (1)..(358): unsure at all n locations
  Clone ID: MRT4577_71070C.1
ggccgccatgtgctggcaatcgccctatacaatctcgcaggaacgcaggccttagccgcgtgcaaatccaggatgacatacttctgacgtgggctcgcattgtcgcgtgttacaataatgataataactatgtaggaataatantatagggaaaaaggatgtttggtaaaaaaaaaaaaaaattataaaaaaaggggggggggggggtaaataaaaaaaaaaaatgtataaaaaaaaaaaaaggggaggggggaagatggaaaaaaagaggttggaaacttggtggggaaaaatctaagggggaattttgggggggggattaaactgggggggggttatggttcatttgggggggcca

SEQ ID NO: 152947 - DNA, 432 bp, Zea mays
  Clone ID: MRT4577_71071C.1
gcacgagccgtcgttggcgtcttcaccgtgcgccgcctcgtgcgccgcggggaccagcggcagacccaggcggctgtccgcctcctgacaaaatggcagcgcgtggcgcacgcgcttcccgaggacctgttcgtgaaggtggccatggagccggaggtcgacgacgccggcgagaggcatccatcggtgaccttcaagtcactgttcctcgggaactgcagcgggatggtcgccgagatgagcgcccacctgccagagctcgacgtgagggcgggcgactgcagagagatgagctggatccagtcgacgctctacttctacgggtacacgggcgaacaggcggccgaggtgctcctggaccggagcctgcagcccaaggactactacaaggtgaagctggactacctgacgtccccgatccccgcggccggg

SEQ ID NO: 152948 - DNA, 242 bp, Zea mays
  Clone ID: MRT4577_71072C.1
gtcacgtggtggttaccccgctgtgagaatcccaagcagtgggcctctatatcgggagaggcccgcccaacaaatcctcttggctcaacatcacccaggcgtactcccactttttgtcgggggacgacgcccgcgtcggaacccatcgacccggagtacaccaccaaagcccggaagaccggaaaggcgtacaacgcaactgaatcctgccctggagagggaggctcgggagctgtagaccc

SEQ ID NO: 152949 - DNA, 539 bp, Zea mays
  unsure (1)..(539): unsure at all n locations
  Clone ID: MRT4577_71073C.1
ctgcgctctgcatgcccgggaggaggtctcccttgcccgtttggtcacctcttgtttggaagaaaatgtctttttttgcctctatgctcacccgtctcaatctagggtagaatcgaagcatccaaacttactcgttacttccatttcctggtttctcctagttttgtgctgcagtacgtacctggactatcaaaaggagcattttaaagcattttacagtaataatggctgctttgcaccaataatttgattgttatgcaaataaataattatgatagttaaaaaaaaaaaaaaaaaaaaaaaaaaaaaaaaaaaaaaaaaaaaaaaaaaaaaaaaaaaaaaaaaaaaaaaaaaaaaaaaaaaaaaaaaaaaaaaaaaaaaaaaaaaaaaaaaaaaaaaaaaaaaaaaaaaaaaaaaaaaaaaaaaaaaanggggggggccctttttaaaggaaaacaatttttaaaacccgtgggtttaaaaaaataaattttttttttagggccccccaatttaaactccggggcccgtttttaaaa

SEQ ID NO: 152950 - DNA, 321 bp, Zea mays
  Clone ID: MRT4577_71074C.1
gcctcttgtgctctttattttatctttttctttttcttttttttttctgaaaaaaagagcaggcgccttaaagggccctactccaatctaattatgtttctggagcacagggaggacatgctcctcttcccccttgaatatccagagaaaaagggcttttgaattttcttgagagaaaaaacgaaggcgctttgaattgtaaattttaggccacccccgattgaggggggggcccgcgtttgaaaaaattagggaacccaatttttcttccggatctattgaggaacctctggaccttcctcaggaacatcccgaagggga

SEQ ID NO: 152951 - DNA, 442 bp, Zea mays
  Clone ID: MRT4577_71075C.1
ggaattattagtaagtcatctcatagtgagaaaaattttatataagtaaaaaaacatgtagtatgaataagtcttacaatctatattgatatatagaatatcaaaaaacatttctttcgaatctaattagctaattaggaatttgatgttcatctcaactcaaaatttccatccttaattaagttcatttttccttctttatttaagcactgagggcacaatcctcacccttgtatcccttgttacattggcaaacaccattattgcaagtacctctacccatgcaaccacgagggcagaccttcttaccaatagtgctgcaatattcaacaggatcagggcaagaaatagtaccggcataaccagaaacactgacattacccttcttgctgcagacaacagacttacttccaaacgtaagggtaaagctagcactgctgcc

SEQ ID NO: 152952 - DNA, 267 bp, Zea mays
  unsure (1)..(267): unsure at all n locations
  Clone ID: MRT4577_71076C.1
tggagtaattaccgagtatttcattgcacatctcnttaattgaagccagccactcttgacaaggagtcttaaaatattctttaaactctgaatagtaaggtaaccgcacaagttacccttctttcttctacccctctagcttcggcatttcccattcttttaaggtaggaaaaacccggaaagccaaattctcttggaccaagtctcttgtgctgatatgctctgaaataattctaaactcatccaacgccttttggatgggacctt

SEQ ID NO: 152953 - DNA, 2748 bp, Zea mays
  Clone ID: MRT4577_71077C.1
gcccgggccggggaaataatccattgaaacgaactaaaactccgccgtccgcccgtccccggccttttccttctcttctcccactctcactatacccatttctcgagatctcggcgaaaccctagtgaaacccccgccgtgggggcaccaagacgccgcaatgctgcacgagctcctcctcgcgctgctcggcttcaccggcgacttcgtcctcgacgtctctctgccgcggcgccgcgccgcctcccaggacgccggcgaggatggaaacggagacggtgaggtgggcccctccttccgcctcgcgccggacctcaccttcctccagccatcagagaggactgctattgagaggctcatatctctgggattttactacagagaactgaatcgctttgcaaccgagtcccgcgacctgagctggattcagtcttctatagatgtttcatcacctcattctgataatacccagaaggggaaagtgagaaaagggagtgtgtacaggagggcaattgccaatggtatcactgagattctgtcagtatacagatcagctgttctgcaggttgagcaaaaccttttatcagatccgttgcctatcctcgcgacagtaactcacgggttgaacaagtttgaagtccttctgcctccactgtatgagcttgttatggaaatccagcataaagacatcaagggtggccagcttcttaatcttttgcacaaacggtgccattgtggggttccagaactgcaaagctgcattcagaggctactttggcatggacaccaggtcatgttcaaccagctgacatcttggatggtttatgggattcttcaagatcagtacagcgagtttttcattagaaggcggcatgagagggatgtggagaatgaatcatctcagcgtgatgtttctgataagttaaagcagaaattagctaaagacacatccctggctagttggcatacgggatttcatgtatcattggacatgttgcctgagtatatccacatgcgaattgcagagtccattctcttcgctggcaaagcaataagggtgcttcgaaatccaagtcctagtgctacattgcaggatcctgtaatcagaactgtaggatctcatggaatgcaaagctctgtaggaggttctggtgtaccaaaagaactggcaaacttctctaacatcagagcagaagaactactgccacaagcagaagctgataaaattgattctatgctcaaggagctaaagcattcttctgaatttcacaaacgaccttttgagtctgctgtcggctcaatacgtacaattgcagcttatttttgctggaagctagtggtggtacgtgctgatctcaacggtcatttgaaggcattgaaagattattttcttttagcaaaaggtgactttttccagtgttttcttgaggaaagccgccaattaatgcggttaccacctcgtcaatctacagccgaagcagatctcatgattccatttcagctggctgcactgaagactatcggtgaggaagacaagtactttaccagagtctcattaggatgctatcatatggtatgaaaagtagcacgtctcagaaagatctccaaaagcctaatgcttcagagcttccttcacaaggaaaagctgcatcagaattgacacttgatgggtgggatagtattgctctggaatattctattgactggcctctgcagctcttcttcactcctgatgttctgtccaagtatcgcaaggtttttcagtatctcatccgattgaagaggacacaaatggaacttgagaaatcctgggcagctgtaatgcataaagaccatgctgatttttctgattattgcaaggatcggaaaaataactctgcaacacaactgcgtcgacaacggtctaagcctttgtggcgagtaagggagcatatggcattcttgatcagaaacctacaattttacatccaggttgatgtaattgagtcacagtggaatgttttacaatctcacgtgcaagattcacatgattttacagagctagtgagctttcatcaagaatatttgtcagcgctggtttcccaatccttcttggacatcggatcagtctctaggatactggatagcataatgaagctttgcttgcagttctgctggagcatagagcaatatgaaactcggccaaatatttctgagattgatcacataactgaggagttcaacaagaagtccaattcgctgtacactatcttgaggagtagtcgcctcgcgggtagtcagagagcacctttcctgaggcaatttctgatgaggctaaattttaactctttctttgagaccaccgcaaggggagtgatgaattcaggaaggctgcgaccaatcactgcaggtgctcagctgtaacggtgatggtatgtttgggggtagtgctgcagcaagagacaagggaggagtttctgtagtttatgtaaattatgatcggatggtggttgtctgtcatggaaaaatcgattgcaggtgattcatgcttgtgccgttggtattgtgtttttctgtgcttccgtttgttaatgctatccagttcctgtggcctgaactgtaccttcgcaaattatacgctcgttcaccgtggggatctggctgacagatagtgaactgctgccactcttttttttttttactaaggccgctgccacttctgagctgtgagatgccatgtctatcaataataacggtaaggagtattct

SEQ ID NO: 152954 - DNA, 942 bp, Zea mays
  Clone ID: MRT4577_71078C.1
cggacgcgtgggttgagtttcatctttaagtttcccgggcttatccgtgtgagattttggagaaaaacaaatcaatgattgattttattgaatttacttgagataaggggaccatgcaagtatcggtgcaacagttttatttcagttgctagtttgtacaaaaatcagttatggtggatataatttagggtgttgagactaaagctcgacaaaaaaaattaatacagtaaaattaattaaggagatgtttgcgactactccgatccaccattttaagttctgctccaccaactccaccatgaagttgctccatgatcgaagtttttagagttttcaaactgcttagcttatagggggacttggtgggtggagaatgacttattataggtcgaccacgcgttcttcttgtttgacacaggtgacatgaggacgctgctttctggaggcgacgacgtcgtcgattttgctgtcttctcgggattcgtgacccgacacttcttgatccccgggaccacgatcattgcaacttctatggtattgaggcatctcgagctccgtgctaaaccgcatggcatgcttaatgaccgaagtcaatgtatgctcagtcatggaagttaagcggcataaaaacaagatgaccaagacttcagcataatgttgtgactaaggtcaaggcgactatggtcatggatgtaccagacgtcgtggaaaaggagctcatggtggcacatcatggaagaatgtggcacatggctcagatggtggtagttgttgaaactattcatcttcaacacactatcgaaaggtcgagcttttgaatcacccaacaagaatacctaggcatagtgattatcgacagttgaaccaaattatttttttgtctttactagtatccaagtttacctttttatagggtatgattacatgcattttgttttatat

SEQ ID NO: 152955 - DNA, 311 bp, Zea mays
  Clone ID: MRT4577_71079C.1
cattacacgtgccgagacattttctgagcagagcccaggacccatggccgtcgccgacgtcgcaacgtctatgtgcgcggcgcatgggctccggaagcccctctgcacccgcagctacgcgacgtcgctcccgggcgtcgcgctcgcgccccgtcgttcggcggcccggatggccgtcgtccgggcgtcgtccgcgcatcaggagcagcacccggccaaagagtgggccgccgcggcggtcgttgcagctgcgctggtgctggccgaggtcgccgaggccgagcccgggatctcgccggcactcaagaact

SEQ ID NO: 152956 - DNA, 1171 bp, Zea mays
  Clone ID: MRT4577_7107C.1
cgggcagcaatcgcagaaatccgttaatgctgggcccaaaaaccaccggggaatccgtcagagctctctacccagttacccacacgaaggaataataggctaggccgccgaccgccgccatcgagtcgcactcgcacgccgccttcatccccctgtgctgcaggcccagccggacgctctctcctgatcttcctccgccgtctcctcctgtcacccgcttgctttgaatccctttcttctgctccgccatcgcgacgcgccgacatgactgggtcttctaagaagcatgacctcaaatctaagcaaaaattggaaaagaagattagtttttacacaaaagtaaaagatgcagttacttccttaaatgctaagaagactgtcagtaagaaaaataaacagagtcggcgccagaagaagcttaaagcatacgatctgtcggcactttctgagttcctcccagaaccagctgcaccagagcagaagactgaagcaaagctgaactgcaagtcaagacagacattagtggtgcaggagtctgctcatcttaaggctgtactggacaacccgcagttccagcttgacccattcgctgcgatccatcagcacctgctggcaacgcagccgcctgcagctgcaaagaaggacgacgcagcggggaagcaggggaaggtttccaaggacaagaaaagcaggaggaagaagggcacatcgtcaatctctcaggcaatggatatctgattgtgttccttcagtactagtaacttggtccgatgtcgactgcccgtgttccactagagggagctcatcgaagttcgatatcgatggttggcatagtttgagtaccagtagaggtagtactgtaccagccctcgcttttggcagcctgtcgattgatgtttgcagaatcggtgccatcaacatttggtgctactttggaaactggggattgaggagaggattgagggagaaaatgaacttgaggggattgagagggtcaatcctatattcctatatgaggtggcaatttccaagcacaacaattcatttgttattaaacctgccgactgtttctgaatccaaatcaactaaagtaggaagcttggaaacaagcgctccaatttcatacgtttgatatggtctcagctgtaaaaaaaaaaaaaaaaaaaataat

SEQ ID NO: 152957 - DNA, 301 bp, Zea mays
  Clone ID: MRT4577_71080C.1
agcagtggtaacaacgcagagtacgcggcacctagctagtcatccttgccgacgacgatccatgtctctgtatctgtgtctgttcatatgcctgatgccgacttgtgctgtatgtagttgcttgaattcagtcgtgttcctgttttgctaccgtacccaccccatgcatcatctgtcaccgcgacgcaataatcatagtaataacaagttcagataatcgaattcattcgctgctgtactcctcctcaaaaaaaaaaaaaaaaaaaaaaaaaaaaaagtactctgcgttgttaccactgct

SEQ ID NO: 152958 - DNA, 299 bp, Zea mays
  Clone ID: MRT4577_71081C.1
agcagtggtaacaacgcagactacgcggggccatcaccaagaacacctagctagtcatccttgccgacgacgatccatgtctctgtatctgtgtctgttcatatgcctgatgccgacttgtgctgtatgtagttgcttgaattcagtcgtgttcctgttttgctaccgtacccaccccatgcatcatctgtcaccgcgacgcaataatcatagtaataacaagttcagataatcgaattcattcccaaaaaaaaaaaaaaaaaaaaaaaaaaaaagtactctgcgttgttaccactgct

SEQ ID NO: 152959 - DNA, 824 bp, Zea mays
  Clone ID: MRT4577_71082C.1
ttttttttttttttttttttctttccatctgataataatatgacatttctcgttcaagcaattcaggtgtacatcaaaaggcacaggtaacgaaacatgcactctccacacgagcatatacagcaagcaaaggcttcatgttttgcgtccctggactcctggtctttacagagaagaaatgtacacggaaaactagctgtccgcagaaccagttgcgtgcacttggccttttgcacgcaaagggtaggaatgaacaaaaaccaaattccttgccccactttacccaaaaactgaaaatgaagacgaaaatcaacaacaagagaacaaaagggcttccaagatctccaacttcctcccagaaagtcgtcgaaccatcaccatcaaggccaacaatcctctcaaacttctgctggctacgccccccttccagctacaaactgataaccgaatttccctgggagcaatattaactccgcgggccttccccgtcctggccatcggccccctcagacttccgctggccgagcgccggtaccgcttcccgagaaacacgccggcgagtacggacagcagggcgactcccaggatgaacttgaaagccatggtgccagaaggttcttgtacttcttgcagggtcgggctcggcgaggccttgtcggcagcctgagttctgtcctgctgtttgaccaaacttgataacgagtccaggctaaactcacgggatctcgactccaagacatccgttgcctgttcgtcagacttggaataagctagctgcagcttctgctcaaggtcctgcaccttcttctccaattcgacactct

SEQ ID NO: 152960 - DNA, 293 bp, Zea mays
  Clone ID: MRT4577_71083C.1
gccttaaccactgcatcagctgatatggttgaaggcatggaacatcttaattgagaatccccttctttattaaacacaactactctgaaaccacaagaaatgagaccgggactactcggaggatttcaacaccacaatgtctagaaagcaggacgcctagatgaccatatgtgaataagctgacattgatgtggcattagtcctatcctcactccaaaggcaaagagacctgaattggtgctataatgccaacaacacattgtacagaaacatggtcgctgacatgttcatat

SEQ ID NO: 152961 - DNA, 264 bp, Zea mays
  Clone ID: MRT4577_71084C.1
gtaaaaaaaaaaacacattttaaattagaaagggggggggggaaaaaaaaaatctgaccccgtttttttgggcttaaaaactacaggggcctaaaatgaaaagggaaaaaccccaattttttttgtttgggggggaaaaaaaatattttttaggctttggagctaaaaaacaaagatgggaatcgaaaactacagggtttgggtttgcaacgttggggaaccaaacaatgcaattttaaggggtgaaaccgttgggcttaaaaa

SEQ ID NO: 152962 - DNA, 233 bp, Zea mays
  Clone ID: MRT4577_71085C.1
cggacgcgtgcggagcccgccatcttttctaacaccaccacctacatccccaaggcgtgcttctaccaccgaactatccgaccgcccgagtatccaccaatgcagattgcgaccgacgccaaggagatcgcaacggccgccaccctggtcacgccactagcgatactgggcctacgaacccgcatcagccgagtagaagcgagctgcggactagacaccacctacatcgcaca

SEQ ID NO: 152963 - DNA, 1657 bp, Zea mays
  Clone ID: MRT4577_71086C.1
aacccctgccctgaattctgaacgcgagcgcgcgcagagctggggcgctccgcgctcccggtctcggactctaggctcgctccagtttccggctggctccaccaacaaaaaccaacgctgcccctgcccctctctttgctcccgagacccgcgctcccctccgtggcgtgcaacgcgttcctcggctcctgcaggcggcgacctcggaaaggcgggggcgtctcgtcgcgaggtcttgtctgtggattgaccaggcatttgaggccaggattttttggtgctctcattgttagctgactggtgagggtctggatctagcaatggcggaaaacacccacggtagtggtcgccacgtgcttggggacttgacaaatgttatttgcaagcgagcagccacatcagatctggagaagagtacaggtgggataaagatcagacggattgaaaagactgggactaggaaagagtacgatgcaaatgcaaaagctagcagtattgggaaaggaattgtatttggccatttgtttgatgatgttgccagagagaaatttcaaagccattctatctttcagaatagtagggttcaacacatagctgccgaagcagctggactcttatccaaggaagccaatgactcgaagaaccactatgcatcaatcggtccattagatctcagtgataaggagcaggattcttcacttgaatctgaagacgactatgatgatgaagataatgatgagacgaatggtgaattgctgcaccattttttcagctcagagctagctaataaaatgtcaacaaatgatggtgagtgcttgactcaggaggagatagttgggtcatctggaaatcagaaacctctgtcttcattggatgctacgacaggtggtgacttgccaatttctagtgctcagcatgcttctgtgagaactggtggtttggaagaagctgttgccccaaaatcttgtgcttgttctttctgtctcaaggctgcttttatgtggatggatctccattatcaggatgcaagaagccggctttctgtattgaagaaaagcatcaagtttgccaggtcattggaggaaaaatgtagaggaaatgaatatgcggccaatgtagctggatatgaatcaaagcgagctgtgggagtggagtttgaactatctcaacaacagagatcactctttctttatacagaaaatgcccttgtccgtgagtcaacgcagcttcattctgcttttgtgaaactgaaagaattgagagagaactgcaagacagatcttgagacgctcagcaattcttcaatgagaaaatgagtgctgcatgttgcgttgctgaactgttagtttcctgagacttagtatgatcagctggcttgtcttgaagcaagatgtgctgagattgaaccacaacttaggaattatggtgcttaccatcaatttgggacttcaatttggctgtagtgattattcctatcataaagcgttggtctagtatgcttgtagctgatgtaaaaataaccatggtaaggtaggaactgtatgtttgtctcgttgaggcatcgtcatcttcacttgtaccttgcagtgagcttccttcatatgaacattctttccacgttctccaaacaaaagggaaaaccatatcgtttcgtgct

SEQ ID NO: 152964 - DNA, 601 bp, Zea mays
  unsure (1)..(601): unsure at all n locations
  Clone ID: MRT4577_71087C.1
atagaaaaaggaaactttcttgggcgtctcttgggatctgatgtacacggctctagggcggcaccggctagcacatctgtgcgaggcaggaagaggccaggagaagatgcagatattcaggtagacctttatggagaataccatgaccctagcggtggagaggctcgacacgcgagacaacgacaaagccgacacccaacacgaggatgggatggccgctgatcaatcagtgactggtatacgctggcgagcggctcgagggtggacgcgctctgggtgactacaacagtacgacaggagtcaactgttgattgggaccatatgcttcggggtgggaccgtgatcaaggagcaagctctgactggacaacagcatgagagcgtcattgaacgcgctgactcgatagacaggatcaaggagcgcgtcgaccagaaagaacgcattgctcccgtgcgggacatagctcatctatgttggcgagcaggtcgctgttgacaagaccggataggactaccacatcgagggtggatctgcactgcatgttgctcttgctctgatgggtnggctactagtctaaacctgatgaactagcacggcagat

SEQ ID NO: 152965 - DNA, 932 bp, Zea mays
  Clone ID: MRT4577_71088C.1
cattgggtacctcgaggccggccgggggacgacaccggccatcgggggcaggtcttcctctcaggccaagtctactctctccctccgtctctcagatccacgctgcctagttgttcggacttcagaccccgccgtgcgctgcccatggccgcgggtcgcggcgacgccgcgagcatggtggcagtgggtctggtgtggggcgccaccaacgcgctgatgcggcggggcgcgctcgtctgggaccgccgcgcccgtgcctgcccctccggtaacgtcctccggcggtgggcggagctgctcctgacgtggcagtactcggcgccgttcgccgccaacctgagcgcgtccgcggccttcttcgcgctcctcggcgccgcgcccatctccgtggccgtccccgtcaccaacgccgtcactttcgccgccacggccgccgccgccgcggccctcggcgagcgcgtccggccagcgcccgcggtccttggtaccacgctcatcgtcctcggcgtctgggtctgcatctcgtaggcttaggctgaagatctgcttggtttggttctggcattacagtcgcatggggaaaaaaaaggaagttttgagggcaattctcagattccatttcacccctctgtgctgtgttgccaattgccatatgagtgaattatgcccagtttgttgatggcagcggcgtttcattagctagatggtcagaatataatgcagtttcattctggtaattttggttactgaatccatttctgcttaggtgatgaatgaatataacactacggttccattcattacatcctgagggttgacatcccacagcagagcattcttctacccttggagctaatttgagaaccttattttatcaattgatttttaaattatcttgggaaatgaaaaaaaaaaaaaaaaaaaaagcggcc

SEQ ID NO: 152966 - DNA, 349 bp, Zea mays
  Clone ID: MRT4577_71089C.1
aactcatgtattttcctctcttactttgcagagaaaaccagagattactgcggctgggacaaaaaagtccagctctacatgaggggcttgagcaatgtacacatgggtagccgaaagacaagccttatcctcagctacaagctatacacaacctgagggggggttaaaatgtttcctgcttttacagcaaagtcacactttagaactggtccctaaacaggccaccaatgaccttccgcaggacagggcgcgactgccgaacacccgctctgcttagggacgatcaggttaaccgttaaatccatcaggctgaaaagaatgcacacacaaagaaaaacagtttgactct

SEQ ID NO: 152967 - DNA, 2200 bp, Zea mays
  Clone ID: MRT4577_7108C.1
ctctgccgtcctcgttcccggccgtccgtgccgaaggaagtatctgctgagtgctgacccagcccatggctatgtttcaggaacggttggtgatgacagctggtacaagacggtcattttagctggtggttcgtcgtgcttgcctggtttaccagagaggctggagaaagagcttcaccaacttcttccaccttatatgtcagaaggaataagagtactccccccttcatttggcactgattctgcctggtttggtgcaaagatgatcagcaacgtgagtactttcactgaggcatggtgtgcaaagaagaaacaattccgtcagaagacaggccggagtggtacattgtttgccaattcctggtaatgaaaatctcagacacaagtcacgagcaagaaacttaaagagttccccgcatcaaaaatacggacataacatccgctccatgctcccctgcgcctccacgaggctgtactagcataagcagtcataccccgtatatattcaggttaaaggtcatccagatatggattctgggcctgtcaatgttgaggttggatctggatatggcacgtatggctgtagcaagtatgctgctccttccgggcgttgtgctacattcttggaattcggtaacattgaagcacctatgtatgcaaggcttcgtcacttcttctctacaatatatacgaggatgcaaataaagccttcgactcagccagttattgttgtccttccactgtgtcactctgatgataccgagtctgctagggcctcaagaaaacaatacaaagagacactgtactctgtcttgtttgacatgaatgttcctgctgtttgtgctgtcgatcaggcagttctatctttgtatgcttctaaacggacctctggtattgttgtgcacattggattcaatacgacttctgttgttcccatctttcaaggtagggtaatgtatgagataggtgttgaaactgtggggcaaggtgcccttaaactcactggatttctcaaggagttaatgcagcggagaaatatatcctgtgagtcactgtacactgttcgaaccatcaaggagaaacttgctacgtagctgctgattatgaagctgaattgcgtaaagatacacaagcgtcctgcgagatcgatggtgaagggtgtttcactctgtcggaagagagattcaagactccagaaatcctatttcagccccatatgggaggaatgtgcgaaatattcagatattgtttgatttgtgcatcgattacagtttagttatggttggtcaatgttgatcttgcccttgcaggcgtgctatgggcttgcataaagcagtatctctatgtatggatcactgctatgtttcaggaacggttggtgatgaccgctggtacacgaaggtgtttgtagctggaggtgtgctgtgctcttctggtttaccagagagcttggtgatggagctccaccatgttcttccacctgatatgtctgacggaagaagagtgctccccccttcatctggtacttcttctgcctggcctggtttacaaatgatgcgcgagatagagcttctcaaactttcacccccttataagtaggaagaaataagagtactcccccgctcatttggcactgattttgcctggtttggtgcaaagatgatcagcaacgtgagtactttcactgaggcatggtgtgcaaagaagaaacaattccgtcagaagacaggccggagtggtacattgtttgccaattcctggtaatgaaaatctcagacacaagtcacgagcaagaaacttaaagagttccccgcatcaaaaatacggacataacatccggtccatgctccactgagcctccaccagtatatagaagcatgagcattcatgcccagtatatattcacgtccatatcatgcatatatggattatgagccagtgcatcatttggtggtgttgttataggatgttttggtaagttcgttgtggttataggttgttggcaaaagcgcagttgtctcgttttaattttaagtggaacgattaattagttattgagcatgagtctttgtttatagctatatatgtctcatgaaatttggtacagttctaaatgttgtaaaacgcaataaatcattttataaatgagatatgtctttattgctgttaaaaaaaaaaaaaaaaaaaaaaaaaaaaaaaa

SEQ ID NO: 152968 - DNA, 418 bp, Zea mays
  Clone ID: MRT4577_71090C.1
tttgggaagatggatggacgactgtcactggtgatggtgagctgggctgctcagtttgagcataccatactggtcactaggaatggtgtagaaatattgacgaaagtttgagttagtcacttagtctcctgcctgattcttatcagaagtgactcatccattttcccaatgagatggctgggcgggagttctctactaaaatgttctaggcccacacatcgcgaaggttttccccatgtagctaactggcagggtataggtgagggcacacatagtcatagtcacagttgcatctgtgtcattgactcattgctggtctcctgcttgctggggaagtcctgcctgtggatcctagaagatattctgtctgtgaaatagcactggtgacagttgatgttgggagatttgtaaggaatac

SEQ ID NO: 152969 - DNA, 367 bp, Zea mays
  Clone ID: MRT4577_71091C.1
gacccacgcgtccggagcagacttacgagacatacatgtcgtgtggatagagattctcagttgagtaaatcctctctaatcggtgtgatatgcccggatctctgacccggtacctaaggcaggaggtaaacattaggtataaaaatgatgttgaattgatgcaacggtgcaatcggactaaatgctaccaaaccattgaaagtgaggacgcaattgattaacggatcgctgcataagtatgtaagctgatgcttgataaagcctgttactagattgctattaaaccagcactatacctggagagtcatcttaccttacatgggcatgactcgtgaaggcacactttgcactctgggttttgaaaccc

SEQ ID NO: 152970 - DNA, 330 bp, Zea mays
  Clone ID: MRT4577_71092C.1
cccactcgtccgaaaaaaaaatttaactttttaaatctaaataaaaaaaactaagaggatgagtaaactttccaaagtcccaaataatatcttactttaagaattccatcaacaatctcactaacaactaccttcagaatccacatctcaatctcaactacttgctagaaatcatgattctgatcaggaaactcatcttgaaatacaactgaaagtgtagctcatcttataagacaacttcacaaaataagacactccataattcacaacatatcaaacgatgacttttgctcctattgatgaccctttctgtgctcattgcatctctct

SEQ ID NO: 152971 - DNA, 942 bp, Zea mays
  Clone ID: MRT4577_71093C.1
caccgttgctgccgcagagaccgttgagagatcatactcggggaacggtacgctgtggcgaggaatgtggactactactagttgcttaataatatgacaacgcattggacgcaagatcccctctgaatcttggcagtatttttttcttatgagaagagggagtgaagagagctggactggagggtgcaaggaactattatacctattatactaatctttttcccagatcaacaaggacacgcaattaaacaagcagcagcagggggaggtgggggtgtgtcagctttgtgctttgtgggtgtccctcctctggctcactgcccccctctctctcactccatattgtttacttctcctgaggtacttgtgctcctgctctcccctcctggcctcactgcctacgatagcagcagcggcaccggccgcataagtaggttgggggggagggctggagtgcgcttcaagcacgagagcgctgttgctgcgtctgaaccgatcccattatttgtttggtttcgttgtacgagcgatctctctcctggccgggctccggcacgttgtaatattcggtcttctcggcgcagcagcaacttgttcttgtgcactgctacttcgctgctctgggccgtttgccgttgatgctgcggacaagtatgggatagtgctgctgtgctgtgcagttcttgcttcttacaactggtagtggtggtctggtctccgtgtgagcatttggtctagaagagcgtgaagctgtgcggctcttctttcgtattcaagatgaagttcatgaagcttggatcgaatccggatacctttcaggacgatgggaatgaagtcaggtgacccatcgcttcttttgctatcttttcccttgcttctttaatgctgcctttgaaccctcgtgttgttctttagaatctgactgattttcttttatttcag

SEQ ID NO: 152972 - DNA, 418 bp, Zea mays
  Clone ID: MRT4577_71094C.1
caatccagcacacatcaaaccatacagaccattacagcgcagcaacaacaacaacaggggctgccatcactgaaccacctaatcatcttgaaccctgtcacctacttgcaacagcagctgctatcatacaacccacttgctctgccgaacgtagctgcataccaccaacaacaacagctgcaacagcatatgccagtgatcactcaactagccatgctgaaccctgccgtctacctacaactactatcatctagaccgctcgcagtaggcaatgcacctacctacctacaacaacagttgctacaacaaatagtaccacctctgactcacctagctgtcgcaaacccttcagcctacttacaacaattgattccattcaaccaactgaatcagtcaaactctgatgcatacctacaac

SEQ ID NO: 152973 - DNA, 3038 bp, Zea mays
  Clone ID: MRT4577_71095C.1
aggaaagccttccgttccataaagggtttgctgctccctgccttcttcttcttggcatcttccgtcaaaggagaccgttgagagatcatactcggggaacggtacggtgtggcgaggaatgtggactactatctggttgcttaataatatgacaacgcattggacgcaagatcccctctgaatcttggcagtatttttttcttatgagaagagggagtgaagagagctggactggagggtgcaaggaactattatactaatctttttcccagatcaacaaggacacgcaattaaacaagcagcagcaggggggaggtgggggtgtgtcagctttgtgctttgtgggtgtccctcctctggctcactgctcccactccatattgtttacttctcctgaggtacttgtgctcctgctctcccctcctggcctcactgcctacgatagcagcagcggcaccggccgcataagtaggttgggggggagggctggagtgcgcttcaagcacgagcgctgttgctgcgtctgaaccgatcccattatttgtttggtttcgttgtacgagcgatctctctcctggccgggctccggcacgttgaatattcggtcttctcggcgcagcagcaacttgttcttgtgcactgctacttcgctgctctgggccgtttgccgttgatgctgcggacaagtatgggatagtgctgctgtgctgtgcagttcttgcttcttactcctcctgctcctggtggtggtctgagcgcattggcctgggggagtgagaggctgcaaggcaaggtggtgtgctgtgctgcgtacttgttcgtcctttgaacctctgtttctgtcaagatgaagttcatgaagcttggatcgaacccggacacctttcaggacgatgggagcgaagtcagaattgtggaaactgaattggtgagtgatatcactgttcgtctaggggacacaaagttttaccttcacaagtttccacttctatccaagtgtgctcgctttcagaagttgatcccaactactggtgatgaaaatattgatatccacatccatgacattcctggtggcccaaaggcttttgagatatgtgccaagttctgctatggcatggttgtcacactcaatgcgtacaatgtcgttgctgcccgctgcgctgcggagtacttggagatgaatgaaactgtcgacaagggtaatctgatctacaagattgatgtcttccccagctcaagcatattcaggagttggaaagactccattattgtccttggtacaacaaaggctcacttaccttgggcagaggatcttaagctggttagccactgcattgactctgttgcttcaaaagcctctattgacgtttcaaaagttgaatggtcatacacatacaaccgtaagaagctcacagttgagaatggtcatgattcgccatggaatggagtcaagcagcagcagtttgttccaaaggattggtgggtcgaagatctgacagatctcgacattgacgcctacaagcaagtcataacagcagtcaaaaccaagggtacggtgcccaaggatgtgatcggtgaggcgattaaagcctacacttacaagaagctcccgtcactaagcaaggtctcgatgatccatggtgacgcaaaagttcgggctatgctagttaccatcacatgcctgttgccatccgagaaaggttcggtttcgtgcagcttcctcttgaagttactgaaggcaacaaacttgctcaagtgtggagagatgtgcaggaaagagcttatgaagcgcatcgcacggcaactggaagaagcgtcagtgttagatcttctgatccctacggtggatggggataccaccgtttacgacatcgacctgattcttagcattgttgaagaatttgtcagacaagatagcaagaatgcccagagacataacggtggtgaggtgaatgaccacgtatctgctcctagtgcgtcaatggttgcagtggccaaaactgtcgatggatatctcacagaggttgcaagggacccaaatataccggtctacaagtttttcagcctagctgagacggtttcgaccggttcaaggccggttcatgatggactgtatcgtgccattgatatgtatctgaaggagcacccaagcttgggcaagagcgacaagaagagattatgtgccctgatggactgcaagaagttgtcgcccgatgcgtgcgctcatgccgtgcagaacgagcgcctgcctctgaggatcgtggtgcaggtgctataccacgagcagacaagggcctgtgccgcagccaccgccatccgagccgacagcatcggcatcggctcctacgagagctcaaggtcaggcgccacaacgaacacagaggacgagtgggacggcgtcatggccgtggaggacctcagcctgtccaagacgacgaagctggtggacaaatgcgacacggcggccagtacggtcgtcgtggggaaggacaaggaccacggtggcaacaagggcgccaccggcagggtggcgaaaggtggcgctggcgcggcgacaccaaagaaggcgctcgggaaaacggtgtccggcaaagggcagaccggggagcgcagcagctcggactcatccgacagcgccgtcgccgtcgcagtcttgacgagccaggagcatcccaagaggacgacccgcgcaaggagcgccgccaagtcggctgctgcgtagcccttccgctgagagaaatgctcaaggagcactagctaggttttagcagtcgtctgttctttgttattacgagtgttgcatagaagccaggaccatgttttttacacgtctgtagctgtagggatggtgtaataccaggtacgtgcgttgttaggtgatgctgttagcacgtaggttccaaacctatgagaccttgggctctgctgggtttatgtcgaactcgcagttgtgttataagaatcctactttgatagacttaactgttctgcaaaaaaaaaaaaaaaaaaaaaaaaaactcgaaagagggcgccggtac

SEQ ID NO: 152974 - DNA, 228 bp, Zea mays
  Clone ID: MRT4577_71096C.1
tcgtaacagcagtcccatctagagacgtgcgggagccaaactctatctagtccaacccccagatcctcattcccagggtttatgaacatgacatcttcgtcttgacatctatcgaatcgcctgatgattgcaccctctaacaagccagaactagatactaatatcacttcaggctcccttgcaataactgactctgagtctacgcaggaacgccaccctacaatcatc

SEQ ID NO: 152975 - DNA, 157 bp, Zea mays
  Clone ID: MRT4577_71097C.1
aaatgatactctttggttagccagccgaaattctctagcctggcagcagccatgggataagcacaagactactacgacacctccacggctctggccgccgccgccgccgccgccgccggcctcgcgctgctcgcggtctgctcgtactacctgctcg

SEQ ID NO: 152976 - DNA, 335 bp, Zea mays
  Clone ID: MRT4577_71098C.1
cgctttttaatagcaggtcgtggtcgcatcaaagatggagcacgggaggaaatgatgcgaggaacgccaggatatgcgcatgtgaacgaacctctccatatattggctgaggcagatctacctgctgacataattgatgctacgcctgatgcaagcccgccagatgcttcaagatctgctaaagcctggggatgaatcccaggacttcttcaagatccatgcacctaccgttgctcccgatgcttaatggcactcttcgtgaggaagggttgcaaagtttctgattatacgcctgttgacacaacagtcttggaatgaagagaggcacgacaagg

SEQ ID NO: 152977 - DNA, 964 bp, Zea mays
  Clone ID: MRT4577_71099C.1
atctgggcgcggctgcccggatgcccgacgcccgcgggatcctcatcaactcgttcgagtcgctggagccgcgcgcgatgcgggcgctaagggatgggctgtgtgtgccgggccgcgccacgccgccggtctactgcgtcgggccgatggtctcgcccggcggcgacggtgccggccacgagtgcctccgctggctggacgcgcagccggaccgcagcgtcgtgttcctctgcttcgggagtttgggcacgttccccaagaggcagctggaggagatcgccgtgggtctggagaggtccgggcagaggttcctctgggtggtgcggagccctcccggcgggccaccagccgacgacgtgcgcgcgctgctcccggcagggttcgcggagcgcaccgagggcagggggctcgtagtcgcgtcgtgggcgccgcaggtggacgtgctgcgtcacagggcggccggcgcgttcgtgacgcactgcgggtggaactccacgctagagggcgtcgtggcgggactgccgctgctgtgctggccgctgtacgcggagcagaggatgaacaaggtgcggatcgtggaggagatgaagctcggggtggaggtgaggagggacggcgagggcctggtgacggctcaagaggtcgaggcgaaggtgaggtgggtgatgcaggactccgacggcgcgcgggagctcaaggaacgcgcggaggcggcgagggcgagagcggccgaggcgctggcggaagggggtccgtcgcgtgcagctttcctcgagttcgtccaagacctgttggcttccgaaggcatggttaacgtttgaagtttgacgagtgtatttacttgtaataaaaaacaataattttcgttcaagaaaatatacagcattggagttaaaaaacaatttcaatttaactaaatttataataaataatccttaataaaaaaaaaaaaaaaaaagcggcc

SEQ ID NO: 152978 - DNA, 2607 bp, Zea mays
  Clone ID: MRT4577_7109C.1
atggtgcaggagctgatggctcaacagaatgagattctacggcagctattgcagcgccagccccaccctcagcaatatggtggaggccagtcgcagcgtcctccggccgcgacaacctatcaagagttcctgagcacgcaaccgcccctgttcactaaggcagaggatccgctagatgccaacgtgtggctaagggttgtgaagtcaaagttcccactcctcacaggagcttgccctgacgacacgaagactcgcttcgccgcacagcaacttcgtggacctgctaggacatggtgggaccatttccgcgccatattacctgctgaccatgaggtgacatgggaggaattcaagactgctttcaggggacaccatattccagcagggattctggatcgcaagttgaatgagtttccggcattaactcaaggaaccagcactgtgttgcatatgcgggctatcatgcagattctgatgaaaagaagagagaccttttctgtagaggtctcaacaccaagttgcaattgcccatggaatcagctaaggcagatgccagcacccaaccaagaccgaggaaggaagcaggaagtgcaagttaggcaaggaaagctcaacttcactactgtggaggagttacctgaaggagcacccgtcatgactggtacctttttagttcttaatcaaactgcattgattctatttgactctggtgcatcgcatagcttcattagccagaaattcagcgttaaatgccaactacatttctatcatacccaagggtctttcatgatagcaatgcttgggggcaaaattgcaacaaaccaattaaatcgaaacgtgcctattcaactgggaagcaaaattgtcaaaaccaccctcctcattcttgggatggataatgtggatatgatttttggagccaactggatgacccagcaccaagtagtgctagatgtcgccaatcgcatcgttgaagtccattccccaacctgtggagggttcaccttattttttcccagccaaggaaccactcggtcatgtgtgttttctatgatagagttacccttgaagaaaattccagtggtctgtgagtatgcaaatgtttttcctgatgagttgccaggaatgccgccagatcgggatattgaatttgctatcgagttgcaaccgggaacgacacctattttcaagaggccctaccggatgccacccgctgaattggcaaaattgaagaaacaactacaagaggttttggacaagggtttcatccgcccaagtacttcaccttggggatgtccagccttgttcgtaaagaagaaggatgaaagcttgagattatgtatagattaccacccgcttaatgcggtgactatcaaaaacaactatcctttgcctctcttcatgcttgaattggacaaatttgtggtggtcttcatcgatgatattctagtgtactcgaagaatgaagcagagcacgccaaacacttgcacacagtactccaatgtctgagagagcaccgcctttatgccaaattgtccaaatgtgatttttggctaaaggaaatcaaattcttgagtcacactatctctgagggaggaatagatgttgatccagataaagtggaagaggtgatgaattggaagccgccaataattgtttgtcatattcgaagttttctggggttgaccgggtattacaaacaattcattccggacttctctcgaattgcgaagcccatgacaaaattattgaagaagggagcaaagtttgattggggtcagaagtgtgaagatgctttccacgccttgaggcagcatctgacaacagcacatgactacgacttggaagtacactaccacccggggaaagccaatgtggtagttgatgcattaagtcgaaagtcgcaatgcaactgtatgatgatggattctcgcatcaataccctatgtgacgagttgagtaagatgaggatcgaagtaattccttctggtaccttgtctcacatcttcgtcgagccaaccttgctagaccagattgttatggcccaactcagtgacaagggagtgcaaatcatcaaagagaatcttagtcagaaagtggagaagtataagtgcttttgccaagacaacaaaaggatactatggtttgaagacagattggtggttcctaaaaatagggatctcaagaagagaatcttggatgaggctcatctctccaaattctccatgcacccaggaagcaccaagatgtaccaagatctgaagcccctatattggtggaccagaatgaagagggagatagcccaatatgtgtcggaatgtgacacatgtcagaggataaaggcaagccacttaaaattagttggtgccttgcaacccctgtcaataccttcatggaaatgggatgacctcaacatggatttcattgtgggtgtgcccaacacctctcgacatcatgattcaatctgggtcattgtggaccgattgacaaaattggcacattttcttccagtgcacaccaccaataaggctcataagtatgcagaattgtatattgaccgaattatgtgtttgcacggattaccccggacaattgtctctcactga

SEQ ID NO: 152979 - DNA, 562 bp, Zea mays
  unsure (1)..(562): unsure at all n locations
  Clone ID: MRT4577_710C.1
ctcgaggcccggaggccgcgagaccgagacacctgtacgngaggcggaccccccgnncaacaacaccaagagggagagcaacgcgagccacagcggccaggcgggcacccagggcggaaacgcgagcagggagcngaacagccgcgagcagggcaggcaggcggagggccagaagcccggagacaagaccaaagggggaggggacgacgcagacaacaccagcagcagagagacaggcgcggggaagcacgacccccgagcggggaacgacgaacaatttttttttttcctccccccccccaggactggcacctaccggcagctcttccatcctgagcagctcatcaaagacaaggaggatgcagccaacaacttcgctcgtggtcactacaccattggcaaggagattgttgacctgcgccttgaccgcatcaggatgcttgcagataattgcacaggtcgccagggcttcctcgtcttcaacgcagctggcggaggaacgggctccgggcttgggtccctcctccaggagcgacggtcggttgactatggcaagaagtcc

SEQ ID NO: 152980 - DNA, 262 bp, Zea mays
  Clone ID: MRT4577_71100C.1
attcggctcgagcaacgacaatttttttgtacctcatctctgaagaccctccaggaggtgatatttatggtgccggtggaaccagttttactggacactgaggccactttgatggggctgttgttgactggggtgtagatcacagttagctaatgaatacattttgtgacttaacagctataaacaagctgctgacctgccgagagtttaaattcggttgttatgcactccatggtgatgcactagcttactgtcatacaca

SEQ ID NO: 152981 - DNA, 399 bp, Zea mays
  Clone ID: MRT4577_71101C.1
caattaatcgatacgaaatcaagcatgagtatgccccgaaccaataaatggtgatgatacaagtaattagaatccacccgcccaaaattagatacgtgtaacccgagcagccaggtgatcagaatcagaacaggtacttggacagcacgtacttgggggcaggcctcctgtccccgagccagtgctgcatgtgcacgccgatggcgtccaggtgctggtcgctgcggccgtggaaccccaccaccttcccctccgtcgtcgccgacgagaagtaggcgccgaactcgtcgccgaacggcccgtacttgcccctgttggtgaggaacgtcagcgacctcaggacccggggcccgtcctccttggtcgtgttgtaaggagccgtacacgcacgtgagcacc

SEQ ID NO: 152982 - DNA, 362 bp, Zea mays
  Clone ID: MRT4577_71102C.1
tctttgatcaatggtttcaaatatctttcgaatatgatcaacatgatctgatccatcggcttggtaatgttctacggcgatctcttctcagaaggctcaactctaatccagaaagagatctacctccaaagtactaatccatactcaaaggctctatatctcacacgcagaagcttcactattatactttacatctaaattcttctgatgcaagccaatccagttctgaatacgctagcaactgccaataaggctcaataaccatctcattaaactggtccaattctatccgaccaatatttctatcgcatgataaaactaaaggccttgaaagaatctaatcttgctttctctcaacatgg

SEQ ID NO: 152983 - DNA, 345 bp, Zea mays
  Clone ID: MRT4577_71103C.1
gtctcccagtcccaggtcgccccttcggccgagctccacatggtgcccggatctccctgctcccctgcgcgcgctctgctccctgcgcgcagctgcgagctccgctcggtcgctcctccctgctcgcccctgcgctcatccaactccactacgccgtgtctctctgtcgagtcgcatccgcagttcgccgccagcgtccgtccgccggtggtgctcgttcccttgacgtcgaactgcgccccatgtcggcttctccagtccgccctggcttggcatttggacaccgggtctgccctgctcgcgttccgggttggacccgacaatcgctgttgcctggtcacatgt

SEQ ID NO: 152984 - DNA, 193 bp, Zea mays
  Clone ID: MRT4577_71104C.1
ctttctttaacatataaactcttttcgttttttacaatgaaactatccataaaaggcttctttcaattaaaagtttgccgatccatattacttcaataaatttatccaaccactcaattactaccaaaaccacatttcaaaatcttacaagcatattttccatttcttataaccaaacttccacttatattaa

SEQ ID NO: 152985 - DNA, 216 bp, Zea mays
  Clone ID: MRT4577_71105C.1
ggggaacaacatatcaatagcgttgaggcggaaataggtgcggacgaaaaccttactcattcatctgtcggctcggtgcatagcggtagcaaacaaagggaacaacaggggtaccaacacctaagccaatgggagaacggacactaacactgtgacagagtcgaactggggctcgatactatgaataaataaggcaactcagcctacaccaggaag

SEQ ID NO: 152986 - DNA, 1885 bp, Zea mays
  Clone ID: MRT4577_71106C.1
acttcaacgaaactgccaattttgattgttcacagctccaactgttggtgcttgacgaggcagatcaaattcttgatcacggattcagaaaccaggttgatgctatcatttctcagattcccaaagttagacaaactttactgttttctgctacacaaacgaagtcagttaaggaccttgcaagggttagcttaagggatcctgaatatataagtgtgcacgaggaggccagaacagccacaccggatacccttgagcagtatgccatgattgtacctcttgagcagaagttaaatatgctctggagcttcattaaaaggcatctaaattcaaagacgatagtcttcttatctagtgtcaagcaggtcaaatttgtttatgaaatttttaagaaacttcgtcctggtattcctttgaaatgtatgcatggacggatgaaacatgtggtacagcaggccatagttgcagatttcaatgaagctacctcagttcttttctcaactgatataacatctcgaggactagatataaagaatgtggattgggtggtgcaggttgattgcccagaaaacattgataattacatccacagagttggccgtacagctcgttacaataagaaaggaaaatcacttatattcctttgtcctgaagaagaagcaatgcttgaaaaattgaaggcaaccgaaagtaaaatacctatacatattcgaaagccaaaggcagaacaactggagcagatatcgcagagtatagcctcagtgctggttaaatttcccaatcttcaggaattgggtaaaagggcttttgttacctatcttaaggcagtatacctccagaaagacaaaaaagtgttcaacctgagcaggttctctgcagagcagtttgctgcatatgctgcttcgcttggtctgcctgttacccccaagatccgcttcataagccacaagaagaatgtgtcgaagaaggatatggaggacattgatatgaaacagatgaaatccagtttggaacatgaagttaccatcactccaaagatcaacattgatttaactttgtgtgatggagatgatgatatcctttatcccaagaagcccactgcagatgctaatatggatgacagacttgatgatgtccttcatcccaaggagtctgccacagatacaaatgtgactggacttgaaagacccttcaaaaagaagaaactgaagataaacgtgaacaggccatcaggaacaagggtcaagtatgatgatgagggcaacgccatcccacctcttgcatctgtcgctgaagaagtatctttagaacctgtggttcacaaggataaaatttcccagcggtatgcagagatgttgagagaaatgcagaaacacgacaaggaggacaagcttgaacacaagaagaccttgcgggagaagaagctgcagaagaagatgaagcttaagcgcaagaggcaggaagacactggagcagggtcagaggaggatagtggatctgaatcagacagaggccaagacacagccaacaaaggtaaaaagaggtacttcaatagcgacgatgaagacaatgacgcagcaaaggacggtgatgttctcgcccagcaggaggcgttggcactgaagctcctgagtaatatgcacagttagctttgggatctgatggtataggttacccttgaatgggggtttgcctattagcgctccagccaggaaggggctgaaattttgaacgtgtcgcggttttttttttctgataaccgggagttaattcccactttcaggcatacgttcatggatgtatgagaaatcagtgtggccgtattaccccaagaaatcggacttagatgaggttttaagtaaaatgcctttgattttaaaattct

SEQ ID NO: 152987 - DNA, 296 bp, Zea mays
  Clone ID: MRT4577_71107C.1
cgacctacgcacacgagaacatgcctctcgcaaaggatctccttcatccctctccagaagaggagaagaggaaacacaagaagaaacgcctggagcagagccccaattcctacttcatggatgtgaaatgcccaggatgctataaaatcaccacggtctttagccatgcacaaacggtagttttgtgtgttggctgctccactgtcctctgccagcctacaggaggaaaagcaaggcttacagaaggatgttccttcaggaggaagcagcactaaaagcactctgagtcaagatga

SEQ ID NO: 152988 - DNA, 225 bp, Zea mays
  Clone ID: MRT4577_71108C.1
acacttctggatttgctactgccaccttgcgctttcttcttccctgccaagccccactgacctggatcatggttaataatcacaatgcgtcccctatcgcaggatccttcaaaccagaatggtcgcaactggataattacattcacaaactcactttcaggtcgattctggcaagattcggtcctactaatagtacgcgaccagcttgagtatagcgatgatctc

SEQ ID NO: 152989 - DNA, 456 bp, Zea mays
  Clone ID: MRT4577_71109C.1
aagccgcagcacacttacgttggcagggtcggcaggacgtgcaatatcacctaccgctgcgggggggtctagctagctccatctccatctccatgtcgctgctggccggacatccaccggacgacgtccatgtagccgccgctcatggccggagttccattaactgctgccgcgcgcgtgctttctttacgattacatgcatgatgtctcgtcattttggtcacgtatgttatataaatatatatatgttaggtagacatggggtggttgatttagatatgtgggtgcaatggtggttggccacgtcccgtagttttgaatgataacgcaacccctgaaaaattttctacatgtctctttggtaataatttactcctatttttactaaatgctagtacatccttattttaaatttgacaaggcgatagtaaatattatcaaattttttttatacta

SEQ ID NO: 152990 - DNA, 458 bp, Zea mays
  Clone ID: MRT4577_7110C.1
aaggaaacaaacattagaaaaataaatgatcaaccaatcaacaacgtgatgtaccaaactttcttctctaaaaccaaaagtcaaggacaaaaaatccctaccttttttttccataacgtacaattggttgttgttgttggtgtttttttttgtttctaatcaatcaacaataagctagtttgacttattaggtgttctttttttatgtactctttgttcttcctccctgctgcgcgcgcgcgtatgcaggggccgccgccgacagtttatcggacgatgccgtcgttgccggctagcatgaggtacttgtccttccgggtgagcatggtgcagccgtagccgagcgcgtcccccatcttcctctgcacgaggttggccatctgggtgctgggcgcggccctgctccggacggcgctggtgtccaccttatcgaggaactgcacggtgtagcacatcct

SEQ ID NO: 152991 - DNA, 387 bp, Zea mays
  Clone ID: MRT4577_71110C.1
atgtatcaagggcagcgaaggaaggatgctagatctgaagaaatggctctgctgacataggaacagttttgccactaggggctaagacaggtccatgtcagatcttccattgccgtgagcctcagacgtaactaaggcatctggcacactcgattgcaccgtgatgatgaaccgggctcacagagagattaagaggaaaatacagggcggggggaataaagacagccacgggcacaaaagacagtatgtagccgtggcagacttcagtcttgcgaggtcaactcgcagggaggaacaatggcagcacccggaacactgtgtgctgccggggcataaggccatatttcccggtgatgtgagggtgtttgaattaagacgaaaaccggc

SEQ ID NO: 152992 - DNA, 339 bp, Zea mays
  Clone ID: MRT4577_71111C.1
ggaaccaaacacccctttaatggtttttataaaagttttggggcccaaaaaatgggtttccatccgattaaaacatgctttcttttcccacataaacattagaccgggtttaacagtttccccatggtttatttaaaacccagggaagtttgaatttgggtcccaaaatgggtaagctaagggggataattttagtcaatataacttggcagttttcgctttgtccaggcagactgtaaagcacattttgttcagttgggaaaaaccaagggggccttttgggggggacatgcaagcgaaaaaagtttgttggggggctgggcacctcctaatcctttt

SEQ ID NO: 152993 - DNA, 912 bp, Zea mays
  Clone ID: MRT4577_71112C.1
cgcacatctcattcccgcgcgcatctgggggacggccctatccgcgctgcagtttgcatgggcagcagctccgacgagtgctcgccggcgagggagatgtgcatggaggtcggcggcggccggagggaggcgcggcggcgggggcagtaggtccgcggcggacggcggcaggaccgccaagcagaagcagccgcagcgtggactgggcgtcgcgcagctcgagaagatccgcctccacaaccagatgctggccgcgtaccgctccgccacccggcagccgccgcacgaccacccccagcagccgcagggccacgacgtcgtcgtcgacgctgccacgcattttcagctggtgccgccgccacggagcgactccagcccgttccagccgtaccaccaccggggcgtcgtgcagtactacggcggcatgtacagcaggaccgaaacgagcccgccgtcgctgtacgcgcacgacgtcagggactcgtcgggacacaggctgggtccgccgccgccgcagcagcactactgcatgacgatgatgagcagcagcagcagcagcgagcgacgacggtgcctgcagcgccgccgaggagctcgacttggagctcaggttgtagcagggaccggctgcagcttttggttttgttctgggctgggtcatgtaatcgcttcgggatcacttggatcatccattgctatcatgcatgcatgggccaagaacatgcatcatatatagaattgaactctcgattgatcttgttgagagatgaaaacaaaacggccggaagtcggaaaacgaaggatccgccggcatctttttgatcccacggcctcataactagtagcatgcagtagcagctacagattagtagtagctccattatcattaataaaagatacagtataatttat

SEQ ID NO: 152994 - DNA, 378 bp, Zea mays
  Clone ID: MRT4577_71113C.1
aggcatagccacataggcgccaaacgcccccaaaagttgtgcatcccatagggccagggtaagataagggtaaacaccgctctcccaaatacagttccaatgcgatcacgcaaactagcgagtagccagttcgcaaatagcatcaccctattaaactacttttcactgctgctgctactacaaaggaaaggacaaatgagaagaaagttagactggtaattctgacctactctttggaagtttggattggaattaggcagttgactgagctaattgctggcttcagaatgctgcgccgctactcttccgaactggaatcagtcacggcaatctcttcgtccaccccctccccgtccccgtgctggtaaccaccggtct

SEQ ID NO: 152995 - DNA, 456 bp, Zea mays
  Clone ID: MRT4577_71114C.1
gttgatatagccaaccccatcttcatcgacatgaggggctgtctcaacaagttgtgtgctgccaaccgcgccttacaggtcaccgtccaggatgtcacctgcaagaacattaccggcccctccttcaccccggaggccgttagcctgctctgcactggcaaaggcccatgcaccggcctgaccatggatgacggcaaccttgagcatagctggaccaacaacaagaccatggctgtatgcacgaacgccaagggcagcaccaagggacgcctcaaggagctcgcatgcttatagaccctgcatccactgacccatcgctctagttataactgatctctcgggactgcattgcccaatagatgctatgcatggccaacgcacaacagtaaaacgacagacatcccacagctatgttatgtacgaccgagtaacaccctgtatatgagggtataaaag

SEQ ID NO: 152996 - DNA, 1043 bp, Zea mays
  Clone ID: MRT4577_71115C.1
gagtgtggctagtgttatccacactattagttttcattgagctagcttcattattcaaacaactgttcattaagtcaataattgacatgtacgtatttatgtaaaagtcggaactcttgtttgcatgataaaaaaggtacagtggcagtggccctcgaccagggaacattgtctccacaaagccaaaggtatgctactctgattaagcagatgcattccttattgctccataacaagaaacaactgtcgctatgcaaccgactacaaggttccagcccagcactttactgaaataaagtttgaaaatatactgctgccatcaccatcctcaccgtcgttacaaccagcagcatcggctaattcttcctggatttcagttctccaatccgttcctccgtggccttcagagcatcgccgaatttgcttatgatttcttcgacttcattgggagtcatgatcagcgggggtgacagcatgatgctgtccccagccaccctgatgagcatcccacgcttctcgcactccgcgccaaatatcgaaccaacaccccattcagctggaaatggatcatttggagatttgttgtcgacaaattcagttccaagtatcagtcccagaccgcgtatctccccaacaattgggcttcctgagaaggccttgattccctcctggaaccttggagcaattttgttaacgtgttctacaatattcctttccctaacgaccattatatgaaggattaatcagacacatatatacagaatagatttaccatgatgggattagatttaccaagtttattgctctgagaatagtttacatccgttatttctgggctaacgagaattgctccaattggcatatatgcagaagaaagagcctactagggggaaaagtgcattaagttcaccattaattttataaagaagttctcttgtaattaataagtattttatattgaactaaccttggctatggaaacaagatctggtttaatattatacatatcacatccaaacattgtccctgtcttccaaatgcag

SEQ ID NO: 152997 - DNA, 561 bp, Zea mays
  Clone ID: MRT4577_71116C.1
cgtttccagtgaatctgagaagaattatgcttttcctccggtgacagcatcgatgatctgcaaggatcgtattcaagtgaaactagtgatagctccaacttatcatctctgggtgcagtagctggtgatgaatggaatacagccttcaagaaggtatactaccctcagactgcatgcatggactctacatctgtcatgtacactaaagaagtagatcaggctagcccaatatctgttcttcagcctctatctgaagattgctctgattctgaaaacatcaggcgagagcctgcagatccatatgagactgctgcggaggcaagtagcattggcagaactagtgactgtttatcctctgaagtgcagccgagcgacgacaaacccatacagcttgttgaagacattctcgaagaactggaagacgatgaggaaagggagttctcttacttgctggacatactgattgcttctggaatccatggaactgtggaggatcaaatgtacaaggtgtgtcagtctatcgagtaccctgctagcgatgatgtgttcgacaaggtggaa

SEQ ID NO: 152998 - DNA, 2428 bp, Zea mays
  Clone ID: MRT4577_71117C.1
aggtttttcgttttgaaaaggggcagggggtccccccccaataaaggggggtaggccccccctttggcccccccggggtttcccttttatttttcccgtcccatttttttgggggatttggaggggaaaaaaattttcccccgggaacaagttttgccctgtttttcccaagggccccattttcccccttttaaggggaaaaaaaatgggggccggggggcccggtttttttttttttttttttttttttttttttttttttttttttttttttttttttttttgtaattttttttttttctttttttttttttttttttttttttttttttttatgcttgcagactcgaaactgcagttccttcactttattactgctttgcctttacaaagctatgtatccgaacactactaccactaacgatacacacgaaaaccattatcttcaggaactacagggcagcaaacatttgagatagtgccattgtttaagggaaatgagggggggggggggggggggggcatctatgtcctgtttaaaaaagttgagccaccatttgcttggcgacagagcaagaacatagaccggggcgctattgccatctcgcagccacgaacttggctgtttattcccctgtacatcagctatggtccgtcgtcgcccggcgtttatcgttatcggcgtcgtcgccgcccttttggctagttcttcttggactgcagggctgccaccctctcctccggggccttgggggcttccccgtagatgcgccccaactcgtggacttcattgggagtcatgatcaagcgggggtgacagcatgatgctgtcccccagccaccctgatgagcatcccacgcttctcgcactccggcgccaaatatcgaaccaacaccccattcagctggaaatggatcatttggagatttgttgtcgacaaattcagttccaagtatcagtcccagaccgcgtatctccccaacaattgggctgcctgagaaggccttgattccctcctggaaccttggagcaattttgttaacgtgttctacaatattcctttccttatatatcttcaaggtttctacagcaacggcacaagaaacaggatgtcccgagtatgtaaagccatgagcaaaagaaccaagtttattgctctgagaatagattacatccgttatttctgggctaacgagaattgctccaattggcatatatgcagaagaaagagccttggctatggaaacaagatctggtttaatattatacatatcacatccaaacattgtccctagtcttccaaatgcagtaatgacctcatccgcaattaacaagatgtcatacttcttcagaactgcctgaatcttctcaaaataggtctttggaggaaggataacaccaccagcgcccatcacaggttcagcaatgaaagcagcaattgtttcaggtccttctttgaggacaagattctccaaattattggcaagtctagttgaaaactcttcttctgtctcatcaggaagacggaatcgccagtagtgagggcagtctgtgtgcaggacaaaaggtgctggtagatcaaacttctgatgaagcgctggcagacctgatagactagctgcaatcaaggttgatccatggtacgattttgagcgagcaataaatttcttcttgtctggccttcccagtgcattattataataccacactagtttaacctgggagtcatttgcttctgaaccactatttgtgaagaacacctttcccatttcccttgcggtgaacatgctgagaatatcatttgcgagatccaatgagggtttggttgtacggttccaaaaggaatggtagaacggtaatttgtttaattgctcagttgccgctttgactagtcgaggctcattaccacctaaagctgtgcaccacagtcctgcaagagcatcaatatacttcttcccattgctgtcatagacataagaaccctctgatctctctataaccaatgggtgtacatcagtgctctgccatcccgctgtgaatggagccagcatgctgtgccccttaaacccattttcttctgtcgcctgaagtgaaggttcagagctgtaatgtctggcagacggctctgataaactgtgccccccttgcaagcttccagcactagcaatgtatttcaccagcttgctaacctgggaggaggcagcactggatttgcggaggccgtttgcgatcatctcgtatcgcctgggttccggttccgccgacctcctcacttcacttcacgggttcttggaagttggagctggggaggaaccgaggaagcaacacgcgagagggacaagctctgggtggtgccggacgacggggacgtgacggcatctttatcccgtccataactgtcgccgccgaaattgcgggcgccaatgg

SEQ ID NO: 152999 - DNA, 261 bp, Zea mays
  Clone ID: MRT4577_71118C.1
aaaaaaaaatttccaggcttaaagcaaaagccttaaatccccatccctccaaacagcacagaaactgcggttaaaatgtctccgattgggcccaacaaaaccatttgacttggttgtttagaccaattaacagacaactagtcaaaataaggttttttaggtccatgaaacccagtccacttccacaaagtcctttttgaagtggcaataccccttttttttaggcaataaaacaccattttccttgaaaaaaggtccccc

SEQ ID NO: 153000 - DNA, 390 bp, Zea mays
  Clone ID: MRT4577_71119C.1
cggacgcgttgacttaaaggaaacataactgacatggaaatcgaagtggcggggcttttatcggatgtaggtgaacaaaatgaacatctgtattcatcacaacaagaggcgtttgggctgcacactacaatagatcttctgaggaacaagcttgatgcttcacaactagttgtctcagaggctttggacaatgagaggactgctataacaaaaattgaaagcctagctgctgagaaaatcaaactcattagtgagcttgattatgctagagacagagaggcgagagagaaaatgacaattgaggatcttactgctgtattgcataaagcatcttgtcaagcacaggaagcacatgattggattcacaagatagaatatgattatgtacat

SEQ ID NO: 153001 - DNA, 2187 bp, Zea mays
  Clone ID: MRT4577_7111C.1
cattgggtacctcgaggccggccgggagacgttctcactggatttgcgtcgctgctgcagctcacctgccaggccgcagaggccagtgccactgctggcaggcgctgaggcgcccgagggccctcaagtggcgcgcgagccgcacgccaacgcccgcgacgcgacgaattatctttatcccctttccctctgccgtcctcgttcccggccgtccgtgccgaaggaagtatctgctgagtgctgacccagcccatgcccatccacctcgctccctcgaccgacccacccagcccagcgcgcgctcgcatggcgatgctgctccgcaaggtgtggggctccgtgctggcgcgcgccgcagcgccgggggccgacccgcgggcccgccgcgcgcaggcgcatcgcgcggagcagtaccagtaccacggctcgctatcgctgggcgcgctcgacgccgtccccaccgacgtgctcgcccagatcctgcgcctgctgggcccgctcgacgccgcgcgctccagcgccgtctgccgcgcctggcgcgtcctcgcctccgacaacggcctctgggctttcttcctccgcctcggccccgagccctgggacctcgtcgtcttcgccgagacgcacctcgccgccggccccgcctcgcacccgtggctgtactacgatagctcgccgcagctctcgttcaaacagatttacggcctccgagcgctggtcccgggtactctcatcgtggatggtggatctggttattgcaagtatggctggagcaagtatgctgctccttccgggcgttgtgctacattcttggaattcggtaacattgaagcacctatgtatgcaaggcttcgtcacttcttctctacaatatatacgaggatgcaaataaagccttcgactcagccagttattgttgtccttccactgtgtcactctgatgataccgagtctgctagggcctcaagaaaacaatacaaggagacgctgtactctgtcttgtttgacatgaatgttcctgctgtttgtgctgtcgatcaggcagttctatctttgtatgcttctaaacggacctctggtattgttgtgcacattggattcaatacgacttctgttgttcccatctttcaaggtagggtaatgtatgagataggtgttgaaactgtggggcaaggtgcccttaaactcactggatttctcaaggagttgatgcagcggagaaatatatcctgtgagtcactgtacactgttcgaaccatcaaggagaaactttgctacgtagctgctgattatgaagctgaattgcgtaaagatacacaagcgtcctgcgagatcgatggtgaagggtgtttcactctgtcggaagagagattcaagactccagaaatcctatttcagccccatatgggaggaatgcgtgctatgggcttgcataaagcagtatctctatgtatggatcactgctatgtttcaggaacggttggtgatgacagctggtacaagacggtcattttagctggtggttcgtcgtgcttgcctggtttaccagagaggctggagaaagagcttcaccaacttcttccaccttatatgtcagaaggaataagagtactccccccttcatttggcactgattctgcctggtttggtgcaaagatgatcagcaacgtgagtactttcactgaggcatggtgtgcaaagaagaaacaattccgtcagaagacaggccggagtggtacattgtttgccaattcctggtaatgaaaatctcagacacaagtcacgagcaagaaacttaaagagttccccgcatcaaaaatatggacataacatccggtccatgctccactgagcctccaccagtatatagaagcatgagcattcatgcccagtatatattcacgtccatatcatgcatatatggattatgagccagtgcatcatttggtggtgttgttataggatgttttggtaagttcgttgtggttataggttcttggcaaaagcgcagttgtctcgttttaattttaagtggaacgattaattagttattgagcatgagtctttgtttatagctatatatgtctcatgaaatttggtacagttctaaatgttgtaaaacgcaataaatcattttataaatgagatatgtctttattgctgtaaaaaaaaaaaaaaaaagcggcc

SEQ ID NO: 153002 - DNA, 449 bp, Zea mays
  Clone ID: MRT4577_71120C.1
accacgcgtcagaacacgcgtccgcgccattggccatcgcttgaatccatttaggaaaaggttgcttcttggacgtatgccgctataagcaaaacggagtgacaaagttggaagaaaatgcctcgagcaggtaaagttgtgtctcgctcggttgtaggaggtgaccgaaacagaagagaaccaacacttataaggattggtcaacctcaagcttccactaccgcgaaaagttcgactagtgccaaaccacatagatatcgtccaggtacgagagcgctgatggaaatacgcaagtttcaaaagagtaccgacttgttgattcgcaagttaccgtttgcacgtctggttaaggaaataactcagcactatcatcacgaacttcgctggcaagtggaggcagtactagcccttcaaacaagtgcagaggactacctagttggtttgttgga

SEQ ID NO: 153003 - DNA, 708 bp, Zea mays
  Clone ID: MRT4577_71121C.1
acatttctccacccctctcccaagtctcaatttcaatattgaactccctgctcctcccgtcgctcgatcgccatgtcctcctccacggggagcttggaccacgcagggttcacgttcacgccgccgccgttcatcacgtccttcaccgagcttctgtcggggtccggcgccggcgacgcggagcggtcgccgagggggttcaaccgagggggccgggccggggcgcccaagttcaagtccgcgcagccgcccagcctgcccatctcgtcgcccttctcctgcttctccgtccctgcaggtctcagccctgccgagctgctcgactcccccgttctcctcaactactctcacatcttggcgtctccgactaccggtgcgatccctgcgcagaggtgcgactggcaggcgagcgccgatctgaacacctttcagcaggatgagctcggcctctctggcttctcctttcacgcagtcaagtccaacgccacggtcaacgctcaagcaaactgcttacctttattcaaggagcagcaggagcaacaacaagaagaagtggttcaagtgagcaacaagagcagcagcagcagcggcaacaacaagcaggttgaggacggatacaattggaggaagtacgggcagaagcaagttaaggggagcgagaacccgcggagctactacaagtgcacctacaacaattgctccatgaag

SEQ ID NO: 153004 - DNA, 410 bp, Zea mays
  Clone ID: MRT4577_71122C.1
gagaacaatatactccgccagggcgtcctacaagagaagaggagccggcagagaataagaagaccagaagttgacaaacttttcctgttcttcgagaagcccattttctctcttcttctccactagatagagaaaggggagagagagggagccgaggaggagaagatccctctcaccgtcatctgctggccaatctaatctccgtcgtctgcatctgggtctgctcccgtccatggcctagtgacggaggattgtatctctgtccatgtggatggcgataaattagtacttgtttataggtgttgctgtgtggttggttggccttgtctccttgtttgaggaagtggggagaggcggaatcttttgttggatcatggcagttccaatgcggccggtgggcttcgcccccc

SEQ ID NO: 153005 - DNA, 1455 bp, Zea mays
  Clone ID: MRT4577_71123C.1
aaagaaagaacattttacccctttcctctccagtttgaagattaagagcagtagcagttacaaaagtacatatccatacaacaggtaaaaagaagcaggtgtactttatactacagtcaagcaccactagtttttttctttccctgctaaaagattacacagtaaccgtgcacctaatcacctgcagttagcagtgatagctgctctcactcagagactcatcagactgctgctgcggccttcacttcactgcccattgccatccaacttgagctccagagcaagaacagcaacgaacggagatcttgacacgtataccaagtcaaaaccgagcgttagctcactgtgtgacgacagtgtgagtgtggcttcctcccgttaacctcgctctccgcctccgccgtctccttgggccgcttcagatcctccgcctccgcctcggcggcgtccgcgctttccctgaacttggcgtagatgtcgcccttgtagaagttccatgtccgccacaccagcaccagcgacacgagcgcgccggcgaccgtggcggcggtgatgatgaggaacgacttgcggaagcactgcacgccgatgcaggtcttgtcgccggcgcccgccagggacccgccgtgctgcttggcggcctcgacgtcgtagagcgcccccgcgacgcggacgttgagcacgtaggcgccgatggggctggccacggacccgaagttgtagagcgtggagtagtacttgagcccgaacacctcggagatgatggcgaacagcagtggccactgcgcgccgaagcagaagccgatcaccacggaggccacgtacagcgactgcggcacgccgaaggcgatgaggaggtggccgacgcacgagagcaggagcaccagcgtgagcagcagcggccgtggcacgcggtgccgcgccagcgccgcctccgacacgtacccggcggccacgcgccccgcgtagttccagatgctgatcagggagacgaacgtgttgacgctcttcgccgggtaccccagcgactcgccgatctgccccatgttgtcgatcgccgtcagcgtgccgcccatgccgcaggtggtcgccacgaacagcaccagcatgtccacgctcaccagcgcctgcaggatcgtgtagtcctcgccccgggccggcggccggaacatggtcctcacgcaccaaccacccaacgaccccaggcaacacgacgacgacgcgctcgacgtcgccgcctgctgctgctgctctgtctcctcaacggcggcggtggcggctgctgatgacatctggacgctggacggtactggtggagcgccggcgtcaacgacggcgatggtagggggcgggtcggcggcggcgtccagctggcgctcgcggtagatcttgtactcctgcttgacgacgacgcccaggggcatgaggaggaggatgagcatcggcgcggcggcg

SEQ ID NO: 153006 - DNA, 761 bp, Zea mays
  Clone ID: MRT4577_71124C.1
gcgcccaagttcaagtccgcgcagccgcccagcctgcccatctcgtcgcccttctcctgcttctccatccctgcgggcctcagccctgctgagctgctcgactcccccgttctcctcaactactcccatatcctggcgtctccgaccacaggtgcgatccctgcgcggaggtacgactggcaggcgagcgccgatctgaacacctttcagcaggatgagccctgccgaggagacagcggcctctttggcttctcctttcacgcagtgaagtccaacgccacggtcaacgctcaagcaaattgcttacctttattcaaggagcagcagcagcagcaacaacaacaagtggtagaagtgagcaacaagagcagcagcggcggcggcaacaacaagcaggttgaggacggatacaactggaggaagtacgggcagaagcaagttaaggggagcgagaacccgcggagctactacaagtgcacctacaacaattgctccatgaagaagaaagtggagcgctctctcgccgacggccgcatcacgcagattgtctacaagggcgcacacgaccacccgaagcccctctccacgcgccgcaactcctccggctgtgcggcggtcgtcgcggaggatcatgccaacggctcggagcactctgggccgacgccggagaattcatccgtcactttcggagacgatgagggcgaccacgggttgcagctcagtgatggcgctgagcccgtgacaagcgccggaaggagcat

SEQ ID NO: 153007 - DNA, 1480 bp, Zea mays
  Clone ID: MRT4577_71125C.1
gccggccgggccgggaatttttttcgatccacactctcaaccagctcattaaatacaagagcatgtgcaggaaacaagctcataatcgacacacctaacagagtaacagacaccaaacaacgcccatcactcgtgcacgctagctagctgccggtcgcctcgccaccatggtgttcgacgcgagcggcagcaggtcggcggcggcggcgtcggggaaccctctccgcgtgatcctgacgcgcgggttcgcgcggcaggtgctcgtggggcggtggttgacggtgttcgcgagcctgctcatcatggcgtcctccggcgcgacgtacatcttcgggagctactccggcacgctcaagtcgtcgctcgggtacgaccagcgcacgctcaacaccgtgtccttcttcaaggacctcggcgccaacctgggcgtcttctcggggctcatcaacgaggtgaccccgccgtgggtggtgctggccatgggcgccgccatgaacctgtccgggtacctcatggtgtacctggccgtgtccgggcgcaccgcgccgccgccgctgtggctcgtgtgcctctacttcttcgtgggcgccaactcgcagtcgttcgccaacaccggcgcgctggtgacctgcgtcaagaacttccccgacagccgcggggtggtgctcggcatcctcaagggcttcgtcggcctcagcggcgccgtgtacacgcagctgtacctggccctgtacggcggcgacgacgccgagtcgctgatcctcctcgtcgcctggctcccccgcggcggtgtccgtcgtgttcgtccacaccatccggtacatgccgtacccgcgccgccgtggcggcgggcaggagacgagcagctccgactccgaccccttcttctgcttcctctacctctccatcgcgctggcgtgcttcctcctcgtcatgatcgtggtgcagaagcaggtgcccttctcccgcgccgcgtacggcttggccgccacgccgctgctcatcctcctcctcatgcccctcggcgtcgtcgtcaagcaggagtacaagatctaccgggagcgccagctcgacgccgccgacccgccgccgccgaccatcgtctccgcgtcggcaacggacgccatcaagaaaacagagcagcagccggcgtcgtcgtcgttctgtgggtgcgtgaggaccatgttccgtccgccggctcgtggggaggactacacgatcctgcaggcgctggtgagcgtggacatgctggtgctgttcgtggcgacaatctgcggcgtgggcgggacgctgacggcgatcgacaacatggggcagatcggcgagtcgctgggctaccccgccaggagcgtcaacacgttcgtgtccctgatcagcatctggaactacgcggggcgcgtgacggcgggctacgcctcggaggcggcgctggcccggtaccgcgtgcccgcgtgacggcgggctacgcctcggaggcggc

SEQ ID NO: 153008 - DNA, 822 bp, Zea mays
  unsure (1)..(822): unsure at all n locations
  Clone ID: MRT4577_71126C.1
cttcgcggatcccctgtcagtttctttccattcgcattcattcattcccgtttcgttcctcaccagctcctccttccagaaccccagagtctccgaccctcgattccgaaacctaccggatttgcggctgctggagtcgccgtcgtcgtgggaaaccgatcaggtggcaaagttgagtaaagcacaagggtggactgtgtggtgctcataaggaacaaccctcttcttttctggcgggagaataccaaatggcccagctgttgcaccatcaggattctgggttctatgacaaggaattacatgggtgccgatggggtattcttcaattctttggatttcgccgtcgccagcggtccgcaaagatgcaacctgacaagaaacatggtccggagaaaaacagtcgtggaagtagacgccgaagccgctcctatgctccattgaaaaacgaagacagtgaaattttggatgatgacaaaaatactgaggttacaaaaaaacagaaggcctcccaaaaaaattctggcaaggcttagtttgaggtccttgattctaaggaaattantatggaaaggaaggtcaggaagaaaagatgcttccagttgcaccaaagctactccgcactatttcggtatactatctggaaaataatganatatgttcttgatggtgatccacttcnagtggntgatggttcttcacatagtactaactcatcgatgcaaatgctaccaatatgaatttgcaccatgctagatgagcatccccagatggttggtggtagtgaattcagttcttcacttcttttaagacagacgacatctc

SEQ ID NO: 153009 - DNA, 1147 bp, Zea mays
  unsure (1)..(1147): unsure at all n locations
  Clone ID: MRT4577_71127C.1
cggggcgagccggggagagaggcagcatcggtcccgcgccaactggccagtactctggctggccgcagccctagtggctagtgcagtaccgcttccgggaccgcgacccggggaatcggtttcacttccacccatccccgtgtgtttccgattccccccgttcgggagcagagcatccgcgcgcgatggccaaagatggtggcttcgccaaggcgctgctgctccacgtcgccgcgctgtggggaggagacaggcggaagaagcagctgccggcgccggccatggccgagatgccccggctccagctggcggagtccggccgcctggagtacctcgagaagttctcgcactacgtggctaggcagctgggtttccaggacgtgagcgagtgcccacagctctgcaggctggcgaacaactacctcagcagcagcaagacatgcatggaggacatctacgggttcttcgccggcgccaaggacgacgccgncgagtgcctgctttatgtcaagctcatagaggagctgggcagatgcatcctcggatattttgcgttccactgggaccatgccacctacctcatcacctcggccttgaccgcggacaccggcagcaaaaggaagctcaggaacatggtcttggaagcaacaagnaagcagcgtttcgagcgcgtgacgcgtgacctgaaggtgacgcgggtgttctcgacgctggtggaggagatgaaggcgatcggcatcatagcgccgcgttccagcggtacagccgcctcgtggacggcgccaggctctacagcaccaactccatgggctcagccaagctcatagcgtggaaggacggtatagagtacagctatctggtgcagtataggaagtttagcttaatgaattagatgaatgggataatatagcattcctcgtccgttgtcggcttatacccgacccatatgtataagttaggctggggttccatggggtagaatatggtggtcggtctagatcggccttccaccagtggttaataatatttggccacggatcatgttgtgggcgattgttttttggttgtgctcaacctaaaaaaatccggagcatattttcatcactaacaggtagctgtcggaggccgccaacgccgagcaagctgc

SEQ ID NO: 153010 - DNA, 769 bp, Zea mays
  Clone ID: MRT4577_71128C.1
aaacaaaatttggaaaccctcaattaaatgggtgtacagtatacacaggtatgcagactgtttaggctgctacaactgtaatctataaagacaaaacaatgtagaaattggccgactttaatccaaagcgaacaccttaacgatcatgtgtctgttatcacctagctttctcctaactaatcctccaaattccggagaagaaatcactttgctatatatagaacgatagcaagagatgcattcttgttaagcttccaaaaattccttcgagttcagaaacatgagctcgaggcctagcgttaactgaaccagtttcaccatcccgttgcagatctgctgcagctcatccaacagaccagtcatcgggcatccttcgctctttcggtgaagaacaccagcgaccgctgcgacgcctttgaagggagcaacgccgtgcagcgggctcctatggaggttggccctgtctgttaggtcgctttgggcaagccccttgtaacatagtactgtggcgggcgtatttgttccggcccatctcatgtgctaccttggcatccatgggatgctgccctgtcctatactgcatatggtcttgatcaagctctagctgttgctcctgcctgtcggcgctgtccggtttcaggtggtagcagtaggctgacgaggtgttggttgctggaggaacggctgggttccttgccacctgtcgcgcgatgtgttgatcagtgacctgcgctctcgaatggtagtactgggcctaccactcttcctg

SEQ ID NO: 153011 - DNA, 2354 bp, Zea mays
  Clone ID: MRT4577_71129C.1
gccggcagggctgggggttccacttccacccatccccgtgtgtttccgattcaccccgttcgggagcagagcatccgcgcgcgatggccaaagatggtggcttcgccaaggcgctgctgctccacgtcgccgcgctgtcgacggccggcgccttcgcggccgccctggcgcggcgccggctgtggggaggagacaggcggaagaagcagctgccggcgccggccatggctgagatgccccggctccagctggcggagtccggctctctgctcgactacctaccgtggcgcatccgagaagttctcgcactacgtggctaggcagctgggtttccaggacgtgagcgagtgcccacagctctgcaggctggcgaacaactacctcagcagcagcaagacatgcatggaggacatctacgggttcttcgccggcgccaaggacgacgccgccgagtgcctgctttatgtcaagctcatagaggagctggacagatgcatcctcggatattttgcgttccactgggaccatgccacctacctcatcacctcggccttgaccgcggacaccggcagcaaaaggaagctcaggaacatggtcttggaagcaacaaggaagcagcgtttcgagcgcgtgacgcgtgacctgaaggtgacgcgggtgttctcgacgctggtggaggagatgaaggcgatcggcatcatagcggcgggcggcggcggcggcgaggcgtcgcagtgcacggacgtgatggcccccgtggcgcactcggagcgcagcccggtgctgctgctgatgggcggcgggatgggcgccggcaagagcacggtgctcaaggagctcaagcaggaggcattctggaccaacgcggaggccaacgccgtggtggtggagtcggacgcgttcaaggaggcggacgtcatctaccgcgccatcagctccatgggccaccacaacgacatgctccagacggcagagctggtccaccagtcgtcgacggatgcggcgtcgtcgctgctggtgacggcgctgaacgaggggcgggacgtcatcctggacggcacgctgtcctgggagcccttcgtggagcagaccatcgccatggcgcgcgccgtgcaccgccagcgctaccgcatgggcgtcggctacaaggtggccgacgacggcaccgtcaccgagaactactgggagcccgcgagcgacgacgccaccgagcaacccccgcggaggccctaccgcatcgaggtggtcggggtcgtctgcgacgcctacctcgccgtggcgaggggcatccggagggccatcatcacccggcgggccgtcagggtcaggtcccagctgcagtcgcacaagcgcttcgccgccgcgttccagcggtacagccgcctcgtggacggcgccaggctctacagcaccaactccatgggctctgccaagctcatcgcgtggaaggacgggatcggaaacagcctgctggtggagccccgggagttcgactgcctggagaaggtgagcgggctcaacgagcacgccacctccgtccacgacctctaccccgacggcaccaccacctgcggctcgcgttccatctgggaggacatgatcgtctccacggcccgtgccgacacccagcgcgagctcagggaggccatccgctccgtcgagtccggcggcggccaaccggacacaccaccaacaacgccccagcgcgagctcctgggcttcatccgctccctggaggccgccaacgccgagcaagctgcagttgacaatggtctctaaattttaaaccataagatttaagaatcgaatcagataatcggaccatatttctatttatttttgaaaccaacatttaattgagactattttattttgtgaaaaagtatttggatcgtgatccattaccacccttagctgcagcaggtcagacaccgacaactacctcttagctagtgctggaaaaatacgggacatgctttttggtcagcacaaacacaacccaaaaacaataggttaaagcacggaccgacacgaaataatatggaccgagttagtacggtccgaaggcgggcctaaaccgagcctcaaattctggcccgtcgagccccggcacagcccacacagataggttgggcttgagccggcacggtctgatgaaactcatgtgtttaattttatttaatttagtaagtgatagactttatattgttatggtatttagagtttatgtggtcaaataatgatgtgattgtttaacatctttaattgagtaagttatgtattttatatgattgtaatattttgattttatgcggttcaatatatgtgtcggccctgccccgacacggcccaat

SEQ ID NO: 153012 - DNA, 274 bp, Zea mays
  Clone ID: MRT4577_7112C.1
ggcgacggcatcaggtggttgtctcaatacgtttaaagaagggaagcgaggagtgcgtatgccgtgggaagaaagaatgcaatggtgcggaggatatgaggtcacgagctatatgtagtggctcctggtgatgacacgattaccgagaagggaggagggaagaggcgttgggccatgaagagttattttatgagactcagcatactcttttttttaggcgaaaaacaaaaaactcataaataaagggcggccgcccttttgttttgatttttga

SEQ ID NO: 153013 - DNA, 177 bp, Zea mays
  Clone ID: MRT4577_71130C.1
aaaaaaaaaaaaaaaaaaaaaaaaaaaaaaaaaaaaaaaaaaaaaaaaacttgtacctacggcccccccccaactaagggacaaattctgaaattattcatacaccccggccgggcgttccacccttcatttaggcgccccagttccccctttggggggccctattacaagttgccc

SEQ ID NO: 153014 - DNA, 472 bp, Zea mays
  Clone ID: MRT4577_71131C.1
tgtttttcataaactagttttagctaaaagggggtagtttttttgggtttaagaggtttcgaacatcttagtttttataaaccagtttctattttgaaacaggctttaaaacgacatgtaggtagtgtttggttcggtatcaatgagggatgggacgggatcaacctcgtcccttatcttttgagggatgacctcatccaccattttttaagaatattccttgactctaactttggacctctaaaccaaacacggatcaaattagaatgatctcatcccattcatcttcatcctttctggtccctccatccaaacactatcttaataacatgtaaaacgcagaactaattatcttccgtccttccagttacaacaatgcgaccgcaactgaacgtgcacacggcgagcccatcccatgcactgttgtacaggcagtaacggttagctgatctgtttgtgcgtgacgggacgc

SEQ ID NO: 153015 - DNA, 263 bp, Zea mays
  unsure (1)..(263): unsure at all n locations
  Clone ID: MRT4577_71132C.1
ccgggtcccctgttgatcgcactgagtatcagctgattgacatcactngaagaggatttgtgagccttttgactgacagtggcaacactaaggatgaccgtgtctaattacgcctgagtttagatgtacttggcgagttacaatatatttatgtggtgtctgaaatgttctagaacctctaaatctattactaagagcaacgatattgtcgcttcttaaaccttagtactacggatgttatgagctaataaatatatttcgct

SEQ ID NO: 153016 - DNA, 610 bp, Zea mays
  Clone ID: MRT4577_71133C.1
tgatcgatgggctaattaataagcttctgttatgtccataacagaaattgagattgacaagcatcctatccaactgaagttgaagttgtggtcaaatcagtcatcaaagaggagccacctaagggtcatgttgagacctcaaatgttttgcaagatgatgatggcatagacgaggagaacaatcttgctggccacccaactatccacatgggtgacgaggaaaacatgtcttttggcggacttggaagaggatgatgtgaaatggtgtagttgcaacttgcaaagcgagatatggacttgtgtacaagaaaatgtagaggtcgagattgctcctgaaaagaacagggacaccatgaaaacaggtggctttgttttgcagtcaagttgccggggtgatgccactgttaaagctaccggggtgaagacacagatgttatcgctcgagatatggcagagatatggcagggtgctacgtttcactagcattatcgtttgtaatttgattcacactcttttgtacataaaaattcatgatgttataaggtaagaacaatatatttacattcattgtttggtcaaaatatataaaaaggcaaacaataaaggaaaa

SEQ ID NO: 153017 - DNA, 156 bp, Zea mays
  Clone ID: MRT4577_71134C.1
gcaccccccgaaagcacggaatacggctcgagggaaaaccagcagaggtttatattcacactgacatagaggcccgaaaacgaaagcaggccaacggagaaagggaaagaaaaagaggacctaaaccagaatgggcaaaccggcggaagaggaccc

SEQ ID NO: 153018 - DNA, 378 bp, Zea mays
  Clone ID: MRT4577_71135C.1
cttgtagatagcctatgagttatagcacattactaaagtcgtgagtacgacggctgcggcgccccagatacaagagagcgcattcctcgacctccacaccgacgacggcctcaagtccctcgaggctcacgggggcgccgtacctatgtccatgctgactcccgcactcatgcgacgttaaggtcttctacggggtgccctagatgcctgtcgctgaccgtcctaatgccacccgctgactcgagaccccctgtgcggccgcagcctaatgacttcgtggcacagctgctggtgtacatctgcctgaataatcaggaggtgcggcccgtgctcctttccatgaagctgaggatgctgatggcctagaggtactcgccc

SEQ ID NO: 153019 - DNA, 451 bp, Zea mays
  unsure (1)..(451): unsure at all n locations
  Clone ID: MRT4577_71136C.1
cccacgcgtccgctcaatgtcttttttttcctatttttctcttctagaagactttgcagtgaagatgttgatgctttcgtttgcctggggaatgaantttctggatcgtcaaggagtaagctactgttgcaagacaacaaatgatgacgacggtattactaattctctggagatatttgagaagcctagtggttctctgcacttccttgcgtcaaacaatgattgtggacttagagactttgacatggaaaaatttctaatatgcaaccacttccattttgcttggcctgtgaatgtaagcctgcagtgcttgttgaatattcaattttctatctaaatctatctgctgaagtcaatgctcatgttttgtcaaagagcatgtcttaaataatgacagaaacacattactgcatcctgtgttggcccctgttataattttctgcatcataca

SEQ ID NO: 153020 - DNA, 378 bp, Zea mays
  Clone ID: MRT4577_71137C.1
ctttaccattttttctgtcttccccccgacaccacaaaatcccgtcagatttttttaatagcctcgctgactaccaatccccttgtttttacttttcaatagaccacatccccaaaaaaaaaaaactcacctccttttattgtatccaaacaaacggcaaaaatttttttcactttaccacttgttattatttgtgaaacacattcaagcatttgcctcaccaaaaccaaaaataccatcaagacctattttttaacttcccaaaaccccaccttttctaacacctccccccaaaatttacactcccattaggcgggtgtgtgtgcccatccctatacaccctatcaaaactcagcacatccattacaaaagaaccta

SEQ ID NO: 153021 - DNA, 350 bp, Zea mays
  unsure (1)..(350): unsure at all n locations
  Clone ID: MRT4577_71138C.1
gtacaccggacccggagcagctcgccgccgaacccagcgctgaaccgacggggagaggcgaggccgcgctttaccccgggaactacgaagcaacgacggcgggactgagcaggcggggatatgactgtgatcaaggcagctggagcggagccgtgcggagacggcggcgcgtacggcgcgaggcggcggcagtcgctgcgggcgcggtacgcgtacgggttcgtcttcttcgccaccaacctgctggcctggttcgtcagggactacggggcaagggcgctccgcggcttgcatcatgtgccggtctgcggagcangggactccaagtgcttccagtccggaggagtgct

SEQ ID NO: 153022 - DNA, 483 bp, Zea mays
  Clone ID: MRT4577_71139C.1
tacagctgcgagaagacgacagatgggttctgctgctttaagacgacagaagggtacggcttgggagaagtgcgacagattgggacggctgcgagaagacgacagaagggtacggctgcgagaagacgacagaagggtacggctgcgagaagacgacagaagggtacggctgcgagaagacgacagaagggtacggctgcgagaagacgacagaagggtactgctgcgagaagacgacagaagggtacggctgctagaagacgacagaagggtacggctgcgagaagacgacagaagggtacggctgcgagaagacgacagaagggtacggctgcgagaagacgacagaagggacactctctgaaacacttacacaaatacctgtgtacgcaataagataaattcaataaataaattataaataaattcttctaaatagccaaaaaaaaaaaaaaaaaaaaaaaaaaaaagggggccgtttta

SEQ ID NO: 153023 - DNA, 652 bp, Zea mays
  Clone ID: MRT4577_7113C.1
cccgggtaaagagaaccgtccctttgaaccacactattcggccgagcgaaaaaagagcgcgtttatgtaccaccaccagatccttgttgctggattctttctttgctactagctaggtgtcccttcttctatcagactataagggcagacccgccctcaccggtccgtcgacgtctcgaactggcagagcgagcatgtatcgccagcaccgaaacacacacagcaaacggaaccaccaccaccaccaccaccgtccggcgaggtagggaggcagcggcgccatgggttgttataactcccctggccaatatcgtgtctagagcgctcgggaaaatgcaacggcggtgcgtgccaagttcttagctttcactttatttacatcttcagcttcgcttctagaattcattcttctagacagggagctctcgtctctcctactactagacagtacagggtgcgctgttgagtgccgaatcttgcatgcatggccctaagatcttgtgccagccgttcacgccagtatcgtacgaaaattataatattgcaaaattcgtgagccgagaaaaaaaaacgacttgctcacgtgcaaggcgcgagagatggcgagaagggaggctggagctggactttgatcacgccttgggctgtcagc

SEQ ID NO: 153024 - DNA, 312 bp, Zea mays
  unsure (1)..(312): unsure at all n locations
  Clone ID: MRT4577_71140C.1
cggctcgagcgcatatccctcgctcccagctggacgtgctccgggtcgctaacatgtccgctagtatggcttcgcgagcggccgccctagttaagatgtccaccgcagtgactgcttgcatcctgctggcggtcctgctgcccatggcgcccaagctagtgatgggtgattgttccgacagttgtcctgacctttgcggcgagtttgctaagcagttctgcacgacaaaccccaaccccaccactttccaaacgggcacggagaggaaatgaagcccctnnttaaggaggggtgtgtcactcaatgcaagac

SEQ ID NO: 153025 - DNA, 309 bp, Zea mays
  unsure (1)..(309): unsure at all n locations
  Clone ID: MRT4577_71141C.1
gacgtgatctatatatagtgaaaatcggtttacgcgcccttactaggcctatgcctgagaggctaccacatatttacagaactctggaagagaacttcactgatagagtcccgcctttaataatacatgaaacactgaatgatgctgctgctcaatttaatgctagctagannnnnnnaccnanagacactgtcagttggtananntgggacatactgactgagagggcttgactctcaaacattagatgctgatgacatgtacatcacaagacctgagctgtgggaaggagtctacatcatgccattg

SEQ ID NO: 153026 - DNA, 261 bp, Zea mays
  Clone ID: MRT4577_71142C.1
ccgacgcgtgtgcatacacattggctttcacttgtgtcaacaagagcccgattgacactcggggcgggtgctgtttgtgatacatcaacggacacatcttgctgcaacggaagatctactatgacgaggcctttgaaaccttttcgtggaaactcctccctaacgtatctctattcgaggtgcgctttgaggaattggaggcgctcattttctgcgctgcttacctcgtccattatcatttgtcattgggtgaagccagtt

SEQ ID NO: 153027 - DNA, 352 bp, Zea mays
  Clone ID: MRT4577_71143C.1
gttccaaaagataccggggttttgtcaaaccccatggatggcgctacagaaaaaggctgggaaccacaaattgaccaacggttaaaaccccaagggcgggctctttttttgaaaaacaaaggaatccaggctccaaaccggattggaaccaaagaatgggtccatccaaaggaagactggggccagctttcggatgatcggcctgatacaaacgtttacgccgaggccccgtggccccagaacgagccctccaggaagctgtttccgggtccggctcctttgagagggcccacgtccccggacctgtggagcgcccactgaccgggggcgggggaaacacccggacgcgtgg

SEQ ID NO: 153028 - DNA, 194 bp, Zea mays
  Clone ID: MRT4577_71144C.1
acgcaagcttgaggtctgtacatttacagcctcggttctttatctataccccgaacgatgagccacagtctgcattggacgttttcgagcaaaccgagaggaactcagaggagatccaagatgagggccaatcgatcaatgtggctctaccctatatgcggaggatctgcatagaagatcaagctatagagagg

SEQ ID NO: 153029 - DNA, 223 bp, Zea mays
  Clone ID: MRT4577_71145C.1
ctttttcctagggggacacatgacggaatttgggactggtatctcgtccgtggtgtgcgccgtttatggacacagcatatggcattagtggcatgactgggagttgtgagcatgttatcttggatttgcactttttgcgcgtgcccggtttggttgactcaagaaggagatctataacattagtattcagcagccacttttgacacgggctgcaaggagaacc

SEQ ID NO: 153030 - DNA, 270 bp, Zea mays
  Clone ID: MRT4577_71146C.1
ggatagaatacaaaactcagcttctaagtgttctcaaaattagcaaggagaaagtagatgagtgttataatgcaattctgcaactctcaaaggccaataaatatggtcataacaacatcaacaacactagcaagcgcaagtatgagcaaatcccaagcagcccaagtggcgtaattgatgctgcattttgctctgatggttccaacgattcgtgggcagtggggtcatcattgatatattcaccaccagagcctctcttcaagaagagca

SEQ ID NO: 153031 - DNA, 408 bp, Zea mays
  Clone ID: MRT4577_71147C.1
tgtttttttttttttttttttattttttttgggggtttttttaaagaggtttggggtaacccccccttgagccaaaaccagggtaatggagcaacaaaaaaaggaggggggggcaaaaaacaatttaattgggaacaacccgggggttgggaaaagaccaaaaaaggggggggtggaaaaaaaaaatatattgggggaaacttgggcaatttcaacgggggacacaaggaaaacgttgtatttttaccagcagaaggaggccccaaaggtgcactgacaccccgggtggaagaccgccccttttccccccccaaaaataaacaacaaaattccgtccgccccgggggaaaaagggtcccaaggggccccaaaaccaatttcggcccagggcccctccggggggggggg

SEQ ID NO: 153032 - DNA, 812 bp, Zea mays
  Clone ID: MRT4577_71148C.1
atgaagatgagtaaactgttagataaccttaaccatgctgcggtcaaaaaaaggggacaaaaatgcagttcgtagaagatgcgtgtgtgtgttccggttctaaaaaaaaaggcaagatgccacagtgaacagtgatgaaactatgaaagatgagagatatatcatatatagatgagaaacagcagaactgaggtcagagtcagacaggcgggtcttctccgtcggagaaaaatcagagaaaacctttaccaggttccatctaggtgtcgttttatctggaattttgcaacaccatcccggcccgcagcatcaaattgacttcactgtgggcacgaggactatcagtcccaaccgacgtcacgtcccaacggccgtggcttatcttcgcaaatcgaggctccctgtcgccggagcaactctcggcgcgttccggttcagcgatctctacagtttttcttcttcttctgaaacacctttgtatgtctctctgcattttccaccaaccaaaagattctacagagaagcacgccaaatgatgggcgatagtgtttgtttaatcccccacctaattgcctctcctctttagaataaccgtcatcatcactaatctctgaatcggcaccgtcaccacgaacaaacactagcgcaggcgcagtacggtacgggcatgctcaggacttgccgtagacgagggttatgccgcgtgcggatgactgctagctctttcttgctcaggcagcggtaggagtgggctgggcgtgcttggactagctagctagctagtgctccatttcatcggagcctggcttcgc

SEQ ID NO: 153033 - DNA, 169 bp, Zea mays
  Clone ID: MRT4577_71149C.1
ttcccggctctacccacttcttcctccattccttcaatcccaaacaccagtttctcatcctgaatccactaatcactgctagaaccttttataacttttgattgaccttaacactttcttctatctctcccacaacttatccattccctcctactaccctcacattaaa

SEQ ID NO: 153034 - DNA, 274 bp, Zea mays
  unsure (1)..(274): unsure at all n locations
  Clone ID: MRT4577_7114C.1
cagcagaaggacgcaaggcgcannacangagagacaaaaacaaaacggcacaaggccaaacaaaaacgaggagcaagcaaaccnngccggcacccgaaccaacggcaggaccccacagacagacaaacacaggcaccggacccagagcgcaaaggacgagaccaacagagacaaggcagccggcgaaccgcaaacaacccgacgaaggangcaaacggcaagacaaccagagcacngaacccaccgggggacggacagagacaacaaaaacgac

SEQ ID NO: 153035 - DNA, 704 bp, Zea mays
  Clone ID: MRT4577_71150C.1
gagtaaaacagatttattcattttattaaagattattgttgtagtgtttacatgatgaatgtgtatagagctcgctccggtctcttctctttattgtttgacaaagaaaacttaagttacaaataactccagcttcttcctttggcacattgcctccatcttcatctacaattgcttgcaaaggtgatccgttgaatacaacaatatcataagcctcttctggtcactgagatttctgagctaagtttgagatgtttatccaagaatcaagcgtcttgatagctttcccagacgattgtacttcacgtgccacggttactccttcagctagcgtttgaactcggttgctaaccagaagagctgcagctgcgtttaggatcaatgaatccgcaattgctccactttcccctgaaagcacacgtcttagcacatccgcattgtagtctggacctccacctcgcaaatcctcaagagtacaacgaggaataccaaagtccaatgggtcgaatgagaattcttcgatcttttccggagttacatcataaactagtcctcctcctaacggactcatttcgtctagaccacatgaatgaaccaccagtgctcttttcattccaaatcgttgcagtgcctttgccatcttaacaaccagatcttttggggtatacaccaacgacagcataagaaactctagcaggattaag

SEQ ID NO: 153036 - DNA, 447 bp, Zea mays
  unsure (1)..(447): unsure at all n locations
  Clone ID: MRT4577_71151C.1
ccccccgcccggccccaaacnacnncgncancncccccncaaaccgggcggaaagccgcgcgccgncgccgnggccanggcgncccngncccccgcgcnccnccccggcgccggcgngacccnccnccgagcgccgccagngnnccgcgncaccgccncnnccgcgagcccggggagcaagaagggcaagaagcccaagagcggcagcaagggcaaggacaccaaggcgcnggagccnccagcgcccgnggnccgccgcgcgccggcgggcagcgccnccanannccagcagcagcagaaggaggcggcgnccaaggccgggggcgccggngggaaggggcccacggaggaggagcnacggcagcggcaggccaacgagaacgccnncccccncgacgggcngggcccaggcancaccanccccgncgagggcaacgcgcacgccgc

SEQ ID NO: 153037 - DNA, 1945 bp, Zea mays
  unsure (1)..(1945): unsure at all n locations
  Clone ID: MRT4577_71152C.1
agtttgccagctttgtggctgcaactcgccagcctgatggggcggcttcgcgcgtgctgccgtctccaccgcttcctcgcgccgccgccggcacaagtgccatcaccgggacaatctctggcccgcgggtccaacaccgctaccgctcacgtagcgcctttctcgaggcttctctcgtcggccgcggccgttgcgccccacgacacacgcgactcgggcctcggcggttcggcgtactgggcctggattcgcgcggcgaccgagtcggccccggctccttcgccgccccaggaggaggaggacgagggcccagcacgctacatccccgtcaaagcctacttcctctccaccagcattgatctgaagagcatgcaagcggagcacgggaatgatattgtacctccgtcgacccgtttgcttaactacattgcgcttcggtactccgagttcccacctgagattatgaacattggagtgaaggataacagattttgctatcgctatgtggttgttttccagtatggttctgctgtgcttttcaacattgctgatcatgaagccgagtactatcttgatataattaggaagcatgcttcaggatggcttccagagatgagaaaagagattatgntaaaagttgagatacagacgggattcgcataatttcaagaactatataatcaagtcctcctttcatccatgttgtcaaggatggtttctcaaccactgcataatcatctttgacaacatggatgataggaggacttgattataattcggctaaaagtcgagccacagacgggattcgcataatttcaagcgttcttggtcaaagtatcgcccttgatcactatattcggcaggtcgatgatatggttgaggaattcactgaaattaatcgtgtcatggagaaaaccggtaactttaccatgcaaagaaaaaaactctttcaacttgtgggtaaggccaattctaatcttgcggatgttatcatcagacttggtctttttgacaggtcagaaattgcttggaaaaatgcaaattatgcacaaattctagaatatcttcgggaggaatatgaactgaatcagcgttttggaagccttgacttcaaactgaaatttgtggagcataacattcactttcttcaagaggtcctccaaaacagacggtctgatctgctggaatggggtgtcataatactgctgattattgagattgctatctcattatatgaaattgccaaggactccatgatcgattgagagctctgaacaacacctctattcatcctcgatcatcccattatgctaactccagatccactgttttaacaaaaaaaggaaaagaatgaccccagcttccatattttctgactatccatctccaccctttggatttctaaccttagatgaaaggaagttgggaatggcgttctggcttgagtttatttacatcctttaattctacaactccaaacgaaaagaagtttggccaattttcctatgtccaatgagttcccgggcagccaggttttccaatttgagtagaatctagttttcctttcaatattcatgccaggtgttcttgatacatgttcttggtgccactttttagtatcttgataggactgtcagctctttttttttgggggcaaggctgacgccaggcagctgcaactggacctgatggaaaaatcatgaaagtttttatcaaatggctttgtaatttgtacaaatacttagcgtgggaaggttccatttggtttaaccatactgaattgctcgttccattttgcgtggtaattaaccatgcatactgtaagtatgtgtagtacacttgatgcctatgagtgagagtgaattagatatttcttctagtcaaaatctatgcaataaataaactatctgtgtataattatatttttgacagtattttgctatct

SEQ ID NO: 153038 - DNA, 178 bp, Zea mays
  Clone ID: MRT4577_71153C.1
cttgggaaacattattaatcgtgttttttgccgcccttcagaacgtgaaggcccccaacactattcaccattactatttatcatcgttactattcattgttactatttcaccgtcactatttgcgagggcctctgtgatctattcatttgttcctattctcttccggttcatccgatc

SEQ ID NO: 153039 - DNA, 649 bp, Zea mays
  unsure (1)..(649): unsure at all n locations
  Clone ID: MRT4577_71154C.1
cattgggtacctcgnagccggccgggaactacgttccttctccgcggccgcgacgtaggcatttacccgaaacaagaacagcaagcgcgtttgcaactcgcgatgccatgcatcccacctcgtgcttcctccaccctctcccgaccacgaggtgcgcgccgacgccgcgactctgcgacacgccgctgcagccgaaactgtcgctctgaagggcagaagcagcacgacatcgcgagggacagcgacgtgtccggccgcgccacgatctggctactctgctgcatcccggtcgtggatcgctcaatggcaccccgccgccgccagtatatgaatatccaatcaccgcgatccgtttaaccaacaataatatactgtgcactctcctacgtctgagagcacttcaagttgatgatcccacccaagtgcaacaccatgatcgagaggtggttccccggataggggctccgctacaaggacaacttcaacggcacctgcaacgggtacgtgatcatccaatccacctacaacaatgccatcaccgtagtacggctccccccatgagtatcctctcgcacgtcgactacctgctcgtcatgaagactacggaggcaagaccgactcctaggtcgggttcgagaccgacttcgtg

SEQ ID NO: 153040 - DNA, 529 bp, Zea mays
  unsure (1)..(529): unsure at all n locations
  Clone ID: MRT4577_71155C.1
acagggaacggcgggaaccggctaaaatatggaggagtatcaaaaaacaatcttggggctcaaccaggaacgagtagataatagggggacgacatcaaatatcttccaaaattaaaaccaggacaacaaatggggctaataaattggggacagagggaggactaattacgggggaaggaaaaaacaaaagggggggactatggtgaggggaaaaggggggggaaaaatttggtttaaaatttgaatncagggggggttcttttgggaggaggtttttggaaatttttttctttggagggaaaaaaagggttggggggggtgggnggnaattaaggaggcttggaaaagtggttaaatgttttaggggaattattggggggtttgaagaggagggggtttttntaaaggggagagggaaggggaaggggggtagaaggggaggaattgggaaaggaatggaaaagggtgggggggggtgggaggggnagaagtaggggggggaagagtggggggggggaccccccgcccc

SEQ ID NO: 153041 - DNA, 152 bp, Zea mays
  unsure (1)..(152): unsure at all n locations
  Clone ID: MRT4577_71156C.1
tgcagttgcaagctttaccttcattccatacatgcatattttcatcataatcatctgaagttagctttgtcacagnaaaaaattctcactgaaccgaagtcggtagtttgtgacaattgttaggtgctcaggtgctcaacataccaaatttt

SEQ ID NO: 153042 - DNA, 4989 bp, Zea mays
  Clone ID: MRT4577_71157C.1
atgaagactctgacgactttctatggctaccatcccctggagatggtgatgcaccccttgggactcttccctgctaagaagaaggatgatcccatgtggtgtaaccgcgtgagccaggtaaaggatgtgtgggcgatgtatcctgacttggttgggagggtcaccgttcagtgcatgagtgcgctgtaccgccttcaggcccttcagagcgatgctatggcactccttgctaacaccgctcaaactgccaagctcactctcgacaatcgggaagattttgtggtcgatctatccactgagttggtagagaaggatctgcaagtggagaggctgagccagcgcatcaccaccttggagcagcaggtggagatccgagacaacactattgatgtcttggaaaaccagcttcacgatgtgcagagggaactcgaggaagcaaatgaccacttggacacgcaccacctggagatggaggccaatgaagccggaagcgagggagaagaggctcccgaggagctaggaccagcccctggtgcccatgggactacctccgcgatgcctccttcacccgagtttctgagcacgcagccgcccttgttcaccaaggcagaggatccgttggacgccgacgtgtggcttcgcatcgtcgagtccaagtttccccttctcacgggagactgccctgatgaggccaaggctcgcttcgctgcacagcagcttcgcggccctgctcggacttggtgggaccacttccgtgctatgctccccgctgatcgtgaagtgtcttgggaggaattcaagactgccttcagaggacaccacatcccagctggtattcttgatcggaagttgaatgaatttctggcccttaatcaaggaacccgcacggtactgcagtatgcgcaagccttcaacgacttatgccagtatgcagggtaccatgctgattctgatgaaaagaagagagaccgcttccgctggggtcttaataccaagctgcaggaacgactcaacactgtccgggctgatagcttcaatgagttggtcaacatggccatctcccaggaagattgcattgtagctcaccgggcagagaagaagagaaaggcaccaatggcagcaccatccgctcaggctcagaggttctggattgtttctcacaatcagagcaggggttttcagcagcaggcaggcagatgggtgatcaggccacctcagcagcagcagccggcacccaaccgctttccagctccagccccaggaaacaatcagcctccgcagcagcagcagttccgccagggcaatgggaacaagtgtttcacttgtggcaatgtgggccactatgccaagaattgtcccaggaaccaacagaggcagatgccggcaccaaatcaagacaagggaagaaagcagaaggtgcaagtcaggcaagggaagctcaacttcactactctggaggaagtacctgagggagctcctatcatgaccggtatcttttcagtttataatcaacctgctttaattctgtttgattctggtgcatctcatagtttcattagccagaagctcagtgataaatgtgaactgccattctctcactcaaaaggtgtgcctattcaactgggaagccacattgtcaaaaccactcttcttgtgttgggtttggagaatgtggacattattctgggagctaattggatgaccttgcaccaagttgtgcttgatgtagccagccgtaccgtggaagttaattctccgttctacggaaacttcaccttaattctgcctagtcaaggttctactcagtcatgtgctttctctatgacggagttacctctaaagaagatcccagtggtctgcgagtatgcagatgtctttcctgatgaattgccaggaatgccaccagaccgggatattgaattcgccaccgagttgcaaccgggaacgacaccaatttccaagaggccctaccgaatgccacccgttgagttggcagaattgaagaagcaattgcaagagttgctggataagggatttattcgcccaagtacttcgccttggggatgtccagcactgtttgtgaagaagaaggatgaaagcttgaggctgtgtatagattaccgccctcttaatgcggtgactatcaagaacaagtatcctttgcctcgtattgatgttctttttgaccagttggtcgaggccaaggtattttccaaaatagaccttcgctctggctaccatcagatcaagatacgagcaagtgatattccgaagacgacattctcaaccagatatgggctatatgaatttttggtgatgtcgttcgggctgacaaatgcaccagcatatttcatgtatctgatgaattctgttttcatgcctgaattggacaaattcgtagtggttttcatcgatgatattttggtgtactcaaagaacgaagaagaacatgccgggcatttgcatgtagtgcttcaacgtctgcgagagcaccacctttatgccaagttatccaagtgtgatttttggctaaaggaaatcaaattcttgggtcacactatctctcaggtaggaatagctgttgatcctgataaagtgcaagaggtgatgaactggaagccaccaccaactgtccgtcagattcggagttttctgggattagctggttattaccgaagatttattccggatttccctcgaattgcgaagcccataactgagctgctgaagaaagaagccaaatttgtttggagacagaagtgcaaagatgccttccatgcattaagacagcatctgaccacagcaccagtattggcgcaacccgacaacagcaagccttttgatgtatattgcgatgcctctggcaccgggctaggttgtgtcttgatgcaagacaaccgagtcatcgcttatgcctcaagagcactcaggcctcatgagcaaaactatcccactcatgacctcgagttggcagcagtggttcatgcattaaaaatgtggaggcactatctaatgggaacccactgcaacatcttcactgatcatacgggccttaagtacatctttactcaggctgatctcaacatgaggcagagaagatggctagagctgatcaaggattatgacctagaggtacattatcacccaagaaaagctaatgtggtagcagatgccttgagtcggaagttgcaatgcaattgcattctgatggattctcgcattaacaccttgtgtgatgagttgagcaagatgcaaattgaagtgatcccttctggttctttgtctcacatttctgttgagccagctttgcaagaccagattatcatggcccagctcagtgacaagggagtgcaaattatcaagaagaatctccatcagaaggttgagaagtataattgtttccgccaagatgaaaagggtgtgttatggttcaaaagcagattggtgattcctaaagaccaggacctcaagaggaaaattttggatgaggctcatctctccaaattctctatgcatccgggaagcaccaagatgtaccatgacctgaagcctttgtattggtggaccagaatgaagagggagatagcccaatatgtattagaatgtgacatctgtcagaggataaaggcaagccacttgaaatcagctggagctttgcaacccctgtctataccttcgtggaagtgggatgacatcagcatggatttcattgtgggtctgcccaacacctctcgtcatcatgattcgatttgggttattgtggaccgactgacaaaagtggcacattttcttcctgtgcacaccactgataaggctcaaaagtatgcagaattgtatattgaccggatcgtgtgtttgcacggattacctcggaccattgtttctgaccgaggagcccaatttgttgccagattttgggaacaattgcaagagtctttgggaaccaagctaatcaggagttcagcttaccacccacagactgatggtcagacagaaagggtaaaccaaattctggaggatatgctgagagcttgtgcaatcgattgtggcaagaactgggataagcacctctccttggcagagtttgcttataacaatagttatcaatctagcctaaggatggcaccttttgaagctctctatggaagaaggtgcaggacaccactcaattggtctcaacctggagaaagagaagtttttggacctgacttagtgactaaagctgaaaggaaggtcaaactaatcaggaagaatctagaagctgctcaggccaggcagaagagttaccatgatagaagaaggaaacctctccagttcgaggtgggaagttttgtatacctcaaggtatcacccaccaagggagtgcagaggtttgggatcaaaggcaagctagcccctcgttacattggaccttatgagatcttagaagcatgtggacccgtggcatataagctgacgttaccatcaaaaatgtctaccattcacagtgtattccatgtatctcagctgaagaagtgtgttcgattgccgaccgagatcatagcagagccagaattggagatagagccagatctatcgtaccaagagtacccctccaagattctggattgcaaagaaagatcaactcgggctaaatcgatcaagatgtacaaggtccagtggagtaatcactcagaggaagaagctacttgggaaaccgaggaattcttgagatccaacttcctcgattgcctacctaaggaaactgttgcaaagagaatgacattcgaagagcagttttaccttaataataacaataatcacccatttcctataagtctcacccttcgcttcaccctgggaggactctggcccaaatctcgggacaaaattcctttaaggggggaaggctgtgacacctcagtgtcacctagggtttctctcaaaatgccaaaccaaggaccatcattttatgtgaaccaaattaagcatgagcatcaattgacttaa

SEQ ID NO: 153043 - DNA, 613 bp, Zea mays
  Clone ID: MRT4577_71158C.1
accaggcgctgctggctcaactatcacctgcccggctctacataaccgcggagcagagcccgttcctccctgctccaccttcgtgaccccgcgtgagtgatccagcgccgccgtgagcagttggcatcagctaatcctggaggagcggctgctcggaaatcgtcacgggagtgctaggtcttgaggccgcagccgggtcaccactcgacggtggcggtcagcgcaacgcgctaaaatccaattgcaatcttgccgacggagagtacgtgctcatccccgagcaaggacctgtccaagaggaggaccaggagcaggctttagaggctgctattgaggatctccccgcagccccagcaattgaagatggcagctaggcagcgtcgcgggcagaatgagcaagctcccccgccacctcctccagctcccacagtgcaggagctgatggcccagcagaatgagattctgcgacagctcttgcagcgccagccccacccacagcatcatggtggaggccagcatcagcgacctccggctatgggcaacataccaggagtttctgagcacgcagccgcccttgttcaccaagcagaggatccgttggacgccgacgtgt

SEQ ID NO: 153044 - DNA, 1908 bp, Zea mays
  Clone ID: MRT4577_71159C.1
atgaagactctgacgactttctgtggctaccatcccctggagatggtgatgcaccccttgggactcttccctgctgagaagaaggatgatcccatgtggtgtaaccgcgtgagccatgtgaaggatgtgtgggcaatgtatcctgacttggttgggagggtcactgtccagtgcatgagtgcgctgtaccgccttcaggcccttcagagcgatgctatgacacttcttgctaacaccgctcaggctgccaagctcactctcgacagtcgggaagattttgtggtcgacctatccacagagttggtggagaaggatctgcaggtggagaggctgaaccagcgtattaccaccctggagcagcaagtggagatccgagacaacactattgatgtcttggagaaccagctccacgacatggcagcgaggcagcgtcgcgggcagaatgagcaagctcccccgccacctcctccagctcccacagtgcaggagctgatggcccagcagaatgagattctgcgacagctcttgcagcgccagccccaccaacagcatcatggtggaggccagcatcagcgacctccggctatggcaacataccaggagtttctgagcacgcagccgcccttgttcaccaaggcagaggatccgttggacgccgacgtatggcttcgcgtcgtcgagtccaagtttcccctcctcacgggagactgccctgatgaggccaaggctcgcttcgccgcacagcagcttcgcggcccagctcggacttggtgggaccacttccgtgctatgctccccgctgatcatgaagtatcttgggaggaattcaagactgccttcagaggacaccacattccagctggcattcttgataggaagttgaatgaattcctggccctcaatcaaggaacccgcacggtactgcagtatgcgcaagccttcaacgacttatgccagtatgcagggtatcatgctgattctgatgaaaagaagagggatcgcttccgcaggggtctcaataccaagctgcgggaacgactcaacactgtccgggccaatagcttcaatgagttggtcaacatggccatctctcaggaggattgcattgttgctcaccgggcagagaagaagaggaaggcaccaatggcagcaccatccgctcaggctcagaggttccggattgtttctcacaatcagagcaggggttttcagcagcaggcaggcagatgggtgatcaggccacctcagcagcagcagcagccggcacccaaccgctatccagctcccgccccaaggaacaatcagcctccgcagcagcagcatttccgccagggcaatgggaacaagtgtttcacttgtggcaatgtgggccactatgccaaaaattgtcccaggaaccagcagaggcagatgccagcaccaaatcaagacaagggaagaaagcagaaggtgcaagtcaggcaagggaagctcaacttcactgctctagaggaagtgccagaaggagctcctatcatgaccggtaccttttcagtttataatcaacctgctttaattctgtttgattctggtgcatctcatagtttcattagccaaaagttcagtgctaattgcaaactgccattttctcactcaaaagggtcattcatgatagtcacacctgggggtaaaattgcaactaaccaattaaaccaaagtgtgcctattcaactgggaagccacattgtcaaaaccactcttcttgtgttgggattggaaaatgtggacattattctaggagcaaattggatgaccttgcaccaagttgtgcttgatgtagccagtcgtaccgtggaatcagggttcttctcagtcgtgtgctttctctatgacggagttgcccctgaagaagatcccagtggtctgtga

SEQ ID NO: 153045 - DNA, 391 bp, Zea mays
  Clone ID: MRT4577_7115C.1
ctgctatcaatgctatcaatcatcatttattttagtagtataggcaccaaatcaagtgggggcatcaattatctaactccaaaaaccatgaagctggcgcttgtggttcttgctttcattgctttattatccattgtttattgtacacagtcaggcagctacaactgctattaccaccgctaccatcatccgtacatcgttcacaactcatgatacaacaaccaccaccactagcgataaccaacacttctgcatactctcaaccacacccaacaattagtttacatgcaatcacttaatcgtaatctgctacttgattgcaacgtccaccactaccatccctaccgctacatgatcactaacaacagcaactacttcacttacagcaact

SEQ ID NO: 153046 - DNA, 3537 bp, Zea mays
  Clone ID: MRT4577_71160C.1
atggcaacctaccaggagtttctgagcacgcagccacccttgttcaccaaggcagaggatccgttggacgccgacgtgtggcttcgcgtcgttgagtccaagtttcccctcctcacgggagactgccctgatgaggccaaggctcgcttcgccgcacagcagcttcgcgaccctgctcggacttggtgggaccacttccgtgctatgctccccgctgatcgtgaagtgtcttgggaggaattcaagactgccttcagaggacaccatatcccagctggcattcttgatcggaagttgaatgaatttctggcccttaatcaaggaacccgcacggtactgcagtatgcgcaagccttcaacgacttatgtcagtatgcagggtaccatgctgattctgatgaaaagaagagggaccgcttccgcaggggtctcaataccaagctgcgggaacgactcaacactgtccgggcagatagcttcaatgagttggtcaacatggccatctcccaggaggagtgcattgtagctcaccgggcagagaagaagagaaaggcaccaatggcagcaccatccactcaggctcagagtttccagattgtttctcacaatcagagcaggggttttcagcagcaggcaggcagatgggtgatcaggccacctccgcagcagcagccggcacccaaccgctttccagctcccgctccaaggaacaatcagcctctgcaacagcagcagttccgccagggcaatgggaacaagtgtttcacttgtggcaatgtgggccactatgccaagaattgtcccaggaaccagcagaggcagatgccagcaccaaatcaagacaagggaagaaagcagaaggtgcaagtcaggcaagggaagctcaacttcactactctggaggaagtacctgaaggagctcctatcatgaccggtatcttttcagtttataatcaacctgctttaattctgtttgattctggtgcatctcatagtttcattagccaaaagttcagtgctaaatgtgaactgccattctctcactctaaagggtcattcttgatagtcacacctgggggtaaaatttcaactaatcaattaaaccaaagtgtgcctattcaactgggaagccacattgtcaaaaccactcttcttgtgttgggtttggaaaatgtggacattattctgggagctaattggatgaccttgcaccaagttgtgcttgatgtagccagtcgtaccgtggaagttaattctctgttctgtgggaacttcaccttaattctacccagtcgaggttctactcagtcatgtgctttctctatgacggagttacctctgaagaagatcccagtggtctgcgagtatgcagatgtctttcctgatgaattgccaggaatgccaccagaccgggatattgaatttgccatcgagttgcaaccaggaacagccccaatttccaagaggccctaccgaatgccacccgctgagttggcagaattgaagaagcaattgcaggagttgctggataagggatttattcgcccaagtacttcgccttgggggtgtccagcactgtttttaaagaagaaggatgaaagcttgaggctgtgtatagattaccgccctcttaatgcggtaactatcaagaacaagtatcctttgcctcgtattgatgttctttttgaccaattggttggggccaaggtgttttccaagatagaccttcgctctggctaccatcagatcaagatacgagcaagtgatatcccaaagacggcattctcaaccagatatgggctatatgaatttttggtgatgtcattcgggctgacaaatgcaccagcatatttcatgtatctgatgaattctgttttcatgcctgaattggacaaattcgtagtggtgttcatcgatgatattttggtgtactcaaagaacgaagaagaacatgtcgggcatttgcatgtagtgcttcaacgtatgcgagagcaccacctttatgccaagttatccaagtgtgacttttggctaaaggaaatcaaattcttgggtcacactatctctcaggcaggaatagttgttgatcctgataaagtgcaagaggtgatgaactggaagccaccaacgactgtccgtcagattcagagttttctgggattagctggttattaccgaagatttattccggatttctctcgaattgcgaagcctataactgagttgctgaagaaagaagccaagtttgtttggagtcagaagtgcgaagatgccttccatgcattaaggcagcatctgaccacagcactagtattggcgcaacccgacaacagcaagccttttgatgtgtattgcgacgcctctggcactgggctaggttgtgtcttgatgcaagacaaccgagtcatcgcttatgcctcaagagcactcaggcctcatgagcaaaactatcccactcatgacctcgagttggcagcagtggttcatgcactaaaaatgtggaggcactatttaatgggaacccactgcaacatcttcactgatcataagagccttaagtacatttttactcaggctgatctcaacatgaggcagagaagatggctagaactgatcaaggattatgatctggaggtacattatcacccaggaaaagctaatgtggtagcagattccttgagtcggaagttgcaatgcaattgtattctgatggattctcgcattaacaccttgtgtgatgagttgagcaagatgcaaattgaagtgattccttctggttctttgtctcacatttttgttgagccagctttgcaagaccagattatcatggcccagctcagtgacaagggagtgcagtttatcaagaagaatctccatcagaaggttgagaagtataattgtttccgccaagatgaaaagggagtcttgggaaccaagctaatcagaagttcagcttaccacccacagactgatggccagacggaaagggtaaaccaaatcctggaggatatgctgagagcttgtgcaatcgattgtggcaagaactgggatgagcccctctccttggcagagtttgcttataacaacagttatcaatccagcctaaggatggcaccttttgaagctctctatggaagaaggtgtaggacaccactcaattggtctcaacctggagaaagaggagtttttggacctgacttagtaaatgaagccgaaaggaaggtcaaactaatcaggaagaatctagaagctgctcaggccaggcagaagagttaccatgatagaagaaggaaacctctccagttcgaggtgggaagttttgtatacctcaagccgaagaagtgtgttcgattgccgaccgagatcatagcagagccagaattggagatagagccagatctatctaccaagaatacccttccaagattctggatagcagagaaagatcaactcgggctaaatcgatcaagatgtacaaggtccagtggagtaatcactcagaggaagaagctacttgggaaaccgaggaattcttga

SEQ ID NO: 153047 - DNA, 1430 bp, Zea mays
  Clone ID: MRT4577_71161C.1
tgtgaggagtgtggcgtgtgtactgtgagtgactaggcaggatggatgcgagagctgctatcacgtggctagagtgttcgtgagagtgatgggagaagagccgcgtcgcgccgctgcgcctctagggcccccggcgagtggggcagccgccgcaccccgtccgaggcgacgccgtccccgccctgcccgtcgacgcccgccgccccagaaccggacggcgccaaggaccaagagcccagcagccccacctgggggccgtccgtcgcgacgtcggtgctggtccaggtaggcgacgagtcgtcgtcgctgggcaacctccggctccggctaagcgaggagagcgcgtcggtgcagcagcagcggtcctgcagccagaggtcgtcgcgcccgccgccagcgttccgggtcaaggaggagtgggacgacagcacggtgagctccaacgtgtccaggatgaggatccagaacaggatcgaggccaccacgcggcgcgagcgagcgctcgcctacgcgttctcgcagcagcttcggagctgcggcggcggcaccagcaagaagcggtcgtcggcgcgcgcggaggggcagggggagttcaacgtggggtggagctggctggagcggtggatggcgacgcggcaggcggagcccgcggacgactgcgcgagccgcaacgcggacacgggctccgccacggggcggcgggtggtggtcgtcaggaggcggagcgacctcgccgtcgaggagaaggagagctgcgcctccaacgacgtctcggtcgtcagcttcgacgcctcctccggcctcgcctgccataggcccacgggcaacaagagccggctcaagggcggccggagcttgccgcgccggaagcaggtggcggcgtcggcgtcggcgtcggaccaccgcttccaggaaagatcacacaaggtgagcaagaaggggcaccagcgagtggagcaggagccgcacaaggaccgattcgacgccgtcgccgccctggacgacgacgcttgccagcctcccacggattactgagacgacctgctctgtacatagatttggaaggatttgcagggctagctgacgatttgtttgggcttgcactagtctgaaagactgcacggttactgtctgctgagtgactgtacgtgtcgtgtcggtcatgtaaaagttcctcgctacacgtacgtcgtatcaaacgtcactcactgtaaaacgtcacggccacatacacgatgacgagttccctagacacggcaaggagaagcaatcagtgacagtatttgtgatatcatggatgtgtttggttcaacttttttctgaccagcttttctgaaaatatggctgtggagagaatctagttgtggggaaaatctgagtatcattacgattacgtgtggagaaagataaagttgttcatagagctcagg

SEQ ID NO: 153048 - DNA, 356 bp, Zea mays
  Clone ID: MRT4577_71162C.1
cccccccctccccccaatgtggttttgggggaaaagccgcttttacccttgtgacaaagagtttgagatgctggacaaacaccaatgagctgctcctactgctttgctgcgcctctgttgagatgtcaacatcggttctcttcacagaaacaccacagcgggatgtaagccctgctattttgacggacccttgtggggaagtggcaggtctttaatttgacatacactttgcacttgatcaaattggagaacctcaggacctcctgcattgaagactggctgccaacgcagaaagctccacctctttggtgcaaggaccatctgctgcgaatgagctggcattcccaaacaaacct

SEQ ID NO: 153049 - DNA, 4068 bp, Zea mays
  Clone ID: MRT4577_71163C.1
atggcaacttaccaggagtttctgagcacgcagccacccttgttcaccaaggcagagaatccgttgaacgccgacgtatggcttcgcatcgtcgagtccaagtttcccctcctcaccgaagactgccctgatgaggccaaggctcgcttcgccgcacagcagcttcgcggttctgctcggacttggtgggaccacttctgtgctatgctccccgctgatcgtgaagtatcttgggaggaattcaagactgccttcagaggacaccacatcccagctggcattcttgatcggaagttgaatgaatttctggtccttaatcaaggaacccgcacggtactgcagtatgcgcaagccttcaacgacttatgccaatatgtagggtatcatgctgattctgatgaaaagaagaggggtcgcttccgcaggggtctcaataccaagctgcgggaacgactcaacactgtccgggctgatagcttcaatgagttggtcaacatggccatctcccaggaggattgcattgttgctcaccgggcagagaagaagagaaaggcaccaatggcagcaccatccgctcaggctcagaggttccagattgtttctcacaatcagagcaggggttttcagcagcaggcagacagatgggtgatcaggccacctcagcagcaacagcagccggcacccaaccgctttccagctcccgccccaaggaacaatcagcctccgcagcagcagcagttccgccagggcaatgggaacaagtgtttcacttgtggcaatgtgggccactatgccaagaattgtcctaggaaccagcagaggcagatgccagcaccaaatcaagacaagggaagaaagcagaaggtgcaagtcaggcaagggaagctcaacttcactactctggaggaagtacctgaaggagctcctatcatgatcggtatcttttcagtttataatcaacctgctttaattctgtttgattctggtgcatctcatagtttcattagccaaaagttcagtgctagatgtaaactgccattctctcactcaaaagggtcattcatgatagtcacacctggggccatccatatcgtggaagttaattctccgttctgcgggaacttcaccttagttctgcctagtcaaggttctactcagtcatgtgctttctctatgacggagttacctctgaagaagatcccagtggtctgtgagtatgcagatgtcttccctgatgaattgccaggaatgccaccagaccgggatattgaattcaccatcgagttgcaaccgggaacggccccaatttccaagaggccctaccgaatgccacccgctgagttggcagaattgaagaagcaattgcaagagttgctggataagggatttattcgcccaagcacttcgccttggggatgtccagcactgtttgtgaagaagaaggatgaaagcttgaggctgtgtatagattaccgccctcttaatgcggtaactatcaagaacaagtatcctttgcctcgtattgatgttctttttggccagttggtcggggccaagatcaagatacgagcaagtgatattccgaagacgacattctcaaccagatatgggctatatgaattcttggtgatgtcattcgggctgacaaatgcaccagcatatttcatgtatctgatgaattctgttttcatgccggaattggacaagttcgtagtggttttcatcgatgacattttggtgtactcaaagaacgaacaagaacatgctgggcatttgcatgtagtgcttcaacgtctgcgagagcatcacctttatgccaagttatccaagtgtgatttttggctaaaggaaatcaaattcttgggtcacactatctctcaggctggaatagctgttgatcctgataaagtgcaagaggtgatgaactggaagccaccaacaactgtccgtcagattcagagttttctgggattagctggttattaccgaagatttattccggacttctctcgaattgcgaagcctataactgagttgctgaagaaagaagtcaaatttgtttggagtcagaagtgcgaagatgccttccatgcattgaggcagcatctgaccacagcaccagtattggcgcaacctgacaacagcaagccttttgatgtatattgcgatgcctctggcaccgggctaggttgcgtcttgatgcaagacaaccgagtcattgcttatgcctcaagagcactcaggcctcatgagcaaaactatcccactcatgacctcgagttggcagcagtggttcatgcattaaagatgtggaggcactatctaatgggaacccactgcaacatcttcactgatcataagagccttaagtacatttttactcaagctgatctcaacatgaggcagagaagatggctagagctgatcaagaattatgacctggaggtacattatcacccaggaaaagctaatgtggtagcagatgccttgagtcggaagttgcaatgcaattgtattctgatatattctcgcattaacaccttgtgtgatgagttgagcaagatgcaaattgaagtgattccttctggttctttgtctcacatttctgttgagccagctttgcaagaccagattatcatggcccagctcagtgacaagggagtgcagattatcaagaagaatctccatcagaaggttgagaagtataattgtttccgccaggatgaaaagggtgtgttatggttcaaaagcagattggtaattcctaaagatcaggacctcaagaggaaaattttggatgaggctcatctctccaaattctctatgcatccgggaagcaccaagatgtaccatgatctgaagcctttgtactggtggaccagaatgaagagggagatagcccagtatgtatcagaatgtgacacctgtcagaggataaatgcaagccacttgaaatcagctggagctttgcaacccctgtccataccttcgtggaagtgggacgacatcagcatggatttcattgtgggtctgcccaacacctctcgtcatcatgattcgatttgggttattgtggaccgactgacaaaagtggcacattttcttcctgtgcacaccactgataaggctcagaagtatgcagaattgtatattgaccggatcgtgtgtttgcacggattacctcggaccattgtttctgaccgaggagcccaatttgttgccagattttgggaacaattgcaagagtctttgggaaccaagctaatcaggagttcagtttatcacccacagactgatggtcagacggaaagggtaaaccaaattctggaggatatgctgagagcttgtgcaatcgattgtggcaagaactgggataagcacctctccttagcagagtttgcttataacaatagttatcaatccagcctaaagatggcaccctttgaagctctctatggaagaaggtgtaggacaccactcaattggtctcaacctggagaaagagaagtttttggacctgacttagtgactgaagccgaaaggaaggtcaaactaatcaggaagaatctagaagctgctcaggccaggcagaagagttaccatgacagaagaaggaaacctctccagttcgaggtgggaagttttgtatacctcaaggtatcacccaccaagggagtgcagaggtttgggatcaaatgcaagctagcccctcgttacattggaccttatgagatcatagaagcatgtggacccgtggcatataagctgaagttaccttcaaagatgtctgccattcacagtgtattccatgtatctcagctaaagaagtgtgttcgattgccgaccgagatcatagcagagccagaattagagatagagccagatctatcgtaccaagagtacccctccaagattctagattgcaaagaaagatcaactcgggctaaatcgatcaagatgtacaaggtccagtggagtaatcactcagaggaggaagctacttgggaaaccgaggaattcttgagatccaacttccccgattgcctacctagggaagctggtacgtaa

SEQ ID NO: 153050 - DNA, 552 bp, Zea mays
  Clone ID: MRT4577_71164C.1
atggcaacataccaggagtttctgagcacgcagccacccttgttcaccaaggcagaggatccgttggacgccgacgtgtggcttcgcgtcatcgagtccaagtttcccctcctcacaggagactgccctgatgaggccaaggctcgcttcgccgcacagcagcttcgcggccctgctcggacttggtgggaccacttccgtgctatgctccccgctgatcgtgaggaacccgcacggtactgcagtatgcgcaagccttcaacgacttatgccagtatgcagggtatcatgctgattctgatggaaagaagagggatcgcttccgcaggggtctcaataccaagctgcgggaacgactcaacactgttcgagctgatagcttcaatgagttggtcaatatggccatctcccaggaggattgcattgttgctcaccgggcagagaagaagagaaaggcaccaatggcagcaccatccgctcaggctcagaggttccggattgtttctcacaatcagagcaggggttttcagcagcaggcaggcagatgggtga

SEQ ID NO: 153051 - DNA, 2673 bp, Zea mays
  Clone ID: MRT4577_71165C.1
ttggtcggggccaaggtgttttccaagatagaccttcgctctggctaccatcagatcaaaatacgagcaagtgatattccgaagacggcattctcaaccagatatgggctatatgaattcttggtgatgtcattcgggctgacaaatgcaccagcatatttcatgtatctgatgaattctgttttcatgccggaattggacaagttcgaggtggttttcatcgacgacattctggtgtactcaaagaacgaagaagaacatgtcgggcatttgcatgtagtgcttcaacgtctgcgagagcaccacctttatgccaagttatccaagtgtgatttttggctaaaggaaatcaaattcttgggtcacactatctctcaggctggaatagctgttgatcctgataaagtgcaagaggtaatgaactggaggccaccaacaactgttcgccagattcggagttttctgggattagctggttattaccgaagatttattccggacttctctcgaattgcgaagcctattactgagttgctgaagaaagaagtcaaatttgtttggagtcagaagtgcgaagatgccttccatgcattaaggcagcatctgaccacagcaccagtattggcgcaacccgatagtagcaagccttttgatgtatattgcgatgcctcaggcaccgggctaggttgtgtcttgatgcaagacaaccgagtcattgcttatgcctcaagagcactcaggcctcatgagcaaaattatccgactcatgacctcgagttggcagcagtggttcatgcattgaagatgtggaggcactatctaatgggaacccactgcaacatcttcactgatcataagagccttaagtacatttttactcaggctgatctcaacatgaggcagagaagatggctagagctgatcaaggattatgacctggaggtacattatcacccaggaaaagctaatgtggtagcagatgccttgagtcggaagttgcaatgcacttgtattctgatggattctcgcattaacaccttgtgtgatgagttgagcaagatgcaaattgaagtgattccttctggttccttgtctcacatttctgttgagccagctttgcaagaccagattatcatggcccagctcagtgacaagggagtgcagattatcaagaagaatctccatcagaaggttgagaagtataattgtttccgccaggatgaaaaaggtgtgctatggttcaaaagcagattggtgattcctaaggaccaggatctcaagaggaaaattttggatgaggctcatctctccaaattctctatgcatccgggaagcaccaagatgtaccatgatctgaagcctttgtactggtggaccaaaatgaagagggagatagcccagtatgtatcagagtgtgacacctgtcagaggataaaggcaagccacttgaagtcagctggagctttgcaaccactgtccataccttcgtggaagtgggatgacatcagcatggatttcattgtgggtctgcccaacacctctcgtcatcatgattcaatttgggttattgtggaccgattgacaaaagtggcacattttcttcctgtgcacaccactgacaaggctcagaagtatgcagaattgtatattgaccgggtcgtgtgtttgcacggattacctcgaaccattgtttctgaccgaggagcccaatttgttgccagattttggcaacaattgagttcagcttaccacccacagactgatggtctgacggaaatggtttaccaaattctggatggtatgcttagtttttttgcgatctattgttgcaagaaaagggataatcacatctacgtgatagggttcgattataacggtggccatcaagggaacctttagttcccaccttttgaagctcactatggaagaaggtgcaggacgccactctattggtctgaaacgggtgaaagagacccggtctttgcggcttcagtaacgggagctggattgaaagtaacgcaactcaggaaaaacaaagaagctgctcaggccaggcagaagagttatcatgataaaagaaggaaacctctccagttcgaggtgggaagttttgtatacctcaaggtatcacccaccaagggagtgcagaggtttgggatcaaaggcaagctagcccctcgttacattggaccttatgagatcatagaagcatgtggacccgtggcatacaagctgaagttaccttcaaaaatgtctgccattcacagtgttttccatgtgtctcaactgaagaagtgtgttcgattgccgaccgagatcatagccgagccagaattggagatagagccagatctatcgtaccaagagtacccctccaagattctggattgcaaagaaagatcaactcgggctaaatcgatcaagatgtacaaggtccagtggagtaatcactcagaggaggaagctacttgggaaaccgaggaattcttaagatccaacttctccgattgcctacctaaggaagctgattgtaatcttaccgacggagagtacgtgctcatccccgagcaaggacctgtccaagaggaggaccaggagcaggcttcagaggctgctattgaggatctccccgcagccccagcaattgaaggcaagccccggttttatgcataa

SEQ ID NO: 153052 - DNA, 592 bp, Zea mays
  Clone ID: MRT4577_71166C.1
aacaaaagctagtcaatccttaagtataaattgtgtaaatgcggaaagtgaattatagaattgtataggacatagataggtaaaggaactcttgcctccaccaaccagctgctgctcaggggcttcagcctcgtagaactcgaagagcttgatctcgggaccagcggttcaccaagtcttgatcgtcgattcctcgaagctcaggaacagatcgcaatttattcacgacgcgcaatgaatacaaataggcacaagcaaacatataattgcataagaacattacaccatacaagataaaatattatcaaaatgagcaataaaaacagagagcgcttctactgttacgcgaggataagaaacgcgacggtcgaagctacggtcgagaagttatcgcgtttacactaaacaattattagtcagaacatttaattcgatattatcaaatataaattataacaactatttaattttgactaacttactgttttagtagcggacgattaaacaaatcattaatcaaccgacacgagtggttatgagcgaacggtttaatatcaagcacggacgacgcacgatacgcgaaaactgcatg

SEQ ID NO: 153053 - DNA, 315 bp, Zea mays
  Clone ID: MRT4577_71167C.1
cggtcgagggcagcagaccgtccaaaccgacacgcgtggtatcctcgcggtgtccggcaagagactaccaagacagacgctatgactgaggctgatgtgaatccaaaggcctatccccttgccgatgcccacctcaccaagaagctactggacctcgttcagcagtcatgtaactataagcagcttcggaaaggagccaatgaggccaccaaaaccctcaacaggggcatctctgagttcatcgtgatggctgcagacgccgagccactggagatcattctgcacctgccgctgctgtgtgaagacaagaatgtg

SEQ ID NO: 153054 - DNA, 600 bp, Zea mays
  Clone ID: MRT4577_71168C.1
atgaattcacccacccccgccagcggaggagacactcgtttcagctctgacttcctctctcacgatggctttccttccatcttgtgggaagtgcttaactctgccggttaccctacgccccctttgtacacggtgcagttgtatgaggagcatcgggtacctcattgccgagtctggctgacattggaggctcatccccttcagccgggttggcgttctcttgacttcaagacgattggattcagggcggacgacaccactaaagaagcagccatgaagactatgacgactttctgtggctaccatcccctggagatggtgatgcaccccttgggacttttccctgctgagaaggatgaccccatgtggtgtaactgttcccttcagagcgacgctatggcacattttgctaacctcgctcaaaccaccaagctcacccttgacagtcgagaagattttgtggtcgacttgtcctccgagttggtggagaaggatttgcaggtggaaaggctgagccagcgcattaccaccttggagcagcaggtggagatccgagacaacactattgatgtcttggagaaccagctccacgatgtgtag

SEQ ID NO: 153055 - DNA, 268 bp, Zea mays
  Clone ID: MRT4577_71169C.1
gccagacccacgcggacgttataactttcaccgttccatttaccttttacacagcaacccaacgaaggaggggccgggggccatccacaagcagtcgctgcttaacccaccgccaattatgtacagctacaaccagttccgcgtcactttccactctgaggtgaaaaaccacttcatccccgacgccatcatcgtcaagaacaaccacgccttctagttcttccttaagaccatcaccctcaacaacgtcccctgccacgacaccatc

SEQ ID NO: 153056 - DNA, 791 bp, Zea mays
  Clone ID: MRT4577_7116C.1
aattcggcacgaggccgcacggcacctctaccattctccccacctctccctcgttccccttcgaaccaaaacccaaacccaaacaccaccatcaccaccacctccaccactcatacagcggcagagcgagagccgagaggcgagccgcattgccaaaccgggcgagccgcagtgctgcaaccgcccaccgcgcacgcgccggggaggcgccgcccgccaccctacgcgcgagcccagcagcgggaggaggaggcgagattccaaagggaaaaaaaggcggcgggagcaaaaggggaggcgaggtgtggaggggggaaaagcggcagtgggcagctgggagggagtccagagtccagtccagtccagtccaaaccagccggaccacggccgacgcggcagggcagctgtgactggctggaaggcaagtgtgctcggcaagcgacgcacgccacgccaccgacaccggcaccggcacccccgcccgcggtgatcggacccgcgcgccagatccgacaccccggccggaatcgcggcggactccagcgcccgcggccccgccccccggatctgcattccgcgcaggggctcctcctggccgccgcgcgccctcgtctccccagatactctgcaagcaatggatcgacgcagctggccttggaagaagaaatcatctgacaaatcatcaaatgcggatgtgctgcagaattttaatcatgcagaacaggaagataaagctccaaaatttgtgcaaatttcacctgaaacatatgcacatcttaccgagtcagagg

SEQ ID NO: 153057 - DNA, 2502 bp, Zea mays
  Clone ID: MRT4577_71170C.1
atgaagactctgacgactttctgtggctaccatcccctggagatggtgatgcaccccttgggactcttccctgctgagaagaaagatgaccccatgtggtgtaactgcctcactctcgacagtcgagaagattttgtggtcgatttatcctccgagttggtggagaaggatctgcaggtggaaaagctgagccagcgcattaccaccttggagcagcaggtggaggtccgagacaacactattgatgtcttggagaaccagctctacgatgtgcagagggaactcgaagaagcaaatgaccacctggacatgcaccacttggagatggaggccaatgaagccggaagagagggagaagaggctcccgaggagctaggaccaacccctggtgccaatgggactacctccgcgatgcctccttcacccctcttgcagcgccagccccaccctcagcagcatggtggaggccagcatcagcgacctccggcagtggcaacctaccaggagttcctgagtacgcagccacccttgttcaccaaggtagatgatccgttggacgccgacgtgtggctccgcgtcgttgagtccaagtttcccctcctcacgggagactgccctgatgaagccaagtctcgcttcgccgcacagcagcttcgcggccctgctcggacttggtgggaccactttcgtgctatgctccccgctgatcgtgaagtgtcttgggaggaattcaagactacttttagaggacaccacatcccagctggcatccttgatcgcaagctgaatgagtttctggcgcttaatcaaggaacccgtacgtatgcagggtaccatgctgattctgatgagaagaagagagaccgctttcgcaggggtcttaacaccaagctacgggaacgactcaacactgtccgggctgatagcttcaatgagttggttaacctggccatctcccaggaggattgcattgtagctcaccggacagagaagaagaggaaggcaccaatggcagcaccatccgctcaggcccagaggttcaggattgtttctcacaatcagagcaggggtttccagcagcagacaggaagatgggtgatcaggccacctcagcagcagcagccgacacccaaccgctttctagctcccgctccaaggaacaatcagcctccgcagcagcagcagttccgccagggcaatgggaacaagtgtttcacttgtggcaatgtgggccactatgccaagaattgtcccaggaaccagcagaggcagatgtcagcaccaagtcaagacaagggaagaaagcagaaggtacaagtcaggcaagggaagctcaacttcactactctagaggaagtacctgagggagctcctatcatgaccggtatcttttcagtttataatcaacctgctttaattatgtttgattctggtgcatctcatagtttcattagccaaaagttcagtgctaaatgtgaactgccattctctcactcaaaagggtcatttatgatagtcacacctgggggtaaaatttcaactaatcaattaaaccaaagtgtgcctattcaactgggaagccacattgtcaaaaccacccttcttgttttgggtttggaaaatgtggacattattctgggagctaattggatgaccttgcaccaagttgtgcttgatgtagccagccttaccgtggaaatcaattctccgttctgtgggaacttcaccttaattctgctcagtcaaggttctactcagtcatgtgctttctctatgatagagttacctctgaagaaaaccccagtggtctgtgagtatgcagatgtcttccgtgatgaattgccaggaatgccaccagaccgggatattgaatttgccatggagttgcaaccgggaacgacaccaatttccaagaggccctaccgaatgccacccgttgagttggcagaattgaagaagcaattgcaggagttgctggataagggatttattcgcccaagtacttcaccttggggatgtccagcactgtttgtgaagaagaaggatgaaagcttgaggctgtgtatagattaccgccctcttaatgcggtaactatcaagaacaagtatcctttgcctcgtattgatgttctttttgaccagttggtcggggccaaggtgttttccaagatagaccttcgctccggctatcatcagatcaagatacgagcaagcgatattccgaagacgacattctcaaccagatatgggctatatgaattcttggtgatgtcattcgggctgacaaatgcaccaacatatttcatgtatttgatgaattctgttttcatgcctgaattggacaaattcatagtggtgttcatcgatgatatcttggtgtactctaagaacgaagaagaacatgtcgggcatttgcatgtagtgcttcaacgtctgcgagagcaccacctttatgccaagttgtcaaaatgcaagacaactgagtcattgcttatgccttaa

SEQ ID NO: 153058 - DNA, 516 bp, Zea mays
  Clone ID: MRT4577_71171C.1
aaacccaaacttggttttgtttcaaaaaccccccaaagccaatttttggggcaagttcagaaacaagggaaaaaaacgggtccaaggttttcccaaagggaagctaattttttttgggcaacacaaaaaggcttgtttttccggggggacttttggcaaaaggatctgaccggggggccgggcaaaaaaaatttggggggggggggagcagggattgactaggcccggggcccaaaccctggggttttttaaatgcagaaccgtcagggggatccccagggggaaaacctccccctggaaaatatgagggcaaagggtaatgatggggaggggggggaccaaaaacaaaatttccttgcccctttcctttgggggggggcaaacgttaaggggcgggggcaggactaccaaaatatacaggggtgggggcaaaatttttgtttcttttacggggagcaggacaaaaaccttgggggggcctacaattggcggggggaaaaaacccccagggttttt

SEQ ID NO: 153059 - DNA, 274 bp, Zea mays
  Clone ID: MRT4577_71172C.1
ataaaatactccagacgcgacgaacagccaacagtatgcgcacgcatatgctactgcggctacagtcttacaggccgaggacggtgtactagatcctcttctcttaggacttacagggtgagagaggcgaacgggggggtctagcgcagtgtttttctggccgtggtcagacttacgctttctcgccatggatcctttttgccttcttgctgcccttgggcgtgatgtggcggcgctgggccccggctgtgctttgcttgtatgtgtttgctgc

SEQ ID NO: 153060 - DNA, 195 bp, Zea mays
  Clone ID: MRT4577_71173C.1
gaatccaccggatcgaccgacgctaacgaccactcgtacgctgaacatgagttttccctctcaattcacaaacatttctacatgagaacagttgacattggacaattcccgggcgatcctgaacacaaataagctatactcctacaaactaaccaagaccacaaacaacaaaactactctgacatttaccaacac

SEQ ID NO: 153061 - DNA, 612 bp, Zea mays
  Clone ID: MRT4577_71174C.1
ttgggtacctcgaggccggccgggacctctttgactatcacgacgacagcgatcgatcggttgcccttcgattgcaacctacgaacgcttgcacagcttgatacatgcattctatggagtggggtcgaggacggagattagtcatctctacctacagagtctccagcacgggtatcagccggtagcccgcctgcctgggcactctgagttcgtctgctcaccagtgttcccattcgaccctgctagcttcacactgctcctgcacgaagatgcccagcgtcgggacataccaccaccactatcccgatgacagtgccagtcgacaacatagtcgagctcctaatgcagtagacatcatacctgatactctgcttaggaatctcatggctgcccatagctggagttctcttcccccgcatgatacatgcttctggttcctggctggcagtacatccacccctagctcttcggaggatcgcatctaactgaccttgatgcggctgaatatgagcaatcctcggctataccatttagccttgttgcgtgagacatctatgttgcatgccgcaactcccagagtgcacaaatcctagacatcatgctgacaagaag

SEQ ID NO: 153062 - DNA, 131 bp, Zea mays
  Clone ID: MRT4577_71175C.1
ttacaacatttgccccaccaccaactacttttaataccactcattttccatcaattctcattcccaaaccgccaacacttttctttatcataccttccaactctacaataactacaccccctatcacctca

SEQ ID NO: 153063 - DNA, 1818 bp, Zea mays
  Clone ID: MRT4577_71176C.1
ctcgaggccggccgggaaaaactatcttagcacagcagcaccaaagcgcgtcgtgtcgtgcaaacccaactttgataccactcgctgcctggttatggactccaccaggagcaaccaggtcgccggcagatgcagcagcaccatcgcgtcaagggctgccacggtcccgccgtcgctgaccatgccgcgcggcgaactcgctgacgccatcgtgggcggaggcggaggaggaggagcggacggggacccccgggccgccctcctccgtctgtctgctctcggggaccgcatggccgccgtccggggccgtatctccgcttctatctcgggcgaagcccggcctctctcctacgccgacatccaatctgtctcctccgagatctccgccgctgcccagctcgtcgtcctcaacgccgccgagctcctcgcttcctccgtcccctttcccgccccacctccacctcctccttccgccgctccctctcccgctcccgtccgagagatcccagttgtggccgcttccgcccaagagcaacccctggaggccgccaaggacgacggcggctacgaggtcgtggagctcgacgccgccgagctgctagcggagcacgtccacttctgcgagatctgcggcaagggcttccgccgcgacgccaacctcaggatgcacatgcgcgcccacggcgaccgcttcaagaccctagacgcgctctcccgccctggtcacggccagccgaagccgcccgttggcagcaacgtgcgcttctcctgcccctttgcgggctgcaacaggaaccgcacacaccgccgcttccggccgctcaagtcggcggtgtgcgcgcggaaccacttccggcgcagccactgccccaagctctacgcctgcgagcgatgtggcggcaagaagcgcttcgctgtcctggcggacctccgcagccacctccgccactgcggcgaggaggcacagtggcgctgctcctgcggcaccaccttctcccgcaaggacaagctcttcggtcatctagcgctctttgaaggccacacgccagcagttaataagccaaacaaggatgtggtgacagggcctacagagtccaccattgatgctatggaggaagggggatttgaagaaggcattcctgaccgggaggaggatgaagagggcggttatgatccagagttcttcaaggagtggatggatgagctcagaggtggtgctggtggctccaattggcctggaccagcagcagatggacattagcaatgttgcgagggttaataggatggtttgacaagggacatctgcttacatcaagtgaccaggaggatcaataaagactgaataaaggtgatagtaaagaaaagaggtgctttgggatagtttgtaggatttctctttaccattgtgtttgtgcgttcgttctaaccagtagcttgtatggtatggtgtgcgtgtgttgtttagttgctgttcactgggcctctcccttgccattctcggttgctttcatgttatcctgtgaatttgtgatctaccaggtaatacagtggagaaatgtgtcatgctctgtaagcgttctccttggctgtgtgggtcatggagttgccggttacggaggaagaaggatagcttgcaggaaaacggtggcaccagttccctgtgcgctgctgaggatgcgaagtattcgggggagttttagaaaaatactttggttttgtgaaacaatttggttttagagtgtcttgatgtgtttggacgcaacaaactttgtagttttgaaaatcatagtattgctaaattgtaggcttccttctatg

SEQ ID NO: 153064 - DNA, 937 bp, Zea mays
  Clone ID: MRT4577_71177C.1
ccggccgggtgcggcaccaccttctcccgcaaggacaagctcttcggtcatctagcgctctttgaaggccacacgccagcagttactaagccaaacaaggatgtggtgacagggcctacagagtccaccattgatgctatggaggaagggggatttgaagaaggcattcctgaccgggaggaggatgaagagggcggttatgatccagagttcttcaaggagtggatggatgagctcagaggtggtgctggtggctccaattggcctggaccagcagcagatggacattagcaatgttgcgagggttaatagggtgataaatattataattagtcctattgtggaagaatgtaaacaacaaatgagtctatgactattatcaagagagcagagctagtgctagaggatcccacatgagtggggttgagaggagggataaaccaaggcaagcctccccccaatgtggagagactgcttcgatcccgcgacctggtaactcagtgaagcagctctcaccagtcaccactacatcaggcctgctcctcaagagatgaaacttttttgttaaacttttgccaagaactctgactagaatgaacagcatgtagcttgaattcaatggtggctgcacttataaatggtttgacaagggacatctgcttacatcaagtgaccaggaggatcaataaagactgaataaaggtgatagtaaagaaaagaggtgctttgggatagtttgtaggatttctctttaccattgtgtttgtgcgttcgttctaaccagtagcttgtatggtatggtgcgtgtgttgtttagttgctgttcactgggcctctcccttgccattctcggttgccttcatgttatcctgtgaatttgtgatctaccaggtaatacagtggagaactgtgtcatgcccgaaaaaaaaaaaaaaaa

SEQ ID NO: 153065 - DNA, 1440 bp, Zea mays
  Clone ID: MRT4577_71178C.1
ccctctcccgctcccgtccgagagatcccagttgtggccgcttccgcccaagagcaacccctggaggccgccaaggacgacggtggctacgaggtcgtggagctcgacgccgccgagctgctagcggagcacgtccacttctgcgagatctgcggcaagggcttccgccgcgacgccaacctcaggatgcacatgcgcgcccacggcgaccgcttcaagaccctagacgcgctctcccgccctggtcacggccagccgaagccgcccgttggcagcaacgtgcgcttctcctgcccctttgcgggctgcaacaggaaccgcacacaccgccgcttccggccgctcaagtcggcggtgtgcgcgcggaaccacttccggcgcagccactgccccaagctctacgcctgcgagcgatgtggcggcaagaagcgcttcgctgtcctggcggacctccgcagccacctccgccactgcggcgaggaggcacagtggcgctgctcctgcggcaccaccttctcccgcaaggacaagctcttcggtcatctagcgctctttgaaggccacacgccagcagttactaagccaaacaaggatgtggtgacagggcctacagagtccaccattgatgctatggaggaagggggatttgaagaaggcattcctgaccgggaggaggatgaagagggcggttatgatccagagttcttcaaggagtggatggatgagctcagaggtggtgctggtggctccaattggcctggaccagcagcagatggacattagcaatgttgcgagggttaataggaattattcggcaagccaaccaacctagttgtgatgttatgaatatttcagcttgattgtctagcaagtcatcctcatacagaaagtgtaagattcagatggtttgacaagggacatctgcttacatcaagtgaccaggaggatcaataaagactgaataaaggtgatagtaaagaaaagaggtgctttgggatagtttgtaggatttctctttaccattgtgtttgtgcgttcgttctaaccagtagcttgtatggtatggtgtgcgtgtgttgtttagttgctgttcactgggcctctcccttgccattctcggttgctttcatgttatcctgtgaatttgtgatctaccaggtaatacagtggagaaatgtgtcatgctctgtaattcggctcgagctgtaagcgttctccttggctgtgtgggtcatggagttgccgattactgaggaagaaggatagcttgcaggaaaacggtggcaccagttccctgtgcgctgctgaggatgcgaagtattcgggggagttttagaaaaatactttggttttgtgaaacaatttgattttagaatgtattgatgtgtttggacgcaccaaaaaaaaaaaaatgttagggggtcaggcatttttagtttt

SEQ ID NO: 153066 - DNA, 209 bp, Zea mays
  Clone ID: MRT4577_71179C.1
aaaccgaagaactgaaatgggggctggcaattcaggttacggtacaccaatttcgagcttggaaatagcaggatgggctaatgccactcgcggcacctagcttgagtggccctttaagaaccccaactacatacttcatattttcagccctctgggcaacaacactttactttcttcggcagcgctacaaccaccgccaaacgggtgca

SEQ ID NO: 153067 - DNA, 280 bp, Zea mays
  Clone ID: MRT4577_7117C.1
cgctgcaaatatcttcgcagctccaaatctgaacagtttaccattttctttacagaatacaatgacaatacatcaaaaaaagaaagaaagaaagaaaagaaaagccccaaagacaggtaccgagactgcgaaagggaaccgctatgctacagctcgaaatgtacaaagaatgctgctacacaccaggcccgtcctgtaccggtgtacccccaaccaactaccgtgctgcaggagtatagtagcttcaccacagtctcaaccttgtaccctccctcgtgcc

SEQ ID NO: 153068 - DNA, 291 bp, Zea mays
  Clone ID: MRT4577_71180C.1
gaccgcgaacacgcccatgattgatggccttgggaaggctgcggatctggtgagtgcgaactgcgagacttatgagggccacatgagagacatccgggattacctggaagagaggctggaagctgaatttggtaagagaatccatttgaacagccgccatccaggagtggagaggcttccgaacacctgcaacttttccatccaggggtcccagcttcgagggtacatggtccttacacagtgccagacactgctggccagcgtgggagcttcatgccactcggatcatga

SEQ ID NO: 153069 - DNA, 226 bp, Zea mays
  unsure (1)..(226): unsure at all n locations
  Clone ID: MRT4577_71181C.1
tcgagncggccgggctccatagaccattgcgttcgcggactagtttnttttcgcagattcggcgatggcggcgacgatccaatccgtgaaggcgcgccagatctttgacagccgcggcaaccctacagtcgaggtcgacgtgntttgctcagacggcacctctgcaagggcacctcctcccagcggagcacccagtggtcgatatgccccccccctccccccaccc

SEQ ID NO: 153070 - DNA, 233 bp, Zea mays
  Clone ID: MRT4577_71182C.1
ataaaaaaaaaaaaaaaaaaaaaaaaaaaattaaagcaaaaaaaataaaaataaccgggcccgcgtacacctatataatacaaatctccatctactctagtgtaaactacaataaagttcactaacccaatttttaccacattatcactcaaaaaactcctgacctacccaactttttcattctgctattattcactccattgccctccggcatcatatgccgtacacatatt

SEQ ID NO: 153071 - DNA, 147 bp, Zea mays
  Clone ID: MRT4577_71183C.1
ataagggcgtccatatatgtatagtacaaacttttggtagttctgtcagtgctatacaggtgcctactggcatatcaggcagccactacgctattccaagccatggctgagtatgggctatggcatgggagagggggagcacattac

SEQ ID NO: 153072 - DNA, 745 bp, Zea mays
  unsure (1)..(745): unsure at all n locations
  Clone ID: MRT4577_71184C.1
atacccataatattttgagcattcagaaacacaccaagcgaagctacctagcaacgacttaacaacaatggctaccagaaataagccctcctggggctttttgccttttttgggggggacaaaaggggtcattttttcacaaaggttaatttgttcttagggccattatcacaagttcttcccccagattttaaggggtttaaacccaatctggaggcttaaggttaacaaagggttggggggagagcggtttccacaaccacttatccaattgtggcaacaaatcttgtggcatattaacatacaaaccacatgcgacacaacagcaacaacagagtctccaccactgagccaaccatatgtggtggagcctgtcgcctacttgcaacaacagggggttgtgttcaacccactcgctctggctgacgtagctgggtgccaacaacaacaacaattgcaacagtttntgccagcgctcagtcaactagccatggtgaaccctggcggctacctacaacagcaacaacagctttcatctagccctctcgttgtgggtgagggggctacatacctgcaacaacaattgctggaacagattgtaccagctctgactcaactagctgtgggaaaacctgctgcctacttgcaacagctgctttcattcaaccaactgactgggtngaactctggtgtgtaccttcacagcgacaacaggtacttaattcatcatcaatggctaacccat

SEQ ID NO: 153073 - DNA, 257 bp, Zea mays
  Clone ID: MRT4577_71185C.1
gtgactggctcaccaagatcttcaagtctgatggcctgaagggtctctaccagggcttcagtgtctctgtgcagggcatcatcatctacagagctgcctacttcggagtctatgacactgccaaggggatgctgccagaccccaagaatgtgcacattattgtgagctggatgattgcccagagtgtgacagccgtggcgggcctagtgtcctatccatgttgccctgtccgtcgtaggatgatgatgcagtctggc

SEQ ID NO: 153074 - DNA, 366 bp, Zea mays
  Clone ID: MRT4577_71186C.1
gggcgggggccccaagaaaaaaaggggcccccccccgggccaaatgggcctaaaagaagaggggcgggacattaaagcatttttccaaaacccggggttcctacccgggggccggggggcccccccaccaaagggtttttttatttcaaaaaaatttttcctaaaaaacggggggggaaaaaaaagttgaggggaaaaaaattgcagggcccaaaaaaagccaatttttggaacgggggggttttacccttgggccccccctatgaaaaaaaaacccaaggggggggccccacccttaggaaaaacccccaaacaggggcttggtggccaaaaccccaaagggccatgggggggaccacccccggg

SEQ ID NO: 153075 - DNA, 562 bp, Zea mays
  Clone ID: MRT4577_71187C.1
gttgtggttttttttttttttttttttttttttttttttttttttttttttttttttttttttttttggttttttttttttttttttttttttttttttgaagggtaaagggtggcctgccaaaggggcccaggaaagaaacgggcccgggggggggcccaacaatcaaaaccacccctatttttccccgagcccccggggcggtcaaaccacaaggggcagcctcaatcaaaacccccccttttttttctaccaaacaaacaactctttacccggagcccccccccccaaacaacccaggggtcaggggcccctggggggcccccttggccagcccccggccctggggaagcctttcatgggcaggccttcggacccccttttgtacctccggggggtcatgggggcgaagcccaaggggggggggaagcccccttggggcccgggggacaaccccggggtgggcaaagcagcccccacacttgcgtagcaggggggcgggaaaactgtaaccctccccaccatgggccccccccacaggccgaggaaaaccctgtaaaaa

SEQ ID NO: 153076 - DNA, 280 bp, Zea mays
  unsure (1)..(280): unsure at all n locations
  Clone ID: MRT4577_71188C.1
gccaagcgtncgggcgaatcaggacccggtattttttgctcaagcctatgaaaaaaacggtgcagtatgtcctaatgaaatgaccgatgaaaagaacttttacggaagggttgacaaactggaggctatacgccatggtggagttcagtgcccagtgttgagcaaagaggccatgattgatgcctgggcactgtactaaggaccggacaagggtgcagaaacaggtgctttaataactggtggattacccgaacgcgagatgaaaaacatgttgaaaatt

SEQ ID NO: 153077 - DNA, 677 bp, Zea mays
  Clone ID: MRT4577_71189C.1
ggccggccgggccgggaattggtacctcgaggccggccggggcaaattattgcttcagctcgcgcgagacctcagctttcactcgagtgagtgcgagtccatcgccggagagagagagcgagagagcacgcaatcgagttaaacaagctctgtctcttggttctctgtccacggcgggagagtgtgagagatgggcaggcagccgtgctgcgagaagatcggtatcaagaaggggccgtggaccgcggaggaggaccagaagctggtcaccttcctcctgtctcacggccattgctgctggcggctcgtccccaagctcgcggggctgctgaggtgcgggaagagctgccggctgcggtggaccaactacctgaggccggacctcaagcgcggcctcctctcggaggaggaagaggcgctggtcatcgacctccacgcgcagctcggcaaccggtggtccaagatcgcggcgcggctgccggggaggacggacaacgagatcaagaaccactggaacacccacatcaagaagaagctcaagaagatgggcatcgaccccgtcacccacgggccgctcgctccggccactcaacctctggcgctggcgctggcgcatcagcgcgatcctccgcaggtggtgcgagaagaggaacgttgcgacgacgaccccagcaagc

SEQ ID NO: 153078 - DNA, 690 bp, Zea mays
  unsure (1)..(690): unsure at all n locations
  Clone ID: MRT4577_7118C.1
ccggccgggccgggtcttctattttcccgctgttccgttgctgtctgcctccagcctcctgccgttacgagcgcgtcagggtttttccttggccagccggcggcggccgttgcacctcctccatccacccctagtcgaaggtcgccagttcattcatccaggctgctgcgcccgagtccctggccaccgtcgctgggcacctgccgtcctcggaagtcgcaaccggaggtaatcttacgcagcggttcgtgaccgaccgtggcgattcgcgttctcttcctcgacgaactcctgcggaggcaatttgggtttcgtttcgggagaaagggtgggggtcgggcggctggcctggggcaggttagtagtatgggtggtggccgattgcgttggccgttggggactagttttctcgtaggtgggctttgctgcttcgaccggatccgtcattggagtcttctgcactccgaattccccaaatcaggattagctgatgcttgcatatttgttctgttcaatttgctgcgcgtcccgtgtggtgccagtattttgcattcctttgtgttgcggaaagctttctttcccatctgtaagttcatcgtggagtcgtgcttgctggtttcggcttgcaaggatgatggagaataatacttcctgtatttggaaaaaaaaaaaaaaaaggnccctagggcc

SEQ ID NO: 153079 - DNA, 848 bp, Zea mays
  unsure (1)..(848): unsure at all n locations
  Clone ID: MRT4577_71190C.1
cctcgaggccggccgggagtctctcagtgctgatacttctctccactctcctctttctttccctgtcccgacagagttcgaggaagctggggtgggcctgatgcttctccttctcttgcagtctagcgtccattccacttcgcaagggcttttctttctgttttaagtaaacaacgcacctgttcctgaaacagaaacgtgatgatggattcagtaagcatgaagctgttagcttttgtgttcctcctgttgcgatgccagcgggcatcgcttgctcttgctgtcgacttccaagaattttgagctcgtcagggttaacaggatccttatcacccagcattgcaaagctaacaactttacagcagctgatactggataacaacaacattactggagggattcctccggagtttggaaacctgtcaagtttgacaattctaaaccttggaagaaataatttaaatggttcaataccggactcccttggacaactttctaaactccaaaatctggatctaagccataattatttgaccgggaatatcccaagctctttctcaaatcttctgtcattgaatgatattaatctggcatataataatataagaggtgcaatcccacaacatctacttcaggtggctcaatacaactatgcaggcaaccacttgaattgtggccaaaatttatctgcatgtgaacgaggcagcacattgacaggtggatcaaaaaattccaagctaaaggtggttattggaagcattgctggagcagtcacactttctgtaactatagttctagntttgctatggtggcaaagaatgcgttaccggnctgaaatcttcattgac

SEQ ID NO: 153080 - DNA, 2354 bp, Zea mays
  Clone ID: MRT4577_71191C.1
cattgggtacctcgaggccggccgggtagattggtctacaatgatgcgtctcgcccgtctcctctttctttccctgtcccgacagagttcgaggaagctggggtgggcctgatgcttctccttctcttgaaacgtgatgatggattcagtaagcatgaagctgttagcttttgtgttcctcctgttgcgatgccagcgggcatcgcttgctcttgctgtcgacttccaagtcgaagcattggttgaaatgaggacgcaacttggtgacaaacgtggtgtccttagtgattggaaggataatcaaatgagcccctgctactgggccaatgttaattgccaagacaacaaagtcacaacaataattttgagctcgtcagggttaacaggatccttatcacccagcattgcaaagctaacaactttacagcagctgatactggataacaacaacattactggagggattcctccggagtttggaaacctgtcaagtttgacaattctaaaccttggaagaaataatttaaatggttcaataccggactcccttggacaactttctaaactccaaaatctggatctaagccataattatttgaccgggaatatcccaagctctttctcaaatcttctgtcattgagtgatattaatctggcatataataatataagaggtgcaatcccacaacatctacttcaggtggctcaatacaactatgcaggcaaccacttgaattgtggccaaaatttatctgcatgtgaacgaggcagcacattgacaggtggatcaaaaaattccaagctaaaggtggttattggaagcattgctggagcagtcacactttctgtaactatagttctagttttgctatggtggcaaagaatgcgttaccggcctgaaatcttcattgacgtgtcaggtcagaatgaccatatgcttgagtttgggcaaataaagcggttctcatggcgggagcttcagattgcaaccagcaatttcagtgaacagaatgttcttggcaagggtggttttggtaaggtgtataaaggagttcttccaggtccaaacagtataaagattgcagtgaaacgactactgaacgtggacagtcgtgatggggaaatggctttcctcagagaagttgaattgataagcattgctgtacacaagaacatattaaggttgataggattctgtacaacaccaacagagaggcttttggtctaccctttcatggagaatcttagtgttgcttcgcgtttaagagatataaaactaaacgaaccagcattagattggtctacaagaatgcgaattgctcttggcgctgcctgtggtttggagtaccttcatgagcactgcaatcccaagatcatccaccgtgatgtcaaggctgcaaatgtcctgcttgatgggaactttgaagcagtggtaggagattttgggctggcaaagatggtagacatagggaggaatacagtaacaacaggggttcgtggaactatgggccatgtagctcctgagtacataaagacaggaaggccatcagtgaagacagatatctttggttatggtgtcatgctgttagagattgtgacaggagagcgtgcaattgcattccatcctgaccgtatagaagaagcaggcgagatcctgctcactgatcaggtcaagctatggatggaagaagggcgactactcgacctagtggatcgcaatctaggtggcgtctacaaccttgaagagctggagaaggttacccagatagcacttctctgcactcacatggatcctgaacaacgccctacaatgtctgaggtggtgcagatgctggaaggagagattgtcccagcagagcggtgggaggagtggcagctggctgagctccaacgacgacaacagcatgagatgaggcaacagggcaaactattcaacttcagtgaagagtctcaaaacatccaggaagccattgagttgtcagctggcagatgagctgtcataagaaagtgacatgattttcacttgttccttaaatagaaaggctataagagaaatattgactattaggaatagtctataaggtcctggactcctggtgtaatatcttgcacaagtaactccgtccatatgctgttaatacaacgataggaccacacctagctcagaccatgtgtatatcaagaatagactgttctacattttaattgcattctgtattactggataactctgaaattctctgttgtgtgtgtgtaaaaaaaaaaaaagagcgcgccccgcgtagagagcgcgtggcccccgggatttattccgggccggggcccgcacgcggggcagctctcccattagtgag

SEQ ID NO: 153081 - DNA, 302 bp, Zea mays
  Clone ID: MRT4577_71192C.1
ggctgtttaggtgctttcaaaggagctcgaaggatattatcagtctttaggggttgggctggatgccgaggtaaaagttctttttgctctaaaagaaaaaggaactaggtcaaaaatctgtccgtgacctatcagttattaatttttaaggatgttgccactggcaaatgtaactgtgccagttctttccataataaaaggctttgagttaactcactgagggtatctgacaatgctgaggttatgaacatagtgaggagaaatgaatgtatgtgctcttagcaaaaacatgtatgtgcatt

SEQ ID NO: 153082 - DNA, 333 bp, Zea mays
  Clone ID: MRT4577_71193C.1
aaagttatgatcctattactgccgaaatttttggcttttatgctaaagctggaattcaaggcttcaagttctacacacacacaacagagaatttcagagttatccagtcatacagaatgcaattaaaatgtggaacagtctattcttgatatacacatggtctgagctaggtgtggtcctatcgttgtattaacagcatatggacggagtaacttgtgcaagatattacaccatgagtccaggaccttatagactattcctaatagtcaatatttctcttatagcctttctatttaaggaacaagtgaaaatcatgtcactttttttatgaca

SEQ ID NO: 153083 - DNA, 686 bp, Zea mays
  Clone ID: MRT4577_71194C.1
atcttatgaaattactatttgttgtctccgtcctctgcttaaccttagctaatggtttcctcttcaggatacccacccctgagcatcctattctagccaccgctgctcctgctggcgtaactgagtacttcactgccttcttcgctcacttcgatcttgatcaaccaaaccaaattctcaattgcttcgatgataagaatgctgtccttttctggaaggaattagatctaactagtgacttagcacaaaatatcgaagaaagaaatcacgttaaggttcacttaggctggggtgaattagttctccttgaaaaagcccttgaatccttacatggatgcatggctgccactcaagattttagtgatttactacacgctcttggagctgaagaacgtaatcctaaactttttatgattgctcaatacgtgtatttccaagcaaactatggaaagctttctcaagaacttcccaaggtagttgaagccatcaagaacaaagattggaagagagctggagaacttaaggctagtatcgtacaatccatggccgatgagctcaaggacaaaggcttagccttacaagctctcgatgctttatggaacggagttcatattgagcttggcttgggagatgctcaaagtgtcttcggatgctggaacaaggaaacagctcatgtaagattagag

SEQ ID NO: 153084 - DNA, 871 bp, Zea mays
  Clone ID: MRT4577_71195C.1
agtctctcagtgctgatacttctctccactctcctctttctttccctgtcccgacagagttcgaggaagctgggtgggcctgatgcttctcccccacccccttctcttgcagtctagcgtccattccacttcgcaagggcttttctttctgttttaagtgaaacggatccagcaacgcacctgttcctgaaacagaaacgtgatgatggattcagtaagcatgaaactgttagcttttgtgttcctcctgttgcgatgccagcgggcatcgcttgctcttgctgtcgacttccaagtcgaagcattggttgaaatgaggacgcaacttggtgacaaccgtggtgtccttagtgattggaaggataatcaaatgagcccctgctactgggccaatgttaattgccaagacaataaagtcacaacaataattttgagctcgtcagggttaacaggatccttatcacccagcattgcaaagctaacaactttacagcagctgatactggataacaacaacattactggagggattcctccggagtttggaaacctatcaggtttgacaattctaaaccttggaagaaataatttaaatgggtcaataccggactcccttggacaactttctaaactccaaaatctggatctaagccataattatttgaccggaaatatcccaagctctttctcaaatcttctgtcattgagtgatattaatctggcatataataatataagaggtgcaatcccacaacatctacttcaggtggcccaatacaactatgcaggcaaccacttgaattgtggccaaaattatctgcatgtgaacgagcagcacattgacaggtggatccaaaattttcagctaaac

SEQ ID NO: 153085 - DNA, 555 bp, Zea mays
  Clone ID: MRT4577_71196C.1
agacgacaccgatccagacatcaactgcgactgggctaccagcatacgaaagacagacataggacctttacttagctatgatggacactgtcactcagaaagcctgagccggtgagttggcgctgctgcttctccagctgatggcacctccgaccacagacccacctactgtgctcggcggatacttcccccgtgttacgactgaacgtcatgtccagacagattgctcttccatatggagccatccccaggggagcaaacctcgtgccttcataccatgacctacgatagactctgcttgcgatgcggaaaactcagtctgctcgaaaaactgaagaacacttccttcacacgctaccagaccatatcatatctctgatctctgcctcgtcattcgcgacgctaagaacccattccctcattggtggtgacacaaccgaaacactcagtagtccaactcatagcgcactcagatatactaaaatgatactatacattactgaatacaagtgcaggcgagcaaacaatcaagagaaacatagcgccgctaaacat

SEQ ID NO: 153086 - DNA, 1006 bp, Zea mays
  Clone ID: MRT4577_71197C.1
attcggctcgagaaacgaaccagctttttattggtctacaagaatgcgaattgctctgggcgcttcctgtggtttgggggaccttcatgagcactgcaatcccaagatcatccaccgtgatgtcaaggctgcaaatgtcctgcttgatgggaactttgaagcagtggtaggagattttgggctggcgaagatggtagacatagggaggaatacagtaacaacaggggttcgtggaactatgggccacgtagctcctgagtacataaagacaggaaggccatcagtgaagacagatatctttggttatggtgtcatgctgttagagattgtgacaggagagcgtgcaattgcattccatcctgaccgtatggaagaagcaggcggagatcatgctcactgatcaggtcaagctatggatggaagaagggcgactactcgacctagtagatcgcaatctaggtggcgtctacaaccttgaagagctggagaaggttacccagatagcacttctctgcacccacatggaacctagtcaacgccctacaatgtcagaggtcgtgcagatgctggaaggagagattgtcccagcagagcggtgggaggaatggcagctggctgagctccaacgacgacaacagcatgagatgaggcaacagggaaaactattcaacttcagtgaagagtctctaaacatccaggaagccattgagttgtcaactggcagatgagctgtcataagaaagtgacatgattttcactcgttccttaagtagaaaggctatatggaaatttcaggagtacgcactacaaatattgactattaggatttaggaatagtctataaggtcctgatgtaatagcttgcacaagtaactccatccaaatgctgttaatacagcgataggaccacacctagcttagaccatgtgtatattaagactatagactgttctacattttaattgcgttctgtattagtggataaaaaaaaaaaaaaggcggccgc

SEQ ID NO: 153087 - DNA, 215 bp, Zea mays
  Clone ID: MRT4577_71198C.1
gttcgttgctcgatcggtgcaggtaatggagaacgctgctaccaatatcgaagcgcacgctatcggcgaacctgactcagcgaacttcagcagactcgcctactgcgacctggacatgcgacgtacgggtccagacagcagggagatggcgactgtcgatggtagaagaggctatagtgatcagacaggcgacatgatgaacgtgagtgactgcc

SEQ ID NO: 153088 - DNA, 460 bp, Zea mays
  Clone ID: MRT4577_71199C.1
attcggctcgaggtttggcttgcctgcccttctgtttgtgccagaatgaggcaaggctgatgaggggcgccacatgattactaacctggaccggcaggttgaccccatgtccgatattcaatgtccatcaaacgggctagagaagtgccttcactacgtacaccttgagtggcgtcatcgtctcggcagacagcatcgagaacgcacaccgggcaccagcattgatatcgtctggatggaagagaagaacatgagcatcctacatgatagcctactctgtgtgaacatatggttacggacgatgtgtagtggagggcatggacacgcagggctgatcacaattttatgcatccttgctgatgaccacatgagtggctaggttgtgctctagcagctgtctggaagctgtgaatcctatgcatgaccaagacatgcaagcaatgcagacgtatacctttct

SEQ ID NO: 153089 - DNA, 693 bp, Zea mays
  Clone ID: MRT4577_7119C.1
gggagaattgtctatcaggccctatatggtagggctcctctccggctccagcttcatggaaggaggtctaccaaaaagtttagttggaggagccattttttttgtgaaaaaacgatgaagtggagctgttttataggagccacagaaggagccctttgggaggagcccttctaaacatatcttaagggggtgtttggtttctagggactaatttctattctttatattttattctattttagtttctaaatctctaaaacggaaactaaaatatagttttactatctatatttggtaatttagggagtaaaatagaataaaatgaaggggctaaattagtctctagaaatcaaacacccctaaagcaaaactctgttttatattatagattgtgttgtttatggagtggattttggaatagtggaaaagatatctagtaagagtatgtacaacttagatttttttgataatgtacaacttagatactacgttatggttctctaagcactagatacatctaaaaaaatccttcatacaacctaatttattcaagtcttgcatcttattcactaaaatctttcaagatacgactcatttatgtaggttgtatcagtagaatcgtatctagacttagagacctgtgctagatacgttccttcatcaatatatcatctcttgtaattttttttgcac

SEQ ID NO: 153090 - DNA, 165 bp, Zea mays
  unsure (1)..(165): unsure at all n locations
  Clone ID: MRT4577_711C.1
ccctccttccttcgtcattcctctcccgtaggttctctctccctccctccctccctccctcagcacacataaactccgagatacacatantgtatcacgtagggagaggatgggatggacaaacctagtcgtgatgactttgtagacgaagataaaattgagctg

SEQ ID NO: 153091 - DNA, 254 bp, Zea mays
  unsure (1)..(254): unsure at all n locations
  Clone ID: MRT4577_71200C.1
cccaatccccacgncctcatcggcctcctctctttttgtctcgccagatctcccgaggtgaccgggcgcgagcatcaaccatggcaatcggggcgcgcgccctgcgccgcctcccgcttcacctctccccctcgatctcccgctccttctgcgcggtttccccggccgccgcctcggctacctcggcccccgccgccgcgtccgccaagggggggggggggatcgtgcgcgtcctcgccatcgatcccgacggg

SEQ ID NO: 153092 - DNA, 505 bp, Zea mays
  unsure (1)..(505): unsure at all n locations
  Clone ID: MRT4577_71201C.1
ttgggtccctcgaggccggccgggncggtacccccagatgcctatcgtcctagagaggtttccgatcccgggaggcggcgaccctccctcctccccttgtttaggtagggcaggcctgaccacccgtcatcgccgctcagtcatggcatcgagaccatgtacaggggtggggagatgcgctgtaccaaaaggatgagtcacatacggatgatgctcgccgcccacgtccctcttggacctggaactgcgatttcccgtatggagagctatggctttaagatgccccaccgaccggatctacttcagcaaccttgcaaagacatggtaaaaactggcgcttgcatcgaggctcatcgttgccttcgagaacccgcatgacatcatcggactgtccggccgctcctatgcgccagagtgctgtcctcaagttctctcagctacactgaggctcatgccatcgctgggaggcacacccctagaaccttcactaaccagctccagacct

SEQ ID NO: 153093 - DNA, 767 bp, Zea mays
  unsure (1)..(767): unsure at all n locations
  Clone ID: MRT4577_71202C.1
cttccttgtccgtctccactaccgaccaaccgatgccggctgggacttcgccctactgctgctgcgcgctggcgagcgcgcgtggttcacgagcgagctccaccacaagcccagtcgcgcacggcagccgttttgcttgttttgtttgcttaccgcctcttccgtccttcctcttttgggcggcctggctgggctagctagctagctgttctgttcattccgagttcccggcatagcacacgaggttggagttggaggcgtaccgagggagcagacagcagaggacactataagagtagctagccctacccaacatcttcagcggtgcttgccaacttggagagagagagagagagagagagagagagagagagagagagagagagagagagagagagagagaaaagagaagagaagagaagaggagggagtgatcgcaggaaggaggatcggagtgatgggagacgcagcagagaccaacaagactcttcacaactggatgggcgagccgaggccgaggtcgagcgaccagcgcgacgaggaggagacgcttcagctcagcctcggcctccccggaggaggagcaagtgcgggtggtggggcagcacccgccgcctggagaatgctgccggccagagacgaggagatgcgctctgctgctgctgtcgccnacacctccctgctctctctcggctactccgccccagctttctcgccccgctcaccaggcaaggcaaaggggtccccagcagcagctacagagaatg

SEQ ID NO: 153094 - DNA, 560 bp, Zea mays
  Clone ID: MRT4577_71203C.1
tttttttttttttttttttttttttttttttttttttttttttttttttttttttttttttttttttttttttttttttttttgggaacaaggggggccttatagatataaactttttcatcccggtttttgggtctaaccccctcggggaggcaaccaagttccaaacttggtttttttccaaaaaaattttttggggtctggggggaacttgccctgacttgaaatttagggccaccattgctcccaaatttgttggaaggtcattattggttaaaaacaacactttcccttatgttttgggaagccttgctgacctttgttggggggggggggctttttttgccccaaattttttaacttggtctgttacattagcatcacttggggaattttggccttttagcccattttgaattttttaaaaaaatattgatggggtgacttttctttattttgaaaaacttttttttaaaaaaagcatttttccgagcgacaaacactttgaaagaaagaaaagggtcccccctgtttgaaatccggaaaattcaattgtgtgg

SEQ ID NO: 153095 - DNA, 221 bp, Zea mays
  Clone ID: MRT4577_71204C.1
aaatacccaggtgttatttttaaagagttaagggttcttaaaaccggggcacggacgttacatgacctgacatacccgaagccacccaaatgacagggaagaaccattaaaccaaaaatgggcagggccggtttcccggaaaggacatacaataccagcggacgaaaaaaaaggatggacgtcacggcccccggagagacgggaaaaaggcacccctcggg

SEQ ID NO: 153096 - DNA, 372 bp, Zea mays
  Clone ID: MRT4577_71205C.1
accatgtgcataattccgacttataggcggggggaggttgcaccacctggaaaacttggagaaacggggggtgttatgaagtagcaacaaattctgctgcacacggttagggggtccaaggacggcacgggtgcgaggtgaacaaaacagggttaaatccaaaaactttcctggaaaatttgtggtatccgcagccaggaaagataggaacctccctgacaggggaccatacttttggatacagtgagaatcatggttaagacagaatgttggtaaactattgatcttgcactgggagttttatctagaagggagacctacgggttcagaactcttcatcagcctaagacgctggaataattggtcaaacat

SEQ ID NO: 153097 - DNA, 287 bp, Zea mays
  Clone ID: MRT4577_71206C.1
ctattaaaagggaaggccaaccctagggcgaaaggaaacaagaccaaagaacatccaacagtatagtagggtaataagcgttgaacaagaacatcattacacatcaaacaaaaaatatatatagggccggtagaagacaactaacagggaggaaacgaaaacatggcctgagtttccacgatacaaccggagctcctaagcagttcgcaattgataattaaggtaggcctaaagccttgctcgcaatgttgctggacagccaggccagggcccttcataacaaaccc

SEQ ID NO: 153098 - DNA, 1391 bp, Zea mays
  unsure (1)..(1391): unsure at all n locations
  Clone ID: MRT4577_71207C.1
ccgggctatccaaccttcccgatggctgcaccatccgaaagcccaagacactgagctggtctgtttagttggaaagccatctgtactgtacgtttttcgccgatcatggaggatgagaggaacacccagcagcaccagggcggtgagcaggcccaggaccaggagaacgaggtgaaggacaggggactcctggacagccttctcggcaggaacaagcacgacgaccaggagaagaagaaccagcagcagcagcaggcggaggaggagctggcgaccggcatggagaaggtcacggtggccgagcccgaccacaaggaggaggggcacgaggccgccgagaagaaggacagccttctcgccaagctgcaccgcaccagctccagttccagctcgtcgagcgacgacgaggaagaggaggtgatcgatgagaacggcggcgagattgtcaagaggaagaagaagaagaagggccttaaggagaaggtcaaggagaagtcnctggcggcccacaaggcccacgatgagggcgaccaccaccagccgggcgtacctgccccggcgcccgcaccgcccgtggcggtggacacgcatgctcaccacctgcaggagggagagcacaagccgcacttcccggcgccggcgcctcccccgcacgtggagacgcaccaccaccccgtcgtcgtccacaagatcgaggacgacgacacgaagactcagaccccaccacaggcaccggaggaggagaagaaaggccttgctggacaagatcaaggagaagctacccggtggccacaagaagccggaagacgctgctgccgccgccgccgcgccggccgtccacgcgccaccgccgccggcgccccacgccgaggtcgacgtcagcagcccggatggcaagaagggcttgctgggcaagatcatggacaagatacccggctaccacaagagctcgggtgaagaagaccgcaaggacgccgccggcgagcacaagaccagctcctaaggtcgcagcgtgtgcgtgtccgtcgtacgttctggccggccgggccttattgggcgcgcgatcagaagcgttgcgttgtgcgtgtgtgtgcttctggtttgctttaattttaccaatgtttgtttcaaggtggatcgcgtggtcaaggtccgtgtgctttaaagacccaccggcagtggcagtgagtgttgctgcttgtgtaggctttggtacgtacgggctttatttgcttccaagtcagggtctggatgttgtgtactacttgggtttgtcgaattattatgagcagttgcgtattgtaattcagctgggctacctggacattgttatgtattaataaatgctttgctttcttctaaaaaaaaaaaaaaaaaaggcccctagggcc

SEQ ID NO: 153099 - DNA, 829 bp, Zea mays
  Clone ID: MRT4577_71208C.1
cattgggtacctcgaggccggccgggagacctatagggggagagagggagcgagctggccggctaggccaggagaggagaggggagacacagacaacgagcgctcgctgggaagaggaagaggttcgtggggacgcagggatccagaggaagatgaggcggtgggtcttagccatcgccattcccattctcgccgctgcttcggcggcggcgctgttccttggggctgaggcccaggcggtccagcagggccaccagacagagaggatctcaggaagtgctggtgacgtgttggaagataaccctgttgggaggctcaaggtttacgtgtatgatctccccagtaaatacaacaagaagctggtgaagaaggatcctaggtgcctgaaccacatgtttgctgctgagatcttcatgcaccggttcctgttgtcaagtgctgtccgaacatttaatcctgaagaagcagattggttctacactcccgtatacgccacatgtgatctgactccttcgggtcttccccttcccttcaaatctccacgcatgatgcgcagcgcaattgagctgattgccacgaactggccttactggaacagatcagagggtgcagatcatttctttgtcacgccacatgactttggtgcttgcttccattatcaggaagagaaagcaatcgggcggggaatccttcccttgcttcagcgtgctacactggttcggacctttggacagaagaaccatgtctgcctgaagggcgggtccatcacaatcccaccatttgcacctccgcagaaaatgcaggctcaccttatccccctggacaccct

SEQ ID NO: 153100 - DNA, 367 bp, Zea mays
  Clone ID: MRT4577_71209C.1
aaattcggcacgaggtcgaagagcaatgacgaccttcgctttggcgccctttgcggccttcaatggcctgcgaccgacgcggagaagctgcggtcggaaaaactcaccgggaaaactcctggtactgccgaagggcccggaagttaagtccaacactccttccacgggcgcaagtttaagcctgggccagccgagccgccatcgccggcggggcaaaggcgtcatcttcgagccagtacagtaccccgaacgtccttcgaacggccaaggcccttccttgccaatgcccaccttgccttgcgttcgttcgtggaaaaaaagaaacaatataccacgaatccttaaataagcgacagcaaggtggcca

SEQ ID NO: 153101 - DNA, 529 bp, Zea mays
  Clone ID: MRT4577_7120C.1
actacaaactgctgtataaacggatatgtcgaatattgaatccttacatctgttgccaaaaaaaaaaaaaaaaaaaaaaaaaaaaaaaaaaaaaaaaaaaaaaaaaaaaaaaaaaaaaaaaaaaaaaaaaaaaaaaaaaaaaaaaaaaaaaaaaagggggggaaaaaaaattgggtaatataaaaaaaaaaaaaaaaaaaggtccttgggccggacccccctaagggggaatttgggaaaaataaaaaaaaagggggggccgttggacgtgcttttaaagggcccaaatgcccctaaaaggggggggaaaaaaaaaaaggggggggggtttaaaaaaggcgggaggggaaaaacccggggggaacccaaataaaagggctggggaaaaaacccccttttccccgggggggaaaaaagaaaaaaggcccccccaaacggcctttcaaaaagggggccaacctgaaggggaaaaggaaccccccttaaacgggcaaaaaaacggggggggggggggggtttacccgaaggg

SEQ ID NO: 153102 - DNA, 271 bp, Zea mays
  Clone ID: MRT4577_71210C.1
tgttgttcccagcttatcgccatcctgctcggggggttttttgaaaacctactggggttgaccacctcacacgagatcataggcatcgacaactacctctactgcttcggcatgaccctagcaatcattggctaaatcaagctggggttagaccccacgaacacctatcggtcctacacaaaccatttgggcaccattggtgctgaagttctgatcaacccatctgagttcttgatgatggtggcgacggcacttagatgccacaaagtga

SEQ ID NO: 153103 - DNA, 609 bp, Zea mays
  Clone ID: MRT4577_71211C.1
attcggcgatatggccgcagcaccaggagaaagagaccctcagcaattgtcccccagtagcaggtccccaccacgatgttcgcccacgattaccacctcgaacacacactgaagattccaatgcgaccactacttgtatgctcgcaccactgagtggatccatatgatcaccctcgtcttcagtagcacaaacttcaggtggccgctgccactgtctcctgcctttgagaatccggatcacattagctcgtacatagctaggacctatgtccatactgatgcccccccatgtacctcggtacatcgtggtaggcccatgcacatgtagctgacactaccactgtctcgtggtacatgtcatcgcacatcttccatcaccacctacctctgagaaccacgccttcttatacttatatgaaccgacgactgcccctctccccattaaggaatcaggacgcgaaaaccttcccaccctcggatactgcggtactgactcccctatgcgctatgccgatactgaaatcccctgccatacccaccataaactaaccatagccggtctgctctggctcgtcgccctaatgatcctcctgaagaccgacacaattg

SEQ ID NO: 153104 - DNA, 252 bp, Zea mays
  Clone ID: MRT4577_71212C.1
gggggttggggtttggggggggggggaacccccattttcttattacttttaaatactgggaatttacaaacaaaagactggcttatacataagggcatatacaacgggggaccaacccaaacaaacatgagctcatttggtccccctttacatggtggacccttcctggtgggggaaatcaatcctcggcccggccattggtgggggattcaagtccagcgggggatcatcaccctccctggcttggggggg

SEQ ID NO: 153105 - DNA, 301 bp, Zea mays
  Clone ID: MRT4577_71213C.1
aaaaaaaaaaaaaaaaaaaaaaaaaaaaaaaaaaaaaaaaaaaaaaaaaaaaaaagaaaaaattaaaagggtgcatattgttaaaaagaaaatgaaataaaataaatgatatttatataagaataatttagaaaaaattaaatttaaaaataaaactgaaggggcggaagatctaaaggttttttgcttaggcacttttgctttctataaatacagtgtttaatgtagagaaatctaaattttttttctagggggggtggcttacaaatttctgtctgagatagctctggattttcgaaat

SEQ ID NO: 153106 - DNA, 283 bp, Zea mays
  Clone ID: MRT4577_71214C.1
aaaacaaagctagaacacgctcttaagcaacacctcacaaggtacacagggaatatttggttttaatgactggcaaactcaaatggctaccctttcaaaagcagaagcccaagagatggatcaaaatccagaacaggggctggggatttagctcagtggtagagcgcttacctaggaagcgcaaggccctgggttcagtccccagctccgaaaaaaaaaaaaaaaaaaaaaaaaaaaaaaaaaaaagaaaaaaaaaagaagaaaaaaaaaagggggggggccc

SEQ ID NO: 153107 - DNA, 280 bp, Zea mays
  Clone ID: MRT4577_71215C.1
gagaccgtgtcggtaagcaaagcacaccagctcatttgcatcggccgttcggcgtgcgtgcatggtcaaccaaagactcgtttccttacttgtggtcctgttcgtaccttccttccgttggaagccttctgccgtaagcacggctgcttggctgcgttctgatggcagttggaggctgcgtgtgtgtagcgtcgccctctccgtcgtcggtcgaatcgtggtcgtggaggactagcggtgtgctgcgtccgcagtcgttaggtgcagcttcgttggctat

SEQ ID NO: 153108 - DNA, 643 bp, Zea mays
  Clone ID: MRT4577_71216C.1
ctcgaggccggccgggaccgcctcctcttgtttctcttcctcttcctactcggcaatcaccacacgagagaagagaagctagcgttcaacaaagtaagatgcgagagagctgacaaaaacgactggccatcaatggctctggcgccggcgcctctccagtgcttcctcacgggcagcagcagaccggtgtgcacggccacggcgacgccgcccaagcacgcgaggaggccgtcgaggatctcgtgcagggcgtccggcgatgacaaggacaaggtcccgtcgggagggaacgatcttggggtcaagcagctcgggaagctggccatggtcgcgctggccgccggcgtgctggcgctcggccccgtcgacggcgccgttgcggccaagtccggcggcagggtcggcgggcaggcgttccggtccgcgccccggtcgtccggccctcggatcaacaactccaggtaacctttatagcgccttctggcttgatttgaatcggcgtgtaatctgttatctgtctgaactgaatataagtagatagatcactttcgtcaaggttcagttctacatgtcggcatgcatgtagccgtgtgttcagttcaaagctcaggcttagaatagatgacgtcgtcttcattcctct

SEQ ID NO: 153109 - DNA, 1366 bp, Zea mays
  Clone ID: MRT4577_71217C.1
gaaaaaaaaaaaaaaaaaaaaaaaaaaataaaaaaaaaaaaaaaaaactacctcgaggcggccgggggcattgcgtacctcgaggccggccgggaggcggccgcgcgggcaccgccgcctcttgtttctcttcctcttcctactcggcaatcaccacacgagagaagagaagctagcgttcaacagaggaagaagcgagagagctgacaaaaatcgactggccatcaatggctctggcgccggcgcctctccagtgcttcctcacgagcagcagaccggccgtatgcacggcgacgccgcccaataagcgcgcgaggaggccgtcgaggatctcgtgcagggcgtccggcgatgacaaggacaaggtcccgtcgtcgggagggaacgatcttggggtcaagcagctcgggaagctggccatggtcgcgctggccgccggcgtgctggcgctcggccccgtcgacggcgccgtggcggccaagtccggcggcagggtcggcgggcaggcgttccggtccgcgccccggtcgtccggccctcggatcaacaactccaaggaccaacatctacatcaacccgccggtggcgccgccgctgggcggatacgggtacgggagcccgttcttcggcggctacggctacggctggtcgccgttcagcttcttcgcccccgggccgagcgtcgccgtcggggtcggcggcggcttcgacacgctcgtcctcttcttggtgctgggcgccgtcgtcggagctgtcaggcggttcctcaacaggaacaacgacgattacgacgactactgattatcagtgccaggctcctgctacgtacttcaccttcgtacgtgtgtgtaatatatgacgaaatttttcccgtgcggaattctaggaacggagtgtactgacgatgcatcaggagatgtatgtaataattttgtccagtgaaatgtaatgagcatagcgtctatagttagggtcagttgcaaacagccaaatactgcataacatcgatcgagccaccgactacaaagtgcatgatgaaaataaaaaacttgcattgctgctattgcatagcttgacaaattgttagacacaaaaaaaaaaaaaaaaaaaaaaaaaaaaaaaaaaaaaaaaaaaaaaaaaaaaaaaaaaaaaaaaaaaaaaaaaaaaaaaaaaaaaaaaaaaatttaaaaaaaaaaaaaaaaaggggccccaaggccccccaagccccattttttgtccctttaagggggggtaattgggggcttgggggaaacaggggcaaaaggggttcccgggggaaaattgttacccctcccaatttccaacaaaaataggagccggaaaaataaaggggaaaacccggggg

SEQ ID NO: 153110 - DNA, 649 bp, Zea mays
  Clone ID: MRT4577_71218C.1
agagccaaaagggggctttttaaacccccaatccaacaaacgaacaaagccctggtgcaaaaaagaaaggcctttgccaatgtttacccaaaaaaaacagcccccgttttaaaaccccggcccccccccttgaaaaatggggggggggcccccggataaaaccaacaacggaaagggaaaaggggtttgtttattacgggcctaaaaaaactaccccccccgctccaaaaaaggggggggatccttccgctccctccattataattattccaagccccggggcaaaggacggccctttaggaacagggttcctttggcctcaacgcccacaataaaaaaaacccccaaccggggttagcttttaaaagcttttggcagctgcaaggaggctctccacggggaggccgccccccttggaaaacgccccgggaggaaccctccccccaaacttggcaaagccaagggccttgccctgggctccgacgaacttttgccaaccaaaaggggccccggcctcaatgctgatccttcctgggacggaaacagggaggaccctcttcttggactcatccgacgggtcatcaaaaagttcccaggaaacaaacgaaacaacccggaccgttttgccctccttcctaaattggggggg

SEQ ID NO: 153111 - DNA, 348 bp, Zea mays
  Clone ID: MRT4577_71219C.1
tttcacgcgtccgcggaagtataaatggaagcaggatttgtgccctaggtcggctattctgcgcccacacagtcagggattgtagatgaagtcgggctatctatctccctggtttgctattctctgcccacgcagtcagggattgtagatgaaatcagattatctatctcatagtttgtggcaccatcgttgttttgggaaaataatttgttttttcggcacgcactcaaagtttctttacttcaaaatgctactaaaatccgttatgatacattgtaaagcataggtttattgtaatagttggatctgcttctaacattctatctattgaaaatgataaaaatacta

SEQ ID NO: 153112 - DNA, 2109 bp, Zea mays
  unsure (1)..(2109): unsure at all n locations
  Clone ID: MRT4577_7121C.1
cattgggtacctcgaggccggccggggcagcagcaggagtcggcaaagcaagcttccttccttgcgaacgcaactgaccgctccggattcgccggcccccgccgccgcttcgccttctctctccctcgtccacggcaaccaactaaccgtcgagatattggcggggcgccgatgctccctgactccccgtatcgcgttgcggatgctgtgggcctgtgaggctcgctgccgccgctttgggatctgggctgctgccggagcggcagcggcggttgtgactggcgccggcgatggcgatatcggcgaaggagaggaagctgagcaggctcgggagttgtaagggcggtgcggcggctggaagtggcagcggcggcggcggcggttcgcctgctgccagggcccaccgacccctcttggccgcctcctcacccgatggacccagcctcgtccactgccctgccgagccatcgnttgtgtggacgtctctctgtccctgtccctgtcccctccggtggcgccgctgcagtgggacaggcttgtgtacgctgcgctcgttgacagcagggacaactccaccgtcgtgttcgccaaggggatgaacctccggccaggccgggttgggtgtggcgtcgaggtaccagtgcgtctttggccgtgatctgtggaagccanagcagcgtgtgctcacgtccccctgtgatttctgccgcacaagagggttttccggtgcgtgactccagctcgcgttcgccggcacctcaggatgacaactgatcccaacggcaatggcaatggcaatgacaagccgatgttggtctccatcagaacgaaggggcagagggactccactctgactcggctcgaggaacctgagccacttcctcctcggcacaactacaggcatcatcgacgacggccaaaggcgcactcaatgtgcgtgtgcaccatgctccgcaaccaggcgaggttcctcagggaatggatcatctaccactcgcgcatcggcgtggagcggtggttcatctacgacaacaacatcgacgacggcatcgagcaggtcctcggcaccatggacccgtcgacgcacaacgtgacgcgccacctgtggccgtggacgaagtcccaggaggctggcttcgcgcactgcgctctgagggcccgggagagctgcgagtgggtggggttcatcgacgtcgacgagttcctccacttccccggcaaccagacgaccctgccagacatcctgcggagctactcgaacaggccgcgggtgggcgagctgaggacagcctgccacagcttcgggccctcggggcggaccagaatccccaagcaaggcgtgacgacgggctacacctgccggctcgccgcgccggagcgccacaagtcgatcgtgaggcccgacgcgctgaacccgtcgctcgtcaacgtggtgcaccacttccacctgagggaaggcgcgaggtacgtgaacgtcgggcagggcgccatgctcgtcaaccactacaagtaccaggtctgggaggtgttcaaggacaagttctccgggcgcgtcgcgacctacgtcgccgactggcgggacgaggagaacgtcgggtccagggacagggcgccggggctggggactaggccggtggagccggaggactggccgcgccggttctgcgaagtgtacgacaccgggcttaaggatttcgtgcagaaggcgttcgcagacccggccactggaagccttccatggtagatgatgattgatgggggtatacatacagagagacagggaattaagaaacaagtaaacgaaaaggataggtagaagagtggtttgctctctgttagtcatttgaggttttcttttttttcccctgttcttacttcttttagagccatctgtttctcttttttttttctttttacatgtctaaggaaatgattcttttgtagataaaaagaaaggtaggtagtaagttatcttgacgaaaggagggaatgaataggatgcctgcctgactttctgtcttcttctgatatttttacactcaattctgtaagcacaagtcaaaaatcagagacagagacagccaagtcaaaaaaatcaggggttgtttt

SEQ ID NO: 153113 - DNA, 289 bp, Zea mays
  Clone ID: MRT4577_71220C.1
gctcaaaaccttttttttttgggtgggtatgttgtttgaagaggaggcgtaattttttgttggtggtgtcatattttgcattaaacaccgaggggggataaaaccaacccgtctaagaaggaaaaaaacccaataaaggtcccaattcaatgggaaaaaacccaatccctggggacataacaaaacccggggaagggtgtatcccccgtgggggggccaaaccaccccgagatgaaaaacttttgggaagaaaaaggggtgtggggagggttaccctttgtccccgggc

SEQ ID NO: 153114 - DNA, 388 bp, Zea mays
  unsure (1)..(388): unsure at all n locations
  Clone ID: MRT4577_71221C.1
cgcccacgcgnccgcgcgcgcggccggcncgccagaaggaggaccccgggaacgccancgnngcgggcgccgccacgggcgggnnccncnccaggcgccagggcangggggccgcgggccggncggcgcncangggcggganccnccgggcccncancgagggcggggggggggggcncaancgcgnccncgccaacccgccccngcccgncgacgagcccaaccngacggcggncangggcggcaacccnnncccgggncggcccggggcgccgccggncgggggaccngcggaagcggngagcgccagcggcgcggggggggggngggggggacnggggggcggggggggggggagaagaaacccggcgcggcggggggggggggg

SEQ ID NO: 153115 - DNA, 2236 bp, Zea mays
  Clone ID: MRT4577_71222C.1
atgcaacggcagtaaagcatggcttagatgcaaatgtttttgtgggcagttcactcatcaacctgtatgtgaaacatggctgcatctctgatgcaaagaaggtgtttgacttctccactgaaaagaacattgtgatgtggaatgctatcctttatgggtttgttcaaaatgagctccaagaagagaccattcagatgtttcagtatatgaggagagctgatcttgaggctgatgattttacatttgtgagtgtccttggcgcgtgcattaacttgtattcacttgatttaggtaggcaggtacactgtataacaatcaagaacggcatggatgcagacttgtttgttgctaatgcaatgctagatatgtactcaaaacttggagcaattgacgttgcaaaagcactattcagtctcattccagttaaggatagcgtatcctggaatgctcttatagttggacttgcacataatgaagaggagggagaagctatcaatatgcttaaaaggatgaagttctatggtatagcactagatgaggtttcttttgcaactgcaattaatgcctgttccaacatttgggctattgagactggaaagcagattcattccgcatctatcaagtacaatgtctgctcaaaccatgctgttggcagctctctgattgacctgtattcaaagtttggagatgtagaatcttctaggaaggttttggcacatgtagacgcaagcagcatagttccaataaatgcgctaattacaggtcttgtgcagaacaatagagaagatgaagccatagagttatttcagcaagtgctaaaagatggtttcaagccgtctaacttcacatttacaagcattctttcagggtgtactagacctgtcagttcagtaattggtaaacaagtccattgttacacactgaaatctgctattttgaatcaggatacttcacttggcatctctctggttggaatatatttgaagtgcaaattgcttgaggatgcaaacaaactcttagaggaggtgccagatcacaaaaacctggttgagtggacagctactatttcagggtatgctcaaaatggttacagtgttcaatctttggtgatgttttggagaatgcgtagttatgatgttcgttcagatgaggccacattcactagtgttctgaaagcttgttctgagatggcatctcttacagatggaaaagagatacatggcctcattgtaaaatctggttttgtttcctatgaaactgcaaccagtgccctcatggacatgtactccaagtgtggggatgttatttcttcctttgaaatcttcaaggaattgaaaaacaggcaaaatataatgccatggaactccatgattgttggttttgcgaaaaatggttatgcaaatgaggcacttcttctcttccagaagatgcaagaatcacaaataaagcctgatgatgtcacactccttggtgttctcattgcttgtagccatgctggtttaatttccgaaggcttacatttcttcgattctatgagccaagtttatggtatagtacccagagtagatcactatgcatgtctcatcgatctacttgggcgtggtggtcaccttcaaaaggctcaagaagttattgaccagttaccattcagagctgatggtgtgatctgggctacataccttgcagcatgtcaaatgcacaaggatgaagagagagggaaagttgcagcaaagaaacttgttgagatggaaccacaaagctcatccacgtacgtgttcctttcaagcttacatgctgcggctggtaactgggttgaagccaaagtagccagagaagcaatgcgagaaaaaggggtgatgaaatttccagggtgtagttggatcacagtgggtaacaaacaaagcgtatttgttgtacaggacacacatcatccggacgctctgagcatctacaaaatgcttgatgatctaactggaatgatgaataaagatggcagaatcaaggaatgcttacttgagggacaatgaccctgtttaactaatatatcatgctaaataatcaagggcctagattgatcttctactgtaatagaaagatgtctggttatttaggtgaggaatttggtacccttgcatagtataagtaatacatttactcataaattaaggatttaggctttgatcacttcatgtttaattgtttatatttttatcatccaggctctaaacattaagat

SEQ ID NO: 153116 - DNA, 716 bp, Zea mays
  unsure (1)..(716): unsure at all n locations
  Clone ID: MRT4577_71223C.1
gtacacctccnggttctnccgggattctttactcactctctcacggtgttgtccggtgcttgtgggagcctaacacgccccccgcctccctctccgccgtcgccgagtccctcgccggcttaccccgtcgctggcgaaggcactccggcgtggacgcctcgccgccccgcgggcggcgtcgacggtcggttttaggcctcccggaggctgcatcccgtgtcgattcgaggtgatttaggggcgatcttggccctaggcgtgagatctcaccagctccggcactggtgccttgcacagctccatggcaagaacacaggggtcttgaaactggaacaggccccaaagtcacagtccacgctcgcctcttcggtcccattggagaatcatgttaacctccatgacgctactggcgcctgccaagcgttcgacgaaattccccacaaggacaccctggactatgcccttctcgacgacatggcagggtttcgtccaccaggcgctagaccacttcttggatgcgcaccgccgccagggcaggtgtgttggcggtggggcactgttaggcatcatcaaaatctgtgggtcagtgccagacagagtactggggaagcagctgcatgccctgtgcgtcaggtgcggacatgatcatggcgacatcagggtcggcacgtctgttgatgacatgtacatgaactggcacagcagttctggacggc

SEQ ID NO: 153117 - DNA, 371 bp, Zea mays
  unsure (1)..(371): unsure at all n locations
  Clone ID: MRT4577_71224C.1
cggcggccgccctcnntttngggggttttttttaagaataacccggttttttccccnaaagaanagagaagatnattcctccgaaaataaagaggggggctttttaatcaaagagcaaattggacatggaaagggaaggggaatcccctgagggagaggctctaccggggcaaaaggggggacacaaacacatgggctgacaggagtaacgggggtattatccacttgagtctatatagacttaaacagaagctgagagaaaaatgggggattcaaataaaaatacggggctaaaaacaggttaggggaggagtcaggagggggctggggccccaaagacaaacagggcatgggctagattttattttttg

SEQ ID NO: 153118 - DNA, 730 bp, Zea mays
  Clone ID: MRT4577_71225C.1
aattcggcacgaggcagatccggtgcttgtgggagcctaacacgccccccgcctccctctccgccgtcgccgagtccctcgccggcttaccccgtcgctggcgaaggcactccggcgtggacgcctcgccgccccgcgggcggcgtcgacggtcggttttaggcctcccggaggctgcatcccgtgtcgattcgaggtatttgtcagtgagatccgcgaaacctaacgcgctccttgttttttcatcctgtttgttggatcgtactgcgacaaggccacaaggggcatcccatcccatgggggatggcgcggtcggtgcctcagcggcggtggcgtgggtgatttaggggcgatcttggccctaggcgtgagatctcaccagctccggcactggtgccttgcacagctccatggcaagaacacaggggtcttgaaactggaacaggccccaaagtcacagtccacgctcgcctcttcggtcccattggagaatcatgttaacctccatgacgctactggcgcctgccaagcgttcgacgaaattcctcacaaggacaccctggactatgcccttctcgacgacatggcagggtttcgtccaccaggcgctagaccacttcttggatgcgcaccgccgccagggcaggtgtgttgccggtggggcactgttaggcatcatcaaaatctgtgggtcagtgccaacagagactggggaagcaggtgctgccct

SEQ ID NO: 153119 - DNA, 182 bp, Zea mays
  Clone ID: MRT4577_71226C.1
acaacccwattaaatatctgtctctaaagggatcmgtagcagggacggaggtagtggttgggcgagcaggtcacaagcctcctctatcgcttctcatcctatagagtccttattakwgccttttctaaaagttaacatgtacaatatagmgtataagagacttatatactaattagttcaat

SEQ ID NO: 153120 - DNA, 645 bp, Zea mays
  unsure (1)..(645): unsure at all n locations
  Clone ID: MRT4577_71227C.1
ggctttaatcaggaaaggtattgcaggtataggcggtttgatgatattgaacaagtcttgaggcacatngaaaaccaatggtgtaaatgttcttctctctggaaactgtgtgctctccaaggccttatcattcttggggctagatcacctaggggtgaaaatcaagagagataatgtcactggtttcccaaaagctgagttttttgattcagttggcaatggattgtatttggacactgattccaaaatgtttgaggtttcattgtcacaagttttggatagcgcacttctcccagatattaactcagagctaatcagggcatctcagcaaggcgatgttgcaagtgctcttcttgtgaaagacaaagcttttcaatggggatatgacatttcaccagatagctgctctgagctattcaaggccttatgtgtgagccctgcttatgttatagatgtcattgaccttatggaggagatgccagatatactttacaaacttgatgctcaaaatctagatttggttgcccaaacattgagtaggaatggaatgtctgctcatgcaaaactggttttagaaaaaatgttgagagaagacttgtcaatcagtcacaatacatatacttatttaatgataggtttatgcga

SEQ ID NO: 153121 - DNA, 272 bp, Zea mays
  Clone ID: MRT4577_71228C.1
gggggggcccggcaacatttttccaaatttcaaaaacgttacaggagccaaagcccctccccggtaaaaaaatacaggaggggggggacatccctcttgttttaaaaaaagggttttttaaaaaaaaaaatccattccagggcaaatttttttttttttttccatttatcccaccatggggggcttcctgccccgttgccttacttgaaccaatttgttttggggggaacaccattgttttaaaacctttttggacccaaccaggatttttt

SEQ ID NO: 153122 - DNA, 399 bp, Zea mays
  Clone ID: MRT4577_71229C.1
acccggctaatccggaccggaccctgccggcgtaccagccggcccaaagggggggcgaataagagccaggggtaatcagggggggagagggtaaccggggaaaaaggccacccgctaacaaagccaaaaaccaaacgagccggaagcggaaagccaaaagcctggggggcctaaaaagaaagccaacgcacaaaaagggcgggggccaaacgggcaacttgaaaggccggaaacctgaagggccaacccaactaacgaatagggcaacgcccggggagaggcggcttgcaaattgggcgccaaagcagttaaacggggaaccagggaaacggccaacacgggagggcccaaaaccggcgggcccagaggagaatgcaggaagccccccacgggggaaag

SEQ ID NO: 153123 - DNA, 192 bp, Zea mays
  Clone ID: MRT4577_7122C.1
tatctgatccagctcccctctcgtggggacgggagctataaggagggcacagagctctcatcaggctttttggctcggcccatggctctcgccacgagggacccaacgcgctatcctgtgtagctgctgctcctagtcatatgcgccgtccgttatcttggatactgatgtaaacgctgtcagcgctaatcc

SEQ ID NO: 153124 - DNA, 432 bp, Zea mays
  Clone ID: MRT4577_71230C.1
ggtagtttctttcatggccttgcaatatcagttacctgcattgataatgaataacctcatattgcattatttggtgagactgatcaggattcctacttatgcttgctatatcataacggtcatctgcaaaattcttgttatcatttgaatgttctgctgttgcttgacaatccctaggataattagtttgtgcaatattctacttcttggtttaccttgaacagatatatatatatatatatatggccacactagtgcttggtctataactaattacctggctttccaaatccattcttaaataattttgtgattaatagatgtgttttttttaactgtgttgttggagcacttatggtttctacttaaattttgttatggtcattgtaagattttttttggggggcttcatcttttcacttttttttggcc

SEQ ID NO: 153125 - DNA, 124 bp, Zea mays
  Clone ID: MRT4577_71231C.1
atgccaactatatttatgtgttacttaataaatgtatggttagtctaaaacgaattagattttgggaacaagggagtatatataacagagaaaaatatcctcccctcaaaagcaccccgctgag

SEQ ID NO: 153126 - DNA, 322 bp, Zea mays
  unsure (1)..(322): unsure at all n locations
  Clone ID: MRT4577_71232C.1
gccaacanaaaagtattcatccaagancaccacccccacccgctccaagcagaaattttgtcttgaagagagccaccaccaattgggcttgtttacaantaaccactggcatctttaancngncgactctgactgggncgtnnnnctnctgaacgttttccagggnctgacctcnnccgggggaaggnaggtctacanccggcggctgggtngccagggaanacccgggcccattaaacccaatggaangttaacncaacaaaggggtcnncggctncnctgntaccgggncccncccattcgggcnggtancaaaactttt

SEQ ID NO: 153127 - DNA, 455 bp, Zea mays
  unsure (1)..(455): unsure at all n locations
  Clone ID: MRT4577_71233C.1
catatcaaaaatatgataggnaggtttaagcatgtattttttccttatcaaacaataggaatgctggtaacacttaaatggatagtgcccccctagccattttaacaccgtcgcaatggtcttaacatatcttaacattttttcctatattaaaacatcgcattatctgttttgctgatacaagaaacccggataggcgccccacttaacatatgtccatatgccccatacatcaaccaccatacctacttttttagcaagatcatatttattcataaaacccgcatgcttgcttaccacttctttcatgctccatcctgtttttcatagagaagaagtaaactctatcgagaaatgcccatatccgaaccctttttataccacttgcccttatgaatggtctactaattcaatgatattccccaaaacatttatgcccgaaattttttcacaat

SEQ ID NO: 153128 - DNA, 388 bp, Zea mays
  Clone ID: MRT4577_71234C.1
gtacgcgctgcgcacgtacttgctggacctacccaggcgtccggtatttttcatcgatcgacgaaacacaatgagatgcggcgattttatatgcatccggatgctcacgagaaatatgaattttatactgaatgaacgagtggacattctagagtaagaacttaatgctgtacgagagccgcttcacaaccttacactgcaaaagaatttaaatgggcctattgatggacagcccaatgttagttaacaacagaattgagctgccgcatggcccacatgaatggcttccacggtgaatatctgactaatgaaacaaggcgactgagatgcgaacctgagactgataaaggacagacatatcttgacctgtgcctgtacattgaacatg

SEQ ID NO: 153129 - DNA, 464 bp, Zea mays
  Clone ID: MRT4577_71235C.1
acgaggccatctggcaactggacaccctgagctgaggagtcctacaaggacagcactttgatcatgctgctccttcgcaatacattgaccctatggacttctgacatctcgcaggaccctgctgcatacattagggaggcacccaagctgcgacttgagtgacggccagtaaagccgcctttatgtgctctacaaactagatgctagagtttgctgctgtcgaatgacactatgcaatgcgatctggcacctgctttcttgggcgcgactcttgctatgactgtcaccactaaaatttggggtgctccccacatgagatgcttccgtacaaggcctcgctgacccacctcgcttgagacggggggcgctgcaacccggactggtagatatgcgaagccctttaaactgttgttacttgcattttaccttttccatcgctgtttattgcgaggggccctatatcg

SEQ ID NO: 153130 - DNA, 396 bp, Zea mays
  unsure (1)..(396): unsure at all n locations
  Clone ID: MRT4577_71236C.1
gggggatggggaaaaaatgttattcccccacaaggcacccgaaaaacgaaaccccagctataaaagggggagaggggcaaaccccacaaactttatctgccccaacaaaactaaaaaaaaaagggggaaaaaggccaaacaaaaaaaaacaagcctaaaacccttaacaacaagggacaaaaaaagcgaggggaaactttataaccagaaaaaacaactcaaaacggacccaaagggtcaaggagcggctcaaacctaaaaaaaaaaactgggctctgggcaaacctggcgcccaccctgggcaaccaacccatgttcttggaggcccccttaaaaaacaacgnattggatcgggaattggcataaatatccagttcaaccaaaaccctttttttt

SEQ ID NO: 153131 - DNA, 527 bp, Zea mays
  unsure (1)..(527): unsure at all n locations
  Clone ID: MRT4577_71237C.1
gatcaagccaaaactgtgcttcaattgatcgggggaataaggatcctaatctgcgccggaattacaatcactactggttgaaccgtttatattatgttaacacacaccaaatggctgtgacacttccatgctttgctataccaggaaggttgtcatttgctttcgctttcactgctgtttggtctcctcgtctgtgctccggatgagatgagcaagcgtaggcccatgcggttgcttttgataggcttacataagataccaattgggacttcctccacatatttgaactctgttacttcttgcccaaggacaagttgaccctgaacttcctgccttccattttcattgagctgagcgaggaaagcgcctcgtacatcttctccctggtggagtagcacacgaagccgtaacctctggagcgaccggactgggcgtaccacatcaccctgcggccaccacggagccgnagcggccgaacgcctccatgagcatctcctacgtgacccacacgacaggatgctgtgaac

SEQ ID NO: 153132 - DNA, 265 bp, Zea mays
  Clone ID: MRT4577_71238C.1
tgccttttggagtccgcgtccagcttggcgctgtgatgatgcctgtcgtgcgtcgggttctccagagacgacttcactaaccgcaacccgtagtgcttcttcagctcctcgaccttgatcttggtgatgacttaagccatgtttctaatgaaggctacttctccaactagctttccttttctatcggggcccttgccagcagcttggctttaggattgtcgtcccaccttgcattcttcttcttggtgttttaacttacttctta

SEQ ID NO: 153133 - DNA, 307 bp, Zea mays
  Clone ID: MRT4577_71239C.1
agctgatcgtcaagtggacgtcatctaacaacactaacctagtgttactcacgatcactcttcggatgacaaagtcgacgatgaaccccatggagtaaacgacgacgttgttgtatccaccacatggagacgaatgacgacaacggcacaacggcacgagcagaaaggcttggccagggcacagtccgagccggttgacggcgagcccgaccgtcatagatcaaggctgacgctgacggacagtgaccgggccacaagcaagctgccccaactgatggcctgggccatggagagcaagggatgggcg

SEQ ID NO: 153134 - DNA, 944 bp, Zea mays
  unsure (1)..(944): unsure at all n locations
  Clone ID: MRT4577_7123C.1
ggtacccccgagttcggccgggacagcaaataaataaaatgcaacgctccccacagaaactaagcaaagaaatagcgccaacaagttaaataatgccccctttgcacgtccccggtagtagtactcctcgcaagttctatcacctggtgctgttccatgtgcacccgttctggatccaagtcctgtacttccttttgatctccgttttgggtttcttgatgctgagagtcctgcccatgaagtccagctccgtgcctaggccctcggctctggacctactcttcacgtcggtgtcggcgacgacagtctccagcatgatcgccgtcgagatggaatccttctctaacgcgcagctcctcctcatgaccctccttatgctcctcgggggcgaggtgttcacaagcatgcttggtctccacttcacctgcaccaagctcagaaacaagagagaaacacctcataataatctccatggtaatagcttagagcagagtcgtcgtcgtcaccgtcccatggagatggaagcccaggccgccgccgtccaaatggagcttgcagggttcaacaaggacggccatggcgatttcgcatccatggctaggttgctaatgtttatcgtgctgggctacatcttggtcgtgcacatcgccggctacgcgctcattctaatctaccttagcgtggtcggcagcgcgagagcagtgcttgttaggaagaggatcagcctgagcaccttctccgtcttcacggtcgtctcgtcgttcgcaaactgtggcttcgtgccaaccaacgaggggatggtgtccttcaagtccttcccgggcatgctcctcctggtcatggcacacatcctactcgggaacacgctcttccccatcttcctcaggctctccatacgnngctcgagagggtcacaaggtggcgagacctctgcgagctgctga

SEQ ID NO: 153135 - DNA, 243 bp, Zea mays
  Clone ID: MRT4577_71240C.1
aactcactcgcctcgcctcgcctcgcccacccgcccgcctgtccctccccaaaggccggaggtcactcttgtcgtgcaccccttcccttccaaccggcaaaaactaacatttgccgccgccgggccacttgcaagggaccgaagggaagcccccgccggctagggagcggcaccaggcgcaagggggggaggagaagcaggagagccgccggcaggatgttcgggcgggacccctggggcggg

SEQ ID NO: 153136 - DNA, 521 bp, Zea mays
  Clone ID: MRT4577_71241C.1
gtgtgggggtgggtttttttttttttttttttttttttttttttttttttttttttggggaaacaaaccatccctgactggtattttttttttttttttgattataatagcacgatacatgcatgcctgacacccgggaaacactacatcagggggggggggggggaatcctccatccaccaagcatacttgggttgcacctgtgctgggacaccaaatctcaatccctggcgctgctgctgctactggggcccccctcgtggtcgtggcccttgccgggcttttttttatccttcttttttttggcctttttctccttgggggcgccggacttgtcgccgtgctccccggggatcttggccttgatcttttccacgatgcctttcttgggctccccgccgtcctttttggggggctccccctcctcctttttggggggctcctcgggctttttggggggcccctcctccttatttttggggggcgcccccccttgggaggttctccccccgtcttggggg

SEQ ID NO: 153137 - DNA, 385 bp, Zea mays
  Clone ID: MRT4577_71242C.1
tgcaagttgtgaaacttgccgcgaaaccggaaggtgctgctcctgctagtgaagatgctgctgatcctgcaactaaagctggtgtttttgttgtcaatgatgctgctattgagcagggagttaaatgtatagcttctctctcaagtggtgcctccaagatggaggttacagtggagaattctcttgcaaatggaccgaccactgaattaggagtttccaattctcttgcaaatggaccgaccactgaattaggagtttccaagggcacgtcccttgctaatgaatcggctgatctgccaggggttacatgcattatgccagaagttacagacaaacctgttactgatctaggggttataagcaccgtggtggaagttagtgatac

SEQ ID NO: 153138 - DNA, 2383 bp, Zea mays
  Clone ID: MRT4577_71243C.1
tagattttagtatgcatctaggcaaataacttttactgtatatctagaaagaaccagatggacttataatttgaaacggaaagttctgtctatactagcatttaacaattgattgttttcgcaccaggaagaataattacaaacattacaggaataaaatacatgggggtgccatctcaacggcatattcgatacaatggacctaacagcatgaagcagaagcaccatgcaaaaataggtcgtgctgccaaaactcagatttcctctataccagcatctaaccgatatcagcttcccaacgggaaccaaattgctattgtaacaaaacaaaacaaaaaatggcctgaaatggcaaagtgtggagccaaaatttcatcttgggaagtgctaggatcagcacatgttactttgttgacatcagaggagctgatttttttttcacaaacccgcacagcaacacctgcacagagttcacgccaaaaatcggcaacatcttggagcacttcccaatcaacatatattcgatattccaccattgaacatttatagacatgagtcagttcctaatgtacagtcaatcattcaccaactttcgtcccaaagttctcagccaagaattcgtcaagaagaccataatttggaatagtttctgaactgaagttgtcagctggcaacttccggatgcatgcaagaatatgctgaacatctcggcataatctatcctttgccagaggagtactgacttccaattttgtaaatgcttctgtaatatgtgaatgaaatatttgaaccacttgcctgaatattgtttgcacctcaacctcaagcagtgtttgagaaagaatgcgatgcaaataggtaacttcctttgtaacagctttagcaaattgactcggctgcacgtcattatcctgtggggcattccagccttccacaatttggggtaattttctaagatttgcaagcaacctctctctcattatctggacaagtttgttgtgaatttcatctcgatggatcttgtagtcctgagctactctatccagctcagacattagcagatgtttgcgcgcttcaggtattttcaggaaaagtactcgcctgatatctggaattaaagaatgcataaaactaatgatttgactcgccaaagctaaatgcttggacgtaattgatttaagtccagacacctgcatggctcctgcaccgagaacaagttggcaagtcctagtgttgaaaagctttaatatttccacaacacgttggaccacctccaaagatagtgatggtaaacatttactgatgtcaacgtattcggataacatcttcaacagtatcaaaccacagtttaccatatgatagccaacacctccatgtacaatcgtttgcaaggtggactttagattcccggcaacattattttcagtctgtgaagtgaattcaaccttgttttcaccagtcccggatgttactttgccattatcagcaatatttttagctgaatatgtcggttcttgacttgtagaccgatgatcactaaactttgagttatcatcagtgctaggcatctccatgccattaacagaagaataagtggatgaaagtgaaagaacgattgcttgaaactcttcaggaacatccacagcaacccacgtctcttgatctagaactgccttgatttttgtcatccgaacattatgctgataatcaacgaattgcttcgattgttgatgtaggattccacgaatgttgtaacccaacctgcctccaatcttttctgtagcagctataaattcttctgttatgttgtagatgatcaagaattcttgaagccttaacctgggatgtaaagcagaacgaacacctagcagcttagcccaccgtccatgggcagcatcacaagccgcgaaaactgcttcagtgttctctctcaagacatcagcccgaacattctttaacgaatttataatggaaaaatcatttgtttttccttggacaaatgggatcttggaagtactccgtgtaagagtattagagcctcttgaagagtcattttcttgggtatcaggaataactgtaccaccatgttgtaacgtaggattactagcatcaacacctaacgttccatcaaggtttcccatgacccactcaactattcttttcacttcagctgcttgctgtaaatgtacctgtactatcctgaaaatggcagataaaagttgaacaaatccttcagatgaaagactccgcaacttatttgctaaggactggcctccagcatcagcatcggtagctctgtctccagttactgagtcagaatctattggtctggcagttaaaactgggagtaactctcctactgtggttttgattgaagctttca

SEQ ID NO: 153139 - DNA, 279 bp, Zea mays
  Clone ID: MRT4577_71244C.1
aaacaaactccgcagttccaatttttgggtttttgccattaagggacaaaacatgccgtttgtggaacccccaaattttttaacaaactccggagttccaatttttggggttttggcattaatgttcaaaacatgcagtttggcgaactcgaaccgcccaacatggtatcccaaatgagtcatgctttcccttatgaggggctcccccaatgtgtggtgcatcccatccgggttgggttctacttagttcccggactttttttatcctgagctcttttg

SEQ ID NO: 153140 - DNA, 239 bp, Zea mays
  Clone ID: MRT4577_71245C.1
aaaagttagactggggtgggataaaaactcacatgactggcttacagaacgcaaacactacatatactgattgcaaggaagtaatcaaccgtctgccctcatcttggggaccttaattcaattccaaattttccttataacaaccatggtggggggggagggggtaggctgggacatttactgagtcagacgcgtgcggatctacactcggatctatcggtgggtccttaagctccacc

SEQ ID NO: 153141 - DNA, 277 bp, Zea mays
  Clone ID: MRT4577_71246C.1
taccttccagaagcgaaagactctaaggtcgtcaccttcccattcttgctcgccgcgcgggtcgcctgacatcatataaacaatgctgaaggctgttgctgcgccaggcagcactcatggtgcccaggccaccatctttttcacccaagagggagatggccctaccgctgtcaccggaagtgtatatggcctcaaccctgccctccatggggtgcatgtacctgcactccgccgacaccaccaacggatgaatgacaactggactacactacaatcc

SEQ ID NO: 153142 - DNA, 247 bp, Zea mays
  Clone ID: MRT4577_71247C.1
gcgtccgaaactaataatgagtcgtagtaaaaagaaaaaaggggggaaaaatcaagggcattgggccgatactctacaggctttaagtcttcattaatcctacatgagaggctcttaaatcttctgtcctggcctcaattttcagttcattggacgtcgtattcccccgtcggtgaacagcgaaaagcctgccattgccaaacctttgcaccttgcaccacattgtcacattcggaggttggcctaa

SEQ ID NO: 153143 - DNA, 325 bp, Zea mays
  Clone ID: MRT4577_71248C.1
acctctcaccagcggtgtcttcggtttgtgaaatcccaaatcttcaaccctacaggatccaacaggcaatcgcagctggcatcttacctttatcacccttgttccttcaactatcatcagccctattacaacaggtacctttggtgcatgtgggggggcaaaacatttgggcacaacaacttcggcttcttgggctagccaaccttgctggctactctcagcgcccgcggtttgtggcctttcacccacttggcgcgttgaactctgcctgttatatgggggagcgcggctaaccattaggcggctcctgctggctacccccagc

SEQ ID NO: 153144 - DNA, 273 bp, Zea mays
  Clone ID: MRT4577_71249C.1
agcagtggtaacaacgcagagtactttttttttttttttttttttttttttttttagaaccaggaggaaaataaacactgcatacatcaatccaacacattcttgtgctttctctttttgcagtacatgatcatcatcacccttctataactgataacaggcacacttacatggccaatacatgatcatttagaaacacacaggtacatgcacatgtagctctatgcagtgaagttctgtcacggcccgcgtatctgcgttgttaccactgct

SEQ ID NO: 153145 - DNA, 439 bp, Zea mays
  Clone ID: MRT4577_7124C.1
tcgtattaatgcaacacgagtatgacacgactagatggaaaatacttgatatgattatatggtgtattcggtgctgataaggtgtacacaggcagccttacccttgcatttttctgcatggaggctgaacggaccatttttttaatgaaaaaacacattattccaaggcagctaactggcgactcatccctggctcccactaaacaccatagtgcccttcctacaaaatttgtcagaggacaagttgcgtgctaaggtgcaatcccattaaacacacatataggcgctctgatactatacttggtcacaagacaaaaccctggggcccctttttttgatttttaatttctacaaaagctttcctcttatttcccatttctgctttccctatctaatttgatatccttacatctaccacattaatgttacaacctcaaat

SEQ ID NO: 153146 - DNA, 1091 bp, Zea mays
  Clone ID: MRT4577_71250C.1
ggccgcttttttttttttttttttcttttagtggcaagcaatgctgtaatgataattaaatttcttatcagtatcttgctttatacgtgaagcaacatgattatccatacttattacttgatctctcaagcaatactggaagatagatacacaattaaattaaattccatatgggaaataagttgcagcttattcaacccaaaatattatcagacacatgaaatcacatccacatttcctgattcccccacgccccagcttatccttggcggggacacctaaaagatggcaagagcatcgacgtttggctggcgtggagttgatgagcagaatatggcggtacatctctcctgcggaacgtatgggatagcatgcttgttgcttctgccattcccatccatggacaaggcaggcgtgttcagataagcataagcactccttgtccaccagtgtttgatgccaacgatctgtgcctcggtagtgccaccggtggcagctgccgccatggctgatccgtctcctccgttcccctccatgagaatctccctgaccatttgctcgtagagcacgtaatcttccatcttgagtgtcttggccctgattcttgcagcctccttctcggcagcgagtcgccgctcctctgcttccacttccttcctgctccagaactcgtcgatctccgctcttgtgatgctgtagaccgggactgctgccatgttcgtcgcagatctagcctctgggaagcaggagttggtggctgcagaggagagggcactggcagtctggcacacggatggccggtctagcactctgccgcctttgtttcttccgtggagctgttcttcccggctagattgaggcgtagccaggttctctctccgtccctcccacacacgcacgtatatatgtttatctgaagtatcttgcaccaccacctacaggtcatgggtgcagtaacccgtgcttctagtggagaatgaatgacgtggaattttcaccactaaacactttttttttttttttttttttttttttttttttttttttttttttttttatttttttcccggccggcctcgaggtacccaatg

SEQ ID NO: 153147 - DNA, 753 bp, Zea mays
  Clone ID: MRT4577_71251C.1
cattgggacctcgtcgcggccggccgggaaaaaaggagagcctccctcctcaccctggaaaacacacgcacgcagacctcccccaaccgctctcagtctctccctccctgtctctctgttcaatctctcggctcgccatggacgctccgagcaactgcacgcgtcctgcgcgcgccaagtgaccgaacaagctgagctctgctgctacagttgcttgcccctgtgccaaactggcaggaggtaggtagcttatagcatagcagctagagctaagctgtggtgcgtagcggcagctagagctagcttgtgcacgcgcaggtgcgtgctagctagctagcttgttagctgtgtactagctgtgtagcagcagcagcagcacagtagcagtagtcggtgataaaaggaatttctttggggacatgtcggcggagagagccccggtgctggtgaggcacggcggcggcggcgtggaggcgctccggcagctcccgccggggttccggttccgccccacggacgaggagctcgtggtgcagtacctccggcgcaaggccatcggcgtgccgctccccgccgccgtcatccccgtcttccgcgacctctacagccgcgacccctgggacgtcgtcgccgtctctgcccctgatacgaggagcgagggggagaaatacttcttcgcggtgcggccggcaagcggcggcaagagcagcggcgctggtactggtagcagggcggccgccgacaagtgagctc

SEQ ID NO: 153148 - DNA, 606 bp, Zea mays
  Clone ID: MRT4577_71252C.1
cccctcgagtttttttttttttttttttttttttttttttttttttttttttttttttttttttttttttttttttggtcttaccaccccccacttggccgggggggggggcgggggggttgggggggcccccccctagttaaaattttggttttacccttcccgtttacctccccggaacaccaactaaccaaacaaccaaccgaacctgccggggggggccaacaaacggggccttggacccggcccaggggcaggacgggggcaggggggcaagggaccccgggcttagccggggaaaggcccccttcctggccaaacccagggggtcctccatgaccccccgggccccggccccggggaccccgccaggcccccccccccccccaaccccaaccccccctgggacctttggaggacctccctgaaaaccggggggctaaggggggccagggggacctggaaccctgccccgggggcccggtaccccggacaatggcccttggttccccaaaaacccaaaaaatcgtaaacttcctttgccccccccgcccccaaggggaggggcttccccccttggccggcaatcctttgccatttttgggg

SEQ ID NO: 153149 - DNA, 545 bp, Zea mays
  Clone ID: MRT4577_71253C.1
tgcgcgcgccaagtgaccgaacaagcttgagctctgctgcttcagttgcttgcccctgtgccaaactggcaggaggtaggtagcttatagcagctagagctaagctgtggtgcgtagcggcagctagagctagctagcagtgcacgcgcaggtgcgtgctagctagctcgttagcggtgtagcagcagcacagtagcagtagcctagccggtgataaaaggaatttctttggggacatgtcggcggagagagccccggtcctggtgaggcacggcggcggcggcgtggaggcgctccggcagctcccgccggggttccggttccgccccacggacgaggagctcgtggtgcagtacctccggtgcaaggccatcggcgtgccgctccccgccgccgtcatccccgtcttccgcgacctctacagccgcgacccctgggacgtcgtcgccgtctctgcccctgatacgaggagcgagggggagaaatacttcttcgcggtgcggccggcaagcgacggcaagagcagcggcgctggtactggtagc

SEQ ID NO: 153150 - DNA, 375 bp, Zea mays
  Clone ID: MRT4577_71254C.1
cccggagaggggtcccggcccaaattcgggttttcccaaaatatttaattaaggggcccctttgaccttttggattcggggggggccccccaaaaaaaaaaacctttttgaaggaaaagggaaaaaaaaaaccccatttgggcccccccgaaaaatcccttgggcaaccacccatccttgggggggggtccttttcctagttaacaaccgccaaaaactggggtttccccccccggaaatcgataaccccccccgaacctttgggggggcttttcccccggggggccactttgggaaaaaacccgggggcctaggaacaccatttggcccgccccctgggggggaagggccccccccccttgaacggggcttttt

SEQ ID NO: 153151 - DNA, 523 bp, Zea mays
  Clone ID: MRT4577_71255C.1
aattcggcacgaggaacgcgatactgtgcagccctgcacacttggacattcggccctcgggaaggggcatgtcctaacgtaggcctggcgctgcagtatcaaaaggctctctcctcggcttgtcagtcggcactgactttccaccgcgctggacgggcaacgcaaggccgagcgcccctcgatccatatccaaggtaggagacggctctcacgaaaattggcctggccgacctcctggtcatagcacagaaccttgccctcaacatcgcggaaaaagggttccccatctaggtctacaacaggaccaccttcaaggttgatgagaccgcgcagcgtaccaaggtcgaactaaacctccccgtgattggtttccacgaccacgccgtgcttgcgtgagctgcattcagaagcccgcggtagatatcatgctcctcaagactggggcgccggtggaccagaccattgctcacgctggacggagcaccttgatctggggggactgtatccgcgatggtgtcaacga

SEQ ID NO: 153152 - DNA, 446 bp, Zea mays
  Clone ID: MRT4577_71256C.1
aaaaccgggaaagggaacctcttatttcgggggggcccccccccccacccaaaaaactttttttttgaattccccccaaaaacccatctaaaagagagggccccccccaagatgggttgttgggaggaggcccctgggtttgtcaaaacaagggggccaaagggcaacaattgttgtaattgaaaaaggggggcggggttacccccaaaccgcgggaaaaaaggccccaaccgttgctgggtcaaaaaagaaaccccggttgctgcaactagctggctaaaagggaaaaaaatttgccgcggcaaaaaacccgcgagggtcaaggcgccccattggttaaaaggaaaaaattgttgttgataaaagaaggcaaaacccacccggccgaaagggaatagggggggcggcaaaaaaaccacagggttcaagggaaaaaggggggtgaa

SEQ ID NO: 153153 - DNA, 253 bp, Zea mays
  Clone ID: MRT4577_71257C.1
tgacacctgcacaaaaagaatatcaggccacagtctgatcccaaagagaattacgttgaattacccaagaatattgagttctctatgcaggtgaatgcttcttgcatcaaagatcttcaagtttacgattatttagataacaaaatgaaagatgatgccattaaggaacttcctcttgtcaggcacaaccaccatgaatacaaaaacctttctaaagagctaattattcaggggttgctccgtttgaaagagc

SEQ ID NO: 153154 - DNA, 197 bp, Zea mays
  Clone ID: MRT4577_71258C.1
cgatcgccgccgcagcgatcacctcgaacatgtcctcgtgggaccggtcgttgcccacgtcacagaacgaagtccggcaggtcagatgtgatctacgccccgctgctgctgcgtgatcaacaggatccgtttcaccaccagaaccttgctatacgccctgaggcttaacctggacaaggatggatgcagatttttct

SEQ ID NO: 153155 - DNA, 765 bp, Zea mays
  unsure (1)..(765): unsure at all n locations
  Clone ID: MRT4577_71259C.1
aaaagagcggagccaaagggtatggcggcttcgtcaagaaccacggattcaggtcgaatgaatcttttaggatgatgtaaaatacaattttgccaaggagcatgagggcccacaattttgacggttctgaacttgacaacaagacaaattcaattcatgatcagttctcgacacagttgtcattgtctagttccagtgatggcgaggagattgcaacttcttcatgtcctgacaaggggtgccctttggccatccttcatttatgcctaaagagttttaagcaggatgctactgaggaggatgcagctaaatggaggcttgacgggacctttgttctttcagacacagaatggggtgattcttcatatgctagttctctcagcgaacagtcatctacaatcagtgcccccagtacgccattcactcagcctgaggatcttgacagaacagatatctggatttcatctttagatcttgatgccgaggattgtgccttgctgccagagccagacaaggaacaatttccagatatactcgggttttgatttccccagcccttctttcagcgcaatcagaagccctccagtttggttcttccagctantagtgctggaatgtttttgagcaaagaagccaacgactctgatgagccaatattctggccatttgagggcacctcctacaacagtcctgaatttgacagatttctgactctgtcgcctcgtagaaacacaatggatcccgggtacgctcaagtccgtcact

SEQ ID NO: 153156 - DNA, 375 bp, Zea mays
  Clone ID: MRT4577_7125C.1
gtgtttgattttatttttcttttttttttttttttttttattaccttagtttatttctccatttgattgttgtagcccaggaccccgggggtacaccaagtaattactatcgggcttggtccacacgcccgtcatacatttacgaggtcgactaaaaaccccatcatacttttggctaaaacagaatccatgggaaaaattaaactcctccctatcttcacctagtagcaaaagatggaagcctagagccctacaattcctggggcgcgctctactaaagtggaactagctcaaatgaacaggggccggtgccagagccgtttcagatccggaaaaatcggccagccagacgcttaaataaacccgccaatcccg

SEQ ID NO: 153157 - DNA, 497 bp, Zea mays
  Clone ID: MRT4577_71260C.1
attcggctcgagggcctgcagatcaccaacttttaaccaacccactggtagcaccttctaatgtgactgcttctaagggcacaatttatcctactagaaaggatacctttggaggacataatgtacacgttcctgacgttttagggatgaaaacggggcgccctattaaggcctctattgcatctgctgataatgaaccctatgctgtatttaaagggatgaactgatcactggtcatgttgactgaaccagctggtaccccgaaaaacaacgttactgaagtacctgtcgtggcaacacacaataaaaatgaaagcgagcatgcagaatcccggcttaatggaggcgacatcaacctacaactataggacttgagtcttgagtgcaagtctcaaatatataatggttccacgtaaagcgcatgagttgtcttgaacatccccttgattgcaaaatgctggagattcttgtgtattgcgaacgttctgaacaaaagg

SEQ ID NO: 153158 - DNA, 614 bp, Zea mays
  unsure (1)..(614): unsure at all n locations
  Clone ID: MRT4577_71261C.1
accggaccgaaaccccggtcgacccagcgtccgctgnttgcatggccagcattgggtgcacatttcccaggcgggaagtgacgacaacagtacaatcccctgcaatctcgcgctagaatctagggcaatgccgtgttttggggaagcccgacgcgcacatgcatgctgctcctacgtactggaccatctccacgaccacaaagctagccgtgtgaccgtgcatcgaggcaacaggcaacaactctcggccgtccgtctctgcctctctggtcttggcccacgtaaactaagtgtatatatacgtacattgtttggatgcgatccgatacttggattaaagtaataaagtagtctagcgttagacggcagtcagggaatatgtgcttaccgttcttggctcatgcatgatagtctgctaccttactaaactattttgtacactagtacggttcagttggtgcaccaacctgtgtgcgcaattgcctagcaacagcaagcaacgtgcgcgcgcgacgaccaagtcaatagtccaacaagttgtaggtccaaatgctatatgcactgcacccgttattaacagctcttgcgaatggcagtataacgtatatgctctc

SEQ ID NO: 153159 - DNA, 387 bp, Zea mays
  Clone ID: MRT4577_71262C.1
ttaaagaacaccaacgcactggcccctgtggcggggctttttaactctaacttcgcctatattcaccggcacagggagccccagcacgggaggagggaacttccagccttcttcctcctcccaacacccaacgcctttgaccgcttggcttccttcaacgcccctcggtccgtggagagacagccagcccctcttgaccaccccgctgagacagagcaagagggttcggggagccctcacattgcttacaacaacagacccccggatacaaaatccgccccggccccaacccgaagcgggcgttacgcggagacgcggtgaaggaagctgtgcgcgcccggggagcagcaatcgtggcggagcctcgaggctcgccgcggggcgccg

SEQ ID NO: 153160 - DNA, 434 bp, Zea mays
  Clone ID: MRT4577_71263C.1
cagtccgttgaccccatgagcgatcctgcgcaccgcggcctacgcgatgctcggagccgtcctcactgcccagcgagatagcttgcgatcagtgccacaaatcacagagcttacaccagtgctgatcggagacggtgcatatagtttttagagagtgtggtgaacagagcagagtcacccacagcgctggcatgtgttgcgccacaggccctacgcctacctgggcggctccccgaccttgcgcccgcaccgggacagcgcatactacaccggctgcttcctgcctgcccgcgcgcggggcaaccgagcgaaaacacagaagaaccgtcagggatacccgtcgcgcagcacggaagaacacgtatggttcaagggactttgggggcaccgcacctagcacggactcttggtcgacggctgcccgtccaaggcct

SEQ ID NO: 153161 - DNA, 1325 bp, Zea mays
  Clone ID: MRT4577_71264C.1
cgaggatctgcttccgttatccaaacgccactatccctctgccacaacgagggccgcctcgagagtcgctgaagccatggcgaccacggcgaccactgcaatcctccgcctcactccagccccttctccccgcaccgcgcgccctcctcgctctgctaccttcctccagcccgcgctctccgtttccctctcccactccctccccgactgccgcaaccaccgccttgccgccgcttccaaggacactgctagcagcaaggggcaggaacaagaccaagagcccgcaccgtcggcgccacaggaaggaggaccggagaaggtaacggaggtgggggcagcatcgcccggggagaagagcccggaggcggtggcggcggagctgaaggaggtgctgagggcgcggaaggaggcggaggccgccgagggccgcggcgggtggtgggcaggcgtggcgcaggagatgaccgagatcgagtggccggcgcctgggaaggtgttgggcaccaccggcgtggtgcttggggtcatcgcgggctccactgtcgcgctgctgtccgtcaacgccctcctcgccgagctctccgacaccgtcttcgccggacgcggacttcaggacttcttctccggctgatgaagcggcgtgcttcgtgtactctgtaactatttttttttttcttgcacttggggctagggtcatagatcaaatgttcgaggttggaattatgtccaattttcagttgccaagaaaaagatgatgagtcacttgcgaatttggtaatgttactaatatgtgagtgacattttgttggtaaatggtcactcgggaacctaacttgagttccttctgtttagtggtgagataataataggcttccagattacactaaaaaaaaaaaaaaaaaaaaaaaaaaaaaaaaaaaaaaaaaaaaaaaaaaaaaaaaaaaaaaaaaaaaaaaaaaaaaaaaaaaaaaaaaaaattaaaaaaaaaaaaaaaaagggggccctgggcccccattttttttcccttttagggggggttattgggcccctgggggaatccggggaaaaaatgggttcccgggggaaattggtttccccttcaaattcccccaaaaattagagccgggaagtttaaggggaaaacccggggggccctaagggggggcctacccccatttattggggtgggcccactggccccttttcaagggggaaaacctgggggccccttttttttaataaatggccccccccccggggaagggggtttgggttttgggggctttttccctttcttcgttaattaattggttggcctggaactt

SEQ ID NO: 153162 - DNA, 343 bp, Zea mays
  Clone ID: MRT4577_71265C.1
agacagagcctctataactacacaatgcattagggggccataatctattccaccggtcagaagccgatcttgaagcaaccacagcgcctgcactccgtagaagaacctgatggaattcacggtacccatgcaagctcattactggatgggagggggtcttacgcatattgttggtcagatttgtgtggatccaccacgtcttatgggacggcatggtttccccttccaaagacgaccgaacaccgaaacccttgcggaccccccggtgccccctttattgacggacacgttcctgaagaccatccaactcctgatatagagagtctccttaacagcttggagg

SEQ ID NO: 153163 - DNA, 474 bp, Zea mays
  unsure (1)..(474): unsure at all n locations
  Clone ID: MRT4577_71266C.1
tgtgctgggaattcgtccttaagcagtggtaacaacgcagagtacgcggggcggacgcgcggccggggactctgatttttttttatctcgtcgacatttcgatttcgtgcccaaaaaaaaaaaaaaaaaaaaaaaaaaaaaaaaaaaaaaaaaaaaaaaaaaaaaaaaaaaaaacaaacaaaaaaaaaaaaaaaaaaaaagaaaaggactttttttttttaccactgtttaagggcaaattctgaaaaaatgaataaaactggcggccgttcaaacatgcattaaaagggccaaattcgccctaaaataagtcgaataaaaaataaatggccgtnntttaaaaaaatnnnaattggaaaaaaattggggtaaccaaaataaaaagccttgaaaaaaaatcccctatttccaactggnttaaaaaaaaaaaagccnaaaacgatggcccttcccaaaaatttntaaaccttaata

SEQ ID NO: 153164 - DNA, 204 bp, Zea mays
  Clone ID: MRT4577_71267C.1
ggtcgcgagcctattcacgtaaagggtgaggcgtcgtatcctacgcacttcaatcgggtgggcataaatcgtcgggactagttactactttatcgatcggatttgtctcatactgggagctatcactaattatgctatcttgaatacgaatcattacactcaatcgatcgatgcagatgaagtctattaagccattcagttcat

SEQ ID NO: 153165 - DNA, 452 bp, Zea mays
  Clone ID: MRT4577_71268C.1
catgaactcgttacctcttgagatttgatatttgcttgatgaactcaatgaacgaacgaatgagggataaaaggaacaaaaagagaagctacacacttgctgtagttgatgcacaccccagctcctcctaataaatctcctagtagggggtcttgtctattattggccgcgctgctccgcctttgcgacgagcgcagcgagcgcttgctgtgccccggcggcgtccggctcggcgaggaacgggtgctccagcagctaagtcaccgacgcgcgccgccaggccttttttttgaggcaccgcgccacgaagtcccggaactcgtccgacgcaacggttggcggctccggcgcctcgccgaagcatatggcgcacatgagcgcggcccattccgggcgctggcccttgggcaggagagggaagtggcccaagcacagttccaggatggcccccc

SEQ ID NO: 153166 - DNA, 300 bp, Zea mays
  Clone ID: MRT4577_71269C.1
gcacgagctcatgctataccttattattaacccggtccattcgactgctccaatgcgctactcgcgttattagtatatatgttctgtgaagcaggccaaattatgtcaaatgagtagctagtacatgtacgtaatatgatcgtcagtgtatttattttgatctttcagtatgataaatgcactttgctctttttatccaaaatgtaatgctatttgtaattaagtatgtaacgcaagaaccattatgctatttatgctggaggccggaatatttccttattcaaaaaaaaaaaaaaaaaa

SEQ ID NO: 153167 - DNA, 457 bp, Zea mays
  Clone ID: MRT4577_7126C.1
tggaatgcgttgtccgtaccctactctacgataccatatgctatctatgtatctatctggtgatgcctggaactctggactgagttgctcactcccggtaccgggaagacgacgctgacgacggatcacaacaggcttctgatcggcgacgacgagcgctgctggaccgacgatggcgtgtccaacatctggggcggctgctctgccaagtgcatggacctggcgcgggagaaagagcctgatatctggctcgccttgaaggtcggagccgtgctggacaacgtcgtcttcggtgagcatactcgggacgttgactacgcctgcacatctggaaccgggagcactcgcgctgcctacccggtcgagtgcatccgcctcgccgggataccatgcggcggccctcacccgaggggcgcgctcctgttggcgtgcgactcctttgcggtgctcccgccgg

SEQ ID NO: 153168 - DNA, 307 bp, Zea mays
  Clone ID: MRT4577_71270C.1
attattatatattagggtggggggttgttgaatgcaaactatataatttatttattaagctttattttaatagaaacggggggacaaaaaaaattttaaaagggggaataattagttaaggcatagggcgcgagcacattaggcaagggggagaggaaatagtttaaaccaaaaaaaaatgaacatttacaaggccaggatagtgcatggaaaaaaagggggcggagctttcttgaaataacaaacaggactgttatttaaactaaaccgacggtggggtgggggaacgattaaaaaaagcgctggg

SEQ ID NO: 153169 - DNA, 308 bp, Zea mays
  unsure (1)..(308): unsure at all n locations
  Clone ID: MRT4577_71271C.1
gggccgcccaaacaaacaaccccaagcacgggaaaaggaacgccaacccgccaaacaacaggaagaccaccgaccacaagggagggggacacaaacccacccaaaacttttttacaaagggggcggggccgggcagggaacgccccacaacaagggccaggcgancaacaagggggggagcggcaggaaaggaccccaccggcccagcgggagcgggagaagccaaaacgcgaaaagcacacggcangcgcccccccacggggacccaaacccgggagggggggccgacacccaagcacggaaaaacc

SEQ ID NO: 153170 - DNA, 511 bp, Zea mays
  Clone ID: MRT4577_71272C.1
gggacggaaaaggtttttaaaaaagcatgggaaacccccagtcggttttccttattcgtaacagaaagcaggcctttttaacggtcccttataagtttttttttaacaagggaaaaaaggtttttttcccaaaaaaataaccctgaaccccggggggaaaaaaaaaaaaaaggaaaagggcttcggggtaaggggccctggcggaaaaaaacacccaaccagcggtttttaggtattcattcagcccaggggttggcccctttttttttccacccccgggacccccattggtatctcaataaggggggggaggggcatttttatttggggaacttttttaaagggacggcccggaaaaaatgcaaacagggctcgaaaaacagccggagaaaaaaaaacacccacgggggcccccgggggtttaagctgaaggaggacgggtcccaccctttgtatcacatgggggaaaaattccccaggggggaagggggaatctaagctggcccttttt

SEQ ID NO: 153171 - DNA, 437 bp, Zea mays
  Clone ID: MRT4577_71273C.1
agcttttatccacaacagccgccgtcctttttttttttttttatttttttttttttttttctcaggggctttttttctttgaaaccagaaatttcaaggggcctttccttttgtgggtttgtgcttcacatgctctgcttcaaaccgatctttatcaagaattgcatgaagccccaaacattacaaccccattcatccatggggcccgtgttcccagaggcatccagcgattccaatagcccattcagatggtccttacacatttcttttgccaaaaaggtcaaaaacctggtcgcccaattaattcatttgccggaaccaccacagattattttagataccttttaaaagtgcatgttaccataccaccttaactctaactttcatacgggaatggcataaaaaagccccaaaattggtctcggccaccataccat

SEQ ID NO: 153172 - DNA, 552 bp, Zea mays
  Clone ID: MRT4577_71274C.1
gacaaagctatgcacgcctgcgtgaagccgggcatcctatagagcggtcgacctacgcgttcgcaactagcaacatataaagcacattattgtaccaataatggcaaaacaatatattttgcctcattatgctacttggactttatagaaagggctcgctacaagcgagcattttcccgcaaagctcacatgctcctataaattcccttcttcccacatgacctctcaccagcgatgtcttaagaagtgtgaaaatccaattctcactaccctacaggatccaacagcgcattcgcagtaggcatcatacctttatgaccctcattacttcaacaatcataaggcctattacagcagttaccttcagagcatttataggcacaaaacatcagggcacaacaactacaacaactcgtgctagcaaaccttgctgcctactctaatgaacagcagttacctttgttgcattagctggcacaaaacatcaaggcacatcagctacaacaactaagtgctagcaaaccttgctgcctactctcagcaacaacagtt

SEQ ID NO: 153173 - DNA, 316 bp, Zea mays
  Clone ID: MRT4577_71275C.1
gggaacaacttttttttttggggggggggaccagtttaaaacaaaccccaaaccccaaaaacccaaacagggcgcggggggaaactaccttccctttcctacggacagggggggcaaagacccacaaaaaggccctacaaaaacccaggccaaaaaattttttacccccacacaacgcagggccaaggccttatttaacaaccaaggttaaaagcccttcgtcttgcttgaaccggggaaccacccccaacgtcgtaacgggagcaataaaagggaccacatgcccacccccccccccccccccccttgggggacg

SEQ ID NO: 153174 - DNA, 657 bp, Zea mays
  Clone ID: MRT4577_71276C.1
ggctgggtgttgggtgttttttttttttttttttttttttttttttttttttgacaagaacacccaatctcatatcatgtacaatacagttatacagctgcaaatgccaccgggccaagaagagggacagacgactctgtttttttttcaagtatccaatcggtgtgatcctccactaccactagctaggcacacaagctagtagcctagtaccctagccactagctagtaggcgcgggcgtgggcggcggcgagcccgtgtgaggccgggagcgggctgcgcatgggcgacctgggcggcggcggctgcgcgaggcggcggccctcggcgtcgtagtagatgaccccggagaagtcgagcggctggcagcgctcccccatgaggatctcctttgtccacaccccgggctcggcggcctccttgttggtcgtcgtcccagacgccggcgccagcgacgaaaaggtcttcttccactgcgccacggcggcctgggcccgcggcgagcccttcccacccccacctccagcggttccggcggccatcctccgcgccgcccgctgcagcctggtcaggagcgacgccaccgcctgcaggagcgtcgcgcccatcctggtatctggatctctgtgttgtggaactgcaaggtgaaaagtggc

SEQ ID NO: 153175 - DNA, 392 bp, Zea mays
  Clone ID: MRT4577_71277C.1
gtgtacgtgaagctgggccaggggctctgctccttcaaccacctgctgctcccctagggcatcgggacattgccggtgctggacgacagggccctcacgcggagcttccgggaggtgagcccaccccccgaggcgtgaggcggagagtgtggccccatggtgtcccccacgctgctcgaggcgtgttcctccaagtggatgagctgttcctcgaagacttccaggccccgccccacgagctcttccaggagtttgactaccagcccattgctgcagcgagcctggcccaagtgcaccgtgccaggctgcacgatggcaccgtggtggccgtgaaggtgcagtacattgacctgcgggaccgctttgatggcgacattcacaccctgtagctc

SEQ ID NO: 153176 - DNA, 163 bp, Zea mays
  Clone ID: MRT4577_71278C.1
attcggctcgagggaacagaacagtctttcactaataccgcaaacggcggacaaatcttgatggtcgagcttgagaggaagtcacctctgttaaaggcaactgcagctgtttgagaacacggggtcggtgacagctgacagattgtactacatactcaagcga

SEQ ID NO: 153177 - DNA, 616 bp, Zea mays
  unsure (1)..(616): unsure at all n locations
  Clone ID: MRT4577_71279C.1
aattcggcacgaggcaccagccaccacgcccgcggccgtcagccggaggtgaagcacgcaattcattacaaaagggtcccctgccaagatccaacactcatgaattgcaacaatacggatcggagacagcgagcagatctcgcggacttgcaattcccctgctgagctgtgagctgtatgcatggcatggccacccctgtggcgcctcttctccatgatgagcctcaagctgctggtatcttactcccagggacaacccagcattcagatcaaacaaactctgactctagagttggagagcttatactgcctaatggggantacttatcgtggcgcgttatcgggcaacacgccacatggcccaggttgtntatatctggtccgatggtntgtgtttatgaaagggtgattgggggagnanagcctctaagcaatggccgagggcagaacgcttgtggccaacaaggggccacctaacacaggtganctactcccggtggctacattttatgggtcaggggaaacgtatacccgccgggctttaacagttacagggggaggcttggaagctgaatcttaagcatggncaccttggcctacagacatatcccaacgg

SEQ ID NO: 153178 - DNA, 360 bp, Zea mays
  Clone ID: MRT4577_7127C.1
ggggattttataaattgctttaccttacacccaagactcgtattaagacgaatcccgcccctgcaaaacacaaaaaatttggcccagacctatttatctattcacaggtaaaaggaggccatgctgcgcacatttgtcggtatgaaggccacgtcaaccagtaagacgagcaggtctaccggctgccacaacattaacaatctgcggcggcggctggggaggcaacaccagcggcagtatcatcagctagacggggagggaggcgaacacaaggaacaccccgatgctgaagtaggtggaccccatgacccttttgccgtggaaatacccctgaagttgagcgccggtgcctatgccgct

SEQ ID NO: 153179 - DNA, 2384 bp, Zea mays
  Clone ID: MRT4577_71280C.1
aggtgccagacccgcggcgtccggttcagcgtgtacagtactacagagctagacaaagttacactacaacaagtaccatccctacacgtcacggatccctataactgtttatatccgcctgcgcaattctcccccagcagttgaggggcgcctctctggttcttttcggatggcttggcaaggagacacgcgagacctacttctcgcagatccatggattggctttcttctaccacgccaaatggacagccaagatggtttctctgattcataccggattatcctgtgcttaggttctgggtgggtaggaccactacagcactgcttttatctgatcccagacctcacgcggactccaaccgtaccatggagggaggactccagttgagtttttcttctaccacaacagcaagaaataagtaagtattgcaagatttactcagatgacgcggaggttaaatttcttttttacattctgttgcattgggcatatataatagagcatgagatcattgtcaaggatcacttggtctgtttaacacatacaatgaggtaccatcaatcatggctattaagattgcttgctgcttcttgtctgtaattttgatatgggaaatccctggggtatttgaatcattgtgggccccttttacgtttctgctacgctagaaagatccatcgccatccaaggcacacttacccccgctacatgagtttcatttccggtatggcctggattggtaagtgtggattaatggatagatttaggtttactaccattctattgttgcagggatcgccaactcagtgggagtgtctcttgcctgctttatcttcctgatcatccggtccttttgcgctattccttcgcccggcaggttctttcgtaggtgggatcttgtagacaatcttgataatagaattctttacgatgttctctggccttcccttttgcttggtaggattcgaacatatacggggaactgagagattcaaattgccagaggctgcatatacagaaatccgatttttgatctctttgttggactgtatcaacaaaaaaaaaaaaaaaaaaaaaaaaaaaaaaaaaaaaaactcttatggtatatggatcacttggtctgtttaacaaatacaatgaggtaccatcaatcatggctattaagattgcttgctgcttcttgtctgtaattttgatatgggaaatccctggggtatttgaatcattgtgggccccctttacgtttctgctaggctataaagatccatcgccatccaaggcacacttacccctgctacatgagtggcatttccgatctggcctcgatcgatacatatggattattggaatgatttatgcttacttccatcctaatgttgaaagatggatggagaagctggaagaatctgagactaaggttagattatcaatcaagggaaccattgtcactctttcattgacggttggctttctgtggtatgaatatatatacaagctagacaaagttacatacaacaagtaccatccctacacatcatggatccctataactgtttatatctgcctgcgcaattgcacccagcagttgaggagtgcctctttagctcttttcgcatggcttggcaagattacactcgagacttatatttctcagatccatatttggcttaggtctagcatgccaaatggacaaccaaagtggcttctttgtttcataccagattatcctatgcttaacttcatgcttactacagcgatctatcttcttctatcataccgtgtgtttgagatcacaaacgtcttgaagtcggcttttatccccagtagggataatagccgcctataccaaaatttgattgctgggatcgccatctcagtgtgcttgtatctctgctcgcttattcttctgaagattcctggtgtatagggatgaagatcttgatagaaggtttcttgtaaaatgtttgcttgataggatgtttcagctcgggcctcgatccccttttgctgttgtggagatagttgggatgcgcggagaagcggctaaagttggacatacggggaattgaattgccagaggctgcagatacagaagtccgaatcttgatctttttgttcattcaaaacacggatggatacaacaagtaggcaatccttccattcttttggaagttgtagcaactgttcgctagactatgttgatgcaacctcgttgtatgagttatcctgtagaactgcaccgtgttgtgccataggtattctgaagctgtaaaaaaaacgacgggcatttcttcttccttgaaaagaagaaatataaaggcagaggcgcagagccctttcttctcctaaaaaaaaaaaaaaaaaactcgagactagctcgtgc

SEQ ID NO: 153180 - DNA, 968 bp, Zea mays
  Clone ID: MRT4577_71281C.1
ggggtactcgaggccggccggggtcccaagtaccatccctacacctcatggatccctataactgtttatatctgcctgcgcaattgctcccagcagttgaggagtgcctctttggtccttttcgcatggcttggcaagattacactagagacttatatctctcagatccatatttggcttaggtctagcatgccaaatggacagccaaaatggcttctttgtttcataccagaatatcctatgcttaacttcatgcttactacggcgatctatcttcttctatcataccgtgtgtttgagatcacgaatgtcttgaagtcggcttttatccccagtagggataatagccgtctgtaccaaaatttcgttgctgggatcgccatctctgtgtgcctgtatctctgctcacttattcttctgaagattcctgttgtatagggatgaacatacaccaagcaatctcgatagtagaaggtttcttgtaaagtgtttgcttgataggatgtttccagctctggcctggattcccttttgcttggtaggatttgaacatatacggggaactgagagattcaattgccagaggctgcatatacagaaatccgattttttgatctctttgttggttcaaaacactctgctgtatgtatacaacaagtaggcaatcagcgcattcttttggaagctgtagcaactactactcgccagccgatgttgatgcaacctcgtgtaagagttatcctgtagaaccgcaccgtgtcgtggtgtaccataagtagtttggtgctgtacaaaaaacgacgggcttttcctcttccttgaaaagaagaatatataaaggcagaggtgcagggccctttcttctcccaaaaaaaaaaaaaaaaaaaaaaaaaaaaaaaaaaaaaaaaagaaaaaaaaaaaaaaaaaaaaaaaaaaaaaagtactctgcgttgttaccactgcttcca

SEQ ID NO: 153181 - DNA, 314 bp, Zea mays
  Clone ID: MRT4577_71282C.1
tttttgggtttttttaagcattcgtcgatttatacaccagagcctccaataaggacccacactgccatccggcccatatggattgcatcggctaaacccaagtttacacagaagtgacccggggcgaactgtatcagcactgcccttatcataagatcagacctagctaggaccccatcaaactgccatttcacggacgctggtgggacctaagacctcagctgccatgacaggagggcgcagctagtgctcctgcttctgggtatggatggccaccaatgacggaagaggggtgatcgtaccaaccttggcct

SEQ ID NO: 153182 - DNA, 2268 bp, Zea mays
  Clone ID: MRT4577_71283C.1
gccgtccggactctcctctcccctccccacccgctcgccattgcgcgcgcatataaatcccacacccccatcgctgtcgcccgggcccacccgcccgcccacccgagcgccgcgccgcacgcacgtccctccggcctccggtcggtgcggcggccctggatctgggctgatcggtcgcgggggaggatcgcgatctcggctcgggggtgcccgccggaatggaggtcttcggccccgtcacgcccggacaggtgtcgtttttgctaggcctattccctgtcctcatcgcgtggatctactctgaagtccttgaatacaggagatctttgtctcatggcaaaatccattcagacgccaacggaaccatcaaggaggatgacaagtcggtattacttgaaggagggcagttgaaatcaccatctacaaagttcaggaatctgtctaccaaagcaaatttgttacggtttataactatggacgagtcttttctgcttgaaaaccgtgctgtactgagagccatggctgaatttggcgttgttctggtttatttttacatttgtgaccggacaaacatatttccagaaagcaagaagagctacaaccgtgatctgttcctgtttctgtacattcttctcatcatagcatcagcgcttacttcacttaagaagcatcatgaaaaatcagcattttcagggaagtccatactctatcttaatcgccaccagactgaggaatggaaagggtggatgcaggtattatttctgatgtaccactattttgctgcttcggagatatacaatgcaatccgtgtgttcattgcttgctatgtctggatgactggatttgggaatttctcgtattactatatcaagaaagattttagtattgcaagatttgctcagatgatgtggagactaaatttctttgtggtattctgttgcgttgtccttgacaatgatatcatgctctattatatctgcccaatgcacacactatttactgttatggtatatggatcacttggtctgtttaacaaatacaatgagataccatcagtcatggctattaagattgcctgctgcttcttgtctgtaattttgatatgggaaattccgggggtattcgaactattgtgggccccctttacgtttctactaggttataaagatccatcaccatccaaggcacacttacccctgctacatgagtggcatttccgatctggcctcgatcgatacatatggattattggaatgatttatgcttactccacgcgtccggttgaaagatggatggagaagctggaagaatctgagactaaggttagattatcaatcaagggaaccattgttactctttcattgatgactggctttctgtggtatgaatacatatacaagctagacaaagttacatacaacaagtaccatccctacacctcatggatccctataactgtttatatctgcctgcgcaattgctcccagcagttgaggagtgcctctttggtccttttcgcatggcttggcaagattacactagagacttatatctctcagatccatatttggcttaggtctagcatgccaaatggacagccaaaatggcttctttgtttcataccagaatatcctatgcttaacttcatgcttactacggcgatctatcttcttctatcataccgtgtgtttgagatcacgaatgtcttgaagtcggcttttatccccagtagggataatagccgtctgtaccaaaatttcgttgctgggatcgccatctctgtgtgcctgtatctctgctcacttattcttctgaagattcctgttgtatagcttattgcatctgcagggatgaacatacaccaagcaatctcgatagtagaaggtttcttgtaaagtgtttgcttgataggatgtttccagctctggcctggattcccttttgcttggtaggatttgaacatatacggggaactgagagattcaattgccagaggctgcatatacagaaatccgattttttgatctctttgttggttcaaaacactctgctgtatgtatacaacaagtaggcaatcagcgcattcttttggaagctgtagcaactactactcgccagccgatgttgatgcaacctcgtgtaagagttatcctgtagaaccgcaccgtgtcgtgttgtaccataggtagtttggtgctgtacaaaaaacgacgggcttttcctcttccttgaaaagaagaatatataaaggcagaggtgcagggccct

SEQ ID NO: 153183 - DNA, 437 bp, Zea mays
  Clone ID: MRT4577_71284C.1
aggatgttacatgtgtttccaccacattatttgagccagtaatattgtttttgcaggctatatgattgttctatttcttgcttattttgtataccataatagtgctgctatatacaatgatgattttgtttaataaaaaaaacatatatagaagtgacagatgtaaagatatatgttctcttcctcaactagttcagtctgccagctaaatttcttttttgattcatgatttgtagagtaaaatctttatttttaattgatttcagttcaaggagctcgcacaagcctatgaggttttgagtgatccagagaaacgtgagatttatgatcagtatggtgaagatgcccttaaggaaggaatgggcggtggaggatcccatgttgatccatttgacatcttctcatcattttttggaccctcttttggaggaggtggt

SEQ ID NO: 153184 - DNA, 512 bp, Zea mays
  Clone ID: MRT4577_71285C.1
acaagctgtttttaatatgtttattttttgtttttttgtttgtattttttttttttttatattgttttttgatgtgtgtataaaaaattattttgattatgcattacccttgtgggtgaaattaaaaaaactgggggttagtttttaggggattcgggtttggggccaagtttggggtaataatggaaaaaggtgttttttgtgggaaaatgttatgcggtaaaaattgcaaaaaaaataaaaggcggaaaaaaaaaatgaaaagactggggggcataaagagggagctaaataaaaaaaattgggatggggtaattgccagttttaaggagaaaaaattgatgggccaagtgcataaaaaaaattgcaaaagcgggggaaaagggggtttgggtaatgggggatttttcgatttctcggtaaataactcgttgggtttgggagtttggttgcggtaagcggtataagattaattaaagggggtaataagggtttccaaaaaatgagggaat

SEQ ID NO: 153185 - DNA, 148 bp, Zea mays
  Clone ID: MRT4577_71286C.1
aaaaaaaaattacaggctatttcgaaccaagtgaattttatttaacaggcttagacgctatttgatcgcgctaacgggacgttatttgataacagtcgactggatgaaacaaaagccccacggactcgggaatttcatatgtgagcaa

SEQ ID NO: 153186 - DNA, 1800 bp, Zea mays
  unsure (1)..(1800): unsure at all n locations
  Clone ID: MRT4577_71287C.1
cggttcgtcacccctgaccgcgtggcagtgtattgcaaatgtgagatgccatacaacccggatgacctcatggtgcagtgcgaagcttgcaaggactggttccatccatcttgcatggctatgaccattgaacaggccaaaaacagatcacttgttgtagctgttgaaagaaaggtagaaccggccggaaaaaaaaaaaaaaaaaaaaaaaattaaaaaaaaaaaaaaaccggctcgatgatgatgtagagatctaaggatgtttggttcttcactttcggcggttggtactgcatatgtgaggtgccggactgcctgcattaaactgcttgcgccgtgggatggcaataaccttcctccttcgttccccatttctcctcttgctaggtttctacccctctaaatcgatcctcgctccacggccatggtgaggatgaagcaggtaaagatctcggtaaagaaggacgtggattcgtacacaatccgcggcaccaacaaggtcgtccatgtgggcgactgcgtgctgatgcgggcgtcggactcggacaagcagccgtatgtggcgcgggtggagaagatggaggccgacggacgcggcagcgtgcgggtgcaggtgcgctggtactaccgccccgaggaatccaagggcggtcgccggcagttccacggcgccaaggagcttttcctttccgatcatttcgacctacagagcgcccacaccatcgaggggaaatgtgttgtccactctttcaagaactacaccaagcttgataatgtcgggcctgaggactacttctcccgatttgagtacaaggcggccaccggttcgttcacccctgaccgcgtggcagtgtattgcaaatgtgagatgccatacaacccggatgacctcatggtgcagtgcgaagcttgcaaggactggttccatccatcttgcatggctatgaccattgaacaggccaaaaaactagatcactttgtttgctcagactgtttgaaagaaaatggttcaaagagactttcaaatgtatatgccacttcatcaaattcttagcccaaggctgaatcaataaggcagacgaggtgaaaactgagtgccaacatccaggggagatgtgctgcttctgtggcgaatcagcccttgcactggcgagagcagaggtgtacagtgtttgctgtggtttgttcgatgtaactagccagtgtggcatgtcatgcagttgttggtagatcagtcattgtgttgacttggtcagcttaactcgacatcccccttcgttgattacattgttgctatggcggtgcggcatgatcgattactgttctattaacatatgacttttatatgttgatataattaaattattttgatactaaaaaaaaaaaaaaaactgaaccaaaaaggcagaggaggtaacaaactgtgagtggtaacatccatatgggtaaggggagatgtgctgcttctgtggtgaatcagcccttgccctttgctgtggtgagagcagaggtgtacagtgtactagaccagtgtttgctgttaggggaacgggttttgttcgatgtgtagaccgtgtggcatggcatgcagttgttggtagaggtcaaaagaacagtcgttgtgttcacttggtcagcttagcgccttagcccttgttaatgtgttaatgcactgtgttaactcagcgagccccccttgtggctgataatgcaagtcatgcagttgttgatacaaaaaaaaaaaaaaaaaaaaaaaaaaaaaaaaaaaaaaaaaaaaaaaaaaaaaangaanaacgatat

SEQ ID NO: 153187 - DNA, 333 bp, Zea mays
  Clone ID: MRT4577_71288C.1
atatgatttaataccattatgataaattaccttgaaggttatatacccagtggcgtagctaccacccccgctgcccccgcagtcgcggggggggggcgcagggggtcttaggggcgcacttttgggagaagaaatattttttttattcattaagacttcaataattctgtatgattttggacaaaaaagcacatcactaatctcaaaataagtgatctaacgtagcctatataggcctaattaatctacatgtagcctatatttgtaaagagtcattaaccaaaaaaattattcttgcgccccccttccccctcacggggggggggggcgcaa

SEQ ID NO: 153188 - DNA, 362 bp, Zea mays
  Clone ID: MRT4577_71289C.1
agcgacagtacatggaggagcagtcgtgggtacatcgatagccggcgcggggagcaaaatcttgggcactcacttggcggaccatgcgccacaaaacgggcgcattgtgcgcgggctcgggaggggtttgagcggcgaggccacacctgcttcgaaaaaggtggcgaagacatcgacctcctgtgaccgctgcgtgtgatttcacggcgccgagtggcaccactacctgagccgctcgctgcacgtgaactacgggactcgaacgctcggtctggggaagcccgtggcgaacctgaagttcgagttggactcgctggaccagatcctgcccaagaatggggccggaggtattttcagcaccc

SEQ ID NO: 153189 - DNA, 202 bp, Zea mays
  Clone ID: MRT4577_7128C.1
ggcccgggaaaatttccatcccgcaaaaaaatctaattttggcgaattgggttggccccaaatttcacccccccaatgtttgggcattttttaaccgcacctcttgtgttttaacttgtccccaaaaaaaaacatgtttttcccgcccaaaactttgctggccgggcaaagtgccaatttgtttttggcttatgccttcccc

SEQ ID NO: 153190 - DNA, 820 bp, Zea mays
  unsure (1)..(820): unsure at all n locations
  Clone ID: MRT4577_71290C.1
cattgggtacctcgaggccggccgggaaaccctagtgctcatttcttctcaatctccccagccgccacagtaaaaaaaaacacagccgccagggagcttcgacggatggcctctggccgatcgagccttccttttttttattctcatttcttcatttctattacgtgctctcttttccttctgtttttgtacatcgcggtgagctgctctctgtgtattatcttcactagtaaagtgagaagccaagtgcccgtgctgtattcttgccaccgtgatgcacaagaacgagaatggttcttggtctctatttcttctctcttatcctgcgtttggccgaacgtctgctttttttttctttttttttttcggccggctcaccttcacacgaccgccaggaagcaccggtggctggcctctggcggaccgcgccgccctgcacagagccgcacagccgcccatctctttgctgtttttctgtttcttgttgaagctcagggctccctctccactcagcagaccgccaggacacaacggctgggacctcttggtgtccggctcggccggcactgtgcacggcgaacagggccccgcaggctctccccgccggcggtcgcgaccccacgggtgggcgcgcggccgtcggtagatcgtttcgtcgggtggtctgttgagccagtgacgttgggccgttcttttcttttgaaccagtcagtgcatctgtgcacagatctggcgtgttcctgtttcttattcgttgattcctggnnccgggaatcgttggatcctgagccctgggcgccgttctctgtgacgatggact

SEQ ID NO: 153191 - DNA, 502 bp, Zea mays
  Clone ID: MRT4577_71291C.1
aaacaccacccgggaaacgggaaataatttaaaaaacgttttccgggggccaagataaacggggaaaaaaaaaaaaccctgggggggaagaggggggggaaaaaaaagacaaaaagcccttaaaaagccacggggctactaaaaaaaccggaagaaaaaaaccaaaccagtccctttttttttggaaggaccttttaaccctggcccccggaaaaggggccctttaaatggaggctttttcaagcccctttgaactaatggaaagggtgctgaatttggtgaataagggaagggcccagcgaacaaaaagggactttaatgccagaccccgggaaaccagggcacctaatggaggcaccaaatttaaagcccttgcccttgcactgggagaaaataaaattgcgcaaaaaaaaaagcttttttgaggggccattgaaaaaatcttccaaaaaaactttaaggggggaaactacattttcccccctcctttgcctttttcccc

SEQ ID NO: 153192 - DNA, 313 bp, Zea mays
  Clone ID: MRT4577_71292C.1
atccaataagcgtcaaactttcgctactgaccatggcgatacaatctgcacactcagcgagagaccacaccatggtgctctattgcacggaatatgacagtatggacgcacacgtgaccaagcttacagatttagcagaggacaagctgacgatgcgcatgacagtccataaggaccagccgactacaacgtccagaaacatgttgtacgacaggcacagaatgcttaatattgtccaactgttcggctagccgtcgagctatctgacagctatacttgttgatcaactactgctgctacacacatcggatgc

SEQ ID NO: 153193 - DNA, 734 bp, Zea mays
  Clone ID: MRT4577_71293C.1
cctcgaggccggccgggatcacccctaccaccaccacagaccaaagggccgtcctatgtgccacggcgacgtcgcccgcccatccagcgcccgccctacgtcataatccagcccctctgtcttgtccattgaccgccatctcttcccccccgcgacgacggtgccttgagggggccatagcgataacagaatgctgagaacagtggctggccgcctggcgcgacggccatggagatttgtctttcccggcctcctattcttcttcttcttctactctctctcgcaccgcacagggtcgcgtacacaggggcccgtacacaaggccaagaccaagtcgttttttccgcctctggagacaaaagccgccaactcgattgagctcgactactgcaagaatttcccaaccaagctgctcgaagaagtgcaggtcgtactcaagggggcctcggacggcgcacacgaaacaaaagcgcatctcaacacggtttcgagctgcatcaccaacctgatcatagtcggcgacagggacgagcgactaggtgaccgacaggtcattgatattctagcggagctgcccaagagttaccaaaaggacaacctcgattttgaggcctatggcgcgcagaaaaagcacacgaagggggcgagacagtcaagggacaacagcggtcggtcaagctcgaccgtttcaagtacctggccatggttgataagggatacatcaccaacccaac

SEQ ID NO: 153194 - DNA, 163 bp, Zea mays
  Clone ID: MRT4577_71294C.1
aaagtacattgctggacacaacgatgttattggaggatgcgtcagtggctgagtgtttggttccaagccgtatttacacatgtgtgtgtgtcaaccgatgtggactatcttcgacagaacatcactcgtgtgatgtcgaaacctgtcttcggtggccatttta

SEQ ID NO: 153195 - DNA, 637 bp, Zea mays
  unsure (1)..(637): unsure at all n locations
  Clone ID: MRT4577_71295C.1
tgtttgagcagtttatatgaaaaatcgtagttgtcgatgtatgtgcttcctctcttgttcaacaataagtcttgagacttgagagataagtccttactctagtaatgtgtgatggaattactatttattctcataacataaatattaaaccagatttctaaacatgatgtcgaagggctgaattttttatataatatttgtcaaccttctgtgcgcactcaacttatatattgtataaatgggcagtaagttgctttgggttccttaactttctgtgcgcgctcaactcattggttactgtaacagcataaatattttgggataattgccaaacacatacctgttgcagtgtactaacttgaagatttgttcctgtgtgcacagttgtgcacacatttccgtgatcacgtttttggtagaagtcaatttgaagctaccatatgttatagtttccaatatattcataattgcagagagatcagattagtaaaccttttggaaactctggttgcaattctcatcctttaataatttgttcgtagataaacatttaaacaaaaccatgtgccttaaagtaagcacaacaatgttnatctgaattttttttgttgacagcaattgaatctaacacttgaac

SEQ ID NO: 153196 - DNA, 332 bp, Zea mays
  Clone ID: MRT4577_71296C.1
cactcggcctgcggatggcagccttgcccatccgcctgacgccatggcggaagctggcatgagcggcttgcgacggacctcgtttgcgcgcaagcgacaccaataccaaattcaacgtctgcgtcaggcacatgcggcggcggccggcatgcacgcagtgcactatgtgccgactcgcgggtgagggacggcgctgctggcgcggtctctagtggtggcgctagccataccttgcgggggcaggtagatccattctactaacaaacaaaatcataccacacaatttggttgcgtagaggaatcggagcctgtcgcataagacagttcggcta

SEQ ID NO: 153197 - DNA, 305 bp, Zea mays
  Clone ID: MRT4577_71297C.1
ggggctgggttttttttttttttttttttcagaaaaaaaaaaaaatttcccctttttttttgattttgaaaaaaaaaactcctttctttccttcaactttaaactgttctaaaaataaaaatcccatggaaacctttggcccggttatttaaaccaccccccccaaacggggaaattctcccccaagggaatccttttggggtaaaacccaaaaccctttctggggggaggaaatacaaaattcttttacaaagcaacctttttctttaatgggatggggccaatcccactgagggcgaaccccc

SEQ ID NO: 153198 - DNA, 478 bp, Zea mays
  Clone ID: MRT4577_71298C.1
cccacgcgtccgcgcttcgtcgtcgattcgcatggatccataaaaggcttggctctggcatccgccgtcgcccccatcgcgttgtccctagagaggaagcaaggcacatgaccaccgtctccgggtgggacgacgagtccgtcctcctcaatgtgatggtcattgaggccaccctcgtctatgagtcccatcgcaagaggcgagcctccacctgctccaacgatgacgacaccagatccaacaccaaatacggagatacagttgacagggctcctctcttccacgctgcgaaggtgacttgtaggtgtacttagcaatggtgcaaatcatgcccatccacgagatcttggcctcaacgctgattgagaagatgacgttgcaaatatttcagacttgtagagccctcgagcacctccatctcttgttcagttgcttatattagtcatatgttccctatgtttaaatttgatagtagatt

SEQ ID NO: 153199 - DNA, 327 bp, Zea mays
  Clone ID: MRT4577_71299C.1
gtacgtaagctcggaattcggctcgaggtcactgttgctactctgacccatgtgccagatccaattcgcgcagttctccctcttctggggccatggcggctctctgtggagaagacctacggctggactggagtgcatgagtcaaggatgacctcgcaggcggaacttctgacctccatatatcgagcttaccatggtccaaatagctgggcttattgcctgccgctcctagttccggccttccaatcccttcgcccgcgctaggatctccgggtctcttcacatgaccatccagaccgccgtcctaactgaaaccctgaccgcgct

SEQ ID NO: 153200 - DNA, 731 bp, Zea mays
  Clone ID: MRT4577_7129C.1
ctccccatggtacgcctcgccgcggtcgacgctcccggccgcgaccccgcccccgggcgaggcggatcctctcgtcgtcgcggcgtccgagattgcgctcggcctccccttccacccagcgccgctcccggccgccgcgcccgcgcccttgctccgcctcctcccggccttcacccccactcactttctctccctacttcgccgcaacccgctcgccctccagccgctcccgctcctttccctcttccgcgtcctcctcgcctcgccgccgggcctcttccgtcacaccccagcctccttcctctccatgtctcacctcctcatcgcccaccgcctctctcaccttgcactccccctcctccgccttctcgtctcccgccttggccgcgactccccgccgcggctactcccgctacttgtctccgcagcctcaaccgacgacccggcgcctctcgtgtccgctgtcgccaaagtatacgccgatgagggcctcctacccgatggatgctccctcctcctcctcgcgctccgccgtggcatccgcgtccccatgccagcgtggaccgatctcatgaatcggctcccatctgttcccgaagcctacgccttctacctgcacctgctcgacgacggcgtgcccccggaggccaggcaggttaacatgctaatgcgtgacatgattagatcaggcaaacttgccagtgcgcggaacgtgttcgatgaaatgttga

SEQ ID NO: 153201 - DNA, 334 bp, Zea mays
  Clone ID: MRT4577_712C.1
gtgcctgaacgtggatcctataggttgcccgcgcctcgtttcttcgaattctacctatagtgagttcgtatacaattcacttggccgaagcccaacaactgacgtgactggaaaaccctgccgaaacaaatggatcgtccagaaggcattccgttcccacacctgggggaataaaaaccttgtctttagggggggttattaacaggagatgccctcgctagaaaaacaattgggcctgctgggttctagccccaagggcccggaaaccaaaaccgcgacccggaacatcccaaataaaaacttccctgacataaccccatttcattgggaaggg

SEQ ID NO: 153202 - DNA, 329 bp, Zea mays
  Clone ID: MRT4577_71300C.1
ctatatcgcgagcggcgccctttttggttttttttggcagctcaaatttaccaaataaatttgctccatggcacaaaatagtaacagcaacaagaagaagagaaccggtgctctctgcagatgtggatatgcatattctactctccacaccgcagaaaggacgacgatatcatattttggtaagccaaactacttgcagctgcagcacgacctttcattacgtagtactgcagacaagtctcgtttcccccatggcctcctgaaggcttcagagagggcaatggcttggcttccactatcttgttaagtaccctggccattttatgcat

SEQ ID NO: 153203 - DNA, 430 bp, Zea mays
  Clone ID: MRT4577_71301C.1
gtgcggtccacaattaccgggtcgacgcacgcgtccacacctggagacatgcattccacatcctgcgaagcaacatcatcaatgcttgccatgtcaccagaacaggctgcgcttttccacattaccgagagcttccgctatgccgcgcttctttacactgagcgcctagcgcagccgactcttcccgcttcagctctgaacttccaaaacttggtatcacagggactttaccacatttctcagattggtatgacgagctgcgttaacaagttcctactatggccattattcattattggcacggaatgcgttgaccctgaacaccgcgctgtggtgcgacaacgatgtgtggagattcaacgtgagagcgggttcttcaacaatctcagtggtctagaagtgctcgaacgagtatggcgcgaagatgacg

SEQ ID NO: 153204 - DNA, 439 bp, Zea mays
  Clone ID: MRT4577_71302C.1
cgcggaccggccggaaatcccggcccgcccacgcgtccggtaatacgcaacaaaaaacggacgcggccagggcatatatacggaagccgcccgaggacccaaggaccgcaaaaaggattatcaaaacaacagcacaaaccaccaacgggcacgaagacaacaggaccgccaacgcactggacacgcttggcggacaagagaagaatgcaaaggagaccacacagccagagaggccacagcaagggaccacacatgggggatccaggcactgaaaaaacacacaaacaaaaggacgcggagcaaaaacgggaccaaagcagaaaaaccagacggacaggggagcactaatgggaaccgaactgagagaaaggaccaaccgcgctaaaccgggcgaagagccacaagactgacaagaacgagttgaaactacagaagacca

SEQ ID NO: 153205 - DNA, 241 bp, Zea mays
  Clone ID: MRT4577_71303C.1
gagttgattcacgatatacgggctcagaatagaagtgccctttgaaatgaaggaacgcttgctgatttattagttgttaatggtaaaggcaaaatattattaacagggtggaccttacgcgcaccactaatgttgagggggggggggacttttgtatttttttggccaaaatcattttgaaaggtggttgcaggcttatgacatacatgcatgacaagcactcacaagatggacaacttgt

SEQ ID NO: 153206 - DNA, 1012 bp, Zea mays
  unsure (1)..(1012): unsure at all n locations
  Clone ID: MRT4577_71304C.1
cggcgccctgcgccaggcctggcgcggtggtgccgcagctgccgggcttccccggcctgccggcgggcagcgtgggcggcggctccacgccgtcgtcgccgaccgactgcgtgaccccgctcgcggggctgatgacgtgcgggacgttcctgacggggagcgagccggagacccccacgccgcagagcgagtgctgcgcgggcctcggggcgttcctcaacagctccagctcggcggcggaaggcgacgaccgcatccttcggtgcctgtgccccgtcatcctcggggacgtgaacaagatgctgcccaagccggtggaccccgtgcgcatgatgtacctgcccatcgcctgcggcgtcgtgctgccgccacaggtcctctacatctgcttcactgggcagcaaaccgcgccactcgtcggccgcattcctgacgtctgggagaagccgacttcagcagccttgtcgccctgatgagcaacttgaatctgaatggaggccggccacgaatgatccgatccagtcagcatcgtcatttatagttcatataagcacacaagatcaaatttattagcagctgcatgcctctttacaacatgcatgcttccacatatnnnnatagttgacttgatacgtatataaatagttcctatataaatttgaatatatgacagtttcaaggtatcagaaattagtagcccgagaaattgaccatcaggtctaatggaagagcatgctcttatacacaacctgatctcgtgccgaattcggcacgaggctggacgaccacaagggcctgcactacttcaagggctggctcatccggggcagcgtcgacttcatcttcggctttggccgcagcttctacgaggactgccgcatcgagtcggtggtcaaggaggtggcggtgctgacggcgcagcagcgttccaagtccatcgagggcgccatcgacaccggcttctcgttcaagaactgcagcatcggcggcgtcaagggcggacagatctacc

SEQ ID NO: 153207 - DNA, 130 bp, Zea mays
  unsure (1)..(130): unsure at all n locations
  Clone ID: MRT4577_71305C.1
ctattttaccaattcaacattcctagcaagaggtcattcttcaattatttgacctancttactaatctttaaccccaaacttcattaacagagatcattcatggactctaaaaaactaatttaacctttt

SEQ ID NO: 153208 - DNA, 437 bp, Zea mays
  unsure (1)..(437): unsure at all n locations
  Clone ID: MRT4577_71306C.1
aacataaaaaaatacatgtgaaaacccaagggaaaaacattgtacgatacggagtacatgcttggatgatgtgaattttataggtgtactaacgtactacaaatgcgctagaggtccttgtgaaatagttgatgggggcgggcagcggcttagaggcaccaaaatgtctcaatctgtaaagacgggatgtggcatnttcaggaactgtccactccagcgttggaaaacttattggactcaccgggaatgggcttgaccacctgaagcgcagngaccaatcgtggtnatgatagacaggaacccaatgggttgggncatgcagtttgtgaacgagcgcgaaagggggggnggggaggagattattttttgggcagggcgagtggaatgtaggggggagaagggtggcctttgtgaagggtgaggtgggagggacgtgg

SEQ ID NO: 153209 - DNA, 482 bp, Zea mays
  Clone ID: MRT4577_71307C.1
accgtgaacaagatttggcacgccgccacgaagcctcactgcactccaggactcgaaccaaccaggtaccctcgtgctggccagtccagacccaccccccccccacaccacaccccgcccttgaacgagacgcccagaggtagccctaggcgagaactaccaaggcagacgaaacgagaagcgggaaccagcacgaacagaatacccactgagcagttaacactaagccacattaggggtagctaacttccaccctttactagacggtagacgaccctcgttttaaaggtgacagacacgctcgcaatgaacctccaggaattcgcgaaggaggaggtcacgttacgggagttgggcgtctctactattctatctctcacctagaccacgacggtaaggacctccacctagacgaaggtcaaggagagtccatacctcgttgacacaaggacctacgcgaccaaggaagttaaggaggagaa

SEQ ID NO: 153210 - DNA, 345 bp, Zea mays
  Clone ID: MRT4577_71308C.1
gattatgatttatctgtttttatttatgattggacatatgttttatttttttttggcccggcaaaccaatctacccctttataaggcaacagaggaatacattgatcttgcgagccacaacatatgtccttaccaaccaaaaattaaaacccctccgataatatgcaaagcacactttttcacaattttgacctaagccgtgatagcatacttcctgatggggaagaacttttgaacctttttttacctttccgatttaaaaaaaaactggagcttggacagacggtggaagattgcaccgttcttcttaaggcggaggttgagggggagcaatttttttttttt

SEQ ID NO: 153211 - DNA, 277 bp, Zea mays
  unsure (1)..(277): unsure at all n locations
  Clone ID: MRT4577_71309C.1
gaactatgcctgggcagggcgaacntctngcntcttgttttggaggtccgnagcggtcctggacgtgcaantcggtcgtccgacctnggtatangngcncaagantaaaagnagccanctantngctggttccctccgaagtttccctcaggctagctggcgctctcgccaacgcgtacgctcgacnncccgnagttttntccggtnnagcgaatgattagaggnctggggccganacgatctcaacctattctcaaactttanatgggtnagnccc

SEQ ID NO: 153212 - DNA, 413 bp, Zea mays
  Clone ID: MRT4577_7130C.1
gcggtggcggagatgtacctgctgggcatgaccgacaagatcgtcaccagcggctggtcgacgttcggctacgtcgggcacggcctcggcgggctcacgccgtggatcatgttcaggcctgagaaccacaccacgccttacccgccgtgccgccgggccaagtccatggagccgtgcatgcacgggccgccgttctacgactgcagggccaagcacggcgccgacacggggaagctggtgccgcacgtccagcactgcgaagacatgagctgggggctcaaacttgtccatcccgagtgaaacagcaataataatgaaaagaatatcttttttaatggttcgaattcctgtgctaaaaaaaaaaaaacacaagaagaaaaagaaaacatgaagcaacaacaaacataaacaac

SEQ ID NO: 153213 - DNA, 102 bp, Zea mays
  Clone ID: MRT4577_71310C.1
accggtctcggaattcccgggtacgacgccacgcccgtccggtctacagcttacagtgcctatcacgcaccaagtgggcctacatggagaagggctctcgca

SEQ ID NO: 153214 - DNA, 342 bp, Zea mays
  Clone ID: MRT4577_71311C.1
tgtcgcgtgggcggacgcgtgggccgacgcggggggactagttcaagatcgctcgcgaactaaaactaggctgccgtcagaaaccaggtgctagctcccggtcctcgtgatagggcggtggactagcctggacgccgtggtgctgctcctcgtcgaagagatggactcggtgatggccgtcctcgagtcggcgccccagactgacgtgctcgtttctgtcagcaccagccactcctgttcgctcctgacgggcaatgccctgtgctctcggtgcacgggcgaggactggcagctcggccacggcgacgcagaggaccggctcgtgcccctggtgattaatgg

SEQ ID NO: 153215 - DNA, 357 bp, Zea mays
  Clone ID: MRT4577_71312C.1
gcgaaactggatgtccgtattacctctaaaatgaacctttgtattctgaatccctgagcttataaggttctacttatcgtgacaggctgccatcctgacgcgcatacttaccatatagtgtcgagagcctgcgataagctacttgtccggcgaccagtaggaccggacagctcacacatttccctcccgtagacggtgacactggtcaatcttggccctcggatactcagtggtttcaatgacagggctctgtgtaccccttgacgagctatgatccctgagccttactccatcttcctactttgcttgacatgatcgactctacctgctcaatcatcattccgagattccctgcca

SEQ ID NO: 153216 - DNA, 806 bp, Zea mays
  Clone ID: MRT4577_71313C.1
atttccccgcattacgtcgcgcacacgggcaggggagagccggcagcggagagagagcaggagacgagatggcggccgcgtccttcaccgccgccaagttcctggcgccggcggccgcgagatccggcggcgaccgggcgcccttccccgcgccgtccgcgttctccatgcgctcgctccgccacaggcccgccaggcgcctcagctccgtcctggccgtctcctccgacgtgctcaaggccgcgcccgccgccgccgcgtacccggctgtgacacgcgaagaggcattggagctttacgaggacatgatccttggccgtaacttcgaagacatgtgcgcgcaaatgtactaccgtggcaagatgtttggtttcgtccatctttacaacgggcaggaggccgtctccaccggcttcatcaagcagctgaaccaacccgactgtgtcgtcagcacgtaccgtgaccacgtccacgcgctgtccaagggtgtcccggcccgtgcagtcatggccgagctctttggcaaggccactggctgctgccgtggacagggtggttccatgcacatgttctctgaaccccacaacctccttggaggctttgccttcattggcgagggcatccctgtcgccactggcgctgcctttgccgccaagtaccgccatgaggtgctcaagcagtctagccctgatgggcttgatgtcacacttgcattctttggggacgggacctgtaacaaccggcagttctttgagtgcctgaacatggctcagctgtggaagctcccgattatttttgttggggag

SEQ ID NO: 153217 - DNA, 295 bp, Zea mays
  Clone ID: MRT4577_71314C.1
acaaactagaggagggggctaaccaaaatgcgtccaaaaaccaaaagtaaaatggcaaaccaaaatgacttaggagacgcaacactctgtaaaaaggggtaacaaaggccaaaggtagggcacgctgaaacgtacaaaaaaaggatgcccaaacccaccacgaaaactagatgggctcccacaacctcaactgaggaagcaccccattcatttctcgtgctcataacatattaggccatgtaaaccacgggccaaattaattgacgcgtgaacactcccggttagagaacgaaag

SEQ ID NO: 153218 - DNA, 239 bp, Zea mays
  Clone ID: MRT4577_71315C.1
gaaaggcgagagcggtcagccgggccacctgccagcaaagaggggaactcttttcacggaacgaacagaaggagaaaggggatgtggtgcgcgtcgtgcctggcgtccgcctgcgcgggctgcgcctgcaacctctgctcgtcggcggcggcgtccgtcactcgccgctcagcccgcctcgcgtactgcggccttttcgcggcctccctcatcctctccttcctcctccgccagttcgc

SEQ ID NO: 153219 - DNA, 374 bp, Zea mays
  unsure (1)..(374): unsure at all n locations
  Clone ID: MRT4577_71316C.1
gaccaaagccgggcatacgcccccaaggccagaagccctctcctttttgctgtcccacacnnaagagttctacccgtcttcgcccgcactcgctcgttcaagcacaggaaggttgacctgtcaggggcccacgagcccggtaagtaaaagtgaaaatcgatggaagtaataaagggagtggccattcttaagcattaaggaactacaacctgggaagaactttatgtatccgtacattttgaaaagtgaatattgcacagcataaacttactggacatagggttgctataaagatcataaactgccgccaaatgagaaatatcgaaatggaagagaaagcaaagagagaactcaagatatttaagttgttcatt

SEQ ID NO: 153220 - DNA, 390 bp, Zea mays
  Clone ID: MRT4577_71317C.1
tgcctggccgcccgtacagccgcaggccgcagccccgcctccgcccgccagactccgcccctccacccggcgtcctccgccacagtgcccgaccaccccgcgccgccgcagcagcagcaggaaaatgcctcgcaaagttgtatctggacccgactacgatgatgactatgatgactatgatgagtatgatgatgatgatgatgatgatgatgagtatgatgaaaccagatatggcaataatactcctgttatgacagggaaagaaacattgaaaaattcctcaagtacagtgtcggttcattggacatgttccatgtgcacattcagtaatcatgaaagcatggtgtactgtgagatgtgtggtgtttccgtgagacctttgtcaaatct

SEQ ID NO: 153221 - DNA, 408 bp, Zea mays
  unsure (1)..(408): unsure at all n locations
  Clone ID: MRT4577_71318C.1
gtattaacatgagataatttcagtcctgcaggtgcaataaatatcagcctagtttaatcggagacaagtggcatatgatagggaaagcaaattactataggatacatactatgccagggttgaattggcacgggctcaccaggagcgcgccagtgatggtaccagcacagcacctcttcatttgaggatgtgcacctcaccacaggggtgtggtggcgcacgccatcgatggccagcttgccacctccaatctccgcgtggaagtacatgctggggagggcatcgattngcggtgcaaattgagtacgcagtcaacgttctccacgatatagcagttattaccatactgaggccaacaaaaggctacacgtaatattggttgtgaaatcatgaatccttggaggaatg

SEQ ID NO: 153222 - DNA, 357 bp, Zea mays
  Clone ID: MRT4577_71319C.1
caggcaacttgaatcgttaagcagaggactggaaatcaagattccaatccaaatcactgaggggaacaaaaggaaagttgtgtgaagaacaaacttaatcgtgaaaaagtacaatatcaacaatgcacaggctctcaatcctacattgcaaaggctattatattgaagcaagaaaaatataaggatgcggaacctaatgcaatagatcttttcaaggagaaatgttttagtgaaaatgttcagaaagatattgttcacatggaagaaatggtagcagcgccatttcaggatggacaacaaccaacatctcctacagaagtttgttctaatgtgctacccggcttcaatgtgttttta

SEQ ID NO: 153223 - DNA, 734 bp, Zea mays
  Clone ID: MRT4577_7131C.1
ccggccggggagggcggcaacactccaatccgcagatcggatcgctcgctcgccggaggaggcctggcccggacacgggaggagacgagcgagcgagatgccgatcgagatgcctcggggtctgccattcgcggtggacacgtggaccccggcgtcggcgctgaagcgccaccgcttcctcacccacgcccaccgcgaccacctcgccggcatcaccgctacgtccgccgtctccgcttcctcctccccggtctacgcctcccgcctcaccatcctcatcgccctccgcatcttcccgcagctcgaccgcgccgccttcgtcgagctggacgtcggccagccgccgctgcgcgtcccggaccccgacggcgacttcaccgtcaccgcggtcgacgccaaccactgcccaggcgccgtgatgttcctgttcgagggccccttcggcgacgtcctgcacaccggcgactgccgcctgacgcccgactgcctcagcgccctgacgtcccacctcgcccgccgcatcgactacctcttcctcgactgcaccttcgcgcggtgctccctgcgcttccccgccacgcaggactccatccgccaggtgatcgactgcgtctggaagcacccgagcgcgccggtggtgtacctcgtgtgcgacatgctggggcaggaggacgtcctcgtcgaggtgtccaaggcgttcgggtccaagatctacgtcgacagggagaagaact

SEQ ID NO: 153224 - DNA, 578 bp, Zea mays
  Clone ID: MRT4577_71320C.1
cattgggtacctcgaggccggccgggaactcagaatacgctagtgacagccagctacgatctctaatcatcgctgagactcgtgaattcgccatcttcccataggacaaggagaactagcctcaccattccctgagcagactaaacctctaactaacgcaaagggatgcggtgaacatgctgccgactaccggctccaaggcggtgcgcgtacttccgatcctccccgcccgtcttcggtgatctacctccgacagcatcatcaagtgtaaacaaatgtatattgaatacacatcttctgcaatgctgcatctctgaacatcaccagaaaggagtgtttcaacacaccaaatatcgatagcttacaaagaaccctcggctgcgtatatagatcctgcatttgacgctattcacgattcttttccccgtgagtgcaacatctgcttactgtgcaacatatcgagaaagtgcctcacatgctgtactaacactaacttcagatggggtatctccatagctagttgtgagatgaagttttggccacactttgctgatctcttagaagttcttacttgagac

SEQ ID NO: 153225 - DNA, 284 bp, Zea mays
  Clone ID: MRT4577_71321C.1
gaactgtgctcgtgctgcgcaggtcggtcgctggagtgcccctggccgcgatctcggctggacgcctgggcttggacctcgccaccgctcccgtctacggttccgggggccgagccaggtttgttcgggtcttactgccaggacgatgaaggacaagcgtggtttcttggatcacctctactgtgtgccgggggggggggatgtcctggtcatacacagatggccagtggtattgctggagcggagaatgaggatagaatgtacaggctgcggtcatccttggg

SEQ ID NO: 153226 - DNA, 661 bp, Zea mays
  Clone ID: MRT4577_71322C.1
aaagaaaaacctgccggcgcaacccaaattccgaccactacctttgcgatttgcgagttgcggctctcaggcgccgccgtcgcaacgacccaccagaccctctctccgccgcctccaacctagtgctccggcgagcttgccggcggaggagcgatgggtgagcggaaggtgctgaacaagtactacccgccggatttcgacccggcgaagatcccgcggcggaagcagcccaagaacaagcagatcaccgtgcgcatgatgcttcccatgagcatccgctgtggcacttgcgggacctacatctacaagggcaccaagttcaactcgcgcaaggaggactgcatcggcgagacatacttgggcatacaactatttaggttttacttcaagtgtactaggtgctcagctgagatgaccttcaaaacagaccctcagaattcagattacacggtggaatctggggctagtcgcaattttgaaccttggcgtaaagaggatgaggtcgtggacaaagagaagagaaaacgagaagcggaggagatgggcgatgcaatgaaagcactggagaacagagcaatggattcaaagcaggacatggacatacttgctgctttagaagaaatgcggtctatgaagtctagacacgctggagtctccgttg

SEQ ID NO: 153227 - DNA, 443 bp, Zea mays
  Clone ID: MRT4577_71323C.1
tgggtacctcgaggccggccaggccacgcctccaccaccaccggacgctagctcaccacctacctcagcacatcgaggagaagaggagtggccaatggcttcgtcggtggccgccgcggcgagcacattcctgggcacccgcctggcggacccggtgccgcagaacgggcgcatcgtggcccggttcgggttcggcggcggaaggcccaaggctgccgtcccgaagaaggtggcgaagacgtcgatctcctctgaccggccgctgtggttccccggcgccgtggcgcccgactacctcgacggctcgctggtcggcgactacgggttcgacgcgttcgtgatcctcaaggccgtgctttttcttgtgacgtaactggccacgctgatacacaacgtgggtcacgaactacgtgtcgttcgatctactggtgctgggtgctatg

SEQ ID NO: 153228 - DNA, 207 bp, Zea mays
  Clone ID: MRT4577_71324C.1
atatcccagattttctttacctgttgggggaaaactccccatcccggtttatttttttagaaacatcggggacaacccaacgttggggtaaaaagggaacacccttggcatatacaaggatggatttttgggcacccctggaccaaatatgggccgccaaaaacaaaatcccaggggggaagagaagccaaatattgggtggcttta

SEQ ID NO: 153229 - DNA, 781 bp, Zea mays
  unsure (1)..(781): unsure at all n locations
  Clone ID: MRT4577_71325C.1
aatcccccctctctctggctgtcgtcgtcgtcccttccatccccgccaccacctccttctcctccttcttccaagatctcctacaccactttgtctcttcttctccctccccgcaaactccccttgactccttccaattcgatcccgtttcgcgctgctggtttggccgggtatcttggctgcttccatcggatttggataaaacaaataccgtaacggaaagcgggacgctgctatcctccctcccattgccgctcctgctctgaatcgtgtccaattccacgcatttgttccgggcgggtcggggttcgttggcgccgtgcggatccgttacgggaggtcgtcggcgtgcgttgctgtccgtccttgttcttcttggcatgagcgttggggaagatggggctggattactacagcgtgctcaaggtcaaccggagcgccacggaggacgatctcaagaagtcgtaccgccggctggccatgaagtggcaccccgacaagaaccccggcgacaacaaggcagaggccgaggccaagttcaagaagatctccgaggcctacgaggttctgagtgatccgcagaagaggacaatatatgatcaatatggggaggagggcctgaaggcctccgcggaggccggtagctcgtcgtcatctatgaatggctccaccaaccaccgtttcaatcctcggaatgccgaggacgtctttgctgagttcttcggcagcagcaagcctntttgaggngatggagcgcgccaagtcgatgaggttccagaca

SEQ ID NO: 153230 - DNA, 600 bp, Zea mays
  unsure (1)..(600): unsure at all n locations
  Clone ID: MRT4577_71326C.1
cgacccacgcttttgtggacgcgtgggcgcgccaccgccggttgcctcctctccactccaccagatctcatccccttctcgcccaccccgatcaccgcgtgggtatcggagcatggcgtctgcggcggtggtggacgccggcgacgcgccggagcccacggtgcggaacctcctggaccaggactccgtgggggggggcttcgtcggcggcnngggcggcgtcggcnggaccacctgcggctccatcctctccgtcctcctcgccggggtccgccngtccgtgctngtcntctccaccggccccgcgcgcggcctcggggacgccttccggcggggcttggccgggtgccccgccctggggcgggggtgggtcgtcctgtgcgccttgggttgtgggccctgttgggggtgttggtggggtttgcgtttggggggggggggtggtggggtgggggcggntgggttgggcggggggggggggtggtgggtggtgtggggtgggggggggggngggtgggggggcggggtgggggggggggggggggggggggggggggtcttggggggggggggggtggggtgtgggtgcggggagagggg

SEQ ID NO: 153231 - DNA, 524 bp, Zea mays
  unsure (1)..(524): unsure at all n locations
  Clone ID: MRT4577_71327C.1
acttaattcaccttgatcgcgtgccaaacaagcaagcaagcagagtagcagtactagacgggcaagatcgcagacaggctcaggaattaacgttacattgacacctgtttctctataatctacacacacaaccaaccaagttgatgtcaacttacagatgctgctcacgcaattaatttacaaccgctttacagtgctttacatcataaacgacatggacttcacaacggcgggaccgctcgactggctcccaagctttcgacgcgtgtcatgcctcggctgtttggaccgacgactcgtcggcatccgatggctgcgactcgtgcttcgccgcggcctggaaacccnggtctttaccgccgtcgtggaaggagacgttggcaggcccaccttgtttggctctatcttcttagctgcccatgacaaggcatctgcgcctactcttactggagacagcacagtttaggtcttttttcaaacctcggagcctcattgtagagatcgcagtgatagtcagccacgct

SEQ ID NO: 153232 - DNA, 711 bp, Zea mays
  Clone ID: MRT4577_71328C.1
ggccggccgggtagcctttggctcctgatttctttggtcggtcaccacttggtcttctcctctcggccgtcgactaagccgacttcgtcatcacgatggagttccttgccgatttccttctctcctctgagtccacttgtttcggatgtcctccctacctatctgtgttggttggctccgaccactctctattctatggtcggctctatgctctaccttagaatgttggcaatggtcagtgcaagctcagccctgcagaccctcccgatggcaagcacgtccccacgggcaggcgcgtcgccgtcgggagggttcgtgcggaggtcttcagccatcggcgagataagtcacaggtgggcgtaagataaaaacccgacggccactttgccatttgcacaaactgtcagcctcttggtcgtttctctatgacttctatacacccggatctagtcctctttactcgcttcccatactgtgtgtatgattgtatgaaatgtatctgatgtattattcgggatcgagttttgagttgataaaaagcgtagatctgatccccacgttatttctgtgctgtttgtgcgcttaaactgagatttgggcctgatatttattcatcccgaaccccatgtgtctttttcttgaacactgttagtgcatctgtgcacttcggtccagtcgaattttggggaaaaaaaaaaaaaaaaagcggcc

SEQ ID NO: 153233 - DNA, 549 bp, Zea mays
  unsure (1)..(549): unsure at all n locations
  Clone ID: MRT4577_71329C.1
tccgctcgtcccggnacaaccacctcctcggtccgcaaccacaaccacacccaccctcccgctcgccgcagccagaaccagctccaacccaaccagaaccagctcgcccctcatcgactcgaggcaacgaagcggccggatgggagcagcagcctgaccctgacgcgatgagcccgcccgccatgctgctgcccgtctgctccgccgcgcccagctgctcccccctctgcccggtgacggcctcgcacgtcgtcgcgcgggtggcgcggagggtggacgtcggcgccgcgctcaggtcctacgccgacccgctcgtcgcgcaggtgcccgaccgcccgccgctcgccgactcctccatactctccccctacatcgccgcgccggacgacatcgcgcgagccttcggcgcccccgcctccgagctccccccgctccccagcgccgaccccagccctgggctatgttgcacgggcaccgaccagccgctggcggcagtcgcggacctggccgccactgccgtggtcaactcggctcccaccgacgccgcgg

SEQ ID NO: 153234 - DNA, 412 bp, Zea mays
  Clone ID: MRT4577_7132C.1
gggggtttttaaataatttttttttttttttttttttttttttttttttttttttttttttttggaaccgaaaggacaaaatcccaaggaataatatcgggctttttttttgtttaaaaaaaaaaaaaaaaccgtgaaaaaaagtgatagggccatgcaaattggcacgggtataaaaaaaaaaaggtaaatcaaaaagggcaaccaccggattcgccggcgaaaccaacggcaacgaattcgccgccgccgaaaccgcaaacgcaaacgaaaccgccgccgccgccggaattaaacgccaaaccaataatggggccggggggaaaaccgccaaacgggccaaagggaaaccccggggtttccaaacaaaacccgttgggggcgggcctcccttcggggccctgggccgggt

SEQ ID NO: 153235 - DNA, 137 bp, Zea mays
  Clone ID: MRT4577_71330C.1
cccagcttactcttttttaaaaagtcatcatttcaagaacctccttttacctagcgaatccatttacattataacagtgattcacacacaactttaatttcctaattagatctagaaggaaaatagattgccaccac

SEQ ID NO: 153236 - DNA, 2524 bp, Zea mays
  Clone ID: MRT4577_71331C.1
cattgggacctcgagacgccggccccggccatcccggcaaaatcccaaaccctgcctcgtcgtcgcaccgcctccactcgtcccggatcaaccacctcctcggtccgcaaccacaaccacacccgccctcccgctcgccgcagccagaaccagctccaacccaaccagaaccagctcgccccggccgccgcgaccgtcccccctcatcgactcgaggcaacgaagcggccggatgggagcagcagcctgaccctgacgcgatgagcccgcccgccatgctgctgcccgtctgctccgccgcgcccagctgctcccccctctgcccggtgacggcctcgcacgtcgtcgcgcgggtggcgcggagggtggacgtcggcgccgcgctcaggtcctacgccgactcgctcgtcgcgcaggtgcccgaccgcccgccgctcgccgactcctccatactctccccctacatcgccgcgccggacgacatcgcgcgagccttcggcgcccccgcctccgagctcccgccgctccccagcgccgaccccagccctgggctatgttgcacgggcaccgaccagccgctggcggcagtcgcggacctggccgcaactgccgtggtcaactcggctcccaccgacgccgcggagcgggccctgtcggacgcgccgttccccagcacgttcccgtctgacgcgtccgaggtcgaggactccgtggccaggctcatcgataaggtcggcaagcaggtcttccaggcggaggacgcgctcaccgaggcctacgacaagctgaggctgtccgcgtacgacgcgctcggtgcgtggaggaagacggtgcgcgacgcgataggtgggctcaaggcgtcggtcgacgccggtaagcagcaggccgccggaggggtcacggatgcttcgggcgcgttgcacgagaaggtggccggagctgggactgtggctgttgatgttctcaggaaggcgattgttgcagcagaggattcactgggcagtgctgccacattcgttgtgtattcttatgggtcggcgaaggagtctctaccaccaaatgttagagatctgttgagctcgtctgaggagaaagctagtctagtcttgagaccaatcggaaatgctctgcaacaggtctatgtagttgttgaaggtgttgagaagaatgttggtttggatccaagtgatcctattgttcaattggcagttgtgcttggaggttcagtgacaatagggacaacgtactggctcttcacatacagtggctattctggagacttgtcacctgaatcagcgtttgacttattgaaaaacgatgacaaagccgtactcattgatgttcggcctgaggatttgagggaaaaagatggtgttcctgatctacgcctcggggctaggtctaaatatgcaagtgtagcttcgcctgagatcaaagatccagtaaagagtatgctcaaagatgaaagagagtttgatgatgctttactggcagttgtcatccgaaacttgaaattggtgaagggcgattcaaaagtcatagttatggattctaatggagctcgatcaaaagccattgctaggttactgaagaagctcggtgtgcagcgaccttaccttgttaaaggtggtttccaagcatggtcaaagaaccttcgtgtcaaagaactgaaacctgagactgcattaacgtcaataaatgaggatgttgaggaaatcctagaacaaataaagcccaccccaactcttgtgtttggatctcttctgggcctctcagcactttcctatgctttactggaatgggagatgactttgcaatacatagctgttttaagcgttgggctgactatctacttgcgattctctacatatgaggactccgaggatttggagaaagacctaaagctgttgctgtctccagtaagagtaggcgcagacgccttgtcatgggcagctaagaagatagagccaaacaaggtgggcctgccaacgtctccttccacgacggcggtgaaagaccgggttcttcaggccgcggcgaagcacgagtcgcagccatcggatgccgacgagtcgtcggtccaaacagccgaggcatgacacgcgccgaaagcttgggagccagtcgagcggtcccgccgaatcctcaataagagcactcggtgggcgctccctggtaatttgtgaagtccatgtcgtttatgatgtaaagcactgtaaagcggttgtaaattaattgcgtgagcagcatctgtaagttgacatcaacttggttggttgtgtgtgtgtagattatagagaaagaggtgtcaatgtaacgttaattcctgagcctaaagcggttgtaaattaattgcgtgagcagcatctgtaagttgacatcaacttggttggttgtgtgagtgtagaaaatagagaaagaggtaagtccggtctgcgatcttgcccgtctggtactgctactctgcttgcttgcttgtttggcacgcgatcaaggtgaattaagtaaaaatggtccgtggtcc

SEQ ID NO: 153237 - DNA, 376 bp, Zea mays
  Clone ID: MRT4577_71332C.1
ctacctacgggtccctcccaaagcgggggattttggtggattcggttcccctcccccaaatccaatccaatccaatccaatccaagctctcttcttcttctctttaagagaggacgggcgagctagggttccttctccttccttccttgggacgaccagagccatggacatggaggattcctcctgctcctcctcctcgccggcgccggcggcggacttggtcgactacctgggtcccgacacctccgtcaccgtcttcaccatgctccaccaccccgccgacctcgcacgcgcatccgccgtctcccgatcctttttacaactcgctatcgacaaccagttcagcaagctgcagtgcctgcgggcctgcccggag

SEQ ID NO: 153238 - DNA, 269 bp, Zea mays
  Clone ID: MRT4577_71333C.1
ccctcttattttctctagtactcttggaccttggtgtcacaatacaatgacaaatctataccaaacattaaggagtgtaatgtaaaatatattcttgtatgattattaaagtctcaagaagagcatgtcatagaagaagtaaagtcaataaatgactttatattagtaactctaacttatgtatattgcataataatatcttatgtaatagagaatatatctcatggaagagaaatattattcgctaagaatgagaacattctttaagg

SEQ ID NO: 153239 - DNA, 418 bp, Zea mays
  Clone ID: MRT4577_71334C.1
attcggctcgaggtttctgcaagcatttttttctgctgagtaagcggacatatagggggcactttaaaaatgggtgcacgtggtgcatatcttaaattatcactcactcatttgagatctagcgtctttaggggatcatgtcaatttacatataacacgctgacaggcttgcaccacctacacaccaccaggttggagggtgctttaagcaaaatctgccaaacatgtagaaacggtagatctaaaatgggtggggcagattgaatatgtgcagcatgtgcaccaatcttccatgggcattagatgtggtctgggtgagtaatccacctgtggcgaataaataaagcactccgttgtcagtgtgccctgagctcagggcccgcttggaatgcaggagattctaggtcgcctatttcta

SEQ ID NO: 153240 - DNA, 438 bp, Zea mays
  Clone ID: MRT4577_71335C.1
ggggcaaaacaggaaccccactggttttaagcaacttcatacagcacaagggggctttaggctttttaacgggcgggggggcagaaacatggatcgtcgtcggcaagggtgactagctaggggttcttggggatggggtaaatggggtaaatgatgccggggattttccccgggaagggggggggggggcaaatccaaaacttggggccgcccccgtccttggggaacacccccagggggggccgggtgttggccatccgggtgtccacccagttgggaggcccctccgacatggtgccgaggcttttttttcctccccttttttttttttgccttggcttggcttgggtggatcggattcctttttttgggcccgtggggggccccggggatttcgggccgggacctgcggggggaccaactttcccttttgggggg

SEQ ID NO: 153241 - DNA, 353 bp, Zea mays
  Clone ID: MRT4577_71336C.1
attcggctcgagcccggtcttggcgacggttattttgatcgcgatggccgtgaggagcccgggggccccggcgaacctcctggacctcgccgcggcattgcaccacatgtcctccgccaatcgcccagactccgacccgaacagatccgttcccgaggagatctacctccacaactttgacagatccatgcgcgagtcgcacagtacgaatgaggcggcgaggacttttcatatcctcgacctggagaacaataagagcctgactgacaagtctttcatgtttgccgacgataaccacgttttcccggtttacacctccaaagacctgatgcatgcagtccagagccctggcg

SEQ ID NO: 153242 - DNA, 257 bp, Zea mays
  Clone ID: MRT4577_71337C.1
aaaaaaaaaagggggggtttttttttaaatttaaatttgggggtgggggccaacccctgaatttgaatttttacacaaaggccggggtaggtaaaaaacttcaccggcccaaaacccaagggggggggggctaaacaggggggtcccaaagggctttggaaactggggggtaactgaacgggcccccccgggggaaaaacaattagttggttaaaggggcatatttttttggcaaacaaatacctatgaaaccaccc

SEQ ID NO: 153243 - DNA, 616 bp, Zea mays
  Clone ID: MRT4577_71338C.1
gataatacacttttttaacggggggaaccccttcaaagttgaaagggaaaaaaccacggttcgccggccggtaacttctcactatttttggggggttacagatcgcaggagatttacaatagagagatagatatctcctgcggggggcagaaggatttatatttgtggttccctaaaacgccggcccaagcctcccggcgacgggcctccgcttcgctcgccaccccggccggcttcttaagaatttggatcacaaactcaacacaaataccggaggtgcttcagctcaccaatagattctggcaacttgctgctgctgtaaaatgacagagacaatacacgcagttttgtttggttccgtagcatgccatcaaaaatatcacttggaccatccattagcggatcgatgcacataatagtgcgtaaatgatatagcttgcagataatatgcttatgcttttgcatactttgaacatgaacagatagatgtcgaacagtgcatggtatttctgtcacattatcatcttctaatttaaagcagtcttccctagagagtgactgtgcaaaagcatgaaggatatcatgcatgacatagtacgaatcacaatacatttga

SEQ ID NO: 153244 - DNA, 434 bp, Zea mays
  unsure (1)..(434): unsure at all n locations
  Clone ID: MRT4577_71339C.1
gcccgccctttttttttttttttttttttaaaaaaagctgtgcggagcccaggaggctcgggtgccctctatactaaaattggatcggccctacccgcaccccattagagtgcatgccatgtggtaaaaaagcaggtttggctcacaccctacagaatnttcttcctccactgccgagctttgaaactgactcacgctagaacagggcatcccaactccgatgttttcgctttaatcacctaatggccatggattagaggggctgcaccctagtctagctatctgggtcagcaaaacaggcaatcttacttgggcatatatggctttaaattcacatccgcaaaatcttgccacctagttttttgctcgccagatcaactgcctcttctcttttggacacatnattggtgccaatggcaacctgagcatatgca

SEQ ID NO: 153245 - DNA, 540 bp, Zea mays
  Clone ID: MRT4577_7133C.1
aattttcttgtctcgttttgtcgggagaggacccctctggtgccctattttcgatttcttcgtttatgcgagacgagctgcctcgtagacactctccctggacgaactatcgccctcccggggcagctctcctgccaccattgactacgcctaggccaccatcaattatcttgtacgaatgctaccgcgctccgactgtctactgtttgctgggaagcagctcatacgacgcgcactcccttgtctcctagatgatgccaaaatgcagaaccctccgcgttgtacaccatcttctcttagggatgcagatcatcactcatgccctcactgtttggactatcacccatcgacgacgcaggctctcctgacaccatcgtacacatatccggacaagatcccggcatgacgaagcaatccgctccatcaccatgcatgttgtcattttatgtgaattactgcgcgaggcacaaatcgcacatgtgtgcgactacatttcctctgaggaagcatcctccacttggagttgtatatctcgagatt

SEQ ID NO: 153246 - DNA, 755 bp, Zea mays
  unsure (1)..(755): unsure at all n locations
  Clone ID: MRT4577_71340C.1
aacgactcccagagcagaaaacctacccaaatccaacaaaacccaaccaaatcgccgcctccccgaacccaaacccccaatccccacctccgcctccggcgacatccctacctgcagcgcgccgacgagctgcagaagcacgagcccctcgtcgcctactactgtcggttgtacgcgatggagaaggggctggtgatcccgcagaaggagcgcaccaagatgaccagctccatcctcgtctccctcatcaaccagctcgagaaggataagaaatctttgaccttggggcctgatgaccatcttcatttggaggggtttgcatcaagtgtctttgctaaagcagacaaacaggatcgtgctggacgagctgacataaacaccgcaaaaaccttctatgctgccagcatcttttttgagattctcagtcagtttggcgagcttcaacctgatcttgagcagaagcagaaatatgccatctggaaagctgctgaaattagaaaagctctcaaagaaggacgaaagcctgaagctggccctcctggtggggacaaagatgaagcacctgccagcaccactacaattgatcatgatatggggcgaagccagtcttttggtagccggcagaatggaaatgaagcatcacctcatcctatagacaaggattttagcaggagggatagcttttctgctgtccagccaggaaatatatcttctcgacaggntgcagagaanngtcatgatcatgtctctgccca

SEQ ID NO: 153247 - DNA, 442 bp, Zea mays
  Clone ID: MRT4577_71341C.1
aaaaaaaaagggggatcgaaacaaatttgggggccttttgggaaaaaaagaccgccccaaaaaagaacacagtttttttgctttgggggggattaaaagggttccctaccccggaaaaaggttccccaaaaaatattcgggggccaaaagggggaaaaaacactttggggaggggccaaagtttttccgggacattggggggggcccccaaaagagggcggggccccgttttgttttaaaaaatggggtacccaattccccgcccaaaagggtttgaaaaattttggggagtttttttttaaaaaccaccgggaatttaacatccaggggggtttaaaaaaaaatttttccttttggggggggtagcaaaacccccccgggaacatggggggcccggggccttaaaaatgacgggggagccaagggcaaaaaaatttgccga

SEQ ID NO: 153248 - DNA, 1251 bp, Zea mays
  Clone ID: MRT4577_71342C.1
atggggagcgagtcggagcccgccaagggcctgttgccctacctgcagcgcgccgatgagctgcagaagcacgaacccctcgtggcgtactactgtgggagacgcttctctctcctcgtcggaaacactgctaaaactttctatgctgcaagtatattcttcgagattcttaaccagtttggcgagcttcaacctgatattgagcaaaaacagaaatatgccatctggaaagctgctgaaataagaaaagctctcaaagaaggccggaagcctgaagctggaccgcctggtggggataaagatgaagcacctgtcagtaccaccaccatttctcaagatatggggcaaagtccttccttcagcagtgtacaccagggcagtgaagcatcacctcgacctgtcaacatggattttagtaggcgggatagcttttctgctgtgcagccaggaaataacgtccctcaccaaagtacagagttcaatgatcatccctctacccagttaccctattcaccgccaccaccctcacagtcccagcatccttctccatcacaatcttattcctctccctcgtatcaggcaacaacagattacccttcttctgattttcacaaaccatcccccaattattcaactcccggctacacaagcacagatttccctaccaatgaggtccacaaaccaccttccaattattccccacctccttacacaaggacagatcgcccttccaatgacggctacaatcctcacagcaatggtaaaccagatgtttcggcttaccctcaggcatatcaaccctcaccctacacatttgaccctcagcacaactctcaaaactactactccacggaagccccagctgttccatacaactaccctaatttccagtcatatcctagtttccaggacaacacgtcagcttctgttctgacgcatcagtcttcattctatcctgaaagtgatgatcccgcagctacatcacacactcctgcctcaaattcttctgtcccaacgcactaccacccaaccgctgactgttcacctcaagtcactcctccagctgcgccaccagctagccagtatagatatgatagcagttaccagcctgaagttgagaagattgctgaggcccacaaggcagccagatttgcggttggtgctcttgcgttcgatgacgtatctgttgctgtggatcacctgaaacgtgcactggatcttctgacgaacccatctgctgaaccccattag

SEQ ID NO: 153249 - DNA, 1057 bp, Zea mays
  Clone ID: MRT4577_71343C.1
aaaaaaaaaaaaagaagtaaagctgttttgttcgacgaaaattatgtaaccatgtcaaaatattgcaaatcgcaaaacactaaaagagaagctgggaaataaccatgttgacaggtcgaggtgatgcttcactgcccctggtgtacactgctgaaggaaggactttgccccatatcttgagaaatggtggtggtactgacaggtgcttcatctttatccccaccaggcggtccagcttcaggcttccggccttctttgagagcttttcttatttcagcagctttccagatggcatatttctgtttttgctcaatctgctcaaggcttaaaagcgaatggtaaacatcgatacatacatatatgttcattggacctttcagcataggtcaaggggtgtcaagattagttagtaataaatacattaataggcaatagcattaataaacttacatcaggttgaagctcgccaaactggttaagaatctcgaagaatatacttgcagcatagaaagttttagcagtgtttatgtcagctcgtccagcacggtcctgtttatctgctttaacaaagacgtttaatgcaaatccctccaaatgaagattgtcgtcgggccccaaagtcaacgatttcttgtccttctcgagctggttcatgagggagatgaggatggagttcgtggtcttggtgcgctccttctggggtatcctcagccccttctccatcgcgtagagccggcctgcccaaacccgaccaaatccaaatcgaatcaaaaccctaaccaataggatcgattaggaacgaacccgacgaggagagagaagcgtctcccacagtagtacgccacgaggggttcgtgcttctgcagctcatcggcgcgctgcaggtagggcaacaggcccttggcgggctccgactcgctccccatcgtaggccgcagatgcccaagcgcgagcacggcccggatttggcggctgagatccccggagcttgaagatgacgggggattggtttgattggtaaggagtcgttgcagctgctgtatcgtcggaaaagaac

SEQ ID NO: 153250 - DNA, 2100 bp, Zea mays
  Clone ID: MRT4577_71344C.1
gactcagctgcggcatcctagcaacgactcccagagcagaaaacctacccaaatccaacaaaacccaaccaaatcgccgcctccccgaacccaaacccccaatccccacctccgcctccggcgacatccctctcctgtagcgaggcagacgtcccccgcggccgatggggagcggcacggagccggccaaggggctgctgccctacctgcagcgcgccgacgagctgcagaagcacgagcccctcgtcgcctactactgtcggttgtacgcgatggagaaggggctggtgatcccgcagaaggagcgcaccaagatgaccaactccatcctcgtctccctcatcaaccagctcgagaaggataagaaatctttgaccttggggcctgatgaccatcttcatttggaggggtttgcatcaagtgtctttgctaaagcaggcaaacaggatcgtgctggacgagctgacataaacaccgcaaaaaccttctatgctgccagcatcttttttgagattctcagtcagtttggcgagcttcaacctgatcttgagcagaagcagaaatatgccatctggaaagctgctgaaattagaaaagctctcaaagaaggccggaagcctgaagctggaccgcctggtggggataaagatgaagcacctgtcagtaccaccaccatttctcaagatatggggcaaagtccttccttcagcagtgtacaccagggcagtgaagcatcacctcgacctgtcaacatggttatttcccagcttctctttagtgtttgcgatttgcaatattttgacatggttacatagtttcgtcgaacaaaacagctttacttcttttttttttgaaatataattttgtgcacaggattttagtaggcgggatagcttttctgctgtgcagccaggaaataacgtccctcaccaaagtacagagttcaatgatcatccctctacccagttaccctattcaccgccaccaccctcacagtcccagcatacttctccatcacaatcttattcctctccctcgtatcaggcaacaacagattacccttcttctgattttcacaaaccatcccccaattattcaactcccggctacacaagcacagatttccctaccaatgaggtccacaaaccaccttccaattattccccacctccttacacaaggacagatcgcccttccaatgacggctacaatcctcacagcaatggtaaaccagatgtttcggcttaccctcaggcatatcaaccctcaccctacacatttgaccctcagcacaactctcaaaactactactccacggaagccccagctgttccatacaactaccctaatttccagtcatatcctagtttccaggacaacacgtcagcttctgttctgacgcatcagtcttcattctatcctgaaagtgatgatcccgcagctacatcacacactcctgcctcaaattcttctgtcccaacgcactaccacccaaccgctgactgttcacctcaagtcactcctccagctgcgccaccagctagccagtatagatattatagcagttaccagcctgaagttgagaagattgctgaggcccacaaggcagccagatttgcggttggtgctcttgcgttcgatgacgtatctgttgctgtggatcacctgaaacgtgcactggatcttctgacgaacccatctgctgaaccccattagctctttgcaccaccgagctcttgtcagaagcatcatctgtacaaatacaagattggtataccaccatggatatattgccaggtcgcgtacatatgagaggggttaccacacaaatctaggagataataagcgagccgtgtgggcttttgaagtcacacttaaggaaaccttattgtgcaaaattcaattatcttattcagagttctgttctacgtaatccattgtattcatttgaatattcttgaggtctggtatggtattttgggtatggacggatgatgcagtgcctgctttgtttgtctcttccatgatttgtcatgctgctgtcaccctcgtgaagatgatttgcacgtgattataacatgtgaaaggttagcacttttt

SEQ ID NO: 153251 - DNA, 136 bp, Zea mays
  Clone ID: MRT4577_71345C.1
ttgaagttcgaggaccgcggcgaggccgcagggtaatttacggaggctatactgacgcagcacgttgtccaaccaaaagggcacggggtcgttgagctaaacaaggcttgcagttctatgtggcgcagatgcaaca

SEQ ID NO: 153252 - DNA, 334 bp, Zea mays
  Clone ID: MRT4577_71346C.1
atcgaattaatttaccctttctgtggtttttttaacgagaacttaatgggggtagaaaggggaaccgcgcccaaatttaaatttttttttgaaaacaaaaaatcgcgggtccggggttttttccaaaacataatttatcacaaaaggggggttaaaaaaaaaggtttttggggaaggaacctttacagttaggggggggggggaaatcggcttttttcttgaactaaataaaagggccgggggaggcgcccttcccggagaccttggctttttgggggtccaacccgggttaaacaaaatgggggggggaaactcttttgaacaaaactggggg

SEQ ID NO: 153253 - DNA, 338 bp, Zea mays
  unsure (1)..(338): unsure at all n locations
  Clone ID: MRT4577_71347C.1
ccactctttctcaatttctttttctaattcttctatcaacttttatcaggaatcttatatcatgggctggccantctgcctgcaggatttcgtatcacttcatttctttatgtccctacctcattaccaacacatattccacgtgctatacatttacagttttctcctccgtcactctttcttcccactatgccgttccggttttcacatataccatatacatatgtaaatgaactctcacgttttcacctgttttattttcgtaactaataccctttctccttttgaatatcacaagtatatctgtatacataggttttttttttctctctcttttt

SEQ ID NO: 153254 - DNA, 355 bp, Zea mays
  Clone ID: MRT4577_71348C.1
atctagataagtttacttacacataacaattattacaaaaccccctataagcaatttaaacaaaaacaccttattttaattgttccctttaaaaaaaactttatttcctgtaactcaaaaaaaaaaataactccatttaaaaaaacatattatcccacaatctttttctttctgcatgaatatatacaaataaacactttggattacaaaaaaaaaaaacctttttattttcaacacccccaaaacaaacttggaaaaaataataaatttttggaactcccctgctcacccttaatacccaaacccaatcctttttttatctaaaaaaaaaaaaacctttaactcccccctaaaa

SEQ ID NO: 153255 - DNA, 267 bp, Zea mays
  Clone ID: MRT4577_71349C.1
ggcgcgttcgcccacgcgtgcgaacaagatcaactcatccccaaatgcacgctgccaccaactcgcacggctgcgagccaagcaccaaagctccgatggcccgcactaaagagacggcgcgcaagccgacgggcggccaggcgccttttagtaggtggaggaccaacgcggaacacaagtctgcgccggccaccggaggcgtgaagaagcccactcgggacccccagccaccgtcgggctcagggagatccgccagtgccacaaaac

SEQ ID NO: 153256 - DNA, 151 bp, Zea mays
  Clone ID: MRT4577_7134C.1
gtgcagcaacacgtgcccgtcaccatcagccaccgcgtcgacacctgggccaacaagctcgaattctacatcaacccctacggagagatcaacatctgcagatacggggcgaggccctatagccgctgtaacattttattcgcgagcgatg

SEQ ID NO: 153257 - DNA, 326 bp, Zea mays
  unsure (1)..(326): unsure at all n locations
  Clone ID: MRT4577_71350C.1
gcttgccgcttggttcattggttattggttgatgatggccccacaagcaagtcgtctggtcttttgccgtccactcggtggttnggggagatgattaattttttttttcccccgccgtcctgttncgcgggctncctttttgttcccgtgctcctcgtcctgcgccctggttgattcctttgtcctcctccgccgccagggggcctgcttgcttggctacgggnagtgtcttccttggcggcctgccccggttgggcttgggcgtgcggtgggggctgtggtggcgggcctgccctctccgctgctgcttcttgttggtttttacc

SEQ ID NO: 153258 - DNA, 649 bp, Zea mays
  Clone ID: MRT4577_71351C.1
ctacaagaagaagaaaaaaacgcacagacagttaaaaaagaagaagaagaagaaaaactctctctgaatctgtcttggcagcagggaagatgaggccaggagagttgatgaggagactttgctgcgttccgttccgttgctgcatgcgtcggagaccgggaatctttcgggcgccctgaagcggaagcggagtgacgagaagatgggggctaatctaaagcagttgtttaaccgcgctgctcgttgccgctttttttttcttctcgtgcctgctgacggaacccacgtgcgcggaccgacctgttcaagtccaggctctgacagacgagagctggcctcgagatgttctcctaatcgctttcgcatttcttaatcgccttcgactcgttatcttccgcttctgtatatgggaatagctataggatagtaagtagtttgtttagccatactacacctagtggtcagtgtgttcggggcttgctctttgggcacatgttctttcttgttgttgctgaatgtggtagtagggtagtggaaagtcttagaagaactagaaagaggatgcgtgtggacgttttatatatatgtaaactatgatgatggtttcatctttgagtacctgatttcagtgcttggaaggggagttttc

SEQ ID NO: 153259 - DNA, 309 bp, Zea mays
  Clone ID: MRT4577_71352C.1
tttaatgtatcctacaagaccttatataggctggggggtttttgtgtgggtgacagacctaatcttgtacttatctgttacattcctattctatgtgggtgggtaactgactgatctaagctcatacttatctgttacaatcattatacatctgttaggaacgctaatgcatctcttttatcccaatagtatcgtggttaatttataccaatcttatttgaccgtccatctaaatataccttagattatattgtcaattaaattgttaaatgaaacttttgggtgttatgcgctagctgaaaggaatat

SEQ ID NO: 153260 - DNA, 315 bp, Zea mays
  Clone ID: MRT4577_71353C.1
atacggccccaagtcctacttaacatgggagcagatgtaggccgacgatcttctagacattttcaggacaaactgaatggcctggtgttaccttgcaaaaggagattgcgctgccaccctacgataaaaaacacgccaccaatctctacccgccggccgccgccgtagctgctaccctggactaggccccggggccgacttatccgagcacttcctctgcttggcaccacgtacatgagccatggacgcgaggagatcaagagaggcaccacgaggctagttctagatcaccagctggcggccacttgggagctt

SEQ ID NO: 153261 - DNA, 571 bp, Zea mays
  Clone ID: MRT4577_71354C.1
tagggacatattccataaagaggctcaaagctaactttttttttttttttttttttttttttccgccttcaatatttttaaattgagaactatcttgactggtgttcaaattacaacaaagaaaattgctgaagttccgtagctcttgtgcctgacgacaagcagccttaaggactcctataattacacccaacgattcaaatgaaggtagagtatgttctgtcgcgagttgtagaataacacgaaagcttttgagaagagtgttgactactaaaggatcgaaaatgcaatgatcaagtgcatccagcagtgccgagcattatggcactgttatatatgttttcatggagcgttgcagcaaactccaaggaaagagcttccaccccttcctctcgtgcagctgggcggtgcgcgcgtgctgaatgaagagctattcggttcatgcgaacctcaccattttgtagggtcgttgcagtaggcctttgaccggctgctatagatcttcctcccttgctcagtctgccggacacttgctggtacctcacgcccccctcgcgcgttgctgggtgta

SEQ ID NO: 153262 - DNA, 514 bp, Zea mays
  Clone ID: MRT4577_71355C.1
agagaagctatcagacacactttattaatttgagaataagtttacatcactttttttttacttcatcctctcctcggacgcaggacaaacagggggtttggaaaggggtcatacttttatccatacccaacaaacctggactgggagtctgggggtgatcttctggttacatttatgcgggggatagcagatcggcaagcaattgggctcatgttcggaattacctttgaaccgatgtctcgaaaacccgcaacacgaatccccaccatcagcacaaatccttaactaatttttccacaagacagcagaatataccacactccacgtttgagctcatcgggtcacgggcattttttccaaaacacctccaccgtcccagccggttgatctcctcctccacctccgccttttgatccgacctgatcagggcgcaacgttgcccatccagccacgccttgggagtctccaacaacgacgtctcgagctctggatcgtccgaagccccaacaaaatg

SEQ ID NO: 153263 - DNA, 364 bp, Zea mays
  Clone ID: MRT4577_71356C.1
cattgtacaactaagtcgtaaaacgtaaatcgtctactttggattacgagatgtttttcatttcaatataatatacatttgaacataagttatcgtgatattatatgttaccgttgcaacgcacgggcactcacctagtaaagaccaaagagtaattgtcactcgcgcgcggcacccaattttttctggcgcccaaaattggccgtagaggcccacctccagttgaactatggaccaaaccctatttcctcttttccaccacccggagttccgccgccagaagcaaggccccttcgtcgcctccgtccgccgcgctctcaactccatcgccatcctcctctgactcctccgacgacggctcctc

SEQ ID NO: 153264 - DNA, 178 bp, Zea mays
  Clone ID: MRT4577_71357C.1
ttcctgggcggcgcccctcctcccaccggtgctttctttttgtgctatccctcttcttcaaccttacagggggcaccggccatgctcgggtggctggttgccctctgctgccttggtcctccctcgttggttgggtggtgggcctcgttgcccttgggtgcgggtgccgtcgctcggc

SEQ ID NO: 153265 - DNA, 298 bp, Zea mays
  unsure (1)..(298): unsure at all n locations
  Clone ID: MRT4577_71358C.1
tcttcctttcaacccaaagttcccnctgatccacatggcctacatcggcggcggagggggccactcctaacccaatcccgtccattaactcaacacatcttctctacctcaataacaccttcaaaaaagacaaacattcctacttctctaaccaccacatattatatatgttccctgctctcacaaaatgcatacactacacaagtcttcttacacttcaaacaagcaccaccatcttcttctccatactcatacttaacaaaaacaaaaatgttatgtagctggagcacattctcta

SEQ ID NO: 153266 - DNA, 121 bp, Zea mays
  Clone ID: MRT4577_71359C.1
gtatgagccaaagaatgtgtatgcaagcatgatgcacattacaatgtgactgggcgcctggcgccatatacacattgctgttgaagaggaacatgcggttgtaaggacatgatggataatt

SEQ ID NO: 153267 - DNA, 381 bp, Zea mays
  Clone ID: MRT4577_7135C.1
atgactgaggagaagatgactaaggagaagaagcttactgaggagaagaagttgtatgaagaaaagaaagttgtagatccttatattgatgggttttatgagtctatggcaaaaacgaatacagagaaaattattaaggagataatggagggtttgtctgaagattctgatgacagtgatagttatgatgtggaaagtggagatgaagattctgaggaccggccctggcggccaagccataccatcttcggaaaatcgaccattaaacaaagtcatattgacgccatgagagggagatattttcgcgacatgtctattgtgagggttggaggagacaacactgcccctgctcctgaggaaaatgaagttgttatttactga

SEQ ID NO: 153268 - DNA, 458 bp, Zea mays
  Clone ID: MRT4577_71360C.1
aaagaaagccgctaggttttccgacttggttaccaaaggtgggaggccacaatttaacggggtaaaccagggggcgcaaaagcgctgtaaaacgggagggaaagcaccttcacaggttaaaaaacgggggacacaaatgcggggcacaagggcaagcaaaggcttgaaaatctgggccctagactcagacttgcctcctacaggacattacagggcgggagcacaaacaaggaaacagccctccgatgactaaccttctaaacgaaaatgccgggtgcaaattcctcccaatggacagttaatcaactccggaagaaaggaaatcaaacgtggaaaatgcctaaaaattaaaaggggaaaaactccgtcacgcagggtgcttgccctggcagatttgcccaagccgtggccaaaaaaagagggatctgatcagccttaaaaccattatgtgtttgcac

SEQ ID NO: 153269 - DNA, 1431 bp, Zea mays
  Clone ID: MRT4577_71361C.1
gaaaataagaattgcataccaaatcttaaaatttgtctcctttcccacaagtccccgagagcagccgcgaagagagatcccgcgctcaaccaccgattctcggccgcggcctccctcggcccctccttgatcccttcctccttcccttggtggccgccggggacggggagcgaagaagcgtcccttccttccctccgttggtcgccggggaggaggagtgaagaaacctcccttcctcttcccctccggtggtcgccgaggacggggagcgaagaagcctgttttcctccttccgtccggtggtcgccagggacgaggagcgaagatgttctatggggccatggtgtgggatccgtggctgatcgtgtcgcagatcgtgtgcctgcagtgcctctactacttgtcgctgggcgtcgccatggcgctcctcgtcggcacccgcgtcccgcgactcaccctcctctacttcttcgacttctccacgctcaccccgcgcacccccacaggttggtgcgccatcgcatcattcctcctcgccgccgtcactggagctgggttcatgctttatgtgattgagcgagccaaaaagtgcctggactttgcagcaacactctacataatccatctcttcatttgcattgtttatggtggatggccagcttcagttacatggtgggttcttaatataactggtttggcaaccatggctctcctgggtgaatacctatgcatccggcgggagttgaaagaaattccaatatcacggcttcgtgcaagtgtttaagctcacatgctaaaagattataggtgatttcaaatggtgttatcccaggaggtgcttgttaatatgttccttaaggaatacagtgactcacaatgaatgctttattctgtgatttccaatggatacttctcaaacttcgcatagagcgttcatctgatgcccaacctcccagttgaccatgatgaactgattgatcctagaggttccaccaacggaaatggcagctcactttctaaatcatacattcaacaagtcctcccttgccccttataaaaaagagttcctggcctgcctctcatgaaagaaaacttcctcccttgcctatgttctagctacagtttgctgcttgataatgtacgactagataccaacatgtgcattcttcagtaatatattgttcttaatacatgcaggcacccatggatctcttgtctgtatcttgcaaatgatatttgcagtgttatatgctaattctgtaattcatgctaaaaaaaaaaaaaaaaaaaaaaaaaaaaaaaaaaaaaaaaaaaaaaaaaaaaaaaaaaaaaattggaggcaatgctcttggcgtgatttgcttctcgggatttaatcctaggcccgtccccgagagctatccacattgccctatatatattataattatt

SEQ ID NO: 153270 - DNA, 242 bp, Zea mays
  Clone ID: MRT4577_71362C.1
tccggctcgagcccgcaacaatcggttctccagcccatagcacgcagccaagaaccgcatccagcaccccagcatcgatctcaacttcttcaacgccccgctggaggtgaccgaggagaacttcttagagatctgcgatgagctgggagtgaagcggccatcttctgtgaaagtattctcaggcaaaagtgagcgcagtcctctggactgctttagtgggaatccagagcgatgccctggag

SEQ ID NO: 153271 - DNA, 499 bp, Zea mays
  Clone ID: MRT4577_71363C.1
gatcctacaacgactatttccttgcaaagcaattcaaacagtaccggtactcctaagccatgaaaccaatgctaagggaaagacttctgctcgctggatcaaagaaaaggtaatatcctcgggaaaggctaagcacattcgaagactggctttcgattcgtatcctctgagcaaggcctattccggggaaacaactaaaccctgggctggttatgatgtgaggctgattcctattccacaaaatggtacggttgttgtattccgattagcggtgcccaggaaagaacgggtacttaacggctgctataaaccattatggaattctgtgttaccttcattcaatatcttatattaggtatagaatcgatcatagttcccccacgaccaagagaagtggcttatctattgaataatagatctcgtaaatcaaataggttatgacaagagagggttcctacactcgttctaatggaacgtggggatcaaagcaagagtcaaa

SEQ ID NO: 153272 - DNA, 428 bp, Zea mays
  Clone ID: MRT4577_71364C.1
tctggggggagtccaattccacatattcaaggttttttgggggcatacatgtggatatatgaattggaattatttggttgctcattaggcccatgctgctgcctaaggatatgagatcggtatttctcgaggaacatcaattgcacattgttaagaaataacgggggcagacatgtccatactagtgaattggacaagtggagggctgattcggcctattctgcagccacaggacttgctatcggtgattcgtggtgtagttcaatctcacattctccagaattctggaggcggacacgttcacttatgcatcgagattatttgcgtttttactaggggtatactgaggcctttggatgtgagatcggaattcctcggggaattccaattccacattttcaagaaataaggaggcagggctgtccata

SEQ ID NO: 153273 - DNA, 1232 bp, Zea mays
  Clone ID: MRT4577_71365C.1
tcatgcgccccaaacattatcttgagcagtgatgctgccagccttcatatcaacaagaaaaatagcgggatatgatgggctattagggaaaacacgttctggacaaatttacagccacctgtttcctccatgatgaagagaaaagggataagaacagagagagaagaagaaaaaaaagaaaggatttgcgtcgctaacaaataacctaatttctatacctcgctatcagtacactaattaccaggcggagtcaagacggcagctttgcaaacagcaacagcacagcaggtgtacgagcaacagctacacttgacttgattgctgcttctctcatcatctctagcagatctgcactgtgccccttttcaagagcagtagcagcttcagtgggtgccgttcaactgtgccggagccgagaagggtgcgagggacttggcgggaagggtgacgccgccccctcggagagaaaccgaggggctcttgctccagctagctttgctcatggcatccgagtcgaggaacaccacgacgacggttatatcgtcgtggaaatgcctcctcacgccacggtcgatcttcttgaggtctgagtatctcatctccctcttcttggcagcttcttgcatcgcggctttcactagtctccgagcgattccattacggggactactttggacaaggtcaacagcttcctgattgctgaggtgctcccatagaccatcagaagcaaatataacaaactgatcgtttggctgtattcggtgttcagtaatttgaggttcagaactaagaatcggcttctggaccgtttctcgaagccgaaacttgctgtgaagaggttctctgttatactccggtttctttagatatacatctccgatagatcttgagatctggatgagacccttcactcgccaaacgttatgttttagaaccacaatacgtggatcatcaggatgtgatgactgcagctcttgtctaacttcttcatagcatgcattatgctccgctgacaactgcgtggccagaacctctccagttgccttaacaagccttccaagaactgcacgggagtcgcccaggtttgcaacatagagagtcccagcacagattacaccaacaaggcaacaggagccaactgatgcaatctgaggcttgaaagaccattccttgatgactagagaaagaaagccctcctcagttttttttttttttttttttttcccggccgg

SEQ ID NO: 153274 - DNA, 156 bp, Zea mays
  Clone ID: MRT4577_71366C.1
agttcaacagagggagacgcgagacagctgacaataatcgagtgccatcaatggctctggcgctggcgcctctcaagtggttcgtcacgagcagcagaccggtcgtatgcctggggacgtcggcgaatatgaggtcgacgacgtcgtcgacgatct

SEQ ID NO: 153275 - DNA, 186 bp, Zea mays
  Clone ID: MRT4577_71367C.1
tcggctacaacacacacacacacacatgcataatggttggtacatggtaaaactatagcaagctaaagtcgatcgctcggctataggctgaccactattaccaagtccaacttcattggttcttggcttgtagatagaccggccagaattaaaaaacttgcttgcttctaaatatattattaagag

SEQ ID NO: 153276 - DNA, 934 bp, Zea mays
  unsure (1)..(934): unsure at all n locations
  Clone ID: MRT4577_71368C.1
cgagggccggccggnnaaaaantttnnaaaaaaaaaaaaaaaaaaaaaaaaaaaaaanaaaaaaaaaaaaaaaaaaaaaaaaaaaaaaacccaacttcagctgcgcctcgactcgtagcccgaaccctagccaccaagccggaggcgagagagcagccatggcgcggtgcctcgcgctcgtcgccctcctcgtactcggcctcgccgccaccgcctccgcggccgacgcgcccttcgtcgtcgcgcacaagaaaatttcgctctcccgccccaagccgggcgtcgagcgcgtcgccgtctccctcgacctctacaaccagggatccgcgactgcctatgatgtgtccattaatgacgactcttggccaacagaagtgtttgagcttgtcactggagagaaatcgaagaaaaaaagacagctcttcaggaggcatactcaactcccatcttcccactggatattctcgctgagagacctccagagaagaagtttgaatgggctaagaggcttgtgatgaaatacgggtcacttgtgtctgttgtctcttttgttggactgtttatctaccttgtcgcgagcccgtcgaagagcagctcaaaggcaagcaagaagagacgctgatctacttataggtcgcagttgacggtgtagctggtggttttgcctggaggaactcttggtagtttgagctgtgcgaaagcttttaagtttacatttactcaccactccatgaacggcaacgaagtattcatcagttagaaaagtgcacctataattttggttgcttataactttctatttgtcagagatttaactcgaaggacctgtaactaggaaagctaattttgcttggaagaacattttgataaaaaaaaaaaaaaaaaagtgcgtggtgccgtgaaattgagaggaaccatttggtgggacgttttc

SEQ ID NO: 153277 - DNA, 862 bp, Zea mays
  Clone ID: MRT4577_71369C.1
cggacgcgtgggccaggctctgggccgccacgcgggcgcacgcgcgctgacgaggcgaggcggctgcgggtgggtcccacgtgcagcctcacgagccgcgtcacgcccccggatggggtgcctgttcttcccagacgaggagagcgagggagcgagacgagatccattcccaacttcagctgcgcctcgactcgtagcccgaaccctagccaccaagccggaggcgagagagcagccatggcgcggtgcctcgcgctcgtcgccctcctcgtactcggcctcgccgccgccgcctccgcggccgacgcgcccttcgtcgtcgcgcacaagaagatttcgctctcccgccccaagccgggcgtcgagcgcgtcgccgtctccctcgacctctacataccgtgttcccacaaagacagctcttcaggaggcatactcaactcccatcttcccactggatattctcgctgagagacctccagagaagaagtttgaatgggctaagaggcttgtgatgaaatacgggtcacttgtgtctgttgtctcttttgttggactgtttatctaccttgtcgcgagcccgtcgaagagcagctcaaaggcaagcaagaagagacgctgatctacttataggtcgcagttgacggtgtagctggtggttttgcctggaggaactcttggtagtttgagctgtgcgaaagcttttaagtttacatttactcaccactccatgaacggcaacgaagtatgcatcagttagaaaagtgcacctataattttggttgcttataactttctatttgtcagagatttaactcgaaggacctgtaactaggaaagttaattttccttgggagaacatttt

SEQ ID NO: 153278 - DNA, 231 bp, Zea mays
  Clone ID: MRT4577_7136C.1
attcggttcgagggtcctctagagctgctgcctacctcagagctggctgactcgggtgaaaataaccatacccaatcctgcacgggtaccaatggcgactattgccaggatgccaataggattcgacgacgcatggcaatactgattgcctgtaggaaatggttgaacgatatcatagatagacaacataggagcggctagcacaacatgaacagacatgtggtgcctaat

SEQ ID NO: 153279 - DNA, 625 bp, Zea mays
  Clone ID: MRT4577_71370C.1
cccacgctttcgcccacgcgtccgcgcgaggaggccaccacgggaagcgcgacagccagcttgcggctccccgagcagtcgaagcagggcaggaacctcatgccgtaggtggaggaggtgagggagacgatgtggtggtgcgagatgatgcggcggcggtcgtcctcggcgccgtcctcctcgagcaaggcggacgacacgcaccccatcctggctactgctggtggtggtggtggtggtggtgctggggaaaaaaagaaagggaagaggagggaagaaattgaatggccagggtgcgcggtgggtgagtgagggaggaggaggagaggggaatttgaaattcaaatggagatggctcggtcgctgtgctgcagctgaaggggttggatttcaacgagtcaaagtcaatccacgtggaatgactccagtggaccaccttactccgactggcctctgctttgtgctttgagtgggccggcccaaacaactctgctggttcttaactttcaagtgttctaagtggcattttcatgagagatttcatgacactaattagtatgtcacatagatttttgatgacacgacactacatttattataaatggcgaaactagttttattaccc

SEQ ID NO: 153280 - DNA, 1017 bp, Zea mays
  Clone ID: MRT4577_71371C.1
cgaggccggccggagaataatgtgcaaaaaatgcattcatttgaaactttgaaaagcttcggctattacctggcggagtcgagatccattcccaactgcacctgcgcgcctcgactcgtagcccgaaccctagctagcaggtcggaggcgagagagcagccatggcgcggtgcctcgcgctcgtctccctccttgtcctcggcctcgcctccgccgcctccgctgccgatgcgccctttgtcgtcgcgcacaagaaagtttcgctctcccgccccaagccgggcgtcgagcgcgtcgccgtctccctcgacctctacaaccagggatccgcgactgcctatgatgtgtcacttaatgacgactcttggccaacacaagcatttgagcttgtcactggagagaaatcgaagacattggaaaggcttgaccctggtgccactgcttcacacacatatgtcctggagaccaaaacacagggcaggttccagggttcaccagctatcattacataccgtgttcccacaaagacagctcttcaggaggcatactcaactcccatcttcccactggatattctcgctgagagacctccagagaagaagtttgaatgggctaagaggcttgtgatgaaatacgggtcacttgtgtctgttgtctcttttgttggactgtttatctaccttgtcgcgagcccgtcgaagagcagctcaaaggcaagcaagaagagacgctgatctacttataggtcgcagttgacggtgtagctggtggttttgcctggaggaactcttggtagtttgagctgtgcgaaagcttttaagtttacatttactcaccactccatgaacggcaacgaagtattcatcagttagaaaagtgcacctataattttggttgcttataactttctatttgtcagagatttaactcgaaggacctgtaactaggaaagttaattttgcttggaagaacaaaaaaaaaaaaaaaaaaaaaaaaaaaaaaaaaaacaaacccagg

SEQ ID NO: 153281 - DNA, 936 bp, Zea mays
  Clone ID: MRT4577_71372C.1
gggtacctcgaggccggccgggcgcttcgtggagttcggcaacttccagaccagcggcgcctccatcttcgtccacgccatcatcttcttcgccctcgccgccgtcttcctcatcgccatcggggtgcacatcaccacggactagccgtatagccatagccgggaccgggatctttcttcgttacagtctgcctgtatatacatacatacatgctcagtacgtacgctttaccactgtgtcagtgagtatctctttgtatcagcacccctgctgtgtgcataccaagcaagtgtttatatgggctgttatcattcagtggcgcagcaaaaaaaaaaaaaaaaactgttcttcccagacgaggagagcgagggagcgagacgagatccattcacaacttcagctgcgcctcgactcgtagcccgaaccctagccaccaagccggaggcgagagagcagccatggcgcggtgcctcgcgctcgtcgccctcctcgtactcggcctcgccgccgccgcctccgcggccgacgcgcccttcgtcgtcgcgcacaagaaaatttcgctctcccgccccaagccgggcgtcgagcgcgtcgctgtctccctcgacctctacaaccagggatccgcgactgcctatgatgtgtccattaatgacgactcttggccaacagaagtgtttgagcttgtcactggagagaaatcgaagacattggaaaggcttgaccctggtgccactgcttcacacacatatgtcctggagaccaaaacacagggcaggttccagggttcaccagctatcattacataccgtggttccacaaagacagctcttcaggaggcatactcaactcccatcttcccactggatattctcgctgagagacctcccgagaagaaggttgaatggcgctaagaagcttgtgatgaaatacgg

SEQ ID NO: 153282 - DNA, 396 bp, Zea mays
  Clone ID: MRT4577_71373C.1
acatgggaatattcatattacatgtccgcttcattcgacatgaaataatgattacgtgttacacgatgaaaatgcactgcattctgaagtcggaagacaatgggaataggttaagtacaactaataatacttctttaatatcagcagcatcttgtgtcatcaactaggatcgaaactttactagcagtaacatctcatattgtttgagtgtcatcaactggtaaatgaaaacacaagtgacagccttccgcaagatatttctttttcaagaaactactacacgactattagtccgccatgccttagtagaaccttcgacgacacagcgaataactatattgacaaactttggatgacatccttgtattcacaccttggacacgatctatttcagag

SEQ ID NO: 153283 - DNA, 291 bp, Zea mays
  Clone ID: MRT4577_71374C.1
aaaaaaacacccgtttgtcaggtggaccacagtttcaaaaaaaaacccgctgaattttacaggggtctatttgggccttcatgccataccactcgcactgttttaggtgtagccctggaccccctttttttcaggaactacaccatagtgggggtgatgaagacaaagtttgtaatttgggggggagggggagaaatttctttggccggcccccaaaggttggtagggttgtgccattccttcccaaggtgttggattttgggggtggcctggggtaacgattccacggga

SEQ ID NO: 153284 - DNA, 1298 bp, Zea mays
  Clone ID: MRT4577_71375C.1
gccggccgggccgggacctggcgcggagaggagagggagtgagtcgagatccattcccaactgcacctgcgcgcctcgactggtagcccgaaccctagctagcaggtcggaggcgagagagcagccatggcgcggtgcctcgcgctcgtctccctccttctcctcggcctcgcctccgccgcctccgctgccgatgcgccctttgtcgtcgcgcacaagaaggtttcgctctcccgccccaagccgggcgtcgagcgcgtcgccgtctccctcgacctctacaaccagggatccgcgactgcctatgatgtgtcacttaatgacgactcttggccaacacaagcatttgagcttgtcactggagagaaatcgaagacattggaaaggcttgaccctggtgccactgctacacacacatatgtcctggagaccaaaacacagggcaggttccagggttcaccagctattattacgtaccgtgttcccacaaagactgctcttcaggaggcctactcaactcccatcttcccactggatattctcgctgagagacttcctgagaagaagtttgaatgggctaagaggcttgtggcgaaatatgggtcacttgtgtctgttgtctcatttgttggattgtttatctacctcgttgcgagcccgtcgaagagcagctcaaaaggaagcaagaagagacgttgatctacttatagttcggcgcagttgaagttgtagctggtggtttttgcctggaggaactcttggtagtttgagctgagcgaaagctttaaattttacatttactcaccacaccatgaactgcaacgaagtaagcatctgttagaaaagtggacctgtaattttggttggttatttctttcctgttttcgtcagagtcttaactcgaaggacctgtaactaggaaagttaattttgcttgaaagaacattttggtaaaaaaaaaaaaaaaaaaaaaaaaaaaaaaaaaaaaaaaaaaagaataaaaaaaaaaaaaaagaggcctccgatcatgctacattaagaaatgccgttgatctacttataggtcccagttgccggtgaagctggtggttttgcctggaggaacttttggtagtttgagctgtgcgaaagcttttaggtttacatttacccccccccccatgaacggcaacgaggtattcaccggttagaaaagggccccaaaaattttggtggctaaaaactttcaatttggcagagatttaactcgaaggccctgtaactaggaaagttaattttgcttggaagaacattttgat

SEQ ID NO: 153285 - DNA, 393 bp, Zea mays
  Clone ID: MRT4577_71376C.1
caaaacaacaaacattcttttgactcgccggaaaaccaaaaatatatgttggaaacctttgccccacggacacatgccaaaagaggtgaggggctcggaaagaaacccgggaaaaaaaattaaacaagggcccaaaaataccaaatactatcaaaccctgcggggggcggtccccacggcatcaaagcatgaaaaattcaagaggggggtgcccaccgtaccaggcaggaggaacaggttctggtttgcctacaagggacccctcctcacacgccttttcttgggagggaggggggccctagccaaccaggcaaaagatttttttgcctgcgagggcgacaccacgcagcacaaaatgctggtgcacaagattgcaaaccccattgatccttg

SEQ ID NO: 153286 - DNA, 353 bp, Zea mays
  unsure (1)..(353): unsure at all n locations
  Clone ID: MRT4577_71377C.1
tatacgtccatgcacgcgcgcgtacagcttgcatgcctctctagacagccgcccttcctttttttttttttttatntatattttccccaaaaggggccatttttttatttcagagcagccaaactactgcacattaattatgaaggcaccttaaacacatttacacgctttagatttcaaaactatgcacccctaaattgtgaaaaaaccactaaaacgccccccaccccacagaccttatgggcgactatcaaatgaaatgggttcaaggtacacaccccaagggaatgaaacaagttaaattacaatgctcttaaaaacagcccggacacccccaaaattccttgaataac

SEQ ID NO: 153287 - DNA, 562 bp, Zea mays
  Clone ID: MRT4577_71378C.1
gccccccctcgagttttttttttttttttttttttttttttttttttttttttttttttttttttttttttttttttttaacggggaacagccctcattttttttagttccattttggggttatttggaggcccttgttttggctggggtaaatccgggacaaaaaaatacctccaacttgggggggcccgttttgccctaggacaaaaaaaatttttttttgttccccccccttggaccaacaggggggtaaaactttggacgggctccctgggggaaacttgttttgcccccctgcatggcttagtacccacccttgatttatttttgcttcggccgttttgttcacccggaaaaataaccctagggcccttggggcgcccttttcctccaaaatccagaaaacttcggggggcttttgtaaatccccagagctttccaaattccaataaaactttgggggggcagcttatccaaaatcggaggctccgaatttgattccatcaaaaacaaaacccaaagcgttgtttggttgattaaggcaaccaaacggttttccttt

SEQ ID NO: 153288 - DNA, 389 bp, Zea mays
  Clone ID: MRT4577_71379C.1
ggaacaggaatcaggattaggatgcccccattaactggaggccttcttcccggactccattggccacgggtaggacatatagcaaacacaaagggcaaaaaaaagaaaggaatagatagataaaaaaacactaggggctagtacgtactggtgctctcctacaagctacaacacaaacgcaacctggtacaacgagatggacatcgacatggacggggggaaacaacgccctgcaagcctgcaacttcactcatgtcattctcaagctgagggactggtggcactgcgccaaccaaggggcgtgctggtgcctaaaaaccccgtcgccttttcctccaagggcaaacgcaacggccctttggcacgccccccccgccgccggcccgtcg

SEQ ID NO: 153289 - DNA, 509 bp, Zea mays
  unsure (1)..(509): unsure at all n locations
  Clone ID: MRT4577_7137C.1
agagcaccaaggacccccggcgcccgcggggggggccacangcggcccgagcgagcgaccggcggaccggcgccacgccggaccacccccaaggcgccaggcgnagcccgccacncncaccaancaagngcgcangacggagcccgacangcagaacccaacngccngcgagcccnncgcagaggccaaggcgggggacccnggngcggcagcagggacaaaggacnacgnacacgngcgcanccagcagcgcaagggccgcaagagccngacnaccgnccagggagngaagaaggagnncagcnacagcaagaaccacaaagaccncaagaaagagcnccgcngcaaggggacagnggnccaggacccagaacgnggacaggncanccagccccagggngancagaggaagaacgacacgaannaccacgaccaggccggcaccgcgaagaaggagcacaccaagacacaggganagggagcaaccggcggagccaaagcaaaccaac

SEQ ID NO: 153290 - DNA, 801 bp, Zea mays
  Clone ID: MRT4577_71380C.1
cctcgaggccggccgggaatgtttgctccggcctcccggtcgtgagtggaccggatcatcacatatctgattccatggcgagctcctcgaaactacgacctgccccctcgctttttttcacagcttcacccgatcaacacgggaccacgagcccggcacgcacggaacccacccatatctacactctccctagcgacgcgctgcatatgtctgccccacccacactccggtcggcccattaccctctgatgttgcatgacgagttcttggctcgtgcttggttgcgtattatctaaataactgaaagcaaatatgggcacgacagctcgcccatccatctgctgatgcacaacaaggttacattggagaaatagatacaaggactccaattcactctggtaaagctagcactgagattattcgcagaaggcacgattttcatctgacaaatcagatgaaagaaagccccagtgctcctgaaacagagaggagtttagccaatgagacacagttgcacatggcccagagagagttgaatacatacaaggaacagctcagctatgctgagactgcgtgaggaccggctctctctgagctagacaaagctaagaaaactgctgatcgactagcggtcaagctggatctgattaacaaggccaaacagttggacatccaggcaacagaggatgcaagacctcaaatcgcgcagcttcgaggtgccagcatgagtgcatgtctagggacagatggtgctctgaagcaggaactggaaagtgcaaggtagcagtatgctgttgcttt

SEQ ID NO: 153291 - DNA, 465 bp, Zea mays
  Clone ID: MRT4577_71381C.1
gattacgttgtactgcataggcaacgccagatgggctcaggctgttaattattaagcagccatattaagtgggacgacggcgtcgtacatcaccagaaccgtatgtatcctggtgctgacacgtggtccgcggctgcggggggttatcttgcccagctacgtgtgcgtggagcccgtggcggcgggttaggtatcggcggcggcgctttggaccgtgaccaagcagcgagagtaggggtaggggtatgccacagctggagggcgcacctttcttatcgtcaaagggacccaccaatctaacagcaggggacccacataagtgatgcctggctgggatcaatcaatctgctggatgtggaactgtctactatggaacatatgcaccgtgcacgagcacgagtggatgctactagctactatgtatgtcttgctcctgtcacaagggcagagcttatgtactgtacg

SEQ ID NO: 153292 - DNA, 341 bp, Zea mays
  unsure (1)..(341): unsure at all n locations
  Clone ID: MRT4577_71382C.1
cgcgtnnccggcgacacccgcacgcctcgcttcggagcttggagacttgtgaggtcgttaggcgccttaggctgtgagctctggcggtagtatagaagaagaggggaagaacggtatgaccgaacgaccggctttcttttaggttgagcttagatacccnngtgactanngtctcgtatttagtgcgactttcgttataccgtnngctatggtctttagnnngccgccgacagacctgagaaagtccgaagtgtctcgaacacacactatttgtactggctcactgnnnntgtctgaaattgaacctgacaaaaaagacactttctgnnatgttcctggag

SEQ ID NO: 153293 - DNA, 388 bp, Zea mays
  Clone ID: MRT4577_71383C.1
cacgcctgcaggagccgggatgctatagagcggtcgacctacgcgttcgtatggagaggagcggagcaggagaggagggcccttgagcgagacactacggtgtgaaagacgtagtacactaacaagcgctgacgagaaggacggtatgaagctagatgatgagcgactacaaggcggacatggtgaacgacgggacgcaggattgctgacctgaatgcaatggcccgtactaaagcttataccaaggaggggcatggatggctcgattagaactgtctgatgcatacccttacaaatccatcatccattgagcttcatcaacaagatacatgactcgaatgtcgatgacatgtctgtctgtgtcagcatacatgtcataaaccagaca

SEQ ID NO: 153294 - DNA, 180 bp, Zea mays
  Clone ID: MRT4577_71384C.1
tcgcgcattagtcatacttgagctcggaagaggctcgagacgcgttaggtctcatcactcgtcatgttagtatggctcgtactcagggtaagcccctcggtggtgagtctgtgtcatgaaaagatgcctgaaatcagggttgtgttgaggagcacattgtttccgagggttggcagcatg

SEQ ID NO: 153295 - DNA, 291 bp, Zea mays
  Clone ID: MRT4577_71385C.1
ctcacacgttctccatcactaaaatctcatttatcagcaatatcttcatagaaagacgttgcgcgttatcacactacttgtgagggcacttataataactgtaccacccaactaatcattacctttgacaatagaaacactctcactttacaactttataatgaacatcacacagaatttatctacagcttacctttccttcttaagactattgaaaaagctatacacgttcattaacatttatcaggtgtcgcgaaccctgcacagttattataatgccactttacacgg

SEQ ID NO: 153296 - DNA, 423 bp, Zea mays
  Clone ID: MRT4577_71386C.1
ggtaaacaattgaatatatagatataaagtttgacactcaacaaataagcatgaaaattacatacattaaacataaagattgcaataatactacttatctggtctgcgctttctcaacgccataaaagtttcaattatatcttcttcattcacttcgaagaaaatatccctctcgatgtatgtaacaagacaatcatccaaaagactatcacacatcttatttctcaatttagtcttcaccaaactcattgcagaaaatgctctttcaacacattttcttcatttatcatctcttcctcttgttcttgatgtgtcgacgcttgagtaacatccggagataatgaagaatcaataaacttttgtttctttgcagcatgattgcgaaaaagagaggcaatatctctctgcttcttcatattttag

SEQ ID NO: 153297 - DNA, 564 bp, Zea mays
  Clone ID: MRT4577_71387C.1
cgagtacctataatcatggtgcgtctagtagcttcttcagctcgtttagcctcctctcgggcgtcgtgagattctttctcactctttttaatgacttcatcagccatttcacgaccgcccttcatccaaatatcagagtaaaacctttcgcctagtaaaaaagctttgatcgaggggtccttggtgtcgccagctgagaaaatatattctggctgggctacagccttaacatgttcgcaacaggccttttctaaaattgtcgggacccctcgtgcaccggcaaatgcgcagaaatccccgcgatcgtcgaatatttcatcgaaagcttcggcttcttcgccaatccactggataactccttcgggatcaccgcgaataattttttgttccgaagagtatgctcccacctttgcaaaactatctttcagtttcttcgcgtattctagggatgtttcatagcatctctccttggaatcccgaagctcttcaacattcttttgcaccctggatctctccatttcacttatttctttcttagcctttgcaacttcgaaattttcattc

SEQ ID NO: 153298 - DNA, 383 bp, Zea mays
  unsure (1)..(383): unsure at all n locations
  Clone ID: MRT4577_71388C.1
tcgagggccggcnccgggaaaaaaaataaaaaaaaaaaaaaaaaaaaaaaaaaaaaaaaaaaaaaaaaaaaaaaaaaaaaaaaaaaaaaaactgcactctactgctcaggtcgaaaagtacctgggccgagcgaaaacgaaaaaacaagaggaagccaaaaggaaaaccgagttcgggagggagcggatggaaagggttctgctaccgctattgctctcggccctcatcgtctccggcgtcgcgaagtcgccggcctcgtcgccgtccgggtcaaaggttcctccggtcagcgcctcggttccgcggggttctgtcgcgccaccgacaacgggggtctcggggccgaaggcctctgtcggggaaccgaccaaagttggggact

SEQ ID NO: 153299 - DNA, 445 bp, Zea mays
  Clone ID: MRT4577_71389C.1
gacttctctaccctaacgcctagctgcctgcgttgatgaatttgtactggtgatccgctgtccaactggtgtagtcatctcctgagttctgatccaagatggatcttcagtattacctccatgacaacagcaaccaagtctacaccaccaataatgataccctcttccgtgtgcctactcaccatgttcaacaggctcacttctcaccatatgatgagtactctcaccctctgtatctgacgatgaagagactagcatttctggcaaaggaaaagccagtgactcgagaactgtcaccttcaaatttccaaccatggatgtgcactatgtgtcacgtgacttgatgattgaagtcttgaaagtgataataggtatctgaagaaaatatcaaacgctgctgagggactcactactgacatatcatcgcgttgcatactctatatga

SEQ ID NO: 153300 - DNA, 190 bp, Zea mays
  Clone ID: MRT4577_7138C.1
ttaaacatacatgcaggtctccacatacgtgggttagccatacaacagaggacattccacccactatcatctggcacacactgatgtcactttccagcttaacaactaaaccatacatcacatgtcgtcgccttttccagtcatagatagactaacctacactaatctcaacaggattttgtaccaggtg

SEQ ID NO: 153301 - DNA, 298 bp, Zea mays
  Clone ID: MRT4577_71390C.1
ttcatcaaatgaaacgcgtgtgcttccttcttcatcctttcttccacctttcatcacttgtcaaaatactcttggcctatttcatctaacccttattaattcatctacttttcatccagggatgtattcactttccatattgcattttgttccaataaaaaataaacatgttcatctaattttttcaaaatatctttatgatcaatcacctttttaaacctttatattaaccccttaaagttacctttccctgttttttaagttttttatatatacaccactttttattcccacattc

SEQ ID NO: 153302 - DNA, 298 bp, Zea mays
  Clone ID: MRT4577_71391C.1
cacgcctccggaagcacggacgcgaatgaggaggagcagcagcagcaggcggcgccgaggagcggcatcccactcagtgcttgcaaccatgggtaggggattgaagaagcacttgaagaggctcaatgcgcccaagcattggatgctccacaagcttggcggagcttttgctcccaagccatcttctggaccccacaagtccacggagtgccttcctctgatcctcatcatcaagaacagggtcaactttgcgctgaagtaccgtgaagtcctttctatcctgatgccacgccatgta

SEQ ID NO: 153303 - DNA, 640 bp, Zea mays
  Clone ID: MRT4577_71392C.1
ctcgagccggccgggagaccccgacttcctctcctccctcctcctggtccgagtcacttcctccacagctaaaatagaggcccctcctcttccagtcttcctcctccgcgctccaatcttcccagcggcacggtttacgtgtcttgcaggagtatcacggaggttccttcgctggaggttcttgtgctgccttgagcgatttggtgccgctcgctgcatgtgttgtggggttgtgagttgtgactgctcatacaacggccgcgtggagagtctagccatcaaggtcgaggaggagggaaaggaaaaggctcgcgtatggacgggcagtggctgggggaggagatgccgacgtccatcctgaagtgcttcttgtactgcacacaaccccaccgtcatagatgcacattctcgccaggacgaatgaacgattgccgacacgacggctgacaccactctgagatgaacagagccacagaacttcaatcttgccgacctctggtaacagtactatgaatgtagtgtgtaccgcgccgcagctacggtgcaactcccacgaggtgaccgagtagatcagtactatgctgcatacctgtcacgtatgcactgtatacaccaacaaggcactgactgcatccagaag

SEQ ID NO: 153304 - DNA, 370 bp, Zea mays
  Clone ID: MRT4577_71393C.1
cggtgcaaagtaaaaccttaatataaaagcttacatatacaaaagacatatgctaaaattaaaacctaatctatatatcaaagatctaaattggtaattattgacaaaaaaacactgaactttaaaaaaaattcataccaatgtaacccttccaagagactaaagataactatcattctgaacaatttatgaactctctgcacgcattgctaaagatgaacaacagccaattttaataagctagccataacaatacattggaaaaaacaagttaatgacacaccataacaccattgagtgttctttgaggaagaaactaagcagtatcataatgatcactaacaaaaataattacttcacgaaaactaaa

SEQ ID NO: 153305 - DNA, 350 bp, Zea mays
  Clone ID: MRT4577_71394C.1
gggcctacaaatcctcgagaacgaggggcaaattctcacaacgggggttgcacaatcttccagggttgatctttcaacaattcggccgattcacaaaattgtttgttcataggatttccagatcatccactaaatatggggaagtaacgatcttaccgggcaactacagatgctactccaacaacatccaccgctattgctaacttttactcgcaccacataacccttacataagcgctctgtgttgtataggtaaaaagacaatctcttcctaccctgcacacaagcagataggttattaatgtttacgaaacttgcctcttacgtattaaaacggttgcacggtctgt

SEQ ID NO: 153306 - DNA, 1123 bp, Zea mays
  Clone ID: MRT4577_71395C.1
attgggtacctcgaggccggccgggaagcgtttcccgagcgatccgatccgatccggaactgtgccggccagccatggcgactagggttttgctcaccgccctcctcctcgccttcctcctcgtcgccacccctttcaccgcccgaggtttccagtgatggacctttaagccctgctcctggtgtagagacagtagttgtattccccaaaaatgctggcaaaattgtactagcaggtgaagaaactgaattactagttggtctgcaaaatgagggtgaatcgactttgaatgttgttgctgttcattcaactctccatcttccttttgaccataatatgtatggccagaaccttactgttcagaatttcttcaacgcatcagttcctgtttctgtgcaagcaaccttcccttataaattcgttgtgagcaagttcttgcagcctggagcttatgatctggttggttacatagtgtatgagatcgaccagcacccttaccagaatgtattctacaatggcactattgaggtcgttgaggctggaggcttactcagtgttgagtctgtgttcctcatcacccttggaatcgctcttcttggtctctttggattatgggcatatggccaggttcagcagctctcgaagaaaacgaagaaggcccccaaggtggagctcggaactggaacaactgatgccaacatcgatgagtggctggagggcacttcgtttgtgcagagaagcaaatccaagaagaagcagacctgagctagctctccagagtagttaatccttggaggatctagaatgaggcatttgagggtagcccttcacaagtgacttctgcagaaagatagatgcctaaggaggtgctgaaaaatgtagtttcgtggtcgaacatctttgttgacaccattttcgaccttgtgtacttcacatggaacttttcttcaaacaaagttttgttaaaaaaaaaggtatatgctgttgtctcaaaaaaaaaaaaaaaaaaaaaaaaaaaaaaaaaaaaaaaaaaaaaaaaaaaaaaaaaaaaaaaaaaaaaaaaagggaggccgcatataaaaaatcaaaacctaacttccgcggaaatgccgacgccataaaa

SEQ ID NO: 153307 - DNA, 499 bp, Zea mays
  Clone ID: MRT4577_71396C.1
acaaacgagtaaatcaaaagggacgggaccttaattaataataaccaaacagtctgcacctagtacgaagcttcagattacaacatggatgatacgccacaaactcacaataggactggaccgctactgacggtacaccgaggcctgaccggcatttgcaggaggaaaaaacgggctgccaaattgggaaccacatacaaaattggcaaatgacccccatccggacgatggttatagcggtgcacctctgcaagtgggcataagactaaaccttctaccagagctgtggatgccgggggggatgcccttcatggtgatgaacaaccggccttccaacgaggggcaggactgtctctccaggttagctcgacagtccagggggcttgttctcctggagaactccttgtactcggcatgaggtgccacaccttgaaaccggtgccccttatccggaagactgtgcagcgccaggaacaccttcagggaggagatgtagggg

SEQ ID NO: 153308 - DNA, 1384 bp, Zea mays
  unsure (1)..(1384): unsure at all n locations
  Clone ID: MRT4577_71397C.1
atgttccaagcagttccggacaaaaacgaggggaaggaaaacccaaagccagcagctgtctgcgtcgccgtcggcttcctatcctactgcgtgcgtggacctcgctgtgctcacgcggcgaccggtggctcctcctattgctacaactacttgtactcgcgcccgtcccttgcgcacgcaacgcaagcgcagacacgagcgatccgatccgatccggaactgtgccggccagccatggcgactagggttttgctcaccgccctcctcctcgccttcctcctcgtcgccacccctttcaccgcccgagttgctagagctgattcggaggaagatgctgctgcagctgaggttgttgaaggggctgatctaggtattgtgggtgatgatacacaggtttccagtgatggacctttaagccctgctcctggtgtagagacagtagttgtattccccaaaaatgctggcaaaattgtactagcaggtgaagaaactgaattactagttggtctgcaaaatgagggtgaatcgactttgaatgttgttgctgttcattcaactctccatcttccttttgaccataatatgtatggccagaaccttactgttcagaatttcttcaacgcatcagttcctgtttctgtgcaagcaaccttcccttataaattcgttgtgagcaagttcttgcagcctggagcttatgatctggttggttacatagtgtatgagatcgaccagcacccttaccagaatgtattctacaatggcactattgaggtcgttgaggctggaggcttactcagtgttgagtctgtgttcctcatcacccttggaatcgctcttcttggtctctttggattatgggcatatggccaggttcagcagctctcgaagaaaacgaagaaggcccccaaggtggagctcggaactggaacaactgatgccaacatcgatgagtggctggagggcacttcgtttgtgcagagaagcaaatccaagaagaagcagacctgaagctagctctccagagtagttaatccttggaggatctagaatgaggcatttgagggtagcccttcacaagtgacttctgcagaaagatagatgcctaaggaggtgctgaaaaatgtagtttcgtggtcgaacatctttgttgacaccattttcgaccttgtgtacttcacatggaacttttcttcaaacaaagttttgttaaaaaaaaaggtatatgctgttgtctctgtgaaaacaaaaaaaaaaaaagcggcccgctgtcatggccactccaggatttttctttgtgggttgtgtagcagaagtcggcaggcaagctgttgttntaagtcggatgacttgctggtcatttggctggncgacttggacgatg

SEQ ID NO: 153309 - DNA, 345 bp, Zea mays
  Clone ID: MRT4577_71398C.1
ggttaaccccatgatattgaacaaagaaaaaggcaaagggacatccaacgggcattacctcaaacacatgttgtgcatccagaacagaagctccacttctagatgaaaggtcccacaaacagacataagcctctatctcctgagcaaaacatcggcatgttccgtcgccatcgccgagatggtacacattcacatcgtaaggaggactaagtgtattgaacacaggagtccctctaataatatattgtcatcaagtttaagtaagctctaaaaatgttaattttttgcgagaccaaaaagttggatcatatgtaattcatactgtataatgaaatgatattattt

SEQ ID NO: 153310 - DNA, 845 bp, Zea mays
  Clone ID: MRT4577_71399C.1
ccggccgggccgggacttactactttgtacccgcgccgctcacgcccatccatcccttcgcgcacgcaacgcaaaaacaagcacaaacacgcgcgatccgatctgggccggccaagcagccacccatccatggcgactagggtttggctcaccgccctcctgcttggtttcctcgtcgccgcctcccccttcaccggccgagttgctagagctgaatccgaggaagatgctgctgcagctgaggttgttgaaggggctgatctaggtattgtgggtgatgatacacaggtttccagtgatggacctttaagtcctgctcctggtgtagagacagtagttgtcttcccaaaaaatgctggcaaaattgtactagcaggtgaagaaactgaattactagttggtctgcaaaatgacggtgaatcaattttgaatgttgttgctgttcattcaactctccatcttccttttgaccacaatatgtatggccagaaccttactgttcagaatttcttcaattcatcagttcctgtttctgtgcaagcaaccttcccctacaagttcgttgtgagcaagttcttgcagcctggagcatatgatctggttggttacatagtgtatgagatcgaccagcacccttaccagaatgtattctacaatggcactatcgaggttgttgaggctggaggcttactcagtgttgagtctgtgttcctcatcacccttggatttgcacttcttggtctgtttggattgtgggcatatggccaggtcagcagctctcgaagaaacaaagaaggcaccccaggtggagctcggaactgggacaactgatgccaacatcgatg

SEQ ID NO: 153311 - DNA, 140 bp, Zea mays
  Clone ID: MRT4577_7139C.1
cttgatgttttcttttacaatgtatcttattttttgagctacaaactctgggggcaatgtattcaaatatttcgtgaaaccacagctcaaaacgattgggcgacctgtattactgtaaaaagaaaccgtgaggggggccg

SEQ ID NO: 153312 - DNA, 308 bp, Zea mays
  Clone ID: MRT4577_713C.1
cgggtctggaattccgggtcggaccacagccgtccgccaacgcttccggggccccttggccacagattaaagtttagggaggagtttggaatcaagccatggacttttgtccaaagactgggaaatccggttttaatacctgttgggggtcctaataaagaccggaatctaagagtttgcaccaagatagttttggattttgtttaaccagaaaacattcataaatgttttactttaaccgaggttttccggagacttcaagggggccccagggcaaaaaaggaaaaactagaggtgataaaaataat

SEQ ID NO: 153313 - DNA, 831 bp, Zea mays
  Clone ID: MRT4577_71400C.1
cattgggtacctcgaggccggccgggaagcctgctcatggaatgggcgatggacacgctgctgcaggaggaggagcctgcggcgctctacgacggctgcggcgaggcagtagccgtcttcccctcgttgcaagggctccgcgacgcctcccacgcggcggagatggtgcgggagctgatggccgccgtcgaaaccgacgacgcggcaaacagctggacaacgagcggttctggcggcgaggtcaccgacggcggcagcagcggggccactgaccctgcagcccccgcggctgcggaggccgcggatttctacggcggctccgggccgccacactcgcccaactcgttcccgagcggcaaaaccaacaccagtctgcccacggtgagggtgagctggaacttcgtcaccggctcggcggcggcgcagcctcgcagcgacggcgtgctggagaaaggcgccgtcccgatacgccgcgtgccgccggagctggcccaccgccgccggtcgccgccaccgccgccgagaagagcccaccacccaacacgcggcatgggagccgcgtcgtgcacgccggaacacatcgtcgcggagcgcaaacgccgggagaagatcaacaatcgcttgatcgagctctccaccgtcatcccaggactcaagaagatggacaaggcgacgatcctctccgacgcagccaagtacgtgaaggagctccagcagcggctcaggcccctggaaagagctgccgccgccgccgccggcagcagcaggaccaaagcgccgacgacgacggacgagaatggcggctcccggtcgccgacgtcggcatcgtcg

SEQ ID NO: 153314 - DNA, 283 bp, Zea mays
  Clone ID: MRT4577_71401C.1
ccaaaatacctccccccccccccccccccccttgttggtttgtatcggaagcctactaggttccaacagctattcccaaagttctggattaattggggagggggggggggggcttttcatctcccccacccacttaatttacagcaccccaccccggcgggaagtcaggtgcaacatccacagcccccggggcgaagccggggattccctactccaaagtgggtcaactgaaaaaaaagccccccacgccatatctcccgaacctgattggagtcccccgacg

SEQ ID NO: 153315 - DNA, 1591 bp, Zea mays
  Clone ID: MRT4577_71402C.1
gggtacctcgaggccggccgggacatccttcctcctgtcctcacccaagccaagcccctcggatcggatccggtctcctccgtgtcccattcgccaggcagcggcgccacaggagacggagacggagatgaagctgtccatccagtcgctcgccaggaagctgtccctgccgtccccgaagcggggcggcggcggcatcgtcgaggacgggaagaagaagaagaagcgctcgctgtcgcgcggcgaggcgccgtcgttcgcgtcctcttcttcatcctcctcctcctcctcctccaccacgacgccgcggtccgtgctggcggcggcgccggcgctggatatcccgcgtggggagctggagggcgtgctgcgtcccgtccgggctcctccctgtcctgctaggctgctggctgctgctacttactactttgtacccgggcctctcgtactcccggcgcccgtcccttgcgcacgcaacgcaagcgcagacacgagcgatccgatccgatccggaactgtgccggccatccatggcgactagggtttggctcaccgccctcctgcttggtttcctcgtcgccgcctcccccttcaccggccgagttgctagagctgaatccgaggaagatgctgctgcagctgaggttgttgaaggggctgatctaggtattgtgggtgatgatacacaggtttccagtgatggacctttaagtcctgctcctggtgtagagacagtagttgtcttcccaaaaaatgctggcaaaattgtactagcaggtgaagaaactgaattactagttggtctgcaaaatgacggtgaatcaattttgaatgttgttgctgttcattcaactctccatcttccttttgaccacaatatgtatggccagaaccttactgttcagaatttcttcaattcatcagttcctgtttctgtgcaagcaaccttcccctataagttcgttgtgagcaagttcttgcagcctggagcatatgatctggttggttacatagtgtatgagatcgaccagcacccttaccagaatgtattctacaatggcactatcgaggttgttgaggctggaggcttactcagtgttgagtctgtgttcctcatcacccttggatttgcacttcttggtctgtttggattgtgggcatatggccaggttcagcagctctcgaagaaaacaaagaaggcacccaaggtggagctcggaactggaacaactgatgccaacatcgatgagtggctggagggcacttcgtttgtgcagagaagcaaatccaagaagaagcagacctgaggctctccaggctagttaaatccttttgaggatctagaatgagacatttgagggtagcccttcacaagtgacttttgcagaaagatagatgcgtaaggaggtgctgaaaaccgtaaacatcttcgttgacattttcgaccttgtgtactttacatggaacaaaattttgttaaaagaaagtatatgctgttgccgctgtggtttctgatcttaaaaaaaaaaaaaaaaaaaggcccctacgcaaccgcccacaaaaataaaaaaaaaaaaaaaaaagcggcccc

SEQ ID NO: 153316 - DNA, 836 bp, Zea mays
  Clone ID: MRT4577_71403C.1
aagtcaatagcaaatgcttattttctgactcataagaattacttatttcgtggctgatatatttgtctgcacacatttttcattttactatatgtttggggatctggaatatatagatctctggctccgagtgaactgcagtgaactatgcttctgttattactgtacctgtctccttatggcatggctgcaactgaacaatagccccctgttttgtttgggatctgctaacaactatgaccaactacaactggctgctctttcgtttcactgtactttgtggttcacacacacacattcatgcacccacagcttcgttattgtttgctgctttgtagtacgtactcaagtatctaaccttaccttcctgcagctcctccaagaccaccggaacagacagttcggaacaaatgagggcggacagcttacttacctggcgctgaactgaagggagagcgacgctgccttggtcaggccttctttcacttgtgcagtgggatctgcgtcctgctgtctcggacgcccattttgcccacgagctggtcgtcacgtgctgtcgctttttgtctgggaaagatagcgtactgcttgctgtatgatactttcatctgtgttcggaagtttgtagcgcttcatatcctggaagggagtaaagaaaatgtccatgctgtccggtgagaatttctttccccgtgctgtgtctgcgagtcaaactaactattgagcgatatgagcatgcattggcatcagtttacctgccataaacctgaaaaaatactaaaaatgaagaaaagaaaagcaaaaaaataaaggggcggccgccgactagggagctc

SEQ ID NO: 153317 - DNA, 251 bp, Zea mays
  Clone ID: MRT4577_71404C.1
ggggaggttagttaaaacatgtcctggtgaactgttatttcctttgtcaccaactttcgaagcctactataactagtatcttatgaattgagattgtgaccattagtaagaatcctttttggttgaggaaagtagacccatagataagattctgataatgtatttgatttcaggctggaactggtattgcagaactcattgctcttgagatttcaaaacagacgtcggctccaattgaagagtgccgcaag

SEQ ID NO: 153318 - DNA, 143 bp, Zea mays
  Clone ID: MRT4577_71405C.1
agtgcccgtcgtaagcccgaatcgataagccaggacgcatactctctatcaggcgaccgactacctgaattgggaaatacactggagccattggcttaccagcctaaaaaaagaagggctcacatgttttccccaattaaggg

SEQ ID NO: 153319 - DNA, 1063 bp, Zea mays
  unsure (1)..(1063): unsure at all n locations
  Clone ID: MRT4577_71406C.1
gatgcaaccctccaggtttcatcgaatgattgttatgaagctgnaattagtatcgcgtcagaggccagtaatttatcattttaaaaactggcactacatcttgaaaaaaggataatttatcattttattacgttgtatacggactaataatttatcattatattataccgtatatctactaatattttatcattttattatgttgtatactgagtaatagttatatgtgctagaatttttactcttcgtagcatatgacaacgtttgacttctcttttagggacttgagaaatatgttatgacaaagctgtttaatcgggtattcgcatcagtcccagaagatgtgaagagtgatgaagaactttttgagaattaacttgtacgagaatgaaacatcatggctggtatgagaattaacttccctcgttttttggcatttttttgcttgatgtattgcatctctggcaagctgcacacatgaataggtttctggcagaaactgaaccaggattgaattgtacttgtgtcttgcgttgggttggtcttttggatctttctatgtattatgtctatactttgtagactactggccagccactacattcgcgtattactcttccattgtgagtttttgctcttcactatccgatgcccaccaatataagcagccaaggcatgcatacctaaccttctcgaggacaattcaggaggtttgcttttttcctccctgttttatactggcatactactatatacttcattgatttttttagcagggtaaaaaatataaagatagatttttagaaaataacatatagttcataaaattatttcagctgatgaaccttttagagttcttttattatataatgccattaattgctaacagggtgcatgtcttctatttctaggtatggtgcataaaaaagtaggaaccacaatgagattgtgatgctgctcagggcacatgccttttgtgtgatgtctgaatgttcatagcnccttgtgctcctcatccacccattttaagaatatgctcacgtctcatgaattgtgtctttct

SEQ ID NO: 153320 - DNA, 275 bp, Zea mays
  Clone ID: MRT4577_71407C.1
atactagtgggccagaaccatatagaagatgaggactaactgatcgcaagttgttaacactttgtaagacatgactgtcaacaggggactgaggctatataaccagccgcgcttgatgggaacgaatggtgcgacgtttgtacacaaccttcaataaggtgccatagaggccggccattaaaaacctgtcctcgaaacgttgggtatccagtacgattagaaaactgtacagagcctactggatccacaataaggccaaatagctttatcggaaa

SEQ ID NO: 153321 - DNA, 457 bp, Zea mays
  Clone ID: MRT4577_71408C.1
aagaatagtcgccattgcaaccggtagcattattgcagggaaaaccatgcttcgcaagcatccaggaaattacattaagggggtgacaacaaaaaaaaacatggtgaacaacaactttccctgctttttgttgggctaacgatgtgttcaattcatccaaaaggcttgggaaacaaagaaacaatgttttatggtgtatcaccatgttcagctttaaaaccgtagtacgggctgaccttgggagtatatggtatcttgtaggccctataagagaacaccccattcacactcaagggcatcgtagaagcaccagcctccgacaattcatgccaacccctgaaatttggccctgtgccgggcaaggcgccagctgcaccgctccggggaaggcgtgccgcttggccacaccatgtcgttgtttacgagcggtcggactttttttttttttttgaactac

SEQ ID NO: 153322 - DNA, 403 bp, Zea mays
  Clone ID: MRT4577_71409C.1
attcggctcgagggtggatgtgctcattttttccctgcactgcaaagcatgcgccgggggggtgattaatcacctctgcaagatggaaggcgcgacttgcctcaacatccacttcgcgtccaagaaggtgacggtggtcgtcgacctcacgcccatgggcgtgctcagcaacgcgtccaaggtgaacaccgcccagctcttggcggctccgccggcgatagccgcctgaaggaaggacgagaaggaaactgcggcccggccaccgcatcagcagtcttttaggcccccctatccgttgcggatggccggccctggctgtcggctgggggaggagagtgccatcctctcttgagttggtgtccgtccgcaccgagtctgtcactgtacgcaatgctcgcggggg

SEQ ID NO: 153323 - DNA, 218 bp, Zea mays
  Clone ID: MRT4577_7140C.1
tacgggcgtaagaagacgacagaacggttgaacgacgttagcaaaaggctgccacggggaggagatccacagtgacggcggctagaccaatgccgtccgccagtcagcgaacatctggctaatggctcgacgtcaaaatctttattacgcaacaactccggctatgcctagctcgactagattatgtccatacactacatttatcacggctaaaccaa

SEQ ID NO: 153324 - DNA, 572 bp, Zea mays
  Clone ID: MRT4577_71410C.1
ctgtctcctttcactgacgcattctcaggcgcacgtcccgtctataactccgaaccccacaatatgataaaagcctcgtgctcctccctggctccggccttcaccgatggcccgcacgaccacacgacgcacactgtcgacggtcgggaaggcgacacggaagcatcttgctactaaagcggcgcgtaagactgcgacggcgacatgtgacttgaagaaatcgcaccgcttccgtccggtcaccggtatgctacgcgatatccgaaagtaccagaacatacggagctgctgatccgcaagctcccgttctcagcgcctggtcctcgagatcgcacaagaatccatagacagacctgctgtttcaatacgtctgacgtcaccgcgctgcatgaggacgcctatgtctacctgctgggactcttcgaggacacgaacctctgtgacatgccatgccgatggcgacgccatcatgatcgaggacattcagctcgcgcatccacatcctatgcgagggcgcctagacggttcatttgaccaccctgctcactactgatgaaagtgcttatgttaca

SEQ ID NO: 153325 - DNA, 444 bp, Zea mays
  Clone ID: MRT4577_71411C.1
acaaacaagaaaaacatttcctttttgtgaaaaaccccccccccaaaaaaaggccaaatccttgtggtttatttgggggggggcgtgcaggaaacagggattgtttttttgggctcgggggggttgcagaccatggggggatgcttggggatctggttggtgaactggccgggcttttccgggggggggattttgtccagccccgggggggggaggagctggaagttttgcaccaaccggcccagggggatgcccatgataggcagcgcgggggtgatcccaggggagtttcggggggcgaccccaaagggcacgaagcggaagtcgttgccgggggccttcacgggctttttcttcttcaggaagggcttgggccggaactcgtggggccgcacccaccttttgggggtcgttggggaggaaccaggccttgacgaggatctt

SEQ ID NO: 153326 - DNA, 285 bp, Zea mays
  Clone ID: MRT4577_71412C.1
aaaaaaaaaaaagctttttatggaaaaggggggccaaaaaattttggggatacattggtttttaaaccccctggggttaccaaattttgtttcctccaaaatggggggaaaaaacataaggggcccttttagcccaattgcccttttagcaccgggtaataagagggcccttttgaaggctggacattttccaaaaaggtttaaaacaaatgggtttggtgggctagaaatcctaggccaaaaatcaacaccctctttgccaattgggccagtgataggggaacc

SEQ ID NO: 153327 - DNA, 819 bp, Zea mays
  Clone ID: MRT4577_71413C.1
gaatactatactagggtttcaccggagaggaaaggggatcggaggtcagtgatgcgccgccgcctgccgtgtgccgagctccccccgcgcgccgtcgccgtcgccgtcggaggcctcgaatgaggatcgagcggtgcttgagcagaggcgcccaaataagcagctccccctttgggagcagcagtccccaatcgaagcagcagcagctccatttcgagctgcttatttccgagctgcaaccagcaatcgaagcaatcaagcggctcctctccgagccgcagtccgcaatcgaagcgcctccctttttaaatcgcaatccgcaaacaaagcagtccttcccggaatacaatcagaaacaggtcctgtttcaaattcagtctccgagtttcaattgctggcgggaacccagccgctatatatctggcctggcggctaccgcggtgctaattcacggcaactcgtgagccttcagctttcaaattcaaattcacggtaaccaattcttctcgggcctcggcagatctacgcgggagccatgacgatgcagaaaggcaagagagctgataggctcagcgcattgcctgatgacattctggtcaacattcttgaccgactcaatctccgcgaggctgcaagaaccagcgtcctctctagacggtggactcaactctgtgccaagctgtctcgacttataataagtgctcagcacttccttcccaagggcgtgttatgcaccgacatctctgataatgaattggttcgcatcaatgccgctgtggcccaagcgatggagagcatattgacgcgtagaaatcctgg

SEQ ID NO: 153328 - DNA, 398 bp, Zea mays
  Clone ID: MRT4577_71414C.1
actgccaggaaaattctctagcatgatctcataaatcaacagcacggacagctacatcacagggcttaatgggggggggggggggggggggggaggggaaagaccatactggaacacacaccagcccttttcgtcattctgggggaggcattcccgtctacgagcatgagcgggcagcatcacgaccacgggcgggggaatcagtttccttgcggaagacacacggggcatttactttgggcctcaaatacaacagccagaaaaaaacacacccctgatggatccctacaggaggcaattaggagttttgggcattggggggctctttgtctgcccctgatttatcaccggtagttccatataggaagcggaccatgacaacggggatgttatcaaag

SEQ ID NO: 153329 - DNA, 424 bp, Zea mays
  Clone ID: MRT4577_71415C.1
cggccgggcgtcgtatgagacgcccacctgcacgaagccaccatcccgacattcgccgctctttctccacgcgccggtcgccgcagacgcaagcccgcccgccgcagctgacgccgcgatccgcgagggtgcaagctagctctggccccgctgccggtgccgactgagatggacccgcgcttcacgctgccggccgccattggcggcggcgccggtcgggtgcaccaccggcgggcccactcggagtcgttcctatgcttctccgacgcggacctgctcctcgacccggacggggacctctccttctccgacctcgacttcccctccctctccgacgactccccggccgcctccgaccctaccccgcccccgccgctgccgcagccggccccggccccggccccccgcccggccggcggggccc

SEQ ID NO: 153330 - DNA, 268 bp, Zea mays
  Clone ID: MRT4577_71416C.1
cgcagaagcccctagagcggggggatgcattgcaaggggcgccgccatggacgcttttcgcaaggtcttggccaaggttggtcttcggttggcgtggaggcgagtggacgtgtgtgcggaaaaccccgccgaaggggcgggcggggcccaaatgctttccccaggaggcgcagcggcggcgaaggtctcgccgcattctccgaagatgatgaaggtgaggcagacgaggatcgtctgcatccacagagttggagaagggggttccctg

SEQ ID NO: 153331 - DNA, 269 bp, Zea mays
  Clone ID: MRT4577_71417C.1
tgagcacatgctcctgtggcgttacccattttagtctcgcgattagtatgccctacatctgctgctgatgagatgggacatacatttctggcttgagcgcttgctgcgttaaccagcgctccacaatatgatatgaggagcggtgcctttaaccatggttgcatagagactggtgacgttgacagtagtattcttcccaacgactcctgtggaggagaatgcacactcgcttttggtccagctgaaacataagacaatgccttagatat

SEQ ID NO: 153332 - DNA, 269 bp, Zea mays
  Clone ID: MRT4577_71418C.1
aggggaaaaggggggatgtgtaatgcgcggcgtgttttaccaaatacaaggaataaccaggcatgggtaccggatctaagtaaataaaccattacagcttggcttatacaaaaaagggtggccttctaatctcccacgctataattttaatttacgaacccgctgatctggcctgaattaagggatcgccaaaccttgcattccttgggcccccttttcggggactttgttaggttgtattggggtgataggtctggcaatggtttccc

SEQ ID NO: 153333 - DNA, 1182 bp, Zea mays
  Clone ID: MRT4577_71419C.1
gcaccagcccattcggctcctccctccgtctccagcagttctccatccaaacaaaccgcgtgatccgtctgaccgctcgctcgctctctccgggggtccggagctccccacctccagcgacccagtccatccgcgcgtgcagcgccgcggcgccgatggagtacgacttccgcggcggccgctcgagctcgggcccgggcccctacggcgcgcctccggggggcgcgcccgggggaggctcctcgctctacccgcgcgtcgggcagccctcccacggcgggggcggggcctccacggcgtctccgcgggccgcgccgtaccaccacggctccgggtccggatccggctccgggtcctcggctcccgtcgtaacgccgttggctccaacctccttctcctcgtcctcgtcctcgtcctcgaaagtgggcatacaagttgcgataaagcctgaattccgcattaccccacctcctcaattgccaccagagatggtagagattcctcgcagcaccttcaactttgattttgagtatgagagaatgattcttgctgaggcagagaaggagaaccccaactggactaaatttgtggtagaaagacaggctgcacctcttgtgccacagcaggctagaccagcatcgtcagggtcaggggatccagttgttgacaagtatgtctcaatggggcttgggcgtcaagccgtctcatttgcggtgttgaattatggagataatccaacaaaggtgaaagagttcgtgaaatcctacagcatcctccacgagatgggcttcacatcgccaaacgtccccgagctgctagccatccacgacaacgatcccgacaaagtcatccagcgactgctatcctcgccatcctgatcctagaagaacaagacgcctcgcatttgtgtgccgcatccatgtacagccctgcccctacgctggcaaccatcacagatgatgtatacgcgttgcctgccgttagttctgtgaaccgagtaacacgctttgtatgttgtacttgtataccgtcacccgtttggtgtttttccttaaaaaatgttttcgcatctttttattcacgtttgaattttttgtgagcctatacagtacaacatgattgggttaaagatgattctcgtcgagaaaaaaaaaaaaaaaaaaaaaaaaaaaaaaaaaaaaa

SEQ ID NO: 153334 - DNA, 204 bp, Zea mays
  unsure (1)..(204): unsure at all n locations
  Clone ID: MRT4577_7141C.1
atcgaatgctaanacagaaaagttaagcatacatgtatgctcatgggagcggacgcagatcaccacctagggctagatagctactgatcggatcagtatgcatgccatgcaggatctcaaggagaaagattacattcttcgtactaacaacctggatacgctgtaaacaaaaggttacgaagagatagcacctatataaaaaga

SEQ ID NO: 153335 - DNA, 211 bp, Zea mays
  Clone ID: MRT4577_71420C.1
ggacacgaattctgcgctcgagctgcaagttatctgaagttgacgtggctacgcgatgtcatacgtagagaagtgcgcttctgctgacatttgttttcatccattcctaccagacatccttgattcacaggcagcaggaagaaacaagtaccttgagctcctgctctctgtagctgagacgtttaacaagagtccatacagttttgtctgg

SEQ ID NO: 153336 - DNA, 523 bp, Zea mays
  Clone ID: MRT4577_71421C.1
cattgggtacctcgaggccggccgggttccctccgcctctgcctacgctctgctcccgctccggcgattcatcgataccaacactcctgtcacctcttcacgcgcctacgaagccgcgcatgctacccctacgccacatgcgcgctaaccacatgctgtgcgtgtaacgtagagtactccacctctgcgccgagaaatgatctccgcgtctgcggcatcgcagctgcaatcccctgatgtaacttgcacgctccttctgcctcttgctaggtcatgcacatctactgtcactaccaaacactccccacctgtgaccacgagcacgtatgaaccccctccgaacaccttcgacaacataaatacactctctgaacgcgccgcggaactcgctgcctcatcgccggcgcgctggtcctctactgtatactcttctccgtactcagctcgtccgcaggctccagcagatacagcagcgtgttcacaaggtcaggaagcgcgatgactgatgaatccgcatccatcc

SEQ ID NO: 153337 - DNA, 490 bp, Zea mays
  unsure (1)..(490): unsure at all n locations
  Clone ID: MRT4577_71422C.1
ccgtcattcttcccagacataggaacggngatttgttttgttatttttattgactagtctgataaatgaatcgataggtatgtatgtcgtgacaattattacgcttgtagctcaggcacgtatttatttgacgcttgtaggaatacggggctacctgcagcatggtaattgtgtccccggttgcgaagtcgtcatgctgcattgctaagtttagatttaacgacataggttatgcgagaaggattaaatcggtgtttcgtaccgatgagtggtcgaagtaataaaatgaggaataggtctagtgtctttaacgactagtcgataggttctttttaaaaattgattatgctaattttaattaaagttgggaatgatgcattacccttagagttattcgaattccatgtttattgatcaagttaaatgttatatttgaatttggccactaagtaaattgtcaagaataatattcatattattttaataggtt

SEQ ID NO: 153338 - DNA, 614 bp, Zea mays
  unsure (1)..(614): unsure at all n locations
  Clone ID: MRT4577_71423C.1
ggcgaaggctgcganggcgaacctgccggagctggcgacgcaggtgctcatcccggacgnggaggacgaggacatcacaatcacgcagaaccaaaggaagcaaaccaccgcggggggaacaaaaaagaacgcctaacgaacagagaagccagaaaaagaggacccaangaatacctaatanaagaggaagaggaacacaaaaaccacaaaacagaaaccaaaaacaccaaaaaaccagaaagaaaaaaaaagaaaaaacaacaaataagaaaaaacaaacaaaacaaaaacaagaaaaaaaaaaaaccgaaaaaaaaagaaaacaaaaaaaaaaaaaaaactaaaaaaaaaaaaaaaataaacaaaaaaaaaaaaaaaaaaaaaaacaacacaaaaaccacaaaacaaaaacagaagcaaatacacacaaaagaaaaaaagaccaagataaaaacaaaacccaaaaaacacaacctaaaaaaacaaaaaagcaaacaaaaaaacaaacaacacaaaaccaaaaaaaaaacaaaaaataaaacaacaaaaaggaatcaaaaaaaaaccaaacacaaaaaaacaaaaaacaaaaaaaagacaaacaaaagaacaaa

SEQ ID NO: 153339 - DNA, 248 bp, Zea mays
  unsure (1)..(248): unsure at all n locations
  Clone ID: MRT4577_71424C.1
cgcacgcactttttttttattacaaggcaagggcggaaaccaccggaccnggggagccagggaaagacccggtgnggccttgttcacccttacagagggcaaagggaggaaggaagaaaacccacatttggatnacgacctagaggtggcaacgctctgaatagcgcccttcttcagaccaaggatttaaagggcggaagctgcacaattgaccacggntcagnaaagcactggnccaccatgcacag

SEQ ID NO: 153340 - DNA, 302 bp, Zea mays
  Clone ID: MRT4577_71425C.1
ggggtgggaagttcaggtcctggctttgcctttgcctgatgtggatgagcagctcacatgctcagggccacctgagactgtcactgctctcccctggctactgggaggagtcactgagagcttcgttacccctgctgccttgcccagggcacaccctatacctcctcatctgctcttcccctccctgccgccttctgggcaggtagcagtccctggcctctccccctggctgatcactctccctcaggcagtggagatctgcgtctggacaccctcagatcctgtcattgcctgcccagagt

SEQ ID NO: 153341 - DNA, 2562 bp, Zea mays
  Clone ID: MRT4577_71426C.1
ttaggcaatatctatccgcctttcaagttctgcagtcttttcagctgcctttgttgcttctctagcatcgtgagtatctttttcacttttctttataatttcgtgggccatccctcggccgccattttcccagatgtcggtaaaaaactttccaccaactaagcttgcttcggccgaggggtcttttgtatcttcaatagataaggcagcttcgttttgcgccaaagattttacatgttcgcaacctattttctccaagatagctgcaactcccctcgcgccagagaaggcgcagacgtctccacggccatttaaaatttcatcgaaagcattggcttcgctgctgatccattcaattgggccctcaggatcgcatcttacgaagttgtcctcgctggagtatgcaccaacgttggcgaagctagtctttatttttcccacacattctatggattttacataacatctttcttttgaagaccgaagttctacagctgttttctcccaataatttttccagtaatcattggcgcctcggtcagcttcggcaattgcacattttaattttgcttctgccagctgcttccgaagatctttaacttcgcatttctgggcttcagcttgggcttttgaagtagcttcgttttcttttatcttgctcaccaacgagttcaatattttgtctttttcaagaccttcgttccttagttcaattacctcggaacgaaggttgttcaaagctatagtgcatccttcgtcttcggcacttttttgcgccctgagggcattgctaagaatgaggccctttaaactattatatgttaggctgtcggccaattcatcttttgatagcaccaaaagcccgtcttccagtgtcgggaacccgaagcttttgctcatctcccggcagacagaaatctccttgctgtctgggagacaatacaagaagtcttcttctccgctgccgttgaatatcaacgccccttttggatatttcagtctctgggcataatattgagcttctcgcttttcttctgcaaataacctttttcccgaaacatgtcgtacaatataatcgagagcttcggaagatgcttcgggaataggaatggcagttttttcagacagaatttgtcctgcagcttcttttttcgtttcttcttctccgatttccaaggatttctccttggtaggctctgaaggcccagcttctgtctcggcctggctcttggcagcttcggcttcggatagttttgcctcaatttgtgtttttgaagcttcgacagtcttcttcggagtagagcttgaagtttttatcgtttccagcacatctagtacgttgaccatccttttcctcttaggagtcattgtaagatccttttgcgcctttagcattgtcacctctgccgaagggcttataacttctaatatttttgttctttcgacctctgcctctgatttggctggtgacgccttcggcattgcagtcggctcttcagtcttctgcgtaagcacaggttctttggcttcggtagccgaagaggtctcaccaccaaattcgggcactgtggccgtttcaatgtagcgtggtcggtgagtaagaaccttcacttttttcctcttcggcgtaggctcactcgaggcagccgaagcaacatccttcacaggagccgcactttttcttttctgcccccgggacgggtagcagtagtcagggtacatgaacccaatagcatcaaaaactctgtttagtctcttctttttccggttcccgaaggccgcagataatgcgttatcttctgctctagagtacggcccaaccaattcatcacttctagcttcgatacattttaaccagtcatcatccggcttaacaaacttaccttcatatctgaaggtgtactttaaccgaactagctctccttcaccagtcttagtgacagtctccatcggcatttcccacttttctacaagtggccatactctaaaagctatgtgctcctggattagatcccttgtcccgatgaaagagcaaaccgtgccgaaggctctttggcatccttcggctgcctcatcaatctctaccttcggcttccgaaggccgaagcgctgccagataggacgcatgattatctctttaatgtcttctcgtgcctttaaatcatttttcacatagaaccattctttcatccaatctccgggccacctcttccaaaaggtcggcactgggcagcttgagccagaacaagcaacgaagctatagcagccaaaattgttatgatactgctccttaccctagggcttcgtctcatatagcagttcgtgcatactgcagaaaccttttgcgtttggctccaaaccttggctcctcacagcccagacgaagattcccattcttatgatggcttcgggagtaatctggtgaagaaaaatctagtatatctttaaaacttcaaccacaaaactgcttagggggaaccgaagcctagccttaaaaagcttcggtagatcacgacttcattctcttcgggaacaggagaacccggcgaacccgagggtacc

SEQ ID NO: 153342 - DNA, 282 bp, Zea mays
  Clone ID: MRT4577_71427C.1
cgaaattcggctcgaggtgcatgtatctggtggggatggtggggactgaggagcaaatgatgatatataagaaaaggtgtttacctatacaggctgatactcctgatcgagcaaatgtcacaacattgtcggatgtagaaaatgcattacctcactgcatacatagcaaaaatcacaaaaacatactttgaaaacattccttttatagagaaccgaaataaataggctgtcgcccactattgagctttttcttctcccgaattaatttccaatctgttccct

SEQ ID NO: 153343 - DNA, 1871 bp, Zea mays
  Clone ID: MRT4577_71428C.1
gggcctaactcgctgaacggccgggaccggcccattaagcctgtccgtgtcccctcgcggcctcgggcgcccccaaacgaaagggaaaccctcaccacgcttcccgaaacttctcctttctccatcctcaaccctactcccccttcatccgcacgaacgaagcagcgcgagcgaggagcagacgatccttcccgacctcgaagcctaccccccttccagctgcggccatggcgaccgtcatgcagaagatcaaggacatcgaggacgagatggcaaggacacagaagaataaagccactgctcaccatcttggtcttcttaaggctaaacttgcaaaattgcggcgggagttgctcactccaacatccaaaggtggtggtggtgcaggtgaaggatttgatgtgacgaagagtggagatgcacgtgttggtttagttggctttccttcggttgggaaatcaacattgttgaacaagctaacagggacattttcagaggttgcttcctacgagtttacaactttaacatgtattcctggagttatcatgtataagggtgctaaaatccagcttctagatctcccagggatcatcgaaggtgctaaagatggaaagggcagaggaagacaggttatcagcacagctaggacatgcaatgttattttgattgttcttgatgccataaaaccaataactcacaagcgtcttattgagaaggagcttgaaggatttggcattaggttgaacaaaacaccacccaatttgactttcagaagaaaggacaagggtggaatcaacttcacatcaacagtgacgaacacacatttggaccttgatacagtaaaagcaatctgtagcgagtacaggatacataatgctgatgtctccctgagatatgatgctacagcagatgatctcatagatgttattgaaggaagccggatttacactccttgcgtatatgttgtcaacaagattgatcagataacactcgaggagctggaaatcttggacaaacttccccattactgcccggttagtgctcatcttgaatggaatcttgatggacttctggagaaggtatgggaatacttggatttggttaggatatacacaaaacctaaagggctgaacccagattatgaggatcctgttatcgtatcatctaagaagaaaaccgtggaagatttctgcgacagaatccacaaggacatggtcaaacaatttaaatacgctctggtatggggttccagtgtgaaacataagcctcagagagttggcaaggagcatgagcttgacgatgaggacgtcgttcagatcattaagaaaatataggcgtatcatgtggtggaacaaaacctgttttttctggaaaactgggagcgttgaggattttgttgagtagtagcctcgcgagaagagcttgaactcggcctttgcttgttggtgaggctcatatgtaatgttccctgttctcagaaaatttgctttgatccaaagacaatgtgagtcggcatttacttatatacaacgagtcatgtagctgtgatgtaacttcctctaacttggtgccatgtggactggagtcaccgatgtgtgctgccaagtgtctggcccaaccgttgaacacgtggagagatgctctccatatctttagaggaggatataaggtgatttgatgatttatttattaagtgtttgtaccttaaaaaaaaaaaaaaaaaaaaaaaaaaaaaaaaaaaaaaaaaaaaaaaaaaaaaaaaaaaaaaaaaaaaaaaaaaaaaaaaaaaaaaaaaaaaaaaaaaaaaaaaaaaaaaaaaaaaaaaaccccccaaaaaaaaaaaaagggggggcccccccaaaggtttcccc

SEQ ID NO: 153344 - DNA, 461 bp, Zea mays
  Clone ID: MRT4577_71429C.1
ttttaatggacacggtgacctcgctaaagaactgtacaaacgcagccaagcccctgtgcaggaatggaacgaagcgcagttgagtgaatacattttctttgagttacctttgctcaaaccatcacgacgattggatttgatgcaccgatttttcgtgtaccgtgttgatggtgcgcagttaccgcaagtgtcaaatgagatcttagcaggaatgggcatcaatgatccccaatacagagaattattgttgaaaatcttcgaaaagcttctcaaagaaggcccagatgtcttcacaccacccgccaccaccactcaagctcaaccaacctcagccacggagcaacccacccagcagcagcagcagcaagcgccacaacaacctgacttggcaaaggatgttcccactcttcgtgacagagtgcaacccgagctttgaatgacaaaataaaatacctgaacac

SEQ ID NO: 153345 - DNA, 188 bp, Zea mays
  Clone ID: MRT4577_7142C.1
gcttttattttttattttttatcacgattgaccacaatgatgtactaggttatctataggagacacatgccggtcagagggcaccatcgctgatttcattttatgtgcagtctaaaagatgggccctacaacgatcgggttgatggaaggcatggatcatcaaagaaaaacgggtcgccggcaactgt

SEQ ID NO: 153346 - DNA, 582 bp, Zea mays
  Clone ID: MRT4577_71430C.1
cggccgggtcgggaaggagaaatacgggttcgattcccgtcgctcgccccaattacaactacacctcaaaacaatatacaccttttacatccacagccacgcctttccttcgaactcttctacaaacaagatcttattcgactccatcacgcaaaatgcctctcgtcgtccccggtatccagtccaaggatggaaactccaaggaggagtggatgaccaagctcatggggaagaagattggcgagcagcacgatgaagtgacgttcgcaaagaccgatctcccagagcagcaccgcgtcctcgggcccgactcgatgaagactatggatttcaagccagacaggctgaacgtacacgttgatgaggacggtaccgtcaaggatattactcacggttaaagaaagaggtcggctacatggcaacgggcttgactgttctggagggatgaggcatagctgcctggacgtggttaatgaagatggcaacatggggcgtgtgcaccccagaccgctactataatagatgacactgatgaatcaaagtcacgattatttacaaaaaaaaaaaaaaaaaaggccccta

SEQ ID NO: 153347 - DNA, 485 bp, Zea mays
  Clone ID: MRT4577_71431C.1
attatgtcaggaagcattcgaatcttggtcgtattgtgcttggggttgctaaggactcgcaaatcccccgccaagcaaactgctagaaatcttttcagaggtggagatgatgaagatgatagtgctgatgccgacacaaatgatcctgttgtaccttggtcattaggtagagtaggagttgggcatatggtgtacatctccggtttgacttgtgccttgagttcaacaaatatgaaagtgctgagagaggtggcatctagaggacgtcatgtcgaacgtgtgaagaatttttttagaaatatgtatatttgtgcgaaactttttagaaacttgactccattttattttctatgttactctcggctttgtttcctatcctttccaatgacttgctatgcatttgcactgtatttggcatgtttaaaactgctacacaaaacttgctatatattttgtccaaaaatactatatccttgttatgattg

SEQ ID NO: 153348 - DNA, 654 bp, Zea mays
  Clone ID: MRT4577_71432C.1
attgggacctcgagccggccgtcaagagatcatgctcatctccatccaatggtcgtcaccgccctgagcatgagatcctccgagcgtcgccgccctgcttctcgtccccactcagggtcaggcttgcggctgccaagccgttggtggaccccatgcggggccagctggtgcgcgcgaagggcacctacaacgcgaagctgatcacgacggagggggaggaggagctgcacgagcccgacgacgtctacatcctggacttcgccgaggacgaaggcatcaacctgcccttctcctgtcgtgcggagtcctgctcctcctgcgacgacaaggacaactctggctgcgtcgaccaggccgaccatgagcgttcctcaacgacaaccatgtctgcgacggttgggaggtcacctgcgctggggaccccacctccgacgttgatcatacgagacgcacaaggaggatgacctcctataattctaactagctatacaccgccagggtccgccggcttgagccaccacatgtagaaacgcccgagaacgagatgagacgtgacatctcaataattctagctatatatatatatatgcatgcatgcatgtacttttgcctgctccaaactgagtatattctaaattacaagatctaatcact

SEQ ID NO: 153349 - DNA, 1085 bp, Zea mays
  Clone ID: MRT4577_71433C.1
cccacgcgtccgcccacgcgtccgcccacgcgtccgcccacgcgtccggttgtgtctgatatgatgtcccccaagtttgctgccgagctgaagaaaaccatttatgacaacatgacatttgcgcctaaacattacggaggaaggtggaacatccttgaggaccatgggaccagccacctgtccatcgtcgacagcgagcgaaacgcggtgtcgatgacgagcaccgtgaacgcgtacttcgggtcactgatcctttccccgcgcacgggcgtcctgctcaacaacgagatggatgacttctccatgccagcgaacgcgtccgagaattctccaccgccagcacctgccaacttcgtcagccccttgaaacggcctctctcttccatggctccgaccgtggttgtcaaggacgggaagctggtggctgcagtcggtgccagtggtggcggcatgatccccgccggaacgatcgaggtgttcatcaaccatttcgtcaagaacatggacccgttggcttcggtcatggcgccaagggtgtatcaccagctgatcccaaacgaggtcaggtacgagaactggacgacggtgaccggcgaccacttcgagctcgacgccgccacgagggccgacctgcacaggagaggccacgtcctgacgccgatagctggagggaccataagccagcttgtggtgcacaacgtcgggcgccaaggcgacctcaccgccgttagcgaccccagaaaaggcggtgtcccggccggttactgagcaggatcggaattccaagcacggttcattagtcccctgctgatccgtgtgtgatgtgcggcgaagccaggaattatatggaatggaatatacaagagacaattcattatttgacactggtaaagtttttggtttattttcttgagcctcaaaatataattcttccctacgactaaggctaagggcatgtttgtttatcttctaaaaaaaaaataaaaaaaaaaggggcggccgtttgaaaccataaataagctaaaataagctagcattgaatagcttatttcagtttttttttatctcgaaaaaaaaaaaaaaaa

SEQ ID NO: 153350 - DNA, 594 bp, Zea mays
  Clone ID: MRT4577_71434C.1
gaacgtggaagttacgaggcacagttcctgaaagtttggtgcttaacggttctgacatattgcttttgatggaagcacaactactgcaagtcgtgtttagtcaattgcaggttttaccaataaggcaaagctcccttttgaatcctcagcaaaactaatttgaaaaatgagaaaagcctggtgatctcagtgcagccctttgcgaatcaagcagtaggcagaagactgctgcatgtggggttgcatgggtactcgcagtcaatctgtttcgcgttttgccttctatcgaaataccaatccccaacggcctctgagatagacttgttgccgagccttggtgagatcggtgaattccatgtgatatcgaatggtgtttgacagtgggtaaagcatgaatcaatgaacaggccccagtccttgttatcttcggcaaccttcaattcactgactaatttcttcttgaatccatgcagtacatcaagttgtgcgcaactgcagttccggatatctgctttgcaactagaccattcctggccaggataggatccatttggtgcgagaatgtttcgtatctgccaagaatcgtaatcggag

SEQ ID NO: 153351 - DNA, 220 bp, Zea mays
  Clone ID: MRT4577_71435C.1
cacgtcacctagtctaggcgctcgagaggggagcaatattggccggtgtgaactccatcaccgtcggactcattcccgccgcgatagttccccaggccttcgcctccttatcaacgtcaaaccatgtgcaactttccgctcccgatggccgccactccgctatattcggcctgacgcccgtcttcagcagcaagaactccactggctcctattaatgcac

SEQ ID NO: 153352 - DNA, 274 bp, Zea mays
  Clone ID: MRT4577_71436C.1
accagacgaggtgctgctcgatttgctttgcaaaaattagaagaggccaaaaaagattatagaagagtattagaactagaaccaaataactttgaagcaacaaatgaactcaggaaaatcagtcaggctttagcatccaaagaaaactcatatccaaaggaagctgacatagtgattaagtcaacagaaggagagcgaaagcaaattgaagcacaacagaataagcagcaggccatttcagagaaagatcgggggaatggatttttcaaagagg

SEQ ID NO: 153353 - DNA, 292 bp, Zea mays
  Clone ID: MRT4577_71437C.1
aattcggcacgaggcggagtctgaaccatggcgatacgacgatcctcgcgactggcccttcggacatccagggctgcctcctcccgggttcgcgtgctggtgaaatacacttgctagcgctgcaagcttgcttgagtgaggcacagtgtatcagagccgctgggctcacatcacagttatggaccttgagtcacggcgatatgccaatatggctcatctggggacaggatgcttggctacattgacagtcaggagccagagcgctggtggccacccattgtctgttaaggga

SEQ ID NO: 153354 - DNA, 255 bp, Zea mays
  Clone ID: MRT4577_71438C.1
atattttttttttttttttttttttttgtgggaaactcaagaagcacatgtggtaattccggactccgaagcacaagttgtatcctcatacaattccgcacaactttaaagaacagtggcataacttgcataggctgctaagacaaactggagcattattgggaacacttagcctttcataactgcgtgcaacggaaaccatgaaacttgataatgtcaatcaaagcaacaatgttttcccatcaaatttggaga

SEQ ID NO: 153355 - DNA, 828 bp, Zea mays
  Clone ID: MRT4577_71439C.1
tattttattttttattatatttttttaattttttttttttatttttttttttttttttttttttttttttttttaagtgactaagtgactaataatctctcattgtcacaatataagaccataaaaatatagtgactgactgataatctctcattgtcacaatataagaccacaaaaatatagtgactaataatctctcattgtcacaatataagaccagcaattttgaatactatcagcatgagtttctaagatctcacacaataagttatttctattacaactgaaatcgctttggagtcaaaaaatacaaatgtgcctttgcccattgatatcctcgcagacttgtactcttgcaccttgctctccaaaaaagtgccactgactcaccatttcccataatcttgaacctttactctgccctattcgcaacagagtgataacatcaaaggaaatttgtttgctgaacacaagtcaaaatatattacctgaatacaaatttaaatcggttacagctgccctgccagcaaaaaaagccacgtccaagtatacataaacggtaaaacattacacaacatgcaaactggaatctaatgactgagaagctaataaagccaaataattaattatcttttagtcatttacccaacaacacaggatataaatctaaaattatatacctattagaagtatacatatctcatctaaatagttggaatcaggatccatataagaatagttgggtaaattcttaacaggacaattgttctttaacaagagtatacaacaagaaacatcaccttagttctgccatgctcttgtatcttg

SEQ ID NO: 153356 - DNA, 2577 bp, Zea mays
  Clone ID: MRT4577_7143C.1
gccggccgggccgggaggaggactttcctctctctctctgtctctctctctctctctcttcttccccgcgcggccgcgttcgctgcctgcgccaccacaccattggcgacggcacgcgccctccctcccttccagggaagcctcctcgctcgcttcgggggcgtctccgcggccatatcttcctctttctgctcggcttcctcgtcaccgcccccctcctcgccgtccactggtgccgagccggcgcgggtggagatccgttcgctttggatcgacttcttcgtgtttgggttgaagccgctcgatttgctcaccagaaattcagattttcgagtggaattcgcttaatatagcaatgcactagggtttactgtgcaccactaggctactgcctctgctattaggaagccgacatctgttgtttccgaagtctttcaagtctctgttgggtggcgttgctattgtgggtgtgataacatgataaagcaatttcttggacgtctccccaagaagccatccaaatctggagataaggatcctattggccggcccagcccctcggtgtcgcaccagccattgggtccgagagctggagacagggccaccaacttgagtagccatccaccggttatctccagctctgggctcagttatgggagtggcatgcatgtcggcaatgcatacacgaaggcacacgtgaacggtgattcggccgcttcagcatttcggtcgttgccgagcttcaaggacgtgcccaacacagagaaacagaacttgtttaatgagaagttgaacttgtgctgcgcccaatttgacttcaccgatccaacaaagaacataaaggagaaggagataaagaggcaaactttggtggagctcgttgactatattgcctcggccagtgggaaattttctgaggcaagcatgcaagagatcacaaaaatggtttctgcaaacctgttcaggacgctgagtactcctcctagagacaacaaagtggatggctttgatgtggatgaggaggagcctgtcatggaccctgcatggccacacttgcagattgtctatgagttgttcttgagattcattcagtctcaagagacagacgccaagttggctaaacggtacattgatcattcgtttgttctgaggctacttgacctctttgattcagaagaccctagggagagagagtacctcaagatgatacttcaccgtgtctatggaaagttcatggttcatcggccctatattcggaaagccattaacaacattttctatcagttcatctatgaaactgaaaaacacaatggaatcgcagagttattggagattttgggaagtatcatcaatgggtttgcattgccacttaaggaagagcataaattgttccttgttcgagctttaattccacttcacaagccaaagtgcatcgcgatgtatcatcagcaattatcttactgtatcacccagtttgtcgaaaaagattgcaaacttgcagatacagttatcagaggcctgctaaaatattggccaatcactaatagctccaaggaggtgctgtttctgggggagttggaagagatattggaagctacgcaacctgcagagtttcagaaatgcatggtccctctcttccgccagatcgcacgttgcctgaatagctcacactttcaggttgctgagcgggcgctatttttgtggaataacgaccacatcgagagtctgatcaaacaaaacagcagggttatattgcctatcatctttcctgcactggagagaaatgccagtgggcactggaaccaagctgtgcaaagcctcactctaaacgtccgaaaactgttctctgacaatgaccctggactattcacggagagtctgcggaaatacgaggaagagaaagcgagagagaaggaggttaagtcgaagcaagaggccacatggagacgccttgaagagatggcatcagcgaaagcgacaagcggcgcggcagttctcgtctctcgacccttatcccggcagtcttcggctgtgtagcgaattttcatgtggtggtcgtgagaacattgtacaggattgagttgtatatacgaggtatattaaggtgggcaaattgacaaatgatatcgtcggagaagccagccagatgggttacagggctaggcacacatcattttcttggtcccgaatctgggcttctgctaagatctacagctggtcgcggtatcatcattatgtttatccttgtcaggagttggctatgattcaattgttttcacctgctggtcctgcagtcttgccatgcatgggtatctgtttctggagacaaaaaatcggtggaagtcgatagaacttagagcctggaaacgagtcgtgctgttgttcttggagtctggaattgttgcgtttctttctagtacaattcatgtgttgtcatcattagaagttaaatcctttgtgctcatcatcatcatacgtatgtggatccaattataaatgcctgataaatggttaagggttcacgatgaagatgacatggattcgtcaaaaaaaaaaaaaaaaaaaaaataataaaaa

SEQ ID NO: 153357 - DNA, 180 bp, Zea mays
  Clone ID: MRT4577_71440C.1
agaaaacagcaagcgaagcgaactagcatttatttaacagcaatggataccaggatattaggcctccttgcgcttattgccctttttgagagcgcaacagatgcgttcattattacacaatgctaacttgatcgtagtgccatgattacacaggtcataccaccagtgactgtaaatggg

SEQ ID NO: 153358 - DNA, 600 bp, Zea mays
  Clone ID: MRT4577_71441C.1
acccgaaattacccaaaaaaacaaaggggggacaaagtacatacaagccaaccccaacactaaagggggaaatattattttaccgcttcttccaaaaaaaaaaaacccccgaaagccttaaaaaagcatccaacggcaggggctcaaacccagggccatccatgaaaaccgcaagccccccccccctctttatttatgaaatcatccccccaagccccgcaaggcccccccccccatacatatagggagggaaaaatatatggaaagcccaggggcaatcccccggaaaaacttcaaaggaaacacgagccccaaattccttcaggattttgaattccctaaaccccgttttggggaaaaaccccccccattctttttcatccccccgccgcccttttggcagggccatcatgccgagggccatcaggaggggagtttccaaaaaaggcccaaaggggccaatcaaaaaatccccgattaaaattttcccgccatccttccgggaaggaatccccttccggcattgacccaggaacttgacccacccctcatcgggcagggggggcaacacaagctttaacacaacagtttgagcagggg

SEQ ID NO: 153359 - DNA, 390 bp, Zea mays
  Clone ID: MRT4577_71442C.1
cgtcagctcacgcgtccgcccaagcgaccgtgttatgccttcaagtggtgccgtcaattgtcaatgtacttgtgacatattaggttgtccatgatgtgtgatgactacagatatggaaatcagactgatgatttgcgttttcagctcatatttttgatcgccttgtcgaagttgtgttttttatcgcaggcatagtagatatcaagatatgacagcgggtccattgatcaccatgacatctctggcatcaggtcctaaaatttgttgctggctcgcttccatggtcagatttcggctgtaaatcttaatgatcatttcctcaaggcttcagttgatgtctacttcatacatgagatgttccattatttttgcacttagttcggtactatg

SEQ ID NO: 153360 - DNA, 484 bp, Zea mays
  Clone ID: MRT4577_71443C.1
attgcatttgccaaagagtcttgaaccaccatcaaaaattgagaagctgagaattagtggctaccggggttcacaattgccacgttggatttcaaagcaaagtgactcttgtggtctagcggatgatacacacctaggaggaaataatgaatccatctgaattctcccatctgactaaactagtattggacaacttaccaaacttggagcatcttggggagcttgtggaactgccactgataaagatccttaagctcaaaagactgccaaagttggtagagctgcttacgaccacaactgcggaggaaggagtggaagcgcaataataattgactaaactagtaataattgattgcccgaaacttgttgtgaagccgtactttccgccgtccttgcagagtttaagactagaggaaacgatggcagttggtttcttcaggatgcttattccgtccacgtcatcatgatgcaactcatgcacatg

SEQ ID NO: 153361 - DNA, 620 bp, Zea mays
  Clone ID: MRT4577_71444C.1
ccggccgggaccgccgagcggaagcggcgccgtagcaaccaacccctgttctcgtccgccggcgtgtccccggaccatggccatgggcgccgcctgctcccgagtgttctgggagtgccgggccgacggctacactaaagatctccaccttccccaggggctgtctgaccgggctgaatgatctgaagtatgctgacactcatgaatgggtgaaagtagatggtgaggtcaggaaccgcggggattatctgccatgcccatgatcatcagggtgaagacgacactgaggggctaccagaaatcgctgtaaagggatcccatggaaataactttggtgcatgatgagagagtgaaggtatccagcgttgtcaattgaacaccggctggataggaagctgatgggcaactgaaacagagtgaggagcctgaatcgaaatacgcaagtgcatccgagaagggctggatgatcatggtgaagcgaaacgattgaggcgagctcaattggctaatggacgatgagaagtactccatattgtgagaggagcatacaacggttgatgcaatcactgtgtcctgcaagcaccatgacctgcagtcgaagctccatgagtggtcctggt

SEQ ID NO: 153362 - DNA, 445 bp, Zea mays
  Clone ID: MRT4577_71445C.1
tggttggaactttgggctgtttagtgcctgtgctaccaaatacgacgccgttgggttgagggaatatctccaaattgaacagtctctgcgttctcgtacacacataattgcgccccaaatccccttctcctaagtcccccgaatttagaggttaaattatttcctaaaggcacaacgtaaggtccgaagcacgataagaacccgctagacctgctatttcggaggcgttcacgccgaaccgtatgatttttaaagacggtactaagcctaatcgctccgacggtcgtagctttagtcctactccgatctggactccctttaacttagaagcggacactgtacagactggtattattcccagcataggctgctcgtagaatcacgcacgaactcctatagcagaacccattacaactagaccccggtggcgtaatcggtccaaaac

SEQ ID NO: 153363 - DNA, 967 bp, Zea mays
  Clone ID: MRT4577_71446C.1
attcaacgtcactccccatcttgttcgtcttggtcactgccccacccccactttcccttcactggtcaaaggcaccaccacccacatcacagtacaagccaagccaagccaagccagagaagaggaccaggcgtaggtggatgcaagtgtgagcccaccgtgtccgccccattcacaccctagccacatggagcatccggcgccggcgccggagccgatgctgctcgacgagcagccccccaccgcagtcgcctgcgagaagaagcagcaggatggcgaggcgccgtatgcggaggggaacgacgccatgaccggtcacatcatctccaccaccatcggcggcaagaacggcgagcccaagcagacgattagctacatggcggagcgcgttgtgggcactggttcgtttggcatcgtctttcaggctaaatgcctggaaaccggggagacggtggccattaagaaggtactgcaggaccgacggtacaagaaccgtgagctgcagcttatgcgttcgatgatccattccaatgttgtctccctcaagcactgcttcttctcaaccacaagtagagatgagctgtttctgaaccttgtcatggagtatgtcccggagacgctctaccgcgtgcttaagcactacagtaatgccaaacaggggatgccacttatctacgtcaagctttacacctatcagctattcagggggctggcgtacattcatactgttccaggagtctgtcacagggatgtgaagccacaaaatgttttggttgatcctttaacacatcaagttaagatctgcgactttggaagcgcgaaagttctgggtggcgggtgagcccaatatatcatacatatgctcacgctactaccgtgctccggagcttatatttggtgcgactgaatatacacatcgatagatatatgggtcagctggttgtgttcttgcagaactgctacttgg

SEQ ID NO: 153364 - DNA, 349 bp, Zea mays
  Clone ID: MRT4577_71447C.1
ctgtgggccgggactagggactccgacctcatccgaatgatccctttctttccggacaagtctgcatccttgccgtatgccttggatcgcttatcacgtccgctcatcgtacctcacccaatgcttatggagtgaatgctgtggtgccaaacgaaggtattaaccctgaccaggtcgggcggctctaactgccaactccacaacactgaaacccgttactacagcagcctagctgaatcccacacttcgcgtagagatgcgcatagctgattgctcgctgataccgtttctcgctcactgactcacatgagctacgaccctcaagtgtagagagcgaagtctgctcact

SEQ ID NO: 153365 - DNA, 421 bp, Zea mays
  unsure (1)..(421): unsure at all n locations
  Clone ID: MRT4577_71448C.1
ggacccgngggcncccnnggcggccangaagccggcggcgaagaagcccgcagaggaggagcccgcggccccggcggagaaggcccccgcggggaagaagccgaaggcggagaagcggcccccggcgggaaaacccgccggcaaggaaggcgggggggacaagaaggggcggaagaaggccaagaagagcggggagacgnacaagaccnacancnncaaggggcngaagcaggggcacccggacancggcaccnccnccaaggccagggccancangaacnnccacagcaacgacancnncgagaagcccgccggcgaggcggccaagcncgcccgggacaacaagaagcccaccancaccncccgggagaaccagaccnccgnccgccccggncaacccggggagcncgccaagcacgcc

SEQ ID NO: 153366 - DNA, 453 bp, Zea mays
  unsure (1)..(453): unsure at all n locations
  Clone ID: MRT4577_71449C.1
agcccgatncgatangatatgggtgggtacaagtacgatnggagtatggnggaggaagagtatatgtgatgnggttgtgcaggngtgcgttgtgggagtacaggagagccggnattgtacgattaaaggacagtgggggctgaaaggngagngntnggttaaaggnaagagggttatgttgtttaccgtgtncgtgttaggngtggtggaggaagaggatgtgntaaaggtattgtntatggnaagnaaagtaaagggtatgannnaggttaagtnttagaggaanaagaggtttgttgttgaggagagggntggataaaagtttggtggaatnagggttgtgaattggtaatgggtgaatgaggatagnanntaaaagtagtttgagaatattgttgttgatgtggggtaaattaagatggggaatgatataaggattaagtggatatgaaa

SEQ ID NO: 153367 - DNA, 297 bp, Zea mays
  Clone ID: MRT4577_7144C.1
tcgcggcggcgatagggttcggcttccgtctccttcccccgccggcggtggtcgcctgtaaatgcttaaggccttctccggcggctcggatcgtgcggcggcggcggcggctctgttcttggtcgtgctcttcttcttctttcaagggatctcttccttctccggcgactcggcatgcctgccttccacgcatacggagatggcgggtgcctcgtctctgccccggccgagctttccaggatgttctgccgcggtggcggagcggtggttcagcagcggaagcgctctctggtggcc

SEQ ID NO: 153368 - DNA, 349 bp, Zea mays
  unsure (1)..(349): unsure at all n locations
  Clone ID: MRT4577_71450C.1
gcgnncaancnttcganggaccttcagctcccgttcaggatccacatctccccgacctattagtgtacagagagctcttggctcttgcgcacctacctccatcacctctttctgtcgcttgccacccatcaccttaacatgttctaaggtgtcgaccaaatcaattagattggccgtgtttttacaccgtcctgtcaggacaaaccttggcgctccccaactaaatcacgttgcaggaaatacctcttcgtccacctgcagtaatatcaaggaggccagcccctttccaccttcccaacatttgcgcaggctgtatggcacatggagctccccctagatcgccgcatta

SEQ ID NO: 153369 - DNA, 454 bp, Zea mays
  Clone ID: MRT4577_71451C.1
acgaccccagtaacatgggttttctcaacaacagattcatcgacatcattctatgggttacaagccacatgggcaggggcgaagcccggatccaaaattaggggggaccaaattagattaggggggtgtttacatgaaaaatagctaaaaacaaacatgtcctataaaattaggggagcattaggaggacatttccccctgggccccctggcgtcgcccctgcacatgggactcaggctatgacaatgcattttgaggcacaaacactgggtccccttcgacaatgtcgttggccaaaaaaggaacaggggggggggcctccatattcactacgacttttaacaaaatatccaattaagcgcacctttacatttttaaaggacaaaaaatgcggcttttattatagcccaaatgaataactttagcatccacaacccgaccaattttgtaaaaa

SEQ ID NO: 153370 - DNA, 388 bp, Zea mays
  Clone ID: MRT4577_71452C.1
attattattattactagtttgttgttacttgcaatatgttaggtctgcttgtttaagagagaaaaacaacaatgggggggtcccaaaaagacccatgcctgtaaaatttcatcagaagacaacaaaagggggggccgcgcaggcgcatgcatgctgacgcaccacgttctaatgaaacgtgaggctggcgatcacggtagcagctgacggagtgggggactgagccgatcagagtctggaacgggccggcggcggcaaagagccaactggctgaaggaaccgacgataggagaacatggagagcctgccgataggtgatctacgtgagagtgagataatcagtgccttctaggtggtgccaaaaccgaaaagggagaatacgggcccg

SEQ ID NO: 153371 - DNA, 1019 bp, Zea mays
  Clone ID: MRT4577_71453C.1
cctgcctgcgcgcttccgttgcgattgcgactttgcaccattaacactccctgcgtgcggtgcgtctgcttagggaggggaaggactcaacgaaggagagaccttcccgcagttctctctctctctctctctctcgcaatcctcctcgccatgctaaggaggtcccgccacggcggggtccgtctcggccggaatctgctcagcctgtggcggcgggcgctctgcggccggcgccggcgccggggaggctaccgccgcctgcagcagcagcagcagaagccctgcgccggcagcggctgcacgcccgggcgcaccgcgaccgcgaccgcgaggaagctggcgccggtgctgcggtggggccggtcgctggcgcggcgcctgcggctcgggtggaggccggccggcggcggcgggcacaggatgctgccggacggcgacggcgagcccgcggtgagcacgcccaaggggcaggtggccgtgtacgtcggcggcgagggcgaggcgtcgcagtcgctgcggtacgtggtgcccgtggtgtacttcaaccaccccacgttcggcgagctgctgagggaggccgaggaggagttcgggttccagcacccgggcgtcatcagcatcccctgccccgccgcgcggttcgagcgggccgcggccctcgccgccgcggccaagaagggcttcggcaggtggtaggcaggccggggcgcgcggtagtcgttaattagggagggagagacgacgcacgacgacggaggccccctgaccgccgccggccggtggcggaggcggattggtgtatatcatgcatgtgcgctttgctaaagaaacgttcggggctgcctagcctaggcctagctgattttgttctctggattcttggtcccggttcttgtcttccggttacttgtttcgtccatgtctactgcttcttgtcttcggatgcaccctcagaccactggaaggaatcacccaactgttgcttgctggacgagtgtgctgaattcaccacgtttgcc

SEQ ID NO: 153372 - DNA, 153 bp, Zea mays
  unsure (1)..(153): unsure at all n locations
  Clone ID: MRT4577_71454C.1
ccagagtcattcatccgaagcaagaaaagcattcggctttggaagttggaatccatggcgtggacctcgtgcttcctccaccagtccaccncccgcgtggccgcaccgtctccgcacctcgccgccccacctcgcagcgcgcaactgttcgtc

SEQ ID NO: 153373 - DNA, 510 bp, Zea mays
  Clone ID: MRT4577_71455C.1
ttttttttttttttttttttttttttttttttttttttttttttttttttttttttttttttttttttttttttttttttttttttttttttttttttttttttgggggggggaaaaaaacattccatggggggccatgggatatacgggggggaacacgcaatttttttttatttccagcaaaaaatttttacaagggggggggatttagggaaaaggggcatatccccccagtttttttgggggacactgggattttcctagggaaaaaaaattggtatttttttttatggaggggggggggggccccaaatgaaaccggggggttgaacgtatccaactttggggctaaattggggggtttccttggggccccgggtggcaggttaaaacgggggggccttaaatttgccggggtaaatggtatgcaaaaaaggagggaaaattttccaagaagcctggagttaatttttggaaaaaaagggggggtgaaaaccttttattggatcc

SEQ ID NO: 153374 - DNA, 245 bp, Zea mays
  Clone ID: MRT4577_71456C.1
cggacgcgtgagcggacgcgtgggcggacgcgtgggcagacgcgagggtgtggatgttggcctgcactttgaagagcaatctatatgaaccacgaggcatgctgataaaaaaaaaaaaacaaaaaaaaacaccaacagaagaaacagaaaacgaaatccaaaacaccgaaagaatggaacattcaaaacgaaagaggacaacagctccaagaagcatgaggtgaaagactacattgaaacaaggg

SEQ ID NO: 153375 - DNA, 329 bp, Zea mays
  Clone ID: MRT4577_71457C.1
cttccaactaaggggagtttggctttttgttatataaaagacagcccccgatactatatcatgccgctattgatgccacccacccctgcctctgctacttatcttcgtctgggaggcaagactacatattgacaggtaagcttaacttgacacatcattatctagcttctgccacattgctttcaccacatatttcattattcatgaccaaaaccatgttaacagcttctgcctgcggcgtcctcagcttctgtagccttttgctttaatattttcttcttgctgacccctgcttaggaagcatccgtctggaggcttgtcgtgtctaa

SEQ ID NO: 153376 - DNA, 316 bp, Zea mays
  Clone ID: MRT4577_71458C.1
gccggccggttcagaggaggagtggcagacgccggattctgccctcgcccagctggaggcgacgctgttccgttcatgatacgaccccccatagcgaatgaaaacctagatctcagcgtgacgccccgatcgtgcgataccttcctatccaagcctcatgggattcctcctcgtatggtctcggctagcatgccgagtgcaactacgtcttcatgatactccctatcggagactcctatgaccatgagaacagcctcctcgtccgtttccctgactactcgtaacatgagctgtagcctaccctatatggtcactt

SEQ ID NO: 153377 - DNA, 1178 bp, Zea mays
  Clone ID: MRT4577_71459C.1
ttgggtacctcgaggccggcccacttcgtcaagcaacaacaccggctaaaattaaaagaggcagcgcgtcgccgtggggcgggaccgtcacgtactcacgctcacgttggaggttggactccgcccccgtgctgctcttcgccttgcctttctccgccggagaccccgccgcctcagctgccgcaggaggaggaggcaaccatggcggggaggtacgaccgcaatccgttcgaggaggatgacgtcaacccctttgcgggaggaagtgtacctcctgcttctaattctcggatgtcagcacttcctcatgaaccagctggcttctacaatgatcgtggtgcaacagtggacatacctcttgattcaacgaaggacctaagtaaaaaggagaaagaactgcaggcaaaggaagctgagctaaacaaacgggaaagggagctgaaaagaaaggaggaagctgcagccagagctggtattgtcattgaagataagaattggccaccctttatgcccattattcatcatgacatttcgaacgagataccaattcacctgcaaaggatgcagtacctggcgttttcttcactattgggattgacagcttgcctcttttggaacatcattgcaactacagcagcatggattaaatcagaaggtgtcatgatctggttgctagcaatcatctacttcatctctggtgtccctggggcctatgtgctttggtatcgcccgctttacaatgcgatgaggactaaagtgctttgaagttgggttttttgtttctccatatcttattctgtgtctggtcagctgtggctcctccatttccattcaaaggaaaatccttggctgggattttgccggctattgatatcataggcaggagtgctattgtggggatattttacttcattggatttggaatgttctgccttgaatcactgctcagcatcgttgtcattcagcaagtatacatgtacttccgtggaagtggaaaagctgcagagatgaagcgagaggcggcccgtggtgctatgaggaatgccttttgatagagcgacctaggcgactggaagagacacggtgtgacaatgggtaactacgttatgtacatatgctgttcctctctgagattacttatactagcttatagccttcttgccttcatgcaatggata

SEQ ID NO: 153378 - DNA, 1130 bp, Zea mays
  Clone ID: MRT4577_7145C.1
actcctatgggcgattgcggccctcgacgccatccttcaccactcccgcccatcccttcgctccaccacctctgagactcctccttcacaggccggcgtcgtcggtggtcggagagatggggcaacaacgcacgttggtgtatagcttcgtggcgcgaggcaccatcgtcctagcggaccatgctgaggtctccggcaactttgcctccgttgctgcacaatgcctacagaaactccccgccaacaacaatcgcttcaactacaattgtgatgggcacacattcaactaccacatttatgatggattcacgtactgcgttgttgctaccgagtcagctggtcgccagcttccagttggatttattgagagagtcaaagaagatttttccaagaaatatagcggaggtaaagccaaaaatgctagtgccaatggcctcaagcgagaatacgggcctaaactcaaggagcacatgaggtattgtgaccagcaccctgaggagatcgacaaacttgcaaaagtgaaggctcaagtcacagaggtcaaaggagtgatgatgcaaaacatcgagaaggtattagatcgtggcgaaaaaatcgagctccttgtggataaaacggaggatctccgatcacaggcacaagatttcaggcaacagggaacaaagatacgacggaagatgtggtgggaaaacatgaagatgaagctcatcgttttcggcatcgtggttgcgctgatcctcctcattgtcttgacagtttgcaaggacttgaattgctgataagaagcagacacacaggaaagaaaagaagaacgtggaaaagggaaggaaaaaaaaacatagaaggtgcattattggtatcacaccgcacggccaaaatccatctcgtctttgtgatgttgacattgatcacattattgttcttagtcatgtctagatcgttgggctcaaagctataacagggctctctcatattttaaataattgtagtggtggtttggataaatatcccgccgtttctgtattagtagaagagattgacggcaaaacgaacaaatttctcctgtaatccatctcaatctgcttccgtaacactttctgactgatgactagcggagaaaaaaaaatata

SEQ ID NO: 153379 - DNA, 324 bp, Zea mays
  Clone ID: MRT4577_71460C.1
aaaaaaaaaaaacagggggggggcgggttttcccctaccggccgagttttttaaacaaattttgcagtccatttgatgcaaatcaatgccttttaacaaaaaatggtttacagggggggccttgacactattattggtcaactccattttaattgacatttttaccattaaaccattttaaacaagggatgggccttatgaccattgttttgaagtttttcttgcttgcaaccgcatttccttttatataaagctgggcccactttaaagatctgaaaaacaggttgggctccccagtttccccccccgtgatatttacctttt

SEQ ID NO: 153380 - DNA, 704 bp, Zea mays
  Clone ID: MRT4577_71461C.1
tgctgggaaggtgttatgatctggctgcttgccattatctacttcatatctggtgcgcctggggcttatgtgctatgtttacaatgcgatgaggactgaaagcgctttgaagtttgggtggtttttcttgttttacctgctccatatcttattctgtgtctggtcagctgtggctcctccatttccattcaaaggaaaatccttggctgggattttgccggctattgatatcataggcaggagtgctattgtggggatattttacttcattggatttggaatgttctgccttgaatcactgctcagcatcgttgtcattcagcaagtatacatgtacttccgtggaagtggaaaagctgcagagatgaagcgagaggcggcccgtggtgctatgaggaatgccttttgatagagcgacctaggcgactggaagagacacggtgtgacaatgggtaactgcgttatgtacatatgctgttcgtctctgagattacttatactagcttatagccttcttgccttcatgcaatgtataccgcctaccaccggagcttgatctcttacctaggttcagatgtgcttataggtaactagtttttttaatacatttcctacatgatttgtactcttaactcgcgagacaattgttgttgttctttggatctcgagtgattctttgcacggcctgaaaccacttggtcttg

SEQ ID NO: 153381 - DNA, 204 bp, Zea mays
  unsure (1)..(204): unsure at all n locations
  Clone ID: MRT4577_71462C.1
tttntttttttttttttttttttttttttttttttttttttttttttttttttttttttttggaccaataagcagatgatttattaaagttgatgcagggaggggcaattttttacaacgcttagggggacttcgtttgctaaacatacattaggggggggcgaccagctaaaacttgccacattagaaggggaaaccaaaact

SEQ ID NO: 153382 - DNA, 795 bp, Zea mays
  unsure (1)..(795): unsure at all n locations
  Clone ID: MRT4577_71463C.1
ccgctcgagcggcgggcgggctcttccagaagaaaggcatggagagagagagagaccatggagaactccctcgtgggtacggcagcatcatctcccactcctcgacggcgtcccgtcctggtgacaaggggcgtccaactctggccctcccagcgcggcggcggcggcggcaggggaggcgaaaattcagcctggctagccacagatcaatcatggccttggcatccatcaatcgcttctgctctactccagaggacagcgccgagtctcgtctcgtctcaacaagactccaattgctgccttctccaatggtgtccccaaagtgttcgacaaaatgtccgtgagctcgcggccaagccaatggcgtccttgaggtgttcgaccaaatgtctgtgagcttgcgaccggagttggcggtttcttccttaatactcctatctagcatggcttgccttgcagtatcatcgatcattcacaattgttctcattcatctactcctacttctctactataataagcatcatacatgcatgcatggatggatatggatttaattactactactagtangaatggtgatttgcatttacttagtgcttacagaaacacgatatatatgattgatgcctgcagggtctcgtcggccgccttgcttcctccaacaagaagaccatccacatactccaaaacgtcaatggcatcatcaaaccatcaaggatgaccctttctctcggacctccatcctccggaaagagcacacttatgcgtgccctcactggcaagcttgacaaaag

SEQ ID NO: 153383 - DNA, 827 bp, Zea mays
  unsure (1)..(827): unsure at all n locations
  Clone ID: MRT4577_71464C.1
ggtaccctcgggctcgccgggcgcgtagcagttggtcgccaccgtcacgtactcacgctcacgttggaggttagactccgcccccgtgctgctcttcgccttgcctttctccgccggagaccccgccgcctcagctgccgcaggaggaggaggcaaccatggcggggaggtacgaccgcaatccgttcgaggaggatgacgtcaacccctttgcgggaggaagtgtacctcctgcttctaattctcggatgtcagcacttcctcatgaaccagctggcttctacaatgatcgtggtgcaacagtggacatacctcttgattcaacgaaggtcacatacaatgttattgatcaagggtggaggtcatgctatttattttagacgttggattgaaaataaattccagagattttttcattggtgtgtttatggttgtttgatcatgtggtgactatgcttgtatgtgaatgtaggacctaagtaaaaaggagaaagaactgcaggcaaaggaagctgagctaaacaaacgggaaagggagctgaaaagaaaggaggaagctgcagccagagctggtattgtcattgaagataagaattggccaccctttatgcccattattcatcatgacatttcgaacgagataccaattcacctgcaaaggatgcagtacctggcgttttcttcactattgggattgacagcttgcctcttttggaacatcattgcaactacagcagcatggattaaatcagaaggtgtcatgatctggntgctagcaatcatctacttcatctctggggtccctggggcctatgtgcttttggtat

SEQ ID NO: 153384 - DNA, 130 bp, Zea mays
  Clone ID: MRT4577_71465C.1
aggggggggaagggcccccaacccgcacatggacacacataattggccccaagacaacaagggcacaaaatatgagcaagcaagcctcaaataagcacaaacaatataaatccgcctgggttattattcc

SEQ ID NO: 153385 - DNA, 2043 bp, Zea mays
  Clone ID: MRT4577_71466C.1
ggtcaaaccaaccgcgatccgcgaatccgcgggagaggaggggaggggcgcgggggccgggggagcgggccggccttatactccaactactctggactctgatattggatcttttgagcttgttataaagatgtatccccaaggaagaatgtctcatcatttccgtgagatgaaagttggtgattatatgtctgtgaagggacctaagggccgtttcaagtacctccctggacaagtcggggcaggagggacaacgctgctgctgacaccgagctacctacctcccccgtgccaccacctctaaaatcccccagcggcccaaccgaacccgcctagggattcctaccgagggaggccgcacgcagccatggatttcctgcaggagcaaagcgtcgagaccacagtggccgtcgccgtcgctgtcgccgccgtcgccgcaggcggcgccttcctcctccttcgatccaggaagcccaagggctgcttggatcctgagaacttcaggaagttcaaacttgttgaaaagaagcaaataagtcataatgttgccaggttcaagttcgctcttccaactccaacttctgtattgggccttccaatcggtcaacatatcagctgcagaggacaagacgctacaggtgaagaagtaatcaagccttatacccctactacattggattctgatcttggatattttgagcttgtcataaagatgtatccccaagggagaatgtcccatcatttccgcgagatgaaagttggtgattatttgtctgtgaagggacctaagggccgattcaagtaccacgttggccaagtgagggcatttggaatgctggctggtggatcaggcattactccaatgtttcaagttgccagagcaattcttgagaaccctaatgacaacaccaaggttcacttaatttatgctaatgtcacatatgaagacattcttctgaaggatgagctggacgacatggccaaaacctatcctggccgctttaagatctactatgtgttgaatcagcctcctgagaactggaacggtggtgttgggtttgtgtctaaggaaatgatccaatctcattgtccagcgcctgctgaggacattcagatcctgagatgtggtcctcctccgatgaacaaggccatggctgcacaccttgacgagctcaactacacaaaggagatgcagttccagttctaagcaatgttaagtttgcaaataataattagtgaccgacatggttcttcggtcacaggaatagtacctgactctgctcgttagctgatatcaggaggaattcaggatcacatgatgattagtagtgcgccagcattttttgcaatctctatttttgaggtcaaatgatatctacctccacataaatccacattggcagagacaacattttgttactatcattattgattttaaatgtggaccattggatgcgataaaaaaaaaaaaaaaaaaaaaaggttacattctctctaccagtaccagaataaacggcggtggaacaaagtcacagtcacagagcgctctgaaagcagcagtgtagttttctcgtctttgagcagaaagcctgaccatacgccatatagctccaaacagacgctctgacaaaaaaaaaaaaaaagctccctatcatcagttaaccatagcaatgcaaagcaccttatttttggttcatatatacacccaaaaagcaaacattttggttatgctgtttccttaacccgtgacatggattgggaatctctcttcttatctggagtaagcattttggttatgcagtcaccttagccgttaaatcgacaattctgacacatgacattgcgaggatagtcccaacccagaactctcagataattttgtacttatcaaatcaaatcatattcttaatgtatatttttgaacacaatattttatttagtcacgtgtctcctctattttattgtcttatcacaattttcgcttaaattttatttattagttattgctagatttttatatattatgtgagtagttcttttaat

SEQ ID NO: 153386 - DNA, 676 bp, Zea mays
  Clone ID: MRT4577_71467C.1
cgctctctcattctcatacctccaaacctcaagtactcaacacagaggaaagagtcttagcaacagatatggcttgccatcttagatcagttagtttgccttctaggcctcacaccaaggtcgaagaggagctgcacagcctagaggcaagcatctcttcaccctccatgaccatcgagactatctctgatggtttgaggaggcttggagacatctacagcaccattgaagagatcctgtgccttcctagcaaccaaatttgctcttcccagcaaaggaagatgttggaaggtgaaactgagtgctcccttgagctactagatctctgcaatgccatgcatgaggacttcaccgagttgaaggccattatccaagatctgcaagtggcgaccagaaaaggagatgacaccgctgctcaagtcaagatccagtcttacacccgcctagtgaagaaggcgaagaaacatttcaagaaggccgcgaagaaggttacatccaacaaggaggactgcaggatggtcaggctgttgatcgaggctagggagatcaccacctctctcctcgagtcaacagtacacctcttgtccaagcgaatcgcagtgccaaaatggtctctcgtctccaaggcattccagaagaagaactcggttgtttgcaaggaggagcagttgcaggt

SEQ ID NO: 153387 - DNA, 107 bp, Zea mays
  Clone ID: MRT4577_71468C.1
gtcatcaagactctttttagctgcagcccgactggtgatcactatctttggacctgcacgcttttggcgtatatgagcgcccaatgacatcagcatgacacacatcg

SEQ ID NO: 153388 - DNA, 737 bp, Zea mays
  unsure (1)..(737): unsure at all n locations
  Clone ID: MRT4577_71469C.1
caggttccggtccggaattcccgggtcgacccacgcgtccggcgggcgctcggagctcggaaatggcggccttggagaaatttctggtggagtataagagtgccgtggagaagaaactagcagagtacaagtgtaacaccaacacagcaatcgagctgaaactagttcgttttcctgaagatcttgagaatgacattagaactttctttcctgaatatacccatcagctctttggggatgatgaaactgctttcggttacaagggcctgaagatcttgctgtactatattgctggtagcctgtcaacactgttccgtgttgaatattcatctaaagttgatgagaactttgattgtgtggaggcagatgatgttgaaggcaaaatcagacaaatcattccacctgggttttgcacaaacacaaatgattttctttccttgctggaaaaggaaactaatttcaagccttttggaaccctcctccatacatacacagttcctagtcagacaggaggtgaaacctttactttccagatccacaaggctgacatgacatgtagaggctttcgagaatatcatgaaaggcttcagacctttttgatgtggtttattgaaactgctagctntattgacgtggatgatgaaagatggcactactttctagtatttgagaagtataataaggatggagctacgctctttgcgaccgtnagctacatgacagtctantattactat

SEQ ID NO: 153389 - DNA, 719 bp, Zea mays
  Clone ID: MRT4577_7146C.1
taggggccttttttttttttttttttgatgacaacacatgaattgtactagaaagaaacgcaacaattccagactccaagaacaacagcacgactcgtttccaggctctaagttctatcgacttccaccgatttttgtctccagaaacagatacccatgcatggcaagactgcaggaccagcaggtgaaaacaattgaatcatagccaactcctgacaaggataaacataacgatgataccacgaccagctgcagatcttagcagaagcccagactcgggaccaagaaaatgatgtgtgtctagccctgtaacccagctggctggcttctcggaggatatcatttgtcaatttgcccaccttaatatacctcgtatatacaactcaatcctgtacaatgttctcacgaccacctagaaatttgagagagattcatctgttagaaagcactctgcccagacttggaatctaacagagagaggcgcatcggtctgattaccacatgaaaattcgctacacagccgaagactggcgggataagggtcgagagacgagaactgccgcgccgcttgtcgctttcgctgatgcgatctcttcaaggcgtctccatgtggcctcttgcttcgacttaacctccttctctctcgctttctcttcctcgtatttccgcagactctccgtgaatagtccagggtcattgtcagagaacagttttcggac

SEQ ID NO: 153390 - DNA, 291 bp, Zea mays
  Clone ID: MRT4577_71470C.1
atgggcgggtccgaagccgccccatgtccagaaaaggtgatatactccatggcgtcaacagtagtccggacccccaaggttggtcccggacccctagatatacagtctggacctccaaggcagcgacctgtccatcccacaggcggcatgcctgtccattccattggtagactgcacgcccatgctgccgcgtgcactacgcccatcattactcgtacgttaccaaggaagctgccgttgtatgtcaacgttgcgtgtgctgtggacaacatgggcctggagattgcatag

SEQ ID NO: 153391 - DNA, 225 bp, Zea mays
  unsure (1)..(225): unsure at all n locations
  Clone ID: MRT4577_71471C.1
agcgagtgagaggtgaggcgcgcggcgccactctaactactatcaagagatagcacanaagcactagatagatcaccactcagcggaccataggtgaatatatacgctgtgtgacacacatatatacgctactgtattctccgcactgtactccaacgcacctcgantagagtgtacgggatatatacacactcgcgtgggcgcgcgcgcacacacgcgagagcg

SEQ ID NO: 153392 - DNA, 852 bp, Zea mays
  unsure (1)..(852): unsure at all n locations
  Clone ID: MRT4577_71472C.1
gcaaaaaaagatttaagttgaaaatattattcaaacaaaagaaatgcatgcaaggctcttctttaaatctactcccttcatccaaaaattaattcaagaatctcggtgatacttatctactactacgcattgtgcaagggtagcaggtgggcttggggagagatatagtagatatgttttgttatagatatagacataaacacacatgtggtgtagtggtagctaccgctagcatttgcttgagaggtcgtgggtttgaatccctttggggccatgtgtacttttttaattttagctaggcgtcggctatactggtggcagagcatgggaatggactgtgcgcggggaggagggaatcggaaaggcagaacacggaatgagcagaacaggaaatggcagaacgcggaatgaccgactactattgcagccttaataagtagtagagatttctgcctttccatgattatataaaatgaattaataatgttatgtgattgtatatatatatattatttcctatatttcatatgtttcttctttcacttaacgtatattgcggtgatgatgaaggtatgtcctttataacattcgtctgaaaatcattatatcctaagggaaataatgattcaaaggacgaaggaatttaacatttaatatcttgtattgttttgttttaattcatagcatttgagaacaagtctccgacactagagatgcgaaaacaacgggctactagcgaggggctcaccggggttcgacgtcctcacaactagggctgcagatcgggtcggcacgtgctgcgattttcnaccgaatagtncaagagcgcaagcggacgctgggcgacccggg

SEQ ID NO: 153393 - DNA, 318 bp, Zea mays
  unsure (1)..(318): unsure at all n locations
  Clone ID: MRT4577_71473C.1
gagcnctccagtcggcggccgccctcttttttttgggggttttttttaagatttttccccttttttacccaaacaatttaatgtttaaatttacatattttggtcccccaaacgggaaaaccggaaaatgaaaaataaccattaaaaatggctaatccccgccccaagaaattgaacaaagcaaacggccaggccggaacaaaccatccaaaagggactttccaagaaaaatacaaaactttttttttggcgaggaaggattaaacccaaggcccacccccgggaaaaatcggatctctggggaaaaattttagtttt

SEQ ID NO: 153394 - DNA, 612 bp, Zea mays
  Clone ID: MRT4577_71474C.1
cgtaaccacaaattcacaaatctcaacgacgagtatataaatacacgttggcatgccagtcacaaaaatcttacggtctggtttgtgtattttggtaacgaaagagattagagtggattaatttttattgtgggaattttttatctattgagaatttatacatactctaatccctccaaaccactttaatactagagtatccaaactagtcccacatgtccacgtttcacaccggttcgtccttaggtcagtgccacgttgctctgctttccgtcgtggacgaacctcttccaatacggcaataccagtgtttcacccagatgatgcccatggactcgagcgggatgcccttggtctccggcaggaagagcgcgatgaagacggtcatgacggcgacccaggcggcgtagtaggcgaaggtggcgtacttgaagcggcagagcatggcgaggaacgactgcgtctgcacgaaggtgaggcagaagccgatggaaacgttcatggcctgccctgccgaccggatgtccaccgggaatatctcggtcgggatcacccaccccagcgggccccacgaccacccgaacccgcagtgtgcagcaggtgaacaccaca

SEQ ID NO: 153395 - DNA, 291 bp, Zea mays
  Clone ID: MRT4577_71475C.1
tagaaactgaagagcctcctttcagttttaaattgtgcatcggaattgtagaattgttatcttagctttcaaggcatcgacacttcaaccttcggtttactcgtttcacgtgtgatccagctaagcactagtgtgaagtcgtagaaacattggccctttcgttcgttctcttgggagagttccagtggcgatgaagcttttcagttttcacagctcggatgtgagcaaatccatcagctcctgcactgcatggatcaaccgggtgtgtacagcagagcaagttcaatgaag

SEQ ID NO: 153396 - DNA, 342 bp, Zea mays
  Clone ID: MRT4577_71476C.1
ctcacgcgtgcgaccgaatctgtgagccatgtctaccaacaagggcagcgcggccaagggcggctgagggaaaaagaaggtggtgaagaacgagacccagctcgggatggcctatatgaagggccacaacttctatgagtggtactgccaggtcgtttttaactctgcaatgctttaccactataacatgtcctgctccgatatattgagggcaccaacgtcgggcgtatgcagcgctactggacagattcttatgcagcagccttaaggtaccctcgaccctaaaccatattatctgcaccctcttgatgatcctaacttcctaccttttgaagatgcttc

SEQ ID NO: 153397 - DNA, 306 bp, Zea mays
  Clone ID: MRT4577_71477C.1
cggaacggaataacaggggcccttttttgggcgggccctttaaatttttttcaagtggccggaaaaggggttacaaccctttcaaaccccctagaatcaaaaaaagaaaaaggggtttttcaaccggaggggttagcagaaaagtgcgagttgatgatctatgccgggggtcaggacactggccgcaccatttcaaaagggattggcacttttaccaccttttttgataacccccttaaaaggccagaaagggatcggggtagggttaattccgggggccctggcgaaggttcccaaaggaccaaa

SEQ ID NO: 153398 - DNA, 501 bp, Zea mays
  Clone ID: MRT4577_71478C.1
ggctggaagaccacccaagagccgataacaggactcgaaaggccaacagtcgagcagcacacctccacgcacggcaagcgcgacggctgcggtccactccacgccgagtgcgcgacctggaaattcgtgagtacagtgcaaacatccacggcagcaccgggactgcccttgacagctgcaacaccaccgacgacgacaagcacatacgtcacttcggtccacatagacccatgtagaatggtggtatattgtgctctatccaaagattctgctcgagcttgcgtaaaaaaaagtgtctttcacagcgttctgacctcgctgatttgacgagccatcaacggactgcgggcccttgtagcaatgttataacctccactctcttttgtcttattaactatgaagattcacttagaaagattcgtgttttgatagccacatttggatttgttcaccggacctctaccttcaacatatgatccgtttagcaagggctaattgagc

SEQ ID NO: 153399 - DNA, 582 bp, Zea mays
  Clone ID: MRT4577_71479C.1
gaatttcctgcggcggcgatggcgatcggtgatgctcttcgagggcgtgaagcagatactgcgccagcaacttcgatcttcgctcgactactacaataatatctacggacgagctcatgccctccccatgcgcctccacggcgatctagaccagttcatcgcctccgacccaggctacagggccccacctcaaggcccggtgatagacaagttaagtgcccgtttgtccggcgctgtcgcggaggctggccacctctgatgacacagccgtcaaaggactcctgagattggtgacacattcctgctacagaacgaacctccttttaacacgaaatccttggtgtcttacataagaagaatacatcctgaatctcactgttgagatggacaagcagaaagccaatcatatgatcatctacgtggagggagcaaccgactctctccttaacagcttgaacgtgcttcaatgaatggtggctattagcatgttccacgaagactacgaggtagtcgcctattaccaggaagccgccacgaatccgacagtcctctatttctctcctggtcatgaggagatcgagt

SEQ ID NO: 153400 - DNA, 398 bp, Zea mays
  Clone ID: MRT4577_7147C.1
gttacggtctccacctcctttcccatcctcttcttcagcgacgaccgcggtgcacaccatcgatatccttcccctcgggcccggaggcgagcatatcgactccagtgtctgcaacgcctgcccgtgtcgttattgggaggattccccatgtctgacatggagtccctagcacctcttatgaactatcaaagctccaagatacaccatcaccaggagccatttcctgatcttgaaagccagagcacggcctccatgaatctcaagcggaaacaccttgaataccactttcggggtcatcaacaggacctcaagaaaaagcttgtggcagctaaatatatcacgataatcgacctccaagagactgttctcaagaccggagaaaagtctggagtagtggt

SEQ ID NO: 153401 - DNA, 416 bp, Zea mays
  unsure (1)..(416): unsure at all n locations
  Clone ID: MRT4577_71480C.1
ggtcaccctcgnagtctcggccggggtgctttacttatggtgggttgagcttctcctccccctccggttcgggttcgcgttcgtgaggttctccggggatcggtttcgtgggtgagcggatcgagatggcggcgtctgatgtagaggaccgctgcttcgtcggcggactcgactagccacagacgaccactcccttcacaacgcctagagcacctacggggatgtgctagagccacaagatcatcctcactcgagagacgaaaacgtcccacggcttctggttccttaccttctccacataagaggcgatgcaaaacgccatcgacgaatgacctttgggaactagacggccgcaaaataacacgccacgaggactattctccggttgctacacagccacggctgatgcgcggtag

SEQ ID NO: 153402 - DNA, 688 bp, Zea mays
  Clone ID: MRT4577_71481C.1
cgcccgccgcattcgctcgcgcagccccgcgtgctagggttgccgagctctccctcaagctggatcccgcgtgctagggtttgccgccgcctcggccggtttcttgatcacttggaatgagaaaagactgaaatgagcgttctgtccggcagctggtagcactagatcttgattcaagaatggagaaggcgatgatataccagaagccgaagtaggagcagaaggccaagaaggttcttgatcacttggaatgagggaagactgaactgagcgttcttgatcacttggctgtactcgtcctaacaaccaaacaggcggatattgtgcccggccgtgcaaaaagtggaccaaaaagttcccggcggggaaattcgtgcggacgaacgaggatttgcaggataaggggttgaggaaaggaaacaccggtcaatccaagatgtggtgttcatgggctcatggctactagctcccttttcttcattagttgtctttcagctgaacaagcacagcttgatttacaccttttttttttcgtccaccaaaactgactgacacttcactgtcggttgtcgctgtcgaagattgcttgcataaaccttggcagttgacctgtgttttttttttacattttatctgaaacattcttcagatacaaattcagactgaagactgtttttttataacacac

SEQ ID NO: 153403 - DNA, 181 bp, Zea mays
  Clone ID: MRT4577_71482C.1
ggttttcacattaattgaaaaacacaccaccttgtgttagcaaaagaaatatggccttgcagcagtggggcacccgattatgctgagagatccttgccacacgacgatgtgtgcaaggatgatattagccattgcctgtatgacggacaacccttttcgggctgcatagttcactcaagtt

SEQ ID NO: 153404 - DNA, 249 bp, Zea mays
  Clone ID: MRT4577_71483C.1
acgccgtcaaaggcggtagatgctcttttatcgacccaataggagaggggggactccgcaaccggcgccatggcgtacgagaagatcaaggcctccaacccaatcgtcaagatggacggtgatgagatgaccaaggcgattctggctggctatcaaggacaagcttatgctcccattactggacctgggacatcatgaactatgattgggggatactgtaccctgaatcaacccgaccacaaggtccca

SEQ ID NO: 153405 - DNA, 297 bp, Zea mays
  Clone ID: MRT4577_71484C.1
tttctttcttttactctagccctcccagggtgtcggttcggcggcggcgatgggtgtcgccccggacccggcggacggcggcgccggcaccggcaccggcaccggcgacgactggttcctcgactgcggcattctcgacgaccttccggccgtggactgcggggccttcccgtgggacgcgtacccgttttctttcaaccccattgtggtagtgtgctgatttgtgaattcccatgttgtttttaaggagcccaattaatgtcttcatatatgcctggtagaattaaatatttttat

SEQ ID NO: 153406 - DNA, 489 bp, Zea mays
  Clone ID: MRT4577_71485C.1
gcgtctccgcctgtagacgggcaccacccgatggttgtgggcctggacctgcgacaccccgaggccgccctgcgccccgagtaggttgttcggagaacccgctcccttctcaacgcaacacgttcatgttaacggagtatgaggactcgccatataacgagcaccagctactcggttaattaaacataaacgaaagaacctggcaagtagcctttaagacacacaaactactaactatgaacggaaccagcttcgcacgacttaccatataagcgtcccagaccaattatctcgtatccgatcctgggtagggtcctgggtccaacttattaaaattaatcgacaatgggttacagtactatcgcaactggtggatgttctctatatttcttatgattcttcctatcgatatggttgattatgagtccatctaagtttgtcttagtttggatggggagaagaaggttcgttctgttctttgcgcttcat

SEQ ID NO: 153407 - DNA, 201 bp, Zea mays
  unsure (1)..(201): unsure at all n locations
  Clone ID: MRT4577_71486C.1
ctcgaggccggccgggccgggttccgagatgcgctgctgaacagtccctgccattttttgaggaccgatttccaggctgcagaggacccttataattacatccatcatgatcctatgttttgaaggagatagtcgcccccattccccttgaagggcggggggggctttttggcgccctnnccncccccccttttttttttt

SEQ ID NO: 153408 - DNA, 498 bp, Zea mays
  Clone ID: MRT4577_71487C.1
cccggggttcccccccatcctaaaaggatttttccaggttttctacaacccggaaaagtttaattcggccaagtaaaaaaaaaggttaaggcggggcccttaacctagtttaaaaaacatttgaacccctgccctccaaaaaaaacttcttactcaaaccctatcccctttccatactggacggttacagttttgtacacaaaagctgccccaccaaaagcagttataacctatggggggccttcactcccccatgagcttgagttccccctttggaggaggcccttttgaaattgctcctaaaaaccttttccccagaaactttcaaaattacaagggaactttgcaagccctttagaaaccttgaagttggttgaattcccctgttaaatcgtctaggttcaacaaaatcaaaagtagcccttcggggctaaaaaaaatcaaaactcgacttttaaaaggttttaagaaaacctctgtttgggttactgacagggg

SEQ ID NO: 153409 - DNA, 881 bp, Zea mays
  Clone ID: MRT4577_71488C.1
gaaatttcagttctcaatctacaaaaggtcttatcagagatgataatcgaagtgaagcatttgttttcatgatatcaactagagcaggtggtgtggggcttaatctcattggtgccgatactgttatattttatgaacaagattggaatcctcaagctgacaaacaggctctacagcgcgctcaccgcattggacagctgaatcatgtcttgtcaataaatttggtgtcacagcgcacaatgaaaaaggtcataatgcgaagagccgacagaaaacttaagcttagccataatattattggagaagaagacgggactgatgggaagggaggagatccaggaattgaagctagtgacatgagatcaattatctttggcttgcacctgtttgatccagcagatacagctacagaaacaatcgatgaggatataactgctgagacattcagtgtcgagaaactggcaaagttaaaaacaatgtctgaaaaggttgtcatgatgcgtagccatgagtcttctgaaaaggatgaacgagcatttgagatcaatccaaatatgactgatgacagtggaactgtgattagaagggcttctgattctatccgcattgatcctgggctaaatgaagctgcatacctatcctgggtcaagaagttcaaagaggcttccatttctagtgaagatgccacagttggatttggaaggcaaagagcagcgcctgaagaaaagctcctgaaacatgatgttaacaagcaaaaaatagaagaaaagagattggccaaatgggaaagtttgggttaccagacactagcagttaaggaacctgatatcacagcaagccagaatatttcagacgccaggatccattcatttggatatgga

SEQ ID NO: 153410 - DNA, 355 bp, Zea mays
  Clone ID: MRT4577_71489C.1
cgcctgcgggtgccggtgtcggattgcaatggccgggccgacctatgcgttttttttttttggcctactacaaacaataattatttacttgcccaggagagttattgggtagattatgatcaagacttatggagaagactacatggaccgattgacgaggcggatgtttatgcaagctgaggcataaaggcctatatcacccatggacggtatcgcttatttaatgacatgattgacatgcatgggagaggctgtacgaccttcaaagcgggctttcccctgtagccctcatatggtagcaggcgacgcatcacactaaggatctggaattagaacggctgcatgaccaactaaa

SEQ ID NO: 153411 - DNA, 395 bp, Zea mays
  Clone ID: MRT4577_7148C.1
cgggcccggaatccccgggcggaccacacccttccgggaaggcttaaggctcgggggaaaggtgtctgtccagacaatcggccgtggaaagtaaaggcacagtttacccaagaggcacattcctaacaagggttgtttaactccaactccaagggaggggcctttggagcccatttccaaatggggaccattgctttctttggggcaaattttttccaaggggttcctccgaacctatcaaggggacctgaaaggtcctggcttggccaccaaaggaagcctggaattggttttgcctttcgctttaccacaaccaaaatggtgggccctctacaggtcgcaggccctggattagttgccttaagtattgtccagaaaatttccaagagggtttc

SEQ ID NO: 153412 - DNA, 307 bp, Zea mays
  Clone ID: MRT4577_71490C.1
aaccaaaaaacaaaacttggggcaagatcacaggatcttttgggggggatcacaagagtagcgaccccctgtttcctggactggacaaacagaattatggtgtataactcttggggcccaagaccctttaaaaaacagtacagatcattttttttaacaggctaaaacaacatattttttacatgtttacagacgggttgtttctacaaaaaaaccccccatacgggaactcattcataccataataatggggttcctttttttgaggaaacgcccactctgggcctggcatttatttaaacaggct

SEQ ID NO: 153413 - DNA, 793 bp, Zea mays
  Clone ID: MRT4577_71491C.1
ccggccgggattgcgccatttccggccgggagccaattctcggtaatctctcgattaccttcactgaatgttctcgtcaaggtaatttatgcaggcgccttttggctctcagcattgcatcgccgaattgacctaggcccgatgcagcccaagtccatctgcatctatcgcagccttctttgggaatccttcgtttggttcagaaatatagcactgctggcttctcctcatcgtgattcctgctctgaaaccttaatcaagaacaggccatctctcgcatcacttgttattaccatcaggtttgtttcagtatcagtagggaccatggatgaagaaaacgatggctctacacagagcatcacggtagaaatgaaagtatacatgcattgcgacgcttgcgaaaggaaagtgcgccgtaccatcagcaaagtcgaaggcgtcgggacggtagaggtggacagggaagagaacaaggtcacagtgacgggagattttgagcctgagaaggtggtgaggaagatcaggaagaagaccggaaagaaggcggagatcttggtccgcgaggaaaacgaggaggacgaaggcaacggaaaagaaacttacgttccttatccattgctgtaccctgatgcagatattcccgacgagtttcagacctataggccggaacgatggaacttccattactttgacgacgaaaactcacaagcgtgtacggtaatgtaacttcgattaacgatagttatatttatgagtacagatatcgaacaaatgtgttaaaactcaactggct

SEQ ID NO: 153414 - DNA, 493 bp, Zea mays
  unsure (1)..(493): unsure at all n locations
  Clone ID: MRT4577_71492C.1
taggctcgagatccccgagggggtcaaggtcaccatcaagaccaggaacgttgtcgttgagggtccccgtggcactctcgagaagtcgctcggtcacttggctgtctccttcacccaccccaagaagaacctcatcaagatcgagctccaccacggctcccgcaagagcgtcgctaccctccgcaccgtccgcaccctcatcaacaacttgatcatcggtgtcacaaagggctacctgtacaagatgcgttacgtctacgcccatttccccatcaacgtcaacgttgagaagaacggcgagaccgatcagttcgaggtcgagatcaggaacttcattggcgagaagcttgtgcgcagggtggtcatgaggcccggtgtccacgttgaggctgctaagaaccagagggatgagctccacctctccggaaactccctcgaggatggttcccagtcggnccgcgacatccagcagatctgcaagggccgcaacaag

SEQ ID NO: 153415 - DNA, 222 bp, Zea mays
  Clone ID: MRT4577_71493C.1
cggttcggaattccgggctcgacccacgcgtgcgcccacgcgtccgtccacgcgtccgccctcgcgtccgccgacacctggtgccgggctaggttctaatgagagtagggatgcacactgcactggagactgcgtagctgctcactttgaacacaaccactaccgatgtggactaaacgtgccatatccaagaaaattgtcaaaccagccctacaagtctca

SEQ ID NO: 153416 - DNA, 638 bp, Zea mays
  Clone ID: MRT4577_71494C.1
cccacgcgtccggctgaagcgaacacagagctgctcgccgtgtaacgcagcaggcagcagcacccagaggcggcaggccacacacacagcacacgcagatcttcgatcaccaccatgggttctctcggcgtcccggtcatcagctggcccttcttcgccgaccagcagaccaactgccgctaccagtgcaacgagtggggcgtcgggatggagatcgacagcaacgtccggcgcgacgccgtggcgagcctcatcgctgagctcatggagggggagcaggggaaggagatgaggagaagggcactggaatggagggacaaggccatcgaggtggccaagcccggaggcacgtcttaccggaatttcgatgaactggttcgcaatgtgctcctgccaaagaactaggcaacttagctctatatttgcagtttgcacggtgcttctgccagtgccgtgtgattttgttcctttgttttggagggagatggacaggtcagtgtcgttgtgtaaacaataaaaatacatgcatacgagcgtcccattgaggatgaaaaaaaaaaaaaaaaaaaaaaaaagggcgcgccccgagtaatatgcgcgtgtcgacccggatatatattgcggaggggcacgcacag

SEQ ID NO: 153417 - DNA, 834 bp, Zea mays
  Clone ID: MRT4577_71495C.1
gggtttagattatctatagatataatatattttttctcgaacctacaggagagttgtgtgtcatttcattaagtaagaaaaacctttagggctagttcctggagagctgcagccccagccgggcaccacatctgcccttcatcgaccactgccaacacaacactttgaacaccaggccaaggtttggatgaatcagcttttagagaccatataaccaacggatgcacagtgcccaactcattctttctaaatcatgaacaccaagccagccatataaggtctttgcaccttagcccatgatttttttttctcgagacgcgcaggagaactgcgccccgttatatattaagcagaagaaaatagaaaaacaaaggtctttgcaccttagcccatgataccaagcaatttcctccattggcctgttcatgaccttttcacaaaaatccccttctctttttatccattgctttgaaaaaccatttgggcagatccaagtcaatcataaggtgattaggagttgctgaaattacggatttaaccacaactaacctcctatattttttcaaaaggtataactactttttgtaaaactaccacaagaaactacacttttaatggacaaattttagagaatcacgatactggttacttagtattcaacaaggctacactcttttagcattgttaggctatatctacatcaactcttctatccattccctgtcccacctcctatttcaaactctactgtgcaaataagttttttttggaaaaaatatgttttttgtgaagctattgctaaaatcactttttttgtgatgcatttgtgcaact

SEQ ID NO: 153418 - DNA, 471 bp, Zea mays
  unsure (1)..(471): unsure at all n locations
  Clone ID: MRT4577_71496C.1
cggcnaattagctcatcnnngactccagattgtgatgtaactcgnnacaccatgaagnngtgctgagtcggtggcccttggcttctcctgggcgcnntcgctgcgaggcnngccgcctctcagtacaagggcggcggctgggtggctgcctagactaccnnaccgtttcaatctaccccgcctccnnngttctatannngccgcctnnccgttctaattctgcnncgccgcangnncagcagcccccgcagcccatgggctaatactctccacttctaacccactcgcagctttaagcctcgttgcccagcangnnttcggatctcctgcgnnngcgttcggcagctngtcgtgcagctcccgttcccttgggccaagtgggcgtcgaggttccctgagggcaccaagtgcaagccccggcgggcgacgctcctacggcttcgccacaagtgcccaggcgctgcagcagca

SEQ ID NO: 153419 - DNA, 1830 bp, Zea mays
  Clone ID: MRT4577_71497C.1
ccggccggttcgggcggacgcgtggggtcacagagacgaccagctgaagcgaacacagagctgctcgccgtgtaacgcagcaggcagcagcacccagaggcggcaggtcacacacacagcacacgcagatcttcgatcaccaccatgggttctctcggcagcgccgcgcagcagcagcagcaaccgcacgccgtgtgcctgccgtacccagcgcagggccacatcaccccgatgctcaacgtggcgaagctgctgcacgcccggggcttccacgtcaccttcgtcaacaccgagtacaaccaggcgcgcctcgtccggacccgcggggcggcggccgtggccggcctcccgggcttccgcttcgccaccatccccgacggcctgccgccgtcggaggacgacgacgtcacgcaggacatcccctcgctgtgcaagtccaccacggagacctgcctcggtcccttccgccgcctgctcgcggacctcagcgacccgcccgtcacctgcgtcgtctccgacgtcgtcatgggcttctccatcgacgccaccaaggagctcggccttccctacgtccagctctggaccgccagcaccatcagcttcctcggctaccgccactaccacctcctcaagagccgtggcctcgctccgctcaaaagtgtggagcagctgacgaacggattccttgacacggcggtggaggacgtgccggggctgcggaacatgaggttccgggacttcccgagcttcatccgctccacggatccggacgagtacatggtgggctacgtcctacaggagacggggcgctcggcgggcgcgtcggccgtgatcctcaacaccttcgacgagctggagggcgaggcggtggcggccatgcgctcgctcggcctggcgcgcaaggtgtacacgctgggcccgctcccgctgctggcgcgcgaggacccgcccaccccgcgctccgccatcagcctcagcctgtggaaggaggaggaggagtgcctgcggtggctcgacggcagggaccccggctccgtcgtctacgtcaacttcggcagcatcaccgtgatgaccagcgaccagctggtggagttcgcgtgggggctggccaacagcggcaggccgttcctgtggatcatccggcgcgacctcgtcaggggcgacactgccgtgctgccgccggagttcctgtccgagacggccggccgcgggctcatggccacctggtgcccgcagcaggcggtgctggaccacccggccgtggccgcgttcctcacgcacagcggatggaactccacgctggaggccatgtgcggcggcgtcccggtcatcagctggcccttcttcgccgaccagcagaccaactgccgctaccagtgcaacgagtggggcgtcgggatggagatcgacagcaacgtccggcgcgacgccgtggcgagcctcatcgctgagctcatggagggggagcaggggaaggagatgaggagaagggcactggaatggagggacaaggccatcgaggtggccaagcccggaggcacgtcttaccggaatttcgatgaactggttcgcaatgtgctcctgccaaagaactaggcaacttagctctatatttgcagtttgcacggtgcttctgccagtgccgtgtgattttgttcctttgttttggagggagatggacaggtcagtgtcgttgtgtaaacaataaaaatacatgcatacgagcgtccaattgaggatgggcaagtctgaaacaaactgttgtgcttgcatggattatattgataaaaatacatgcaaaccgcaaaaaaaaaacaaaaaaaagcggcc

SEQ ID NO: 153420 - DNA, 324 bp, Zea mays
  Clone ID: MRT4577_71498C.1
ggacaggccaacccataatttgatagacaacccagttaagttgtttcttaaaagacacaataaatcccctagttgcgttaaccaacgggggatgacccatagaaatctccgcccatcattaaaaaattgcaatgggggaatttcaccacgaatggtgctcacatgaatggcgccccgacacaaacgagaggggggggtgtttaactgggttaaagcggggggaacccccccgttaaaagcccaaaaaggcgcctgttattccctctatttttaagggacaaattttttaaaatcttgtgccgacccctaagggccctggtttca

SEQ ID NO: 153421 - DNA, 538 bp, Zea mays
  Clone ID: MRT4577_71499C.1
ccgtttgatgtctcgttcgtccgattcgttcctatgcaatagggcatactcaagattttgaagtgaattatggatatctgccatacatccgagcaactgaaccagttgtgtgttacatggacagaagcactggcaacactataaaaagactactcctggtcaagggtccttaacacagaccttagagaagatgtggactgcccgtgtatgtcacactaaacgggagctacacctagacttcaaaacatgatcccgaggaacgagatcgagaccactacacgccaactacagcttatgcttgaaaaaggaccgtgtgcgaccccgttcttgaaacgccaggcttacttatattgcacctcctgttggtactcaggcttggtcttattctacacgggcgtgtacaggctcaagcccaggctcttgggcaccgacttgtccatgctggacgcgaactccttgggagtagctgaggttgaacccgctctgcataaggagcgtctggatcaccagacttagcggctgcttcagataatctgtc

SEQ ID NO: 153422 - DNA, 223 bp, Zea mays
  Clone ID: MRT4577_7149C.1
atctcttagaccccaaagtgagatgacagtctcttagagttcgagaacatagagttacggtaccatatgtagatgggttatctcaactagctgtgactagttttgaggatattgagtcattgatgtctgagggaaataggctcgacggtagctgtaccacatgacaagaagcagacgtccatgctgtgtcaacatcataatcacacagacactttatgacctg

SEQ ID NO: 153423 - DNA, 309 bp, Zea mays
  Clone ID: MRT4577_714C.1
gggaaaaaaaccggccccggttttaaccgataatgggggggggtttgaaaaacagggttttgaaccctggggcagttgggaagttttacctgacgggggaaaaaaagggcaggggattggagcttttatgagccccggtcctagaaagggccacaaagcaggggtctggaaaaaaacggggggccaccacatcccccagcagcgggcaatccgggggccaaggggggggcggcctcaaacaagcccctgagctggagctagcctagcaatgggaaccctgaagggggggcaagaaacgtaatccacccc

SEQ ID NO: 153424 - DNA, 1529 bp, Zea mays
  Clone ID: MRT4577_71500C.1
ccggtccggaattcccgggtcgacccacgcgtccgagaattctctcggtctctaccaaaaaaacagcgacctctaacgcttagctagctctttgtgtcagcgcctgagcatcgagctattggcatggcgcactccaccaccttggccctggtgattgtcgttgtgctggcgctcacctttggtgccacggtcagtgtctccgctcccgtgaacaagtcgtgcgtcagcggtagcgccggcgccagcgtgagcattggctacggcggggcaagagccagcgccggcgctggcgtgtcccttggcgccgacgcgtaccggagcacgtgcccccgtgccgaggagatcatccgtgcggccgttgagagggccgtcgctgccgacccacgcatggcagcgtctctcctgcgcctccatttccatgactgcttcgtcaacggctgtgacggctccgtggttctggacgacaagccgttcttcatcggcgagaagacggctgtgcccaacgccaactcaatcaggggcttcgaggtcattgacgccatcaagaccgagctggagcgggagtgcccagatacagtttcctgtgccgacctccttgccatcgctgcccgtgactccgtcgttgtgtctggcgggccgagctgggagattgaggtcggccggaaggacagccgcaccgccagcctgcagggcgccaacaccaacctcccagcaccgacgtctggcgtcgacaccctcgtgcagaagttcaggaacgtgggcctctctaccaaggacatggtcgcactctccggcgcgcacaccatcgggaaagcgcggtgcacttcgttcagtgcgcgccttgccggcgccggcggcgtctcggaaggcggcgcgggcgccttcaaggacctcaccttcttgcagtcgctgcagcagctgtgcacggggtcggctgggtccgcgctggcacacctggacctcgccaccccggcgaccttcgacaaccagtactacatcaacctgctctctggcgacggtctgctgccgtcagaccaggcactggcgtcgtcggctgccgtgcctggggtagaggcggacgtcgccagcctcgtcgccacctacgccttcgacgcctccgtattcttccaggacttcgcggagtccatgctgcggatggggaggcttgcaccgggcgtcggcaccagcggcgaggtccgccggaactgccgggtggtgaacagctccgaataaagtcatgcatgctcacgctcaactatctggtcgtccgtgcggcttgcattgctgatttgttatcagctaagtcaagccagtaagtttgtttgggttaaaaaataatcggctttggcatgggaattatgataatggccatcgtttaaatagctactagtaggtgtcttgatgtactaatgtactatctacgctacgtactctgctgttcccaaataaatatttttaagacattaaatctatctaaaaaattattcaaaaaaaaaaaaaaagggcggacgctcgcgatctagaactag

SEQ ID NO: 153425 - DNA, 152 bp, Zea mays
  unsure (1)..(152): unsure at all n locations
  Clone ID: MRT4577_71501C.1
ggcatatncttccgaggccccgaacccgggcaaacggaaccagcccagancagcgaaacacacggggcgcncccgagaccggacacanggcggcggcggcggngacgnccaacggcggcgcagnggccgcaaaagggccggcgcccggccgg

SEQ ID NO: 153426 - DNA, 351 bp, Zea mays
  unsure (1)..(351): unsure at all n locations
  Clone ID: MRT4577_71502C.1
ggacagggagagagggggccaaaaagatgtataatcaagggtctctcctgcgggaccccaaaaaaccgagggtccaaaggagctccacacttaccttttagcctcagcaaaggaccacattatttgggccttcaaaaacgccctcgggcttgacaaggatcctctgggggcggggagtttagccccccgggggagggaagaaccactttacccccccgggggggattccccggggggaaggggttaattagcccgggagctttggagctcttagcctttgggcggttgggtctcctccnggggcctgggggggggggcctggggggtgggcgcggggggggccttgggggg

SEQ ID NO: 153427 - DNA, 412 bp, Zea mays
  Clone ID: MRT4577_71503C.1
aaccattattttttgaggtttttttattatcctttgggtcaaggaagaattgggagaacatgtttttggggggggggggggggccaaaaaaagaaatttccttttacacctttaaaccacggggaggccccaagcccctctttatggcatcggagcaagggccgggccccgcccagcagtactctaggagccccccgacaggccaaaaaaaggggaaaatcttcaaaaaactaacggggggcccccaccaggaccaaaacgggggggcccccgggggggccaacccctccaggtcccccacctattatgggggcctgaaaagcacaccatgcccgaaggcccacggaaagccaaaaaaggccctggaggaggggggcgccgaaaaaacccgcccgggggggggaaccaaaaa

SEQ ID NO: 153428 - DNA, 237 bp, Zea mays
  Clone ID: MRT4577_71504C.1
ccttgtgttttttgttggggctgattacggcgcatgaccccagacaccatacaggtcacccagggcgacacggagtggtcggaagcttgagacatgtcctctaggtcacacacaacactgttatgggagtaccacgataacgaaaagtttcgccggctttgcgcactagccgatgaacagggcgcccatcttaactggagggcctgctgatggcactggaggccgactagagtttag

SEQ ID NO: 153429 - DNA, 257 bp, Zea mays
  unsure (1)..(257): unsure at all n locations
  Clone ID: MRT4577_71505C.1
ggaagccggtgctccaagaagatctttatttcacacacccatatattgctcataaccctaacaatgaagangctagtttttttttatcaataaatccaaacctttttagaatgttaaacattggaatggttgtatttttcaaaacagtggacattggaaaaatgttttactttttgagggtgagcattgtacaaatatgacattccttttcacccatgcatcaatttatttagaactcctcctttttttcaaaaaga

SEQ ID NO: 153430 - DNA, 716 bp, Zea mays
  unsure (1)..(716): unsure at all n locations
  Clone ID: MRT4577_71506C.1
agagtttctagtttgagtcgcggtgtgaaagccagagggcgttgcgagtttcaccgcaaccggactcgtacaggtcagttcggggtgcgcgggcagccaccgccccgttcaatggccgccgcgctttacctcccggcgaacccaaatccgacgcccaaccctacctcgtccctccgccctccgctgccgcggccttccacttccggcgagctccacttccgtccccgcccagtgccccgtcgtgcccgcgctcgaacccatctccccgccgcgttcgggaggcgaccgcccgcggcggctgcggccgagcgcggagggaaggactactacgccacgctgaacgtccggcgcgacgccaccctgaaggaggtcaagagcgcctaccgcaccctcgcgcgcaagtaccacccggatatgaacaagagccctggggcagaagaaaaatttaaggagataagtgctgcatacgaggttctgtcggacaaagagaaaagatctttgtatgatcggtttggagaaacaggacttcatgcanattatggnaggtggagatttcggtgcacatggggttgatccatatgaactcttcaatgcattttttggcagttctaacaagttctttggagatagcatgggtccagggcgatttcattacagttcaaatgtcaaggataacagggcacttgatattcgctatgatcttctccttccttttg

SEQ ID NO: 153431 - DNA, 373 bp, Zea mays
  Clone ID: MRT4577_71507C.1
ggatttcttatcctatctcgattagactttcctttgttggttgtctgggataaaaaaattcctttctatctgagcatgcatatggtttttgttctgttcatgatcttttttacaaaggtcgtgtagcagcttattcttttgaatgacatttgcaatgatgatactgtttttacccagctcattatgagacttccctctgtgggttgtcatgataagtgctattcctttgtatctgagcgcattcaagaattttactcatttgccgtccactattttcttaccaagctgtgcaattttacccatctatttaagtcatttgtacaacgggcgtagtctgatttgttctgcaatgatgataagatactctaatccc

SEQ ID NO: 153432 - DNA, 281 bp, Zea mays
  Clone ID: MRT4577_71508C.1
atgcccacaaatcagcatgcacattaatggatgggagttaccattatagactagcatagtgacgaagtcgcatattataaagagtctggctactactcattggatcggatggataatgtgcagctcctgcgtactaactcaagtcccacccacggcttatatattcggatcaacattatcgacgagtaaaaactacagctcgtccagtacatcagtggctgtcaattttgtcgctgtcagcctggtagctgcatgactagcgacctccttcaccatgccag

SEQ ID NO: 153433 - DNA, 702 bp, Zea mays
  unsure (1)..(702): unsure at all n locations
  Clone ID: MRT4577_71509C.1
gtaccctcggagcttgccgggaccggccgctcagcatggacagctactatttgtactggcaggggaagtggtattggtggtcggggtactggaacgatcctaacgatagcagacgttacccagcagttaatatagttatattaactaatgcctccttcaactatgcgttgggcatgggagcattagccgaaccacctcaggacagctctgccgacggtgtgatcttgatcaaggatatggcggagtggcaaaagcactgggaccagactgctccatacaacaagctgctggtgtatgagttctacgaaaagaattcctcgctgtgcaaggccatggacaagccgttcgagaagctcgccacgcagtacaaaggcagggccgacttctgcaagctggacgtggacaactttgagcttttggcgcggatttgcggagtggagggagcgtatccgacgttcgtgctgttcaagaaatgcgcgcaggtngttgcagctgttggattgctgcagctgcaatccatagagagaaaaatactgtagaagccgcagccgcagccggattgcagccgcagcaagccgcagcgaacaagctgctagctaggagtagtcgtcaactcgtcatgtagtaccacacagactcagttttcgtacgtgtgccaagacanaactacaaaaggacatgactatgcgtacgcatcgatcg

SEQ ID NO: 153434 - DNA, 355 bp, Zea mays
  Clone ID: MRT4577_7150C.1
aataaaaccagaaatcaatcagtccctagatagacgtcgggggatctgtaaccggtagaaaatataatccaataggcttaccaagacagttcgctaaacgtgaagagcgtctgaccccgattaagctatcccgacaagcaattcaatatgtgcgcccatcttatgagacaaccgggacaaaccgagcaacagtgcaaacacagatctgtataggaggatgataatgttccccatcgggtcatggcagaagcccatccttgagagaagatgcgcttgaataatcagcccaaacccgtgatatctgagaccgccgggacattcatatgccacatgaattcctacctataagactggc

SEQ ID NO: 153435 - DNA, 742 bp, Zea mays
  Clone ID: MRT4577_71510C.1
actcgagctccaagccactggagctgctcctggacaggagcggcgagacgcccagatacgtcaaggccaagtccgactacgtgcaagaacccatcccacggcacgtgtgggagagaacatggtcatggctggagaagcccgaggccgggctgctcatcctggacccctacggcggccggatgggcagcggctccctcgaggcggggcgggtcccgcaccggaaggggaacctgtacaacctccagtactactcgtattggttcgagaatggcactgcggcattggagaagcggatgagctgggtcagggggctgtacgaggagatggagccgtatgtgtccaagaacccaagaactggatatgtcaactacagggacctggatcttgggacgaacgagttggaggacaatgtgactagctacgccagggcgaggatctggggggagaagtatttcaaaggcaattttgagaggctggcagctgtgaaggccatggcggatcctgatgacttcttcaggaatgagcagagcatccctcctcttcccgctgcaaaaggatggggctccatttgagtggtcgtttgtttcgtagctttgcctggtggtggatttcttgtctacgtttgtgaattgtgatcacggctgaggatttgcatgggtgaagtgtagaatgcactattgtattccgtgttctgttgagctgagttctctttgatttgtttttaaaaaaaaaaaaaaaagcc

SEQ ID NO: 153436 - DNA, 871 bp, Zea mays
  unsure (1)..(871): unsure at all n locations
  Clone ID: MRT4577_71511C.1
cgaggggccggccgggccagggnaactcaaaaaaatagtattgcaaatagcaatttacctatgatgatgcagcaagctgttcagatgcagcagatgcaattccagcagtcactgatgatgcagacgtcaatagccgctcagcaggccgctgtacgtgcagccaccatgaaaaatgccactgatgcagcagctgcacgggctgccgagataagcaggaagttgaaagcagagggctttggtggggaaactgcggaagaaaaggatgccaaagagaagtcgagatcgccatcgcccccttctcgtagatccaagtctcggtcaagatcacctatcaagtaccgtcggagtaggcgggatcgctcttactctccgccagttagacgctcccgggatcaccgatcacgatctccgtcgagatctcaccactcaaagtatggcagtgaccgatcatatagggatgatagggacaaatatagcaggtctgggagaagagagagtgacaggtctcgtgatcattactcatctagttcaaggaggaacaggagcagaagtataagcccgaggtctaagaagccatcaagagctgattctcgttcaccgaagcggcaaagggaagaaagtttaagcccatcaaaatcaagaaggtcagctcgtgctggctcaaggtcaccacgacatcataaaggaagcaagtcatcaccaacacgcgatcagcgttcttctcgtcgtagcaggcattcaagatccagatctcaagagagaaagcatcgtagcagtgataagaaggatgtaaaaaaatctgaggggcaggatgacaaaaaaagatctgatagaggtactagaggtggcaaagatgaaagtctggtaaagg

SEQ ID NO: 153437 - DNA, 650 bp, Zea mays
  Clone ID: MRT4577_71512C.1
gttctagatcgcgaccggccgctcagcatggacagctactatttgtactggcaggggaagtggtattggtggtcggggtactggaacgatcctaacgatagtacgcatgcggcggtgctccctgttctatctatctatctatctatctatctatctatctatctatctatctatctatctatcttgtgtttctcttcatgctattgtatccaataaaagagttttcctgtaattttaaccagctagccgccggtgtcttccttgatctatgtgcatgtaggcagacgttacccagcagttaatatagttatattaactaatgcctccttcaactatgcgttgggcatgggagcattagccgaaccacctcaggacagctctgccgacggtgtgatcttgatcaaggatatggcggagtggcaaaagcactgggaccagactgctccatacaacaagctgaattcctcgctgtgcaaggccatggacaagccgttcgagaagctcgccacgcagtacaaaggcagggccgacttctgcaagctggacgtggacaactttgagcttttggcgcggatttgcggagtggagggagcgtatccgacgttcgtgctgttcaagaaatgcgcgcaggtgggcaaggtcgttggcct

SEQ ID NO: 153438 - DNA, 977 bp, Zea mays
  unsure (1)..(977): unsure at all n locations
  Clone ID: MRT4577_71513C.1
gtcgggagagcacgtattcgttccttgcctcatgcggatcgatggacggccttagctcccactatactactccatatatattgcccctgctccttcctcacgagctagctcaccggccgctcccctagtccagcatgtacagctactatctgtactgggaggggaagtggtattggtggtcgtcggggtactggagcgaacctaacgatagcagacgttacccagcagttaatatagttatattaactaatgcctccttcaactatgcgttgggcatgggagcattagccgaaccacctcaggacagctctgccgacggtgtgatcttgatcaaggatatggcggagtggcaaaagcactgggaccagactgctccatacaacaagctgctggtgtatgagttctacgaaaagaactcctcgctgtgcaaggccatggacaagccgttcgagaagctcgccacgcagtacaaaggcagggccgacttctgcaagctggacgtggacaactttgagcttttggcgcggatttgcggagtggagggagcgtatccgacgttcgtgctgttcaagaaatgcgcgcaggtgggcaaggtcgttggcctcaaggaggacgacctcgagcggatcgtccagcgagcgataataagctagggcgtgttcggctggctacaagccgacactgttgcagctgtttggattgctgcagctgcaatccatagagagaaaaatactgtagaagccgcagccgcagccggattgcagccgcagcaagccgcagcgaacaagctgctagctaggagtagtcgtcaactcgtcatgtagtaccacacagactcagttttcgtacgtgtgccaagacaagactacgataggacatgactatgcgtacgcatcgatcggcacagtggcggatctacaccctctgtggctggngcttgatcatgtaatcttatatagtctctatgtatacgatat

SEQ ID NO: 153439 - DNA, 1636 bp, Zea mays
  Clone ID: MRT4577_71514C.1
atgcaaacgtccgtaagctcggaattcggctcgaggcatggacagctactatttgtactggcaggggaagtggtattggtggtcggggtactggaacgatcctaacgatagcagacgttacccagcagttaatatagttatattaactaatgcctccttcaactatgcgttgggcatgggagcattagccgaaccacctcaggacagctctgccgacggtgtgatcttgatcaaggatatggcggagtggcaaaagcactgggaccagactgctccatacaacaagctgctggtgtatgagttctacgaaaagaattcctcgctgtgcaaggccatggacaagccgttcgagaagctcgccacgcagtacaaaggcagggccgacttctgcaagctggacgtggacaactttgagcttttggcgcggatttgcggagtggagggagcgtatccgacgttcgtgctgttcaagaaatgcgcgcaggtgggcaaggtcgttggcctcaaggaggacgacctcgagcggatcgtccagcgagcgataataagctagggcgtgttcggctggctacaagccgacactgttgcagctgtttggattgctgcagctgcaatccatagagagaaaaatactgtagaagccgcagccgcagccggattgcagccgcagcaagccgcagcgaacaagctgctagctaggagtagtcgtcaactcgtcatgtagtaccacacagactcagttttcgtacgtgtgccaagacaaaactacaaaaggacatgactatgcgtacgcatcgatcggcacagtggcggatctacaccctctgtggctggggcttgatccatgtatctttatataagtctctatttaatacgatataaaatagttaagataaaatgaagatgagaaaatttggtagatttagtccggatcataaaaaaattctggatccatccctggatcggcatgctaccaaaaatatgtacgataaagcgtacgtggtacatatatatggtcggtctatcgtcgacctagctaggattttagtagagacataactattaaaagaaattcgtgaataaatttagtacttccaccaactagtcaaagttgttaattagtctttgcacgcgtactgccacactatttgtttcctgacacgtctcatgtatcaagtcttaactagatatactcctctgtaaattatggggatatctgcctgtcatgaatttatcagatattctataccttttctttctatctattctatatctatataatttcccccttagcgtcataacttcacgtgtcatcaatatatgtttcgttcataccttagattatatgctccttatggtgctcctcctacgttccctcccacctatggtgctcctcccacatgtggtacccctgctccttctcgtgctcccttaaaaacagtagtgctaccaagtagccagaatgatgcagactccaacatagtccacgttctctggtgcatcatagtttcaatggcgacgggcctggactaagatggaggatcaaaggcttgtaaatacgcgtacacttttatgaattccatactttttgaaagtacaaaatattttttgagtttgggcattaaaaaaaaaaaaa

SEQ ID NO: 153440 - DNA, 305 bp, Zea mays
  Clone ID: MRT4577_71515C.1
gcttattacaggacagcgggccttcgatctagcttgccttgctaatgatgatgatgtcatgcttcttgattgggggttggtggtcaatttttcctatgtaaccgttaaaaaacttgctaatcatttgatccaatgacaaagagcttttgataatgtctaaggaataaatattttaactgaattggtgcattgtgataggctgacagctgaacaagtagtgacatgctcctgtccctgaaagtcaagggattgctcaaggagaagaaactggagagtctggtcgaccaaaacttaaacaccacttc

SEQ ID NO: 153441 - DNA, 585 bp, Zea mays
  Clone ID: MRT4577_71516C.1
ggccgcttttttttttttttttccaatgcaactagcagctctttatattttctataatttactgcaaaataaatataaaaaaaaggagaaaaatactaataaacagaaacagcgagatcacgcgttcggtcggtttaatagttaagaaaaatataacttttgcgatagctagagaaggtaaaatagaccttttcctcctatccagaacagtaaccaagatcttcactggattttgacaaatgctgagggctgctataggccaaaccctgagcgccgcagccccgggcaatcaatcacatggatttttgtaccggcttctcattagcagaccgggcccatacctctgcgaatcagacatgtacagcagcctttcgagactcgcatccacggattatcacatggccgcatggggcctgccactgccaggcaaggacgggctgcttattcggatgatcgctgatcggatcaaagcttagctacaggactggctctttttgaatgatctacacaggtgaataactcatttgccaaaaaaaatctacaaaaacgcgggcttgttcgttccttgagggatgggatggcggc

SEQ ID NO: 153442 - DNA, 653 bp, Zea mays
  Clone ID: MRT4577_71517C.1
ctcaccggccgctcagcatggacagctactatttgtactggcaggggaagtggtattggtggtcggggtactggaacgatcctaacgatagtacgcatgcggcggtgctccctgttctatctatctatctatctatctatctatctatctatctatctatctatctatctatcttgtgtttctcttcatgctattgtatccaataaaagagttttcctgtaattttaacctgctagccgccggtgtcttccttgatctatgtgcatgtaggcagacgttacccagcagttaatatagttatattaactaatgcctccttcaactatgcgttgggcatgggagcattagccgaaccacctcaggacagctctgccgacggtgtgatcttgatcaaggatatggcggagtggcaaaagcactgggaccagactgctccatacaacaagctggtacctaatctatatctatatatacacatagccagtcgtagcaacacctttgctttccttttaattagtagaaactactcatctgatctctgaaattatctagctggtgtatgagttctacgaaaagaattcctcgctgtgcaaggccatggacaagccgttcgagaagctcgccacgcagtacctgcccgggcggccgctcga

SEQ ID NO: 153443 - DNA, 2772 bp, Zea mays
  Clone ID: MRT4577_71518C.1
gccggccgggttctcgacgtattcgttccttgccgcatgcggatcgatggacggccttagctcccactatactactccatatatattgcccctgctccttcctcacgagctagctcaccggccgctcccctagtccagcatgtacagctactatctgtactgggaggggaagtggtattggtggtcgtcggggtactggagcgaacctaacgatagtacgcatgcggtccctgttctatctatctatctatctatctatcttgtgttctctttgtatcgaataaaagaatttgcctgtaattttaaccggctagccgccggtgtcttccttgatctatgtgcatgtaggcagacgttacccagcagttaatatagttatattaactaatgcctccttcaactatgcgttgggcatgggagcattagccgaaccacctcaggacagctctgccgacggtgtgatcttgatcaaggatatggcggagtggcaaaagcactgggaccagactgctccatacaacaagctgctggtgtatgagttctacgaaaagaattcctcgctgtgcaaggccatggacaagccgttcgagaagctcgccacgcagtacaaaggcagggccgacttctgcaagctggacgtggacaactttgagcttttggcgcggatttgcggagtggagggagcgtatccgacgttcgtgctgttcaagaaatgcgcgcaggtgggcaaggtcgttggcctcaaggaggacgacctcgagcggatcgtccagcgagcgataataagctagggcgtgttcggctggctacaagccgacactgttgcagctgtttggactgctgcagctgcaatccatagagagaaaaatactgtagaagccgcagccgcagccggattgcagccgcagcaagccgcagcgaacaagctgcaaatacaaaaaaaactgcaatctccctgacgcttcttgcactcgcgttcattcctattttgtgctcatgcatctcttattcccaaactgtacagcgcttgctactactacaagcaaattcgaacctccactccagtcccgccaactccaggttctgctgctgctgcttcaccttccattggacccgcctcgcgacatcagcagctcatcgcctcgcacttcaccggaatcggccggtcgaacccccctcgggacagcagggtgtcgcggcagaacacgaacggttggctcaatggtgtcgctgcagccactgccgttctaggcattggaatcgcttccggcttcgtggtgaccacaacgttgccaccgtcttttcgagtggcattctcttgcactgttgccacttcttcttcttgctctgcaatggcagccgccgcgtccttggccctctgcctctccgcgtccagcaccgccgacatgatgcacgagtagcccttctgcagcatccggtacaggaacagcgccgacatgcgcgcctggtcgcgcacggcctccaggtcgcggtgttcgtccacgagctcaagcctctccgcgaacgacgccgaccgctcgggcttcagcttcagcgtcagcaccaggtgcgcgcgctccagctccgaccgcgtgcacccgcgccgcaccccgaggagggcgtagtagtcgacgccgcacccctcgccggcggcgacgcggccgcggagcagctggatgcgcgccgtgagcgtgcggtgcgcgccggcgatctccccgaactggacgccgccctgcggccgcagcttgccgccccggagcgcggcgtcgtacaggagcttgaggtggtccaggtcccggaggcagtccgggagcgccccgaccgactccagcaggtcggcgcgcgctcgcagcgccgggatggaggccgggtccagcgccagcgcgcggttgcagtccgcgatggcgtccgcggggcgccccgccgaccggaacgcggcggcgcggcccaccaggcaggccgtggcgaaggggtgcggcagcacgctgcggcgcgtgtccagcaccttgttgaaatgccgcactgcctcgccggggagcccggcgtccagcgccgccaccgccgccgcgcgccgccggaggaggagcttcacgtgcgcgagcagctgcgacacggactccgcctcggacgctgcggcgctgttggccgtcagcgggttcgacggcgagaagctgtcctccgaccagcacacgctctcgcgccggaacgccgcggtggcgaggcggcgggcggtttggaggagcaccaccgcgtcttccatcaggccgaggtggaagcaggctctgcccaggaccaggtacctccactgcgcctcggtgctcgagctcctgcagaagctggcgacgaggcggcgcttgaggtcggacacgtggaggcagcagaggaagcgggcggcgccggcgcaggcgtcggaacggtcgcggtccccggaggcagacgagcaggacgaggatgacgaggcgcaggtggcgtcatcgtcgcccgagcacgacctggcgtaactggggatgtagtcgcggagcatgtcggcgacgtcgcggtagcgcctgagcgcgaggagcgcgcgcgcccggagctccagcgccgcctcggcccgcggcgacatctccagggcggccgtgaccaggccgagcgccgccgccgccgccgccgcgtcgtcggtgtcctgcgcggccgcagcgagagccgcccgcgcctcgctgaggtacgtgtcgaacacctgtcgcacatggacgcatcgccatcagattccatccaaccaccaaaccgtac

SEQ ID NO: 153444 - DNA, 964 bp, Zea mays
  Clone ID: MRT4577_71519C.1
ggacggccttagctcccactatactactccatatatattgcccctgctccttcctcacgagctagctcaccggccgctcccctagtccagcatgtacagctactatctgtactgggaggggaagtggtattggtggtcgtcggggtactggagcgaacctaacgatagcagacgttacccagcagttaatatagttatattaactaatgcctccttcaactatgcgttgggcatgggagcattagccgaaccacctcaggacagctctgccgacggtgtgatcttgatcaaggatatggcggagtggcaaaagcactgggaccagactgctccatacaacaagctgctggtgtatgagttctacgaaaagaattcctcgctgtgcaaggccatggacaagccgttcgagaagctcgccacgcagtacaaaggcagggccgacttctgcaagctggacgtggacaactttgagcttttggcgcggatttgcggagtggagggagcgtatccgacgttcgtgctgttcaagaaatgcgcgcaggtgggcaaggtcgttggcctcaaggaggacgacctcgagcggatcgtccagcgagcgataataagctagctaggagtagtcgtcaactcgtcatgtagtaccacacagactcagttttcgtacgtgtgccaagacaaaactacaaaaggacatgactatgcgtacgcatcgatcgatgggcacagcggcggatctacaccccaggccgggacacggtccgtggcctggggctgatacatatacctctatataagtctctatttaatacggtataaaatagttaagataaaatgaagatgagaaaatttggtagatttagtccgggtcataaaaaaattctggatccacccctggatcagcatgctaccaaaatatgtacaataaagcgtacgtggtacatatatatgggcggtctgtcatcga

SEQ ID NO: 153445 - DNA, 367 bp, Zea mays
  unsure (1)..(367): unsure at all n locations
  Clone ID: MRT4577_71520C.1
ctcccctcttgacaacccccccnnnnnnnttngnnaagaagagtggcggcggatccataccaccaaaaaatcccagaggagacctggaacgtggactaattataaacgaaggacgacatgggagaggacatgaccttaccatagcaggcatgagaacgtccgtgaggacgcggaggtcgtgtaaataaccgcgggggggggggtgcggcggacccaacatgagagaatgacgaacttgctcatgcggaaggccacttagctgccatagacacatgcacagcgcgaagaagagtccaatacatagaagcttcagcacacggcagcggtaatatgcaggtaaaacgggctaaatgcaaggtgactgatt

SEQ ID NO: 153446 - DNA, 350 bp, Zea mays
  unsure (1)..(350): unsure at all n locations
  Clone ID: MRT4577_71521C.1
caacccngaacacacccaaggggcgggggagagaaggggaaaaacgcgcccacaccaaaacaaggggggacgcgaacagacaacagaccgcagcaacaaaccaccgactgaaacaacacacaggggcacgacgaccaccaggcaaaaaaggcaaggggagacaaaccatgcgacggagccacacagaaaaaacggccggaacaagcgccacgacaccggaaaaaaagaccggagccagatgaagaacgtgaggagccccacagccacgcgcagccccgggaagtaagcgacgaaaaaggacccccctcgccgggcctgggacgccagcatggcagccccccaggaaagcc

SEQ ID NO: 153447 - DNA, 330 bp, Zea mays
  Clone ID: MRT4577_71522C.1
acgcatgcgtaaactcacacgccctggcgaggatcctgtttccaatcccctcattccaaattgaccacgaagacccttaattccggatccggggggaaaaccccggtttttttcccgaacttaacttcttcacatcccttgaatatgcttccgttcccgggccccaccgtctattcaaggcttcattccgtctcaacttggaaacaatgtgctcgctaagtctccttgccagtttccggccatacattgcccaaaaacaagcactggctcaatgctgtccattatgttggtcatgcagagcccaattgggaaagaacccaagataacatc

SEQ ID NO: 153448 - DNA, 429 bp, Zea mays
  unsure (1)..(429): unsure at all n locations
  Clone ID: MRT4577_71523C.1
ccggtgaccagcttcgtttggcaatagttgagcctggggggacgtaggggggcaaaaaaaaaagacttgctacttaacctgctaagtagtagttctagatcaatggtagcagtttgatgaaggttacagtttggttgcattattttcatttnactacatatgtgaagttgtntttttgttttatggggggggggggggtttgactccctcactctgtaaaagtttggtgctgaaatagattgacgttgtcactacttagttttagtgtggataagttactattttagttttagttttagtttaggtttaggacaacccaaaccattgatctataattttgtgactagtgttaaaagattgaaattgatacaccaaattaaaaaaacatgaggaaccgatttggcaaacgacttataaaaggaataggct

SEQ ID NO: 153449 - DNA, 431 bp, Zea mays
  unsure (1)..(431): unsure at all n locations
  Clone ID: MRT4577_71524C.1
gtttggatttttttttttttttttttttttttttttttattttttgtttttttttgttaaccccaaagaaaattaggttgggcttcatttttttctattgaaaggaaacaaattttggcggtaacccttatgggccgaaaaaagtttgggggggcgngcctccaaaactcggtagtttgggttttggggggtaacatcgaaagttttttccaacaattgatttttagcgaggggttcaccggggggaaggagccaatagaggggggggggttgcttagcaatacggaaaggggcttctttttcttcgggtgaaccaggaggggggggtcttccttcttaagtcccgaagaaaagattttttatgaagggggggggggtttttgtttagggggcccgaaagggaaacttcactgggtggaaaaaagcatcgg

SEQ ID NO: 153450 - DNA, 191 bp, Zea mays
  unsure (1)..(191): unsure at all n locations
  Clone ID: MRT4577_71525C.1
ccgtctgctacgccctgttgcgtgcaccatggnatccccgttgcggtggctagccggcccgctcctcctcctcgtcgtggcctcgtgtgcctcctccttaggacggactcccactgtggccctcgtgtaactagacgcccttgtgcgcgcggagccggtgttgctacgtaccctggtggggctggcttctt

SEQ ID NO: 153451 - DNA, 733 bp, Zea mays
  unsure (1)..(733): unsure at all n locations
  Clone ID: MRT4577_71526C.1
cggccggggcagccgacgtcgccgccgtgtggtctgcgcctccacggtctgcgccaccaagctcctgatccgctgggctgacgccgccgcacaggctgtctgcttcacgagcaggagtcttccgccagccggccacctcattccgcacgccaggaggtcacgtaaggagcaggcttgggagccacgcctggcgccattctccgagccaagcgtgcccacgccgggatccagccctcgcctggccatcctctcctcggacggtcgcgcctgggcttcctcgccgagcgcccccacgccgggccacctcgggcaccggagcgccactaccaagggccgaccgaaccagcaccgggggcgagccatagtctggtgccaagcacccgcgccggccgagcgcgctcaccgaggagccgccgggtgggcttcttgcatcgcgccatggctgccatgccgcggtcggcgtccgtgcccgagacagcagtcggtgccatagccacctgccatggtccagtcctgcgccgcaccaagcgccatgggccgactggatcttgcccacaccggagatgctccaagtggcgcccgcgcaggggctgtatccctgctcccccacccctccccccaaccggnccgtcgtggcggcaaccaccaccagccggacagagggccattaggccctcccatttggggaaggtggngccaccccgtttgggcggtggccagtgaagaagatgcg

SEQ ID NO: 153452 - DNA, 1245 bp, Zea mays
  unsure (1)..(1245): unsure at all n locations
  Clone ID: MRT4577_71527C.1
gtgtatatggtgctggagctgtttgtggacatgtctattcctgcgacggcgagcactgctgctcctgtcgatgggtgatcacttgctatggagtggcagaaacgtacgtgtacgtccatctagaccgcaataatgctactgcttctgtttgttttcttttcccttcagcttctttggctgttgagaaaaggaaatggaccgattctccaagcacgtcccgtatggaagtatgatcatagttcatcacgtttatctgaaactagccgaaattgcctgcgccnaaaaaaaaaaaaaaaaaaaaaaacgggaattccacactgcactactgcagctaacaagcgcatcacaatggccagctttgcaaagccgcagcatctgctgcttgccgccaccgtggccgtcgttctcctgctcgtcgccgcggcggacgccagccagcgcccggtgcacctgcggttgtacatgcacgacatcatcggcgggccggggcagacggccatccacctcatccggaacgtcgggccgccgcacacgtcgctgaagggcgcctacttcggcgacacggtggccatcgacgacctcgtgaccgagggacccgccgccgactccagggccgtcggccgggcgctgggcacctacatgctgtcctcccagcgcgagcaggtgctcgtggtcgccgtcaccgtcgtgctcgccgacgggccctacaacggcagcaccttcgccgtggccggccgcgtcaagatcttcgacgacacgacggagctcgctgtcgtcagcggaacgggcgggctccggcgcgccgccggtcacttgctgtggaggacggctgaggtggtgtccgaggtgtatatggtgctggagctggtcgtgcgcatgtctgttcctgcgacggcgagcactgctgctcctgtcgatgggtgatcacttgctatcgagtggcagaaacgtacgtgtacgtccatctagaccgcaataatgcattaatgctactgcttctgtttgttttcttttcccttcagcttctttggttgttgagaaaaggaaatggaccgattccccgagcacgtcccgtatggaagtatgatcatagttcatcatattctgtacacgtttatctgaaactagccgaaattgcctgcgcatcatgtgtctttgacaggagaggagaacagttgacatcgaatttaaataatgaatggaagtgtcgttacacgaaaaaaaaaaaaaaaaaaagcggcccta

SEQ ID NO: 153453 - DNA, 899 bp, Zea mays
  Clone ID: MRT4577_71528C.1
taatcttcacaattcccttgaaagctgcttcttttcttcccccttctccctctcgcacgaagccctaatcgccggatcaggcgccacccccatggatccaccagtcctcgaaccaaggtacctgcgcctaaatccactaccacccatgtatccacctatcggcggtaggctcgcaccaagaaaatccaccaccacccatggatccacaagccggtggtctcaattttccatccgtctatgttcccggcgatgggaccagggccggccacttcgccccgcgctggaccgttccggatttctacgccaactacactccccagcctccgctgccagggaccagggctggacacttccttccgcgcgggaccgccccagagttctacgccaactatactccccagcctccgccgccagggtgtgaggagaagacacaacatgtgcctggcccgtcgtacacgtcctctaacctgaggcctcctagcatgccaacatctgcctcttacttgccctctacttgtatgccaccatggctttgcccgccagattttcagtgcccaggggacctgctggggcgcccccttaccccgtctctagggccaccatttctgcatcggaaacaacctgagtggggaatggacttctgtatccgggtcgaccgtgcgggatgctaccacacatatcctcacgttggtgggccatttgaaggactacaggaagcagaacgtgctatcgagcgccatcttgataaccgtcgggatccaaaaatgtttacgatggataatgtttctgcagtggacatcgctgtacggcattatctctacctgcctgatggcacgaggaagcactcgggaatatatgataaaatcagtgataatcagcgccagttggttcttgctttg

SEQ ID NO: 153454 - DNA, 188 bp, Zea mays
  Clone ID: MRT4577_71529C.1
ctggaaagtggttctggttgacaacaccgacttcgtcagggaactccagtgagaaccgggccggagcacccaggtgctgagactgggtgtagtttagcagggcttgtgatccaatacgatgtgggctagaggttgtgctgctgctagcctgctaatgcaactgctacatgatcttgtttggcagtggt

SEQ ID NO: 153455 - DNA, 196 bp, Zea mays
  Clone ID: MRT4577_7152C.1
acccgtccgccatttgggggcctaaaggaggagccttcttttgaatccgaggttggttcggaggggggggcaataatttaacaattgggaccagggttggcgggccccaactcctaaggggaggcctttttttattgttgccctgaactttggggagattgttctacccaagttggattttgcactgaggggcctt

SEQ ID NO: 153456 - DNA, 1229 bp, Zea mays
  unsure (1)..(1229): unsure at all n locations
  Clone ID: MRT4577_71530C.1
aattcggcacgagggagcggcagcggtttatatagaggcaaaaacccgccggccgtcaacgtccgctcgaccaccacgagggagtgggctgtgactcggacagcaccaaaacctcgcccgccatggcgtcgccgtcgtcgtctccgccgccgaagctgccgatccccggccgccgcaacatactcatcaccagcgccttaccctatgtgaataacgtcccgcacctcgggaacatcatcggatgcgttctgagcgccgacgtgttcgcgcgctactgcaggctacgcgggtacaacgcgctctacatatgcgggacggacgagtacgggacggccacggagaccaaggccatggagngaggagtgctcgcccaaggagatctgtgacaagtaccatgctatccacagtgaggtttaacaagtggtttgacatagaatttgacaaatttgggcgtacatcctctcctcaacagacaacaatctgccaagcaattttccataaattgatggaaaacaattggctatcagaaaacaccatgcagcagctttactgtgatacatgtccanagggttttggcagatagacttgtagaaggagcatgcccaacagaagggtgtactaataaagctgcgcgaggtgatcaatgtgacaattgcagccacatgttgaatccaactgaactaattgatccaaagtgtaaggtctgtaagaatactcctcatattcgtgaaacggatcacttgttcttggatctccctcgaatagaagacaagttggtaaactacattaatgatacttcagtagctggtatgtggagtcaaaatgccattcaagctacaaatgcatggttaaaggaaggactaaaatcacgctgtatcacaagagatcttaaatggggagttcctgttccaattgagaagtataaagataaggttttctatgtctggttcgatgcaccgattggctacgtgtccatcacatcatcttatacacctgagtgggagaggtggtggaagaatcctgataatgtggaattatttcagttcatgggcaaagataatgtgccatttcatacgatcatgtttccttcaacactactaggaactggtgaaaattggacaatgatgaagaccatttgtgtcaccgaatatctaaattacgaaggaggaaaattctccaagagtaagggtatcggagttttcggtaatgatgccaaggataccaatatt

SEQ ID NO: 153457 - DNA, 630 bp, Zea mays
  unsure (1)..(630): unsure at all n locations
  Clone ID: MRT4577_71531C.1
ttttttttttgcagcagcggaacaaacgaaatgactcatcatgacattgcatcacaaggtagattcttgtatacatacgttgctacatactgtaccacccaccaaaaaatatattgcactctggtaggtattctctcagagctcagaagaaacctgaaaatcgctcaactggacaaaggaccagtaagatataaagaggagggccataggcgaatatgtctccggtggatcaggtgagtagatcactcaagagcatgtacagcagcctgtgttgaccagatcacctccccgccacaagaccactaaacacttggctgttcccagcctgtgttgcctcccactcgatagaagacagcagtatttgagagagcgtgattaccacctgcttcatgtccggccgtagaacagggtcttcgtccacgcactgttttgctagcatggccacctcgtacgcacagtcataaggatacagatcccttagattatggtcaatgcagtctttcaggttccccatatacgttgaattaggacatttccttacggcagctaacataactgatgccagtgagcatcgctcggagtttgagcttgcacccattcttcagctncttgtaatcgctnccttnccaa

SEQ ID NO: 153458 - DNA, 760 bp, Zea mays
  Clone ID: MRT4577_71532C.1
cattgggtacctcgaggccggccgggatcaattgtgcttgtgattgtctttgtatcacgaaaactatacgattcgattccttgttttcaatggacaccttcttcaactctcaatcttcttcttcttcgagaagccgctggagttacgatactctcaagaatttccgtgagatctctccgctggttcagaatcacatcaaacgggtttattttacgttatgttgcgctgtggtggctgctgctgttggagcttttcttcatgttctgtggaacattgggggttttctcaccacgttggcttccattggaagcatggtttggttgctatctacaccccctgttgaagagcaaaagaggttgtctctgttgatggcttcggccttgtttcagggcgcttccattggacctctgattgatttggctattgccattgatcctagccttattgttagtgcatttgtggcaacttctttggcttttgcttgcttctctgcggcagctttagttgcaaggcgtagggagtacctctaccttggtggtttgctttcttctgggctgtccattcttatgtggttgcactttgcttcctctctctttgggggctcaattacactcttcaagtttgagctgtactttgggcttttggtgtttgtgggctacgttatagtagacactcaagaaattattgaaagggctcactttggtgacctggattatgtggagcatgcattgacattgttcactgatttggctgcaatctt

SEQ ID NO: 153459 - DNA, 447 bp, Zea mays
  unsure (1)..(447): unsure at all n locations
  Clone ID: MRT4577_71533C.1
attccataaanggacgcgtgggggcgccggaaaccaccggaccccaaaatgtcaagcatggagcccattaactaaaactggatcacgttgggggacctgtcccaaacatgttacatgggggatgttattgctaaaacctacccagggccctccaaaagtaaaatctggagggcgcaaaaaacagttccacaggacttgggcaaacataaaaccccttgcctcccccccgtttaaaagggctccacaggggcccggaatttggcccctgcgtaaacagaaataacgccaaactcttttttaattataaaaagctggttttatttggcaagaccctcttatttggagggggctccagttttaatttgacccggggacaaaccaactgccaaataagaaatgaaaggggccccagtctcacccctcctatgactaggcaaaaacccccag

SEQ ID NO: 153460 - DNA, 1556 bp, Zea mays
  Clone ID: MRT4577_71534C.1
gcccccgggaaacaagaaaaagaaaaggccgggccggaggggcaaagctgtaaacttgagctggaagcactgcgcccctgtcttcacaccagtttgctgtttctttttcaccccgagcgcgagaactagggcgaccgcagcactacgcccctgctgcccatgtcttcgtcggggcctttgccggcgaccggaacccaccacggcagtcaaagggcagagtgtaaatcccagggttccacttctgcacgcaaggtacaaaaggctgatcgtgagaagatgcgaagagataaattaaacgagcagttccaggacttgggaaatgcacttgatccagaccgtcccaggaatgataaggcaactatacttggtgacacaatccagatgctgaaagatttgactactcaggtgaacaagctgaaagctgaatacacgtcactttctgaagaagcgtgtgagttaacacaagaaaagaatgagcttagagatgagaaagcttcactgaaatctgaggttgataatttgaataatcagtatcagcaacggatgcgggtgctatacccatgggttggaatggagccttctgttgtcatggggccacctcctgcatatccctacccagtcccagttccaataccctctggtgctgtacccatgcatccgcagttgcaaacataccacttcttccacagtcaagcttctggaaccatcccaaacacatgcatcccttacatggcatatacacaaccctgccatcctcccactgatcagccgtctaaccaacttaatactccagttgcccattcaagtagtcataggtctaactctccagctcaagactgtagaagcaagtcatctacattgcagcaaccaagctgtggagtgagaagcagtgatgctggtgatattgcaactgatctggaattgaagactcctggttcttcatgtcaatcacatgcagagattgctaacaacgattcctcttcggatttgaaaacaaagaagcattgcataaagcagattaatgattgcactctcactgaaagcagtagttcaagcagatgctcttccaatggtcccccagatgtttctaatagtgctattgatgaataagctgcttgacgaccgattaacatacaaaacgttgactggtatagattgagaaaagatctcgtttaaccacccataagtgagctcccaactctatatgcagtgtaatttgctattgttgctagcttatttacatagaagtggtcagattctaatgtgatgactcacaaattgggaggcgtggactttgtagataatctcatgattgttagtggtaaaagtttggtggaagggaaaaaaggagagaacaaaatcatagacagcagcatctatggtggttcggtagggactccaggactaggtatggtgagcattgtcagtgttcggcatggcaggtagatattcataataactggattctagtaccattgcatagttcgtcctagactggcattttacataaatttctgtgtcaaatatgtaaataactcgagggcggataactggat

SEQ ID NO: 153461 - DNA, 663 bp, Zea mays
  Clone ID: MRT4577_71535C.1
aattcggcacgaggcccggcagtaccgcaactcctcttccaccaaactccagaggcatccaacagcaggcgaggaaagcaagacacgcccacccacccgctccggcagccagcggctatgcagcagcagatgcccatgccgccggcgcccgctgccgccgcggcggcggcgcccccggcggccggcatcactaccgagcagatccagaaggtacgagccgccccgccccgccccgccccgcgcctacctgctaggatttggacgccgtgcttggttaggtccgccggccgccttagctcgtttcgccaagaaacggacgggtacttctcctcgggtggctggctcctgcgcgcgccgtgcctcctccttgctttgtcgggctcgtgcgccgccgactcgtccgttttgcccttcctcctatggctgcgtcggttttaggggttggttccaatcaaagattgggtcttttcggctggctgtttggttagggcgagattgggcgtccttgtgcctttttccattatcgcagattgctggattgagtgcttaggtcagtcggtgggtggcagtactgtaatagcagattcttgaatcgagagttttatttcaatcagcgagtaacagtagtttggtggcgtgctctggctgtttggagtgctatgc

SEQ ID NO: 153462 - DNA, 356 bp, Zea mays
  Clone ID: MRT4577_71536C.1
gaagctcccatattcaccccccgagaagccaaattccaagaacaaacccaccaccgcacgggacaaaatctaaatgccccgaggccccccaagaggggcccaaaagcaaacactttaattggggcgacaccaaaaggcccaacccccggccccaggcaagcaaggcacaagggggtgccccctaacaaggaaacgcccacggaaaccccaaagggaaaagatcggaaaaccccgccccccaaaaaagcccagtccccgggggccccccagcggacggaaaccccccacccccggaaaaaaaaaagggccaaaagaccccaaagggggcattccggggcctcaaaaaacccgggggg

SEQ ID NO: 153463 - DNA, 407 bp, Zea mays
  unsure (1)..(407): unsure at all n locations
  Clone ID: MRT4577_71537C.1
agccgtccgtccgtcgcctgaacaggaagtgttgctccggagcaccggctagccgccctagaggatcgacaagatggtgccaattccagtgactccctgaaattgggatgttggatcagatcgatccagtatggcaacacagggacaacatatatcctggattcaagtgcaagtactgcaaaaaacagtggaaggatgtggtgctatacgtttcaagcaacaccttgcatcgtgtggggggaatgtgcaaggttgtcgcatcgttccaccggacactgtcgattactttcagcaggagcttgacaaggtccatgatgctagtggtggtggtgcttgtggtagcggtgttggtgctagtggtgcttgtgcttgcngtaaccgttgttgtggcagtggtggtgcttggg

SEQ ID NO: 153464 - DNA, 702 bp, Zea mays
  Clone ID: MRT4577_71538C.1
ttcccgacaagctcagatcccatatccgctcccctacctctcttaatctcacgactccgaaggctcctctcctgtcctctcctctgcggtcgtgcgaatagctctatcttgatccttctctccttaacagatggcgaggttcgtcgcccagtgtctgccttggtacccacagatgctatagactcattcgccgcccacgaccccttcataacgagcaattacttgagctacatgctgaggtacaacacagcgcaatggcaatgtcattacacagactgcatcctcatgaacgctaagacgcttctcttcatgcataagccgtgcaccacctctgcaatcacgaaccccgagaaaatcccgcgaacccgaagcatgaagttcatcatgtcgtgtaaggcgcaccgagcatactctgacatgcgtacttagaggtgtgtgctagcactcatgacacggtgctcgcctagacagacatgtgtatctctgtgcccaatcaagaatgcacccatgtgtgttgttgacgatactgagaacaggcactcctccgatagaaactttgtctccgatgctagctgcacctccaactgtcttgctcaccttgctacagacattctctgacacatatcttcaattattgagagcttgatgaccactgtgcatgtcatcactgccaccctctaagactggtgatgcattctcatg

SEQ ID NO: 153465 - DNA, 275 bp, Zea mays
  unsure (1)..(275): unsure at all n locations
  Clone ID: MRT4577_71539C.1
attcttcaacaacaacaatgatatataatagctgttgaatctctgacngtgtatcttggacgggtgaactctcaaacgctgctgcttagacctanntgttgaccaaanttacactggagacattgaaagggaactcagcatctcttaagtctacacgttacaagcttacactattgaccaagacggtacttgtctctttgcatgtgttttaacatagatggttggtggaaggcggatggctgctataaatcatatgagagtgctggttgcatata

SEQ ID NO: 153466 - DNA, 413 bp, Zea mays
  unsure (1)..(413): unsure at all n locations
  Clone ID: MRT4577_7153C.1
ggaaaagcaaaaaacgactaaaataataaaaaatatcgatttatttattttaactgtttatgtttggatctttagttgttaagtaattaaacattaatcacttttgttttatattctgagatcaaacactatcaggctatccgcagcggttccctctaatttttccccctatatcacttttttgtgtcacatcatcaacatttcacctcctatttttcatctcccgcagcgattccccataaatactccccctatatcccactacaactataaaatatcattttctatatctactatcaatcttatatctactaacaattacttgttgacccacagcacagtgtcgtaggggatgaacaatgaacccttggattgagggggagagagaaagngaccgcgccgtggggagcccc

SEQ ID NO: 153467 - DNA, 484 bp, Zea mays
  Clone ID: MRT4577_71540C.1
tccgcgcaaaattgtttaaaatgtttaaagggccttataagtggacctttctcatgtactccacgctcccccaacaatgttaggccttatataaaaaaaaaaaaaaaaaaaaaaaaaaaaaaaaaaaaaaaaaaaaaaaaaaaaaaaaaaaaaaaaaaaaaaaaaaaaaaaaaaaaaaaaaaaaaaaaaaaaaaaaaaaaaaaaaaaaaaaaaaaaaaggccccaaaggcccgggcccattaaaaaaaaaggaaacccccgggataaaaaaaaccaaaaacaaatttattaaaaacagcaaccccaagggggggcccggaacccaattccccctaaaagaagacaaataaaccgccaataaaaggcccgcctttaaaaaattgggaaaggaaaaaacccgggcgaaaccaaaattaaaccacttagaaaaaaacccctttatccacgatggggtaaaaaaaaaaaagcactatacaaaaatccc

SEQ ID NO: 153468 - DNA, 187 bp, Zea mays
  Clone ID: MRT4577_71541C.1
ctgggcgcacactgcatccgtactctgtgctagcagagcatccacaacttccggttcgggtcccgcgccgaacaatcgcgtcctgtgccgaagggccggggtgctcccggcactcagaagctcgcagacatctctgccgatgtccgcgtcatacatctaccgtagcgtattcgcgtagagcttcccg

SEQ ID NO: 153469 - DNA, 821 bp, Zea mays
  unsure (1)..(821): unsure at all n locations
  Clone ID: MRT4577_71542C.1
cattgggtacctcgaggccggccgggagcccgctatatacagagcgagccagcacacagttttttttcctacggctggtctgcaattaggtgcctcgactgcttgctagccgccggattaatctttccctaccctaagttatggtgtcaacaaacacctattattattcgtgcgcacgttctggagccgccttggcgtctctgtcccggacgacgcctcttcagaacgaactctgtgatcttcgaaggcgtgcacccctccaccacttcggtcctccgccagtgcaagatgaggccgccctgaggcgtatcagactgcaccgcgaggacaccgccgtggctaacctttggctcaggttttagtgggatatgatgaagctaaaaagtggacgacgaccgttctataaggatgttaagcttgtagactgccgttcaggctcaagtcttccacatttggctgctcaagcaaagtttgcagccatgaacatgaagactgaagatgtcaatcctcgtcgaccagttcaagtcagacgaagtagatgggctcttggtgatgtaaccgaggtgttggatcataattcgtggaggcttgggaagattacagaagtactgaagaatgactattttgtcatcagngctagtgggttgcatccaaccaagagaattccacatatcttgcttgaggattccacatgatcgcaagcagntgactgttggaggcagggacatcagnctatgaaagagttgatcactatngctagaggaagcagcaatatctgtgcttccacggtgctagagctgtcagagaaactagaagcagca

SEQ ID NO: 153470 - DNA, 1913 bp, Zea mays
  Clone ID: MRT4577_71543C.1
tgggaccctcgggccggccggtgtagtatggtgtaacaaacacctattattattcgtgcgcacgttctggagccgccttggcgtctctgtcccggacgacgcctcttagaacgaactctggatcttcgaaggcgtgcacccctccaccacttcggtcctccgccagtgcaagatgaggccgccctgaggcgtatcagactgcaccgcgaggacaccgccgtggctaacctttggtgccgtgcattcaccacggcgatgctctgatcaaaccctcccccctctttgtatattacaaattttttcagctagcctacttttgatctgattaggcataacaccatacaaataagacttttggtttattctgatgactttaaatccttgactttcttctgtcaaatcatttattaacagtgaacttgtgttccacttgtacacttacctagaaatataatgcttggctcttaacaaacaatggtttcattttcttatccattcatgttttaatattcttccctgtgtgctagtgcttcttttgacttttgttcatggtccaccttttatgtgcatatacatttcaggctcaggttttagtgggatatgatgaagctaaaaagtggacgacgaccgttctataaggatgttaagcttgtagactgccgttcaggctcaagtcttccacatttggctgctcaagcaaagtttgcagccatgaacatgaagactgaagatgtcaatcctcgtcgaccagttcaagtcagacgaagtagatgggctcttggtgatgtaaccgaggtgttggatcataattcgtggaggcttgggaagattacagaagttctgaagaatgactattttgtcatcaggctagtgggttgcatccaaccaagagaattccacatatcttgcttgaggattccacatgattgcaagcagttgactgttggaggcagggaccatcaagcctatgaagaggttgatcactatgctaagaggaaagcagccaatatctgtgcttccaccggtgctagagctgtcaagagaaaactagaagcaagcaggatcccacctaatggtttagtcagaagaacaggcaaggaacagaaagtatctacatatgaatttcgccagttaaccaagaacgagttgcctccgaaggtgtctgctaggaatgccatcgacgaagatgatcattttcataggcctttaagtagcagatacaacgatctgcctgagaaacctctgcgcaccagagaagaggacgagtgctcggtggctagctgcagcgcgaattactcagagcacagtaccagtgatgatgaccatcaatcagtcggaaccggcagttgtttccctgatgatgttatgtctgcatgtgagtatgggcaggagactgaggacgcctatggctctggtttgtttcagaacgtccatgagctggagctgcgagcatatcgatcaaccgtcagagctctccatgctgcaggacctctgacgtgggagcaagagtcgctcctgacgaacctgcgcctctcgctcaacatctcgaacgaggagcacttgcttcagttgaggcatctcctagctctttgaaaattttcaaaaatcaatatgttttttgaacacctgtggattacctccaactcgcagagatctccgcaggcttgtagcgtgcgtaagcgtaacttgagggtgttgtatatagaggaagagtccagagaaattcacctgtagctgttgtacttcgccagaactttgttgctaggagtacatgagtcttgcatttttttagtgtttttacaatttcgaggaaatgtaaagcttcgaaatattagtcatgctgataatcaaggtgggatatcagttccttaaataaaaatggagtatcacttgccgttactgatttcactcaa

SEQ ID NO: 153471 - DNA, 132 bp, Zea mays
  Clone ID: MRT4577_71544C.1
gacttacttagggaaagctgtgtcgcctgtcggtaccgcgcccggaatttccggtttcgaccccacgttgtatgcgcgtcacctcctccgtcctcctccctgtcgccgactgtcctccatccattccatctc

SEQ ID NO: 153472 - DNA, 413 bp, Zea mays
  Clone ID: MRT4577_71545C.1
gcgggcggcttcacgtcgacggtgcgggcgcacgtgcgcgtctccatcgtcgtcgcctatcctggtgcggacactactgaccttccactgccgccatcgaacaagacacatacgaagaagctcacgtgacaaaccttatccagcatacagccgctaccctccgaaagccgcatacggcacgactcgtctctttctttggattcggcagccggtgctgctagtccggatactgcggtcaaatgcatcacccacatctcgagctacattaacactgctgtgttcgccctaagcgaccagttgtatgacgtcctgcttatcgctgagaagacactgaggagccgaacatggtcatccgtggtccctaactgcatgtgccacgtgccggtctcttctggtctctgagacgatgatct

SEQ ID NO: 153473 - DNA, 262 bp, Zea mays
  Clone ID: MRT4577_71546C.1
ccggggcaacacaagcaaagacttgggcccgcctcccgtatcttaccgcacatgcgcgtggggccgcgtcgacatagctgcttggcgtcgacacccgcaaacgcaatggccgtagcccacgcaccggcgcgccggtgcgagatgcccctcatgctcgtcgccgcgatggtggagaagctgccgagcaactgcgccgcgaacaggagcaagaaggagcagcggacatcttcagatggagggactagctctacgaccccaggaa

SEQ ID NO: 153474 - DNA, 478 bp, Zea mays
  Clone ID: MRT4577_71547C.1
accactcctttgcttactatcgactcactatgcgatccaagtaccatgcatcaatagcaggatgtccttcactcccaatgtactacccccatgaacatgatgttggcccaaagcaagctcaccatcagagccactatatttttgctggtggagcagctcccctacctactgatgctggatgacggccgtaattacaacataatactgatgtatgatatcatcgaactactgtctatccatgattctttagctatatatgtcataatgcctttagacgacatacattatcatcgagaaggatgaccaccactatatgacatatggcataacacatttacgcccggattgaattaatccgctcattcctatgactgatctacaactttcatcaactataatcttaactgacaaacatatccgccaccctatctacctggatctgataccacactcatgcatgatcatacggtgaaatatt

SEQ ID NO: 153475 - DNA, 316 bp, Zea mays
  Clone ID: MRT4577_71548C.1
ctccctttttttcttaaaattgctcaagaaactggtggtgcccaaaaacttaagtgtattcaaacaaaaccaggaacaaatacaccataaatccaaacgacacatcaacatatcttaaaaacaaaaaacaatttcccatgtccaaaaacattcaaacaccgacccttgttttcataaatgacaagccaacaaaaaactaagtcacaacaccacatcctctgctttataagatctaaccaaaccactcttattttcgaaccaattattcaacaagccacatacccttatgcggcactagcctcaaaggaccttcaac

SEQ ID NO: 153476 - DNA, 505 bp, Zea mays
  Clone ID: MRT4577_71549C.1
aaacgggaaatggaacagttaaaataaaacgaacagttgaacagcgggggccaccccctgaaacatttgtttcggcctggttaataatacaatttttttttggccccagcaaaccttaaaaacagttaaattttccccccaaaattgcccccccttaggaagggcgggttgggcaaattccccaatatttcccgggttgcatcaacatcgatttggaagttgcccattttttaaactcccccagccccgttaaaattaaccctaccagggccctttgtattttgccccccctaatttattttaattcccctcaccttctgggtcctttcatttccaccgttcttatccccagcccagcttttttgcccgagaattgaaaaataaatgccttttttcacaccaccaccaaaagaacgccttttaaaccctgccccgacttttttgggggggggagtttttttgaacctacctttaaaggaaccccccccaacccttgtatttttgg

SEQ ID NO: 153477 - DNA, 387 bp, Zea mays
  Clone ID: MRT4577_7154C.1
agaaaactactacatacgggtgcacatcctaatcactactgagtatcacagagagattgatacttatataagagtcctagagtatgcaactggtgaaaccagaggctacaatccagtattactgatacgagacatgtatgattctccactgttgtacatgtatgagcttggagtactgtatactttaacacactcaatactaggtagtggagagtacactgatgtacatcctaaatgcaccactctgttaacattttagatgaaagtacaccgagctccgatataggctactccagataacgctgcttaattgacactcgtagcttatggtaaatagttcttaagaagttcaaggccactaataatgtatagtacaagtacgcgctt

SEQ ID NO: 153478 - DNA, 339 bp, Zea mays
  Clone ID: MRT4577_71550C.1
attcctctccttttacagtgttcgcgtcgtcgccgtatcccatactccatcagccgtttacgcgttcctgccatgggtaacgtgctttgatcgctgcgcagtcgcatcggataggcgccgcagggcgacccccagatggtgagcaccttcgaagataagaagaagaccagggccagcgcgtacaggaggatgcttatacaaccgtgcgctctcttcaccgccgtgcgtcgaggttcagtgagaaacacgatcccatctctctccctaaagttactccgctctgctatcaccggttcctcatccttgccgctctccgtatgattatgctcttgatggcac

SEQ ID NO: 153479 - DNA, 495 bp, Zea mays
  Clone ID: MRT4577_71551C.1
ctttttttttttgaacttcaacagtaaaaaaattattagaaaaatggacaataaattctaacacactgtgcatcaatcgagcacatattctagctgttgacacacgcatgcccgggatttatttctcgtgccagggatgagccgtgtgctgcacttaactaggacggagcagacgaagagaaccgactctatatagcagtagcgctacagcagctgcaaaatgaaagaacagcttgataatctgttactatatggtacaacagatttttttttgcacttgcaccagtcggtcggcctactaataagtatatataatattgacctgccggccggctaggaatatagagagctcgatcgatccatagatggcagctgcatggatcggtcacatcgacctggccgccgtggcggcaccgtcgtgctcgacgtcggaaacagcgccgtcatcgtcgtcgtcgagtcccccgccgcacccggcgccaggagggccgccgc

SEQ ID NO: 153480 - DNA, 483 bp, Zea mays
  Clone ID: MRT4577_71552C.1
cttccccacaaaaccaatggtttttagcacagaaggctgccagccaagggttacagtacaaaatcaaacggggcaacacagacaaagcagccgaataagcagcagcctaaaccccattaattgccccacagggaaaaaaaaaaaatgaagaacttgtctttaagctaaccaaagaaaaggcttctgctgctaacaagttcttgagggggggaaagcactggaaaaggtcgtttttggaatgcctcccctccgaatgttctttgcacttggcctcgaagggggggcaaataaaggtctgcatgcaaatcttgcactgaatgttcatggcctttttgttggcctccagctggctgcctttgccgcccttgtttttttgggcgttcctttcgcgcgccattttgaacttttggggcgttgccgccgcccatggccgccaaatcctgcgatggaagaggcaaaaaaagaaacaagaggagcgggggc

SEQ ID NO: 153481 - DNA, 1275 bp, Zea mays
  Clone ID: MRT4577_71553C.1
tcaaagccaaagagccgaggcccggagcgcggatggcagcggcgatctcatcggtgacgaggacttctccagccgccaccacctcagcaccgacgacggcagccgcctacccgtcggtagatccccactcaagtcctcccagacgggcgagcaccgacctccgcgcgaaggcatcgtgccgaagcaagggcaggagaacccaagaacacgaacgccgccaagcagcgcgcgacgtcttgggcggtcccctggtgcgcgcaacgcaatagccacccgtatggcgggccgatagccgcactccgcccagcggtgggaggtggcaccggaagtcgtgccagagccagctaagccagcgaaccaggcatgctggagctgacgacgcttgcggccgctcggccccgcgttgtcgaagtccgccccttccgctaggctggtgagcgccctctcccctgaatgctgaaggagaaggtggcccacgaacccgtgcgggaggtagagctccggctcagcttgccctccgccccagcaaggatgatgaagatacttgaagctgagggcggggcagaggccgcagcccggcttgcttctccccaccatcaaactggtggtcaccatcttgggtgaccatcggcgaggggatgcagtcgggctgcctgatgaaaatccttgaagccgagcgatggctgaaaggtaccaacttccgcgaagttgcgttcgtgcgagaaactgcaccgccacttgcgccagtaccgcgccttctcgactgcggaaccggtgccgcgactcgaggcaaccctgacaggaaaacagcgccgcctgccctgctccgactgctgtgccacccgccagggtgaggctgacagcagccaagtccagccttgggcgccataggaagctccgcctcgcccgcccccagggctcggactcaaccacgactccggaagacggtctccgccttgcctgaccccagggctcagactcaacctcgactccggaagacggtctccacctcgcccaacccaagggcttggactcaacctcgacctcggaagacggtctccgcctcacccgaccccagggctcagactcaacctcgacttcggaagatggtctccgcctcgcccgaccccagggctcggactccacctcgacctcggaagacggtctccgcctcgcccaaccccagggctcggactcaaccttgacctcggaggagtcaccacctcgcccgacctcgggtgtttcccccttttgctccgtctcgcgccgacccat

SEQ ID NO: 153482 - DNA, 444 bp, Zea mays
  Clone ID: MRT4577_71554C.1
attcaaaaacacacctaacgaaacgcactaaccaccgaccaaccaccatgggttcccagggtttagccctttttgggctttttggcctttttggtgagcgcaacaaaatgcgtttccattatttccaacaatggctcactttgcttcctagtgccctttattgcacagttccttccctccaggtacttcaatgggcttcgaacacccagctgtgcaagcctacaggctacaacaagcgcttgcggcgagcgtcttacaacaaccaattgcccaattacaacaacaatccttggcacatctaaccatacaaaccatcgcaacgcaacagcaacaacaatttctaccagcactgagccaactagctgtggtgaaccctgtcgcctacttgcaacagcagttgcttgcatccaacccacttgctctggcaaacatagttgcatacca

SEQ ID NO: 153483 - DNA, 630 bp, Zea mays
  Clone ID: MRT4577_71555C.1
atggagcacgcggggtgccatcattacttgttttaccggggcgagccagatgggacgccgcccgaggtcgggcgaggtggtgactcctccgaggtcgaggctgagtccgagccctggggtcgggcgaggcggagaccgtcttccggagtcgaggctgagtccgagccctggggtcgggcgaggcggagaccgtcttccggagtcgaggttgagtccgagccctggggtcgggcgaggcggagaccgtcgtccaaggtcgaggttgagtccaagccctggggtcgggcgaggcggagaccgtcttccggcgtcgaggttgagtccgagccctggggtcgggcgaggcggagaccgtcttccggcgtcgaggttgagtccgagccctggggtcgggcaaggcggagtccgtcgtccgaggtcgagacgggggccgagccctggggtcgggcgaggcggagcttcctatggcgcccgaggctggacttagctactgtcggcctcactctggcgagtggcacagcagtcggagtagggcaggcgacgctgttttcctgtcaggtcagtcagtggagcggcgaagtgactgcggtcactgcggccttgtcgattgaggagcgtgcgtcaggataa

SEQ ID NO: 153484 - DNA, 726 bp, Zea mays
  Clone ID: MRT4577_71556C.1
atggttgcctcgcctcctcctccgtcgacggggaaggtgacgggacagacccagatgctgctcttccatcacgcggggaagacgtcgtcgatttcgccgccgtcgggcgggctgacgaccgtcgttgtcgttgtcgcgcggcggagaaaggagtaccgtgtcgtagctgccgtcgagggacatgaactcgagactcctgaaatggagcatcgtcccgggctggagaggttgctggagactacccatctggagcttgacgggaagctgttcgtcaacacgcagcagccccctacctggcgtgccaactgtcggcgtttcgaccccagggggtccctggaccgacaacctgaggtcgggcgaggtggtgactcctccaaggtcgaggctgagtccgagccctggggtcgggcgaggcagagactgtcgtctcaggtcgaggttgagtccgagccctggggtcgggcgaggcggagaccgtcttccgaggtcgaggttgagtccgagccctggggtcgggctaggcggagaccgtcttctgaggtcgaggttgagtccgagccctggggtcgggcgaggcggagaccgtcttccgaggtcgaggttgagtccgagccctggggtcgggcgaggcgaagaccgtcttccgaggtcaaggttgagtctgagccctggggtcgagcgaggcggagaccgtctttcgaggtcaaggttgagcccgagccctag

SEQ ID NO: 153485 - DNA, 363 bp, Zea mays
  Clone ID: MRT4577_71557C.1
aaaagcccggaaggaaaataccctgaatattttacccacccgggttccttatcacaggggccccctagcagcaatcccttgttttattggggggggtttaccaaaccagggggacccctagtttttttaggaggattccaggcccccccgattttaaaccgttaattaagccccccttttttaatatcccgtttttaatgggccattccctagttataacaaaacaggggttccctagggcatccccctaaacttggaggggggcaaaaattaaaaggttttttcctagctaaatttttttccccatcctgagggggttgggaaaaatgaaatccatttttccaccacccgggaaaccccccc

SEQ ID NO: 153486 - DNA, 212 bp, Zea mays
  Clone ID: MRT4577_71558C.1
gatcctctagacgtggcgcgcccttgcggttgttttttttttagcacgccagaacgaggggccgcatctcacatatatgctaaaccagaggcgggaacaaaagtagcccaaggctaggctacaagactccaaacaacccgcgctcacaaagaaaccgaggtggaaagggcgttttttttacagagagtgaccaaaaccattggcccccccag

SEQ ID NO: 153487 - DNA, 251 bp, Zea mays
  Clone ID: MRT4577_71559C.1
tttggttttattcagactagaagggccgtctgcatctaaagacgaattcccgtacacacacacacatcagccgaacaacggatctaatcaaccaatgtcacgaacccacatcttctgaaacacgcctatctggctgagcaacaaaaccagcgttgtccagccgacataccagatcactggacgaggccgaccccgtggactgaccgtttctgcaagtggcaagcgagctcgtggacacgataaactggaat

SEQ ID NO: 153488 - DNA, 1304 bp, Zea mays
  Clone ID: MRT4577_7155C.1
gttatagacatttaaacatttcggagctgatttattgtgatgaagaagattctagagtgaaccaatatgttaacacacgcaaagttgaacttgtgcaggtcccttttggcagtgatgctactcaagtcgctgatatgcttttggatattatacgcccacatattaatcggttgcgtgatgctggtgtgattgaccatcgggactattcaaattggacccaatttgaactgctgaaatttaaggataaattcaaggaagtacccccaccaaacatccatgaaatcgagagaggggaaattgaaagatcttttgtaattcttggcccactttgtcacacaaggaagttgcttttgagccatggaacccaatttgcacatgggtatcttgacaaacgattgaagggagggtcattgaatttgatgcacaagaacgaattcttttggcgattaaaacaaaagatgaagctttcctcatctcacagtattactccaaaagtacaggaattgaaaaggctgatggttgagcactttaatactgattccaatttgaaggactcaaggattattatattttcccattaccgagaaagtgtcaatgaaatatattgctcactacaggatattgatgataaacttgtcagacctgttgaattcattggtcaaagctcagcaggtaaccaactgaaggggcaaagccaaaaaactcaacaagctattttgaagaaattccgatctggggtatataatgttttggtggcaacatcaattggcgaggaaggacttgatattattgaggttgatctcgtgatctgtttcgatgccaatgtctcaccattaaggatgattcaacggatgggaagaaccgggagaaagaatgaaggtcgagttgtggttttggcttatgaaggtcaggaattgcaggggtacagaaagaaacaaggagattgtcgaaccatgaggaagctattgcataacagtgagagatttgaataccatgctagtcctaggatggttccacatgtctataaaccagaagttaagtatgttaagttgacaatagacaagtatattcctcacgcaaagaaaatgagggttgccgcaaaagaagcctcgccaattccatggaagatgtcggaggcagacggtcaaatgattactaggtactttagtgtgtgcaaagaagaagtttggaggccgtcccttgtggcatttcctagatttcagctttatccaagtgtcggtcacaaagttccacattcatttcggacaacagatatgctaactgatgctatgaagcacttcaag

SEQ ID NO: 153489 - DNA, 702 bp, Zea mays
  Clone ID: MRT4577_71560C.1
cattgggtacctcgaggccggccgggagcttggtcagagagggtgaggttacccgatctgttcccgtgtcttctcgatcaggaataggtaactcacagacgcgcttgctccctcttggataaatccaccctatgatccaatccgtctcccgagcgatacgacgacgacgaggacgcgattcgcctatacacgggtaaaaatagacaacaaggttacactacctacgtatgagcgacgcctctgacgttctgctcaggccgtatgctgggctgaaacccactgttgcccgcatgactcctgctggataggggtcacgactaccagctagggcgaccaccgatcgtgcgaaatcctcgcttggtgaactcatctgagaaactagtagctgccaccgtactcatatcggtgttgacttcgccgactaaaccgtcaaatagggccggggagaagcatatcgcacttctagatgggtgtttgctccttggcaggccactcgactgggtggcaataattgttgccaaacgttatgactatgcatgcattactcagagataatatgagtcactcgactcaagagaattttctggcataggatgatgcattaagaatgtcagatgatgactgatgactgaacgctgaactcactatgtctgataaataatgtgatcttgaactctgtgagaatgcatcattaatggcttt

SEQ ID NO: 153490 - DNA, 264 bp, Zea mays
  Clone ID: MRT4577_71561C.1
atgaaggctgtactgttgcttgggattggcttggggcttttcctgcgcaccttaggtggatggcgaagaaggaccccttccgggggggccctgagccatcagtgagatatcactctggaagagctaggattctaaccttgcgtcagacccgcgggccaagggacagtgtcaggtagacagttagtatggggcgtaggcctcgcaaaatgtaacgtaggcgtgccaaggtttgctcggaccagacggacattggtcatccagtgc

SEQ ID NO: 153491 - DNA, 774 bp, Zea mays
  unsure (1)..(774): unsure at all n locations
  Clone ID: MRT4577_71562C.1
ggaccctttggccgcctcgagctctttcatcacgacaactaacctcacagcacaccggagtcgagcaaaatgtcgaccttcgaacccgtcattgtcatcgacggcaagggccacttgctcggtcgcctcgccagcaccgtcgccaagcagctcctcaatggccagaagatcgtcgtcgtacgatgtgaggctctcaacatctccggcgagttcttccgcgcgaagctgaagtactcggctttcctgcgcaagcagacccgtttcaaccccacccgcggtggtcccttccacttccgcgccccctccaagatgttctggcgaaccgtccgcggcatgattccccacaagaccgctcgtggtgccgccgccatggagcgcctcaagacctttgagggtatccccgccccctacgacaagaagaagcgcgtcgttgttccccaggccctgagggtactgaggctcaagcctggccgcaagtactgcactgtcggacgtctcggccacgagttcggctggaagtaccaggacgttgttgcccgtcttgaggagcgcaggaaggtcaagggtgctgcttactacgagcgcaagaaggccctccgacggcagttggccgaggccaagaagacggccaacgtggacagcaagacccaggagcagcttaccgccctcggatactaaaaaacggcagttgatgaccaggtgtcngttttcggtgatgtgcttcgggcgtggattgcatttggctcatgggatgtttctttcctctactatact

SEQ ID NO: 153492 - DNA, 532 bp, Zea mays
  Clone ID: MRT4577_71563C.1
atgaagctatcatccagacgccagcaggtgcagagtcttctcgtccgctcgttctcctggggaagaacccccagtcgtccaccagataagttgtgaaactttgctgaggggggatgagcggtgtctttcgcgaacctctactccgaggcaggggttaaaaagcttgatggacaccttctcactcccaggtacatcactgagtagcaagcttccaaggatgacttgtctgtggacacgtcactgtcgagctgctccctcgtccaggtatatcaacataacaaggtggttgaaccacatagaggcgatcgagaggctgagcggaattactgcagaggcccaatgtgtgaaggtgggatcctcaggaggtacttcagccccaactccagatgttgctgaagcacaggccgcaactgctgaggaggaagatgatgatgatggtgacctttttggtgaggagagcgaagatgcgaagaacggtgatgaagagggtgctgcagctgccaacgcttctggcgagaagaaagaatctggc

SEQ ID NO: 153493 - DNA, 541 bp, Zea mays
  unsure (1)..(541): unsure at all n locations
  Clone ID: MRT4577_71564C.1
gtccggactcccggggggagattcacatccacacacatgcgcatccctgtttcctaaggctgcctgtcccaccaccaaccaccaaatcgcacggatttgacgcctcggcctctcagggattccgagcgacaaagtacaggcgtataggctccaggaggaggacggaggcaccncacggccgccgggggagatgctactctgggaccggtactgcggggtgcttgcctccctccgtctgtggcagaaggaggccacgaccctcttgctttggctctacaacaccagtaagaccacgctgctgcacatgctcaaggacgagcggttggtgcattaccagcctgcgcagcaaccatcctctgaggagcttactatccgctagatcaagatcaagggcttcgaccttagcggtcaccagatcgcgcgccgcgtgtggaaagattactacgcacagggtgatgctgtcgtatacctcggtcgatgcatataataaggagcggttcgctgaatcaaagaaagagctcgatgctctcctgtctgatga

SEQ ID NO: 153494 - DNA, 238 bp, Zea mays
  Clone ID: MRT4577_71565C.1
ggataatgtgcatgttttaacttggttttataaaatctgtaatgtttcacttcttgaaccatgtaccaaatttgccaattttctgtccaagtgtttcagatgaataacaaaacgctgttcattgaagctttcgccacctttcttaaagcagcgtatgttccaagggaaaaaggcattgacaagccatcgtttgtttttatgacgataggtgttcagattcttcagttttttgaattag

SEQ ID NO: 153495 - DNA, 396 bp, Zea mays
  Clone ID: MRT4577_71566C.1
cgattattactcaatcatcgccgctaatatgactcaactagctagctagccggcggcgatactacagcacatagcttcttcagtgggggacaccgccagctagctagctagttgagtcatttagcggcgacgatcgagttctcatgcgcgacgcgtgagtcgccccgggaattcaggaccggcacatgctggcgtacaagctgtccctattgtgagacgtattagctcactgtttaattcagttcaagtcttatgtgtatcttgccttgctatccgagtaataatactgaggatgtggtagtcatgatatatgtttattctctgttggttcctatcttatgcaattattcataagagatgctgccaaaattttattattgtaccattgtaagtatt

SEQ ID NO: 153496 - DNA, 439 bp, Zea mays
  unsure (1)..(439): unsure at all n locations
  Clone ID: MRT4577_71567C.1
cagccaatggcaccacatggaggatgtctggcgactgcggtcctnctcgtatcgggaaccgtatgcngagtggtgttgctcaacagcgaggcgggttctggcgttgaggtgggttccagcgtcgaggcggtccccaatggtgaggacccaccgggatgcggcggggcggtgctatctgcccatcaacaagatcttgcattgctcggtcgactgcccgacgtatagaagaaaggttgaagatgtcatggtgagaggcttcaatctagccatcgttcacggcggcgacaaggtggttcaccacgaattcgcgttggtatagaggcattttcttaccattcttncttncttgggtatctcttcttcgtctggcaagagcgggcgctgataacggggttagaaacaaagaaactgaagcanatgatgaatgttcntttcattt

SEQ ID NO: 153497 - DNA, 355 bp, Zea mays
  Clone ID: MRT4577_71568C.1
gtccactacagtcactgcattttcttcaacttgcatactaacttggcgccagacttcaacagggccaagcgacctacccacaggccacatcgagaggagtaaaacgcacaatgattatgatagtagccactcataagcttctgcagcaaccacaccgtcacgctgaagcggagctaaacctggccccgggctttcggtttcacccgacagacgaagagctggtggcgcactacctctgcgcagcgcgccgagatgcgccgtccgccggtgtccatcatcgccgatgtcgacctgtaccgattcgacccctgggacctgtcggagcgcgccctattcggtcgacgcgagtggtact

SEQ ID NO: 153498 - DNA, 290 bp, Zea mays
  Clone ID: MRT4577_71569C.1
actcttttatttttgaacaacaagccgcacactatgcagactatttccaagctcttcaggccacacactaccaacaacaccattacatattatctctcaacccctccaccaacccacacaattctcaaaccgactttaacttataaattctaataaattaacacctacaccgtcttcaccaacacatacattaaacttaacgaaccatactctttaaaacaatcccactttaaattaatcatcatttatatccattaaaaactatataatatatcctaaaatttcaaaac

SEQ ID NO: 153499 - DNA, 533 bp, Zea mays
  Clone ID: MRT4577_7156C.1
aacagaagtaatcactactgcagagcttgatagcacctatagccaactgtgcgcatacgatacactacacaggattaggacatgacacacatgctaacaacaggcctatatacgtaccgctcgactcgacaacactcacttggaccatatgcatacactcatggctcatgtatacacagcctactactgcctaaactgatgcggactgggaccaacaactgtaccatatcctgttcattaggattgtcacaacaatttgcattaatcatatggatgattacaagctgtcataaaacgataaacagttatattagcatcttacatacgaaactgaaacataaagcctataggaacccttgtctactaacgcagataacaccatttatttgtttttctcttactggccgatcatacagtaaaaaagctactccactaactacctaacaatagttaaatattctatgcgacctaatgaatagtgttctctacgtacaaaaatacctattatgaccacactggaaatgcaacaaata

SEQ ID NO: 153500 - DNA, 276 bp, Zea mays
  Clone ID: MRT4577_71570C.1
gggggaaaccccccggaaaactcgtcagggagacagaaaacatgactgttctaaaatagtaatggggcacatattttgccctctttctcaaaacaaaaaaggggaaggttttttatggaaaattaaatataaaaatagaaaaacagggacgatgaacaagtaacaaccggaatcgcgggatgaaacattaaggggcccattccttggatgctggcttcatatccaaatacagcccaattagtcggggcaagcaaagactttttgggcaaattttgc

SEQ ID NO: 153501 - DNA, 663 bp, Zea mays
  Clone ID: MRT4577_71571C.1
cctcgaggccggccgggattgagctttctctcgctcctgagagagtctctctctctgcgccctgcgctctgcgccgccgccatggaggatgacaatgactgccctcctctctccggtgagatccctctcgtgttcgccatcccctccagagtaatcttcactctcacacccctctacagctggcgtcaacgtcatcaccgattacctccgggctggaaagcccacgctaagcaactacattctgaatgagaatagatgtcaatataattgtcgtgaatgacgtaaatgagttagcagaggaatatctgatacctaaaggttggaagatccatgaagtgcaagagggacgcacttatcgaggaatgagtgaagctggccaatgtatgtgtctgttgctctgtaaaacacaaactgtatcaaggactcgatcaaattgtgcacagaaacgatagaatgaatcatatattacttgagacaacaaggatgtcctatcctgcctccacttgaatctgtatctttggatagactgatcaactctggagacaacaattgagctgaattctattattacggctattgatgcaaaaaacttctggttacagattgacgagtacaaaaactcttcctcattacctgaatgatgacatcaaatagcatctgcct

SEQ ID NO: 153502 - DNA, 251 bp, Zea mays
  Clone ID: MRT4577_71572C.1
cacaagcttgtactgtaacggagcccctggctagctacctagctcgctaggttactcatccaacggcgatgagtaacgcagtgacacccatcaccaagggtggcggcgcgagcaatgacctgagggaaccatagcaatggcgggggggggggggtgctgagcacagcggcttggggtcccggggggggcgggtggggagcccgcggctccttttcttttgtttggacctggcccggccccccccccggggg

SEQ ID NO: 153503 - DNA, 417 bp, Zea mays
  Clone ID: MRT4577_71573C.1
ccccaaaccccccaaagagaacaggggggcggggcccaacaatttttcctccaacaaaaaaactgattgaacattgtcccaaaaaaccctcaagggttaccttcaccccagccaggggctaaaatttttacaatggggaaaccactgggagactggacctctttttgctttgcaaaaaaaaacaattctcaaatggcacccgggtaagaggggggagccaactctttgggcctttttaaaagggggcctccaattcgcagggttgacccagtgggggccccaccccctttttaaaccttttgatcccccttaaattgcttttttaaggccttaggccctaggggaaaaacatttaatactctcgcctgtggtttgccgccttcctaacttaggggaaaaaaaaggccttaaaagccc

SEQ ID NO: 153504 - DNA, 129 bp, Zea mays
  Clone ID: MRT4577_71574C.1
gcaggctctagaccgagcgagctagggctctcccaggcctactacacctacagctgcggctacacctgcgactcaaaccgtcgagcccgttcccttcccgagcaccgcgcgttccaaagctatccctgg

SEQ ID NO: 153505 - DNA, 296 bp, Zea mays
  Clone ID: MRT4577_71575C.1
atataataaacaaattaaataataaaaaaaatggatggttgggtccaaaaaggttttggaaaaaaaagaaaacacagaaaccgtgagtttttccggaaccaacgccaataaaaaaggaaaaaaaagaatgtgttaacaaaggaaaaaaaaagttaggaaaataacagaaccagtggggggaaaaaaaagctgggccagtctttttttactaaacccttaaaatgcttattggataaaacctcctctgggggttttggaattaaccttgggtccaaaaactggaaaaaatatggggt

SEQ ID NO: 153506 - DNA, 343 bp, Zea mays
  Clone ID: MRT4577_71576C.1
tggtttttttgtttttttttttttttttttggccatcaaaccccaaaactaaacactacattaataacctgtgcttcaaggtttgctcggcaaactctggacaatcaattttgctgctgtacatgttccgtaacttcatcattttctttgtcctatccacgaaagaaagaaaattccacaccgaaatatggttgtttacggccacgtaaatatagttgcatcgcgtcagttaactgccggactttgctgcatcggccgacctgagcacgatgagcaacaagtccattggcgagcacgagcgcaagtagctaaacttgtgcagagccgccgttccccgtccccg

SEQ ID NO: 153507 - DNA, 2199 bp, Zea mays
  Clone ID: MRT4577_71577C.1
cattgggtacctcgaggccggccggggtccgtggatatgacgccgacctctcttctcttcacccctctcctctctagccgtagtagctagcgcgccgaaggcttaggctgcctgcctgaattctctcgtttctctgcttcttcctcctctcccacccagaaccagaaccaggaagcatcgcgagccaccggcgagccctcgtcgccgccaggacgtgcaccgacgaccgggtctctgccggccgctggcctttctacaggtcttcgccgtccgctggggctaagcaagctagcttgcgagggagcatatatggtcctccgcgtttcatgaccttcatgaggtgttccgcggccgtctccgacggcattgcgctgcgcttccccgccgagggcagggccctccgcggaggcgtctgcgcgcgcgggcgcgggctgctcgctctgggttcccacaggagcagcagtaggagggcgaggcgcaggcacgtggcggtcttcgcgaggcggcggctcggcaagtaacaacgggcgtggtggagggccatcttcgcggactggaacgacgacgaggcgagtctggccgggttcagagcgaacggcgagctgctgaaggagattggggccgaccaggagctgtcggagaaggccaagttcgaggagtggaggcggaaggccgaggccattgttgagctgcgcgaggcccagcaggacgcgttcaacgccgaggagcggtcgtgggaggactggaccggcggtggcggcggtggtggcgcggcgtatgggggggctggggacggacgcggcgaggccagcttgtcggagcagataaccgatgatcctgcggagatcgtctgggataagggcgtcgttgaggttttcagaggtactatcgatgaggattacgaggatatgctgttcgaagatcgagtttttatgtatgcctccacgaactcggccaaattcctagcattgctgatcgtggttccgtgggtgatagattttctagtgcacgactatgccatgatgccctttttagagaggtatgtccagaaggtgccgcttgcagctgagttacttgatgtgaggcgcagccagaagctgcagatggttaaggacctgaacatcgagaaggcaagataccgtcttgaagtagagatcggcaaatctcccccgctctctgatgaggaggtctggtttgagctgcgggaaaaagcgctcgagttgagggacgattggaggctagaaaaccgacaagcttttgcaaatgtatggtccgacatggtttatggggttgttctattcctgcttctctgcttcaaccagagcaaagttgcgatgctcaagttcacaggatataagttgctaaataacatttcagacactgggaaggccttcctaattattctagtatcagacatccttctagggtaccattcagagtcaggttggcatacaatggtagaagttattctcgagcattacgggcttgaatccgatgaagcggcggtcacattttttgtttgtctggttccagttgctttggatgtgtacataaagttttgggtatacaaataccttccaagattatcacccagtgtgggcaacgttctggatgaaataaagcgccactaaggaatcatttggataaattattgccttggaggtattcgatgggtgtatttgcttggcatattaagttttcatcaaatctgaagggactccttcgtctggaaaggccttgcctagaatgcctgcctggccacgccatcaatcagagtgtccggctgttcgggaggactgggaattggagaagtaatctgagctagtccttatgtatattctaaaacaatatcttgtggatagataaccatagaggaaactcgaggcttttggtctgagatttatcattggcggcaaagcatttttgccttagaaattcttttgcatgatggaggccacaggttggttggaatctgtcaggttattgtttcaggatgatgtccagagctgcaaccttcgttggtgctcctattttagaaccgaaacgtatcgacatcttgatgtccagagtttgcagggttcagaaaccgaaacataatatgcaagttttaaacttcgttactaagtcgtaaagttcaattgtaaactgtttcggttcgaacctttatctttcgacaaagcaagtttttttgattaattt

SEQ ID NO: 153508 - DNA, 192 bp, Zea mays
  unsure (1)..(192): unsure at all n locations
  Clone ID: MRT4577_71578C.1
accgcgncgcnccagnggccgaagncancacccncaccgaagagaccnnncnccgacaagaaaaaggagaaggacacggggggggnnngaggcagacggcgnccccagggggaaacacggcaagaaccnaggaacacaacgggaggaccggggaaaggccacggaaggcgcggangaaaccgaganggggca

SEQ ID NO: 153509 - DNA, 818 bp, Zea mays
  Clone ID: MRT4577_71579C.1
cctcgaggccggccgggtaaatccttgacagtgcctatccattgtgaccactttgttctgcagaaggatccacagttgtttttgaacttgcatttgttttcaacctatgtcatccaccatccaagcttctttttgttgaccaaccaaacaattgtgcctcttaagctgatttctcagtagtttccatgagcagatgagctccaggatgtcttcttttcatgtgttaaatttgtgccttggataggggaccaaaggttaaaaaaatgcagacaccgactgggttgttcctttatgcacaggtacggattgcacagccaagcgcaacatcgccaagctgcttgcgaattccataatataccgctacctcagcagtgaggaactgcttgaggatgttcttggtggcaaggacgccctcagagccttcaaggaatctgatgagaagggttatcttgaagtcgaggtgctttccttctttctccctcatgtttttcttactagttttcttgctctaaatgttactgcccctgcattacctagcaccaattttccaatttttctgtctcgctgctagaccgaagggttaaagcagctcacgtccatgggtagccttgtactgtgctgtggagatggcgccgttatgaactcaaccaatctgtatgtatgaatgtatatccagtgtctattatttttttcatgcatgttaagtcgttagttaagtctatcaatgctggtgtttattatttaatgaaccttcagagggctgctgaggcatggtggtctcattttggattgatgttcctccttgaatggcagcaaat

SEQ ID NO: 153510 - DNA, 638 bp, Zea mays
  Clone ID: MRT4577_7157C.1
aattccaagatgctgatgaagaatggcgttgaggtgaaggagctccagagcctcgagctccctttgacgcctactctgctttccgagaggatacctgggctggaccgcgggctatcagaaaggatctggacagtgttcagggaagaagctttcgttgatgacaaaggatacatgaaagaggatggccgggaaacgccatggaaggatgcattggtcaagaggggcctctgggaagaggtgtctgcgttggctgatcacatccaggaagagctaaatcttgcttatggataccacgagatgacgagcttacacgctgatgagatgtttgattgggttgacaagcacttgagatgagggggctatggtggatcatttcagcatcggtgcagcttctattaaactagttggagaaatgtaggggaatgaaaatcataaactggtgacacagaagacacgcacaacatatccatcctaacattcggatgaactgactttattatgtgaaatgtgtcgtgttcactacttccagcttgctcttgtgcaatggatttgtgaaaagaagtactctatccgtcctaaaatattagttgttttaactttttaaaaaaaaaaaaaaaaaaaactcgagggggggcccg

SEQ ID NO: 153511 - DNA, 232 bp, Zea mays
  Clone ID: MRT4577_71580C.1
ccacgcgtcgcgcacctccgatctgttatcctttccttcgacatcgctactacagattagttgatatctgacctgtggccggaggcggtactactgaagatcatgattgctttcttttcttttgttgtgtgattctcttggtgggtcactggtctcatgcatgcgatctctgtataaattcaccgactctttaggaactgattactattggctattcgctattatgagtata

SEQ ID NO: 153512 - DNA, 280 bp, Zea mays
  Clone ID: MRT4577_71581C.1
ggggcccgaaaaatccttccactacccccaaatataaatccccctcctgttgaccggggcaggggaagcttgaaaaaacctttttgtttttttacagggcaggaaaaagaaaattgggaaaatttccaaaaacaacttacccttgtgggggtttcaggctttttttcaggagaacccccttctttggggatttaaggaattcgggaaaggggggccccccacccttttttttttacaaaaccaaggggaccggtttatttttggggggggggggggggcc

SEQ ID NO: 153513 - DNA, 379 bp, Zea mays
  Clone ID: MRT4577_71582C.1
gtattgttttttttttattgttttactgtaatcgttacaaaaacaaagagaccggggtgatatgaaagggatacttcccacatgagatggggactgatggtatctctgggaatgcacgcactcggttttccaaagacagctggtatgctcaaagtccccttcctcgacacggacccatgtatagggcctcacccatgtcccaaggggttccaagaaaccggcttctttagctggacccttggggtttcctgaacaatcaaagacttcaggattcggctgtcgagaaggatttatttgcggatgttgtttcccctcaccctaagggtgtgaaggggtacaggttttttccctttaagagcaaaatctacagatttcaagc

SEQ ID NO: 153514 - DNA, 400 bp, Zea mays
  Clone ID: MRT4577_71583C.1
cacgacatcccccctacacacacacacacacacgggggcccggtccgggtggccgtttcgattcgatgcttgtggccgcccatcagcgaacgagtcgcagccggatcccgactcacccgagggcgctcgagcgccctccgaagaagaccccctctccgcctccgcttctgcctctgccgccgagccctggtcgcctcctcggcatgcccgtctacgagttcatcgaccagcacctgctcttccgtcgtcgtcgcctgccccactctagcagcaactgtacgtagacaaaaacaagcgggactgctggagtggatgggattggggatgaattgtggatggacggaggttgcgtgtgggagttggtttgcgcagcgcgaggaggtagaggattttcgtttcg

SEQ ID NO: 153515 - DNA, 150 bp, Zea mays
  Clone ID: MRT4577_71584C.1
gtcccaacagccgcttcgcttgacttgtaccccgacgcgccttccccgccatctccggcgaccggcgccacagccaatggagttcatggacagccagctcacggctctcgcgctctccgactccgacagcgcctccgtcgagggcgcccc

SEQ ID NO: 153516 - DNA, 1716 bp, Zea mays
  Clone ID: MRT4577_71585C.1
gggtacctcgaggccggccgggaccccctcccgtatcctcccaattcacgacaacccaaacaaacaacccccctacacacacacaccggaggcccggtccgggtggccgtttcgattcgatgcttgtggccgcccatcagcgaacgagtcgcagccggatcccgactcacccgagggcgctcggccgcctctgaagccggaaggagcgcgcgcgttggacatgggggagctcgcggcggcttcctcgcccccgccgcccgccgtgctgcaggtggtcttcgtcgacggcgagcagagcgtggacctgggcacggtcgccgtgcagccgtcgctgagcggtgtgaagcggctgcaggccgtggtggcggaccgcgtgggcgtcgcgccgtaccagatctcggcgtccctggcgcggccccgccgcgcgcgccgcgtgcccctcgacgacgccaccgacctcgccgccgccgtcgcgcgggagggcagcgagtgctacgtcgtcgctgggctccgccgctcccgccgcgagcgacggggcggccggtcccgtcgcgacaggaagggagccaaggacgcgggcgcgccagcggagaagaccatcctgaagcgcctcccgccaacggatctggcgtccctggtcggcactccccctccgccgcttcccttcccccacgccgttgccgcggccccgccgctcgcgctcgacgggtggggctacgacgactacgaggcccggctgcgggagctgcagcttcagcgcgattggtacatgttgagcaccgtgggagtgggagcgggtccggacccagcctacctccatctggcggctggcgggcacccggagcacgaggatccggcggcgccgtggtccccggggcggcgcccgtctccgtgcccagagtgcgaggcggcggcggcggccatgcgccagccggcgttccactggtgcgtgcacgacgcggtggtctccgctgtgttccgctcccacgtgggtcccatcgagcgccctccgaagaagaccccctctccgcctccgcttctgcctctgccgccgagccctggtcgcctcctcggcatgcccgtctacgagttcatcgaccagcacctgctcttccgtcgtcgtcgcctgccccactctagcagcaactgtacgtagacaaaaacaagcgggactgctggagtggatgggattggggatgaattgtggatggacggaggttgcgtgtgggagttggtttgcgcagcgcgaggaggtagaggattttcgtttcgatagtagctagtcaccgcagcagtcgtttctcctccttggtgtgcaaggaagccatgacgtggtacctggacggacacgcttgctcgctcttgtctcggtccggcacgcggcagggcttcttcgcctggttcaccgtggcactgtagcagtagaaaaccaaatttccccctttttttcctttttctttcctgtggcctgtgggttgtggtgcactggtgcgtgcctgaacaatgtggcatgggcgagtccatggcttgattcgtttcggccatatttgtggactcctcttttgtttttccttttttctgagagagaagagagagagatttgtttctgttatatcgaagtggtatatgcagaaggcttctattgtagccttgtgagtgtaactgttcgtctcgtgtcatccatcctgtgcttttccttaaaaaaaacacacacac

SEQ ID NO: 153517 - DNA, 327 bp, Zea mays
  Clone ID: MRT4577_71586C.1
atcactattctaatgcatccgtttcaacttaaataaacctttctcacatactagaccttgttattatcaacaatgacgctacagaaaagcccaaaataactccactcaacggaccccctaccaagcaagcctcgccaccgccgaaaccaaaaagagggggccacaacccggtgggaaaaaaaaaagggaggaggacagagcacgcagagacacaacacccacaacctgaggggccccacccacaacagacaacctgggggatactcttgatgcccagcagggaacaacacccccaagggaagcgcaaagagcgcccgtggggggggg

SEQ ID NO: 153518 - DNA, 332 bp, Zea mays
  Clone ID: MRT4577_71587C.1
ggcgcgaccaacgacggacgagcagcaacaatgctccgcctctcccgcttcctcccctccaccttcaggggagtcactgacctaaaagatgttctctggagcgggtcgttgacattcaagcacgcgcttgcaacttcagctgcaaatgttgatgagaatgcatctgttaaaaagtgtgcgagctacactgtgttgaagggaaaggctgcactttctataaggactatgctttctttgttgaccaaaggtgaatctggaggatcttgagtggacaggaatggggcaagcatggggacctttgtccccggagttggacaaaggaagtactacta

SEQ ID NO: 153519 - DNA, 458 bp, Zea mays
  unsure (1)..(458): unsure at all n locations
  Clone ID: MRT4577_71588C.1
gccgttccacgcgcggagatcggtgaggttgagtatggcgacgagaacgatgacaacgacggtgactaggttggagtgctctacgcatactacgacgaggaggaggactctgaggaagacggctactaagctgacaacgcggaggaaggggaaggtgatgtngaaggaaaaaggagagcgtcccgcatgtgactggcggtgtcttcgcacacgcgcccaaggatatctcgccaaggcacggggaacaganagcaacgagcatcggttgcggttcacgccgcttagaagtacgtgccgaacggggggccatcatgcgacaacggacgccccaacggccacgtgtacgtgcacgtggacggggagatgaacttgctgctgccgatcctgatgtgcgtgcacttgcacgccggcctgggtgcgcacggcatgggccagcaacaggccgtggccacaggcga

SEQ ID NO: 153520 - DNA, 354 bp, Zea mays
  Clone ID: MRT4577_71589C.1
gcgcagccagatgcccagatgagcgagggtgctactgccacctcgccggcgctggagaccgaggtggcgcctttgccggacaacgacgacctccatcgggagatctttctccgtctaccgccgttcccctcgtcgctgccccgcgcctccctcgtctgcaagcgctggcgccgtcttatctccgaccccgccttcctccgccgtttccacgtccaccacagggcgcctcccctcctcggcttcttcgccgacgaagacggtgacatcgagttcgtgcccacgctgcgccggcccgaccgcattctcggcgcgcgcttcttcctgccgcggtgcgacaactactatttgagcttt

SEQ ID NO: 153521 - DNA, 270 bp, Zea mays
  Clone ID: MRT4577_7158C.1
gagggggaagattaaagaacgccgcgcggaaccccccccggaagagccacaacacggcgcggccacagaggagcaggagcacccgcaagaggaaggacagcgcgacaaggagccgcaccgaggccgcgaggacgaggggacccgaaggcggaaaagaagcgcccgagcgcgaggccgacggaggcagcgaggacccaggagaggcggaacccggagaagcccacgacgaacccacccggaacacacaccggcagacggcgacccgagcgg

SEQ ID NO: 153522 - DNA, 188 bp, Zea mays
  Clone ID: MRT4577_71590C.1
ccgtaccacatgctcagacatagattttcgatttctttttcataacagatacgccccaactgagagagggacaactatcatgttacctcacctttcaatcttcaagctttcataaacatgtacatattcttatatggtaacgatacctttattcggtgctggaacacccacctaatgattcggagatt

SEQ ID NO: 153523 - DNA, 308 bp, Zea mays
  Clone ID: MRT4577_71591C.1
attcggctcgagcggaagtaccgagcccattgtatggcgggcggcctttatatcggctgttgggggggcatttgatcttagctctgcgccctccccacgggaacccgagcaggagaccaaaggccgtacaatacctccagtatcccttaactacactattaagaaaaggaaagcgctcactgtctgtcactagggttttatcgttgactaaaagcaccaatgacttcttgttcaaacataatttctcataacagctgtacaatgcacgatgtttctacctgggactccataaataccattaaatttgt

SEQ ID NO: 153524 - DNA, 485 bp, Zea mays
  Clone ID: MRT4577_71592C.1
tcccaggtccctttcaacgagagagagggagagaggagcagttagttgagaacctgagacccgaggcggagatggatctgctggagaggagcgccactattaaggccgaggcgggggaggcccagcggaaggaagcggagaggaaggagcagcagcaggagcaggagacccagcagcaaggccaaggactcaccgccagacccccgctcgccaacggcaggtctggaatgttgccaatgtcgagccctccagcaaatccaggacagcttaccattttttatggtgggtcagtatgtgtgtatgactcagtgccaccagagaaggctcaagcaatcatgctcattgcagcagcagcagctgcggcctcaaaaagcaatggcaccgctgctgttaagcctccagcgatgtctgcgaccaatgctatccaagccatgcttacgcggtcgctctcacttcagagcacttctgtagcaaatggacaacct

SEQ ID NO: 153525 - DNA, 383 bp, Zea mays
  Clone ID: MRT4577_71593C.1
aaaaaaaaaaaaaaaaaaaaaaaattaatttaaaaaaaaaaaaaaaaaaaaaaaaagaaggggaaaaattaaaaaaaataaaagaaaaaaaaaaaaaaaaatacaaaaaaataaaaaaaaatataatatagggccggcctttttaaatgtcccagctttacttccccttccttccgacttattacttcttttttgttgccccctaatttaatttcctggcccgtctttttccaacttgcgtcctggaaaaaccgtgggttccccaaattttttccccttgctgcacttccctttttgtccaacttactttatctttatcggccctttaccttttgcccttccaaacatttcccccaccttattgcctaatggtcccccccctt

SEQ ID NO: 153526 - DNA, 206 bp, Zea mays
  Clone ID: MRT4577_71594C.1
gtcgcctgcggtacggtcggtagtccggtcgacccgcgtccgcggcgcgtggcggacgctggcacccacgcatcttcatctttaacttttcaaacaaaaacttttatttcctaatacaatcttccacaaagctttacctatatctacacaccctaaataccaatttataattcattaaaaaaactcctttttttaaaacacatata

SEQ ID NO: 153527 - DNA, 253 bp, Zea mays
  Clone ID: MRT4577_71595C.1
atcggtgacgactgcacagagcaacactcacacccgtgcccaaatgcattgactccaatcacgtccgaacatatcgacgaccatggatgtataccggcccgaacgcggcgacgactttaccaagactgacaccaactgcaaggaccaatccatcgaccgcaaggtcgacgtcatcgaggaggacgcgctagaacaactactatgtaagttatgcgaatgtgaacgggacactgacaaggctgtggtaatgctg

SEQ ID NO: 153528 - DNA, 607 bp, Zea mays
  Clone ID: MRT4577_71596C.1
cgctccaagggttcacataatacaaccatagaaagtaagcattaataaaaagacaatgggaaaaactactacaacccttcacgacatgcagagatgtggtaaaaacaacacacaacacacttgagtccccaaagactatgaacttgctgatcggtcatgttcatgttattcatttggaggagcatctatgggcaaagtagttgaagtcgtagtggtggatgttatgctcctttagccatgattgtgatgcatcgaagagagaggaaatatgctcttggtcaccggagtttggacttgcccacactttggcatctaacttgtatgttgcaaggccgaacggcgcaagtgacatatgattgaaggcttgcatgctatctaaagcaacaatatctttgcatgttgaaaggctatggtaggtcaaaaagcaagtattcagatcttttctattcttcatagggacatgacttgctggataccaaaaaacggacatccaacttgatggcgagagctctgcactgcttaaagatgatagggaaggacaactatagcaaagctcatataccttgtctgcgaaaggtatcctctcgtaaggggagtcaggctcaaa

SEQ ID NO: 153529 - DNA, 195 bp, Zea mays
  Clone ID: MRT4577_71597C.1
gggaggctaaaacaaaaatgctatgcaatgttcaccagatacaaaggttgggcaaaagattcaaaaccctttgaaaatatgggctttcaacatatcctaaaagcgccagggggagggctaatgctggagtacataccagacgaaagagaccagggatttgatgtggcgttccctagaggccaccagctatatcgt

SEQ ID NO: 153530 - DNA, 1142 bp, Zea mays
  Clone ID: MRT4577_71598C.1
ccccgcgtccgcccccacgcgtccgcccacgcgtccggacaattacggcctgaagaatccgattaccttgatgagccatgttacaccagtgatggccatcgccactatgatactatctctattactggatccttggagtgaatttcaaaagaattcatattttgatagcccttggcatgtcatgcgcagttgcttacttatgcttatcggaggatccttagcttttttcatggtgttaacagagtatatacttatttcagcaacaagtgccataaccgtgacgatagctggggtagtaaaagaagctgtaaccattttggttgcggtattttatttccatgatgaatttacttggttgaaagggtttggtcttttcaccattatggttggtgttagcttgttcaattggtacaagtatgagagattcaaaaggggtcagataaatgaggatgacgtcagctctccatttactggtgacgtcaagtacattattatagacgacttggaatatcagtgaatttgaggaagatacataattctgtaatacagtgaattctaactgccactggcttgttcatgcctgaacctattgaaatagtagttacttatcgaggttttctccggaaaacatgcatgaagaacacagctaaggctaggtgtgattatactatgcacaccaaaatctgatgtgagctatgtttgtcacgatgatgttcaattctcgtcttggttgaacagtcaggctgactacactgtcaagcaaagagctaactccatcggatcagaattcccattttgagaagactagcagtgggttgcagattgatatacatgctatagcgggaactgctgagaatgctccggcatctgtatatttgttgttctcttcgcgttagtgcgctggcgcatattcattcttgaacctccacatttttagtgacgaggtgtattcattctctatataggtctgttttgtaaatctgaccagaggataccccacacgtgctgttttcccttgaaacctagggagcggcatttgattttttctgtagactgtttcggggtaccgaatatgttgtggatatttgattgaagaattaagaacagcagggtagattggctaactggccttttgaggtgtt

SEQ ID NO: 153531 - DNA, 598 bp, Zea mays
  Clone ID: MRT4577_71599C.1
gacgtcgacgcgctagtggtaaaattgcattttccttacatactgtccttagatacaagaggaatatagcaagcatcttgacctatatgcacccaataattgtacacctctagtcaattttctaaccaaacgccactttcatctgctgaacattcagcgggcgtatgctaggctttggggcattaacaatttggcttccgtgacagagataacaaagctaggctgcatcattcttcgaccccatcatcaaaggacaaacaatgaaacaacatcagtctctagtgtaccaacttcgcaagcgacactccttttgacctctcttagaataagttgccgtaatcagacacgacatgacaatgtgtaacagtactaatatattcgacctgcatacttgcctgtgtttctttttgcaaggccaacatagccataggtatgcgtactcaaacaaagcgtgtagcgactatttggaatttaagagtttcacatagaaatggtttaatatattaacagttccaatgtcaaaatcatagcaattttacagtcttgtactatctccaaccatatcatctatattcctcatctatatatctcatttaca

SEQ ID NO: 153532 - DNA, 243 bp, Zea mays
  unsure (1)..(243): unsure at all n locations
  Clone ID: MRT4577_7159C.1
ctccacattagganaactcaacaccataaagctgctcatttttgtccttgctctcctgtccctcgctgttatggccgcctccagtacaatcgagggttgtgggtgtgagacacaactgttatatctaccgtctccntactatatgccgcctctattatatctgccgtcggagtaacagccgtggtcatggtaatagcccactcaaccaccgcatgtaagcgcgtgccaacgtttttgatcctg

SEQ ID NO: 153533 - DNA, 740 bp, Zea mays
  Clone ID: MRT4577_715C.1
tttttttttttttttttgtacggtaagacggcgcaactgttgttgcgagtacgaaatcttattcgcttagctttaatccgaatcggcttttactttacactgttttgtctctataaattgcaggcgaagcggttcgaacaggtatctttaactatggctttatgctggccgcagcggtctccgctgagcatccccctccccttgctggcggctacaactccctccccttggcccgcagcgttgcctcctacgcgtcggccctcttctctctccccctcaatccagcggttcactgttcatcccctccggcatcggttgcattgcaggcatgtctacagcctagcgctcttggctgtctcaagtagagtcagtccttgccgctgcgcgcatctgtgcacaatgcacatctcccggaaagcgcggataataaggatacggaacaaaggcattggatatatatgctttgctagtattgaatatgcaaaacagctgatacagaattataaatgacactgtttgatactatttacagaaaaaaaatttaaaataagaaataagtgaagagatatgataatggatctgtcggtgatagcctatgcatcgaattttcgcgttggctttcttgtgcatggacctattttccgcgcccatgggcctgctagagacaggcgggcaatgtgagcctcaaatggatcacggcacggatgaaatggatcgaccgagatcactggcgtgcacat

SEQ ID NO: 153534 - DNA, 324 bp, Zea mays
  Clone ID: MRT4577_71600C.1
ctcgaactaacacataagcgatggctacaccacaacaacccgctaacggaattttatacgcttgcgttgctgaaggcaagactattgttgcccaacacggcgataaagatcaattcaagaaagtcgcaaaagtcattcttgagcgtattcccaacgaagatattaagaaatcatacgtgcatcaatcatatgccttcaattacattagtcaaaagggcagagtcttcctttgcgtgacctccacagatttccaaacccgtgtcgccttcgcttatttgcaaaaaatccaaggtgaatatagacccagtggtgatttggacttcg

SEQ ID NO: 153535 - DNA, 1235 bp, Zea mays
  Clone ID: MRT4577_71601C.1
cccacgcgtccgcccacgcgtccgcccacgcgtccgcccacgcgtccgcttgagctagagcaagtttcgtcactctagaagctaaatattgaaacagaaagagttaaaaatgactaaaagaatatcttttaccattttagttacttttagctctttatgtttggatttttagctcacaaagtggctaaattagttcatgggattcaaataggcctttaatttgttgcattgacagtgaagcatgtgattttatgtaagaggtactgatagttttggagcaaggaaaagctgaagcattggttcaaggtgtgtctgtgtctgcaaatgagaagaaaaataaacggaattttattatgtgaggttttgtaccgtcatttctgagattgcaagtgcaccttcttaccagggaaaaataggattgactcaactttttgtggtgtattgaacagagggcacgtgtgcatcttggttgttagaatcacatagtgacatagagatgcatcaacagagataggtaggtagtaggacagagacgataaccaagaagacagtagcaccaggaaaagatacaaaaaaatcaagggaccatcagtttgaagtacagtcaaaaaattaaaaaggaaagggtaaatcagtagtgtgcgtgctctatgttgctagttttgcttttttgtagcaagatgaccctgaattactcatcattttgtgtaattgcaacggtgtactttgaattttttttgtaggtgagtaagcttgagggatgagtttgcttggagctcatattccaaaaccaattggaagtaaaagagtgtttgcgccagtttgcatctctttgcgttaagctgcagccagctgtgtatgcagagtattgatctgtagaagaagacaaatcttggtgctgcagagtattggattcaagaaaccatctgctccgtggattacgtgttttcaggcacctgtgtatgttctggcggcgcttctcgtcacggccgtagcattgtttactgaactgcttcattgatgcagtagtgcaacagcagtagtagtagtagcattgttcatgagaaaaacaggcatagattcagattcagtgacacgtttatctctccccccaatgctaaggcggacgccaaacactggtcaccgttactggttttacaatatgccctgctagctgcctttgcatttagatgaagtgtcttactttaagcctttagccatgacaatggcaacgg

SEQ ID NO: 153536 - DNA, 710 bp, Zea mays
  Clone ID: MRT4577_71602C.1
gcgattgggttcctcgaggccggccgggaccacctccgccgccactcaaacacttgcgccgccggtggccacacgtgaggccgccatgctctccgtgtccgcctggcgacttaatggcatcctggcgcacgcgcttcttctctgctgggccgtctgctcctcgatcatagccattgagatcgctcaatggacacaagtcggtgatcggcacgctgcgtaggagatctcgtatgtctatgagtcctcaacctgctaattatgagactacctcactgtcattcctccgcaagcggatgaacaccacctcgacccacggccccatccacttctcacggccccgccaatagtcctgctgtgcgcaccatcctgcgcgatgattccgcactggaccaagagggtatacgctgctctggcgaggctcatgacatacgaaggcgtcccgccgccgtactacaagaccaagcgtatggtcatccctgactctcttaaggttctgatgctagcccctgtacacaagtactgcctcctcgtgcgagctctctaaggaggaccggtggaactaccatgacaccatcatggaacttgaggagaatatgagctacaacgcctaggttgcctacgagagtgaagaagctattgtgcaagctgcgtgatcaggtcgataaacagccgaggacgaatatccgcctcatctggagattcttgcccct

SEQ ID NO: 153537 - DNA, 409 bp, Zea mays
  Clone ID: MRT4577_71603C.1
aaataaaaaaaaaaaaaaaaaaaaaaaaaaaaaaaaaaaaaaaaaaaaaaaggagaaaaaaaaggggaaaaaaaaatattggggccgccgttctaataaataccaactctcgtcctcgtgcacgccaaagttatatctcttctttagggtaacacaaattcatttctctggccgcccttttatcaacccattttcttggaaaaccccggcgttccccaatttaatgcccttggagaacataccccttttccccggtggccctttatcaaaaaggcccctcccctttgtcctatccaacatttccccaatctgtttatttaatgggaccccccccttttcttccctttaacccccccggttgtgtttttttcaccacatttccccccttttttttccctttccccccctc

SEQ ID NO: 153538 - DNA, 376 bp, Zea mays
  Clone ID: MRT4577_71604C.1
gaaaagaatcaaacgacggtggcggagtagaacacaggggctagtactgaaagctatgaggactttctgaggtgtttgccgaagactgactgcagatatgcactgaatgagtttgattttgttactggcagagactgttcagaaaagcaatatatggatgattgtctggttcacatcgacatcagcgatacttgctacaatgatgaactgcacatcaagggaccggaacagccatcatcttgaccgtttctacgacgaaatccactcgaccggccagttcgaggtggacatcgaggttatcctggatcgggcacactgaagctgcctctccttttgaacggacatgtggagggccgtgaaccttaagccacgatgc

SEQ ID NO: 153539 - DNA, 489 bp, Zea mays
  Clone ID: MRT4577_71605C.1
taacctggacccggcccaagaacaaaccctaaaacctaaaactttttctcactaaaaaccaattctgaggatattttttttcactgtttggccgctcccccctgcggccaaagcccccaattcggccttttgtgggccgcttttcaaaccactgggcgggggccttcaccgccccaagtgggagaacctttttgttacccaccttatacatttcggagggcatgcctgttactcctgggggcctaatagcgtttagggcctcaccgatcacccttctttgcacctgtgccgtcttaatggggagtggacaccccctgtttcggcccatttaatccgccttctgaacgggttacgctcccccgtgttcggtgcatttttcagggccctgagcccctgtccttcccgtattttccctttctttgttgccaacttcatccgctttccccgtggcgctttaactcggttgctcctttgcgggccccccttttg

SEQ ID NO: 153540 - DNA, 669 bp, Zea mays
  Clone ID: MRT4577_71606C.1
ggccctaggggccttttttttttttttttttcttttttttttttttttttttttttttttttttttttttttttttttttaaatggaaaaaaaacgatacggatcaaacaagggaggaaaaaaaaaaaagggtaaaaaacctaatggcccaacaatatagaaccaaacaaaaacaaaacccaacaagaaacacgggagggaagaaacaagggggaaaaaaaaaaagggggggaaaaaaaaggggaaacaaaatgaaaaataatcccgcgccaacaattaccccccctaacaggtgtcgccccccgccgcttcaaccccccccccccctggggccccccaccgaaccaaaaggaacaaccatgaaaaaaaaaggggggaaccccttccggtccttcccgctggaacagggtggaagcacaccctggaatcaccacccgccagaggggccggcaagcctaagaaaaaaaaataggagtggccccccgaggggccccaaaaaaaacatatttaaccagaaagatggggcccccgaaaactgcgcctatctttcaaaccttccctctggttgaccccccccaattttgcatcaggggaaatactcaggggggctacgagccccctctgggtcgccccctcctgggggtgggtcaaactgtatgaaaggacccc

SEQ ID NO: 153541 - DNA, 1379 bp, Zea mays
  Clone ID: MRT4577_71607C.1
gcagcggaaatcttattaccaaattttacaagttacaaaaattttacttcgtacatgatcagagtgattactacattgattcaaagaaagaaactttgaacggttataaattatttatagttttgaaatatatgctagctcaagtgaccatcctcaataagaagataaaggcggggtttttttttttaagaaggccgagcccaccggcacttaacaccatcaacagcagcacaaaacctataacctgggtaacactaggttagtgttgttagacgatgatcacttgacgaccatcctttgtcccgatacttgcttcatctgtccatctccagttccgttcatcagcaccatcttgtggtcgattcagttctggttctccgcatcgcgtggttaattctcgtaccatttccacagctgacacgaatccgcgagatcggtagcgattttccgatccaggcaatttgtcaagcgcttggggaatatcgcgctgctagcttcgtcttcatccgatccttaggattccttgatgacgcacggaataacgacgatcttcgattgaagtcttcgaccgagtacttgataagcgatgcacagggacctcgcttatttttgtctgaagtccgggatttgtggttcgacgaaatcgagcagacaagaacgaggttcgacgggctcgacgacgatacagagagtgacatatatggagctatagatctggcgagctgacgcaagtgacggagacagccgcgtatggcagcagtgcgtcgacagtctatagatttgggtgttttattgaatatgtgggatgtgaggagccgaacaatcactcacggtcgacggcgaggccgagtaccatggcgaggtcgaggaggacgacttgatgttggtccggtcacggcgtatggcttcaggcccccctgcgaaccccagcaatcaggccgagagcagggactcgtgcaggagcagaggcaagtgccgtgagaaggatgagagtgagcggcgacactggttccagcgacgactggagcacgcacgaccaaaggagaacaatactggccgggaatgaccattggaccaacggcgggttcgagcttgcgttcgaccgcgagctccacggacgagaagagaggacagcgcgtcgtggaggtagagaaccgatgctgcgtcgaacaggaagcgcatgaggcgatgctttccaacggctcaccatggctgagcagtacgactgctgtggacggtaccaggaacagggagaggagctccggcacggcagccatggagggagatggggcttgctgctccctgcacggttcctaactggaggagagcgagcaggagggcgatggagggagggctgggcgagctccacgtcgaacgtg

SEQ ID NO: 153542 - DNA, 260 bp, Zea mays
  Clone ID: MRT4577_71608C.1
tcgggcgtacttccgcctcccggctctcctctgcctcgccgtcgtcgccgtcgtcgtcacggcggatgccggcgccttcgtcagagaaggtggcctccttctgccccgtgacgccacgttcccggcggcgcaagcggagcggctcattctcgcgctcaacctcctgcctaaggagaaggaggctgcgccggccgcaggcggctgctacgggcccagcgtggtgcccggggagctcctatagcgtcgcgtccggctgcccg

SEQ ID NO: 153543 - DNA, 199 bp, Zea mays
  Clone ID: MRT4577_71609C.1
cccacaactcaaatactaccacaagcagcgccgataagctcctccagcaccaacaaaccttcaggcaatagagcgccactcgaccacgaaattgagaaagttgccacaaaccgattctccagagaacaggcgagagcaaccgcccccaagctgacggaaaatccacagaacctcaaccccaacaaggacctccacaagc

SEQ ID NO: 153544 - DNA, 630 bp, Zea mays
  Clone ID: MRT4577_7160C.1
gccggccgggcctgttcactcttcctcctcgcgatcctctcatcagcacggagacgccgccaggatctgaccgctgaccgacccccttcccatatctagcactctcttttcccacatcggattctaattgcgctatatccgccgccgtgccaggagccgagtccttagccgatgcttcgcctgcgagtaccgcccatcaagagttacagactgcacgacatgaatgttctctatatcatcctgcatcactgtgagaagaaataccctcgcatagctacacttacctttcatagcaattaccagcacctgtacatggacgatgatcatgtgcttgactttactttgggcctatttttgggcgtctcatcaggcaaggccaacgctataaatgcacctttacaaccctgagcagaaccccacttggaatacatcagtagcaaagcgtggtgttacaaactcctgatgctccttctgcgaaattttatccgaacaacgttgatcaccatgaacacaatagtaaacagaggcacagtcctgatgcaccactatttgggaacttctgtggacaaccacggaattcctccggtccagtggtagatcgttctgtatgaccgctgagacatcagtctc

SEQ ID NO: 153545 - DNA, 466 bp, Zea mays
  Clone ID: MRT4577_71610C.1
gggttgttgttttttttttttttttttttttttgtttttttttttttttttttttttttttttatgctggtggtttgcacgggtcatacatttctgttcgacagggtcaaattattggggggctgttttttttattcatgggtgcacattgggggggggggggcttacaattagaccttggtggctccaaaaagcggggcctcctttcaaactggcgtgagttgggttgcatattccccgcgggcaaatacaatattttgccgaagctaggaaccctgggtggttttctaccgaccccgggggtagtttgggggcctcgggggcggcgggctatgcatattcgtgcacactttttttggcttttccctcgcccacagggtttggaagttccctttttttcatccaagggcgaacaaggggccaagagggaaggggcccatgtacaaaagggcaggttggccatgcc

SEQ ID NO: 153546 - DNA, 546 bp, Zea mays
  Clone ID: MRT4577_71611C.1
ttggagctttcaactttctttgcttgaacaaaaagaaaagatctatatagacatatccgtgccctaccttaccccaaaaagtatggccacaattgccttaatttatcatctatatatgtatgtggtctcgttgaattgacacacatttataatgatcgttaacaatcaacactagctaccctgtagatttctttgacgactcaactaatggtaccgttagttatataaagttggccatcagggcatatagaagccgtggcactgttagcaaacttttacggttagtagattaaggagagaaaaaaaaaggcaccacacacgcaaattgatagtgaagtacatctgtcgctttcactgcatcattgtaaatatcttttctttgatcacgagttgatcaacagctagctagctagctagcaggcaatgagagccggaatgatgtgggggttccccaaatttgatccagtcttcttatcaaacaagggtttcttgttgcgcccagtagctaggtggcatcatgctctgcacaacatgtttttgtaatgc

SEQ ID NO: 153547 - DNA, 175 bp, Zea mays
  Clone ID: MRT4577_71612C.1
cgccactcgcgcgcccgggctcctttccgccacgctcacgacgatgccgtccccggcgtggtatcttctcctgaatccctccaaaccctcctgcttccgacgactctcgggcccgcgcctgagccggttacatgtctcctgcgacgcgccacggggcgcgcggaaggcccgaggc

SEQ ID NO: 153548 - DNA, 511 bp, Zea mays
  Clone ID: MRT4577_71613C.1
gcctcgcctgatccagttccacacgcgctctgcttcagctaaccggcgatgggagccggaactaccgccggcgccacctcccgcctcgccgtcgttccactcctgctgttacccctactcctcgcgcgcggcgccgaggctgtcagcctctggcggccgccgccggaggccgggctcctgggctccgccccaggcaggttcctgacgcaggaggagcactggatgagccaaaccctcgaccacttctcccccaccgatcatcggcaattcaagcagcggtactacgaatttcttgattaccaccgagctccaaatgggccggtcttcttaaatatatgtggagaagcttcatgcactgggatttctaacaactacttagctgtgatggccaagaagtttggcgctgctttggtttctcccgagcatcgatactatgggaagagttccccttttgaggatttgacgacagaaaatctaaggttcttgtcatcgaagcaggctttatctgatt

SEQ ID NO: 153549 - DNA, 141 bp, Zea mays
  Clone ID: MRT4577_71614C.1
atcacatcatagtacatgcggtgctgaaacttctccaagtgctggcccaaggtcaaggcgatcaagaggcatcaggataggaacattgtggaacaccgcagtcatcacggacgttcaggaagcatgcgcctatgatggcta

SEQ ID NO: 153550 - DNA, 614 bp, Zea mays
  Clone ID: MRT4577_71615C.1
catcgatcgccgagcgtgcgtgctctagctctagcaatagcagcgaggagacggtcgaggatggatcagaacaacagcaacaggcagcagcagcaggcgccgccgccaccacccgcgggctacccgacggcaggcgcggagcagcagggaggcagcggcaggaagcagggacgccgggggaagacgacctcgcgcggggagaagggcttcatcgaaggatggtaaactaccaatcacaaacttaatgatccttcagtcgtccgtcggtccacccgtttctctgtcctcttctgctacaaaaaaataacctcaggaattaagaactgacgacctactgctactgtgtggcgtgtttttggtttttcagcatcgcggcgctctgctgctgctggatctgcgagatgtgctgcgactaggcagcccccccttccctccgccgccaggctttgagcctttgacaggaacggagagatctgctccacccatagctgcagttgtggctgcacgtacttgttgagctgttgtgttgtgtccatctcggtactttttgatttggtattaggaggagctgtgatgacgatgcatgggctgctctggcttctgcagctctagca

SEQ ID NO: 153551 - DNA, 625 bp, Zea mays
  Clone ID: MRT4577_71616C.1
cggcacgccttccactacaacagcatcatcgccgagcgtgcgtgctctagctctagcaatagcagcgaggagacgatcgaggatggatcagaacaacagcaacaggcagcagcagcaggcgccgccgccaccacccgcgggtcagatcgatcgatcgatcgttatctcagaatactccgtgtggatggacattggacggatcgacggacacatattgctgacatggcttgcttgcaggctacccgacggcaggcgcggagcagcagggaggcagcggcaggaagcagggacgccgggggaagacgacctcgcgcggggagaagggcttcatcgaaggatggtaaattaccaatcacaaacttaatgatccttcagtcgtccgtcggtccacccgtttctctgtcctcttctgctacaaaaaaaataacctcaggaattaagaactgctactgtgtggcgtgtttttggtttttcagcatcgcggcgctctgctgctgctggatctgcgagatgtgttgcgactaggcagcccccctcccctccctccgcccgccaggcttgacaggaacggagagatctgctccacccatagctgcagttgtggctgcacgtacttgttgagctg

SEQ ID NO: 153552 - DNA, 538 bp, Zea mays
  unsure (1)..(538): unsure at all n locations
  Clone ID: MRT4577_71617C.1
ccccgcgtccgggggnaaaggggacaatcgggcgatggaggcgtgctgctgctcgtcctcatcggcgccgtcggcgtccatcctcgccgccgcgccggacgtagccctccgccgtcgtatccccgcggcggcgggagggaggacgccggcgcgcccgctgcgcgtctccgcggtgatgctggccaccgcggtcccgcggcggcgcggaccgggcgtcatcagggcggtgttcgagcggttcacggagcgggcggtgaaggcggtggtgttctcgcagcgggaggcgcgcgggatgggggacgacactgttgcgccgcaccacctgctgctgggcctcattgccgaggaccggaccctcgtggggttcctcggttccggcctccgcgtcgagcgcgcgcgagaggcgtgccgcgacgccctgggtaaggccgggcctgcgcaagcggccaccgggctggccacggacgtgccattctcggctgcaagcaagcgggtcttcgaggccgccgtcgagttctccaggaacattggctgcaac

SEQ ID NO: 153553 - DNA, 2214 bp, Zea mays
  Clone ID: MRT4577_71618C.1
atgactcgtcgctcctccccgcgcccggctccacactcccggccggaatctgaaccgaatgaagtctagtgcagtggtggtggtgatgcaatctcgccgttgccgtccgtagcaaccgcacgcttcctcgctcgccgcgaaccctagagagcaggtgtcggtgtcatggccttctggtggccgctgctggtgctcgccgccgcatacgcgctctgtcgcctgctcctcttcctcatcccgcccaccgtcccatccatcgacgtcgacgcctccgacgtgttggccaaggaggacagcttcatctacataccgagaaggggtaaatcaactcagactgacaaggtccaatgctatgaaccagcgaccatgaaatacttggggtacttcccagtggtgactcctgatgaggtcaaggaacatgttgcacaatccaggaaagctcaaaggatatgggcaaaaagcagcttcaagcaaaggcgccagtttcttcgaatccttctcaagtatatacttgaacatcaggatctcatatgcgaggtatcatctcgggacactggaaagactatggttgatgcttcattaggagagataatgaccacctgtgagaagattacctggcttttggatgagggcgagaagtggctgaaacctgaatacagatctactgggagatcaatgctgcataagagagcaaaagttgagttttaccctcttggagtgattggtgcgattgtatcttggaattatcccttccataatgtttttaatccagtgctagcagcagtattctccggtaatgcagcagttataaaggtctcagaacatgcgacttggtcgggctgcttttattttcgtattatacaagcagctctttcagctgttggtgcacctgagaatctggtgcacataataactggttttgcggaaacaggccaagctcttgtatcatcagtagacaaaataatatttgtgggatcaccaggtgttggaaaaatgatcatgaaaagggcgtcggagactctaatacctgtaactctggagcttggtggcaaagattcatttattgtgtgtgaagatgtagatttacccagtgttgttcaagttgctactagagctgctctgcaatctagtgggcagaattgcgctggtgctgaaagattttatgttcacgatgacatctattctgcctttgtttcacagatagtgaagacagtcaaatctataagtgttggccccccattatcaggcagatatgacatgggtgcaatctgtatgattgagcactctgagaaacttcagaatcttgttaatgatgctctagacaaaggtgccgaaattgccgtcagggggagttttggcaatcttggtgaagatgcagttgatcaatttttcccaccaactgtcctggtgaatgttgatcacacaatgaaaattatgcaagaagagacatttggacctattataccaatcatgaaattcagttctgatgaagaggctatcaaacttgcaaacgactcaaaatatggtcttggctgtgctgttttttctggcaaccagaagcgtgccatcagaatagcgtcccagttacactgtggggtagcagcaatcaatgattttgcttcaagttacatgtgccagtctttgccattcggtggtgttaaagacagcggattcgggagatttgctggcgtagaaggcttgcgagcttgctgccttgtgaagtctgttgtagaagatagattgtggccatatattagaacagtgatcccgaagcctatccagtatcccgtctcagagcatggatttgagttccagcagttgcttgtggagactctgtatggctatagcgtgtgggacaggttgcggtcccttgtgaatcttataaagatggttaccgagcagaattttgccccgacttcaaatgcgaccacgaagaaaaggcgatgagacgaatgcccggggggttcattgaatctgtttatggtaagtctgatctctggacgctgtaaacctccccaagctgctgtgatcggccttgtttgctctctgaaacaatctcgagcctgggagcttgtgtattcaagcgctttagctttcatttcagaaccttcttttctctctctctcccttgcttattaacacccaaatgcgtgggcaatggaaatgaaattccactgtggatgtgctaggaaaaaaaaaaaaaaaaaagcggcc

SEQ ID NO: 153554 - DNA, 2412 bp, Zea mays
  Clone ID: MRT4577_71619C.1
gaggccggccggggctccacactcccggccggaatctgaaccgaatgaagtctagtgcagtggtggtggtggtagtgtagagagccctgcccttccgatccggtccggtccggctggattcctcactttagttttttttttcgcttcttctctgatcagatgcaatctcgccgttgccgtccgtagcaaccgcacgcttcctcgctcgccgcgaaccctagagagcaggtgtcggtgtcgcggctcgaccatggccttctggtggccgctgctggtgctcgccgccgcatacgcgctctgtcgcctgctcctcttcctcatcccgcccaccgtcccatccatcgacgtcgacgcctccgacgtgttggccaaggaggacagcttcatctacataccgagacggggtaaatcaactcagactgacaaggtccaatgctatgaaccagcgaccatgaaatacttggggtacttcccagtggtgactcctgatgaggtcaaggaacatgttgcacaatccaggaaagctcaaaggatatgggcaaaaagcagcttcaagcaaaggcgccagtttcttcgaatcgttctcaagtatatacttgaacatcaggatctcatatgcgaggtatcatctcgggacactggaaagactatggttgatgcttcattaggagagataatgaccacctgtgagaagattacctggcttttggatgagggcgagaagtggctgaaacctgaatacagatctactgggagatcaatgctgcataagagagcaaaagttgagttttaccctcttggagtgattggtgcgattgtatcttggaattatcccttccataatgtttttaatccagtgctagcagcagtattctccggtaatgcagcagttataaaggtctcagaacatgcgacttggtcgggctgcttttattttcgtattatacaagcagctctttcagctgttggtgcaacctgagaatctggtgcacataataactggttttgcggaaacaggccaagctcttgtatcatcagtagacaaaataatatttgtgggatcaccaggtgttggaaaaatgatcatgaaaagggcgtcggagactctaatacctgtaactctggagcttggtggcaaagattcatttattgtgtgtgaagatgtagatttacccagtgttgttcaagttgctactagagctgctctgcaatctagtgggcagaattgcgctggtgctgaaagattttatgttcacgatgacatctattctgcctttgtttcacagatagtgaagacagtcaaatctataagtgttggccccccattatcaggcagatatgacatgggtgcaatctgtatgattgagcactctgagaaacttcagaatcttgttaatgatgctctagacagaggtgccgaaattgccgtcagagggagctttggcaatcttggtgaagatgcagttgatcaatttttcccaccaactgtcctggtgaatgttgatcacacaatgaaaattatgcaagaagagacatttggacctattataccaatcatgaaattcagttctgatgaagaggctatcaaacttgcaaacgactcaaaatatggtcttggctgtgctgttttttctggcaaccagaagcgtgccatcagaatagcgtcccagttacactgtggggtagcagcaatcaatgattttgcttcaagttacatgtgccagtctttgccattcggtggtgttaaagacagcggattcgggagatttgctggcgtagaaggcttgcgagcttgctgccttgtgaagtctgttgtagaagatagattgtggccatatattagaacagtgatcccgaagcctatccagtatcccgtctcagagcatggatttgagttccagcagttgcttgtggagactctgtatggctatagcgtgtgggacaggttgcggtcccttgtgaatcttataaagatggttaccgagcagaattctgccccggcttcaaatgcgaccacgaagaaaaggcgatgagacgaatgcccggggggttcattgaatctgtttatggtaagtctgatctctggacgctgtaaacctccccattccccaagctgctgtaatcggccttgtttgctctctgaaacaatctcgagcctgggagcttgtgtattcaagcgctttagctttcatttcagaaccttcttttttttttctctctctccctctctccctttcttattaacacccacatgcgtgggcaatggaaatgaaattccactgtggatgtgctaggaactgtcattgtgctgccgctgctgtgatttgtgaacatcatcggtattgagggtgaaaaaaaaaaaaaaaaaaaaaaaaaaacggacgcgtgggcggacgcggggcggacgcgggg

SEQ ID NO: 153555 - DNA, 193 bp, Zea mays
  Clone ID: MRT4577_7161C.1
cttggttgaccagctcgccactgctcaattccttaatttccagcttctcctgctcctatttattcttcactttccgtcctttcgttcgcaatccaaagccgaggctacaattggtgcatacttcccgctccgataacaaccgggtccaaacccccaacaacaacacacatacctcaattcattcacccccttc

SEQ ID NO: 153556 - DNA, 2361 bp, Zea mays
  Clone ID: MRT4577_71620C.1
aaccagcaaaatctttacatgctaattaccaaatggtgaacaaaactgtcactctgtcagcctctgattcctcctcccccgccacagaaaatgagggaaataggaaagggggaaaagagtagattagagcacacatgcgggctctcgctgtagctatcaacaccgatcagagtgagcattcgcttgctcgatgtccgtgtcgccaagcaagcgcgacttctcgtctccgccagccttgtcgtcgctgtcctcggccacgaggccgccggtgagctgcctcgagcgcttggcctcgcacgcccagtccgtgcgcccgatgaccagcagcatgcgcaccatgcaggtggcctgcgccgccaggagccccaaccacaggcccttgaagtcgtagtggagccagaaggctaggacgagcgccaccggcgtccccacgaggtagaaggaccggaggttgatgctggctgcgtccttgggcctggcgctgccgcgcagcacgccgcagcccgtcgtctgcgggcagttgcccagctcgcacagcccaaggatgggcagcaccgacgcggtgagcgcgatgatcgccgggtcggccgtgaacatgctcgcccacacgttccgcaccaggaacgcgaacgccgaggccaggccgccgaaggcgaagcccagcatgagccccaccgcggcggcgcggctcgcctcctcgggccggttcgcgcccagctcgttgctgacgcgggtggacacgccgaagctcagggaggaagggaagatgtagatgagcgacgtggtctggatcaggatgcccatgcacgccaccgtggcctgcgggttcgcgagcaggccgcacagcaggatcatgatctcgtaccaccaccactcgaggcagacgctgacgcagctcggcagcgcgaggcttacgagctcgccccagccgcggaagctctcgcgggagagcaagaaaccgccggtgcgcttgtgcacgctcttgaagaggatgtaggcgacgaggaagaggagaaggttcaggttcgccagcacggaggcgaatgccacccctctgatgccgaggccgaggacggtgacgaggacgtagttgatggggaggtggatggcaatggcgagcgtggcgcacagggtaagaggcaggttgatggactgcgtccgtaggtatatccggacggggtggaggaacgcctggaggagtaggtccggcagggaggcaagaatgtaggtctcggcgaccgcggcgatgccggcgtcctggccgcagaggaggaggagaggccgcatgtgcatccacaggccaccgatggggacggccgccgcgatgagcagcagcaccgtcctctgcatggtgattccgaggagcgagaagttgcccgcgccgaatgcctggccgcatatgggctccatgcccatggcgaggccggagagcacggaataccccgtgatgttggcaaagccgatggccagcgacccgccagcgagggccagaccgccgagacggccgaggaagagcattgaaatcatggagcggaggtagagcaggaggcccgtcagaatcatcgggagcgcgaggccgagaatcgaccgcgcctctgcatgcgcgtcgctggacgacaccaacggcgtcatcgggaacgccgctcccagggagacggacaaggcctccttcaccgcggtggcaagccgcccgggcgacttgctcgtgagcacgggcacggccggcgcctcgtctccggccaccgggatgtggacctccccagtcttggcgagtaaggggtagacgatgacgcagggcgcgtccccgtgcggctgcgcgtcatcccggcatgccaccgtggcgtttcccgagcacgacgtcatggctgctggagaaacagagggataccctgctctctctctctctctctctatctctctctctctcctggttgcccgcccgcgcgtgcggtttcgccaggcaagggagtaaaaacctttgcggcgttggtaactcccaggcaatttacgagatcgtacgcagtttctgttggggggagatggggaagcgcttctcgggttgtctcccctttggaagctgggatgcttgcttggttggtggagtcgagagccgcgcggcgcgggggactgggaagcccggcgatacctttttataggcgtcgaacggggcgagggggaagccttggccgcttaccccttctctcactagcttttctctgtccttgacagcgcttggattggttctgtgttttgtctttcaaccgagagccgcccagactttcatttcatttcttcgcgcactggattgtacaataatatgtacctgtaacggaatactaataattctgcataacatatgac

SEQ ID NO: 153557 - DNA, 271 bp, Zea mays
  Clone ID: MRT4577_71621C.1
aaagagccctgcatctttctatttaggacaatgcttcactctgtagcgactcatcttcatcattttagcatggttttattttccgtgttatgttgtttttctttgtcgatgccccatttgagcaaacaaggctgtatagagaaaacagcctgagggatatagtatttgtgtagaggccatgtggcatgaacctgtgctctgtgactgatccctgtggtatgtgcatggtgttgtgttggctactgtgtctacaggtctgcattacagggat

SEQ ID NO: 153558 - DNA, 362 bp, Zea mays
  Clone ID: MRT4577_71622C.1
cactgatccaagacaaaacatggctgtgaatgtgagcaccatgtggtcgttgatgcagggacaagttgccatgggtgtggcgttggcctttttggtgaaccgcgccttgtgccgtgcttcccaaagtcccccctggcaagaacatcacggccacctatggcaaggactggttagacgctaaagcaccatggtttggcaagccgacggttgccggtcccgacgacattggtggcggttgcgggtccaaggacttgaccacccccctttaatatccatgcgcgcgcggggaaatatccatatttaaaggtaggctctgttttgggggccgcgtttagatctaatgcgctaagcttgtggagtgc

SEQ ID NO: 153559 - DNA, 220 bp, Zea mays
  Clone ID: MRT4577_71623C.1
ctcaacggcttctccatagtcggggcggggttcagtgacgccagaacctctgtctccctaccgagcttgctgcacattattacaatagtgcgcctaccgacttcgaccttcaataccaactctgtataagaatgttcccgacaagactatgaggggccttaaagatggcgacactagataagaaaaagaaccttaaactagagctacctctccgtaccaa

SEQ ID NO: 153560 - DNA, 176 bp, Zea mays
  Clone ID: MRT4577_71624C.1
tctttactgtacttatgtttgtatccacttactgctgcgctttctcaccgcggggggagtacatccttatcctgatttggcttcacggtaaatgggcatggtcagggctaactttcagaatcagctccaccaggggctctttttaatatgcttgctcaaattttcagagcgcaaaa

SEQ ID NO: 153561 - DNA, 544 bp, Zea mays
  Clone ID: MRT4577_71625C.1
ccggccggggccaagcaacaaattaaacaaacaaacaaacttgttcccgtgcagatcagctgaaaacacaagcatctatccatggagaagaaggtgatgaagacgcggctggctgtggcggccgtggtgctgttatttggcctgctactggccgtgcgggaggccgccgccgccgaggaggccgcggaagcggcgccgacgacgcccggcaacagcaaggccgactgcgaggtccccggcacttgcgaccggaacctcaaccaagccgccgaccccaaacgcccgggtgcggcggccaacccatatacccgcggctgcagcaagatcactggatgccgcggctgatcgatgccatgcaagcatatatatacctgagtcgatgattgttcctgagtacacttgtttcttagaaatttttatatatttggaaatctaacagttatcacctgtatgtatgatagattgatagtatcgcacgacagacaaagaattactctgagagatgatttggtgacacaaaaaaaaaaaaaaaaaaggggcggcc

SEQ ID NO: 153562 - DNA, 486 bp, Zea mays
  Clone ID: MRT4577_71626C.1
cctcgaggtctcggccgggacaaacacacaacgagccggtgcgcgcgcgatcccgtggagcgccgcccctataggtagctgctacttgaggtagtttgtctagctagtctgtctaggtggctaccagctgtgtctgacttacccaaggacaaagagagagccatgggcagcgaggacgctaggatgacggcggggttgggcaagctgaccgacgcggtgccgtcccctgcggtggtatgggtgcggggcgtgcagaagcctttgcgaggccgacctggacgtcagggcgcctcctgtagggcgccgaccgctgctacgagctacctcatgctgctcgccgctcgtgcagaccgggcgcgttcggaaacggagattccgggctggtcctataggtgccattcaagattaggtcttgacgctctatgagagacttaagaggaggatgcatattggatgacagcgctgaaggcgccgtgtttgcatatg

SEQ ID NO: 153563 - DNA, 248 bp, Zea mays
  Clone ID: MRT4577_71627C.1
ccggccgggaaggcccagcattctacgattgtcacggatgattttgccctgcacagggtcattcaagaaatcgttgaggccaataatcagaagattccatcctaaattcttcatgtcatgcttgcattaccgagctgttggggccaatagtgggttgggaagtgatggttcagacatcggtttcgtgcttaaaacggccaataatcagaatttgttaacataaaaaaaaaaaaaaaaaaggggcggcc

SEQ ID NO: 153564 - DNA, 306 bp, Zea mays
  Clone ID: MRT4577_71628C.1
gtttttctttttaccaacacccaatcgggggagctcggaggcagcatcggcggcggctgtaatcgagggggaggagattgacctgctacatgtgtgcatattcgacccttgcgcgggcatatagggcagtcgcgcagtcgtggcggttgcgctgtgttatagagaccccagctgaggaatctggcaagggttaggccccggtccaaaacaaggttgctggatggatattggacaaggagacactttcctgggttgtgacccaaaacattggggatcccgcgctggttgtgagccactacaacttat

SEQ ID NO: 153565 - DNA, 487 bp, Zea mays
  Clone ID: MRT4577_71629C.1
cgctgctgtctcgtctacctcgccacgttacgcacacacggagatcccactcaggatcgagcggaggccatggtgaagcccaagccttgctcggacggtgccaagcctaccgggcctgctccgcctgacacagcgcagtcagtgctggccacctacacctgaatgctccggctactgtaaatttgtggggccttgcgtatactcctggggtacactatggtgcacgcggacggttcggatggtgcggacttactagcacctcagggatcactgagagctctacgggctaatggtcatttggtccatgccgcagactcgtggagtggaataacatattaaaattcagactattagagggcgcgctacagatgatgctacctgcgaagcgcttcatagggcccatttcgtctgccgtgaacgtgcctgactacaaggtcactatggcttacaatgcatcatgcagtgacacttgataacttaccttggt

SEQ ID NO: 153566 - DNA, 621 bp, Zea mays
  Clone ID: MRT4577_7162C.1
aaattcggcacgaggtttctgaataatccagagcgagcaaattaaaggagaaggagagagcgagcgggagagagggagaagatgatgacgacccagtaaactgataatcgtcaagaaaaaaaaaagaaaagcaacaaggcaagatggcggaggccatcgtggggtcgatgctgtggaagctgcagcaggtggcggtgagtgaggcgcggacgctggtggccgtgaacgaggacatccggagcctccgggacaagctcatgtggatgcaggccttcctgcacgacgtccagccgtcgcgccgcgtgcagcccaacgagctcatcaaggtgtggctgcagcagacccgcgacgccgtcttcgacgccgaagacgccgtcgaccagtacttcgtccaaatcgatctctcaagattccctagctggagccgtgccatcttgggtttctttgccagctttaccacccaagtggttgtccgtcgcgacctctcgagcaggatcaggctgatcaatggaaggctggagggaatcattgccaacaaggacaggtacaggttggggagagtctactacgctgggagcaatttggaggccatctagcttcacgtcaccgctcttcgaaatg

SEQ ID NO: 153567 - DNA, 289 bp, Zea mays
  Clone ID: MRT4577_71630C.1
cccgggcgaaaacacttaaagggtccaaaaagtccggcagctgcttgggcggggtttaatttgaaaaaagagaaccccgggtccaatttcctcgcaaacgtggacccctccgttccagagaacaaacaggggcctccatgcccaagattggtgcagggggcttcatagttgctgcttcccacagggttttttttgtaaaggggggggggtcccccctttttggattcctcgcccaccttctggaacccattttatggttcccccccccccttggacccccatgggtttg

SEQ ID NO: 153568 - DNA, 446 bp, Zea mays
  Clone ID: MRT4577_71631C.1
aaaggaaaaaaggggggttacagggggggggggtaaaaagattcagtttcaggttcggggggcccaaaaaaaagtttcaggagcccatgttaaaaagccccaaaggggggtgttccgggcctactgacttaagggcggggttcggggaaaaaggccttctgacctcaggggggggaagttccggcccctcggggggggggggggggggggaccctttaaatgcctgaatgccggaaatttgcacatttgccccggggtgggaaacaatccggggggggcaaggggctccgggggatgattaaaaaagtcccgggcccccgggagggggctttggccggggtttcttttcgggaaaaaaaaaaccggtcaggggggggtgttttctttaaacaggggggatgggcgggaaaaaaaaccccacggacaggcgttgggtttggggaaaa

SEQ ID NO: 153569 - DNA, 375 bp, Zea mays
  Clone ID: MRT4577_71632C.1
aggggggaaccggctggccaattttttttgggggaaccggttggtttttttttttttttgccggggcgaattttatatttggggggtgataattttgaagggtttctgggaacaattaattggacaaaaaccattcttgggttaaaaatgggaaaaacttcctggaaaacattaattcaggggggggggcccctctttttttttttgggcttctttttgagggcccggggataataattgcctttgataaaaaaccctccctttaaagactttttttgggcgcatcccacctttggggttctttttgccaccattaacgcgaaaggggcgcacttttttttcccccctccccctgtgcacttgttcgtgtttttt

SEQ ID NO: 153570 - DNA, 398 bp, Zea mays
  Clone ID: MRT4577_71633C.1
ggaacacgtttaaaatttattgttacagaggtcaattctaagaagcggaagcttcggcattaactctaataacttcagccatctttaagaaagctgcttctatatttgtaccatcctttgctgatgtttctatgtatgggatatcaagagattcacaatactcattggcttcatccgcctgcacttgcctttcagaagccaaatccactttgttaccaatgagtagcttggctgcgtctggtgcataacggtcagcctcttggacccacttttgaacagaagcccaggtttcttggtttgtgatgtcatacatcactatcacaccattggcaccctgataaaaagacgatgtgattgttcggaaacgttcttgacctccagtgtcccaaatctgtagt

SEQ ID NO: 153571 - DNA, 382 bp, Zea mays
  Clone ID: MRT4577_71634C.1
acccacgcgtcggtctttgcgcatttagaaacacaacacacgtttcgcactaccaacatgctaacagcagtggctaccacgatattaaccgtcgttgcgcttcgtgcgccttttgcgagcgaaacacatgcttccattagtccagattgctcacttgctccaatctctattagtctacacttcatcccatcatttacgtcagtggccatcgaagagccacctgtgcatccctatacggtacaagaggcgattgcggccagcgtcatagtccaggcagttgccgagttgcaagtgtaagccttgcgacatctcatagtaaacgccatcgcaatgcactaggtccatgagtatcgaccagcactgaaccacctaaccatggtga

SEQ ID NO: 153572 - DNA, 421 bp, Zea mays
  Clone ID: MRT4577_71635C.1
ggtccggattcccggggttgcacttttatgagagactagatcatgaggaaccaatactgccgtgtgctatgcttgtgcctgattgcctttgccgtatctggtatcgcctgagccatgtacaccacctctgcacaagcaggaaggagtggctacaactagcacgaacctgatggaaggagtggatacaactgtgatacaataaacctcggtaacagcccgtagacataccatgtatcctgtataagaaatcaaaaaaatataaaagctcatgcggataaaaactgtgctgtgtattctgtcatgtcatgtgcattggtatattatggatagttcttactatttaatgtaaagcgggtacaataaatatgcactgttagacttcaacgaaactatagtaaaaaaaaatagataggacgtgcga

SEQ ID NO: 153573 - DNA, 332 bp, Zea mays
  Clone ID: MRT4577_71636C.1
agaagcctcagcaagccacccttctcaacgccgctccattctatcgccagctttgcctccgttcagcgcgtccatcacccgccacactcgctgcctggtcatttatcctacctttaaaccggaccatcgccttcgccgactcgacaccatggaggaagagcgcctttggaagtttaggaaacccgagtggttaaacagcatgtgggctcggaacgctggcgtctacggcgccggagctctgttctccatcgccttttacgttatgctcgactccgccgtctggtccaagtcggccaagaacggatccaacgtccacgttaaattcgtcgact

SEQ ID NO: 153574 - DNA, 217 bp, Zea mays
  unsure (1)..(217): unsure at all n locations
  Clone ID: MRT4577_71637C.1
gtccttattcccgtgcgccgccctttttttntttttttttaaaatttacaatggctacaatacaaacaaacattgaggggggattttaaccaaattatatctcccaaaaacacctagaaccaaaaaaaaattacaactccactaatacaacaagactaataccctccaacaaacaaacaaaaaaaccctcctcacgccactttcttcttaacaaaac

SEQ ID NO: 153575 - DNA, 359 bp, Zea mays
  Clone ID: MRT4577_71638C.1
ttttaagcctctgtggcaaaatcatgcaatattggatgttctctaagctttggcagctccaacctttgtggtactctggtgtctacctatgcctctggatcagaaggtactgttctaaatgaacctattgtactaagaaaagaatactcaaggatcttgttggagttcgaggcaggaagttttaagaaatatcagttaccacgaatcaatggttcctatattctccaatgtcccagtcgaagttttacttgcaccatgggaaactgtggatgtttgcaaggtggtaaagtctctattgatgctcaagatagactttggagcttcgccattaccattggtggtaatataaacatcaaggg

SEQ ID NO: 153576 - DNA, 422 bp, Zea mays
  Clone ID: MRT4577_71639C.1
tttttttttttttttttttattttttttttgatttgaattgggcttttttttttttttattatttatttaaatatttttttttttttatatatactaataaatgttttataaaattgtctaacattatttataaactgttttcatttagaacaaaaagaaacaaaaaaaatgccggggctaactcaaaaaaaataagaaaattaacagattataccagatcaacaaaataagctcatctaataagccgtctgaagagacctgccataaaaccaagctttggctataaaacgctaaaaaaacatgttttcctcctcggaaatataaatgattaaggccataattcctgacatgaaaaaattttccttgaccatgtttgggtggaaattgccctccttaaaaagcaagtataaacggttgactt

SEQ ID NO: 153577 - DNA, 432 bp, Zea mays
  Clone ID: MRT4577_7163C.1
cccacgcgtgcggtcttcctactcgacttcaacgccggcaccacagtcccggccccgtgttgctcctgaaccccacccgttctgcgaggaatgtgcggcatgcccgcatacgcgcaccaccatataagccctctggtaaggaacggtggcggtcgtgctggccgtagacgattgacggggacagaaagagattcttgtggatgttacatctgttggaccttaatttataccgacagataaacatataaaaaatcccagagaccaaaaaactttctttgttgaaccgccctgcttaccctctggagggacagaattagagattgtgacatacgacctgtctgggcatttttccggacggtgaatgatgataccatgatggacgcgctgaagcgtaacaacaactgcgcccctccggaggagaccttggatgac

SEQ ID NO: 153578 - DNA, 806 bp, Zea mays
  Clone ID: MRT4577_71640C.1
gaatacgggcagcagctgctcaccataggttccgacagtccccaccatcatctcgctgggaggcaatggaggcggaagcacaggtggcggcggccctatgactgggacgctaacctcctcgtcccttagctgcctcttggccggcggtttccggtccttgagccggcggtggcagaaccacatctgaagctgcctgtctgtgaggttcaactgcaccgacagctccgcccgcttcgtctcgttgggatacgagtcctctgcgtacgtcctctcgaggacctccagctggtagggcgtcttcatgacgcgcttcaccggcggcttcccgccggatccagacgcgccaggagcgctactcgcaccgccaacggctgcgggggccgacggagggccgggactccctgccgccggcccggagcccccgtcgtcggaggactccattcccgactgaccgttaccctagattcgcctccgccagacaacaaaacacaacacgcgaagaccaggccgacacagaagaacaacaaaacctaatcacacgctacggcgaattccgagatatatacagaggcgccaagcccgaatcgagcccgcggctcgatccgcgcgacgaattccaccaccgacgggcgacagcagcaggtaacgtcgcagcgcagacgcgaggtagaacaggatcggtgggcgcgccgcgccccagcacggacgcggagaagtaatagggacgcgggcgcgaggaggagcaacacgggaggccacggatgcaactccatcctccgcccgacagcaacggaattcgagctcgg

SEQ ID NO: 153579 - DNA, 282 bp, Zea mays
  Clone ID: MRT4577_71641C.1
ccgacgcgtgcgcggacgcgtgggctctgtttagatgatcacatgcagttgtaacagccggacacaaggagttcaatgacgcggatcggaccgtccgtcaaggtgaagaaccataaagctctctactaacagacatagtgcatgagcctgtcacaccagatgaaacactgtccgctgagcacacaaaaaattgctgctacccaccgaccaccagaaaatgctgctgctgttatgactgagcaacatatcacgaacttggtacttacgccagacatgaatgct

SEQ ID NO: 153580 - DNA, 367 bp, Zea mays
  unsure (1)..(367): unsure at all n locations
  Clone ID: MRT4577_71642C.1
gcgcctctacacaagccccctggaggggccgccgcagttccccggcttggggaccaccggcgcgagcagcgcgcagcgggagctcgcgccttcttcggcagactccccgaaaccaccggggtgggttttgtttcggaggaccgnttgcctgggggtggggggggggaaggaacagaaacagacggacccaccctactagggggggggacccatacagctaactcataagtacaactacaggctcgccgggcaagcgctgaacctgaacctggtgggcgacccggacctggtggtgagagaccccgtgggtgcgcttatgtcggccatttggttctggatgacgcctttgttgtttaagcctttgtgc

SEQ ID NO: 153581 - DNA, 331 bp, Zea mays
  Clone ID: MRT4577_71643C.1
ggggggcaccccaaaatacaacgggtttgggttttaaaaaacccttcctgccatgggatgcccattggaggggggggggggggattttcacaaagaaaaaagaacaacgccccacacccccccacatttgggtgggccaatacaaccaaaaggtaacggcggggacggcggggggacaatttggggacatacacggggacaaggtttatttttcatggtttttcccccttttccttttttcctcctccggccatgggcggacgggaaaatgggtggggggccccggggttttttaattgatgttgaggggcaacgggttggcggcccactt

SEQ ID NO: 153582 - DNA, 434 bp, Zea mays
  Clone ID: MRT4577_71644C.1
cgggctttcaccccgttcctgattcgtgtgcgataccgtcgaagtaccatgccattgctgctcttaaggacactaattagaaccgctcctttgccttgccgagataagaaccctacggagagcacgttacgctctacttacgatgatcttcacgttggaacgacgagcgccgagaagcggctacgaatcgcccagtgcctagaaaatctgcaccggcgaagctcttatttgccggagtcaacaatagggacgagccccataccgacttgattatttcaatctgcgactgcaagtgtacgacgaggtgaagacattcactgccgtacgcctgggaaaccgaagcccccccaacccatctactataccgctgaggagacggggactaaagaatatgggccatgatgcgcttctttctctgaaaaagaaatgaatag

SEQ ID NO: 153583 - DNA, 548 bp, Zea mays
  Clone ID: MRT4577_71645C.1
tgcaccggacatgttactattcactgtcttgtgcaccggacaggtcactattcactgtcttgtgcaccggacacagctactattcactgtcctgtgcaccggacgctgctactattcactgtcctgtgcaccggacgctgcgactattcgctgtcctgtgcaccggacacagttactattcactgtcctgtgcaccggacaggtcactattcactgtcctgtgcaccggacagctactattcactgtcctgtgcaccagccaacagcacactaagtgctttttccttcgttctttctccgtttgacttcaacttttgggaggattttcctgagacttaaacaaacacatttagagtataatccaattgatttagtcctagaaacttacatctttcttgttcttctcctagcttttctgtttctcctccagcagagctcagaatggtactttctctgcagaaagagttagagagcaaaccaaagcaccaaacttgtagtaagaggtgtatgcacatggttgaacactcaaaccttacatacttaacctt

SEQ ID NO: 153584 - DNA, 336 bp, Zea mays
  Clone ID: MRT4577_71646C.1
acccggcgcggaacctttgcctaaaaaaaacaagaagggccctgattcccctggcgggaatttttgggggggcggcgacagggcaatttttttcacaggaaaaactgaaacaacctttatattccaaacgagttctcccgggccgcctaaatttacaacagggggaacgcgaagaaacctatttgatcaggggggggccccgacaccataactcccaagaaaatttgcttgcattaggggggccccttggcaccatctaacgcaaaaaccttttgggaaccacttgggggaaaaccattgccgggcttgtcctgggagggaaggggggggggcccc

SEQ ID NO: 153585 - DNA, 830 bp, Zea mays
  Clone ID: MRT4577_71647C.1
gcaccaggagagagagaatcgattcgagtgatgtatacaattgttggctgcacttgtgttcttgtttgaggcgcctaggggtcccttttatagccccaaatggcctaggagccgttggagcttcgtttggaagctcccagccttccctggttgcgggtgcaccggactgtccggtggcgcaccggacagtgaacagtaacggatctgattggcagtttccttctctggaatagctagccgttggtgcaccggacaggttactattcactgtcctgtgcaccggacaggtcactattcactgtcctgtgccccggacgcagctactattcattgtcctgtgcaccggacagggactattcactgtcctgtgcaccggacaggttactattcactgttctgtgcaccggacagtgttactattcactgtcttgtgcaccggacagctactattcactgtcctgtgcaccagccaacagcacactaagtgatttttcctccgttctttctccgtttgacttcaacttttgagagaattttcctgagacttaaacaaacacatttagagtataatccaattgatttagtcctagaaacttacatctttcttgttcttctcctagcttttctgtttctcctccagcagagctcagaatggcactttctctacagaaagagttagagagcaaaccaaagcaccaaatttgtagtaagaggtgtatgcaacatggttaaacactcaaaccttacatacttaacctttttcattgttttacccaatttggcatgtttgaggtcgatgttggactttaaaccattaagtcaacttgact

SEQ ID NO: 153586 - DNA, 444 bp, Zea mays
  unsure (1)..(444): unsure at all n locations
  Clone ID: MRT4577_71649C.1
ctagaaacatagatagatgaaggacactacaaagatattagaaacaatgggagccaagagttccttgctccttgccctactggcgtttcgaggacgacctgctcgctatactttcattctccaatgctcacccaatacccctctacgtctacagacgggggatttcaatacccaaaaacccaagggtacaacgcaccagagtccatcagagaaagcatcttacgatcattcccattaaaccttcgacactcacaacgctctatagccctattaatccttagaccattggtatattcattgaatcaaagacacaacgactcaaaaaccacaacaacccaaccatcaataacttagtggctgctcacagttacagctgacctttagcatacaaacaactcgttcatattatanactagatgttagtgaccacagcaacaacttcca

SEQ ID NO: 153587 - DNA, 389 bp, Zea mays
  Clone ID: MRT4577_7164C.1
gaataagcccccaaattgggggggctcggcctaaaaaaaatcccctcgggggggtttgggatgaccccaagaagaaaaaaaactcccaccccccggggggctggtgggggggagacgtggaattgccggaaaaaagggggggttcccaagggggattttttttataagatctgcctttttgctaattggttcaaatgccggcgaacctctttgccaaacccatggactttcccatgggggttttgcaaacggccctggttttgttgccggatccatttggcttgagttctaccttctccagacttatcccctggcatggaaggtttttggcccattttaacgtgatggccccccgcctattgaaggggccccggatgtttttgaaaacc

SEQ ID NO: 153588 - DNA, 381 bp, Zea mays
  Clone ID: MRT4577_71650C.1
gagctgcttagatccgtcgcatcactgtttaccctcatgccggcgcaatctcatccggggcaccgtgaacaaccttcggaagcgcatgatctcccttatactgcgggcacctgtatcaccatacgtgccttgcccccacttcttgccgctcttctatccgcaccgcctcctctgcgccatcaaatgcgtcgctacaaaaccattcgccgtcgaggactacctagtctgcacatgcggtcttacccaagcacaggcccttaaggcgtccaagcatgactcccatctgaaggatacctcgtaagccgactcggtcgtcgtcttgctatgcaatctcagcctgtccagctcctagatcaccgacttcgtgaccagggtccccaa

SEQ ID NO: 153589 - DNA, 397 bp, Zea mays
  Clone ID: MRT4577_71651C.1
cgcgtccgcacttgtttatttcttattccatatactgtcagcaaactagagcagggttttacaattgggccattgataagttattattctgcctaggttagctgtcagttttctatgatagagaaaattagttctactatatgtttttttctcgaacgagatgagcaaatgttggagaattctgctatacgttattgcagatggtacatgaactgaaaaaaaatatgtgcactctctaacaagaaaaaaagtgaaataaatttgagttcaatggacaaggctttactttattcgtgctgtgttgtaaaaaatgtcaacaacagtacactcactaagtcactagcaatataattcactttataccagtattctttatattgcctttctcttggttttg

SEQ ID NO: 153590 - DNA, 125 bp, Zea mays
  Clone ID: MRT4577_71652C.1
gcgcgtgcggggtcgcgtagagccctggcacccacgcgatcgggcttcatgattaaagtgaggagctgcatagcccgtagacgcgcctcaccatgcagatgtgacatatgatggatctgtccggg

SEQ ID NO: 153591 - DNA, 495 bp, Zea mays
  Clone ID: MRT4577_71653C.1
atgcaatgccgtcatccgtgcaccccttacatcctctcatttcctcgcccgcgacggcgacatccaccgaactcaggatcgatctgaaagcccgtacggtgcttccccacctccagaggagctacaaaggcaatcgcttagatcgaggccactgcaaggcactatgggacctagtggctacagtgcctgcttaattttcttcggtgctccaagtttagtgacatctgtctacaatggtgaagcaagtcgcgtagggctgggaaccaggatgttctctgttgcctacctggatggtgctagtctttgattgcactggagacatctgcaaagatgttatcattcaaccatgttctgggggcaaccgcaattgtcaggggatggtgcaagcaagagcttgtagctaatgcggtgcccctcgagtcccaaattgtgttccctgctgggactagtatctgcacgattgctgtaaacatggacatagctgacctatgtggg

SEQ ID NO: 153592 - DNA, 413 bp, Zea mays
  unsure (1)..(413): unsure at all n locations
  Clone ID: MRT4577_71654C.1
tagctccggcgacagtggcagcatgtaatggaacagtggccagagctgctgcttgcagaagccgtggtagaagcgggagcggaggtcggcgggcaggaaggtgggaacgcagcggaagccctcgaggaggtcgtgcgcgacctggtcgtgctcggctgggggcacgtcgtcgcggaggctgtccttgacctgcaggaggaggctgtcctggtcccacgcgaagtcccacccgccgccgttggcgccgccatcgcggcgggaggcgcggacggggagctggttggcgacgatgatgacgcgctcccgcggcgcgtgggaggactggtcggcggcggatgcggaggcggaggcggaggcggcgtcngagacgtcgaggtccggcacaatgccggaggccgtcacgacgcgcggta

SEQ ID NO: 153593 - DNA, 384 bp, Zea mays
  Clone ID: MRT4577_71655C.1
aggacgtcgcctgcacgcctccgtaagctgggatcctctatagtggacccacgcgtgcggggccttctgcctgtgcgttgcctgctgcctctgatccactgatcagtggcctcgcctccccgcgttccgctcccccctgccgccctctgatcccgggatcgggggggcgcccgccctctgcctatccgagagcgttcttgatccggcgagtggggggccctgcgccgcgcgccccgccccttctgacgagctagatccaggggaagcatctgctatcatttagctcccttcgaggtcatccaagacaagctgctcccagatgtcatctgcaggagcgcgcgatcctgctgctcaacggggctggccagaagggcgggacagaaa

SEQ ID NO: 153594 - DNA, 210 bp, Zea mays
  Clone ID: MRT4577_71656C.1
agtgccagtgactacaacaaagggggggcttaagattattagattcaatacatcctcgccgacacaatcgatcatctagcgaacaatcaacacagaagcggcctctaacatgaatccatcgacataagatctcacgcgcacgtagcgagagttaatgatagctcccgaaacgcccgctcattgatcgggaggaggctctgcaccttttcc

SEQ ID NO: 153595 - DNA, 192 bp, Zea mays
  Clone ID: MRT4577_71657C.1
ctcagggcatggttcctacgtcctataattgatattgatgccataaataatcgcctcaacacagtatccttattcactttctcaattcttgatgcccaattggccactaggcaccattagttttctgtactgttttcctagaaatggcagataacattctttctttgctgtgaagaagtaatgtctgcattg

SEQ ID NO: 153596 - DNA, 430 bp, Zea mays
  Clone ID: MRT4577_71658C.1
aattcggcacgaggctctaccgccgctccatcgtcgtccttcctcgatgcaatcgcgagcgatacgtgaggcgacagtgccctccaccaccgccatcgtctcagatttgtcgtcctccaccgccatctctgccctcagtttgctgtcctccaccgtcgtcttccgtggcacgattgggggggtgtctccaagacctagtacatggtcttctccaagatccagtacaaggtcgtctcctccaagatccgaaccccaatgctagtgagagtggaggcagcacatgaaaccaacatggagaagaaaaatgaaatggcattccacatgaagcttgtgaaagatggagttaaactcgtaatttattctagtgccggggttcctaaccaagagacttgtgttccatttttatattatattgtctatgtgtgtgtgg

SEQ ID NO: 153597 - DNA, 608 bp, Zea mays
  unsure (1)..(608): unsure at all n locations
  Clone ID: MRT4577_71659C.1
aacggagaagtttttggccnnanaacggacagggggcgcggggggacaancaagnaccanaccgggcgggagaaacnggccaagnacccngngancgannncagcaaggacggcgaggngcacngcnncaagcangncancgncggcccgcangccnacanggagnncacganagacncgnccaaggctgggggggcgacncganggcngacgggaacagaggcangcgcggcgcnaacgcgcngggcagggacagngncaccgngcngggagagnacccnaaggngaagccnaggcngcncaacancaagaggcaccgcacaaggangnnccncaaccnggacgagaacanngcaanggcngaggagcncggcnnngagggggncancgacgaggccaacgngagcncnganancnccaagnncgcggcgcnggngaacacggnggacgnnangangggcgnccanggagcngggcncacaaaccgcgngnncnngccgcagaacgccacgccganccagaaagngccgnggggagggnnggaaggggngncccgcaccgaccncggcaaccccgcggagccganggggccgcaccacaagcaggac

SEQ ID NO: 153598 - DNA, 245 bp, Zea mays
  Clone ID: MRT4577_7165C.1
tcgagctctgcgtggcgagcccatgcagtggaggtacatgggagggactggcagtgggtggagtcggcggtgcctgaatcgccctgtagagagagcgacacaggggcctaatgtattcttacctcaacttatattaagagggaggcacggagggaaggagcaattgcatttgtttatgatgttacccgtgtagtctaatcactattctgtttataatgtcaatagtgtaaatactgctgctgagt

SEQ ID NO: 153599 - DNA, 546 bp, Zea mays
  Clone ID: MRT4577_71660C.1
ccggaccggccttcccgggctcctagcgaccactgctcattattctttttaagaatactatataataccaagattattgtcacggtttagaggagagcctttccaccacagatttaacttcttaactctacagaacgtgagcgtcatgatcgatttcagggcgcaagagatacccatgctatgatgtataaatatggtcacccctcactcctatgataatgaacgctacagggcccgatagaaaggatgacatacttactatagttgattatgacagagaggccaaaaaggagcactctatcccatccggggctaggggaccactaccgatggactttatgaagatacaaatctgggctatgctagaacttttgtgactcctgatgaagagtattagctctcttttaagattgcgcatgtgttaatcaagcctgaaagatcatactgtgtgaagacatatggatccttgctatatagtcataaagagacgcatgcgttgcttgaaaacttgaactgactctcgaatacgcagcatacttataagaa

SEQ ID NO: 153600 - DNA, 134 bp, Zea mays
  Clone ID: MRT4577_71661C.1
acacatgctgaggggcatttacaggcatcaagctggacggtgcgaccctggggggaaccagtgccacattcaatgcccgtgcccctgtcaggctggcgcatggcccatgccagcttcagcgttagattatcaat

SEQ ID NO: 153601 - DNA, 258 bp, Zea mays
  Clone ID: MRT4577_71662C.1
agaaattgaagatttgtatgttaatgaaataaacaaattaacagatttttcgcaagctaccaacagcgagttagtttggaaacattttcgtaagatgattgaacatgtgctttctgataatcacttttactatttattaaatgagtacgattggcgtgtactcgcttcttttggatctttaacaattgcttcacagcaattattggttcgtttgttaagtcgaaagaacagatggcttcatcgtcgttctattcaata

SEQ ID NO: 153602 - DNA, 617 bp, Zea mays
  unsure (1)..(617): unsure at all n locations
  Clone ID: MRT4577_71663C.1
aagcacagaatcatctttagttatgcaggatgaaagaaacttatgagcttattctatgtatcgccaaaaggatcagctaatttcctcattcccttatgtattcattcttcatccaaattctactctcccagaactaagagagatcacaggtgttgggaaatctaataggcaggaggatagaattcaaaagcagtgactcttcagatacagtgcgtgaggacaaactagtcgccctgtgttgaagagacgatgtaacttctttagtgccctccttccttttccattttctcttgcatctttgggtttcaattgtccccccaaaatacaaatcagaaatgctgaaaatttaaatcttatttttctttttgtattttgaagaacacagcccaaaagtaataatgaaaatagaaagtcatatatcctagattctaaagattgaatggatgttgaaggtcatctagtcaaagcacagaaatggaatgctcagcatggtgcaatttctttctaattttttgggggaattgtttagaatgggaagttagttttgtgcacatctgtatgtttctctcatctttaaaaatggatttgntctgttttctccatgtttctttttttct

SEQ ID NO: 153603 - DNA, 596 bp, Zea mays
  Clone ID: MRT4577_71664C.1
ctcgaggccggccgggcctgaatcccaaacagacactcctcacctctcccgtcctccgtctcatgtcctgatgatcttcatgccggccccactcgacctcgactacataggcctctcgtcggctgcggctgtcgccgctgaccacgacgacctgaagtgctaacgatctcctccttgctctggcggcgtccgattcgccgaaacgacgtgttgtgactgacaccgcaaccaccctgaatgtgctcgcgactaacgccgtgaatagcgaatcttctgacgaggcgcctgactacatctgcccggtgaagcttccgccaacgaaaagaacgtatggctataggacgaggacaagaaggatgcactgacgccgcagacggtcgcaaaagttctaggtggtgtgatcggccaccaatcccaagataccgctagaacactatgtctaccacccagctgaaaggcatgaaggaggatgctgacgccaaccaggaccacgggttcctgtacgtctagcggcagcatgcgtagtgaaacgtcgtacctcacgtaagattgacctcgagacttacaagaacgtacaaggacctggcaactgcgct

SEQ ID NO: 153604 - DNA, 915 bp, Zea mays
  Clone ID: MRT4577_71665C.1
ccgccgcttctcaatccacttgtgggggagggggtgttctactcgtctagagatccgtccgggcgcggcagcctcgctttcgtttcgaggtacatctgtccgtcagcaatgtccatagaagagaggaagataagtgtgataagcaagagcattgcgctaaatccaaatgcgggggagttggttccttcatcccttagatctgtcaatgattcctccaagagatcatatgcaactacggttgtctcagggatatctaaagaatccagcactgacaagccagagtcaattttacgaagtaactctgatgaagaagcacatcagtactggcagcaacagctccctgacgacattacccctgatttcaaagtcatgggacaagatgaaagtcctggacctgacagtctatcactcacagacctgtccataaatgatggcattggcacatcaatattttctccaccccagacactgcgtatgcacaaccggtcgccgactccaggttatgataatatcaagcgccccccaccccagcaaggctgactgccgccgtcgagcagtatctcatggaacacggccttctgtaattcggcgtgcaaccaggcctgctccgcatcctgctctagtaatggaactggtcgtcctagctgttgttcacaactggatcagatgaaaaagaagggaaaaagaaaagaaaagaaaagataagttgacctgtacttttgtatatggcagagattgctagcaggatagtagcgttaagaacttaagatagctcatgtaacattcatgtcaggctttttgtcagcaaatgtatacgtcttaaaaaaaaaaaaaaaaaaaaaaaaaaaaaaaaaaaaaaaaaaaaaaaaaaaaaaaaaaaaccaaaaaaaaaaaaaaggggcgggccgttttaaa

SEQ ID NO: 153605 - DNA, 412 bp, Zea mays
  Clone ID: MRT4577_71666C.1
gttagtagtagcattggcgatgggattggaaatacaaacagtataagtgtgctaattaccatagtcaattatatatagtttagagcacgagggagtactggcagaaacactggtcctgtcctgctgctgctgcgtaggcgatgagctggtggtgacgcggccaggcgcgggcaccaagagcaaacgcgtggctcgcatggcggtcttatccgcgcgcccccgtcgccgcgccatctccaccccatgttcgccggccagctgctttcgttggcttggcttggcttcttttgcgcttttttttttctgttgcctgctttggcccgcgggcctcggcgtcggtggtgaccttttgggggcccctccgggagtgcgctttgtggctctggttcaacgcaccgactattcccttgtc

SEQ ID NO: 153606 - DNA, 354 bp, Zea mays
  Clone ID: MRT4577_71667C.1
aggccgacagagcccgaaggccccagaccgaccaccggagcgacagcacgccagacacggcacaccgccgaaggccccgcgcgcggaagcccgcgaggagaggaggaagaagagggagggcaaccccgcccacaacgggcacgccggcaaccaagaccgcaacgcaagaggggaacccaaaagacacaagcacgacaacgagcccgaaggccacgggccagaagagaagaccgcggaacaccaccaagacgaccagagcaacaacgcccaaccagaccggcgcagccaagagcagaccccaagaaaccgccggcgagccagaacccacagcgacccaagacgacgcacacgggg

SEQ ID NO: 153607 - DNA, 134 bp, Zea mays
  Clone ID: MRT4577_71668C.1
caccaaacccctgccagtgagtgcagagaactcgcagagccacagcaggcggtctcagccaccgtcccgctcacaggggcccaatgccaggtcacaacactaagaatatctttcaaaaaatgtgtctttttttt

SEQ ID NO: 153608 - DNA, 427 bp, Zea mays
  Clone ID: MRT4577_71669C.1
acgcgagcgaactaccaagcgagatacacggacacggcatcctagaaaagctgtagccatacgttgcctcactagtaagcagacgaaagacatgtacgatgtctctgtgctgtatactgcgatgagatacataacgcctggtggccgagaagccgaaaatcgtatatccacttcacaaaatcgcacaacatacaagccgtatgcataaaccgctaaggctgaggtgactaacgagtgacactacttacattaatagattcgcgctcactgcctttttggcaggcgccatacctgaaccgacagatgcattaattactgggctatcgcataaggagaggaaccttgcgattctgacgcccagggcaaccacataaactccaacaatacgcgcaacaactgatggtgctgtaacgtctggctttggaag

SEQ ID NO: 153609 - DNA, 244 bp, Zea mays
  Clone ID: MRT4577_7166C.1
atacatatatttttttatagactgatattttttgaatcttgaactgataagaagacgcaagaaaaaacgacaacggtggattcaaagcaaaacagttaaatcaatgaggacatcatttaaaaggcaggaaaacccaaaagctctgaataaataaaaaaaagggcccggataaacaaatttaaacaaacaatttggttgcccacttgcatggcgtttaggtaaaatattaaaaaacttgcggcgc

SEQ ID NO: 153610 - DNA, 633 bp, Zea mays
  Clone ID: MRT4577_71670C.1
tcgaacggccgcccgggcaggtaagcttttttttttttttttttttttttttttttattcattttttttttttttttttttttttttttttttttttttttttttttttaaatttttttttttatttttattttatctttttttttttttttttcttctgtgaaaaagggaaaatgatgcttttttttggggggggcaccaactaccttcaaaaaagtttttttttgcaaaccctaaaaagaaaaaattaaaaggggggaaccaaaagggcgggctgaaccgggggggttatttgctgttcaaaaaactactgccataaagccaaaaagttggggaaaaccgagagggcttgtgggcacagcaacaattgctggcttaaaaccaacaatttgggggtaacccaaaaaacatcttacaactacaacaattgggggcctttgggcaacttgctttgacagaccaaaaaaactgctgccaacaacacatcattgggggagccctctaaaaaaattgcttattaggtgggattcaataataacagttttttggatgatggaatggggccaacccgaaaaaagaagttacattttccgaattttaagagggggtaaagaaaaaaaaaaaatttttttt

SEQ ID NO: 153611 - DNA, 1625 bp, Zea mays
  Clone ID: MRT4577_71671C.1
ggttaataacagagggggtagagataaatatcgcaatatcatcagagtacttattacatagcagaagtcttacaaaataaaagataaatataaaatgaactaaaggccatccttggggccataaagtcaactgggagacgccacctagatcatggcgaactcctcgttgtggggctcctcttgaaccacctgtacttcttttgtggggagggtgtgagacagcaaaggggagctcacagatgttcatcgctcaacaaggtggggggaataatgtggcatgaactcaccaaagggggaagttcatgtaatgtgtaaggctgatcaacaataggggttaaagctgagcattgcttttaataagttggtcaaattttattagcagttactaaatgtatgtaaataccaaatcataattaataataatagaacaaaattaataataaatctcatgcaatgcatatgacaaattgagtttaagttccatagattattcatgcgagagtcctgagctgctcatgaccatgagctcggctagtataccagttttacactctgcagaggttgtaccctgtacccacaagtcgtgtatcccatgtcaccagggtttgcaaggcccttagacactaccgaggtgaatggctagggatccactacgaggcctttacaaagttctactagcttcagaaaacccgctacagtttctagaaagcgcaatataggaatcccccgtctgaaaagccatcgcaacatgatcaccccgagaacctccctataccgacaactcccttactgcccttgcccctttcgggtaaggtagtcctcaactagctttcctaattagtcagcccaggccgtcccattccacccttgtggtagcacccatttctcaagttaagttctatgttccaattaacacaatgatcttgtcacgaacaataactaaaacaacagtataactggaacaatgatcataatgcagagcaatagcaaaactacccaaaagttcaatggtaaacaaggtgtggaataaacaagtctagggaaaccaattatgtcccatcaaattaacctgagcatgtcacagtgattaacatgaacattattgggtaaagaaaagtgatcaagggcacaacttgccttagacttgagattccaggtacaaggttggtcttcaagtgactcgtaacctcattgcaaaggagacggtgggcgcaaggctgtcctcgacgtcgcgacggaaatgacctccggcgagaaatccccagtaacctcgtgcttttccgaccaccgcaaaccacactcgtggacaacgaacctcgacgacacaccctagcccctttaatttcaccgagtagcacgcagtcgtgagcccgaggcggagccgccaagttcctggcagaaggacatcctttctctctctctggaaatcgacgactgaggaacggcgaaggaatgggatagaaggccatggcgcacgaattttatggcccaggggacgacggtctctgcaatctctagatggagtttgttggcggacgcgagatccacgtggtctgttgaaagcttagttcgcggataggggagaagggcgcctgacaccccggccggcctcgaggtacccaatg

SEQ ID NO: 153612 - DNA, 1011 bp, Zea mays
  Clone ID: MRT4577_71672C.1
aattcggctcggcacaagtgcccatcaatgcattcagaggcctcagctgccactgctcactccccgccattaattcgtagtattcactaccacagcagtacctctccctctctctctctctcacacacacacaccccttctatctaggcatctcctcgtcactgtcttgcatttcatatacagttcacagttcacgctgcagggcagtggccatagagtagctcgtgagcgagggagcaaaaaccagtgaagaaaaggaaaaaaacaacggggcaaaacgaaatgctgtctttttctcgttcggccatcctctcctacctactgtggtgccttctatttctcaccttggcaagcagcaatggcgcggtcgccacagcaaagccgaaggctgggtgcgggtacaagctggtctcccttgttcagctgcccaacgggggaggccttgtgggttacctgcaggtgaagcagcgcacctccacttatggtcctgacatccctcgcctcaggctctttgtcaagcacgagaccagggagagggtgcgcgtgcagattacagatgcagataagcagaggtgggaggtcccctacaacctgctcccaagggagccagccccacccgtgaccggcggcaaggtcacgggcgcccccgtcacgggcgccgagtaccccggcgaggagctggtgttcacctatgggcgcgacccgttctggttcgcggtgcaccgccggtccactcggcagccgctgttcaacaccagcgccggcgcgctggtgttcaaggaccagtacctggaggtgtccacggcgctgcccaagaacgccgccctgtacgggctcggcgagaacacgcagccggggggcatccggctgcggcccaacgacccctacaccatctacaccacggacatttccgccatcaacctcaacaccgacctctacggctcgcacccggtgtacatggacctccgcagcctgggcggccgcggcgtcgcgcacgccgtgctgctgctc

SEQ ID NO: 153613 - DNA, 179 bp, Zea mays
  Clone ID: MRT4577_71673C.1
acgctcctctcacaacccagtcgatcaaaaccctagagctctcgcctgctcgtctacgtcgccggagcgagctaccccatactacatccgtacaaccatggcgacccagatcagcacgaagaagaagttcgtcagcgagagtgttttctacgccgagctcaatgcgatgctgacgcggg

SEQ ID NO: 153614 - DNA, 2446 bp, Zea mays
  Clone ID: MRT4577_71674C.1
cccacgcgtccgcttcattacgttctacgttagtgtgcaactattaaattcatcactataaactttctctgttactctttctagcactgtgcaaatatggcccaagagttgttgttcgttgcataaaaccaattaacaagggagatgaagtgtgcataacatacattgatcttctccagaccagggtactatttcttgaattttgctgaacccatatttagtcactctgacacatgaagtcagtatacccataatattatagatctccatatattatcaacatcaacatagtcttttagtcccaaacaagttggggtaggctagagttgaaaccccacaagaactcactaaaaagagaaagagagagaaaggggaggggaaaaggcttttgagagaactaaaagggaaaagacctaatcacggttcgggcacgtggatagcttctttccaagcacttctatccgaacacaactcctttgggatatttcattccttcaagtcccttttgagttttgattgcctcctctcatgtcaagtttggccgctctctaccgctcttcatatactatgtttccaaggatctaatcatggtttacatgtagtgttcgctacctgagttactgttatacacaatatttgatatttacatgattgacatatcatattttgcctttattttagaattttgggctgtaatttagaacaaaaatatcaaaggagtaaaggacctaacactcgcactcggttttggtatttttgtttcttttgagcggctgttgttgatacatgacagtgccctgatttgtagtgtattggtaatttgcttgtgaaaaaagattatcttgactcacatggtcacagtcacacttactgtattctgcaagttacacactagtgcctagttcatagctacgccacttgataaaattgtcaacttatcttgaaaactttggtttctctgctttctagcagaggaatgcaaaaatgttgagttgttgaccaaccctgtccgttttgatgtagctttctatacaataatactaatgtttttcactaacgattagtcaatgcgtactggttatcttagcaaaatttagctgatattgtcgaagttccagattgaggtcaccatccatagattgaaaatagactttcgtggtatttgtaccggatgtatttcaaattaaatattttattcgcttatgttgggatgctcataagagttcttttcaggaagcaaggcattcggatttgtggtcaaagtataaatttatttgttcttgcaggcgctgtattgcatcaccagagccatacactgatcttattctgaattgtgatgtgagggacttggataaagcagaagcagagggtactgttacacctccagcaattgagaatttgggtgatgtactacaacaggcaatatctgagtacacgtcaaatgatgaccctgaagcttgctgtaatatgattgaaaccatgctttccaacaggtttttgagtggtttgaagcaagaggatatttcagggagaaaacatatactacagcctcttcaccatatctgtcttactgcttacatgacacttgcctctgcttaccggtttcgcgccttaagtttagaagaagctgtccgttcagatggagaaaatactgatgacttttttagaatggctaaagcagcagcagcgtattccctggtacttgcagggagtgcacaccatttgttcctatcagaatgttctcttatgatccccctgtctcattttttgttaaacactggacagtctctgttatatcttgctgagtctatcaagggaaagacaaggcaaaatatatccgaggccaggctcagcttttcttcatgtccagcaagttctacagacaatgattctccaccgtaccatgtgttcagatcaacctgtgaagcgtttggcaagcaaatgttatccctgtcactgcggtgctggtcatttctagtgcgaggtttaccctgcctggaaaagataaagagccccatggaatttagtatgcccggaacaacaatatttcagtctgtcctttctgaggaagaccatgccaacctttccgcgcacgagccagtaggtttcacggagagacaagcggggtgcatccttagtttggctctatgttgtatcacctactgcaaatatcttgctaccatatgctacggcccacatcattatctggcagaccatgcaaaatatctacttgaaggtatcgatcctgcacaatgaatcttctttcttggcataggtgtgttgtgaaatcttatgctcttatgagttaatgtaaaacgtgtcgtgattatcaaggctgttgagcttattttctatatgattgtatgctgagctcgttatttattattttgtatggaagcaccatttttctaaaaaaatttggtcactgggaagttgtatcactaat

SEQ ID NO: 153615 - DNA, 278 bp, Zea mays
  Clone ID: MRT4577_71675C.1
ccggccggggtcttttcccccgacgactacaaagacttcacactcgcagccgcagccgcacgctgctccgggagactccgtcgccgggaagacttctcctctcctctctcctctactacccttccactacgctgctctcctgtgataccgcagcgcggaagaccacatgtcggatacatcactggtacctcctctccgctctgaaatcgcaaaggcagccatgaggcgagaggttggctaagctgactgcgcactcacgcgttacgcgaagacctcga

SEQ ID NO: 153616 - DNA, 403 bp, Zea mays
  Clone ID: MRT4577_71676C.1
aatacataaaagagcaaagaactgatgagcttggcgactgctaaagatgttgtgggccgaaaaatttttgttgtcttttacatgacctccgacggctccgatatcgagcacattaacgcgcagaacgacggacatactgacagtgcgcatgacagacatggggcgcccgtggaagggaaaataacacatcatcgtgtgaagctacaacacgacgtgaaccggcatgataaggctctatgcactcactatataaatgtggcggatagtatacatgcttacatgtatgaggacctgctctgaattgtatctttgcaataccaaacaatacatatccgacagatactagatacatgcaaccttgttgaggtacacaacattggtgcatgctggcgggaagatgatg

SEQ ID NO: 153617 - DNA, 128 bp, Zea mays
  Clone ID: MRT4577_71677C.1
attggtttggccaaacacaaaactcatacttacctagttgaacataccctactctaaaaatggaccccgggggatcattcctccatatgcttggggcgccccctctaaaagtcccacgcttccgtacc

SEQ ID NO: 153618 - DNA, 522 bp, Zea mays
  unsure (1)..(522): unsure at all n locations
  Clone ID: MRT4577_71678C.1
ctgacgcgtggngaaaaaaaaaaaaaaaaaaaaaaaaaaaaaaaaaaaaaaaaaaaaaaaaaaaaaaaaaaaaaaaaaaaaaaaaaaaaaaaaaaaaaaggaggggcaaaaagaaaggaaccaacctggcgggccgcggtccttgcgtacggtttagcgtccccctttagtgcccccctcctgcccttctttttgggccggggcggtttttttttttttccttggcgggccccctcgctttttcccctcttggcagccccccgtctcttccccttttggcccgctggcgtggccgcccgcgtgccctctccgctcgactttcccaacggccgggccgctctgccggccccttgtacgccccctgtagcggcgctttgggtgggggccactcgctgggtacccgcctcttgaccgctcgctttgccagccccctatcccccgttcttttccctttttttcgtcgcttgctgggccctgttcgcggggttttcttgctgggcggttccgtggggggtccctttc

SEQ ID NO: 153619 - DNA, 1549 bp, Zea mays
  Clone ID: MRT4577_71679C.1
caaatctctcgcgcctcccactcctccccgccactcgccgccagcgaccaaccatcgcccgcccagcagcagcacggccccacgccaggactcgacccacgcgcggctagctaagctcccgccgccatgatcacggccctgcaggtctccggcggcggcctgccgctcctgttcgcccggcgccggcgccgggcgttccggccgccccaagcggtggcgtccgacgccgccgccgccgccgagggcacggcgagggaggatggcgggaaggtggccctgggcgggtccggcgtagccgtcaccaagctcggcgtcggggcgtggtcctggggcgacaccacctactggaacgagttccggtgggacgatacgaagctgaaggcagccaaaggagcgtttgacgcgagcatcgactgcggaataaccttcttcgacaccgccgaagtgtacggagcaggggtatcgggagcgattaattcagagagtttactaggaaggtttatcaaggagaggcagcggaaggagcaggtggacgtggctgtcgcgaccaagttcgcagctcttccatggaggttcggtcgtgggagcgtcatctgcgcgctcaaggcctcgctggatcgcctcggtgtctcgtcggttgagctctaccaactccattggccagggatatggggcaacgaagactacctggacggccttggagacgctgtggagcaagggcttgtgaaggccgtcggggtctcaaactacagcgagaaacgtctccgagacgcgtacgagcgcctcaggaagaggggggtcccgctcgcctccaaccaggtgaactacagcctgatataccggaacccggaggagaacggggtgaaggcggcctgcgacgagctcggcgtcactctgatcgcgtactccccgatcgcccaaggtgctctgacgggaaagtacacgccggagagtcctcctaaaggccctcgaggacggatatacacgccggagttcctgacgaagctccagccacttatcaaccggatcaaggagatcggaggaagctacgggaggacttcaacccaggtggtgctgaactggctggtgtgccagggcaacgtggtgccgatcccgggcgccaagaacgccgagcaggcgcgggagttcgctggcgctctcgggtggagcctggcgcccgacgaggtggaggagctccggtccatggcgcgccaggtcaagcccgtcatcggcttcccggtggagaagctgtgaccacccccatggcactggtatatatcaggccactgtagtagtgtaatgtatagtaggactgtaggtacgtagatgggcaaagcataccatttccatcgcgagactgcggacgatgtatgctacattgctactgaacgtagcgtcacgccgtcgaccagagatcacagtagctgtctgcgctaaggacgtggttcactacttgcgaaagtcagtgttttaattacatggaaaaaattataaaattataaaatttttatctttcacaaaaaaaaaaaaaaaaaaaaaaaaaaaaaaa

SEQ ID NO: 153620 - DNA, 150 bp, Zea mays
  Clone ID: MRT4577_7167C.1
cgccacgcgctgcaggatatatgtggtatgcccattcaccgagctgtgcacgacctgggtggaggtgaacacaagcctaatcggaatacatgctagtgctgtcagaccgaacctggcgaacccactgagcctagaggccccaaattaccg

SEQ ID NO: 153621 - DNA, 418 bp, Zea mays
  Clone ID: MRT4577_71680C.1
gcccacgcgttcgccacgcgtcgcccactcgtcgccacgcgtccggattaatgagagagtttactaggaagggttatcaaggagaggcagcggaaggagcaggtggacgtggctgtcgcgaccaagttcgcagctcttccatggaggttcggtcgtgggagcgtcatctgcgcgctcaaggcctcgctggatcgccttggcgtctcttcggttgagctctaccaactccattggttggctcatcagccttttctcaaccgatttctcaatctctctctctctctttctatgtgtgtgtggactgtggacactgtcggttaactcttggcatatcctttttaggccagggatatggggcaacgaagactacctggacggccttggagacgctgtggagcaagggcttgtgaaggcagtc

SEQ ID NO: 153622 - DNA, 1400 bp, Zea mays
  Clone ID: MRT4577_71681C.1
ccggaacaacccagcagccatcatgtcgcgcaggctataccaacacgcagcggtgatgtctgcttgggctccggctgcctatacgctcgtcttgctccttcatcttctagcaggtgctgtcgtcactgctaagaccaacaatggtgttgatcctggtcctaggcagcaggagccctctatgcccgtggactccagcggtgacgaagccctctctgcgttgacctggatggcaaccggtagtgaagcctcgaaggcagctgaggctgtggttgactggcataaacacgacagcaagaggatgctccatgcggtttaccgtgttggggatctggaccgcacaatcaagtactacacggaatgctttgggatgaaactgctgaggaaaagggatgttcctgatgagaagtacaccaatgccttccttggctttgggccagagaacaccaactttgcagttgaattgacatacaactatggcgttgacaagtatgacattggaacgggctttgggcatttcgcaattgctaatgatgatgtgtacaagttagctgagaatatcaaatccaagggtggtaagatcacccgcgaacctggtcctgtcaagggaggatccactgttattgccttcgcacaggatcctgatggctacatgtttgagcttatccagagggctgacacacctgagcctctttgccaggtcatgcttcgtgttggtgaccttgagcgttctatcaagttttatgagaaggccctagggatgaagctcctaaggaagaaggatgtacctgattacaagtataccattgccatgttgggctatgctgatgaggacaagacaactgttctggagctgacgtacaactacggagtcacagaatacagcaagggcaatgcatatgctcaggttgccattggcaccaatgatgtgtacaagagcaccgaggcggttgatctggcgaccaaagaactaggtggcaagattttgcggcagccagggcctctacctgggatcaacactaagatcgcctcttttgttgatccagatggctggaaagtggttctggttgacaacaccgacttcctcaaggaactccactgaaggctcgggatacccaggtgctgtgctaggatgtagtaatgcttgtctgtggtgtaataagatgtgggtggtttgtttctgccctgatgaacttataatactgaatgttgctacagaggttgtgcttctgccagtgaggtttgggatttgctatgtaactgtgcctgcgggctccgattctggcgctgttcgtacactgtagaagccagtgaatcccaataaacccagcttcacaggctcctcttaaaaaaaaaaaaaaaaaaaaaaaaaaaaaaaagtactctgcgttgttaccactgct

SEQ ID NO: 153623 - DNA, 527 bp, Zea mays
  Clone ID: MRT4577_71682C.1
ccggccgggggagtacgactccgccgaacgataagctgattgagatgatggtgggtctttccatctataaccagcaggctgccgtggcgctaccgctttccatctataaccagcagaccaccgccgcgcaaccgcggctgtgcgaggtgcacgacgctgcggcggcggatagcttctcatctgcttttcttgaggctcgtcgcagtatcatcgatccgcgagcatacgtgccgccgcctccgatagggcagaaagccggtccgtcagcgccgtcgcagatgcatcctggattggtgcggatgccgctgccgccctacgatcgtagcgtgcctgacgcgcgatccttcgcggaaggtcgacttcggcgcagcatatctcgtgggccccggaacgaggccgcgggcatgctctcgcctggcgcaatcggcgcagcttgcggggcccaccctggcgggcacgcgtatatgggggccgccgccctacctacacagggggacgggaggaaaacctgctcctcgcgctgtccg

SEQ ID NO: 153624 - DNA, 730 bp, Zea mays
  Clone ID: MRT4577_71683C.1
aatttcaaagcaggtcatgatctagttctatctagctagtagagggagggaaaatgtatccgcttctcgctgctgacatgaactacgctgcatgccatcctggccttaggagccacctaatacgacccaataatgatagtttctcacgcaaccacctgccgttttcttctacacagaccacgaagcgaacgcgtaaccttagctttactacacgatctgcaataatactgaggcaaaatggagtccaaatgatagagcccctcgaaaatcccacaaagggattgacctcgccctactgacttcactcttcggtgacgacacttcactgtaccaaattgaacgtgcttgtaatgaagatgagaaaggcggatagtcacactggcatgcacttcagccacaatcatccagaaaggatactggacaggagcaattcaaacattgtaacagaatcgcatcatatggatgacaggtacgtctgattgatctaggaaatgttgatgtacgtatatagggtctctatctcttgcgccagaatacaggcgaactcaaacaaataaagatgtattaactgctcatggcatcaagtactacagaaacctcatcatcttgatgctagaaaacggaatacagtcgtatgcaacaatgttccactgtgatgcacctcatgcactagaacagaagtactacgtcttcctagattgcagtcatatgagcattgtagaagattaca

SEQ ID NO: 153625 - DNA, 442 bp, Zea mays
  Clone ID: MRT4577_71684C.1
gaaggactagatggtttgctttgggatgaaactgctgaggaaaagggatgttcctgatgagaagtacaccaacgcgttccttggctttgggccagagaacaccaactttgcagttgaattgacatacaactatggcgttgacaagtatgacattggaacgggctttgggcatttcgcaattgctaatgatgatgtgtacaagttagctgagaatatcaaatccaagggtggcaagatcacccgcgaacctggtcctgtcaagggaggatccactgttattgccttcgcacaggatcctgatggctacatgcttcgtgttggtgaccttgagcgttctatcaagttttatgagaaggccctagggatgaagcttctaaagaagaaggatgtacctgattaccagtataccattgccatgttgggctatgctgatgaggacaag

SEQ ID NO: 153626 - DNA, 1516 bp, Zea mays
  Clone ID: MRT4577_71685C.1
ttgggtacctcgaggccggccgggacttacctggacggggtcgacgggggatcaagaagcctcatggcctaggccagtggctcgcattgcacatggtgggtgcgctggcttaccatctccccaagtgggagagtggacgtcataatttgtggtagagggggtacgcgttcgcgcggcccctgctatttatgggcggcgccttcgtctccactccccaccggaggaaggaagcgagaagaccagaaggtgagaagagagagagagagtgtgtgtgatcggtacaaggatcaccgctgtgcctgcgcgtgctgcttcaccgaatcgagtcagatcctgtccgaatccgagctaagggatggcaaccggtagtgaagcctcgaaggcagctgaggctgtggttgactggcataaacacgacagcaagaggatgctccatgcggtttaccgtgttggggatctggaccgcacaatcaagtactacacggaatgctttgggatgaaactgctgaggaaaagggatgttcctgatgagaagtacaccaatgccttccttggctttgggccagagaacaccaactttgcagttgaattgacatacaactatggcgttgacaagtatgacattggaacgggctttgggcatttcgcaattgctaatgatgatgtgtacaagttagctgagaatatcaaatccaagggtggtaagatcacccgcgaacctggtcctgtcaagggaggatccactgttattgccttcgcacaggatcctgatggctacatgtttgagcttatccagagggctgacacacctgagcctctttgccaggtcatgcttcgtgttggtgaccttgagcgttctatcaagttttatgagaaggccctagggatgaagctcctaaggaagaaggatgtacctgattacaagtataccattgccatgttgggctatgctgatgaggacaagacaactgttctggagctgacgtacaactatggagtcacagaatacagcaagggcaatgcatatgctcaggttgccattggcaccaatgatgtgtacaagagcgccgaggcggttgatctggcgaccaaagaactaggtggcaagattttgcggcagccagggcctctacctgggatcaacactaagatcgcctcttttgttgatccagatggctggaaagtggttctggttgacaacaccgacttcctcaaggaactccactgaaggctcgggatacccaggtgctgtgctaggatgtagtaatgcttgtctgtggtgtaataagatgtgggtggtttgtttctgccctgatgaacttataatactgaatgttgctacagaggttgtgcttctgccagtgaggtttgggatttgctatgtaactgtgcctgcgggctccgattctggcgctgttcgtacactgtagaagccagtgaatcccaataaacccagcttcacaggctcctcttatcccgtagaccctagttgtttttgggtggagctggagcccct

SEQ ID NO: 153627 - DNA, 1309 bp, Zea mays
  Clone ID: MRT4577_71686C.1
cctcgaggccggccgggaccgaaggaagcgagaagcccagaaggtgagaagatagatagagagagagagagtgatcggtacaaggatcaccgctgtgcctgcgcgtgctgcttcaccgaatcgagacagaccctgtccgaatccgagccaagggatggcaaccggtagtgaagcctcgaaggcagctgagactgtggttgactggcataaacaggacagcaagaggatgctccatgcggtttaccgtgttggggatctggaccgcacaatcaagtactacacggaatgctttgggatgaaactgctgaggaaaagggatgttcctgatgagaagtacaccaacgccttccttggctttgggccagagaacaccaactttgcagttgaattgacatacaactatggcgttgacaagtatgacattggaacgggctttgggcatttcgcaattgctaatgatgatgtgtacaagttagctgagaatatcaaatccaagggtggcaagatcacccgcgaacctggtcctgtcaagggaggatccactgttattgccttcgcacaggatcctgatggctacatgtttgagcttatccagagggctgacacacctgagcctctttgccaggtcatgcttcgtgttggtgaccttgagcgttctatcaagttttatgagaaggccctagggatgaagctcctaaggaagaaggatgtacctgattacaagtataccattgccatgttgggctatgctgatgaggacaagacaactgttctggagctgacgtacaactatggagtcacagaatacagcaagggcaatgcatatgctcaggttgccattggcaccaatgatgtgtacaagagcgctgaggcagttgatctggcgaccaaagaactaggtggcaagattttgcggcagccagggcctctacctgggatcaacactaagatcgcctcttttgttgatccagatggctggaaagtggttctggtcgacaacaccgacttcctcaaggaactacagtgaagactcgggagtcgggatacccaggtgctgtgctaggatgtagtaatgcttgtctgtggtgtaataagatgtgggtggtttgtttccgccctgatgaacttataatactgaatgttgctacagaggttgtgcttctgccagtgaggtttgggatttgctatgtaactgtgcctgcgggctccgattctggcgctgttcatacactgtagaagccagtgaatcccaataaacccagcttcacaggctcctcttatcccgtagaccctagttgttttcgggtgg

SEQ ID NO: 153628 - DNA, 1281 bp, Zea mays
  Clone ID: MRT4577_71687C.1
gcgagaagcccagaaggtgagaagatagatagagagagagagagtgatcggtacaaggatcaccgctgtgcctgcgcgtgctgcttcaccgaatcgagtcagaccctgtccgaatccgagccaagggatggcaaccggtagtgaggcctcgaaggcagctgaggctgtggttgactggcataaacaggacagcaagaggatgctccatgcggtttaccgtgttggggatctggaccgtacaatcaagtactacacggaatgctttgggatgaaactgctgaggaaaagggatgttcctgatgagaagtacaccaacgccttccttggctttgggccagagaacaccaactttgcagttgaattgacatacaactatggcgttgacaagtatgatattggaacgggctttgggcatttcgcaattgctaatgatgatgtgtacaagttagctgagaatatcaaatccaagggtggcaagatcacccgcgaacctggtcctgtcaagggaggatccactgttattgccttcgcacaggatcctgatggctacatgtttgagcttatccagagggccgacacacctgagcctctttgccaggtcatgcttcgtgttggtgaccttgagcgttctatcaagttttatgagaaggccctagggatgaagctcctaaggaagaaggatgtacctgattacaagtataccattgccatgttgggctatgctgatgaggacaagacaactgttctggagctgacgtacaactatggagtcacagaatacagcaagggcaatgcatatgctcaggttgccattggcaccaatgatgtgtacaagagcgccgaggcggttgatctggcgaccaaagaactaggtggcaagattttgcggcagccagggcctctacctgggatcaacactaagatcgcctcttttgttgatccagatggctggaaagtggttctggttgacaacaccgacttcctcaaggaactccactgaaggctcgggatacccaggtgctgtgctaggatgtagtaatgcttgtctgtggtgtaataagatgtgggtggtttgtttctgccctgatgaacttataatactgaatgttgctacagaggttgtgcttctgccagtgaggtttgggatttgctatgtaactgtgcctgcgggctccgattctggcgctgttcatacactgtagaagccagtgaatcccaataaacccagcttcacaggcaaaaaaaaaaaaaaaaaaaaaaaaaaaaaaaaaaaacaaccac

SEQ ID NO: 153629 - DNA, 1584 bp, Zea mays
  Clone ID: MRT4577_71688C.1
gccatcatgtcgcgcaggctataccaacacgcagcggtgatgtctgcttgggctccggctgcctatacgctcgtcttgctcctgtatcttctagcaggtgctgtcgtcactgctaagaccaacaatggtgttgatcctggtcctaggcagcaggagccctctatgcccgtggactccagcggtgacgaagccctctctgcgttgacctgcactgaaccttctcgcgctcggcagttggcagtcctgtcctgtggaccgtatgacgtgtttatttatgggcggcgccttcgtctccactccccaccggaggaaggaagcgagaagaccagaagggatggcaaccggtagtgaagcctcgaaggcagctgaggctgtggttgactggcataaacacgacagcaagaggatgctccatgcggtttaccgtgttggggatctggaccgcacaatcaagtactacacggaatgctttgggatgaaactgctgaggaaaagggatgttcctgatgagaagtacaccaatgccttccttggctttgggccagagaacaccaactttgcagttgaattgacatacaactatggcgttgacaagtatgacattggaacgggctttgggcatttcgcaattgctaatgacgatgtgtacaagttagctgagaatatcaaatccaagggtggtaagatcacccgcgaacctggtcctgtcaagggaggatccactgttattgccttcgcacaggatcctgatggctacatgtttgagcttatccagagggctgacacacctgagcctctttgccaggtcatgcttcgtgttggtgaccttgagcgttctatcaagttttatgagaaggccctagggatgaagctcctaaggaagaaggatgtacctgattacaagtataccattgccatgttgggctatgctgatgaggacaagacaactgttctggagctgacgtacaactatggagtcacagaatacagcaagggcaatgcatatgctcaggttgccattggcaccaatgatgtgtacaagagcgccgaggcggttgatctggcgaccaaagaactaggtggcaagattttgcggcagccagggcctctacctgggatcaacactaagatcgcctcttttgttgatccagatggctggaaagtggttctggttgacaacaccgacttcctcaaggaactccactgaaggctcgggatacccaggtgctgtgctaggatgtagtaatgcttgtctgtggtgtaataagatgtgggtggtttgtttctgccctgatgaacttataatactgaatgttgctacagaggttgtgcttctgccagtgaggtttgggatttgctatgtaactgtgcctgcgggctccgattctggcgctgttcgtacactgtagaagccagtgaatcccaataaacccagcttcacaggctcctcttatcccgtagaccctagttgtttttgggtggagctggagccactgacctgccgaagagggctcctatggtccttttttttttacccgtttcacctcatgcatccacattcaataggaggtagcagatttaccc

SEQ ID NO: 153630 - DNA, 701 bp, Zea mays
  Clone ID: MRT4577_71689C.1
gccggccggtccgggaaataaataaagatgagtgaatacgaaggaggacgtcctcaacatgatggcattattcgttacggtgatcatgtttcgcttaaacatgtagctaccaatcgttatcttacatccagaccaggctcatacgatggtggttcttatcaacaaaagattttcactgtcgaatgttctcctgaagaagaaagcacctggattgttcttcctcctgctgaaacagaagaagagcccggttacgaagtaggctgggatgaccctgttcgtctcaagcacgttcctacacgtgtcaatttacatacacatggtattcaaagtcccgtttcaggtcagcaagaggtctctggttttggtgatgatgaaacttcagatgaaaatgatgtctggaaggttcaacaatacaatgaagacgatgaacaatacgatgatttttggcgtgttggtcaaccttttgtccttcgccatgttgaaacagacagacttcttcactctcacgaaatgcttttggaagaaggtgcaaatgaagtgactggctatgaagagaatgacgaaaacagtatgtgggttgttacatttgactaaatcccttttactctttctatttaatttctaagggtgatttacttgaatcattcgcattaataaaacaaaatatcaaagcggaaaaaaaaaaaaaaaaaaggccccta

SEQ ID NO: 153631 - DNA, 260 bp, Zea mays
  Clone ID: MRT4577_71690C.1
gcccaacgagcatgctatgctgattcctttatatgcaagcgctatgctgatatcactgagactgccatggacgagcctctgataagaacgggcgaaagctgcgctcactggctactttctgatgctaggcgttgttgctctgtccacaccactgctttcttgtataagacgtggcattccaaaagatcggagcgatcatctcatcgcgcggcgggctcgatccttgcactcaatctcatgcgagctcagatagtacgaga

SEQ ID NO: 153632 - DNA, 290 bp, Zea mays
  Clone ID: MRT4577_71691C.1
ttttgctggcgttcaggggggtggtcttgatggttaatcttagcaacaaactagttacaacatgtggtctgcaacaactcttctgtctttctgagtgtttatactatacatgtgcaattatacatatgcatccaatcagatcggttacaggtgccttataccacatccttagtctagacactcacaacgccaggacaattaatagcaaccccatgtcgtgaccactggtgtacataaacgaactcttaaggaccgcgtccgtgaccggcagcgagaagagcacggttatg

SEQ ID NO: 153633 - DNA, 2222 bp, Zea mays
  Clone ID: MRT4577_71692C.1
gggagcctgccggccggccggggctttcagcctcatggccagcgcgggactccaccactcctcctccccctctccgcggatcacccaccgaacccacgcgaaaccggcgtccagatcttctcccccgcggttcagatccccggacgcagccggcgccttctgacttgggttggcacagccgtacaggttgctttgcgctgcggtggatctcctggcgtggcgacatgggcctgggtttgggagctcttctcaaatccggcgggctctcggtctcggatcacgacgccatcgtctcgattaacatcttcatcgcgctgctctgcagctgcattgtcatcggccacttgctggaagggaaccgatgggtgaacgagtccatcaccgcgcttgtcatgggcctcatcaccggaggcgtcatcctgctggttactaatgggacaaactcacgcattcttgtgttcagcgaggacctgtttttcatatatttacttccgccgataatcttcaatgccgggtttcaagtaaagaaaaagcaattcttccgcaactttataacgattattttgtttggtgctattgggactctgatttcctttgtaataatctctcttggtgctatggggttgttcaagaaacttgatgttggtccactcgagcttggggactatcttgcaattggtgctattttctcggcaacagattctgtttgcaccttacaggtgcttaaccaggatgaaacacccctactctatagtctagtttttggtgaaggtgttgttaatgatgccacatctgttgtgctcttcaatgcaattgaaaaccttgatattgataattttgatgctattgttctgttgaatttcgtcggaaaatttctctacttgttcttcaccagcaccatacttggagtagctaccgggttgcttagtgcatacattatcaagaagctctgttttgccagacattcaactgatagagaagtttctatcatgatactcatggcatacctttcatacatgatatcaatgctgttggacctgagtggaattcttactgtcttcttctgtggaatagtaatgtcacattacacttggcataatgtgacagaaagttctagggttaccaccaagcatacttttgcaactttatcattcattgcagaaattttcctcttcctctatgttgggatggatgcattggacattgagaagtggaaattagctagtagcagtcctaagaaaccaattgctttaagtgcaattattttgggcttggttatggttggaagagcggcatttgtattccctttgtcgttcttatccaacctaagcaaaaaggaggcccgtccaaagatctccttcaagcaacaagtaatcatatggtgggctggtctcatgagaggagcagtgtcaattgcgcttgcctataacaagtttacagcatctggtcacactgaagtgcgagtcaatgctatcatgatcaccagcacagttattgttgttctattcagcacaatggttttcggcctgctgacgaagccgctgctcagtctcctcatcccaccaaggactggactgaacacgtcgtctctgctctcaagccagtctatgctggacccactccttactagcatgatggggtctgactttgatgtagggcagatcaactcccctcaatacaacctccagttcattctcaccgcgccagctcgctccgtccatcgcctttggcgcaagtttgacgatcggttcatgcgcccggtgttcggggggcgaggtttcgtcccctttgtgcctggttcgccggtggagaggagtgtccctgaatctcacctgggcactgtgacggaggctgagggcagttgaaatgaggcaagagggatgccgacaattttctgtagatcttcagacagataccactcatactcctattttattttcagaatccactggtgcgaattgttctttgtagtaccttgtgcatatagttttatatagagctgctacacaagctgctgtaaatttctgggaggcactcccaactgtagattactgcaattcatctgtaaatttcaatcttgttcaagaagaatgatcatatattggcatgttttttaaaaaaagaggccaggacaaaacaaaaaaatgaaacggcgcctttaaaggtataatactaactcactttcccttgaagggggctttttttcatatttgtttcttcat

SEQ ID NO: 153634 - DNA, 298 bp, Zea mays
  Clone ID: MRT4577_71693C.1
attctttttcgatggtttgctgggaacgtgtaatcatcatgacagttttctgtctagatgcgcttttcagatttagaaaggggcatatgcttgaaggtgaacaggtgtattgaattatccatccagttgctgtccaatattagctcctgagaattgaattgctaattttgtctgacccattgttggtccaatatggggacctagtttcatatgagttaaattgtggctgaagaacttgttgtaaccacattatagtttactttccattccttttgactacttgctacaattcaagaga

SEQ ID NO: 153635 - DNA, 308 bp, Zea mays
  Clone ID: MRT4577_71694C.1
ccttgctttttttcttttccttgcgaacatacagtttttttataattgaccctaatccaacaaaactggccatcccatttcatcgataagaggggtaacacccaggcttatcccagcttaatagcttgccagcacaagccattttcgtcagcatacacaataggcaagggggccgctcctatcgtctttaccaaccgaggtacatcttgaatggacaacggcacccgctttgtagccccaccctaaaagcggtgggtgggctgactactcacagtgtgatcgatgcaccactgatcgccctagcgccc

SEQ ID NO: 153636 - DNA, 1043 bp, Zea mays
  Clone ID: MRT4577_71695C.1
attcttttagggagggcaaccatctttagagtagcaattagctgaacctgcaaaaaaaactttttgttagccctgatttgggaggatttccccaaactagccaataatattatattggtaaaattaaaataaagtggacaaggaaaggcgccttgtcaggcaaagagaagagctgaagataggattagcttctatctatattgcagagtttgctggtaccaggaaacacaaaagaaatacaatactcctatctatcacctgtctagatctccttctagaaagaaaccataggatgaatggtgggaccaccagcatagcatgagtatacaatgaaagcagatcataaccaccagcattatagctgcttttaaaaagtaagtgttactctgaaagtttctccttttcaaggtcacaaatgattggatttttttggttatataccatttgtttgcttgcattatagttgcttttttgtggtttgaatctaacaggattttcctacttttgttgtattgtttgctttttttagaaaaaaacacagtaaaaatacgggcctctagtttataaacactcggcatgtagactagcgagatagtatatagattaaacaacagttaataaatgatattaggaagaagcttgtgtagcatcggtggccctatggggcatgctatgtcaacaatgcatcagtggccttgtcagttttattttgaccccctcaaggccttgcaaccatttcccaagccacagtatccaagagatggcagtgtcactcacagaagcagctgttcttagtatgtgatttaggaattcaatgaattatatctatgtatggttacacaagtcctatgctgacaatctgtaacatgtgtatgcttgtatttgaacctgaaacctgtgtaggctggtgtgagatctgtttgtggtatttttggtaacctgaaacctattttctatgttgtgtatgttgttttttggtaacctgaaacctgttgtgtatgttgtgcgtactactttgtagaaacctgaaatctgttttgtat

SEQ ID NO: 153637 - DNA, 2020 bp, Zea mays
  Clone ID: MRT4577_71696C.1
gcgactatctgcacacgcctcactggttgccagtttgccactgcatcagcaaggcatatcctgctgggcagcaataatgcctcacttcgtcgtcggcatcgcggcggcgctgctccttctgcagcagctgatggcctcgtcgtcgtcctaccccagcagtgcggtccttgcagactctgtgctcggccggaaagctggcatcgtcgtcgacgaggcgtcggcgcgtgagagttcacccccgggggctgggactgggaggtacgccgtgatcttcgacgccggcagcacagggacccgtgtacacgtcttcaggttcgacaggaagctcgaactcctcgagatcggcgacgacggcatcgaggtgttcgccaaggtgaagcccgggctgagctcatacgctggacatccccaagaggctgcaaattccatgctgcctcttcttgacaaggccaagagcgccgtccctaaacagctgacgaaaaggaccccgcttagactcggagcgactgctgggttgagacttatcggagaggagcaatcagagcagattctcgaagcagtcaggaaccttatccacactaagagcaaatttcagtacaagcccgagtggatcaatgttattgagggatctcaagaaggatcatacctatgggtatgacttaattatcaagcataaacaaacaaacaaaaaagacctttcaggaaatgctatttttggtcacctcattttaatatatgtacccctaacactatatatgtgtttgagtgctctgagcatgggttgtttattaggttgctctgaattatctgttggataaattgggaggggactactcacagacagtagctgtgcttgacatgggcggtggatcagtgcaaatggcctatgccgtttctgcaaatgccgctgcaagtgctccggcgccgcctcatggggaagacccctatgttacaagagagtatcttaaaggaaaagattacaacatctatactcacagttacttgcactatggtgcttttgcatcacgagcagagattttgaaggcaaaggatggaccattcagcagctgcatgttacgtggattcattggtcaatacacctacaatgaggagcaatatgacgcgactgccgcgccggaaggagcagtctatggcaagtgcagggaagagatcggcagagcactgaacctgaacgcgccatgtgaaatgaagaactgcaccttcaatggcatatggaatggcggcggcggagcaggccaaggcagcatctatgttgcatccagcttctacttcgtggcctcagaggtcggcatcgtagatggcaacgcaccaagcgggaacactacccctggcgcattcggagcttccgcggagaaggcttgccagatgagtgttgaagaagccaagatcgaatacccaaacgtcaacgatgtcgatgtgccctacctgtgcatggaccttgcctaccagtatactttgctagtagatggctttggtgtggagaggaccaaggagatcacagtggtggacaaggtgaagcacggagagtactacgtcgaagctgcatggcctctaggctctgctattgaggctgtgtcgtcaaccaaagaatggcgtcaagataaatgatctgttggtccaatctcatatgctagtattgtatctgacatgtacagtactggcacaacttatgaaataaacgaaaacgtctgtggtctcccgctaatatacgcattaagcccttggcaaagatggttttgccgagtatccgtctataccgagtgtttcacgctcagtaaacgttatcgttgtcgagagtgttatttccccgaatacccgacaaaatgtactcgacaaagagccgtactccggcagtgaaatgcatattccttgaatggttatatgcaccaccaaagaaaactaaacatttcttcaatgtttgtcaaggaaaatttcaatatgatcatggcttgtaaagttcttgtttagtttgtaagtctccttaattaaatctgtaaat

SEQ ID NO: 153638 - DNA, 218 bp, Zea mays
  Clone ID: MRT4577_71697C.1
cccacgcgtccgtttaaacatttgtttcgttcttggtgcttagcaaatatgcatcgtgagactaacaatcagttacatagctagtgttgatgcttgtgtaacaaagatgaatctgttggagctgctagggtgccaaaggtggggtcccctattcggcagagctctggcagacggtaaattctatgaatcgattcgtttaggctttgttcggttatttc

SEQ ID NO: 153639 - DNA, 344 bp, Zea mays
  unsure (1)..(344): unsure at all n locations
  Clone ID: MRT4577_71698C.1
cccacgcgttctctgactcatgttcatacacttggaccgacaccccaagggagccagtccactttccagagtctggggcacancaacaccacattcaataaggacgccatcagcgaataacactaccacttcatcaagggcatatacaactaccccaactatatacacatgtcacactgcacacactccgaacacataaacactccgaacataaaagacagcttcacacacagaagctaactataatcaacctacaactattccaacaactattcgcgcaagaaagataaacactgaaacttaaaaatagcccatcgcattactctctactctttagaaaacaa

SEQ ID NO: 153640 - DNA, 1604 bp, Zea mays
  unsure (1)..(1604): unsure at all n locations
  Clone ID: MRT4577_71699C.1
gggggcctgacccattacagagggtcaagagagtaaatgtacccaaaccctaatacagttccaacacaatcatacataaagagtacatagtgtattgcgcatccgcggtctgaaactaaaacacccgtgtgctggcaaccattgtggtaccacggaaccagcgtgccactaaactatgtctctcgctgtatcccaactcatccaacttctcaggtacctacaacaccctggtgttgttaggcgataacaatatctttctaggatgacaagcacaagctccaaacagatagacaaaactagcttaagtcaaatatgagaaaatggccagaacatgccatagcattaacacaaactttcgaggcgtttgcagtttgatctagttgtccaacttggtgcaagagggtattttcatagcatccatttgggtttaatcactccatgagagtttcaggccacaaagttcaaggacggaggacagttctggctgaccttatcttgccatttccttagtgttttatcaagtgcccttggccgttcataaccatttgtaggaacatcatttgcactttcatttgatgcttgttcctcattgtactcatcctttccttctcgtcgccccctaacttgctgtcttgattcaggcttccagcatgctttcgcaagcgacttgccaagtaaatcagcaatatttattgccatgttttcagcctgctgcacatgaggaaagttatcttcctcaaaatgatgtgacaaccatagatacattgataggacctgatgttttgtctcaaggtccagaagctcagcgtcattttttgcagaaccccttggtattcccattgcgatgccaacacgacggctatgagaatagttggtggcaaatcttaaaagatggtacatggcttttggatcccttatatttaccggagcaaagcaaaaattatagcgatccttgaggcatagcccctgcaccctctcaagcatattagcaaccttcttgatactgtcctgctggcacatgaagtatgttttatcgatgcgacaactatcacggaatttatccaacagatcattaaaagaaaggttagggaattggctggcaaacatttcaacttgctcaaagcaaggaaaaataccagctttttgtgcctcctcaaatggctgctgcaggcactgaatcaaataatctaaatcatctttcaagaaagttgttgtgagtccatctggatagacactgcccctccgaccagcacgaccagcaatctgctttacctgcgaagcgggaactggaaccatcctttccccattgtattttgccaagctatagaacacaactctcctaatgttaaggttcagccccataccgactgcatcacttgctataagcacatcatactcattatcctgctcgttgaacaactttgcttgttgtcgtcgtgtctctggtggcagagctccatagataacacaacacttgtgctttgtaaacttctccaattgccaagcttcacctcgannatatctccttgcgtgagaaagcaacaacgcagtcaccagagcggatatctgaggtccccaagaagttctctcggccggcctcgagg

SEQ ID NO: 153641 - DNA, 321 bp, Zea mays
  unsure (1)..(321): unsure at all n locations
  Clone ID: MRT4577_7169C.1
aggatacttacttagaaggaattgagcacgcaggatggacttaaacacaacttcagtatttgaccttagaaaaccctgcccgccaacatggtatgcacccacctcggccggtgggagggcacagctccccaaaagaagaaagagcgacggcacacacgcacgctcacatacggttcgatcaatgcaggccaaaattaacaaccaagagcggtcggtggggctatctggacagacacagtgtacagcggtttattttttttcacgggtatncttgccttcgttcttttgttcttgggggtgttttacttcaagttgaaaggc

SEQ ID NO: 153642 - DNA, 581 bp, Zea mays
  unsure (1)..(581): unsure at all n locations
  Clone ID: MRT4577_716C.1
gaactctgcccctttnattcgggaactaaaattaattacgagcgaagaacatttggatcgtgacccattgccatccctagcagcacagcaggtcaccctgaccttggctgtctgagtgtttggcttattggaaatctggaaaagaggtgcaaagcatgacagtttcaaggacgccggacaattttaatgctcctgctaagttgctagcgctactgcttttagaattttaatatgcattatttgttaaaaaagactaaaatgtactgatatcatgttttttttggagaaaataacgtatccacatatctccatctttctgattacagtacttatatctgtatccgtgctacataggtgaatactagtttcatttcaactctgaagtttactgttttgtttttgttttttgcaacaggcaagctttgtttccttccattcacttcgntgtagtgtggagatcagactaaccaagggcaacccaaatttggggattctttaagtgaagcctctgtatagagatagtttgaagatgatgaaccagcacagggaggaggatgcattgagaaggcaagcagtcaaaa

SEQ ID NO: 153643 - DNA, 492 bp, Zea mays
  Clone ID: MRT4577_71700C.1
ccggccggggagcaatgatcctcaccgccgtcgtagctgatatgcctggacgagtattccgcatctactcatcaaaaggatcatgaaggacaccgcgtgtgcgattctctggaagagagagggatccacctatctctatagataggaacaccatatacagacccataaatctatatccccgtgggcaatctccgccgatgatatctgcaccgtggctctttcgatctgcgattagacgtcttataccgggtcacatgcctgatcgaaggcaaatatccgccaatgcggaaaatactgctatcattgcgagctactgggcggcgtccgattctggaggaaaaggacaagcatcacgccaaacaaggccggcaatcaacttaatccgggaggacatatcttcctcagagaaggatctcattgtcaccctaggaagctatcacgggaaacaacaacgcaggaagcctacagcacactcatgccgagcctgggtct

SEQ ID NO: 153644 - DNA, 275 bp, Zea mays
  Clone ID: MRT4577_71701C.1
ttcattctttctatttctattttttacttttattctatcttttccttctcttcggacagttttttttctttctttatcaacaacgttaaaccccacccttcaatataatgaccccttacaaaaactaccccatttcaatgactgcaaattcttttgcttatactactaaggtaaatccacggatatacctgaattctcaaacaatcctatcactttgaacatacataccttaactaccaacctataaaatcctaccacttcgacttcaacaacaa

SEQ ID NO: 153645 - DNA, 557 bp, Zea mays
  Clone ID: MRT4577_71702C.1
atcgacgtcgccatcgccatcggcatcatttcattgcgagtgtctgattcatctagacccctcaccccgcgacgaataatgccaatcgccgcgcttgaagatttgaattcgtagaaccgcgcactgataaggggcaaatggtggtcgttcgtcgtgcaatccgagcacgatctcgattcgcttctctgagatgatctgccggcggtgggtgtcgtgctgattcctccttccgcctccactgtcggatgtcggcggttctcgacgatggccgagtggtgctcggcctccacttcatcggatgattcagagacggcgaacaagtcggaggagacgaaggagaacaagtccaacaagttgaaaatcttgtcgtactatcactacaggtcaatcaggtgaggaagccaatggtgtcggagctgttcaatgcgacgggatgcgacagcgcgatgtgctactagctcgacgcgaagatcgggcgcgacgaggttggctatacctagctctgcatagaccgcgcctcaggggaggcggtggtctgcaagtttatctagaagaag

SEQ ID NO: 153646 - DNA, 315 bp, Zea mays
  Clone ID: MRT4577_71703C.1
tacgcttccgcggacaagagcaacgacttggcgctgaaaatggataccgggccacaccgcgcgggacgtgtatctcggcgcgcgcctcgcgtggaccaacgccggcggtgacgcgcggctcgtgctccatgtgcgccgccacgaccgtacccgggtgctggggccctacctgcagcacatgcagtccgtcgccgacgagatggaggcgcgccgccgagagctgcgggtacacgccaacgccgcccgtggcgcgcctcgctgggcgtgcccgccctttacacaccccggcacgctctacacgggggggagggaccc

SEQ ID NO: 153647 - DNA, 479 bp, Zea mays
  Clone ID: MRT4577_71704C.1
tttcgcatatgttgccttcatccatcctccgagcttaccgtctcgcccccgcccccaaaccctagaccccctacaatcacgaggaaggggagaacggccgaggaggatgctccgcatggaaggggaggacggtcgaggatgacgttgttgctcgtcgctgagcatcttcgcgccctcagtgctgccaaggagccctctctatccctgatggcgtcccaaccgttggccgatcgtcggcgatgatgacccagcctccctctccacgtgcctgctgcccaactcatacaggtgttgtggcgccctcctctccactccgctatctattttgttgattgatgtctactttcttcgccgctctggttgcggcacgattggtgcaccacctcctcgtgcgaggtgagggcaagcctgcacatgctcaacttcattgacaacctcacctttatgccactctgggagcatgccgagtggcgatgtga

SEQ ID NO: 153648 - DNA, 355 bp, Zea mays
  unsure (1)..(355): unsure at all n locations
  Clone ID: MRT4577_71705C.1
acaaatggattggatcacacagaaannnctagccgatatgaattggtttagcaacccgatctgcagagcccaatcaanaaacttccaacttgggacaatngagacattttccaaggggagtgcatcaaaccacgccctaatgttgaagcaactgngacctccatatgatctctgcaaatggtggtatatccacagagcactcagattggagtgaaattaaatggggggagatagttcacataatggagatataatctccttgttaagatataagactgaacccagcacagattttgacataaaaaacatacattgtgcaaagtgggtaaatagaaagtacaatattgggactaat

SEQ ID NO: 153649 - DNA, 678 bp, Zea mays
  unsure (1)..(678): unsure at all n locations
  Clone ID: MRT4577_71706C.1
aattcggcacgaggcgcagccgccgcctaagctcgacgcgccgcggcggtggatgcgacgccacacccccggccttctcgccgccaatctcctccgcgcctcgtcgctcctcagacccccgtccgtcctcgccgcccgcgcggccttgctccaccatgcgccggacgacgcccaccggctgctcgacgaaacgccgcgcgggagggcggccgccatcgtacgtgccctcacgtccgcaccgtcttcctcctccggtgacacggcctgcatcgcgtgcctccactgcgcggccctcaagtcaggcgccgtgctggacccgccagtgcgcacgtccctgctcgcggcgtacgccagggccggccgcggcgcgggagcgggagccggagcaggcgccgccctggcgctcttccgcgaggccgttgcgcccgacgtgatcctgtggaacgcggccgtcggcgccctgacgacgagctgccggtacgacgacgccgcggctctgttccggcggatggcgcgcgagctcggngagtttgactccaccaccgtggtcgtcatgctgtcgggggcgtcccgcgcgggtaaccttcggcgtggaatggagctccatggcatggcggccaagagttgtctcggcgctcattgtctcggcgcgtggaacgctctcgttgacatgtatgc

SEQ ID NO: 153650 - DNA, 596 bp, Zea mays
  unsure (1)..(596): unsure at all n locations
  Clone ID: MRT4577_71707C.1
gnaaaggcgaagccaaagccgcgaaggccgcggcggttagaagagagcaaagcagagcgagagccgaaggcacgcgtcgtagcgagcctgagccagtcgatggggtgcatctcctcgaagctcctcccgccggggccaggcggcgacggcaggcgcgccacggtgcgcggccgtgtcgaacacgtcgtctccctcacctccaccacctacggcgtcctcgacctccaccccaagcacggaggagccgtcctccccgcatctgccgctgctgacgaagaggcggagaatgagcagcaacagcagcagccgccgccgccgcctcaggacaagccgataagcaaggagtggaagcgtgccagcatgcgtccgccaccaattgcggtcccgagcgccgcacagaagccggcggggaagccggagtccggcctggaggtcatcaacgcgnnggagatcatggcccggctcgaggagtcctacgtcgccgggtcgccggcgaagaagccgtccaagccggcccggtggtcgccggcnagggtattggcatggccttgccgtcgcacaagaaggtnggcgacaaggcggtagaacacgccggg

SEQ ID NO: 153651 - DNA, 613 bp, Zea mays
  Clone ID: MRT4577_71708C.1
gggttactgatcaaagctccttcgtaaattccactcccactacacttgccaatttcccaggaaagctgaattttcagaacggattggcaacagaggaggatgcaccggacagtgtgtacaatactgcaaggcggttgcaaaacagtactcgctccgtgtccaatatgacgtggcaatttgatgttgatgcccgttcaagctatctcattcggttccatttatgtgacattgtgagcaaggctccttatcagctcctgtttgatgtatatgtggatagctggtcggtggtgaaagatctagatctctccgataaagcatttggcaacttggcaacaccatattacattgatgctgtcttgctatcaagtgatccatctggtaagctcagtgtcagcattgggccttctgctgtaaagatagcagcgccggatggtatcctgaatggcttggagatcatgaagatgaacatcagtacagggtctgtttccattgtggcaccaccttcagtggcaagaagccatctcggtgtcatattgggttctgttctcggagttgtggctgcttgcgtcattgctattggtatcttgatcttctttcaggagaaaaaacaagc

SEQ ID NO: 153652 - DNA, 358 bp, Zea mays
  Clone ID: MRT4577_71709C.1
ccagtcactcttttcggctttcagcctaccacactcttttttatacttaataattttaggttgctttacagcttcttattatccaaccccgtctctcttttccttcgatacaattactatataccgtaattcctaaatccagccttcaagatgcagttcaccatctccgccgctgccctcatggccttcgccgccaaggccctcgcccaggtcgccgacttcgaccccgttctcactcccaccaactgggaggaggtctccgctggcaccaccctcgacatcacctggcaggccaagcccaagtactccggcgagaagatctccatctctctgatcggtggtgctacccagaacaccc

SEQ ID NO: 153653 - DNA, 143 bp, Zea mays
  Clone ID: MRT4577_7170C.1
ccttctatcctgcgtcccctccccgccttttccatggccaccgcgacgatgtgggtcaggctgcttcccaaaaaacgctgagggggtgcattgtcgctttcatgaggcacattcctctagtacgcactctggagaaggacata

SEQ ID NO: 153654 - DNA, 485 bp, Zea mays
  Clone ID: MRT4577_71710C.1
ggccgcttttttttttttttttttgggcagacaaaatcaaatgattacttttatgtattgtctcatggcattggtgtcttaactttgttacttctcacatttatactgtaattatcagtgctatattcccgctacttcaccttttgcatggccctgtttaagatttgttgaatgcaatttttgtggagctgttggagcaggagatatccagagccaccttgttggaacagtcccaaatcttcgagtgcttgttgtgatgtctatggacattggacagtgataaatgatgacataactgacatacatccgcttatctgcaagctgaagcagaaggggtccatggagcgagctggggtcgcacaccaagcgcagcaagctgtggctgctgctgctgctgtaagtgcagaatggaaggtgacgaaggatgcatggattcagaggcttgccagcaagctgggggttgtttgagacggagacccggccgg

SEQ ID NO: 153655 - DNA, 1198 bp, Zea mays
  Clone ID: MRT4577_71711C.1
ctcgaggccggccgggctctcccctctcttcacgcgaaccagcacacagcacagcacgactcgggtgcgccgcgcacacggacggcagtgcacgcctcgccggctcaccaatcgacaccctgtccaaccagcaccacccggcgtcgtcctccctggcggggggctaggctagctagagctgtacagcgcgagagcgacgaacggcaggtcgatcggcggtcgcacgtacgtcgtcgaccgagagcagagcagacgaccgcggcgccagagatagttcgaatccgattccgacccatccatgggggttcacctgctgaagaagcagcactcgtcggcgccgtcgtcgctgggccgcggctccgggtccgggtccgggtccgcatccgggtcgtcggcgtcggcgtcgtcgatgccacccaaggggtgcatggcggtgcgcgtggtggggccttcctccgccgccgccggcggggggcgaaaggaacagcaggaggaggaggaggaggagcggttcgtggtgcccgtggggtacctgaagcacccgctgttcgtggcgctgctccaggcggcggaggaggagtacgggttcgagcagaagggcgccatcaccattccctgcggcgtggaccacttccgccgcgtgcagggcatcatccaccaccacggctccggcggcgggcaccaccatggtcaccacagcagcagcagcaaccacttccacatcgccggctgcttccgcgcctgatcggtcggtcttccatctacaccacgtggatgatggatggaaatagagaccgatccatgccccgctgggctcctctctagcgccgacgggacgacggatcgatcgaggaacaacaacaatatttactagctctaccgcttaattttctagggttttcttcttcttggttaggatttagacgcatggcctctctctggactggaccgaccgaggatcgaaggaccatggttggctcctgcctgcggccgacgcagtctaccagaggacggactggtcgctctcgcttggtcatgcggtgcgcgcggatcaatcgatcggtggatgatgatatgttttgccatgtgttttttttggagtttttaatatcttaggagtaatttggattgttgttgttgttgttattgttgttgaggatgatgaaaacaaattaaagcggaggaggaaagggaaacc

SEQ ID NO: 153656 - DNA, 260 bp, Zea mays
  Clone ID: MRT4577_71712C.1
ctgccgctctggtcttgcatctacttggtgttctataacagagctcgcatcgtgaccaatatgtatgtgatacatggcacgtcagacattacgatcataattgctgaataatctgtgcttgaagctcaagttgactaatttaaccaggacaaggatgttgctgaactgcatgtataaacacctaacgatagattctgacctatacctgcacacttgtctatagacctactggaatgactcaaagggtatgccattgtaaa

SEQ ID NO: 153657 - DNA, 881 bp, Zea mays
  unsure (1)..(881): unsure at all n locations
  Clone ID: MRT4577_71713C.1
nnncgaggccggccggggaaaaaaaaaaaaaaaaacttttcctcgcttacctcctcccacccaccttgcgagcctcaaatctgttgccggatttcgtcaagctttcccactctcgcaagataccgacaagaaattttcgagaaaatcagacaagatggttctcgccgttgatcttctgaacccttccccggccgccgaggccaagaagcacaagctcaagacccttgtgcccgcccctcgatccttcttcatggacgtcaagtgccccggttgcttcaccatcaccaccgtcttctctcacgcccagaccgttgtcatctgccagggatgcaccactgtcctctgccagcctaccggtggtaaggctcgtctgactgagggctgctctttccgaaggaagtaaacgcctcgcggcggtttatttccttgggcactcatgactcttacggttcatctcatggtggccatctcggatctgcaaaacacaacatcgacatggacggatagaacagccgacgttgcgaacattcaccaaaaaatctttgcagatagaagatggaacacccagaataggggcgtttggggtctccggatatcttgcatggcacatcatttctcttttgtttttccgttacgcgccttgtaccaaagagtcgtctggaggcaggaagggaaaaaaagcactgcatgggtggaaagctgagaaagccttcacacgagtgtccacgctggctctaataggttggctggacatgaggacgtggaaccgtttcttgatgatcgcttcatacccgagtgcagtgggtagcggaggatggtcactgtgcttttgcgaaattcacaatggtttccgcaaaaaaaaaaaaaaaaaacccgcggcc

SEQ ID NO: 153658 - DNA, 265 bp, Zea mays
  Clone ID: MRT4577_71714C.1
tctggaccaaccaagaaagctgttttatccgtcttgacagaggcatgccgtacaaaagtaccccagaatacagaaaaaccaagaaaagagagaaatattatctccatctcagaggctgtcctgaaaaagtgccgtattgccctgcggcgtgctatttcctctgatgaatcaaagcagtttgctaatttgcttggaacaactctaacaaattccaatgagaatgaagatgagggcatccttggatttcctggtatggtatcccgcc

SEQ ID NO: 153659 - DNA, 374 bp, Zea mays
  Clone ID: MRT4577_71715C.1
aagaaaccttgtgcttttgggagacgcgaggttgtccgtcaacaagattaaagaggcgttgctgacttaggccttagggggcctgttggtttagcccctggaggtaatcctctcggcccacaaaaaagactttcattttttcggtaggatcagacggttccagcaacggcacatgcccccagtggaaaggcctcttacaaaacacggacctaaggcttgctgtgccttaatcccagactcatggaccagcgccgtttcctggggctgcttgtccgattgaactgaaaagcgtgcttctcagccggccgcggtggtcaaaaccaaaaactatttaaggcgtcgatccgaggtcaggcttctactgttgtggccct

SEQ ID NO: 153660 - DNA, 224 bp, Zea mays
  Clone ID: MRT4577_71716C.1
aaggaggacgcggtcaccgggaacaccaccggccccgccgccgcccggcagcagcaagctatcacaggaggaagctcaacgtattcgccagccaccgatcatcctccgttggggtctagcaagggatggacctccggtctccgacaaggacgtaacgaccaataaggaggaggagacccaggccgacgccgcagaggagaacgacggccgaggaggcggctgga

SEQ ID NO: 153661 - DNA, 459 bp, Zea mays
  Clone ID: MRT4577_71717C.1
tagcttcagcaatctcattattgcttggatgtttaggcgcttttacaatttctcgcttgcagtcatgttcgaatacttggatgacaatgtttaggcgccttatctttacgtttcaccagaagctggtaaaaaggatgttggattgacatctggacatagttttgatgaggatgccactgttctttcaatgttaatgtaatgaaaatccaccgatgacatagatgtgtattatcttttggagctgtactaaagtctatcggaatacgttgttttgttaaaactaaatctggacatagtcatatgagctgctgccctgtttggtgttgccaacactacatgtagtgttgaatttgtttagtactcgacacaagtataccatttttatttgttaaagcctattggtacacaatcattgtggctttctttgtctaattttgctaacgtattaaaatatttatc

SEQ ID NO: 153662 - DNA, 612 bp, Zea mays
  Clone ID: MRT4577_71718C.1
gaggttcggcacgggaacactcgatcgagcttggttgctcggctgtagctatcactggccgccaagggaggagatgagctgaagctgctgggcgtgtgggacagaccgtacgtaacagggtccagatcgcgcctcaaccttaagggcctcagccactagtacgtggaggacgacctacctgacgacgagcgctacactcactcactcgcaacccgcggtactagagagcgcccgggctaatccactgccgcttataccgtccccgagtcgcagaccatggctcaccatctctattagtctacatccacatgctcaccgccgtgggcgcttccaagcgcaccttacagaggcgccaccgcccgattctgggcactcctctgttccttacaaggtctgatcttcatgctacactactgtgccggcgcggtatcacgggaagacagcacacccggggtgacctttcgtctggtccctgcaaacactgtaggcctcaccaaaggactgctccacatgaagggactacttctgcgcgccatccatcgggttcgcggacgtggtgctcggcagctacctgtgctcgttcacggcggttggagaagacggccggcgtca

SEQ ID NO: 153663 - DNA, 1047 bp, Zea mays
  Clone ID: MRT4577_71719C.1
cacgctgccctcagacctaagactcggctctaggtcaccgcttaaaagcaaatcaaaaggtaaaggggttgcataccaacgtgcacagacaacactcaccgatagcaagtagcgccgccgacgtctcgagagcagagtacaacgacagccccagacaacactcaccgatagcaagtagcgccgccgacgtttcgagagcagagtatccaagctagccaagcgcgcacctcggtgacctagctagttcaggcgacgatatggcgtcaggtcaggaaagcaggaaggagctggaccgcaaggcccgcgagggcgagaccgtcgtccccggcgggaccggcggcaagagcgtcgaggcccaggagcacctcgccgaagggcgcagccgcggaggccagactcgcagggagcagctggggcagcaggggtacagcgagatggggaagaagggcggtctgagcaccacggacgagtccggcggcgagcgcgccgccagggagggcgtcagcatcgacgagtccaagttcaccaagtagtcctatcgcgtgcgtgcgtacgcagcgttcgtagctgtctgcgtagtgtaccttggccgtagctagtgctactctctactttggagtagctgaatgataataatgtagctagcagcatgcatgtaggcgatcatacatacgtacgtacacaggtacgtgtgtgtgatcatgtatgcttccagaagggtatcctagcttaatcagtcacgtcgtcaagtcgtcaatatggcaggttcgcgtcagggctttgtagtttgatagcctgtttcacgactcctcaataatcaagtagtgtaatgaaagtttggcggttccttgttattatctgcttgttgtatctcctgctctgcactggttaatttctcccatattgtggtagtaaataaaaaaaaaaaaaaaaaaacttttaggactagtttagttctggaggaaataaattaaaaaaaaaatcttatattctggagggagtgtaaacacccttaaaactttacacacacttgaataaaaataagct

SEQ ID NO: 153664 - DNA, 256 bp, Zea mays
  Clone ID: MRT4577_7171C.1
cggaagggaaacaaactaatttttttgctggcaaaaaaataaaaaaactggtcctgtcagccactttcaaaaaaggaaaagcaatacgtatttataggaacttatttaaacaaaagaatgcccaccagggataaacggagtttccccttgggtgtacgaggctgaaaaaaaccccacctgcttatataacttactaacaaacaatttggggcaggggaacattcggggaatttttttgttttaaaaactttccact

SEQ ID NO: 153665 - DNA, 372 bp, Zea mays
  Clone ID: MRT4577_71720C.1
cggaattcgggtggagaccatcatgaagattattctgcggggaggatcctgggtcccgtgcgggatctttatggtaactactggaccaagctcctgcagaaggattctaaaggactgaacgacaggggtggtggtgatatcttcatgcgcggccaactgtaggatcaaggtggacaagcatttcgccctcaagaaggagattgcagctacactcttgtataccatggactacatcagcctccttgggaggttcctcttccattccaacgaccaggtatgaaaagctccccagatcagctagctggatcggacggacattcctgcatccggtcagaggcagctgacaacgtgcatggaacgattcatagcttt

SEQ ID NO: 153666 - DNA, 236 bp, Zea mays
  unsure (1)..(236): unsure at all n locations
  Clone ID: MRT4577_71721C.1
acaagctttttttttttttgtgtttttttttttttcctaaaaagtactttcttatttttgggaagcccaaactcatccaaaaaattcatttttgaaacttataacttcattaagacaatgctcaaaataggggcactcgaccaatgaatgggattagttggataaaacaatgctgggttttgaaaagcaaggtggttgaatggcagcaattgcagcagttggnagggggtgccagc

SEQ ID NO: 153667 - DNA, 883 bp, Zea mays
  Clone ID: MRT4577_71722C.1
caacactcaccgatagcaagtagcgccgccgacgtttcgagagcagagtatccaagctagccaagcgcgcacctcggtgacctagctagttcaggcgacgatatggcgtcaggtcaggaaagcaggaaggagctggaccgcaaggcccgcgagggcgagaccgtcgtccccggcgggaccggcggcaagagcgtcgaggcccaggagcacctcgccgaaggtatatatagccgactgcggctaaccatctgcatatgttaattcactgtcgttggctttaattacacgagtagtgtggctacctgatatgttctgaaatgttgcttgcacgtactgagtgattgcctctacgtttgcagggcgcagccgcggaggccagactcgcagggagcagctggggcagcaggggtacagcgagatggggaagaagggcggtctgagcaccacggacgagtccggcggcgagcgcgccgccagggagggcgtcagcatcgacgagtccaagttcaccaagtagtcctatcgcgtgcgtgcgtacgcagcgttcgtagctgtctgcgtagtgtaccttggccgtagctagtgctactctctactttggagtagctgaatgataataatgtagctagcagcatgcatgtaggcgatcatacatacgtacgtacacaggtacgtgtgtgtgatcatgtatgcttccagaagggtatcctagcttaatcagtcacgtcgtcaagtcgtcaatatggcaggttcgcgtcagggctttgtagtttgatagcctgtttcacgactcctcaataatcaagtagtgtaatgaaagtttggcggttcaaaaaaaaaaaaaaaaaaaaaaaaaaaaaaaaaaaaaaaaaaaaaaaaaacc

SEQ ID NO: 153668 - DNA, 2566 bp, Zea mays
  Clone ID: MRT4577_71723C.1
gataaccatcttttagaagtttgtttctggcttattccttaatgttctgagcactaacttctgattaggattcacctttttttcttaagcaaataaccgtgtatcatatgagggcgcatgatgttctcctgtatttatttgtgtagctcaggcatcctgtaaatagcatcatggaaatgttgaatcttaaagaaaacaattctgctttctactgtccaatccattattccttcccccttcgcttcgcttattcccccactcacttcccttccacaccgccgcctccggagaagggtccacggcggcgtccttcctcgggaggcgctcggctcggattcgctcctgctcggcggcggcgtcgccggctggtgggctcgcgcgcgcacctggtgctgggctccgcgggcgctcctcgtgcgtgacacgcgcccgatgcgtcaggatcgcgcggccggcgcccggggcctgccgtgattctgcggggaggctggatctcggtgcttccgcgtgcgggaaccagtgagttttctttttgtcttctcttccccggcggctagcggcgggccgcttggtgcacgtcagcgcgggaggccggaggttagccgatctggtgctctcgccgcccggagaggtggtgctgggcccactgccgggttctgcttagtaggaggcggaggaggtaagtccctcgtctcatggggctcgcgccgccggagctgggccagttcgacgggtgggagagctccggggaggaggagcgggagcgggagcgttggggctggtgccgccgcagccgccgcggcagcagcaggcgccgcgcggcccccaagggcaccgacgacgacaccgcggtcgacaccggctgctgcatccgcctctggcccgtcgggacatgccctccgccgccgcagaggtccaaggtcgacacctccaccagcagcgccagcacgcacggggagaagtcaacagaaaatggtagtaggaatcaaccggtggcattggtagtctcaggttctacaactactagtaatgctgaaagcagttcatctgcatctaaagtcggagaagagataaaagttgcctcccagccgggccccgcgagtaaccgttcagctgctctacgcggaacttcaggcctgaaagtctccttggagaagggggttttggatgtgtttttaaagggtggattgaagaaaatggaactgcacctgtgaaacctggtacaggtctcacagttgctgtcaagacgctgaaccatgacgggcttcaagggcataaagaatgggtggctgaagttgattttcttggaaatcttcaccatcccaatttggtcagattgattggatattgtgttgaagatgaccaaaggttgctggtctatgaattcatgcctcgtggcagtttggataaccatctttttagaaggtctcttcctctcccatgggcaatcagaatgaaggttgcactcggagcagcaaagggtctggctttccttcatgaagaagcagaaagaccagtcatttatcgcgattttaaaacatctaatatactgctggatgcggagtataacgcaaagctctctgattttgggcttgcgaaagacggacctgtaggtgataaaactcatgtttctactcgagtaatgggaacctatggatatgcagcaccagaatatgtcatgactggtcatctgacatcaaagagtgatgtctacagcttcggggtggtgcttcttgagatgatgtcagggcgcaggtcgatggacaagaaccgcccgaacggggagcacaacctggtggaatgggcgcgccccctcctaggcgagaggcagcggttctacaagctaatcgaccctcgcctggagggcaacttctcggtgaagggcgcgcagaaggcggcgcagctagcgcgcgtgtgcctgagccgggaccccaaggcgcggcccctgatgagccaggtggtggaggtcctgaagccgctgcagaacctcaaggacatggcgagcgcctcctacttcttccagacgatgcaggccgagcggatggcgcactcgagcagcatgaacgggaggagcagcatgaacggcggcttcaagacgcagagcccgtttgggcggcatgggcagccgccgcccgtgaggagcctctctgacgggccccgcgcgtctccgttccgctactcgccgaagcctaacgtgaagtgagcggagtggtggaggcgcggttttctgccggctggaaggcacggcccctggatgaaacctggtttgttgggggtgactggttcgggccgtgcatttgcattgcattgcattgatgtgtgtgctgtagattgacatgtgcacaaagtaaaaggatataggcgaaaaagggtggtgtaggtatcggagtttgcttggcggatgtttgctctgaggttttaactgaatgaatgcggatgcaccgttgctataaaatttttttgcccaaacaagtatgttaggcttaggtgattttccttggccttgcagtgtacgggcgtctcatgaatcttgatggtatgtaaaaaaaaaaaaaaaaaagcggcc

SEQ ID NO: 153669 - DNA, 2041 bp, Zea mays
  unsure (1)..(2041): unsure at all n locations
  Clone ID: MRT4577_71724C.1
ctcccatgggcaatcagaatgaaggttgcactcggagcagcaaagggtctggctttccttcatgaagaagcagaaagaccagtcatttatcgcgattttaaaacatctaatatactgctggatgcggtaagttaatgaataggattatgcagtgtgtgcttcatgatctatatactgctacatcatatgttatattgcttgtacaggagtataacgcaaagctctctgattttgggcttgcgaaagacggacctgtaggtgataaaactcatgtttctactcgagtaatgggaacctatggatatgcagcaccagaatatgtcatgactggtaagtatcttgtcatatttgccatgactgtgtccatcgaactctggtggtgagcaagtctggccactgccagtgctaccagtgagcaacgaaccattcactagattcagctttatctgcttgttgcgtatccaaatcgatgtttaagtatgctgggatataatcagttctccattatttgatgcttcattgaagacatttaaggttggaagctatgcttgttgggagacgttgtaatgctttacgttacatgccatacttgtttggataatatgataagtttccattagtggtatgtttgtaccgaggtaatgatgtttaccatatctgtctaaggcgggcagaggggtttgttcagaaccatacaatcctaatatacacaggaatacgcggaacacgtagttaccacacttgcaactttacatgtgtctttgtgctacaagacctttatgtagtggaagcttaaaacacactggcaggggcaaattgaaaaggtttatcagctaaattaactgtggaaatgggcatgggtagttcatgtagaatgtaggtattctcagtgagttgaccccagcaatcacatatcccaagataaaatcatttatgtttacatagaatttgtttggggtgaagtgcttagtgcttacctaggtttggattggcttcaaatccataatattgaaagaataatttgactaccttgctctcttaagattcaaacacccttttactctactgtttacacatctggtctttgcttgacatgcacttttgtctttctgttccacttttcaggtcatctgacatcaaagagtgatgtctacagcttcggggtggtgcttcttgagatgatgtcagggcgcaggtcgatggacaagaaccgcccgaacggggagcacaacctggtggaatgggcgcgccccctcctaggcgagaggcagcggttctacaagctaatcgaccctcgcctggagggcaacttctcggtgaagggcgcgcagaaggcggcgcagctagcgcgcgtgtgcctgagccgggaccccaaggcgcggcccctgatgagccaggtggtggaggtcctgaagccgctgcagaacctcaaggacatggcgagcgcctcctacttcttccagacgatgcaggccgagcggatggcgcactcgagcagcatgaacgggaggagcagcatgaacggcggcttcaagacgcagagcccgtttgggcggcatgggcagccgcctcccgtgaggagcctctctgacgggccccgcgcgtctccgttccgctactcgccgaagcctaacgtgaagtgagcggagtggtggaggcgcggttttctgccggctggaaggcacggcccctggatgaaacctggtttgttgggggtgactggttcgggccgtgcatttgcattgcattgcattgatgtgtgtgctgtagattgacatgtgcacaaagtaaaaggatataggcgaaaaagggtggtgtaggtatcggagtttgcttggcggatgtttgctctgaggttttaactgaatgaatgcggatgcaccgttgctattctaccttctttcttaccctctctttcggagtacaactgtaacataagatcatgtgcgtacatactcaatccacacccccgcccccaacacgcacacactatgcagncagcgcactcaaaaacggaactagaagtctagagacgacctgc

SEQ ID NO: 153670 - DNA, 449 bp, Zea mays
  Clone ID: MRT4577_71726C.1
ataaaacaggtagcaaggaggataatcaaattccaaggaatggtaatgcatcaagtgtttcatcactcaactcctatcacctaatgcagcatataagtgataaaaattttaaaacagcaaggaggtggcaaatgcaccggggcttgtctgggataacactaagtcattgttattagatgatgaccacttggcaaccagccttgtgtgttggcacgggttcagtctgtccatccttaagttcgttcatcagcatcaccttgcaaatagacccacgcttaacaccatcttgtggtcgactcagttccgatcctccacatcacgtgatcacttaacgtacctaaatgatatacataatgcacatacgcatgggcataaaaagcacaatatagataagctatactaaagaggataacacttaaaacaaacattacaacccttgggggtaacta

SEQ ID NO: 153671 - DNA, 348 bp, Zea mays
  Clone ID: MRT4577_71727C.1
aggctgggttcctttgagggggcggccctttttttttttttttttttttttttttcccaagggagggttccaatcacataaaggcgggattaacccaattctgggagaagttaaaatgaaaagaagggatttaggggatgaaagagagattttttcggggggcgcccttgcaatcacacctaatttaaggtgaaccgggcccttcttgttccagcccaaaccaatcctgttccaaattaatttaaagaaaccctttcccagaggatttgaattaccgaaacccacaaaacctgggggtggtttttttccttggccaggggaaaccccggtacttccccggacccggga

SEQ ID NO: 153672 - DNA, 277 bp, Zea mays
  unsure (1)..(277): unsure at all n locations
  Clone ID: MRT4577_71728C.1
acgaaaaccgccggggggagcaaaaggagcccgcggaggagaaccngccgcaccaaggaaccagcgagaaggagcncgagnancagcaaccaaacaaagacccgagagcaccgaaacagagancggaagccgcaaaaggaccaccagaaaacaagaaacgggaggaagcaccaaagccaaagcgacagaanggaaaccacgacgaccaagagaaggccagcgcgaacacgagaccgaaccagaacaccaacaacaaggggaagccngaagagagcaa

SEQ ID NO: 153673 - DNA, 1834 bp, Zea mays
  Clone ID: MRT4577_71729C.1
gctcccctcgaggccggccgggatcttccgcggtctcataaaaataacctctgattgcgtagaaaaagcctcgcgaatggacgccagaagcagcagcagtatgcacgttgtgatgctgccatggctggctttcggccacatcctcccgttcaccgagttcgccaagcgcatagctcggcagggccaccgagtcaccctcttctccacgccaagaaacacgcggcggttaatccgcatccctccagaactcgcggggaatatccgagtcgtggacatcaccctgccgcgcgtggagcgcctgccggaggacagcgaggcgagcatagacctcccgtccgacgacctccgcccgtacctccgcgtagcctacgacgccgccttcgccgacaaactctcggccatcctgcaggagccggggccggagaggccggactgggtggtcatcgactatgccgcgtactgggcgcccgcggcggcggcgaggcacggcgtgccatgcgcgttcctgagcctgttcggcgccgcggcgctcagtttctatggccccccggaggggctcatgggacgcggcaagtacgccaggacgaagccggaggacctcaccgttgtacccgactacgtgccgttcccgaccaccgtcgcgtaccgcggcttggaggcgcgcgagtttttcacgccggtcttggccccggacgaatctggcgtgtcggaaggctaccggttcggcaagtgcatcgaagagagccagctcgtgggcatcaggagcagcgcggagttcgaaccggagtggcttcaggtggtcggtgggctataccagaagccggtcatcccggtcggtctattccctccaccacccacacaagacatcggcggccacaaggcagcgctgcaatggctggacgggcaggcgccgcgctccgttgtgtacgcggccttcggcagcgaggcgaagctgactagcgcacagctgcaggcaattgcgcttggtctcgaggcttccggcctgccgttcctgtgggcattcaggcaaccagtcgatgccaacgaaggcgaaagcggattgccggaaggtttcgaggagcgcatcgacggccgcggactcgtctgccgcggctgggtgcctcagaccaggctggtgctgctaccgctggtgttcgatcagggcctcaacgcgaggcatctgactgagaagaagataagtgtcgaggtgccgcgggacgatgaagatggctcgttcgcgcccaaagacattgcagctgctttgaggaaggtcctggtggaggaaggatgcgaggtgttcggtgataaggccaaagagctcgccatgttgtttggaaatgacgatatgaatgatcagtgcgtgcgagattttctcaagtgcatgttagaatacagcaggcagcgacaggttgcattatagggctggtaacgtcaaattttagatagggccataggggctttttcaaaggtttactacgacagacaacatcaccgagataataaaaaatatataaaaaatactcgtgtgttgcaacaggaacatataaataatataaataatattatgatagtttatatgtgaatgtgttatattgttatgagaaaaaatttgtaatccatttgttattctaagatatacataaattttattattttaatatagcatagagcaaagaaatggtagtaagtcacgtcacgctatcaaaaaaaatccttccaggcaaatactactccgtagccaataaaatatggaatggaagcatgcatctataagattaaagccaataaatttttcctctctattctttacaaaacaaaggaagtttccttcctt

SEQ ID NO: 153674 - DNA, 276 bp, Zea mays
  Clone ID: MRT4577_7172C.1
tggctcttcccctggcggtagtactcctggtggctcctctcctggtggttctacccctggtggctcttcccctggcagtggttcccctagcggtagttccccaggtggtggttcatctaacggtggtgctcccggcggcggtgtctcgggtagttcgccctccggcgataacacctctcctggcggtctcgtccccaatgttggcggtacttcgacgactttgggtacaacaggctcgggcactgagactggaagttcagttcccatttacactgg

SEQ ID NO: 153675 - DNA, 1619 bp, Zea mays
  Clone ID: MRT4577_71730C.1
atggacgccagaagcagcagcagtatgcacgttgtgatgctgccatggctggctttcggccacatcctcccgttcaccgagttcgccaagcgcatagctcggcagggccaccgagtcaccctcttctccacgccaagaaacacgcggcggttaatccgcatccctccagaactcgcggggaatatccgagtcgtggacatcaccctgccgcgcgtggagcgcctgccggaggacagcgaggcgagcatagacctcccgtccgacgacctccgcccgtacctccgcgtagcctacgacgctgccttcgccaacaaactctcggccatcctgcaggagccggggccggagaggccggactgggtggtcatcgactatgccgcgtactgggcgcccgcggcggcggcgaggcacggcgtgccatgcgcgttcctgagcctgttcggcgccgcggcgctcagtttctatggccccccggaggggctcatgggacgcggcaagtacgccaggacaaagccggaggacctcaccgttgtacccgactacgtgccgttcccgaccaccgtcgcgtaccgcggcttggaggcgcgcgagtttttcacgccggtgttggccccggacgaatctggcgtatcggaaggctaccggttcggcaagtgcatcgaacagagccagctcgtgggcatcaggagcagcgcggagttcgaaccggagtggcttcaggtggtcagtgggctataccagaagccggtcatcccggtcggtctattccctccaccaccacccacacaagacatcggcagccacaaggcagcgctggaatggctggacgggcaggcgcctcgctccgttgtgtacgcggccttcggcagcgaggcgaagctgactagcgcacagctgcaggcaattgcgctcggtctcgaggcttccggcctgccgttcctgtgggcattcaggcaaccaaccgatgccaacgaaggcaaaagcggattgccggaaggtttcgaggagcgcatcaacggccgcggactcgtctgccgcggctgggtgcctcaggccaggtttttggcccacgaatctgtcggagggttcttgacccacgccggttggaactccatcatcgaaggcctcgcccgcggcgtcaggctggtgctgctaccgctgatgttcgatcagggcctcaacgcgaggcatctgactgagaagaagataagcgtcgaggtgccgcgggacgaggaagatggctcgttcgcgcccaaagacattgcagctgctttgaggagggtcctagtggatgaagaatgcgaggtgttcggggataaggccaaagagctcgccaagttgtttggaaatgacgagatgaatgatcagtgcgtgcgagattttctcaagtgcatgtcggaatacagcaggcagcgacaggttgcattatagggaacgtcaaattttggatagggccataggggcctttttcaaaggtttactacgactgagaacatccctcagataataaaaatatataaataaaaatactcttacgttgtaacggaacatataaataatattatgataatttatgtgcaaatgtgttatactgttatgaaaaaaaaaatcataatcca

SEQ ID NO: 153676 - DNA, 719 bp, Zea mays
  Clone ID: MRT4577_71731C.1
ggtacccctcgggtccggccgggtgcccgtctccgctctctccctgcagcaccttgcgcgcgccctcctcaagctcgcttctctctgctcacctctaccctgctggccttcgttgacacagcgccgcgcgcgcagggcactcgtgttccggatcacgacgtgagcctctctctctcatcacgacagtctctctctcgctgaagttgctccctgtgcagcgctcgcattccctccgagtctgctgctccctgttccttccactcgcccggcccgcgccttccctgtcctctgtatgcgcgcagctcgccccctcagctcgtcgcgcgcctgggatgcttgccggcgctcagctctgtcctttctccctctgttcgcccacgcgcaggcatgcttcgccgagctcgcccctgcacgtcctgctctccccagctccgctctggtcgtgcgcgctcctctgctcgccgaggccccttctctgtgcactctccggccagccgaggtctcgccagccacagttccgctcaaagttctctgctcagttcccttgcgtgcgccctggtggctgcgcgtgctattccctgccgagctcggtactgtctatctcgccacgctcggtctctagctccttgggtgcacatctgtttatggccgtggtgatattatggggtggcgacgtcgagcgcggtatggaagttgttttggccgtgaaatagtcccgg

SEQ ID NO: 153677 - DNA, 882 bp, Zea mays
  unsure (1)..(882): unsure at all n locations
  Clone ID: MRT4577_71732C.1
attgggtccctcgaggccggccggggtccttctccgcgagccagtccacgcaccacttccccccttcgatctagccatcccaactccgccgactcgctggaaccctagccagccgccgccatgccgccgcgccgcggtagaaggaaggggaagggcagggcaaagccaagagcgaaggccaccgagcccgagcctgagctagaggaagccgccgattccgagatcgaggcgggggacgcgaaggcggaggagtccggcgaagcgaaagaagatgaatcggcaagcgacgccgagtccatggatgcagatgccaacgaggaagccgtcgagaacggagcggatgagatggatgcggagcctgaagccaaagccgagccggaagcggtagccaccgaggcggaagcgaaacctgacgtctcggatgccgaggatgaagaagccggtgaaacgtgctccgaccgcgaagcagatgccaaggatgttgattcgaaggccaaagcggaggagtccgacggcgaggatgaggagggagccaccgccgataccgacggcgaggatgaggagggagccaccgccgagaccgacggcgagagtgaagaggaagccgctgagacgggcggcgagaacgaagaagatggtggggactccgacaccgaaggtgatgctgaggaatcccctccaccccctccttcccgcagccgccgccgtaagcgagcggccactcccgatgatgaagcagaggagacccttacaccgtcgcgtcgccggcgccgtcggagtcggaggcagcgtggtgactctccgccgncacttccggnacancctccgctgccgtcgtagnngacgggaaagagtgggcgctgctcgggccgtgcactccca

SEQ ID NO: 153678 - DNA, 246 bp, Zea mays
  Clone ID: MRT4577_71733C.1
tcgaaaggagtcagcacgccgtccgttgggaagggagcttcaaggcggcccgccaccgttcgttggtcgggcaggctgaagaaatggtacacgcgcttggggcgataacgccctaacttgggtccgagcgggcggccagcacaggcgccagctgctagcttggattctcacttagaggcggtcagtcataatccgggacacggtgctttacgccacttgctttttaaacaagcgcgatgaccaatt

SEQ ID NO: 153679 - DNA, 557 bp, Zea mays
  unsure (1)..(557): unsure at all n locations
  Clone ID: MRT4577_71734C.1
ccccgcgnccgccccgcgnccgcccaccgggccgcccacgcgnccgccaacaagcaacatagaaaggggaanccaggagcaacaagagagcaacaagggcggaccaagaaggggcccgccnaaggcccccagcncnnncnacaagngnngcnaacgcgacaannngcccgcaaggcgcacaagcnccnanagcnacccnncnacccccaaaccnnccaacaacnagagcggcaggaggggaaaacccagcncnncaaccaaagaggcnncaacaagcaancgcagcaagcaacaaaccnnnancgcccnggggggggcaacaaacgccagcccaaacnngggggcagncangggnacaaaccancagggcacaacagcngcagcaacccgggccaccnccgancaaccaaggagcacgggcaaaccnaacccccaacccacagcaacaacaagngcnnccanncaaccaacgggcnacacngaacccngcngcnnannngcagcaacaaccangaccaaagagccagcnagcnacggccaacncncagcaacaacaa

SEQ ID NO: 153680 - DNA, 801 bp, Zea mays
  unsure (1)..(801): unsure at all n locations
  Clone ID: MRT4577_71735C.1
ggggctcgggggcgngaccaagctgatgggacttgggcacatctcttatcagccaattaaatggcgcttgcaatctgtttggtgacatgctacaaaggatatagttgcgtggaacaccatgatttttggctatgtccaacacggggtgggatgaaagctatcaagttatttaaaaatgaaggacgaagaagtggtgccagactggattactcaccgtgcttaaaatagaattcacatgagctgcagtaaggagagagaggtgcgattccattttttggcgcactggagtggagagagggagctggaaggtggaataaaaaaaatcaacagcctgtggagcgaggattgagatctggatcgcatagggaaatgctccgaggagctgtggttggcagcgacggggctgatctacgccgccgccaggtgcggggaccttccggagctgcaggtcggagtattcttgccgccaagtttggcacgaagttcgtctccgcggcgtccatcctccgcagcggatgcgggatcaacgccaaggtgaggaccgccggcgacccgcctactccggctggctggctgacttctcaatctttcgggcgcttcatctagggctagctgcagcggtgaaaaggtccagaagccatggcgcaaacaacataaaaaatggaagtggagaaaaagaatccagagctcaacaaagagaaattgcatgccttcttttgcggtgttcttcagattcttaagtcttttttcgttttctcttccattggtttaagatcttttggaaaaatccttccgtgcagg

SEQ ID NO: 153681 - DNA, 221 bp, Zea mays
  Clone ID: MRT4577_71736C.1
taataaccctgttgaagctcgtaccaagagtctagatgatataccgcttctgggaaatggcttgaccgatgatggaaagtctgactatcactacctagattcaaatgcattttacgaggaaaacgatttacttatagatgatcgccatgcagaattgcattacgttctagatgatactgcatctggagatcaaggatcacataatgacgagcacattgcta

SEQ ID NO: 153682 - DNA, 324 bp, Zea mays
  Clone ID: MRT4577_71737C.1
aaaacaaacaagaccccttttaattaaattaatgttcagggcccaacctgtacactggtttttgataccctgaaacccaaaaaggggttgggggggtttttttttctttttaaccaaaaaagaaaaaactggggggggggtaccagctttacactttggggggtttttaattccccggttattaaaataaaatacaccctggcttgcccatgcgattattgttttttgcaatttgcaagtccactgcaggttaaaattttgcttaatttgaaatgctgcaaaatggatgggggcaatttattaaatttgggttaaaaagaattc

SEQ ID NO: 153683 - DNA, 768 bp, Zea mays
  Clone ID: MRT4577_71738C.1
atgaaggaagatgacaaggcaaaaacaagctttatcacacccttcggcacatactgcttcgtgcgtatgcccgaaggcatggaaaatgtcggctccacattttcaaggctaaccaaaaccattctaaagagccagatgggtcgcaacattttcacatatgtcaacaacatagttgtcgcaagcagaaacaaagatgatcacctctctgaccttgcagaaacgtttgccaatatgtgcgaagccaaacttcgcctaaactcagagaaattcaaaatagattccaaaattgtcgttggccaaattgagaaagactgcaccacaggggagtcggtcctcatgttatacttattagctgtgtggagtctagaaaagcagttcaaaggattcacgctccaacacatagacaagagcaagaatgaagatgctgacatgctagcaaaggcagcagcacagggtgactcgatgtccttagatgtattcttccatatgataggcacacccatgggccactaccatcccaccgatcaggtcgaggccaaaaggttaaaatacagaagctacgagttcgcaataatacaagggcaactatacaaaataggactcagccaaccctgctcaaacacattacagaggtcgagggcatcaaactccttcgagaggtccacaagggcatctgcggttctcgcttgggccctagatccctcacctctaaggtcatgcgccaagggttctactagccagccattatgtgcgcagcaaaccgcgtag

SEQ ID NO: 153684 - DNA, 407 bp, Zea mays
  Clone ID: MRT4577_71739C.1
gccggccgggtcgggatcaggtgctcttgccaccacagcccgacgttgtgagagctagcgttggaggtggcgatggcggcattgcaagagcagcaggaggaggacggcgacgagggcgagggcgggaaagacgacgacgaggagtcagaggatgatggggtagggtgggggcagctgatctgatctcctcttgacgcttgtcccgaggcgtcctgtccgcttgtggcggtgtagcagtaagatattggcgcaataggctcaatcacctttttttcccctctctctctcttcattttctttcctgcttctacgttgctgtgcttgattttttaaccacttttgttcctataaatcgatgaaaaaaataaaaaggcaccctccaaaaaaaaaaaaaaaaaaggccccta

SEQ ID NO: 153685 - DNA, 431 bp, Zea mays
  Clone ID: MRT4577_7173C.1
gagcagggggggcccaaaaaaatagaaaaaagggcccaggctaacaggggccaacagttcacaaaaaaacggcaacgcccacaaaaaaaacttggaaagaagaaaaccagggtttggaaaagcaggcccaggaacccaaaaatttttcttgggagaaaccttgggcaccctgggcccggggggggccctttttcccacacctttgaaaaccccaacaaaaaccggctgccttatgggccgggcaggaaaccccccaagggggggaacccccgaaaaaggccccccccccagggggcggggggggaaaaatttaaccaaaccaaaataaccggttttaaagaactttgggtccttttaaaactccttgccaaaccccctgggaaacttggaaaagggcccaccaaacttgaaacccatgtggggaggggggg

SEQ ID NO: 153686 - DNA, 333 bp, Zea mays
  Clone ID: MRT4577_71740C.1
aagcatggggcggctccattaaataggagacatctttacctacacataaaaaggtgcagaatttaagctggtgttatccatacccacatttggacaacattctgaggctctatgtggctaggggctgaatgtgtctagatgtgacaaagcatcacatatcaccgcacatcaatatcaaagaacctatctgatatcggaacttaacaacatgctattatttggtgcgtgccagacatgacataacagcacatatcacacatgaaggaccactcggtactattggacaacaaggttgcaaactcaatcactcactacctaacttccgcatgacat

SEQ ID NO: 153687 - DNA, 527 bp, Zea mays
  Clone ID: MRT4577_71741C.1
aagatagccgtagaagatttcacagtcttgaagagattgtgcttgcatagtggtaggagatggagcgttcctctgtgctgattttgctgatatttgcatttgctggaggaaatctgctcgtgggcatcgcctctaacgcaagaagcaccaagaacacagatccaggacatggaagcatagatctaaacgacaggaaactgaaggaacggtatacttttaccatccgaaagacaaggggcctggaaaatgtcaggacggacgactaccaacccgttgacccgagcccaagctccaaagccacgatcaggccaggtccaattgagcatggagctccgcttcttccttatgtaccgcggtacccgccgccgccgcctgcctcctgttgaatcccctggatcccctttcaggctttcacttggatacatctggtcgtcaaaatctgctgtcatacttttattaaggtcactagtgtgaccatatatgtatcaaatataagtgtgttactgttaccaataccatattgctcg

SEQ ID NO: 153688 - DNA, 179 bp, Zea mays
  Clone ID: MRT4577_71742C.1
tatttgtattactgttcttgggtctggtgttgtctagttgcgatgtcgtaagtgatgtgcttggtaggttttgagctatccttggcactggagtggtttgttgtggaatgcctcgtgcactgttgggagattgtgttctggatattggctcgtaactgaattgcacggttcctggtcta

SEQ ID NO: 153689 - DNA, 204 bp, Zea mays
  unsure (1)..(204): unsure at all n locations
  Clone ID: MRT4577_71743C.1
gtctctgactntnaaccngtgaaattgacctgnccgtgaagaggcgggcanacgagaagancctanngagcnttaatttattaatgnaaacagtacctancanacccacaggtactagactaccaaacctgcattannanttncggttggggcgacctcngagcnganngcaacctccnaggcagtanatgctatggngtntca

SEQ ID NO: 153690 - DNA, 725 bp, Zea mays
  unsure (1)..(725): unsure at all n locations
  Clone ID: MRT4577_71744C.1
ccggccaccgcatcagcctcatcgactccccgggccacatcgacttctgttccgaggtctcctccgctgcgcgcctttcggactcggcgctcatcctcgtcgacgccgtcgagggggtgcacatccagacgcacgccgcgctgcgccaggccttcatcgagcgcctccggccctgcctcgtgctcaacaaaatcgaccgcctcatcaccgagctcagcctcacccccgccgaggcctacgtccgcctccaccgcatcgtctccgacgtcaactccatctattccgcgctccgctcccactcctacttctccctcctctccgcactggatgacaacccctccacaagctcttcgtcctcagctgaggacctaccggaggactttgaagacgacgatgacaacgaggacgccttccagcccctcaagggcaatgtcatcttcgcctgtgcacttgacggctggggctttcgcccccaacagttcgccaacctctacgccagaaagatcggngtcaacccctccgccttcctgaaaggattgtggggccccagatatctagataagaagacggngaaggttgtagggaagaaagccatcaagagctcagacccacagccaatgttcgtggagtttgtgctgagtgccctgtggaagatgtacgagctggtgctgaaggatggtggtgagagtaagggggtgaagaaatgattgtaaactttgacttga

SEQ ID NO: 153691 - DNA, 416 bp, Zea mays
  Clone ID: MRT4577_71745C.1
tattacacaggattagggtttggttttgccttatgcctatatgcaatatgtacactacgatgctttatcctttttgcctactaaagccatataagtttggagtgtcaacaaacgggccaaataataagtattaaataactctattttcctagataactagactgaaattttggtcagacaacatgcacatttgttaaacatgtattattaatcggagttaatgcagatgcttatttgtgctattggctattgactggctctttctatgcaagcaatgcagttgtagtttagatgaatatgcttcttagtttggctggtttacatgaaacaattcatattgctgcttattttaaatatatttgtgtgttgacctacttttgcttgtgatttcgggtgggtttgagtgtccatttcat

SEQ ID NO: 153692 - DNA, 152 bp, Zea mays
  Clone ID: MRT4577_71746C.1
aacttacccaccaagggagaaagaggccaaaaggaagggaagagtgtcgaattgctttcaattgtcgtttcaagaaggcccgttcttttatttcgccttttgaaaaacttaatcgaaccgtcttccgttcccggaattggttccgccttaag

SEQ ID NO: 153693 - DNA, 721 bp, Zea mays
  unsure (1)..(721): unsure at all n locations
  Clone ID: MRT4577_71747C.1
gccctcgttcgcactcgcaattggtatagttatagccatgaggtgcagcgccgccgccatctccagcgtcgcctccgcatccccaccagcgatatccatctccgttggagtcggagcctctgcttcttgctcgtccctgtccttcgccagcggacgcccacggcccgcggccgtctccatctctaccactgccaccgatgaaaatgatgatacacagaaagaaacaggcaccaccaggactatattcttattctcacgacataaaaaaaaataagcttgtgtctggagctggaggtctggatttgaataccaagaacattaactctatctatgaaaatgatgaagatgaaactgataagaatatgatgaacatgatatagatattgaaagctactagcgatacctattctgcaaatacgaagacaatgatcatggagcttgatcagcacgatatcaataaagaaaactatatctatgataaatatttcccagcaccagcaccagcaagataaaactagcaagtgctggcactgacagtgaatgtccagattgagagtgactgtatctctgatctctaatcagatcatcctaccactcatttcattatccataaacaaccatgaattagaggtacatgtacctgtaccaggtcagagaacgaaaactgacaaaaacaaacctttgtgacaaggataaatgatgtgtgtgtgtgtgntgagtg

SEQ ID NO: 153694 - DNA, 290 bp, Zea mays
  Clone ID: MRT4577_71748C.1
gagttcctgagtcaccttgccaccatactcatcaccggcacaggaatcaaccctgcgtagcggccttggatcggtcgggatctacaaccgaaatcatgccatgcacgaccattgaatcttctggagtgcacccttcatcggagcgcagacctggctgccatctaccaccaggtgatcatcattgccatccacctcaagagcatgactaaagctgccgcggaactgccaagacatgcctgccagacctgaaggacgagcgctataatgtcgggctgaatgccttgattgac

SEQ ID NO: 153695 - DNA, 373 bp, Zea mays
  Clone ID: MRT4577_71749C.1
ctgcccccttttttggggaaggggcttaaaaatccccccccccttgggttttaaaggggaaaaaaaacctacaccgtttggccggttttcaatgggaaaatttgcataaggggccaaccccgaagtttttccccaaaaacctttaaggcgggaggtgccaaaatttggcgaaaccccttgaaaggttccaaaatgttaaattatcccccttaaaaatttcgagggcggaaaactttttttatgacccccccccttaaagaaacccccaacctgttttttagagacccaccccttctgttaaaccccctcagactgaaaattgcaccacaaaccctgggattgggcccaacctggtaaaaaaaacaaagaaaag

SEQ ID NO: 153696 - DNA, 339 bp, Zea mays
  Clone ID: MRT4577_7174C.1
gggggggggagcgtaaaatgaggtgggtgggggtgaccaccatgtgactgattcataattcgcagtgcgaaaccacagggtcgctcgcggaatgttaatgaagctggagacattttgttggtggcagcttattttaccgtacgtatgggggggggggggggaggggctcgctgagagggcaccttttgggagcgatggtggaggtgctttggcgtgagcacggcttctgcgtgcgatggtggctggtcattgcgtgggcatccttggtgtctccttcgggtcctgctctcgctcttccgaggtcttcctgatggtagcgggggggtagatgggtgtggg

SEQ ID NO: 153697 - DNA, 145 bp, Zea mays
  Clone ID: MRT4577_71750C.1
agagaagcataaacaaacgtctattctgtcggaaatgatggccagcaagtaagggcttatttatgggccaaattacacgcattaagcggtttattaaccaactactccacgcgcgtaaataaaaaatatcacggactcttatttt

SEQ ID NO: 153698 - DNA, 305 bp, Zea mays
  Clone ID: MRT4577_71751C.1
gaaccacggaaaatctgccaacttttgcattaaaacataaattaaacaaaggacaaataacgggccctaaagcggaaaaaattttaaaaaaccttgaatgaaaaaacaattggggcaacttaaaaacccaacggtttaaaaccaacgggttttttcaaattttaaaaaaacttttaaaacaaccaaaaaaccaatttttatcctgtttaaaaaaaattttttgggggggagcaaaacccatttaaaaaataattgaaaaaaaagggcttaccctaaatttaaaaaaacaccatttactgaaaggg

SEQ ID NO: 153699 - DNA, 378 bp, Zea mays
  Clone ID: MRT4577_71752C.1
gccactcgtacactcacacttaaggatgatccccttccgcttccggttcgctagggggttgatctcgcgtcgtcggcgacacctcctgctatccggctactcctgaccccacaaaggcagcgctcagacgagggcctatggcgggaggagtggcgcacacatccacgcggatggccaacgggggggctccacgcggagagttaaccatgagcgaaacatgctgccaactaagaaagcaagggaagagggcatctatgccgttcataactgctggagatcctgacctgtgaaccacatggaaagcatcgaagattctcaattcctgtggctcggatgatataaacatgacacgtccatactgaggtccactcgctgatg

SEQ ID NO: 153700 - DNA, 333 bp, Zea mays
  Clone ID: MRT4577_71753C.1
aaataaacattaagccgcgtgttctttataatttttagggaaaccaaaatactggggcacacacctaccaaagagtactacatacaattatatttttgataggcttacatagcgaacgcccaaagtcacacatacacatactgatcacattgcatgctttcacatgttgtaggtttcaacacaaaaaatcacaatactgcggatcatttcacactcaactttacttatatgccacatagcttaaaattcttaatcatacaaactttacagcataattgacatgcatctttaatacaaactttttaacctagcccaaactatactcaaacatct

SEQ ID NO: 153701 - DNA, 1022 bp, Zea mays
  Clone ID: MRT4577_71754C.1
gcatcggcattcagcagccacctcttaccaccccaacgtgatggcggtgagcaacaacatcacggcatgcgtgacgctgctggcgctgatctgcgcggtgcccgtgatcgcgtcgggggtgtggttcgcgtcggcgcagggcgaggagtgcgcgcgcctggcgcggtggcccgtggccatcctgggcgggctgctcctgctggccgcgctggcgggcttcgtgggcgcgtactggaaccggcgcggcctgctggccttctacctcttcgccatggcgtcgctcgtggtgctcctcatcgcgctcctcgccttcgccttcgccgtcacccgcgggtccggcgcctaccccgtgctcggccgcgcctacgacgactaccgcctcgacggcttctccatgtggctccgcgggtacgtctccgacgaccccgggcgctgggacaaggtcagggcctgcctcgccgtctccgacacctgcaagaagctcgcgcgccaggccgccttcaccagcgcagaccagttctatcagtcgcacctctccccgctccagtccgggtgctgcaagccgccgtcggtgtgcgggttcagctacgtgagcccgacggtgtggtccgccccggcggcgcggccggcggcggacgcggactgcgggctgtggagcaacgacccggggcagctgtgctacgggtgcgagtcctgcaaggcgggcctcctggaggcgctccgggaccagtggcacaaggccaacgtcgccctcgtcgtcgccaccgtcgccctcgtcatcctctacctcgtcggctgcagcgcctacaagaacgcgcaggccgccgccatcttcggacgccgcaagtactagctagctagctgccatgttagttttttgcgtatgtggtgtgtgtttccagacttggttcatcatggtagtgtgatagatgtgtgtaagatcagttactttaattactaattgtggtgttttcctctttcctgttcgccgacgagtaatgtatctggtttgaagattattt

SEQ ID NO: 153702 - DNA, 122 bp, Zea mays
  unsure (1)..(122): unsure at all n locations
  Clone ID: MRT4577_71755C.1
tcctcggcggcgtctcctggcctctcccgccaaggaacctccccagcncggggcgccctccatggtcgcgggcctcgagatcttacgcgggcagtctccggagagcggcgcacgagcccccc

SEQ ID NO: 153703 - DNA, 1111 bp, Zea mays
  Clone ID: MRT4577_71756C.1
cggacgcgtgggttcagcagccacctcttagtcttaccacgccccacggcaccaccccaacgtcatggcggtgagcaacaacatcacggcatgcgtgacgctgctggcgctgatctgcgcggtgcccgtgatcgcgtcgggggtgtggttcgcgtcggcgcagggcgaggagtgcgcgcgcctggcgcggtggcccgtggccatcctgggcggcctgctcctgctggccgcgctggcgggcttcgtgggcgcgtactggaaccggcgcggcctgctggccttctacctcttcgccatggcgtcgctcgtggtgctcctcatcgcgctcctcgccttcgccttcgccgtcacccgcgggtccggcgcctaccccgtgctcggccgcgcctacgacgactaccgcctcgacggcttctccatgtggctccgcgggtacgtctccgacgaccccgggcgctgggacaaggtcagggcctgcctcgccgtctccgacacctgcaagaagctcgcgcgccaggccgccttcaccagcgcagaccagttctatcagtcgcacctctccccgctccagtccgggtgctgcaagccgccgtcggtgtgcgggttcagctacgtgagccggacggtgtggtccgccccggcggcgcggccggcggcggacgcggactgcgggctgtggagcaacgacccggggcagctgtgctacgggtgcgagtcctgcaaggcgggcctcctggaggcgctccgggaccagtggcacaaggccaacgtcgccctcgtcgtcgccaccgtcgccctcgtcatcctctacctcgtcggctgcagcgcctacaagaacgcgcaggccgccgccatcttcggacgccgcaagtattagctagctagctagctgccatgttagtttttttttttttgcgctttttttttttctttattgtcatgtgggttgtggattatggattgcgtatgtgtgtcccctggtggagagaagcatttgtagcggtggcgtggtgtgtgtttccggacttggttcatcatggtagtgtgatagatgtgtaagattagttactttactaatggtggtgtttttctcaaaaaaaaaaaaaaaaaa

SEQ ID NO: 153704 - DNA, 1211 bp, Zea mays
  Clone ID: MRT4577_71757C.1
gtaccgtatcagtctcccggattctggtgccggttcgtgggagggccaaagcttcgagttaggaaaaccctaccgctgtgggagtagcctccggcgatggctgcggcggcgatcctgccggagctggcgacgcaggtgctcatcccggtcgcggcggccgtgggcatcgcgttcgcggtggtgcagtgggtgctggtctccaaggtgcccgtgatcgcgtcgggggtgtggttcgcgtcggcgcagggcgaggagtgcgcgcgcctggcgcggtggcccgtggccatcctgggcgggctgctcctgctggccgcgctggcgggcttcgtgggcgcgtactggaaccggcgcggcctgctggccttctacctcttcgccatggcgtcgctcgtggtgctcctcatcgcgctcctcgccttcgccttcgccgtcacccgcgggtccggcgcctaccccgtgctcggccgcgcctacgacgactaccgcctcgacggcttctccatgtggctccgcgggtacgtctccgacgaccccggccgctgggacaaggtcagggcctgcctcgccgtctccgacacctgcaagaagctcgcgcgccaggccgccttcaccagcgcagaccagttctatcagtcgcacctctccccgctccagtccgggtgctgcaagccgccgtcggtgtgcgggttcagctacgtgagcccgacggtgtggtccgccccggcggcgcggccggcggcggacgcggactgcgggctgtggagcaacgacccggggcagctgtgctacgggtgcgagtcctgcaaggcgggcctcctggaggcgctccgggaccagtggcacaaggccaacgtcgccctcgtcgtcgccaccgtcgccctcgtcatcctctacctcgtcggctgcagcgcctacaagaacgcgcaggccgccgccatcttcggacgccgcaagtattagctagctagctgccatgttagtttttttttgcgctttttttttttttttgtcatgtgggttgtggattatggattgcgtatgtgtgtcccccctggtggagagaagcatttgtagcggtggcgtggtgtgtgtttccggacttggttcatcatggtagtgtgatacatgtgtaagattagttactttaattactaattgtgctgttttcctctttccctgttcgccgacgagtaatgtatctggtttgaaga

SEQ ID NO: 153705 - DNA, 274 bp, Zea mays
  unsure (1)..(274): unsure at all n locations
  Clone ID: MRT4577_71758C.1
accagcggcagtttctcgttatgcccaagtcatgaagactgtaaggaaanaggcggatcatctctctgactctcaaaggattagatgtaccatagagaacttcaccaagggcatccctgaagcacggacatacttgaatactgcttcaacagctcagaataaagagaggtcttgatagatcatcttggaattgagcctttgatgaaggaagctcatgagaagattgagaaggacattaagaaaccactattgaggagcgacaagaagaacatgg

SEQ ID NO: 153706 - DNA, 185 bp, Zea mays
  Clone ID: MRT4577_71759C.1
catacataatttccaagcacacccaaggcaccccccaaaattcacagaaccctccccacgggtacaccccattgccccaaaactggcacacttaagcaaccgccatttacactagaacatgtgtgaaccatcgtaaaaatattaaccacgaaaaattgcacaaaaaaaaacccccataagtaaaa

SEQ ID NO: 153707 - DNA, 195 bp, Zea mays
  unsure (1)..(195): unsure at all n locations
  Clone ID: MRT4577_7175C.1
gggggnnncgaaacaaggccttgacatgatataatattcccccaattacgattctacaaacacaaactgcacattcgaaccagccgtttcaaaaaaagagggtaaggtatcaacgtggaaggctgcacaagttcattagattagatcacttatcgacggccgccaaaggggcgccgacccccttcccggggagct

SEQ ID NO: 153708 - DNA, 393 bp, Zea mays
  Clone ID: MRT4577_71760C.1
tgcaacattctaccattgattccatagcagacttcatcaaagaaccagtcgttattctgtcaagatgcatttcacaaactccatcgctcaagccattctctgcctctcagttacaattctccctgtcgcacagtcttcaatcgctatcgggaatcaaattcgtgaaggagggacccattttaatgtcgcctgggttgaaggagtgaatccctgccagtccgacgtcgagattgcgccggaaagctccagagaatgtgaccaaaacttttcgctaaacggcgaagaatattacttggttggatgcactgatcgtaatactggttatgctcaaaagccacagaggcttcgacgggtcaaggacaactcgctctatggaacttgtgcgccagtttc

SEQ ID NO: 153709 - DNA, 352 bp, Zea mays
  Clone ID: MRT4577_71761C.1
tgctcgagcggacgccgtgcgatggatatcttgagaattagcccttagtgagtgccgagctatgttcacagcttaagattcatgaagagacatgccttgctgtaaaatgaccatgctgcatcgagtgattatcatgacatttactgtgaactgacttcactaatcaggttacaggagaggcttgcgcatgttcataagctcacatttgcggatatggagcgatacgaaccaacatgagcactcattatgaaccagatagcgaagaaatttgtatggagactcatgtaatacactgtgatggagcatggtcattctgtaacaaggatgtattttcattaatctgaagccgtga

SEQ ID NO: 153710 - DNA, 1136 bp, Zea mays
  Clone ID: MRT4577_71762C.1
gaagtcatctttcatgctttaggttttattaaatttttgccgcgcaaacacggtatttcacgacgaagcattttaacaatcaaataatacatccgcgacaaatccctacgacgtacaaaataactatcgcagccacatctgtatccgatctaacacaaaataacgcatcggctcaccatatcaaactttggtcggggttgctgcacgtgtggcgcgaaggcgaatgcgtcgtcgcgcatgggagaccaaagcgaagccggagggcgtggctcgctgctgcgattcgtcgagcacccacgcgcgaggcgaaggagcaggctgctgtggcgtgcagcttgctgcgcaggtaggcggtggagctcgctgctggaattttatgggcgccctggacagtgagctgggcggccattggcctctcgccaggggtggagctcggatgggggaaaaatgctgccatgggagaggagtttggttgtcctccatggctgtccagatctcaggcgcagcagggattgttctaggcgctgaaacctggagaggagcaaagggaggaagggggaagattgcagggcgtcatgggaggaagaggtgggcgagctgctgctcgccgtggacgacggcggctcgctgcgactgctgttttatggggaagaggggaggagaggggccttggcggcatggctcctactgctgtccatggaaaataaataggacgcaggaacagcaggggaagggaggtcggccgtcgaccccagccgcagccatgggcaagctagagagtgccatgcccctgcacgccgacgtggccgagcaggagagggacgtcgagctgcaggtcagccatgggaggaaaacagcagggagcttggagctgctgctgggcgccgatggctgcgggactgctacctgcacttggggaggaggagggagaggatgggggtcacgcccatggagagcaggaggcgagggagcaggcctgggcgccatggagaggagcacggctccctgctgctgctgccgtgggatgcctgctgcgcgatggagaagaagacagggaggctgctgtggcggctggaaacaaaaatgaggggtgggaatgcaaaaatgcctcccggccggcctcgagggtcccaatg

SEQ ID NO: 153711 - DNA, 220 bp, Zea mays
  Clone ID: MRT4577_71763C.1
ttcctcgtgtgcggcagaaaacagccgccgggggggcctttataaggggaggagcgcatcaacacaagactggtagatggtactggtggaatggtgcataaagacgaaggaagacgagcacacaggtgacaggggccatgaaaatgagggcagtacaaatacagaccccaacggcgaagggcaagacacataaagggacgatggggaagcagaccaagac

SEQ ID NO: 153712 - DNA, 437 bp, Zea mays
  Clone ID: MRT4577_71764C.1
cctcccccccccctccctcctttctcttttttttttttttttttttttttttttttgtgactttttttggaaaaatttttatttcatttttttacccgcttcaagcctagcaacaagcagtgcaataaaccggggactataaaggggtcccatttggggtccccttttttaaaatggtattgcaccatccacggggcccctttctttttcggttttgataaacttccatttggacttaactttgggaaaacccttggcaaaacaatttcccggagaatttcccgactttggaaacccttttggaagacctttccggaaaccgttgcgggactcctggaagctttccctaaggagttacccttggggaaaaacatgggcaaaaacctgaaaactttgcttcaaagtttgatgcaaaacccctggggcacccccttttt

SEQ ID NO: 153713 - DNA, 379 bp, Zea mays
  Clone ID: MRT4577_71765C.1
tggaacctttgggctgatttatgtgcttgttagagggtgttgttgtacgcttatgtggttttaaggaaggcggtggtggggtgaggggggctcgtcccggctgtgctcgtttggactcagctgggccttaggaggcgggggtgatgcgcgcggggtggtgatttcctgttggtgtggtctggttctggtggtacttcggtggtagcgagtgtggtgcctgcacgctatccttgggtgccgtgggcttcggtcgggcgcttgtgtagtaagggggtacgtggttggttgcgggctgtacgtgtgaagaaggcgtcgctcggtgttttagggtagggagtggtgttgtgtgcggaggctcggaactcggcgtgtgcggggc

SEQ ID NO: 153714 - DNA, 598 bp, Zea mays
  Clone ID: MRT4577_71766C.1
ttttttttttttttttgaatacatatacttatacagaattactcaaatacatacagttcaagtaatagggcacaaaacacatacaatttcctcaaatacagatcacaatcagaatcaaatacagatcacaagcagttcacagatagtttacactttagatgccagagcaagtggcctataccgtagctagttttggcactcaaagtctgcttatagtacttgcaaatggaaccatacctgaccctcttaccattgatgacatgagttagctcctcgaagtcgttctagactttagatctgggtgccctcttccttgatttgttgctaccgcgatcatcactggcagcagtgcaagccacatcagtaggggccatagagtcggtaggggtacgtcttgtggggcctatgccagtctccgtcctaggcatgtctaggttgatgctggtaccgacatcgaacaaagtattagcgtcctcctgttaaacgtctggagccggtgttcttccacctcgactgttggatcaagatccatgacgaggacctcgaagtcgaccgacatcctcggtgccgcctccttgacgacttgtacagccggagc

SEQ ID NO: 153715 - DNA, 307 bp, Zea mays
  Clone ID: MRT4577_71767C.1
caaaaactgccctcgggtgggaccccacaaatgttccccacaacaaaggctaggctgttgctaataagcaaatccagaatccgggggtgggcaaggttttttcatatcatttttagcggggaacacacagggataagcccacattattcgagcaagacgcagcagctttcatgggggggccccattggtgtaggttttggggaagggggagtactccaaacttggggggggccccttcagttctggtcctacaaaacaagtagccccccgggggttagctagtcccaaattgtcagctcccccaccg

SEQ ID NO: 153716 - DNA, 132 bp, Zea mays
  Clone ID: MRT4577_71768C.1
gtaggaggacacgcggatagcagccctgagtagcacccgggacaaagcaacacccgggatggaactacacacgagaggctgtacatagatcaggtatgaggtgcaattattgatgcaacgggctggcgatca

SEQ ID NO: 153717 - DNA, 987 bp, Zea mays
  Clone ID: MRT4577_71769C.1
cattgggtacctcgaggccggccgggacttcccccctcatctctctccgttcattccctctctcatgcgtgcttgggttgggttgggtatagacagttcttgcagtccacaccacctcaagtgagggggtgaccccccaccctcctccctagcgctcctcaccgccatgctgccaagaaggcagagcatcttccacctcggggaggagggtggcgccgccgccgtgcaccaccgcgtcagcgtcgtcggcgcggcgtcttcgtccatggccatgggcggcggccggcgtgctcgcgagcgtgagcgcctcgtcgtggggctccagatcctggtgcaccaccaccaccacggccggcacgggcacgggcacgcgcacgcggcgaacgtagtcctgaagcagatggtgaggccgcgcgccgccgctggctcgcgccacggccacggcagccacgccttctcgtgcagtttcctcaaggcctgctacctctgcaagcgggagcttagccctgacaaggacgtctatatgtatagaggtgaccaggggttctgcagcgaggagtgccggtggcagcagatcctggtggacgaggcgcgcgagcgcgaggcggcggcggtgatgagcaacaaggagctgcagcggcgagcgcaggcccgccaccacagcccccaccgcacgcccatgcccatccgtggcaggccgccgaggaagacacttgccgtagcctagctagcaggtcctctgtctgctgaggaggacaaaggaatcaatcatggcgcatgacgaggagcactgctactactagctagtacgggtctactggactgcgtgggtaaaaaaaaattaatcatctcttctaatcaccgagtggactgctagagaccagacgacttgcttgtgttgtcatcatcaaccaataatcaatgaagctgcaagtatatattaccagaatggcatttcttgttccaaaaaaaaaaaaaaaagcggcc

SEQ ID NO: 153718 - DNA, 255 bp, Zea mays
  Clone ID: MRT4577_7176C.1
tgacgcaacaggggtcgacgcccacaccggggggcgggtactgcgtgtgctgctcctcggtgccgacctgaggaacgcggtgtccgcatgcctcggggcgccggcggaaagaacggcagagcacgggaacatggaagggcgcccgtaggcccagcgccgcagcaggatcacgagcaggagcaggactggggcggcgggatgagcagaaacgaacaactgcgcaacagccgcacggacttcgtcgcccaggggtgc

SEQ ID NO: 153719 - DNA, 549 bp, Zea mays
  Clone ID: MRT4577_71770C.1
ggcccttgcaaaaaagggctaaaaatttgtataaaacctcaccacttttggggatgggcaaaataccctttttacccgacaatgttttaaagggactcaaaaaatgaaaggagaacgcgatgggcaaaataccctatttacacgggaatgttccaaaaaaactttcaaaagcttttgctgccatattttgttcttatcggtgctggaagttcagttttttgatgcaaactgggtacaaaaacccgaaaaatactggaaagagtaccaaaaccggggcaatgaccgggaaaaaatccctggggtatccaaaatgatgggttacataaaagcttatcggctgctcactttttccagggactgaaatgaggtcttccaggtctccgtattggggcacaatgagcccatacactggccatgccagggggcaaatccagtagtaccaaatccaccatccaggaattctcggtctcggaatgaaaaaccctgaaaagaaattgaaaaaagaaaaaaaagctgctgcgaagatggatgcaacctcatggtttgggg

SEQ ID NO: 153720 - DNA, 478 bp, Zea mays
  Clone ID: MRT4577_71771C.1
ccggccggggcggcctactcgtcgtgccaatgcacgagcacctggcgaactccacccgccaggcgagcccgctcgatccgaaggggctctggaaccactgcgccatggtggactatgggcaggtcaggaggtgtggccgatggagtcccgatgaatttcttcctcgcgagaccttttctcatttctttccaatcatgagaacgatccggttgaagagctcgaggaactcacaggagaagcccctgagcagcagtcggttggtggaggcaagtgtcccttgacctatctctgtcctattcattctttaattcacctcccgctttacacatttatgcctaaggattgactagctttgttatccatgtccttgtttacctatttgggttggattattattgtctagctttatgccattgctcaaactctaatcaatgaacatgatgagattatctaaaaaaaaaaaaaaaaaaaagcggcc

SEQ ID NO: 153721 - DNA, 382 bp, Zea mays
  Clone ID: MRT4577_71772C.1
ggggaccacaaaccaggggtccagagttcaaacctccccccccaaccgggaattgcgggcgtagggttccccacacctatggtaggttgggaaaacaaaaaaccggtttacaatttcttaaaaggattctttacccccacatcaactttgcaccttactaaagggtttctggaccgccgcgctggttttcgggggcccccccccttccagggaaaataacttagggtcgctttggttggacaaacgtggcccaaaagaggaaaaagcatcaggttctgcacaaacgtggctttgaggggggcttgtttccgcttaagctccctttcttaacttgggagcgacgaatcgatacttaattttcgggcctggaagggggcttttt

SEQ ID NO: 153722 - DNA, 293 bp, Zea mays
  Clone ID: MRT4577_71773C.1
atcgactctgtccgctttctaactgactcatcagcgcttggataggtatcatcatgattgaaacgcaaattgaaatcgctgccccgccttctaaggtgcgagaaattctgctcgacttttccaactatccacaatggcactcagcattaatcaagttgctcgagcctgaggatagttctaagtcgctctcgtcactcaaaccgggcgacaaagtcaaatgtaacatcgatgacatgaagtttgtcgcgaccatcacggcgaactcagaaaagctatttcagtggcaaggccca

SEQ ID NO: 153723 - DNA, 148 bp, Zea mays
  Clone ID: MRT4577_71774C.1
cccacgcgtccgaatatggatctcacgaagctgatgctctagttctggttcttgctggcgatggaattgctcactagagttgattactccatgctggacacgcatttgaaggttgccaacaggtacgtagagatcctgtagaccctgc

SEQ ID NO: 153724 - DNA, 330 bp, Zea mays
  Clone ID: MRT4577_71775C.1
accccggaccccaaaaactaaaactggatcacgtttgggaacaaggccgaaacaaggtacctgggggaaattaatgccaaaaacaactcagggccccccaaaaaaaaaatccgcaggtcgcaaaaaacagattcacaggacttgtgcaaacaaaaaaacacttgcaacccccccgttaaaaaaggccccacaaggccacggaaattggcacccccctaaacagcaaaagccccaagcccttcttaaaacctaaaaaaccggtttgtatttggcaagaccccctaaactgcagggggccccaatcaaaaactgaccccgggacaaaaccaa

SEQ ID NO: 153725 - DNA, 326 bp, Zea mays
  Clone ID: MRT4577_71776C.1
aagaagggcgctggattaaattaagcagagaccagatacatgatacatccaacatgcaagacgattttactccagggagatgttgcattacaggaagacactacggctgttgaacgcgaaacacagagacgctaaaccaaacttatacatccggatggcgggacagaactagcgcctagcttcgaagatcaggccatacacagaggggcagtgccaaatgaaatgatgcacttgtcgagcgccataccagagagaggggttgatttcaccgtctttgatccaacatgtttccaaaaggcagagagaacgggaccattagactccct

SEQ ID NO: 153726 - DNA, 588 bp, Zea mays
  Clone ID: MRT4577_71777C.1
aatcggttttttttttttttttttaaccgtgaagaggatcgttttttgaagggttttgtcctcaatatataatcagttggaaccccaagctaattgaagcaaacattttctcattagtccccattcatcttggatatcacatttttcgctttttcaatataaatatacatacaaacagccttaaagctagaaatcggatcagcaactttccaatgtatcaaccccttgttgcaccacgtccagtgattctgacgagcagagcttcagctcaccatttaccagcctgccaccttcgagcttcttcgagctacatccaactcagtactcacgtcgtcaacgcattggggagcgacgagtgcgtccccagcaccttgccaccgacgtctgggaagctctcctgcccatgcagcggccccaccctcccatcctgctcgaccctcacggggtacttcatgaggtggcccttcatatccgccatctgcggcgagacatagctcgcccagttgtcatctgccatctggttcacctgctgcacgcactcctcggactctggccggcggaaacactcctgcactgtgcccaggtgct

SEQ ID NO: 153727 - DNA, 427 bp, Zea mays
  unsure (1)..(427): unsure at all n locations
  Clone ID: MRT4577_71778C.1
ttttnnttttttnnttttttnntttttttttaaatttttttnnttttagcatgagaacagggatnatttcagtttctcaataggcattattcatggagattctcaagaacactaacacgggtgaaacaccgatatctaagcaagaggcggccactgggggttcacacgatccacacgctaaaccgctnaaattaaaactgcgagccgatacactgagtaaactatagaccaccacctcagatcaccacccatcttattcagatccaaaggaacggacgcagggggagtcgacgatgacggagggagggcggccgatcagaccagatcagagagatctaggagagctgtccgcagtcagcgaccttgaccaccttggaggtggagccgttgcgggtgccccgcgtactctgggttgttaccactgttt

SEQ ID NO: 153728 - DNA, 259 bp, Zea mays
  Clone ID: MRT4577_71779C.1
attgccttggcccttgagcagtcgcgcgtacgaagctcgaatttcgctccaggcctatggtaatcctgtattctgtaatgtggcattgcctgcgctggtggctgctgctgctgctatcgatctcagccacactagctagatcctgcggtccagaacgccagtgtgcacgcaagcgagcgccaagtggtgtggtgaccactaccagcgcagtgcgcagcgtcccccacctattgttgtatccgctacaattccacacaac

SEQ ID NO: 153729 - DNA, 1321 bp, Zea mays
  Clone ID: MRT4577_7177C.1
acactctgcgtcgcacgcaacactgttcatccgatgctcccactagggattttggtacctttcagccagtccgtttcagatctgttattcttcagtgttttattgctctgcattaagaggtcacggtttactatttcatttgactgaagattctccagttttagcagttgatagaagcaatgttgctgcaatcaagacttggcagatcaatgatggcaaggtaatggctgcaaacaacactaaaccaactatgattatgagtctgtccaaattcaccactgctaaggctatctggtcacatctgaaggatcggtttgttcaggatagcggtgctcttttacatactcttatgcagcagactcatgtcattgagcaacatgatatgtccattgatgaatattatccagcctttgatcgtcttatgagtgcattgacctccatgttgcccgcatgtacaactgtgccttgcccaacccataagttcattgagaagtttttacctactgatttgtatgggagttcgacctgaatttgattctcttcgtgcaaggctgcttcacagaatcacagtttagatactctcaccatggcccatgcattgtctgaattgcttgctgcagagactcgtctgaagtctatgtcttctattactggtgtgagttctcacagtgtgttggctgctgctcagaggtccaggaacacctcctttcagccttgtgaacattgcaaaaagaccactcatcagtctgagaactgctttgctaagtttccagagaagctggctgattttcgtgtccgtcgtgctactcgtggtcgtggtacaagaccatctcctagaggctcagttgcggttgctactacttcatctgctggtgctttgtcatcatcttgggttcttgattctggagcttcctttcatgtgacatctgatcagtcacggctggcgtctactaaacctgtcaccgaggatacttctgttcaaactactgatggatcgcaaaacaggggatgtgattgggactggccatcgccgtaaatcttcgcctcgcctctacatcttggacactttgcgtcttctttcatcccctaccactacacctcatgtgctcgctgcttcgggccccaagacgtcattcgcccagtggcatcatcgtctgggccacttatgtggatcccgtctgtctactctaataaagtcaggatgtttaggctctactaatgttgagtctagttttcattgtaaaggttgtcatcttgggaaacaaatacaacttccatattttactagtaaaaaaaaaaaaaaaaaaaggaattaaaaact

SEQ ID NO: 153730 - DNA, 212 bp, Zea mays
  Clone ID: MRT4577_71780C.1
aatgtttctgttcggcccctttgcttggtcttgttgatctttgtgcggcggaaaccgataccaacgttgaaagtgtggtctacaataaacaaattgtcactctattaaagatctcagaccgcttttaagggttcattttcaaaggggatagtccttttggggggttaataaaacaagactggcctctataaaagacaatgcgtgggccgccc

SEQ ID NO: 153731 - DNA, 363 bp, Zea mays
  Clone ID: MRT4577_71781C.1
gggcccaacccaggttctttaaatttaagggggtttttttggggttttcccaccattttttgtttggttaaaaattttgggaacagttcttgttgttttttaaaaagcccaaacttgggggagtttggccaaaacaacagtttttttttttgaaaagggttaaacccatttttttgtccgacttctttttagggttcggagcctttttttttttttttggagcaactgttgggcccgagttaccaacaggaaccggggggggaaaaaaaaaattgtttggggccttgagggactcctttattttgtcaacatgtgggttttaatagtcttttttaacagaaacaacaagcacattttttttcc

SEQ ID NO: 153732 - DNA, 500 bp, Zea mays
  Clone ID: MRT4577_71782C.1
cccacgcgtccgcgagacgccgctgcaggtcaagctcaacggcgtggccaccatcatcggcaagatcggcctcgccttcgccgtggtcacgttcgcggtgctcacgcagggcctgttctggcgcaagctcgccgacggctcctacttcagctggaccggcgacgacgcgctggagctgctggaggtcttcgccatcgccgtcacgatcgtcgtcgtggccgtccccgagggcctgccactggccgtgacgctcagcctggcgttcgcaatgaagaagatgatgaacgacaaggcgctcgtgcggcacctcgcggcctgcgagaccatgggctccgccaccaccatctgcagcgacaagaccggcacgctgaccaccaaccacatgaccgtcgtgaaggcctgcatctgcggcaaggtgaaggacgtgaacagctccgcggagaccaagacgctgccctccgacctgccggcgtccgtcgtggcgatgctcctgcagtcca

SEQ ID NO: 153733 - DNA, 368 bp, Zea mays
  Clone ID: MRT4577_71783C.1
ggttggggtttttttttttttttttttttttttttccttgaatattaacttaggataaagcccaacggggggaacaggatacattaatccgcaaccaaaggccatttgttgcatgccactgagggaacctaaaataaacacaggaataacaagggacacaaagggaacattaaatcaaaaaaaaatatgggcaacaccaaatatgacacaaaaaaatataaaccctttaaactaaggtaaacaaaacgggagcaaacaagaaaactaggccacaaaggcacaaccgtttatatcctacatttacagacagaatcacatgaccaaaaaacacaaaagccaccactaaaaccgcagccaccaccaccgaa

SEQ ID NO: 153734 - DNA, 755 bp, Zea mays
  Clone ID: MRT4577_71784C.1
tccgcccacgcgtccgcccacgcgtacgcccacgcgtccgtaacaatctgctccggagagagcccttgaagcttgttgatgggggtcagtctcagagaaccttcgtctacatcaaggatgctatcgaagctgtagtgctgatgattgaaaatcctgctcgagccaatggccacatcttcaatgttgggaatccgaacaatgaagttaccgttagggagttggcccaaatgatgacagaggtctacgcaaatgtctcaggagaggcaccgctggatgagcccatgattgacgtgagctcgagtcagttctacggcgaaggatacgatgatagcgacaagaggatccccgacatgactataatcaacaagcagctaggttggaacccaaagacgcctctcaaggatctgctggagacaacgctgacgtatcagcacaagacatacaaagaagctgtgaaaaggcaaatgtcgcaggcttcagcgtcgacttagatagcgtgcccctggctctcgtctagagcctagtcgcagctgttaagttgtttcggaagcgcaggtcacacatacgctagtgatctttttttttgaggccctagatgtccgtgttgttagataaccaagggatgctgtatcagtatgatatatttgtggcagagttgatgtattccatcgttcgtcgtactagttgggttgattgccgagagctggttatatattgctgtttgagtgtagaaaaaaaaaaaaaaaaaagcggcc

SEQ ID NO: 153735 - DNA, 1050 bp, Zea mays
  Clone ID: MRT4577_71785C.1
gtacgcgggaagcagtggtaacaacgcagagtacgcgggaagcagtggtaacaacgcagagtacgcgggaagcagtggtaacaacgcagagtacgcgggtatcagtatgatatatttgtggcagagttgatgtattccatcgttcgtcgtactagttgggttgattgccgagagctgttatatattgctgtttgagtgtagaactagttgctcagttatatgttattggttcatgagattagcgccttttaattggattgggccaaggatggatttcattcctggtgtcgatggtcctagtgagggtgtaccccgggtgctggcttgcttcagtaacaatctgctccgccgagagcctttgaagcttgtcgatgggggccagtctcagagaacctttgtatacatcaaggatgccatcgaagctgttgtgctgatgattgaaaatcctgctcgagccaatggtcacatcttcaatgttgggaatcctgacaatgaggttacggttagggagttggcccaaatgatgacagaggtattgccattagatttatatgacatgacgccgtcaagtaatggtcgggtgttaccagtttctgttgtttttgtgccgcgcaggtctatgcaaacgtctcaggagaggcgccgctggatgagcctatgatcgacgtgagttcgagtcagttctacggtgaaggatacgatgacagtgataagagaattcctgacatgactataatcaacaagcagctaggttggaacccaaagacacctctcaaggatctgctggagacaacattgacgtaccagcacaagacatacaaagaagctgtgaagaggcaaatgtcgcaggcttcagcaacaagttaagttggcgctggctggggacggctcctcgtttagagccctagtcgcagcagctgtttcgcaagtcagaatacatatacgccggtaatcgttctgtttgaggccctagacgcgcccatgttttgtctgctaccaagggatgttatcctattgtgatataactactacctgtgtttggttgctcct

SEQ ID NO: 153736 - DNA, 377 bp, Zea mays
  unsure (1)..(377): unsure at all n locations
  Clone ID: MRT4577_71786C.1
ttttactctccccccagcagtccctcccaacggttgggctgtgaaccaccatgctggcgccccanaccgtggacgcgtcggcttagcattctagcataccacagtatactacacaccacccaacatgtcacgcaaggacgagtccaaggccagcgatgccgttgcgaccgtcaacattgccgactttactcgtactcgcgacgccatcattgtctgtctcgccaatttgcaggcgaacatctttgatttgtcgcgcgcctacattaaccatgcaaacacagtcctgaggggtggccctatcaaccttgaatccagcctaggctctggactggctggcggtttcgccgccagcttacttgagaatagtctcgtgggtg

SEQ ID NO: 153737 - DNA, 355 bp, Zea mays
  Clone ID: MRT4577_71787C.1
attcccgggtcgaccacgcgtccgccacgcgtccggaaaaaataatgtttaaagtgcaggctatgggaaagctggactctgagaatcacttgtcggctgcaactgaggtgagacttcatcagatcacaggatcctgccactggacgtatctcgcgctactggaaagcgatactttacgtttcggccctagcttttgcttgtcggccaggatacaagaacatgctttgatgccatcttccaaattggcataatgtgagaattgaccggctgcacgactgttcggcatattgacatactatgaccaatggagtatgttatgtagctagctgctactttgtagttagtgcgtgatgat

SEQ ID NO: 153738 - DNA, 276 bp, Zea mays
  Clone ID: MRT4577_71788C.1
aaaaacaacagacgaccaaaaatattaaaaattttaaaaaaaaatattaaaataaaagggcaaaaaactttctggcgggggggataaaataaagcaacccctctttatggccgggcggccttctattatactccacgttttttttcccctgctttcaccagttttattttttttttttctccccttatataatttgacggcctcgtcttttccaacctttgggttcggaaacccttgcgggaccccctctttttttctgtccggggcacccccttt

SEQ ID NO: 153739 - DNA, 446 bp, Zea mays
  Clone ID: MRT4577_71789C.1
aggcatcaaagctaaaagctttaaacttattcagggccatcaaaactgaacagggctttaaaaccatttccttactcgacctaaataacgggttctaaaatttcctaccccccccaaatttttttttttttttttggggggggtcgttggattaataaggaacgggaggtaaactacctccttccaggttgggaggcatcctcctttaacatgacggggcaggaatgggcgttttcgtcgttaaacatgtcgccgaagccttcccccgggggcaaaaaggccctcctttgggggggggcgctgaataagtaatcctcgaccaaaaaacccggttggacctggcacgggtagctttacgggcccggttggggaacccttaatatatacgggtttgcccccggcaaccggttggggggagagaaatggtggtatctgttgttgaaaaa

SEQ ID NO: 153740 - DNA, 2609 bp, Zea mays
  Clone ID: MRT4577_7178C.1
gggttggggaggccttgactaatcttgtttgggctattgttacaccacttgctgatgtgaaagcaagcgggaactggatgtatgctgcaaagcttgatggtgaaggtgcagatatgtatgatgcagctgttgcattggctgactgtatgattgaacttggtattgcaatagatgggggaaaggacagtctttccatggcagctcaatgtgatggtgaagtcatcaaggctcctggaaatctggttatcagtacatacgtgacatgtcctgatataacattgacagtaacccctgatttgaagcttggtaaggatgggattcttctacatattgatcttgctaaaggaaatcgccgtcttggtggttctgctcttgcacaagcatttgatcaaattggaaatgactgcccggacattgatgatgttctgtacttgaagaaggtatttgaggctattcaagaattgctcagtcaacgtcttatttcagcaggccatgacataagtgatggtggccttattgttagtgttcttgagatggcatttgctggtaactgtggttttaagcttgacatagacttagaagataggagccttattgaaggactttttgcagaggagcttggcctcattattgaagtacactcgaaatatctcaacattgtgaagcaaaagcttgaaatagcaggcatttctgctaatgttattggagaagttactaactcaccagaaatagaagtttttattgatggcaatctgcatctcaaggaaaaaacttcagatctcagggatctgtgggaggaaacaagcttccagcttgaggagttacaacgtctgaaatcttgtgtaaaacttgagaaagaaggattaaaatgcaggacatcaccatcatggtctctgtcttttaccccaaaattcacagatgggaaactgttgactgcttccttgaaaccaaaggttgccatcattcgtgaggaagggagcaatggggacagggaaatggctgctgcattccacgctgctggatttgaaccatgggatattacaatgtcagacctcttggctgggaagtcttctctcaaggagttccgtgggattgcatttgttggtggtttcagctatgcagatgtgctggattcagcgaaaggctgggctgcatcaatcaggtttaaccaacccctcattcagcaattccaggacttctaccataggccagacacgtttagccttggagtgtgcaatggttgtcagcttatggctcttcttggctgggtgccaggatcaggtgttggaggttctcttggtacaggtggagatatgtcccagccgaggtttattcacaatgaatctggtcgttttgagtgccggtttaccagtgtgtccattggcgattctcctgctattatgttcaaagggatggaaggttccaccttaggtgtttggagtgctcatggtgagggaagagcttttttcccagatgaaaatgttctagctactgttgtgaagtcaaatctggctcctgtgcggtattgtgatgattctaacaatattactgagacctatcccttcaaccctaatggttctccactgggtatagcagccctttgctcacctgacgggaggcacctggctatgatgccgcatccagagcgttgcttcatgatgtggcaatatccatggtatcccaaggaatggcaggttgagaagagtggccccagcccttggctgcgaatgttccagaatgctagagaatggtgttcatagtgcagggaagcttcctgctgcaaggatgtagtcatccaggcaccggctgctacgagtatatggatgattggtggttgtatggcccaattgatgacccctttttggcagaataaatgtgttttgaccatcaatacattatcttgtaataatgtatcgaatttggaattttgaaaatggagaaccgtctggtttccgaaatcggaaggcctcagatatgactcccctagtttaaaacatttactagtggattggctgcgtatgttccagaatgcaagggaatggtgttcatagtgcagggcagtgcccagctgtagcgatgcggatggttgttttcatctgatgaccccttccttttgcggaataaagaggtgttcgacccgcagcgcgttatccaagctgataacaaacgtgtcaaaattgaagttttatacatagaaaactgccaggttttttgcgtagcctatgccaaagatgcgtaaactgtcagccccatcagggcttgtttggtaatcttggattagagtggattgaagtggtataagatatattaaagtgtaatataaactaatttccctttaaatctctaaaatacacctcaatccacttcaatccctctttatccaaacaaagcctcagcgaatttcccaatcaacgtagagaatgcttgctgcgttactcaaatctgatgcttatgcaatggtcgtttttgtgctgtctgtctgatgatgagtaagtatgagttcattcgcaactagacaagtcattagtatgaattcagtcacaaccagacaagtcattgtaatagcttgagataattcatctggtgatgtggcaaattcttagagtccc

SEQ ID NO: 153741 - DNA, 199 bp, Zea mays
  unsure (1)..(199): unsure at all n locations
  Clone ID: MRT4577_71790C.1
taccggtccgnattccgggctgaaggcgttccctgtgcanactgtgcaagtaaagatccatccggtaccagctactcgtaaagccacgatgcgcaatgcaagatatattttcacaaaaaaaaagaatatgtggtttctgcccatcatatatatacttatatacaatgtacttattatggagcatgattcagcattgtgc

SEQ ID NO: 153742 - DNA, 1710 bp, Zea mays
  Clone ID: MRT4577_71791C.1
gtgatctctgtgtgaattttactttatgtttcatttatactgtttatggatcatgcagactataaaaaatgacgatttggaggaaattagagagctgggttcaggtacttatggggcagtttatcatggtaaatggagaggatgtgatgtcgctgttaaaagaataaaagcgagttgctttgtaggaagaccatctgagagagagcgtttgattgcggatttctggaaagaagctctgatcctaagctcactccatcatccaaatgtggtttcattttatggtgtagttcgtgatggtccagatggaagcttagcaactgttactgagtttatgatcaatggatctctaaaacagtttctgaggaaaaaagacaggacaattgatcgccggaagagagtaatattagccatggatgctgcatttggcatggagtatttgcatgggaagaatatagtccattttgacctgaaatgtgagaatctactggtgaacatgagggatccgcagcgaccaatttgcaagatcggtgatcttggactgtcaaaggttaaacagcatactttggtatctggtggtgttagaggaaccttaccatggatggcaccagagcttctgagtgggaaaagtaatatggtgtcagacaaggtaagactgccttgtcttattgatgtctattcgtttggaattgtcatgtgggagttgcttactggggaagagccatactctggcatgcgtgctgctgaaattattgggggcattgtaaacgattccctacgtcctcaaattccttcatggtgtgatcctgagtggaagggattgatggaaagctgttggtccagtgatccagctgagagaccgtccttcacggatatatctcaaaggttgaggaaaatggccgccgcaatgaatgtgaagtaaaggtccggaagccatatttgtcttgtatgtgtgttccccgcatccaatatatatagcgatatacaagaggaaggcagagttgaaacaggattattttgagtaaatatgttccatatgtcttggcagcatcgcagttgatgaccctactccaagtgataatttaacaagtgctgacttcatgggagaaaatctatgtcatggagattccaaagcatgtttgatgttttcttttaatcctggagtaaaccggctaccatttgccttccgccgaaaacaagtatgctatatggcgcattgtcttgatgggagctgttgcactgtcatgtaaataagttttgacttgctggcccgtagtagatgtgcaaagtaataggcacgatcacacagttactttttttttcccatataaattgtgttctaggataggtagaacgaacatgactggagcgatccttgttcagattgtaaagaaaaggacagacccagtgctgacggttcttatatgagtggggtctggttaaagaataaccaaaacaagtcttatacttttaacttgcagagaggttgcatcgaatctaggactttggctcggtagaaaggtttttcaccactgcgttaggcctatacttttttcagtttaaccactgtgctagacctgcccccttttttcagtttgtacttggtctaaaaataagagtatactgttttccatgtgtatatatcatcacttcctatttgaatgccccaaaaaacaagagtacactgtttgtcatgtatacaccatcacttcc

SEQ ID NO: 153743 - DNA, 492 bp, Zea mays
  Clone ID: MRT4577_71792C.1
gtctattcgtttggaattgtcatgtgggagttgcttactagggaagagccatactctggtatgcgtgctgctgaaattattgggggcattgtaaacgattccctacgtcctcaaattccttcatggtgtgatcctgagtggaaggggttgatggaaagctgttggtccagtgatccagctgagagaccgtccttcacggatatatctcaaaggttgaggaaaatggccgccgcaatgaatgtgaagtaaaggtctggaagccatatttgtcttcatcgcagttgatgaccctactccaagtgataatttatcaagtgctgacttcatgggagaaaatctatgtcatggagattccaaagcatgtttgatgttttcttttaatcctggagtaaaccggctaccatttgccttccgccgaaaacaagtatgctatatggcgcattgtcttgatgggagctgttgcactgtcatgtaaataagttttgacttgct

SEQ ID NO: 153744 - DNA, 2610 bp, Zea mays
  Clone ID: MRT4577_71793C.1
caatctttgaggaggagagcgaagagtcctgttgacactgccgcaccatatgattccccacacctgccaataccaaatgggagcattaacatgaattctgttagaaatacaggtgatgcgagtcccaggatagcaggtcttattggatatgatcgaatgccaaacccatttactccgcccaatggcagcatactatatagagttggtgggcatgatgttcctgcagctatggagaacactagtgcttttggtcctaggtctaatccaactgctgctcagtatgttcagccttttattgctcctgaatcaatccagcatcaacctggagttcccttgagggaggtttatcctgaaagagcataccctgaacccatgccgtcatcatatgctgatggcaaagtagctgtttctgcattgcccctcaccgaccaattattcaggttggatataaacacaatgaagaaacttgaaggacaagatgatgggaactctactcgaaatgtgaatgaaacaactcttttgcatgctgtggatgaaccaagtaccttaccccaccatgttggatctgtacatgaagtcgatcctaagcaggagaagctaaccgaaaaagaaagcaggcaaaagcaacatgaagctggggctacagcactgcaggaatgtggggatatttcagaggatatgttgaatttccttcctgaattaattgcctctgttaaaaaggtaacactggaagatgctgctgagacacaaatagcccaatcagatgctaatgctgctgtttcacctgttcctgatgatgacgataatggaaagaagctggatgaggcaacatctggtaatacaaatgcaaatcaggaccctgatttgcaaggaagccttgatcggcagaagagtttcaagattgagtctacaactgctgaagctgaagctttgtcgaaaggactacagactataaaaaatgatgatttagaggaaattagagagctgggttcaggtacttatggggcggtctatcatggcaaatggaggggatgcgatgttgctattaaaagaataaaagcaagttgctttgctggaagaccatctgaaagagagcgtttgatcacggatttctggaaagaagctctgatcctaagctcacttcatcatccaaatgtggttgcattttatggtgtagttcgtgatggtccagatggaagcttagcaactgttactgagtttatggttaatgggtctctcaaacagttcctgaggaaaaaagacagatcgccggaagagagtaatattagccatggatgctgcatttggcatggaatatttgcacgggaagaatatagtccattttgacctgaagtgtgagaatctactggtgaacatgagggatccacagcgaccaatctgcaagatcggtgatctcgggctatcaaaggttaaacagcatactttggtatctggtggtgttagaggaaccttaccgtggatggcaccagagcttctgagtgggaaaaacaatatggtgtcagagaagattgacgtctattcgtttggaattgtcatgtgggagctgcttactggggaagagccatactctgatatgcgtgctgctgaaattattggggccattgtaaacgattccctacgccctcaaatcccttcatggtgtgatcctgagtggaagggattgatggaaagctgttggtccagtgatccagccgagagaccgtccttcactgatatatctcaaaggttgaggaaaatggccgctgcaatgaatgtgaagtgaaggttcggaagccatatttgtcttgtaagtgctcccacatccagtataagtgattacaagaggaaggtagagttcaaacaggattgatttgagtaaatatggccaaaatgtcttggcagcatctcagtttaccctactccaagtgataattttattatgtcatggagattccaaagcatgtttgatgcgagccagctgttgggtttatttactccttgtatgaccattagtaaaagggaaaactgacgtttctgcttacctgtttcaggattttccttagtcctggagtaacccggctgtcatttgccttccgccgaaaataagtatgctatatggcgcattgtcttgatgggagctgttgcactgtcatgtaaataagttttgacttgctggcccgtagtagatgtgcaaagtaataggcacgatcacacagttactttttttttccccatataaattgtgttctaggataggtagaacgaacatgactggagcgatccttgttcagattgtaaagaaaaggacagacccagtgctgacggttcttatatgagtggggtctggttaaagaataaccaaaacaagtcttatactttatcttgcagagaggttgcatcgaatctaggactttggctcggtagaaaggtttttcaccactgcgttaggcctatacttttttcagtttaaccactgtgctagacctgcccccttttttcagtttgtacttggtctaaaaataagagtatactgttttcctgtatcaaaaaaaaaaaaaaaaaaaaaaaaaaaaaaaaaaccaaaaaaaaaaaaaaaacaaaaaaaaaaaa

SEQ ID NO: 153745 - DNA, 455 bp, Zea mays
  unsure (1)..(455): unsure at all n locations
  Clone ID: MRT4577_71794C.1
gtgcgagcattctgacacaatcagtggaagcatcatcggggacatggacctgtgtagccccacccggggggggggctttggggggagtggtttanttcctcactaggagacatgcaagagcagtggatagcagacttttatgggtgtgcctgtgcagggtcccaatcttgggatggccaggggaaagccatcttatcaccggttggagattaacatggtagcttctggaggtacaccgaccttggcgagatgtgggtttgggcatccccagggtatttttggcagcacaacccagatccagtgttctggagttcttttggagggtcatcagctgggatcaggtaaatgtggaaatggctcaccaagaaccagtatacaggttttatgtagggagagaagaaaatgctccggttggtttagggtttagaggtttcaggtttttttcttttgttttc

SEQ ID NO: 153746 - DNA, 807 bp, Zea mays
  Clone ID: MRT4577_71795C.1
atgtttgagattgttgatatggagttcccatacaatgccatcatcagaagaggaactctcaacatatttgaagcaattctgcattcagcttacctctgtatgaagataccaagcaacaatgggtcatatcagtctatggtagccaagaagcagcaagaagggcaaaaggaggatgagctgaagaacagtttcataacccctagtggtacttactactatcttcggttgcctgaggggctcaagaatgctggtggaagcttcagcagaatgtcagacaaggtgttgagttcacaattggacaaaaatgttttgacttatattgatgatatcattgagatagtggacgaaggtgtaaaaaggcatatgcctagctacttcgtattcaaagtattaggaacatccaaaaggaactatacagagatggagaaggtcctatacgcagtcctaatggcttcaaaaaagcttcgtcattacttccaatcccacaacattattgtgccatcatcccaaccactcaaggacatcataacaaatagggaggcctcgagccaaattggaaagtgggttgtagagattaaggagtttgttatagactttgttcatagatcatccatccaatctcaagctttagcagattttatcgctggttggactcctagctcgcaagacaaagcaactcagtcagacgaagttgtctggacagtcttttgtgatggttcttggggctcctttggggatggtgctgcaaatgttattgtttcaccgcctgaagtaagaactttgtatgctgtcaagttacagttctag

SEQ ID NO: 153747 - DNA, 337 bp, Zea mays
  unsure (1)..(337): unsure at all n locations
  Clone ID: MRT4577_71796C.1
ggnatcctctanacaaccccccgttggttggtgtgtttttaaaaaaaaaaaacctatataatgtttttcttctttcttctaaatctaaaaacctacagatattatccaaacatacaaacaccgacatccctttttttttttctttttattctaaaaacctacaaattttttttgttgggggggacacctaccctnncnncantacaacacctaacaataacacatactaccccacccnnatatnncccntnnncacccacnacacacacacacacctaccantcnttcttatcctccaatttattnncccttatcnncttttctcccacaatncatt

SEQ ID NO: 153748 - DNA, 565 bp, Zea mays
  Clone ID: MRT4577_71797C.1
aaatcgccaactcaggccggtggggcactctaggaccagaacaagcctaatacagaatctgccgttcgtgaatgaagaagacctgcagaccttaggagcaggaaggacactctcgcccatgatcgaggagctcacactcccctctgtcactgtagcacagacatgcaaccagactgaaactacttgcaggaaaagagatagctgggtcttacatggaggtgctgactgactctactcgaacgaccttacagacgaggatcctgaaggggcggccctggattttcccaaaaacggagatcctttcggacccgcaaaacatgcgagcgacacccgagcccggagcgccaaccagcccccgcagccggcgggcggcttcggcgtggacagtcgcgtggagagcaccttggacgggctgacggacctgccttacattggcatctacctctgaggaggcccaaacgaccaccgggagatcacgaaagatgcattgctgtagcaagctggggcatagcaacagtttgaagacaaccccgctattataaatgaccccaagctcggggtaaag

SEQ ID NO: 153749 - DNA, 264 bp, Zea mays
  Clone ID: MRT4577_71798C.1
agcagtggtaacaacgcagagtacgcggggggcaagtgatttagtggaagtacctagccagctattccagggttcattgttgcttggacttattagtagagcaacatttgaatataggtatctgatacttgatattttgaactcggttcatttctaatatttctaataaaaaaaaaaaaaaaaaaaaaaaaaaaaaaaaaaaaaaaccaaaaaaaaaaaaaaaaaaaaaaaaaaaaaaagtactctgcgttgttaccactgctt

SEQ ID NO: 153750 - DNA, 3156 bp, Zea mays
  Clone ID: MRT4577_71799C.1
atgctgaatgaaaacaactcgcttgtcaaagcgttccgatacgcgagagagcgccttgagcgcgagggtaatcaaaagataacactcagattgctaggctgcaacacacgccatgatgtacaatacaacctaccctcaaatggtgagatcgctgccatagttgttggtgactacacgactggggaatacacgtacgatgttcttgtgcacgatagagagtgtggcctaaaacgtgtttcatgcttgcatccagcatacatgcctttgcaatatccgctgttgtttccttacggtgaacatggcttccatattggtattaggtactttggtgctaacgaggttggttcatcaaaacgaaaatacgttacgatgcttgagtttgtaaggagacacctgcactacagattggatgagccaaacccatatacgtgttacggtagattaagtgatcaaatagatgtcgatgcatattcaactatcgagggcaacatgctacagttcatagcaagccaccaaagcgaactgcgttcagaaactatccaaggcatagctgacgccattgataagggcttcctcaatgctgattcgattggtggtcgtgtagttgttcctgccagcttcattggtggtagaaggtaccatgtcatgaattaccaggacgcgatggctatatgtagggtatacggacctccagatctttttgtgacttttacttgtaatactaagtggagggaaatagccgatgccttacgctttgaacctggccaacaaccatgcgatcgttctgacttggtggtgcgtgtgttccatatgaaagtaaacgaattcatagcagatattagagagggaaagacatttggttcgatacttgcggtcctatacactgttgaattccaaaaacgtggcttgccgcatatacactgccttgtgtggctaaccgatgggagcaaagagtttagtgcttctattgttgacagattcatttgcgctgagattcctgatatcgtcgctgaccctttagggttttctttggtcgacgaatttatgatgcacggtccctgtggtgtcgacaacaaaagatgcccatgtatgaaaaacgacaaatgcagcaaaaaattcccaaagcctttccaagaagagaccatcttagacggatttggctttactatctataggcgtaggcctgatgacagacatgttctcaagaatggtgtgagacttgataatagaaatgttgttccatataatatgcaccttctgaaaaagtataacgcacacataaacgttgaatggtgcaacaagtcaaacatgattaaatatctattcaagtatgttacgaagggaatcgatagagcaaaggtgtacttcgaaatcaccgcaaacacgtctaacgcgtcgcctgctctgcaggtagccccaccgaatgaaatccaggaatacatcgatgctaggacgttcaacggtcaagtgtacgacacatttcgtgctgcctgcgaggcgcgtgggttgcttgagagcaataatgagtggaagttgttgtttgacgaggcgatcgtatccgcgtcgtcgtaccagctcaggcagctttttgtgaccgtggttatgttctgccctgttgctaatgtgcgtgcattgtttgatacatactggctatcttttacagatgacattgtccgacaacttagagatacattgggaaatcctaactacaacataccgcatgaacaactcatgtctctcctgatacgcaaactttcggctgcctttgctaatagtggcgggaacataaatgattacggtctgccaaggatagatgtccaatgcgctttcatggatgagaacagattaattaatgatgaaattgaccctgagccattaatgttgtcgatgcacgctgattccttggttacacagttgaatgcgaaacaacgaaccatttatgataccataattggtcgtgtttataaacttatacaggtgtcctccctcattatatgggatgaggcgccaatgacgcaccgttggtgctttgaggctttagataagacaatgcgtgatattctttcagagcatactccttcaaatgcgctcctcccatttggtggcaagcttgtagttcttggtggcgatttctgtcaaatactacctgttgttagaaaaggatctcgctcttccatagttaacgcctctattacaaactctaatctatggcaccatgttgtcctccttaggctacgcaccaacatgcgccttttcgatccctctttgcaagaagatgcacagaaagagctcgacatgtttgccaaatgggtcctatctattggtgatggtaccttgcctgctgaaagaagagggagcgagtgtgaggcaacgtggattacaatccctgtagatttgttgccccgtgttgagggtgataaggtagctgcccttgtatcagaagtatacccaaattttctattgaattaccaagatcccacgtacctttcctcgcgtgccattgtttgcccaaataatgcaacagttgatgacgttaacaaatacgttctctcgcttgtccctagagaaaccatacaatacctgagctgtgacgttatagcaaaatcgtcggaacacataccagactttgatgtcctctaccctactgaattcttaaactcaattgatgcgagcaattttcctacccacaaactcgagctaaaaaagggtgccattgtgatgttgttgcgcaacctgaatcaaaataagggtctctgtaatggcacaaggcttcttgtcactgaactcggtcaacgcatcttgcactgtgtagcgcttacaggatcaaatgttggggaagaagtcttaataccaaggattgcccttaatactactgatgtgaagtggcccttcacacttcagcgacgccaattcccagtgcgtctgtgttatgcaatgacgataaataaaagtcaggggcaaacgttatcaagagttggcctttacctcaagggacctgtctttatgcatggacagctttatgtggctgtctcccgttcaacgtctagaaatggacttataatcctgattgaaaatgaagatgcttcgtgcggctcacagacccggaacgttgtttacaaggaagtccttgctgccgctgatgcgactgccacttag

SEQ ID NO: 153751 - DNA, 219 bp, Zea mays
  Clone ID: MRT4577_7179C.1
cccacgcgtcccaaaacgcaaagtttcattttacatacataaaaatacagggcgactaagcaaattatattgattaactacacaacacaaaacaccacacacatatattaaaaatttcatctaattaaaaatacacctgaacttcacaaagcaacaaatccttcacaattgaagtcttacactgtactaacatacagaattaatatacaacatctattt

SEQ ID NO: 153752 - DNA, 456 bp, Zea mays
  unsure (1)..(456): unsure at all n locations
  Clone ID: MRT4577_717C.1
gggggtggggggttttttttttttttttttttttttttttttggggggaacagaggtttgttatttgccaacagattacacacatgattggggtttcacacgcaaccggtcggtttgacgatttttctcctttttattagcaccagttttgggtgggggggcatgtttggggtgtgggcttgcgggccacccagatccatgatacagagattgattcattggtttggatgagcatgacttgttgggagccactttgtttcaccaccattcaccaacgcatgttcaaagttctgcattattattggattgccttcgccaggtgttgaccgatcagtgcaangccttttggacagtaaaacctttcacccccttgaaaaggggaccggagattttttttttttggggggggacaaggggtgaccttttgctttggggtttttggtagattttgagccc

SEQ ID NO: 153753 - DNA, 507 bp, Zea mays
  unsure (1)..(507): unsure at all n locations
  Clone ID: MRT4577_71800C.1
aaaaaaaaaaaaaaaaaaaaaaaaaaaaaaaaaaaaaaaaaaaaaaaaaaaaaaaaaaaaaaaaaaaaaaaaaaaaaaaaaaaaaaaaaaaaaaaaataaaagggggggggccttttggccgggaccccccttaggggcatttttttggggttttccttccccttgggggccgtttgaccttttttttagggggcccatttcccctttttgggggtgtttttacatttcattggccgtttttttacaactttgggattggaaaaaccttgggtttccccaatttattccctttgcacaacttccctttttttccagttgggttaatagcaaaaaggcccgcaccgttcctctttccaaaatttttttcacccttattggtgattggcccccccctttancggccctttattcccggcggttgtgggggttcccctcattgggaccgtttcttttgcgctggcctttgcccccgctcttttcgttttttttcctttctttttttcccc

SEQ ID NO: 153754 - DNA, 338 bp, Zea mays
  Clone ID: MRT4577_71801C.1
aaaagcaacactggccccgtttattattggcgacaccctaccgggcggcccgggctgggggtgacagaatataaacgatgatgggcgatgaatgaccacccgatcgaatacatacgtacgtacgtacagggggcttgatgagcactagtagcaactaggtcctagttccgatttttgaggggggggcgagcgtttagcgggatcttaaaatttgggcgcgggaccataacgacgtcgacggttttatcgccgccagcgtctatattaaacagcactttggggatgcacagggggaggtttactttccgggttttcccggggccggagcccgggacaac

SEQ ID NO: 153755 - DNA, 161 bp, Zea mays
  Clone ID: MRT4577_71802C.1
attatccagacccatagaaggctcctcgtgaccgatctactctcagccgcttacaaggtttccccttctcccacgtgcgtaacgaggcagacaactccgtatcggaggaggagaccaagatcaaatgcattctcatcctcctcggcgagcacctcgatatc

SEQ ID NO: 153756 - DNA, 479 bp, Zea mays
  Clone ID: MRT4577_71803C.1
ccgggctctcgctccgaggctcggctcggccagaaccctactcagccaattaatgcatccgccgcagccgtgtctgatctgcagcctgacgctgtcgctgaaccattgttgcagattctggagagactcaacgagaacaagcttaggatgcctgacacgctcgaccttcctatggctctgaaaacatatgatccacctaacgacactctggctgagcgtgtctgtgatcctgacccacatccgcaggctcaagaccactgtgacctacctcgaggatccccacatagtgcagggggcccatatgattgtagttgactacgtggataccgacgctatctagcatgtgaacccgagcaggaggcttgttcatcatgcttgcccagaccgaccaagcttttttggcagtagagctagcagcagagcccattacgcgcccacttggagctgtacgctcaatggcaagcaacttcccggccctg

SEQ ID NO: 153757 - DNA, 1727 bp, Zea mays
  unsure (1)..(1727): unsure at all n locations
  Clone ID: MRT4577_71804C.1
atggctcattccaacggcgcggccgccactgccactgccggcggcggcgacatggacgacgagnnnnnnnnnnnnnnnnnnnnnnnnnnnnnnnnnnnnnnggtggcgctgatcacgggcatcacggggcagaacgggagctacctcacggagntgctcctgtccaagggatacgaggtgcacggcctcatcctccgctcctccaacttcaacacgcagcggctggaccacatctaccacgacccgcacncggtgccgtcggcnccgcgtnnnnngatncggctcttctacgccgacctgtccgnnnnnnnnnnnnnnnnnnnnnnnnncgacgccacttnnnnngacgaggtctacaaccctgccgcgcagtcgcacgtcgccgtctccttcgagatcccgcactactccgccgacgtcaccgccacnnnnncgctccgcctcctcgaggccgtccgcctgtcgcgcaagcccatgcgctactaccaggccggttcctcggagatgttcggctccacgccgccgccgcagngcgaggacagccccttccacccgcgctcgccctacgccgccgccaaggtcgccgcgcactggtacaccgtcaactaccgcgaggcctacggcgtattcgcctgcaacggcgtgctcttcaaccacgagtccccgcgccgcggcgagaacttcgtcacgcgcaacatcacgcgcgccgtcggccgcatcaaggtcgggctgcagaccagggtcttcctcggcaacctctcggccgccagggactgggggttcgcgggggactacgtcgaggcaatgtggctcatgctgcagcaggaacagccgggggattacgtcgtcgccactgaggagtcccacaccgtcgaggagttcctgcaggctgccttcggctacgccggcctcagctggaaggatcacgtggtcattgacaagaagtacttccggcctgcagaagtcgacagcctcaagggggacgccaccaaggcgaggaaggtgctcaagtggaagcccaaggttgggttccaggagctcgtggagatgatggtcgatcacgacattgagctcgccaagaaggagaaggtcctggtggatgctgggtaccgtgatcccaagcagcagccatagaaacatcacagttgcttcttgctctgttggggctcggattcagattgttcccctcatacatggtgggtctcaggggtagaggttgactgaagttactatcgatatttatcctggtaagaaataaggattgttgcagtatgatcttacagtgtgttcatttagttttctgactatgttatgtgctttaatcgaatgaatgaataatccgtgccaatttggtatttggaagaggatgatatgcctgcctgattgcagctgttgatgttaagagcaaaagtgtcctcctgatagcagctgcttcagtttgtattgttccacttcagctactcccacacttgttctgatacatggcagaaaagctgttgtagggacattttgtaagttgaatcagtggcaaatgcatccaacaacacttgcagttgaagaggggaacaaacaaaaggaaacaaaaaatagcacctaactctacctctacctgtgcagggagagcaattttaccattattatcaatggatttaccatgttggagtcacttgagttctcaatcttggtatgccatgtcacttgagtgcgccatcgtggcacgccacgtc

SEQ ID NO: 153758 - DNA, 1650 bp, Zea mays
  Clone ID: MRT4577_71805C.1
ctcgaggccggccgggccgggtaatttgcttcggcactctgccgccgcacccccaacccgtggcaatcaatccccttcctcgcttcgcaaatggctcattccaatggcgcggccgccactgccactgccggcggcggcgacgtggacgacgagaccgccccggtgccgcgggccctcgcgccggcgcggaaggtggcgctgatcacgggcatcacggggcaggacgggagctacctcacggagctgctcctgtccaagggatacgaggtgcacggcctcatccgccgctcctccaacttcaacacgcagcggctggaccacatctaccacgacccgcacgcggtgccgtcggccccgcgtcccccgatgcggctccactacgccgacctctccgactcctcctccctccgccgcgcgctcgacgccatctcccccgacgaggtctacaacctcgccgcgcagtcgcacgtcgccgtctccttcgagatccccgactacaccgccgacgtcaccgccacgggggcgctccgcctcctcgaggccgtccgcctgtcgcgcaagcccatgcgctactaccaggccggctcctcggagatgttcggctccacgccgccgccgcagcgcgaggacacgcccttccacccgcgctcgccctacgccgccgccaaggtcgccgcgcactggtacaccgtcaactaccgcgaggcctacggcgtattcgcctgcaacggcgtgctcttcaaccacgagtccccgcgccgcggcgagaacttcgtcacgcgcaagatcacgcgcgccgtcggccgcatcaagctcggcctgcagaccaaggtcttcctgggcaacctctcggcggccagggactgggggttcgcgggggactacgtggaggcaatgtggctcatgctgcagcaggatcagccggccgactacgtcgtcgccaccgaggagtcccacacagtcgaggagttcttgcaggctgccttcggctacgccggcctcaactggaaggatcatgtggtcattgacaagaagtacttccgccccgcagaggtcgacagcctccagggagactccaccaaggcgaggaagttgctcaaatggaagcccaaggttgggttccagcagctcgttgagatgatggttgatcgcgacgttgagctcgccaagaaggagaaggtcctggtcgatgctgggtaccgtgaccccaagcagcagccatagaagcagcacggctgcttcttgctctgctgcgttccggattcagactgttgctcatacacggtgattctcagagtaaaggttgacccaagttactatcgatacttctccaggtaagaaataaggatggttgcagtatgaccctcacagtatcttcattactttttttttcctgactataaaccaaacacccccttaaacaaaacgatgaataatccatgccagtttggtatttggaagaggatgaaacgcctgtctgattgtagctgttgatgttaagacatactgatagcatcagtttgtattgttctacttcagctactgtcacacatgtactgtttgatcggaaatatatgtttttttaggaaggttaatttcaaaaaaaaaaaaaaaaaaaaaaaaaaaaaaaaaaaaaaaaacccccccccc

SEQ ID NO: 153759 - DNA, 231 bp, Zea mays
  Clone ID: MRT4577_71806C.1
ggaaagaagaaaatcgttttttttggccccgcaagcaggagaaaaaactggaacaattcccaaaaggggggggagggaatcccactccgggaggacctttcagaaaccacaggaacgccaaccgggcgaggttttcaggcagggacgcgcccaacccccacagtacccggattatgcacgcaatgaacgccccactgagctggcacccgcggtaacaaagcaaccaactgc

SEQ ID NO: 153760 - DNA, 236 bp, Zea mays
  Clone ID: MRT4577_71807C.1
aaaaaaaaaaaaaataatataaaaaaaaaaaaaaaaataaaaaaaaaaaaataaaaaaaaaaaaaggagataaaagggaaaaaaaggggcggccgatctaaaaggaaccaagttaacatacccttgctttcagcaaaaaaagcgttgtgttggggtctcacttaattaaatttcctgcccgctgtttatcaccgttttgttctgttaaaaccctgcccttacccaacttaatggcc

SEQ ID NO: 153761 - DNA, 567 bp, Zea mays
  unsure (1)..(567): unsure at all n locations
  Clone ID: MRT4577_71808C.1
cgccacgaacttcaatccataccaatacattttcttacacatatacacgcatgcacaacatcgaccaaggcttaaatagattaatccacaaaataccaagtgaacaacctggacgaatcgaggctagtaacatgggctgtccacaaggcttggcgtttcgtcgaatgggccaagcgcgaagcgcggcgtcgaccactagcgagggtcgacggcatagcggacggggctgtgcacaacacattatttctcacgggtattccgtcgaacagccaaggggcattgaagagaacagcaagggcgctcagctatgggagggaagcaggggcgccatggaggttgctgccgctgcttggtgttttgaagggtgggctgttgttcttccctgcgcttgaggggtttcctgcgcacgagcagagagggagnggaggtgccatggctgccacagagggcgtcggccaagggaactgctccctgcgcgcaggggagntattggctccctgctcttaacgcagtggagaagagggggcgttgggcagaggaagaagaatggcttgggcgccatggctg

SEQ ID NO: 153762 - DNA, 186 bp, Zea mays
  Clone ID: MRT4577_71809C.1
acgtgagttgcctttgaaagcgtaaagacgtggacgagcgctacaccgactgtactctttctttctcgctttggtcgtccacctcgattaacgattactggtggggagggaaagggaacgggagacgggaggggaatccaattgcgatggcctaccgactcgggcgatttcggtggggagaacaag

SEQ ID NO: 153763 - DNA, 711 bp, Zea mays
  Clone ID: MRT4577_7180C.1
ccggccggaaatcacctacacaaaacaactcatccctgaatcccgcaaacaccatagcagatctccgtgttgctcgcgtccattggatgcgctcgggttgctggggttcgacctccctataaagcaaggcaccgtgatttcccctagcatcccacctagccgggacctgagaacgaagagagagcgaggaggatccgccgcgagctcctctgcatctcaccggtaatcagccaatcattgaggccaagaaggggggttcgctagggagtgcacggacactggatcaaggaagacaaacagaagattcaataatttctagccgaacttgggtttcgtcaccggtccgtcccgcggcatggcgaaatcgccgccgcggccatctcatgtgcacaccgctgcgccacccatggagagctactagggatctttgccattggttctgggtcctgcggctacctttctggggtcgaatgggacctcgagtggtggatgattgctcgccggaatcctaggggtatcaccggccgcaccacgccgttgccaggcttccccacgtctacgccacaggtaccatggattctgggtattacacaaatctcctagttaatggtattgaagaatctcaagcactcgtggtgatgtaagatacagcatggtcgtgcaacagccaagagttctcagggtagaaagaaaaaaaaaaaaaaagcggcc

SEQ ID NO: 153764 - DNA, 384 bp, Zea mays
  Clone ID: MRT4577_71810C.1
cctgccggtttatcttgttttctatccgcttcgctgcaccttgccgacgccgtaatcgatcaacagtaagacaccatcatgtagttggccaccatattgtggtatcgtcccgagaagatgagtgttgggagcgcccgcgttacttacatcggtggctcgactgtttgccgcgcgaggagacaccgaccctcgcggcacccatgtctgagtcgttcatcctgatggcctctctcctaagactcgggcatggcattgcatccacgtcccccaaaatagcttgtctgtctgacagagatcttagctgactatgtcaatctgaatcatccgtccacaccgatctgcggctgtgtgttgaaagacactcactgcaagggggcctgcgtg

SEQ ID NO: 153765 - DNA, 618 bp, Zea mays
  Clone ID: MRT4577_71811C.1
atcaaaggagcagctgccactgcacgcgaagaggggacctattcccttccaaagcaacgaactttcttccgcggtttatctgttgtagcgcttgcctccgcactcgtcactcacctaacagcctccatccccgctgtgttgttgcatcgaccgtccctggagatggatcggcggacatctcagcagcagtgcagcacgagcaggcaacacgagagatggatcgagtacatgagcagcacctagacaggaactggacggacgtggacaggaaccggatggagatggatcgagtacgtgagcagcatggcagcacgggatgccaaggggaaaaaaatggattggcgccgatgaaaactgatttagttgctaaatactatatttgaggctctgttgttggagacccaagttttatgtcactcctaagtagattagatcggttctacaaattaaatttaggacctcggtttaggattcctttttggagttgctctaattagctgtagtgggatattttacgtaggaagcatggcttagatagaacaattaggcgagagcaaaaatctctaaactacagtcaacctgtagtgggatattttagattatttatttttttgacat

SEQ ID NO: 153766 - DNA, 212 bp, Zea mays
  Clone ID: MRT4577_71812C.1
caacgtccaaaatccagaccgctggtaggagtatctcgtatacattgatcaacgggggcggggcgagcgcctgcgccacctccatccccctcgtctcggcgccttctgcatgcccttccaagaagaccaccgtcgccaggttcctgtgctctacggcgacttgcatggccatcagcggcggtggctgtggccgttgctgcgaaaatgatggc

SEQ ID NO: 153767 - DNA, 2021 bp, Zea mays
  Clone ID: MRT4577_71813C.1
cgccgccgggaccagcccgcggcctcccagccgcaccaggaaggggtcgattcctccgacgccgcgcctccggcggacgccgcggcgccggatcatccggcggccgagaagcctgagaaggtcaagcgggagcggcggtcgcggtcgtcgcgctccgcatccaccgcggcggcggcgcacgccgaggttcgcctgggcgggagctttgccaacaaggcgcgcggggcgcgtggggccgctggctggcccgcctggctctccgccgtcgccggtgaggccatcgatggctggacccctcgccgcgccgactccttcgagaagatcgacaagatcggccagggcacgtacagcaatgtgtacaaggcgcgggactcgctcagcggcaagatcgtggcgctcaagaaggtgcgcttcgacaacctggagcccgagagcgtgcggttcatggcgcgcgagatccgcatcctgcgccgcctcgaccaccccaatgtcatcaagctcgacgggctcgtcacctcccgcatgtcctgcagcctctacctcgtcttcgactacatggtccacgacctcgccggcctcgccgccagccccgacatcaagttcacgctgccccgggtcaagtgctatgtgcgtcagctcttgtcagggctggagcactgccacaaccggggagtgcttcaccgcgacatcaaggggtcaaacctgcttttggacaacaacggtgtgctgaagattggcgatttcggtctggcgtccttcttcgaccccaaccataaacagccaatgacgagtcgggtggtgacactctggtaccgccctccagagttgctgctgggtgcgacggattatggagttggcgtcgacttgtggagtgcaggatgtatactggctgaattgctggctggaaagcctattatgcctggacggactgaggtggaacagctgcataaaatttttaagctatgtggctctccaacggaagaatattggaaaaaatcaaagttgccccatgcaactatatttaagcctcaacagccatacaaaaggcgaatagcagatacattcaaagatttccctcaatcagcacttcgactgatcgagacactacttgcaatcgacccatctgaccgattaactgcaacttctgcattgaacagtgatttctttaaaacagagccttatgcgtgtgaaccatcaagtctgccccaatacccgccaagcaaagagatggatgccaaacgaagagacgaagaagctagacgattaaaggctgctggtggtagagctaatggagatggaacaaggaagacaaggacacgggaccggcctagggctgttccagctccagaggcaaacgccgaactgcaagcaaatattgataaaagaaggttaataactcatgcaaatgcgaagagcaagagtgaaaagttccctccgccgcatcaggatggcgcacttggatttcccttgggctgttcgaaccacatggaaccttcatttgaacccccagacccttcttccttcagcactgtatttccttacgaaaaaagcaccgtgccaacctggtccggaccattggcggactctgcagctggcaaccagaagcggaaacacaagtctggccgctcctcgaaacaaccagcaaccgcccgtgctagatgatacacatcatgccatgcttagtccaaaccaaatcttcaatacctcccaaagaaataccttgcagtggttcctacaaactgggatacctgattcggaatcaagagctacagcaatgaactgttttcttttcctcagatccattcatgtacgcattttttttcctgagcatcgagcaatgtataggctggagatggagctggattagtcagttatgtacattaggttctcttttccattcttacaagcagcaacatgtcagtttagatttattcgagtgaggaatggagctggtaggtcaacttagcaagctatcattctacatagatacttacaatcaattgaaatattttttacttttt

SEQ ID NO: 153768 - DNA, 282 bp, Zea mays
  Clone ID: MRT4577_71814C.1
ctcaactttattttggccagtttatcataaggggggggaatcaagattttggggtcacaaaagctcatcatattacacaattggtactaatgaattacaagtgtgctttctgataaaagaacctccgaactttgaaagaggaatgtaacttcacacaacataggctgggataatttgaaacagacacgaatgcatgctttcaataccgggacaatctaaaaatagcagcttcgacttctttaatacctactcttgaacgggatcaccctggtgatcacctga

SEQ ID NO: 153769 - DNA, 2210 bp, Zea mays
  Clone ID: MRT4577_71815C.1
aattcggcacgaggtactttactcgcccccaccaccaccacctccacgcccgccttccgcttcccacccgccccgcctgtctccacgcgccgccgccgcctccggatcgcggcctccctcctgccctgcagcgaagctttgcgcgctcggctcggcccggcccggcccatgccccgccgtgggtgaccagcgcctccacgtccggccatgggctgcgtgcacggccgccccgccacctccagccccgcgcccgccgccacctcctccagccgccgggaccatcccacggcctcccagacgcacaaggacggggtcgattccgccgccgccgcacctccggtggacgccgaggcgccggagcagcaggcggccgagaagccccagaaggtcaagcgggagcggcggtcgcggtcgtcgcgctccgccgccttcgcggcgcacaccgaggtgcgcctgggcgggagcttcgccaacaaggcgcgcggcgagcaggtcgccgccggctggcccgcttggctctccgctgtcgccggcgaggccatcgaaggatggaccccgcgccgcgccgacggcttcgagaagatcgacaagatcggccagggcacgtacagcaatgtgtacaaggcgcgagactcgctgagcggcaagatcgtggcgctcaagaaggtgcgcttcgacaacctggagcccgagagcgtgcggttcatggcgcgcgagatcctcatcctgcgccgcctcgaccaccccaatgtcgtcaagctcgacgggctcgtcacctcccgcatgtcctgcagcctctacctcgtcttcgactacatggtccacgacctcgccggcctagccgccagccccgacatcaagttcacgctgccccaggtcaagtgctatgtgcaccagctgttgtcaggacttgagcattgtcacaaccggggagtgctacatcgcgacatcaaggggtctaacctgcttttggacaacaacggtgtgctgaagattgctgatttcggtctggcgtccttcttcgaccccaaccataaacagccaatgacgagtcgggtggtgacactctggtaccgcccaccagagctgctgctgggtgcgacagattatggagttggcgtcgacttgtggagcgcaggatgtatactagctgaattgctggctggaaagcccattatgcctggacggactgaggtggaacagctgcataaaatttttaagctatgtggctctccgacagaagaatattggaaaaaatcaaagttgcctcatgcaactatatttaagccccaacagccatacaaaaggcgaatagcggatacattcaaagatttccctcaatcagcacttcgactgatcgagacactacttgcaattgatccagctgatcggttaacggcaacttctgcattgaacagtgatttctttgcaacagagccttatgcgtgtgaaccatcaagtctgccccaatacccaccaagtaaagagatggatgctaaacgaagagacgaagaagctagacgcttaagggctgctggtggtagaggtaacggagatggaacaaggaagacaaggacacgggatcggcctagggctgttccagcgccagaggcaaacgccgaactgcaagcaaacattgataaaagaaggttgataactcatgcaaatgctaagagcaagagcgaaaagttccctccaccgcatcaggacggcgcgctcggctttcccttgggctgttcgaatcacatggaaccttcattcgagcccccggacccttcttccttcagcactgtatttcctttcgagaaaagcgcggtgccaacctggtccggaccgctggcggactccgcagctgggaaccagaagcggaaacacaagtctgcccgctcctcaaaacaaccagcaactgcccgtgctagatgatacacaccatgccgtgcttagcgcagatcaagtcttcaatacccccaaagaaatacattgtagtggttcctacaaactgggatgtctgattcggaatcaagagctacaacaaggaattgtttacttttttctcggatccaattcatgtatgaaattttttctgaacaacggtcaatgtataggctggagagggagctcgattagtccaaaaaaaaaaaaaaaaagggcggccgccgactagtgagctcgtcgacccgggaattaattccggaccggtacctgcaggc

SEQ ID NO: 153770 - DNA, 246 bp, Zea mays
  Clone ID: MRT4577_71816C.1
cggaagctcataagaggagaccgagtgaaatgttccgctctactggtggctggacaccgacgggcttcttgtggtctctgacgagcgcgaactcgtggaagagtgcctgtcggaaatcctgtgccccgttccccaaaggagaaaaagaaaatatacgaacagaagtgtttctcgtcagtcttgagtctgctactcgccgctcgctactggacgcctggctggcgtttcgacttggatgtcgctcga

SEQ ID NO: 153771 - DNA, 122 bp, Zea mays
  Clone ID: MRT4577_71817C.1
atccaaactaaaaatacttctacactggaccagctgccggacatggccttgctcacgaaatgatacttcacgcgcgattaccctaatcattattgccaccagagagcttcgattccttacct

SEQ ID NO: 153772 - DNA, 260 bp, Zea mays
  unsure (1)..(260): unsure at all n locations
  Clone ID: MRT4577_71818C.1
ggtcgagcacgcgtccacgaggaggcccggccttctttccccttcccccccccggcggacccaaaaaggccattcgggtcccccggaagaacccccccgccttggcccaacggaagccttcccggcaacttcgngctttgatccctggggcctccgatttgaccccgagagcctgcggtggaacgtgcaggcggagctggtgcactgccggtgggcgatgctcggcgcggcgggcatcttcatcccggagttcctgacca

SEQ ID NO: 153773 - DNA, 1036 bp, Zea mays
  Clone ID: MRT4577_71819C.1
ccggccgggatcatgtcgttgtcccgcccgtcgctgcgcgaggtatggctgtccctgcccctccggtgaggctgggcgtcacaatccacggacaggcccagcgtcgcgtccactctgacccttcgggcttcatctgccgcaccggagccaccacaccttcgcccaccacacgggagacgctccatcgctgctatggtgggccctaccatcgagaggacccaggcacggttgcaggcttgcagcgggcagacaacacggtccaccgcatggccgtcatcgtcgtacccaccacccgatggctgcgcacggtctccagatctgaatagggaggcgacccaacggctgcgcacgatctccagatctaaacaggaagcggcatggtcgtcgttggctggcactgttgccctgcttcgacccaattgtgcttcgtctaccgtatgggagccgcatgggaccgatccaccttcaccatctgcatgggagccggtctgccgctgctatggtggcccctggctctatgcggacccacgcgtagctgcagcgagcaggggatgcagccctttgtgtgatcctcgtcggtgaacccggcaccccacggctgcgtacgtttcagcactgcagcgacatagtcaccgacgttgttgtcctctccacagaaactggggagggaaaggaataacaaatctaagacctaatcttcagatacagagttcgcagaaggctgttcgtcgctgattccttttgggagtatgtatatgatacatgttgggggtctgcttcgtcgccgaaggtcctgtaagaagaaacatcttcggaagatcaacacagaagcaacgccgaagctaccatccagggagcttcggcatagcgatacgccttgagacgaagggatgcaccgacttaaagatgaaaagaccgatcggcccatgataatttgtgtcatgattgtaactagttgtaaaggacatgaatgtaatttcatacaggctgcgacttgtgcctataaataaatgaacagtacccccgtactgttccc

SEQ ID NO: 153774 - DNA, 880 bp, Zea mays
  Clone ID: MRT4577_7181C.1
gcacgagggccagcgttgggcatggcccacctgccattgttagaggcggaagcccacaggcggacccgaatccagaattcctgaatcctgtcactgctcgaaaatcgaaatcgatccgatctccgcttgcgctgaagcctgatctccaccgggttcgcagcaggggcgcaggacctcgatcacgaggaggcaggggagcagcatccacaaccacaagccatggcggggagggccaacatccccactaacaactccgccctcatcgcaatcatcgccgacgaggacaccgtcactggcttcttgatggccggcgttggcaatgttgatctgcgcaagaaaaccaactacctcctcgtcgacaacaagacgacagttaaacaaatcgaggatgcgttcaaagaatttactacgagggaggatattgctattgtgctcatcagtcagtatattgccaacatgataaggtttctggtggatagctacaacaagcccgtccctgctattctggagatcccatccaaggaccatccatatgatccagcgcacgactctgtgctctctcgagtgaaatatctgttctctgcagaatcggtggcgtctgataggcgatgaaggcatccttgcgtagcagtacccttcgatgcatctattttgttatggtattgaaaagaagatggcacgtaccattgggtgcgagcgagccagcatgaataataatgagcttgcaaacaatgattggttgaactaaaccaacacaattttttttcataaatggttcgaatgatattttggtgcttgtgtttgattggttattagggaataaaatgcgattgttatgacgaaaaaaaaaaaaaaaaaactcgagactagttcctcgtgc

SEQ ID NO: 153775 - DNA, 987 bp, Zea mays
  unsure (1)..(987): unsure at all n locations
  Clone ID: MRT4577_71820C.1
ccccgggctgcaggaattcggcacgaggctacctccagcagatgttatatcacattccttttctcatcccctatttcaaacatcactttgcaaacaatatcatctatagtttcatgtcccctattttacaaaaaaaaaaaaaaaaaaaaaaaaaaaagggggggggggggggggaaaaaaacaaacaaaaagggggggggggaaaaaaaaggaaaaggacccggggggggggccggggccccagtggggcggaggggggggcgcttaacgggggggcgcgagggggggcggacccccgggcccaaaacttttttgggaggggaggccccctggggggggaggggtaaaagggggggggggggagaggggggggggggggatcggggggggggggggggggggggccccccccggggggggggggcggggggcccaaagggggggggttccgcccgggccgggagggggacgcgcgccgggcccccccccgcggggagggggggggggcaaggggccggggaacaacggcctaaaaaaaccgaggggggggggggcgcaaaagtggcggtattgggaaaggccgagcccaaaaacggtgggggggaggccgcgaccgggaacacgggggggggggccccccccccccacaccgggaaaggccggatcacgcccgggggggaagggggggggcgggcgcgccccccagtgtaaagggcgggggggggccttttttggtgggcgcgccggcnccggccccaaaataaaaagagaaagaaaaaggggggggcgggggcgggcaacccacctcggagggggggcgggtcgcggccccataccccactttcttcccnttggcggccggggggcgcccacanacacattnctccttttcagaagggnatttcatatgagngggacggggggtttagaccctcctccagccgcgcgggggggaccccacgntatgaaccccccactcataacgaa

SEQ ID NO: 153776 - DNA, 388 bp, Zea mays
  Clone ID: MRT4577_71821C.1
ggcgcgggtgcatgctgacagtctatagactctctctatagctgctcacctacaattctaattcacgtggcacgtctgttttactaactgttcgtgtacttgtggaataactccttgtgcgttaccccaaactattatatcagcacttgtcagcatcaatcctcctcttttcgcctagcttggtcgataatagtcgaagtaggctccgcactcgattcgtcctttaccaacatgttgcgcagtcctgatatggctaatgggacgcgctcctgtagcggtcgcattaatgcgcggtcgggtgttggtggttaacacgcagtcgtgacccgttacactttgtcaagcgccctagctgcccgcttcatttcgatttgttgccattcctttc

SEQ ID NO: 153777 - DNA, 264 bp, Zea mays
  Clone ID: MRT4577_71822C.1
atgggccgctacgggcccttccctgccgccgccggtgatggcgggggctgcctgcccctgccgattgtagcggctgaaggcgcgctggctgtcctggacggcgccattgcgaccgcggccttcgtgcagttagcaaggattcataggcacaaccagctacaaggatggactcggcaaaagctagcctacatcggcaagaaacgacttgctctgccaggcaagccgaattggttctccatcatctacatgcgtgtggttatatga

SEQ ID NO: 153778 - DNA, 619 bp, Zea mays
  Clone ID: MRT4577_71823C.1
tttttttttttttttttcccttggaagatggaaaactgagatgacttttggcttgtcttacttcactgctgctgtcacctgcatgagacttggaaagtgcgctaacatgcggtttgacgctttaagctcgtgaaatggtaagcgcaataattggtgaactcacattgcaagcatgcaagaacagttcaaccccacccattcttgctgcaagacccttgctcgacggcaccatcgacaccaacaagacatgacagttggaaaggagaatccgtttgagatcatcttttcaacaaaaaaaaaacccgaagaatttctgatcgaatcgatcatcaaagaaaacatttaggagaccgtgagccagacacatctcaaagtgttttcgtagagcacgagcagagcatcgaaaacacggctaaagtaagtagtaagtacgccccaaacctgcaaacgaaccggcgattttagcggataattgcttgctcttcgtagcattacaaaatctagtttcgtagtgcgatttattgtccgaatggggaaaaaaggtaaagcagatgctaagaatgaagagttgaatattgtttctggaacttcaggggaagcgtgtctagtctgagtcaag

SEQ ID NO: 153779 - DNA, 368 bp, Zea mays
  Clone ID: MRT4577_71824C.1
aacagaacggttgaggttgtattcaactggcattattttcagcctttttgctgggattaaatacaatctgtattttaacaggtttaatatctaggatagtattgttaccggtcgcggcgtattttgcctatctggtggacgtccaggttccctgaccttattgccggagcgacgcccgaacagtcagtgggccgatcattttgggcgtgagcatgggccggttggccatggtcgcctgggcttcccacgtcttaggcctgaaggcgtagaccagcaccgttgcgaaagattttatctgcctgttctcgaacactgttcccaggcaggcgcttggcccggcatggaaagccctgaacttgtgggggctg

SEQ ID NO: 153780 - DNA, 406 bp, Zea mays
  Clone ID: MRT4577_71825C.1
ctacggcgaggtcctcgagtcgacgatcatcctggatcgggagacgcagaggtcccgcgggttcagcttcggcaccttctgcacggaggacgcgatgcgcagcgccatcgagggcatgaacggtaaggagctagacgggcggaacatgaccgctaacgaggcccagttccgcggctgccgtagaggcagcggcggcggatacagtggccggcgccgtgatggaggcggctacggcggcggcggtggacgctaccgcatgggtcgtggaggctacggccgcggtgggggatacggtggtgcaaaccgcggcggcggctacggctacaacgacgggaactggatgaactgagcggtggagtccgctgaggcctagttaatccggtcgcttatgctaccgcggtcaccc

SEQ ID NO: 153781 - DNA, 256 bp, Zea mays
  Clone ID: MRT4577_71826C.1
cggagtttgccgaggatggtgccattgagattatcatcataaagaccacaggagacatgatcttggacaaacccctggcggatataggaggcaagggtttattcaccaaggagatagacgatgcgctcttgcaggggagcattgtcatcggggtccactcggtgaaagatgtgccaacatatctgccgggaggcatgatattggccctgggcctcccccgggaaggtgggggaggtgcgtgggtatgcgtggctgg

SEQ ID NO: 153782 - DNA, 792 bp, Zea mays
  unsure (1)..(792): unsure at all n locations
  Clone ID: MRT4577_71827C.1
gtgcggcgctcaggcggcgggtctgggtgtccgacaaaacgcggcctcgctcatagcacagtgtgtggcagcggacggaatcgcctggaaccccccaacaccaacagtgaatcatcccagcggccatcagccttcttcacgttcgtctcctcctcgccatgaatcccaccgtccacttgcgtgcggaattaaacgcgaagtcgacgtttaacggcgatgtctcgctgccgtgccgtggagggagatgagcaggccacttcgctttgccgtggagggagatgagccgtttgtggaatcagcgagaaagtgacgggagagggcaatgcagagaggccaggccaagaaccccgaataaaggaaggtgcgacaggtggctggcactgtggcgcaagcggacgttgcgtcttctctccgttgctctcgctcaaggaggcggcgggggcgggccaactagttttcggattccagcgtcgtttggagttgtcctgtcgtgtcttccggtaaacaacaagctagcgagctgaaaaggtgagcagagacgctcccacccccaattttgtcttgctcgttttcttcgtcgtcttcatcctgcctgtctcccttgaccttcttttgttggctgtgagctcaattcggagcacgtcggcctaattttagctcacccggagatcacccccggaacaatttcttgaggggcagaatcggttgcttggctaggctgngttctccccgcccagtctgttcggttccacgccaggnncggtatagccggccacttgcagacagcgtcag

SEQ ID NO: 153783 - DNA, 677 bp, Zea mays
  Clone ID: MRT4577_71828C.1
cattgggaccctcgaggccggccattggcgtggccccaaacgtcagtgaccggacgtaattgcagaggaaacggtttcagccagtgaggcatgctgaatgctactgaaattgtgtgcaccaagttctttgtgatcccgtcgggttgagatgggttccggcatcatgttgctcggccatcccaggcactggcgaataaatatgatgacttgagaggcatgtgtcctctgtgattgtgtatgctggtttcacaaccatatatagcgagatgcgtatttatgaatttatgaagtcttgataaataaagctaggaagcacaggggtcacggaccattgtgccattcttcccgatgtaggcgtgggttgtgttcagctaaattttctgtgggcgttgtacatgcttgcaggaattcagtgccagctgtttgaaatttgaatcataggttcagtggcaaggcaacttggtgcttaagaatcctactaaaatgcactcactacgtttcaattataagatttttctagatgtatgccaatatatcggtgatattagatgttttcatcttattcccattgaggaatgttgtctttacaaccatccgatgtaactctaagttgtaatgagcagtaagcggttgtaatgagcagtaagcgtcatattattctagagaaatctttttcg

SEQ ID NO: 153784 - DNA, 1663 bp, Zea mays
  Clone ID: MRT4577_71829C.1
cattgggaccctcgaggctggcccgggacccgcatgttgcgggcctgtatactgtagcccttaatcgaaaccgtccccaacccttcgtccggcacgctctcgtctccgccgcgctaggaacttccaactcccaagcccagccgcctgcctagggttaaggtcgcccctccgccccctcgctccgctcgtgaccggcagggttcgtcgccgccgttggatatgtcgcggacgctggtgcagccggtggggcagaagcgcctcaccaacgtggctgtggtgcggctgcgcaagcacggccagcgcttcgagatcgcctgcttcccaaacaaggtgctctcgtggcgctcccgcgtcgagaaggacatcgacgaggtgctccagtcccacaccgtctactccaacgtctccaagggcatcctcgccaactccaaggaactcgccaaggccttcggcaccgacgaccttacccaaatctgcatcgagattctggagaaaggggaactccaggtctccggcaaggagagggaggcgcagctctccagccagttccgcgacatcgcaactattgtcatggagaagaccatcaacccagagacccgccgcccctacaccatcaccatgatcgagcgcctcatgcacgagatacacttcgccgtcgacccaaacctcacctccaaggaacaggctctaaaagttatcaagaagctcacagagcatttccccataaagcgtgcaccgctaagggtgcggttcactgcaccaaaacccaattttccaggccttacggagaagattggcggatggaatgctaccataatttcaaaggatgaattgagcactcagccttctattgtatgcgagatcgagccatctcttctgcgctcatgtgaggagcggttgaaggatgtccaagggagggtcgaagtgctgtctgtctccacgcacgtagaaagtggcccatctgtggaacaacacaacagtgtggaagtgccacacgcggctcctgtaaaggaacctgatgctgttgctcagataagtgagaccatgcagaaacagagcatttctactgaaagccagggcaatgcacaaggcaagcaacagagaaggtgcaaggagtgtgatgtactcgtggaggacaagctttacagagagcactgcaagagtgggtggcacaaacacaactacacacgccacaagaatgggctcccgcctctcagccaagaggagtgtatggtggagatggaattggccgactccaagaaagaccttaaagactacgatttctgatgaggatggttaacaaggggtgcacagggcatgaagttgtttccaatccgtttttattttaacgaggaagtgaggagtgaggcacatggtcgttttctgatgctgtataggaattattagaatgagatggtttagccacatctttgaactgagggtagaacctgtctgtctgtggattgctttggctttgtatcgtggacgagtgaacttggtagtggcattccaaattcgacattctatgcgggctagaaacttcgcttgttttaatacttatcggcatcctttctttttggatttggtttgtgatagcgttgccttttgttgttgctacacctgatggcaatttcatttagatggcgaaaaaaaaaaaaaaaaa

SEQ ID NO: 153785 - DNA, 347 bp, Zea mays
  Clone ID: MRT4577_7182C.1
gctacgtggcagtcggtggtctcccaccccgagctccgaaggccgcagcatcaggcgcgccccccctcgcgtgtgaccgagatggcgctgccgaatcaagggaccgttgattaccccagcttcaagctcgtcatcgtcggcgatggaggaactggcaaaactacatttgtgaagaggcatctcactggagagtttgagaagaaatatgaaccaaccattggtgtggaagttcatccggtggatttcgccactaactgtggaaagaggaggatctactgatggaataccgctgggaaaagagaacttaggagacatcacgaatgaatactatatctatgtctaatgag

SEQ ID NO: 153786 - DNA, 116 bp, Zea mays
  Clone ID: MRT4577_71830C.1
cacaagcacactcgatcatcgaactcgaacgaacacacaatggcaaaccagcactctcccttccgaatactacgaactacttctagggctactagaggctactacctttctctttt

SEQ ID NO: 153787 - DNA, 545 bp, Zea mays
  Clone ID: MRT4577_71831C.1
gcagacaccactcccaagccgaacccacatcctcgagcagacccgcaatgtcaagaccaaaacggtcgacatggctcgcacgcaatctgacggagcggtcgccgcggtggccgccgcgctgctgctggcagcggccgcgacgacctcagagccgtcatcacctgcgggcaggtgagctccgccatcgcaccctgcctctcctacgcccgcggtacgtggaccggcccctccgcgacctgctgtaccggcgaaaggaacctacaagagcgccgccagcaccggcaccaacaggcccaccgactgcaactgtctaaagaacgcctccaggggcgtaagaagtctaaacgcctgcaacgccgtcagcatcccctccaagcgcgtggtcaacatcccctacaccatgagcacctgcaccgactgttgcaacgttaactaaaacctagaccacgcgcgacgactgacgactaatcgatcgaccaaccattacgccgtctgcgccggcccatatcattgaacgtccgcatgaagaaatctatcaatctacg

SEQ ID NO: 153788 - DNA, 745 bp, Zea mays
  Clone ID: MRT4577_71832C.1
aatatctggctatcatcagtacgcatccccctgcagtgttgcgcacataatgtccaataagatcctgctgcctgctgccattctgctcgccggcgccgtgctcggtgccttgtgtcggggccgctaagggagctgagcgcatccagctgactacatcgccatcgatcccgacggggcgctgacgcgaagaggacggactctacggtgatacactccttcagggtctggctaaggaagggctcatccaggcgggctaccacggactcgaggatatggacgcgtgctccgacgagtgcgacgaacacatggagcacgagtggcttgacaagctgccacaaccgtcataggaggagggatacgtgctgacgcgcgagtccagaaatcgcgagctcaacaagcacgcgcgtctgggatgccagggcgtcctcgagccggagctgcaaggggatgggcgtaacaaatatacgatgctggtgggggaagatagcataaagtactgacgtacatgggaaaggtgcattctagtgaatatgagacgctgcatgaattaccaagactaagcaatactgagtcatggcgcaatacccttaaatatactactatacaatcctagtgaaaaaaaatgaattgggtagttgaaataatgacctgcaacatacgaaaataacaagcaaaatcagaagcttatgaataaataacaaaaacgaacaactccagtaataaaaaaaaaaacaaaaaaaaaata

SEQ ID NO: 153789 - DNA, 278 bp, Zea mays
  Clone ID: MRT4577_71833C.1
cagaaacacaccaagcgaagcgcactagttacgacctaacaacaatggctaccaagatattagcgcttcttgggcttattggcctttttgggaacgccaaaaaaggggttaatatttcccaaaggctaatttgttccaagggcctttattccaaagttcctccaaccagttacttaaaggggctttgaacacctagttgtgcaagccaacttgcaacaacaagcgcttgcggcaagcgttttacaccaaccaattgccaaattggaacaacaatcctt

SEQ ID NO: 153790 - DNA, 313 bp, Zea mays
  Clone ID: MRT4577_71834C.1
ggccaaacaaatcacacttttttatccaactcccttacggaaggcaataccccacataaggggaagggtacaatatatttgcattatccacgcttggaacaaaagcacggggcgcaggggtggaattggatttattggacaaaatatgacggggtatactgggcacctgacgacaaacagggactaaaaagggtgggccgaaaccgacaaggggccggggcatttaacgcttttccctggggaaccccacgggggcaagggtgagggcgataaacctgccgttgatggggcccctaaggattttttgtttttc

SEQ ID NO: 153791 - DNA, 292 bp, Zea mays
  Clone ID: MRT4577_71835C.1
ctttcacattttcatatatccaatctgtgaagggggcgacattattctaatacgtgttttatcgagtgcagaaccacgatggccgatcatgcttactagcaacttataggaacgatcgaagcacacacacatccattattcggcgacggacatgtactcttggcatgtccgagtcattcattttgtagatttaaacctcagcctggaagaagccaataggtgatcctgtgcgacaagcccgaccccgacatcgtcgtgctgcccgtcggcacgccggtgaccatggcttttc

SEQ ID NO: 153792 - DNA, 265 bp, Zea mays
  Clone ID: MRT4577_71836C.1
tgtttaaatgccaaaatgtacttaaatgagttacttagaatgccataaaattgcagtttcatgtatgtatataatcatgctcatgtatatttagttacgtataatgctttctgagtgagttttactcttaaatcatttggttaaatcatttggcttgctgtttactcccttctgtagtttttaattaaaaactttaaagataagtctacattaaacaatgatcacatctaaagctttatctttgtgtaatctaagtatatgtgag

SEQ ID NO: 153793 - DNA, 377 bp, Zea mays
  Clone ID: MRT4577_71837C.1
ttactcctttctcccctaaatagagggcaaaacagagtacaatcaatgatacaagctttgcataagcttatagcctatatatatgcctcaggaccagaccaagatacctcataaaggttctaacacatcgaacgcccgccacctcccctctgctcaacccacggcctcgccgctgccagagcagggcggcggcgcttcccgcgcgcccctgctaggacggtgtttcaattgtgcgcacctcttcaacgtcatcctatcggccgccgactgcttcaacaagtgggccggcgcagatcctgtgcggcaagaagtcggatgcctccgccctcaccccgcggtaccaaccgttgcagagacattctcacgcgggtgcggcg

SEQ ID NO: 153794 - DNA, 578 bp, Zea mays
  Clone ID: MRT4577_71838C.1
gctgccaatcaaagagcacacacgcacccgtcgatctccaagaagcggaagcgggagcgagcagagcaaaggtgcgatggcggcgccggcggtgaaggtgcacgggtgggcgatgtcgccgttcgtggcgcgcgcgttgctgtgcctggaggaggccggcgtggagtacgagctcgtccccatgagccgcgaggccggcgaccaccgccagcccgacttcctcgcccggaaccccttcggccaggtccccgttctcgaggacggcgacctcaccatcttcgaatcgcgcgccgtcgcgaggcacgtgctgcgcaagcacaagccggagctgctgggctccggctcgccggagtcggcggcgatggtggacgtgtggctggaggtggaggcccaccagcaccagaccccggcgggcaccatcgtcatgcagtgcatcctcaccccgttcctcggctgccagcgcgaccaggccgccatcgacgagaacgcggcaaagctgacgaatctgttcgacgtgtacgaggcgcgcctgtcggcgtccaggtaccttgccggggaggcggtcagcctcgcggacc
